United States Patent Application Publication US 2022/0213167 A1 - sequence listing, part 15

SEQ ID NO: 305917 - protein, 16 aa, Homo sapiens
  CDR3 for alpha chain variable domain of TCR clone 152959 (TRAV4, TRAJ22)
CLVGDLHSGSARQLTF

SEQ ID NO: 305918 - protein, 16 aa, Homo sapiens
  CDR3 for beta chain variable domain of TCR clone 152959 (TRBV7-9, TRBJ2-1)
CASSDVAGGSYNERFF

SEQ ID NO: 305919 - protein, 16 aa, Homo sapiens
  CDR3 for alpha chain variable domain of TCR clone 152960 (TRAV3, TRAJ10)
CAVRDMRAGGGNTLTF

SEQ ID NO: 305920 - protein, 13 aa, Homo sapiens
  CDR3 for beta chain variable domain of TCR clone 152960 (TRBV20-1, TRBJ1-1)
CSARGGGNTEAFF

SEQ ID NO: 305921 - protein, 16 aa, Homo sapiens
  CDR3 for alpha chain variable domain of TCR clone 152961 (TRAV3, TRAJ37)
CALRGEGSGNTGKLIF

SEQ ID NO: 305922 - protein, 13 aa, Homo sapiens
  CDR3 for beta chain variable domain of TCR clone 152961 (TRBV14, TRBJ2-7)
CASSQDRRYEQYF

SEQ ID NO: 305923 - protein, 14 aa, Homo sapiens
  CDR3 for alpha chain variable domain of TCR clone 152962 (TRAV13-1, TRAJ35)
CAVSKGGFGNVLNC

SEQ ID NO: 305924 - protein, 13 aa, Homo sapiens
  CDR3 for beta chain variable domain of TCR clone 152962 (TRBV7-3, TRBJ1-1)
CASSQDWGAEAFF

SEQ ID NO: 305925 - protein, 16 aa, Homo sapiens
  CDR3 for alpha chain variable domain of TCR clone 152963 (TRAV30, TRAJ24)
CGTKIVDADSWGKFQF

SEQ ID NO: 305926 - protein, 13 aa, Homo sapiens
  CDR3 for beta chain variable domain of TCR clone 152963 (TRBV20-1, TRBJ1-1)
CSAPPGGHTEAFF

SEQ ID NO: 305927 - protein, 13 aa, Homo sapiens
  CDR3 for alpha chain variable domain of TCR clone 152964 (TRAV12-3, TRAJ7)
CAMSASGNNRLGF

SEQ ID NO: 305928 - protein, 14 aa, Homo sapiens
  CDR3 for beta chain variable domain of TCR clone 152964 (TRBV13, TRBJ2-5)
CASSLGPRGETQYF

SEQ ID NO: 305929 - protein, 11 aa, Homo sapiens
  CDR3 for alpha chain variable domain of TCR clone 152965 (TRAV13-2, TRAJ54)
RAVQGAQKLVF

SEQ ID NO: 305930 - protein, 15 aa, Homo sapiens
  CDR3 for beta chain variable domain of TCR clone 152965 (TRBV20-1, TRBJ2-7)
CSAESGTSGAYELYF

SEQ ID NO: 305931 - protein, 13 aa, Homo sapiens
  CDR3 for alpha chain variable domain of TCR clone 152966 (TRAV17, TRAJ22)
SAHHSGSARQLTF

SEQ ID NO: 305932 - protein, 14 aa, Homo sapiens
  CDR3 for beta chain variable domain of TCR clone 152966 (TRBV16, TRBJ1-1)
CASSQAGPNTEAFF

SEQ ID NO: 305933 - protein, 13 aa, Homo sapiens
  CDR3 for alpha chain variable domain of TCR clone 152967 (TRAV12-2, TRAJ9)
CAVLETGGFKTIF

SEQ ID NO: 305934 - protein, 18 aa, Homo sapiens
  CDR3 for beta chain variable domain of TCR clone 152967 (TRBV4-1, TRBJ1-5)
CASSQDPRGQGLNQPQHF

SEQ ID NO: 305935 - protein, 14 aa, Homo sapiens
  CDR3 for alpha chain variable domain of TCR clone 152968 (TRAV13-1, TRAJ53)
CAASISGSNYKLTF

SEQ ID NO: 305936 - protein, 17 aa, Homo sapiens
  CDR3 for beta chain variable domain of TCR clone 152968 (TRBV4-1, TRBJ1-4)
CASSDTGELMKNCFLAV

SEQ ID NO: 305937 - protein, 13 aa, Homo sapiens
  CDR3 for alpha chain variable domain of TCR clone 152969 (TRAV4, TRAJ42)
CLVGGGSQGNLIF

SEQ ID NO: 305938 - protein, 17 aa, Homo sapiens
  CDR3 for beta chain variable domain of TCR clone 152969 (TRBV28, TRBJ2-5)
CASSTPEGDALQETQYF

SEQ ID NO: 305939 - protein, 12 aa, Homo sapiens
  CDR3 for alpha chain variable domain of TCR clone 152970 (TRAV13-1, TRAJ49)
CAASPMGNQFYF

SEQ ID NO: 305940 - protein, 17 aa, Homo sapiens
  CDR3 for beta chain variable domain of TCR clone 152970 (TRBV11-2, TRBJ2-1)
CASSLSPPGVEYNEQFF

SEQ ID NO: 305941 - protein, 18 aa, Homo sapiens
  CDR3 for alpha chain variable domain of TCR clone 152971 (TRAV3, TRAJ32)
CAVRDIKGYGGATNKLIF

SEQ ID NO: 305942 - protein, 15 aa, Homo sapiens
  CDR3 for beta chain variable domain of TCR clone 152971 (TRBV12-4, TRBJ2-2)
CASSLGVRHTGELFF

SEQ ID NO: 305943 - protein, 14 aa, Homo sapiens
  CDR3 for alpha chain variable domain of TCR clone 152972 (TRAV13-1, TRAJ10)
CAAKEPGGGNKLTF

SEQ ID NO: 305944 - protein, 13 aa, Homo sapiens
  CDR3 for beta chain variable domain of TCR clone 152972 (TRBV7-9, TRBJ2-7)
CASSAPGGYEQYF

SEQ ID NO: 305945 - protein, 13 aa, Homo sapiens
  CDR3 for alpha chain variable domain of TCR clone 152973 (TRAV12-1, TRAJ26)
SATYLYYGQNFVF

SEQ ID NO: 305946 - protein, 16 aa, Homo sapiens
  CDR3 for beta chain variable domain of TCR clone 152973 (TRBV4-3, TRBJ2-2)
CASSHLQGSGTGELFF

SEQ ID NO: 305947 - protein, 14 aa, Homo sapiens
  CDR3 for alpha chain variable domain of TCR clone 152974 (TRAV12-1, TRAJ9)
CVVTGYTGGFKTIF

SEQ ID NO: 305948 - protein, 13 aa, Homo sapiens
  CDR3 for beta chain variable domain of TCR clone 152974 (TRBV20-1, TRBJ1-1)
CSARAGGNSEAFF

SEQ ID NO: 305949 - protein, 14 aa, Homo sapiens
  CDR3 for alpha chain variable domain of TCR clone 152975 (TRAV17, TRAJ37)
CATDSSSNTGKLIF

SEQ ID NO: 305950 - protein, 13 aa, Homo sapiens
  CDR3 for beta chain variable domain of TCR clone 152975 (TRBV11-2, TRBJ2-1)
CASSLDLVNEQFF

SEQ ID NO: 305951 - protein, 13 aa, Homo sapiens
  CDR3 for alpha chain variable domain of TCR clone 152976 (TRAV2, TRAJ40)
CAVVTSGTYKYIF

SEQ ID NO: 305952 - protein, 14 aa, Homo sapiens
  CDR3 for beta chain variable domain of TCR clone 152976 (TRBV19, TRBJ2-1)
CANPTVVLSGEQFF

SEQ ID NO: 305953 - protein, 14 aa, Homo sapiens
  CDR3 for alpha chain variable domain of TCR clone 152977 (TRAV23/DV6, TRAJ11)
CAASLESGYSTLTS

SEQ ID NO: 305954 - protein, 13 aa, Homo sapiens
  CDR3 for beta chain variable domain of TCR clone 152977 (TRBV4-1, TRBJ2-5)
CASSLTRGETKYF

SEQ ID NO: 305955 - protein, 14 aa, Homo sapiens
  CDR3 for alpha chain variable domain of TCR clone 152978 (TRAV1-2, TRAJ16)
CAVNRFSDGQKLPF

SEQ ID NO: 305956 - protein, 16 aa, Homo sapiens
  CDR3 for beta chain variable domain of TCR clone 152978 (TRBV24-1, TRBJ2-3)
CAASDPGTGATDTQYF

SEQ ID NO: 305957 - protein, 14 aa, Homo sapiens
  CDR3 for alpha chain variable domain of TCR clone 152979 (TRAV2, TRAJ3)
CAVRPYSSASKITF

SEQ ID NO: 305958 - protein, 17 aa, Homo sapiens
  CDR3 for beta chain variable domain of TCR clone 152979 (TRBV7-6, TRBJ2-5)
CTSSSPRAGDPSETQYF

SEQ ID NO: 305959 - protein, 11 aa, Homo sapiens
  CDR3 for alpha chain variable domain of TCR clone 152980 (TRAV2, TRAJ23)
CAVETRGKLIF

SEQ ID NO: 305960 - protein, 17 aa, Homo sapiens
  CDR3 for beta chain variable domain of TCR clone 152980 (TRBV20-1, TRBJ2-1)
CSASSSGLAGSYNEQIF

SEQ ID NO: 305961 - protein, 21 aa, Homo sapiens
  CDR3 for alpha chain variable domain of TCR clone 152981 (TRAV1-2, TRAJ37)
CLLPLCCERFHGSGNTGKLIF

SEQ ID NO: 305962 - protein, 14 aa, Homo sapiens
  CDR3 for beta chain variable domain of TCR clone 152981 (TRBV2, TRBJ2-5)
CASSEVLAQENQYF

SEQ ID NO: 305963 - protein, 14 aa, Homo sapiens
  CDR3 for alpha chain variable domain of TCR clone 152982 (TRAV8-4, TRAJ9)
CAVTFNTGGFKTIF

SEQ ID NO: 305964 - protein, 17 aa, Homo sapiens
  CDR3 for beta chain variable domain of TCR clone 152982 (TRBV11-2, TRBJ2-1)
CASSLYPPGVEYNEQFF

SEQ ID NO: 305965 - protein, 17 aa, Homo sapiens
  CDR3 for alpha chain variable domain of TCR clone 152983 (TRAV26-1, TRAJ53)
CIVRVDDSGGSNYKLTF

SEQ ID NO: 305966 - protein, 17 aa, Homo sapiens
  CDR3 for beta chain variable domain of TCR clone 152983 (TRBV7-6, TRBJ1-6)
CASSFLGQGKGNSPLHF

SEQ ID NO: 305967 - protein, 12 aa, Homo sapiens
  CDR3 for alpha chain variable domain of TCR clone 152984 (TRAV27, TRAJ34)
CAEPYNTDKLIF

SEQ ID NO: 305968 - protein, 15 aa, Homo sapiens
  CDR3 for beta chain variable domain of TCR clone 152984 (TRBV7-6, TRBJ1-5)
CASSQSSGINQPQHF

SEQ ID NO: 305969 - protein, 14 aa, Homo sapiens
  CDR3 for alpha chain variable domain of TCR clone 152985 (TRAV3, TRAJ21)
CAVESQANFNKFYF

SEQ ID NO: 305970 - protein, 15 aa, Homo sapiens
  CDR3 for beta chain variable domain of TCR clone 152985 (TRBV7-9, TRBJ2-7)
CASSSGSPQPYEQYF

SEQ ID NO: 305971 - protein, 14 aa, Homo sapiens
  CDR3 for alpha chain variable domain of TCR clone 152986 (TRAV26-1, TRAJ21)
CIVRVGHNFNKFYF

SEQ ID NO: 305972 - protein, 13 aa, Homo sapiens
  CDR3 for beta chain variable domain of TCR clone 152986 (TRBV4-2, TRBJ1-1)
CASSQAGNTEAFF

SEQ ID NO: 305973 - protein, 14 aa, Homo sapiens
  CDR3 for alpha chain variable domain of TCR clone 152987 (TRAV20, TRAJ18)
CAVGRGPTLGRLYF

SEQ ID NO: 305974 - protein, 14 aa, Homo sapiens
  CDR3 for beta chain variable domain of TCR clone 152987 (TRBV28, TRBJ2-4)
CASTQVTGVNIQYF

SEQ ID NO: 305975 - protein, 15 aa, Homo sapiens
  CDR3 for alpha chain variable domain of TCR clone 152988 (TRAV12-3, TRAJ27)
CAMRAYKTNAGKSTF

SEQ ID NO: 305976 - protein, 13 aa, Homo sapiens
  CDR3 for beta chain variable domain of TCR clone 152988 (TRBV11-2, TRBJ2-5)
CASSRGPSETQYF

SEQ ID NO: 305977 - protein, 10 aa, Homo sapiens
  CDR3 for alpha chain variable domain of TCR clone 152989 (TRAV17, TRAJ52)
CATEAGGTSY

SEQ ID NO: 305978 - protein, 14 aa, Homo sapiens
  CDR3 for beta chain variable domain of TCR clone 152989 (TRBV28, TRBJ1-5)
CASSLGVLVKPQHF

SEQ ID NO: 305979 - protein, 14 aa, Homo sapiens
  CDR3 for alpha chain variable domain of TCR clone 152990 (TRAV17, TRAJ9)
CATVILGGGFKTIF

SEQ ID NO: 305980 - protein, 15 aa, Homo sapiens
  CDR3 for beta chain variable domain of TCR clone 152990 (TRBV4-3, TRBJ2-7)
CASSQDLGSSYEQYF

SEQ ID NO: 305981 - protein, 12 aa, Homo sapiens
  CDR3 for alpha chain variable domain of TCR clone 152991 (TRAV12-3, TRAJ17)
CAMTLTGTKPTF

SEQ ID NO: 305982 - protein, 15 aa, Homo sapiens
  CDR3 for beta chain variable domain of TCR clone 152991 (TRBV20-1, TRBJ2-7)
CSARDRVSGMDEQYF

SEQ ID NO: 305983 - protein, 16 aa, Homo sapiens
  CDR3 for alpha chain variable domain of TCR clone 152992 (TRAV8-6, TRAJ6)
CSVIPLPSGGSYIPTF

SEQ ID NO: 305984 - protein, 19 aa, Homo sapiens
  CDR3 for beta chain variable domain of TCR clone 152992 (TRBV24-1, TRBJ2-2)
CATSAGIVLAGANTGELFF

SEQ ID NO: 305985 - protein, 11 aa, Homo sapiens
  CDR3 for alpha chain variable domain of TCR clone 152993 (TRAV13-1, TRAJ52)
PGGTSYGKLTF

SEQ ID NO: 305986 - protein, 16 aa, Homo sapiens
  CDR3 for beta chain variable domain of TCR clone 152993 (TRBV28, TRBJ2-7)
CASSPWVATGHLSQYF

SEQ ID NO: 305987 - protein, 14 aa, Homo sapiens
  CDR3 for alpha chain variable domain of TCR clone 152994 (TRAV20, TRAJ56)
CAVQSGGANSKMTF

SEQ ID NO: 305988 - protein, 14 aa, Homo sapiens
  CDR3 for beta chain variable domain of TCR clone 152994 (TRBV20-1, TRBJ2-7)
CSAKRGRSSYEQYF

SEQ ID NO: 305989 - protein, 15 aa, Homo sapiens
  CDR3 for alpha chain variable domain of TCR clone 152995 (TRAV2, TRAJ15)
CAVEDRGQAGTALIF

SEQ ID NO: 305990 - protein, 15 aa, Homo sapiens
  CDR3 for beta chain variable domain of TCR clone 152995 (TRBV19, TRBJ1-2)
CASSVGQVLNYGYTF

SEQ ID NO: 305991 - protein, 14 aa, Homo sapiens
  CDR3 for alpha chain variable domain of TCR clone 152996 (TRAV2, TRAJ9)
CAVEDRSGGFKTIF

SEQ ID NO: 305992 - protein, 14 aa, Homo sapiens
  CDR3 for beta chain variable domain of TCR clone 152996 (TRBV20-1, TRBJ2-1)
CSAQIGASANEQFF

SEQ ID NO: 305993 - protein, 15 aa, Homo sapiens
  CDR3 for alpha chain variable domain of TCR clone 152997 (TRAV38-1, TRAJ39)
CAFMKPHNAGNMLTF

SEQ ID NO: 305994 - protein, 14 aa, Homo sapiens
  CDR3 for beta chain variable domain of TCR clone 152997 (TRBV19, TRBJ1-1)
CASSKVTGVTEAFF

SEQ ID NO: 305995 - protein, 12 aa, Homo sapiens
  CDR3 for alpha chain variable domain of TCR clone 152998 (TRAV13-1, TRAJ21)
CAAKEGFNKFYF

SEQ ID NO: 305996 - protein, 14 aa, Homo sapiens
  CDR3 for beta chain variable domain of TCR clone 152998 (TRBV11-3, TRBJ2-6)
CASNKGSVDNVLTF

SEQ ID NO: 305997 - protein, 13 aa, Homo sapiens
  CDR3 for alpha chain variable domain of TCR clone 152999 (TRAV27, TRAJ6)
CAGGTRGSYKPTF

SEQ ID NO: 305998 - protein, 13 aa, Homo sapiens
  CDR3 for beta chain variable domain of TCR clone 152999 (TRBV4-1, TRBJ2-2)
CASSQENTGELFF

SEQ ID NO: 305999 - protein, 11 aa, Homo sapiens
  CDR3 for alpha chain variable domain of TCR clone 153000 (TRAV10, TRAJ23)
CGEDQGGKLIF

SEQ ID NO: 306000 - protein, 16 aa, Homo sapiens
  CDR3 for beta chain variable domain of TCR clone 153000 (TRBV20-1, TRBJ2-2)
CSARDQLAGDTGELFF

SEQ ID NO: 306001 - protein, 16 aa, Homo sapiens
  CDR3 for alpha chain variable domain of TCR clone 153001 (TRAV35, TRAJ28)
CAGQKYSGAGSYQPTF

SEQ ID NO: 306002 - protein, 13 aa, Homo sapiens
  CDR3 for beta chain variable domain of TCR clone 153001 (TRBV19, TRBJ1-2)
CASSQGQVYGYTF

SEQ ID NO: 306003 - protein, 17 aa, Homo sapiens
  CDR3 for alpha chain variable domain of TCR clone 153002 (TRAV17, TRAJ28)
CATDPRRGGAGSYKLTF

SEQ ID NO: 306004 - protein, 16 aa, Homo sapiens
  CDR3 for beta chain variable domain of TCR clone 153002 (TRBV25-1, TRBJ1-1)
CASSGDRDRGRSEAFF

SEQ ID NO: 306005 - protein, 13 aa, Homo sapiens
  CDR3 for alpha chain variable domain of TCR clone 153003 (TRAV26-1, TRAJ33)
CIVRVDSNYQLMW

SEQ ID NO: 306006 - protein, 15 aa, Homo sapiens
  CDR3 for beta chain variable domain of TCR clone 153003 (TRBV7-2, TRBJ1-5)
CASSFSAGINQPQHF

SEQ ID NO: 306007 - protein, 14 aa, Homo sapiens
  CDR3 for alpha chain variable domain of TCR clone 153004 (TRAV26-1, TRAJ34)
CIVRVADNTDKLIF

SEQ ID NO: 306008 - protein, 15 aa, Homo sapiens
  CDR3 for beta chain variable domain of TCR clone 153004 (TRBV7-2, TRBJ2-1)
CASSSGLAGGNEQFF

SEQ ID NO: 306009 - protein, 11 aa, Homo sapiens
  CDR3 for alpha chain variable domain of TCR clone 153005 (TRAV40, TRAJ53)
TSGGSNYKLTF

SEQ ID NO: 306010 - protein, 14 aa, Homo sapiens
  CDR3 for beta chain variable domain of TCR clone 153005 (TRBV9, TRBJ2-1)
CASSVVGTFDEQFF

SEQ ID NO: 306011 - protein, 12 aa, Homo sapiens
  CDR3 for alpha chain variable domain of TCR clone 153006 (TRAV21, TRAJ33)
CAKMDSNYQLIW

SEQ ID NO: 306012 - protein, 16 aa, Homo sapiens
  CDR3 for beta chain variable domain of TCR clone 153006 (TRBV7-3, TRBJ2-2)
CGSSLKRGTLSGELFF

SEQ ID NO: 306013 - protein, 15 aa, Homo sapiens
  CDR3 for alpha chain variable domain of TCR clone 153007 (TRAV12-1, TRAJ44)
CVVDTPQGTASKLTF

SEQ ID NO: 306014 - protein, 18 aa, Homo sapiens
  CDR3 for beta chain variable domain of TCR clone 153007 (TRBV12-4, TRBJ2-2)
CASSVVAGTRGRTGELFF

SEQ ID NO: 306015 - protein, 15 aa, Homo sapiens
  CDR3 for alpha chain variable domain of TCR clone 153008 (TRAV26-1, TRAJ22)
CIVRVSFWFCKATDL

SEQ ID NO: 306016 - protein, 14 aa, Homo sapiens
  CDR3 for beta chain variable domain of TCR clone 153008 (TRBV6-6, TRBJ2-7)
CASSDSGAGYEQYF

SEQ ID NO: 306017 - protein, 10 aa, Homo sapiens
  CDR3 for alpha chain variable domain of TCR clone 153009 (TRAV36/DV7, TRAJ48)
CAVGNEKLTF

SEQ ID NO: 306018 - protein, 13 aa, Homo sapiens
  CDR3 for beta chain variable domain of TCR clone 153009 (TRBV11-2, TRBJ2-1)
CASSLDLVNEQFF

SEQ ID NO: 306019 - protein, 15 aa, Homo sapiens
  CDR3 for alpha chain variable domain of TCR clone 153010 (TRAV20, TRAJ53)
CAVQASGGSNYKLTF

SEQ ID NO: 306020 - protein, 15 aa, Homo sapiens
  CDR3 for beta chain variable domain of TCR clone 153010 (TRBV4-1, TRBJ2-5)
CASSQWDLYQETQYF

SEQ ID NO: 306021 - protein, 12 aa, Homo sapiens
  CDR3 for alpha chain variable domain of TCR clone 153011 (TRAV1-1, TRAJ39)
CAVPVVGNMLTF

SEQ ID NO: 306022 - protein, 15 aa, Homo sapiens
  CDR3 for beta chain variable domain of TCR clone 153011 (TRBV5-1, TRBJ2-2)
CASSSQGGNTGELFF

SEQ ID NO: 306023 - protein, 14 aa, Homo sapiens
  CDR3 for alpha chain variable domain of TCR clone 153012 (TRAV1-2, TRAJ16)
CAVNRFSDGQKLLF

SEQ ID NO: 306024 - protein, 13 aa, Homo sapiens
  CDR3 for beta chain variable domain of TCR clone 153012 (TRBV20-1, TRBJ1-2)
CSATGIQGSGYTF

SEQ ID NO: 306025 - protein, 11 aa, Homo sapiens
  CDR3 for alpha chain variable domain of TCR clone 153013 (TRAV12-1, TRAJ30)
CVVNGQDKIIF

SEQ ID NO: 306026 - protein, 15 aa, Homo sapiens
  CDR3 for beta chain variable domain of TCR clone 153013 (TRBV28, TRBJ2-5)
CASSSGRTIQEAQYF

SEQ ID NO: 306027 - protein, 14 aa, Homo sapiens
  CDR3 for alpha chain variable domain of TCR clone 153014 (TRAV12-2, TRAJ17)
CAVLFKAAGNKLTF

SEQ ID NO: 306028 - protein, 13 aa, Homo sapiens
  CDR3 for beta chain variable domain of TCR clone 153014 (TRBV2, TRBJ1-1)
CARNPTGGFHAFF

SEQ ID NO: 306029 - protein, 12 aa, Homo sapiens
  CDR3 for alpha chain variable domain of TCR clone 153015 (TRAV12-2, TRAJ31)
CAVNTPDARLMF

SEQ ID NO: 306030 - protein, 15 aa, Homo sapiens
  CDR3 for beta chain variable domain of TCR clone 153015 (TRBV4-2, TRBJ1-1)
CASSQDQGLNIEAFF

SEQ ID NO: 306031 - protein, 13 aa, Homo sapiens
  CDR3 for alpha chain variable domain of TCR clone 153016 (TRAV17, TRAJ4)
CATKSVGYNKLIF

SEQ ID NO: 306032 - protein, 14 aa, Homo sapiens
  CDR3 for beta chain variable domain of TCR clone 153016 (TRBV20-1, TRBJ1-5)
CSARDDRGNQPQHF

SEQ ID NO: 306033 - protein, 12 aa, Homo sapiens
  CDR3 for alpha chain variable domain of TCR clone 153017 (TRAV8-3, TRAJ26)
FAGDNYGQNFVF

SEQ ID NO: 306034 - protein, 15 aa, Homo sapiens
  CDR3 for beta chain variable domain of TCR clone 153017 (TRBV6-5, TRBJ2-1)
CASSYDAGAGNEQFF

SEQ ID NO: 306035 - protein, 14 aa, Homo sapiens
  CDR3 for alpha chain variable domain of TCR clone 153018 (TRAV17, TRAJ4)
CATAPLGGYNKLIF

SEQ ID NO: 306036 - protein, 13 aa, Homo sapiens
  CDR3 for beta chain variable domain of TCR clone 153018 (TRBV12-4, TRBJ1-3)
CASSVASGNTIYF

SEQ ID NO: 306037 - protein, 15 aa, Homo sapiens
  CDR3 for alpha chain variable domain of TCR clone 153019 (TRAV26-1, TRAJ27)
CIVRVLTPMQANQPF

SEQ ID NO: 306038 - protein, 13 aa, Homo sapiens
  CDR3 for beta chain variable domain of TCR clone 153019 (TRBV20-1, TRBJ2-7)
CSATHTSGYEQYF

SEQ ID NO: 306039 - protein, 14 aa, Homo sapiens
  CDR3 for alpha chain variable domain of TCR clone 153020 (TRAV3, TRAJ8)
CAVSLNTGFQKLVF

SEQ ID NO: 306040 - protein, 15 aa, Homo sapiens
  CDR3 for beta chain variable domain of TCR clone 153020 (TRBV5-1, TRBJ1-2)
CASSYPGTGSSGYTF

SEQ ID NO: 306041 - protein, 15 aa, Homo sapiens
  CDR3 for alpha chain variable domain of TCR clone 153021 (TRAV38-2/DV8, TRAJ45)
CAYWDSGGGADGLTF

SEQ ID NO: 306042 - protein, 17 aa, Homo sapiens
  CDR3 for beta chain variable domain of TCR clone 153021 (TRBV19, TRBJ2-6)
CASSTGQVFSGANVLTF

SEQ ID NO: 306043 - protein, 14 aa, Homo sapiens
  CDR3 for alpha chain variable domain of TCR clone 153022 (TRAV17, TRAJ15)
CATTTNQPGTALIF

SEQ ID NO: 306044 - protein, 16 aa, Homo sapiens
  CDR3 for beta chain variable domain of TCR clone 153022 (TRBV4-1, TRBJ2-7)
CASSRGDILNSYEQYF

SEQ ID NO: 306045 - protein, 11 aa, Homo sapiens
  CDR3 for alpha chain variable domain of TCR clone 153023 (TRAV2, TRAJ33)
CAVDSSYQLIW

SEQ ID NO: 306046 - protein, 14 aa, Homo sapiens
  CDR3 for beta chain variable domain of TCR clone 153023 (TRBV11-2, TRBJ2-3)
CASSRLARTDTQYF

SEQ ID NO: 306047 - protein, 16 aa, Homo sapiens
  CDR3 for alpha chain variable domain of TCR clone 153024 (TRAV3, TRAJ40)
CAVRDRIASGTYKYIF

SEQ ID NO: 306048 - protein, 13 aa, Homo sapiens
  CDR3 for beta chain variable domain of TCR clone 153024 (TRBV2, TRBJ2-7)
CASSEGGQFEQYF

SEQ ID NO: 306049 - protein, 11 aa, Homo sapiens
  CDR3 for alpha chain variable domain of TCR clone 153025 (TRAV12-1, TRAJ30)
CVVNGQDKIIF

SEQ ID NO: 306050 - protein, 13 aa, Homo sapiens
  CDR3 for beta chain variable domain of TCR clone 153025 (TRBV19, TRBJ1-2)
CASSQGQVYGYTF

SEQ ID NO: 306051 - protein, 13 aa, Homo sapiens
  CDR3 for alpha chain variable domain of TCR clone 153026 (TRAV8-3, TRAJ48)
CAVVPFGNEKLTF

SEQ ID NO: 306052 - protein, 14 aa, Homo sapiens
  CDR3 for beta chain variable domain of TCR clone 153026 (TRBV11-2, TRBJ2-7)
CASSLGAGAYEQYF

SEQ ID NO: 306053 - protein, 15 aa, Homo sapiens
  CDR3 for alpha chain variable domain of TCR clone 153027 (TRAV16, TRAJ12)
CSKWPLRDSSYKLIF

SEQ ID NO: 306054 - protein, 13 aa, Homo sapiens
  CDR3 for beta chain variable domain of TCR clone 153027 (TRBV4-2, TRBJ1-1)
CASSQAGNIEAFF

SEQ ID NO: 306055 - protein, 12 aa, Homo sapiens
  CDR3 for alpha chain variable domain of TCR clone 153028 (TRAV12-2, TRAJ13)
PGPSGGYQKVTF

SEQ ID NO: 306056 - protein, 15 aa, Homo sapiens
  CDR3 for beta chain variable domain of TCR clone 153028 (TRBV7-9, TRBJ1-6)
CASSSPGRGNSPLHF

SEQ ID NO: 306057 - protein, 14 aa, Homo sapiens
  CDR3 for alpha chain variable domain of TCR clone 153029 (TRAV29/DV5, TRAJ53)
CSKPDRGSNYKLTF

SEQ ID NO: 306058 - protein, 15 aa, Homo sapiens
  CDR3 for beta chain variable domain of TCR clone 153029 (TRBV19, TRBJ2-4)
CASSIGLAGANIQYF

SEQ ID NO: 306059 - protein, 16 aa, Homo sapiens
  CDR3 for alpha chain variable domain of TCR clone 153030 (TRAV3, TRAJ37)
CAVRGKGSGNTGKLIF

SEQ ID NO: 306060 - protein, 17 aa, Homo sapiens
  CDR3 for beta chain variable domain of TCR clone 153030 (TRBV20-1, TRBJ2-1)
CGASSSGLAGSYNEQFF

SEQ ID NO: 306061 - protein, 13 aa, Homo sapiens
  CDR3 for alpha chain variable domain of TCR clone 153031 (TRAV27, TRAJ45)
CRSSGGGAAGLTF

SEQ ID NO: 306062 - protein, 14 aa, Homo sapiens
  CDR3 for beta chain variable domain of TCR clone 153031 (TRBV7-2, TRBJ2-7)
CASSPKTSFYEQYF

SEQ ID NO: 306063 - protein, 15 aa, Homo sapiens
  CDR3 for alpha chain variable domain of TCR clone 153032 (TRAV8-4, TRAJ8)
CAVSDLNTGFQKLVF

SEQ ID NO: 306064 - protein, 17 aa, Homo sapiens
  CDR3 for beta chain variable domain of TCR clone 153032 (TRBV18, TRBJ2-1)
CASSKGLSGGADNEQFF

SEQ ID NO: 306065 - protein, 14 aa, Homo sapiens
  CDR3 for alpha chain variable domain of TCR clone 153033 (TRAV12-2, TRAJ13)
CAVKKTGGYQKVTF

SEQ ID NO: 306066 - protein, 16 aa, Homo sapiens
  CDR3 for beta chain variable domain of TCR clone 153033 (TRBV19, TRBJ2-2)
CASRSPGTGATGELFS

SEQ ID NO: 306067 - protein, 11 aa, Homo sapiens
  CDR3 for alpha chain variable domain of TCR clone 153034 (TRAV1-1, TRAJ23)
CAVRQGGKLIF

SEQ ID NO: 306068 - protein, 14 aa, Homo sapiens
  CDR3 for beta chain variable domain of TCR clone 153034 (TRBV7-9, TRBJ2-2)
CASSLVQDTGELFF

SEQ ID NO: 306069 - protein, 17 aa, Homo sapiens
  CDR3 for alpha chain variable domain of TCR clone 153035 (TRAV13-1, TRAJ52)
CAASSGDGGTSYGKLTF

SEQ ID NO: 306070 - protein, 12 aa, Homo sapiens
  CDR3 for beta chain variable domain of TCR clone 153035 (TRBV11-2, TRBJ2-2)
CASSLGGGELFF

SEQ ID NO: 306071 - protein, 13 aa, Homo sapiens
  CDR3 for alpha chain variable domain of TCR clone 153036 (TRAV38-1, TRAJ42)
CARWGGSQGNLIF

SEQ ID NO: 306072 - protein, 15 aa, Homo sapiens
  CDR3 for beta chain variable domain of TCR clone 153036 (TRBV7-9, TRBJ1-1)
CASSLLEQGGTEAFF

SEQ ID NO: 306073 - protein, 12 aa, Homo sapiens
  CDR3 for alpha chain variable domain of TCR clone 153037 (TRAV12-3, TRAJ5)
CAMETGRRALTF

SEQ ID NO: 306074 - protein, 13 aa, Homo sapiens
  CDR3 for beta chain variable domain of TCR clone 153037 (TRBV7-7, TRBJ2-2)
CASSLTSAGELFF

SEQ ID NO: 306075 - protein, 13 aa, Homo sapiens
  CDR3 for alpha chain variable domain of TCR clone 153038 (TRAV26-1, TRAJ34)
CIVRPWITDKLIF

SEQ ID NO: 306076 - protein, 17 aa, Homo sapiens
  CDR3 for beta chain variable domain of TCR clone 153038 (TRBV7-8, TRBJ2-6)
CASSAGTGGAGANVLTF

SEQ ID NO: 306077 - protein, 12 aa, Homo sapiens
  CDR3 for alpha chain variable domain of TCR clone 153039 (TRAV17, TRAJ20)
CATNSNDYKLSF

SEQ ID NO: 306078 - protein, 17 aa, Homo sapiens
  CDR3 for beta chain variable domain of TCR clone 153039 (TRBV5-1, TRBJ2-2)
CASSLAGLSGGTGELFF

SEQ ID NO: 306079 - protein, 15 aa, Homo sapiens
  CDR3 for alpha chain variable domain of TCR clone 153040 (TRAV29/DV5, TRAJ28)
CSAGYSGAGSYQLTF

SEQ ID NO: 306080 - protein, 18 aa, Homo sapiens
  CDR3 for beta chain variable domain of TCR clone 153040 (TRBV3-1, TRBJ1-2)
CASSQDVIGWNGDYGYTF

SEQ ID NO: 306081 - protein, 16 aa, Homo sapiens
  CDR3 for alpha chain variable domain of TCR clone 153041 (TRAV30, TRAJ24)
CGTEIVDGDSWGKFQF

SEQ ID NO: 306082 - protein, 14 aa, Homo sapiens
  CDR3 for beta chain variable domain of TCR clone 153041 (TRBV12-5, TRBJ2-5)
CASGSRTRQETQYF

SEQ ID NO: 306083 - protein, 13 aa, Homo sapiens
  CDR3 for alpha chain variable domain of TCR clone 153042 (TRAV27, TRAJ49)
CAPRPYTGNPFCF

SEQ ID NO: 306084 - protein, 16 aa, Homo sapiens
  CDR3 for beta chain variable domain of TCR clone 153042 (TRBV4-1, TRBJ1-2)
CASSQDAGQVLYGYTF

SEQ ID NO: 306085 - protein, 13 aa, Homo sapiens
  CDR3 for alpha chain variable domain of TCR clone 153043 (TRAV13-1, TRAJ21)
CAASIYNFNKFYF

SEQ ID NO: 306086 - protein, 15 aa, Homo sapiens
  CDR3 for beta chain variable domain of TCR clone 153043 (TRBV7-2, TRBJ2-1)
CASSLASGRVNEQFF

SEQ ID NO: 306087 - protein, 13 aa, Homo sapiens
  CDR3 for alpha chain variable domain of TCR clone 153044 (TRAV20, TRAJ48)
CAVQGVGNEKLTF

SEQ ID NO: 306088 - protein, 19 aa, Homo sapiens
  CDR3 for beta chain variable domain of TCR clone 153044 (TRBV2, TRBJ2-2)
WASSQRGLAGGGDTGELFF

SEQ ID NO: 306089 - protein, 14 aa, Homo sapiens
  CDR3 for alpha chain variable domain of TCR clone 153045 (TRAV13-1, TRAJ40)
CAASMTSGTYKSIF

SEQ ID NO: 306090 - protein, 13 aa, Homo sapiens
  CDR3 for beta chain variable domain of TCR clone 153045 (TRBV4-1, TRBJ2-5)
CASSQEVQETQYF

SEQ ID NO: 306091 - protein, 12 aa, Homo sapiens
  CDR3 for alpha chain variable domain of TCR clone 153046 (TRAV26-1, TRAJ43)
CIVRPRGDGMRF

SEQ ID NO: 306092 - protein, 13 aa, Homo sapiens
  CDR3 for beta chain variable domain of TCR clone 153046 (TRBV3-1, TRBJ2-2)
CASLARGSGELFF

SEQ ID NO: 306093 - protein, 16 aa, Homo sapiens
  CDR3 for alpha chain variable domain of TCR clone 153047 (TRAV3, TRAJ37)
CAVRPHGFGNTGKPIF

SEQ ID NO: 306094 - protein, 14 aa, Homo sapiens
  CDR3 for beta chain variable domain of TCR clone 153047 (TRBV20-1, TRBJ2-1)
CSARGGSSYNEQFF

SEQ ID NO: 306095 - protein, 15 aa, Homo sapiens
  CDR3 for alpha chain variable domain of TCR clone 153048 (TRAV12-2, TRAJ43)
CAFDMRFGAGTRLTV

SEQ ID NO: 306096 - protein, 15 aa, Homo sapiens
  CDR3 for beta chain variable domain of TCR clone 153048 (TRBV5-1, TRBJ2-3)
CASSVTAGSTDTQYF

SEQ ID NO: 306097 - protein, 16 aa, Homo sapiens
  CDR3 for alpha chain variable domain of TCR clone 153049 (TRAV16, TRAJ4)
FSLSRMFSGGYNKLIF

SEQ ID NO: 306098 - protein, 16 aa, Homo sapiens
  CDR3 for beta chain variable domain of TCR clone 153049 (TRBV24-1, TRBJ2-3)
CDTSDPGTGATDTQYF

SEQ ID NO: 306099 - protein, 14 aa, Homo sapiens
  CDR3 for alpha chain variable domain of TCR clone 153050 (TRAV12-3, TRAJ42)
CAMNYGGSQGNLIF

SEQ ID NO: 306100 - protein, 13 aa, Homo sapiens
  CDR3 for beta chain variable domain of TCR clone 153050 (TRBV7-2, TRBJ2-7)
CASSSPSGSEQYF

SEQ ID NO: 306101 - protein, 13 aa, Homo sapiens
  CDR3 for alpha chain variable domain of TCR clone 153051 (TRAV38-1, TRAJ42)
FARWGGSQGNRIF

SEQ ID NO: 306102 - protein, 17 aa, Homo sapiens
  CDR3 for beta chain variable domain of TCR clone 153051 (TRBV20-1, TRBJ2-1)
CSARDPLAGAWDNEQFF

SEQ ID NO: 306103 - protein, 16 aa, Homo sapiens
  CDR3 for alpha chain variable domain of TCR clone 153052 (TRAV30, TRAJ24)
CGTEIVDADSWGNFQF

SEQ ID NO: 306104 - protein, 15 aa, Homo sapiens
  CDR3 for beta chain variable domain of TCR clone 153052 (TRBV7-9, TRBJ1-4)
CASSARTGGNEKLFF

SEQ ID NO: 306105 - protein, 16 aa, Homo sapiens
  CDR3 for alpha chain variable domain of TCR clone 153053 (TRAV1-2, TRAJ10)
CAVRGVLTGGGNKLTF

SEQ ID NO: 306106 - protein, 15 aa, Homo sapiens
  CDR3 for beta chain variable domain of TCR clone 153053 (TRBV7-3, TRBJ2-7)
CASSPPVALNYEQYF

SEQ ID NO: 306107 - protein, 14 aa, Homo sapiens
  CDR3 for alpha chain variable domain of TCR clone 153054 (TRAV8-3, TRAJ4)
CAVGAAGGYHKLIF

SEQ ID NO: 306108 - protein, 16 aa, Homo sapiens
  CDR3 for beta chain variable domain of TCR clone 153054 (TRBV7-2, TRBJ1-2)
CASSRQGGGANYGYTF

SEQ ID NO: 306109 - protein, 13 aa, Homo sapiens
  CDR3 for alpha chain variable domain of TCR clone 153055 (TRAV9-2, TRAJ37)
FALHSSNTGKLIF

SEQ ID NO: 306110 - protein, 15 aa, Homo sapiens
  CDR3 for beta chain variable domain of TCR clone 153055 (TRBV7-2, TRBJ2-7)
CASSTPGLTRGEQYF

SEQ ID NO: 306111 - protein, 18 aa, Homo sapiens
  CDR3 for alpha chain variable domain of TCR clone 153056 (TRAV21, TRAJ52)
CAVRPSPAGGTSYGKLKF

SEQ ID NO: 306112 - protein, 13 aa, Homo sapiens
  CDR3 for beta chain variable domain of TCR clone 153056 (TRBV20-1, TRBJ1-1)
CSARVGGNTEAFF

SEQ ID NO: 306113 - protein, 15 aa, Homo sapiens
  CDR3 for alpha chain variable domain of TCR clone 153057 (TRAV22, TRAJ45)
CAAKYSGGGADGLTF

SEQ ID NO: 306114 - protein, 12 aa, Homo sapiens
  CDR3 for beta chain variable domain of TCR clone 153057 (TRBV7-8, TRBJ2-7)
CASSLGDREQYF

SEQ ID NO: 306115 - protein, 14 aa, Homo sapiens
  CDR3 for alpha chain variable domain of TCR clone 153058 (TRAV3, TRAJ7)
CAVREEEREQQARF

SEQ ID NO: 306116 - protein, 12 aa, Homo sapiens
  CDR3 for beta chain variable domain of TCR clone 153058 (TRBV7-8, TRBJ2-7)
SASSLGDREQYF

SEQ ID NO: 306117 - protein, 12 aa, Homo sapiens
  CDR3 for alpha chain variable domain of TCR clone 153059 (TRAV13-2, TRAJ23)
CAQRHRGGKLIF

SEQ ID NO: 306118 - protein, 16 aa, Homo sapiens
  CDR3 for beta chain variable domain of TCR clone 153059 (TRBV20-1, TRBJ1-4)
CSAPGQGILTNEKLFF

SEQ ID NO: 306119 - protein, 12 aa, Homo sapiens
  CDR3 for alpha chain variable domain of TCR clone 153060 (TRAV12-1, TRAJ32)
YELCGATNKLIF

SEQ ID NO: 306120 - protein, 15 aa, Homo sapiens
  CDR3 for beta chain variable domain of TCR clone 153060 (TRBV7-9, TRBJ2-2)
CASGPLDTFPGELFF

SEQ ID NO: 306121 - protein, 19 aa, Homo sapiens
  CDR3 for alpha chain variable domain of TCR clone 153061 (TRAV26-1, TRAJ28)
CIVRVAHAYAGAGSYQLTF

SEQ ID NO: 306122 - protein, 17 aa, Homo sapiens
  CDR3 for beta chain variable domain of TCR clone 153061 (TRBV9, TRBJ2-2)
CASSVGGQGTDTGELFF

SEQ ID NO: 306123 - protein, 14 aa, Homo sapiens
  CDR3 for alpha chain variable domain of TCR clone 153062 (TRAV9-2, TRAJ39)
CALYIYNAGNMLTF

SEQ ID NO: 306124 - protein, 14 aa, Homo sapiens
  CDR3 for beta chain variable domain of TCR clone 153062 (TRBV15, TRBJ1-5)
CATSREQSNQPQHF

SEQ ID NO: 306125 - protein, 17 aa, Homo sapiens
  CDR3 for alpha chain variable domain of TCR clone 153063 (TRAV26-1, TRAJ58)
CIIRVGAEETSGSRLTF

SEQ ID NO: 306126 - protein, 18 aa, Homo sapiens
  CDR3 for beta chain variable domain of TCR clone 153063 (TRBV7-9, TRBJ2-7)
CASSLTTSGSRTWYEQYF

SEQ ID NO: 306127 - protein, 10 aa, Homo sapiens
  CDR3 for alpha chain variable domain of TCR clone 153064 (TRAV38-2/DV8, TRAJ40)
CASGTYKYIF

SEQ ID NO: 306128 - protein, 15 aa, Homo sapiens
  CDR3 for beta chain variable domain of TCR clone 153064 (TRBV27, TRBJ2-5)
CASSLYPRGGETQYF

SEQ ID NO: 306129 - protein, 10 aa, Homo sapiens
  CDR3 for alpha chain variable domain of TCR clone 153065 (TRAV13-2, TRAJ43)
CAESDDDMRF

SEQ ID NO: 306130 - protein, 14 aa, Homo sapiens
  CDR3 for beta chain variable domain of TCR clone 153065 (TRBV7-9, TRBJ2-1)
CASSPRDSLYEQFF

SEQ ID NO: 306131 - protein, 14 aa, Homo sapiens
  CDR3 for alpha chain variable domain of TCR clone 153066 (TRAV12-2, TRAJ13)
CAVKKTGGYQKVTF

SEQ ID NO: 306132 - protein, 14 aa, Homo sapiens
  CDR3 for beta chain variable domain of TCR clone 153066 (TRBV5-5, TRBJ2-7)
RASSLGQGTYEQYF

SEQ ID NO: 306133 - protein, 17 aa, Homo sapiens
  CDR3 for alpha chain variable domain of TCR clone 153067 (TRAV3, TRAJ6)
CAVRDGPRAGGSYIPAF

SEQ ID NO: 306134 - protein, 13 aa, Homo sapiens
  CDR3 for beta chain variable domain of TCR clone 153067 (TRBV12-4, TRBJ2-7)
CASSPTETYEQYF

SEQ ID NO: 306135 - protein, 14 aa, Homo sapiens
  CDR3 for alpha chain variable domain of TCR clone 153068 (TRAV1-2, TRAJ16)
CAANRFSDGQKLLF

SEQ ID NO: 306136 - protein, 13 aa, Homo sapiens
  CDR3 for beta chain variable domain of TCR clone 153068 (TRBV12-4, TRBJ2-7)
CASSPTETYEQYF

SEQ ID NO: 306137 - protein, 14 aa, Homo sapiens
  CDR3 for alpha chain variable domain of TCR clone 153069 (TRAV20, TRAJ56)
CAVQFGGANSKLTF

SEQ ID NO: 306138 - protein, 14 aa, Homo sapiens
  CDR3 for beta chain variable domain of TCR clone 153069 (TRBV20-1, TRBJ2-1)
CSAQIGGSANEQFF

SEQ ID NO: 306139 - protein, 16 aa, Homo sapiens
  CDR3 for alpha chain variable domain of TCR clone 153070 (TRAV30, TRAJ24)
CGTEIVDADSWGKFQF

SEQ ID NO: 306140 - protein, 12 aa, Homo sapiens
  CDR3 for beta chain variable domain of TCR clone 153070 (TRBV12-4, TRBJ2-3)
CASSSTTYTQYF

SEQ ID NO: 306141 - protein, 12 aa, Homo sapiens
  CDR3 for alpha chain variable domain of TCR clone 153071 (TRAV12-3, TRAJ17)
CAMTLTGNKLTF

SEQ ID NO: 306142 - protein, 15 aa, Homo sapiens
  CDR3 for beta chain variable domain of TCR clone 153071 (TRBV12-4, TRBJ2-5)
CQQFFVRGRQETQYF

SEQ ID NO: 306143 - protein, 13 aa, Homo sapiens
  CDR3 for alpha chain variable domain of TCR clone 153072 (TRAV21, TRAJ27)
CAARPGNAGKSTF

SEQ ID NO: 306144 - protein, 13 aa, Homo sapiens
  CDR3 for beta chain variable domain of TCR clone 153072 (TRBV7-6, TRBJ2-1)
CQQLGGGADEQLF

SEQ ID NO: 306145 - protein, 14 aa, Homo sapiens
  CDR3 for alpha chain variable domain of TCR clone 153073 (TRAV2, TRAJ37)
CAVDFTSNTGKLIF

SEQ ID NO: 306146 - protein, 14 aa, Homo sapiens
  CDR3 for beta chain variable domain of TCR clone 153073 (TRBV20-1, TRBJ1-1)
SAVLHLGGGTEAVF

SEQ ID NO: 306147 - protein, 14 aa, Homo sapiens
  CDR3 for alpha chain variable domain of TCR clone 153074 (TRAV1-2, TRAJ16)
CAVNRFSDGQKLLF

SEQ ID NO: 306148 - protein, 16 aa, Homo sapiens
  CDR3 for beta chain variable domain of TCR clone 153074 (TRBV28, TRBJ2-4)
CASSLIQGPLGNSQYF

SEQ ID NO: 306149 - protein, 12 aa, Homo sapiens
  CDR3 for alpha chain variable domain of TCR clone 153075 (TRAV12-2, TRAJ21)
CAPSDNFNEFYF

SEQ ID NO: 306150 - protein, 14 aa, Homo sapiens
  CDR3 for beta chain variable domain of TCR clone 153075 (TRBV12-4, TRBJ1-1)
CASSLRSSGTEAFF

SEQ ID NO: 306151 - protein, 22 aa, Homo sapiens
  CDR3 for alpha chain variable domain of TCR clone 153076 (TRAV8-2, TRAJ45)
HLTKPSAHMSDAAEYSADGLTF

SEQ ID NO: 306152 - protein, 13 aa, Homo sapiens
  CDR3 for beta chain variable domain of TCR clone 153076 (TRBV7-3, TRBJ2-1)
CTSSPVAYNEQFF

SEQ ID NO: 306153 - protein, 15 aa, Homo sapiens
  CDR3 for alpha chain variable domain of TCR clone 153077 (TRAV35, TRAJ58)
CAGRRQETSGSMLTF

SEQ ID NO: 306154 - protein, 16 aa, Homo sapiens
  CDR3 for beta chain variable domain of TCR clone 153077 (TRBV2, TRBJ2-1)
CASSVGGSLSYNEQFF

SEQ ID NO: 306155 - protein, 16 aa, Homo sapiens
  CDR3 for alpha chain variable domain of TCR clone 153078 (TRAV30, TRAJ24)
CGTEIVDADSWGNFQF

SEQ ID NO: 306156 - protein, 15 aa, Homo sapiens
  CDR3 for beta chain variable domain of TCR clone 153078 (TRBV15, TRBJ1-5)
CATSRDPVSNQPQHF

SEQ ID NO: 306157 - protein, 12 aa, Homo sapiens
  CDR3 for alpha chain variable domain of TCR clone 153079 (TRAV21, TRAJ39)
CAAVNAGNMLTF

SEQ ID NO: 306158 - protein, 13 aa, Homo sapiens
  CDR3 for beta chain variable domain of TCR clone 153079 (TRBV12-4, TRBJ1-1)
CASSPGTGFEAFF

SEQ ID NO: 306159 - protein, 16 aa, Homo sapiens
  CDR3 for alpha chain variable domain of TCR clone 153080 (TRAV21, TRAJ37)
CAVRTAGSSDTGKLIF

SEQ ID NO: 306160 - protein, 13 aa, Homo sapiens
  CDR3 for beta chain variable domain of TCR clone 153080 (TRBV7-9, TRBJ2-5)
CASLPAGRETQYF

SEQ ID NO: 306161 - protein, 13 aa, Homo sapiens
  CDR3 for alpha chain variable domain of TCR clone 153081 (TRAV24, TRAJ53)
CAFGGGSHYKLTF

SEQ ID NO: 306162 - protein, 15 aa, Homo sapiens
  CDR3 for beta chain variable domain of TCR clone 153081 (TRBV5-8, TRBJ2-2)
CASSLDRGATGELFF

SEQ ID NO: 306163 - protein, 17 aa, Homo sapiens
  CDR3 for alpha chain variable domain of TCR clone 153082 (TRAV12-1, TRAJ13)
CVVNKRGEFWGLPESYL

SEQ ID NO: 306164 - protein, 12 aa, Homo sapiens
  CDR3 for beta chain variable domain of TCR clone 153082 (TRBV29-1, TRBJ1-2)
CSAHRVDYGYTF

SEQ ID NO: 306165 - protein, 15 aa, Homo sapiens
  CDR3 for alpha chain variable domain of TCR clone 153083 (TRAV3, TRAJ23)
CAVRDRGNQGGKLIV

SEQ ID NO: 306166 - protein, 13 aa, Homo sapiens
  CDR3 for beta chain variable domain of TCR clone 153083 (TRBV7-2, TRBJ2-7)
CASSSPSGSEQYF

SEQ ID NO: 306167 - protein, 14 aa, Homo sapiens
  CDR3 for alpha chain variable domain of TCR clone 153084 (TRAV8-3, TRAJ34)
CAVGPPHNTDKLIF

SEQ ID NO: 306168 - protein, 14 aa, Homo sapiens
  CDR3 for beta chain variable domain of TCR clone 153084 (TRBV28, TRBJ1-6)
CATVYSRVRSPLHF

SEQ ID NO: 306169 - protein, 16 aa, Homo sapiens
  CDR3 for alpha chain variable domain of TCR clone 153085 (TRAV20, TRAJ38)
CAVQASNAGNNRKLIW

SEQ ID NO: 306170 - protein, 16 aa, Homo sapiens
  CDR3 for beta chain variable domain of TCR clone 153085 (TRBV7-8, TRBJ2-6)
CVSRVGDSSGANVLTF

SEQ ID NO: 306171 - protein, 12 aa, Homo sapiens
  CDR3 for alpha chain variable domain of TCR clone 153086 (TRAV12-1, TRAJ40)
CVVSSGTYTYIF

SEQ ID NO: 306172 - protein, 14 aa, Homo sapiens
  CDR3 for beta chain variable domain of TCR clone 153086 (TRBV20-1, TRBJ2-2)
CSAPDTANTGELFF

SEQ ID NO: 306173 - protein, 10 aa, Homo sapiens
  CDR3 for alpha chain variable domain of TCR clone 153087 (TRAV23/DV6, TRAJ31)
CARGGARLMF

SEQ ID NO: 306174 - protein, 14 aa, Homo sapiens
  CDR3 for beta chain variable domain of TCR clone 153087 (TRBV7-8, TRBJ1-2)
CASSPDSLSYGYTL

SEQ ID NO: 306175 - protein, 14 aa, Homo sapiens
  CDR3 for alpha chain variable domain of TCR clone 153088 (TRAV12-2, TRAJ45)
CALPERGGADGLTF

SEQ ID NO: 306176 - protein, 11 aa, Homo sapiens
  CDR3 for beta chain variable domain of TCR clone 153088 (TRBV19, TRBJ1-1)
CASSIGSEAFF

SEQ ID NO: 306177 - protein, 14 aa, Homo sapiens
  CDR3 for alpha chain variable domain of TCR clone 153089 (TRAV12-2, TRAJ13)
CALKKTGGYQKVTF

SEQ ID NO: 306178 - protein, 15 aa, Homo sapiens
  CDR3 for beta chain variable domain of TCR clone 153089 (TRBV6-3, TRBJ2-7)
CASSSPGTVFYEQYF

SEQ ID NO: 306179 - protein, 11 aa, Homo sapiens
  CDR3 for alpha chain variable domain of TCR clone 153090 (TRAV35, TRAJ34)
CWSRNTDKLIF

SEQ ID NO: 306180 - protein, 18 aa, Homo sapiens
  CDR3 for beta chain variable domain of TCR clone 153090 (TRBV27, TRBJ2-3)
CASSKGTSGRTSTDTQYF

SEQ ID NO: 306181 - protein, 18 aa, Homo sapiens
  CDR3 for alpha chain variable domain of TCR clone 153091 (TRAV26-2, TRAJ54)
CILRDVEVGIQGAQKLVF

SEQ ID NO: 306182 - protein, 13 aa, Homo sapiens
  CDR3 for beta chain variable domain of TCR clone 153091 (TRBV20-1, TRBJ2-2)
CSASAAGTGELFF

SEQ ID NO: 306183 - protein, 12 aa, Homo sapiens
  CDR3 for alpha chain variable domain of TCR clone 153092 (TRAV13-1, TRAJ27)
CAAHTNAGKSTF

SEQ ID NO: 306184 - protein, 14 aa, Homo sapiens
  CDR3 for beta chain variable domain of TCR clone 153092 (TRBV19, TRBJ2-2)
CTSSGQGIAGELYF

SEQ ID NO: 306185 - protein, 12 aa, Homo sapiens
  CDR3 for alpha chain variable domain of TCR clone 153093 (TRAV1-1, TRAJ30)
CAVRGRDDKIIF

SEQ ID NO: 306186 - protein, 17 aa, Homo sapiens
  CDR3 for beta chain variable domain of TCR clone 153093 (TRBV11-2, TRBJ2-1)
CASSLYPPGVEYNEQFF

SEQ ID NO: 306187 - protein, 13 aa, Homo sapiens
  CDR3 for alpha chain variable domain of TCR clone 153094 (TRAV1-1, TRAJ9)
CAAKNTGGFKTIF

SEQ ID NO: 306188 - protein, 16 aa, Homo sapiens
  CDR3 for beta chain variable domain of TCR clone 153094 (TRBV12-5, TRBJ2-5)
CAGGPRTSGNQETQYF

SEQ ID NO: 306189 - protein, 12 aa, Homo sapiens
  CDR3 for alpha chain variable domain of TCR clone 153095 (TRAV13-1, TRAJ49)
CAASPMGNQFYF

SEQ ID NO: 306190 - protein, 13 aa, Homo sapiens
  CDR3 for beta chain variable domain of TCR clone 153095 (TRBV19, TRBJ1-1)
CASSIGSEAFLDK

SEQ ID NO: 306191 - protein, 23 aa, Homo sapiens
  CDR3 for alpha chain variable domain of TCR clone 153096 (TRAV26-1, TRAJ38)
CIADNAGNNHIQNPDPAVYQLRD

SEQ ID NO: 306192 - protein, 15 aa, Homo sapiens
  CDR3 for beta chain variable domain of TCR clone 153096 (TRBV9, TRBJ2-2)
CASSGTLANTGELFF

SEQ ID NO: 306193 - protein, 20 aa, Homo sapiens
  CDR3 for alpha chain variable domain of TCR clone 153097 (TRAV14/DV4, TRAJ9)
CAMNPGGFKTTLEQEQDYLL

SEQ ID NO: 306194 - protein, 16 aa, Homo sapiens
  CDR3 for beta chain variable domain of TCR clone 153097 (TRBV28, TRBJ2-5)
CASSFSPAGGWETQYF

SEQ ID NO: 306195 - protein, 13 aa, Homo sapiens
  CDR3 for alpha chain variable domain of TCR clone 153098 (TRAV2, TRAJ6)
CAARPGGSYIPTF

SEQ ID NO: 306196 - protein, 13 aa, Homo sapiens
  CDR3 for beta chain variable domain of TCR clone 153098 (TRBV20-1, TRBJ1-5)
CSASWGRSQPQHF

SEQ ID NO: 306197 - protein, 18 aa, Homo sapiens
  CDR3 for alpha chain variable domain of TCR clone 153099 (TRAV26-2, TRAJ54)
CILRDVEVGIQGAQKLVF

SEQ ID NO: 306198 - protein, 13 aa, Homo sapiens
  CDR3 for beta chain variable domain of TCR clone 153099 (TRBV24-1, TRBJ2-1)
CATSAGPYNEQFF

SEQ ID NO: 306199 - protein, 14 aa, Homo sapiens
  CDR3 for alpha chain variable domain of TCR clone 153100 (TRAV21, TRAJ35)
CAVMPIGFGNVLHC

SEQ ID NO: 306200 - protein, 17 aa, Homo sapiens
  CDR3 for beta chain variable domain of TCR clone 153100 (TRBV7-8, TRBJ2-6)
CASSAGTGGAGANVLTF

SEQ ID NO: 306201 - protein, 12 aa, Homo sapiens
  CDR3 for alpha chain variable domain of TCR clone 153101 (TRAV8-3, TRAJ26)
CAGNNYGQNFVF

SEQ ID NO: 306202 - protein, 14 aa, Homo sapiens
  CDR3 for beta chain variable domain of TCR clone 153101 (TRBV7-2, TRBJ2-7)
CASRSQGAAYEQYF

SEQ ID NO: 306203 - protein, 13 aa, Homo sapiens
  CDR3 for alpha chain variable domain of TCR clone 153102 (TRAV16, TRAJ54)
CSKWGSGSQKLVF

SEQ ID NO: 306204 - protein, 15 aa, Homo sapiens
  CDR3 for beta chain variable domain of TCR clone 153102 (TRBV18, TRBJ2-2)
CASSTSGLHTGELFF

SEQ ID NO: 306205 - protein, 14 aa, Homo sapiens
  CDR3 for alpha chain variable domain of TCR clone 153103 (TRAV17, TRAJ6)
CATNPAGGSYIPTF

SEQ ID NO: 306206 - protein, 16 aa, Homo sapiens
  CDR3 for beta chain variable domain of TCR clone 153103 (TRBV7-7, TRBJ2-1)
CASSLASGTSYNEQFF

SEQ ID NO: 306207 - protein, 15 aa, Homo sapiens
  CDR3 for alpha chain variable domain of TCR clone 153104 (TRAV3, TRAJ9)
CAVRARNTGGFKTIF

SEQ ID NO: 306208 - protein, 15 aa, Homo sapiens
  CDR3 for beta chain variable domain of TCR clone 153104 (TRBV6-6, TRBJ1-1)
CASSPYADPYTEAFF

SEQ ID NO: 306209 - protein, 14 aa, Homo sapiens
  CDR3 for alpha chain variable domain of TCR clone 153105 (TRAV12-3, TRAJ7)
CAMSEIGGNNRLAF

SEQ ID NO: 306210 - protein, 13 aa, Homo sapiens
  CDR3 for beta chain variable domain of TCR clone 153105 (TRBV20-1, TRBJ1-1)
CSARGGGNTEAFF

SEQ ID NO: 306211 - protein, 13 aa, Homo sapiens
  CDR3 for alpha chain variable domain of TCR clone 153106 (TRAV17, TRAJ54)
CATVIQGAQKLVF

SEQ ID NO: 306212 - protein, 15 aa, Homo sapiens
  CDR3 for beta chain variable domain of TCR clone 153106 (TRBV13, TRBJ2-1)
CASSLLSGINNEQFF

SEQ ID NO: 306213 - protein, 14 aa, Homo sapiens
  CDR3 for alpha chain variable domain of TCR clone 153107 (TRAV1-2, TRAJ8)
CAVREDTGFQKLVF

SEQ ID NO: 306214 - protein, 15 aa, Homo sapiens
  CDR3 for beta chain variable domain of TCR clone 153107 (TRBV29-1, TRBJ2-1)
CSVEAPRGSPNEQFF

SEQ ID NO: 306215 - protein, 13 aa, Homo sapiens
  CDR3 for alpha chain variable domain of TCR clone 153108 (TRAV13-1, TRAJ5)
CAASDIGRRALTF

SEQ ID NO: 306216 - protein, 12 aa, Homo sapiens
  CDR3 for beta chain variable domain of TCR clone 153108 (TRBV28, TRBJ2-3)
CASSLYRDTQYF

SEQ ID NO: 306217 - protein, 13 aa, Homo sapiens
  CDR3 for alpha chain variable domain of TCR clone 153109 (TRAV12-2, TRAJ10)
CAVPTGGGNKLTF

SEQ ID NO: 306218 - protein, 16 aa, Homo sapiens
  CDR3 for beta chain variable domain of TCR clone 153109 (TRBV15, TRBJ1-2)
CATSRGPRTGGGGYTF

SEQ ID NO: 306219 - protein, 13 aa, Homo sapiens
  CDR3 for alpha chain variable domain of TCR clone 153110 (TRAV13-1, TRAJ21)
CAASIYNFNKFYF

SEQ ID NO: 306220 - protein, 13 aa, Homo sapiens
  CDR3 for beta chain variable domain of TCR clone 153110 (TRBV7-6, TRBJ1-2)
CASSLVADYGYTF

SEQ ID NO: 306221 - protein, 16 aa, Homo sapiens
  CDR3 for alpha chain variable domain of TCR clone 153111 (TRAV3, TRAJ28)
CAVLPRSGAGSYQLTF

SEQ ID NO: 306222 - protein, 17 aa, Homo sapiens
  CDR3 for beta chain variable domain of TCR clone 153111 (TRBV25-1, TRBJ2-7)
CASSDARVVFSSYEQYF

SEQ ID NO: 306223 - protein, 14 aa, Homo sapiens
  CDR3 for alpha chain variable domain of TCR clone 153112 (TRAV2, TRAJ9)
FAVEDRSGGFKTIF

SEQ ID NO: 306224 - protein, 17 aa, Homo sapiens
  CDR3 for beta chain variable domain of TCR clone 153112 (TRBV13, TRBJ2-3)
CASSLSRVAGGRNTQYF

SEQ ID NO: 306225 - protein, 18 aa, Homo sapiens
  CDR3 for alpha chain variable domain of TCR clone 153113 (TRAV21, TRAJ52)
CAVRPSPAGGTSYGKLPF

SEQ ID NO: 306226 - protein, 15 aa, Homo sapiens
  CDR3 for beta chain variable domain of TCR clone 153113 (TRBV20-1, TRBJ2-7)
CSARKGLAESYEQYF

SEQ ID NO: 306227 - protein, 10 aa, Homo sapiens
  CDR3 for alpha chain variable domain of TCR clone 153114 (TRAV23/DV6, TRAJ57)
CAASSTLSQG

SEQ ID NO: 306228 - protein, 14 aa, Homo sapiens
  CDR3 for beta chain variable domain of TCR clone 153114 (TRBV20-1, TRBJ2-7)
CSAKRGRSSYEQFF

SEQ ID NO: 306229 - protein, 16 aa, Homo sapiens
  CDR3 for alpha chain variable domain of TCR clone 153115 (TRAV23/DV6, TRAJ9)
CVASIGGNTGGFKTIF

SEQ ID NO: 306230 - protein, 15 aa, Homo sapiens
  CDR3 for beta chain variable domain of TCR clone 153115 (TRBV6-3, TRBJ2-7)
CASSSPGTVLYEQYF

SEQ ID NO: 306231 - protein, 13 aa, Homo sapiens
  CDR3 for alpha chain variable domain of TCR clone 153116 (TRAV12-2, TRAJ20)
CAVYPSNDYKLSF

SEQ ID NO: 306232 - protein, 15 aa, Homo sapiens
  CDR3 for beta chain variable domain of TCR clone 153116 (TRBV27, TRBJ2-5)
CASSLYPRGGRDPVL

SEQ ID NO: 306233 - protein, 15 aa, Homo sapiens
  CDR3 for alpha chain variable domain of TCR clone 153117 (TRAV26-1, TRAJ56)
CIVRVDNGANSKLTF

SEQ ID NO: 306234 - protein, 18 aa, Homo sapiens
  CDR3 for beta chain variable domain of TCR clone 153117 (TRBV2, TRBJ2-1)
CASRGLAGGPRTYNEQFF

SEQ ID NO: 306235 - protein, 14 aa, Homo sapiens
  CDR3 for alpha chain variable domain of TCR clone 153118 (TRAV12-1, TRAJ30)
CVVRGMNRDDKVIF

SEQ ID NO: 306236 - protein, 14 aa, Homo sapiens
  CDR3 for beta chain variable domain of TCR clone 153118 (TRBV7-2, TRBJ2-1)
CASSLTSGNRRQFF

SEQ ID NO: 306237 - protein, 15 aa, Homo sapiens
  CDR3 for alpha chain variable domain of TCR clone 153119 (TRAV12-1, TRAJ4)
CVVNPFSGGYNELIF

SEQ ID NO: 306238 - protein, 16 aa, Homo sapiens
  CDR3 for beta chain variable domain of TCR clone 153119 (TRBV5-1, TRBJ1-1)
CASSKTGTEVGTEAFF

SEQ ID NO: 306239 - protein, 14 aa, Homo sapiens
  CDR3 for alpha chain variable domain of TCR clone 153120 (TRAV26-1, TRAJ44)
CISHLPGTASKLTF

SEQ ID NO: 306240 - protein, 16 aa, Homo sapiens
  CDR3 for beta chain variable domain of TCR clone 153120 (TRBV19, TRBJ2-1)
CASSKAGPSSYNEQFF

SEQ ID NO: 306241 - protein, 11 aa, Homo sapiens
  CDR3 for alpha chain variable domain of TCR clone 153121 (TRAV8-6, TRAJ34)
CAVWNTDKLIF

SEQ ID NO: 306242 - protein, 15 aa, Homo sapiens
  CDR3 for beta chain variable domain of TCR clone 153121 (TRBV6-3, TRBJ2-7)
CASSSPGTVFYEQYF

SEQ ID NO: 306243 - protein, 14 aa, Homo sapiens
  CDR3 for alpha chain variable domain of TCR clone 153122 (TRAV13-1, TRAJ16)
CAAAYFFRWPEAAL

SEQ ID NO: 306244 - protein, 16 aa, Homo sapiens
  CDR3 for beta chain variable domain of TCR clone 153122 (TRBV12-5, TRBJ2-5)
CASGPRTSGNQETQYF

SEQ ID NO: 306245 - protein, 18 aa, Homo sapiens
  CDR3 for alpha chain variable domain of TCR clone 153123 (TRAV29/DV5, TRAJ52)
GAAGFRGAGGTSYGKLTF

SEQ ID NO: 306246 - protein, 16 aa, Homo sapiens
  CDR3 for beta chain variable domain of TCR clone 153123 (TRBV7-3, TRBJ2-2)
CASSLKRGTLSGELFF

SEQ ID NO: 306247 - protein, 13 aa, Homo sapiens
  CDR3 for alpha chain variable domain of TCR clone 153124 (TRAV21, TRAJ27)
CAARPGNAGKSTV

SEQ ID NO: 306248 - protein, 12 aa, Homo sapiens
  CDR3 for beta chain variable domain of TCR clone 153124 (TRBV11-2, TRBJ2-2)
CASSLGGGELFF

SEQ ID NO: 306249 - protein, 16 aa, Homo sapiens
  CDR3 for alpha chain variable domain of TCR clone 153125 (TRAV12-3, TRAJ45)
CAMGWGSGGGADGLTF

SEQ ID NO: 306250 - protein, 12 aa, Homo sapiens
  CDR3 for beta chain variable domain of TCR clone 153125 (TRBV11-2, TRBJ2-1)
CASSPGNNEQFF

SEQ ID NO: 306251 - protein, 11 aa, Homo sapiens
  CDR3 for alpha chain variable domain of TCR clone 153126 (TRAV2, TRAJ33)
CAVESNYQLIW

SEQ ID NO: 306252 - protein, 16 aa, Homo sapiens
  CDR3 for beta chain variable domain of TCR clone 153126 (TRBV12-4, TRBJ1-2)
CASSPTATGKTRGYTF

SEQ ID NO: 306253 - protein, 15 aa, Homo sapiens
  CDR3 for alpha chain variable domain of TCR clone 153127 (TRAV8-3, TRAJ45)
CASSYSGGGADGLTF

SEQ ID NO: 306254 - protein, 15 aa, Homo sapiens
  CDR3 for beta chain variable domain of TCR clone 153127 (TRBV18, TRBJ1-1)
CASSPRQGENTEALF

SEQ ID NO: 306255 - protein, 14 aa, Homo sapiens
  CDR3 for alpha chain variable domain of TCR clone 153128 (TRAV38-1, TRAJ29)
CAFITPSGNTPLVF

SEQ ID NO: 306256 - protein, 13 aa, Homo sapiens
  CDR3 for beta chain variable domain of TCR clone 153128 (TRBV4-2, TRBJ1-1)
CASSQAGNTEAFF

SEQ ID NO: 306257 - protein, 13 aa, Homo sapiens
  CDR3 for alpha chain variable domain of TCR clone 153129 (TRAV8-3, TRAJ17)
CAGIKAAGNTLTF

SEQ ID NO: 306258 - protein, 15 aa, Homo sapiens
  CDR3 for beta chain variable domain of TCR clone 153129 (TRBV4-2, TRBJ2-5)
CASSTQTGLQETQYF

SEQ ID NO: 306259 - protein, 18 aa, Homo sapiens
  CDR3 for alpha chain variable domain of TCR clone 153130 (TRAV12-3, TRAJ52)
CAMSRTNAGGTSYGKLTF

SEQ ID NO: 306260 - protein, 15 aa, Homo sapiens
  CDR3 for beta chain variable domain of TCR clone 153130 (TRBV2, TRBJ2-1)
CASSELAGSYNEQFF

SEQ ID NO: 306261 - protein, 14 aa, Homo sapiens
  CDR3 for alpha chain variable domain of TCR clone 153131 (TRAV12-2, TRAJ13)
CAVKKTGGYQRVTF

SEQ ID NO: 306262 - protein, 14 aa, Homo sapiens
  CDR3 for beta chain variable domain of TCR clone 153131 (TRBV12-5, TRBJ2-5)
CASGSRTHQETQYF

SEQ ID NO: 306263 - protein, 15 aa, Homo sapiens
  CDR3 for alpha chain variable domain of TCR clone 153132 (TRAV5, TRAJ9)
CAERPPRTGGFKTIF

SEQ ID NO: 306264 - protein, 15 aa, Homo sapiens
  CDR3 for beta chain variable domain of TCR clone 153132 (TRBV5-1, TRBJ2-2)
CASSWTSPNTGELFF

SEQ ID NO: 306265 - protein, 14 aa, Homo sapiens
  CDR3 for alpha chain variable domain of TCR clone 153133 (TRAV8-2, TRAJ4)
CVVSPSGGYNKLIF

SEQ ID NO: 306266 - protein, 15 aa, Homo sapiens
  CDR3 for beta chain variable domain of TCR clone 153133 (TRBV4-1, TRBJ1-4)
CAISDTGGTNEKLFF

SEQ ID NO: 306267 - protein, 14 aa, Homo sapiens
  CDR3 for alpha chain variable domain of TCR clone 153134 (TRAV29/DV5, TRAJ36)
CAARRKTGANNLFF

SEQ ID NO: 306268 - protein, 15 aa, Homo sapiens
  CDR3 for beta chain variable domain of TCR clone 153134 (TRBV10-2, TRBJ2-6)
CASSEQGTGANDLTF

SEQ ID NO: 306269 - protein, 15 aa, Homo sapiens
  CDR3 for alpha chain variable domain of TCR clone 153135 (TRAV12-3, TRAJ6)
CAMSAASGGSYVPTF

SEQ ID NO: 306270 - protein, 13 aa, Homo sapiens
  CDR3 for beta chain variable domain of TCR clone 153135 (TRBV20-1, TRBJ1-2)
CSASTERIYGDTF

SEQ ID NO: 306271 - protein, 16 aa, Homo sapiens
  CDR3 for alpha chain variable domain of TCR clone 153136 (TRAV3, TRAJ10)
CAVRDMRAGGGSKLTF

SEQ ID NO: 306272 - protein, 13 aa, Homo sapiens
  CDR3 for beta chain variable domain of TCR clone 153136 (TRBV4-2, TRBJ1-1)
CASSQAGNTEAFF

SEQ ID NO: 306273 - protein, 10 aa, Homo sapiens
  CDR3 for alpha chain variable domain of TCR clone 153137 (TRAV14/DV4, TRAJ48)
CAPRSEKLTF

SEQ ID NO: 306274 - protein, 15 aa, Homo sapiens
  CDR3 for beta chain variable domain of TCR clone 153137 (TRBV7-9, TRBJ1-4)
CASSATGGNNEKLVF

SEQ ID NO: 306275 - protein, 14 aa, Homo sapiens
  CDR3 for alpha chain variable domain of TCR clone 153138 (TRAV35, TRAJ33)
CAGSSQDSNYQLIW

SEQ ID NO: 306276 - protein, 16 aa, Homo sapiens
  CDR3 for beta chain variable domain of TCR clone 153138 (TRBV12-4, TRBJ1-5)
CASSRPVGGSNQPQHF

SEQ ID NO: 306277 - protein, 14 aa, Homo sapiens
  CDR3 for alpha chain variable domain of TCR clone 153139 (TRAV3, TRAJ30)
CAVRHIGRDDKIIF

SEQ ID NO: 306278 - protein, 14 aa, Homo sapiens
  CDR3 for beta chain variable domain of TCR clone 153139 (TRBV20-1, TRBJ2-3)
CSARGGTSTDTQYF

SEQ ID NO: 306279 - protein, 14 aa, Homo sapiens
  CDR3 for alpha chain variable domain of TCR clone 153140 (TRAV23/DV6, TRAJ37)
CAASTSSNTGKLIF

SEQ ID NO: 306280 - protein, 14 aa, Homo sapiens
  CDR3 for beta chain variable domain of TCR clone 153140 (TRBV15, TRBJ2-3)
CATRSGTGTDTQYF

SEQ ID NO: 306281 - protein, 15 aa, Homo sapiens
  CDR3 for alpha chain variable domain of TCR clone 153141 (TRAV12-1, TRAJ41)
CVVNSRTGSGYALNF

SEQ ID NO: 306282 - protein, 11 aa, Homo sapiens
  CDR3 for beta chain variable domain of TCR clone 153141 (TRBV6-4, TRBJ2-1)
CASSVSYAQFF

SEQ ID NO: 306283 - protein, 12 aa, Homo sapiens
  CDR3 for alpha chain variable domain of TCR clone 153142 (TRAV12-1, TRAJ40)
CVFYPGTYKYIF

SEQ ID NO: 306284 - protein, 14 aa, Homo sapiens
  CDR3 for beta chain variable domain of TCR clone 153142 (TRBV11-3, TRBJ2-2)
CASSPHRHTGELFF

SEQ ID NO: 306285 - protein, 14 aa, Homo sapiens
  CDR3 for alpha chain variable domain of TCR clone 153143 (TRAV1-2, TRAJ8)
CAVREATGFQKLVF

SEQ ID NO: 306286 - protein, 16 aa, Homo sapiens
  CDR3 for beta chain variable domain of TCR clone 153143 (TRBV7-9, TRBJ2-1)
CASSDVAGGSYNEQFF

SEQ ID NO: 306287 - protein, 17 aa, Homo sapiens
  CDR3 for alpha chain variable domain of TCR clone 153144 (TRAV4, TRAJ18)
CLVGERSVGSTLGRLYF

SEQ ID NO: 306288 - protein, 14 aa, Homo sapiens
  CDR3 for beta chain variable domain of TCR clone 153144 (TRBV6-5, TRBJ1-2)
CASSYDGNGGGYTF

SEQ ID NO: 306289 - protein, 14 aa, Homo sapiens
  CDR3 for alpha chain variable domain of TCR clone 153145 (TRAV8-3, TRAJ39)
CAVGANTAGNMLTF

SEQ ID NO: 306290 - protein, 13 aa, Homo sapiens
  CDR3 for beta chain variable domain of TCR clone 153145 (TRBV3-1, TRBJ2-5)
CASSPVLSETQYF

SEQ ID NO: 306291 - protein, 14 aa, Homo sapiens
  CDR3 for alpha chain variable domain of TCR clone 153146 (TRAV8-2, TRAJ5)
CVVIMDTGRRALTF

SEQ ID NO: 306292 - protein, 13 aa, Homo sapiens
  CDR3 for beta chain variable domain of TCR clone 153146 (TRBV15, TRBJ1-2)
CATRRDQGYGYTF

SEQ ID NO: 306293 - protein, 14 aa, Homo sapiens
  CDR3 for alpha chain variable domain of TCR clone 153147 (TRAV8-3, TRAJ4)
CAVGAAGGYNKLIF

SEQ ID NO: 306294 - protein, 13 aa, Homo sapiens
  CDR3 for beta chain variable domain of TCR clone 153147 (TRBV11-2, TRBJ2-5)
CASSFSSQETQYF

SEQ ID NO: 306295 - protein, 12 aa, Homo sapiens
  CDR3 for alpha chain variable domain of TCR clone 153148 (TRAV21, TRAJ8)
CAVNTGFQKLVF

SEQ ID NO: 306296 - protein, 13 aa, Homo sapiens
  CDR3 for beta chain variable domain of TCR clone 153148 (TRBV6-3, TRBJ2-1)
CASSYDNYNEQLF

SEQ ID NO: 306297 - protein, 12 aa, Homo sapiens
  CDR3 for alpha chain variable domain of TCR clone 153149 (TRAV35, TRAJ28)
GVEGAGSYQLTF

SEQ ID NO: 306298 - protein, 12 aa, Homo sapiens
  CDR3 for beta chain variable domain of TCR clone 153149 (TRBV5-1, TRBJ2-7)
CASSLDSYEQYF

SEQ ID NO: 306299 - protein, 12 aa, Homo sapiens
  CDR3 for alpha chain variable domain of TCR clone 153150 (TRAV16, TRAJ10)
CSRTGGGNKLTL

SEQ ID NO: 306300 - protein, 13 aa, Homo sapiens
  CDR3 for beta chain variable domain of TCR clone 153150 (TRBV28, TRBJ1-1)
CASSKQGWTEAFF

SEQ ID NO: 306301 - protein, 14 aa, Homo sapiens
  CDR3 for alpha chain variable domain of TCR clone 153151 (TRAV1-2, TRAJ8)
CAVREDTGFQKLVF

SEQ ID NO: 306302 - protein, 15 aa, Homo sapiens
  CDR3 for beta chain variable domain of TCR clone 153151 (TRBV4-3, TRBJ2-3)
CASSQDGRATDTQYF

SEQ ID NO: 306303 - protein, 14 aa, Homo sapiens
  CDR3 for alpha chain variable domain of TCR clone 153152 (TRAV17, TRAJ6)
CATDASGGSYIPTF

SEQ ID NO: 306304 - protein, 13 aa, Homo sapiens
  CDR3 for beta chain variable domain of TCR clone 153152 (TRBV18, TRBJ1-1)
CASSGGRNTEAFF

SEQ ID NO: 306305 - protein, 17 aa, Homo sapiens
  CDR3 for alpha chain variable domain of TCR clone 153153 (TRAV38-1, TRAJ28)
CAFMKPTSGAGSYQLTF

SEQ ID NO: 306306 - protein, 14 aa, Homo sapiens
  CDR3 for beta chain variable domain of TCR clone 153153 (TRBV7-2, TRBJ1-4)
CASSHSKTNEKLFF

SEQ ID NO: 306307 - protein, 15 aa, Homo sapiens
  CDR3 for alpha chain variable domain of TCR clone 153154 (TRAV14/DV4, TRAJ26)
CAMREGQNYGQNFVF

SEQ ID NO: 306308 - protein, 15 aa, Homo sapiens
  CDR3 for beta chain variable domain of TCR clone 153154 (TRBV19, TRBJ1-5)
CASSIVWADNQPQHF

SEQ ID NO: 306309 - protein, 11 aa, Homo sapiens
  CDR3 for alpha chain variable domain of TCR clone 153155 (TRAV17, TRAJ9)
CGFTGGFKTIF

SEQ ID NO: 306310 - protein, 22 aa, Homo sapiens
  CDR3 for beta chain variable domain of TCR clone 153155 (TRBV29-1, TRBJ2-5)
TVSNMSPEDSSIYLCSAGTQYF

SEQ ID NO: 306311 - protein, 11 aa, Homo sapiens
  CDR3 for alpha chain variable domain of TCR clone 153156 (TRAV17, TRAJ49)
CATNTGDQFYF

SEQ ID NO: 306312 - protein, 12 aa, Homo sapiens
  CDR3 for beta chain variable domain of TCR clone 153156 (TRBV2, TRBJ2-7)
CASSGGGGIPYF

SEQ ID NO: 306313 - protein, 16 aa, Homo sapiens
  CDR3 for alpha chain variable domain of TCR clone 153157 (TRAV23/DV6, TRAJ52)
CAAIMNGGTSYGKLTF

SEQ ID NO: 306314 - protein, 16 aa, Homo sapiens
  CDR3 for beta chain variable domain of TCR clone 153157 (TRBV27, TRBJ2-2)
CASSFRGLVRTGELFF

SEQ ID NO: 306315 - protein, 14 aa, Homo sapiens
  CDR3 for alpha chain variable domain of TCR clone 153158 (TRAV1-2, TRAJ8)
CAVREDTGFKKLVF

SEQ ID NO: 306316 - protein, 14 aa, Homo sapiens
  CDR3 for beta chain variable domain of TCR clone 153158 (TRBV19, TRBJ2-2)
CASSTLHRSGELFF

SEQ ID NO: 306317 - protein, 14 aa, Homo sapiens
  CDR3 for alpha chain variable domain of TCR clone 153159 (TRAV12-1, TRAJ9)
CVVNRRTGGFKTIF

SEQ ID NO: 306318 - protein, 15 aa, Homo sapiens
  CDR3 for beta chain variable domain of TCR clone 153159 (TRBV11-3, TRBJ2-7)
CVSSPGPASSYEQYF

SEQ ID NO: 306319 - protein, 13 aa, Homo sapiens
  CDR3 for alpha chain variable domain of TCR clone 153160 (TRAV3, TRAJ9)
CAFWNTGGFKTIF

SEQ ID NO: 306320 - protein, 15 aa, Homo sapiens
  CDR3 for beta chain variable domain of TCR clone 153160 (TRBV9, TRBJ2-5)
CASSARLGSGETQYF

SEQ ID NO: 306321 - protein, 14 aa, Homo sapiens
  CDR3 for alpha chain variable domain of TCR clone 153161 (TRAV12-3, TRAJ10)
SHLPLTGGGNKLTF

SEQ ID NO: 306322 - protein, 16 aa, Homo sapiens
  CDR3 for beta chain variable domain of TCR clone 153161 (TRBV13, TRBJ2-2)
WASSPRTGEHTGELFF

SEQ ID NO: 306323 - protein, 11 aa, Homo sapiens
  CDR3 for alpha chain variable domain of TCR clone 153162 (TRAV17, TRAJ43)
CATPRSNDMHF

SEQ ID NO: 306324 - protein, 15 aa, Homo sapiens
  CDR3 for beta chain variable domain of TCR clone 153162 (TRBV11-2, TRBJ2-1)
CASSLGTSGLNEQFF

SEQ ID NO: 306325 - protein, 10 aa, Homo sapiens
  CDR3 for alpha chain variable domain of TCR clone 153163 (TRAV30, TRAJ24)
WMLTAGKFQF

SEQ ID NO: 306326 - protein, 15 aa, Homo sapiens
  CDR3 for beta chain variable domain of TCR clone 153163 (TRBV20-1, TRBJ2-7)
CSARDRVSGMDEQYF

SEQ ID NO: 306327 - protein, 18 aa, Homo sapiens
  CDR3 for alpha chain variable domain of TCR clone 153164 (TRAV21, TRAJ52)
CAVRPSPAGGTSYGKLTF

SEQ ID NO: 306328 - protein, 14 aa, Homo sapiens
  CDR3 for beta chain variable domain of TCR clone 153164 (TRBV7-2, TRBJ2-7)
CANSPKTSFYEQYF

SEQ ID NO: 306329 - protein, 14 aa, Homo sapiens
  CDR3 for alpha chain variable domain of TCR clone 153165 (TRAV12-2, TRAJ15)
CAPHTGQAGTALIF

SEQ ID NO: 306330 - protein, 16 aa, Homo sapiens
  CDR3 for beta chain variable domain of TCR clone 153165 (TRBV7-9, TRBJ2-7)
CASSSGFSSGEDGYTF

SEQ ID NO: 306331 - protein, 15 aa, Homo sapiens
  CDR3 for alpha chain variable domain of TCR clone 153166 (TRAV26-1, TRAJ39)
CIVRVARNAGNMLTF

SEQ ID NO: 306332 - protein, 16 aa, Homo sapiens
  CDR3 for beta chain variable domain of TCR clone 153166 (TRBV29-1, TRBJ2-7)
CSVEDAEDGTAYEQYF

SEQ ID NO: 306333 - protein, 13 aa, Homo sapiens
  CDR3 for alpha chain variable domain of TCR clone 153167 (TRAV1-2, TRAJ9)
CAALNTGGFKTIF

SEQ ID NO: 306334 - protein, 16 aa, Homo sapiens
  CDR3 for beta chain variable domain of TCR clone 153167 (TRBV5-1, TRBJ2-3)
CASSLTSGTSGGTQYF

SEQ ID NO: 306335 - protein, 15 aa, Homo sapiens
  CDR3 for alpha chain variable domain of TCR clone 153168 (TRAV12-3, TRAJ27)
CAMRAYNNNAGKSTF

SEQ ID NO: 306336 - protein, 13 aa, Homo sapiens
  CDR3 for beta chain variable domain of TCR clone 153168 (TRBV20-1, TRBJ1-5)
CSASPRANQPQHF

SEQ ID NO: 306337 - protein, 15 aa, Homo sapiens
  CDR3 for alpha chain variable domain of TCR clone 153169 (TRAV12-2, TRAJ53)
CAVNGGGGSNYKVTF

SEQ ID NO: 306338 - protein, 17 aa, Homo sapiens
  CDR3 for beta chain variable domain of TCR clone 153169 (TRBV7-3, TRBJ2-3)
CASSLMKRMRGADTQYF

SEQ ID NO: 306339 - protein, 10 aa, Homo sapiens
  CDR3 for alpha chain variable domain of TCR clone 153170 (TRAV23/DV6, TRAJ31)
CARGGARLMV

SEQ ID NO: 306340 - protein, 14 aa, Homo sapiens
  CDR3 for beta chain variable domain of TCR clone 153170 (TRBV7-8, TRBJ1-2)
CASSPDSLSYGYTF

SEQ ID NO: 306341 - protein, 13 aa, Homo sapiens
  CDR3 for alpha chain variable domain of TCR clone 153171 (TRAV8-6, TRAJ50)
CAVIKTSYDKVIF

SEQ ID NO: 306342 - protein, 14 aa, Homo sapiens
  CDR3 for beta chain variable domain of TCR clone 153171 (TRBV7-6, TRBJ2-3)
CASSLGTVTDTQYF

SEQ ID NO: 306343 - protein, 10 aa, Homo sapiens
  CDR3 for alpha chain variable domain of TCR clone 153172 (TRAV26-1, TRAJ40)
CIAGTYKYIF

SEQ ID NO: 306344 - protein, 14 aa, Homo sapiens
  CDR3 for beta chain variable domain of TCR clone 153172 (TRBV12-4, TRBJ1-1)
CASSLGTGGTEAFF

SEQ ID NO: 306345 - protein, 16 aa, Homo sapiens
  CDR3 for alpha chain variable domain of TCR clone 153173 (TRAV16, TRAJ4)
CALSRMFFGGYNKLIF

SEQ ID NO: 306346 - protein, 16 aa, Homo sapiens
  CDR3 for beta chain variable domain of TCR clone 153173 (TRBV12-4, TRBJ1-5)
CASSRPVGGSNQPQHF

SEQ ID NO: 306347 - protein, 15 aa, Homo sapiens
  CDR3 for alpha chain variable domain of TCR clone 153174 (TRAV17, TRAJ22)
CATAPISGAARQLTF

SEQ ID NO: 306348 - protein, 14 aa, Homo sapiens
  CDR3 for beta chain variable domain of TCR clone 153174 (TRBV9, TRBJ2-1)
CASSVDPRGKEQFF

SEQ ID NO: 306349 - protein, 14 aa, Homo sapiens
  CDR3 for alpha chain variable domain of TCR clone 153175 (TRAV17, TRAJ16)
CATADFSDGQKLLF

SEQ ID NO: 306350 - protein, 15 aa, Homo sapiens
  CDR3 for beta chain variable domain of TCR clone 153175 (TRBV18, TRBJ2-1)
CASSPPSGSYNEQFF

SEQ ID NO: 306351 - protein, 11 aa, Homo sapiens
  CDR3 for alpha chain variable domain of TCR clone 153176 (TRAV2, TRAJ21)
CAVFNFNKFYF

SEQ ID NO: 306352 - protein, 12 aa, Homo sapiens
  CDR3 for beta chain variable domain of TCR clone 153176 (TRBV24-1, TRBJ1-1)
CATSDSDRGAFF

SEQ ID NO: 306353 - protein, 14 aa, Homo sapiens
  CDR3 for alpha chain variable domain of TCR clone 153177 (TRAV13-1, TRAJ44)
CAAKATGTASKLTF

SEQ ID NO: 306354 - protein, 18 aa, Homo sapiens
  CDR3 for beta chain variable domain of TCR clone 153177 (TRBV7-9, TRBJ2-3)
CASSLPINGQISTDTQYF

SEQ ID NO: 306355 - protein, 14 aa, Homo sapiens
  CDR3 for alpha chain variable domain of TCR clone 153178 (TRAV17, TRAJ34)
FATDSLEGTDKLIF

SEQ ID NO: 306356 - protein, 13 aa, Homo sapiens
  CDR3 for beta chain variable domain of TCR clone 153178 (TRBV11-2, TRBJ2-7)
CASSGTRPYEQYF

SEQ ID NO: 306357 - protein, 16 aa, Homo sapiens
  CDR3 for alpha chain variable domain of TCR clone 153179 (TRAV8-3, TRAJ28)
CAVPPQRGAGSYQLTF

SEQ ID NO: 306358 - protein, 13 aa, Homo sapiens
  CDR3 for beta chain variable domain of TCR clone 153179 (TRBV7-7, TRBJ2-3)
CASSLRSDNTQYF

SEQ ID NO: 306359 - protein, 14 aa, Homo sapiens
  CDR3 for alpha chain variable domain of TCR clone 153180 (TRAV1-2, TRAJ8)
CAVRADTGFQKLVF

SEQ ID NO: 306360 - protein, 18 aa, Homo sapiens
  CDR3 for beta chain variable domain of TCR clone 153180 (TRBV10-2, TRBJ2-2)
CISAPAVHRQADAGELFF

SEQ ID NO: 306361 - protein, 14 aa, Homo sapiens
  CDR3 for alpha chain variable domain of TCR clone 153181 (TRAV12-2, TRAJ13)
CAVKKTGGYHKVTF

SEQ ID NO: 306362 - protein, 16 aa, Homo sapiens
  CDR3 for beta chain variable domain of TCR clone 153181 (TRBV7-3, TRBJ2-2)
CASSLKRGTLSGELFF

SEQ ID NO: 306363 - protein, 12 aa, Homo sapiens
  CDR3 for alpha chain variable domain of TCR clone 153182 (TRAV12-3, TRAJ40)
CAMSSGTYSYIF

SEQ ID NO: 306364 - protein, 15 aa, Homo sapiens
  CDR3 for beta chain variable domain of TCR clone 153182 (TRBV7-3, TRBJ2-2)
CASSETGQGTGELFF

SEQ ID NO: 306365 - protein, 13 aa, Homo sapiens
  CDR3 for alpha chain variable domain of TCR clone 153183 (TRAV20, TRAJ9)
CAVPDTGGFKPIF

SEQ ID NO: 306366 - protein, 14 aa, Homo sapiens
  CDR3 for beta chain variable domain of TCR clone 153183 (TRBV7-2, TRBJ2-5)
CASSPRGSSETQYF

SEQ ID NO: 306367 - protein, 12 aa, Homo sapiens
  CDR3 for alpha chain variable domain of TCR clone 153184 (TRAV12-1, TRAJ40)
CVVYSGTYKYIF

SEQ ID NO: 306368 - protein, 18 aa, Homo sapiens
  CDR3 for beta chain variable domain of TCR clone 153184 (TRBV11-2, TRBJ2-3)
CASSLGGASRGAPNRQYF

SEQ ID NO: 306369 - protein, 12 aa, Homo sapiens
  CDR3 for alpha chain variable domain of TCR clone 153185 (TRAV13-1, TRAJ9)
CASHTGGFKAIF

SEQ ID NO: 306370 - protein, 18 aa, Homo sapiens
  CDR3 for beta chain variable domain of TCR clone 153185 (TRBV11-2, TRBJ2-3)
CASSLGGASRGAPNTQYF

SEQ ID NO: 306371 - protein, 14 aa, Homo sapiens
  CDR3 for alpha chain variable domain of TCR clone 153186 (TRAV1-2, TRAJ16)
CAVNRVSDGQKLLF

SEQ ID NO: 306372 - protein, 15 aa, Homo sapiens
  CDR3 for beta chain variable domain of TCR clone 153186 (TRBV2, TRBJ2-1)
CASSEEREGDNEQFF

SEQ ID NO: 306373 - protein, 13 aa, Homo sapiens
  CDR3 for alpha chain variable domain of TCR clone 153187 (TRAV27, TRAJ40)
CAGPPSGTYKYIF

SEQ ID NO: 306374 - protein, 13 aa, Homo sapiens
  CDR3 for beta chain variable domain of TCR clone 153187 (TRBV7-9, TRBJ1-2)
CASSLKQNYGYTF

SEQ ID NO: 306375 - protein, 11 aa, Homo sapiens
  CDR3 for alpha chain variable domain of TCR clone 153188 (TRAV21, TRAJ33)
CAKMDSNYQLV

SEQ ID NO: 306376 - protein, 14 aa, Homo sapiens
  CDR3 for beta chain variable domain of TCR clone 153188 (TRBV2, TRBJ2-7)
CASSLTSGGYEQYF

SEQ ID NO: 306377 - protein, 15 aa, Homo sapiens
  CDR3 for alpha chain variable domain of TCR clone 153189 (TRAV38-1, TRAJ37)
CSFIHGSGNSGKLIF

SEQ ID NO: 306378 - protein, 12 aa, Homo sapiens
  CDR3 for beta chain variable domain of TCR clone 153189 (TRBV7-9, TRBJ2-7)
CASSFGSYEQYF

SEQ ID NO: 306379 - protein, 18 aa, Homo sapiens
  CDR3 for alpha chain variable domain of TCR clone 153190 (TRAV26-1, TRAJ52)
CIVRVEGAGGTSYGKLTF

SEQ ID NO: 306380 - protein, 16 aa, Homo sapiens
  CDR3 for beta chain variable domain of TCR clone 153190 (TRBV12-5, TRBJ2-5)
CASGPRTSGNQETQYF

SEQ ID NO: 306381 - protein, 17 aa, Homo sapiens
  CDR3 for alpha chain variable domain of TCR clone 153191 (TRAV13-2, TRAJ28)
CAEEPAGSGAGSYQLTF

SEQ ID NO: 306382 - protein, 15 aa, Homo sapiens
  CDR3 for beta chain variable domain of TCR clone 153191 (TRBV5-5, TRBJ1-1)
CASSVVGKDNTEAFF

SEQ ID NO: 306383 - protein, 14 aa, Homo sapiens
  CDR3 for alpha chain variable domain of TCR clone 153192 (TRAV12-1, TRAJ17)
CVVNYKAAGNKLTF

SEQ ID NO: 306384 - protein, 15 aa, Homo sapiens
  CDR3 for beta chain variable domain of TCR clone 153192 (TRBV28, TRBJ2-3)
CAPTFRDWSTDTQYF

SEQ ID NO: 306385 - protein, 14 aa, Homo sapiens
  CDR3 for alpha chain variable domain of TCR clone 153193 (TRAV12-2, TRAJ40)
CAVKIPSGIYKYIF

SEQ ID NO: 306386 - protein, 13 aa, Homo sapiens
  CDR3 for beta chain variable domain of TCR clone 153193 (TRBV7-9, TRBJ1-2)
CASSLKQNYGYTF

SEQ ID NO: 306387 - protein, 15 aa, Homo sapiens
  CDR3 for alpha chain variable domain of TCR clone 153194 (TRAV12-3, TRAJ6)
CAMSATTGGSYIPTF

SEQ ID NO: 306388 - protein, 14 aa, Homo sapiens
  CDR3 for beta chain variable domain of TCR clone 153194 (TRBV7-9, TRBJ2-7)
CASSLDRPTDEQYF

SEQ ID NO: 306389 - protein, 16 aa, Homo sapiens
  CDR3 for alpha chain variable domain of TCR clone 153195 (TRAV14/DV4, TRAJ54)
CAMREGRIQGAQKLVF

SEQ ID NO: 306390 - protein, 15 aa, Homo sapiens
  CDR3 for beta chain variable domain of TCR clone 153195 (TRBV5-1, TRBJ2-7)
CASSLDLTSSYEQYF

SEQ ID NO: 306391 - protein, 15 aa, Homo sapiens
  CDR3 for alpha chain variable domain of TCR clone 153196 (TRAV8-4, TRAJ36)
CAVRKSWTGANNLFF

SEQ ID NO: 306392 - protein, 13 aa, Homo sapiens
  CDR3 for beta chain variable domain of TCR clone 153196 (TRBV7-2, TRBJ2-7)
CASSSPSGSEQYF

SEQ ID NO: 306393 - protein, 10 aa, Homo sapiens
  CDR3 for alpha chain variable domain of TCR clone 153197 (TRAV8-1, TRAJ21)
CAVNGTKFYF

SEQ ID NO: 306394 - protein, 14 aa, Homo sapiens
  CDR3 for beta chain variable domain of TCR clone 153197 (TRBV19, TRBJ2-1)
CASPTFVLSGEQFF

SEQ ID NO: 306395 - protein, 12 aa, Homo sapiens
  CDR3 for alpha chain variable domain of TCR clone 153198 (TRAV21, TRAJ33)
CAKLDSNYQLIW

SEQ ID NO: 306396 - protein, 14 aa, Homo sapiens
  CDR3 for beta chain variable domain of TCR clone 153198 (TRBV2, TRBJ2-7)
CASSLTAGGYEQYF

SEQ ID NO: 306397 - protein, 15 aa, Homo sapiens
  CDR3 for alpha chain variable domain of TCR clone 153199 (TRAV8-3, TRAJ27)
CAVGTSKTNAGKSTF

SEQ ID NO: 306398 - protein, 15 aa, Homo sapiens
  CDR3 for beta chain variable domain of TCR clone 153199 (TRBV7-2, TRBJ2-1)
CVSSSGLAGGNEQFF

SEQ ID NO: 306399 - protein, 17 aa, Homo sapiens
  CDR3 for alpha chain variable domain of TCR clone 153200 (TRAV36/DV7, TRAJ52)
CAVAQRAGGTSYGTLTF

SEQ ID NO: 306400 - protein, 17 aa, Homo sapiens
  CDR3 for beta chain variable domain of TCR clone 153200 (TRBV28, TRBJ2-5)
CASSTPEGDALQETQYF

SEQ ID NO: 306401 - protein, 14 aa, Homo sapiens
  CDR3 for alpha chain variable domain of TCR clone 153201 (TRAV29/DV5, TRAJ36)
CAACRKTGANNLFF

SEQ ID NO: 306402 - protein, 16 aa, Homo sapiens
  CDR3 for beta chain variable domain of TCR clone 153201 (TRBV12-5, TRBJ2-5)
CASGPRTSGNQETQYF

SEQ ID NO: 306403 - protein, 14 aa, Homo sapiens
  CDR3 for alpha chain variable domain of TCR clone 153202 (TRAV12-1, TRAJ17)
CVVNYKAAGDKLTF

SEQ ID NO: 306404 - protein, 14 aa, Homo sapiens
  CDR3 for beta chain variable domain of TCR clone 153202 (TRBV28, TRBJ2-1)
CASSPSTGYNEQFF

SEQ ID NO: 306405 - protein, 15 aa, Homo sapiens
  CDR3 for alpha chain variable domain of TCR clone 153203 (TRAV17, TRAJ45)
CATAELGGGADGLTF

SEQ ID NO: 306406 - protein, 14 aa, Homo sapiens
  CDR3 for beta chain variable domain of TCR clone 153203 (TRBV3-1, TRBJ2-5)
CAGSQAVRQETQYF

SEQ ID NO: 306407 - protein, 14 aa, Homo sapiens
  CDR3 for alpha chain variable domain of TCR clone 153204 (TRAV26-1, TRAJ15)
CIVRANHAGTALIF

SEQ ID NO: 306408 - protein, 16 aa, Homo sapiens
  CDR3 for beta chain variable domain of TCR clone 153204 (TRBV20-1, TRBJ1-4)
CSAIGGPRGANEKLFF

SEQ ID NO: 306409 - protein, 16 aa, Homo sapiens
  CDR3 for alpha chain variable domain of TCR clone 153205 (TRAV30, TRAJ24)
CGTEIVDADSWGKFRF

SEQ ID NO: 306410 - protein, 15 aa, Homo sapiens
  CDR3 for beta chain variable domain of TCR clone 153205 (TRBV20-1, TRBJ2-4)
CSARDLTGGPNIQYF

SEQ ID NO: 306411 - protein, 14 aa, Homo sapiens
  CDR3 for alpha chain variable domain of TCR clone 153206 (TRAV12-2, TRAJ13)
CAVKKTGGYQKVNF

SEQ ID NO: 306412 - protein, 16 aa, Homo sapiens
  CDR3 for beta chain variable domain of TCR clone 153206 (TRBV4-1, TRBJ2-3)
CASSQSTSGAEDTQYF

SEQ ID NO: 306413 - protein, 11 aa, Homo sapiens
  CDR3 for alpha chain variable domain of TCR clone 153207 (TRAV12-2, TRAJ39)
CAVNNMLTFGG

SEQ ID NO: 306414 - protein, 11 aa, Homo sapiens
  CDR3 for beta chain variable domain of TCR clone 153207 (TRBV12-4, TRBJ2-3)
CASTATDTQYF

SEQ ID NO: 306415 - protein, 12 aa, Homo sapiens
  CDR3 for alpha chain variable domain of TCR clone 153208 (TRAV1-2, TRAJ33)
CACGDSNYQLIW

SEQ ID NO: 306416 - protein, 15 aa, Homo sapiens
  CDR3 for beta chain variable domain of TCR clone 153208 (TRBV2, TRBJ2-7)
CASSEGLARSYEQYF

SEQ ID NO: 306417 - protein, 14 aa, Homo sapiens
  CDR3 for alpha chain variable domain of TCR clone 153209 (TRAV2, TRAJ22)
CAVGRGGSAMQLTF

SEQ ID NO: 306418 - protein, 15 aa, Homo sapiens
  CDR3 for beta chain variable domain of TCR clone 153209 (TRBV20-1, TRBJ2-7)
CSARDRVSGMDEQYF

SEQ ID NO: 306419 - protein, 13 aa, Homo sapiens
  CDR3 for alpha chain variable domain of TCR clone 153210 (TRAV27, TRAJ53)
CAGQGGSNYKLTI

SEQ ID NO: 306420 - protein, 13 aa, Homo sapiens
  CDR3 for beta chain variable domain of TCR clone 153210 (TRBV29-1, TRBJ1-1)
CSVESGFGTEAFF

SEQ ID NO: 306421 - protein, 15 aa, Homo sapiens
  CDR3 for alpha chain variable domain of TCR clone 153211 (TRAV21, TRAJ24)
CAARSSTDSWGKLQF

SEQ ID NO: 306422 - protein, 15 aa, Homo sapiens
  CDR3 for beta chain variable domain of TCR clone 153211 (TRBV5-1, TRBJ2-3)
CASSVTSGSTDTQYF

SEQ ID NO: 306423 - protein, 17 aa, Homo sapiens
  CDR3 for alpha chain variable domain of TCR clone 153212 (TRAV3, TRAJ42)
CAVRDRHYGGSQGNLIF

SEQ ID NO: 306424 - protein, 15 aa, Homo sapiens
  CDR3 for beta chain variable domain of TCR clone 153212 (TRBV2, TRBJ2-7)
CASSEGLARSYEQYF

SEQ ID NO: 306425 - protein, 12 aa, Homo sapiens
  CDR3 for alpha chain variable domain of TCR clone 153213 (TRAV3, TRAJ26)
CAVRDYGQNFVF

SEQ ID NO: 306426 - protein, 11 aa, Homo sapiens
  CDR3 for beta chain variable domain of TCR clone 153213 (TRBV19, TRBJ1-1)
CASSIGSEAFF

SEQ ID NO: 306427 - protein, 15 aa, Homo sapiens
  CDR3 for alpha chain variable domain of TCR clone 153214 (TRAV21, TRAJ52)
CAVRGGGTSYGKLTF

SEQ ID NO: 306428 - protein, 16 aa, Homo sapiens
  CDR3 for beta chain variable domain of TCR clone 153214 (TRBV25-1, TRBJ1-1)
CASSGDRDRGRIEAFF

SEQ ID NO: 306429 - protein, 14 aa, Homo sapiens
  CDR3 for alpha chain variable domain of TCR clone 153215 (TRAV1-2, TRAJ16)
CAVNRSSDGQKLLF

SEQ ID NO: 306430 - protein, 16 aa, Homo sapiens
  CDR3 for beta chain variable domain of TCR clone 153215 (TRBV9, TRBJ2-1)
CASSVGGGGNYNEQFF

SEQ ID NO: 306431 - protein, 17 aa, Homo sapiens
  CDR3 for alpha chain variable domain of TCR clone 153216 (TRAV3, TRAJ38)
CALRDCLNAGNNRKLIW

SEQ ID NO: 306432 - protein, 16 aa, Homo sapiens
  CDR3 for beta chain variable domain of TCR clone 153216 (TRBV20-1, TRBJ1-4)
CSAPGQGLLTNEKLFF

SEQ ID NO: 306433 - protein, 21 aa, Homo sapiens
  CDR3 for alpha chain variable domain of TCR clone 153217 (TRAV12-1, TRAJ32)
SAVIQPPTSMNYGGATNKLIF

SEQ ID NO: 306434 - protein, 15 aa, Homo sapiens
  CDR3 for beta chain variable domain of TCR clone 153217 (TRBV7-9, TRBJ2-2)
CASGPLDTFPGELFF

SEQ ID NO: 306435 - protein, 11 aa, Homo sapiens
  CDR3 for alpha chain variable domain of TCR clone 153218 (TRAV12-1, TRAJ21)
CVVYNFNKFYF

SEQ ID NO: 306436 - protein, 12 aa, Homo sapiens
  CDR3 for beta chain variable domain of TCR clone 153218 (TRBV11-2, TRBJ2-4)
CASSSASGSEYF

SEQ ID NO: 306437 - protein, 14 aa, Homo sapiens
  CDR3 for alpha chain variable domain of TCR clone 153219 (TRAV12-1, TRAJ17)
RVVNFKAAGNKLTF

SEQ ID NO: 306438 - protein, 17 aa, Homo sapiens
  CDR3 for beta chain variable domain of TCR clone 153219 (TRBV20-1, TRBJ2-1)
CSASASGLAGSYNEQFF

SEQ ID NO: 306439 - protein, 12 aa, Homo sapiens
  CDR3 for alpha chain variable domain of TCR clone 153220 (TRAV12-3, TRAJ17)
CAMTLTGNKLTF

SEQ ID NO: 306440 - protein, 15 aa, Homo sapiens
  CDR3 for beta chain variable domain of TCR clone 153220 (TRBV20-1, TRBJ2-7)
CSARDRVSGMDEKCF

SEQ ID NO: 306441 - protein, 13 aa, Homo sapiens
  CDR3 for alpha chain variable domain of TCR clone 153221 (TRAV12-3, TRAJ35)
CAMAIGFGNVMHF

SEQ ID NO: 306442 - protein, 15 aa, Homo sapiens
  CDR3 for beta chain variable domain of TCR clone 153221 (TRBV20-1, TRBJ2-1)
CSARGSGTYYNEQFF

SEQ ID NO: 306443 - protein, 12 aa, Homo sapiens
  CDR3 for alpha chain variable domain of TCR clone 153222 (TRAV12-1, TRAJ40)
CVVYSGSYKYIF

SEQ ID NO: 306444 - protein, 17 aa, Homo sapiens
  CDR3 for beta chain variable domain of TCR clone 153222 (TRBV11-3, TRBJ1-5)
CASSPLTGLRGNQPQHF

SEQ ID NO: 306445 - protein, 10 aa, Homo sapiens
  CDR3 for alpha chain variable domain of TCR clone 153223 (TRAV1-2, TRAJ23)
CAGQGGKIIF

SEQ ID NO: 306446 - protein, 16 aa, Homo sapiens
  CDR3 for beta chain variable domain of TCR clone 153223 (TRBV11-2, TRBJ1-1)
CASSLRQGGEHSKAFF

SEQ ID NO: 306447 - protein, 13 aa, Homo sapiens
  CDR3 for alpha chain variable domain of TCR clone 153224 (TRAV25, TRAJ21)
CAGLRGNFNKFYF

SEQ ID NO: 306448 - protein, 13 aa, Homo sapiens
  CDR3 for beta chain variable domain of TCR clone 153224 (TRBV7-2, TRBJ2-2)
CASSLAVTGELFF

SEQ ID NO: 306449 - protein, 15 aa, Homo sapiens
  CDR3 for alpha chain variable domain of TCR clone 153225 (TRAV21, TRAJ56)
CAVTKYTGANSKLTF

SEQ ID NO: 306450 - protein, 15 aa, Homo sapiens
  CDR3 for beta chain variable domain of TCR clone 153225 (TRBV19, TRBJ1-2)
CASSVGQVLNYGYTF

SEQ ID NO: 306451 - protein, 13 aa, Homo sapiens
  CDR3 for alpha chain variable domain of TCR clone 153226 (TRAV13-2, TRAJ48)
CAEMDFGNEKLTF

SEQ ID NO: 306452 - protein, 17 aa, Homo sapiens
  CDR3 for beta chain variable domain of TCR clone 153226 (TRBV7-9, TRBJ1-6)
CASSSRDVEIHPSTLGT

SEQ ID NO: 306453 - protein, 16 aa, Homo sapiens
  CDR3 for alpha chain variable domain of TCR clone 153227 (TRAV3, TRAJ21)
CALRDIERGNFNKFYF

SEQ ID NO: 306454 - protein, 20 aa, Homo sapiens
  CDR3 for beta chain variable domain of TCR clone 153227 (TRBV4-1, TRBJ2-2)
CASSQASPPGLASNTGELFF

SEQ ID NO: 306455 - protein, 15 aa, Homo sapiens
  CDR3 for alpha chain variable domain of TCR clone 153228 (TRAV4, TRAJ39)
CLVGPNNNAGNMLTF

SEQ ID NO: 306456 - protein, 15 aa, Homo sapiens
  CDR3 for beta chain variable domain of TCR clone 153228 (TRBV27, TRBJ1-4)
CASSAQQDLNEKLFS

SEQ ID NO: 306457 - protein, 14 aa, Homo sapiens
  CDR3 for alpha chain variable domain of TCR clone 153229 (TRAV38-1, TRAJ48)
CAFMANFGNEKLTF

SEQ ID NO: 306458 - protein, 16 aa, Homo sapiens
  CDR3 for beta chain variable domain of TCR clone 153229 (TRBV28, TRBJ2-1)
CASSSPEYPRDNEQFF

SEQ ID NO: 306459 - protein, 17 aa, Homo sapiens
  CDR3 for alpha chain variable domain of TCR clone 153230 (TRAV17, TRAJ52)
CATDRNAGGTSYGKLTF

SEQ ID NO: 306460 - protein, 14 aa, Homo sapiens
  CDR3 for beta chain variable domain of TCR clone 153230 (TRBV5-1, TRBJ2-7)
CASSRGESWYEQYF

SEQ ID NO: 306461 - protein, 14 aa, Homo sapiens
  CDR3 for alpha chain variable domain of TCR clone 153231 (TRAV9-2, TRAJ36)
RALPWRTGANNLFF

SEQ ID NO: 306462 - protein, 14 aa, Homo sapiens
  CDR3 for beta chain variable domain of TCR clone 153231 (TRBV2, TRBJ1-2)
CASSELQVNYGYAF

SEQ ID NO: 306463 - protein, 15 aa, Homo sapiens
  CDR3 for alpha chain variable domain of TCR clone 153232 (TRAV27, TRAJ38)
CAARRNAGNNRKLSW

SEQ ID NO: 306464 - protein, 15 aa, Homo sapiens
  CDR3 for beta chain variable domain of TCR clone 153232 (TRBV5-1, TRBJ2-1)
CASSPPRAPYNEQFS

SEQ ID NO: 306465 - protein, 13 aa, Homo sapiens
  CDR3 for alpha chain variable domain of TCR clone 153233 (TRAV8-6, TRAJ49)
CAVITNTGNQFYF

SEQ ID NO: 306466 - protein, 15 aa, Homo sapiens
  CDR3 for beta chain variable domain of TCR clone 153233 (TRBV11-2, TRBJ2-1)
CASSKNRGLIYEQFF

SEQ ID NO: 306467 - protein, 19 aa, Homo sapiens
  CDR3 for alpha chain variable domain of TCR clone 153234 (TRAV26-1, TRAJ29)
CCVLFIVRVEGSGNTPLVF

SEQ ID NO: 306468 - protein, 14 aa, Homo sapiens
  CDR3 for beta chain variable domain of TCR clone 153234 (TRBV25-1, TRBJ1-1)
CASTHLGGNTEAFF

SEQ ID NO: 306469 - protein, 16 aa, Homo sapiens
  CDR3 for alpha chain variable domain of TCR clone 153235 (TRAV30, TRAJ24)
CGTEIGDADSWGKFQF

SEQ ID NO: 306470 - protein, 15 aa, Homo sapiens
  CDR3 for beta chain variable domain of TCR clone 153235 (TRBV12-4, TRBJ2-1)
CASSLLGRTYNEQFF

SEQ ID NO: 306471 - protein, 16 aa, Homo sapiens
  CDR3 for alpha chain variable domain of TCR clone 153236 (TRAV27, TRAJ34)
CAGGGLGDYNTDKLIF

SEQ ID NO: 306472 - protein, 13 aa, Homo sapiens
  CDR3 for beta chain variable domain of TCR clone 153236 (TRBV7-9, TRBJ1-2)
CASSLKQNYGYTF

SEQ ID NO: 306473 - protein, 13 aa, Homo sapiens
  CDR3 for alpha chain variable domain of TCR clone 153237 (TRAV13-1, TRAJ5)
CAASDKGRRALTF

SEQ ID NO: 306474 - protein, 14 aa, Homo sapiens
  CDR3 for beta chain variable domain of TCR clone 153237 (TRBV4-2, TRBJ2-1)
CASGLDRAYNEQFF

SEQ ID NO: 306475 - protein, 11 aa, Homo sapiens
  CDR3 for alpha chain variable domain of TCR clone 153238 (TRAV21, TRAJ33)
CAVLSNYKLIW

SEQ ID NO: 306476 - protein, 15 aa, Homo sapiens
  CDR3 for beta chain variable domain of TCR clone 153238 (TRBV11-2, TRBJ2-7)
CASSLMVGGSYEQYF

SEQ ID NO: 306477 - protein, 13 aa, Homo sapiens
  CDR3 for alpha chain variable domain of TCR clone 153239 (TRAV2, TRAJ21)
CAVEDLNFNKFYF

SEQ ID NO: 306478 - protein, 19 aa, Homo sapiens
  CDR3 for beta chain variable domain of TCR clone 153239 (TRBV11-2, TRBJ2-2)
LRTRPCISVPAALEGELFF

SEQ ID NO: 306479 - protein, 14 aa, Homo sapiens
  CDR3 for alpha chain variable domain of TCR clone 153240 (TRAV3, TRAJ34)
CAVRAPGNTDKLIF

SEQ ID NO: 306480 - protein, 14 aa, Homo sapiens
  CDR3 for beta chain variable domain of TCR clone 153240 (TRBV5-4, TRBJ1-1)
CSSSLDSRRDEAFF

SEQ ID NO: 306481 - protein, 15 aa, Homo sapiens
  CDR3 for alpha chain variable domain of TCR clone 153241 (TRAV26-1, TRAJ3)
CIVRSGYSSASKIIF

SEQ ID NO: 306482 - protein, 14 aa, Homo sapiens
  CDR3 for beta chain variable domain of TCR clone 153241 (TRBV13, TRBJ2-5)
CASYRRIAEETQYF

SEQ ID NO: 306483 - protein, 16 aa, Homo sapiens
  CDR3 for alpha chain variable domain of TCR clone 153242 (TRAV4, TRAJ18)
CCVLLIGGSTLGRLYF

SEQ ID NO: 306484 - protein, 14 aa, Homo sapiens
  CDR3 for beta chain variable domain of TCR clone 153242 (TRBV20-1, TRBJ1-1)
CSAQTRIGGTEAFF

SEQ ID NO: 306485 - protein, 13 aa, Homo sapiens
  CDR3 for alpha chain variable domain of TCR clone 153243 (TRAV21, TRAJ27)
CAARPGNAGKSTF

SEQ ID NO: 306486 - protein, 15 aa, Homo sapiens
  CDR3 for beta chain variable domain of TCR clone 153243 (TRBV20-1, TRBJ2-7)
RSARDRVSGMDEQYF

SEQ ID NO: 306487 - protein, 10 aa, Homo sapiens
  CDR3 for alpha chain variable domain of TCR clone 153244 (TRAV26-1, TRAJ40)
CIAGTYKYIF

SEQ ID NO: 306488 - protein, 15 aa, Homo sapiens
  CDR3 for beta chain variable domain of TCR clone 153244 (TRBV19, TRBJ2-1)
CASRSPGVPLDEQFL

SEQ ID NO: 306489 - protein, 15 aa, Homo sapiens
  CDR3 for alpha chain variable domain of TCR clone 153245 (TRAV17, TRAJ57)
CATGPSQGGSEKLVF

SEQ ID NO: 306490 - protein, 14 aa, Homo sapiens
  CDR3 for beta chain variable domain of TCR clone 153245 (TRBV18, TRBJ1-1)
CASSQGQGNTEAFF

SEQ ID NO: 306491 - protein, 13 aa, Homo sapiens
  CDR3 for alpha chain variable domain of TCR clone 153246 (TRAV8-4, TRAJ30)
CAVSVNRDDKIIF

SEQ ID NO: 306492 - protein, 13 aa, Homo sapiens
  CDR3 for beta chain variable domain of TCR clone 153246 (TRBV3-1, TRBJ2-2)
CAILARGSGELFF

SEQ ID NO: 306493 - protein, 11 aa, Homo sapiens
  CDR3 for alpha chain variable domain of TCR clone 153247 (TRAV1-1, TRAJ23)
CAVRQGGKLIF

SEQ ID NO: 306494 - protein, 13 aa, Homo sapiens
  CDR3 for beta chain variable domain of TCR clone 153247 (TRBV19, TRBJ2-5)
CASSIHSQETQYF

SEQ ID NO: 306495 - protein, 14 aa, Homo sapiens
  CDR3 for alpha chain variable domain of TCR clone 153248 (TRAV20, TRAJ29)
CAVQAWVGNTPLVF

SEQ ID NO: 306496 - protein, 14 aa, Homo sapiens
  CDR3 for beta chain variable domain of TCR clone 153248 (TRBV11-2, TRBJ2-3)
CASSRLARTDTQYL

SEQ ID NO: 306497 - protein, 17 aa, Homo sapiens
  CDR3 for alpha chain variable domain of TCR clone 153249 (TRAV26-1, TRAJ37)
CIVRVITVSSNTGKLIF

SEQ ID NO: 306498 - protein, 15 aa, Homo sapiens
  CDR3 for beta chain variable domain of TCR clone 153249 (TRBV5-5, TRBJ2-2)
CASSRQASGAGELFF

SEQ ID NO: 306499 - protein, 11 aa, Homo sapiens
  CDR3 for alpha chain variable domain of TCR clone 153250 (TRAV21, TRAJ41)
CAVRSGYALNF

SEQ ID NO: 306500 - protein, 13 aa, Homo sapiens
  CDR3 for beta chain variable domain of TCR clone 153250 (TRBV7-2, TRBJ2-5)
CASSQTSVETQCF

SEQ ID NO: 306501 - protein, 13 aa, Homo sapiens
  CDR3 for alpha chain variable domain of TCR clone 153251 (TRAV17, TRAJ26)
CATVDNYGQNFDF

SEQ ID NO: 306502 - protein, 16 aa, Homo sapiens
  CDR3 for beta chain variable domain of TCR clone 153251 (TRBV2, TRBJ2-1)
CASSVGGSLSYNEQFF

SEQ ID NO: 306503 - protein, 15 aa, Homo sapiens
  CDR3 for alpha chain variable domain of TCR clone 153252 (TRAV12-2, TRAJ43)
CAFDMRFGAGTRLTV

SEQ ID NO: 306504 - protein, 13 aa, Homo sapiens
  CDR3 for beta chain variable domain of TCR clone 153252 (TRBV4-2, TRBJ1-1)
CASSQAGNTEAYF

SEQ ID NO: 306505 - protein, 14 aa, Homo sapiens
  CDR3 for alpha chain variable domain of TCR clone 153253 (TRAV29/DV5, TRAJ36)
CAARRKTGANNHFF

SEQ ID NO: 306506 - protein, 15 aa, Homo sapiens
  CDR3 for beta chain variable domain of TCR clone 153253 (TRBV10-3, TRBJ2-3)
CAISLTSGGTDTQYF

SEQ ID NO: 306507 - protein, 15 aa, Homo sapiens
  CDR3 for alpha chain variable domain of TCR clone 153254 (TRAV21, TRAJ53)
CATLNSGGSNYKLTF

SEQ ID NO: 306508 - protein, 14 aa, Homo sapiens
  CDR3 for beta chain variable domain of TCR clone 153254 (TRBV7-9, TRBJ2-7)
CASSLSQGSYEQYF

SEQ ID NO: 306509 - protein, 13 aa, Homo sapiens
  CDR3 for alpha chain variable domain of TCR clone 153255 (TRAV3, TRAJ8)
CAVRFTGFQKLVF

SEQ ID NO: 306510 - protein, 14 aa, Homo sapiens
  CDR3 for beta chain variable domain of TCR clone 153255 (TRBV6-1, TRBJ1-3)
CASVQGGGGNTIYF

SEQ ID NO: 306511 - protein, 15 aa, Homo sapiens
  CDR3 for alpha chain variable domain of TCR clone 153256 (TRAV8-3, TRAJ45)
CASSYSGGGADGLTF

SEQ ID NO: 306512 - protein, 13 aa, Homo sapiens
  CDR3 for beta chain variable domain of TCR clone 153256 (TRBV10-3, TRBJ2-1)
CASKLAVNYEQFF

SEQ ID NO: 306513 - protein, 17 aa, Homo sapiens
  CDR3 for alpha chain variable domain of TCR clone 153257 (TRAV3, TRAJ12)
CAVRDGGRMASSYKLIF

SEQ ID NO: 306514 - protein, 14 aa, Homo sapiens
  CDR3 for beta chain variable domain of TCR clone 153257 (TRBV7-9, TRBJ1-2)
CASSRQGANYGYTF

SEQ ID NO: 306515 - protein, 14 aa, Homo sapiens
  CDR3 for alpha chain variable domain of TCR clone 153258 (TRAV21, TRAJ38)
CAVMGAGYNRKLIW

SEQ ID NO: 306516 - protein, 13 aa, Homo sapiens
  CDR3 for beta chain variable domain of TCR clone 153258 (TRBV7-3, TRBJ2-5)
CASSIGFFETQYF

SEQ ID NO: 306517 - protein, 13 aa, Homo sapiens
  CDR3 for alpha chain variable domain of TCR clone 153259 (TRAV8-3, TRAJ30)
CAVGGWRDDKIIF

SEQ ID NO: 306518 - protein, 14 aa, Homo sapiens
  CDR3 for beta chain variable domain of TCR clone 153259 (TRBV20-1, TRBJ1-1)
CSAPPADMNTAAFF

SEQ ID NO: 306519 - protein, 13 aa, Homo sapiens
  CDR3 for alpha chain variable domain of TCR clone 153260 (TRAV12-2, TRAJ49)
CAMNMRTGNQFYF

SEQ ID NO: 306520 - protein, 11 aa, Homo sapiens
  CDR3 for beta chain variable domain of TCR clone 153260 (TRBV5-5, TRBJ1-1)
CASSLGVEAFF

SEQ ID NO: 306521 - protein, 15 aa, Homo sapiens
  CDR3 for alpha chain variable domain of TCR clone 153261 (TRAV26-1, TRAJ37)
CIVKTGSSNTGKLIF

SEQ ID NO: 306522 - protein, 14 aa, Homo sapiens
  CDR3 for beta chain variable domain of TCR clone 153261 (TRBV20-1, TRBJ1-1)
CSAWATGVGTEAFF

SEQ ID NO: 306523 - protein, 11 aa, Homo sapiens
  CDR3 for alpha chain variable domain of TCR clone 153262 (TRAV35, TRAJ30)
CAGERDDKIIF

SEQ ID NO: 306524 - protein, 16 aa, Homo sapiens
  CDR3 for beta chain variable domain of TCR clone 153262 (TRBV13, TRBJ2-2)
CASSPRTGEHTGELFF

SEQ ID NO: 306525 - protein, 14 aa, Homo sapiens
  CDR3 for alpha chain variable domain of TCR clone 153263 (TRAV26-1, TRAJ39)
CIVRGSRAGNMLTF

SEQ ID NO: 306526 - protein, 15 aa, Homo sapiens
  CDR3 for beta chain variable domain of TCR clone 153263 (TRBV7-9, TRBJ2-1)
CASSLGWGRANEQFF

SEQ ID NO: 306527 - protein, 18 aa, Homo sapiens
  CDR3 for alpha chain variable domain of TCR clone 153264 (TRAV26-1, TRAJ23)
CIVRVGLEVWNQGGKLIF

SEQ ID NO: 306528 - protein, 14 aa, Homo sapiens
  CDR3 for beta chain variable domain of TCR clone 153264 (TRBV7-6, TRBJ2-3)
CSSSLGTVTDTQYF

SEQ ID NO: 306529 - protein, 13 aa, Homo sapiens
  CDR3 for alpha chain variable domain of TCR clone 153265 (TRAV12-1, TRAJ9)
CVVLNTGGFKTVF

SEQ ID NO: 306530 - protein, 13 aa, Homo sapiens
  CDR3 for beta chain variable domain of TCR clone 153265 (TRBV19, TRBJ1-2)
CASSVPGQDGYTF

SEQ ID NO: 306531 - protein, 16 aa, Homo sapiens
  CDR3 for alpha chain variable domain of TCR clone 153266 (TRAV30, TRAJ24)
CGTEIVDADSWGKFQF

SEQ ID NO: 306532 - protein, 13 aa, Homo sapiens
  CDR3 for beta chain variable domain of TCR clone 153266 (TRBV7-3, TRBJ2-7)
CASSKRRGGEQYF

SEQ ID NO: 306533 - protein, 15 aa, Homo sapiens
  CDR3 for alpha chain variable domain of TCR clone 153267 (TRAV13-1, TRAJ15)
CAASIERQAGTAFNF

SEQ ID NO: 306534 - protein, 13 aa, Homo sapiens
  CDR3 for beta chain variable domain of TCR clone 153267 (TRBV5-1, TRBJ2-7)
CASSATGGNEQYF

SEQ ID NO: 306535 - protein, 15 aa, Homo sapiens
  CDR3 for alpha chain variable domain of TCR clone 153268 (TRAV8-3, TRAJ27)
CAVGPFKTTAGKSTF

SEQ ID NO: 306536 - protein, 15 aa, Homo sapiens
  CDR3 for beta chain variable domain of TCR clone 153268 (TRBV7-2, TRBJ2-1)
CASSSGLAGGNEQFF

SEQ ID NO: 306537 - protein, 13 aa, Homo sapiens
  CDR3 for alpha chain variable domain of TCR clone 153269 (TRAV13-1, TRAJ21)
CAASIYNFNKFYF

SEQ ID NO: 306538 - protein, 19 aa, Homo sapiens
  CDR3 for beta chain variable domain of TCR clone 153269 (TRBV6-1, TRBJ2-5)
CASSEQGLAGGLYQETQYF

SEQ ID NO: 306539 - protein, 14 aa, Homo sapiens
  CDR3 for alpha chain variable domain of TCR clone 153270 (TRAV21, TRAJ15)
CSVSLHQAGTALIF

SEQ ID NO: 306540 - protein, 11 aa, Homo sapiens
  CDR3 for beta chain variable domain of TCR clone 153270 (TRBV20-1, TRBJ2-7)
CSARTSYEQYF

SEQ ID NO: 306541 - protein, 16 aa, Homo sapiens
  CDR3 for alpha chain variable domain of TCR clone 153271 (TRAV12-2, TRAJ18)
CAVTTDRGSTLRRLYF

SEQ ID NO: 306542 - protein, 14 aa, Homo sapiens
  CDR3 for beta chain variable domain of TCR clone 153271 (TRBV4-2, TRBJ1-5)
CASSQDSINQPQHF

SEQ ID NO: 306543 - protein, 14 aa, Homo sapiens
  CDR3 for alpha chain variable domain of TCR clone 153272 (TRAV1-2, TRAJ16)
CAVNRFSDGQKLLF

SEQ ID NO: 306544 - protein, 17 aa, Homo sapiens
  CDR3 for beta chain variable domain of TCR clone 153272 (TRBV20-1, TRBJ2-1)
CSSSSSGLAGSYNEQFF

SEQ ID NO: 306545 - protein, 13 aa, Homo sapiens
  CDR3 for alpha chain variable domain of TCR clone 153273 (TRAV26-1, TRAJ33)
CTVRVDSNYQLIW

SEQ ID NO: 306546 - protein, 15 aa, Homo sapiens
  CDR3 for beta chain variable domain of TCR clone 153273 (TRBV7-2, TRBJ1-5)
CASSFSAGINQPQHF

SEQ ID NO: 306547 - protein, 13 aa, Homo sapiens
  CDR3 for alpha chain variable domain of TCR clone 153274 (TRAV2, TRAJ40)
RAMVTSGTYKYIF

SEQ ID NO: 306548 - protein, 14 aa, Homo sapiens
  CDR3 for beta chain variable domain of TCR clone 153274 (TRBV19, TRBJ2-1)
CASPTFVLSGEQFF

SEQ ID NO: 306549 - protein, 16 aa, Homo sapiens
  CDR3 for alpha chain variable domain of TCR clone 153275 (TRAV30, TRAJ49)
SAAQRVGPNTGNQFYF

SEQ ID NO: 306550 - protein, 13 aa, Homo sapiens
  CDR3 for beta chain variable domain of TCR clone 153275 (TRBV27, TRBJ2-7)
CASSLTTGYEQYF

SEQ ID NO: 306551 - protein, 15 aa, Homo sapiens
  CDR3 for alpha chain variable domain of TCR clone 153276 (TRAV8-2, TRAJ40)
CVVLGTTSGTYKYCF

SEQ ID NO: 306552 - protein, 16 aa, Homo sapiens
  CDR3 for beta chain variable domain of TCR clone 153276 (TRBV7-3, TRBJ2-1)
CASSLEGYRSYNEQFF

SEQ ID NO: 306553 - protein, 13 aa, Homo sapiens
  CDR3 for alpha chain variable domain of TCR clone 153277 (TRAV8-3, TRAJ48)
CAVVPVGNEKLTF

SEQ ID NO: 306554 - protein, 19 aa, Homo sapiens
  CDR3 for beta chain variable domain of TCR clone 153277 (TRBV25-1, TRBJ2-2)
CAILVYRVDRGRKTGELFF

SEQ ID NO: 306555 - protein, 14 aa, Homo sapiens
  CDR3 for alpha chain variable domain of TCR clone 153278 (TRAV16, TRAJ33)
CALSAMDSNYQLIW

SEQ ID NO: 306556 - protein, 14 aa, Homo sapiens
  CDR3 for beta chain variable domain of TCR clone 153278 (TRBV7-2, TRBJ2-5)
CASSFTQGQETQYF

SEQ ID NO: 306557 - protein, 15 aa, Homo sapiens
  CDR3 for alpha chain variable domain of TCR clone 153279 (TRAV38-2/DV8, TRAJ26)
CAYRSRDNYGQNFVF

SEQ ID NO: 306558 - protein, 14 aa, Homo sapiens
  CDR3 for beta chain variable domain of TCR clone 153279 (TRBV11-2, TRBJ2-3)
CASSRLARTDTQYF

SEQ ID NO: 306559 - protein, 12 aa, Homo sapiens
  CDR3 for alpha chain variable domain of TCR clone 153280 (TRAV3, TRAJ43)
CAVRDPNNDMRF

SEQ ID NO: 306560 - protein, 15 aa, Homo sapiens
  CDR3 for beta chain variable domain of TCR clone 153280 (TRBV2, TRBJ2-7)
CASTLLGSGATEQYF

SEQ ID NO: 306561 - protein, 14 aa, Homo sapiens
  CDR3 for alpha chain variable domain of TCR clone 153281 (TRAV4, TRAJ30)
CLVGDMNRDDKHIF

SEQ ID NO: 306562 - protein, 15 aa, Homo sapiens
  CDR3 for beta chain variable domain of TCR clone 153281 (TRBV7-2, TRBJ2-7)
CASSLSSGRTYEQYF

SEQ ID NO: 306563 - protein, 11 aa, Homo sapiens
  CDR3 for alpha chain variable domain of TCR clone 153282 (TRAV1-1, TRAJ23)
CAVRQGGKLIF

SEQ ID NO: 306564 - protein, 16 aa, Homo sapiens
  CDR3 for beta chain variable domain of TCR clone 153282 (TRBV7-8, TRBJ2-1)
CASSLEGYRSYNEQFF

SEQ ID NO: 306565 - protein, 15 aa, Homo sapiens
  CDR3 for alpha chain variable domain of TCR clone 153283 (TRAV3, TRAJ5)
CAVRDLDTGRRALTF

SEQ ID NO: 306566 - protein, 15 aa, Homo sapiens
  CDR3 for beta chain variable domain of TCR clone 153283 (TRBV6-3, TRBJ2-2)
CASSFLVTLTGELFF

SEQ ID NO: 306567 - protein, 15 aa, Homo sapiens
  CDR3 for alpha chain variable domain of TCR clone 153284 (TRAV13-2, TRAJ45)
CAEHHSGGGADGLNL

SEQ ID NO: 306568 - protein, 15 aa, Homo sapiens
  CDR3 for beta chain variable domain of TCR clone 153284 (TRBV7-2, TRBJ2-7)
CASSLALGSAYEQYF

SEQ ID NO: 306569 - protein, 14 aa, Homo sapiens
  CDR3 for alpha chain variable domain of TCR clone 153285 (TRAV17, TRAJ45)
CATSSGGGADGLTF

SEQ ID NO: 306570 - protein, 15 aa, Homo sapiens
  CDR3 for beta chain variable domain of TCR clone 153285 (TRBV11-2, TRBJ2-1)
CASSRNRGLMYEQFF

SEQ ID NO: 306571 - protein, 16 aa, Homo sapiens
  CDR3 for alpha chain variable domain of TCR clone 153286 (TRAV30, TRAJ24)
CGTEIVDADSWGKFQF

SEQ ID NO: 306572 - protein, 14 aa, Homo sapiens
  CDR3 for beta chain variable domain of TCR clone 153286 (TRBV4-3, TRBJ2-7)
CASSQDVAGGEQYF

SEQ ID NO: 306573 - protein, 11 aa, Homo sapiens
  CDR3 for alpha chain variable domain of TCR clone 153287 (TRAV12-2, TRAJ43)
CRERQNNDMRF

SEQ ID NO: 306574 - protein, 14 aa, Homo sapiens
  CDR3 for beta chain variable domain of TCR clone 153287 (TRBV25-1, TRBJ2-2)
CASSELGLPGELFF

SEQ ID NO: 306575 - protein, 13 aa, Homo sapiens
  CDR3 for alpha chain variable domain of TCR clone 153288 (TRAV12-2, TRAJ49)
CAMSRNTGNQFYF

SEQ ID NO: 306576 - protein, 16 aa, Homo sapiens
  CDR3 for beta chain variable domain of TCR clone 153288 (TRBV5-8, TRBJ2-2)
CASSLINPGGAGELFF

SEQ ID NO: 306577 - protein, 15 aa, Homo sapiens
  CDR3 for alpha chain variable domain of TCR clone 153289 (TRAV23/DV6, TRAJ4)
CAASPLRGGYNKLIF

SEQ ID NO: 306578 - protein, 16 aa, Homo sapiens
  CDR3 for beta chain variable domain of TCR clone 153289 (TRBV7-9, TRBJ1-2)
CASSLGFSSGEDGYTF

SEQ ID NO: 306579 - protein, 15 aa, Homo sapiens
  CDR3 for alpha chain variable domain of TCR clone 153290 (TRAV17, TRAJ9)
CFLLLRITGGFKTIF

SEQ ID NO: 306580 - protein, 14 aa, Homo sapiens
  CDR3 for beta chain variable domain of TCR clone 153290 (TRBV7-9, TRBJ2-2)
CASSLVQDTGELFF

SEQ ID NO: 306581 - protein, 17 aa, Homo sapiens
  CDR3 for alpha chain variable domain of TCR clone 153291 (TRAV3, TRAJ38)
CAVRDCLNAGNNRKLIW

SEQ ID NO: 306582 - protein, 16 aa, Homo sapiens
  CDR3 for beta chain variable domain of TCR clone 153291 (TRBV20-1, TRBJ1-4)
CSARPYGGELNERLFF

SEQ ID NO: 306583 - protein, 13 aa, Homo sapiens
  CDR3 for alpha chain variable domain of TCR clone 153292 (TRAV17, TRAJ5)
CALRGTGRRALTL

SEQ ID NO: 306584 - protein, 15 aa, Homo sapiens
  CDR3 for beta chain variable domain of TCR clone 153292 (TRBV6-1, TRBJ1-5)
CASSELREGNQPQHF

SEQ ID NO: 306585 - protein, 14 aa, Homo sapiens
  CDR3 for alpha chain variable domain of TCR clone 153293 (TRAV38-1, TRAJ27)
CAFIHNTNAGKSTF

SEQ ID NO: 306586 - protein, 14 aa, Homo sapiens
  CDR3 for beta chain variable domain of TCR clone 153293 (TRBV28, TRBJ2-2)
CASTRRSGDGELFF

SEQ ID NO: 306587 - protein, 13 aa, Homo sapiens
  CDR3 for alpha chain variable domain of TCR clone 153294 (TRAV36/DV7, TRAJ49)
CAVEANTGNQFQF

SEQ ID NO: 306588 - protein, 13 aa, Homo sapiens
  CDR3 for beta chain variable domain of TCR clone 153294 (TRBV10-3, TRBJ2-7)
CASKLAVNYEQYF

SEQ ID NO: 306589 - protein, 15 aa, Homo sapiens
  CDR3 for alpha chain variable domain of TCR clone 153295 (TRAV40, TRAJ45)
GLLGDLGGGADGLTF

SEQ ID NO: 306590 - protein, 13 aa, Homo sapiens
  CDR3 for beta chain variable domain of TCR clone 153295 (TRBV7-9, TRBJ1-2)
CASSLKQNYGYTF

SEQ ID NO: 306591 - protein, 13 aa, Homo sapiens
  CDR3 for alpha chain variable domain of TCR clone 153296 (TRAV27, TRAJ45)
CRSSGGGADGLTF

SEQ ID NO: 306592 - protein, 17 aa, Homo sapiens
  CDR3 for beta chain variable domain of TCR clone 153296 (TRBV10-3, TRBJ2-4)
CTSVPSVKKGSKNIQYF

SEQ ID NO: 306593 - protein, 12 aa, Homo sapiens
  CDR3 for alpha chain variable domain of TCR clone 153297 (TRAV3, TRAJ20)
CAVRDPDYKLSF

SEQ ID NO: 306594 - protein, 16 aa, Homo sapiens
  CDR3 for beta chain variable domain of TCR clone 153297 (TRBV11-2, TRBJ2-7)
CASSPTTGGVSYEQYF

SEQ ID NO: 306595 - protein, 15 aa, Homo sapiens
  CDR3 for alpha chain variable domain of TCR clone 153298 (TRAV26-1, TRAJ56)
CIVRVATGANRKLTF

SEQ ID NO: 306596 - protein, 15 aa, Homo sapiens
  CDR3 for beta chain variable domain of TCR clone 153298 (TRBV27, TRBJ2-7)
CASSPQREGQREQYF

SEQ ID NO: 306597 - protein, 13 aa, Homo sapiens
  CDR3 for alpha chain variable domain of TCR clone 153299 (TRAV30, TRAJ24)
CGTVTDSWGKLQF

SEQ ID NO: 306598 - protein, 16 aa, Homo sapiens
  CDR3 for beta chain variable domain of TCR clone 153299 (TRBV19, TRBJ2-1)
CASSKAGPSSYNERFF

SEQ ID NO: 306599 - protein, 11 aa, Homo sapiens
  CDR3 for alpha chain variable domain of TCR clone 153300 (TRAV17, TRAJ43)
CATPRSNDIRF

SEQ ID NO: 306600 - protein, 15 aa, Homo sapiens
  CDR3 for beta chain variable domain of TCR clone 153300 (TRBV11-2, TRBJ2-1)
CASSLGTRGLNEQFF

SEQ ID NO: 306601 - protein, 17 aa, Homo sapiens
  CDR3 for alpha chain variable domain of TCR clone 153301 (TRAV17, TRAJ28)
CATDPRRGGAGRYPLPF

SEQ ID NO: 306602 - protein, 16 aa, Homo sapiens
  CDR3 for beta chain variable domain of TCR clone 153301 (TRBV25-1, TRBJ1-1)
CASSGDRDRGRIEAFF

SEQ ID NO: 306603 - protein, 13 aa, Homo sapiens
  CDR3 for alpha chain variable domain of TCR clone 153302 (TRAV36/DV7, TRAJ37)
CAVFSSNTGKLIF

SEQ ID NO: 306604 - protein, 16 aa, Homo sapiens
  CDR3 for beta chain variable domain of TCR clone 153302 (TRBV12-4, TRBJ2-5)
CASSFFVGGRQETQYF

SEQ ID NO: 306605 - protein, 12 aa, Homo sapiens
  CDR3 for alpha chain variable domain of TCR clone 153303 (TRAV12-3, TRAJ20)
CAMVRGDYKLSF

SEQ ID NO: 306606 - protein, 17 aa, Homo sapiens
  CDR3 for beta chain variable domain of TCR clone 153303 (TRBV7-9, TRBJ2-6)
CASSFGAGHSGANVLTF

SEQ ID NO: 306607 - protein, 14 aa, Homo sapiens
  CDR3 for alpha chain variable domain of TCR clone 153304 (TRAV12-2, TRAJ40)
CAVKIPAGTYKNIF

SEQ ID NO: 306608 - protein, 14 aa, Homo sapiens
  CDR3 for beta chain variable domain of TCR clone 153304 (TRBV20-1, TRBJ1-1)
CSAQTRIGGTEAFF

SEQ ID NO: 306609 - protein, 11 aa, Homo sapiens
  CDR3 for alpha chain variable domain of TCR clone 153305 (TRAV13-1, TRAJ30)
GAASRDEKIIF

SEQ ID NO: 306610 - protein, 15 aa, Homo sapiens
  CDR3 for beta chain variable domain of TCR clone 153305 (TRBV18, TRBJ1-1)
CASSPSSWVNTEAFF

SEQ ID NO: 306611 - protein, 15 aa, Homo sapiens
  CDR3 for alpha chain variable domain of TCR clone 153306 (TRAV27, TRAJ38)
CAARRNAGNNRKLIW

SEQ ID NO: 306612 - protein, 12 aa, Homo sapiens
  CDR3 for beta chain variable domain of TCR clone 153306 (TRBV7-6, TRBJ2-5)
CASSLSQDTQYF

SEQ ID NO: 306613 - protein, 13 aa, Homo sapiens
  CDR3 for alpha chain variable domain of TCR clone 153307 (TRAV27, TRAJ3)
ASLRGSSASKIIF

SEQ ID NO: 306614 - protein, 17 aa, Homo sapiens
  CDR3 for beta chain variable domain of TCR clone 153307 (TRBV28, TRBJ1-3)
CASSMGWASGNTYILER

SEQ ID NO: 306615 - protein, 11 aa, Homo sapiens
  CDR3 for alpha chain variable domain of TCR clone 153308 (TRAV17, TRAJ9)
CGFTGGFKTNF

SEQ ID NO: 306616 - protein, 14 aa, Homo sapiens
  CDR3 for beta chain variable domain of TCR clone 153308 (TRBV7-9, TRBJ2-2)
CASSLVQGTGELFF

SEQ ID NO: 306617 - protein, 16 aa, Homo sapiens
  CDR3 for alpha chain variable domain of TCR clone 153309 (TRAV3, TRAJ10)
CAVRDMRAGGGNKLTF

SEQ ID NO: 306618 - protein, 19 aa, Homo sapiens
  CDR3 for beta chain variable domain of TCR clone 153309 (TRBV6-3, TRBJ1-2)
CASSYSKGRTGTPNYGYTF

SEQ ID NO: 306619 - protein, 16 aa, Homo sapiens
  CDR3 for alpha chain variable domain of TCR clone 153310 (TRAV26-1, TRAJ45)
CIVEKYSGGGADGLPF

SEQ ID NO: 306620 - protein, 15 aa, Homo sapiens
  CDR3 for beta chain variable domain of TCR clone 153310 (TRBV15, TRBJ2-7)
CHQQRPIQQAYEQYF

SEQ ID NO: 306621 - protein, 14 aa, Homo sapiens
  CDR3 for alpha chain variable domain of TCR clone 153311 (TRAV4, TRAJ29)
CLGGPDSGNTPLVF

SEQ ID NO: 306622 - protein, 13 aa, Homo sapiens
  CDR3 for beta chain variable domain of TCR clone 153311 (TRBV4-1, TRBJ2-3)
CASSQPPTDTQYF

SEQ ID NO: 306623 - protein, 13 aa, Homo sapiens
  CDR3 for alpha chain variable domain of TCR clone 153312 (TRAV8-3, TRAJ23)
CAGIYNQGGKRIF

SEQ ID NO: 306624 - protein, 15 aa, Homo sapiens
  CDR3 for beta chain variable domain of TCR clone 153312 (TRBV5-1, TRBJ2-1)
CASSPPRAPYNEQFF

SEQ ID NO: 306625 - protein, 14 aa, Homo sapiens
  CDR3 for alpha chain variable domain of TCR clone 153313 (TRAV8-4, TRAJ34)
RAVSDPGDTDKPIF

SEQ ID NO: 306626 - protein, 15 aa, Homo sapiens
  CDR3 for beta chain variable domain of TCR clone 153313 (TRBV6-6, TRBJ1-1)
CASSPRGDVETEAFF

SEQ ID NO: 306627 - protein, 12 aa, Homo sapiens
  CDR3 for alpha chain variable domain of TCR clone 153314 (TRAV12-3, TRAJ17)
CAMTLTGNNITF

SEQ ID NO: 306628 - protein, 15 aa, Homo sapiens
  CDR3 for beta chain variable domain of TCR clone 153314 (TRBV20-1, TRBJ2-7)
RSARDRVSGMDEQYF

SEQ ID NO: 306629 - protein, 16 aa, Homo sapiens
  CDR3 for alpha chain variable domain of TCR clone 153315 (TRAV4, TRAJ22)
CLVGDLYSGSARQLTF

SEQ ID NO: 306630 - protein, 16 aa, Homo sapiens
  CDR3 for beta chain variable domain of TCR clone 153315 (TRBV27, TRBJ2-7)
CASSSERRDSAYEQYF

SEQ ID NO: 306631 - protein, 11 aa, Homo sapiens
  CDR3 for alpha chain variable domain of TCR clone 153316 (TRAV12-2, TRAJ49)
CAVHTGNQFYL

SEQ ID NO: 306632 - protein, 15 aa, Homo sapiens
  CDR3 for beta chain variable domain of TCR clone 153316 (TRBV27, TRBJ2-1)
CASSNGGGSSNEQFF

SEQ ID NO: 306633 - protein, 18 aa, Homo sapiens
  CDR3 for alpha chain variable domain of TCR clone 153317 (TRAV21, TRAJ52)
CAVRPSPAGGTSYGKLTF

SEQ ID NO: 306634 - protein, 17 aa, Homo sapiens
  CDR3 for beta chain variable domain of TCR clone 153317 (TRBV13, TRBJ2-3)
CASSLSRVAGGKDTRYF

SEQ ID NO: 306635 - protein, 15 aa, Homo sapiens
  CDR3 for alpha chain variable domain of TCR clone 153318 (TRAV3, TRAJ22)
CAVRDRGVSARQLTF

SEQ ID NO: 306636 - protein, 13 aa, Homo sapiens
  CDR3 for beta chain variable domain of TCR clone 153318 (TRBV2, TRBJ1-5)
CATAGPGNQPQHF

SEQ ID NO: 306637 - protein, 13 aa, Homo sapiens
  CDR3 for alpha chain variable domain of TCR clone 153319 (TRAV12-1, TRAJ8)
CVGMGPGFQKLVF

SEQ ID NO: 306638 - protein, 15 aa, Homo sapiens
  CDR3 for beta chain variable domain of TCR clone 153319 (TRBV11-3, TRBJ2-3)
CASSAGTVVTNTQYF

SEQ ID NO: 306639 - protein, 16 aa, Homo sapiens
  CDR3 for alpha chain variable domain of TCR clone 153320 (TRAV12-2, TRAJ40)
CAVIRGGTSGTYKYIF

SEQ ID NO: 306640 - protein, 16 aa, Homo sapiens
  CDR3 for beta chain variable domain of TCR clone 153320 (TRBV7-9, TRBJ2-1)
CASSDVAGGSHNEQFF

SEQ ID NO: 306641 - protein, 15 aa, Homo sapiens
  CDR3 for alpha chain variable domain of TCR clone 153321 (TRAV25, TRAJ52)
CAGRPGGTSYGKLTF

SEQ ID NO: 306642 - protein, 15 aa, Homo sapiens
  CDR3 for beta chain variable domain of TCR clone 153321 (TRBV9, TRBJ2-1)
CASSLAGSSYNEQFF

SEQ ID NO: 306643 - protein, 12 aa, Homo sapiens
  CDR3 for alpha chain variable domain of TCR clone 153322 (TRAV12-3, TRAJ40)
CAMTSGTYTYIF

SEQ ID NO: 306644 - protein, 15 aa, Homo sapiens
  CDR3 for beta chain variable domain of TCR clone 153322 (TRBV7-3, TRBJ2-2)
CASSLTGQGTGELFF

SEQ ID NO: 306645 - protein, 14 aa, Homo sapiens
  CDR3 for alpha chain variable domain of TCR clone 153323 (TRAV13-2, TRAJ10)
CAETFTGGGNKLTF

SEQ ID NO: 306646 - protein, 16 aa, Homo sapiens
  CDR3 for beta chain variable domain of TCR clone 153323 (TRBV18, TRBJ2-7)
SASSPRSQGISYEQYF

SEQ ID NO: 306647 - protein, 13 aa, Homo sapiens
  CDR3 for alpha chain variable domain of TCR clone 153324 (TRAV8-3, TRAJ15)
CAVGIQPGTALLF

SEQ ID NO: 306648 - protein, 17 aa, Homo sapiens
  CDR3 for beta chain variable domain of TCR clone 153324 (TRBV20-1, TRBJ2-1)
CSARDPLAGVSYNEQFF

SEQ ID NO: 306649 - protein, 14 aa, Homo sapiens
  CDR3 for alpha chain variable domain of TCR clone 153325 (TRAV21, TRAJ35)
CAVMPIGFGNVLHC

SEQ ID NO: 306650 - protein, 15 aa, Homo sapiens
  CDR3 for beta chain variable domain of TCR clone 153325 (TRBV2, TRBJ1-4)
CASSERRGTNEKLFF

SEQ ID NO: 306651 - protein, 22 aa, Homo sapiens
  CDR3 for alpha chain variable domain of TCR clone 153326 (TRAV2, TRAJ9)
CAVEDRSGGLKLSLEQEQDYLL

SEQ ID NO: 306652 - protein, 14 aa, Homo sapiens
  CDR3 for beta chain variable domain of TCR clone 153326 (TRBV7-3, TRBJ2-1)
CASSLAGGTNEQFF

SEQ ID NO: 306653 - protein, 15 aa, Homo sapiens
  CDR3 for alpha chain variable domain of TCR clone 153327 (TRAV13-1, TRAJ49)
CAASTEGNTGNQLYF

SEQ ID NO: 306654 - protein, 12 aa, Homo sapiens
  CDR3 for beta chain variable domain of TCR clone 153327 (TRBV11-2, TRBJ2-2)
CASSIGGGELFF

SEQ ID NO: 306655 - protein, 14 aa, Homo sapiens
  CDR3 for alpha chain variable domain of TCR clone 153328 (TRAV1-2, TRAJ16)
CAVNRFSDGPKLPF

SEQ ID NO: 306656 - protein, 15 aa, Homo sapiens
  CDR3 for beta chain variable domain of TCR clone 153328 (TRBV27, TRBJ2-1)
CASSNGGGSSNEQFF

SEQ ID NO: 306657 - protein, 12 aa, Homo sapiens
  CDR3 for alpha chain variable domain of TCR clone 153329 (TRAV13-2, TRAJ23)
CAERHRGGQLIF

SEQ ID NO: 306658 - protein, 14 aa, Homo sapiens
  CDR3 for beta chain variable domain of TCR clone 153329 (TRBV7-9, TRBJ2-3)
CASSLEDGTDTQYF

SEQ ID NO: 306659 - protein, 13 aa, Homo sapiens
  CDR3 for alpha chain variable domain of TCR clone 153330 (TRAV13-1, TRAJ5)
CAARVTGRRALTF

SEQ ID NO: 306660 - protein, 15 aa, Homo sapiens
  CDR3 for beta chain variable domain of TCR clone 153330 (TRBV28, TRBJ2-7)
CASSLGGRGFYEQYV

SEQ ID NO: 306661 - protein, 15 aa, Homo sapiens
  CDR3 for alpha chain variable domain of TCR clone 153331 (TRAV35, TRAJ40)
CAGQLGTSGTYKYIF

SEQ ID NO: 306662 - protein, 13 aa, Homo sapiens
  CDR3 for beta chain variable domain of TCR clone 153331 (TRBV2, TRBJ1-5)
CASSQGGSQPQHF

SEQ ID NO: 306663 - protein, 18 aa, Homo sapiens
  CDR3 for alpha chain variable domain of TCR clone 153332 (TRAV26-2, TRAJ45)
CILRLWGYSGGGADGLTF

SEQ ID NO: 306664 - protein, 13 aa, Homo sapiens
  CDR3 for beta chain variable domain of TCR clone 153332 (TRBV7-8, TRBJ2-7)
CAGSLTGGREQYF

SEQ ID NO: 306665 - protein, 22 aa, Homo sapiens
  CDR3 for alpha chain variable domain of TCR clone 153333 (TRAV8-3, TRAJ38)
CAVGASNAGNNHIQNPDPAVYK

SEQ ID NO: 306666 - protein, 15 aa, Homo sapiens
  CDR3 for beta chain variable domain of TCR clone 153333 (TRBV11-3, TRBJ1-3)
CASSLFGPSGNTIYF

SEQ ID NO: 306667 - protein, 12 aa, Homo sapiens
  CDR3 for alpha chain variable domain of TCR clone 153334 (TRAV12-3, TRAJ17)
CAMTLTGNKLTF

SEQ ID NO: 306668 - protein, 16 aa, Homo sapiens
  CDR3 for beta chain variable domain of TCR clone 153334 (TRBV7-2, TRBJ2-5)
CASSPFPTGGEETQYF

SEQ ID NO: 306669 - protein, 15 aa, Homo sapiens
  CDR3 for alpha chain variable domain of TCR clone 153335 (TRAV12-1, TRAJ36)
CVVNEHQTGADNLFF

SEQ ID NO: 306670 - protein, 14 aa, Homo sapiens
  CDR3 for beta chain variable domain of TCR clone 153335 (TRBV10-3, TRBJ2-5)
CAIRTSGGQETQYF

SEQ ID NO: 306671 - protein, 14 aa, Homo sapiens
  CDR3 for alpha chain variable domain of TCR clone 153336 (TRAV13-1, TRAJ35)
CAASTGGFGNVLYC

SEQ ID NO: 306672 - protein, 13 aa, Homo sapiens
  CDR3 for beta chain variable domain of TCR clone 153336 (TRBV7-3, TRBJ1-1)
CASSQDWGAEAFF

SEQ ID NO: 306673 - protein, 14 aa, Homo sapiens
  CDR3 for alpha chain variable domain of TCR clone 153337 (TRAV9-2, TRAJ39)
CALYIYNAGNMPTF

SEQ ID NO: 306674 - protein, 16 aa, Homo sapiens
  CDR3 for beta chain variable domain of TCR clone 153337 (TRBV19, TRBJ2-2)
CASRSPGTGATGELFF

SEQ ID NO: 306675 - protein, 13 aa, Homo sapiens
  CDR3 for alpha chain variable domain of TCR clone 153338 (TRAV12-1, TRAJ33)
CGDAPDSNYQLIW

SEQ ID NO: 306676 - protein, 14 aa, Homo sapiens
  CDR3 for beta chain variable domain of TCR clone 153338 (TRBV13, TRBJ2-5)
CASSLGPRGETQYF

SEQ ID NO: 306677 - protein, 14 aa, Homo sapiens
  CDR3 for alpha chain variable domain of TCR clone 153339 (TRAV1-1, TRAJ27)
CAVIYTTNAGKSTF

SEQ ID NO: 306678 - protein, 13 aa, Homo sapiens
  CDR3 for beta chain variable domain of TCR clone 153339 (TRBV12-5, TRBJ1-2)
CASGVRTGNGYTF

SEQ ID NO: 306679 - protein, 10 aa, Homo sapiens
  CDR3 for alpha chain variable domain of TCR clone 153340 (TRAV12-3, TRAJ18)
CAMSAEAQPW

SEQ ID NO: 306680 - protein, 16 aa, Homo sapiens
  CDR3 for beta chain variable domain of TCR clone 153340 (TRBV7-8, TRBJ2-6)
CASRVGDSSGANVLTF

SEQ ID NO: 306681 - protein, 12 aa, Homo sapiens
  CDR3 for alpha chain variable domain of TCR clone 153341 (TRAV1-1, TRAJ8)
CAGGTGFQKLVF

SEQ ID NO: 306682 - protein, 17 aa, Homo sapiens
  CDR3 for beta chain variable domain of TCR clone 153341 (TRBV6-6, TRBJ2-1)
CASSYRPGWSSYNEQFF

SEQ ID NO: 306683 - protein, 11 aa, Homo sapiens
  CDR3 for alpha chain variable domain of TCR clone 153342 (TRAV12-1, TRAJ3)
CVVSSASKIIF

SEQ ID NO: 306684 - protein, 11 aa, Homo sapiens
  CDR3 for beta chain variable domain of TCR clone 153342 (TRBV6-3, TRBJ2-3)
CATGQADTQYF

SEQ ID NO: 306685 - protein, 16 aa, Homo sapiens
  CDR3 for alpha chain variable domain of TCR clone 153343 (TRAV12-3, TRAJ53)
CAMSPGSGGSNYKLKF

SEQ ID NO: 306686 - protein, 17 aa, Homo sapiens
  CDR3 for beta chain variable domain of TCR clone 153343 (TRBV11-2, TRBJ2-1)
CASSLYPPGVEYNEQFF

SEQ ID NO: 306687 - protein, 13 aa, Homo sapiens
  CDR3 for alpha chain variable domain of TCR clone 153344 (TRAV27, TRAJ54)
CAGAGQGAQRLVF

SEQ ID NO: 306688 - protein, 15 aa, Homo sapiens
  CDR3 for beta chain variable domain of TCR clone 153344 (TRBV18, TRBJ2-6)
CASSPSYAGANVLTF

SEQ ID NO: 306689 - protein, 14 aa, Homo sapiens
  CDR3 for alpha chain variable domain of TCR clone 153345 (TRAV8-4, TRAJ16)
CAVSPVCRWPEAAL

SEQ ID NO: 306690 - protein, 14 aa, Homo sapiens
  CDR3 for beta chain variable domain of TCR clone 153345 (TRBV23-1, TRBJ2-5)
CASSFLRSQETQYF

SEQ ID NO: 306691 - protein, 20 aa, Homo sapiens
  CDR3 for alpha chain variable domain of TCR clone 153346 (TRAV1-2, TRAJ34)
LLKELQMKDSASPNTDKLIF

SEQ ID NO: 306692 - protein, 20 aa, Homo sapiens
  CDR3 for beta chain variable domain of TCR clone 153346 (TRBV28, TRBJ2-1)
CASTPIGRSPGLAGGNEQFF

SEQ ID NO: 306693 - protein, 13 aa, Homo sapiens
  CDR3 for alpha chain variable domain of TCR clone 153347 (TRAV3, TRAJ21)
FTVREPDFNKFYL

SEQ ID NO: 306694 - protein, 17 aa, Homo sapiens
  CDR3 for beta chain variable domain of TCR clone 153347 (TRBV7-8, TRBJ2-6)
CASSAGTGGAGANVLTF

SEQ ID NO: 306695 - protein, 13 aa, Homo sapiens
  CDR3 for alpha chain variable domain of TCR clone 153348 (TRAV13-1, TRAJ39)
CAASIVMQATCSL

SEQ ID NO: 306696 - protein, 16 aa, Homo sapiens
  CDR3 for beta chain variable domain of TCR clone 153348 (TRBV20-1, TRBJ1-4)
CRAPGQGLLTNEKLFF

SEQ ID NO: 306697 - protein, 14 aa, Homo sapiens
  CDR3 for alpha chain variable domain of TCR clone 153349 (TRAV23/DV6, TRAJ39)
CAASMRGAGNMPTF

SEQ ID NO: 306698 - protein, 14 aa, Homo sapiens
  CDR3 for beta chain variable domain of TCR clone 153349 (TRBV10-3, TRBJ2-3)
CAISVTRSRDTQYF

SEQ ID NO: 306699 - protein, 13 aa, Homo sapiens
  CDR3 for alpha chain variable domain of TCR clone 153350 (TRAV12-1, TRAJ11)
CVVTRGGYSNLTF

SEQ ID NO: 306700 - protein, 13 aa, Homo sapiens
  CDR3 for beta chain variable domain of TCR clone 153350 (TRBV20-1, TRBJ1-2)
CSARDQGAYGYTF

SEQ ID NO: 306701 - protein, 14 aa, Homo sapiens
  CDR3 for alpha chain variable domain of TCR clone 153351 (TRAV2, TRAJ37)
CAVDFTSNTGKLIF

SEQ ID NO: 306702 - protein, 12 aa, Homo sapiens
  CDR3 for beta chain variable domain of TCR clone 153351 (TRBV19, TRBJ1-5)
CASSIAQQTQHF

SEQ ID NO: 306703 - protein, 10 aa, Homo sapiens
  CDR3 for alpha chain variable domain of TCR clone 153352 (TRAV1-2, TRAJ31)
CAFFDARLMF

SEQ ID NO: 306704 - protein, 15 aa, Homo sapiens
  CDR3 for beta chain variable domain of TCR clone 153352 (TRBV12-4, TRBJ1-5)
CASSFSGRGNQPQHF

SEQ ID NO: 306705 - protein, 14 aa, Homo sapiens
  CDR3 for alpha chain variable domain of TCR clone 153353 (TRAV27, TRAJ42)
CAGGDGGSQGNLIF

SEQ ID NO: 306706 - protein, 15 aa, Homo sapiens
  CDR3 for beta chain variable domain of TCR clone 153353 (TRBV3-1, TRBJ2-2)
CASSQDLAGTGELFF

SEQ ID NO: 306707 - protein, 13 aa, Homo sapiens
  CDR3 for alpha chain variable domain of TCR clone 153354 (TRAV20, TRAJ49)
CAVQARTGNQFYF

SEQ ID NO: 306708 - protein, 15 aa, Homo sapiens
  CDR3 for beta chain variable domain of TCR clone 153354 (TRBV27, TRBJ2-7)
CASSTAGTGSYEQYF

SEQ ID NO: 306709 - protein, 14 aa, Homo sapiens
  CDR3 for alpha chain variable domain of TCR clone 153355 (TRAV12-2, TRAJ17)
CAVLFKAAGNKLTF

SEQ ID NO: 306710 - protein, 17 aa, Homo sapiens
  CDR3 for beta chain variable domain of TCR clone 153355 (TRBV20-1, TRBJ2-2)
SAVLADRDRGLTGELFF

SEQ ID NO: 306711 - protein, 12 aa, Homo sapiens
  CDR3 for alpha chain variable domain of TCR clone 153356 (TRAV16, TRAJ10)
CSRTGGGNKLTF

SEQ ID NO: 306712 - protein, 13 aa, Homo sapiens
  CDR3 for beta chain variable domain of TCR clone 153356 (TRBV20-1, TRBJ1-1)
CSAPLGGGTEAFF

SEQ ID NO: 306713 - protein, 11 aa, Homo sapiens
  CDR3 for alpha chain variable domain of TCR clone 153357 (TRAV12-2, TRAJ48)
CAVSGNEKLTF

SEQ ID NO: 306714 - protein, 13 aa, Homo sapiens
  CDR3 for beta chain variable domain of TCR clone 153357 (TRBV27, TRBJ1-4)
CASSLMGDEKLFF

SEQ ID NO: 306715 - protein, 15 aa, Homo sapiens
  CDR3 for alpha chain variable domain of TCR clone 153358 (TRAV8-3, TRAJ11)
CAVGLLNSGYSTRTF

SEQ ID NO: 306716 - protein, 15 aa, Homo sapiens
  CDR3 for beta chain variable domain of TCR clone 153358 (TRBV7-9, TRBJ1-6)
CASSSPGRGDSPLHF

SEQ ID NO: 306717 - protein, 15 aa, Homo sapiens
  CDR3 for alpha chain variable domain of TCR clone 153359 (TRAV26-1, TRAJ29)
CIVRVEGSGNTPLVF

SEQ ID NO: 306718 - protein, 14 aa, Homo sapiens
  CDR3 for beta chain variable domain of TCR clone 153359 (TRBV7-2, TRBJ1-2)
CASSSQGAHYGYTF

SEQ ID NO: 306719 - protein, 12 aa, Homo sapiens
  CDR3 for alpha chain variable domain of TCR clone 153360 (TRAV1-2, TRAJ23)
CAVTNQGGKLIF

SEQ ID NO: 306720 - protein, 14 aa, Homo sapiens
  CDR3 for beta chain variable domain of TCR clone 153360 (TRBV12-4, TRBJ1-6)
CASNLQGKGSPLHF

SEQ ID NO: 306721 - protein, 13 aa, Homo sapiens
  CDR3 for alpha chain variable domain of TCR clone 153361 (TRAV36/DV7, TRAJ54)
CAVDIQGAQKLVF

SEQ ID NO: 306722 - protein, 14 aa, Homo sapiens
  CDR3 for beta chain variable domain of TCR clone 153361 (TRBV7-3, TRBJ2-1)
CASSLAGGTNEQFF

SEQ ID NO: 306723 - protein, 10 aa, Homo sapiens
  CDR3 for alpha chain variable domain of TCR clone 153362 (TRAV38-2/DV8, TRAJ21)
WAYRSNKFYF

SEQ ID NO: 306724 - protein, 12 aa, Homo sapiens
  CDR3 for beta chain variable domain of TCR clone 153362 (TRBV11-3, TRBJ2-3)
CASSLWEDTQYF

SEQ ID NO: 306725 - protein, 13 aa, Homo sapiens
  CDR3 for alpha chain variable domain of TCR clone 153363 (TRAV38-1, TRAJ42)
CARWGGSQGNLIF

SEQ ID NO: 306726 - protein, 17 aa, Homo sapiens
  CDR3 for beta chain variable domain of TCR clone 153363 (TRBV20-1, TRBJ2-1)
CSGSDPLAGVWDNEQFF

SEQ ID NO: 306727 - protein, 17 aa, Homo sapiens
  CDR3 for alpha chain variable domain of TCR clone 153364 (TRAV3, TRAJ6)
CAVRDGPRAGGSYIPTF

SEQ ID NO: 306728 - protein, 15 aa, Homo sapiens
  CDR3 for beta chain variable domain of TCR clone 153364 (TRBV12-4, TRBJ2-2)
CASSLGVRHTGELFF

SEQ ID NO: 306729 - protein, 14 aa, Homo sapiens
  CDR3 for alpha chain variable domain of TCR clone 153365 (TRAV26-1, TRAJ38)
CIADNAGNNRKLIW

SEQ ID NO: 306730 - protein, 15 aa, Homo sapiens
  CDR3 for beta chain variable domain of TCR clone 153365 (TRBV4-1, TRBJ1-1)
CASSQEWGHYAEAFF

SEQ ID NO: 306731 - protein, 14 aa, Homo sapiens
  CDR3 for alpha chain variable domain of TCR clone 153366 (TRAV12-2, TRAJ13)
CAVKKTGGHQKVTF

SEQ ID NO: 306732 - protein, 16 aa, Homo sapiens
  CDR3 for beta chain variable domain of TCR clone 153366 (TRBV12-5, TRBJ2-5)
CASGPRTSGNQETQYF

SEQ ID NO: 306733 - protein, 16 aa, Homo sapiens
  CDR3 for alpha chain variable domain of TCR clone 153367 (TRAV26-2, TRAJ45)
CTTASPIGGGADGFTF

SEQ ID NO: 306734 - protein, 20 aa, Homo sapiens
  CDR3 for beta chain variable domain of TCR clone 153367 (TRBV28, TRBJ2-1)
CASTPIGRSPGLAGGNEQFF

SEQ ID NO: 306735 - protein, 15 aa, Homo sapiens
  CDR3 for alpha chain variable domain of TCR clone 153368 (TRAV8-6, TRAJ10)
CAVSDQAGGGNKLTF

SEQ ID NO: 306736 - protein, 16 aa, Homo sapiens
  CDR3 for beta chain variable domain of TCR clone 153368 (TRBV4-3, TRBJ2-1)
CASSQERLAGFNEQFF

SEQ ID NO: 306737 - protein, 14 aa, Homo sapiens
  CDR3 for alpha chain variable domain of TCR clone 153369 (TRAV1-2, TRAJ16)
CAVSRFSDGQKLLF

SEQ ID NO: 306738 - protein, 15 aa, Homo sapiens
  CDR3 for beta chain variable domain of TCR clone 153369 (TRBV9, TRBJ1-6)
CASSVAGAGDSPLHF

SEQ ID NO: 306739 - protein, 13 aa, Homo sapiens
  CDR3 for alpha chain variable domain of TCR clone 153370 (TRAV23/DV6, TRAJ22)
CAPYSGSVRQLTF

SEQ ID NO: 306740 - protein, 15 aa, Homo sapiens
  CDR3 for beta chain variable domain of TCR clone 153370 (TRBV11-2, TRBJ1-6)
CASSLDPWAVSPLLF

SEQ ID NO: 306741 - protein, 16 aa, Homo sapiens
  CDR3 for alpha chain variable domain of TCR clone 153371 (TRAV12-3, TRAJ28)
CAMRANSGAGSYQLTF

SEQ ID NO: 306742 - protein, 14 aa, Homo sapiens
  CDR3 for beta chain variable domain of TCR clone 153371 (TRBV7-2, TRBJ1-6)
CASSLQGANSPLHF

SEQ ID NO: 306743 - protein, 12 aa, Homo sapiens
  CDR3 for alpha chain variable domain of TCR clone 153372 (TRAV20, TRAJ49)
CAVNKDGNQFYF

SEQ ID NO: 306744 - protein, 16 aa, Homo sapiens
  CDR3 for beta chain variable domain of TCR clone 153372 (TRBV4-1, TRBJ2-3)
CASSQSTSGAEDTQYF

SEQ ID NO: 306745 - protein, 14 aa, Homo sapiens
  CDR3 for alpha chain variable domain of TCR clone 153373 (TRAV8-3, TRAJ4)
CAVGASGGYNKLIF

SEQ ID NO: 306746 - protein, 13 aa, Homo sapiens
  CDR3 for beta chain variable domain of TCR clone 153373 (TRBV7-7, TRBJ2-5)
CATTGGAMETQYF

SEQ ID NO: 306747 - protein, 15 aa, Homo sapiens
  CDR3 for alpha chain variable domain of TCR clone 153374 (TRAV26-1, TRAJ23)
CIVRVAGYQGGKLIF

SEQ ID NO: 306748 - protein, 18 aa, Homo sapiens
  CDR3 for beta chain variable domain of TCR clone 153374 (TRBV28, TRBJ2-1)
CASSSTSVRANSYNEQFF

SEQ ID NO: 306749 - protein, 15 aa, Homo sapiens
  CDR3 for alpha chain variable domain of TCR clone 153375 (TRAV3, TRAJ20)
CAVRDIKLSDYKLSF

SEQ ID NO: 306750 - protein, 17 aa, Homo sapiens
  CDR3 for beta chain variable domain of TCR clone 153375 (TRBV13, TRBJ2-3)
CASSLSRVAGGRNTQYF

SEQ ID NO: 306751 - protein, 13 aa, Homo sapiens
  CDR3 for alpha chain variable domain of TCR clone 153376 (TRAV12-2, TRAJ6)
CAALKGGSYIPTF

SEQ ID NO: 306752 - protein, 14 aa, Homo sapiens
  CDR3 for beta chain variable domain of TCR clone 153376 (TRBV5-1, TRBJ2-3)
CASSLVGPTDTQYF

SEQ ID NO: 306753 - protein, 16 aa, Homo sapiens
  CDR3 for alpha chain variable domain of TCR clone 153377 (TRAV30, TRAJ24)
CGTEMVDADSWGKFQF

SEQ ID NO: 306754 - protein, 13 aa, Homo sapiens
  CDR3 for beta chain variable domain of TCR clone 153377 (TRBV20-1, TRBJ1-2)
CSAPRSGRYGYTF

SEQ ID NO: 306755 - protein, 14 aa, Homo sapiens
  CDR3 for alpha chain variable domain of TCR clone 153378 (TRAV3, TRAJ6)
CAVRDWGGSYIPTF

SEQ ID NO: 306756 - protein, 17 aa, Homo sapiens
  CDR3 for beta chain variable domain of TCR clone 153378 (TRBV28, TRBJ2-5)
CASSTPEGDALQETQYF

SEQ ID NO: 306757 - protein, 12 aa, Homo sapiens
  CDR3 for alpha chain variable domain of TCR clone 153379 (TRAV2, TRAJ31)
CAVEDNNARLMF

SEQ ID NO: 306758 - protein, 16 aa, Homo sapiens
  CDR3 for beta chain variable domain of TCR clone 153379 (TRBV12-5, TRBJ2-1)
CASGLAGRDAYNEQFF

SEQ ID NO: 306759 - protein, 14 aa, Homo sapiens
  CDR3 for alpha chain variable domain of TCR clone 153380 (TRAV12-1, TRAJ17)
CVVNYKAAGSNLTF

SEQ ID NO: 306760 - protein, 17 aa, Homo sapiens
  CDR3 for beta chain variable domain of TCR clone 153380 (TRBV20-1, TRBJ2-1)
CSASSSGLAGSYNEQFF

SEQ ID NO: 306761 - protein, 17 aa, Homo sapiens
  CDR3 for alpha chain variable domain of TCR clone 153381 (TRAV3, TRAJ6)
CAVRDGPRAGGSHIPKF

SEQ ID NO: 306762 - protein, 14 aa, Homo sapiens
  CDR3 for beta chain variable domain of TCR clone 153381 (TRBV7-2, TRBJ2-7)
CASSPKTSFYEQYF

SEQ ID NO: 306763 - protein, 12 aa, Homo sapiens
  CDR3 for alpha chain variable domain of TCR clone 153382 (TRAV25, TRAJ11)
CAGASGYSTLTF

SEQ ID NO: 306764 - protein, 16 aa, Homo sapiens
  CDR3 for beta chain variable domain of TCR clone 153382 (TRBV7-3, TRBJ2-2)
CASSLKRGTLSGELFS

SEQ ID NO: 306765 - protein, 11 aa, Homo sapiens
  CDR3 for alpha chain variable domain of TCR clone 153383 (TRAV17, TRAJ31)
CATSKNARLMF

SEQ ID NO: 306766 - protein, 16 aa, Homo sapiens
  CDR3 for beta chain variable domain of TCR clone 153383 (TRBV7-8, TRBJ2-4)
CASSAERTLAKDIQYF

SEQ ID NO: 306767 - protein, 10 aa, Homo sapiens
  CDR3 for alpha chain variable domain of TCR clone 153384 (TRAV12-1, TRAJ33)
CVASNYQLIW

SEQ ID NO: 306768 - protein, 14 aa, Homo sapiens
  CDR3 for beta chain variable domain of TCR clone 153384 (TRBV19, TRBJ2-7)
CASSMGQGAIEQYF

SEQ ID NO: 306769 - protein, 17 aa, Homo sapiens
  CDR3 for alpha chain variable domain of TCR clone 153385 (TRAV4, TRAJ42)
CLVGVLNYGGSQGNLIF

SEQ ID NO: 306770 - protein, 13 aa, Homo sapiens
  CDR3 for beta chain variable domain of TCR clone 153385 (TRBV19, TRBJ1-2)
CASSVPGQDGYTF

SEQ ID NO: 306771 - protein, 14 aa, Homo sapiens
  CDR3 for alpha chain variable domain of TCR clone 153386 (TRAV12-2, TRAJ13)
FAVKKTGGYQKVTF

SEQ ID NO: 306772 - protein, 16 aa, Homo sapiens
  CDR3 for beta chain variable domain of TCR clone 153386 (TRBV9, TRBJ1-2)
CASSVEEKVSPYGDTF

SEQ ID NO: 306773 - protein, 15 aa, Homo sapiens
  CDR3 for alpha chain variable domain of TCR clone 153387 (TRAV26-1, TRAJ29)
CVVKVEGSGNTPLVF

SEQ ID NO: 306774 - protein, 15 aa, Homo sapiens
  CDR3 for beta chain variable domain of TCR clone 153387 (TRBV7-9, TRBJ1-5)
CASSQGHQPNQPQHF

SEQ ID NO: 306775 - protein, 10 aa, Homo sapiens
  CDR3 for alpha chain variable domain of TCR clone 153388 (TRAV30, TRAJ24)
WVLTAGKFQF

SEQ ID NO: 306776 - protein, 14 aa, Homo sapiens
  CDR3 for beta chain variable domain of TCR clone 153388 (TRBV12-5, TRBJ2-5)
CASGSRTHQETQYF

SEQ ID NO: 306777 - protein, 13 aa, Homo sapiens
  CDR3 for alpha chain variable domain of TCR clone 153389 (TRAV1-2, TRAJ20)
CAVRDGNDYKLSF

SEQ ID NO: 306778 - protein, 14 aa, Homo sapiens
  CDR3 for beta chain variable domain of TCR clone 153389 (TRBV7-2, TRBJ2-3)
CQQLGGGGRDTQYF

SEQ ID NO: 306779 - protein, 18 aa, Homo sapiens
  CDR3 for alpha chain variable domain of TCR clone 153390 (TRAV21, TRAJ52)
CAVRPSPAGGTSYGKLTF

SEQ ID NO: 306780 - protein, 16 aa, Homo sapiens
  CDR3 for beta chain variable domain of TCR clone 153390 (TRBV4-2, TRBJ1-2)
CASSQAGTKANYGYAF

SEQ ID NO: 306781 - protein, 13 aa, Homo sapiens
  CDR3 for alpha chain variable domain of TCR clone 153391 (TRAV35, TRAJ53)
CAGQESSNYKMTF

SEQ ID NO: 306782 - protein, 11 aa, Homo sapiens
  CDR3 for beta chain variable domain of TCR clone 153391 (TRBV29-1, TRBJ2-5)
CSEDRTGTQYF

SEQ ID NO: 306783 - protein, 14 aa, Homo sapiens
  CDR3 for alpha chain variable domain of TCR clone 153392 (TRAV8-3, TRAJ27)
CAGGRNTNAGKSNF

SEQ ID NO: 306784 - protein, 15 aa, Homo sapiens
  CDR3 for beta chain variable domain of TCR clone 153392 (TRBV11-3, TRBJ2-5)
CASSLRGRVQETQYF

SEQ ID NO: 306785 - protein, 15 aa, Homo sapiens
  CDR3 for alpha chain variable domain of TCR clone 153393 (TRAV14/DV4, TRAJ46)
CAMREKKSSGDKLSF

SEQ ID NO: 306786 - protein, 13 aa, Homo sapiens
  CDR3 for beta chain variable domain of TCR clone 153393 (TRBV20-1, TRBJ2-5)
CSAREAFQETQYF

SEQ ID NO: 306787 - protein, 11 aa, Homo sapiens
  CDR3 for alpha chain variable domain of TCR clone 153394 (TRAV3, TRAJ17)
PRGAAGNKLTF

SEQ ID NO: 306788 - protein, 16 aa, Homo sapiens
  CDR3 for beta chain variable domain of TCR clone 153394 (TRBV7-6, TRBJ2-1)
CASSAPGPSSYNEEFF

SEQ ID NO: 306789 - protein, 13 aa, Homo sapiens
  CDR3 for alpha chain variable domain of TCR clone 153395 (TRAV8-3, TRAJ34)
CAVGPYNTDKLIF

SEQ ID NO: 306790 - protein, 13 aa, Homo sapiens
  CDR3 for beta chain variable domain of TCR clone 153395 (TRBV7-8, TRBJ1-2)
CASSAQSYYGYTF

SEQ ID NO: 306791 - protein, 13 aa, Homo sapiens
  CDR3 for alpha chain variable domain of TCR clone 153396 (TRAV8-4, TRAJ30)
CAVSVNRHDKIIF

SEQ ID NO: 306792 - protein, 13 aa, Homo sapiens
  CDR3 for beta chain variable domain of TCR clone 153396 (TRBV3-1, TRBJ2-2)
CASLARGSGELFF

SEQ ID NO: 306793 - protein, 15 aa, Homo sapiens
  CDR3 for alpha chain variable domain of TCR clone 153397 (TRAV27, TRAJ38)
CAARRNAGNNRRLSW

SEQ ID NO: 306794 - protein, 13 aa, Homo sapiens
  CDR3 for beta chain variable domain of TCR clone 153397 (TRBV12-5, TRBJ2-3)
CASGDRQSDTQYF

SEQ ID NO: 306795 - protein, 12 aa, Homo sapiens
  CDR3 for alpha chain variable domain of TCR clone 153398 (TRAV8-3, TRAJ41)
CAVALSGYALNF

SEQ ID NO: 306796 - protein, 16 aa, Homo sapiens
  CDR3 for beta chain variable domain of TCR clone 153398 (TRBV27, TRBJ2-7)
GASSSERRDSAYEQYF

SEQ ID NO: 306797 - protein, 14 aa, Homo sapiens
  CDR3 for alpha chain variable domain of TCR clone 153399 (TRAV1-2, TRAJ8)
CAVRADTGFQKLVF

SEQ ID NO: 306798 - protein, 15 aa, Homo sapiens
  CDR3 for beta chain variable domain of TCR clone 153399 (TRBV27, TRBJ2-1)
CASSNGGGSSNEQFF

SEQ ID NO: 306799 - protein, 14 aa, Homo sapiens
  CDR3 for alpha chain variable domain of TCR clone 153400 (TRAV13-1, TRAJ35)
CAASKGGFGNGLHC

SEQ ID NO: 306800 - protein, 13 aa, Homo sapiens
  CDR3 for beta chain variable domain of TCR clone 153400 (TRBV7-3, TRBJ1-1)
FASSQDWGAEAFF

SEQ ID NO: 306801 - protein, 13 aa, Homo sapiens
  CDR3 for alpha chain variable domain of TCR clone 153401 (TRAV3, TRAJ27)
CAVRPLGAGKSTF

SEQ ID NO: 306802 - protein, 12 aa, Homo sapiens
  CDR3 for beta chain variable domain of TCR clone 153401 (TRBV7-2, TRBJ1-6)
CASSLSSSPLHF

SEQ ID NO: 306803 - protein, 14 aa, Homo sapiens
  CDR3 for alpha chain variable domain of TCR clone 153402 (TRAV13-1, TRAJ35)
CAASKGGFGNVLHC

SEQ ID NO: 306804 - protein, 15 aa, Homo sapiens
  CDR3 for beta chain variable domain of TCR clone 153402 (TRBV7-9, TRBJ1-6)
CASSSPGCGNSPLHF

SEQ ID NO: 306805 - protein, 14 aa, Homo sapiens
  CDR3 for alpha chain variable domain of TCR clone 153403 (TRAV12-3, TRAJ29)
CAMNPYSGNTPLVF

SEQ ID NO: 306806 - protein, 12 aa, Homo sapiens
  CDR3 for beta chain variable domain of TCR clone 153403 (TRBV9, TRBJ2-1)
CASSVGGTDIFF

SEQ ID NO: 306807 - protein, 13 aa, Homo sapiens
  CDR3 for alpha chain variable domain of TCR clone 153404 (TRAV21, TRAJ27)
CAARPGNAGKSPL

SEQ ID NO: 306808 - protein, 14 aa, Homo sapiens
  CDR3 for beta chain variable domain of TCR clone 153404 (TRBV7-6, TRBJ2-3)
RASSLGTVTDTQYF

SEQ ID NO: 306809 - protein, 12 aa, Homo sapiens
  CDR3 for alpha chain variable domain of TCR clone 153405 (TRAV17, TRAJ4)
SATDGGYNKLIF

SEQ ID NO: 306810 - protein, 13 aa, Homo sapiens
  CDR3 for beta chain variable domain of TCR clone 153405 (TRBV29-1, TRBJ2-2)
CSTTGVNTGELFF

SEQ ID NO: 306811 - protein, 12 aa, Homo sapiens
  CDR3 for alpha chain variable domain of TCR clone 153406 (TRAV21, TRAJ47)
CAAMEYGNKLVF

SEQ ID NO: 306812 - protein, 17 aa, Homo sapiens
  CDR3 for beta chain variable domain of TCR clone 153406 (TRBV20-1, TRBJ2-1)
CSAPPRLAGTRYNEQFF

SEQ ID NO: 306813 - protein, 15 aa, Homo sapiens
  CDR3 for alpha chain variable domain of TCR clone 153407 (TRAV27, TRAJ38)
CAGRFNAGNNRKLIW

SEQ ID NO: 306814 - protein, 13 aa, Homo sapiens
  CDR3 for beta chain variable domain of TCR clone 153407 (TRBV12-5, TRBJ2-3)
CASQNRGTDSQYF

SEQ ID NO: 306815 - protein, 12 aa, Homo sapiens
  CDR3 for alpha chain variable domain of TCR clone 153408 (TRAV2, TRAJ9)
CAVGAGGFKTIF

SEQ ID NO: 306816 - protein, 17 aa, Homo sapiens
  CDR3 for beta chain variable domain of TCR clone 153408 (TRBV7-8, TRBJ2-6)
CASSAGTGGAGANVLTF

SEQ ID NO: 306817 - protein, 16 aa, Homo sapiens
  CDR3 for alpha chain variable domain of TCR clone 153409 (TRAV2, TRAJ4)
CAVEDRFSGGYNKLIF

SEQ ID NO: 306818 - protein, 12 aa, Homo sapiens
  CDR3 for beta chain variable domain of TCR clone 153409 (TRBV7-7, TRBJ2-5)
CQSRSGQETQYF

SEQ ID NO: 306819 - protein, 14 aa, Homo sapiens
  CDR3 for alpha chain variable domain of TCR clone 153410 (TRAV2, TRAJ11)
CAVVPNSGYSTLTF

SEQ ID NO: 306820 - protein, 15 aa, Homo sapiens
  CDR3 for beta chain variable domain of TCR clone 153410 (TRBV4-1, TRBJ1-3)
CAISQDLRVGNTIYF

SEQ ID NO: 306821 - protein, 15 aa, Homo sapiens
  CDR3 for alpha chain variable domain of TCR clone 153411 (TRAV12-2, TRAJ43)
CAFDMRFGAGTRLTV

SEQ ID NO: 306822 - protein, 13 aa, Homo sapiens
  CDR3 for beta chain variable domain of TCR clone 153411 (TRBV6-1, TRBJ1-6)
CASSSSGDSPLHF

SEQ ID NO: 306823 - protein, 14 aa, Homo sapiens
  CDR3 for alpha chain variable domain of TCR clone 153412 (TRAV12-2, TRAJ17)
CAVLFKAAGNKLTF

SEQ ID NO: 306824 - protein, 15 aa, Homo sapiens
  CDR3 for beta chain variable domain of TCR clone 153412 (TRBV19, TRBJ2-2)
CQPISRDRGHRGAVF

SEQ ID NO: 306825 - protein, 16 aa, Homo sapiens
  CDR3 for alpha chain variable domain of TCR clone 153413 (TRAV3, TRAJ37)
CAVRPHGSGNTGKLNF

SEQ ID NO: 306826 - protein, 16 aa, Homo sapiens
  CDR3 for beta chain variable domain of TCR clone 153413 (TRBV20-1, TRBJ1-4)
CSAPGQGLLTNEKLFF

SEQ ID NO: 306827 - protein, 14 aa, Homo sapiens
  CDR3 for alpha chain variable domain of TCR clone 153414 (TRAV1-2, TRAJ8)
CAVREDTGFQKLVF

SEQ ID NO: 306828 - protein, 14 aa, Homo sapiens
  CDR3 for beta chain variable domain of TCR clone 153414 (TRBV6-1, TRBJ1-3)
CASVKGGGGNTIYF

SEQ ID NO: 306829 - protein, 13 aa, Homo sapiens
  CDR3 for alpha chain variable domain of TCR clone 153415 (TRAV21, TRAJ24)
GLMTTDSWGKLQF

SEQ ID NO: 306830 - protein, 12 aa, Homo sapiens
  CDR3 for beta chain variable domain of TCR clone 153415 (TRBV11-2, TRBJ2-7)
WASSPPADEQYF

SEQ ID NO: 306831 - protein, 15 aa, Homo sapiens
  CDR3 for alpha chain variable domain of TCR clone 153416 (TRAV12-1, TRAJ33)
CVVNGNLDSNYQLNW

SEQ ID NO: 306832 - protein, 13 aa, Homo sapiens
  CDR3 for beta chain variable domain of TCR clone 153416 (TRBV9, TRBJ2-7)
CASSKTGTYEHYF

SEQ ID NO: 306833 - protein, 13 aa, Homo sapiens
  CDR3 for alpha chain variable domain of TCR clone 153417 (TRAV3, TRAJ27)
CAVRPLGAGKSTF

SEQ ID NO: 306834 - protein, 12 aa, Homo sapiens
  CDR3 for beta chain variable domain of TCR clone 153417 (TRBV7-9, TRBJ2-3)
CQSPGSTDTQYF

SEQ ID NO: 306835 - protein, 14 aa, Homo sapiens
  CDR3 for alpha chain variable domain of TCR clone 153418 (TRAV13-2, TRAJ22)
CADGTLGSARQLTF

SEQ ID NO: 306836 - protein, 16 aa, Homo sapiens
  CDR3 for beta chain variable domain of TCR clone 153418 (TRBV19, TRBJ2-1)
CAISSKGTRSYNEQFF

SEQ ID NO: 306837 - protein, 16 aa, Homo sapiens
  CDR3 for alpha chain variable domain of TCR clone 153419 (TRAV12-3, TRAJ53)
CAMSVGSGGSNYKLTF

SEQ ID NO: 306838 - protein, 14 aa, Homo sapiens
  CDR3 for beta chain variable domain of TCR clone 153419 (TRBV12-5, TRBJ2-5)
CASGSRTHQETQYF

SEQ ID NO: 306839 - protein, 14 aa, Homo sapiens
  CDR3 for alpha chain variable domain of TCR clone 153420 (TRAV12-3, TRAJ10)
SHLPLTGGGNKLTF

SEQ ID NO: 306840 - protein, 13 aa, Homo sapiens
  CDR3 for beta chain variable domain of TCR clone 153420 (TRBV7-9, TRBJ2-7)
CASSAGLQYEQYF

SEQ ID NO: 306841 - protein, 16 aa, Homo sapiens
  CDR3 for alpha chain variable domain of TCR clone 153421 (TRAV23/DV6, )
CAEPDIQNPDHAVYQL

SEQ ID NO: 306842 - protein, 15 aa, Homo sapiens
  CDR3 for beta chain variable domain of TCR clone 153421 (TRBV12-4, TRBJ2-5)
CASTLNSGRGETQYF

SEQ ID NO: 306843 - protein, 13 aa, Homo sapiens
  CDR3 for alpha chain variable domain of TCR clone 153422 (TRAV8-3, TRAJ36)
CAVGATGANNLFL

SEQ ID NO: 306844 - protein, 16 aa, Homo sapiens
  CDR3 for beta chain variable domain of TCR clone 153422 (TRBV20-1, TRBJ1-4)
CSAPGQGLLTNEKLFF

SEQ ID NO: 306845 - protein, 14 aa, Homo sapiens
  CDR3 for alpha chain variable domain of TCR clone 153423 (TRAV8-3, TRAJ30)
CAVGDMNRVDKIIF

SEQ ID NO: 306846 - protein, 17 aa, Homo sapiens
  CDR3 for beta chain variable domain of TCR clone 153423 (TRBV19, TRBJ2-2)
CASSRNPGGFGTGELFF

SEQ ID NO: 306847 - protein, 15 aa, Homo sapiens
  CDR3 for alpha chain variable domain of TCR clone 153424 (TRAV4, TRAJ26)
CLVGDMNNYGQHFVF

SEQ ID NO: 306848 - protein, 16 aa, Homo sapiens
  CDR3 for beta chain variable domain of TCR clone 153424 (TRBV7-3, TRBJ2-2)
CASSLKRGTLSGELFF

SEQ ID NO: 306849 - protein, 15 aa, Homo sapiens
  CDR3 for alpha chain variable domain of TCR clone 153425 (TRAV8-3, TRAJ11)
CAVGLLNSGYSTLTF

SEQ ID NO: 306850 - protein, 15 aa, Homo sapiens
  CDR3 for beta chain variable domain of TCR clone 153425 (TRBV6-1, TRBJ2-4)
CASSEAVWTINIQYF

SEQ ID NO: 306851 - protein, 13 aa, Homo sapiens
  CDR3 for alpha chain variable domain of TCR clone 153426 (TRAV8-3, TRAJ28)
CAVCAVGSYQLTF

SEQ ID NO: 306852 - protein, 14 aa, Homo sapiens
  CDR3 for beta chain variable domain of TCR clone 153426 (TRBV7-2, TRBJ2-7)
CASRSQGAACEQYF

SEQ ID NO: 306853 - protein, 11 aa, Homo sapiens
  CDR3 for alpha chain variable domain of TCR clone 153427 (TRAV8-2, TRAJ26)
CVVTLLLGSEF

SEQ ID NO: 306854 - protein, 15 aa, Homo sapiens
  CDR3 for beta chain variable domain of TCR clone 153427 (TRBV11-2, TRBJ2-2)
GASSSDRVNAGELFF

SEQ ID NO: 306855 - protein, 13 aa, Homo sapiens
  CDR3 for alpha chain variable domain of TCR clone 153428 (TRAV2, TRAJ40)
CAVVPSGTYQYIF

SEQ ID NO: 306856 - protein, 14 aa, Homo sapiens
  CDR3 for beta chain variable domain of TCR clone 153428 (TRBV19, TRBJ2-1)
CASPTFVLSGEQFF

SEQ ID NO: 306857 - protein, 20 aa, Homo sapiens
  CDR3 for alpha chain variable domain of TCR clone 153429 (TRAV21, TRAJ35)
AASQPGDSATYRTRGNVLHC

SEQ ID NO: 306858 - protein, 13 aa, Homo sapiens
  CDR3 for beta chain variable domain of TCR clone 153429 (TRBV7-2, TRBJ2-5)
CQQLVRGGETQYF

SEQ ID NO: 306859 - protein, 18 aa, Homo sapiens
  CDR3 for alpha chain variable domain of TCR clone 153430 (TRAV1-1, TRAJ3)
CAVRFHSTGYSSASKIIF

SEQ ID NO: 306860 - protein, 15 aa, Homo sapiens
  CDR3 for beta chain variable domain of TCR clone 153430 (TRBV4-1, TRBJ1-4)
CASSDTGGTNEKLFF

SEQ ID NO: 306861 - protein, 14 aa, Homo sapiens
  CDR3 for alpha chain variable domain of TCR clone 153431 (TRAV17, TRAJ32)
CATDPGGATNKLIF

SEQ ID NO: 306862 - protein, 19 aa, Homo sapiens
  CDR3 for beta chain variable domain of TCR clone 153431 (TRBV7-9, TRBJ2-1)
CASSHNRGALLRSYNEQFF

SEQ ID NO: 306863 - protein, 13 aa, Homo sapiens
  CDR3 for alpha chain variable domain of TCR clone 153432 (TRAV23/DV6, TRAJ22)
CAPYSGSARQLTF

SEQ ID NO: 306864 - protein, 14 aa, Homo sapiens
  CDR3 for beta chain variable domain of TCR clone 153432 (TRBV7-2, TRBJ2-5)
CASSPRGSSETQYF

SEQ ID NO: 306865 - protein, 14 aa, Homo sapiens
  CDR3 for alpha chain variable domain of TCR clone 153433 (TRAV16, TRAJ15)
CALRPNQAGTALIF

SEQ ID NO: 306866 - protein, 15 aa, Homo sapiens
  CDR3 for beta chain variable domain of TCR clone 153433 (TRBV28, TRBJ2-5)
CASSPPWSYQETQYF

SEQ ID NO: 306867 - protein, 14 aa, Homo sapiens
  CDR3 for alpha chain variable domain of TCR clone 153434 (TRAV26-1, TRAJ38)
CIADNAGNNRKLIW

SEQ ID NO: 306868 - protein, 13 aa, Homo sapiens
  CDR3 for beta chain variable domain of TCR clone 153434 (TRBV7-9, TRBJ1-2)
CASSLKQNYGYAF

SEQ ID NO: 306869 - protein, 13 aa, Homo sapiens
  CDR3 for alpha chain variable domain of TCR clone 153435 (TRAV17, TRAJ34)
CATDRYKTDKLIF

SEQ ID NO: 306870 - protein, 15 aa, Homo sapiens
  CDR3 for beta chain variable domain of TCR clone 153435 (TRBV20-1, TRBJ2-3)
CSATGTSGFTDTQYF

SEQ ID NO: 306871 - protein, 17 aa, Homo sapiens
  CDR3 for alpha chain variable domain of TCR clone 153436 (TRAV13-1, TRAJ52)
CAAGRNAGGTSYGKLTF

SEQ ID NO: 306872 - protein, 15 aa, Homo sapiens
  CDR3 for beta chain variable domain of TCR clone 153436 (TRBV5-4, TRBJ2-2)
CASRAGGQGTGELFF

SEQ ID NO: 306873 - protein, 14 aa, Homo sapiens
  CDR3 for alpha chain variable domain of TCR clone 153437 (TRAV17, TRAJ22)
CATSPSGSARQLTF

SEQ ID NO: 306874 - protein, 17 aa, Homo sapiens
  CDR3 for beta chain variable domain of TCR clone 153437 (TRBV7-3, TRBJ2-3)
CASSLMKRMRGADTQYF

SEQ ID NO: 306875 - protein, 14 aa, Homo sapiens
  CDR3 for alpha chain variable domain of TCR clone 153438 (TRAV13-1, TRAJ20)
CAARPGSNDYKLSF

SEQ ID NO: 306876 - protein, 12 aa, Homo sapiens
  CDR3 for beta chain variable domain of TCR clone 153438 (TRBV14, TRBJ2-7)
CASSLYKDEQYF

SEQ ID NO: 306877 - protein, 16 aa, Homo sapiens
  CDR3 for alpha chain variable domain of TCR clone 153439 (TRAV3, TRAJ37)
CAVRPHGSGNTGKLIS

SEQ ID NO: 306878 - protein, 14 aa, Homo sapiens
  CDR3 for beta chain variable domain of TCR clone 153439 (TRBV19, TRBJ2-1)
CASPTFVLSGEQFF

SEQ ID NO: 306879 - protein, 13 aa, Homo sapiens
  CDR3 for alpha chain variable domain of TCR clone 153440 (TRAV8-3, TRAJ6)
CAVASGGSYIPTF

SEQ ID NO: 306880 - protein, 14 aa, Homo sapiens
  CDR3 for beta chain variable domain of TCR clone 153440 (TRBV11-2, TRBJ1-1)
CASSTQRGRTEAFF

SEQ ID NO: 306881 - protein, 14 aa, Homo sapiens
  CDR3 for alpha chain variable domain of TCR clone 153441 (TRAV12-2, TRAJ9)
CAVNALEGGFKTIF

SEQ ID NO: 306882 - protein, 14 aa, Homo sapiens
  CDR3 for beta chain variable domain of TCR clone 153441 (TRBV19, TRBJ2-7)
CASTVQGRPYEQYF

SEQ ID NO: 306883 - protein, 10 aa, Homo sapiens
  CDR3 for alpha chain variable domain of TCR clone 153442 (TRAV30, TRAJ48)
CGIGNEKLTF

SEQ ID NO: 306884 - protein, 16 aa, Homo sapiens
  CDR3 for beta chain variable domain of TCR clone 153442 (TRBV4-2, TRBJ2-3)
CASSQELAGDTDTQYF

SEQ ID NO: 306885 - protein, 15 aa, Homo sapiens
  CDR3 for alpha chain variable domain of TCR clone 153443 (TRAV17, TRAJ57)
CATGPSQGGSEKLVF

SEQ ID NO: 306886 - protein, 16 aa, Homo sapiens
  CDR3 for beta chain variable domain of TCR clone 153443 (TRBV5-1, TRBJ1-1)
CASSSGGNSLNTEAFF

SEQ ID NO: 306887 - protein, 15 aa, Homo sapiens
  CDR3 for alpha chain variable domain of TCR clone 153444 (TRAV17, TRAJ23)
CATDAEDNQGGKLIF

SEQ ID NO: 306888 - protein, 16 aa, Homo sapiens
  CDR3 for beta chain variable domain of TCR clone 153444 (TRBV19, TRBJ1-1)
CASSPTRFWPGTEAFF

SEQ ID NO: 306889 - protein, 13 aa, Homo sapiens
  CDR3 for alpha chain variable domain of TCR clone 153445 (TRAV8-1, TRAJ23)
CAWRDNQGGKLIF

SEQ ID NO: 306890 - protein, 16 aa, Homo sapiens
  CDR3 for beta chain variable domain of TCR clone 153445 (TRBV20-1, TRBJ2-1)
CSARDLKQGMNNEQFF

SEQ ID NO: 306891 - protein, 14 aa, Homo sapiens
  CDR3 for alpha chain variable domain of TCR clone 153446 (TRAV26-1, TRAJ45)
CIVRVVGGVDGLTF

SEQ ID NO: 306892 - protein, 16 aa, Homo sapiens
  CDR3 for beta chain variable domain of TCR clone 153446 (TRBV7-9, TRBJ1-1)
CASSLTQVRSNTEAFF

SEQ ID NO: 306893 - protein, 14 aa, Homo sapiens
  CDR3 for alpha chain variable domain of TCR clone 153447 (TRAV16, TRAJ54)
CALSGVQGAQKLAF

SEQ ID NO: 306894 - protein, 15 aa, Homo sapiens
  CDR3 for beta chain variable domain of TCR clone 153447 (TRBV18, TRBJ2-2)
CASSTSGLHTGELFF

SEQ ID NO: 306895 - protein, 14 aa, Homo sapiens
  CDR3 for alpha chain variable domain of TCR clone 153448 (TRAV12-3, TRAJ10)
SHLPLTGGGNNLTF

SEQ ID NO: 306896 - protein, 13 aa, Homo sapiens
  CDR3 for beta chain variable domain of TCR clone 153448 (TRBV12-5, TRBJ2-3)
CASGDRQSDTQYF

SEQ ID NO: 306897 - protein, 13 aa, Homo sapiens
  CDR3 for alpha chain variable domain of TCR clone 153449 (TRAV12-1, TRAJ3)
CVLNPRGSSKIIF

SEQ ID NO: 306898 - protein, 13 aa, Homo sapiens
  CDR3 for beta chain variable domain of TCR clone 153449 (TRBV28, TRBJ1-5)
CASSDRGNQPQHF

SEQ ID NO: 306899 - protein, 15 aa, Homo sapiens
  CDR3 for alpha chain variable domain of TCR clone 153450 (TRAV17, TRAJ23)
CATDAEDNQGGKLIF

SEQ ID NO: 306900 - protein, 20 aa, Homo sapiens
  CDR3 for beta chain variable domain of TCR clone 153450 (TRBV7-8, TRBJ2-2)
CASSHLFPGPTIHITGELFF

SEQ ID NO: 306901 - protein, 13 aa, Homo sapiens
  CDR3 for alpha chain variable domain of TCR clone 153451 (TRAV8-3, TRAJ44)
CAVVPGTASKLTF

SEQ ID NO: 306902 - protein, 15 aa, Homo sapiens
  CDR3 for beta chain variable domain of TCR clone 153451 (TRBV11-2, TRBJ1-2)
CASSLEGVQRNGYTF

SEQ ID NO: 306903 - protein, 15 aa, Homo sapiens
  CDR3 for alpha chain variable domain of TCR clone 153452 (TRAV26-2, TRAJ28)
CILVESGAGSYQLTF

SEQ ID NO: 306904 - protein, 11 aa, Homo sapiens
  CDR3 for beta chain variable domain of TCR clone 153452 (TRBV25-1, TRBJ2-7)
CASSASYEQYF

SEQ ID NO: 306905 - protein, 13 aa, Homo sapiens
  CDR3 for alpha chain variable domain of TCR clone 153453 (TRAV2, TRAJ40)
CAVVTSGTYKYIF

SEQ ID NO: 306906 - protein, 14 aa, Homo sapiens
  CDR3 for beta chain variable domain of TCR clone 153453 (TRBV19, TRBJ2-1)
CSSPTFVVSGEQFF

SEQ ID NO: 306907 - protein, 13 aa, Homo sapiens
  CDR3 for alpha chain variable domain of TCR clone 153454 (TRAV12-1, TRAJ20)
CVVNVPNDYKLSF

SEQ ID NO: 306908 - protein, 16 aa, Homo sapiens
  CDR3 for beta chain variable domain of TCR clone 153454 (TRBV19, TRBJ2-2)
CASTRGSGGATGELFF

SEQ ID NO: 306909 - protein, 13 aa, Homo sapiens
  CDR3 for alpha chain variable domain of TCR clone 153455 (TRAV20, TRAJ37)
CAVYSGNTGKLIF

SEQ ID NO: 306910 - protein, 15 aa, Homo sapiens
  CDR3 for beta chain variable domain of TCR clone 153455 (TRBV27, TRBJ2-1)
CASSNGGGSSNEQFF

SEQ ID NO: 306911 - protein, 12 aa, Homo sapiens
  CDR3 for alpha chain variable domain of TCR clone 153456 (TRAV3, TRAJ17)
CAVTAAGNKLTF

SEQ ID NO: 306912 - protein, 15 aa, Homo sapiens
  CDR3 for beta chain variable domain of TCR clone 153456 (TRBV9, TRBJ1-6)
CASSVAGTGDSPLHF

SEQ ID NO: 306913 - protein, 17 aa, Homo sapiens
  CDR3 for alpha chain variable domain of TCR clone 153457 (TRAV17, TRAJ28)
CATDPRRGGAGSYQLTF

SEQ ID NO: 306914 - protein, 16 aa, Homo sapiens
  CDR3 for beta chain variable domain of TCR clone 153457 (TRBV7-3, TRBJ2-2)
CASSLKRGTLSGELFF

SEQ ID NO: 306915 - protein, 12 aa, Homo sapiens
  CDR3 for alpha chain variable domain of TCR clone 153458 (TRAV13-1, TRAJ48)
CAANFGNEKLTF

SEQ ID NO: 306916 - protein, 14 aa, Homo sapiens
  CDR3 for beta chain variable domain of TCR clone 153458 (TRBV7-2, TRBJ2-5)
CASSRRGSSETQYF

SEQ ID NO: 306917 - protein, 13 aa, Homo sapiens
  CDR3 for alpha chain variable domain of TCR clone 153459 (TRAV4, TRAJ42)
CLVGGGSQGNLIF

SEQ ID NO: 306918 - protein, 14 aa, Homo sapiens
  CDR3 for beta chain variable domain of TCR clone 153459 (TRBV12-5, TRBJ2-5)
CASGSRTHQETQYF

SEQ ID NO: 306919 - protein, 12 aa, Homo sapiens
  CDR3 for alpha chain variable domain of TCR clone 153460 (TRAV12-2, TRAJ3)
CAVWSSASKIIF

SEQ ID NO: 306920 - protein, 12 aa, Homo sapiens
  CDR3 for beta chain variable domain of TCR clone 153460 (TRBV11-2, TRBJ2-1)
CASSPGKNEQFF

SEQ ID NO: 306921 - protein, 13 aa, Homo sapiens
  CDR3 for alpha chain variable domain of TCR clone 153461 (TRAV13-1, TRAJ10)
CAATLGGGNKLTF

SEQ ID NO: 306922 - protein, 15 aa, Homo sapiens
  CDR3 for beta chain variable domain of TCR clone 153461 (TRBV13, TRBJ1-2)
CASSLGRQPGYGYTF

SEQ ID NO: 306923 - protein, 17 aa, Homo sapiens
  CDR3 for alpha chain variable domain of TCR clone 153462 (TRAV3, TRAJ6)
CAVRDGPRAVGSYIPTF

SEQ ID NO: 306924 - protein, 14 aa, Homo sapiens
  CDR3 for beta chain variable domain of TCR clone 153462 (TRBV7-2, TRBJ2-7)
CASSPKTSSYEQYF

SEQ ID NO: 306925 - protein, 14 aa, Homo sapiens
  CDR3 for alpha chain variable domain of TCR clone 153463 (TRAV12-1, TRAJ30)
CVVNIGGRDDKIIF

SEQ ID NO: 306926 - protein, 15 aa, Homo sapiens
  CDR3 for beta chain variable domain of TCR clone 153463 (TRBV18, TRBJ1-2)
CASLPSNTPNYGYTF

SEQ ID NO: 306927 - protein, 11 aa, Homo sapiens
  CDR3 for alpha chain variable domain of TCR clone 153464 (TRAV27, TRAJ47)
CAGASGNKLVF

SEQ ID NO: 306928 - protein, 17 aa, Homo sapiens
  CDR3 for beta chain variable domain of TCR clone 153464 (TRBV7-8, TRBJ2-6)
CASSAGTGGAGANVLTF

SEQ ID NO: 306929 - protein, 18 aa, Homo sapiens
  CDR3 for alpha chain variable domain of TCR clone 153465 (TRAV38-2/DV8, TRAJ42)
CAYRSADLTGGSQGNLIF

SEQ ID NO: 306930 - protein, 12 aa, Homo sapiens
  CDR3 for beta chain variable domain of TCR clone 153465 (TRBV11-2, TRBJ2-2)
CASSLGGGELLF

SEQ ID NO: 306931 - protein, 14 aa, Homo sapiens
  CDR3 for alpha chain variable domain of TCR clone 153466 (TRAV25, TRAJ52)
CRASWCTSYGKLTF

SEQ ID NO: 306932 - protein, 17 aa, Homo sapiens
  CDR3 for beta chain variable domain of TCR clone 153466 (TRBV7-8, TRBJ2-6)
CASSAGTGGAGANVLTF

SEQ ID NO: 306933 - protein, 15 aa, Homo sapiens
  CDR3 for alpha chain variable domain of TCR clone 153467 (TRAV3, TRAJ36)
CAVRASQTGANNLFF

SEQ ID NO: 306934 - protein, 14 aa, Homo sapiens
  CDR3 for beta chain variable domain of TCR clone 153467 (TRBV4-2, TRBJ2-7)
CASSLAGGSYEQYF

SEQ ID NO: 306935 - protein, 14 aa, Homo sapiens
  CDR3 for alpha chain variable domain of TCR clone 153468 (TRAV26-1, TRAJ21)
CIAHTTSTNLTLDL

SEQ ID NO: 306936 - protein, 15 aa, Homo sapiens
  CDR3 for beta chain variable domain of TCR clone 153468 (TRBV20-1, TRBJ2-7)
CSARDRVSGMDEQYF

SEQ ID NO: 306937 - protein, 18 aa, Homo sapiens
  CDR3 for alpha chain variable domain of TCR clone 153469 (TRAV38-1, TRAJ8)
CDVFLCFSMNTGFQKLVF

SEQ ID NO: 306938 - protein, 14 aa, Homo sapiens
  CDR3 for beta chain variable domain of TCR clone 153469 (TRBV4-1, TRBJ2-3)
CASSQEGSTDTKYF

SEQ ID NO: 306939 - protein, 12 aa, Homo sapiens
  CDR3 for alpha chain variable domain of TCR clone 153470 (TRAV1-1, TRAJ39)
CAVPVVGNMLTS

SEQ ID NO: 306940 - protein, 15 aa, Homo sapiens
  CDR3 for beta chain variable domain of TCR clone 153470 (TRBV7-3, TRBJ2-2)
CASSETGQGTGELFF

SEQ ID NO: 306941 - protein, 12 aa, Homo sapiens
  CDR3 for alpha chain variable domain of TCR clone 153471 (TRAV8-3, TRAJ37)
FAVVGNTGKLIF

SEQ ID NO: 306942 - protein, 17 aa, Homo sapiens
  CDR3 for beta chain variable domain of TCR clone 153471 (TRBV12-4, TRBJ2-3)
CASSSGLAGGHFDTQYF

SEQ ID NO: 306943 - protein, 14 aa, Homo sapiens
  CDR3 for alpha chain variable domain of TCR clone 153472 (TRAV25, TRAJ27)
CAGPGNTNAGKSTF

SEQ ID NO: 306944 - protein, 16 aa, Homo sapiens
  CDR3 for beta chain variable domain of TCR clone 153472 (TRBV4-1, TRBJ2-6)
CASSQDGGPAANVLTF

SEQ ID NO: 306945 - protein, 16 aa, Homo sapiens
  CDR3 for alpha chain variable domain of TCR clone 153473 (TRAV1-2, TRAJ10)
CAVRGVLTGGGNKLTF

SEQ ID NO: 306946 - protein, 15 aa, Homo sapiens
  CDR3 for beta chain variable domain of TCR clone 153473 (TRBV10-3, TRBJ1-2)
CAITVTGGWDYGYTF

SEQ ID NO: 306947 - protein, 13 aa, Homo sapiens
  CDR3 for alpha chain variable domain of TCR clone 153474 (TRAV17, TRAJ39)
CATDYGAGNMLTF

SEQ ID NO: 306948 - protein, 11 aa, Homo sapiens
  CDR3 for beta chain variable domain of TCR clone 153474 (TRBV7-2, TRBJ2-2)
CASSADRRKRR

SEQ ID NO: 306949 - protein, 13 aa, Homo sapiens
  CDR3 for alpha chain variable domain of TCR clone 153475 (TRAV3, TRAJ36)
CAVKRTGANNLFF

SEQ ID NO: 306950 - protein, 18 aa, Homo sapiens
  CDR3 for beta chain variable domain of TCR clone 153475 (TRBV7-9, TRBJ2-3)
CASSLPINGQISTDTQYF

SEQ ID NO: 306951 - protein, 12 aa, Homo sapiens
  CDR3 for alpha chain variable domain of TCR clone 153476 (TRAV13-1, TRAJ42)
VNYGGSQGNLIF

SEQ ID NO: 306952 - protein, 12 aa, Homo sapiens
  CDR3 for beta chain variable domain of TCR clone 153476 (TRBV7-9, TRBJ2-7)
CASSIEGYEHYF

SEQ ID NO: 306953 - protein, 16 aa, Homo sapiens
  CDR3 for alpha chain variable domain of TCR clone 153477 (TRAV26-1, TRAJ32)
CIVRTNYGGATNKLIF

SEQ ID NO: 306954 - protein, 15 aa, Homo sapiens
  CDR3 for beta chain variable domain of TCR clone 153477 (TRBV28, TRBJ2-1)
CASSIIAGGRSEQFF

SEQ ID NO: 306955 - protein, 15 aa, Homo sapiens
  CDR3 for alpha chain variable domain of TCR clone 153478 (TRAV2, TRAJ22)
CAVPSRGGSARQLTF

SEQ ID NO: 306956 - protein, 13 aa, Homo sapiens
  CDR3 for beta chain variable domain of TCR clone 153478 (TRBV27, TRBJ2-1)
CASSSGSYNEQFF

SEQ ID NO: 306957 - protein, 14 aa, Homo sapiens
  CDR3 for alpha chain variable domain of TCR clone 153479 (TRAV26-1, TRAJ48)
CIVRVPFGNEKLTF

SEQ ID NO: 306958 - protein, 16 aa, Homo sapiens
  CDR3 for beta chain variable domain of TCR clone 153479 (TRBV18, TRBJ2-1)
CASSPYLSIREDEQFF

SEQ ID NO: 306959 - protein, 11 aa, Homo sapiens
  CDR3 for alpha chain variable domain of TCR clone 153480 (TRAV12-3, TRAJ43)
CAMSVSNDMRF

SEQ ID NO: 306960 - protein, 12 aa, Homo sapiens
  CDR3 for beta chain variable domain of TCR clone 153480 (TRBV20-1, TRBJ1-2)
CSAPGFNYGYTF

SEQ ID NO: 306961 - protein, 14 aa, Homo sapiens
  CDR3 for alpha chain variable domain of TCR clone 153481 (TRAV17, TRAJ15)
CATDGGQAGTALIF

SEQ ID NO: 306962 - protein, 14 aa, Homo sapiens
  CDR3 for beta chain variable domain of TCR clone 153481 (TRBV6-1, TRBJ1-3)
CASVQGGGGNTIYF

SEQ ID NO: 306963 - protein, 15 aa, Homo sapiens
  CDR3 for alpha chain variable domain of TCR clone 153482 (TRAV8-6, TRAJ6)
GAVSFTSGGSYIPTF

SEQ ID NO: 306964 - protein, 13 aa, Homo sapiens
  CDR3 for beta chain variable domain of TCR clone 153482 (TRBV29-1, TRBJ2-1)
CSVEGGRVNEQFF

SEQ ID NO: 306965 - protein, 13 aa, Homo sapiens
  CDR3 for alpha chain variable domain of TCR clone 153483 (TRAV13-1, TRAJ5)
CAARVTGRRALTF

SEQ ID NO: 306966 - protein, 12 aa, Homo sapiens
  CDR3 for beta chain variable domain of TCR clone 153483 (TRBV7-9, TRBJ1-1)
CASSLEGTEAFF

SEQ ID NO: 306967 - protein, 12 aa, Homo sapiens
  CDR3 for alpha chain variable domain of TCR clone 153484 (TRAV38-1, TRAJ20)
CAFIWNDYMLSF

SEQ ID NO: 306968 - protein, 14 aa, Homo sapiens
  CDR3 for beta chain variable domain of TCR clone 153484 (TRBV27, TRBJ1-1)
CASSPQGKRAEAFF

SEQ ID NO: 306969 - protein, 12 aa, Homo sapiens
  CDR3 for alpha chain variable domain of TCR clone 153485 (TRAV12-3, TRAJ17)
CAMTLTGNKLTF

SEQ ID NO: 306970 - protein, 15 aa, Homo sapiens
  CDR3 for beta chain variable domain of TCR clone 153485 (TRBV20-1, TRBJ2-7)
CSARDRVSRMDEQCF

SEQ ID NO: 306971 - protein, 14 aa, Homo sapiens
  CDR3 for alpha chain variable domain of TCR clone 153486 (TRAV3, TRAJ22)
CAVRDYGSARQLTF

SEQ ID NO: 306972 - protein, 17 aa, Homo sapiens
  CDR3 for beta chain variable domain of TCR clone 153486 (TRBV11-2, TRBJ2-5)
CASGHGAKETRTSGQAR

SEQ ID NO: 306973 - protein, 15 aa, Homo sapiens
  CDR3 for alpha chain variable domain of TCR clone 153487 (TRAV1-2, TRAJ17)
CAVRGYGAARNKLTF

SEQ ID NO: 306974 - protein, 23 aa, Homo sapiens
  CDR3 for beta chain variable domain of TCR clone 153487 (TRBV11-2, TRBJ2-5)
CASSSPGGEGAASRDPVLRARHA

SEQ ID NO: 306975 - protein, 15 aa, Homo sapiens
  CDR3 for alpha chain variable domain of TCR clone 153488 (TRAV27, TRAJ38)
CAVRRNAGNSRKLIW

SEQ ID NO: 306976 - protein, 13 aa, Homo sapiens
  CDR3 for beta chain variable domain of TCR clone 153488 (TRBV12-5, TRBJ2-3)
CASGDRQSDTQYF

SEQ ID NO: 306977 - protein, 17 aa, Homo sapiens
  CDR3 for alpha chain variable domain of TCR clone 153489 (TRAV1-2, TRAJ27)
CAVRDKTGDTNAGKSTF

SEQ ID NO: 306978 - protein, 13 aa, Homo sapiens
  CDR3 for beta chain variable domain of TCR clone 153489 (TRBV7-3, TRBJ2-5)
CASSFRGGETQYF

SEQ ID NO: 306979 - protein, 10 aa, Homo sapiens
  CDR3 for alpha chain variable domain of TCR clone 153490 (TRAV13-2, TRAJ49)
CADTGNQFYF

SEQ ID NO: 306980 - protein, 14 aa, Homo sapiens
  CDR3 for beta chain variable domain of TCR clone 153490 (TRBV7-3, TRBJ2-1)
CASSLAGGTNEQFF

SEQ ID NO: 306981 - protein, 16 aa, Homo sapiens
  CDR3 for alpha chain variable domain of TCR clone 153491 (TRAV30, TRAJ24)
CGTEIVDADSWGKFQF

SEQ ID NO: 306982 - protein, 17 aa, Homo sapiens
  CDR3 for beta chain variable domain of TCR clone 153491 (TRBV20-1, TRBJ2-1)
CSARDRRRASAYNEQFF

SEQ ID NO: 306983 - protein, 16 aa, Homo sapiens
  CDR3 for alpha chain variable domain of TCR clone 153492 (TRAV3, TRAJ37)
CAVRGKGSGNTGKLIF

SEQ ID NO: 306984 - protein, 13 aa, Homo sapiens
  CDR3 for beta chain variable domain of TCR clone 153492 (TRBV15, TRBJ2-1)
CVSPAEVDTAQFF

SEQ ID NO: 306985 - protein, 12 aa, Homo sapiens
  CDR3 for alpha chain variable domain of TCR clone 153493 (TRAV12-3, TRAJ5)
CAMDTARRALTF

SEQ ID NO: 306986 - protein, 13 aa, Homo sapiens
  CDR3 for beta chain variable domain of TCR clone 153493 (TRBV7-7, TRBJ2-2)
CASSLTSAGELFF

SEQ ID NO: 306987 - protein, 15 aa, Homo sapiens
  CDR3 for alpha chain variable domain of TCR clone 153494 (TRAV23/DV6, TRAJ18)
CAARYRGPTLGRLYF

SEQ ID NO: 306988 - protein, 14 aa, Homo sapiens
  CDR3 for beta chain variable domain of TCR clone 153494 (TRBV6-1, TRBJ1-3)
CASVQGGGGNTIYF

SEQ ID NO: 306989 - protein, 16 aa, Homo sapiens
  CDR3 for alpha chain variable domain of TCR clone 153495 (TRAV8-4, TRAJ45)
CAVSAGVGGGADGLTF

SEQ ID NO: 306990 - protein, 14 aa, Homo sapiens
  CDR3 for beta chain variable domain of TCR clone 153495 (TRBV6-1, TRBJ1-3)
CARVQGGGGNTIYF

SEQ ID NO: 306991 - protein, 13 aa, Homo sapiens
  CDR3 for alpha chain variable domain of TCR clone 153496 (TRAV25, TRAJ30)
CAGRVDRDDKIIF

SEQ ID NO: 306992 - protein, 13 aa, Homo sapiens
  CDR3 for beta chain variable domain of TCR clone 153496 (TRBV29-1, TRBJ1-1)
CSVGDSRNTEAFF

SEQ ID NO: 306993 - protein, 11 aa, Homo sapiens
  CDR3 for alpha chain variable domain of TCR clone 153497 (TRAV27, TRAJ47)
SIVEYGNKLVF

SEQ ID NO: 306994 - protein, 18 aa, Homo sapiens
  CDR3 for beta chain variable domain of TCR clone 153497 (TRBV2, TRBJ2-1)
CASRGLAGGPRSYNEQFF

SEQ ID NO: 306995 - protein, 15 aa, Homo sapiens
  CDR3 for alpha chain variable domain of TCR clone 153498 (TRAV38-2/DV8, TRAJ45)
GAYWDSGGGADGLTF

SEQ ID NO: 306996 - protein, 15 aa, Homo sapiens
  CDR3 for beta chain variable domain of TCR clone 153498 (TRBV20-1, TRBJ2-7)
CSARDRVSGMDEQYF

SEQ ID NO: 306997 - protein, 11 aa, Homo sapiens
  CDR3 for alpha chain variable domain of TCR clone 153499 (TRAV35, TRAJ30)
CDGERDDKIIF

SEQ ID NO: 306998 - protein, 14 aa, Homo sapiens
  CDR3 for beta chain variable domain of TCR clone 153499 (TRBV15, TRBJ2-5)
CATSGDRGQETQYF

SEQ ID NO: 306999 - protein, 13 aa, Homo sapiens
  CDR3 for alpha chain variable domain of TCR clone 153500 (TRAV2, TRAJ40)
CAVVTSGTYKYIF

SEQ ID NO: 307000 - protein, 15 aa, Homo sapiens
  CDR3 for beta chain variable domain of TCR clone 153500 (TRBV11-3, TRBJ2-3)
CASLKDMREGDTQYF

SEQ ID NO: 307001 - protein, 13 aa, Homo sapiens
  CDR3 for alpha chain variable domain of TCR clone 153501 (TRAV12-1, TRAJ34)
CVVTGYNTDKLIF

SEQ ID NO: 307002 - protein, 13 aa, Homo sapiens
  CDR3 for beta chain variable domain of TCR clone 153501 (TRBV28, TRBJ2-7)
CASKSGGVYEQYF

SEQ ID NO: 307003 - protein, 16 aa, Homo sapiens
  CDR3 for alpha chain variable domain of TCR clone 153502 (TRAV8-3, TRAJ10)
CAVGPILTGGGNKLTF

SEQ ID NO: 307004 - protein, 16 aa, Homo sapiens
  CDR3 for beta chain variable domain of TCR clone 153502 (TRBV7-2, TRBJ2-5)
CASSSKWLSGQETQYY

SEQ ID NO: 307005 - protein, 14 aa, Homo sapiens
  CDR3 for alpha chain variable domain of TCR clone 153503 (TRAV17, TRAJ54)
CATDANQGAQKLVF

SEQ ID NO: 307006 - protein, 15 aa, Homo sapiens
  CDR3 for beta chain variable domain of TCR clone 153503 (TRBV6-5, TRBJ2-7)
CASSYSTSGNYEQYF

SEQ ID NO: 307007 - protein, 14 aa, Homo sapiens
  CDR3 for alpha chain variable domain of TCR clone 153504 (TRAV4, TRAJ12)
CLVGYTDSSYKLIF

SEQ ID NO: 307008 - protein, 14 aa, Homo sapiens
  CDR3 for beta chain variable domain of TCR clone 153504 (TRBV27, TRBJ1-1)
CASSPGGGATEAFF

SEQ ID NO: 307009 - protein, 13 aa, Homo sapiens
  CDR3 for alpha chain variable domain of TCR clone 153505 (TRAV2, TRAJ40)
CAVVTSGTYKYIF

SEQ ID NO: 307010 - protein, 13 aa, Homo sapiens
  CDR3 for beta chain variable domain of TCR clone 153505 (TRBV7-2, TRBJ2-2)
CASGLAVTGELFF

SEQ ID NO: 307011 - protein, 13 aa, Homo sapiens
  CDR3 for alpha chain variable domain of TCR clone 153506 (TRAV2, TRAJ40)
CAVVSSGTYKYTF

SEQ ID NO: 307012 - protein, 15 aa, Homo sapiens
  CDR3 for beta chain variable domain of TCR clone 153506 (TRBV11-3, TRBJ2-3)
CASLKDGREGDTQYF

SEQ ID NO: 307013 - protein, 11 aa, Homo sapiens
  CDR3 for alpha chain variable domain of TCR clone 153507 (TRAV4, TRAJ31)
CLVGDNDRLMF

SEQ ID NO: 307014 - protein, 16 aa, Homo sapiens
  CDR3 for beta chain variable domain of TCR clone 153507 (TRBV7-2, TRBJ2-5)
CVSSSKWLSGQETQYF

SEQ ID NO: 307015 - protein, 12 aa, Homo sapiens
  CDR3 for alpha chain variable domain of TCR clone 153508 (TRAV17, TRAJ30)
CATDARDDKIIF

SEQ ID NO: 307016 - protein, 16 aa, Homo sapiens
  CDR3 for beta chain variable domain of TCR clone 153508 (TRBV5-6, TRBJ2-7)
CASSTTSGRDLDEQYF

SEQ ID NO: 307017 - protein, 16 aa, Homo sapiens
  CDR3 for alpha chain variable domain of TCR clone 153509 (TRAV13-1, TRAJ37)
CAASSLGSSNTGKLIF

SEQ ID NO: 307018 - protein, 15 aa, Homo sapiens
  CDR3 for beta chain variable domain of TCR clone 153509 (TRBV7-9, TRBJ1-5)
CASSQGHQPNQPQHF

SEQ ID NO: 307019 - protein, 13 aa, Homo sapiens
  CDR3 for alpha chain variable domain of TCR clone 153510 (TRAV38-1, TRAJ42)
CARWGGSQGNLIF

SEQ ID NO: 307020 - protein, 14 aa, Homo sapiens
  CDR3 for beta chain variable domain of TCR clone 153510 (TRBV12-4, TRBJ2-1)
CASSVGQGASEQFF

SEQ ID NO: 307021 - protein, 11 aa, Homo sapiens
  CDR3 for alpha chain variable domain of TCR clone 153511 (TRAV2, TRAJ23)
CAVETQGKLIF

SEQ ID NO: 307022 - protein, 14 aa, Homo sapiens
  CDR3 for beta chain variable domain of TCR clone 153511 (TRBV2, TRBJ2-3)
FASSEGQNTDTQYF

SEQ ID NO: 307023 - protein, 15 aa, Homo sapiens
  CDR3 for alpha chain variable domain of TCR clone 153512 (TRAV29/DV5, TRAJ12)
CAAAPRMDSSYKLIF

SEQ ID NO: 307024 - protein, 14 aa, Homo sapiens
  CDR3 for beta chain variable domain of TCR clone 153512 (TRBV6-1, TRBJ1-3)
CASVQGGGGNTIYF

SEQ ID NO: 307025 - protein, 14 aa, Homo sapiens
  CDR3 for alpha chain variable domain of TCR clone 153513 (TRAV17, TRAJ57)
CATDPQGGSEKLGF

SEQ ID NO: 307026 - protein, 14 aa, Homo sapiens
  CDR3 for beta chain variable domain of TCR clone 153513 (TRBV11-2, TRBJ2-5)
CASSRTGGIETQYF

SEQ ID NO: 307027 - protein, 17 aa, Homo sapiens
  CDR3 for alpha chain variable domain of TCR clone 153514 (TRAV3, TRAJ6)
CAVSRRTDTGGSYIPTF

SEQ ID NO: 307028 - protein, 18 aa, Homo sapiens
  CDR3 for beta chain variable domain of TCR clone 153514 (TRBV7-2, TRBJ2-3)
CASSLEASRGRKAYTQYF

SEQ ID NO: 307029 - protein, 12 aa, Homo sapiens
  CDR3 for alpha chain variable domain of TCR clone 153515 (TRAV2, TRAJ32)
CAVGGATNKLIF

SEQ ID NO: 307030 - protein, 16 aa, Homo sapiens
  CDR3 for beta chain variable domain of TCR clone 153515 (TRBV2, TRBJ2-1)
CASSVGGSLSYNEQFF

SEQ ID NO: 307031 - protein, 13 aa, Homo sapiens
  CDR3 for alpha chain variable domain of TCR clone 153516 (TRAV20, TRAJ34)
CAVHLHNTDKLIF

SEQ ID NO: 307032 - protein, 16 aa, Homo sapiens
  CDR3 for beta chain variable domain of TCR clone 153516 (TRBV7-2, TRBJ1-2)
CASSSNQDRRGHGYTF

SEQ ID NO: 307033 - protein, 12 aa, Homo sapiens
  CDR3 for alpha chain variable domain of TCR clone 153517 (TRAV20, TRAJ56)
CAVTGVNSKLTF

SEQ ID NO: 307034 - protein, 14 aa, Homo sapiens
  CDR3 for beta chain variable domain of TCR clone 153517 (TRBV20-1, TRBJ2-5)
CSALVPGYQETQYF

SEQ ID NO: 307035 - protein, 12 aa, Homo sapiens
  CDR3 for alpha chain variable domain of TCR clone 153518 (TRAV27, TRAJ35)
CAGADFGNGLHC

SEQ ID NO: 307036 - protein, 15 aa, Homo sapiens
  CDR3 for beta chain variable domain of TCR clone 153518 (TRBV19, TRBJ2-1)
CASSISSGGYNEQFF

SEQ ID NO: 307037 - protein, 14 aa, Homo sapiens
  CDR3 for alpha chain variable domain of TCR clone 153519 (TRAV1-2, TRAJ8)
CAVREDTGFQKLVF

SEQ ID NO: 307038 - protein, 14 aa, Homo sapiens
  CDR3 for beta chain variable domain of TCR clone 153519 (TRBV4-3, TRBJ1-5)
CASSQGGQGWPQHF

SEQ ID NO: 307039 - protein, 14 aa, Homo sapiens
  CDR3 for alpha chain variable domain of TCR clone 153520 (TRAV13-1, TRAJ44)
CASRGGGTASKLTF

SEQ ID NO: 307040 - protein, 14 aa, Homo sapiens
  CDR3 for beta chain variable domain of TCR clone 153520 (TRBV7-2, TRBJ2-5)
CASSPRGSSETQYF

SEQ ID NO: 307041 - protein, 15 aa, Homo sapiens
  CDR3 for alpha chain variable domain of TCR clone 153521 (TRAV27, TRAJ38)
CAARRNAGNNRKLLW

SEQ ID NO: 307042 - protein, 17 aa, Homo sapiens
  CDR3 for beta chain variable domain of TCR clone 153521 (TRBV20-1, TRBJ2-2)
CSASGSGQGGLTGELFF

SEQ ID NO: 307043 - protein, 15 aa, Homo sapiens
  CDR3 for alpha chain variable domain of TCR clone 153522 (TRAV12-2, TRAJ23)
CAVNTLYNQGGKLIF

SEQ ID NO: 307044 - protein, 15 aa, Homo sapiens
  CDR3 for beta chain variable domain of TCR clone 153522 (TRBV9, TRBJ2-6)
CASSVALAGANVLTF

SEQ ID NO: 307045 - protein, 14 aa, Homo sapiens
  CDR3 for alpha chain variable domain of TCR clone 153523 (TRAV12-1, TRAJ12)
CVVTRMDSSYKLIF

SEQ ID NO: 307046 - protein, 17 aa, Homo sapiens
  CDR3 for beta chain variable domain of TCR clone 153523 (TRBV7-8, TRBJ2-6)
CASSAGTGGAGANVLTF

SEQ ID NO: 307047 - protein, 15 aa, Homo sapiens
  CDR3 for alpha chain variable domain of TCR clone 153524 (TRAV8-3, TRAJ27)
CAVGPSKTNAGKSTF

SEQ ID NO: 307048 - protein, 16 aa, Homo sapiens
  CDR3 for beta chain variable domain of TCR clone 153524 (TRBV7-9, TRBJ1-2)
CASSLGFSSGEDGYTF

SEQ ID NO: 307049 - protein, 15 aa, Homo sapiens
  CDR3 for alpha chain variable domain of TCR clone 153525 (TRAV23/DV6, TRAJ33)
CAASNSGGGNYQLIW

SEQ ID NO: 307050 - protein, 14 aa, Homo sapiens
  CDR3 for beta chain variable domain of TCR clone 153525 (TRBV7-2, TRBJ2-7)
CASSLDPGRYEQYF

SEQ ID NO: 307051 - protein, 14 aa, Homo sapiens
  CDR3 for alpha chain variable domain of TCR clone 153526 (TRAV12-2, TRAJ13)
CAVKKTGGYQKVTF

SEQ ID NO: 307052 - protein, 15 aa, Homo sapiens
  CDR3 for beta chain variable domain of TCR clone 153526 (TRBV4-1, TRBJ2-7)
CASSQQGQGFDEQYF

SEQ ID NO: 307053 - protein, 14 aa, Homo sapiens
  CDR3 for alpha chain variable domain of TCR clone 153527 (TRAV1-2, TRAJ8)
CAVREDTGFQKLVF

SEQ ID NO: 307054 - protein, 19 aa, Homo sapiens
  CDR3 for beta chain variable domain of TCR clone 153527 (TRBV6-3, TRBJ2-7)
CASSSPDSFLRAVLRAGHQ

SEQ ID NO: 307055 - protein, 13 aa, Homo sapiens
  CDR3 for alpha chain variable domain of TCR clone 153528 (TRAV13-1, TRAJ21)
CAASIFNFNKFYF

SEQ ID NO: 307056 - protein, 13 aa, Homo sapiens
  CDR3 for beta chain variable domain of TCR clone 153528 (TRBV27, TRBJ1-4)
CASSLMGDEKLFF

SEQ ID NO: 307057 - protein, 15 aa, Homo sapiens
  CDR3 for alpha chain variable domain of TCR clone 153529 (TRAV4, TRAJ10)
CLVVREGGGGNKLTF

SEQ ID NO: 307058 - protein, 16 aa, Homo sapiens
  CDR3 for beta chain variable domain of TCR clone 153529 (TRBV7-3, TRBJ2-2)
CASSLKRGTLSGELFF

SEQ ID NO: 307059 - protein, 12 aa, Homo sapiens
  CDR3 for alpha chain variable domain of TCR clone 153530 (TRAV12-3, TRAJ17)
CAMTLTGNTLTF

SEQ ID NO: 307060 - protein, 14 aa, Homo sapiens
  CDR3 for beta chain variable domain of TCR clone 153530 (TRBV5-1, TRBJ2-7)
CASSRGESLYEQYF

SEQ ID NO: 307061 - protein, 14 aa, Homo sapiens
  CDR3 for alpha chain variable domain of TCR clone 153531 (TRAV9-2, TRAJ39)
CALYIYNAGNMLTF

SEQ ID NO: 307062 - protein, 12 aa, Homo sapiens
  CDR3 for beta chain variable domain of TCR clone 153531 (TRBV11-2, TRBJ2-1)
CASSVQREGQFF

SEQ ID NO: 307063 - protein, 13 aa, Homo sapiens
  CDR3 for alpha chain variable domain of TCR clone 153532 (TRAV30, TRAJ6)
CGTEAGGSYIPTF

SEQ ID NO: 307064 - protein, 14 aa, Homo sapiens
  CDR3 for beta chain variable domain of TCR clone 153532 (TRBV11-2, TRBJ2-1)
CASSLSGPYNEQFF

SEQ ID NO: 307065 - protein, 15 aa, Homo sapiens
  CDR3 for alpha chain variable domain of TCR clone 153533 (TRAV3, TRAJ22)
CAVRDRGGSARQLTF

SEQ ID NO: 307066 - protein, 15 aa, Homo sapiens
  CDR3 for beta chain variable domain of TCR clone 153533 (TRBV6-4, TRBJ2-1)
CASSFGVAGTNEQFF

SEQ ID NO: 307067 - protein, 14 aa, Homo sapiens
  CDR3 for alpha chain variable domain of TCR clone 153534 (TRAV12-2, TRAJ53)
CAGQGGGSNYKLTF

SEQ ID NO: 307068 - protein, 14 aa, Homo sapiens
  CDR3 for beta chain variable domain of TCR clone 153534 (TRBV7-7, TRBJ2-2)
CATRQDSDTGELFF

SEQ ID NO: 307069 - protein, 12 aa, Homo sapiens
  CDR3 for alpha chain variable domain of TCR clone 153535 (TRAV13-1, TRAJ15)
CAASQAGTALIF

SEQ ID NO: 307070 - protein, 14 aa, Homo sapiens
  CDR3 for beta chain variable domain of TCR clone 153535 (TRBV7-6, TRBJ2-3)
CASSLGTVTDTQYF

SEQ ID NO: 307071 - protein, 12 aa, Homo sapiens
  CDR3 for alpha chain variable domain of TCR clone 153536 (TRAV2, TRAJ5)
CAPDTGRRALTF

SEQ ID NO: 307072 - protein, 15 aa, Homo sapiens
  CDR3 for beta chain variable domain of TCR clone 153536 (TRBV10-3, TRBJ2-1)
CAISDVQDRAYEQFI

SEQ ID NO: 307073 - protein, 14 aa, Homo sapiens
  CDR3 for alpha chain variable domain of TCR clone 153537 (TRAV29/DV5, TRAJ36)
CAARRKPGANALFF

SEQ ID NO: 307074 - protein, 14 aa, Homo sapiens
  CDR3 for beta chain variable domain of TCR clone 153537 (TRBV12-5, TRBJ2-5)
CASGSRTHQESQYF

SEQ ID NO: 307075 - protein, 13 aa, Homo sapiens
  CDR3 for alpha chain variable domain of TCR clone 153538 (TRAV12-1, TRAJ26)
CVVRRNYGQNFVF

SEQ ID NO: 307076 - protein, 14 aa, Homo sapiens
  CDR3 for beta chain variable domain of TCR clone 153538 (TRBV6-3, TRBJ1-1)
CASRYTGEGTEAFF

SEQ ID NO: 307077 - protein, 14 aa, Homo sapiens
  CDR3 for alpha chain variable domain of TCR clone 153539 (TRAV1-2, TRAJ16)
CAVNRFSAGQKLLF

SEQ ID NO: 307078 - protein, 13 aa, Homo sapiens
  CDR3 for beta chain variable domain of TCR clone 153539 (TRBV4-2, TRBJ1-1)
CASSQAGNTEAFF

SEQ ID NO: 307079 - protein, 16 aa, Homo sapiens
  CDR3 for alpha chain variable domain of TCR clone 153540 (TRAV30, TRAJ24)
CGTEIVDADSWGKFQF

SEQ ID NO: 307080 - protein, 15 aa, Homo sapiens
  CDR3 for beta chain variable domain of TCR clone 153540 (TRBV7-9, TRBJ1-4)
CAISARTGGNEKLFF

SEQ ID NO: 307081 - protein, 15 aa, Homo sapiens
  CDR3 for alpha chain variable domain of TCR clone 153541 (TRAV26-1, TRAJ29)
CIVRVQGSGNTPLVF

SEQ ID NO: 307082 - protein, 14 aa, Homo sapiens
  CDR3 for beta chain variable domain of TCR clone 153541 (TRBV18, TRBJ2-5)
CASSPGVYQETQYF

SEQ ID NO: 307083 - protein, 12 aa, Homo sapiens
  CDR3 for alpha chain variable domain of TCR clone 153542 (TRAV12-2, TRAJ17)
CAMTLTCNKLTF

SEQ ID NO: 307084 - protein, 15 aa, Homo sapiens
  CDR3 for beta chain variable domain of TCR clone 153542 (TRBV20-1, TRBJ2-7)
RSARDRVSGMDEQYF

SEQ ID NO: 307085 - protein, 14 aa, Homo sapiens
  CDR3 for alpha chain variable domain of TCR clone 153543 (TRAV1-2, TRAJ16)
CAVNRFSDGQKLLV

SEQ ID NO: 307086 - protein, 16 aa, Homo sapiens
  CDR3 for beta chain variable domain of TCR clone 153543 (TRBV7-3, TRBJ2-2)
CASSLKRGTLSGELFF

SEQ ID NO: 307087 - protein, 16 aa, Homo sapiens
  CDR3 for alpha chain variable domain of TCR clone 153544 (TRAV30, TRAJ24)
CGTEIVDADSWGKFQF

SEQ ID NO: 307088 - protein, 13 aa, Homo sapiens
  CDR3 for beta chain variable domain of TCR clone 153544 (TRBV3-1, TRBJ2-7)
CASSLRDGYEQYF

SEQ ID NO: 307089 - protein, 16 aa, Homo sapiens
  CDR3 for alpha chain variable domain of TCR clone 153545 (TRAV14/DV4, TRAJ53)
CAMRAGGGGSNYKPTF

SEQ ID NO: 307090 - protein, 18 aa, Homo sapiens
  CDR3 for beta chain variable domain of TCR clone 153545 (TRBV18, TRBJ1-3)
CASSPRGGAGPSGNTIYF

SEQ ID NO: 307091 - protein, 11 aa, Homo sapiens
  CDR3 for alpha chain variable domain of TCR clone 153546 (TRAV13-1, TRAJ39)
CASHAGNMLTI

SEQ ID NO: 307092 - protein, 15 aa, Homo sapiens
  CDR3 for beta chain variable domain of TCR clone 153546 (TRBV6-3, TRBJ2-7)
CASSSPGTVFYEQYF

SEQ ID NO: 307093 - protein, 15 aa, Homo sapiens
  CDR3 for alpha chain variable domain of TCR clone 153547 (TRAV27, TRAJ38)
CAARRNAGNNRKLIW

SEQ ID NO: 307094 - protein, 14 aa, Homo sapiens
  CDR3 for beta chain variable domain of TCR clone 153547 (TRBV19, TRBJ2-1)
CASPTFVLSGKQFF

SEQ ID NO: 307095 - protein, 13 aa, Homo sapiens
  CDR3 for alpha chain variable domain of TCR clone 153548 (TRAV13-1, TRAJ20)
CAARVSNDYKLSF

SEQ ID NO: 307096 - protein, 16 aa, Homo sapiens
  CDR3 for beta chain variable domain of TCR clone 153548 (TRBV11-1, TRBJ1-1)
CATNPRDRAFHTEDFF

SEQ ID NO: 307097 - protein, 15 aa, Homo sapiens
  CDR3 for alpha chain variable domain of TCR clone 153549 (TRAV2, TRAJ9)
CAVEERGTGCFKTIF

SEQ ID NO: 307098 - protein, 16 aa, Homo sapiens
  CDR3 for beta chain variable domain of TCR clone 153549 (TRBV24-1, TRBJ2-3)
CATSDPGTGATDTQYF

SEQ ID NO: 307099 - protein, 16 aa, Homo sapiens
  CDR3 for alpha chain variable domain of TCR clone 153550 (TRAV3, TRAJ4)
CAVRASPSGGYNKLIF

SEQ ID NO: 307100 - protein, 12 aa, Homo sapiens
  CDR3 for beta chain variable domain of TCR clone 153550 (TRBV7-9, TRBJ2-7)
CASSQGVYEQYF

SEQ ID NO: 307101 - protein, 13 aa, Homo sapiens
  CDR3 for alpha chain variable domain of TCR clone 153551 (TRAV2, TRAJ40)
CAVVTSGTYKYIF

SEQ ID NO: 307102 - protein, 13 aa, Homo sapiens
  CDR3 for beta chain variable domain of TCR clone 153551 (TRBV11-2, TRBJ1-6)
CASSLAGVSPLHF

SEQ ID NO: 307103 - protein, 12 aa, Homo sapiens
  CDR3 for alpha chain variable domain of TCR clone 153552 (TRAV1-1, TRAJ8)
CAGGTGFQKIVF

SEQ ID NO: 307104 - protein, 16 aa, Homo sapiens
  CDR3 for beta chain variable domain of TCR clone 153552 (TRBV12-5, TRBJ2-5)
CASGPRTSGNQETQYF

SEQ ID NO: 307105 - protein, 13 aa, Homo sapiens
  CDR3 for alpha chain variable domain of TCR clone 153553 (TRAV2, TRAJ20)
CAVEDPSEYTLSF

SEQ ID NO: 307106 - protein, 16 aa, Homo sapiens
  CDR3 for beta chain variable domain of TCR clone 153553 (TRBV25-1, TRBJ2-7)
CASSELTGGGIYEQYF

SEQ ID NO: 307107 - protein, 11 aa, Homo sapiens
  CDR3 for alpha chain variable domain of TCR clone 153554 (TRAV16, TRAJ26)
CSKELCQNFVF

SEQ ID NO: 307108 - protein, 14 aa, Homo sapiens
  CDR3 for beta chain variable domain of TCR clone 153554 (TRBV10-3, TRBJ2-1)
CASSSDLAYNEQFF

SEQ ID NO: 307109 - protein, 14 aa, Homo sapiens
  CDR3 for alpha chain variable domain of TCR clone 153555 (TRAV17, TRAJ35)
CATDRPGFGNVLHC

SEQ ID NO: 307110 - protein, 19 aa, Homo sapiens
  CDR3 for beta chain variable domain of TCR clone 153555 (TRBV11-3, TRBJ2-2)
CASSTRPGAKTTNTGELLF

SEQ ID NO: 307111 - protein, 15 aa, Homo sapiens
  CDR3 for alpha chain variable domain of TCR clone 153556 (TRAV17, TRAJ57)
CATGPSQGGSEKLVF

SEQ ID NO: 307112 - protein, 16 aa, Homo sapiens
  CDR3 for beta chain variable domain of TCR clone 153556 (TRBV4-2, TRBJ2-3)
CASSQELAGDTDTQYF

SEQ ID NO: 307113 - protein, 15 aa, Homo sapiens
  CDR3 for alpha chain variable domain of TCR clone 153557 (TRAV3, TRAJ3)
CAVRDRRSSASKIIF

SEQ ID NO: 307114 - protein, 13 aa, Homo sapiens
  CDR3 for beta chain variable domain of TCR clone 153557 (TRBV28, TRBJ2-7)
CASSPSGTYEQYF

SEQ ID NO: 307115 - protein, 15 aa, Homo sapiens
  CDR3 for alpha chain variable domain of TCR clone 153558 (TRAV13-2, TRAJ53)
CPQAPSGGSNYKLTF

SEQ ID NO: 307116 - protein, 15 aa, Homo sapiens
  CDR3 for beta chain variable domain of TCR clone 153558 (TRBV18, TRBJ2-1)
CASSPPSASYNEQFF

SEQ ID NO: 307117 - protein, 14 aa, Homo sapiens
  CDR3 for alpha chain variable domain of TCR clone 153559 (TRAV27, TRAJ13)
CRSSNSGGYQKVTF

SEQ ID NO: 307118 - protein, 16 aa, Homo sapiens
  CDR3 for beta chain variable domain of TCR clone 153559 (TRBV12-5, TRBJ2-5)
CASGPRTSGNQETQYF

SEQ ID NO: 307119 - protein, 17 aa, Homo sapiens
  CDR3 for alpha chain variable domain of TCR clone 153560 (TRAV3, TRAJ6)
CAVREGPRAGGSYIPTF

SEQ ID NO: 307120 - protein, 14 aa, Homo sapiens
  CDR3 for beta chain variable domain of TCR clone 153560 (TRBV7-8, TRBJ2-5)
CASSATGGQETQYF

SEQ ID NO: 307121 - protein, 13 aa, Homo sapiens
  CDR3 for alpha chain variable domain of TCR clone 153561 (TRAV12-1, TRAJ40)
CVVPTSGTYKYIF

SEQ ID NO: 307122 - protein, 18 aa, Homo sapiens
  CDR3 for beta chain variable domain of TCR clone 153561 (TRBV7-6, TRBJ2-1)
CASSPRPSGMSSYNEQFF

SEQ ID NO: 307123 - protein, 18 aa, Homo sapiens
  CDR3 for alpha chain variable domain of TCR clone 153562 (TRAV9-2, TRAJ52)
CALSRHNAGGTSYGKLTF

SEQ ID NO: 307124 - protein, 18 aa, Homo sapiens
  CDR3 for beta chain variable domain of TCR clone 153562 (TRBV7-9, TRBJ2-7)
CASSLTTSGSRTWYEQYF

SEQ ID NO: 307125 - protein, 10 aa, Homo sapiens
  CDR3 for alpha chain variable domain of TCR clone 153563 (TRAV12-3, TRAJ49)
CAMNDDQFYF

SEQ ID NO: 307126 - protein, 15 aa, Homo sapiens
  CDR3 for beta chain variable domain of TCR clone 153563 (TRBV15, TRBJ2-3)
CATSGAGFGTETQYF

SEQ ID NO: 307127 - protein, 11 aa, Homo sapiens
  CDR3 for alpha chain variable domain of TCR clone 153564 (TRAV35, TRAJ34)
CWARNTDKLIF

SEQ ID NO: 307128 - protein, 17 aa, Homo sapiens
  CDR3 for beta chain variable domain of TCR clone 153564 (TRBV28, TRBJ2-3)
CASSPTPAGGRVDTQYF

SEQ ID NO: 307129 - protein, 15 aa, Homo sapiens
  CDR3 for alpha chain variable domain of TCR clone 153565 (TRAV26-1, TRAJ29)
CIVRVVPGRNTPLVL

SEQ ID NO: 307130 - protein, 14 aa, Homo sapiens
  CDR3 for beta chain variable domain of TCR clone 153565 (TRBV7-2, TRBJ2-5)
CASSPRGSSETQYF

SEQ ID NO: 307131 - protein, 15 aa, Homo sapiens
  CDR3 for alpha chain variable domain of TCR clone 153566 (TRAV1-2, TRAJ30)
CAVRPHGNRDDKIIF

SEQ ID NO: 307132 - protein, 16 aa, Homo sapiens
  CDR3 for beta chain variable domain of TCR clone 153566 (TRBV7-3, TRBJ2-1)
CASSLEGYRSYNEQFF

SEQ ID NO: 307133 - protein, 11 aa, Homo sapiens
  CDR3 for alpha chain variable domain of TCR clone 153567 (TRAV21, TRAJ11)
CAVNGYRTLTF

SEQ ID NO: 307134 - protein, 11 aa, Homo sapiens
  CDR3 for beta chain variable domain of TCR clone 153567 (TRBV19, TRBJ1-1)
CASSTGSEAFF

SEQ ID NO: 307135 - protein, 13 aa, Homo sapiens
  CDR3 for alpha chain variable domain of TCR clone 153568 (TRAV27, TRAJ6)
CAGGTRGSYIPTF

SEQ ID NO: 307136 - protein, 14 aa, Homo sapiens
  CDR3 for beta chain variable domain of TCR clone 153568 (TRBV20-1, TRBJ2-4)
CSASGRVGENDQYF

SEQ ID NO: 307137 - protein, 14 aa, Homo sapiens
  CDR3 for alpha chain variable domain of TCR clone 153569 (TRAV12-2, TRAJ40)
CAVKIPSGTYKYIF

SEQ ID NO: 307138 - protein, 17 aa, Homo sapiens
  CDR3 for beta chain variable domain of TCR clone 153569 (TRBV20-1, TRBJ2-1)
CSAFSGTSGSLYNEQFF

SEQ ID NO: 307139 - protein, 14 aa, Homo sapiens
  CDR3 for alpha chain variable domain of TCR clone 153570 (TRAV13-1, TRAJ36)
CAASINTGSNNLFF

SEQ ID NO: 307140 - protein, 18 aa, Homo sapiens
  CDR3 for beta chain variable domain of TCR clone 153570 (TRBV20-1, TRBJ2-3)
CSARDPWGQGLSTGTQYF

SEQ ID NO: 307141 - protein, 15 aa, Homo sapiens
  CDR3 for alpha chain variable domain of TCR clone 153571 (TRAV2, TRAJ13)
CATPSYSGGYQKVTF

SEQ ID NO: 307142 - protein, 14 aa, Homo sapiens
  CDR3 for beta chain variable domain of TCR clone 153571 (TRBV7-3, TRBJ2-1)
CASSLAGGTNEQFF

SEQ ID NO: 307143 - protein, 12 aa, Homo sapiens
  CDR3 for alpha chain variable domain of TCR clone 153572 (TRAV12-3, TRAJ40)
CAMSSGTNKYIF

SEQ ID NO: 307144 - protein, 15 aa, Homo sapiens
  CDR3 for beta chain variable domain of TCR clone 153572 (TRBV7-3, TRBJ2-2)
CASSETGQGTGELFF

SEQ ID NO: 307145 - protein, 14 aa, Homo sapiens
  CDR3 for alpha chain variable domain of TCR clone 153573 (TRAV12-1, TRAJ38)
CVVNNAGNNCKLIW

SEQ ID NO: 307146 - protein, 16 aa, Homo sapiens
  CDR3 for beta chain variable domain of TCR clone 153573 (TRBV7-2, TRBJ1-2)
CASSRQGGGANYGYTF

SEQ ID NO: 307147 - protein, 13 aa, Homo sapiens
  CDR3 for alpha chain variable domain of TCR clone 153574 (TRAV17, TRAJ22)
CAGRRGSARPLTF

SEQ ID NO: 307148 - protein, 14 aa, Homo sapiens
  CDR3 for beta chain variable domain of TCR clone 153574 (TRBV19, TRBJ1-1)
CASSITGWETEAFF

SEQ ID NO: 307149 - protein, 12 aa, Homo sapiens
  CDR3 for alpha chain variable domain of TCR clone 153575 (TRAV13-2, TRAJ23)
CAERHMGGKLIF

SEQ ID NO: 307150 - protein, 15 aa, Homo sapiens
  CDR3 for beta chain variable domain of TCR clone 153575 (TRBV6-3, TRBJ2-7)
CASSSPGTVFYEQYF

SEQ ID NO: 307151 - protein, 13 aa, Homo sapiens
  CDR3 for alpha chain variable domain of TCR clone 153576 (TRAV13-1, TRAJ37)
CAARSGNTGKLIF

SEQ ID NO: 307152 - protein, 14 aa, Homo sapiens
  CDR3 for beta chain variable domain of TCR clone 153576 (TRBV12-4, TRBJ2-3)
CASSLGQGTDTQYV

SEQ ID NO: 307153 - protein, 18 aa, Homo sapiens
  CDR3 for alpha chain variable domain of TCR clone 153577 (TRAV1-2, TRAJ18)
CAVRDMGDRGSTLGRLCF

SEQ ID NO: 307154 - protein, 16 aa, Homo sapiens
  CDR3 for beta chain variable domain of TCR clone 153577 (TRBV29-1, TRBJ1-2)
CSVEANRDIANYGYTF

SEQ ID NO: 307155 - protein, 14 aa, Homo sapiens
  CDR3 for alpha chain variable domain of TCR clone 153578 (TRAV13-1, TRAJ39)
CAASYNNAGNMLTF

SEQ ID NO: 307156 - protein, 13 aa, Homo sapiens
  CDR3 for beta chain variable domain of TCR clone 153578 (TRBV24-1, TRBJ1-4)
CATNNGRSEKLFV

SEQ ID NO: 307157 - protein, 12 aa, Homo sapiens
  CDR3 for alpha chain variable domain of TCR clone 153579 (TRAV13-1, TRAJ21)
CAAKEGFNKFYF

SEQ ID NO: 307158 - protein, 17 aa, Homo sapiens
  CDR3 for beta chain variable domain of TCR clone 153579 (TRBV19, TRBJ2-7)
CASSISFYDSDPYEQYF

SEQ ID NO: 307159 - protein, 14 aa, Homo sapiens
  CDR3 for alpha chain variable domain of TCR clone 153580 (TRAV13-1, TRAJ44)
CAAKATGTASKLTF

SEQ ID NO: 307160 - protein, 12 aa, Homo sapiens
  CDR3 for beta chain variable domain of TCR clone 153580 (TRBV28, TRBJ2-3)
CASSLYRDTQYF

SEQ ID NO: 307161 - protein, 15 aa, Homo sapiens
  CDR3 for alpha chain variable domain of TCR clone 153581 (TRAV26-1, TRAJ44)
WIVRANTGTASKLTF

SEQ ID NO: 307162 - protein, 16 aa, Homo sapiens
  CDR3 for beta chain variable domain of TCR clone 153581 (TRBV7-7, TRBJ2-1)
CASSLASGTSYNEQFF

SEQ ID NO: 307163 - protein, 13 aa, Homo sapiens
  CDR3 for alpha chain variable domain of TCR clone 153582 (TRAV21, TRAJ27)
CAARPGNAGKSPF

SEQ ID NO: 307164 - protein, 13 aa, Homo sapiens
  CDR3 for beta chain variable domain of TCR clone 153582 (TRBV7-6, TRBJ2-1)
CQQLGGGADEQFF

SEQ ID NO: 307165 - protein, 14 aa, Homo sapiens
  CDR3 for alpha chain variable domain of TCR clone 153583 (TRAV12-2, TRAJ4)
CAEDPSGGYNQLIF

SEQ ID NO: 307166 - protein, 13 aa, Homo sapiens
  CDR3 for beta chain variable domain of TCR clone 153583 (TRBV7-9, TRBJ1-2)
CASSLKQNYGYTF

SEQ ID NO: 307167 - protein, 13 aa, Homo sapiens
  CDR3 for alpha chain variable domain of TCR clone 153584 (TRAV21, TRAJ27)
CAARPGNAGKSTF

SEQ ID NO: 307168 - protein, 20 aa, Homo sapiens
  CDR3 for beta chain variable domain of TCR clone 153584 (TRBV7-8, TRBJ2-2)
CASSHLLPGPTIHITGELFF

SEQ ID NO: 307169 - protein, 13 aa, Homo sapiens
  CDR3 for alpha chain variable domain of TCR clone 153585 (TRAV29/DV5, TRAJ36)
CAASETGANNLFF

SEQ ID NO: 307170 - protein, 13 aa, Homo sapiens
  CDR3 for beta chain variable domain of TCR clone 153585 (TRBV4-2, TRBJ1-1)
CASSQAGNTEAFF

SEQ ID NO: 307171 - protein, 18 aa, Homo sapiens
  CDR3 for alpha chain variable domain of TCR clone 153586 (TRAV13-1, TRAJ37)
CAPPPGPHGSSNTGKLIF

SEQ ID NO: 307172 - protein, 14 aa, Homo sapiens
  CDR3 for beta chain variable domain of TCR clone 153586 (TRBV6-1, TRBJ1-3)
CASVQGGGGNTIYF

SEQ ID NO: 307173 - protein, 14 aa, Homo sapiens
  CDR3 for alpha chain variable domain of TCR clone 153587 (TRAV1-2, TRAJ16)
CAVNRFSDGQKLLF

SEQ ID NO: 307174 - protein, 16 aa, Homo sapiens
  CDR3 for beta chain variable domain of TCR clone 153587 (TRBV13, TRBJ2-1)
CASSLNPGQPSNEQFF

SEQ ID NO: 307175 - protein, 17 aa, Homo sapiens
  CDR3 for alpha chain variable domain of TCR clone 153588 (TRAV20, TRAJ52)
CAVQANAGGTSYGKLTF

SEQ ID NO: 307176 - protein, 14 aa, Homo sapiens
  CDR3 for beta chain variable domain of TCR clone 153588 (TRBV11-2, TRBJ2-7)
CASSLGAGAYEQYF

SEQ ID NO: 307177 - protein, 11 aa, Homo sapiens
  CDR3 for alpha chain variable domain of TCR clone 153589 (TRAV17, TRAJ31)
CATSNNARLMF

SEQ ID NO: 307178 - protein, 17 aa, Homo sapiens
  CDR3 for beta chain variable domain of TCR clone 153589 (TRBV28, TRBJ2-5)
CASSTPEGDALQETQYF

SEQ ID NO: 307179 - protein, 14 aa, Homo sapiens
  CDR3 for alpha chain variable domain of TCR clone 153590 (TRAV12-2, TRAJ40)
CAAKIPSGTYKYIF

SEQ ID NO: 307180 - protein, 14 aa, Homo sapiens
  CDR3 for beta chain variable domain of TCR clone 153590 (TRBV20-1, TRBJ1-1)
CSAQTRIGGTEALF

SEQ ID NO: 307181 - protein, 14 aa, Homo sapiens
  CDR3 for alpha chain variable domain of TCR clone 153591 (TRAV12-2, TRAJ13)
CAVKRTGGYQKVTF

SEQ ID NO: 307182 - protein, 14 aa, Homo sapiens
  CDR3 for beta chain variable domain of TCR clone 153591 (TRBV5-5, TRBJ2-7)
CASSLGQGTHEQYF

SEQ ID NO: 307183 - protein, 14 aa, Homo sapiens
  CDR3 for alpha chain variable domain of TCR clone 153592 (TRAV27, TRAJ40)
CAGSLLRGTYKYIF

SEQ ID NO: 307184 - protein, 15 aa, Homo sapiens
  CDR3 for beta chain variable domain of TCR clone 153592 (TRBV6-3, TRBJ1-4)
CASSSTGQENEKLFF

SEQ ID NO: 307185 - protein, 15 aa, Homo sapiens
  CDR3 for alpha chain variable domain of TCR clone 153593 (TRAV17, TRAJ57)
CATGPSQGGSEKLVL

SEQ ID NO: 307186 - protein, 13 aa, Homo sapiens
  CDR3 for beta chain variable domain of TCR clone 153593 (TRBV27, TRBJ2-1)
CASRTLGVGEQFF

SEQ ID NO: 307187 - protein, 13 aa, Homo sapiens
  CDR3 for alpha chain variable domain of TCR clone 153594 (TRAV35, TRAJ42)
CAGFPGSQGNPIF

SEQ ID NO: 307188 - protein, 14 aa, Homo sapiens
  CDR3 for beta chain variable domain of TCR clone 153594 (TRBV29-1, TRBJ2-2)
CSVLAETNTGELFF

SEQ ID NO: 307189 - protein, 15 aa, Homo sapiens
  CDR3 for alpha chain variable domain of TCR clone 153595 (TRAV12-1, TRAJ44)
CVVFVNTGTASKLTF

SEQ ID NO: 307190 - protein, 17 aa, Homo sapiens
  CDR3 for beta chain variable domain of TCR clone 153595 (TRBV7-8, TRBJ2-6)
CASSAGTWGAGANVLTF

SEQ ID NO: 307191 - protein, 13 aa, Homo sapiens
  CDR3 for alpha chain variable domain of TCR clone 153596 (TRAV35, TRAJ43)
CGGYPYNNNDMRF

SEQ ID NO: 307192 - protein, 15 aa, Homo sapiens
  CDR3 for beta chain variable domain of TCR clone 153596 (TRBV25-1, TRBJ1-4)
CASSKRIATNEKLFF

SEQ ID NO: 307193 - protein, 12 aa, Homo sapiens
  CDR3 for alpha chain variable domain of TCR clone 153597 (TRAV27, TRAJ58)
CAGARETSRLTF

SEQ ID NO: 307194 - protein, 14 aa, Homo sapiens
  CDR3 for beta chain variable domain of TCR clone 153597 (TRBV7-3, TRBJ2-1)
CASSLGTSANEQFF

SEQ ID NO: 307195 - protein, 14 aa, Homo sapiens
  CDR3 for alpha chain variable domain of TCR clone 153598 (TRAV12-3, TRAJ29)
CAMSPYSGNTPLVF

SEQ ID NO: 307196 - protein, 15 aa, Homo sapiens
  CDR3 for beta chain variable domain of TCR clone 153598 (TRBV27, TRBJ2-1)
CTSSNGGGSSNEQFF

SEQ ID NO: 307197 - protein, 14 aa, Homo sapiens
  CDR3 for alpha chain variable domain of TCR clone 153599 (TRAV12-2, TRAJ13)
CAVKKTGGYPKVTF

SEQ ID NO: 307198 - protein, 16 aa, Homo sapiens
  CDR3 for beta chain variable domain of TCR clone 153599 (TRBV4-2, TRBJ2-4)
CASSQELRRAKNIQYF

SEQ ID NO: 307199 - protein, 11 aa, Homo sapiens
  CDR3 for alpha chain variable domain of TCR clone 153600 (TRAV2, TRAJ33)
CAVESNYQLIW

SEQ ID NO: 307200 - protein, 10 aa, Homo sapiens
  CDR3 for beta chain variable domain of TCR clone 153600 (TRBV7-9, TRBJ1-1)
CASSFTEAFF

SEQ ID NO: 307201 - protein, 11 aa, Homo sapiens
  CDR3 for alpha chain variable domain of TCR clone 153601 (TRAV12-1, TRAJ26)
CVVVYGQNFVF

SEQ ID NO: 307202 - protein, 15 aa, Homo sapiens
  CDR3 for beta chain variable domain of TCR clone 153601 (TRBV12-4, TRBJ2-5)
CASSGTGQAQETQYF

SEQ ID NO: 307203 - protein, 15 aa, Homo sapiens
  CDR3 for alpha chain variable domain of TCR clone 153602 (TRAV12-2, TRAJ53)
CAVNTGGGSNYKLTF

SEQ ID NO: 307204 - protein, 15 aa, Homo sapiens
  CDR3 for beta chain variable domain of TCR clone 153602 (TRBV5-1, TRBJ2-5)
CASSLVLGEIKTQSF

SEQ ID NO: 307205 - protein, 14 aa, Homo sapiens
  CDR3 for alpha chain variable domain of TCR clone 153603 (TRAV16, TRAJ34)
CALPYDYNTDKLIF

SEQ ID NO: 307206 - protein, 15 aa, Homo sapiens
  CDR3 for beta chain variable domain of TCR clone 153603 (TRBV20-1, TRBJ2-7)
CSAESGTSGAYEQYF

SEQ ID NO: 307207 - protein, 15 aa, Homo sapiens
  CDR3 for alpha chain variable domain of TCR clone 153604 (TRAV8-3, TRAJ37)
CAVGARASNTGKLIF

SEQ ID NO: 307208 - protein, 13 aa, Homo sapiens
  CDR3 for beta chain variable domain of TCR clone 153604 (TRBV7-9, TRBJ1-2)
CASSLKQNYGYTF

SEQ ID NO: 307209 - protein, 17 aa, Homo sapiens
  CDR3 for alpha chain variable domain of TCR clone 153605 (TRAV4, TRAJ13)
CLVGAQGSSGGYQKVTF

SEQ ID NO: 307210 - protein, 18 aa, Homo sapiens
  CDR3 for beta chain variable domain of TCR clone 153605 (TRBV15, TRBJ2-3)
CASSRDGARSWDTDTQYF

SEQ ID NO: 307211 - protein, 15 aa, Homo sapiens
  CDR3 for alpha chain variable domain of TCR clone 153606 (TRAV21, TRAJ53)
CATLNSGGSNYKLTF

SEQ ID NO: 307212 - protein, 16 aa, Homo sapiens
  CDR3 for beta chain variable domain of TCR clone 153606 (TRBV2, TRBJ2-6)
CASSEVGGAGANVLTF

SEQ ID NO: 307213 - protein, 15 aa, Homo sapiens
  CDR3 for alpha chain variable domain of TCR clone 153607 (TRAV1-2, TRAJ28)
CAVQYSGAGSYQLTF

SEQ ID NO: 307214 - protein, 13 aa, Homo sapiens
  CDR3 for beta chain variable domain of TCR clone 153607 (TRBV20-1, TRBJ2-2)
CSASAAGTGELFF

SEQ ID NO: 307215 - protein, 13 aa, Homo sapiens
  CDR3 for alpha chain variable domain of TCR clone 153608 (TRAV1-2, TRAJ9)
CAALNTGGFKTIF

SEQ ID NO: 307216 - protein, 14 aa, Homo sapiens
  CDR3 for beta chain variable domain of TCR clone 153608 (TRBV19, TRBJ2-1)
CASGKSTQYNEQFF

SEQ ID NO: 307217 - protein, 17 aa, Homo sapiens
  CDR3 for alpha chain variable domain of TCR clone 153609 (TRAV8-1, TRAJ42)
CAVKWGNYGGRQGNLIF

SEQ ID NO: 307218 - protein, 15 aa, Homo sapiens
  CDR3 for beta chain variable domain of TCR clone 153609 (TRBV9, TRBJ1-6)
CASSVAGTGDSPLHF

SEQ ID NO: 307219 - protein, 14 aa, Homo sapiens
  CDR3 for alpha chain variable domain of TCR clone 153610 (TRAV20, TRAJ22)
CAVQVSGSARQLTF

SEQ ID NO: 307220 - protein, 16 aa, Homo sapiens
  CDR3 for beta chain variable domain of TCR clone 153610 (TRBV12-4, TRBJ1-4)
CASSLKGIGDGEKLFF

SEQ ID NO: 307221 - protein, 19 aa, Homo sapiens
  CDR3 for alpha chain variable domain of TCR clone 153611 (TRAV26-1, TRAJ52)
CVLLHRPSAGGTSYGKLTF

SEQ ID NO: 307222 - protein, 13 aa, Homo sapiens
  CDR3 for beta chain variable domain of TCR clone 153611 (TRBV7-9, TRBJ2-1)
CASSLDVGNEQFF

SEQ ID NO: 307223 - protein, 11 aa, Homo sapiens
  CDR3 for alpha chain variable domain of TCR clone 153612 (TRAV17, TRAJ9)
CATTGGFKTIF

SEQ ID NO: 307224 - protein, 14 aa, Homo sapiens
  CDR3 for beta chain variable domain of TCR clone 153612 (TRBV20-1, TRBJ1-1)
CSARAVNGYTEAFF

SEQ ID NO: 307225 - protein, 16 aa, Homo sapiens
  CDR3 for alpha chain variable domain of TCR clone 153613 (TRAV30, TRAJ24)
CGTEIVDADSWGKFQF

SEQ ID NO: 307226 - protein, 15 aa, Homo sapiens
  CDR3 for beta chain variable domain of TCR clone 153613 (TRBV24-1, TRBJ2-5)
CATSDRRQEQETQYF

SEQ ID NO: 307227 - protein, 13 aa, Homo sapiens
  CDR3 for alpha chain variable domain of TCR clone 153614 (TRAV12-3, TRAJ7)
CAMSASGNNRLGF

SEQ ID NO: 307228 - protein, 15 aa, Homo sapiens
  CDR3 for beta chain variable domain of TCR clone 153614 (TRBV7-3, TRBJ2-2)
CASSETGQGTGELFF

SEQ ID NO: 307229 - protein, 14 aa, Homo sapiens
  CDR3 for alpha chain variable domain of TCR clone 153615 (TRAV8-2, TRAJ4)
CVVSPSGGYNKLIF

SEQ ID NO: 307230 - protein, 15 aa, Homo sapiens
  CDR3 for beta chain variable domain of TCR clone 153615 (TRBV11-2, TRBJ2-1)
CASSLGTSGLNEQFF

SEQ ID NO: 307231 - protein, 14 aa, Homo sapiens
  CDR3 for alpha chain variable domain of TCR clone 153616 (TRAV12-2, TRAJ17)
CAALFKAAGNKLTF

SEQ ID NO: 307232 - protein, 14 aa, Homo sapiens
  CDR3 for beta chain variable domain of TCR clone 153616 (TRBV7-8, TRBJ2-3)
CASSLEAGTDTQYF

SEQ ID NO: 307233 - protein, 14 aa, Homo sapiens
  CDR3 for alpha chain variable domain of TCR clone 153617 (TRAV26-1, TRAJ39)
CIVRVSRAGNMLTF

SEQ ID NO: 307234 - protein, 15 aa, Homo sapiens
  CDR3 for beta chain variable domain of TCR clone 153617 (TRBV7-9, TRBJ1-5)
CASSQGHQPKQPQHF

SEQ ID NO: 307235 - protein, 14 aa, Homo sapiens
  CDR3 for alpha chain variable domain of TCR clone 153618 (TRAV12-2, TRAJ15)
CAPHTGQAGTALIF

SEQ ID NO: 307236 - protein, 16 aa, Homo sapiens
  CDR3 for beta chain variable domain of TCR clone 153618 (TRBV19, TRBJ2-2)
CASSFPGQGLAGELFF

SEQ ID NO: 307237 - protein, 13 aa, Homo sapiens
  CDR3 for alpha chain variable domain of TCR clone 153619 (TRAV29/DV5, TRAJ31)
CAASRNNNARLMF

SEQ ID NO: 307238 - protein, 13 aa, Homo sapiens
  CDR3 for beta chain variable domain of TCR clone 153619 (TRBV3-1, TRBJ1-1)
CASSPGVITEAFF

SEQ ID NO: 307239 - protein, 15 aa, Homo sapiens
  CDR3 for alpha chain variable domain of TCR clone 153620 (TRAV8-3, TRAJ20)
LSTSVLDFNDYKLSF

SEQ ID NO: 307240 - protein, 15 aa, Homo sapiens
  CDR3 for beta chain variable domain of TCR clone 153620 (TRBV28, TRBJ2-7)
CASSPGGRGFYEQYF

SEQ ID NO: 307241 - protein, 12 aa, Homo sapiens
  CDR3 for alpha chain variable domain of TCR clone 153621 (TRAV4, TRAJ34)
CLVGEGTDRLIF

SEQ ID NO: 307242 - protein, 13 aa, Homo sapiens
  CDR3 for beta chain variable domain of TCR clone 153621 (TRBV2, TRBJ2-7)
CATSMGLVYEQYF

SEQ ID NO: 307243 - protein, 18 aa, Homo sapiens
  CDR3 for alpha chain variable domain of TCR clone 153622 (TRAV29/DV5, TRAJ52)
CAAGFRGAGGTSYGKLTF

SEQ ID NO: 307244 - protein, 13 aa, Homo sapiens
  CDR3 for beta chain variable domain of TCR clone 153622 (TRBV10-3, TRBJ2-7)
CASKLAVNYEQYF

SEQ ID NO: 307245 - protein, 13 aa, Homo sapiens
  CDR3 for alpha chain variable domain of TCR clone 153623 (TRAV12-3, TRAJ33)
CAMGVNSNYQLIW

SEQ ID NO: 307246 - protein, 13 aa, Homo sapiens
  CDR3 for beta chain variable domain of TCR clone 153623 (TRBV7-2, TRBJ2-2)
CASSVAVTGELFF

SEQ ID NO: 307247 - protein, 12 aa, Homo sapiens
  CDR3 for alpha chain variable domain of TCR clone 153624 (TRAV17, TRAJ20)
CATDSNDYKLSF

SEQ ID NO: 307248 - protein, 17 aa, Homo sapiens
  CDR3 for beta chain variable domain of TCR clone 153624 (TRBV5-1, TRBJ2-2)
CASNLAGLSGGTGELFF

SEQ ID NO: 307249 - protein, 15 aa, Homo sapiens
  CDR3 for alpha chain variable domain of TCR clone 153625 (TRAV3, TRAJ22)
CAVRDRGGSARQLTC

SEQ ID NO: 307250 - protein, 14 aa, Homo sapiens
  CDR3 for beta chain variable domain of TCR clone 153625 (TRBV11-1, TRBJ2-7)
CASSFRQGSYEQYF

SEQ ID NO: 307251 - protein, 17 aa, Homo sapiens
  CDR3 for alpha chain variable domain of TCR clone 153626 (TRAV12-2, TRAJ52)
CAVNPYAGGTSYGKLTF

SEQ ID NO: 307252 - protein, 16 aa, Homo sapiens
  CDR3 for beta chain variable domain of TCR clone 153626 (TRBV5-5, TRBJ2-2)
CASSGRRERATGELFF

SEQ ID NO: 307253 - protein, 13 aa, Homo sapiens
  CDR3 for alpha chain variable domain of TCR clone 153627 (TRAV20, TRAJ20)
CAVQAGSGYKLSF

SEQ ID NO: 307254 - protein, 14 aa, Homo sapiens
  CDR3 for beta chain variable domain of TCR clone 153627 (TRBV7-6, TRBJ2-3)
CASSVAGGTDTQYF

SEQ ID NO: 307255 - protein, 12 aa, Homo sapiens
  CDR3 for alpha chain variable domain of TCR clone 153628 (TRAV12-3, TRAJ5)
CAMDTGRRALTF

SEQ ID NO: 307256 - protein, 14 aa, Homo sapiens
  CDR3 for beta chain variable domain of TCR clone 153628 (TRBV11-2, TRBJ2-5)
CASSRTGGIETQYF

SEQ ID NO: 307257 - protein, 14 aa, Homo sapiens
  CDR3 for alpha chain variable domain of TCR clone 153629 (TRAV1-2, TRAJ8)
CALREDTGFQKLVF

SEQ ID NO: 307258 - protein, 15 aa, Homo sapiens
  CDR3 for beta chain variable domain of TCR clone 153629 (TRBV12-4, TRBJ2-5)
CASSPPTGLQETQYF

SEQ ID NO: 307259 - protein, 13 aa, Homo sapiens
  CDR3 for alpha chain variable domain of TCR clone 153630 (TRAV8-1, TRAJ23)
YAVAGGQGGKLIF

SEQ ID NO: 307260 - protein, 15 aa, Homo sapiens
  CDR3 for beta chain variable domain of TCR clone 153630 (TRBV20-1, TRBJ2-2)
CSAIPGHSNTGELFF

SEQ ID NO: 307261 - protein, 12 aa, Homo sapiens
  CDR3 for alpha chain variable domain of TCR clone 153631 (TRAV2, TRAJ5)
CALDTRRRALTF

SEQ ID NO: 307262 - protein, 15 aa, Homo sapiens
  CDR3 for beta chain variable domain of TCR clone 153631 (TRBV10-3, TRBJ2-1)
CAISDVQDRAYEQFF

SEQ ID NO: 307263 - protein, 15 aa, Homo sapiens
  CDR3 for alpha chain variable domain of TCR clone 153632 (TRAV27, TRAJ38)
CAARRNAGNNRKLIW

SEQ ID NO: 307264 - protein, 19 aa, Homo sapiens
  CDR3 for beta chain variable domain of TCR clone 153632 (TRBV7-8, TRBJ2-5)
CASSVLCQKLAGGQETQYF

SEQ ID NO: 307265 - protein, 14 aa, Homo sapiens
  CDR3 for alpha chain variable domain of TCR clone 153633 (TRAV9-2, TRAJ39)
CALYIYNAGNMLTF

SEQ ID NO: 307266 - protein, 14 aa, Homo sapiens
  CDR3 for beta chain variable domain of TCR clone 153633 (TRBV7-2, TRBJ2-5)
CASSLTQGQETQYF

SEQ ID NO: 307267 - protein, 14 aa, Homo sapiens
  CDR3 for alpha chain variable domain of TCR clone 153634 (TRAV38-1, TRAJ43)
CAFMKHNNNNDMRF

SEQ ID NO: 307268 - protein, 15 aa, Homo sapiens
  CDR3 for beta chain variable domain of TCR clone 153634 (TRBV9, TRBJ1-6)
CASSVAGSGDSPLHF

SEQ ID NO: 307269 - protein, 16 aa, Homo sapiens
  CDR3 for alpha chain variable domain of TCR clone 153635 (TRAV4, TRAJ22)
CLVGDLYSGSPRQLTF

SEQ ID NO: 307270 - protein, 16 aa, Homo sapiens
  CDR3 for beta chain variable domain of TCR clone 153635 (TRBV7-9, TRBJ2-1)
CASSDVAGGSYNEQFF

SEQ ID NO: 307271 - protein, 12 aa, Homo sapiens
  CDR3 for alpha chain variable domain of TCR clone 153636 (TRAV8-3, TRAJ26)
CSGYNYGQNFVF

SEQ ID NO: 307272 - protein, 15 aa, Homo sapiens
  CDR3 for beta chain variable domain of TCR clone 153636 (TRBV12-4, TRBJ2-1)
CASSLSGGASNEQFF

SEQ ID NO: 307273 - protein, 16 aa, Homo sapiens
  CDR3 for alpha chain variable domain of TCR clone 153637 (TRAV30, TRAJ24)
CGTEIGDADSWGKFQF

SEQ ID NO: 307274 - protein, 19 aa, Homo sapiens
  CDR3 for beta chain variable domain of TCR clone 153637 (TRBV25-1, TRBJ2-2)
CAILVYRVDRGRKTGELFF

SEQ ID NO: 307275 - protein, 14 aa, Homo sapiens
  CDR3 for alpha chain variable domain of TCR clone 153638 (TRAV2, TRAJ9)
CAVEDRSGGFKTIF

SEQ ID NO: 307276 - protein, 11 aa, Homo sapiens
  CDR3 for beta chain variable domain of TCR clone 153638 (TRBV7-9, TRBJ2-5)
CARSLGETQYF

SEQ ID NO: 307277 - protein, 11 aa, Homo sapiens
  CDR3 for alpha chain variable domain of TCR clone 153639 (TRAV12-1, TRAJ21)
CVVNNFNKFYF

SEQ ID NO: 307278 - protein, 13 aa, Homo sapiens
  CDR3 for beta chain variable domain of TCR clone 153639 (TRBV28, TRBJ2-7)
CASTPGLAGEQYF

SEQ ID NO: 307279 - protein, 14 aa, Homo sapiens
  CDR3 for alpha chain variable domain of TCR clone 153640 (TRAV12-2, TRAJ48)
CAVNAFFGNEKLSF

SEQ ID NO: 307280 - protein, 13 aa, Homo sapiens
  CDR3 for beta chain variable domain of TCR clone 153640 (TRBV28, TRBJ2-7)
CAGAQQGLDEQYF

SEQ ID NO: 307281 - protein, 14 aa, Homo sapiens
  CDR3 for alpha chain variable domain of TCR clone 153641 (TRAV38-1, TRAJ40)
CALRPTSGTYTYIS

SEQ ID NO: 307282 - protein, 14 aa, Homo sapiens
  CDR3 for beta chain variable domain of TCR clone 153641 (TRBV25-1, TRBJ1-1)
CASTHLGGNTEAFF

SEQ ID NO: 307283 - protein, 13 aa, Homo sapiens
  CDR3 for alpha chain variable domain of TCR clone 153642 (TRAV27, TRAJ49)
CAPRPYTGNQFYF

SEQ ID NO: 307284 - protein, 12 aa, Homo sapiens
  CDR3 for beta chain variable domain of TCR clone 153642 (TRBV7-9, TRBJ2-3)
CASSFITDTQYF

SEQ ID NO: 307285 - protein, 12 aa, Homo sapiens
  CDR3 for alpha chain variable domain of TCR clone 153643 (TRAV8-4, TRAJ31)
CAVSDSNARLMF

SEQ ID NO: 307286 - protein, 17 aa, Homo sapiens
  CDR3 for beta chain variable domain of TCR clone 153643 (TRBV13, TRBJ2-3)
CASSLSRVAGGRNTQYF

SEQ ID NO: 307287 - protein, 13 aa, Homo sapiens
  CDR3 for alpha chain variable domain of TCR clone 153644 (TRAV21, TRAJ57)
CAGTQGGSEKLVF

SEQ ID NO: 307288 - protein, 16 aa, Homo sapiens
  CDR3 for beta chain variable domain of TCR clone 153644 (TRBV29-1, TRBJ2-7)
CSVEDAEGGTAYEQYF

SEQ ID NO: 307289 - protein, 13 aa, Homo sapiens
  CDR3 for alpha chain variable domain of TCR clone 153645 (TRAV38-1, TRAJ42)
CARWGGSQGNLIF

SEQ ID NO: 307290 - protein, 17 aa, Homo sapiens
  CDR3 for beta chain variable domain of TCR clone 153645 (TRBV20-1, TRBJ2-1)
CSASDPLAGVCDNEQFF

SEQ ID NO: 307291 - protein, 14 aa, Homo sapiens
  CDR3 for alpha chain variable domain of TCR clone 153646 (TRAV12-2, TRAJ45)
CAVYSGGGADGLTF

SEQ ID NO: 307292 - protein, 16 aa, Homo sapiens
  CDR3 for beta chain variable domain of TCR clone 153646 (TRBV11-2, TRBJ1-2)
CASSLDTGGADYGYTF

SEQ ID NO: 307293 - protein, 13 aa, Homo sapiens
  CDR3 for alpha chain variable domain of TCR clone 153647 (TRAV3, TRAJ27)
CAVRPLGAGKSTF

SEQ ID NO: 307294 - protein, 15 aa, Homo sapiens
  CDR3 for beta chain variable domain of TCR clone 153647 (TRBV10-3, TRBJ2-1)
CAISDVQDRAYEQFF

SEQ ID NO: 307295 - protein, 13 aa, Homo sapiens
  CDR3 for alpha chain variable domain of TCR clone 153648 (TRAV12-1, TRAJ16)
CVVNGPDGQKLLF

SEQ ID NO: 307296 - protein, 16 aa, Homo sapiens
  CDR3 for beta chain variable domain of TCR clone 153648 (TRBV4-1, TRBJ2-3)
CASSQSTSGAEDTQYF

SEQ ID NO: 307297 - protein, 12 aa, Homo sapiens
  CDR3 for alpha chain variable domain of TCR clone 153649 (TRAV8-3, TRAJ27)
CAVGAEAGKSTF

SEQ ID NO: 307298 - protein, 14 aa, Homo sapiens
  CDR3 for beta chain variable domain of TCR clone 153649 (TRBV2, TRBJ2-1)
CVSRLIVGHDEQFF

SEQ ID NO: 307299 - protein, 16 aa, Homo sapiens
  CDR3 for alpha chain variable domain of TCR clone 153650 (TRAV12-3, TRAJ53)
CAMSPGSGGSNYKLTF

SEQ ID NO: 307300 - protein, 13 aa, Homo sapiens
  CDR3 for beta chain variable domain of TCR clone 153650 (TRBV19, TRBJ1-1)
CAISITGESEAFF

SEQ ID NO: 307301 - protein, 14 aa, Homo sapiens
  CDR3 for alpha chain variable domain of TCR clone 153651 (TRAV36/DV7, TRAJ48)
CAQRRDFGNEKLTF

SEQ ID NO: 307302 - protein, 14 aa, Homo sapiens
  CDR3 for beta chain variable domain of TCR clone 153651 (TRBV28, TRBJ2-4)
RASTQVTGVNIQYF

SEQ ID NO: 307303 - protein, 14 aa, Homo sapiens
  CDR3 for alpha chain variable domain of TCR clone 153652 (TRAV38-1, TRAJ45)
CAYYSGGGADGLTF

SEQ ID NO: 307304 - protein, 14 aa, Homo sapiens
  CDR3 for beta chain variable domain of TCR clone 153652 (TRBV19, TRBJ2-1)
CASGKSTQYNEQFF

SEQ ID NO: 307305 - protein, 10 aa, Homo sapiens
  CDR3 for alpha chain variable domain of TCR clone 153653 (TRAV3, TRAJ18)
CAVRLIEAQP

SEQ ID NO: 307306 - protein, 15 aa, Homo sapiens
  CDR3 for beta chain variable domain of TCR clone 153653 (TRBV7-2, TRBJ2-1)
CASTPGTGIYNEQFF

SEQ ID NO: 307307 - protein, 13 aa, Homo sapiens
  CDR3 for alpha chain variable domain of TCR clone 153654 (TRAV2, TRAJ40)
CEVVTSGTYKYIF

SEQ ID NO: 307308 - protein, 15 aa, Homo sapiens
  CDR3 for beta chain variable domain of TCR clone 153654 (TRBV11-3, TRBJ2-3)
CASLKDGREGDTQYF

SEQ ID NO: 307309 - protein, 15 aa, Homo sapiens
  CDR3 for alpha chain variable domain of TCR clone 153655 (TRAV8-2, TRAJ16)
CVVSDGFSEGQKLLF

SEQ ID NO: 307310 - protein, 14 aa, Homo sapiens
  CDR3 for beta chain variable domain of TCR clone 153655 (TRBV24-1, TRBJ1-1)
CATSIPRGDTEAFF

SEQ ID NO: 307311 - protein, 14 aa, Homo sapiens
  CDR3 for alpha chain variable domain of TCR clone 153656 (TRAV26-2, TRAJ31)
CILIPGNNNARPMF

SEQ ID NO: 307312 - protein, 16 aa, Homo sapiens
  CDR3 for beta chain variable domain of TCR clone 153656 (TRBV7-3, TRBJ2-1)
CASSLVGGSSNNEQFF

SEQ ID NO: 307313 - protein, 13 aa, Homo sapiens
  CDR3 for alpha chain variable domain of TCR clone 153657 (TRAV21, TRAJ20)
CAVGVFADYKLSF

SEQ ID NO: 307314 - protein, 13 aa, Homo sapiens
  CDR3 for beta chain variable domain of TCR clone 153657 (TRBV4-2, TRBJ1-1)
CASSQAGNTEAFF

SEQ ID NO: 307315 - protein, 14 aa, Homo sapiens
  CDR3 for alpha chain variable domain of TCR clone 153658 (TRAV12-2, TRAJ6)
CASKWGGGSYIPTF

SEQ ID NO: 307316 - protein, 13 aa, Homo sapiens
  CDR3 for beta chain variable domain of TCR clone 153658 (TRBV2, TRBJ1-1)
CAGSVGGNTEAFF

SEQ ID NO: 307317 - protein, 15 aa, Homo sapiens
  CDR3 for alpha chain variable domain of TCR clone 153659 (TRAV21, TRAJ24)
CAARSSTDSWGKLQF

SEQ ID NO: 307318 - protein, 11 aa, Homo sapiens
  CDR3 for beta chain variable domain of TCR clone 153659 (TRBV11-2, TRBJ2-2)
CASSLSGELFF

SEQ ID NO: 307319 - protein, 14 aa, Homo sapiens
  CDR3 for alpha chain variable domain of TCR clone 153660 (TRAV12-1, TRAJ23)
CMVIVYNQGGKLIF

SEQ ID NO: 307320 - protein, 15 aa, Homo sapiens
  CDR3 for beta chain variable domain of TCR clone 153660 (TRBV20-1, TRBJ2-7)
CSARDRVSGMDEQYF

SEQ ID NO: 307321 - protein, 15 aa, Homo sapiens
  CDR3 for alpha chain variable domain of TCR clone 153661 (TRAV17, TRAJ13)
CATDAGSGGYQKTTF

SEQ ID NO: 307322 - protein, 17 aa, Homo sapiens
  CDR3 for beta chain variable domain of TCR clone 153661 (TRBV11-2, TRBJ2-1)
CASSLYPPGVEYNEQFF

SEQ ID NO: 307323 - protein, 14 aa, Homo sapiens
  CDR3 for alpha chain variable domain of TCR clone 153662 (TRAV12-3, TRAJ41)
CAMSAWNSGYALNF

SEQ ID NO: 307324 - protein, 14 aa, Homo sapiens
  CDR3 for beta chain variable domain of TCR clone 153662 (TRBV7-2, TRBJ2-7)
CASSPKTSFYEQYF

SEQ ID NO: 307325 - protein, 18 aa, Homo sapiens
  CDR3 for alpha chain variable domain of TCR clone 153663 (TRAV21, TRAJ52)
CAVRPSPAGGTSYGKLTF

SEQ ID NO: 307326 - protein, 14 aa, Homo sapiens
  CDR3 for beta chain variable domain of TCR clone 153663 (TRBV6-5, TRBJ2-7)
CASSSGVPPYEQYF

SEQ ID NO: 307327 - protein, 18 aa, Homo sapiens
  CDR3 for alpha chain variable domain of TCR clone 153664 (TRAV21, TRAJ52)
CAVSPSLAGGTSYGKLTF

SEQ ID NO: 307328 - protein, 13 aa, Homo sapiens
  CDR3 for beta chain variable domain of TCR clone 153664 (TRBV19, TRBJ1-2)
CASSVPGQDGYTF

SEQ ID NO: 307329 - protein, 12 aa, Homo sapiens
  CDR3 for alpha chain variable domain of TCR clone 153665 (TRAV21, TRAJ39)
CAADNAGNMLTF

SEQ ID NO: 307330 - protein, 15 aa, Homo sapiens
  CDR3 for beta chain variable domain of TCR clone 153665 (TRBV11-3, TRBJ2-3)
CASLKDGREGDTQYF

SEQ ID NO: 307331 - protein, 13 aa, Homo sapiens
  CDR3 for alpha chain variable domain of TCR clone 153666 (TRAV1-2, TRAJ9)
CAALNTGGFKTIF

SEQ ID NO: 307332 - protein, 17 aa, Homo sapiens
  CDR3 for beta chain variable domain of TCR clone 153666 (TRBV7-2, TRBJ1-4)
CASSFKAGPTTNEKLFF

SEQ ID NO: 307333 - protein, 13 aa, Homo sapiens
  CDR3 for alpha chain variable domain of TCR clone 153667 (TRAV17, TRAJ54)
CAAGIQGAQKLVF

SEQ ID NO: 307334 - protein, 14 aa, Homo sapiens
  CDR3 for beta chain variable domain of TCR clone 153667 (TRBV11-2, TRBJ1-2)
CASSLGTANYGHTF

SEQ ID NO: 307335 - protein, 13 aa, Homo sapiens
  CDR3 for alpha chain variable domain of TCR clone 153668 (TRAV35, TRAJ42)
CAGFPGSQGNLTF

SEQ ID NO: 307336 - protein, 14 aa, Homo sapiens
  CDR3 for beta chain variable domain of TCR clone 153668 (TRBV4-1, TRBJ2-2)
CASSQAVNTGVLFF

SEQ ID NO: 307337 - protein, 13 aa, Homo sapiens
  CDR3 for alpha chain variable domain of TCR clone 153669 (TRAV35, TRAJ44)
CAGLSGTASKLTF

SEQ ID NO: 307338 - protein, 17 aa, Homo sapiens
  CDR3 for beta chain variable domain of TCR clone 153669 (TRBV7-8, TRBJ1-2)
CASRLRPLQGHLYGYTF

SEQ ID NO: 307339 - protein, 17 aa, Homo sapiens
  CDR3 for alpha chain variable domain of TCR clone 153670 (TRAV12-3, TRAJ52)
CASPPFAGGTSYGKLTF

SEQ ID NO: 307340 - protein, 16 aa, Homo sapiens
  CDR3 for beta chain variable domain of TCR clone 153670 (TRBV6-5, TRBJ2-5)
CGSSSVGRWGRETQYF

SEQ ID NO: 307341 - protein, 17 aa, Homo sapiens
  CDR3 for alpha chain variable domain of TCR clone 153671 (TRAV3, TRAJ6)
CAVRDGPRAGGSYIPTF

SEQ ID NO: 307342 - protein, 16 aa, Homo sapiens
  CDR3 for beta chain variable domain of TCR clone 153671 (TRBV4-1, TRBJ2-7)
CASSQDPTGYSYEQYF

SEQ ID NO: 307343 - protein, 14 aa, Homo sapiens
  CDR3 for alpha chain variable domain of TCR clone 153672 (TRAV29/DV5, TRAJ32)
CAAAYGVATNKLIF

SEQ ID NO: 307344 - protein, 11 aa, Homo sapiens
  CDR3 for beta chain variable domain of TCR clone 153672 (TRBV11-2, TRBJ2-2)
CASSLPGELFF

SEQ ID NO: 307345 - protein, 14 aa, Homo sapiens
  CDR3 for alpha chain variable domain of TCR clone 153673 (TRAV1-2, TRAJ16)
CAVNRFSVGQKLLF

SEQ ID NO: 307346 - protein, 14 aa, Homo sapiens
  CDR3 for beta chain variable domain of TCR clone 153673 (TRBV13, TRBJ1-1)
CASTVITVNTEAFF

SEQ ID NO: 307347 - protein, 14 aa, Homo sapiens
  CDR3 for alpha chain variable domain of TCR clone 153674 (TRAV23/DV6, TRAJ37)
CAASTSSNTGKLIF

SEQ ID NO: 307348 - protein, 15 aa, Homo sapiens
  CDR3 for beta chain variable domain of TCR clone 153674 (TRBV7-9, TRBJ2-7)
CASSPGGGSTYEQYV

SEQ ID NO: 307349 - protein, 13 aa, Homo sapiens
  CDR3 for alpha chain variable domain of TCR clone 153675 (TRAV2, TRAJ40)
CAVVTSGTYKYIF

SEQ ID NO: 307350 - protein, 14 aa, Homo sapiens
  CDR3 for beta chain variable domain of TCR clone 153675 (TRBV4-1, TRBJ1-6)
CASSPGSDSSPLHF

SEQ ID NO: 307351 - protein, 13 aa, Homo sapiens
  CDR3 for alpha chain variable domain of TCR clone 153676 (TRAV29/DV5, TRAJ31)
CAASRNNNARLRF

SEQ ID NO: 307352 - protein, 15 aa, Homo sapiens
  CDR3 for beta chain variable domain of TCR clone 153676 (TRBV2, TRBJ2-1)
CASSELAGSYNEQFF

SEQ ID NO: 307353 - protein, 14 aa, Homo sapiens
  CDR3 for alpha chain variable domain of TCR clone 153677 (TRAV17, TRAJ22)
CATVISGSSRQLTF

SEQ ID NO: 307354 - protein, 13 aa, Homo sapiens
  CDR3 for beta chain variable domain of TCR clone 153677 (TRBV15, TRBJ1-6)
CATSGGLNSPLHF

SEQ ID NO: 307355 - protein, 10 aa, Homo sapiens
  CDR3 for alpha chain variable domain of TCR clone 153678 (TRAV23/DV6, TRAJ57)
CAASSTLSQG

SEQ ID NO: 307356 - protein, 16 aa, Homo sapiens
  CDR3 for beta chain variable domain of TCR clone 153678 (TRBV7-8, TRBJ2-6)
CASRVGDSSGANVLTF

SEQ ID NO: 307357 - protein, 17 aa, Homo sapiens
  CDR3 for alpha chain variable domain of TCR clone 153679 (TRAV3, TRAJ6)
CAVRDVPRAGGSYKPTF

SEQ ID NO: 307358 - protein, 14 aa, Homo sapiens
  CDR3 for beta chain variable domain of TCR clone 153679 (TRBV7-2, TRBJ2-7)
CASSPKTSFYEQYF

SEQ ID NO: 307359 - protein, 12 aa, Homo sapiens
  CDR3 for alpha chain variable domain of TCR clone 153680 (TRAV29/DV5, TRAJ53)
CAASGGNYKLTF

SEQ ID NO: 307360 - protein, 14 aa, Homo sapiens
  CDR3 for beta chain variable domain of TCR clone 153680 (TRBV11-2, TRBJ2-5)
CASSRTGGIETQYF

SEQ ID NO: 307361 - protein, 16 aa, Homo sapiens
  CDR3 for alpha chain variable domain of TCR clone 153681 (TRAV3, TRAJ37)
CAVRGKGSGNTGKLIL

SEQ ID NO: 307362 - protein, 15 aa, Homo sapiens
  CDR3 for beta chain variable domain of TCR clone 153681 (TRBV6-6, TRBJ2-5)
CASSYGKIIQETQYF

SEQ ID NO: 307363 - protein, 14 aa, Homo sapiens
  CDR3 for alpha chain variable domain of TCR clone 153682 (TRAV12-1, TRAJ4)
CVVPLKSGYNKLIF

SEQ ID NO: 307364 - protein, 15 aa, Homo sapiens
  CDR3 for beta chain variable domain of TCR clone 153682 (TRBV27, TRBJ2-7)
CASGRGGAYEQYLGR

SEQ ID NO: 307365 - protein, 15 aa, Homo sapiens
  CDR3 for alpha chain variable domain of TCR clone 153683 (TRAV26-1, TRAJ29)
CIVRVGGSANTPLVF

SEQ ID NO: 307366 - protein, 15 aa, Homo sapiens
  CDR3 for beta chain variable domain of TCR clone 153683 (TRBV7-9, TRBJ1-5)
CASSQGHQPNQPQHF

SEQ ID NO: 307367 - protein, 15 aa, Homo sapiens
  CDR3 for alpha chain variable domain of TCR clone 153684 (TRAV30, TRAJ57)
CGTAIPQGGSEKLVF

SEQ ID NO: 307368 - protein, 13 aa, Homo sapiens
  CDR3 for beta chain variable domain of TCR clone 153684 (TRBV7-9, TRBJ1-2)
CASSPSNFWGYIF

SEQ ID NO: 307369 - protein, 15 aa, Homo sapiens
  CDR3 for alpha chain variable domain of TCR clone 153685 (TRAV27, TRAJ38)
CAARRNAGNNRKLIW

SEQ ID NO: 307370 - protein, 13 aa, Homo sapiens
  CDR3 for beta chain variable domain of TCR clone 153685 (TRBV12-5, TRBJ2-3)
CASGDRRSDTQYL

SEQ ID NO: 307371 - protein, 12 aa, Homo sapiens
  CDR3 for alpha chain variable domain of TCR clone 153686 (TRAV13-1, TRAJ21)
CAAKEGFNKFYF

SEQ ID NO: 307372 - protein, 17 aa, Homo sapiens
  CDR3 for beta chain variable domain of TCR clone 153686 (TRBV13, TRBJ2-3)
CAISLSRVAGGRNTQYF

SEQ ID NO: 307373 - protein, 16 aa, Homo sapiens
  CDR3 for alpha chain variable domain of TCR clone 153687 (TRAV13-1, TRAJ45)
CAAPKESGGGAYGLTF

SEQ ID NO: 307374 - protein, 17 aa, Homo sapiens
  CDR3 for beta chain variable domain of TCR clone 153687 (TRBV4-1, TRBJ2-7)
CASSRDPLGVRGGEQYF

SEQ ID NO: 307375 - protein, 15 aa, Homo sapiens
  CDR3 for alpha chain variable domain of TCR clone 153688 (TRAV12-3, TRAJ6)
CAMSATTGGSYIPTF

SEQ ID NO: 307376 - protein, 13 aa, Homo sapiens
  CDR3 for beta chain variable domain of TCR clone 153688 (TRBV12-4, TRBJ1-2)
CASSMTGGYGYTF

SEQ ID NO: 307377 - protein, 18 aa, Homo sapiens
  CDR3 for alpha chain variable domain of TCR clone 153689 (TRAV21, TRAJ52)
CAVRPSPAGGTSYGKLTF

SEQ ID NO: 307378 - protein, 13 aa, Homo sapiens
  CDR3 for beta chain variable domain of TCR clone 153689 (TRBV7-3, TRBJ1-2)
CASSLKRGYGYTF

SEQ ID NO: 307379 - protein, 13 aa, Homo sapiens
  CDR3 for alpha chain variable domain of TCR clone 153690 (TRAV27, TRAJ42)
CAGARGSQGNLIF

SEQ ID NO: 307380 - protein, 14 aa, Homo sapiens
  CDR3 for beta chain variable domain of TCR clone 153690 (TRBV20-1, TRBJ1-1)
CSAQTRIGGTEAFS

SEQ ID NO: 307381 - protein, 16 aa, Homo sapiens
  CDR3 for alpha chain variable domain of TCR clone 153691 (TRAV38-1, TRAJ32)
CAFMKGGGGATNKLIF

SEQ ID NO: 307382 - protein, 14 aa, Homo sapiens
  CDR3 for beta chain variable domain of TCR clone 153691 (TRBV13, TRBJ2-2)
CASSFQGGAGELFF

SEQ ID NO: 307383 - protein, 15 aa, Homo sapiens
  CDR3 for alpha chain variable domain of TCR clone 153692 (TRAV3, TRAJ3)
CAVRDRDSSASKIIF

SEQ ID NO: 307384 - protein, 18 aa, Homo sapiens
  CDR3 for beta chain variable domain of TCR clone 153692 (TRBV25-1, TRBJ1-2)
CASSGLQNGQGLIFGFTF

SEQ ID NO: 307385 - protein, 14 aa, Homo sapiens
  CDR3 for alpha chain variable domain of TCR clone 153693 (TRAV13-1, TRAJ4)
CAATLPSGYNKLVF

SEQ ID NO: 307386 - protein, 14 aa, Homo sapiens
  CDR3 for beta chain variable domain of TCR clone 153693 (TRBV19, TRBJ2-1)
CASPTFVLSGEQFF

SEQ ID NO: 307387 - protein, 14 aa, Homo sapiens
  CDR3 for alpha chain variable domain of TCR clone 153694 (TRAV4, TRAJ17)
CLVGPQAAGNRLTF

SEQ ID NO: 307388 - protein, 14 aa, Homo sapiens
  CDR3 for beta chain variable domain of TCR clone 153694 (TRBV18, TRBJ2-7)
CASSPRGGAYEQYF

SEQ ID NO: 307389 - protein, 16 aa, Homo sapiens
  CDR3 for alpha chain variable domain of TCR clone 153695 (TRAV30, TRAJ24)
CGTEIVDADSCGKFQF

SEQ ID NO: 307390 - protein, 16 aa, Homo sapiens
  CDR3 for beta chain variable domain of TCR clone 153695 (TRBV4-1, TRBJ2-7)
CASSQEGTASSYEQYF

SEQ ID NO: 307391 - protein, 14 aa, Homo sapiens
  CDR3 for alpha chain variable domain of TCR clone 153696 (TRAV12-1, TRAJ9)
CVVNINTGGFKTIF

SEQ ID NO: 307392 - protein, 15 aa, Homo sapiens
  CDR3 for beta chain variable domain of TCR clone 153696 (TRBV2, TRBJ2-1)
CASSDRSSGAREQFF

SEQ ID NO: 307393 - protein, 14 aa, Homo sapiens
  CDR3 for alpha chain variable domain of TCR clone 153697 (TRAV13-1, TRAJ40)
CAASMTSGTYKYIF

SEQ ID NO: 307394 - protein, 14 aa, Homo sapiens
  CDR3 for beta chain variable domain of TCR clone 153697 (TRBV9, TRBJ2-7)
CASSVGVGSYEQYF

SEQ ID NO: 307395 - protein, 15 aa, Homo sapiens
  CDR3 for alpha chain variable domain of TCR clone 153698 (TRAV26-1, TRAJ40)
CIVRVTTSGTDKYIF

SEQ ID NO: 307396 - protein, 12 aa, Homo sapiens
  CDR3 for beta chain variable domain of TCR clone 153698 (TRBV7-9, TRBJ1-4)
CASSTDREKLFF

SEQ ID NO: 307397 - protein, 11 aa, Homo sapiens
  CDR3 for alpha chain variable domain of TCR clone 153699 (TRAV12-2, )
CAVASLAATIS

SEQ ID NO: 307398 - protein, 16 aa, Homo sapiens
  CDR3 for beta chain variable domain of TCR clone 153699 (TRBV5-1, TRBJ2-2)
CASSSRAGGRTGELFF

SEQ ID NO: 307399 - protein, 11 aa, Homo sapiens
  CDR3 for alpha chain variable domain of TCR clone 153700 (TRAV16, TRAJ20)
CALSEGFKAAL

SEQ ID NO: 307400 - protein, 13 aa, Homo sapiens
  CDR3 for beta chain variable domain of TCR clone 153700 (TRBV7-3, TRBJ2-1)
CASSLASYNEQFF

SEQ ID NO: 307401 - protein, 12 aa, Homo sapiens
  CDR3 for alpha chain variable domain of TCR clone 153701 (TRAV21, TRAJ58)
CSAETSGSMLTF

SEQ ID NO: 307402 - protein, 15 aa, Homo sapiens
  CDR3 for beta chain variable domain of TCR clone 153701 (TRBV20-1, TRBJ2-7)
CSARDPVKGEGEQYF

SEQ ID NO: 307403 - protein, 13 aa, Homo sapiens
  CDR3 for alpha chain variable domain of TCR clone 153702 (TRAV8-2, TRAJ13)
CVVSDLRYQKVTF

SEQ ID NO: 307404 - protein, 14 aa, Homo sapiens
  CDR3 for beta chain variable domain of TCR clone 153702 (TRBV25-1, TRBJ1-1)
CASTHLGENTEAFF

SEQ ID NO: 307405 - protein, 12 aa, Homo sapiens
  CDR3 for alpha chain variable domain of TCR clone 153703 (TRAV30, TRAJ39)
CGRGNAGNMLTF

SEQ ID NO: 307406 - protein, 12 aa, Homo sapiens
  CDR3 for beta chain variable domain of TCR clone 153703 (TRBV10-3, TRBJ1-1)
CVGVERGLEALF

SEQ ID NO: 307407 - protein, 18 aa, Homo sapiens
  CDR3 for alpha chain variable domain of TCR clone 153704 (TRAV21, TRAJ52)
CAVRPSPAGGTSYGKLTF

SEQ ID NO: 307408 - protein, 13 aa, Homo sapiens
  CDR3 for beta chain variable domain of TCR clone 153704 (TRBV6-1, TRBJ1-1)
CASSEGWGTEAFF

SEQ ID NO: 307409 - protein, 15 aa, Homo sapiens
  CDR3 for alpha chain variable domain of TCR clone 153705 (TRAV29/DV5, TRAJ40)
CAASAQGSGTYKYIF

SEQ ID NO: 307410 - protein, 16 aa, Homo sapiens
  CDR3 for beta chain variable domain of TCR clone 153705 (TRBV20-1, TRBJ1-4)
CSAPGQGLLTNEKLFF

SEQ ID NO: 307411 - protein, 13 aa, Homo sapiens
  CDR3 for alpha chain variable domain of TCR clone 153706 (TRAV3, TRAJ27)
CAVRPLGAGKSTF

SEQ ID NO: 307412 - protein, 12 aa, Homo sapiens
  CDR3 for beta chain variable domain of TCR clone 153706 (TRBV19, TRBJ1-4)
CASKDWPGGLFF

SEQ ID NO: 307413 - protein, 13 aa, Homo sapiens
  CDR3 for alpha chain variable domain of TCR clone 153707 (TRAV25, TRAJ10)
CAGRTGGGNKLTF

SEQ ID NO: 307414 - protein, 19 aa, Homo sapiens
  CDR3 for beta chain variable domain of TCR clone 153707 (TRBV7-2, TRBJ2-3)
CASSFLSRNWGGGTDTQYF

SEQ ID NO: 307415 - protein, 13 aa, Homo sapiens
  CDR3 for alpha chain variable domain of TCR clone 153708 (TRAV23/DV6, TRAJ36)
CAAGQTGANNLFF

SEQ ID NO: 307416 - protein, 12 aa, Homo sapiens
  CDR3 for beta chain variable domain of TCR clone 153708 (TRBV11-2, TRBJ2-2)
CASSLPTGELFF

SEQ ID NO: 307417 - protein, 15 aa, Homo sapiens
  CDR3 for alpha chain variable domain of TCR clone 153709 (TRAV1-2, TRAJ18)
CAVRGEAQPWGGYTL

SEQ ID NO: 307418 - protein, 15 aa, Homo sapiens
  CDR3 for beta chain variable domain of TCR clone 153709 (TRBV20-1, TRBJ2-1)
CSAEGGLLAGDEQFF

SEQ ID NO: 307419 - protein, 15 aa, Homo sapiens
  CDR3 for alpha chain variable domain of TCR clone 153710 (TRAV12-2, TRAJ43)
CAFDMRFGAGTRLTV

SEQ ID NO: 307420 - protein, 17 aa, Homo sapiens
  CDR3 for beta chain variable domain of TCR clone 153710 (TRBV13, TRBJ2-3)
CANSLSRVAGGRNTQYF

SEQ ID NO: 307421 - protein, 13 aa, Homo sapiens
  CDR3 for alpha chain variable domain of TCR clone 153711 (TRAV23/DV6, TRAJ47)
CAASMTRGNKLVC

SEQ ID NO: 307422 - protein, 14 aa, Homo sapiens
  CDR3 for beta chain variable domain of TCR clone 153711 (TRBV7-3, TRBJ1-1)
CASSLKGGNTEAFF

SEQ ID NO: 307423 - protein, 15 aa, Homo sapiens
  CDR3 for alpha chain variable domain of TCR clone 153712 (TRAV26-1, TRAJ29)
CIVRVEGSGNTHLVF

SEQ ID NO: 307424 - protein, 15 aa, Homo sapiens
  CDR3 for beta chain variable domain of TCR clone 153712 (TRBV7-2, TRBJ2-7)
CASSTPGLTRGEQYF

SEQ ID NO: 307425 - protein, 12 aa, Homo sapiens
  CDR3 for alpha chain variable domain of TCR clone 153713 (TRAV27, TRAJ9)
CAGESGGFKTIF

SEQ ID NO: 307426 - protein, 14 aa, Homo sapiens
  CDR3 for beta chain variable domain of TCR clone 153713 (TRBV7-2, TRBJ2-7)
CASSLRWEVNEQYF

SEQ ID NO: 307427 - protein, 12 aa, Homo sapiens
  CDR3 for alpha chain variable domain of TCR clone 153714 (TRAV13-1, TRAJ21)
CAAKEGFNKFYF

SEQ ID NO: 307428 - protein, 15 aa, Homo sapiens
  CDR3 for beta chain variable domain of TCR clone 153714 (TRBV7-7, TRBJ2-5)
CASRQLERAEETQYF

SEQ ID NO: 307429 - protein, 15 aa, Homo sapiens
  CDR3 for alpha chain variable domain of TCR clone 153715 (TRAV34, TRAJ38)
CGADFTPGNNRKLIW

SEQ ID NO: 307430 - protein, 16 aa, Homo sapiens
  CDR3 for beta chain variable domain of TCR clone 153715 (TRBV12-5, TRBJ2-5)
CASGPRTSGNQETKYF

SEQ ID NO: 307431 - protein, 11 aa, Homo sapiens
  CDR3 for alpha chain variable domain of TCR clone 153716 (TRAV21, TRAJ39)
LLVNAGNMFTF

SEQ ID NO: 307432 - protein, 15 aa, Homo sapiens
  CDR3 for beta chain variable domain of TCR clone 153716 (TRBV29-1, TRBJ2-1)
CSGRDRKSSYNEQFF

SEQ ID NO: 307433 - protein, 14 aa, Homo sapiens
  CDR3 for alpha chain variable domain of TCR clone 153717 (TRAV20, TRAJ44)
CAVQDTGTASKLTF

SEQ ID NO: 307434 - protein, 13 aa, Homo sapiens
  CDR3 for beta chain variable domain of TCR clone 153717 (TRBV29-1, TRBJ1-3)
CSAGTGRGNTVYF

SEQ ID NO: 307435 - protein, 14 aa, Homo sapiens
  CDR3 for alpha chain variable domain of TCR clone 153718 (TRAV26-1, TRAJ49)
CIVRLTNTGNQFYF

SEQ ID NO: 307436 - protein, 12 aa, Homo sapiens
  CDR3 for beta chain variable domain of TCR clone 153718 (TRBV11-2, TRBJ2-2)
CASSLGGGELFF

SEQ ID NO: 307437 - protein, 15 aa, Homo sapiens
  CDR3 for alpha chain variable domain of TCR clone 153719 (TRAV38-1, TRAJ57)
CAFMDSQGGSEKLVF

SEQ ID NO: 307438 - protein, 20 aa, Homo sapiens
  CDR3 for beta chain variable domain of TCR clone 153719 (TRBV7-8, TRBJ2-2)
CASSHLFPGPTIHITGELFF

SEQ ID NO: 307439 - protein, 11 aa, Homo sapiens
  CDR3 for alpha chain variable domain of TCR clone 153720 (TRAV1-1, TRAJ23)
CAVRQGGKLIF

SEQ ID NO: 307440 - protein, 15 aa, Homo sapiens
  CDR3 for beta chain variable domain of TCR clone 153720 (TRBV2, TRBJ1-1)
CASTEPGQGASGAFF

SEQ ID NO: 307441 - protein, 11 aa, Homo sapiens
  CDR3 for alpha chain variable domain of TCR clone 153721 (TRAV12-2, TRAJ31)
CAVTRWARPMF

SEQ ID NO: 307442 - protein, 15 aa, Homo sapiens
  CDR3 for beta chain variable domain of TCR clone 153721 (TRBV19, TRBJ2-7)
CASSIGGGFVNEQYF

SEQ ID NO: 307443 - protein, 13 aa, Homo sapiens
  CDR3 for alpha chain variable domain of TCR clone 153722 (TRAV12-1, TRAJ16)
CVVSTRNGQKLPF

SEQ ID NO: 307444 - protein, 19 aa, Homo sapiens
  CDR3 for beta chain variable domain of TCR clone 153722 (TRBV6-1, TRBJ2-5)
CASSRFGAGGPGLEETQYF

SEQ ID NO: 307445 - protein, 19 aa, Homo sapiens
  CDR3 for alpha chain variable domain of TCR clone 153723 (TRAV26-1, TRAJ52)
CIVRAHRNAGGTSYGKLTF

SEQ ID NO: 307446 - protein, 15 aa, Homo sapiens
  CDR3 for beta chain variable domain of TCR clone 153723 (TRBV29-1, TRBJ2-1)
CSGRDSKSSYNEQFF

SEQ ID NO: 307447 - protein, 13 aa, Homo sapiens
  CDR3 for alpha chain variable domain of TCR clone 153724 (TRAV1-1, TRAJ9)
CAAKNTGGFKTIF

SEQ ID NO: 307448 - protein, 14 aa, Homo sapiens
  CDR3 for beta chain variable domain of TCR clone 153724 (TRBV11-2, TRBJ2-5)
CASSRTGGIETQYF

SEQ ID NO: 307449 - protein, 10 aa, Homo sapiens
  CDR3 for alpha chain variable domain of TCR clone 153725 (TRAV23/DV6, TRAJ57)
CAASSTLSQV

SEQ ID NO: 307450 - protein, 13 aa, Homo sapiens
  CDR3 for beta chain variable domain of TCR clone 153725 (TRBV7-7, TRBJ2-5)
CASSRSGQETQYF

SEQ ID NO: 307451 - protein, 13 aa, Homo sapiens
  CDR3 for alpha chain variable domain of TCR clone 153726 (TRAV27, TRAJ29)
CAGAHSGNTPLVF

SEQ ID NO: 307452 - protein, 12 aa, Homo sapiens
  CDR3 for beta chain variable domain of TCR clone 153726 (TRBV28, TRBJ1-5)
CASRDSNQPQHF

SEQ ID NO: 307453 - protein, 11 aa, Homo sapiens
  CDR3 for alpha chain variable domain of TCR clone 153727 (TRAV13-2, TRAJ26)
CADIPGQNFVF

SEQ ID NO: 307454 - protein, 19 aa, Homo sapiens
  CDR3 for beta chain variable domain of TCR clone 153727 (TRBV19, TRBJ2-2)
CASTRPGLAGGRVTGELFF

SEQ ID NO: 307455 - protein, 14 aa, Homo sapiens
  CDR3 for alpha chain variable domain of TCR clone 153728 (TRAV1-2, TRAJ6)
CAVSLSGGSYIPTF

SEQ ID NO: 307456 - protein, 15 aa, Homo sapiens
  CDR3 for beta chain variable domain of TCR clone 153728 (TRBV28, TRBJ2-7)
CASSPGGWGFYEQYF

SEQ ID NO: 307457 - protein, 14 aa, Homo sapiens
  CDR3 for alpha chain variable domain of TCR clone 153729 (TRAV26-1, TRAJ38)
CIADNAGNNRKLIW

SEQ ID NO: 307458 - protein, 18 aa, Homo sapiens
  CDR3 for beta chain variable domain of TCR clone 153729 (TRBV18, TRBJ1-3)
CASSPRGGAGPSGNTIYF

SEQ ID NO: 307459 - protein, 14 aa, Homo sapiens
  CDR3 for alpha chain variable domain of TCR clone 153730 (TRAV8-3, TRAJ28)
CAVVPGAGSYQLTF

SEQ ID NO: 307460 - protein, 16 aa, Homo sapiens
  CDR3 for beta chain variable domain of TCR clone 153730 (TRBV19, TRBJ2-3)
CASSPGAASRTDTQYF

SEQ ID NO: 307461 - protein, 14 aa, Homo sapiens
  CDR3 for alpha chain variable domain of TCR clone 153731 (TRAV16, TRAJ42)
CALPAGGSQGNLIF

SEQ ID NO: 307462 - protein, 14 aa, Homo sapiens
  CDR3 for beta chain variable domain of TCR clone 153731 (TRBV9, TRBJ2-7)
CASSVGVGSYEQYF

SEQ ID NO: 307463 - protein, 16 aa, Homo sapiens
  CDR3 for alpha chain variable domain of TCR clone 153732 (TRAV13-1, TRAJ45)
CAARGSRKGGADGLTC

SEQ ID NO: 307464 - protein, 13 aa, Homo sapiens
  CDR3 for beta chain variable domain of TCR clone 153732 (TRBV12-4, TRBJ2-5)
CASRKRGKETQYF

SEQ ID NO: 307465 - protein, 15 aa, Homo sapiens
  CDR3 for alpha chain variable domain of TCR clone 153733 (TRAV26-1, TRAJ40)
CIVRVTTSGTYKYIF

SEQ ID NO: 307466 - protein, 11 aa, Homo sapiens
  CDR3 for beta chain variable domain of TCR clone 153733 (TRBV7-9, TRBJ1-4)
CSSTDREKLFF

SEQ ID NO: 307467 - protein, 12 aa, Homo sapiens
  CDR3 for alpha chain variable domain of TCR clone 153734 (TRAV8-3, TRAJ26)
CAGDNYSQNFVF

SEQ ID NO: 307468 - protein, 15 aa, Homo sapiens
  CDR3 for beta chain variable domain of TCR clone 153734 (TRBV11-2, TRBJ2-1)
CASSLGTSGLNEQFF

SEQ ID NO: 307469 - protein, 14 aa, Homo sapiens
  CDR3 for alpha chain variable domain of TCR clone 153735 (TRAV12-2, TRAJ40)
CAVKIPSGTYKYIF

SEQ ID NO: 307470 - protein, 14 aa, Homo sapiens
  CDR3 for beta chain variable domain of TCR clone 153735 (TRBV19, TRBJ2-1)
CARGARSFQWEQFF

SEQ ID NO: 307471 - protein, 17 aa, Homo sapiens
  CDR3 for alpha chain variable domain of TCR clone 153736 (TRAV26-2, TRAJ42)
CILRDVGYGGSQGNLIF

SEQ ID NO: 307472 - protein, 12 aa, Homo sapiens
  CDR3 for beta chain variable domain of TCR clone 153736 (TRBV12-4, TRBJ1-3)
CARSFSGNTIYF

SEQ ID NO: 307473 - protein, 15 aa, Homo sapiens
  CDR3 for alpha chain variable domain of TCR clone 153737 (TRAV26-1, TRAJ29)
FIARVEGSGNTPLVF

SEQ ID NO: 307474 - protein, 15 aa, Homo sapiens
  CDR3 for beta chain variable domain of TCR clone 153737 (TRBV7-9, TRBJ1-5)
CASSQGHQPNQPQHF

SEQ ID NO: 307475 - protein, 16 aa, Homo sapiens
  CDR3 for alpha chain variable domain of TCR clone 153738 (TRAV3, TRAJ37)
CSVRPHGSGNTGKLIF

SEQ ID NO: 307476 - protein, 11 aa, Homo sapiens
  CDR3 for beta chain variable domain of TCR clone 153738 (TRBV10-3, TRBJ2-7)
CAISEGLEQYF

SEQ ID NO: 307477 - protein, 15 aa, Homo sapiens
  CDR3 for alpha chain variable domain of TCR clone 153739 (TRAV2, TRAJ9)
CTVEDRGTGGFKTIF

SEQ ID NO: 307478 - protein, 16 aa, Homo sapiens
  CDR3 for beta chain variable domain of TCR clone 153739 (TRBV24-1, TRBJ2-3)
CATSDPGTGATDTQYF

SEQ ID NO: 307479 - protein, 16 aa, Homo sapiens
  CDR3 for alpha chain variable domain of TCR clone 153740 (TRAV3, TRAJ10)
CAVRDMRAGGGNKLTF

SEQ ID NO: 307480 - protein, 14 aa, Homo sapiens
  CDR3 for beta chain variable domain of TCR clone 153740 (TRBV25-1, TRBJ1-1)
CASTPLGGNTEAFF

SEQ ID NO: 307481 - protein, 11 aa, Homo sapiens
  CDR3 for alpha chain variable domain of TCR clone 153741 (TRAV21, TRAJ39)
LLVNAGNMLTF

SEQ ID NO: 307482 - protein, 15 aa, Homo sapiens
  CDR3 for beta chain variable domain of TCR clone 153741 (TRBV7-3, TRBJ2-2)
CQQLKAGTLSGELFF

SEQ ID NO: 307483 - protein, 15 aa, Homo sapiens
  CDR3 for alpha chain variable domain of TCR clone 153742 (TRAV8-3, TRAJ45)
CASSYSGGGADGLTF

SEQ ID NO: 307484 - protein, 13 aa, Homo sapiens
  CDR3 for beta chain variable domain of TCR clone 153742 (TRBV10-3, TRBJ2-7)
CASERAVNYEQYF

SEQ ID NO: 307485 - protein, 15 aa, Homo sapiens
  CDR3 for alpha chain variable domain of TCR clone 153743 (TRAV12-2, TRAJ53)
CVVNGGGGSNYKLTF

SEQ ID NO: 307486 - protein, 12 aa, Homo sapiens
  CDR3 for beta chain variable domain of TCR clone 153743 (TRBV7-6, TRBJ2-5)
CASSLSQETQYF

SEQ ID NO: 307487 - protein, 12 aa, Homo sapiens
  CDR3 for alpha chain variable domain of TCR clone 153744 (TRAV17, TRAJ20)
CATDGDDYKLRF

SEQ ID NO: 307488 - protein, 18 aa, Homo sapiens
  CDR3 for beta chain variable domain of TCR clone 153744 (TRBV6-5, TRBJ2-5)
CASSYSQAGGSYQETQYF

SEQ ID NO: 307489 - protein, 13 aa, Homo sapiens
  CDR3 for alpha chain variable domain of TCR clone 153745 (TRAV8-4, TRAJ9)
CAVSETGGFKTIF

SEQ ID NO: 307490 - protein, 14 aa, Homo sapiens
  CDR3 for beta chain variable domain of TCR clone 153745 (TRBV18, TRBJ2-3)
CASSGLADTDTQYL

SEQ ID NO: 307491 - protein, 13 aa, Homo sapiens
  CDR3 for alpha chain variable domain of TCR clone 153746 (TRAV12-3, TRAJ9)
CAMRNTGGFQTIF

SEQ ID NO: 307492 - protein, 14 aa, Homo sapiens
  CDR3 for beta chain variable domain of TCR clone 153746 (TRBV11-2, TRBJ2-7)
CASSSTGEGYEQYF

SEQ ID NO: 307493 - protein, 14 aa, Homo sapiens
  CDR3 for alpha chain variable domain of TCR clone 153747 (TRAV8-1, TRAJ34)
CAVITTDNTDKLIF

SEQ ID NO: 307494 - protein, 14 aa, Homo sapiens
  CDR3 for beta chain variable domain of TCR clone 153747 (TRBV11-3, TRBJ1-3)
CASSHNGQGNTIYF

SEQ ID NO: 307495 - protein, 16 aa, Homo sapiens
  CDR3 for alpha chain variable domain of TCR clone 153748 (TRAV12-2, TRAJ52)
CRPANAGGTSYGKLTF

SEQ ID NO: 307496 - protein, 13 aa, Homo sapiens
  CDR3 for beta chain variable domain of TCR clone 153748 (TRBV10-3, TRBJ2-7)
CASKLAVNYEQYF

SEQ ID NO: 307497 - protein, 12 aa, Homo sapiens
  CDR3 for alpha chain variable domain of TCR clone 153749 (TRAV3, TRAJ43)
CAVRDPNNDMLF

SEQ ID NO: 307498 - protein, 14 aa, Homo sapiens
  CDR3 for beta chain variable domain of TCR clone 153749 (TRBV6-1, TRBJ1-3)
CSSVQGGGGNTIYF

SEQ ID NO: 307499 - protein, 13 aa, Homo sapiens
  CDR3 for alpha chain variable domain of TCR clone 153750 (TRAV8-4, TRAJ54)
CAVTGGGAQKRLF

SEQ ID NO: 307500 - protein, 16 aa, Homo sapiens
  CDR3 for beta chain variable domain of TCR clone 153750 (TRBV2, TRBJ2-6)
CASSEVGGAGANVLTF

SEQ ID NO: 307501 - protein, 16 aa, Homo sapiens
  CDR3 for alpha chain variable domain of TCR clone 153751 (TRAV8-3, TRAJ34)
CDAAEYFCAIPGKLIF

SEQ ID NO: 307502 - protein, 16 aa, Homo sapiens
  CDR3 for beta chain variable domain of TCR clone 153751 (TRBV7-6, TRBJ2-1)
CASSAPGPSSYNEQFF

SEQ ID NO: 307503 - protein, 14 aa, Homo sapiens
  CDR3 for alpha chain variable domain of TCR clone 153752 (TRAV12-2, TRAJ17)
CAVLFKAAGNKLTF

SEQ ID NO: 307504 - protein, 17 aa, Homo sapiens
  CDR3 for beta chain variable domain of TCR clone 153752 (TRBV20-1, TRBJ2-2)
WSASGSGQGGLTGELLF

SEQ ID NO: 307505 - protein, 13 aa, Homo sapiens
  CDR3 for alpha chain variable domain of TCR clone 153753 (TRAV1-1, TRAJ10)
CAVNSGGYQKVTF

SEQ ID NO: 307506 - protein, 12 aa, Homo sapiens
  CDR3 for beta chain variable domain of TCR clone 153753 (TRBV28, TRBJ2-1)
CAISVQINEQFF

SEQ ID NO: 307507 - protein, 11 aa, Homo sapiens
  CDR3 for alpha chain variable domain of TCR clone 153754 (TRAV13-1, TRAJ43)
CAAHNNNDMRF

SEQ ID NO: 307508 - protein, 15 aa, Homo sapiens
  CDR3 for beta chain variable domain of TCR clone 153754 (TRBV7-2, TRBJ2-7)
CASSLVSSGSYEQYF

SEQ ID NO: 307509 - protein, 14 aa, Homo sapiens
  CDR3 for alpha chain variable domain of TCR clone 153755 (TRAV1-2, TRAJ16)
CAVNRFSDGQNPLF

SEQ ID NO: 307510 - protein, 16 aa, Homo sapiens
  CDR3 for beta chain variable domain of TCR clone 153755 (TRBV12-4, TRBJ1-5)
CASSRPVGGSNQPQHF

SEQ ID NO: 307511 - protein, 15 aa, Homo sapiens
  CDR3 for alpha chain variable domain of TCR clone 153756 (TRAV26-1, TRAJ52)
CIVSDVGTSYGKLTF

SEQ ID NO: 307512 - protein, 15 aa, Homo sapiens
  CDR3 for beta chain variable domain of TCR clone 153756 (TRBV6-5, TRBJ2-7)
CASSASGRWSYEQYF

SEQ ID NO: 307513 - protein, 13 aa, Homo sapiens
  CDR3 for alpha chain variable domain of TCR clone 153757 (TRAV29/DV5, TRAJ31)
CAASRNNNARLMF

SEQ ID NO: 307514 - protein, 16 aa, Homo sapiens
  CDR3 for beta chain variable domain of TCR clone 153757 (TRBV7-2, TRBJ2-1)
CASSLVAGAGYNEQFF

SEQ ID NO: 307515 - protein, 15 aa, Homo sapiens
  CDR3 for alpha chain variable domain of TCR clone 153758 (TRAV14/DV4, TRAJ12)
CAMREERDRSYKLIF

SEQ ID NO: 307516 - protein, 16 aa, Homo sapiens
  CDR3 for beta chain variable domain of TCR clone 153758 (TRBV11-2, TRBJ1-2)
CASSLDRGGNNYGYTF

SEQ ID NO: 307517 - protein, 14 aa, Homo sapiens
  CDR3 for alpha chain variable domain of TCR clone 153759 (TRAV35, TRAJ33)
CSGSSQYSNYQLLC

SEQ ID NO: 307518 - protein, 15 aa, Homo sapiens
  CDR3 for beta chain variable domain of TCR clone 153759 (TRBV4-1, TRBJ1-4)
CASSDKGGTNEKLFF

SEQ ID NO: 307519 - protein, 20 aa, Homo sapiens
  CDR3 for alpha chain variable domain of TCR clone 153760 (TRAV12-3, TRAJ41)
SLFIRDSQPSDSATPEALNF

SEQ ID NO: 307520 - protein, 14 aa, Homo sapiens
  CDR3 for beta chain variable domain of TCR clone 153760 (TRBV12-5, TRBJ2-5)
CASGSRTHQETQYF

SEQ ID NO: 307521 - protein, 13 aa, Homo sapiens
  CDR3 for alpha chain variable domain of TCR clone 153761 (TRAV12-3, TRAJ7)
CAMTPYGNNRLAF

SEQ ID NO: 307522 - protein, 15 aa, Homo sapiens
  CDR3 for beta chain variable domain of TCR clone 153761 (TRBV5-1, TRBJ2-1)
CASSPPRAPYNEQFF

SEQ ID NO: 307523 - protein, 11 aa, Homo sapiens
  CDR3 for alpha chain variable domain of TCR clone 153762 (TRAV20, TRAJ53)
CGRGSNYKLTF

SEQ ID NO: 307524 - protein, 13 aa, Homo sapiens
  CDR3 for beta chain variable domain of TCR clone 153762 (TRBV7-2, TRBJ2-7)
CASSSPSGSEQYF

SEQ ID NO: 307525 - protein, 15 aa, Homo sapiens
  CDR3 for alpha chain variable domain of TCR clone 153763 (TRAV21, TRAJ32)
CAENSYGGATNKLIF

SEQ ID NO: 307526 - protein, 18 aa, Homo sapiens
  CDR3 for beta chain variable domain of TCR clone 153763 (TRBV7-9, TRBJ2-1)
CASSTGLAEGSSYNEQFF

SEQ ID NO: 307527 - protein, 10 aa, Homo sapiens
  CDR3 for alpha chain variable domain of TCR clone 153764 (TRAV12-3, TRAJ18)
CAMSAEAQPW

SEQ ID NO: 307528 - protein, 15 aa, Homo sapiens
  CDR3 for beta chain variable domain of TCR clone 153764 (TRBV15, TRBJ1-6)
CATSGALIHPSTLGT

SEQ ID NO: 307529 - protein, 14 aa, Homo sapiens
  CDR3 for alpha chain variable domain of TCR clone 153765 (TRAV29/DV5, TRAJ36)
CAARRKTGANNLFF

SEQ ID NO: 307530 - protein, 15 aa, Homo sapiens
  CDR3 for beta chain variable domain of TCR clone 153765 (TRBV2, TRBJ2-3)
CASSDFEKATDTQYF

SEQ ID NO: 307531 - protein, 16 aa, Homo sapiens
  CDR3 for alpha chain variable domain of TCR clone 153766 (TRAV12-3, TRAJ45)
CAMCWGSGGGADGLTF

SEQ ID NO: 307532 - protein, 18 aa, Homo sapiens
  CDR3 for beta chain variable domain of TCR clone 153766 (TRBV12-4, TRBJ2-2)
CASSLVAGTRGRTGELFF

SEQ ID NO: 307533 - protein, 11 aa, Homo sapiens
  CDR3 for alpha chain variable domain of TCR clone 153767 (TRAV21, TRAJ34)
CAVTNTDELIF

SEQ ID NO: 307534 - protein, 13 aa, Homo sapiens
  CDR3 for beta chain variable domain of TCR clone 153767 (TRBV5-5, TRBJ1-2)
CASSFWRGEDYTF

SEQ ID NO: 307535 - protein, 16 aa, Homo sapiens
  CDR3 for alpha chain variable domain of TCR clone 153768 (TRAV19, TRAJ20)
CALSGWRVPNDSKLSF

SEQ ID NO: 307536 - protein, 16 aa, Homo sapiens
  CDR3 for beta chain variable domain of TCR clone 153768 (TRBV7-9, TRBJ1-2)
CASSLGFSSGEDGYTF

SEQ ID NO: 307537 - protein, 12 aa, Homo sapiens
  CDR3 for alpha chain variable domain of TCR clone 153769 (TRAV12-3, TRAJ17)
CAMTPTGTKLTF

SEQ ID NO: 307538 - protein, 15 aa, Homo sapiens
  CDR3 for beta chain variable domain of TCR clone 153769 (TRBV20-1, TRBJ2-7)
CSARDRVSGMDEQYF

SEQ ID NO: 307539 - protein, 12 aa, Homo sapiens
  CDR3 for alpha chain variable domain of TCR clone 153770 (TRAV27, TRAJ9)
CAGASGGFKTIF

SEQ ID NO: 307540 - protein, 14 aa, Homo sapiens
  CDR3 for beta chain variable domain of TCR clone 153770 (TRBV6-1, TRBJ2-1)
CASAKDGFYNEQFF

SEQ ID NO: 307541 - protein, 14 aa, Homo sapiens
  CDR3 for alpha chain variable domain of TCR clone 153771 (TRAV1-2, TRAJ8)
CAVREDTGFQKLVF

SEQ ID NO: 307542 - protein, 18 aa, Homo sapiens
  CDR3 for beta chain variable domain of TCR clone 153771 (TRBV10-2, TRBJ2-2)
CISAPAVHRQADAGQLFF

SEQ ID NO: 307543 - protein, 18 aa, Homo sapiens
  CDR3 for alpha chain variable domain of TCR clone 153772 (TRAV8-3, TRAJ4)
WVRDPTSNDPGGYNKLIF

SEQ ID NO: 307544 - protein, 13 aa, Homo sapiens
  CDR3 for beta chain variable domain of TCR clone 153772 (TRBV20-1, TRBJ1-2)
CSTTGIQGSGYTF

SEQ ID NO: 307545 - protein, 13 aa, Homo sapiens
  CDR3 for alpha chain variable domain of TCR clone 153773 (TRAV8-3, TRAJ36)
CAVGATGANNLFF

SEQ ID NO: 307546 - protein, 15 aa, Homo sapiens
  CDR3 for beta chain variable domain of TCR clone 153773 (TRBV25-1, TRBJ1-4)
CASSPGDSTNEKLFF

SEQ ID NO: 307547 - protein, 15 aa, Homo sapiens
  CDR3 for alpha chain variable domain of TCR clone 153774 (TRAV26-2, TRAJ26)
CILRDFDNYGQNFVF

SEQ ID NO: 307548 - protein, 14 aa, Homo sapiens
  CDR3 for beta chain variable domain of TCR clone 153774 (TRBV11-2, TRBJ2-3)
CASSRLARTDTQYF

SEQ ID NO: 307549 - protein, 14 aa, Homo sapiens
  CDR3 for alpha chain variable domain of TCR clone 153775 (TRAV12-2, TRAJ6)
CASKWGGGSYIPTF

SEQ ID NO: 307550 - protein, 15 aa, Homo sapiens
  CDR3 for beta chain variable domain of TCR clone 153775 (TRBV4-1, TRBJ2-5)
CASSQWDLYQETQYF

SEQ ID NO: 307551 - protein, 21 aa, Homo sapiens
  CDR3 for alpha chain variable domain of TCR clone 153776 (TRAV8-3, TRAJ6)
CAVGGEEATYLHLEEEAALLF

SEQ ID NO: 307552 - protein, 14 aa, Homo sapiens
  CDR3 for beta chain variable domain of TCR clone 153776 (TRBV5-1, TRBJ2-7)
CASSRGESLYEQYF

SEQ ID NO: 307553 - protein, 14 aa, Homo sapiens
  CDR3 for alpha chain variable domain of TCR clone 153777 (TRAV10, TRAJ32)
CGEPRGGATNKLIF

SEQ ID NO: 307554 - protein, 14 aa, Homo sapiens
  CDR3 for beta chain variable domain of TCR clone 153777 (TRBV5-4, TRBJ2-2)
CASRLDGGTGELFL

SEQ ID NO: 307555 - protein, 16 aa, Homo sapiens
  CDR3 for alpha chain variable domain of TCR clone 153778 (TRAV3, TRAJ37)
FAVRVRGSGNTGKLIF

SEQ ID NO: 307556 - protein, 13 aa, Homo sapiens
  CDR3 for beta chain variable domain of TCR clone 153778 (TRBV7-9, TRBJ1-2)
CASSLKQNYGYTF

SEQ ID NO: 307557 - protein, 16 aa, Homo sapiens
  CDR3 for alpha chain variable domain of TCR clone 153779 (TRAV3, TRAJ18)
CAVRDGRGSTLGRRYL

SEQ ID NO: 307558 - protein, 17 aa, Homo sapiens
  CDR3 for beta chain variable domain of TCR clone 153779 (TRBV5-1, TRBJ2-3)
CASSKIGLADRTDTQYF

SEQ ID NO: 307559 - protein, 14 aa, Homo sapiens
  CDR3 for alpha chain variable domain of TCR clone 153780 (TRAV34, TRAJ44)
CGADGTGTASKLTF

SEQ ID NO: 307560 - protein, 11 aa, Homo sapiens
  CDR3 for beta chain variable domain of TCR clone 153780 (TRBV29-1, TRBJ2-5)
CSEDRTGTQYF

SEQ ID NO: 307561 - protein, 13 aa, Homo sapiens
  CDR3 for alpha chain variable domain of TCR clone 153781 (TRAV12-3, TRAJ13)
CAMSSGGYQKVTF

SEQ ID NO: 307562 - protein, 16 aa, Homo sapiens
  CDR3 for beta chain variable domain of TCR clone 153781 (TRBV4-1, TRBJ2-7)
CASSRGDIPNSYEQYF

SEQ ID NO: 307563 - protein, 16 aa, Homo sapiens
  CDR3 for alpha chain variable domain of TCR clone 153782 (TRAV35, TRAJ28)
CAGQRYSGAGSYQLTF

SEQ ID NO: 307564 - protein, 13 aa, Homo sapiens
  CDR3 for beta chain variable domain of TCR clone 153782 (TRBV19, TRBJ1-2)
CAISQGQVYGDTF

SEQ ID NO: 307565 - protein, 14 aa, Homo sapiens
  CDR3 for alpha chain variable domain of TCR clone 153783 (TRAV1-2, TRAJ16)
CAVNRFSDGQQLLF

SEQ ID NO: 307566 - protein, 14 aa, Homo sapiens
  CDR3 for beta chain variable domain of TCR clone 153783 (TRBV7-3, TRBJ1-1)
CASSLKGGNTEAFF

SEQ ID NO: 307567 - protein, 13 aa, Homo sapiens
  CDR3 for alpha chain variable domain of TCR clone 153784 (TRAV12-3, TRAJ43)
CAMIRPNNNDMRF

SEQ ID NO: 307568 - protein, 11 aa, Homo sapiens
  CDR3 for beta chain variable domain of TCR clone 153784 (TRBV29-1, TRBJ2-5)
CSEDRAGTQYF

SEQ ID NO: 307569 - protein, 17 aa, Homo sapiens
  CDR3 for alpha chain variable domain of TCR clone 153785 (TRAV8-2, )
CVVNIQNPDPAVYQLRD

SEQ ID NO: 307570 - protein, 17 aa, Homo sapiens
  CDR3 for beta chain variable domain of TCR clone 153785 (TRBV19, TRBJ1-5)
CASSRDRILSRFQPQHF

SEQ ID NO: 307571 - protein, 14 aa, Homo sapiens
  CDR3 for alpha chain variable domain of TCR clone 153786 (TRAV13-1, TRAJ8)
CAASEDTGFQKLGF

SEQ ID NO: 307572 - protein, 13 aa, Homo sapiens
  CDR3 for beta chain variable domain of TCR clone 153786 (TRBV19, TRBJ1-5)
CASSARRDQPQHF

SEQ ID NO: 307573 - protein, 16 aa, Homo sapiens
  CDR3 for alpha chain variable domain of TCR clone 153787 (TRAV3, TRAJ6)
CAVRDGPRAGGSYTYI

SEQ ID NO: 307574 - protein, 15 aa, Homo sapiens
  CDR3 for beta chain variable domain of TCR clone 153787 (TRBV5-1, TRBJ2-2)
CASSSQGGNTGELFF

SEQ ID NO: 307575 - protein, 11 aa, Homo sapiens
  CDR3 for alpha chain variable domain of TCR clone 153788 (TRAV1-1, TRAJ5)
CAVRVRRALTF

SEQ ID NO: 307576 - protein, 14 aa, Homo sapiens
  CDR3 for beta chain variable domain of TCR clone 153788 (TRBV7-9, TRBJ2-2)
CASSGLADTGELFF

SEQ ID NO: 307577 - protein, 14 aa, Homo sapiens
  CDR3 for alpha chain variable domain of TCR clone 153789 (TRAV1-2, TRAJ8)
CAVREYTGFQELVF

SEQ ID NO: 307578 - protein, 16 aa, Homo sapiens
  CDR3 for beta chain variable domain of TCR clone 153789 (TRBV7-3, TRBJ2-2)
CASSLKRGTLSGELFF

SEQ ID NO: 307579 - protein, 16 aa, Homo sapiens
  CDR3 for alpha chain variable domain of TCR clone 153790 (TRAV30, TRAJ24)
CGTEIVDADSWGKFEF

SEQ ID NO: 307580 - protein, 14 aa, Homo sapiens
  CDR3 for beta chain variable domain of TCR clone 153790 (TRBV7-8, TRBJ2-3)
CASSLEAGTDTQYF

SEQ ID NO: 307581 - protein, 11 aa, Homo sapiens
  CDR3 for alpha chain variable domain of TCR clone 153791 (TRAV35, TRAJ34)
CWARNTDKLIF

SEQ ID NO: 307582 - protein, 14 aa, Homo sapiens
  CDR3 for beta chain variable domain of TCR clone 153791 (TRBV7-2, TRBJ2-5)
CASSPRGSSETQYF

SEQ ID NO: 307583 - protein, 14 aa, Homo sapiens
  CDR3 for alpha chain variable domain of TCR clone 153792 (TRAV21, TRAJ52)
CGRAGVTSYGKLTF

SEQ ID NO: 307584 - protein, 14 aa, Homo sapiens
  CDR3 for beta chain variable domain of TCR clone 153792 (TRBV19, TRBJ1-2)
CASSVLGYNYGYTF

SEQ ID NO: 307585 - protein, 14 aa, Homo sapiens
  CDR3 for alpha chain variable domain of TCR clone 153793 (TRAV38-1, TRAJ45)
CASHSGGGADVLTF

SEQ ID NO: 307586 - protein, 13 aa, Homo sapiens
  CDR3 for beta chain variable domain of TCR clone 153793 (TRBV10-3, TRBJ1-2)
CASSERDSYGYTF

SEQ ID NO: 307587 - protein, 15 aa, Homo sapiens
  CDR3 for alpha chain variable domain of TCR clone 153794 (TRAV26-1, TRAJ29)
CIVRVEGSGNTPSVF

SEQ ID NO: 307588 - protein, 15 aa, Homo sapiens
  CDR3 for beta chain variable domain of TCR clone 153794 (TRBV7-9, TRBJ1-5)
CASSQGHQPNQPQHF

SEQ ID NO: 307589 - protein, 13 aa, Homo sapiens
  CDR3 for alpha chain variable domain of TCR clone 153795 (TRAV21, TRAJ27)
CAARPGNAGKSTF

SEQ ID NO: 307590 - protein, 20 aa, Homo sapiens
  CDR3 for beta chain variable domain of TCR clone 153795 (TRBV7-8, TRBJ2-1)
CASSLAHRLAGVRSYNEQFF

SEQ ID NO: 307591 - protein, 17 aa, Homo sapiens
  CDR3 for alpha chain variable domain of TCR clone 153796 (TRAV8-6, TRAJ58)
CAVSSWVGVTSGSRLTF

SEQ ID NO: 307592 - protein, 14 aa, Homo sapiens
  CDR3 for beta chain variable domain of TCR clone 153796 (TRBV4-2, TRBJ2-1)
CASGLDRAYNEQFF

SEQ ID NO: 307593 - protein, 13 aa, Homo sapiens
  CDR3 for alpha chain variable domain of TCR clone 153797 (TRAV30, TRAJ24)
CGTVTDSWGKLQF

SEQ ID NO: 307594 - protein, 17 aa, Homo sapiens
  CDR3 for beta chain variable domain of TCR clone 153797 (TRBV6-3, TRBJ2-2)
CTSVPAPTRHTPGSCFF

SEQ ID NO: 307595 - protein, 13 aa, Homo sapiens
  CDR3 for alpha chain variable domain of TCR clone 153798 (TRAV1-1, TRAJ15)
CAFPHQAGTALIF

SEQ ID NO: 307596 - protein, 18 aa, Homo sapiens
  CDR3 for beta chain variable domain of TCR clone 153798 (TRBV20-1, TRBJ2-3)
CSASGLAGRPGTTDTQYF

SEQ ID NO: 307597 - protein, 12 aa, Homo sapiens
  CDR3 for alpha chain variable domain of TCR clone 153799 (TRAV12-3, TRAJ17)
CAMTLTGNKLTL

SEQ ID NO: 307598 - protein, 17 aa, Homo sapiens
  CDR3 for beta chain variable domain of TCR clone 153799 (TRBV20-1, TRBJ2-7)
CSARDRVSGMDESTSGR

SEQ ID NO: 307599 - protein, 15 aa, Homo sapiens
  CDR3 for alpha chain variable domain of TCR clone 153800 (TRAV3, TRAJ4)
CAVRDGTGGYNKLIF

SEQ ID NO: 307600 - protein, 16 aa, Homo sapiens
  CDR3 for beta chain variable domain of TCR clone 153800 (TRBV27, TRBJ2-2)
CASGSSGVSSTGELFF

SEQ ID NO: 307601 - protein, 16 aa, Homo sapiens
  CDR3 for alpha chain variable domain of TCR clone 153801 (TRAV8-4, TRAJ32)
CAVSEGYGGATNKLIF

SEQ ID NO: 307602 - protein, 17 aa, Homo sapiens
  CDR3 for beta chain variable domain of TCR clone 153801 (TRBV28, TRBJ2-6)
CASSLRGAGSGANVLTF

SEQ ID NO: 307603 - protein, 14 aa, Homo sapiens
  CDR3 for alpha chain variable domain of TCR clone 153802 (TRAV8-1, TRAJ9)
CAVNAWTRGFKTIF

SEQ ID NO: 307604 - protein, 16 aa, Homo sapiens
  CDR3 for beta chain variable domain of TCR clone 153802 (TRBV28, TRBJ2-2)
CASSLEGGSNTGELFF

SEQ ID NO: 307605 - protein, 12 aa, Homo sapiens
  CDR3 for alpha chain variable domain of TCR clone 153803 (TRAV1-1, TRAJ39)
CAVPVVGNVLTF

SEQ ID NO: 307606 - protein, 18 aa, Homo sapiens
  CDR3 for beta chain variable domain of TCR clone 153803 (TRBV7-9, TRBJ2-7)
CASSLTTSGSRTWYEQYF

SEQ ID NO: 307607 - protein, 11 aa, Homo sapiens
  CDR3 for alpha chain variable domain of TCR clone 153804 (TRAV1-2, TRAJ31)
CAVNNNARLMF

SEQ ID NO: 307608 - protein, 13 aa, Homo sapiens
  CDR3 for beta chain variable domain of TCR clone 153804 (TRBV19, TRBJ2-7)
CASSTKQGYEQYF

SEQ ID NO: 307609 - protein, 12 aa, Homo sapiens
  CDR3 for alpha chain variable domain of TCR clone 153805 (TRAV21, TRAJ31)
CSVWCNNAILMF

SEQ ID NO: 307610 - protein, 16 aa, Homo sapiens
  CDR3 for beta chain variable domain of TCR clone 153805 (TRBV27, TRBJ2-5)
CASSYGPGGQKETQYF

SEQ ID NO: 307611 - protein, 11 aa, Homo sapiens
  CDR3 for alpha chain variable domain of TCR clone 153806 (TRAV2, TRAJ33)
CAVESNYQLIW

SEQ ID NO: 307612 - protein, 13 aa, Homo sapiens
  CDR3 for beta chain variable domain of TCR clone 153806 (TRBV15, TRBJ2-7)
CATSTTGHYEQYF

SEQ ID NO: 307613 - protein, 14 aa, Homo sapiens
  CDR3 for alpha chain variable domain of TCR clone 153807 (TRAV12-3, TRAJ58)
CAMSTETSGSRLTF

SEQ ID NO: 307614 - protein, 15 aa, Homo sapiens
  CDR3 for beta chain variable domain of TCR clone 153807 (TRBV11-3, TRBJ1-1)
CASRLGGPGDTEAFF

SEQ ID NO: 307615 - protein, 12 aa, Homo sapiens
  CDR3 for alpha chain variable domain of TCR clone 153808 (TRAV35, TRAJ54)
CADLQGAQKLVF

SEQ ID NO: 307616 - protein, 16 aa, Homo sapiens
  CDR3 for beta chain variable domain of TCR clone 153808 (TRBV27, TRBJ2-2)
CASSFRGLVRTGELFF

SEQ ID NO: 307617 - protein, 14 aa, Homo sapiens
  CDR3 for alpha chain variable domain of TCR clone 153809 (TRAV12-3, TRAJ10)
SHLPLTGGGNKLTF

SEQ ID NO: 307618 - protein, 12 aa, Homo sapiens
  CDR3 for beta chain variable domain of TCR clone 153809 (TRBV5-1, TRBJ2-7)
CASSFRGYEQYL

SEQ ID NO: 307619 - protein, 15 aa, Homo sapiens
  CDR3 for alpha chain variable domain of TCR clone 153810 (TRAV26-1, TRAJ29)
CIVRVEGSGNTPLVF

SEQ ID NO: 307620 - protein, 15 aa, Homo sapiens
  CDR3 for beta chain variable domain of TCR clone 153810 (TRBV5-7, TRBJ1-2)
CASSSPGQGNYGYTF

SEQ ID NO: 307621 - protein, 14 aa, Homo sapiens
  CDR3 for alpha chain variable domain of TCR clone 153811 (TRAV12-1, TRAJ13)
RVVIDSGGYQKVTF

SEQ ID NO: 307622 - protein, 12 aa, Homo sapiens
  CDR3 for beta chain variable domain of TCR clone 153811 (TRBV29-1, TRBJ2-3)
CSVTGGADTQYF

SEQ ID NO: 307623 - protein, 13 aa, Homo sapiens
  CDR3 for alpha chain variable domain of TCR clone 153812 (TRAV20, TRAJ34)
CAVRSYNTDKLIF

SEQ ID NO: 307624 - protein, 15 aa, Homo sapiens
  CDR3 for beta chain variable domain of TCR clone 153812 (TRBV27, TRBJ1-3)
CASSPSPGSGITIYF

SEQ ID NO: 307625 - protein, 15 aa, Homo sapiens
  CDR3 for alpha chain variable domain of TCR clone 153813 (TRAV17, TRAJ58)
CATDASGTSGSRLTF

SEQ ID NO: 307626 - protein, 12 aa, Homo sapiens
  CDR3 for beta chain variable domain of TCR clone 153813 (TRBV29-1, TRBJ1-5)
CSVRAGGQPQHF

SEQ ID NO: 307627 - protein, 12 aa, Homo sapiens
  CDR3 for alpha chain variable domain of TCR clone 153814 (TRAV12-1, TRAJ40)
CVVYSGTYKYIF

SEQ ID NO: 307628 - protein, 14 aa, Homo sapiens
  CDR3 for beta chain variable domain of TCR clone 153814 (TRBV7-6, TRBJ2-1)
CASSLGGGVDEQFF

SEQ ID NO: 307629 - protein, 12 aa, Homo sapiens
  CDR3 for alpha chain variable domain of TCR clone 153815 (TRAV9-2, TRAJ42)
NNYGGSQGNLIF

SEQ ID NO: 307630 - protein, 14 aa, Homo sapiens
  CDR3 for beta chain variable domain of TCR clone 153815 (TRBV28, TRBJ2-1)
CASSYYTAYNEQFF

SEQ ID NO: 307631 - protein, 14 aa, Homo sapiens
  CDR3 for alpha chain variable domain of TCR clone 153816 (TRAV12-2, TRAJ17)
CAVNIKAAGNKLTF

SEQ ID NO: 307632 - protein, 14 aa, Homo sapiens
  CDR3 for beta chain variable domain of TCR clone 153816 (TRBV12-4, TRBJ1-1)
CASTWTGHDTEAFF

SEQ ID NO: 307633 - protein, 12 aa, Homo sapiens
  CDR3 for alpha chain variable domain of TCR clone 153817 (TRAV21, TRAJ39)
CAADNAGNMLTF

SEQ ID NO: 307634 - protein, 12 aa, Homo sapiens
  CDR3 for beta chain variable domain of TCR clone 153817 (TRBV5-4, TRBJ2-7)
CASSCAGQGENF

SEQ ID NO: 307635 - protein, 16 aa, Homo sapiens
  CDR3 for alpha chain variable domain of TCR clone 153818 (TRAV12-1, TRAJ21)
CVVLSGYFGSGTKLNV

SEQ ID NO: 307636 - protein, 13 aa, Homo sapiens
  CDR3 for beta chain variable domain of TCR clone 153818 (TRBV7-3, TRBJ1-1)
CVSSQDWGAEAFF

SEQ ID NO: 307637 - protein, 11 aa, Homo sapiens
  CDR3 for alpha chain variable domain of TCR clone 153819 (TRAV3, TRAJ21)
CAVGNFNKFYF

SEQ ID NO: 307638 - protein, 15 aa, Homo sapiens
  CDR3 for beta chain variable domain of TCR clone 153819 (TRBV11-2, TRBJ1-6)
CASTLRETGNSPLHF

SEQ ID NO: 307639 - protein, 11 aa, Homo sapiens
  CDR3 for alpha chain variable domain of TCR clone 153820 (TRAV3, TRAJ49)
CAPITGNQFYF

SEQ ID NO: 307640 - protein, 20 aa, Homo sapiens
  CDR3 for beta chain variable domain of TCR clone 153820 (TRBV7-8, TRBJ2-2)
CASSHLFPGPTIHITGELFF

SEQ ID NO: 307641 - protein, 16 aa, Homo sapiens
  CDR3 for alpha chain variable domain of TCR clone 153821 (TRAV19, TRAJ24)
CSSLLSTTDSWGKLKF

SEQ ID NO: 307642 - protein, 13 aa, Homo sapiens
  CDR3 for beta chain variable domain of TCR clone 153821 (TRBV12-5, TRBJ2-3)
CASGDRQSDTQYF

SEQ ID NO: 307643 - protein, 15 aa, Homo sapiens
  CDR3 for alpha chain variable domain of TCR clone 153822 (TRAV21, TRAJ40)
CSVRPQTSGTYKYIL

SEQ ID NO: 307644 - protein, 13 aa, Homo sapiens
  CDR3 for beta chain variable domain of TCR clone 153822 (TRBV7-2, TRBJ2-2)
CASSSVRAGGLFF

SEQ ID NO: 307645 - protein, 14 aa, Homo sapiens
  CDR3 for alpha chain variable domain of TCR clone 153823 (TRAV9-2, TRAJ39)
CALYIYNAGNMLTF

SEQ ID NO: 307646 - protein, 13 aa, Homo sapiens
  CDR3 for beta chain variable domain of TCR clone 153823 (TRBV4-2, TRBJ1-1)
CASSQAGNTEVFF

SEQ ID NO: 307647 - protein, 13 aa, Homo sapiens
  CDR3 for alpha chain variable domain of TCR clone 153824 (TRAV21, TRAJ20)
CAVGVFADYKLSF

SEQ ID NO: 307648 - protein, 14 aa, Homo sapiens
  CDR3 for beta chain variable domain of TCR clone 153824 (TRBV7-2, TRBJ2-7)
CASSPKTSFYEQYF

SEQ ID NO: 307649 - protein, 13 aa, Homo sapiens
  CDR3 for alpha chain variable domain of TCR clone 153825 (TRAV38-1, TRAJ57)
CALVQGGSEKLVL

SEQ ID NO: 307650 - protein, 17 aa, Homo sapiens
  CDR3 for beta chain variable domain of TCR clone 153825 (TRBV29-1, TRBJ2-3)
CSVDSPPRGARTDTQYF

SEQ ID NO: 307651 - protein, 15 aa, Homo sapiens
  CDR3 for alpha chain variable domain of TCR clone 153826 (TRAV13-2, TRAJ17)
CREEGGEAAGNKLTF

SEQ ID NO: 307652 - protein, 17 aa, Homo sapiens
  CDR3 for beta chain variable domain of TCR clone 153826 (TRBV20-1, TRBJ1-5)
CSASLSPGQGGNQPQHF

SEQ ID NO: 307653 - protein, 13 aa, Homo sapiens
  CDR3 for alpha chain variable domain of TCR clone 153827 (TRAV13-1, TRAJ41)
CADAPNSEYALNF

SEQ ID NO: 307654 - protein, 13 aa, Homo sapiens
  CDR3 for beta chain variable domain of TCR clone 153827 (TRBV19, TRBJ2-7)
CASEGTTTYEQYF

SEQ ID NO: 307655 - protein, 13 aa, Homo sapiens
  CDR3 for alpha chain variable domain of TCR clone 153828 (TRAV17, TRAJ31)
CATDENNNARLMF

SEQ ID NO: 307656 - protein, 15 aa, Homo sapiens
  CDR3 for beta chain variable domain of TCR clone 153828 (TRBV6-3, TRBJ2-7)
CASSSPGTVFYEQYF

SEQ ID NO: 307657 - protein, 14 aa, Homo sapiens
  CDR3 for alpha chain variable domain of TCR clone 153829 (TRAV4, TRAJ6)
CLVGEAGGSYIPTF

SEQ ID NO: 307658 - protein, 16 aa, Homo sapiens
  CDR3 for beta chain variable domain of TCR clone 153829 (TRBV7-6, TRBJ2-1)
CASSLKEGPSYNEQFF

SEQ ID NO: 307659 - protein, 14 aa, Homo sapiens
  CDR3 for alpha chain variable domain of TCR clone 153830 (TRAV13-1, TRAJ44)
CAAKATGTDSKLTF

SEQ ID NO: 307660 - protein, 16 aa, Homo sapiens
  CDR3 for beta chain variable domain of TCR clone 153830 (TRBV7-9, TRBJ2-6)
CASSLKGPLRANVLTF

SEQ ID NO: 307661 - protein, 14 aa, Homo sapiens
  CDR3 for alpha chain variable domain of TCR clone 153831 (TRAV35, TRAJ33)
CAGSSQDSNYKLIW

SEQ ID NO: 307662 - protein, 14 aa, Homo sapiens
  CDR3 for beta chain variable domain of TCR clone 153831 (TRBV5-1, TRBJ2-7)
CASSRGESLYEQYF

SEQ ID NO: 307663 - protein, 14 aa, Homo sapiens
  CDR3 for alpha chain variable domain of TCR clone 153832 (TRAV38-1, TRAJ45)
CAYYAGGGADGLTF

SEQ ID NO: 307664 - protein, 20 aa, Homo sapiens
  CDR3 for beta chain variable domain of TCR clone 153832 (TRBV28, TRBJ2-1)
WASTPIGRSPGLAGGNEQFF

SEQ ID NO: 307665 - protein, 14 aa, Homo sapiens
  CDR3 for alpha chain variable domain of TCR clone 153833 (TRAV1-2, TRAJ16)
CAVNRFSDGQKLLF

SEQ ID NO: 307666 - protein, 18 aa, Homo sapiens
  CDR3 for beta chain variable domain of TCR clone 153833 (TRBV6-6, TRBJ1-3)
CASSYSKWDSISGDTIYF

SEQ ID NO: 307667 - protein, 14 aa, Homo sapiens
  CDR3 for alpha chain variable domain of TCR clone 153834 (TRAV21, TRAJ58)
CAVRRGRSGSRLTF

SEQ ID NO: 307668 - protein, 13 aa, Homo sapiens
  CDR3 for beta chain variable domain of TCR clone 153834 (TRBV7-8, TRBJ2-7)
CASSLTGGREQYF

SEQ ID NO: 307669 - protein, 12 aa, Homo sapiens
  CDR3 for alpha chain variable domain of TCR clone 153835 (TRAV12-3, TRAJ17)
CAMTLTGNKLTF

SEQ ID NO: 307670 - protein, 14 aa, Homo sapiens
  CDR3 for beta chain variable domain of TCR clone 153835 (TRBV7-2, TRBJ2-7)
CASGSQGAAYEQYF

SEQ ID NO: 307671 - protein, 14 aa, Homo sapiens
  CDR3 for alpha chain variable domain of TCR clone 153836 (TRAV1-2, TRAJ8)
CAVREDTGSQKLVF

SEQ ID NO: 307672 - protein, 15 aa, Homo sapiens
  CDR3 for beta chain variable domain of TCR clone 153836 (TRBV7-2, TRBJ2-1)
CASSLASGRVNEQFF

SEQ ID NO: 307673 - protein, 13 aa, Homo sapiens
  CDR3 for alpha chain variable domain of TCR clone 153837 (TRAV3, TRAJ30)
CAVRDRGDDKTIF

SEQ ID NO: 307674 - protein, 14 aa, Homo sapiens
  CDR3 for beta chain variable domain of TCR clone 153837 (TRBV5-1, TRBJ1-1)
CASSRTTGDTEAFF

SEQ ID NO: 307675 - protein, 12 aa, Homo sapiens
  CDR3 for alpha chain variable domain of TCR clone 153838 (TRAV12-2, TRAJ21)
CAVNRNFNKFYF

SEQ ID NO: 307676 - protein, 14 aa, Homo sapiens
  CDR3 for beta chain variable domain of TCR clone 153838 (TRBV12-4, TRBJ2-3)
SASSLSGATDTQYF

SEQ ID NO: 307677 - protein, 10 aa, Homo sapiens
  CDR3 for alpha chain variable domain of TCR clone 153839 (TRAV21, TRAJ43)
CAVRVGDMRF

SEQ ID NO: 307678 - protein, 13 aa, Homo sapiens
  CDR3 for beta chain variable domain of TCR clone 153839 (TRBV20-1, TRBJ2-7)
CSAQGLADYEQYF

SEQ ID NO: 307679 - protein, 14 aa, Homo sapiens
  CDR3 for alpha chain variable domain of TCR clone 153840 (TRAV12-1, TRAJ30)
CVVNIGGRDDKIIF

SEQ ID NO: 307680 - protein, 13 aa, Homo sapiens
  CDR3 for beta chain variable domain of TCR clone 153840 (TRBV12-5, TRBJ2-1)
CASVLGRGNEQFF

SEQ ID NO: 307681 - protein, 12 aa, Homo sapiens
  CDR3 for alpha chain variable domain of TCR clone 153841 (TRAV13-2, TRAJ23)
RAERPRGGKLIF

SEQ ID NO: 307682 - protein, 19 aa, Homo sapiens
  CDR3 for beta chain variable domain of TCR clone 153841 (TRBV19, TRBJ2-5)
CASSIGQVTDFFLGETQYF

SEQ ID NO: 307683 - protein, 14 aa, Homo sapiens
  CDR3 for alpha chain variable domain of TCR clone 153842 (TRAV2, TRAJ9)
CAVEDRSGGFKTII

SEQ ID NO: 307684 - protein, 12 aa, Homo sapiens
  CDR3 for beta chain variable domain of TCR clone 153842 (TRBV12-4, TRBJ2-4)
CASSSSGNIQYF

SEQ ID NO: 307685 - protein, 16 aa, Homo sapiens
  CDR3 for alpha chain variable domain of TCR clone 153843 (TRAV3, TRAJ10)
CAVRDMRAGGGNKLTF

SEQ ID NO: 307686 - protein, 13 aa, Homo sapiens
  CDR3 for beta chain variable domain of TCR clone 153843 (TRBV6-1, TRBJ1-1)
CASSRQGNIEAFF

SEQ ID NO: 307687 - protein, 12 aa, Homo sapiens
  CDR3 for alpha chain variable domain of TCR clone 153844 (TRAV13-1, TRAJ53)
SASGGSNYKLTF

SEQ ID NO: 307688 - protein, 15 aa, Homo sapiens
  CDR3 for beta chain variable domain of TCR clone 153844 (TRBV28, TRBJ2-1)
CASSIIAGGRSEQFF

SEQ ID NO: 307689 - protein, 14 aa, Homo sapiens
  CDR3 for alpha chain variable domain of TCR clone 153845 (TRAV8-3, TRAJ39)
CAVGANNSGNMLTF

SEQ ID NO: 307690 - protein, 12 aa, Homo sapiens
  CDR3 for beta chain variable domain of TCR clone 153845 (TRBV11-3, TRBJ1-1)
CASSHRQGEAFF

SEQ ID NO: 307691 - protein, 15 aa, Homo sapiens
  CDR3 for alpha chain variable domain of TCR clone 153846 (TRAV34, TRAJ38)
CGADFTPGNNRKLIW

SEQ ID NO: 307692 - protein, 15 aa, Homo sapiens
  CDR3 for beta chain variable domain of TCR clone 153846 (TRBV4-1, TRBJ2-5)
CASSQWDLYQETQYF

SEQ ID NO: 307693 - protein, 14 aa, Homo sapiens
  CDR3 for alpha chain variable domain of TCR clone 153847 (TRAV12-2, TRAJ29)
CAVKIPSGTYKYIF

SEQ ID NO: 307694 - protein, 15 aa, Homo sapiens
  CDR3 for beta chain variable domain of TCR clone 153847 (TRBV29-1, TRBJ2-7)
CSVEFFDRGSYEQYF

SEQ ID NO: 307695 - protein, 16 aa, Homo sapiens
  CDR3 for alpha chain variable domain of TCR clone 153848 (TRAV12-1, TRAJ4)
CVVRRLTAGGYNKLIF

SEQ ID NO: 307696 - protein, 15 aa, Homo sapiens
  CDR3 for beta chain variable domain of TCR clone 153848 (TRBV14, TRBJ2-5)
CASSRRGGVQETQYF

SEQ ID NO: 307697 - protein, 12 aa, Homo sapiens
  CDR3 for alpha chain variable domain of TCR clone 153849 (TRAV22, TRAJ29)
CAPPSGKTPLVF

SEQ ID NO: 307698 - protein, 14 aa, Homo sapiens
  CDR3 for beta chain variable domain of TCR clone 153849 (TRBV11-2, TRBJ2-7)
CASSLGAGAYEQYF

SEQ ID NO: 307699 - protein, 14 aa, Homo sapiens
  CDR3 for alpha chain variable domain of TCR clone 153850 (TRAV4, TRAJ32)
CPVNYGGATNKLIF

SEQ ID NO: 307700 - protein, 14 aa, Homo sapiens
  CDR3 for beta chain variable domain of TCR clone 153850 (TRBV15, TRBJ2-5)
CATSGGTRTETQYF

SEQ ID NO: 307701 - protein, 14 aa, Homo sapiens
  CDR3 for alpha chain variable domain of TCR clone 153851 (TRAV12-2, TRAJ13)
CAVKKTGGFQKVTF

SEQ ID NO: 307702 - protein, 15 aa, Homo sapiens
  CDR3 for beta chain variable domain of TCR clone 153851 (TRBV27, TRBJ2-1)
CASSNRGGSSNEQFF

SEQ ID NO: 307703 - protein, 18 aa, Homo sapiens
  CDR3 for alpha chain variable domain of TCR clone 153852 (TRAV21, TRAJ53)
CAVKGGENSGGSNYKLTF

SEQ ID NO: 307704 - protein, 12 aa, Homo sapiens
  CDR3 for beta chain variable domain of TCR clone 153852 (TRBV2, TRBJ2-1)
CAYGPPGNEQFF

SEQ ID NO: 307705 - protein, 12 aa, Homo sapiens
  CDR3 for alpha chain variable domain of TCR clone 153853 (TRAV1-1, TRAJ39)
CAVPVVGTMLTF

SEQ ID NO: 307706 - protein, 18 aa, Homo sapiens
  CDR3 for beta chain variable domain of TCR clone 153853 (TRBV7-9, TRBJ2-7)
CASSLTTSGSRTWYEQYF

SEQ ID NO: 307707 - protein, 15 aa, Homo sapiens
  CDR3 for alpha chain variable domain of TCR clone 153854 (TRAV12-3, TRAJ49)
CAMAVTKNTGNQFYF

SEQ ID NO: 307708 - protein, 18 aa, Homo sapiens
  CDR3 for beta chain variable domain of TCR clone 153854 (TRBV4-1, TRBJ1-5)
CASSQDPRGQGLNQPQHF

SEQ ID NO: 307709 - protein, 15 aa, Homo sapiens
  CDR3 for alpha chain variable domain of TCR clone 153855 (TRAV21, TRAJ53)
CATLNSGASNYKLTF

SEQ ID NO: 307710 - protein, 15 aa, Homo sapiens
  CDR3 for beta chain variable domain of TCR clone 153855 (TRBV20-1, TRBJ2-7)
CSARDRVSGMDEQYF

SEQ ID NO: 307711 - protein, 16 aa, Homo sapiens
  CDR3 for alpha chain variable domain of TCR clone 153856 (TRAV14/DV4, TRAJ54)
YAMREGRIQGAQKLVF

SEQ ID NO: 307712 - protein, 13 aa, Homo sapiens
  CDR3 for beta chain variable domain of TCR clone 153856 (TRBV2, TRBJ1-2)
CASSVRGNYGYTF

SEQ ID NO: 307713 - protein, 14 aa, Homo sapiens
  CDR3 for alpha chain variable domain of TCR clone 153857 (TRAV8-3, TRAJ4)
CAVGASGGYNKLIF

SEQ ID NO: 307714 - protein, 14 aa, Homo sapiens
  CDR3 for beta chain variable domain of TCR clone 153857 (TRBV11-2, TRBJ1-2)
CASSRGGTNYGYTF

SEQ ID NO: 307715 - protein, 13 aa, Homo sapiens
  CDR3 for alpha chain variable domain of TCR clone 153858 (TRAV38-1, TRAJ42)
CARWGGSQGNLIF

SEQ ID NO: 307716 - protein, 14 aa, Homo sapiens
  CDR3 for beta chain variable domain of TCR clone 153858 (TRBV2, TRBJ2-7)
CASSLTSGGYEQYF

SEQ ID NO: 307717 - protein, 12 aa, Homo sapiens
  CDR3 for alpha chain variable domain of TCR clone 153859 (TRAV17, TRAJ57)
CATDGGSEKLVF

SEQ ID NO: 307718 - protein, 12 aa, Homo sapiens
  CDR3 for beta chain variable domain of TCR clone 153859 (TRBV12-4, TRBJ1-2)
CASSFIWRHLRF

SEQ ID NO: 307719 - protein, 19 aa, Homo sapiens
  CDR3 for alpha chain variable domain of TCR clone 153860 (TRAV26-1, TRAJ52)
CIVRAHRNAGGTSYGKLTF

SEQ ID NO: 307720 - protein, 15 aa, Homo sapiens
  CDR3 for beta chain variable domain of TCR clone 153860 (TRBV12-4, TRBJ2-5)
CVSSPPTGLQETQYF

SEQ ID NO: 307721 - protein, 15 aa, Homo sapiens
  CDR3 for alpha chain variable domain of TCR clone 153861 (TRAV26-1, TRAJ29)
CIVRVEGSGNTPLVL

SEQ ID NO: 307722 - protein, 14 aa, Homo sapiens
  CDR3 for beta chain variable domain of TCR clone 153861 (TRBV18, TRBJ2-5)
CVSSPGVSQETQYF

SEQ ID NO: 307723 - protein, 18 aa, Homo sapiens
  CDR3 for alpha chain variable domain of TCR clone 153862 (TRAV16, TRAJ45)
CAQTSYPSSGGGADGLTF

SEQ ID NO: 307724 - protein, 12 aa, Homo sapiens
  CDR3 for beta chain variable domain of TCR clone 153862 (TRBV11-3, TRBJ2-4)
CASSAGRVIQYF

SEQ ID NO: 307725 - protein, 16 aa, Homo sapiens
  CDR3 for alpha chain variable domain of TCR clone 153863 (TRAV12-2, TRAJ43)
CAVNDMRFGAGTRLTV

SEQ ID NO: 307726 - protein, 12 aa, Homo sapiens
  CDR3 for beta chain variable domain of TCR clone 153863 (TRBV29-1, TRBJ2-3)
CSVTGGADTQYF

SEQ ID NO: 307727 - protein, 12 aa, Homo sapiens
  CDR3 for alpha chain variable domain of TCR clone 153864 (TRAV29/DV5, TRAJ15)
CAASGEGTALIF

SEQ ID NO: 307728 - protein, 15 aa, Homo sapiens
  CDR3 for beta chain variable domain of TCR clone 153864 (TRBV4-3, TRBJ1-5)
CASSHDSGGVQPQHF

SEQ ID NO: 307729 - protein, 11 aa, Homo sapiens
  CDR3 for alpha chain variable domain of TCR clone 153865 (TRAV16, TRAJ33)
CALSAMDRTIS

SEQ ID NO: 307730 - protein, 12 aa, Homo sapiens
  CDR3 for beta chain variable domain of TCR clone 153865 (TRBV5-1, TRBJ1-2)
CASSQDTYGYTF

SEQ ID NO: 307731 - protein, 14 aa, Homo sapiens
  CDR3 for alpha chain variable domain of TCR clone 153866 (TRAV4, TRAJ32)
CLVNYGGATTKLIF

SEQ ID NO: 307732 - protein, 14 aa, Homo sapiens
  CDR3 for beta chain variable domain of TCR clone 153866 (TRBV15, TRBJ2-5)
CATSGGTRAETQYF

SEQ ID NO: 307733 - protein, 16 aa, Homo sapiens
  CDR3 for alpha chain variable domain of TCR clone 153867 (TRAV21, TRAJ33)
CAVSPASMGSNYQLIW

SEQ ID NO: 307734 - protein, 17 aa, Homo sapiens
  CDR3 for beta chain variable domain of TCR clone 153867 (TRBV2, TRBJ1-4)
CASSKRELTQGEEKLFF

SEQ ID NO: 307735 - protein, 17 aa, Homo sapiens
  CDR3 for alpha chain variable domain of TCR clone 153868 (TRAV26-1, TRAJ37)
CIVRVITVSSNTGKLIF

SEQ ID NO: 307736 - protein, 19 aa, Homo sapiens
  CDR3 for beta chain variable domain of TCR clone 153868 (TRBV4-1, TRBJ2-1)
CASSQGPLPGLGSRNEQFF

SEQ ID NO: 307737 - protein, 15 aa, Homo sapiens
  CDR3 for alpha chain variable domain of TCR clone 153869 (TRAV8-6, TRAJ10)
CAVSDQAGGGNELTF

SEQ ID NO: 307738 - protein, 15 aa, Homo sapiens
  CDR3 for beta chain variable domain of TCR clone 153869 (TRBV5-1, TRBJ2-7)
CASSLNGGPAREQYF

SEQ ID NO: 307739 - protein, 18 aa, Homo sapiens
  CDR3 for alpha chain variable domain of TCR clone 153870 (TRAV29/DV5, TRAJ52)
CAAGYRGAGGTSYGKLTF

SEQ ID NO: 307740 - protein, 16 aa, Homo sapiens
  CDR3 for beta chain variable domain of TCR clone 153870 (TRBV7-3, TRBJ2-2)
CASSLKRGTLSGELFF

SEQ ID NO: 307741 - protein, 16 aa, Homo sapiens
  CDR3 for alpha chain variable domain of TCR clone 153871 (TRAV3, TRAJ37)
CAVRGKGSGNTGKLIF

SEQ ID NO: 307742 - protein, 15 aa, Homo sapiens
  CDR3 for beta chain variable domain of TCR clone 153871 (TRBV6-6, TRBJ2-5)
CASSYGKIIQETHYF

SEQ ID NO: 307743 - protein, 16 aa, Homo sapiens
  CDR3 for alpha chain variable domain of TCR clone 153872 (TRAV12-2, TRAJ24)
CGTEIVDADSWGKFQF

SEQ ID NO: 307744 - protein, 14 aa, Homo sapiens
  CDR3 for beta chain variable domain of TCR clone 153872 (TRBV12-5, TRBJ2-5)
CASGSRTHQGTQYF

SEQ ID NO: 307745 - protein, 14 aa, Homo sapiens
  CDR3 for alpha chain variable domain of TCR clone 153873 (TRAV4, TRAJ30)
CLVGDMNRDDKIIF

SEQ ID NO: 307746 - protein, 14 aa, Homo sapiens
  CDR3 for beta chain variable domain of TCR clone 153873 (TRBV19, TRBJ2-7)
CTSSIQEWSYEQYF

SEQ ID NO: 307747 - protein, 14 aa, Homo sapiens
  CDR3 for alpha chain variable domain of TCR clone 153874 (TRAV12-2, TRAJ13)
CAVKKNGGYQKVTF

SEQ ID NO: 307748 - protein, 13 aa, Homo sapiens
  CDR3 for beta chain variable domain of TCR clone 153874 (TRBV4-2, TRBJ1-1)
CASSQAGNTEAFF

SEQ ID NO: 307749 - protein, 13 aa, Homo sapiens
  CDR3 for alpha chain variable domain of TCR clone 153875 (TRAV23/DV6, TRAJ58)
CAARLIRGSRLTF

SEQ ID NO: 307750 - protein, 13 aa, Homo sapiens
  CDR3 for beta chain variable domain of TCR clone 153875 (TRBV2, TRBJ1-6)
CADPGSYNSPLHF

SEQ ID NO: 307751 - protein, 17 aa, Homo sapiens
  CDR3 for alpha chain variable domain of TCR clone 153876 (TRAV3, TRAJ6)
CAVRDGPRAGGSYIPTI

SEQ ID NO: 307752 - protein, 14 aa, Homo sapiens
  CDR3 for beta chain variable domain of TCR clone 153876 (TRBV7-2, TRBJ2-7)
CASSPKTSLYEQYF

SEQ ID NO: 307753 - protein, 14 aa, Homo sapiens
  CDR3 for alpha chain variable domain of TCR clone 153877 (TRAV12-2, TRAJ13)
CAVKKTGGYQKGTF

SEQ ID NO: 307754 - protein, 17 aa, Homo sapiens
  CDR3 for beta chain variable domain of TCR clone 153877 (TRBV20-1, TRBJ2-2)
CSASGSGQGGLTGELFF

SEQ ID NO: 307755 - protein, 13 aa, Homo sapiens
  CDR3 for alpha chain variable domain of TCR clone 153878 (TRAV12-1, TRAJ16)
CVVNGPYGQKLLF

SEQ ID NO: 307756 - protein, 13 aa, Homo sapiens
  CDR3 for beta chain variable domain of TCR clone 153878 (TRBV2, TRBJ1-1)
CARNPTGGFHAFF

SEQ ID NO: 307757 - protein, 13 aa, Homo sapiens
  CDR3 for alpha chain variable domain of TCR clone 153879 (TRAV4, TRAJ21)
CLVGAYNFNKFYF

SEQ ID NO: 307758 - protein, 16 aa, Homo sapiens
  CDR3 for beta chain variable domain of TCR clone 153879 (TRBV29-1, TRBJ2-7)
CSVEDAEDGTAYEQYF

SEQ ID NO: 307759 - protein, 14 aa, Homo sapiens
  CDR3 for alpha chain variable domain of TCR clone 153880 (TRAV12-3, TRAJ10)
SHLPLTGRGNKLTF

SEQ ID NO: 307760 - protein, 14 aa, Homo sapiens
  CDR3 for beta chain variable domain of TCR clone 153880 (TRBV6-1, TRBJ1-3)
CASVQGGGGNTIYF

SEQ ID NO: 307761 - protein, 16 aa, Homo sapiens
  CDR3 for alpha chain variable domain of TCR clone 153881 (TRAV16, TRAJ4)
CALSRMFSVGYIKLIF

SEQ ID NO: 307762 - protein, 16 aa, Homo sapiens
  CDR3 for beta chain variable domain of TCR clone 153881 (TRBV24-1, TRBJ2-3)
CATSDPGTGATDTQYF

SEQ ID NO: 307763 - protein, 15 aa, Homo sapiens
  CDR3 for alpha chain variable domain of TCR clone 153882 (TRAV8-4, TRAJ52)
CALSDGGTSYGKLTF

SEQ ID NO: 307764 - protein, 12 aa, Homo sapiens
  CDR3 for beta chain variable domain of TCR clone 153882 (TRBV29-1, TRBJ2-3)
CSVTSGGDTQYF

SEQ ID NO: 307765 - protein, 14 aa, Homo sapiens
  CDR3 for alpha chain variable domain of TCR clone 153883 (TRAV26-1, TRAJ3)
CIVRVGRSASKIIF

SEQ ID NO: 307766 - protein, 14 aa, Homo sapiens
  CDR3 for beta chain variable domain of TCR clone 153883 (TRBV25-1, TRBJ1-1)
CASTHLGGNTEAFF

SEQ ID NO: 307767 - protein, 16 aa, Homo sapiens
  CDR3 for alpha chain variable domain of TCR clone 153884 (TRAV17, TRAJ35)
RATAEGGIGFGNVLHC

SEQ ID NO: 307768 - protein, 16 aa, Homo sapiens
  CDR3 for beta chain variable domain of TCR clone 153884 (TRBV6-5, TRBJ2-7)
CASSSDTTSGFYEQYF

SEQ ID NO: 307769 - protein, 15 aa, Homo sapiens
  CDR3 for alpha chain variable domain of TCR clone 153885 (TRAV8-3, TRAJ15)
CAVGAANQSGTALIF

SEQ ID NO: 307770 - protein, 14 aa, Homo sapiens
  CDR3 for beta chain variable domain of TCR clone 153885 (TRBV20-1, TRBJ2-1)
CSPNDEASYNEQFF

SEQ ID NO: 307771 - protein, 15 aa, Homo sapiens
  CDR3 for alpha chain variable domain of TCR clone 153886 (TRAV26-1, TRAJ44)
CIARVPFGTASKLTF

SEQ ID NO: 307772 - protein, 15 aa, Homo sapiens
  CDR3 for beta chain variable domain of TCR clone 153886 (TRBV7-3, TRBJ2-2)
CASSETGQGTGELFF

SEQ ID NO: 307773 - protein, 11 aa, Homo sapiens
  CDR3 for alpha chain variable domain of TCR clone 153887 (TRAV21, TRAJ23)
CAPQRRGKLMF

SEQ ID NO: 307774 - protein, 14 aa, Homo sapiens
  CDR3 for beta chain variable domain of TCR clone 153887 (TRBV12-4, TRBJ1-1)
CASTWTGHDTEAFF

SEQ ID NO: 307775 - protein, 17 aa, Homo sapiens
  CDR3 for alpha chain variable domain of TCR clone 153888 (TRAV3, TRAJ6)
CAVRDGPRAGGGYIPTF

SEQ ID NO: 307776 - protein, 15 aa, Homo sapiens
  CDR3 for beta chain variable domain of TCR clone 153888 (TRBV5-5, TRBJ1-5)
CASSSTPGSNQPQHF

SEQ ID NO: 307777 - protein, 17 aa, Homo sapiens
  CDR3 for alpha chain variable domain of TCR clone 153889 (TRAV3, TRAJ12)
CAVTDGGGMDSSYKLIF

SEQ ID NO: 307778 - protein, 13 aa, Homo sapiens
  CDR3 for beta chain variable domain of TCR clone 153889 (TRBV15, TRBJ1-6)
CATSGGLNSPLHF

SEQ ID NO: 307779 - protein, 14 aa, Homo sapiens
  CDR3 for alpha chain variable domain of TCR clone 153890 (TRAV13-1, TRAJ35)
CAASKRGFGNVLHC

SEQ ID NO: 307780 - protein, 12 aa, Homo sapiens
  CDR3 for beta chain variable domain of TCR clone 153890 (TRBV7-8, TRBJ2-7)
CASSLGDREQYF

SEQ ID NO: 307781 - protein, 12 aa, Homo sapiens
  CDR3 for alpha chain variable domain of TCR clone 153891 (TRAV2, TRAJ31)
CAVENNNARLMF

SEQ ID NO: 307782 - protein, 12 aa, Homo sapiens
  CDR3 for beta chain variable domain of TCR clone 153891 (TRBV28, TRBJ2-3)
CASSLYRDTQYF

SEQ ID NO: 307783 - protein, 13 aa, Homo sapiens
  CDR3 for alpha chain variable domain of TCR clone 153892 (TRAV8-4, TRAJ9)
CAVSETGGFKTIF

SEQ ID NO: 307784 - protein, 15 aa, Homo sapiens
  CDR3 for beta chain variable domain of TCR clone 153892 (TRBV5-1, TRBJ1-1)
CASSSTTGTNTEAFF

SEQ ID NO: 307785 - protein, 13 aa, Homo sapiens
  CDR3 for alpha chain variable domain of TCR clone 153893 (TRAV20, TRAJ37)
CAGCSSNTGKLIF

SEQ ID NO: 307786 - protein, 14 aa, Homo sapiens
  CDR3 for beta chain variable domain of TCR clone 153893 (TRBV7-8, TRBJ2-3)
CASSLEAGTDTQYF

SEQ ID NO: 307787 - protein, 15 aa, Homo sapiens
  CDR3 for alpha chain variable domain of TCR clone 153894 (TRAV4, TRAJ39)
CLVGPNNNAGNMLTF

SEQ ID NO: 307788 - protein, 16 aa, Homo sapiens
  CDR3 for beta chain variable domain of TCR clone 153894 (TRBV13, TRBJ2-2)
CASSPRTGEQTGELFF

SEQ ID NO: 307789 - protein, 12 aa, Homo sapiens
  CDR3 for alpha chain variable domain of TCR clone 153895 (TRAV17, TRAJ4)
CATDGGYNKLIF

SEQ ID NO: 307790 - protein, 14 aa, Homo sapiens
  CDR3 for beta chain variable domain of TCR clone 153895 (TRBV7-8, TRBJ2-3)
CASSFPDGQDTQYF

SEQ ID NO: 307791 - protein, 12 aa, Homo sapiens
  CDR3 for alpha chain variable domain of TCR clone 153896 (TRAV21, TRAJ33)
CAKMDSNYQLIW

SEQ ID NO: 307792 - protein, 15 aa, Homo sapiens
  CDR3 for beta chain variable domain of TCR clone 153896 (TRBV19, TRBJ2-7)
CASRPTPGLSIEQYF

SEQ ID NO: 307793 - protein, 11 aa, Homo sapiens
  CDR3 for alpha chain variable domain of TCR clone 153897 (TRAV3, TRAJ33)
CAVRRNYQLIW

SEQ ID NO: 307794 - protein, 15 aa, Homo sapiens
  CDR3 for beta chain variable domain of TCR clone 153897 (TRBV28, TRBJ1-5)
CASSDQVYSNQHQHF

SEQ ID NO: 307795 - protein, 17 aa, Homo sapiens
  CDR3 for alpha chain variable domain of TCR clone 153898 (TRAV3, TRAJ42)
CAVRDRDYGGSQGNLIF

SEQ ID NO: 307796 - protein, 11 aa, Homo sapiens
  CDR3 for beta chain variable domain of TCR clone 153898 (TRBV7-8, TRBJ2-7)
CASSLSLEQYF

SEQ ID NO: 307797 - protein, 12 aa, Homo sapiens
  CDR3 for alpha chain variable domain of TCR clone 153899 (TRAV3, TRAJ43)
CAVRDPNNDMRF

SEQ ID NO: 307798 - protein, 15 aa, Homo sapiens
  CDR3 for beta chain variable domain of TCR clone 153899 (TRBV27, TRBJ1-5)
CASSLGTGFNQPQHF

SEQ ID NO: 307799 - protein, 14 aa, Homo sapiens
  CDR3 for alpha chain variable domain of TCR clone 153900 (TRAV9-2, TRAJ39)
CALYIYNAGNMLTF

SEQ ID NO: 307800 - protein, 19 aa, Homo sapiens
  CDR3 for beta chain variable domain of TCR clone 153900 (TRBV12-5, TRBJ2-2)
CASGLEQGTMFANTGELFF

SEQ ID NO: 307801 - protein, 17 aa, Homo sapiens
  CDR3 for alpha chain variable domain of TCR clone 153901 (TRAV14/DV4, TRAJ3)
CAMREGPEYSSATKIIF

SEQ ID NO: 307802 - protein, 17 aa, Homo sapiens
  CDR3 for beta chain variable domain of TCR clone 153901 (TRBV20-1, TRBJ1-5)
CSARVGGERQGNQPQHF

SEQ ID NO: 307803 - protein, 16 aa, Homo sapiens
  CDR3 for alpha chain variable domain of TCR clone 153902 (TRAV3, TRAJ3)
CAVRDRAKSSASKIIF

SEQ ID NO: 307804 - protein, 16 aa, Homo sapiens
  CDR3 for beta chain variable domain of TCR clone 153902 (TRBV20-1, TRBJ2-4)
CSATSLSELAKNIQYF

SEQ ID NO: 307805 - protein, 14 aa, Homo sapiens
  CDR3 for alpha chain variable domain of TCR clone 153903 (TRAV24, TRAJ13)
CASSKAGGLPESYL

SEQ ID NO: 307806 - protein, 15 aa, Homo sapiens
  CDR3 for beta chain variable domain of TCR clone 153903 (TRBV28, TRBJ2-5)
CASSPPWSYQETQYF

SEQ ID NO: 307807 - protein, 15 aa, Homo sapiens
  CDR3 for alpha chain variable domain of TCR clone 153904 (TRAV8-6, TRAJ10)
CAVSDQAGGGNTLTF

SEQ ID NO: 307808 - protein, 16 aa, Homo sapiens
  CDR3 for beta chain variable domain of TCR clone 153904 (TRBV19, TRBJ2-1)
CASSKAGPSSYNEQFF

SEQ ID NO: 307809 - protein, 19 aa, Homo sapiens
  CDR3 for alpha chain variable domain of TCR clone 153905 (TRAV29/DV5, TRAJ49)
CSVLLCSKLTLDTGNQSYF

SEQ ID NO: 307810 - protein, 17 aa, Homo sapiens
  CDR3 for beta chain variable domain of TCR clone 153905 (TRBV13, TRBJ2-3)
CASSLSRVAGGRNTQYF

SEQ ID NO: 307811 - protein, 14 aa, Homo sapiens
  CDR3 for alpha chain variable domain of TCR clone 153906 (TRAV8-4, TRAJ9)
CAVSDRTGGFQTIF

SEQ ID NO: 307812 - protein, 13 aa, Homo sapiens
  CDR3 for beta chain variable domain of TCR clone 153906 (TRBV11-2, TRBJ2-7)
CASSLGDSYEQYF

SEQ ID NO: 307813 - protein, 12 aa, Homo sapiens
  CDR3 for alpha chain variable domain of TCR clone 153907 (TRAV3, TRAJ43)
CCERGRNNEMRF

SEQ ID NO: 307814 - protein, 12 aa, Homo sapiens
  CDR3 for beta chain variable domain of TCR clone 153907 (TRBV5-1, TRBJ2-7)
CASSLDAYEQYF

SEQ ID NO: 307815 - protein, 15 aa, Homo sapiens
  CDR3 for alpha chain variable domain of TCR clone 153908 (TRAV27, TRAJ38)
CAARRNAGNNRKLIW

SEQ ID NO: 307816 - protein, 15 aa, Homo sapiens
  CDR3 for beta chain variable domain of TCR clone 153908 (TRBV7-6, TRBJ1-1)
CASSPQGGANTEAFF

SEQ ID NO: 307817 - protein, 17 aa, Homo sapiens
  CDR3 for alpha chain variable domain of TCR clone 153909 (TRAV13-1, TRAJ28)
CAASPPYSGAGSYQLTF

SEQ ID NO: 307818 - protein, 13 aa, Homo sapiens
  CDR3 for beta chain variable domain of TCR clone 153909 (TRBV9, TRBJ2-1)
CASSPSGGNEQFF

SEQ ID NO: 307819 - protein, 17 aa, Homo sapiens
  CDR3 for alpha chain variable domain of TCR clone 153910 (TRAV4, TRAJ13)
CLVGVQGSSGGYQKVTF

SEQ ID NO: 307820 - protein, 18 aa, Homo sapiens
  CDR3 for beta chain variable domain of TCR clone 153910 (TRBV15, TRBJ2-3)
CAISRDGARSWDTDTQYF

SEQ ID NO: 307821 - protein, 10 aa, Homo sapiens
  CDR3 for alpha chain variable domain of TCR clone 153911 (TRAV8-3, TRAJ20)
CAVGYYKLSF

SEQ ID NO: 307822 - protein, 15 aa, Homo sapiens
  CDR3 for beta chain variable domain of TCR clone 153911 (TRBV20-1, TRBJ2-7)
CSARDRVSGMDEQYF

SEQ ID NO: 307823 - protein, 13 aa, Homo sapiens
  CDR3 for alpha chain variable domain of TCR clone 153912 (TRAV14/DV4, TRAJ20)
CAMRESNDYKLSF

SEQ ID NO: 307824 - protein, 15 aa, Homo sapiens
  CDR3 for beta chain variable domain of TCR clone 153912 (TRBV7-9, TRBJ1-1)
CDSSRPGTANTEAFF

SEQ ID NO: 307825 - protein, 11 aa, Homo sapiens
  CDR3 for alpha chain variable domain of TCR clone 153913 (TRAV2, TRAJ13)
CASRGYQKVTF

SEQ ID NO: 307826 - protein, 16 aa, Homo sapiens
  CDR3 for beta chain variable domain of TCR clone 153913 (TRBV7-3, TRBJ2-1)
CASSLEGYRSYNEQFF

SEQ ID NO: 307827 - protein, 12 aa, Homo sapiens
  CDR3 for alpha chain variable domain of TCR clone 153914 (TRAV8-6, TRAJ43)
CAVSNNNNDTRF

SEQ ID NO: 307828 - protein, 15 aa, Homo sapiens
  CDR3 for beta chain variable domain of TCR clone 153914 (TRBV7-3, TRBJ2-6)
CASSLGGSGANVLTF

SEQ ID NO: 307829 - protein, 17 aa, Homo sapiens
  CDR3 for alpha chain variable domain of TCR clone 153915 (TRAV21, TRAJ24)
CAGIRLRSTDSWGKLQF

SEQ ID NO: 307830 - protein, 15 aa, Homo sapiens
  CDR3 for beta chain variable domain of TCR clone 153915 (TRBV7-2, TRBJ2-3)
CASSPRGRSTDTQYF

SEQ ID NO: 307831 - protein, 13 aa, Homo sapiens
  CDR3 for alpha chain variable domain of TCR clone 153916 (TRAV35, TRAJ58)
CAGLETSGSRLTF

SEQ ID NO: 307832 - protein, 15 aa, Homo sapiens
  CDR3 for beta chain variable domain of TCR clone 153916 (TRBV20-1, TRBJ2-1)
CSARFSGGGLNEQFF

SEQ ID NO: 307833 - protein, 15 aa, Homo sapiens
  CDR3 for alpha chain variable domain of TCR clone 153917 (TRAV21, TRAJ40)
CAVRPQTSVTYNYIF

SEQ ID NO: 307834 - protein, 13 aa, Homo sapiens
  CDR3 for beta chain variable domain of TCR clone 153917 (TRBV7-2, TRBJ2-2)
CASSSVRARELFF

SEQ ID NO: 307835 - protein, 15 aa, Homo sapiens
  CDR3 for alpha chain variable domain of TCR clone 153918 (TRAV20, TRAJ53)
CAVQERGGSNYKLTF

SEQ ID NO: 307836 - protein, 13 aa, Homo sapiens
  CDR3 for beta chain variable domain of TCR clone 153918 (TRBV7-9, TRBJ1-2)
CASSLKQNYGYTF

SEQ ID NO: 307837 - protein, 13 aa, Homo sapiens
  CDR3 for alpha chain variable domain of TCR clone 153919 (TRAV35, TRAJ32)
CAGVGGATNKLIF

SEQ ID NO: 307838 - protein, 17 aa, Homo sapiens
  CDR3 for beta chain variable domain of TCR clone 153919 (TRBV4-3, TRBJ2-1)
CASSRFSSGRASGEQFF

SEQ ID NO: 307839 - protein, 16 aa, Homo sapiens
  CDR3 for alpha chain variable domain of TCR clone 153920 (TRAV38-1, TRAJ32)
CAFMKGGGGATNKLIF

SEQ ID NO: 307840 - protein, 13 aa, Homo sapiens
  CDR3 for beta chain variable domain of TCR clone 153920 (TRBV20-1, TRBJ1-2)
CSARDQGAYGYTF

SEQ ID NO: 307841 - protein, 16 aa, Homo sapiens
  CDR3 for alpha chain variable domain of TCR clone 153921 (TRAV3, TRAJ10)
CAVRDMRAGGGNKPTF

SEQ ID NO: 307842 - protein, 14 aa, Homo sapiens
  CDR3 for beta chain variable domain of TCR clone 153921 (TRBV25-1, TRBJ1-1)
CVSTHLGGNTEAFF

SEQ ID NO: 307843 - protein, 10 aa, Homo sapiens
  CDR3 for alpha chain variable domain of TCR clone 153922 (TRAV21, TRAJ43)
CAVWIGDMRF

SEQ ID NO: 307844 - protein, 13 aa, Homo sapiens
  CDR3 for beta chain variable domain of TCR clone 153922 (TRBV20-1, TRBJ2-7)
CSAPGLADYEQYF

SEQ ID NO: 307845 - protein, 12 aa, Homo sapiens
  CDR3 for alpha chain variable domain of TCR clone 153923 (TRAV12-3, TRAJ17)
CAMTLTGNKLTF

SEQ ID NO: 307846 - protein, 18 aa, Homo sapiens
  CDR3 for beta chain variable domain of TCR clone 153923 (TRBV11-2, TRBJ2-1)
CASRAGTSGAKYYNEQFF

SEQ ID NO: 307847 - protein, 14 aa, Homo sapiens
  CDR3 for alpha chain variable domain of TCR clone 153924 (TRAV12-2, TRAJ13)
CAVKKTGGNQKVTF

SEQ ID NO: 307848 - protein, 16 aa, Homo sapiens
  CDR3 for beta chain variable domain of TCR clone 153924 (TRBV20-1, TRBJ1-5)
CSASRGTGYSNQPQHF

SEQ ID NO: 307849 - protein, 14 aa, Homo sapiens
  CDR3 for alpha chain variable domain of TCR clone 153925 (TRAV17, TRAJ32)
CATVPGGATNKLIF

SEQ ID NO: 307850 - protein, 14 aa, Homo sapiens
  CDR3 for beta chain variable domain of TCR clone 153925 (TRBV2, TRBJ1-5)
CASSENRGGQPQHF

SEQ ID NO: 307851 - protein, 12 aa, Homo sapiens
  CDR3 for alpha chain variable domain of TCR clone 153926 (TRAV17, TRAJ12)
CATLRSSYKLIF

SEQ ID NO: 307852 - protein, 14 aa, Homo sapiens
  CDR3 for beta chain variable domain of TCR clone 153926 (TRBV19, TRBJ2-1)
CARAARSFQWEQFF

SEQ ID NO: 307853 - protein, 14 aa, Homo sapiens
  CDR3 for alpha chain variable domain of TCR clone 153927 (TRAV26-1, TRAJ38)
CIADNAGNNRKLIW

SEQ ID NO: 307854 - protein, 14 aa, Homo sapiens
  CDR3 for beta chain variable domain of TCR clone 153927 (TRBV20-1, TRBJ1-1)
CSAQTRVGGTEAFF

SEQ ID NO: 307855 - protein, 16 aa, Homo sapiens
  CDR3 for alpha chain variable domain of TCR clone 153928 (TRAV21, TRAJ52)
CAVTNAGDTSYGKLTF

SEQ ID NO: 307856 - protein, 16 aa, Homo sapiens
  CDR3 for beta chain variable domain of TCR clone 153928 (TRBV2, TRBJ2-1)
CASSVGGSLSYNEQFF

SEQ ID NO: 307857 - protein, 14 aa, Homo sapiens
  CDR3 for alpha chain variable domain of TCR clone 153929 (TRAV8-6, TRAJ49)
CAVSDPGTGNQLYF

SEQ ID NO: 307858 - protein, 16 aa, Homo sapiens
  CDR3 for beta chain variable domain of TCR clone 153929 (TRBV24-1, TRBJ2-1)
CATSGVAGANYNEQFF

SEQ ID NO: 307859 - protein, 10 aa, Homo sapiens
  CDR3 for alpha chain variable domain of TCR clone 153930 (TRAV1-2, TRAJ31)
CVSEDARLMF

SEQ ID NO: 307860 - protein, 12 aa, Homo sapiens
  CDR3 for beta chain variable domain of TCR clone 153930 (TRBV5-7, TRBJ1-1)
CASSLGKGKAFF

SEQ ID NO: 307861 - protein, 14 aa, Homo sapiens
  CDR3 for alpha chain variable domain of TCR clone 153931 (TRAV14/DV4, TRAJ49)
CAFNRYLTGNQFYF

SEQ ID NO: 307862 - protein, 13 aa, Homo sapiens
  CDR3 for beta chain variable domain of TCR clone 153931 (TRBV24-1, TRBJ2-2)
CATSDWSTGELFF

SEQ ID NO: 307863 - protein, 14 aa, Homo sapiens
  CDR3 for alpha chain variable domain of TCR clone 153932 (TRAV1-2, TRAJ8)
CAVREDTGFQKLVF

SEQ ID NO: 307864 - protein, 16 aa, Homo sapiens
  CDR3 for beta chain variable domain of TCR clone 153932 (TRBV15, TRBJ2-3)
CATSRDLGSVTDTQYF

SEQ ID NO: 307865 - protein, 12 aa, Homo sapiens
  CDR3 for alpha chain variable domain of TCR clone 153933 (TRAV13-1, TRAJ53)
AASGGSNYKLTF

SEQ ID NO: 307866 - protein, 16 aa, Homo sapiens
  CDR3 for beta chain variable domain of TCR clone 153933 (TRBV2, TRBJ1-4)
CASNLLQGATNEKLFF

SEQ ID NO: 307867 - protein, 10 aa, Homo sapiens
  CDR3 for alpha chain variable domain of TCR clone 153934 (TRAV23/DV6, TRAJ57)
CAASSTLSQG

SEQ ID NO: 307868 - protein, 16 aa, Homo sapiens
  CDR3 for beta chain variable domain of TCR clone 153934 (TRBV6-1, TRBJ2-5)
CASSETLDRGAETQYF

SEQ ID NO: 307869 - protein, 12 aa, Homo sapiens
  CDR3 for alpha chain variable domain of TCR clone 153935 (TRAV13-1, TRAJ21)
CAATEGFNKFYF

SEQ ID NO: 307870 - protein, 14 aa, Homo sapiens
  CDR3 for beta chain variable domain of TCR clone 153935 (TRBV18, TRBJ2-7)
CASSPRGGAYEQYF

SEQ ID NO: 307871 - protein, 12 aa, Homo sapiens
  CDR3 for alpha chain variable domain of TCR clone 153936 (TRAV13-1, TRAJ9)
CASHTGGFKTIF

SEQ ID NO: 307872 - protein, 13 aa, Homo sapiens
  CDR3 for beta chain variable domain of TCR clone 153936 (TRBV12-4, TRBJ1-2)
CASSSGSKDSYTF

SEQ ID NO: 307873 - protein, 16 aa, Homo sapiens
  CDR3 for alpha chain variable domain of TCR clone 153937 (TRAV20, TRAJ22)
CAVQASSSGSARQLTF

SEQ ID NO: 307874 - protein, 13 aa, Homo sapiens
  CDR3 for beta chain variable domain of TCR clone 153937 (TRBV7-2, TRBJ2-5)
CVSSQTSVETHYF

SEQ ID NO: 307875 - protein, 14 aa, Homo sapiens
  CDR3 for alpha chain variable domain of TCR clone 153938 (TRAV23/DV6, TRAJ36)
CAASMQGGANNLFF

SEQ ID NO: 307876 - protein, 13 aa, Homo sapiens
  CDR3 for beta chain variable domain of TCR clone 153938 (TRBV4-1, TRBJ1-1)
CASSRKMNTEAFF

SEQ ID NO: 307877 - protein, 14 aa, Homo sapiens
  CDR3 for alpha chain variable domain of TCR clone 153939 (TRAV1-2, TRAJ16)
CAVNRFSDGQKLLF

SEQ ID NO: 307878 - protein, 16 aa, Homo sapiens
  CDR3 for beta chain variable domain of TCR clone 153939 (TRBV7-3, TRBJ2-3)
CASSLGGYRPEDTQYF

SEQ ID NO: 307879 - protein, 15 aa, Homo sapiens
  CDR3 for alpha chain variable domain of TCR clone 153940 (TRAV26-1, TRAJ28)
CIVRVAGAGRYQLTF

SEQ ID NO: 307880 - protein, 19 aa, Homo sapiens
  CDR3 for beta chain variable domain of TCR clone 153940 (TRBV7-3, TRBJ2-7)
CASSLTGVAGGWPSYEQYF

SEQ ID NO: 307881 - protein, 14 aa, Homo sapiens
  CDR3 for alpha chain variable domain of TCR clone 153941 (TRAV12-2, TRAJ45)
CAVNKGGGADGLTF

SEQ ID NO: 307882 - protein, 15 aa, Homo sapiens
  CDR3 for beta chain variable domain of TCR clone 153941 (TRBV5-4, TRBJ2-6)
CASSSGRTGANVLTF

SEQ ID NO: 307883 - protein, 10 aa, Homo sapiens
  CDR3 for alpha chain variable domain of TCR clone 153942 (TRAV13-1, TRAJ26)
CSPYGQNFVF

SEQ ID NO: 307884 - protein, 15 aa, Homo sapiens
  CDR3 for beta chain variable domain of TCR clone 153942 (TRBV28, TRBJ2-3)
CASSQELGGTDTQYF

SEQ ID NO: 307885 - protein, 15 aa, Homo sapiens
  CDR3 for alpha chain variable domain of TCR clone 153943 (TRAV26-2, TRAJ13)
CILRDLSGGYQKVTF

SEQ ID NO: 307886 - protein, 15 aa, Homo sapiens
  CDR3 for beta chain variable domain of TCR clone 153943 (TRBV4-1, TRBJ1-1)
CASSQEWGHYTEAFF

SEQ ID NO: 307887 - protein, 12 aa, Homo sapiens
  CDR3 for alpha chain variable domain of TCR clone 153944 (TRAV12-1, TRAJ40)
CAMTSGTYKYIF

SEQ ID NO: 307888 - protein, 15 aa, Homo sapiens
  CDR3 for beta chain variable domain of TCR clone 153944 (TRBV7-3, TRBJ2-2)
CASSLTGQGTGELFF

SEQ ID NO: 307889 - protein, 10 aa, Homo sapiens
  CDR3 for alpha chain variable domain of TCR clone 153945 (TRAV19, TRAJ45)
PGGGADGLTF

SEQ ID NO: 307890 - protein, 14 aa, Homo sapiens
  CDR3 for beta chain variable domain of TCR clone 153945 (TRBV25-1, TRBJ1-1)
CASTHLGGNTEAFF

SEQ ID NO: 307891 - protein, 15 aa, Homo sapiens
  CDR3 for alpha chain variable domain of TCR clone 153946 (TRAV17, TRAJ13)
CATDSGSGGYQKVTL

SEQ ID NO: 307892 - protein, 17 aa, Homo sapiens
  CDR3 for beta chain variable domain of TCR clone 153946 (TRBV11-2, TRBJ2-1)
CASSLYPPGVEYNEQFF

SEQ ID NO: 307893 - protein, 13 aa, Homo sapiens
  CDR3 for alpha chain variable domain of TCR clone 153947 (TRAV20, TRAJ37)
CAGCSSNTGKLIF

SEQ ID NO: 307894 - protein, 11 aa, Homo sapiens
  CDR3 for beta chain variable domain of TCR clone 153947 (TRBV12-3, TRBJ2-3)
WASTATDTQYF

SEQ ID NO: 307895 - protein, 14 aa, Homo sapiens
  CDR3 for alpha chain variable domain of TCR clone 153948 (TRAV5, TRAJ21)
CAESILDNFNKFYF

SEQ ID NO: 307896 - protein, 15 aa, Homo sapiens
  CDR3 for beta chain variable domain of TCR clone 153948 (TRBV25-1, TRBJ1-4)
CASSKRIATNEKLFF

SEQ ID NO: 307897 - protein, 10 aa, Homo sapiens
  CDR3 for alpha chain variable domain of TCR clone 153949 (TRAV36/DV7, TRAJ56)
CAGPAVELTF

SEQ ID NO: 307898 - protein, 14 aa, Homo sapiens
  CDR3 for beta chain variable domain of TCR clone 153949 (TRBV19, TRBJ2-1)
CASPTFVLSGEQFF

SEQ ID NO: 307899 - protein, 16 aa, Homo sapiens
  CDR3 for alpha chain variable domain of TCR clone 153950 (TRAV16, TRAJ4)
CALSRMFSGGYNKLIF

SEQ ID NO: 307900 - protein, 16 aa, Homo sapiens
  CDR3 for beta chain variable domain of TCR clone 153950 (TRBV24-1, TRBJ2-3)
FATSGPGTGATDTQYF

SEQ ID NO: 307901 - protein, 13 aa, Homo sapiens
  CDR3 for alpha chain variable domain of TCR clone 153951 (TRAV2, TRAJ20)
CAVEDPSEYKLSF

SEQ ID NO: 307902 - protein, 11 aa, Homo sapiens
  CDR3 for beta chain variable domain of TCR clone 153951 (TRBV12-4, TRBJ2-3)
CASTATDTQYF

SEQ ID NO: 307903 - protein, 11 aa, Homo sapiens
  CDR3 for alpha chain variable domain of TCR clone 153952 (TRAV2, TRAJ13)
CASGGYQKVTF

SEQ ID NO: 307904 - protein, 13 aa, Homo sapiens
  CDR3 for beta chain variable domain of TCR clone 153952 (TRBV12-4, TRBJ1-2)
CSSSLRQGKGYTF

SEQ ID NO: 307905 - protein, 14 aa, Homo sapiens
  CDR3 for alpha chain variable domain of TCR clone 153953 (TRAV17, TRAJ5)
CATVALTGRIALTF

SEQ ID NO: 307906 - protein, 14 aa, Homo sapiens
  CDR3 for beta chain variable domain of TCR clone 153953 (TRBV28, TRBJ2-7)
CASSPYGMAYEQYF

SEQ ID NO: 307907 - protein, 11 aa, Homo sapiens
  CDR3 for alpha chain variable domain of TCR clone 153954 (TRAV6, TRAJ41)
CALNSGYALNF

SEQ ID NO: 307908 - protein, 15 aa, Homo sapiens
  CDR3 for beta chain variable domain of TCR clone 153954 (TRBV4-1, TRBJ2-3)
CASSQVVAGADTQYF

SEQ ID NO: 307909 - protein, 15 aa, Homo sapiens
  CDR3 for alpha chain variable domain of TCR clone 153955 (TRAV12-3, TRAJ6)
CAMSATTAGSYIPTF

SEQ ID NO: 307910 - protein, 19 aa, Homo sapiens
  CDR3 for beta chain variable domain of TCR clone 153955 (TRBV25-1, TRBJ2-2)
CAILVYRVDRGRKTGELFF

SEQ ID NO: 307911 - protein, 15 aa, Homo sapiens
  CDR3 for alpha chain variable domain of TCR clone 153956 (TRAV25, TRAJ52)
CAGRPGGTSYGKLTF

SEQ ID NO: 307912 - protein, 16 aa, Homo sapiens
  CDR3 for beta chain variable domain of TCR clone 153956 (TRBV12-5, TRBJ2-5)
CASGPRTSGKQETQYF

SEQ ID NO: 307913 - protein, 14 aa, Homo sapiens
  CDR3 for alpha chain variable domain of TCR clone 153957 (TRAV30, TRAJ26)
CGTEIVSYGQNFVF

SEQ ID NO: 307914 - protein, 15 aa, Homo sapiens
  CDR3 for beta chain variable domain of TCR clone 153957 (TRBV7-3, TRBJ2-1)
CASSLGQGPFGEQFF

SEQ ID NO: 307915 - protein, 10 aa, Homo sapiens
  CDR3 for alpha chain variable domain of TCR clone 153958 (TRAV12-2, TRAJ10)
CAAWTGVETH

SEQ ID NO: 307916 - protein, 14 aa, Homo sapiens
  CDR3 for beta chain variable domain of TCR clone 153958 (TRBV23-1, TRBJ2-2)
EDRGVEKDTGELFF

SEQ ID NO: 307917 - protein, 15 aa, Homo sapiens
  CDR3 for alpha chain variable domain of TCR clone 153959 (TRAV13-1, TRAJ52)
SYYNAGGTSYGNLTF

SEQ ID NO: 307918 - protein, 11 aa, Homo sapiens
  CDR3 for beta chain variable domain of TCR clone 153959 (TRBV12-4, TRBJ2-2)
CASSSAGELFF

SEQ ID NO: 307919 - protein, 17 aa, Homo sapiens
  CDR3 for alpha chain variable domain of TCR clone 153960 (TRAV23/DV6, TRAJ57)
CAASSTLSQGGSEKLVF

SEQ ID NO: 307920 - protein, 14 aa, Homo sapiens
  CDR3 for beta chain variable domain of TCR clone 153960 (TRBV7-8, TRBJ2-5)
CASSATWGQETQYF

SEQ ID NO: 307921 - protein, 13 aa, Homo sapiens
  CDR3 for alpha chain variable domain of TCR clone 153961 (TRAV12-2, TRAJ20)
CAVYPSNDYKLSF

SEQ ID NO: 307922 - protein, 12 aa, Homo sapiens
  CDR3 for beta chain variable domain of TCR clone 153961 (TRBV14, TRBJ2-7)
CASSRLNGEQYF

SEQ ID NO: 307923 - protein, 14 aa, Homo sapiens
  CDR3 for alpha chain variable domain of TCR clone 153962 (TRAV13-2, TRAJ15)
CAENPNQAGTALIF

SEQ ID NO: 307924 - protein, 16 aa, Homo sapiens
  CDR3 for beta chain variable domain of TCR clone 153962 (TRBV12-4, TRBJ1-2)
CARSPTATGKTRGYTF

SEQ ID NO: 307925 - protein, 17 aa, Homo sapiens
  CDR3 for alpha chain variable domain of TCR clone 153963 (TRAV3, TRAJ6)
CAARDGPRAGGSYIPTF

SEQ ID NO: 307926 - protein, 20 aa, Homo sapiens
  CDR3 for beta chain variable domain of TCR clone 153963 (TRBV28, TRBJ2-1)
CASTPIGRSPGLAGGNEQFC

SEQ ID NO: 307927 - protein, 13 aa, Homo sapiens
  CDR3 for alpha chain variable domain of TCR clone 153964 (TRAV1-2, TRAJ9)
CAALNTGGFKTTF

SEQ ID NO: 307928 - protein, 15 aa, Homo sapiens
  CDR3 for beta chain variable domain of TCR clone 153964 (TRBV6-3, TRBJ2-7)
CASSSPGTVFYEQYF

SEQ ID NO: 307929 - protein, 12 aa, Homo sapiens
  CDR3 for alpha chain variable domain of TCR clone 153965 (TRAV12-3, TRAJ17)
CAMTLTGNKLTF

SEQ ID NO: 307930 - protein, 16 aa, Homo sapiens
  CDR3 for beta chain variable domain of TCR clone 153965 (TRBV7-3, TRBJ2-1)
CANSLEGYRSYNEQFF

SEQ ID NO: 307931 - protein, 13 aa, Homo sapiens
  CDR3 for alpha chain variable domain of TCR clone 153966 (TRAV3, TRAJ27)
CAVRHLGAGKLTF

SEQ ID NO: 307932 - protein, 13 aa, Homo sapiens
  CDR3 for beta chain variable domain of TCR clone 153966 (TRBV7-9, TRBJ2-3)
CASSPGSTDTQYF

SEQ ID NO: 307933 - protein, 15 aa, Homo sapiens
  CDR3 for alpha chain variable domain of TCR clone 153967 (TRAV26-1, TRAJ37)
CIVENGSGNTGKLIL

SEQ ID NO: 307934 - protein, 15 aa, Homo sapiens
  CDR3 for beta chain variable domain of TCR clone 153967 (TRBV20-1, TRBJ2-7)
CSARDRVSGMDEQYF

SEQ ID NO: 307935 - protein, 13 aa, Homo sapiens
  CDR3 for alpha chain variable domain of TCR clone 153968 (TRAV21, TRAJ10)
CAVPTGGGNKLTF

SEQ ID NO: 307936 - protein, 17 aa, Homo sapiens
  CDR3 for beta chain variable domain of TCR clone 153968 (TRBV14, TRBJ2-5)
CASSQASGRPSTSGQAR

SEQ ID NO: 307937 - protein, 13 aa, Homo sapiens
  CDR3 for alpha chain variable domain of TCR clone 153969 (TRAV9-2, TRAJ53)
CALSRGSNYKLTF

SEQ ID NO: 307938 - protein, 15 aa, Homo sapiens
  CDR3 for beta chain variable domain of TCR clone 153969 (TRBV9, TRBJ1-6)
CASSVAGTGDSPLHF

SEQ ID NO: 307939 - protein, 13 aa, Homo sapiens
  CDR3 for alpha chain variable domain of TCR clone 153970 (TRAV17, TRAJ9)
CATAITLGFKTIF

SEQ ID NO: 307940 - protein, 16 aa, Homo sapiens
  CDR3 for beta chain variable domain of TCR clone 153970 (TRBV15, TRBJ2-1)
CATSRNLAGGYNEQFF

SEQ ID NO: 307941 - protein, 14 aa, Homo sapiens
  CDR3 for alpha chain variable domain of TCR clone 153971 (TRAV12-1, TRAJ3)
CGAARYSSASKIIF

SEQ ID NO: 307942 - protein, 15 aa, Homo sapiens
  CDR3 for beta chain variable domain of TCR clone 153971 (TRBV7-2, TRBJ2-6)
CASSREGCGANVLTF

SEQ ID NO: 307943 - protein, 14 aa, Homo sapiens
  CDR3 for alpha chain variable domain of TCR clone 153972 (TRAV12-1, TRAJ9)
CVVNRRTGGFKTIF

SEQ ID NO: 307944 - protein, 16 aa, Homo sapiens
  CDR3 for beta chain variable domain of TCR clone 153972 (TRBV4-1, TRBJ2-3)
CASRQSTSGAEDTQYF

SEQ ID NO: 307945 - protein, 13 aa, Homo sapiens
  CDR3 for alpha chain variable domain of TCR clone 153973 (TRAV38-1, TRAJ42)
CARWGGSQGNLIF

SEQ ID NO: 307946 - protein, 17 aa, Homo sapiens
  CDR3 for beta chain variable domain of TCR clone 153973 (TRBV20-1, TRBJ2-1)
CSARDPLAGVWDTEQFF

SEQ ID NO: 307947 - protein, 15 aa, Homo sapiens
  CDR3 for alpha chain variable domain of TCR clone 153974 (TRAV8-3, TRAJ45)
CASLYSGGGADGLTF

SEQ ID NO: 307948 - protein, 15 aa, Homo sapiens
  CDR3 for beta chain variable domain of TCR clone 153974 (TRBV20-1, TRBJ2-7)
CIARDRVSGMDEQYF

SEQ ID NO: 307949 - protein, 15 aa, Homo sapiens
  CDR3 for alpha chain variable domain of TCR clone 153975 (TRAV26-1, TRAJ27)
CIVRVLTPMHANQPL

SEQ ID NO: 307950 - protein, 13 aa, Homo sapiens
  CDR3 for beta chain variable domain of TCR clone 153975 (TRBV20-1, TRBJ2-7)
CSATHTSGYEQYF

SEQ ID NO: 307951 - protein, 15 aa, Homo sapiens
  CDR3 for alpha chain variable domain of TCR clone 153976 (TRAV21, TRAJ45)
CAVSYSGGGDDELTF

SEQ ID NO: 307952 - protein, 13 aa, Homo sapiens
  CDR3 for beta chain variable domain of TCR clone 153976 (TRBV20-1, TRBJ2-5)
CSAATELQETQYF

SEQ ID NO: 307953 - protein, 16 aa, Homo sapiens
  CDR3 for alpha chain variable domain of TCR clone 153977 (TRAV3, TRAJ37)
CAVRGKRSGNTGKLIF

SEQ ID NO: 307954 - protein, 15 aa, Homo sapiens
  CDR3 for beta chain variable domain of TCR clone 153977 (TRBV7-3, TRBJ2-2)
CASSETGQGTGELFF

SEQ ID NO: 307955 - protein, 12 aa, Homo sapiens
  CDR3 for alpha chain variable domain of TCR clone 153978 (TRAV2, TRAJ9)
CAVGAGGVKTIF

SEQ ID NO: 307956 - protein, 11 aa, Homo sapiens
  CDR3 for beta chain variable domain of TCR clone 153978 (TRBV13, TRBJ2-2)
CASSPRTGEHT

SEQ ID NO: 307957 - protein, 16 aa, Homo sapiens
  CDR3 for alpha chain variable domain of TCR clone 153979 (TRAV12-1, TRAJ43)
CVVNPHRCGAGTRLTV

SEQ ID NO: 307958 - protein, 16 aa, Homo sapiens
  CDR3 for beta chain variable domain of TCR clone 153979 (TRBV27, TRBJ2-2)
CASSSTGGGDTGELFF

SEQ ID NO: 307959 - protein, 15 aa, Homo sapiens
  CDR3 for alpha chain variable domain of TCR clone 153980 (TRAV23/DV6, TRAJ37)
CAAGEGSSNTGKLIF

SEQ ID NO: 307960 - protein, 17 aa, Homo sapiens
  CDR3 for beta chain variable domain of TCR clone 153980 (TRBV20-1, TRBJ2-7)
CSATRTGGVAGVEEQYF

SEQ ID NO: 307961 - protein, 14 aa, Homo sapiens
  CDR3 for alpha chain variable domain of TCR clone 153981 (TRAV8-1, TRAJ36)
CAVNSPTGANNLFF

SEQ ID NO: 307962 - protein, 17 aa, Homo sapiens
  CDR3 for beta chain variable domain of TCR clone 153981 (TRBV25-1, TRBJ2-5)
CASSRRGGRGGQETQYF

SEQ ID NO: 307963 - protein, 18 aa, Homo sapiens
  CDR3 for alpha chain variable domain of TCR clone 153982 (TRAV21, TRAJ52)
CAVRPSPAGGTSYGKLTF

SEQ ID NO: 307964 - protein, 15 aa, Homo sapiens
  CDR3 for beta chain variable domain of TCR clone 153982 (TRBV9, TRBJ1-5)
CASSVAGGANQPQHF

SEQ ID NO: 307965 - protein, 16 aa, Homo sapiens
  CDR3 for alpha chain variable domain of TCR clone 153983 (TRAV14/DV4, TRAJ21)
CAMREGPENNFNKFYF

SEQ ID NO: 307966 - protein, 16 aa, Homo sapiens
  CDR3 for beta chain variable domain of TCR clone 153983 (TRBV13, TRBJ2-2)
CASSPRTGEHTGELFF

SEQ ID NO: 307967 - protein, 15 aa, Homo sapiens
  CDR3 for alpha chain variable domain of TCR clone 153984 (TRAV8-6, TRAJ11)
CAVNFMHSGYSTLTF

SEQ ID NO: 307968 - protein, 17 aa, Homo sapiens
  CDR3 for beta chain variable domain of TCR clone 153984 (TRBV3-1, TRBJ2-5)
CASSNWGGTSGQETQYF

SEQ ID NO: 307969 - protein, 12 aa, Homo sapiens
  CDR3 for alpha chain variable domain of TCR clone 153985 (TRAV13-1, TRAJ21)
CAAKEGFNKFYF

SEQ ID NO: 307970 - protein, 15 aa, Homo sapiens
  CDR3 for beta chain variable domain of TCR clone 153985 (TRBV7-7, TRBJ2-5)
GASSQLERAEETQYF

SEQ ID NO: 307971 - protein, 13 aa, Homo sapiens
  CDR3 for alpha chain variable domain of TCR clone 153986 (TRAV8-3, TRAJ4)
WVFYSGGYNKLIF

SEQ ID NO: 307972 - protein, 16 aa, Homo sapiens
  CDR3 for beta chain variable domain of TCR clone 153986 (TRBV7-8, TRBJ2-3)
CASSTEEQRETDTQYF

SEQ ID NO: 307973 - protein, 12 aa, Homo sapiens
  CDR3 for alpha chain variable domain of TCR clone 153987 (TRAV12-3, TRAJ17)
CAMTLTGNRLTF

SEQ ID NO: 307974 - protein, 15 aa, Homo sapiens
  CDR3 for beta chain variable domain of TCR clone 153987 (TRBV20-1, TRBJ2-7)
CSARDRVSGIDEQYF

SEQ ID NO: 307975 - protein, 15 aa, Homo sapiens
  CDR3 for alpha chain variable domain of TCR clone 153988 (TRAV3, TRAJ29)
CAVRDINSGNTPLVF

SEQ ID NO: 307976 - protein, 16 aa, Homo sapiens
  CDR3 for beta chain variable domain of TCR clone 153988 (TRBV4-1, TRBJ2-5)
CASSQTFYRDQETQYF

SEQ ID NO: 307977 - protein, 11 aa, Homo sapiens
  CDR3 for alpha chain variable domain of TCR clone 153989 (TRAV8-3, TRAJ15)
CAVGPGTALIV

SEQ ID NO: 307978 - protein, 18 aa, Homo sapiens
  CDR3 for beta chain variable domain of TCR clone 153989 (TRBV18, TRBJ2-3)
CASSYTSGAAGGTDTQYF

SEQ ID NO: 307979 - protein, 14 aa, Homo sapiens
  CDR3 for alpha chain variable domain of TCR clone 153990 (TRAV1-2, TRAJ16)
CAVNRFSDGQKLLF

SEQ ID NO: 307980 - protein, 15 aa, Homo sapiens
  CDR3 for beta chain variable domain of TCR clone 153990 (TRBV12-4, TRBJ2-5)
CASSPPTGPQETQYF

SEQ ID NO: 307981 - protein, 14 aa, Homo sapiens
  CDR3 for alpha chain variable domain of TCR clone 153991 (TRAV1-2, TRAJ16)
CAVNRFSDGLKLLF

SEQ ID NO: 307982 - protein, 15 aa, Homo sapiens
  CDR3 for beta chain variable domain of TCR clone 153991 (TRBV5-1, TRBJ2-1)
CASSPPRAPYNEHFF

SEQ ID NO: 307983 - protein, 14 aa, Homo sapiens
  CDR3 for alpha chain variable domain of TCR clone 153992 (TRAV12-2, TRAJ17)
CAALIKAAGNKLTF

SEQ ID NO: 307984 - protein, 16 aa, Homo sapiens
  CDR3 for beta chain variable domain of TCR clone 153992 (TRBV20-1, TRBJ2-2)
CSASASGIPGAGELFF

SEQ ID NO: 307985 - protein, 15 aa, Homo sapiens
  CDR3 for alpha chain variable domain of TCR clone 153993 (TRAV19, TRAJ8)
CALSGPNTGFQKLVF

SEQ ID NO: 307986 - protein, 15 aa, Homo sapiens
  CDR3 for beta chain variable domain of TCR clone 153993 (TRBV5-5, TRBJ1-5)
CASSSTPGSNQPQHF

SEQ ID NO: 307987 - protein, 15 aa, Homo sapiens
  CDR3 for alpha chain variable domain of TCR clone 153994 (TRAV12-2, TRAJ53)
CAVNGRGGSNYKLTF

SEQ ID NO: 307988 - protein, 13 aa, Homo sapiens
  CDR3 for beta chain variable domain of TCR clone 153994 (TRBV19, TRBJ2-1)
CASSMYRVNEQFF

SEQ ID NO: 307989 - protein, 15 aa, Homo sapiens
  CDR3 for alpha chain variable domain of TCR clone 153995 (TRAV8-4, TRAJ28)
CAVSLSGAGSYQLTF

SEQ ID NO: 307990 - protein, 14 aa, Homo sapiens
  CDR3 for beta chain variable domain of TCR clone 153995 (TRBV7-2, TRBJ2-7)
CASSPKTSFYEQYF

SEQ ID NO: 307991 - protein, 12 aa, Homo sapiens
  CDR3 for alpha chain variable domain of TCR clone 153996 (TRAV40, TRAJ20)
CLRGLNDYNLSF

SEQ ID NO: 307992 - protein, 14 aa, Homo sapiens
  CDR3 for beta chain variable domain of TCR clone 153996 (TRBV19, TRBJ2-1)
CASSSGRDYNEQFF

SEQ ID NO: 307993 - protein, 16 aa, Homo sapiens
  CDR3 for alpha chain variable domain of TCR clone 153997 (TRAV35, TRAJ37)
CWAFLRGSSNTGKLIF

SEQ ID NO: 307994 - protein, 13 aa, Homo sapiens
  CDR3 for beta chain variable domain of TCR clone 153997 (TRBV2, TRBJ1-2)
CASSVRCNYGYTF

SEQ ID NO: 307995 - protein, 11 aa, Homo sapiens
  CDR3 for alpha chain variable domain of TCR clone 153998 (TRAV3, TRAJ21)
CAVGNFNKFYF

SEQ ID NO: 307996 - protein, 16 aa, Homo sapiens
  CDR3 for beta chain variable domain of TCR clone 153998 (TRBV19, TRBJ2-2)
CASSAAGTGGTGELFF

SEQ ID NO: 307997 - protein, 16 aa, Homo sapiens
  CDR3 for alpha chain variable domain of TCR clone 153999 (TRAV30, TRAJ24)
CGTEIVDADSWGKFQF

SEQ ID NO: 307998 - protein, 14 aa, Homo sapiens
  CDR3 for beta chain variable domain of TCR clone 153999 (TRBV19, TRBJ2-7)
CASNFRDTFTGVYF

SEQ ID NO: 307999 - protein, 15 aa, Homo sapiens
  CDR3 for alpha chain variable domain of TCR clone 154000 (TRAV26-2, TRAJ54)
CILRDVGQGAQQLVF

SEQ ID NO: 308000 - protein, 13 aa, Homo sapiens
  CDR3 for beta chain variable domain of TCR clone 154000 (TRBV7-9, TRBJ1-1)
CASSLAGVTEAFF

SEQ ID NO: 308001 - protein, 14 aa, Homo sapiens
  CDR3 for alpha chain variable domain of TCR clone 154001 (TRAV12-2, TRAJ6)
CASKWGGGSYIPTF

SEQ ID NO: 308002 - protein, 13 aa, Homo sapiens
  CDR3 for beta chain variable domain of TCR clone 154001 (TRBV2, TRBJ1-1)
CASSGGGNTEAFF

SEQ ID NO: 308003 - protein, 11 aa, Homo sapiens
  CDR3 for alpha chain variable domain of TCR clone 154002 (TRAV26-1, TRAJ27)
CIDPNAGKSTF

SEQ ID NO: 308004 - protein, 18 aa, Homo sapiens
  CDR3 for beta chain variable domain of TCR clone 154002 (TRBV7-9, TRBJ2-6)
CTSSFPGAGISGANVLTF

SEQ ID NO: 308005 - protein, 18 aa, Homo sapiens
  CDR3 for alpha chain variable domain of TCR clone 154003 (TRAV13-1, TRAJ52)
CAAKNPNAGGTSYGKLTF

SEQ ID NO: 308006 - protein, 15 aa, Homo sapiens
  CDR3 for beta chain variable domain of TCR clone 154003 (TRBV9, TRBJ1-6)
CSSSVAGTGDSPLHF

SEQ ID NO: 308007 - protein, 14 aa, Homo sapiens
  CDR3 for alpha chain variable domain of TCR clone 154004 (TRAV8-6, TRAJ53)
CAARVLGSNYKLTF

SEQ ID NO: 308008 - protein, 15 aa, Homo sapiens
  CDR3 for beta chain variable domain of TCR clone 154004 (TRBV20-1, TRBJ2-3)
CSAEPLAGHGDTQYF

SEQ ID NO: 308009 - protein, 14 aa, Homo sapiens
  CDR3 for alpha chain variable domain of TCR clone 154005 (TRAV38-1, TRAJ45)
CAYYSGGGDDGLTF

SEQ ID NO: 308010 - protein, 14 aa, Homo sapiens
  CDR3 for beta chain variable domain of TCR clone 154005 (TRBV25-1, TRBJ1-1)
CASTHLGGNTEAFF

SEQ ID NO: 308011 - protein, 13 aa, Homo sapiens
  CDR3 for alpha chain variable domain of TCR clone 154006 (TRAV17, TRAJ9)
CATDYTGGFKTIF

SEQ ID NO: 308012 - protein, 15 aa, Homo sapiens
  CDR3 for beta chain variable domain of TCR clone 154006 (TRBV19, TRBJ1-5)
CASSIVWADNQPQHF

SEQ ID NO: 308013 - protein, 12 aa, Homo sapiens
  CDR3 for alpha chain variable domain of TCR clone 154007 (TRAV13-1, TRAJ5)
CAVDTGRRSLTF

SEQ ID NO: 308014 - protein, 12 aa, Homo sapiens
  CDR3 for beta chain variable domain of TCR clone 154007 (TRBV28, TRBJ2-1)
CASSFYRHEQFF

SEQ ID NO: 308015 - protein, 14 aa, Homo sapiens
  CDR3 for alpha chain variable domain of TCR clone 154008 (TRAV13-1, TRAJ40)
CAASMTSGTYKYIF

SEQ ID NO: 308016 - protein, 15 aa, Homo sapiens
  CDR3 for beta chain variable domain of TCR clone 154008 (TRBV7-3, TRBJ2-1)
SASSPTGGGEVEQFF

SEQ ID NO: 308017 - protein, 15 aa, Homo sapiens
  CDR3 for alpha chain variable domain of TCR clone 154009 (TRAV35, TRAJ50)
CAGQVRKTSYDKVIF

SEQ ID NO: 308018 - protein, 12 aa, Homo sapiens
  CDR3 for beta chain variable domain of TCR clone 154009 (TRBV5-1, TRBJ2-5)
CASSLGLETQYF

SEQ ID NO: 308019 - protein, 15 aa, Homo sapiens
  CDR3 for alpha chain variable domain of TCR clone 154010 (TRAV12-2, TRAJ53)
CAVNGGGGSNDKLTF

SEQ ID NO: 308020 - protein, 16 aa, Homo sapiens
  CDR3 for beta chain variable domain of TCR clone 154010 (TRBV5-1, TRBJ1-1)
CASSSGGNSLNTEAFF

SEQ ID NO: 308021 - protein, 12 aa, Homo sapiens
  CDR3 for alpha chain variable domain of TCR clone 154011 (TRAV12-3, TRAJ20)
CAMVRGDYKLSF

SEQ ID NO: 308022 - protein, 16 aa, Homo sapiens
  CDR3 for beta chain variable domain of TCR clone 154011 (TRBV5-1, TRBJ2-3)
CASSLGLAVYTDTQHF

SEQ ID NO: 308023 - protein, 23 aa, Homo sapiens
  CDR3 for alpha chain variable domain of TCR clone 154012 (TRAV26-1, )
CIADNAGNNHIQNPDPAVYQLRD

SEQ ID NO: 308024 - protein, 14 aa, Homo sapiens
  CDR3 for beta chain variable domain of TCR clone 154012 (TRBV7-3, TRBJ1-1)
CASSLKGGNTEAFF

SEQ ID NO: 308025 - protein, 16 aa, Homo sapiens
  CDR3 for alpha chain variable domain of TCR clone 154013 (TRAV17, TRAJ52)
CATSNAGGTSYGKLTF

SEQ ID NO: 308026 - protein, 17 aa, Homo sapiens
  CDR3 for beta chain variable domain of TCR clone 154013 (TRBV7-8, TRBJ2-6)
CASSAGTGGAGANVLTF

SEQ ID NO: 308027 - protein, 14 aa, Homo sapiens
  CDR3 for alpha chain variable domain of TCR clone 154014 (TRAV23/DV6, TRAJ4)
CPAPSSGGYNKLIF

SEQ ID NO: 308028 - protein, 16 aa, Homo sapiens
  CDR3 for beta chain variable domain of TCR clone 154014 (TRBV19, TRBJ1-1)
CASRFGGPVTGTEAFF

SEQ ID NO: 308029 - protein, 15 aa, Homo sapiens
  CDR3 for alpha chain variable domain of TCR clone 154015 (TRAV3, TRAJ22)
CAVRDRGGSARQLTF

SEQ ID NO: 308030 - protein, 15 aa, Homo sapiens
  CDR3 for beta chain variable domain of TCR clone 154015 (TRBV27, TRBJ2-1)
CASSNGEGPPMSSSS

SEQ ID NO: 308031 - protein, 13 aa, Homo sapiens
  CDR3 for alpha chain variable domain of TCR clone 154016 (TRAV26-1, TRAJ30)
CIFNMNRDDKIIF

SEQ ID NO: 308032 - protein, 16 aa, Homo sapiens
  CDR3 for beta chain variable domain of TCR clone 154016 (TRBV16, TRBJ2-7)
CASSRPAGESSYEQYF

SEQ ID NO: 308033 - protein, 12 aa, Homo sapiens
  CDR3 for alpha chain variable domain of TCR clone 154017 (TRAV2, TRAJ33)
CAVPASNYQLIW

SEQ ID NO: 308034 - protein, 20 aa, Homo sapiens
  CDR3 for beta chain variable domain of TCR clone 154017 (TRBV19, TRBJ2-1)
CASSISRTVTSTRLNNEQFF

SEQ ID NO: 308035 - protein, 13 aa, Homo sapiens
  CDR3 for alpha chain variable domain of TCR clone 154018 (TRAV1-1, TRAJ9)
CAAKNTGGFKPIL

SEQ ID NO: 308036 - protein, 14 aa, Homo sapiens
  CDR3 for beta chain variable domain of TCR clone 154018 (TRBV20-1, TRBJ2-1)
CSAQIGGSANEQFF

SEQ ID NO: 308037 - protein, 14 aa, Homo sapiens
  CDR3 for alpha chain variable domain of TCR clone 154019 (TRAV9-2, TRAJ39)
CALYTYNAGNMLTF

SEQ ID NO: 308038 - protein, 15 aa, Homo sapiens
  CDR3 for beta chain variable domain of TCR clone 154019 (TRBV5-1, TRBJ2-1)
CASSPPRAPYNEQFF

SEQ ID NO: 308039 - protein, 14 aa, Homo sapiens
  CDR3 for alpha chain variable domain of TCR clone 154020 (TRAV3, TRAJ21)
CAVRDAYNFNKFYF

SEQ ID NO: 308040 - protein, 14 aa, Homo sapiens
  CDR3 for beta chain variable domain of TCR clone 154020 (TRBV7-2, TRBJ2-7)
CASRSQGAAYEQYF

SEQ ID NO: 308041 - protein, 12 aa, Homo sapiens
  CDR3 for alpha chain variable domain of TCR clone 154021 (TRAV13-1, TRAJ21)
CAAKEGFNKFYF

SEQ ID NO: 308042 - protein, 15 aa, Homo sapiens
  CDR3 for beta chain variable domain of TCR clone 154021 (TRBV24-1, TRBJ2-2)
CATKTGGADTGDLFF

SEQ ID NO: 308043 - protein, 14 aa, Homo sapiens
  CDR3 for alpha chain variable domain of TCR clone 154022 (TRAV17, TRAJ33)
CATDARRSNYQLIW

SEQ ID NO: 308044 - protein, 18 aa, Homo sapiens
  CDR3 for beta chain variable domain of TCR clone 154022 (TRBV6-5, TRBJ1-1)
CASSYSAPGGTGGTEAFF

SEQ ID NO: 308045 - protein, 14 aa, Homo sapiens
  CDR3 for alpha chain variable domain of TCR clone 154023 (TRAV1-2, TRAJ16)
CAVNRFSDGQKLLF

SEQ ID NO: 308046 - protein, 16 aa, Homo sapiens
  CDR3 for beta chain variable domain of TCR clone 154023 (TRBV7-2, TRBJ2-7)
CASSLGLSGGAYEQYF

SEQ ID NO: 308047 - protein, 14 aa, Homo sapiens
  CDR3 for alpha chain variable domain of TCR clone 154024 (TRAV9-2, TRAJ39)
CALYIYNAGNMLTF

SEQ ID NO: 308048 - protein, 16 aa, Homo sapiens
  CDR3 for beta chain variable domain of TCR clone 154024 (TRBV2, TRBJ2-5)
CASSARGLGGRETQYF

SEQ ID NO: 308049 - protein, 12 aa, Homo sapiens
  CDR3 for alpha chain variable domain of TCR clone 154025 (TRAV21, TRAJ27)
CAANTNAGKSTF

SEQ ID NO: 308050 - protein, 14 aa, Homo sapiens
  CDR3 for beta chain variable domain of TCR clone 154025 (TRBV19, TRBJ2-1)
CASEVTGARNEQFF

SEQ ID NO: 308051 - protein, 15 aa, Homo sapiens
  CDR3 for alpha chain variable domain of TCR clone 154026 (TRAV21, TRAJ24)
CAARSSTYSWGKLQF

SEQ ID NO: 308052 - protein, 13 aa, Homo sapiens
  CDR3 for beta chain variable domain of TCR clone 154026 (TRBV11-2, TRBJ2-5)
CASSLTGEETQYF

SEQ ID NO: 308053 - protein, 11 aa, Homo sapiens
  CDR3 for alpha chain variable domain of TCR clone 154027 (TRAV2, TRAJ21)
CAVFNFNKFYF

SEQ ID NO: 308054 - protein, 13 aa, Homo sapiens
  CDR3 for beta chain variable domain of TCR clone 154027 (TRBV12-5, TRBJ2-3)
CASGDRQSDTQYF

SEQ ID NO: 308055 - protein, 19 aa, Homo sapiens
  CDR3 for alpha chain variable domain of TCR clone 154028 (TRAV26-1, TRAJ50)
CCVLLHRQNPKTSYDKVIF

SEQ ID NO: 308056 - protein, 16 aa, Homo sapiens
  CDR3 for beta chain variable domain of TCR clone 154028 (TRBV29-1, TRBJ2-7)
CSVEVVGTSGSYEQYF

SEQ ID NO: 308057 - protein, 12 aa, Homo sapiens
  CDR3 for alpha chain variable domain of TCR clone 154029 (TRAV3, TRAJ26)
CAVRDYGQNFSF

SEQ ID NO: 308058 - protein, 16 aa, Homo sapiens
  CDR3 for beta chain variable domain of TCR clone 154029 (TRBV11-2, TRBJ1-2)
CASSPSGREANYGYTF

SEQ ID NO: 308059 - protein, 13 aa, Homo sapiens
  CDR3 for alpha chain variable domain of TCR clone 154030 (TRAV21, TRAJ27)
CAERPGNAGKSTF

SEQ ID NO: 308060 - protein, 14 aa, Homo sapiens
  CDR3 for beta chain variable domain of TCR clone 154030 (TRBV7-9, TRBJ2-5)
CASSLDTAQETQYF

SEQ ID NO: 308061 - protein, 14 aa, Homo sapiens
  CDR3 for alpha chain variable domain of TCR clone 154031 (TRAV29/DV5, TRAJ29)
CAARSNSGNTPLFF

SEQ ID NO: 308062 - protein, 17 aa, Homo sapiens
  CDR3 for beta chain variable domain of TCR clone 154031 (TRBV4-2, TRBJ2-1)
CASSQVSGLAMNNEQFF

SEQ ID NO: 308063 - protein, 15 aa, Homo sapiens
  CDR3 for alpha chain variable domain of TCR clone 154032 (TRAV29/DV5, TRAJ24)
CAASGATDSWGKFKF

SEQ ID NO: 308064 - protein, 13 aa, Homo sapiens
  CDR3 for beta chain variable domain of TCR clone 154032 (TRBV19, TRBJ1-2)
CASSVPGQDGYTF

SEQ ID NO: 308065 - protein, 13 aa, Homo sapiens
  CDR3 for alpha chain variable domain of TCR clone 154033 (TRAV3, TRAJ36)
CAVRDTGANNLFF

SEQ ID NO: 308066 - protein, 15 aa, Homo sapiens
  CDR3 for beta chain variable domain of TCR clone 154033 (TRBV24-1, TRBJ2-1)
CATSGSVGFYNEQFF

SEQ ID NO: 308067 - protein, 13 aa, Homo sapiens
  CDR3 for alpha chain variable domain of TCR clone 154034 (TRAV35, TRAJ42)
CSGFPGSQGNPIF

SEQ ID NO: 308068 - protein, 13 aa, Homo sapiens
  CDR3 for beta chain variable domain of TCR clone 154034 (TRBV29-1, TRBJ2-1)
CSVEGGRVNEQFF

SEQ ID NO: 308069 - protein, 14 aa, Homo sapiens
  CDR3 for alpha chain variable domain of TCR clone 154035 (TRAV8-4, TRAJ8)
CAVSVGTGVQKLVF

SEQ ID NO: 308070 - protein, 15 aa, Homo sapiens
  CDR3 for beta chain variable domain of TCR clone 154035 (TRBV2, TRBJ2-3)
CASSGEGTGTDTQYF

SEQ ID NO: 308071 - protein, 15 aa, Homo sapiens
  CDR3 for alpha chain variable domain of TCR clone 154036 (TRAV21, TRAJ53)
CATLNSGGSNYKLTL

SEQ ID NO: 308072 - protein, 15 aa, Homo sapiens
  CDR3 for beta chain variable domain of TCR clone 154036 (TRBV7-3, TRBJ2-2)
CASSETGQGTGELFF

SEQ ID NO: 308073 - protein, 11 aa, Homo sapiens
  CDR3 for alpha chain variable domain of TCR clone 154037 (TRAV12-3, TRAJ17)
CNDAYRQKLTF

SEQ ID NO: 308074 - protein, 20 aa, Homo sapiens
  CDR3 for beta chain variable domain of TCR clone 154037 (TRBV7-8, TRBJ2-2)
CASSHLFPGPTIHITGELFF

SEQ ID NO: 308075 - protein, 13 aa, Homo sapiens
  CDR3 for alpha chain variable domain of TCR clone 154038 (TRAV13-2, TRAJ15)
CSERPQAGTALIF

SEQ ID NO: 308076 - protein, 15 aa, Homo sapiens
  CDR3 for beta chain variable domain of TCR clone 154038 (TRBV9, TRBJ2-3)
CASSAYEAGTDTQYF

SEQ ID NO: 308077 - protein, 13 aa, Homo sapiens
  CDR3 for alpha chain variable domain of TCR clone 154039 (TRAV8-6, TRAJ49)
CAVITKTGNQFYF

SEQ ID NO: 308078 - protein, 14 aa, Homo sapiens
  CDR3 for beta chain variable domain of TCR clone 154039 (TRBV19, TRBJ2-1)
CASPTFVLSGEQFF

SEQ ID NO: 308079 - protein, 11 aa, Homo sapiens
  CDR3 for alpha chain variable domain of TCR clone 154040 (TRAV12-2, TRAJ39)
CAVTNMLTFGG

SEQ ID NO: 308080 - protein, 14 aa, Homo sapiens
  CDR3 for beta chain variable domain of TCR clone 154040 (TRBV18, TRBJ2-7)
CASSPRGGAYEQYF

SEQ ID NO: 308081 - protein, 17 aa, Homo sapiens
  CDR3 for alpha chain variable domain of TCR clone 154041 (TRAV3, TRAJ28)
CAVREAYSGAGSYQLPF

SEQ ID NO: 308082 - protein, 18 aa, Homo sapiens
  CDR3 for beta chain variable domain of TCR clone 154041 (TRBV27, TRBJ2-1)
CASGNRAVGVGSKNEQFF

SEQ ID NO: 308083 - protein, 13 aa, Homo sapiens
  CDR3 for alpha chain variable domain of TCR clone 154042 (TRAV3, TRAJ21)
CAVREPDFNKFYF

SEQ ID NO: 308084 - protein, 12 aa, Homo sapiens
  CDR3 for beta chain variable domain of TCR clone 154042 (TRBV4-1, TRBJ2-3)
CASSQGTDTQYF

SEQ ID NO: 308085 - protein, 11 aa, Homo sapiens
  CDR3 for alpha chain variable domain of TCR clone 154043 (TRAV4, TRAJ31)
CLVGDNARLMF

SEQ ID NO: 308086 - protein, 11 aa, Homo sapiens
  CDR3 for beta chain variable domain of TCR clone 154043 (TRBV25-1, TRBJ2-7)
CASSTSYEQYF

SEQ ID NO: 308087 - protein, 18 aa, Homo sapiens
  CDR3 for alpha chain variable domain of TCR clone 154044 (TRAV29/DV5, TRAJ52)
CAAGFSGAGGTSYGKLTF

SEQ ID NO: 308088 - protein, 16 aa, Homo sapiens
  CDR3 for beta chain variable domain of TCR clone 154044 (TRBV7-3, TRBJ2-2)
CASSIKRGTLSGELFF

SEQ ID NO: 308089 - protein, 18 aa, Homo sapiens
  CDR3 for alpha chain variable domain of TCR clone 154045 (TRAV13-1, TRAJ52)
CAASKRSAGGTSYGKLAF

SEQ ID NO: 308090 - protein, 19 aa, Homo sapiens
  CDR3 for beta chain variable domain of TCR clone 154045 (TRBV7-3, TRBJ2-2)
CASSLRAGGSGPNTGELFF

SEQ ID NO: 308091 - protein, 14 aa, Homo sapiens
  CDR3 for alpha chain variable domain of TCR clone 154046 (TRAV26-1, TRAJ38)
CNVVGAGNNRKLIW

SEQ ID NO: 308092 - protein, 12 aa, Homo sapiens
  CDR3 for beta chain variable domain of TCR clone 154046 (TRBV5-1, TRBJ2-5)
CASSWDQETQYF

SEQ ID NO: 308093 - protein, 15 aa, Homo sapiens
  CDR3 for alpha chain variable domain of TCR clone 154047 (TRAV13-1, TRAJ44)
CAAIRGGGTASKLTF

SEQ ID NO: 308094 - protein, 14 aa, Homo sapiens
  CDR3 for beta chain variable domain of TCR clone 154047 (TRBV7-2, TRBJ2-5)
CASSPRGSSETQYF

SEQ ID NO: 308095 - protein, 13 aa, Homo sapiens
  CDR3 for alpha chain variable domain of TCR clone 154048 (TRAV12-2, TRAJ39)
CAVNNNAGNMLTF

SEQ ID NO: 308096 - protein, 13 aa, Homo sapiens
  CDR3 for beta chain variable domain of TCR clone 154048 (TRBV2, TRBJ1-5)
CATAGPGNQPQLF

SEQ ID NO: 308097 - protein, 15 aa, Homo sapiens
  CDR3 for alpha chain variable domain of TCR clone 154049 (TRAV3, TRAJ4)
CAGRDGTGGYDKLIF

SEQ ID NO: 308098 - protein, 16 aa, Homo sapiens
  CDR3 for beta chain variable domain of TCR clone 154049 (TRBV27, TRBJ2-2)
CASSSSGVSNTGEPFF

SEQ ID NO: 308099 - protein, 12 aa, Homo sapiens
  CDR3 for alpha chain variable domain of TCR clone 154050 (TRAV8-3, TRAJ6)
CAVGGGSYIPTS

SEQ ID NO: 308100 - protein, 15 aa, Homo sapiens
  CDR3 for beta chain variable domain of TCR clone 154050 (TRBV20-1, TRBJ2-7)
CSARDRVSGMDEQYF

SEQ ID NO: 308101 - protein, 12 aa, Homo sapiens
  CDR3 for alpha chain variable domain of TCR clone 154051 (TRAV12-3, TRAJ34)
CAMGYNTDKLIF

SEQ ID NO: 308102 - protein, 14 aa, Homo sapiens
  CDR3 for beta chain variable domain of TCR clone 154051 (TRBV4-1, TRBJ2-2)
SASSQAVNTGELFF

SEQ ID NO: 308103 - protein, 15 aa, Homo sapiens
  CDR3 for alpha chain variable domain of TCR clone 154052 (TRAV8-2, TRAJ40)
CVVLGNTSGTYKYIF

SEQ ID NO: 308104 - protein, 16 aa, Homo sapiens
  CDR3 for beta chain variable domain of TCR clone 154052 (TRBV7-3, TRBJ2-1)
CASSLEGYRSYNEQFF

SEQ ID NO: 308105 - protein, 13 aa, Homo sapiens
  CDR3 for alpha chain variable domain of TCR clone 154053 (TRAV25, TRAJ10)
CAGRTGGGNKLTF

SEQ ID NO: 308106 - protein, 12 aa, Homo sapiens
  CDR3 for beta chain variable domain of TCR clone 154053 (TRBV5-1, TRBJ2-7)
CASSLDSYEQYF

SEQ ID NO: 308107 - protein, 15 aa, Homo sapiens
  CDR3 for alpha chain variable domain of TCR clone 154054 (TRAV12-1, TRAJ36)
CVVNEHQTGANNLFF

SEQ ID NO: 308108 - protein, 14 aa, Homo sapiens
  CDR3 for beta chain variable domain of TCR clone 154054 (TRBV10-3, TRBJ2-5)
CAIRTSGWQETQYF

SEQ ID NO: 308109 - protein, 11 aa, Homo sapiens
  CDR3 for alpha chain variable domain of TCR clone 154055 (TRAV4, TRAJ21)
CLIYNFNKFYF

SEQ ID NO: 308110 - protein, 13 aa, Homo sapiens
  CDR3 for beta chain variable domain of TCR clone 154055 (TRBV18, TRBJ1-1)
CASSGGRNTEAFF

SEQ ID NO: 308111 - protein, 13 aa, Homo sapiens
  CDR3 for alpha chain variable domain of TCR clone 154056 (TRAV16, TRAJ34)
CALISYNTDKLIF

SEQ ID NO: 308112 - protein, 13 aa, Homo sapiens
  CDR3 for beta chain variable domain of TCR clone 154056 (TRBV19, TRBJ2-2)
CASQEGIHGELFF

SEQ ID NO: 308113 - protein, 17 aa, Homo sapiens
  CDR3 for alpha chain variable domain of TCR clone 154057 (TRAV2, TRAJ20)
LTTVLWSFRSNDYKLSF

SEQ ID NO: 308114 - protein, 12 aa, Homo sapiens
  CDR3 for beta chain variable domain of TCR clone 154057 (TRBV7-6, TRBJ2-3)
CASSTGTDTQYF

SEQ ID NO: 308115 - protein, 14 aa, Homo sapiens
  CDR3 for alpha chain variable domain of TCR clone 154058 (TRAV8-4, TRAJ8)
CAVSLNTGFQKLVF

SEQ ID NO: 308116 - protein, 13 aa, Homo sapiens
  CDR3 for beta chain variable domain of TCR clone 154058 (TRBV7-9, TRBJ2-3)
CACSPGSTDTQYF

SEQ ID NO: 308117 - protein, 14 aa, Homo sapiens
  CDR3 for alpha chain variable domain of TCR clone 154059 (TRAV16, TRAJ31)
CSKWRRGDNARLMF

SEQ ID NO: 308118 - protein, 16 aa, Homo sapiens
  CDR3 for beta chain variable domain of TCR clone 154059 (TRBV28, TRBJ2-7)
CASSLFLETGGPEQYF

SEQ ID NO: 308119 - protein, 13 aa, Homo sapiens
  CDR3 for alpha chain variable domain of TCR clone 154060 (TRAV8-1, TRAJ23)
RAVTGGQGGKLIF

SEQ ID NO: 308120 - protein, 14 aa, Homo sapiens
  CDR3 for beta chain variable domain of TCR clone 154060 (TRBV20-1, TRBJ1-1)
CSAQTRIGGTEAFF

SEQ ID NO: 308121 - protein, 17 aa, Homo sapiens
  CDR3 for alpha chain variable domain of TCR clone 154061 (TRAV36/DV7, TRAJ42)
CAGGGMNYGGSQGNLIF

SEQ ID NO: 308122 - protein, 15 aa, Homo sapiens
  CDR3 for beta chain variable domain of TCR clone 154061 (TRBV20-1, TRBJ2-7)
CSARDRVSGMDEQYF

SEQ ID NO: 308123 - protein, 13 aa, Homo sapiens
  CDR3 for alpha chain variable domain of TCR clone 154062 (TRAV38-2/DV8, TRAJ34)
CAYRTWNTDKLIF

SEQ ID NO: 308124 - protein, 18 aa, Homo sapiens
  CDR3 for beta chain variable domain of TCR clone 154062 (TRBV6-6, TRBJ1-3)
CASSCSKWDSISGNTIYF

SEQ ID NO: 308125 - protein, 15 aa, Homo sapiens
  CDR3 for alpha chain variable domain of TCR clone 154063 (TRAV16, TRAJ16)
CALQGGGSDGQKRLF

SEQ ID NO: 308126 - protein, 18 aa, Homo sapiens
  CDR3 for beta chain variable domain of TCR clone 154063 (TRBV11-2, TRBJ2-3)
CASSLGGASRGAPNTQYF

SEQ ID NO: 308127 - protein, 16 aa, Homo sapiens
  CDR3 for alpha chain variable domain of TCR clone 154064 (TRAV8-4, TRAJ52)
CAVSDPGGTSYGKLTF

SEQ ID NO: 308128 - protein, 14 aa, Homo sapiens
  CDR3 for beta chain variable domain of TCR clone 154064 (TRBV25-1, TRBJ1-1)
CASTHLGGNTEAFF

SEQ ID NO: 308129 - protein, 12 aa, Homo sapiens
  CDR3 for alpha chain variable domain of TCR clone 154065 (TRAV12-3, TRAJ17)
CAMTLTGNRLTF

SEQ ID NO: 308130 - protein, 15 aa, Homo sapiens
  CDR3 for beta chain variable domain of TCR clone 154065 (TRBV20-1, TRBJ2-7)
CSARDWVSGMDEQYF

SEQ ID NO: 308131 - protein, 13 aa, Homo sapiens
  CDR3 for alpha chain variable domain of TCR clone 154066 (TRAV39, TRAJ48)
CAAVNFGNEKLTF

SEQ ID NO: 308132 - protein, 12 aa, Homo sapiens
  CDR3 for beta chain variable domain of TCR clone 154066 (TRBV7-9, TRBJ2-7)
CASSIKREEQYF

SEQ ID NO: 308133 - protein, 14 aa, Homo sapiens
  CDR3 for alpha chain variable domain of TCR clone 154067 (TRAV1-2, TRAJ8)
CAVREDTGFQKLVF

SEQ ID NO: 308134 - protein, 16 aa, Homo sapiens
  CDR3 for beta chain variable domain of TCR clone 154067 (TRBV6-1, TRBJ2-5)
CDSSETLDRGAETQYF

SEQ ID NO: 308135 - protein, 19 aa, Homo sapiens
  CDR3 for alpha chain variable domain of TCR clone 154068 (TRAV2, TRAJ20)
ILQVREADAAVYRDCKLSF

SEQ ID NO: 308136 - protein, 16 aa, Homo sapiens
  CDR3 for beta chain variable domain of TCR clone 154068 (TRBV19, TRBJ2-5)
CASSKAGPSSYNEQFF

SEQ ID NO: 308137 - protein, 16 aa, Homo sapiens
  CDR3 for alpha chain variable domain of TCR clone 154069 (TRAV16, TRAJ4)
CALSRMFSGGYNKLIF

SEQ ID NO: 308138 - protein, 16 aa, Homo sapiens
  CDR3 for beta chain variable domain of TCR clone 154069 (TRBV24-1, TRBJ2-3)
CATCDPGTGATDTQYF

SEQ ID NO: 308139 - protein, 12 aa, Homo sapiens
  CDR3 for alpha chain variable domain of TCR clone 154070 (TRAV2, TRAJ31)
CAVEDNNARLMF

SEQ ID NO: 308140 - protein, 15 aa, Homo sapiens
  CDR3 for beta chain variable domain of TCR clone 154070 (TRBV27, TRBJ1-4)
CASSPNLGVNEKLFF

SEQ ID NO: 308141 - protein, 13 aa, Homo sapiens
  CDR3 for alpha chain variable domain of TCR clone 154071 (TRAV21, TRAJ57)
CAVTQGGSEKLVF

SEQ ID NO: 308142 - protein, 15 aa, Homo sapiens
  CDR3 for beta chain variable domain of TCR clone 154071 (TRBV28, TRBJ1-5)
CASSRTGGYVQPQHF

SEQ ID NO: 308143 - protein, 15 aa, Homo sapiens
  CDR3 for alpha chain variable domain of TCR clone 154072 (TRAV12-1, TRAJ42)
CVVTRDGGSQGNLIF

SEQ ID NO: 308144 - protein, 14 aa, Homo sapiens
  CDR3 for beta chain variable domain of TCR clone 154072 (TRBV11-2, TRBJ2-3)
CASSLGGGANTKYF

SEQ ID NO: 308145 - protein, 12 aa, Homo sapiens
  CDR3 for alpha chain variable domain of TCR clone 154073 (TRAV1-1, TRAJ15)
CAVGQAGTALIF

SEQ ID NO: 308146 - protein, 19 aa, Homo sapiens
  CDR3 for beta chain variable domain of TCR clone 154073 (TRBV25-1, TRBJ2-2)
CAILVYRVDRGRKTGELFF

SEQ ID NO: 308147 - protein, 14 aa, Homo sapiens
  CDR3 for alpha chain variable domain of TCR clone 154074 (TRAV9-2, TRAJ39)
CALYIYTEGNMLTF

SEQ ID NO: 308148 - protein, 14 aa, Homo sapiens
  CDR3 for beta chain variable domain of TCR clone 154074 (TRBV4-1, TRBJ2-2)
CASSQAVNTGELFF

SEQ ID NO: 308149 - protein, 19 aa, Homo sapiens
  CDR3 for alpha chain variable domain of TCR clone 154075 (TRAV1-2, TRAJ26)
CLLPLCCERPDNYAQNFVF

SEQ ID NO: 308150 - protein, 11 aa, Homo sapiens
  CDR3 for beta chain variable domain of TCR clone 154075 (TRBV29-1, TRBJ2-5)
CSEDRTGTQYF

SEQ ID NO: 308151 - protein, 13 aa, Homo sapiens
  CDR3 for alpha chain variable domain of TCR clone 154076 (TRAV26-1, TRAJ23)
CIDLRTRGGKLNF

SEQ ID NO: 308152 - protein, 14 aa, Homo sapiens
  CDR3 for beta chain variable domain of TCR clone 154076 (TRBV2, TRBJ2-7)
CASSRDRSSYEQYF

SEQ ID NO: 308153 - protein, 14 aa, Homo sapiens
  CDR3 for alpha chain variable domain of TCR clone 154077 (TRAV1-2, TRAJ8)
CAVREDTGFQKLVF

SEQ ID NO: 308154 - protein, 13 aa, Homo sapiens
  CDR3 for beta chain variable domain of TCR clone 154077 (TRBV7-3, TRBJ2-1)
CASSLWPYNEQFF

SEQ ID NO: 308155 - protein, 13 aa, Homo sapiens
  CDR3 for alpha chain variable domain of TCR clone 154078 (TRAV12-2, TRAJ12)
CAVNWDSSYKLIF

SEQ ID NO: 308156 - protein, 17 aa, Homo sapiens
  CDR3 for beta chain variable domain of TCR clone 154078 (TRBV13, TRBJ2-3)
CASSLSRVAGGRNTQYF

SEQ ID NO: 308157 - protein, 13 aa, Homo sapiens
  CDR3 for alpha chain variable domain of TCR clone 154079 (TRAV2, TRAJ40)
CAVVTSGTDKYIF

SEQ ID NO: 308158 - protein, 12 aa, Homo sapiens
  CDR3 for beta chain variable domain of TCR clone 154079 (TRBV28, TRBJ2-6)
CAIQAGANVLTF

SEQ ID NO: 308159 - protein, 22 aa, Homo sapiens
  CDR3 for alpha chain variable domain of TCR clone 154080 (TRAV34, TRAJ40)
PAQPCRHLPLWSGPSGTYKYIF

SEQ ID NO: 308160 - protein, 12 aa, Homo sapiens
  CDR3 for beta chain variable domain of TCR clone 154080 (TRBV29-1, TRBJ2-3)
CSVTGGADTQYF

SEQ ID NO: 308161 - protein, 23 aa, Homo sapiens
  CDR3 for alpha chain variable domain of TCR clone 154081 (TRAV13-1, )
CAASTRRAQIPDIQNPDPAVYQL

SEQ ID NO: 308162 - protein, 16 aa, Homo sapiens
  CDR3 for beta chain variable domain of TCR clone 154081 (TRBV5-1, TRBJ2-2)
CASRNTGEANTGELFF

SEQ ID NO: 308163 - protein, 12 aa, Homo sapiens
  CDR3 for alpha chain variable domain of TCR clone 154082 (TRAV12-3, TRAJ40)
CALTSGTYKYIF

SEQ ID NO: 308164 - protein, 15 aa, Homo sapiens
  CDR3 for beta chain variable domain of TCR clone 154082 (TRBV7-3, TRBJ2-2)
CASSLTGQGTGELFF

SEQ ID NO: 308165 - protein, 15 aa, Homo sapiens
  CDR3 for alpha chain variable domain of TCR clone 154083 (TRAV21, TRAJ37)
CAVRPTLSNTGKLIF

SEQ ID NO: 308166 - protein, 15 aa, Homo sapiens
  CDR3 for beta chain variable domain of TCR clone 154083 (TRBV24-1, TRBJ2-3)
CTSDRRQDLTDTQYF

SEQ ID NO: 308167 - protein, 13 aa, Homo sapiens
  CDR3 for alpha chain variable domain of TCR clone 154084 (TRAV3, TRAJ21)
CAVREPDFNKFYF

SEQ ID NO: 308168 - protein, 14 aa, Homo sapiens
  CDR3 for beta chain variable domain of TCR clone 154084 (TRBV4-1, TRBJ1-5)
CASSQGPTNQPQHF

SEQ ID NO: 308169 - protein, 13 aa, Homo sapiens
  CDR3 for alpha chain variable domain of TCR clone 154085 (TRAV13-1, TRAJ11)
CAAVLAGYSTLTF

SEQ ID NO: 308170 - protein, 15 aa, Homo sapiens
  CDR3 for beta chain variable domain of TCR clone 154085 (TRBV12-4, TRBJ2-5)
CASSPPTGLQETQYF

SEQ ID NO: 308171 - protein, 13 aa, Homo sapiens
  CDR3 for alpha chain variable domain of TCR clone 154086 (TRAV21, TRAJ27)
CAARPGNAGKSTF

SEQ ID NO: 308172 - protein, 13 aa, Homo sapiens
  CDR3 for beta chain variable domain of TCR clone 154086 (TRBV7-3, TRBJ2-7)
CASSQAGEYEQYF

SEQ ID NO: 308173 - protein, 17 aa, Homo sapiens
  CDR3 for alpha chain variable domain of TCR clone 154087 (TRAV4, )
CLVDIQNPDPAVYKLRD

SEQ ID NO: 308174 - protein, 13 aa, Homo sapiens
  CDR3 for beta chain variable domain of TCR clone 154087 (TRBV6-1, TRBJ2-1)
CAGMDPTNNEQFF

SEQ ID NO: 308175 - protein, 14 aa, Homo sapiens
  CDR3 for alpha chain variable domain of TCR clone 154088 (TRAV34, TRAJ44)
CGADGTGTASKLTF

SEQ ID NO: 308176 - protein, 15 aa, Homo sapiens
  CDR3 for beta chain variable domain of TCR clone 154088 (TRBV5-1, TRBJ2-1)
GASSPPRAPYSEQFF

SEQ ID NO: 308177 - protein, 15 aa, Homo sapiens
  CDR3 for alpha chain variable domain of TCR clone 154089 (TRAV8-6, TRAJ27)
CAVREVNTNAGKSTF

SEQ ID NO: 308178 - protein, 13 aa, Homo sapiens
  CDR3 for beta chain variable domain of TCR clone 154089 (TRBV7-3, TRBJ1-1)
CASSQDWGAEAFF

SEQ ID NO: 308179 - protein, 13 aa, Homo sapiens
  CDR3 for alpha chain variable domain of TCR clone 154090 (TRAV1-2, TRAJ9)
CAALNTGGFKPIF

SEQ ID NO: 308180 - protein, 14 aa, Homo sapiens
  CDR3 for beta chain variable domain of TCR clone 154090 (TRBV13, TRBJ2-3)
CASSSGSPTDTQYF

SEQ ID NO: 308181 - protein, 15 aa, Homo sapiens
  CDR3 for alpha chain variable domain of TCR clone 154091 (TRAV3, TRAJ20)
CAVRDSRSNDYKLSF

SEQ ID NO: 308182 - protein, 16 aa, Homo sapiens
  CDR3 for beta chain variable domain of TCR clone 154091 (TRBV19, TRBJ2-1)
CASSKAGPSSYNEQFF

SEQ ID NO: 308183 - protein, 14 aa, Homo sapiens
  CDR3 for alpha chain variable domain of TCR clone 154092 (TRAV12-1, TRAJ12)
CVVTSGDSSYKLIF

SEQ ID NO: 308184 - protein, 15 aa, Homo sapiens
  CDR3 for beta chain variable domain of TCR clone 154092 (TRBV7-3, TRBJ2-1)
CASSPQRGGYNEQFF

SEQ ID NO: 308185 - protein, 13 aa, Homo sapiens
  CDR3 for alpha chain variable domain of TCR clone 154093 (TRAV13-2, TRAJ13)
CAERPGGYQKVTF

SEQ ID NO: 308186 - protein, 15 aa, Homo sapiens
  CDR3 for beta chain variable domain of TCR clone 154093 (TRBV11-3, TRBJ2-7)
CTSSHGPASSYEQYF

SEQ ID NO: 308187 - protein, 16 aa, Homo sapiens
  CDR3 for alpha chain variable domain of TCR clone 154094 (TRAV16, TRAJ57)
CAPYLITQGGSEKLVF

SEQ ID NO: 308188 - protein, 17 aa, Homo sapiens
  CDR3 for beta chain variable domain of TCR clone 154094 (TRBV24-1, TRBJ2-4)
CATSDAEARGLRNIQYF

SEQ ID NO: 308189 - protein, 13 aa, Homo sapiens
  CDR3 for alpha chain variable domain of TCR clone 154095 (TRAV2, TRAJ15)
CAVASQAGTALIF

SEQ ID NO: 308190 - protein, 17 aa, Homo sapiens
  CDR3 for beta chain variable domain of TCR clone 154095 (TRBV4-3, TRBJ2-1)
CASSQFSSGRASGEQFF

SEQ ID NO: 308191 - protein, 14 aa, Homo sapiens
  CDR3 for alpha chain variable domain of TCR clone 154096 (TRAV1-2, TRAJ8)
SAVREDTGFQKLVF

SEQ ID NO: 308192 - protein, 15 aa, Homo sapiens
  CDR3 for beta chain variable domain of TCR clone 154096 (TRBV20-1, TRBJ2-7)
CSAREGRDSLYEQYF

SEQ ID NO: 308193 - protein, 17 aa, Homo sapiens
  CDR3 for alpha chain variable domain of TCR clone 154097 (TRAV26-1, TRAJ53)
CIVRVDDSGGSNYKLTF

SEQ ID NO: 308194 - protein, 15 aa, Homo sapiens
  CDR3 for beta chain variable domain of TCR clone 154097 (TRBV7-9, TRBJ1-4)
CASSRTGGFNEELFF

SEQ ID NO: 308195 - protein, 13 aa, Homo sapiens
  CDR3 for alpha chain variable domain of TCR clone 154098 (TRAV12-1, TRAJ38)
CVVPAGNNRKLIW

SEQ ID NO: 308196 - protein, 16 aa, Homo sapiens
  CDR3 for beta chain variable domain of TCR clone 154098 (TRBV27, TRBJ2-2)
CASSSSGVSNTGELFF

SEQ ID NO: 308197 - protein, 13 aa, Homo sapiens
  CDR3 for alpha chain variable domain of TCR clone 154099 (TRAV17, TRAJ26)
CATVDNYGQNFVF

SEQ ID NO: 308198 - protein, 16 aa, Homo sapiens
  CDR3 for beta chain variable domain of TCR clone 154099 (TRBV12-4, TRBJ1-5)
CASSRPDGGSNQPQHF

SEQ ID NO: 308199 - protein, 14 aa, Homo sapiens
  CDR3 for alpha chain variable domain of TCR clone 154100 (TRAV38-1, TRAJ48)
CAFMANFGNEKLTF

SEQ ID NO: 308200 - protein, 16 aa, Homo sapiens
  CDR3 for beta chain variable domain of TCR clone 154100 (TRBV4-1, TRBJ2-7)
CASRTSGGGADNEQYF

SEQ ID NO: 308201 - protein, 14 aa, Homo sapiens
  CDR3 for alpha chain variable domain of TCR clone 154101 (TRAV13-1, TRAJ39)
CAASEGNAGNMLTF

SEQ ID NO: 308202 - protein, 12 aa, Homo sapiens
  CDR3 for beta chain variable domain of TCR clone 154101 (TRBV7-8, TRBJ2-7)
CASSLGDREQYF

SEQ ID NO: 308203 - protein, 11 aa, Homo sapiens
  CDR3 for alpha chain variable domain of TCR clone 154102 (TRAV2, TRAJ20)
AAVYRDCKLSF

SEQ ID NO: 308204 - protein, 16 aa, Homo sapiens
  CDR3 for beta chain variable domain of TCR clone 154102 (TRBV20-1, TRBJ1-4)
CSAPGQGLLTNEKLFF

SEQ ID NO: 308205 - protein, 15 aa, Homo sapiens
  CDR3 for alpha chain variable domain of TCR clone 154103 (TRAV2, TRAJ9)
CAVEDRGTGGFKTIF

SEQ ID NO: 308206 - protein, 16 aa, Homo sapiens
  CDR3 for beta chain variable domain of TCR clone 154103 (TRBV7-2, TRBJ1-2)
CASSSNQDRRGHGYTF

SEQ ID NO: 308207 - protein, 14 aa, Homo sapiens
  CDR3 for alpha chain variable domain of TCR clone 154104 (TRAV12-2, TRAJ3)
CAVGLYSSASKIIF

SEQ ID NO: 308208 - protein, 14 aa, Homo sapiens
  CDR3 for beta chain variable domain of TCR clone 154104 (TRBV6-1, TRBJ1-3)
CASVQGGGGNTIYF

SEQ ID NO: 308209 - protein, 15 aa, Homo sapiens
  CDR3 for alpha chain variable domain of TCR clone 154105 (TRAV4, TRAJ10)
CLVCDGSGGGNKLTF

SEQ ID NO: 308210 - protein, 15 aa, Homo sapiens
  CDR3 for beta chain variable domain of TCR clone 154105 (TRBV27, TRBJ2-3)
CASSSLAGVIDTQYF

SEQ ID NO: 308211 - protein, 13 aa, Homo sapiens
  CDR3 for alpha chain variable domain of TCR clone 154106 (TRAV13-2, TRAJ8)
CAFMNNGFQKLVF

SEQ ID NO: 308212 - protein, 17 aa, Homo sapiens
  CDR3 for beta chain variable domain of TCR clone 154106 (TRBV28, TRBJ2-1)
CASSSARQALTYNEQFF

SEQ ID NO: 308213 - protein, 13 aa, Homo sapiens
  CDR3 for alpha chain variable domain of TCR clone 154107 (TRAV1-2, TRAJ20)
CAVRDGNDYKLSF

SEQ ID NO: 308214 - protein, 14 aa, Homo sapiens
  CDR3 for beta chain variable domain of TCR clone 154107 (TRBV7-2, TRBJ2-3)
CQPLRGGGRDTQYF

SEQ ID NO: 308215 - protein, 14 aa, Homo sapiens
  CDR3 for alpha chain variable domain of TCR clone 154108 (TRAV23/DV6, TRAJ17)
CAASIGAAGNKLTF

SEQ ID NO: 308216 - protein, 15 aa, Homo sapiens
  CDR3 for beta chain variable domain of TCR clone 154108 (TRBV20-1, TRBJ2-7)
CSARDRVSGMDEQYF

SEQ ID NO: 308217 - protein, 14 aa, Homo sapiens
  CDR3 for alpha chain variable domain of TCR clone 154109 (TRAV12-3, TRAJ10)
SHLPLTGGGNKLTF

SEQ ID NO: 308218 - protein, 15 aa, Homo sapiens
  CDR3 for beta chain variable domain of TCR clone 154109 (TRBV13, TRBJ1-2)
CASSLGRQPGYGYTF

SEQ ID NO: 308219 - protein, 14 aa, Homo sapiens
  CDR3 for alpha chain variable domain of TCR clone 154110 (TRAV13-1, TRAJ53)
CAASISGSNYKLTF

SEQ ID NO: 308220 - protein, 14 aa, Homo sapiens
  CDR3 for beta chain variable domain of TCR clone 154110 (TRBV7-3, TRBJ2-3)
CASSLTRGGRYAVF

SEQ ID NO: 308221 - protein, 14 aa, Homo sapiens
  CDR3 for alpha chain variable domain of TCR clone 154111 (TRAV1-2, TRAJ8)
CAVRDDTGFQKLVF

SEQ ID NO: 308222 - protein, 15 aa, Homo sapiens
  CDR3 for beta chain variable domain of TCR clone 154111 (TRBV11-3, TRBJ2-3)
CASLKDGREGDTQYF

SEQ ID NO: 308223 - protein, 10 aa, Homo sapiens
  CDR3 for alpha chain variable domain of TCR clone 154112 (TRAV1-2, TRAJ34)
CAVNTDKLIF

SEQ ID NO: 308224 - protein, 15 aa, Homo sapiens
  CDR3 for beta chain variable domain of TCR clone 154112 (TRBV4-1, TRBJ1-4)
CASSDTGGTNEKLFF

SEQ ID NO: 308225 - protein, 13 aa, Homo sapiens
  CDR3 for alpha chain variable domain of TCR clone 154113 (TRAV21, TRAJ27)
CAARPGNAGKSTF

SEQ ID NO: 308226 - protein, 15 aa, Homo sapiens
  CDR3 for beta chain variable domain of TCR clone 154113 (TRBV7-6, TRBJ1-4)
CASSARTGGNETLFF

SEQ ID NO: 308227 - protein, 14 aa, Homo sapiens
  CDR3 for alpha chain variable domain of TCR clone 154114 (TRAV21, TRAJ35)
CAVMPIGFGNVLHC

SEQ ID NO: 308228 - protein, 12 aa, Homo sapiens
  CDR3 for beta chain variable domain of TCR clone 154114 (TRBV7-9, TRBJ2-7)
CARSMKREEQYF

SEQ ID NO: 308229 - protein, 12 aa, Homo sapiens
  CDR3 for alpha chain variable domain of TCR clone 154115 (TRAV13-1, TRAJ27)
CAAHTNAGKSTF

SEQ ID NO: 308230 - protein, 14 aa, Homo sapiens
  CDR3 for beta chain variable domain of TCR clone 154115 (TRBV19, TRBJ2-2)
CTSSGQGIAGEMFF

SEQ ID NO: 308231 - protein, 14 aa, Homo sapiens
  CDR3 for alpha chain variable domain of TCR clone 154116 (TRAV23/DV6, TRAJ8)
CAASNNTGFQKLVF

SEQ ID NO: 308232 - protein, 16 aa, Homo sapiens
  CDR3 for beta chain variable domain of TCR clone 154116 (TRBV4-1, TRBJ2-6)
CATSQVGDPGANVLTF

SEQ ID NO: 308233 - protein, 16 aa, Homo sapiens
  CDR3 for alpha chain variable domain of TCR clone 154117 (TRAV3, TRAJ21)
CAVRDIERENLNKFYF

SEQ ID NO: 308234 - protein, 14 aa, Homo sapiens
  CDR3 for beta chain variable domain of TCR clone 154117 (TRBV27, TRBJ1-1)
CASSLLSGLSEAFF

SEQ ID NO: 308235 - protein, 13 aa, Homo sapiens
  CDR3 for alpha chain variable domain of TCR clone 154118 (TRAV16, TRAJ28)
CALTGAGSYQLTF

SEQ ID NO: 308236 - protein, 14 aa, Homo sapiens
  CDR3 for beta chain variable domain of TCR clone 154118 (TRBV27, TRBJ2-2)
CASRPGVNTGELFF

SEQ ID NO: 308237 - protein, 13 aa, Homo sapiens
  CDR3 for alpha chain variable domain of TCR clone 154119 (TRAV8-3, TRAJ20)
CAVGRPNDYKLSF

SEQ ID NO: 308238 - protein, 14 aa, Homo sapiens
  CDR3 for beta chain variable domain of TCR clone 154119 (TRBV18, TRBJ2-1)
CASSPQGRFNEQFF

SEQ ID NO: 308239 - protein, 23 aa, Homo sapiens
  CDR3 for alpha chain variable domain of TCR clone 154120 (TRAV12-2, TRAJ43)
SLLIRDSQPSDSATYLCDFDMRF

SEQ ID NO: 308240 - protein, 11 aa, Homo sapiens
  CDR3 for beta chain variable domain of TCR clone 154120 (TRBV11-2, TRBJ2-2)
CASSLPGELFF

SEQ ID NO: 308241 - protein, 13 aa, Homo sapiens
  CDR3 for alpha chain variable domain of TCR clone 154121 (TRAV12-2, TRAJ3)
CAFQYSSASKIIF

SEQ ID NO: 308242 - protein, 11 aa, Homo sapiens
  CDR3 for beta chain variable domain of TCR clone 154121 (TRBV20-1, TRBJ2-3)
GSGTSSTTQYF

SEQ ID NO: 308243 - protein, 13 aa, Homo sapiens
  CDR3 for alpha chain variable domain of TCR clone 154122 (TRAV30, TRAJ20)
CGTEDRSDYKLSF

SEQ ID NO: 308244 - protein, 11 aa, Homo sapiens
  CDR3 for beta chain variable domain of TCR clone 154122 (TRBV29-1, TRBJ2-5)
CSEDRTGTQYF

SEQ ID NO: 308245 - protein, 23 aa, Homo sapiens
  CDR3 for alpha chain variable domain of TCR clone 154123 (TRAV26-1, )
CIADSAGNNHIQNPDPAVYQLRD

SEQ ID NO: 308246 - protein, 13 aa, Homo sapiens
  CDR3 for beta chain variable domain of TCR clone 154123 (TRBV20-1, TRBJ2-1)
CSARASPRDEQFF

SEQ ID NO: 308247 - protein, 16 aa, Homo sapiens
  CDR3 for alpha chain variable domain of TCR clone 154124 (TRAV23/DV6, TRAJ9)
CSASIGGNTGGFKTIF

SEQ ID NO: 308248 - protein, 13 aa, Homo sapiens
  CDR3 for beta chain variable domain of TCR clone 154124 (TRBV12-4, TRBJ1-1)
CASSPGTGFEAFF

SEQ ID NO: 308249 - protein, 14 aa, Homo sapiens
  CDR3 for alpha chain variable domain of TCR clone 154125 (TRAV12-2, TRAJ17)
CAVLFKAAGNKLHF

SEQ ID NO: 308250 - protein, 17 aa, Homo sapiens
  CDR3 for beta chain variable domain of TCR clone 154125 (TRBV20-1, TRBJ2-2)
CSASGSGQGGLTGELFF

SEQ ID NO: 308251 - protein, 19 aa, Homo sapiens
  CDR3 for alpha chain variable domain of TCR clone 154126 (TRAV13-1, TRAJ52)
CAASSSPNAGGTSYGKLTF

SEQ ID NO: 308252 - protein, 20 aa, Homo sapiens
  CDR3 for beta chain variable domain of TCR clone 154126 (TRBV4-1, TRBJ2-2)
CASSQASPPGLASNTGELFF

SEQ ID NO: 308253 - protein, 15 aa, Homo sapiens
  CDR3 for alpha chain variable domain of TCR clone 154127 (TRAV8-3, TRAJ45)
CALSYSGGGADGLTF

SEQ ID NO: 308254 - protein, 13 aa, Homo sapiens
  CDR3 for beta chain variable domain of TCR clone 154127 (TRBV10-3, TRBJ2-7)
CASRLAVNYEQYF

SEQ ID NO: 308255 - protein, 15 aa, Homo sapiens
  CDR3 for alpha chain variable domain of TCR clone 154128 (TRAV35, TRAJ40)
CAGQLGTSGTYKYIF

SEQ ID NO: 308256 - protein, 16 aa, Homo sapiens
  CDR3 for beta chain variable domain of TCR clone 154128 (TRBV13, TRBJ2-2)
CASSPRTGEHTGELFF

SEQ ID NO: 308257 - protein, 14 aa, Homo sapiens
  CDR3 for alpha chain variable domain of TCR clone 154129 (TRAV27, )
CADIHNPDPAVYQL

SEQ ID NO: 308258 - protein, 13 aa, Homo sapiens
  CDR3 for beta chain variable domain of TCR clone 154129 (TRBV28, TRBJ2-5)
CASSSRNQETQYF

SEQ ID NO: 308259 - protein, 14 aa, Homo sapiens
  CDR3 for alpha chain variable domain of TCR clone 154130 (TRAV1-2, TRAJ16)
CAVNRFSDGQKLLF

SEQ ID NO: 308260 - protein, 18 aa, Homo sapiens
  CDR3 for beta chain variable domain of TCR clone 154130 (TRBV7-9, TRBJ2-7)
CASSLGSGGSLDSYEQYF

SEQ ID NO: 308261 - protein, 16 aa, Homo sapiens
  CDR3 for alpha chain variable domain of TCR clone 154131 (TRAV13-1, TRAJ48)
CSKYRESNFGNEKLTF

SEQ ID NO: 308262 - protein, 17 aa, Homo sapiens
  CDR3 for beta chain variable domain of TCR clone 154131 (TRBV28, TRBJ2-1)
CASSSARQALSYNEQFF

SEQ ID NO: 308263 - protein, 11 aa, Homo sapiens
  CDR3 for alpha chain variable domain of TCR clone 154132 (TRAV26-1, TRAJ37)
CIVRVVRKLIF

SEQ ID NO: 308264 - protein, 14 aa, Homo sapiens
  CDR3 for beta chain variable domain of TCR clone 154132 (TRBV7-2, TRBJ2-7)
CASSLPPGQGPQYF

SEQ ID NO: 308265 - protein, 12 aa, Homo sapiens
  CDR3 for alpha chain variable domain of TCR clone 154133 (TRAV8-3, TRAJ20)
CAVGANDYKLSF

SEQ ID NO: 308266 - protein, 15 aa, Homo sapiens
  CDR3 for beta chain variable domain of TCR clone 154133 (TRBV11-2, TRBJ2-1)
GASSLGTSGLNEQFF

SEQ ID NO: 308267 - protein, 15 aa, Homo sapiens
  CDR3 for alpha chain variable domain of TCR clone 154134 (TRAV8-2, TRAJ16)
CVVSDGFSDGQKLLF

SEQ ID NO: 308268 - protein, 13 aa, Homo sapiens
  CDR3 for beta chain variable domain of TCR clone 154134 (TRBV20-1, TRBJ1-1)
CSAPPGGHTEALF

SEQ ID NO: 308269 - protein, 14 aa, Homo sapiens
  CDR3 for alpha chain variable domain of TCR clone 154135 (TRAV8-3, TRAJ4)
CAVGASGGYNKLIF

SEQ ID NO: 308270 - protein, 16 aa, Homo sapiens
  CDR3 for beta chain variable domain of TCR clone 154135 (TRBV4-3, TRBJ2-2)
CASSHPQGSGTGELFF

SEQ ID NO: 308271 - protein, 13 aa, Homo sapiens
  CDR3 for alpha chain variable domain of TCR clone 154136 (TRAV1-1, TRAJ33)
CASHMDSNYQLTW

SEQ ID NO: 308272 - protein, 18 aa, Homo sapiens
  CDR3 for beta chain variable domain of TCR clone 154136 (TRBV20-1, TRBJ2-2)
CSARVQTARPSGTGELFF

SEQ ID NO: 308273 - protein, 14 aa, Homo sapiens
  CDR3 for alpha chain variable domain of TCR clone 154137 (TRAV16, TRAJ54)
CALSGVQGAQKRVF

SEQ ID NO: 308274 - protein, 15 aa, Homo sapiens
  CDR3 for beta chain variable domain of TCR clone 154137 (TRBV18, TRBJ2-2)
CASSTSGLHTGELFF

SEQ ID NO: 308275 - protein, 14 aa, Homo sapiens
  CDR3 for alpha chain variable domain of TCR clone 154138 (TRAV12-1, TRAJ17)
CVVNYKAAGNKLTF

SEQ ID NO: 308276 - protein, 16 aa, Homo sapiens
  CDR3 for beta chain variable domain of TCR clone 154138 (TRBV9, TRBJ2-2)
CASSAMGKGNTGGLFF

SEQ ID NO: 308277 - protein, 11 aa, Homo sapiens
  CDR3 for alpha chain variable domain of TCR clone 154139 (TRAV21, TRAJ49)
CAVKDGNQFYF

SEQ ID NO: 308278 - protein, 14 aa, Homo sapiens
  CDR3 for beta chain variable domain of TCR clone 154139 (TRBV7-2, TRBJ2-7)
CASSPKTSFYEQYF

SEQ ID NO: 308279 - protein, 18 aa, Homo sapiens
  CDR3 for alpha chain variable domain of TCR clone 154140 (TRAV12-2, )
CAVEDIQNPDPAVYQLRD

SEQ ID NO: 308280 - protein, 15 aa, Homo sapiens
  CDR3 for beta chain variable domain of TCR clone 154140 (TRBV11-1, TRBJ2-7)
CASSLNYGASYELYF

SEQ ID NO: 308281 - protein, 14 aa, Homo sapiens
  CDR3 for alpha chain variable domain of TCR clone 154141 (TRAV1-2, TRAJ8)
CALREDTGFQKLVF

SEQ ID NO: 308282 - protein, 15 aa, Homo sapiens
  CDR3 for beta chain variable domain of TCR clone 154141 (TRBV4-1, TRBJ2-7)
CASSQNTGRLYEQYL

SEQ ID NO: 308283 - protein, 15 aa, Homo sapiens
  CDR3 for alpha chain variable domain of TCR clone 154142 (TRAV12-2, TRAJ8)
CAVREESTGFQKLVF

SEQ ID NO: 308284 - protein, 15 aa, Homo sapiens
  CDR3 for beta chain variable domain of TCR clone 154142 (TRBV28, TRBJ2-4)
CAAGSGTLLMGMQYF

SEQ ID NO: 308285 - protein, 16 aa, Homo sapiens
  CDR3 for alpha chain variable domain of TCR clone 154143 (TRAV3, TRAJ37)
CDVRGKGSGNTGKLIF

SEQ ID NO: 308286 - protein, 14 aa, Homo sapiens
  CDR3 for beta chain variable domain of TCR clone 154143 (TRBV7-2, TRBJ2-7)
CASSPKTSFYEQYF

SEQ ID NO: 308287 - protein, 13 aa, Homo sapiens
  CDR3 for alpha chain variable domain of TCR clone 154144 (TRAV20, TRAJ37)
CAGCFSNTGKLIF

SEQ ID NO: 308288 - protein, 12 aa, Homo sapiens
  CDR3 for beta chain variable domain of TCR clone 154144 (TRBV29-1, TRBJ2-3)
CSVTGGADTQYF

SEQ ID NO: 308289 - protein, 12 aa, Homo sapiens
  CDR3 for alpha chain variable domain of TCR clone 154145 (TRAV13-2, TRAJ23)
CAERHRGGKLIF

SEQ ID NO: 308290 - protein, 14 aa, Homo sapiens
  CDR3 for beta chain variable domain of TCR clone 154145 (TRBV20-1, TRBJ1-1)
CSAQTRIGGTEAFS

SEQ ID NO: 308291 - protein, 14 aa, Homo sapiens
  CDR3 for alpha chain variable domain of TCR clone 154146 (TRAV1-2, TRAJ8)
CAVREDPGFQKLVF

SEQ ID NO: 308292 - protein, 12 aa, Homo sapiens
  CDR3 for beta chain variable domain of TCR clone 154146 (TRBV11-2, TRBJ2-2)
CASSLPTGELFF

SEQ ID NO: 308293 - protein, 14 aa, Homo sapiens
  CDR3 for alpha chain variable domain of TCR clone 154147 (TRAV2, TRAJ9)
CAVEDRSGGVKTIF

SEQ ID NO: 308294 - protein, 12 aa, Homo sapiens
  CDR3 for beta chain variable domain of TCR clone 154147 (TRBV11-2, TRBJ2-1)
CASSPGNNEQFF

SEQ ID NO: 308295 - protein, 13 aa, Homo sapiens
  CDR3 for alpha chain variable domain of TCR clone 154148 (TRAV23/DV6, TRAJ22)
CAASSGSARQLTF

SEQ ID NO: 308296 - protein, 15 aa, Homo sapiens
  CDR3 for beta chain variable domain of TCR clone 154148 (TRBV7-2, TRBJ2-1)
CASSLVGSSYNEQFF

SEQ ID NO: 308297 - protein, 13 aa, Homo sapiens
  CDR3 for alpha chain variable domain of TCR clone 154149 (TRAV13-1, TRAJ39)
CSKYSNAGNMLTF

SEQ ID NO: 308298 - protein, 15 aa, Homo sapiens
  CDR3 for beta chain variable domain of TCR clone 154149 (TRBV5-1, TRBJ2-7)
CASSLMTSGSNEQYF

SEQ ID NO: 308299 - protein, 13 aa, Homo sapiens
  CDR3 for alpha chain variable domain of TCR clone 154150 (TRAV17, TRAJ20)
CAPLGVDDYKLSF

SEQ ID NO: 308300 - protein, 12 aa, Homo sapiens
  CDR3 for beta chain variable domain of TCR clone 154150 (TRBV29-1, TRBJ2-3)
CSVTGGADMQYF

SEQ ID NO: 308301 - protein, 14 aa, Homo sapiens
  CDR3 for alpha chain variable domain of TCR clone 154151 (TRAV8-6, TRAJ57)
CAAYTQGGSEKLVF

SEQ ID NO: 308302 - protein, 14 aa, Homo sapiens
  CDR3 for beta chain variable domain of TCR clone 154151 (TRBV11-2, TRBJ2-5)
CSSSRTGGIETQYF

SEQ ID NO: 308303 - protein, 11 aa, Homo sapiens
  CDR3 for alpha chain variable domain of TCR clone 154152 (TRAV26-2, TRAJ8)
CILTGFQKLVF

SEQ ID NO: 308304 - protein, 15 aa, Homo sapiens
  CDR3 for beta chain variable domain of TCR clone 154152 (TRBV28, TRBJ2-3)
CASSQELGGTDTQYF

SEQ ID NO: 308305 - protein, 16 aa, Homo sapiens
  CDR3 for alpha chain variable domain of TCR clone 154153 (TRAV30, TRAJ24)
CGTEIVDADGWGKFRF

SEQ ID NO: 308306 - protein, 16 aa, Homo sapiens
  CDR3 for beta chain variable domain of TCR clone 154153 (TRBV4-1, TRBJ2-7)
CASSQEGTASSYEQYF

SEQ ID NO: 308307 - protein, 14 aa, Homo sapiens
  CDR3 for alpha chain variable domain of TCR clone 154154 (TRAV17, TRAJ54)
CATDANQGAQKLVF

SEQ ID NO: 308308 - protein, 12 aa, Homo sapiens
  CDR3 for beta chain variable domain of TCR clone 154154 (TRBV7-9, TRBJ2-7)
CAGSIKREEQYF

SEQ ID NO: 308309 - protein, 12 aa, Homo sapiens
  CDR3 for alpha chain variable domain of TCR clone 154155 (TRAV12-3, TRAJ3)
CAIDSSASKIIF

SEQ ID NO: 308310 - protein, 14 aa, Homo sapiens
  CDR3 for beta chain variable domain of TCR clone 154155 (TRBV7-2, TRBJ2-2)
CASRGQGAAGELFF

SEQ ID NO: 308311 - protein, 12 aa, Homo sapiens
  CDR3 for alpha chain variable domain of TCR clone 154156 (TRAV8-3, TRAJ20)
CAVDFNDYKLSF

SEQ ID NO: 308312 - protein, 13 aa, Homo sapiens
  CDR3 for beta chain variable domain of TCR clone 154156 (TRBV3-1, TRBJ1-1)
CASSQLQGAEAFF

SEQ ID NO: 308313 - protein, 12 aa, Homo sapiens
  CDR3 for alpha chain variable domain of TCR clone 154157 (TRAV30, TRAJ39)
CGRGHAGNMLTF

SEQ ID NO: 308314 - protein, 12 aa, Homo sapiens
  CDR3 for beta chain variable domain of TCR clone 154157 (TRBV10-3, TRBJ1-1)
CATMDRPPEAFF

SEQ ID NO: 308315 - protein, 14 aa, Homo sapiens
  CDR3 for alpha chain variable domain of TCR clone 154158 (TRAV8-6, TRAJ5)
CAVSVDTGRRALTV

SEQ ID NO: 308316 - protein, 14 aa, Homo sapiens
  CDR3 for beta chain variable domain of TCR clone 154158 (TRBV6-1, TRBJ1-3)
CASVQGGGGNTIYF

SEQ ID NO: 308317 - protein, 15 aa, Homo sapiens
  CDR3 for alpha chain variable domain of TCR clone 154159 (TRAV8-2, TRAJ16)
CVVSDGFSDGQKLLF

SEQ ID NO: 308318 - protein, 14 aa, Homo sapiens
  CDR3 for beta chain variable domain of TCR clone 154159 (TRBV7-3, TRBJ1-1)
CASGLGTGYTEAFF

SEQ ID NO: 308319 - protein, 14 aa, Homo sapiens
  CDR3 for alpha chain variable domain of TCR clone 154160 (TRAV1-2, TRAJ16)
CACNRFSDVQKLLF

SEQ ID NO: 308320 - protein, 15 aa, Homo sapiens
  CDR3 for beta chain variable domain of TCR clone 154160 (TRBV10-1, TRBJ2-1)
CASSEWRGTYNEQFF

SEQ ID NO: 308321 - protein, 12 aa, Homo sapiens
  CDR3 for alpha chain variable domain of TCR clone 154161 (TRAV35, TRAJ39)
LAPNNAGNMLTF

SEQ ID NO: 308322 - protein, 12 aa, Homo sapiens
  CDR3 for beta chain variable domain of TCR clone 154161 (TRBV7-6, TRBJ2-5)
CASSLSQETQYF

SEQ ID NO: 308323 - protein, 14 aa, Homo sapiens
  CDR3 for alpha chain variable domain of TCR clone 154162 (TRAV12-3, TRAJ15)
CAMIPPQAATALIF

SEQ ID NO: 308324 - protein, 12 aa, Homo sapiens
  CDR3 for beta chain variable domain of TCR clone 154162 (TRBV11-2, TRBJ2-2)
CASSFGGGELFF

SEQ ID NO: 308325 - protein, 15 aa, Homo sapiens
  CDR3 for alpha chain variable domain of TCR clone 154163 (TRAV26-1, TRAJ21)
CIVRVPNYNINKFYF

SEQ ID NO: 308326 - protein, 16 aa, Homo sapiens
  CDR3 for beta chain variable domain of TCR clone 154163 (TRBV7-9, TRBJ2-3)
CASSLQGNPGTDTQYF

SEQ ID NO: 308327 - protein, 17 aa, Homo sapiens
  CDR3 for alpha chain variable domain of TCR clone 154164 (TRAV12-3, TRAJ26)
CAISGGRWDNYGQNFVF

SEQ ID NO: 308328 - protein, 12 aa, Homo sapiens
  CDR3 for beta chain variable domain of TCR clone 154164 (TRBV19, TRBJ1-1)
CASSTTGIEAFF

SEQ ID NO: 308329 - protein, 14 aa, Homo sapiens
  CDR3 for alpha chain variable domain of TCR clone 154165 (TRAV2, TRAJ22)
CTVEVTRAARQLTF

SEQ ID NO: 308330 - protein, 14 aa, Homo sapiens
  CDR3 for beta chain variable domain of TCR clone 154165 (TRBV19, TRBJ2-2)
CASTPGYSGGELFF

SEQ ID NO: 308331 - protein, 13 aa, Homo sapiens
  CDR3 for alpha chain variable domain of TCR clone 154166 (TRAV8-3, TRAJ44)
CAVVPGTASKLTF

SEQ ID NO: 308332 - protein, 14 aa, Homo sapiens
  CDR3 for beta chain variable domain of TCR clone 154166 (TRBV11-2, TRBJ2-3)
CASRRLARTDTQYV

SEQ ID NO: 308333 - protein, 14 aa, Homo sapiens
  CDR3 for alpha chain variable domain of TCR clone 154167 (TRAV12-2, TRAJ40)
CAVKIPSGTYKYIF

SEQ ID NO: 308334 - protein, 17 aa, Homo sapiens
  CDR3 for beta chain variable domain of TCR clone 154167 (TRBV11-2, TRBJ2-1)
CASSLYPPGVEYNEQFL

SEQ ID NO: 308335 - protein, 11 aa, Homo sapiens
  CDR3 for alpha chain variable domain of TCR clone 154168 (TRAV21, TRAJ23)
CPPQRRGKLIF

SEQ ID NO: 308336 - protein, 14 aa, Homo sapiens
  CDR3 for beta chain variable domain of TCR clone 154168 (TRBV12-4, TRBJ1-1)
CASTWTGHDTEAFF

SEQ ID NO: 308337 - protein, 13 aa, Homo sapiens
  CDR3 for alpha chain variable domain of TCR clone 154169 (TRAV38-2/DV8, TRAJ34)
CAYRNYNTDRLIF

SEQ ID NO: 308338 - protein, 15 aa, Homo sapiens
  CDR3 for beta chain variable domain of TCR clone 154169 (TRBV20-1, TRBJ2-5)
CSAEGTGGLQETQYF

SEQ ID NO: 308339 - protein, 14 aa, Homo sapiens
  CDR3 for alpha chain variable domain of TCR clone 154170 (TRAV8-6, TRAJ49)
CAVSDPGTGNQVYF

SEQ ID NO: 308340 - protein, 13 aa, Homo sapiens
  CDR3 for beta chain variable domain of TCR clone 154170 (TRBV7-9, TRBJ1-2)
CASSLKQNYGYTF

SEQ ID NO: 308341 - protein, 12 aa, Homo sapiens
  CDR3 for alpha chain variable domain of TCR clone 154171 (TRAV13-2, TRAJ23)
CAERQRGGKIIL

SEQ ID NO: 308342 - protein, 13 aa, Homo sapiens
  CDR3 for beta chain variable domain of TCR clone 154171 (TRBV2, TRBJ1-6)
CADSGSYNSPLHF

SEQ ID NO: 308343 - protein, 13 aa, Homo sapiens
  CDR3 for alpha chain variable domain of TCR clone 154172 (TRAV13-1, TRAJ6)
CAASSGGSYIPTF

SEQ ID NO: 308344 - protein, 19 aa, Homo sapiens
  CDR3 for beta chain variable domain of TCR clone 154172 (TRBV25-1, TRBJ2-2)
CAILVYRVDRGRKTGELFF

SEQ ID NO: 308345 - protein, 12 aa, Homo sapiens
  CDR3 for alpha chain variable domain of TCR clone 154173 (TRAV12-3, TRAJ17)
CAMTLTGNKLTF

SEQ ID NO: 308346 - protein, 14 aa, Homo sapiens
  CDR3 for beta chain variable domain of TCR clone 154173 (TRBV4-1, TRBJ2-7)
CASSQDREHVDQYF

SEQ ID NO: 308347 - protein, 14 aa, Homo sapiens
  CDR3 for alpha chain variable domain of TCR clone 154174 (TRAV12-3, TRAJ10)
SHLPLTGGGNKLTF

SEQ ID NO: 308348 - protein, 19 aa, Homo sapiens
  CDR3 for beta chain variable domain of TCR clone 154174 (TRBV7-9, TRBJ2-6)
CASSLESATVLPGANVLTF

SEQ ID NO: 308349 - protein, 14 aa, Homo sapiens
  CDR3 for alpha chain variable domain of TCR clone 154175 (TRAV12-2, TRAJ13)
CAVRKTGGYQKVTF

SEQ ID NO: 308350 - protein, 16 aa, Homo sapiens
  CDR3 for beta chain variable domain of TCR clone 154175 (TRBV12-4, TRBJ2-5)
CASSFFVRGRQETQYF

SEQ ID NO: 308351 - protein, 13 aa, Homo sapiens
  CDR3 for alpha chain variable domain of TCR clone 154176 (TRAV20, TRAJ49)
CAVRPNTGNQFYF

SEQ ID NO: 308352 - protein, 14 aa, Homo sapiens
  CDR3 for beta chain variable domain of TCR clone 154176 (TRBV27, TRBJ2-2)
CASRPGVNTGELFF

SEQ ID NO: 308353 - protein, 13 aa, Homo sapiens
  CDR3 for alpha chain variable domain of TCR clone 154177 (TRAV2, TRAJ40)
CAVVTSGTYKYIF

SEQ ID NO: 308354 - protein, 15 aa, Homo sapiens
  CDR3 for beta chain variable domain of TCR clone 154177 (TRBV7-8, TRBJ2-3)
CASSPRTGSTDTQYF

SEQ ID NO: 308355 - protein, 14 aa, Homo sapiens
  CDR3 for alpha chain variable domain of TCR clone 154178 (TRAV21, TRAJ35)
CAVMPIGFGNVLHC

SEQ ID NO: 308356 - protein, 17 aa, Homo sapiens
  CDR3 for beta chain variable domain of TCR clone 154178 (TRBV13, TRBJ2-3)
CASSLSRVAGGRNTQYF

SEQ ID NO: 308357 - protein, 14 aa, Homo sapiens
  CDR3 for alpha chain variable domain of TCR clone 154179 (TRAV2, TRAJ28)
CAATSGAGSYQLTF

SEQ ID NO: 308358 - protein, 15 aa, Homo sapiens
  CDR3 for beta chain variable domain of TCR clone 154179 (TRBV9, TRBJ2-2)
CARSVEDTYTGELFF

SEQ ID NO: 308359 - protein, 15 aa, Homo sapiens
  CDR3 for alpha chain variable domain of TCR clone 154180 (TRAV23/DV6, TRAJ45)
CAASSAGGGADGLTF

SEQ ID NO: 308360 - protein, 13 aa, Homo sapiens
  CDR3 for beta chain variable domain of TCR clone 154180 (TRBV19, TRBJ2-7)
CASRKAGGSEQYF

SEQ ID NO: 308361 - protein, 16 aa, Homo sapiens
  CDR3 for alpha chain variable domain of TCR clone 154181 (TRAV12-2, TRAJ52)
CRLANAGGTSYGKLTF

SEQ ID NO: 308362 - protein, 13 aa, Homo sapiens
  CDR3 for beta chain variable domain of TCR clone 154181 (TRBV7-6, TRBJ1-2)
CASSLVADYGYTF

SEQ ID NO: 308363 - protein, 14 aa, Homo sapiens
  CDR3 for alpha chain variable domain of TCR clone 154182 (TRAV17, TRAJ57)
CATDPPGGSEKLVF

SEQ ID NO: 308364 - protein, 17 aa, Homo sapiens
  CDR3 for beta chain variable domain of TCR clone 154182 (TRBV5-1, TRBJ2-2)
CASSLAGLSGGTGELFF

SEQ ID NO: 308365 - protein, 14 aa, Homo sapiens
  CDR3 for alpha chain variable domain of TCR clone 154183 (TRAV29/DV5, TRAJ44)
CAASATGTASKLTF

SEQ ID NO: 308366 - protein, 17 aa, Homo sapiens
  CDR3 for beta chain variable domain of TCR clone 154183 (TRBV4-1, TRBJ1-4)
CASSQEGPRGVEEKLFF

SEQ ID NO: 308367 - protein, 13 aa, Homo sapiens
  CDR3 for alpha chain variable domain of TCR clone 154184 (TRAV17, TRAJ4)
CAAKSGGYNKLIF

SEQ ID NO: 308368 - protein, 14 aa, Homo sapiens
  CDR3 for beta chain variable domain of TCR clone 154184 (TRBV20-1, TRBJ1-5)
CSARDDRGNQPQHF

SEQ ID NO: 308369 - protein, 13 aa, Homo sapiens
  CDR3 for alpha chain variable domain of TCR clone 154185 (TRAV21, TRAJ27)
CAARPGSAGKSTL

SEQ ID NO: 308370 - protein, 15 aa, Homo sapiens
  CDR3 for beta chain variable domain of TCR clone 154185 (TRBV12-4, TRBJ2-5)
CASSPPTGLQETEYF

SEQ ID NO: 308371 - protein, 13 aa, Homo sapiens
  CDR3 for alpha chain variable domain of TCR clone 154186 (TRAV6, TRAJ20)
CALAISNDYKLSF

SEQ ID NO: 308372 - protein, 16 aa, Homo sapiens
  CDR3 for beta chain variable domain of TCR clone 154186 (TRBV7-9, TRBJ2-1)
CASSDVAGGSYNEQFF

SEQ ID NO: 308373 - protein, 15 aa, Homo sapiens
  CDR3 for alpha chain variable domain of TCR clone 154187 (TRAV27, TRAJ38)
CASRRNAGNNRKLIL

SEQ ID NO: 308374 - protein, 13 aa, Homo sapiens
  CDR3 for beta chain variable domain of TCR clone 154187 (TRBV12-5, TRBJ2-3)
CASGDRQSDTQYF

SEQ ID NO: 308375 - protein, 13 aa, Homo sapiens
  CDR3 for alpha chain variable domain of TCR clone 154188 (TRAV17, TRAJ9)
CATDYTGGFKTIF

SEQ ID NO: 308376 - protein, 13 aa, Homo sapiens
  CDR3 for beta chain variable domain of TCR clone 154188 (TRBV7-7, TRBJ2-1)
CASSLDVGNEQFF

SEQ ID NO: 308377 - protein, 13 aa, Homo sapiens
  CDR3 for alpha chain variable domain of TCR clone 154189 (TRAV1-2, TRAJ9)
CAAINTGGFKTIF

SEQ ID NO: 308378 - protein, 13 aa, Homo sapiens
  CDR3 for beta chain variable domain of TCR clone 154189 (TRBV19, TRBJ1-2)
CASSVPGQNGYTF

SEQ ID NO: 308379 - protein, 13 aa, Homo sapiens
  CDR3 for alpha chain variable domain of TCR clone 154190 (TRAV12-1, TRAJ16)
CVVNGPDGQKMLF

SEQ ID NO: 308380 - protein, 12 aa, Homo sapiens
  CDR3 for beta chain variable domain of TCR clone 154190 (TRBV24-1, TRBJ2-2)
CATSDPGLTGLQ

SEQ ID NO: 308381 - protein, 14 aa, Homo sapiens
  CDR3 for alpha chain variable domain of TCR clone 154191 (TRAV12-1, TRAJ38)
CGVNDAGHNRKLIW

SEQ ID NO: 308382 - protein, 14 aa, Homo sapiens
  CDR3 for beta chain variable domain of TCR clone 154191 (TRBV19, TRBJ1-5)
CASSIVQGIQPQHF

SEQ ID NO: 308383 - protein, 14 aa, Homo sapiens
  CDR3 for alpha chain variable domain of TCR clone 154192 (TRAV38-1, TRAJ45)
CAYYSGGGADGLTF

SEQ ID NO: 308384 - protein, 15 aa, Homo sapiens
  CDR3 for beta chain variable domain of TCR clone 154192 (TRBV7-9, TRBJ2-7)
CASSLALAEAYEQYF

SEQ ID NO: 308385 - protein, 15 aa, Homo sapiens
  CDR3 for alpha chain variable domain of TCR clone 154193 (TRAV13-1, TRAJ44)
CAASRGGGTASKLTF

SEQ ID NO: 308386 - protein, 14 aa, Homo sapiens
  CDR3 for beta chain variable domain of TCR clone 154193 (TRBV11-3, TRBJ2-5)
CASSLGGHAETQYF

SEQ ID NO: 308387 - protein, 13 aa, Homo sapiens
  CDR3 for alpha chain variable domain of TCR clone 154194 (TRAV20, TRAJ20)
CAVQAGSGYKLSF

SEQ ID NO: 308388 - protein, 15 aa, Homo sapiens
  CDR3 for beta chain variable domain of TCR clone 154194 (TRBV7-2, TRBJ2-1)
CASSSGLAGGNEQFF

SEQ ID NO: 308389 - protein, 16 aa, Homo sapiens
  CDR3 for alpha chain variable domain of TCR clone 154195 (TRAV30, TRAJ24)
CGTEIVDADSWGKFQF

SEQ ID NO: 308390 - protein, 16 aa, Homo sapiens
  CDR3 for beta chain variable domain of TCR clone 154195 (TRBV11-2, TRBJ1-1)
CASSLRQGVEHSKAFF

SEQ ID NO: 308391 - protein, 16 aa, Homo sapiens
  CDR3 for alpha chain variable domain of TCR clone 154196 (TRAV16, TRAJ52)
CALSAAGGTSYGRLTF

SEQ ID NO: 308392 - protein, 16 aa, Homo sapiens
  CDR3 for beta chain variable domain of TCR clone 154196 (TRBV12-4, TRBJ2-7)
CASSLIGGTGTYEQYF

SEQ ID NO: 308393 - protein, 14 aa, Homo sapiens
  CDR3 for alpha chain variable domain of TCR clone 154197 (TRAV35, TRAJ54)
CAGYLIQGDQKLVF

SEQ ID NO: 308394 - protein, 14 aa, Homo sapiens
  CDR3 for beta chain variable domain of TCR clone 154197 (TRBV7-2, TRBJ2-5)
CASSVGWAEETQYF

SEQ ID NO: 308395 - protein, 17 aa, Homo sapiens
  CDR3 for alpha chain variable domain of TCR clone 154198 (TRAV23/DV6, TRAJ28)
CAAPLAYSGAGSYQLTF

SEQ ID NO: 308396 - protein, 18 aa, Homo sapiens
  CDR3 for beta chain variable domain of TCR clone 154198 (TRBV10-3, TRBJ2-1)
CAISEGLAANSSYNEQFF

SEQ ID NO: 308397 - protein, 12 aa, Homo sapiens
  CDR3 for alpha chain variable domain of TCR clone 154199 (TRAV1-1, TRAJ30)
CAVRGRDDKIIF

SEQ ID NO: 308398 - protein, 13 aa, Homo sapiens
  CDR3 for beta chain variable domain of TCR clone 154199 (TRBV11-3, TRBJ2-7)
CASSLAKLYEQYF

SEQ ID NO: 308399 - protein, 18 aa, Homo sapiens
  CDR3 for alpha chain variable domain of TCR clone 154200 (TRAV13-1, TRAJ52)
CAASKRSAGGTSYGKLTF

SEQ ID NO: 308400 - protein, 12 aa, Homo sapiens
  CDR3 for beta chain variable domain of TCR clone 154200 (TRBV12-4, TRBJ2-7)
CPSSLGGYEQYF

SEQ ID NO: 308401 - protein, 13 aa, Homo sapiens
  CDR3 for alpha chain variable domain of TCR clone 154201 (TRAV27, TRAJ45)
CRSPGGGSDGLTF

SEQ ID NO: 308402 - protein, 17 aa, Homo sapiens
  CDR3 for beta chain variable domain of TCR clone 154201 (TRBV11-2, TRBJ2-1)
CASSLYPPGVEYNEQFF

SEQ ID NO: 308403 - protein, 12 aa, Homo sapiens
  CDR3 for alpha chain variable domain of TCR clone 154202 (TRAV35, TRAJ39)
LAPNNAGNMLTF

SEQ ID NO: 308404 - protein, 16 aa, Homo sapiens
  CDR3 for beta chain variable domain of TCR clone 154202 (TRBV2, TRBJ2-3)
CASSTSVEGVTDTQFF

SEQ ID NO: 308405 - protein, 15 aa, Homo sapiens
  CDR3 for alpha chain variable domain of TCR clone 154203 (TRAV12-1, TRAJ9)
CVVSFVDTGGFKTIF

SEQ ID NO: 308406 - protein, 12 aa, Homo sapiens
  CDR3 for beta chain variable domain of TCR clone 154203 (TRBV11-3, TRBJ1-1)
CASSHRQGEAFF

SEQ ID NO: 308407 - protein, 11 aa, Homo sapiens
  CDR3 for alpha chain variable domain of TCR clone 154204 (TRAV21, TRAJ34)
CAVTNTDKLLF

SEQ ID NO: 308408 - protein, 17 aa, Homo sapiens
  CDR3 for beta chain variable domain of TCR clone 154204 (TRBV20-1, TRBJ2-1)
CSARRPSGGPPTMSSSS

SEQ ID NO: 308409 - protein, 14 aa, Homo sapiens
  CDR3 for alpha chain variable domain of TCR clone 154205 (TRAV12-2, TRAJ45)
CAVYSGGGADGLTF

SEQ ID NO: 308410 - protein, 15 aa, Homo sapiens
  CDR3 for beta chain variable domain of TCR clone 154205 (TRBV10-2, TRBJ2-6)
CASSEQGTGANVLTF

SEQ ID NO: 308411 - protein, 13 aa, Homo sapiens
  CDR3 for alpha chain variable domain of TCR clone 154206 (TRAV35, TRAJ21)
CAGQLSNFNKFYF

SEQ ID NO: 308412 - protein, 11 aa, Homo sapiens
  CDR3 for beta chain variable domain of TCR clone 154206 (TRBV7-6, TRBJ2-5)
CASGSQETQYF

SEQ ID NO: 308413 - protein, 13 aa, Homo sapiens
  CDR3 for alpha chain variable domain of TCR clone 154207 (TRAV13-1, TRAJ37)
CAARSGNTGKLIF

SEQ ID NO: 308414 - protein, 14 aa, Homo sapiens
  CDR3 for beta chain variable domain of TCR clone 154207 (TRBV12-4, TRBJ2-3)
CASGLGQGTDTQYF

SEQ ID NO: 308415 - protein, 12 aa, Homo sapiens
  CDR3 for alpha chain variable domain of TCR clone 154208 (TRAV12-1, TRAJ34)
CVVAGATDKLIF

SEQ ID NO: 308416 - protein, 14 aa, Homo sapiens
  CDR3 for beta chain variable domain of TCR clone 154208 (TRBV2, TRBJ1-5)
CASSGTVSNQPQHF

SEQ ID NO: 308417 - protein, 14 aa, Homo sapiens
  CDR3 for alpha chain variable domain of TCR clone 154209 (TRAV38-1, TRAJ29)
CAFITPSGDTPIVF

SEQ ID NO: 308418 - protein, 14 aa, Homo sapiens
  CDR3 for beta chain variable domain of TCR clone 154209 (TRBV18, TRBJ2-7)
CASSPRGGAYEQYF

SEQ ID NO: 308419 - protein, 13 aa, Homo sapiens
  CDR3 for alpha chain variable domain of TCR clone 154210 (TRAV17, TRAJ5)
CALRGTGRRALTF

SEQ ID NO: 308420 - protein, 16 aa, Homo sapiens
  CDR3 for beta chain variable domain of TCR clone 154210 (TRBV6-5, TRBJ1-5)
CASSRQGAGGNQPQHF

SEQ ID NO: 308421 - protein, 13 aa, Homo sapiens
  CDR3 for alpha chain variable domain of TCR clone 154211 (TRAV12-3, TRAJ43)
CAMMPYNNNDMRF

SEQ ID NO: 308422 - protein, 16 aa, Homo sapiens
  CDR3 for beta chain variable domain of TCR clone 154211 (TRBV11-2, TRBJ2-1)
CASSLLLLSSYNEQFF

SEQ ID NO: 308423 - protein, 12 aa, Homo sapiens
  CDR3 for alpha chain variable domain of TCR clone 154212 (TRAV13-1, TRAJ21)
CAAKEGFNKFYF

SEQ ID NO: 308424 - protein, 19 aa, Homo sapiens
  CDR3 for beta chain variable domain of TCR clone 154212 (TRBV11-3, TRBJ2-2)
CASSTRPGAKTTNTGELFF

SEQ ID NO: 308425 - protein, 13 aa, Homo sapiens
  CDR3 for alpha chain variable domain of TCR clone 154213 (TRAV13-1, TRAJ5)
CAASDTGRRALNF

SEQ ID NO: 308426 - protein, 12 aa, Homo sapiens
  CDR3 for beta chain variable domain of TCR clone 154213 (TRBV28, TRBJ2-3)
CASSVYRDTQYF

SEQ ID NO: 308427 - protein, 13 aa, Homo sapiens
  CDR3 for alpha chain variable domain of TCR clone 154214 (TRAV27, TRAJ3)
ASLRGSSASKIIF

SEQ ID NO: 308428 - protein, 15 aa, Homo sapiens
  CDR3 for beta chain variable domain of TCR clone 154214 (TRBV7-9, TRBJ2-2)
CASRRTGGRTGELFF

SEQ ID NO: 308429 - protein, 12 aa, Homo sapiens
  CDR3 for alpha chain variable domain of TCR clone 154215 (TRAV1-1, TRAJ33)
CAASDSNYQLIL

SEQ ID NO: 308430 - protein, 18 aa, Homo sapiens
  CDR3 for beta chain variable domain of TCR clone 154215 (TRBV20-1, TRBJ2-2)
CSARVQTARPSGTGELFF

SEQ ID NO: 308431 - protein, 11 aa, Homo sapiens
  CDR3 for alpha chain variable domain of TCR clone 154216 (TRAV2, TRAJ13)
CASGGYQKVTF

SEQ ID NO: 308432 - protein, 12 aa, Homo sapiens
  CDR3 for beta chain variable domain of TCR clone 154216 (TRBV7-8, TRBJ2-7)
CSSSLGDREQYF

SEQ ID NO: 308433 - protein, 14 aa, Homo sapiens
  CDR3 for alpha chain variable domain of TCR clone 154217 (TRAV29/DV5, TRAJ48)
CAAMALFGNERLTF

SEQ ID NO: 308434 - protein, 15 aa, Homo sapiens
  CDR3 for beta chain variable domain of TCR clone 154217 (TRBV7-2, TRBJ2-1)
CASTHGTGIYNEQFF

SEQ ID NO: 308435 - protein, 10 aa, Homo sapiens
  CDR3 for alpha chain variable domain of TCR clone 154218 (TRAV1-2, TRAJ20)
CACNDYKLSF

SEQ ID NO: 308436 - protein, 14 aa, Homo sapiens
  CDR3 for beta chain variable domain of TCR clone 154218 (TRBV25-1, TRBJ1-1)
CASTHLGGNTEAFF

SEQ ID NO: 308437 - protein, 16 aa, Homo sapiens
  CDR3 for alpha chain variable domain of TCR clone 154219 (TRAV27, TRAJ13)
CAGTESDSGGYQKVTF

SEQ ID NO: 308438 - protein, 15 aa, Homo sapiens
  CDR3 for beta chain variable domain of TCR clone 154219 (TRBV29-1, TRBJ2-1)
CSVGRHALFYNEQFF

SEQ ID NO: 308439 - protein, 13 aa, Homo sapiens
  CDR3 for alpha chain variable domain of TCR clone 154220 (TRAV12-1, TRAJ21)
CVVIGDNFNKFYF

SEQ ID NO: 308440 - protein, 14 aa, Homo sapiens
  CDR3 for beta chain variable domain of TCR clone 154220 (TRBV7-3, TRBJ2-2)
CAGSLYPLTGELFF

SEQ ID NO: 308441 - protein, 18 aa, Homo sapiens
  CDR3 for alpha chain variable domain of TCR clone 154221 (TRAV26-1, TRAJ44)
CIVRVAGGGISTASKITF

SEQ ID NO: 308442 - protein, 16 aa, Homo sapiens
  CDR3 for beta chain variable domain of TCR clone 154221 (TRBV20-1, TRBJ2-3)
CSAIFPIGGLTDTQYF

SEQ ID NO: 308443 - protein, 14 aa, Homo sapiens
  CDR3 for alpha chain variable domain of TCR clone 154222 (TRAV4, TRAJ17)
CLVGDMAAGNKLTF

SEQ ID NO: 308444 - protein, 15 aa, Homo sapiens
  CDR3 for beta chain variable domain of TCR clone 154222 (TRBV28, TRBJ1-1)
CASTSTRGLNTEAFF

SEQ ID NO: 308445 - protein, 14 aa, Homo sapiens
  CDR3 for alpha chain variable domain of TCR clone 154223 (TRAV1-2, TRAJ8)
CAVREDTGFQKLVF

SEQ ID NO: 308446 - protein, 23 aa, Homo sapiens
  CDR3 for beta chain variable domain of TCR clone 154223 (TRBV15, TRBJ1-1)
AWGTQPCTCVPPVYRGRNTEAFF

SEQ ID NO: 308447 - protein, 18 aa, Homo sapiens
  CDR3 for alpha chain variable domain of TCR clone 154224 (TRAV21, TRAJ52)
CAVRPSPAGGTSYGKLTF

SEQ ID NO: 308448 - protein, 12 aa, Homo sapiens
  CDR3 for beta chain variable domain of TCR clone 154224 (TRBV11-2, TRBJ2-2)
CASSLGGRELFF

SEQ ID NO: 308449 - protein, 16 aa, Homo sapiens
  CDR3 for alpha chain variable domain of TCR clone 154225 (TRAV16, TRAJ42)
CARKMNHGGSQGNLIF

SEQ ID NO: 308450 - protein, 14 aa, Homo sapiens
  CDR3 for beta chain variable domain of TCR clone 154225 (TRBV14, TRBJ2-3)
CKQPDDRDTDTQYF

SEQ ID NO: 308451 - protein, 14 aa, Homo sapiens
  CDR3 for alpha chain variable domain of TCR clone 154226 (TRAV13-1, TRAJ4)
CAATPPSGYNKLIF

SEQ ID NO: 308452 - protein, 14 aa, Homo sapiens
  CDR3 for beta chain variable domain of TCR clone 154226 (TRBV19, TRBJ2-1)
CASPTFVLSGQQFF

SEQ ID NO: 308453 - protein, 11 aa, Homo sapiens
  CDR3 for alpha chain variable domain of TCR clone 154227 (TRAV1-2, TRAJ20)
CAVANDYKLSF

SEQ ID NO: 308454 - protein, 18 aa, Homo sapiens
  CDR3 for beta chain variable domain of TCR clone 154227 (TRBV20-1, TRBJ2-6)
CSAETTQTHGSGANDLTF

SEQ ID NO: 308455 - protein, 15 aa, Homo sapiens
  CDR3 for alpha chain variable domain of TCR clone 154228 (TRAV8-3, TRAJ45)
CASSYSGGGADGLTF

SEQ ID NO: 308456 - protein, 13 aa, Homo sapiens
  CDR3 for beta chain variable domain of TCR clone 154228 (TRBV11-3, TRBJ1-1)
CATEEGLNTEAFF

SEQ ID NO: 308457 - protein, 12 aa, Homo sapiens
  CDR3 for alpha chain variable domain of TCR clone 154229 (TRAV27, TRAJ35)
CAGADFGNVLHC

SEQ ID NO: 308458 - protein, 13 aa, Homo sapiens
  CDR3 for beta chain variable domain of TCR clone 154229 (TRBV3-1, TRBJ1-1)
CASSPGVITEAFF

SEQ ID NO: 308459 - protein, 12 aa, Homo sapiens
  CDR3 for alpha chain variable domain of TCR clone 154230 (TRAV17, TRAJ20)
CATDSNDYKLSF

SEQ ID NO: 308460 - protein, 14 aa, Homo sapiens
  CDR3 for beta chain variable domain of TCR clone 154230 (TRBV19, TRBJ2-1)
CASSLLASINEQFF

SEQ ID NO: 308461 - protein, 14 aa, Homo sapiens
  CDR3 for alpha chain variable domain of TCR clone 154231 (TRAV12-1, TRAJ30)
FVVNIGGRDDKSIF

SEQ ID NO: 308462 - protein, 13 aa, Homo sapiens
  CDR3 for beta chain variable domain of TCR clone 154231 (TRBV12-5, TRBJ2-1)
CASGLGRGNEQFF

SEQ ID NO: 308463 - protein, 12 aa, Homo sapiens
  CDR3 for alpha chain variable domain of TCR clone 154232 (TRAV20, TRAJ13)
CCVKRGYQKVTF

SEQ ID NO: 308464 - protein, 13 aa, Homo sapiens
  CDR3 for beta chain variable domain of TCR clone 154232 (TRBV12-5, TRBJ2-1)
CASGLGRWNEQFF

SEQ ID NO: 308465 - protein, 16 aa, Homo sapiens
  CDR3 for alpha chain variable domain of TCR clone 154233 (TRAV1-2, TRAJ10)
CAVRGVPTGGGNKLTF

SEQ ID NO: 308466 - protein, 15 aa, Homo sapiens
  CDR3 for beta chain variable domain of TCR clone 154233 (TRBV9, TRBJ1-6)
CASSVAGTGDSPLHF

SEQ ID NO: 308467 - protein, 17 aa, Homo sapiens
  CDR3 for alpha chain variable domain of TCR clone 154234 (TRAV23/DV6, TRAJ57)
CAASSTLSQGGSEKPVF

SEQ ID NO: 308468 - protein, 14 aa, Homo sapiens
  CDR3 for beta chain variable domain of TCR clone 154234 (TRBV25-1, TRBJ1-1)
CASTHLGRNTEAFF

SEQ ID NO: 308469 - protein, 12 aa, Homo sapiens
  CDR3 for alpha chain variable domain of TCR clone 154235 (TRAV13-2, TRAJ23)
CAESHRGGKLIF

SEQ ID NO: 308470 - protein, 16 aa, Homo sapiens
  CDR3 for beta chain variable domain of TCR clone 154235 (TRBV7-9, TRBJ1-2)
CASSLGFSSGEDGYTF

SEQ ID NO: 308471 - protein, 16 aa, Homo sapiens
  CDR3 for alpha chain variable domain of TCR clone 154236 (TRAV1-2, TRAJ10)
CAVRGVLTGAGNKLTF

SEQ ID NO: 308472 - protein, 14 aa, Homo sapiens
  CDR3 for beta chain variable domain of TCR clone 154236 (TRBV19, TRBJ2-1)
CASGKSTQYNEQFF

SEQ ID NO: 308473 - protein, 11 aa, Homo sapiens
  CDR3 for alpha chain variable domain of TCR clone 154237 (TRAV12-2, TRAJ33)
CAVTSNYQLIC

SEQ ID NO: 308474 - protein, 14 aa, Homo sapiens
  CDR3 for beta chain variable domain of TCR clone 154237 (TRBV28, TRBJ2-2)
CASRSRSGTGELFF

SEQ ID NO: 308475 - protein, 14 aa, Homo sapiens
  CDR3 for alpha chain variable domain of TCR clone 154238 (TRAV13-1, TRAJ20)
CAAPMGFTSPALEP

SEQ ID NO: 308476 - protein, 14 aa, Homo sapiens
  CDR3 for beta chain variable domain of TCR clone 154238 (TRBV28, TRBJ2-5)
CASTGAGGVETQYF

SEQ ID NO: 308477 - protein, 12 aa, Homo sapiens
  CDR3 for alpha chain variable domain of TCR clone 154239 (TRAV12-1, TRAJ40)
CVFYSGTYKYIF

SEQ ID NO: 308478 - protein, 14 aa, Homo sapiens
  CDR3 for beta chain variable domain of TCR clone 154239 (TRBV7-9, TRBJ2-5)
CASSLDTAQETQYF

SEQ ID NO: 308479 - protein, 15 aa, Homo sapiens
  CDR3 for alpha chain variable domain of TCR clone 154240 (TRAV38-1, TRAJ37)
CAFIFGSGNTCKLIF

SEQ ID NO: 308480 - protein, 12 aa, Homo sapiens
  CDR3 for beta chain variable domain of TCR clone 154240 (TRBV7-9, TRBJ2-7)
CASSLEGYEQYF

SEQ ID NO: 308481 - protein, 14 aa, Homo sapiens
  CDR3 for alpha chain variable domain of TCR clone 154241 (TRAV1-2, TRAJ16)
CAVNRFSDGQKLLF

SEQ ID NO: 308482 - protein, 14 aa, Homo sapiens
  CDR3 for beta chain variable domain of TCR clone 154241 (TRBV18, TRBJ1-2)
CASSLNRENYGYTF

SEQ ID NO: 308483 - protein, 15 aa, Homo sapiens
  CDR3 for alpha chain variable domain of TCR clone 154242 (TRAV27, TRAJ38)
CAARRNAGNNRKRIW

SEQ ID NO: 308484 - protein, 13 aa, Homo sapiens
  CDR3 for beta chain variable domain of TCR clone 154242 (TRBV28, TRBJ2-5)
CAGVSRGEETQYF

SEQ ID NO: 308485 - protein, 13 aa, Homo sapiens
  CDR3 for alpha chain variable domain of TCR clone 154243 (TRAV3, TRAJ21)
CAVREPDFNKFYF

SEQ ID NO: 308486 - protein, 13 aa, Homo sapiens
  CDR3 for beta chain variable domain of TCR clone 154243 (TRBV9, TRBJ2-1)
CASSPSDGNEQFC

SEQ ID NO: 308487 - protein, 14 aa, Homo sapiens
  CDR3 for alpha chain variable domain of TCR clone 154244 (TRAV12-2, TRAJ13)
CAVKKTGGYQKVTF

SEQ ID NO: 308488 - protein, 13 aa, Homo sapiens
  CDR3 for beta chain variable domain of TCR clone 154244 (TRBV28, TRBJ2-7)
CASNAGGVYEQYF

SEQ ID NO: 308489 - protein, 14 aa, Homo sapiens
  CDR3 for alpha chain variable domain of TCR clone 154245 (TRAV13-1, TRAJ30)
CAASPQNRDDKIIF

SEQ ID NO: 308490 - protein, 17 aa, Homo sapiens
  CDR3 for beta chain variable domain of TCR clone 154245 (TRBV15, TRBJ1-4)
CATSRYGTGDPNEKLFF

SEQ ID NO: 308491 - protein, 15 aa, Homo sapiens
  CDR3 for alpha chain variable domain of TCR clone 154246 (TRAV12-3, TRAJ5)
CAMSGLGTGRRALTF

SEQ ID NO: 308492 - protein, 16 aa, Homo sapiens
  CDR3 for beta chain variable domain of TCR clone 154246 (TRBV20-1, TRBJ2-3)
CSARPHSAGAIDTQYF

SEQ ID NO: 308493 - protein, 12 aa, Homo sapiens
  CDR3 for alpha chain variable domain of TCR clone 154247 (TRAV1-1, TRAJ8)
CAGGTGFQKLVF

SEQ ID NO: 308494 - protein, 14 aa, Homo sapiens
  CDR3 for beta chain variable domain of TCR clone 154247 (TRBV7-9, TRBJ1-4)
CSSRTGGFNEKLFF

SEQ ID NO: 308495 - protein, 18 aa, Homo sapiens
  CDR3 for alpha chain variable domain of TCR clone 154248 (TRAV12-3, TRAJ52)
GAMSVGGAGGTSYGKLTF

SEQ ID NO: 308496 - protein, 15 aa, Homo sapiens
  CDR3 for beta chain variable domain of TCR clone 154248 (TRBV20-1, TRBJ2-7)
CSARDRVSGMDEQYF

SEQ ID NO: 308497 - protein, 15 aa, Homo sapiens
  CDR3 for alpha chain variable domain of TCR clone 154249 (TRAV1-2, TRAJ31)
CLLPLCCDNNARLMF

SEQ ID NO: 308498 - protein, 15 aa, Homo sapiens
  CDR3 for beta chain variable domain of TCR clone 154249 (TRBV28, TRBJ2-1)
CASSIIAGGRSEQFF

SEQ ID NO: 308499 - protein, 16 aa, Homo sapiens
  CDR3 for alpha chain variable domain of TCR clone 154250 (TRAV12-1, TRAJ42)
CVVTPYYGGSQGNLIF

SEQ ID NO: 308500 - protein, 14 aa, Homo sapiens
  CDR3 for beta chain variable domain of TCR clone 154250 (TRBV19, TRBJ2-1)
CASPTFVLSGEQFF

SEQ ID NO: 308501 - protein, 12 aa, Homo sapiens
  CDR3 for alpha chain variable domain of TCR clone 154251 (TRAV13-1, TRAJ15)
CAASQAGTAVIF

SEQ ID NO: 308502 - protein, 14 aa, Homo sapiens
  CDR3 for beta chain variable domain of TCR clone 154251 (TRBV19, TRBJ2-2)
CASSTLHRSGELFF

SEQ ID NO: 308503 - protein, 15 aa, Homo sapiens
  CDR3 for alpha chain variable domain of TCR clone 154252 (TRAV12-3, TRAJ42)
CAMSGHGGSQGNLIF

SEQ ID NO: 308504 - protein, 15 aa, Homo sapiens
  CDR3 for beta chain variable domain of TCR clone 154252 (TRBV27, TRBJ2-7)
CASSLRNEQGYEQYF

SEQ ID NO: 308505 - protein, 17 aa, Homo sapiens
  CDR3 for alpha chain variable domain of TCR clone 154253 (TRAV3, TRAJ12)
CAVRDGGRMDSSYKLIF

SEQ ID NO: 308506 - protein, 13 aa, Homo sapiens
  CDR3 for beta chain variable domain of TCR clone 154253 (TRBV5-4, TRBJ1-1)
CASSPGEGTEAFF

SEQ ID NO: 308507 - protein, 11 aa, Homo sapiens
  CDR3 for alpha chain variable domain of TCR clone 154254 (TRAV27, TRAJ20)
CAGLNDYKLSF

SEQ ID NO: 308508 - protein, 19 aa, Homo sapiens
  CDR3 for beta chain variable domain of TCR clone 154254 (TRBV7-9, TRBJ2-1)
CASSHNRGALLRSYNEQFF

SEQ ID NO: 308509 - protein, 13 aa, Homo sapiens
  CDR3 for alpha chain variable domain of TCR clone 154255 (TRAV38-2/DV8, TRAJ34)
CAYRTWNTDKLIF

SEQ ID NO: 308510 - protein, 19 aa, Homo sapiens
  CDR3 for beta chain variable domain of TCR clone 154255 (TRBV12-5, TRBJ2-2)
CASSLGQGTMFANTGELFF

SEQ ID NO: 308511 - protein, 14 aa, Homo sapiens
  CDR3 for alpha chain variable domain of TCR clone 154256 (TRAV9-2, TRAJ39)
CALYIYNAGNMLTF

SEQ ID NO: 308512 - protein, 15 aa, Homo sapiens
  CDR3 for beta chain variable domain of TCR clone 154256 (TRBV10-3, TRBJ1-5)
CAISESSDSNQPQHF

SEQ ID NO: 308513 - protein, 13 aa, Homo sapiens
  CDR3 for alpha chain variable domain of TCR clone 154257 (TRAV8-3, TRAJ44)
CAVVPGTASKLTF

SEQ ID NO: 308514 - protein, 14 aa, Homo sapiens
  CDR3 for beta chain variable domain of TCR clone 154257 (TRBV11-2, TRBJ2-3)
CSSRRLARTDTQYF

SEQ ID NO: 308515 - protein, 14 aa, Homo sapiens
  CDR3 for alpha chain variable domain of TCR clone 154258 (TRAV12-2, TRAJ53)
CAVNDGGSNYKLTF

SEQ ID NO: 308516 - protein, 16 aa, Homo sapiens
  CDR3 for beta chain variable domain of TCR clone 154258 (TRBV7-3, TRBJ2-2)
CASSLKRGTLSGELFF

SEQ ID NO: 308517 - protein, 15 aa, Homo sapiens
  CDR3 for alpha chain variable domain of TCR clone 154259 (TRAV13-1, TRAJ15)
CAASIERQAGTALIF

SEQ ID NO: 308518 - protein, 15 aa, Homo sapiens
  CDR3 for beta chain variable domain of TCR clone 154259 (TRBV5-7, TRBJ1-5)
CASSYGKLWDQPQHF

SEQ ID NO: 308519 - protein, 10 aa, Homo sapiens
  CDR3 for alpha chain variable domain of TCR clone 154260 (TRAV1-2, TRAJ31)
CAFFDARLMF

SEQ ID NO: 308520 - protein, 14 aa, Homo sapiens
  CDR3 for beta chain variable domain of TCR clone 154260 (TRBV19, TRBJ2-7)
CASSMGQGAIEQYF

SEQ ID NO: 308521 - protein, 14 aa, Homo sapiens
  CDR3 for alpha chain variable domain of TCR clone 154261 (TRAV1-2, TRAJ16)
CAVNRFSDGQKLLF

SEQ ID NO: 308522 - protein, 11 aa, Homo sapiens
  CDR3 for beta chain variable domain of TCR clone 154261 (TRBV12-4, TRBJ2-5)
CASSFQGAQYF

SEQ ID NO: 308523 - protein, 14 aa, Homo sapiens
  CDR3 for alpha chain variable domain of TCR clone 154262 (TRAV13-2, TRAJ17)
CAENSKAAGKKLTF

SEQ ID NO: 308524 - protein, 14 aa, Homo sapiens
  CDR3 for beta chain variable domain of TCR clone 154262 (TRBV19, TRBJ2-1)
CASPTFVLSGEQFF

SEQ ID NO: 308525 - protein, 13 aa, Homo sapiens
  CDR3 for alpha chain variable domain of TCR clone 154263 (TRAV21, TRAJ27)
CAARPGNAGKSTF

SEQ ID NO: 308526 - protein, 12 aa, Homo sapiens
  CDR3 for beta chain variable domain of TCR clone 154263 (TRBV7-3, TRBJ2-5)
CASSSPGGTQYF

SEQ ID NO: 308527 - protein, 18 aa, Homo sapiens
  CDR3 for alpha chain variable domain of TCR clone 154264 (TRAV13-1, TRAJ52)
CAASKRSAGGTSYVKLTF

SEQ ID NO: 308528 - protein, 13 aa, Homo sapiens
  CDR3 for beta chain variable domain of TCR clone 154264 (TRBV12-4, TRBJ1-2)
CASSLRQGEGYTF

SEQ ID NO: 308529 - protein, 16 aa, Homo sapiens
  CDR3 for alpha chain variable domain of TCR clone 154265 (TRAV23/DV6, TRAJ9)
CAASIGVNTGGFKTIF

SEQ ID NO: 308530 - protein, 15 aa, Homo sapiens
  CDR3 for beta chain variable domain of TCR clone 154265 (TRBV20-1, TRBJ1-1)
CSASRGVTGNTEAFF

SEQ ID NO: 308531 - protein, 13 aa, Homo sapiens
  CDR3 for alpha chain variable domain of TCR clone 154266 (TRAV23/DV6, TRAJ43)
CAASMGGNNAMRL

SEQ ID NO: 308532 - protein, 15 aa, Homo sapiens
  CDR3 for beta chain variable domain of TCR clone 154266 (TRBV11-3, TRBJ2-7)
CASSPGPASSYEQYF

SEQ ID NO: 308533 - protein, 15 aa, Homo sapiens
  CDR3 for alpha chain variable domain of TCR clone 154267 (TRAV35, TRAJ42)
CAGQGYGGSQGNLIF

SEQ ID NO: 308534 - protein, 13 aa, Homo sapiens
  CDR3 for beta chain variable domain of TCR clone 154267 (TRBV7-2, TRBJ1-1)
CASSLVEGAEDFF

SEQ ID NO: 308535 - protein, 16 aa, Homo sapiens
  CDR3 for alpha chain variable domain of TCR clone 154268 (TRAV20, TRAJ53)
CAVQGNSGGSNYKLTF

SEQ ID NO: 308536 - protein, 14 aa, Homo sapiens
  CDR3 for beta chain variable domain of TCR clone 154268 (TRBV11-2, TRBJ1-2)
CASSLGTANYGYTF

SEQ ID NO: 308537 - protein, 14 aa, Homo sapiens
  CDR3 for alpha chain variable domain of TCR clone 154269 (TRAV29/DV5, TRAJ36)
CAARRKTGASNLFF

SEQ ID NO: 308538 - protein, 13 aa, Homo sapiens
  CDR3 for beta chain variable domain of TCR clone 154269 (TRBV19, TRBJ1-2)
CASSVPGQDGYTF

SEQ ID NO: 308539 - protein, 13 aa, Homo sapiens
  CDR3 for alpha chain variable domain of TCR clone 154270 (TRAV27, TRAJ6)
CAGGTRGSYIPTF

SEQ ID NO: 308540 - protein, 14 aa, Homo sapiens
  CDR3 for beta chain variable domain of TCR clone 154270 (TRBV20-1, TRBJ2-4)
CSASGRVGEKIQYF

SEQ ID NO: 308541 - protein, 16 aa, Homo sapiens
  CDR3 for alpha chain variable domain of TCR clone 154271 (TRAV4, TRAJ18)
CCVLLIGGSTLGRLYF

SEQ ID NO: 308542 - protein, 17 aa, Homo sapiens
  CDR3 for beta chain variable domain of TCR clone 154271 (TRBV7-8, TRBJ2-6)
CASSAGTGGAGANVLTF

SEQ ID NO: 308543 - protein, 12 aa, Homo sapiens
  CDR3 for alpha chain variable domain of TCR clone 154272 (TRAV12-1, TRAJ34)
CVVILNTDKLIF

SEQ ID NO: 308544 - protein, 17 aa, Homo sapiens
  CDR3 for beta chain variable domain of TCR clone 154272 (TRBV13, TRBJ2-3)
CASSLSRVAGGRNTQYF

SEQ ID NO: 308545 - protein, 13 aa, Homo sapiens
  CDR3 for alpha chain variable domain of TCR clone 154273 (TRAV21, TRAJ20)
CAVGLRVDYKLSF

SEQ ID NO: 308546 - protein, 16 aa, Homo sapiens
  CDR3 for beta chain variable domain of TCR clone 154273 (TRBV5-1, TRBJ2-5)
CASSPSSGARTETQYF

SEQ ID NO: 308547 - protein, 14 aa, Homo sapiens
  CDR3 for alpha chain variable domain of TCR clone 154274 (TRAV8-3, TRAJ4)
CAVGAAGGYNKLIF

SEQ ID NO: 308548 - protein, 16 aa, Homo sapiens
  CDR3 for beta chain variable domain of TCR clone 154274 (TRBV19, TRBJ2-2)
CASRFPGTGATGELFF

SEQ ID NO: 308549 - protein, 17 aa, Homo sapiens
  CDR3 for alpha chain variable domain of TCR clone 154275 (TRAV3, TRAJ38)
CAGRDCLNAGNNRKLIW

SEQ ID NO: 308550 - protein, 13 aa, Homo sapiens
  CDR3 for beta chain variable domain of TCR clone 154275 (TRBV23-1, TRBJ1-4)
CASRGKFNEKLFF

SEQ ID NO: 308551 - protein, 13 aa, Homo sapiens
  CDR3 for alpha chain variable domain of TCR clone 154276 (TRAV35, TRAJ42)
GAGFPGSQGNLIF

SEQ ID NO: 308552 - protein, 14 aa, Homo sapiens
  CDR3 for beta chain variable domain of TCR clone 154276 (TRBV19, TRBJ2-1)
CASPTFVLSGEQFF

SEQ ID NO: 308553 - protein, 11 aa, Homo sapiens
  CDR3 for alpha chain variable domain of TCR clone 154277 (TRAV8-6, TRAJ20)
CAVSYDYKPSF

SEQ ID NO: 308554 - protein, 14 aa, Homo sapiens
  CDR3 for beta chain variable domain of TCR clone 154277 (TRBV10-2, TRBJ2-2)
CASSERSNTGELFF

SEQ ID NO: 308555 - protein, 14 aa, Homo sapiens
  CDR3 for alpha chain variable domain of TCR clone 154278 (TRAV13-2, TRAJ11)
CAETGNSGYSTLTF

SEQ ID NO: 308556 - protein, 14 aa, Homo sapiens
  CDR3 for beta chain variable domain of TCR clone 154278 (TRBV6-5, TRBJ1-2)
CASSYDGTGGGYTF

SEQ ID NO: 308557 - protein, 14 aa, Homo sapiens
  CDR3 for alpha chain variable domain of TCR clone 154279 (TRAV3, TRAJ40)
CAVRDRRGTYKYNF

SEQ ID NO: 308558 - protein, 15 aa, Homo sapiens
  CDR3 for beta chain variable domain of TCR clone 154279 (TRBV28, TRBJ2-1)
CASSIIAGGRSEQFF

SEQ ID NO: 308559 - protein, 13 aa, Homo sapiens
  CDR3 for alpha chain variable domain of TCR clone 154280 (TRAV17, TRAJ5)
CAPMDTGRRALTF

SEQ ID NO: 308560 - protein, 16 aa, Homo sapiens
  CDR3 for beta chain variable domain of TCR clone 154280 (TRBV28, TRBJ2-1)
CASSSPEYPRDNEQFF

SEQ ID NO: 308561 - protein, 12 aa, Homo sapiens
  CDR3 for alpha chain variable domain of TCR clone 154281 (TRAV2, TRAJ34)
CAVERNTDKLIF

SEQ ID NO: 308562 - protein, 14 aa, Homo sapiens
  CDR3 for beta chain variable domain of TCR clone 154281 (TRBV7-9, TRBJ2-1)
SASSDNSGYNEQFF

SEQ ID NO: 308563 - protein, 16 aa, Homo sapiens
  CDR3 for alpha chain variable domain of TCR clone 154282 (TRAV17, TRAJ28)
CATASVPGAGSYKLTF

SEQ ID NO: 308564 - protein, 11 aa, Homo sapiens
  CDR3 for beta chain variable domain of TCR clone 154282 (TRBV7-9, TRBJ2-5)
CASSLGETQYF

SEQ ID NO: 308565 - protein, 14 aa, Homo sapiens
  CDR3 for alpha chain variable domain of TCR clone 154283 (TRAV13-1, TRAJ40)
CAASMTSGTYKYIF

SEQ ID NO: 308566 - protein, 13 aa, Homo sapiens
  CDR3 for beta chain variable domain of TCR clone 154283 (TRBV20-1, TRBJ1-1)
CSARGGGNTEAFF

SEQ ID NO: 308567 - protein, 14 aa, Homo sapiens
  CDR3 for alpha chain variable domain of TCR clone 154284 (TRAV12-3, TRAJ10)
SHLPLKGGGNKLTF

SEQ ID NO: 308568 - protein, 13 aa, Homo sapiens
  CDR3 for beta chain variable domain of TCR clone 154284 (TRBV29-1, TRBJ2-3)
CSATRGGRDTQYF

SEQ ID NO: 308569 - protein, 14 aa, Homo sapiens
  CDR3 for alpha chain variable domain of TCR clone 154285 (TRAV12-1, TRAJ43)
CVVNGRSNNNDMRF

SEQ ID NO: 308570 - protein, 14 aa, Homo sapiens
  CDR3 for beta chain variable domain of TCR clone 154285 (TRBV7-9, TRBJ2-1)
CASSPRDSLYEQFF

SEQ ID NO: 308571 - protein, 12 aa, Homo sapiens
  CDR3 for alpha chain variable domain of TCR clone 154286 (TRAV16, TRAJ10)
CSRTGGGNKLTF

SEQ ID NO: 308572 - protein, 12 aa, Homo sapiens
  CDR3 for beta chain variable domain of TCR clone 154286 (TRBV19, TRBJ2-1)
CASSQISNEQFF

SEQ ID NO: 308573 - protein, 14 aa, Homo sapiens
  CDR3 for alpha chain variable domain of TCR clone 154287 (TRAV35, TRAJ42)
CCVPYGGSQGNLIF

SEQ ID NO: 308574 - protein, 18 aa, Homo sapiens
  CDR3 for beta chain variable domain of TCR clone 154287 (TRBV13, TRBJ2-6)
CASSPMTSGGSGANVLTV

SEQ ID NO: 308575 - protein, 13 aa, Homo sapiens
  CDR3 for alpha chain variable domain of TCR clone 154288 (TRAV21, TRAJ15)
CAVANQAGTALTF

SEQ ID NO: 308576 - protein, 20 aa, Homo sapiens
  CDR3 for beta chain variable domain of TCR clone 154288 (TRBV7-8, TRBJ2-2)
CASSHLFPGPTIHITGELFF

SEQ ID NO: 308577 - protein, 15 aa, Homo sapiens
  CDR3 for alpha chain variable domain of TCR clone 154289 (TRAV12-1, TRAJ37)
CVVNLPTSNTGKLTF

SEQ ID NO: 308578 - protein, 16 aa, Homo sapiens
  CDR3 for beta chain variable domain of TCR clone 154289 (TRBV2, TRBJ2-1)
CASRSPAGGKYNEQFF

SEQ ID NO: 308579 - protein, 13 aa, Homo sapiens
  CDR3 for alpha chain variable domain of TCR clone 154290 (TRAV8-3, TRAJ4)
CCGSPGGYNKLIF

SEQ ID NO: 308580 - protein, 16 aa, Homo sapiens
  CDR3 for beta chain variable domain of TCR clone 154290 (TRBV4-3, TRBJ2-2)
CASSRLQGSGTGELFF

SEQ ID NO: 308581 - protein, 12 aa, Homo sapiens
  CDR3 for alpha chain variable domain of TCR clone 154291 (TRAV12-3, TRAJ17)
CAMTITGNKLTF

SEQ ID NO: 308582 - protein, 14 aa, Homo sapiens
  CDR3 for beta chain variable domain of TCR clone 154291 (TRBV19, TRBJ2-1)
CASPTFVLSGEQFF

SEQ ID NO: 308583 - protein, 16 aa, Homo sapiens
  CDR3 for alpha chain variable domain of TCR clone 154292 (TRAV26-1, TRAJ52)
CIVSNAGGTSHGKLTF

SEQ ID NO: 308584 - protein, 16 aa, Homo sapiens
  CDR3 for beta chain variable domain of TCR clone 154292 (TRBV5-1, TRBJ2-1)
CASSLEGRGLYNEQFF

SEQ ID NO: 308585 - protein, 13 aa, Homo sapiens
  CDR3 for alpha chain variable domain of TCR clone 154293 (TRAV35, TRAJ13)
CWAVPWGYQKVTF

SEQ ID NO: 308586 - protein, 14 aa, Homo sapiens
  CDR3 for beta chain variable domain of TCR clone 154293 (TRBV19, TRBJ2-2)
CASSMVGLSGELFF

SEQ ID NO: 308587 - protein, 11 aa, Homo sapiens
  CDR3 for alpha chain variable domain of TCR clone 154294 (TRAV13-1, TRAJ52)
PGGTSYGKLTF

SEQ ID NO: 308588 - protein, 16 aa, Homo sapiens
  CDR3 for beta chain variable domain of TCR clone 154294 (TRBV28, TRBJ2-7)
CASSPWVVTGDLSQYF

SEQ ID NO: 308589 - protein, 12 aa, Homo sapiens
  CDR3 for alpha chain variable domain of TCR clone 154295 (TRAV1-2, TRAJ33)
CAALDGNYRLIW

SEQ ID NO: 308590 - protein, 16 aa, Homo sapiens
  CDR3 for beta chain variable domain of TCR clone 154295 (TRBV6-4, TRBJ1-2)
CASSEAVGDPNYGYTF

SEQ ID NO: 308591 - protein, 15 aa, Homo sapiens
  CDR3 for alpha chain variable domain of TCR clone 154296 (TRAV25, TRAJ52)
CAGTSGGTSYGKLTF

SEQ ID NO: 308592 - protein, 15 aa, Homo sapiens
  CDR3 for beta chain variable domain of TCR clone 154296 (TRBV7-2, TRBJ2-1)
CASSSRTSREDEQFF

SEQ ID NO: 308593 - protein, 11 aa, Homo sapiens
  CDR3 for alpha chain variable domain of TCR clone 154297 (TRAV1-2, TRAJ11)
CAVRGYSTLTF

SEQ ID NO: 308594 - protein, 12 aa, Homo sapiens
  CDR3 for beta chain variable domain of TCR clone 154297 (TRBV19, TRBJ2-1)
CASSRQGAEQFF

SEQ ID NO: 308595 - protein, 10 aa, Homo sapiens
  CDR3 for alpha chain variable domain of TCR clone 154298 (TRAV27, TRAJ58)
SETSGSRLPF

SEQ ID NO: 308596 - protein, 13 aa, Homo sapiens
  CDR3 for beta chain variable domain of TCR clone 154298 (TRBV4-2, TRBJ1-1)
CASSQAGNTEAFF

SEQ ID NO: 308597 - protein, 18 aa, Homo sapiens
  CDR3 for alpha chain variable domain of TCR clone 154299 (TRAV12-3, TRAJ52)
CAMSVGGAGGTSYGKLTF

SEQ ID NO: 308598 - protein, 14 aa, Homo sapiens
  CDR3 for beta chain variable domain of TCR clone 154299 (TRBV28, TRBJ2-1)
CASSLNGRNNEQFF

SEQ ID NO: 308599 - protein, 11 aa, Homo sapiens
  CDR3 for alpha chain variable domain of TCR clone 154300 (TRAV23/DV6, TRAJ58)
CAARLLRGETS

SEQ ID NO: 308600 - protein, 16 aa, Homo sapiens
  CDR3 for beta chain variable domain of TCR clone 154300 (TRBV20-1, TRBJ2-2)
CSARDDRVGLTGELFF

SEQ ID NO: 308601 - protein, 13 aa, Homo sapiens
  CDR3 for alpha chain variable domain of TCR clone 154301 (TRAV1-2, TRAJ9)
CAALNTRGFKTIF

SEQ ID NO: 308602 - protein, 15 aa, Homo sapiens
  CDR3 for beta chain variable domain of TCR clone 154301 (TRBV7-2, TRBJ2-1)
FASSSGLAGGNEQFF

SEQ ID NO: 308603 - protein, 11 aa, Homo sapiens
  CDR3 for alpha chain variable domain of TCR clone 154302 (TRAV12-2, TRAJ31)
CAVTRWARLMF

SEQ ID NO: 308604 - protein, 13 aa, Homo sapiens
  CDR3 for beta chain variable domain of TCR clone 154302 (TRBV11-3, TRBJ1-1)
CASSSNRDTEAFF

SEQ ID NO: 308605 - protein, 15 aa, Homo sapiens
  CDR3 for alpha chain variable domain of TCR clone 154303 (TRAV4, TRAJ12)
CLVGDLMDSSYKFIF

SEQ ID NO: 308606 - protein, 14 aa, Homo sapiens
  CDR3 for beta chain variable domain of TCR clone 154303 (TRBV7-2, TRBJ1-1)
CASSHRQGRTEAFF

SEQ ID NO: 308607 - protein, 12 aa, Homo sapiens
  CDR3 for alpha chain variable domain of TCR clone 154304 (TRAV20, TRAJ39)
CAVGNAGNMLTF

SEQ ID NO: 308608 - protein, 14 aa, Homo sapiens
  CDR3 for beta chain variable domain of TCR clone 154304 (TRBV20-1, TRBJ2-7)
CSAPELAGVGEQYF

SEQ ID NO: 308609 - protein, 16 aa, Homo sapiens
  CDR3 for alpha chain variable domain of TCR clone 154305 (TRAV12-2, TRAJ40)
CAVIRGGTSGTYKYIF

SEQ ID NO: 308610 - protein, 12 aa, Homo sapiens
  CDR3 for beta chain variable domain of TCR clone 154305 (TRBV6-3, TRBJ2-7)
CASSLAPYEQYF

SEQ ID NO: 308611 - protein, 17 aa, Homo sapiens
  CDR3 for alpha chain variable domain of TCR clone 154306 (TRAV3, TRAJ42)
CAVRNRDYGGSQGNLIF

SEQ ID NO: 308612 - protein, 13 aa, Homo sapiens
  CDR3 for beta chain variable domain of TCR clone 154306 (TRBV10-3, TRBJ2-7)
CASKLAVNYGQYF

SEQ ID NO: 308613 - protein, 11 aa, Homo sapiens
  CDR3 for alpha chain variable domain of TCR clone 154307 (TRAV1-2, TRAJ11)
CAVRGYSTLTF

SEQ ID NO: 308614 - protein, 14 aa, Homo sapiens
  CDR3 for beta chain variable domain of TCR clone 154307 (TRBV2, TRBJ2-1)
CASRTGSSYNEQFF

SEQ ID NO: 308615 - protein, 14 aa, Homo sapiens
  CDR3 for alpha chain variable domain of TCR clone 154308 (TRAV27, TRAJ17)
CRRTIRAAGNKLTF

SEQ ID NO: 308616 - protein, 16 aa, Homo sapiens
  CDR3 for beta chain variable domain of TCR clone 154308 (TRBV5-7, TRBJ2-5)
CASTLAPAGGRETQYF

SEQ ID NO: 308617 - protein, 13 aa, Homo sapiens
  CDR3 for alpha chain variable domain of TCR clone 154309 (TRAV12-1, TRAJ29)
CVVKGSGNTPLVF

SEQ ID NO: 308618 - protein, 19 aa, Homo sapiens
  CDR3 for beta chain variable domain of TCR clone 154309 (TRBV19, TRBJ2-5)
CASSIGQVTDFFLGETQYF

SEQ ID NO: 308619 - protein, 15 aa, Homo sapiens
  CDR3 for alpha chain variable domain of TCR clone 154310 (TRAV6, TRAJ4)
CALGGFSVGYNKLIF

SEQ ID NO: 308620 - protein, 13 aa, Homo sapiens
  CDR3 for beta chain variable domain of TCR clone 154310 (TRBV19, TRBJ1-2)
CASSVPGQDGYTF

SEQ ID NO: 308621 - protein, 16 aa, Homo sapiens
  CDR3 for alpha chain variable domain of TCR clone 154311 (TRAV30, TRAJ24)
CGTEIVDADSWGKFQF

SEQ ID NO: 308622 - protein, 13 aa, Homo sapiens
  CDR3 for beta chain variable domain of TCR clone 154311 (TRBV7-2, TRBJ2-2)
CASSSVRAGGLFF

SEQ ID NO: 308623 - protein, 16 aa, Homo sapiens
  CDR3 for alpha chain variable domain of TCR clone 154312 (TRAV12-3, TRAJ53)
CAMSPGSGGSNYKLTF

SEQ ID NO: 308624 - protein, 14 aa, Homo sapiens
  CDR3 for beta chain variable domain of TCR clone 154312 (TRBV12-4, TRBJ1-1)
CASSLRTGGTEAFF

SEQ ID NO: 308625 - protein, 14 aa, Homo sapiens
  CDR3 for alpha chain variable domain of TCR clone 154313 (TRAV2, TRAJ37)
TTVPGSSYTGKLIF

SEQ ID NO: 308626 - protein, 14 aa, Homo sapiens
  CDR3 for beta chain variable domain of TCR clone 154313 (TRBV7-8, TRBJ2-7)
CASSLWQSSYEQYF

SEQ ID NO: 308627 - protein, 14 aa, Homo sapiens
  CDR3 for alpha chain variable domain of TCR clone 154314 (TRAV1-2, TRAJ8)
CAVREDTGFQKLVF

SEQ ID NO: 308628 - protein, 17 aa, Homo sapiens
  CDR3 for beta chain variable domain of TCR clone 154314 (TRBV11-2, TRBJ2-1)
CASSLYPPGVEYNEQFV

SEQ ID NO: 308629 - protein, 17 aa, Homo sapiens
  CDR3 for alpha chain variable domain of TCR clone 154315 (TRAV26-2, TRAJ28)
CILRPLLIVAGSYQLTF

SEQ ID NO: 308630 - protein, 16 aa, Homo sapiens
  CDR3 for beta chain variable domain of TCR clone 154315 (TRBV6-3, TRBJ2-6)
CASSYGPGAGANVLTF

SEQ ID NO: 308631 - protein, 13 aa, Homo sapiens
  CDR3 for alpha chain variable domain of TCR clone 154316 (TRAV3, TRAJ21)
CAVREPDFNKFYF

SEQ ID NO: 308632 - protein, 15 aa, Homo sapiens
  CDR3 for beta chain variable domain of TCR clone 154316 (TRBV9, TRBJ1-6)
CASSVAGTRDSPLHF

SEQ ID NO: 308633 - protein, 13 aa, Homo sapiens
  CDR3 for alpha chain variable domain of TCR clone 154317 (TRAV27, TRAJ41)
CAGEGNSGYALNF

SEQ ID NO: 308634 - protein, 16 aa, Homo sapiens
  CDR3 for beta chain variable domain of TCR clone 154317 (TRBV4-1, TRBJ1-2)
CASSQDAGQVLYGYTF

SEQ ID NO: 308635 - protein, 13 aa, Homo sapiens
  CDR3 for alpha chain variable domain of TCR clone 154318 (TRAV21, TRAJ49)
CAVRPSTGNQFYF

SEQ ID NO: 308636 - protein, 13 aa, Homo sapiens
  CDR3 for beta chain variable domain of TCR clone 154318 (TRBV6-6, TRBJ1-5)
CASRAYQDQHQHF

SEQ ID NO: 308637 - protein, 14 aa, Homo sapiens
  CDR3 for alpha chain variable domain of TCR clone 154319 (TRAV13-1, TRAJ44)
CAAKATGTASKVTF

SEQ ID NO: 308638 - protein, 14 aa, Homo sapiens
  CDR3 for beta chain variable domain of TCR clone 154319 (TRBV19, TRBJ2-2)
CASSTLHRSGELFF

SEQ ID NO: 308639 - protein, 13 aa, Homo sapiens
  CDR3 for alpha chain variable domain of TCR clone 154320 (TRAV1-1, TRAJ23)
CAVVANQGGKLIF

SEQ ID NO: 308640 - protein, 15 aa, Homo sapiens
  CDR3 for beta chain variable domain of TCR clone 154320 (TRBV20-1, TRBJ2-7)
CSARDRVSGMDEQYF

SEQ ID NO: 308641 - protein, 10 aa, Homo sapiens
  CDR3 for alpha chain variable domain of TCR clone 154321 (TRAV16, TRAJ22)
LAMYLRQLTF

SEQ ID NO: 308642 - protein, 15 aa, Homo sapiens
  CDR3 for beta chain variable domain of TCR clone 154321 (TRBV7-9, TRBJ1-6)
CASSSPGRGDSPLHF

SEQ ID NO: 308643 - protein, 15 aa, Homo sapiens
  CDR3 for alpha chain variable domain of TCR clone 154322 (TRAV26-1, TRAJ23)
CIVRVAGYRGGKLIF

SEQ ID NO: 308644 - protein, 18 aa, Homo sapiens
  CDR3 for beta chain variable domain of TCR clone 154322 (TRBV28, TRBJ2-1)
CASSSTSGRANSYNEQFF

SEQ ID NO: 308645 - protein, 16 aa, Homo sapiens
  CDR3 for alpha chain variable domain of TCR clone 154323 (TRAV3, TRAJ10)
CAVRDMRAGGGNKLTF

SEQ ID NO: 308646 - protein, 17 aa, Homo sapiens
  CDR3 for beta chain variable domain of TCR clone 154323 (TRBV28, TRBJ2-5)
CASSTTEGDALQETQYF

SEQ ID NO: 308647 - protein, 12 aa, Homo sapiens
  CDR3 for alpha chain variable domain of TCR clone 154324 (TRAV12-3, TRAJ17)
CAMTLTGNKLTF

SEQ ID NO: 308648 - protein, 16 aa, Homo sapiens
  CDR3 for beta chain variable domain of TCR clone 154324 (TRBV5-1, TRBJ1-2)
CASSPGSNSHNYGYTF

SEQ ID NO: 308649 - protein, 11 aa, Homo sapiens
  CDR3 for alpha chain variable domain of TCR clone 154325 (TRAV12-3, TRAJ43)
RAMSVSNDMRF

SEQ ID NO: 308650 - protein, 16 aa, Homo sapiens
  CDR3 for beta chain variable domain of TCR clone 154325 (TRBV20-1, TRBJ2-1)
CSARDSLGAVYNEQFF

SEQ ID NO: 308651 - protein, 14 aa, Homo sapiens
  CDR3 for alpha chain variable domain of TCR clone 154326 (TRAV1-2, TRAJ16)
CAVNRFSDGQKLHF

SEQ ID NO: 308652 - protein, 17 aa, Homo sapiens
  CDR3 for beta chain variable domain of TCR clone 154326 (TRBV15, TRBJ1-2)
CATSGREIDVVNYGYTF

SEQ ID NO: 308653 - protein, 11 aa, Homo sapiens
  CDR3 for alpha chain variable domain of TCR clone 154327 (TRAV17, TRAJ43)
CATPRSNDMRF

SEQ ID NO: 308654 - protein, 13 aa, Homo sapiens
  CDR3 for beta chain variable domain of TCR clone 154327 (TRBV7-2, TRBJ2-7)
CASSSPSGSEQYF

SEQ ID NO: 308655 - protein, 15 aa, Homo sapiens
  CDR3 for alpha chain variable domain of TCR clone 154328 (TRAV12-3, TRAJ6)
CAMSATTGGSYIPTF

SEQ ID NO: 308656 - protein, 15 aa, Homo sapiens
  CDR3 for beta chain variable domain of TCR clone 154328 (TRBV7-9, TRBJ2-7)
CASSLALAEAYEQYF

SEQ ID NO: 308657 - protein, 17 aa, Homo sapiens
  CDR3 for alpha chain variable domain of TCR clone 154329 (TRAV12-3, TRAJ6)
CAMTARGGAGGSYIPTF

SEQ ID NO: 308658 - protein, 12 aa, Homo sapiens
  CDR3 for beta chain variable domain of TCR clone 154329 (TRBV12-4, TRBJ2-3)
CASSTLPDTQYF

SEQ ID NO: 308659 - protein, 17 aa, Homo sapiens
  CDR3 for alpha chain variable domain of TCR clone 154330 (TRAV38-1, TRAJ45)
CAFMKHYMGGGADGLTF

SEQ ID NO: 308660 - protein, 17 aa, Homo sapiens
  CDR3 for beta chain variable domain of TCR clone 154330 (TRBV18, TRBJ2-1)
CASSPRVAGGSYNEQFF

SEQ ID NO: 308661 - protein, 12 aa, Homo sapiens
  CDR3 for alpha chain variable domain of TCR clone 154331 (TRAV12-3, TRAJ40)
CAMSSGTYKYIF

SEQ ID NO: 308662 - protein, 14 aa, Homo sapiens
  CDR3 for beta chain variable domain of TCR clone 154331 (TRBV18, TRBJ2-7)
CASSPRGGAYEQYF

SEQ ID NO: 308663 - protein, 12 aa, Homo sapiens
  CDR3 for alpha chain variable domain of TCR clone 154332 (TRAV25, TRAJ11)
CAGYSGYSTLTF

SEQ ID NO: 308664 - protein, 14 aa, Homo sapiens
  CDR3 for beta chain variable domain of TCR clone 154332 (TRBV25-1, TRBJ1-1)
CASTHLGGNTEAFF

SEQ ID NO: 308665 - protein, 15 aa, Homo sapiens
  CDR3 for alpha chain variable domain of TCR clone 154333 (TRAV12-3, TRAJ6)
CAMSATTGGSYIPTF

SEQ ID NO: 308666 - protein, 15 aa, Homo sapiens
  CDR3 for beta chain variable domain of TCR clone 154333 (TRBV7-2, TRBJ2-5)
CASSGILSGAETQYF

SEQ ID NO: 308667 - protein, 13 aa, Homo sapiens
  CDR3 for alpha chain variable domain of TCR clone 154334 (TRAV12-3, TRAJ33)
CAMSVNSNYKLIW

SEQ ID NO: 308668 - protein, 13 aa, Homo sapiens
  CDR3 for beta chain variable domain of TCR clone 154334 (TRBV7-2, TRBJ2-2)
CASSLAVAGELFF

SEQ ID NO: 308669 - protein, 12 aa, Homo sapiens
  CDR3 for alpha chain variable domain of TCR clone 154335 (TRAV12-3, TRAJ17)
CAMTLTGNKLTL

SEQ ID NO: 308670 - protein, 14 aa, Homo sapiens
  CDR3 for beta chain variable domain of TCR clone 154335 (TRBV5-7, TRBJ2-1)
CASSLGDSYNEQFF

SEQ ID NO: 308671 - protein, 12 aa, Homo sapiens
  CDR3 for alpha chain variable domain of TCR clone 154336 (TRAV8-1, TRAJ28)
CRLWGWEYQLTF

SEQ ID NO: 308672 - protein, 14 aa, Homo sapiens
  CDR3 for beta chain variable domain of TCR clone 154336 (TRBV7-2, TRBJ2-2)
CASRGQGAAGELFF

SEQ ID NO: 308673 - protein, 14 aa, Homo sapiens
  CDR3 for alpha chain variable domain of TCR clone 154337 (TRAV12-1, TRAJ12)
CVVTRMDSSYKLIF

SEQ ID NO: 308674 - protein, 13 aa, Homo sapiens
  CDR3 for beta chain variable domain of TCR clone 154337 (TRBV12-4, TRBJ1-2)
CASSLRQGKGYTF

SEQ ID NO: 308675 - protein, 16 aa, Homo sapiens
  CDR3 for alpha chain variable domain of TCR clone 154338 (TRAV12-2, TRAJ6)
CAVRIQASGGSYIPTF

SEQ ID NO: 308676 - protein, 14 aa, Homo sapiens
  CDR3 for beta chain variable domain of TCR clone 154338 (TRBV2, TRBJ2-2)
CASSERRFTEELFF

SEQ ID NO: 308677 - protein, 16 aa, Homo sapiens
  CDR3 for alpha chain variable domain of TCR clone 154339 (TRAV3, TRAJ10)
CAVRDMRAGGGNKLTF

SEQ ID NO: 308678 - protein, 15 aa, Homo sapiens
  CDR3 for beta chain variable domain of TCR clone 154339 (TRBV7-2, TRBJ2-3)
CASSLVVRGPDTQYF

SEQ ID NO: 308679 - protein, 13 aa, Homo sapiens
  CDR3 for alpha chain variable domain of TCR clone 154340 (TRAV27, TRAJ17)
CAGAATAGNKLAF

SEQ ID NO: 308680 - protein, 15 aa, Homo sapiens
  CDR3 for beta chain variable domain of TCR clone 154340 (TRBV5-1, TRBJ2-3)
CASRNQAGSTDTQYF

SEQ ID NO: 308681 - protein, 16 aa, Homo sapiens
  CDR3 for alpha chain variable domain of TCR clone 154341 (TRAV4, TRAJ9)
CLVGDPNRPGGFKTIF

SEQ ID NO: 308682 - protein, 16 aa, Homo sapiens
  CDR3 for beta chain variable domain of TCR clone 154341 (TRBV28, TRBJ1-4)
CASSPPYRGRSDKLSF

SEQ ID NO: 308683 - protein, 12 aa, Homo sapiens
  CDR3 for alpha chain variable domain of TCR clone 154342 (TRAV13-2, TRAJ47)
CAEALYGYKLVF

SEQ ID NO: 308684 - protein, 14 aa, Homo sapiens
  CDR3 for beta chain variable domain of TCR clone 154342 (TRBV11-2, TRBJ2-3)
CASSRLARTDTQYF

SEQ ID NO: 308685 - protein, 17 aa, Homo sapiens
  CDR3 for alpha chain variable domain of TCR clone 154343 (TRAV3, TRAJ6)
CAVSRRTDTGGSYIPTF

SEQ ID NO: 308686 - protein, 14 aa, Homo sapiens
  CDR3 for beta chain variable domain of TCR clone 154343 (TRBV4-1, TRBJ2-2)
CASSQAVNTGELFF

SEQ ID NO: 308687 - protein, 14 aa, Homo sapiens
  CDR3 for alpha chain variable domain of TCR clone 154344 (TRAV1-2, TRAJ16)
CAVTRFSDGQKLLF

SEQ ID NO: 308688 - protein, 15 aa, Homo sapiens
  CDR3 for beta chain variable domain of TCR clone 154344 (TRBV9, TRBJ1-6)
CASSVAGTGDAPLHF

SEQ ID NO: 308689 - protein, 14 aa, Homo sapiens
  CDR3 for alpha chain variable domain of TCR clone 154345 (TRAV8-6, TRAJ49)
CAVSDLGTGNQFYF

SEQ ID NO: 308690 - protein, 16 aa, Homo sapiens
  CDR3 for beta chain variable domain of TCR clone 154345 (TRBV24-1, TRBJ2-1)
CATSGVAGANYNEQFF

SEQ ID NO: 308691 - protein, 15 aa, Homo sapiens
  CDR3 for alpha chain variable domain of TCR clone 154346 (TRAV12-2, TRAJ32)
CAVNHYGGATNKLIF

SEQ ID NO: 308692 - protein, 13 aa, Homo sapiens
  CDR3 for beta chain variable domain of TCR clone 154346 (TRBV7-9, TRBJ1-2)
CGSSLKQNYGYTF

SEQ ID NO: 308693 - protein, 12 aa, Homo sapiens
  CDR3 for alpha chain variable domain of TCR clone 154347 (TRAV8-3, TRAJ20)
CAVGADDYKLSF

SEQ ID NO: 308694 - protein, 16 aa, Homo sapiens
  CDR3 for beta chain variable domain of TCR clone 154347 (TRBV19, TRBJ2-2)
CASRAPGTGATGELFF

SEQ ID NO: 308695 - protein, 14 aa, Homo sapiens
  CDR3 for alpha chain variable domain of TCR clone 154348 (TRAV35, TRAJ33)
CAGSSQGSNYQLIW

SEQ ID NO: 308696 - protein, 15 aa, Homo sapiens
  CDR3 for beta chain variable domain of TCR clone 154348 (TRBV20-1, TRBJ2-7)
CSAESGTSGAYEQNF

SEQ ID NO: 308697 - protein, 11 aa, Homo sapiens
  CDR3 for alpha chain variable domain of TCR clone 154349 (TRAV12-3, TRAJ16)
CAIRDGQKLLF

SEQ ID NO: 308698 - protein, 14 aa, Homo sapiens
  CDR3 for beta chain variable domain of TCR clone 154349 (TRBV19, TRBJ2-1)
CASPTFVLSGEQFF

SEQ ID NO: 308699 - protein, 12 aa, Homo sapiens
  CDR3 for alpha chain variable domain of TCR clone 154350 (TRAV13-1, TRAJ21)
CAAKEGFNKFYF

SEQ ID NO: 308700 - protein, 13 aa, Homo sapiens
  CDR3 for beta chain variable domain of TCR clone 154350 (TRBV11-2, TRBJ1-2)
CASSLDSPSGYTF

SEQ ID NO: 308701 - protein, 12 aa, Homo sapiens
  CDR3 for alpha chain variable domain of TCR clone 154351 (TRAV13-2, TRAJ23)
CAERHRGGKLIF

SEQ ID NO: 308702 - protein, 15 aa, Homo sapiens
  CDR3 for beta chain variable domain of TCR clone 154351 (TRBV7-9, TRBJ1-2)
CASSSFGDTNYGYTF

SEQ ID NO: 308703 - protein, 14 aa, Homo sapiens
  CDR3 for alpha chain variable domain of TCR clone 154352 (TRAV2, TRAJ29)
CAVTPPSGNTPLVF

SEQ ID NO: 308704 - protein, 15 aa, Homo sapiens
  CDR3 for beta chain variable domain of TCR clone 154352 (TRBV15, TRBJ2-2)
CATSRGLADTGELFF

SEQ ID NO: 308705 - protein, 14 aa, Homo sapiens
  CDR3 for alpha chain variable domain of TCR clone 154353 (TRAV27, TRAJ22)
CAGVSVLGKRQLTF

SEQ ID NO: 308706 - protein, 14 aa, Homo sapiens
  CDR3 for beta chain variable domain of TCR clone 154353 (TRBV7-3, TRBJ1-1)
CASSLKGGNTEAFF

SEQ ID NO: 308707 - protein, 13 aa, Homo sapiens
  CDR3 for alpha chain variable domain of TCR clone 154354 (TRAV13-1, TRAJ5)
CAAEHTGRRALTF

SEQ ID NO: 308708 - protein, 13 aa, Homo sapiens
  CDR3 for beta chain variable domain of TCR clone 154354 (TRBV20-1, TRBJ1-1)
CSARGGGNTEAFF

SEQ ID NO: 308709 - protein, 14 aa, Homo sapiens
  CDR3 for alpha chain variable domain of TCR clone 154355 (TRAV14/DV4, TRAJ42)
CPRGSLSSQGNLIF

SEQ ID NO: 308710 - protein, 18 aa, Homo sapiens
  CDR3 for beta chain variable domain of TCR clone 154355 (TRBV20-1, TRBJ2-3)
CSASGLAGGPGTTDTQYF

SEQ ID NO: 308711 - protein, 14 aa, Homo sapiens
  CDR3 for alpha chain variable domain of TCR clone 154356 (TRAV12-2, TRAJ11)
CAVNRESGYSTLTF

SEQ ID NO: 308712 - protein, 10 aa, Homo sapiens
  CDR3 for beta chain variable domain of TCR clone 154356 (TRBV20-1, TRBJ2-5)
CSARFKTQYF

SEQ ID NO: 308713 - protein, 11 aa, Homo sapiens
  CDR3 for alpha chain variable domain of TCR clone 154357 (TRAV8-1, TRAJ8)
CAMTGFQKPVF

SEQ ID NO: 308714 - protein, 14 aa, Homo sapiens
  CDR3 for beta chain variable domain of TCR clone 154357 (TRBV5-4, TRBJ1-2)
CASTRQTGNYGYTF

SEQ ID NO: 308715 - protein, 16 aa, Homo sapiens
  CDR3 for alpha chain variable domain of TCR clone 154358 (TRAV12-2, TRAJ50)
CAVGTATKTSYDKVVF

SEQ ID NO: 308716 - protein, 12 aa, Homo sapiens
  CDR3 for beta chain variable domain of TCR clone 154358 (TRBV12-4, TRBJ1-5)
CASSLGGQPQHF

SEQ ID NO: 308717 - protein, 10 aa, Homo sapiens
  CDR3 for alpha chain variable domain of TCR clone 154359 (TRAV25, TRAJ52)
CAGTSGGTSY

SEQ ID NO: 308718 - protein, 13 aa, Homo sapiens
  CDR3 for beta chain variable domain of TCR clone 154359 (TRBV7-7, TRBJ2-3)
CASSLSRADTQYF

SEQ ID NO: 308719 - protein, 11 aa, Homo sapiens
  CDR3 for alpha chain variable domain of TCR clone 154360 (TRAV4, TRAJ28)
CLVGDNRAETM

SEQ ID NO: 308720 - protein, 13 aa, Homo sapiens
  CDR3 for beta chain variable domain of TCR clone 154360 (TRBV20-1, TRBJ2-7)
CSATHTSGYEQYF

SEQ ID NO: 308721 - protein, 14 aa, Homo sapiens
  CDR3 for alpha chain variable domain of TCR clone 154361 (TRAV12-2, TRAJ40)
CAVKIHSGTYKYNF

SEQ ID NO: 308722 - protein, 14 aa, Homo sapiens
  CDR3 for beta chain variable domain of TCR clone 154361 (TRBV20-1, TRBJ1-1)
CSAQTRIGGTEAFF

SEQ ID NO: 308723 - protein, 17 aa, Homo sapiens
  CDR3 for alpha chain variable domain of TCR clone 154362 (TRAV12-1, TRAJ32)
CVVNMQGYGGATNKLIL

SEQ ID NO: 308724 - protein, 13 aa, Homo sapiens
  CDR3 for beta chain variable domain of TCR clone 154362 (TRBV6-6, TRBJ2-1)
CASSLHQGDEQFF

SEQ ID NO: 308725 - protein, 11 aa, Homo sapiens
  CDR3 for alpha chain variable domain of TCR clone 154363 (TRAV13-1, TRAJ43)
CAAHNNNDMRF

SEQ ID NO: 308726 - protein, 15 aa, Homo sapiens
  CDR3 for beta chain variable domain of TCR clone 154363 (TRBV6-1, TRBJ2-2)
CTSSRLRGDTGELFF

SEQ ID NO: 308727 - protein, 14 aa, Homo sapiens
  CDR3 for alpha chain variable domain of TCR clone 154364 (TRAV38-2/DV8, TRAJ30)
CAYRTLNRDDKIIF

SEQ ID NO: 308728 - protein, 14 aa, Homo sapiens
  CDR3 for beta chain variable domain of TCR clone 154364 (TRBV19, TRBJ2-1)
CASPTFVLSGEQFF

SEQ ID NO: 308729 - protein, 17 aa, Homo sapiens
  CDR3 for alpha chain variable domain of TCR clone 154365 (TRAV8-6, TRAJ58)
CAVSSWVGETSGSRLTF

SEQ ID NO: 308730 - protein, 11 aa, Homo sapiens
  CDR3 for beta chain variable domain of TCR clone 154365 (TRBV7-9, TRBJ2-3)
CASSGPDTQYF

SEQ ID NO: 308731 - protein, 15 aa, Homo sapiens
  CDR3 for alpha chain variable domain of TCR clone 154366 (TRAV12-2, TRAJ43)
CAFDMRFGAGTRLTV

SEQ ID NO: 308732 - protein, 16 aa, Homo sapiens
  CDR3 for beta chain variable domain of TCR clone 154366 (TRBV4-3, TRBJ2-2)
CASSHLQGSGTGELFF

SEQ ID NO: 308733 - protein, 13 aa, Homo sapiens
  CDR3 for alpha chain variable domain of TCR clone 154367 (TRAV35, TRAJ36)
CAGPRIGANNLFF

SEQ ID NO: 308734 - protein, 15 aa, Homo sapiens
  CDR3 for beta chain variable domain of TCR clone 154367 (TRBV20-1, TRBJ2-7)
CSASDRVSGMDEQYF

SEQ ID NO: 308735 - protein, 14 aa, Homo sapiens
  CDR3 for alpha chain variable domain of TCR clone 154368 (TRAV2, TRAJ9)
CAVEDRSGGFKTIF

SEQ ID NO: 308736 - protein, 14 aa, Homo sapiens
  CDR3 for beta chain variable domain of TCR clone 154368 (TRBV7-2, TRBJ2-5)
CASSTGGELKTQYF

SEQ ID NO: 308737 - protein, 16 aa, Homo sapiens
  CDR3 for alpha chain variable domain of TCR clone 154369 (TRAV12-3, TRAJ53)
CAMSPGSGGSIYKLTF

SEQ ID NO: 308738 - protein, 15 aa, Homo sapiens
  CDR3 for beta chain variable domain of TCR clone 154369 (TRBV25-1, TRBJ1-4)
CASSKRIATNEKLFF

SEQ ID NO: 308739 - protein, 15 aa, Homo sapiens
  CDR3 for alpha chain variable domain of TCR clone 154370 (TRAV26-1, TRAJ44)
CIVRANTGTASKLTF

SEQ ID NO: 308740 - protein, 15 aa, Homo sapiens
  CDR3 for beta chain variable domain of TCR clone 154370 (TRBV15, TRBJ1-5)
CATSREQGGNQHQHF

SEQ ID NO: 308741 - protein, 12 aa, Homo sapiens
  CDR3 for alpha chain variable domain of TCR clone 154371 (TRAV35, TRAJ49)
CAGWNTGNQFYF

SEQ ID NO: 308742 - protein, 12 aa, Homo sapiens
  CDR3 for beta chain variable domain of TCR clone 154371 (TRBV7-9, TRBJ2-7)
CASSLEGYEQYF

SEQ ID NO: 308743 - protein, 10 aa, Homo sapiens
  CDR3 for alpha chain variable domain of TCR clone 154372 (TRAV12-1, TRAJ20)
FVVNPRKLSF

SEQ ID NO: 308744 - protein, 15 aa, Homo sapiens
  CDR3 for beta chain variable domain of TCR clone 154372 (TRBV5-1, TRBJ2-1)
CASSPPRAPYNEQFF

SEQ ID NO: 308745 - protein, 12 aa, Homo sapiens
  CDR3 for alpha chain variable domain of TCR clone 154373 (TRAV13-1, TRAJ21)
CAAKEGFNKFYF

SEQ ID NO: 308746 - protein, 20 aa, Homo sapiens
  CDR3 for beta chain variable domain of TCR clone 154373 (TRBV28, TRBJ2-1)
CASTPIGPSPGLAGGNEQFF

SEQ ID NO: 308747 - protein, 15 aa, Homo sapiens
  CDR3 for alpha chain variable domain of TCR clone 154374 (TRAV26-1, TRAJ42)
CIVRVKGGSQGNLIF

SEQ ID NO: 308748 - protein, 14 aa, Homo sapiens
  CDR3 for beta chain variable domain of TCR clone 154374 (TRBV19, TRBJ2-1)
CASPTFVLGGEQFF

SEQ ID NO: 308749 - protein, 14 aa, Homo sapiens
  CDR3 for alpha chain variable domain of TCR clone 154375 (TRAV12-3, TRAJ9)
CAMSPNTGGFKTIF

SEQ ID NO: 308750 - protein, 14 aa, Homo sapiens
  CDR3 for beta chain variable domain of TCR clone 154375 (TRBV5-1, TRBJ2-3)
CASSASGGKDTQYF

SEQ ID NO: 308751 - protein, 15 aa, Homo sapiens
  CDR3 for alpha chain variable domain of TCR clone 154376 (TRAV26-1, TRAJ29)
CIVRVEGSGNTPLVF

SEQ ID NO: 308752 - protein, 13 aa, Homo sapiens
  CDR3 for beta chain variable domain of TCR clone 154376 (TRBV18, TRBJ2-5)
CSSPGVSQETQYF

SEQ ID NO: 308753 - protein, 14 aa, Homo sapiens
  CDR3 for alpha chain variable domain of TCR clone 154377 (TRAV8-3, TRAJ4)
CAVGAAGGYNKLIF

SEQ ID NO: 308754 - protein, 13 aa, Homo sapiens
  CDR3 for beta chain variable domain of TCR clone 154377 (TRBV19, TRBJ2-1)
CATSRGVYNEQFF

SEQ ID NO: 308755 - protein, 16 aa, Homo sapiens
  CDR3 for alpha chain variable domain of TCR clone 154378 (TRAV30, TRAJ24)
CGTEIVGADSWGKFQF

SEQ ID NO: 308756 - protein, 14 aa, Homo sapiens
  CDR3 for beta chain variable domain of TCR clone 154378 (TRBV12-5, TRBJ2-5)
CARGSRTHQETQYF

SEQ ID NO: 308757 - protein, 15 aa, Homo sapiens
  CDR3 for alpha chain variable domain of TCR clone 154379 (TRAV8-3, TRAJ11)
CAGVLLNSGYSTLTF

SEQ ID NO: 308758 - protein, 16 aa, Homo sapiens
  CDR3 for beta chain variable domain of TCR clone 154379 (TRBV7-9, TRBJ1-2)
CASSLGFSSGEDGYTF

SEQ ID NO: 308759 - protein, 11 aa, Homo sapiens
  CDR3 for alpha chain variable domain of TCR clone 154380 (TRAV1-2, TRAJ20)
CAVANDYKLSF

SEQ ID NO: 308760 - protein, 15 aa, Homo sapiens
  CDR3 for beta chain variable domain of TCR clone 154380 (TRBV3-1, TRBJ2-1)
CASSLSGHSYNEQFF

SEQ ID NO: 308761 - protein, 12 aa, Homo sapiens
  CDR3 for alpha chain variable domain of TCR clone 154381 (TRAV3, TRAJ31)
CAAQRANARLMF

SEQ ID NO: 308762 - protein, 17 aa, Homo sapiens
  CDR3 for beta chain variable domain of TCR clone 154381 (TRBV7-8, TRBJ1-2)
CASSLRPLQGHLYGYTF

SEQ ID NO: 308763 - protein, 14 aa, Homo sapiens
  CDR3 for alpha chain variable domain of TCR clone 154382 (TRAV8-2, TRAJ11)
CVGSAKSGYSTLTF

SEQ ID NO: 308764 - protein, 16 aa, Homo sapiens
  CDR3 for beta chain variable domain of TCR clone 154382 (TRBV28, TRBJ2-1)
CASSSPEYPRDNEQFF

SEQ ID NO: 308765 - protein, 16 aa, Homo sapiens
  CDR3 for alpha chain variable domain of TCR clone 154383 (TRAV3, TRAJ37)
CAVRPHGSGNTGILIF

SEQ ID NO: 308766 - protein, 14 aa, Homo sapiens
  CDR3 for beta chain variable domain of TCR clone 154383 (TRBV20-1, TRBJ2-1)
CSARGGSSYNEQFF

SEQ ID NO: 308767 - protein, 11 aa, Homo sapiens
  CDR3 for alpha chain variable domain of TCR clone 154384 (TRAV2, TRAJ13)
CASGGYQEVTF

SEQ ID NO: 308768 - protein, 18 aa, Homo sapiens
  CDR3 for beta chain variable domain of TCR clone 154384 (TRBV19, TRBJ2-6)
CASIGPTSGGSGANVLTF

SEQ ID NO: 308769 - protein, 12 aa, Homo sapiens
  CDR3 for alpha chain variable domain of TCR clone 154385 (TRAV29/DV5, TRAJ15)
CPSNQAGTALIF

SEQ ID NO: 308770 - protein, 15 aa, Homo sapiens
  CDR3 for beta chain variable domain of TCR clone 154385 (TRBV11-2, TRBJ2-2)
CASSSDRVNAGELFF

SEQ ID NO: 308771 - protein, 12 aa, Homo sapiens
  CDR3 for alpha chain variable domain of TCR clone 154386 (TRAV4, TRAJ26)
CLVGDYGQNFVF

SEQ ID NO: 308772 - protein, 14 aa, Homo sapiens
  CDR3 for beta chain variable domain of TCR clone 154386 (TRBV3-1, TRBJ2-5)
CASCQGPDQETQYF

SEQ ID NO: 308773 - protein, 15 aa, Homo sapiens
  CDR3 for alpha chain variable domain of TCR clone 154387 (TRAV9-2, TRAJ39)
CALTPLNNAGNMLTF

SEQ ID NO: 308774 - protein, 13 aa, Homo sapiens
  CDR3 for beta chain variable domain of TCR clone 154387 (TRBV19, TRBJ2-2)
CASSIWSTGELFF

SEQ ID NO: 308775 - protein, 12 aa, Homo sapiens
  CDR3 for alpha chain variable domain of TCR clone 154388 (TRAV25, TRAJ11)
CAGASGYSTLTF

SEQ ID NO: 308776 - protein, 14 aa, Homo sapiens
  CDR3 for beta chain variable domain of TCR clone 154388 (TRBV5-8, TRBJ2-3)
CASSLVQGTDTQYF

SEQ ID NO: 308777 - protein, 15 aa, Homo sapiens
  CDR3 for alpha chain variable domain of TCR clone 154389 (TRAV20, TRAJ53)
CAVQASGGSNYKLTF

SEQ ID NO: 308778 - protein, 15 aa, Homo sapiens
  CDR3 for beta chain variable domain of TCR clone 154389 (TRBV9, TRBJ2-1)
CASSRAGSSYNEQFF

SEQ ID NO: 308779 - protein, 13 aa, Homo sapiens
  CDR3 for alpha chain variable domain of TCR clone 154390 (TRAV20, TRAJ9)
CAVPDTGGFKTTF

SEQ ID NO: 308780 - protein, 14 aa, Homo sapiens
  CDR3 for beta chain variable domain of TCR clone 154390 (TRBV7-2, TRBJ2-5)
CASSPRGSSETQYF

SEQ ID NO: 308781 - protein, 14 aa, Homo sapiens
  CDR3 for alpha chain variable domain of TCR clone 154391 (TRAV12-1, TRAJ13)
CVVIDSGGYQKVTF

SEQ ID NO: 308782 - protein, 14 aa, Homo sapiens
  CDR3 for beta chain variable domain of TCR clone 154391 (TRBV7-2, TRBJ2-7)
CASSPKTSFYEQYF

SEQ ID NO: 308783 - protein, 13 aa, Homo sapiens
  CDR3 for alpha chain variable domain of TCR clone 154392 (TRAV21, TRAJ45)
CAVMGGGADGLTF

SEQ ID NO: 308784 - protein, 14 aa, Homo sapiens
  CDR3 for beta chain variable domain of TCR clone 154392 (TRBV7-6, TRBJ2-3)
CASSLGTVTDTQYF

SEQ ID NO: 308785 - protein, 13 aa, Homo sapiens
  CDR3 for alpha chain variable domain of TCR clone 154393 (TRAV20, TRAJ54)
CAVQAGGAQKLVF

SEQ ID NO: 308786 - protein, 14 aa, Homo sapiens
  CDR3 for beta chain variable domain of TCR clone 154393 (TRBV20-1, TRBJ2-7)
CSAKTGAGGYEQYF

SEQ ID NO: 308787 - protein, 11 aa, Homo sapiens
  CDR3 for alpha chain variable domain of TCR clone 154394 (TRAV13-2, TRAJ20)
CADYNDYKLSF

SEQ ID NO: 308788 - protein, 14 aa, Homo sapiens
  CDR3 for beta chain variable domain of TCR clone 154394 (TRBV11-2, TRBJ1-5)
CASSLDRGRQPQHF

SEQ ID NO: 308789 - protein, 14 aa, Homo sapiens
  CDR3 for alpha chain variable domain of TCR clone 154395 (TRAV13-1, TRAJ6)
CAASKSGGSYIPTF

SEQ ID NO: 308790 - protein, 17 aa, Homo sapiens
  CDR3 for beta chain variable domain of TCR clone 154395 (TRBV7-3, TRBJ2-3)
CASSLMKRMRGADTQYF

SEQ ID NO: 308791 - protein, 12 aa, Homo sapiens
  CDR3 for alpha chain variable domain of TCR clone 154396 (TRAV12-3, TRAJ17)
CAMTLTGNKLTF

SEQ ID NO: 308792 - protein, 16 aa, Homo sapiens
  CDR3 for beta chain variable domain of TCR clone 154396 (TRBV12-4, TRBJ2-7)
CASRSTGTGPSYEQYF

SEQ ID NO: 308793 - protein, 14 aa, Homo sapiens
  CDR3 for alpha chain variable domain of TCR clone 154397 (TRAV12-1, TRAJ17)
CVVNYKAAGNKLTF

SEQ ID NO: 308794 - protein, 15 aa, Homo sapiens
  CDR3 for beta chain variable domain of TCR clone 154397 (TRBV4-1, TRBJ1-1)
CASSQEWGHYTEAFF

SEQ ID NO: 308795 - protein, 12 aa, Homo sapiens
  CDR3 for alpha chain variable domain of TCR clone 154398 (TRAV30, TRAJ43)
CGTEERGNDMRF

SEQ ID NO: 308796 - protein, 13 aa, Homo sapiens
  CDR3 for beta chain variable domain of TCR clone 154398 (TRBV27, TRBJ2-7)
CASSFSQGYEQFF

SEQ ID NO: 308797 - protein, 16 aa, Homo sapiens
  CDR3 for alpha chain variable domain of TCR clone 154399 (TRAV30, TRAJ24)
FGTEIVDADSWGKFQF

SEQ ID NO: 308798 - protein, 12 aa, Homo sapiens
  CDR3 for beta chain variable domain of TCR clone 154399 (TRBV11-2, TRBJ2-2)
CASSLGGGELFF

SEQ ID NO: 308799 - protein, 13 aa, Homo sapiens
  CDR3 for alpha chain variable domain of TCR clone 154400 (TRAV35, TRAJ43)
CAGYPYNNNDMRF

SEQ ID NO: 308800 - protein, 16 aa, Homo sapiens
  CDR3 for beta chain variable domain of TCR clone 154400 (TRBV20-1, TRBJ2-1)
CSARDRLKSLYNEQFF

SEQ ID NO: 308801 - protein, 13 aa, Homo sapiens
  CDR3 for alpha chain variable domain of TCR clone 154401 (TRAV16, TRAJ34)
CALTGYNTDNLIF

SEQ ID NO: 308802 - protein, 13 aa, Homo sapiens
  CDR3 for beta chain variable domain of TCR clone 154401 (TRBV6-1, TRBJ2-1)
CASREDGGHEQFF

SEQ ID NO: 308803 - protein, 16 aa, Homo sapiens
  CDR3 for alpha chain variable domain of TCR clone 154402 (TRAV30, TRAJ24)
FGTEIVDADSWGKFQF

SEQ ID NO: 308804 - protein, 17 aa, Homo sapiens
  CDR3 for beta chain variable domain of TCR clone 154402 (TRBV20-1, TRBJ2-1)
CSARDPLAGVWDNEQFF

SEQ ID NO: 308805 - protein, 11 aa, Homo sapiens
  CDR3 for alpha chain variable domain of TCR clone 154403 (TRAV21, TRAJ48)
CAVDGNEKLTF

SEQ ID NO: 308806 - protein, 13 aa, Homo sapiens
  CDR3 for beta chain variable domain of TCR clone 154403 (TRBV28, TRBJ2-7)
CASTPGLAGEQYF

SEQ ID NO: 308807 - protein, 11 aa, Homo sapiens
  CDR3 for alpha chain variable domain of TCR clone 154404 (TRAV12-3, TRAJ27)
CAMANAGKSTF

SEQ ID NO: 308808 - protein, 12 aa, Homo sapiens
  CDR3 for beta chain variable domain of TCR clone 154404 (TRBV12-4, TRBJ2-3)
CASSTLPDTQYL

SEQ ID NO: 308809 - protein, 20 aa, Homo sapiens
  CDR3 for alpha chain variable domain of TCR clone 154405 (TRAV27, TRAJ49)
TAAQPGDTGLYLCTGNQFYF

SEQ ID NO: 308810 - protein, 15 aa, Homo sapiens
  CDR3 for beta chain variable domain of TCR clone 154405 (TRBV6-6, TRBJ2-7)
CASSYSYGGSYEQYF

SEQ ID NO: 308811 - protein, 15 aa, Homo sapiens
  CDR3 for alpha chain variable domain of TCR clone 154406 (TRAV3, TRAJ32)
CAVSSYVGATNKPIF

SEQ ID NO: 308812 - protein, 13 aa, Homo sapiens
  CDR3 for beta chain variable domain of TCR clone 154406 (TRBV20-1, TRBJ2-7)
CSARPSTNYEQYF

SEQ ID NO: 308813 - protein, 14 aa, Homo sapiens
  CDR3 for alpha chain variable domain of TCR clone 154407 (TRAV1-2, TRAJ8)
CAVREDTGFQKLVF

SEQ ID NO: 308814 - protein, 14 aa, Homo sapiens
  CDR3 for beta chain variable domain of TCR clone 154407 (TRBV11-2, TRBJ2-7)
CASSPSTTSYEQYF

SEQ ID NO: 308815 - protein, 12 aa, Homo sapiens
  CDR3 for alpha chain variable domain of TCR clone 154408 (TRAV8-2, TRAJ45)
DAAEYSADGLTF

SEQ ID NO: 308816 - protein, 13 aa, Homo sapiens
  CDR3 for beta chain variable domain of TCR clone 154408 (TRBV7-3, TRBJ2-1)
CASSPVAYNEQFC

SEQ ID NO: 308817 - protein, 14 aa, Homo sapiens
  CDR3 for alpha chain variable domain of TCR clone 154409 (TRAV4, TRAJ9)
CLVGSGTGGFKTIF

SEQ ID NO: 308818 - protein, 15 aa, Homo sapiens
  CDR3 for beta chain variable domain of TCR clone 154409 (TRBV7-9, TRBJ2-2)
CASGPLDTFPGELFF

SEQ ID NO: 308819 - protein, 15 aa, Homo sapiens
  CDR3 for alpha chain variable domain of TCR clone 154410 (TRAV38-1, TRAJ37)
CAFIHVSGNTGKLIF

SEQ ID NO: 308820 - protein, 12 aa, Homo sapiens
  CDR3 for beta chain variable domain of TCR clone 154410 (TRBV7-9, TRBJ2-7)
CASSVGSYEQYF

SEQ ID NO: 308821 - protein, 14 aa, Homo sapiens
  CDR3 for alpha chain variable domain of TCR clone 154411 (TRAV8-3, TRAJ4)
CAGGASGGYNKLIF

SEQ ID NO: 308822 - protein, 17 aa, Homo sapiens
  CDR3 for beta chain variable domain of TCR clone 154411 (TRBV7-6, TRBJ2-3)
CASSLSTGRVASNTQYF

SEQ ID NO: 308823 - protein, 14 aa, Homo sapiens
  CDR3 for alpha chain variable domain of TCR clone 154412 (TRAV21, TRAJ15)
CRSYHNQAGTALIF

SEQ ID NO: 308824 - protein, 13 aa, Homo sapiens
  CDR3 for beta chain variable domain of TCR clone 154412 (TRBV20-1, TRBJ1-1)
CSARGGGNTEAFF

SEQ ID NO: 308825 - protein, 16 aa, Homo sapiens
  CDR3 for alpha chain variable domain of TCR clone 154413 (TRAV14/DV4, TRAJ54)
CAMREGRIQGAQKLVF

SEQ ID NO: 308826 - protein, 16 aa, Homo sapiens
  CDR3 for beta chain variable domain of TCR clone 154413 (TRBV11-2, TRBJ2-1)
CASSPRLAGVYNEQFF

SEQ ID NO: 308827 - protein, 13 aa, Homo sapiens
  CDR3 for alpha chain variable domain of TCR clone 154414 (TRAV38-1, TRAJ7)
CAFMMDGNNRLAF

SEQ ID NO: 308828 - protein, 16 aa, Homo sapiens
  CDR3 for beta chain variable domain of TCR clone 154414 (TRBV2, TRBJ2-1)
CASRSPAGGKYNEQFF

SEQ ID NO: 308829 - protein, 14 aa, Homo sapiens
  CDR3 for alpha chain variable domain of TCR clone 154415 (TRAV26-1, TRAJ38)
CIADNAGNNRKLNW

SEQ ID NO: 308830 - protein, 14 aa, Homo sapiens
  CDR3 for beta chain variable domain of TCR clone 154415 (TRBV4-1, TRBJ2-2)
CASSQAVNTGELFF

SEQ ID NO: 308831 - protein, 15 aa, Homo sapiens
  CDR3 for alpha chain variable domain of TCR clone 154416 (TRAV17, TRAJ16)
CATALRFSDGQKLLF

SEQ ID NO: 308832 - protein, 14 aa, Homo sapiens
  CDR3 for beta chain variable domain of TCR clone 154416 (TRBV6-3, TRBJ2-2)
CASTYTPDTGELFF

SEQ ID NO: 308833 - protein, 15 aa, Homo sapiens
  CDR3 for alpha chain variable domain of TCR clone 154417 (TRAV3, TRAJ3)
CAVRDRDSSASKIIF

SEQ ID NO: 308834 - protein, 14 aa, Homo sapiens
  CDR3 for beta chain variable domain of TCR clone 154417 (TRBV7-2, TRBJ2-5)
CASSPGGELKTQYF

SEQ ID NO: 308835 - protein, 17 aa, Homo sapiens
  CDR3 for alpha chain variable domain of TCR clone 154418 (TRAV38-2/DV8, TRAJ57)
CAYRSVLTQGGSEKLDF

SEQ ID NO: 308836 - protein, 16 aa, Homo sapiens
  CDR3 for beta chain variable domain of TCR clone 154418 (TRBV7-3, TRBJ2-2)
CASSLKRGTLSGELFF

SEQ ID NO: 308837 - protein, 13 aa, Homo sapiens
  CDR3 for alpha chain variable domain of TCR clone 154419 (TRAV21, TRAJ20)
CAVGLRVDYKLSF

SEQ ID NO: 308838 - protein, 11 aa, Homo sapiens
  CDR3 for beta chain variable domain of TCR clone 154419 (TRBV11-2, TRBJ2-2)
CASGLPGELFF

SEQ ID NO: 308839 - protein, 13 aa, Homo sapiens
  CDR3 for alpha chain variable domain of TCR clone 154420 (TRAV8-6, TRAJ49)
CAVITNTGNQFYF

SEQ ID NO: 308840 - protein, 14 aa, Homo sapiens
  CDR3 for beta chain variable domain of TCR clone 154420 (TRBV18, TRBJ1-5)
CASSPGNSNQPQHF

SEQ ID NO: 308841 - protein, 15 aa, Homo sapiens
  CDR3 for alpha chain variable domain of TCR clone 154421 (TRAV38-2/DV8, TRAJ48)
CAYRSPESGNEKLTF

SEQ ID NO: 308842 - protein, 17 aa, Homo sapiens
  CDR3 for beta chain variable domain of TCR clone 154421 (TRBV20-1, TRBJ2-1)
GSASSSGLAGSYSEQFF

SEQ ID NO: 308843 - protein, 14 aa, Homo sapiens
  CDR3 for alpha chain variable domain of TCR clone 154422 (TRAV26-1, TRAJ21)
CIVRPPYNFNKFYF

SEQ ID NO: 308844 - protein, 14 aa, Homo sapiens
  CDR3 for beta chain variable domain of TCR clone 154422 (TRBV11-3, TRBJ2-1)
CASSATTSGSIQFS

SEQ ID NO: 308845 - protein, 14 aa, Homo sapiens
  CDR3 for alpha chain variable domain of TCR clone 154423 (TRAV1-2, TRAJ16)
CAVNRFSDGQKLPF

SEQ ID NO: 308846 - protein, 16 aa, Homo sapiens
  CDR3 for beta chain variable domain of TCR clone 154423 (TRBV25-1, TRBJ1-1)
CASSGDRDRGRIEAFF

SEQ ID NO: 308847 - protein, 13 aa, Homo sapiens
  CDR3 for alpha chain variable domain of TCR clone 154424 (TRAV21, TRAJ57)
CAVTQGGSEKLVF

SEQ ID NO: 308848 - protein, 13 aa, Homo sapiens
  CDR3 for beta chain variable domain of TCR clone 154424 (TRBV27, TRBJ2-7)
CASSLRHRYEQYF

SEQ ID NO: 308849 - protein, 15 aa, Homo sapiens
  CDR3 for alpha chain variable domain of TCR clone 154425 (TRAV3, TRAJ3)
CAVRDGHSSASKIIF

SEQ ID NO: 308850 - protein, 14 aa, Homo sapiens
  CDR3 for beta chain variable domain of TCR clone 154425 (TRBV28, TRBJ1-4)
CASSFGTFDEKVFF

SEQ ID NO: 308851 - protein, 15 aa, Homo sapiens
  CDR3 for alpha chain variable domain of TCR clone 154426 (TRAV20, TRAJ52)
CAVQAGGTSYGKLTF

SEQ ID NO: 308852 - protein, 20 aa, Homo sapiens
  CDR3 for beta chain variable domain of TCR clone 154426 (TRBV7-8, TRBJ2-2)
CASSHLFPGPTIHITGELFF

SEQ ID NO: 308853 - protein, 16 aa, Homo sapiens
  CDR3 for alpha chain variable domain of TCR clone 154427 (TRAV26-1, TRAJ52)
CIVSNAGGTSYGKLTL

SEQ ID NO: 308854 - protein, 15 aa, Homo sapiens
  CDR3 for beta chain variable domain of TCR clone 154427 (TRBV7-3, TRBJ2-1)
CASSPTGGGEGEQFF

SEQ ID NO: 308855 - protein, 16 aa, Homo sapiens
  CDR3 for alpha chain variable domain of TCR clone 154428 (TRAV3, TRAJ37)
WAVRPHGSGNTGKLIF

SEQ ID NO: 308856 - protein, 16 aa, Homo sapiens
  CDR3 for beta chain variable domain of TCR clone 154428 (TRBV9, TRBJ1-2)
CASSVEEKVSPYGYTF

SEQ ID NO: 308857 - protein, 13 aa, Homo sapiens
  CDR3 for alpha chain variable domain of TCR clone 154429 (TRAV8-1, TRAJ15)
CAVKNQAGTALIF

SEQ ID NO: 308858 - protein, 14 aa, Homo sapiens
  CDR3 for beta chain variable domain of TCR clone 154429 (TRBV7-9, TRBJ2-5)
CASSLDTAQETQYF

SEQ ID NO: 308859 - protein, 14 aa, Homo sapiens
  CDR3 for alpha chain variable domain of TCR clone 154430 (TRAV12-1, TRAJ10)
CVAILPGGGNKLTF

SEQ ID NO: 308860 - protein, 15 aa, Homo sapiens
  CDR3 for beta chain variable domain of TCR clone 154430 (TRBV20-1, TRBJ2-7)
CSARGFRPQTYEQYF

SEQ ID NO: 308861 - protein, 12 aa, Homo sapiens
  CDR3 for alpha chain variable domain of TCR clone 154431 (TRAV3, TRAJ31)
CAVRDGNARLMF

SEQ ID NO: 308862 - protein, 18 aa, Homo sapiens
  CDR3 for beta chain variable domain of TCR clone 154431 (TRBV7-2, TRBJ2-3)
CASSLKREGSGIKDTQYF

SEQ ID NO: 308863 - protein, 12 aa, Homo sapiens
  CDR3 for alpha chain variable domain of TCR clone 154432 (TRAV12-3, TRAJ17)
CAMTLAGNKLTF

SEQ ID NO: 308864 - protein, 14 aa, Homo sapiens
  CDR3 for beta chain variable domain of TCR clone 154432 (TRBV2, TRBJ1-6)
CASSEAYTYWALHF

SEQ ID NO: 308865 - protein, 14 aa, Homo sapiens
  CDR3 for alpha chain variable domain of TCR clone 154433 (TRAV12-1, TRAJ17)
CVVNYKAAGYKLTF

SEQ ID NO: 308866 - protein, 17 aa, Homo sapiens
  CDR3 for beta chain variable domain of TCR clone 154433 (TRBV20-1, TRBJ2-1)
CSASSSGLAVSYNEQFF

SEQ ID NO: 308867 - protein, 16 aa, Homo sapiens
  CDR3 for alpha chain variable domain of TCR clone 154434 (TRAV23/DV6, TRAJ21)
CAASSGGGTTSTNFTL

SEQ ID NO: 308868 - protein, 11 aa, Homo sapiens
  CDR3 for beta chain variable domain of TCR clone 154434 (TRBV7-8, TRBJ2-7)
CAISLSLEQYF

SEQ ID NO: 308869 - protein, 12 aa, Homo sapiens
  CDR3 for alpha chain variable domain of TCR clone 154435 (TRAV1-2, TRAJ29)
CAVPSGNNPLVF

SEQ ID NO: 308870 - protein, 14 aa, Homo sapiens
  CDR3 for beta chain variable domain of TCR clone 154435 (TRBV18, TRBJ2-5)
CASTPGVSQETQYF

SEQ ID NO: 308871 - protein, 15 aa, Homo sapiens
  CDR3 for alpha chain variable domain of TCR clone 154436 (TRAV16, TRAJ16)
CSKWPGHRDGKKLLF

SEQ ID NO: 308872 - protein, 14 aa, Homo sapiens
  CDR3 for beta chain variable domain of TCR clone 154436 (TRBV7-9, TRBJ2-4)
CASTTGGAKNIQYF

SEQ ID NO: 308873 - protein, 14 aa, Homo sapiens
  CDR3 for alpha chain variable domain of TCR clone 154437 (TRAV17, TRAJ40)
CARALTSGTYKYIF

SEQ ID NO: 308874 - protein, 13 aa, Homo sapiens
  CDR3 for beta chain variable domain of TCR clone 154437 (TRBV27, TRBJ2-1)
CASSSGSYNEQFF

SEQ ID NO: 308875 - protein, 10 aa, Homo sapiens
  CDR3 for alpha chain variable domain of TCR clone 154438 (TRAV13-1, TRAJ52)
CAAKTPMLVV

SEQ ID NO: 308876 - protein, 14 aa, Homo sapiens
  CDR3 for beta chain variable domain of TCR clone 154438 (TRBV6-5, TRBJ1-1)
CASSFRQGLTEAFF

SEQ ID NO: 308877 - protein, 15 aa, Homo sapiens
  CDR3 for alpha chain variable domain of TCR clone 154439 (TRAV23/DV6, TRAJ39)
CAASMSNNAGNMLTF

SEQ ID NO: 308878 - protein, 13 aa, Homo sapiens
  CDR3 for beta chain variable domain of TCR clone 154439 (TRBV19, TRBJ1-2)
CASSVPGQDGYTF

SEQ ID NO: 308879 - protein, 12 aa, Homo sapiens
  CDR3 for alpha chain variable domain of TCR clone 154440 (TRAV12-3, TRAJ17)
CAMTLTGNKLTF

SEQ ID NO: 308880 - protein, 15 aa, Homo sapiens
  CDR3 for beta chain variable domain of TCR clone 154440 (TRBV11-2, TRBJ2-2)
CASSSDRVNAGELFL

SEQ ID NO: 308881 - protein, 11 aa, Homo sapiens
  CDR3 for alpha chain variable domain of TCR clone 154441 (TRAV3, TRAJ21)
CAVGNFNRFYF

SEQ ID NO: 308882 - protein, 14 aa, Homo sapiens
  CDR3 for beta chain variable domain of TCR clone 154441 (TRBV6-3, TRBJ1-1)
CASRYHSKNTEAFF

SEQ ID NO: 308883 - protein, 13 aa, Homo sapiens
  CDR3 for alpha chain variable domain of TCR clone 154442 (TRAV8-3, TRAJ7)
CAVGAYGNNRLAF

SEQ ID NO: 308884 - protein, 13 aa, Homo sapiens
  CDR3 for beta chain variable domain of TCR clone 154442 (TRBV7-3, TRBJ1-5)
CASSLDSNKPQHF

SEQ ID NO: 308885 - protein, 13 aa, Homo sapiens
  CDR3 for alpha chain variable domain of TCR clone 154443 (TRAV1-1, TRAJ28)
CVTSGAGSYQLTF

SEQ ID NO: 308886 - protein, 17 aa, Homo sapiens
  CDR3 for beta chain variable domain of TCR clone 154443 (TRBV18, TRBJ2-2)
CAISQRSSGQGPGELFF

SEQ ID NO: 308887 - protein, 15 aa, Homo sapiens
  CDR3 for alpha chain variable domain of TCR clone 154444 (TRAV29/DV5, TRAJ42)
CAAKTDGGSQGNLIF

SEQ ID NO: 308888 - protein, 12 aa, Homo sapiens
  CDR3 for beta chain variable domain of TCR clone 154444 (TRBV19, TRBJ2-1)
CASSPGQGRPQI

SEQ ID NO: 308889 - protein, 13 aa, Homo sapiens
  CDR3 for alpha chain variable domain of TCR clone 154445 (TRAV21, TRAJ37)
CAVSSGNPGKLIF

SEQ ID NO: 308890 - protein, 17 aa, Homo sapiens
  CDR3 for beta chain variable domain of TCR clone 154445 (TRBV5-1, TRBJ2-5)
CASSLLGLAANQETQYF

SEQ ID NO: 308891 - protein, 13 aa, Homo sapiens
  CDR3 for alpha chain variable domain of TCR clone 154446 (TRAV2, TRAJ40)
CAVVTSGTYKYIF

SEQ ID NO: 308892 - protein, 14 aa, Homo sapiens
  CDR3 for beta chain variable domain of TCR clone 154446 (TRBV19, TRBJ2-1)
CAIPTFALSGEQFF

SEQ ID NO: 308893 - protein, 12 aa, Homo sapiens
  CDR3 for alpha chain variable domain of TCR clone 154447 (TRAV23/DV6, TRAJ30)
CAASKGDDKIIF

SEQ ID NO: 308894 - protein, 14 aa, Homo sapiens
  CDR3 for beta chain variable domain of TCR clone 154447 (TRBV20-1, TRBJ2-5)
CSAHRQGLWETQYF

SEQ ID NO: 308895 - protein, 11 aa, Homo sapiens
  CDR3 for alpha chain variable domain of TCR clone 154448 (TRAV3, TRAJ21)
CAGGNFNNFYF

SEQ ID NO: 308896 - protein, 16 aa, Homo sapiens
  CDR3 for beta chain variable domain of TCR clone 154448 (TRBV19, TRBJ2-1)
CASSKAGPSSYNEQFF

SEQ ID NO: 308897 - protein, 12 aa, Homo sapiens
  CDR3 for alpha chain variable domain of TCR clone 154449 (TRAV30, TRAJ43)
FGTEERGNDMRF

SEQ ID NO: 308898 - protein, 14 aa, Homo sapiens
  CDR3 for beta chain variable domain of TCR clone 154449 (TRBV7-2, TRBJ2-7)
CASSPKTSFYEQYF

SEQ ID NO: 308899 - protein, 16 aa, Homo sapiens
  CDR3 for alpha chain variable domain of TCR clone 154450 (TRAV8-3, TRAJ8)
CAVPRDGNKGFQKLVF

SEQ ID NO: 308900 - protein, 14 aa, Homo sapiens
  CDR3 for beta chain variable domain of TCR clone 154450 (TRBV28, TRBJ1-1)
CASSESGRGTEAFF

SEQ ID NO: 308901 - protein, 14 aa, Homo sapiens
  CDR3 for alpha chain variable domain of TCR clone 154451 (TRAV1-2, TRAJ8)
CALREDTGFQKLGF

SEQ ID NO: 308902 - protein, 16 aa, Homo sapiens
  CDR3 for beta chain variable domain of TCR clone 154451 (TRBV27, TRBJ2-2)
CASSFRGLVRTGELFF

SEQ ID NO: 308903 - protein, 17 aa, Homo sapiens
  CDR3 for alpha chain variable domain of TCR clone 154452 (TRAV3, TRAJ6)
CAVRAGPRAGGSYIPTF

SEQ ID NO: 308904 - protein, 14 aa, Homo sapiens
  CDR3 for beta chain variable domain of TCR clone 154452 (TRBV7-2, TRBJ2-7)
CASSPKASFYEQYF

SEQ ID NO: 308905 - protein, 15 aa, Homo sapiens
  CDR3 for alpha chain variable domain of TCR clone 154453 (TRAV3, TRAJ4)
CAVRDGTGGYNKLMC

SEQ ID NO: 308906 - protein, 16 aa, Homo sapiens
  CDR3 for beta chain variable domain of TCR clone 154453 (TRBV27, TRBJ2-2)
CASSSSGVSNTGELFF

SEQ ID NO: 308907 - protein, 14 aa, Homo sapiens
  CDR3 for alpha chain variable domain of TCR clone 154454 (TRAV1-2, TRAJ8)
CAVREDTGFQKLVF

SEQ ID NO: 308908 - protein, 14 aa, Homo sapiens
  CDR3 for beta chain variable domain of TCR clone 154454 (TRBV20-1, TRBJ2-1)
GSAQIGGSANEQFF

SEQ ID NO: 308909 - protein, 14 aa, Homo sapiens
  CDR3 for alpha chain variable domain of TCR clone 154455 (TRAV1-2, TRAJ16)
CAVNRFSDGQKPLF

SEQ ID NO: 308910 - protein, 13 aa, Homo sapiens
  CDR3 for beta chain variable domain of TCR clone 154455 (TRBV7-6, TRBJ1-2)
CASSLVADYGYTF

SEQ ID NO: 308911 - protein, 13 aa, Homo sapiens
  CDR3 for alpha chain variable domain of TCR clone 154456 (TRAV25, TRAJ26)
CAGMDNYGQNFVF

SEQ ID NO: 308912 - protein, 11 aa, Homo sapiens
  CDR3 for beta chain variable domain of TCR clone 154456 (TRBV12-4, TRBJ2-3)
CASTATDTQYF

SEQ ID NO: 308913 - protein, 15 aa, Homo sapiens
  CDR3 for alpha chain variable domain of TCR clone 154457 (TRAV17, TRAJ23)
CATDAEDNQGGKRIF

SEQ ID NO: 308914 - protein, 13 aa, Homo sapiens
  CDR3 for beta chain variable domain of TCR clone 154457 (TRBV12-4, TRBJ2-5)
CASSLGGSRTQYF

SEQ ID NO: 308915 - protein, 16 aa, Homo sapiens
  CDR3 for alpha chain variable domain of TCR clone 154458 (TRAV30, TRAJ24)
CGTEIVDADSWGKFRF

SEQ ID NO: 308916 - protein, 14 aa, Homo sapiens
  CDR3 for beta chain variable domain of TCR clone 154458 (TRBV12-5, TRBJ2-5)
CDSGSRTHQETQYF

SEQ ID NO: 308917 - protein, 14 aa, Homo sapiens
  CDR3 for alpha chain variable domain of TCR clone 154459 (TRAV1-2, TRAJ16)
CAVNRFSDGQKLLF

SEQ ID NO: 308918 - protein, 13 aa, Homo sapiens
  CDR3 for beta chain variable domain of TCR clone 154459 (TRBV20-1, TRBJ1-2)
CSARGRVYGGYTF

SEQ ID NO: 308919 - protein, 14 aa, Homo sapiens
  CDR3 for alpha chain variable domain of TCR clone 154460 (TRAV13-2, TRAJ10)
CAENITGGGNKLTF

SEQ ID NO: 308920 - protein, 15 aa, Homo sapiens
  CDR3 for beta chain variable domain of TCR clone 154460 (TRBV7-2, TRBJ2-7)
CASSLGGANSGEQYF

SEQ ID NO: 308921 - protein, 14 aa, Homo sapiens
  CDR3 for alpha chain variable domain of TCR clone 154461 (TRAV12-3, TRAJ22)
CAMSLFGSARQLTF

SEQ ID NO: 308922 - protein, 13 aa, Homo sapiens
  CDR3 for beta chain variable domain of TCR clone 154461 (TRBV7-2, TRBJ2-7)
CASSFGNFYEQYF

SEQ ID NO: 308923 - protein, 15 aa, Homo sapiens
  CDR3 for alpha chain variable domain of TCR clone 154462 (TRAV3, TRAJ22)
CAVRDRGGSARQLTF

SEQ ID NO: 308924 - protein, 14 aa, Homo sapiens
  CDR3 for beta chain variable domain of TCR clone 154462 (TRBV28, TRBJ2-7)
CASSLLGQGVEQYF

SEQ ID NO: 308925 - protein, 14 aa, Homo sapiens
  CDR3 for alpha chain variable domain of TCR clone 154463 (TRAV12-1, TRAJ12)
CVVTRMDSSYKLIF

SEQ ID NO: 308926 - protein, 13 aa, Homo sapiens
  CDR3 for beta chain variable domain of TCR clone 154463 (TRBV24-1, TRBJ2-1)
CATSAGPYNEQFF

SEQ ID NO: 308927 - protein, 14 aa, Homo sapiens
  CDR3 for alpha chain variable domain of TCR clone 154464 (TRAV1-1, TRAJ27)
CAVIYNTNAGKSTS

SEQ ID NO: 308928 - protein, 15 aa, Homo sapiens
  CDR3 for beta chain variable domain of TCR clone 154464 (TRBV9, TRBJ1-6)
CASSVAGTGDSPLHF

SEQ ID NO: 308929 - protein, 13 aa, Homo sapiens
  CDR3 for alpha chain variable domain of TCR clone 154465 (TRAV29/DV5, TRAJ31)
CAASRNNNASLMF

SEQ ID NO: 308930 - protein, 14 aa, Homo sapiens
  CDR3 for beta chain variable domain of TCR clone 154465 (TRBV4-1, TRBJ2-2)
CASSQAVNTGELFF

SEQ ID NO: 308931 - protein, 14 aa, Homo sapiens
  CDR3 for alpha chain variable domain of TCR clone 154466 (TRAV1-2, TRAJ16)
CAVNRFSDGQKLLF

SEQ ID NO: 308932 - protein, 17 aa, Homo sapiens
  CDR3 for beta chain variable domain of TCR clone 154466 (TRBV13, TRBJ2-3)
CARSLSRVAGGRNTQYF

SEQ ID NO: 308933 - protein, 17 aa, Homo sapiens
  CDR3 for alpha chain variable domain of TCR clone 154467 (TRAV3, TRAJ6)
CAVRDGPRAGGSYIPTF

SEQ ID NO: 308934 - protein, 14 aa, Homo sapiens
  CDR3 for beta chain variable domain of TCR clone 154467 (TRBV7-2, TRBJ2-7)
CASSPKTSFCEQCF

SEQ ID NO: 308935 - protein, 18 aa, Homo sapiens
  CDR3 for alpha chain variable domain of TCR clone 154468 (TRAV13-1, TRAJ52)
CAAKNPNAGGTSYGKMPF

SEQ ID NO: 308936 - protein, 17 aa, Homo sapiens
  CDR3 for beta chain variable domain of TCR clone 154468 (TRBV7-8, TRBJ2-6)
CASSAGTGGAGANVLTF

SEQ ID NO: 308937 - protein, 13 aa, Homo sapiens
  CDR3 for alpha chain variable domain of TCR clone 154469 (TRAV1-2, TRAJ9)
CAALNTGGFKTIF

SEQ ID NO: 308938 - protein, 16 aa, Homo sapiens
  CDR3 for beta chain variable domain of TCR clone 154469 (TRBV19, TRBJ2-1)
CASSKAGPGSYNEQFF

SEQ ID NO: 308939 - protein, 10 aa, Homo sapiens
  CDR3 for alpha chain variable domain of TCR clone 154470 (TRAV12-3, TRAJ49)
CAINDDQFYF

SEQ ID NO: 308940 - protein, 13 aa, Homo sapiens
  CDR3 for beta chain variable domain of TCR clone 154470 (TRBV12-4, TRBJ1-1)
CASGPGTGFEAFF

SEQ ID NO: 308941 - protein, 17 aa, Homo sapiens
  CDR3 for alpha chain variable domain of TCR clone 154471 (TRAV12-1, TRAJ13)
CVVNKRGEFWGLPESDL

SEQ ID NO: 308942 - protein, 17 aa, Homo sapiens
  CDR3 for beta chain variable domain of TCR clone 154471 (TRBV28, TRBJ2-5)
CASSTPEGDALQETQYF

SEQ ID NO: 308943 - protein, 15 aa, Homo sapiens
  CDR3 for alpha chain variable domain of TCR clone 154472 (TRAV12-1, TRAJ44)
CVVDTPQGTASKLPF

SEQ ID NO: 308944 - protein, 13 aa, Homo sapiens
  CDR3 for beta chain variable domain of TCR clone 154472 (TRBV27, TRBJ2-1)
CASSSGSYNEQFF

SEQ ID NO: 308945 - protein, 14 aa, Homo sapiens
  CDR3 for alpha chain variable domain of TCR clone 154473 (TRAV26-1, TRAJ17)
CIVRVAAAGNKLTF

SEQ ID NO: 308946 - protein, 17 aa, Homo sapiens
  CDR3 for beta chain variable domain of TCR clone 154473 (TRBV13, TRBJ2-3)
CASSLSRVAGGRNTQYF

SEQ ID NO: 308947 - protein, 13 aa, Homo sapiens
  CDR3 for alpha chain variable domain of TCR clone 154474 (TRAV17, TRAJ9)
CATDHTGGFKTIF

SEQ ID NO: 308948 - protein, 14 aa, Homo sapiens
  CDR3 for beta chain variable domain of TCR clone 154474 (TRBV19, TRBJ2-5)
CASSMTGQQETQYF

SEQ ID NO: 308949 - protein, 14 aa, Homo sapiens
  CDR3 for alpha chain variable domain of TCR clone 154475 (TRAV27, TRAJ17)
CRSTIRAAGNKLTF

SEQ ID NO: 308950 - protein, 16 aa, Homo sapiens
  CDR3 for beta chain variable domain of TCR clone 154475 (TRBV5-7, TRBJ2-5)
CASTLAPAGGRETQFF

SEQ ID NO: 308951 - protein, 16 aa, Homo sapiens
  CDR3 for alpha chain variable domain of TCR clone 154476 (TRAV30, TRAJ24)
CGTEIVDADSWGKFQF

SEQ ID NO: 308952 - protein, 17 aa, Homo sapiens
  CDR3 for beta chain variable domain of TCR clone 154476 (TRBV10-3, TRBJ2-6)
CAISESTAPSGANVLTF

SEQ ID NO: 308953 - protein, 12 aa, Homo sapiens
  CDR3 for alpha chain variable domain of TCR clone 154477 (TRAV12-3, TRAJ20)
CAVVRGDYKLSF

SEQ ID NO: 308954 - protein, 14 aa, Homo sapiens
  CDR3 for beta chain variable domain of TCR clone 154477 (TRBV5-5, TRBJ1-5)
CASSGQGVDQPQHF

SEQ ID NO: 308955 - protein, 14 aa, Homo sapiens
  CDR3 for alpha chain variable domain of TCR clone 154478 (TRAV1-2, TRAJ8)
CAVRKDTGFQKLVF

SEQ ID NO: 308956 - protein, 17 aa, Homo sapiens
  CDR3 for beta chain variable domain of TCR clone 154478 (TRBV13, TRBJ2-3)
CASSLSRVAGGRNTQYF

SEQ ID NO: 308957 - protein, 15 aa, Homo sapiens
  CDR3 for alpha chain variable domain of TCR clone 154479 (TRAV3, TRAJ5)
CAVRDLDTGRRALTF

SEQ ID NO: 308958 - protein, 15 aa, Homo sapiens
  CDR3 for beta chain variable domain of TCR clone 154479 (TRBV19, TRBJ2-1)
CASSSPGVPLDEQFF

SEQ ID NO: 308959 - protein, 14 aa, Homo sapiens
  CDR3 for alpha chain variable domain of TCR clone 154480 (TRAV12-1, TRAJ4)
CVVNTAGGYNKLIF

SEQ ID NO: 308960 - protein, 13 aa, Homo sapiens
  CDR3 for beta chain variable domain of TCR clone 154480 (TRBV12-4, TRBJ1-2)
CASSLRQGKGYTF

SEQ ID NO: 308961 - protein, 14 aa, Homo sapiens
  CDR3 for alpha chain variable domain of TCR clone 154481 (TRAV21, TRAJ45)
CAVSSGGGADGLTF

SEQ ID NO: 308962 - protein, 16 aa, Homo sapiens
  CDR3 for beta chain variable domain of TCR clone 154481 (TRBV7-2, TRBJ1-4)
CASSLAPGRRDEKLFF

SEQ ID NO: 308963 - protein, 11 aa, Homo sapiens
  CDR3 for alpha chain variable domain of TCR clone 154482 (TRAV12-1, TRAJ30)
CVVNGQDKIIF

SEQ ID NO: 308964 - protein, 12 aa, Homo sapiens
  CDR3 for beta chain variable domain of TCR clone 154482 (TRBV27, TRBJ2-2)
CASKLYTGELFF

SEQ ID NO: 308965 - protein, 15 aa, Homo sapiens
  CDR3 for alpha chain variable domain of TCR clone 154483 (TRAV27, TRAJ38)
CAARRNAGNNRKLIW

SEQ ID NO: 308966 - protein, 14 aa, Homo sapiens
  CDR3 for beta chain variable domain of TCR clone 154483 (TRBV7-2, TRBJ2-7)
CASSPRDGDYEQYF

SEQ ID NO: 308967 - protein, 12 aa, Homo sapiens
  CDR3 for alpha chain variable domain of TCR clone 154484 (TRAV30, TRAJ43)
CGAEERGNDMRF

SEQ ID NO: 308968 - protein, 11 aa, Homo sapiens
  CDR3 for beta chain variable domain of TCR clone 154484 (TRBV29-1, TRBJ2-5)
CSEDRTGTQYF

SEQ ID NO: 308969 - protein, 13 aa, Homo sapiens
  CDR3 for alpha chain variable domain of TCR clone 154485 (TRAV12-3, TRAJ54)
CALVPQGAQKLVF

SEQ ID NO: 308970 - protein, 15 aa, Homo sapiens
  CDR3 for beta chain variable domain of TCR clone 154485 (TRBV4-1, TRBJ2-2)
CASGQDSRGTGELFF

SEQ ID NO: 308971 - protein, 13 aa, Homo sapiens
  CDR3 for alpha chain variable domain of TCR clone 154486 (TRAV8-1, TRAJ34)
CAVNGKGTDKLSF

SEQ ID NO: 308972 - protein, 13 aa, Homo sapiens
  CDR3 for beta chain variable domain of TCR clone 154486 (TRBV20-1, TRBJ2-5)
CSARLAGVETQYF

SEQ ID NO: 308973 - protein, 18 aa, Homo sapiens
  CDR3 for alpha chain variable domain of TCR clone 154487 (TRAV26-1, TRAJ23)
CIVRVGLEVWNQGGKLIF

SEQ ID NO: 308974 - protein, 16 aa, Homo sapiens
  CDR3 for beta chain variable domain of TCR clone 154487 (TRBV12-4, TRBJ2-5)
CASSFFVGGREETQYF

SEQ ID NO: 308975 - protein, 15 aa, Homo sapiens
  CDR3 for alpha chain variable domain of TCR clone 154488 (TRAV23/DV6, TRAJ18)
CAPRYRGSTLGRLSF

SEQ ID NO: 308976 - protein, 13 aa, Homo sapiens
  CDR3 for beta chain variable domain of TCR clone 154488 (TRBV7-2, TRBJ2-7)
CASSSPSGSEQYF

SEQ ID NO: 308977 - protein, 13 aa, Homo sapiens
  CDR3 for alpha chain variable domain of TCR clone 154489 (TRAV2, TRAJ24)
CAVTPDSWGKLQF

SEQ ID NO: 308978 - protein, 14 aa, Homo sapiens
  CDR3 for beta chain variable domain of TCR clone 154489 (TRBV13, TRBJ2-5)
CASSLGRGQETQYL

SEQ ID NO: 308979 - protein, 13 aa, Homo sapiens
  CDR3 for alpha chain variable domain of TCR clone 154490 (TRAV12-1, TRAJ16)
CVVNGPDGQKLLF

SEQ ID NO: 308980 - protein, 16 aa, Homo sapiens
  CDR3 for beta chain variable domain of TCR clone 154490 (TRBV7-8, TRBJ2-6)
CASPGRVVAGANVLTF

SEQ ID NO: 308981 - protein, 14 aa, Homo sapiens
  CDR3 for alpha chain variable domain of TCR clone 154491 (TRAV16, TRAJ33)
CALSAMDSNYQLIW

SEQ ID NO: 308982 - protein, 16 aa, Homo sapiens
  CDR3 for beta chain variable domain of TCR clone 154491 (TRBV12-4, TRBJ2-3)
CASSFPSNTNTATQYF

SEQ ID NO: 308983 - protein, 15 aa, Homo sapiens
  CDR3 for alpha chain variable domain of TCR clone 154492 (TRAV27, TRAJ38)
CAARRNAGNNRKLIW

SEQ ID NO: 308984 - protein, 13 aa, Homo sapiens
  CDR3 for beta chain variable domain of TCR clone 154492 (TRBV4-2, TRBJ2-1)
CASSPGTYNEQFV

SEQ ID NO: 308985 - protein, 16 aa, Homo sapiens
  CDR3 for alpha chain variable domain of TCR clone 154493 (TRAV16, TRAJ42)
CALSGLLGGSQGNHIF

SEQ ID NO: 308986 - protein, 15 aa, Homo sapiens
  CDR3 for beta chain variable domain of TCR clone 154493 (TRBV5-1, TRBJ2-1)
CASSPGGLAGNEQFF

SEQ ID NO: 308987 - protein, 16 aa, Homo sapiens
  CDR3 for alpha chain variable domain of TCR clone 154494 (TRAV3, TRAJ28)
CAVLPRSGAGRYQLPF

SEQ ID NO: 308988 - protein, 13 aa, Homo sapiens
  CDR3 for beta chain variable domain of TCR clone 154494 (TRBV12-4, TRBJ2-5)
CASRLAVQETQYF

SEQ ID NO: 308989 - protein, 12 aa, Homo sapiens
  CDR3 for alpha chain variable domain of TCR clone 154495 (TRAV35, TRAJ40)
CAGRAGTYKYIF

SEQ ID NO: 308990 - protein, 14 aa, Homo sapiens
  CDR3 for beta chain variable domain of TCR clone 154495 (TRBV7-2, TRBJ1-3)
CASSRGGTGNTKYF

SEQ ID NO: 308991 - protein, 13 aa, Homo sapiens
  CDR3 for alpha chain variable domain of TCR clone 154496 (TRAV3, TRAJ21)
CAVREPEFNKFYF

SEQ ID NO: 308992 - protein, 14 aa, Homo sapiens
  CDR3 for beta chain variable domain of TCR clone 154496 (TRBV7-6, TRBJ2-3)
CASSLGTVTDTQYF

SEQ ID NO: 308993 - protein, 14 aa, Homo sapiens
  CDR3 for alpha chain variable domain of TCR clone 154497 (TRAV12-1, TRAJ43)
CVVNGRSNNNDMRF

SEQ ID NO: 308994 - protein, 16 aa, Homo sapiens
  CDR3 for beta chain variable domain of TCR clone 154497 (TRBV28, TRBJ2-5)
CASSLERTGSWETQYF

SEQ ID NO: 308995 - protein, 15 aa, Homo sapiens
  CDR3 for alpha chain variable domain of TCR clone 154498 (TRAV4, TRAJ10)
CLVGDEEGGGNKLTF

SEQ ID NO: 308996 - protein, 14 aa, Homo sapiens
  CDR3 for beta chain variable domain of TCR clone 154498 (TRBV7-2, TRBJ2-7)
CASSPKTSFYEQYF

SEQ ID NO: 308997 - protein, 13 aa, Homo sapiens
  CDR3 for alpha chain variable domain of TCR clone 154499 (TRAV21, TRAJ57)
RAVTQGGSEKLFF

SEQ ID NO: 308998 - protein, 16 aa, Homo sapiens
  CDR3 for beta chain variable domain of TCR clone 154499 (TRBV29-1, TRBJ2-7)
CSVEDAEDGTAYEQYF

SEQ ID NO: 308999 - protein, 13 aa, Homo sapiens
  CDR3 for alpha chain variable domain of TCR clone 154500 (TRAV13-1, TRAJ6)
CAASSGGSYIPTF

SEQ ID NO: 309000 - protein, 14 aa, Homo sapiens
  CDR3 for beta chain variable domain of TCR clone 154500 (TRBV20-1, TRBJ2-4)
CSAVAGGAGNIQYF

SEQ ID NO: 309001 - protein, 13 aa, Homo sapiens
  CDR3 for alpha chain variable domain of TCR clone 154501 (TRAV36/DV7, TRAJ37)
CAVFSSNTGKLIF

SEQ ID NO: 309002 - protein, 15 aa, Homo sapiens
  CDR3 for beta chain variable domain of TCR clone 154501 (TRBV12-4, TRBJ2-5)
CREFFVRGRQETQYF

SEQ ID NO: 309003 - protein, 11 aa, Homo sapiens
  CDR3 for alpha chain variable domain of TCR clone 154502 (TRAV17, TRAJ43)
CATDNNNDMRF

SEQ ID NO: 309004 - protein, 15 aa, Homo sapiens
  CDR3 for beta chain variable domain of TCR clone 154502 (TRBV10-2, TRBJ2-6)
CASSEQGTGANDLTF

SEQ ID NO: 309005 - protein, 17 aa, Homo sapiens
  CDR3 for alpha chain variable domain of TCR clone 154503 (TRAV13-1, TRAJ31)
CAPRDRLMFGDGTQLVV

SEQ ID NO: 309006 - protein, 12 aa, Homo sapiens
  CDR3 for beta chain variable domain of TCR clone 154503 (TRBV7-2, TRBJ2-5)
CASSLYQETQYF

SEQ ID NO: 309007 - protein, 16 aa, Homo sapiens
  CDR3 for alpha chain variable domain of TCR clone 154504 (TRAV8-2, TRAJ7)
CVVSEGPDYGNNRLAF

SEQ ID NO: 309008 - protein, 16 aa, Homo sapiens
  CDR3 for beta chain variable domain of TCR clone 154504 (TRBV20-1, TRBJ1-4)
CSAPGQGLLTNEKLFF

SEQ ID NO: 309009 - protein, 14 aa, Homo sapiens
  CDR3 for alpha chain variable domain of TCR clone 154505 (TRAV1-2, TRAJ16)
CAVNRFSDGQKLLF

SEQ ID NO: 309010 - protein, 13 aa, Homo sapiens
  CDR3 for beta chain variable domain of TCR clone 154505 (TRBV10-3, TRBJ2-7)
CASKLAVDYEQYF

SEQ ID NO: 309011 - protein, 14 aa, Homo sapiens
  CDR3 for alpha chain variable domain of TCR clone 154506 (TRAV8-2, TRAJ4)
CVVSPSGGYKKLIF

SEQ ID NO: 309012 - protein, 11 aa, Homo sapiens
  CDR3 for beta chain variable domain of TCR clone 154506 (TRBV29-1, TRBJ2-5)
CSEDRAGTQYF

SEQ ID NO: 309013 - protein, 14 aa, Homo sapiens
  CDR3 for alpha chain variable domain of TCR clone 154507 (TRAV1-2, TRAJ8)
CAVREDTGFQKLVF

SEQ ID NO: 309014 - protein, 15 aa, Homo sapiens
  CDR3 for beta chain variable domain of TCR clone 154507 (TRBV7-3, TRBJ2-2)
CASSVTGQGTGELFF

SEQ ID NO: 309015 - protein, 15 aa, Homo sapiens
  CDR3 for alpha chain variable domain of TCR clone 154508 (TRAV12-1, TRAJ44)
CVADLPTDTASQLTF

SEQ ID NO: 309016 - protein, 13 aa, Homo sapiens
  CDR3 for beta chain variable domain of TCR clone 154508 (TRBV6-5, TRBJ2-5)
CASSPQGGETQYF

SEQ ID NO: 309017 - protein, 21 aa, Homo sapiens
  CDR3 for alpha chain variable domain of TCR clone 154509 (TRAV30, TRAJ43)
GLPAQLLRNPLPIIELNDMRF

SEQ ID NO: 309018 - protein, 14 aa, Homo sapiens
  CDR3 for beta chain variable domain of TCR clone 154509 (TRBV27, TRBJ2-1)
CASRHLGGRKEQFF

SEQ ID NO: 309019 - protein, 14 aa, Homo sapiens
  CDR3 for alpha chain variable domain of TCR clone 154510 (TRAV12-2, TRAJ13)
CAVKRTGGYQKVTF

SEQ ID NO: 309020 - protein, 15 aa, Homo sapiens
  CDR3 for beta chain variable domain of TCR clone 154510 (TRBV27, TRBJ2-1)
CASSNGGGSSNEQFC

SEQ ID NO: 309021 - protein, 12 aa, Homo sapiens
  CDR3 for alpha chain variable domain of TCR clone 154511 (TRAV13-1, TRAJ53)
CAAGGSNYKLTF

SEQ ID NO: 309022 - protein, 12 aa, Homo sapiens
  CDR3 for beta chain variable domain of TCR clone 154511 (TRBV16, TRBJ1-4)
CASSKGDEKLFF

SEQ ID NO: 309023 - protein, 13 aa, Homo sapiens
  CDR3 for alpha chain variable domain of TCR clone 154512 (TRAV12-1, TRAJ3)
CVVNPRGASNIIF

SEQ ID NO: 309024 - protein, 13 aa, Homo sapiens
  CDR3 for beta chain variable domain of TCR clone 154512 (TRBV28, TRBJ1-5)
CASSDRGNQPQHF

SEQ ID NO: 309025 - protein, 18 aa, Homo sapiens
  CDR3 for alpha chain variable domain of TCR clone 154513 (TRAV12-3, TRAJ52)
CAMSVGGAGGSSYGKLTF

SEQ ID NO: 309026 - protein, 15 aa, Homo sapiens
  CDR3 for beta chain variable domain of TCR clone 154513 (TRBV27, TRBJ1-6)
CASSFDRGLGSPLHF

SEQ ID NO: 309027 - protein, 10 aa, Homo sapiens
  CDR3 for alpha chain variable domain of TCR clone 154514 (TRAV8-6, TRAJ34)
CAVNTDKLIF

SEQ ID NO: 309028 - protein, 12 aa, Homo sapiens
  CDR3 for beta chain variable domain of TCR clone 154514 (TRBV7-2, TRBJ2-5)
CASSQYQETQYF

SEQ ID NO: 309029 - protein, 16 aa, Homo sapiens
  CDR3 for alpha chain variable domain of TCR clone 154515 (TRAV12-2, TRAJ50)
CAVGTATKTSYDKVIF

SEQ ID NO: 309030 - protein, 14 aa, Homo sapiens
  CDR3 for beta chain variable domain of TCR clone 154515 (TRBV7-2, TRBJ2-7)
CASSSQGAAYEQYF

SEQ ID NO: 309031 - protein, 14 aa, Homo sapiens
  CDR3 for alpha chain variable domain of TCR clone 154516 (TRAV9-2, TRAJ9)
CALSDPTGGFKTIF

SEQ ID NO: 309032 - protein, 14 aa, Homo sapiens
  CDR3 for beta chain variable domain of TCR clone 154516 (TRBV20-1, TRBJ2-4)
CSARDRGQGGNQYF

SEQ ID NO: 309033 - protein, 12 aa, Homo sapiens
  CDR3 for alpha chain variable domain of TCR clone 154517 (TRAV12-2, TRAJ10)
WGVTGGGNKLTF

SEQ ID NO: 309034 - protein, 16 aa, Homo sapiens
  CDR3 for beta chain variable domain of TCR clone 154517 (TRBV6-4, TRBJ1-2)
CASSEAVGDTNYGYTF

SEQ ID NO: 309035 - protein, 15 aa, Homo sapiens
  CDR3 for alpha chain variable domain of TCR clone 154518 (TRAV8-3, TRAJ45)
CASSYSGGGADGLTL

SEQ ID NO: 309036 - protein, 13 aa, Homo sapiens
  CDR3 for beta chain variable domain of TCR clone 154518 (TRBV7-9, TRBJ1-2)
CASSLKQNYGYTF

SEQ ID NO: 309037 - protein, 14 aa, Homo sapiens
  CDR3 for alpha chain variable domain of TCR clone 154519 (TRAV8-1, TRAJ22)
CAAPSSGSARHLTF

SEQ ID NO: 309038 - protein, 14 aa, Homo sapiens
  CDR3 for beta chain variable domain of TCR clone 154519 (TRBV9, TRBJ2-2)
CASSVGQGAGELFF

SEQ ID NO: 309039 - protein, 14 aa, Homo sapiens
  CDR3 for alpha chain variable domain of TCR clone 154520 (TRAV1-2, TRAJ8)
CAVREDTGFQKLVF

SEQ ID NO: 309040 - protein, 16 aa, Homo sapiens
  CDR3 for beta chain variable domain of TCR clone 154520 (TRBV6-6, TRBJ2-5)
CASSYDWAGGSETQYF

SEQ ID NO: 309041 - protein, 13 aa, Homo sapiens
  CDR3 for alpha chain variable domain of TCR clone 154521 (TRAV16, TRAJ54)
CALKVRGAQKLVF

SEQ ID NO: 309042 - protein, 13 aa, Homo sapiens
  CDR3 for beta chain variable domain of TCR clone 154521 (TRBV20-1, TRBJ1-1)
CSARGGGNTEAFI

SEQ ID NO: 309043 - protein, 14 aa, Homo sapiens
  CDR3 for alpha chain variable domain of TCR clone 154522 (TRAV12-1, TRAJ12)
CVVTRMDSSSKLIF

SEQ ID NO: 309044 - protein, 14 aa, Homo sapiens
  CDR3 for beta chain variable domain of TCR clone 154522 (TRBV12-4, TRBJ1-1)
CASSLGTGGTEAFF

SEQ ID NO: 309045 - protein, 13 aa, Homo sapiens
  CDR3 for alpha chain variable domain of TCR clone 154523 (TRAV12-2, TRAJ38)
CAVNAGNNRKLIW

SEQ ID NO: 309046 - protein, 16 aa, Homo sapiens
  CDR3 for beta chain variable domain of TCR clone 154523 (TRBV19, TRBJ2-1)
CASSKAGPSSYNEQFF

SEQ ID NO: 309047 - protein, 16 aa, Homo sapiens
  CDR3 for alpha chain variable domain of TCR clone 154524 (TRAV30, TRAJ24)
CGTEIVDADSWGKFQC

SEQ ID NO: 309048 - protein, 14 aa, Homo sapiens
  CDR3 for beta chain variable domain of TCR clone 154524 (TRBV12-5, TRBJ2-5)
CASGSRTHQATQYF

SEQ ID NO: 309049 - protein, 11 aa, Homo sapiens
  CDR3 for alpha chain variable domain of TCR clone 154525 (TRAV12-2, TRAJ23)
CARGRGGKLIF

SEQ ID NO: 309050 - protein, 15 aa, Homo sapiens
  CDR3 for beta chain variable domain of TCR clone 154525 (TRBV28, TRBJ2-5)
CASSPPWSYQETQYF

SEQ ID NO: 309051 - protein, 14 aa, Homo sapiens
  CDR3 for alpha chain variable domain of TCR clone 154526 (TRAV30, TRAJ26)
CGTEIVSYGQNFVF

SEQ ID NO: 309052 - protein, 13 aa, Homo sapiens
  CDR3 for beta chain variable domain of TCR clone 154526 (TRBV19, TRBJ1-3)
CASGLSLGNTMYF

SEQ ID NO: 309053 - protein, 14 aa, Homo sapiens
  CDR3 for alpha chain variable domain of TCR clone 154527 (TRAV9-2, TRAJ24)
CALNPRGRWGKLQF

SEQ ID NO: 309054 - protein, 15 aa, Homo sapiens
  CDR3 for beta chain variable domain of TCR clone 154527 (TRBV7-2, TRBJ2-3)
CASSSTGLETDTQYF

SEQ ID NO: 309055 - protein, 17 aa, Homo sapiens
  CDR3 for alpha chain variable domain of TCR clone 154528 (TRAV3, TRAJ42)
CAVRDRDDGGSQGNLIF

SEQ ID NO: 309056 - protein, 14 aa, Homo sapiens
  CDR3 for beta chain variable domain of TCR clone 154528 (TRBV7-2, TRBJ2-5)
CASSPRGSSENQYF

SEQ ID NO: 309057 - protein, 15 aa, Homo sapiens
  CDR3 for alpha chain variable domain of TCR clone 154529 (TRAV17, TRAJ23)
CATDAEDNQGGKLVF

SEQ ID NO: 309058 - protein, 12 aa, Homo sapiens
  CDR3 for beta chain variable domain of TCR clone 154529 (TRBV2, TRBJ2-1)
CAKRGGYNEQFF

SEQ ID NO: 309059 - protein, 15 aa, Homo sapiens
  CDR3 for alpha chain variable domain of TCR clone 154530 (TRAV8-3, TRAJ27)
CAVGAGDTNAGKSTF

SEQ ID NO: 309060 - protein, 13 aa, Homo sapiens
  CDR3 for beta chain variable domain of TCR clone 154530 (TRBV10-3, TRBJ2-7)
CASKLAVNYEQYF

SEQ ID NO: 309061 - protein, 14 aa, Homo sapiens
  CDR3 for alpha chain variable domain of TCR clone 154531 (TRAV12-3, TRAJ10)
SHLPLTGGGNKLTF

SEQ ID NO: 309062 - protein, 13 aa, Homo sapiens
  CDR3 for beta chain variable domain of TCR clone 154531 (TRBV29-1, TRBJ2-3)
GSATRGGRDTQYF

SEQ ID NO: 309063 - protein, 13 aa, Homo sapiens
  CDR3 for alpha chain variable domain of TCR clone 154532 (TRAV21, TRAJ27)
CAARPGNAGKSTF

SEQ ID NO: 309064 - protein, 12 aa, Homo sapiens
  CDR3 for beta chain variable domain of TCR clone 154532 (TRBV7-6, TRBJ2-5)
CASSFSWETQYF

SEQ ID NO: 309065 - protein, 14 aa, Homo sapiens
  CDR3 for alpha chain variable domain of TCR clone 154533 (TRAV17, TRAJ35)
CATDRPGFGNVLHC

SEQ ID NO: 309066 - protein, 15 aa, Homo sapiens
  CDR3 for beta chain variable domain of TCR clone 154533 (TRBV28, TRBJ2-5)
CASSSGRVIQEPQYF

SEQ ID NO: 309067 - protein, 14 aa, Homo sapiens
  CDR3 for alpha chain variable domain of TCR clone 154534 (TRAV36/DV7, TRAJ40)
CAVETTSGTYKYIF

SEQ ID NO: 309068 - protein, 15 aa, Homo sapiens
  CDR3 for beta chain variable domain of TCR clone 154534 (TRBV6-3, TRBJ2-7)
CASSSPGTVFYEQYF

SEQ ID NO: 309069 - protein, 14 aa, Homo sapiens
  CDR3 for alpha chain variable domain of TCR clone 154535 (TRAV12-2, TRAJ40)
CAVKIPSGTHNYIF

SEQ ID NO: 309070 - protein, 17 aa, Homo sapiens
  CDR3 for beta chain variable domain of TCR clone 154535 (TRBV13, TRBJ2-3)
CASSLSRVAGGRNTQYF

SEQ ID NO: 309071 - protein, 12 aa, Homo sapiens
  CDR3 for alpha chain variable domain of TCR clone 154536 (TRAV12-1, TRAJ8)
CVVNKGFQKLVF

SEQ ID NO: 309072 - protein, 16 aa, Homo sapiens
  CDR3 for beta chain variable domain of TCR clone 154536 (TRBV7-3, TRBJ2-2)
CASSLKRGTLSGELFF

SEQ ID NO: 309073 - protein, 11 aa, Homo sapiens
  CDR3 for alpha chain variable domain of TCR clone 154537 (TRAV3, TRAJ17)
PRGAAGNKLTF

SEQ ID NO: 309074 - protein, 15 aa, Homo sapiens
  CDR3 for beta chain variable domain of TCR clone 154537 (TRBV4-2, TRBJ1-1)
CASSQEDLPRTEAFF

SEQ ID NO: 309075 - protein, 14 aa, Homo sapiens
  CDR3 for alpha chain variable domain of TCR clone 154538 (TRAV13-1, TRAJ9)
CAASALTGGFKTIF

SEQ ID NO: 309076 - protein, 14 aa, Homo sapiens
  CDR3 for beta chain variable domain of TCR clone 154538 (TRBV7-9, TRBJ2-7)
CASSLDRPTDEQYF

SEQ ID NO: 309077 - protein, 14 aa, Homo sapiens
  CDR3 for alpha chain variable domain of TCR clone 154539 (TRAV12-3, TRAJ6)
CAMSATGGSYIPTV

SEQ ID NO: 309078 - protein, 16 aa, Homo sapiens
  CDR3 for beta chain variable domain of TCR clone 154539 (TRBV4-2, TRBJ2-1)
CASSPRAGQGANEQFF

SEQ ID NO: 309079 - protein, 16 aa, Homo sapiens
  CDR3 for alpha chain variable domain of TCR clone 154540 (TRAV3, TRAJ37)
CAVRGKGSGNTGKINF

SEQ ID NO: 309080 - protein, 14 aa, Homo sapiens
  CDR3 for beta chain variable domain of TCR clone 154540 (TRBV20-1, TRBJ2-3)
CSARGGTSTDTQYF

SEQ ID NO: 309081 - protein, 13 aa, Homo sapiens
  CDR3 for alpha chain variable domain of TCR clone 154541 (TRAV26-1, )
CIVSHRVEGFWNQ

SEQ ID NO: 309082 - protein, 16 aa, Homo sapiens
  CDR3 for beta chain variable domain of TCR clone 154541 (TRBV7-3, TRBJ2-2)
CASSLKRGTLSGELFF

SEQ ID NO: 309083 - protein, 22 aa, Homo sapiens
  CDR3 for alpha chain variable domain of TCR clone 154542 (TRAV12-2, TRAJ32)
CSSETPSPVIQPPKSATNKLIF

SEQ ID NO: 309084 - protein, 14 aa, Homo sapiens
  CDR3 for beta chain variable domain of TCR clone 154542 (TRBV28, TRBJ1-2)
CASRIQGANYGYTF

SEQ ID NO: 309085 - protein, 15 aa, Homo sapiens
  CDR3 for alpha chain variable domain of TCR clone 154543 (TRAV12-1, TRAJ42)
CVVTRDGGSQGNLIF

SEQ ID NO: 309086 - protein, 13 aa, Homo sapiens
  CDR3 for beta chain variable domain of TCR clone 154543 (TRBV12-4, TRBJ1-2)
CASSLRQGKGYTF

SEQ ID NO: 309087 - protein, 16 aa, Homo sapiens
  CDR3 for alpha chain variable domain of TCR clone 154544 (TRAV14/DV4, TRAJ20)
CAMREGRSRDDYKLSF

SEQ ID NO: 309088 - protein, 15 aa, Homo sapiens
  CDR3 for beta chain variable domain of TCR clone 154544 (TRBV7-2, TRBJ2-1)
CASSLVLAGDNEQFF

SEQ ID NO: 309089 - protein, 14 aa, Homo sapiens
  CDR3 for alpha chain variable domain of TCR clone 154545 (TRAV17, TRAJ57)
CATDPQGGSEKLVF

SEQ ID NO: 309090 - protein, 15 aa, Homo sapiens
  CDR3 for beta chain variable domain of TCR clone 154545 (TRBV2, TRBJ2-4)
CASSGTNLAKNIQYF

SEQ ID NO: 309091 - protein, 14 aa, Homo sapiens
  CDR3 for alpha chain variable domain of TCR clone 154546 (TRAV3, TRAJ21)
CAVESQANFNKYYF

SEQ ID NO: 309092 - protein, 18 aa, Homo sapiens
  CDR3 for beta chain variable domain of TCR clone 154546 (TRBV7-9, TRBJ2-1)
CASSLAVSGTSGRNEQFF

SEQ ID NO: 309093 - protein, 10 aa, Homo sapiens
  CDR3 for alpha chain variable domain of TCR clone 154547 (TRAV8-4, TRAJ43)
CAVSADDMRF

SEQ ID NO: 309094 - protein, 16 aa, Homo sapiens
  CDR3 for beta chain variable domain of TCR clone 154547 (TRBV12-5, TRBJ2-5)
CASGPRTSGNQEAQYF

SEQ ID NO: 309095 - protein, 14 aa, Homo sapiens
  CDR3 for alpha chain variable domain of TCR clone 154548 (TRAV29/DV5, TRAJ36)
CAARRKTGANNLFF

SEQ ID NO: 309096 - protein, 15 aa, Homo sapiens
  CDR3 for beta chain variable domain of TCR clone 154548 (TRBV27, TRBJ2-7)
CASSTAGTGSYEQYF

SEQ ID NO: 309097 - protein, 16 aa, Homo sapiens
  CDR3 for alpha chain variable domain of TCR clone 154549 (TRAV8-3, TRAJ44)
CAVGPLNTGTTSKLTF

SEQ ID NO: 309098 - protein, 18 aa, Homo sapiens
  CDR3 for beta chain variable domain of TCR clone 154549 (TRBV3-1, TRBJ2-1)
CASSQDLPGRPLFDEQFF

SEQ ID NO: 309099 - protein, 14 aa, Homo sapiens
  CDR3 for alpha chain variable domain of TCR clone 154550 (TRAV12-2, TRAJ13)
CAVKKTGGYQKVTF

SEQ ID NO: 309100 - protein, 17 aa, Homo sapiens
  CDR3 for beta chain variable domain of TCR clone 154550 (TRBV13, TRBJ2-3)
CAGSLSRVAGGRNTQYF

SEQ ID NO: 309101 - protein, 14 aa, Homo sapiens
  CDR3 for alpha chain variable domain of TCR clone 154551 (TRAV12-3, TRAJ10)
SHLPLTGGGNKLTF

SEQ ID NO: 309102 - protein, 12 aa, Homo sapiens
  CDR3 for beta chain variable domain of TCR clone 154551 (TRBV7-9, TRBJ2-7)
CASSIKREELYF

SEQ ID NO: 309103 - protein, 18 aa, Homo sapiens
  CDR3 for alpha chain variable domain of TCR clone 154552 (TRAV13-1, TRAJ52)
CAASKSSAGGTSYGKLTF

SEQ ID NO: 309104 - protein, 15 aa, Homo sapiens
  CDR3 for beta chain variable domain of TCR clone 154552 (TRBV6-3, TRBJ2-7)
CASSSPGTVFYEQYF

SEQ ID NO: 309105 - protein, 16 aa, Homo sapiens
  CDR3 for alpha chain variable domain of TCR clone 154553 (TRAV30, TRAJ24)
CGTEIVYADSWGKFQF

SEQ ID NO: 309106 - protein, 15 aa, Homo sapiens
  CDR3 for beta chain variable domain of TCR clone 154553 (TRBV9, TRBJ1-6)
CASSVAGTGDSPLHF

SEQ ID NO: 309107 - protein, 16 aa, Homo sapiens
  CDR3 for alpha chain variable domain of TCR clone 154554 (TRAV12-3, TRAJ40)
CAMSWNLQIHLWNRHQ

SEQ ID NO: 309108 - protein, 15 aa, Homo sapiens
  CDR3 for beta chain variable domain of TCR clone 154554 (TRBV7-3, TRBJ2-2)
CASSETGQGTGELFF

SEQ ID NO: 309109 - protein, 13 aa, Homo sapiens
  CDR3 for alpha chain variable domain of TCR clone 154555 (TRAV8-3, TRAJ10)
CAVGHTHVRRKQT

SEQ ID NO: 309110 - protein, 10 aa, Homo sapiens
  CDR3 for beta chain variable domain of TCR clone 154555 (TRBV20-1, TRBJ2-5)
CSARFETQYF

SEQ ID NO: 309111 - protein, 16 aa, Homo sapiens
  CDR3 for alpha chain variable domain of TCR clone 154556 (TRAV1-2, TRAJ10)
CAVRGVLTGGGNKLTF

SEQ ID NO: 309112 - protein, 16 aa, Homo sapiens
  CDR3 for beta chain variable domain of TCR clone 154556 (TRBV2, TRBJ2-7)
CASSEPWTGPSYEQYF

SEQ ID NO: 309113 - protein, 14 aa, Homo sapiens
  CDR3 for alpha chain variable domain of TCR clone 154557 (TRAV13-1, TRAJ4)
CAATLPSGYNRLIF

SEQ ID NO: 309114 - protein, 14 aa, Homo sapiens
  CDR3 for beta chain variable domain of TCR clone 154557 (TRBV19, TRBJ2-1)
CASPTFVLSGEQFF

SEQ ID NO: 309115 - protein, 23 aa, Homo sapiens
  CDR3 for alpha chain variable domain of TCR clone 154558 (TRAV2, TRAJ26)
GRQMLLFTTVLGPPGDYGQNVVF

SEQ ID NO: 309116 - protein, 17 aa, Homo sapiens
  CDR3 for beta chain variable domain of TCR clone 154558 (TRBV11-2, TRBJ2-1)
CASSLYPPGVEYNEQFF

SEQ ID NO: 309117 - protein, 16 aa, Homo sapiens
  CDR3 for alpha chain variable domain of TCR clone 154559 (TRAV3, TRAJ37)
CAVRGKGSGNTGKLIF

SEQ ID NO: 309118 - protein, 18 aa, Homo sapiens
  CDR3 for beta chain variable domain of TCR clone 154559 (TRBV28, TRBJ1-5)
CASSFRGGYSNQPSILVM

SEQ ID NO: 309119 - protein, 23 aa, Homo sapiens
  CDR3 for alpha chain variable domain of TCR clone 154560 (TRAV26-1, TRAJ38)
CIADNAGNNHIQNPYPAVYQLRD

SEQ ID NO: 309120 - protein, 13 aa, Homo sapiens
  CDR3 for beta chain variable domain of TCR clone 154560 (TRBV7-3, TRBJ1-1)
CASSQDWGAEAFF

SEQ ID NO: 309121 - protein, 14 aa, Homo sapiens
  CDR3 for alpha chain variable domain of TCR clone 154561 (TRAV1-2, TRAJ8)
CAVREDPGFQKLVF

SEQ ID NO: 309122 - protein, 15 aa, Homo sapiens
  CDR3 for beta chain variable domain of TCR clone 154561 (TRBV28, TRBJ2-7)
CASSFRGQGRYEQYF

SEQ ID NO: 309123 - protein, 10 aa, Homo sapiens
  CDR3 for alpha chain variable domain of TCR clone 154562 (TRAV8-4, TRAJ39)
CAVSGNMLTF

SEQ ID NO: 309124 - protein, 14 aa, Homo sapiens
  CDR3 for beta chain variable domain of TCR clone 154562 (TRBV6-1, TRBJ1-3)
CASVQGGGGNTIYF

SEQ ID NO: 309125 - protein, 10 aa, Homo sapiens
  CDR3 for alpha chain variable domain of TCR clone 154563 (TRAV23/DV6, TRAJ57)
CAASSTLSQG

SEQ ID NO: 309126 - protein, 15 aa, Homo sapiens
  CDR3 for beta chain variable domain of TCR clone 154563 (TRBV2, TRBJ2-1)
CASSEEREGDNEQFF

SEQ ID NO: 309127 - protein, 13 aa, Homo sapiens
  CDR3 for alpha chain variable domain of TCR clone 154564 (TRAV12-3, TRAJ47)
CAMKKEYGNKLVF

SEQ ID NO: 309128 - protein, 17 aa, Homo sapiens
  CDR3 for beta chain variable domain of TCR clone 154564 (TRBV11-2, TRBJ2-7)
CASSLYPPGVEYNEQYF

SEQ ID NO: 309129 - protein, 15 aa, Homo sapiens
  CDR3 for alpha chain variable domain of TCR clone 154565 (TRAV3, TRAJ4)
CAVRDGTGGYNKRIF

SEQ ID NO: 309130 - protein, 16 aa, Homo sapiens
  CDR3 for beta chain variable domain of TCR clone 154565 (TRBV10-3, TRBJ1-6)
CAISERRGQGNSPLHF

SEQ ID NO: 309131 - protein, 13 aa, Homo sapiens
  CDR3 for alpha chain variable domain of TCR clone 154566 (TRAV3, TRAJ21)
CAVREPDSNKFYF

SEQ ID NO: 309132 - protein, 13 aa, Homo sapiens
  CDR3 for beta chain variable domain of TCR clone 154566 (TRBV20-1, TRBJ2-5)
CSARRGTGATQYF

SEQ ID NO: 309133 - protein, 13 aa, Homo sapiens
  CDR3 for alpha chain variable domain of TCR clone 154567 (TRAV12-3, TRAJ43)
CAMIRPNNNDMRF

SEQ ID NO: 309134 - protein, 12 aa, Homo sapiens
  CDR3 for beta chain variable domain of TCR clone 154567 (TRBV11-2, TRBJ2-5)
CASSLGQETQDF

SEQ ID NO: 309135 - protein, 15 aa, Homo sapiens
  CDR3 for alpha chain variable domain of TCR clone 154568 (TRAV4, TRAJ10)
CLVGDEEGGGNKLTF

SEQ ID NO: 309136 - protein, 15 aa, Homo sapiens
  CDR3 for beta chain variable domain of TCR clone 154568 (TRBV7-2, TRBJ2-7)
CASSLKGQGTYEQYF

SEQ ID NO: 309137 - protein, 12 aa, Homo sapiens
  CDR3 for alpha chain variable domain of TCR clone 154569 (TRAV12-3, TRAJ17)
CAMTPTGNKLTF

SEQ ID NO: 309138 - protein, 15 aa, Homo sapiens
  CDR3 for beta chain variable domain of TCR clone 154569 (TRBV11-2, TRBJ2-2)
CASSSDRVNAGELFF

SEQ ID NO: 309139 - protein, 15 aa, Homo sapiens
  CDR3 for alpha chain variable domain of TCR clone 154570 (TRAV26-1, TRAJ15)
CIVRDANQAGTALIF

SEQ ID NO: 309140 - protein, 13 aa, Homo sapiens
  CDR3 for beta chain variable domain of TCR clone 154570 (TRBV10-3, TRBJ2-7)
CAISEAGPYEQCF

SEQ ID NO: 309141 - protein, 11 aa, Homo sapiens
  CDR3 for alpha chain variable domain of TCR clone 154571 (TRAV1-1, TRAJ23)
CAVRQGGKLIF

SEQ ID NO: 309142 - protein, 20 aa, Homo sapiens
  CDR3 for beta chain variable domain of TCR clone 154571 (TRBV11-2, TRBJ1-6)
CASSLVLATGGSVHPSTLGT

SEQ ID NO: 309143 - protein, 13 aa, Homo sapiens
  CDR3 for alpha chain variable domain of TCR clone 154572 (TRAV13-1, TRAJ43)
CAASKNNNNDMRF

SEQ ID NO: 309144 - protein, 13 aa, Homo sapiens
  CDR3 for beta chain variable domain of TCR clone 154572 (TRBV10-3, TRBJ2-7)
CASKLAVNYEQYF

SEQ ID NO: 309145 - protein, 15 aa, Homo sapiens
  CDR3 for alpha chain variable domain of TCR clone 154573 (TRAV30, TRAJ13)
CGTQGVTGGYQKVTF

SEQ ID NO: 309146 - protein, 16 aa, Homo sapiens
  CDR3 for beta chain variable domain of TCR clone 154573 (TRBV5-1, TRBJ2-3)
CASSLGLAVYTDTQYF

SEQ ID NO: 309147 - protein, 14 aa, Homo sapiens
  CDR3 for alpha chain variable domain of TCR clone 154574 (TRAV3, TRAJ34)
CAVRAPGNTDKLIF

SEQ ID NO: 309148 - protein, 16 aa, Homo sapiens
  CDR3 for beta chain variable domain of TCR clone 154574 (TRBV12-4, TRBJ1-5)
CASSRPVGGSNQPQHF

SEQ ID NO: 309149 - protein, 21 aa, Homo sapiens
  CDR3 for alpha chain variable domain of TCR clone 154575 (TRAV12-3, TRAJ33)
SPVIQPPTSAMSVNSNYQLIW

SEQ ID NO: 309150 - protein, 13 aa, Homo sapiens
  CDR3 for beta chain variable domain of TCR clone 154575 (TRBV7-2, TRBJ2-2)
CASSLAVTGELFF

SEQ ID NO: 309151 - protein, 13 aa, Homo sapiens
  CDR3 for alpha chain variable domain of TCR clone 154576 (TRAV35, TRAJ44)
FAGLSGTASKLTF

SEQ ID NO: 309152 - protein, 17 aa, Homo sapiens
  CDR3 for beta chain variable domain of TCR clone 154576 (TRBV7-8, TRBJ1-2)
CASSLRPLQGHLYGYTF

SEQ ID NO: 309153 - protein, 16 aa, Homo sapiens
  CDR3 for alpha chain variable domain of TCR clone 154577 (TRAV14/DV4, TRAJ21)
CAMREGPENNFNKLYF

SEQ ID NO: 309154 - protein, 12 aa, Homo sapiens
  CDR3 for beta chain variable domain of TCR clone 154577 (TRBV29-1, TRBJ2-2)
CSVDKYTGELFF

SEQ ID NO: 309155 - protein, 13 aa, Homo sapiens
  CDR3 for alpha chain variable domain of TCR clone 154578 (TRAV12-2, TRAJ20)
CAVYPSNDYKLSF

SEQ ID NO: 309156 - protein, 14 aa, Homo sapiens
  CDR3 for beta chain variable domain of TCR clone 154578 (TRBV27, TRBJ2-3)
CASRDSPITDTQYF

SEQ ID NO: 309157 - protein, 13 aa, Homo sapiens
  CDR3 for alpha chain variable domain of TCR clone 154579 (TRAV3, TRAJ21)
RAVREPDFNKFYS

SEQ ID NO: 309158 - protein, 13 aa, Homo sapiens
  CDR3 for beta chain variable domain of TCR clone 154579 (TRBV9, TRBJ2-1)
CASSPSGGNEQFF

SEQ ID NO: 309159 - protein, 16 aa, Homo sapiens
  CDR3 for alpha chain variable domain of TCR clone 154580 (TRAV1-1, TRAJ45)
CAVRAYSGGGADGLTF

SEQ ID NO: 309160 - protein, 13 aa, Homo sapiens
  CDR3 for beta chain variable domain of TCR clone 154580 (TRBV20-1, TRBJ1-2)
RSARGTADYGYTF

SEQ ID NO: 309161 - protein, 14 aa, Homo sapiens
  CDR3 for alpha chain variable domain of TCR clone 154581 (TRAV3, TRAJ15)
CAVTLNQAGTALIF

SEQ ID NO: 309162 - protein, 18 aa, Homo sapiens
  CDR3 for beta chain variable domain of TCR clone 154581 (TRBV11-2, TRBJ2-3)
CASSVRTSGSKKTDTQYF

SEQ ID NO: 309163 - protein, 14 aa, Homo sapiens
  CDR3 for alpha chain variable domain of TCR clone 154582 (TRAV1-2, TRAJ16)
CSVNRFSDGQKLLF

SEQ ID NO: 309164 - protein, 12 aa, Homo sapiens
  CDR3 for beta chain variable domain of TCR clone 154582 (TRBV7-8, TRBJ2-7)
CASSLGDREQYF

SEQ ID NO: 309165 - protein, 14 aa, Homo sapiens
  CDR3 for alpha chain variable domain of TCR clone 154583 (TRAV13-1, TRAJ44)
CAAKATGTASKLTF

SEQ ID NO: 309166 - protein, 12 aa, Homo sapiens
  CDR3 for beta chain variable domain of TCR clone 154583 (TRBV7-3, TRBJ2-1)
CASSFINNEQFF

SEQ ID NO: 309167 - protein, 15 aa, Homo sapiens
  CDR3 for alpha chain variable domain of TCR clone 154584 (TRAV3, TRAJ32)
CAVSSYGGATNKPIF

SEQ ID NO: 309168 - protein, 13 aa, Homo sapiens
  CDR3 for beta chain variable domain of TCR clone 154584 (TRBV15, TRBJ1-6)
CATSGGLNSPLHF

SEQ ID NO: 309169 - protein, 11 aa, Homo sapiens
  CDR3 for alpha chain variable domain of TCR clone 154585 (TRAV2, TRAJ13)
CASGGYQKVTF

SEQ ID NO: 309170 - protein, 14 aa, Homo sapiens
  CDR3 for beta chain variable domain of TCR clone 154585 (TRBV6-3, TRBJ1-1)
CASSNLVPGAEAFF

SEQ ID NO: 309171 - protein, 14 aa, Homo sapiens
  CDR3 for alpha chain variable domain of TCR clone 154586 (TRAV29/DV5, TRAJ28)
CAATEGAGSYQLTF

SEQ ID NO: 309172 - protein, 15 aa, Homo sapiens
  CDR3 for beta chain variable domain of TCR clone 154586 (TRBV28, TRBJ2-5)
CASSSGRTIQETQYF

SEQ ID NO: 309173 - protein, 11 aa, Homo sapiens
  CDR3 for alpha chain variable domain of TCR clone 154587 (TRAV17, TRAJ43)
CATDVTGDMRF

SEQ ID NO: 309174 - protein, 14 aa, Homo sapiens
  CDR3 for beta chain variable domain of TCR clone 154587 (TRBV12-4, TRBJ1-1)
CASRPGQGRTQAFF

SEQ ID NO: 309175 - protein, 16 aa, Homo sapiens
  CDR3 for alpha chain variable domain of TCR clone 154588 (TRAV30, TRAJ24)
CGTEIVDADSWGKFQF

SEQ ID NO: 309176 - protein, 15 aa, Homo sapiens
  CDR3 for beta chain variable domain of TCR clone 154588 (TRBV2, TRBJ2-1)
CASSDRSSGAREQFF

SEQ ID NO: 309177 - protein, 15 aa, Homo sapiens
  CDR3 for alpha chain variable domain of TCR clone 154589 (TRAV27, TRAJ38)
CAARRNAGNNRKLIW

SEQ ID NO: 309178 - protein, 16 aa, Homo sapiens
  CDR3 for beta chain variable domain of TCR clone 154589 (TRBV9, TRBJ2-1)
CASSVGGGGNYNEQFF

SEQ ID NO: 309179 - protein, 13 aa, Homo sapiens
  CDR3 for alpha chain variable domain of TCR clone 154590 (TRAV3, TRAJ27)
CAVRPLGAGEPTF

SEQ ID NO: 309180 - protein, 13 aa, Homo sapiens
  CDR3 for beta chain variable domain of TCR clone 154590 (TRBV7-9, TRBJ2-3)
CASSPGSTDTQYF

SEQ ID NO: 309181 - protein, 14 aa, Homo sapiens
  CDR3 for alpha chain variable domain of TCR clone 154591 (TRAV12-1, TRAJ17)
CVVNYKAPGNKLTF

SEQ ID NO: 309182 - protein, 17 aa, Homo sapiens
  CDR3 for beta chain variable domain of TCR clone 154591 (TRBV20-1, TRBJ2-1)
CSASSSGLAGSYNEQFF

SEQ ID NO: 309183 - protein, 12 aa, Homo sapiens
  CDR3 for alpha chain variable domain of TCR clone 154592 (TRAV3, TRAJ20)
CAVRDHDYKLSF

SEQ ID NO: 309184 - protein, 15 aa, Homo sapiens
  CDR3 for beta chain variable domain of TCR clone 154592 (TRBV9, TRBJ1-6)
CASSVAETGDSPLHF

SEQ ID NO: 309185 - protein, 13 aa, Homo sapiens
  CDR3 for alpha chain variable domain of TCR clone 154593 (TRAV20, TRAJ34)
CAVSSYNTDKLIL

SEQ ID NO: 309186 - protein, 13 aa, Homo sapiens
  CDR3 for beta chain variable domain of TCR clone 154593 (TRBV7-9, TRBJ1-2)
CASSLKQNYGDTF

SEQ ID NO: 309187 - protein, 13 aa, Homo sapiens
  CDR3 for alpha chain variable domain of TCR clone 154594 (TRAV23/DV6, TRAJ45)
CAARRGGADGLTF

SEQ ID NO: 309188 - protein, 14 aa, Homo sapiens
  CDR3 for beta chain variable domain of TCR clone 154594 (TRBV7-2, TRBJ2-3)
CARSLARGTDTQYF

SEQ ID NO: 309189 - protein, 14 aa, Homo sapiens
  CDR3 for alpha chain variable domain of TCR clone 154595 (TRAV8-4, TRAJ48)
CAVSETFGNEKSTF

SEQ ID NO: 309190 - protein, 14 aa, Homo sapiens
  CDR3 for beta chain variable domain of TCR clone 154595 (TRBV13, TRBJ2-7)
CASSLKGASYEQYF

SEQ ID NO: 309191 - protein, 15 aa, Homo sapiens
  CDR3 for alpha chain variable domain of TCR clone 154596 (TRAV12-1, TRAJ5)
CVVNMLETGRRALTF

SEQ ID NO: 309192 - protein, 12 aa, Homo sapiens
  CDR3 for beta chain variable domain of TCR clone 154596 (TRBV11-2, TRBJ2-2)
CAISLGGGELFF

SEQ ID NO: 309193 - protein, 12 aa, Homo sapiens
  CDR3 for alpha chain variable domain of TCR clone 154597 (TRAV26-1, TRAJ43)
CIVRVYNNDTRF

SEQ ID NO: 309194 - protein, 14 aa, Homo sapiens
  CDR3 for beta chain variable domain of TCR clone 154597 (TRBV25-1, TRBJ1-4)
CASSYSGGQEKLFF

SEQ ID NO: 309195 - protein, 16 aa, Homo sapiens
  CDR3 for alpha chain variable domain of TCR clone 154598 (TRAV8-3, TRAJ8)
CAVPRDGNTGFQKLVF

SEQ ID NO: 309196 - protein, 15 aa, Homo sapiens
  CDR3 for beta chain variable domain of TCR clone 154598 (TRBV11-2, TRBJ1-2)
CASSLEGVQRNGYTF

SEQ ID NO: 309197 - protein, 16 aa, Homo sapiens
  CDR3 for alpha chain variable domain of TCR clone 154599 (TRAV16, TRAJ4)
CALSRMFSGGYNKRIF

SEQ ID NO: 309198 - protein, 16 aa, Homo sapiens
  CDR3 for beta chain variable domain of TCR clone 154599 (TRBV12-4, TRBJ1-5)
CASSRPVGGSNQPQHF

SEQ ID NO: 309199 - protein, 16 aa, Homo sapiens
  CDR3 for alpha chain variable domain of TCR clone 154600 (TRAV29/DV5, TRAJ36)
CAASAGGETGANNLFF

SEQ ID NO: 309200 - protein, 16 aa, Homo sapiens
  CDR3 for beta chain variable domain of TCR clone 154600 (TRBV5-1, TRBJ2-3)
CASSLGLAVYTDTQYF

SEQ ID NO: 309201 - protein, 15 aa, Homo sapiens
  CDR3 for alpha chain variable domain of TCR clone 154601 (TRAV12-1, TRAJ9)
CVVSFGDTGGFKTIF

SEQ ID NO: 309202 - protein, 15 aa, Homo sapiens
  CDR3 for beta chain variable domain of TCR clone 154601 (TRBV10-3, TRBJ2-3)
CAISLTSGGTDTQYF

SEQ ID NO: 309203 - protein, 14 aa, Homo sapiens
  CDR3 for alpha chain variable domain of TCR clone 154602 (TRAV13-1, TRAJ45)
CAAIGGGGADGLTF

SEQ ID NO: 309204 - protein, 16 aa, Homo sapiens
  CDR3 for beta chain variable domain of TCR clone 154602 (TRBV7-2, TRBJ1-1)
CASSLGAGWTNAEAFF

SEQ ID NO: 309205 - protein, 14 aa, Homo sapiens
  CDR3 for alpha chain variable domain of TCR clone 154603 (TRAV8-4, TRAJ12)
CAVSPMDSSYKLIS

SEQ ID NO: 309206 - protein, 15 aa, Homo sapiens
  CDR3 for beta chain variable domain of TCR clone 154603 (TRBV5-5, TRBJ2-1)
CASSPEAETYNEQFF

SEQ ID NO: 309207 - protein, 13 aa, Homo sapiens
  CDR3 for alpha chain variable domain of TCR clone 154604 (TRAV30, TRAJ6)
CGFIEGGSYIPTF

SEQ ID NO: 309208 - protein, 17 aa, Homo sapiens
  CDR3 for beta chain variable domain of TCR clone 154604 (TRBV20-1, TRBJ2-1)
CSAPPRLAGTRYNEQFF

SEQ ID NO: 309209 - protein, 16 aa, Homo sapiens
  CDR3 for alpha chain variable domain of TCR clone 154605 (TRAV16, TRAJ42)
CARKMNYGGSQGNLIF

SEQ ID NO: 309210 - protein, 13 aa, Homo sapiens
  CDR3 for beta chain variable domain of TCR clone 154605 (TRBV20-1, TRBJ2-7)
CSASPPSSCEQYF

SEQ ID NO: 309211 - protein, 16 aa, Homo sapiens
  CDR3 for alpha chain variable domain of TCR clone 154606 (TRAV16, TRAJ52)
CALSGVGGTSYGKLAF

SEQ ID NO: 309212 - protein, 15 aa, Homo sapiens
  CDR3 for beta chain variable domain of TCR clone 154606 (TRBV12-4, TRBJ2-5)
CASSPPTGLQETQYF

SEQ ID NO: 309213 - protein, 13 aa, Homo sapiens
  CDR3 for alpha chain variable domain of TCR clone 154607 (TRAV21, TRAJ57)
CAITQGGSEKLVF

SEQ ID NO: 309214 - protein, 17 aa, Homo sapiens
  CDR3 for beta chain variable domain of TCR clone 154607 (TRBV13, TRBJ2-3)
CASSLSRVAGGRNTQYF

SEQ ID NO: 309215 - protein, 13 aa, Homo sapiens
  CDR3 for alpha chain variable domain of TCR clone 154608 (TRAV13-2, TRAJ48)
CAEMDFGNEKLTF

SEQ ID NO: 309216 - protein, 16 aa, Homo sapiens
  CDR3 for beta chain variable domain of TCR clone 154608 (TRBV7-9, TRBJ2-3)
CASSPWREVGTDTQYF

SEQ ID NO: 309217 - protein, 12 aa, Homo sapiens
  CDR3 for alpha chain variable domain of TCR clone 154609 (TRAV1-2, TRAJ24)
CAVVGSWGKFQF

SEQ ID NO: 309218 - protein, 15 aa, Homo sapiens
  CDR3 for beta chain variable domain of TCR clone 154609 (TRBV6-1, TRBJ2-7)
CASSEGVGNPYEQYF

SEQ ID NO: 309219 - protein, 12 aa, Homo sapiens
  CDR3 for alpha chain variable domain of TCR clone 154610 (TRAV22, TRAJ29)
RAPPSGNTPLVF

SEQ ID NO: 309220 - protein, 14 aa, Homo sapiens
  CDR3 for beta chain variable domain of TCR clone 154610 (TRBV11-2, TRBJ2-7)
CASSLGAGAYEQYF

SEQ ID NO: 309221 - protein, 15 aa, Homo sapiens
  CDR3 for alpha chain variable domain of TCR clone 154611 (TRAV12-3, TRAJ17)
CAMSPSLAAGNKLTF

SEQ ID NO: 309222 - protein, 17 aa, Homo sapiens
  CDR3 for beta chain variable domain of TCR clone 154611 (TRBV13, TRBJ2-3)
CASSLSRVAGGRNTQYF

SEQ ID NO: 309223 - protein, 13 aa, Homo sapiens
  CDR3 for alpha chain variable domain of TCR clone 154612 (TRAV21, TRAJ27)
CAARPGNAGKSTF

SEQ ID NO: 309224 - protein, 18 aa, Homo sapiens
  CDR3 for beta chain variable domain of TCR clone 154612 (TRBV25-1, TRBJ1-2)
CASSGLQDGQGLIFGYTF

SEQ ID NO: 309225 - protein, 14 aa, Homo sapiens
  CDR3 for alpha chain variable domain of TCR clone 154613 (TRAV20, TRAJ16)
CAVQENSDGQKLLF

SEQ ID NO: 309226 - protein, 13 aa, Homo sapiens
  CDR3 for beta chain variable domain of TCR clone 154613 (TRBV27, TRBJ2-3)
CASSSLPGDTKYF

SEQ ID NO: 309227 - protein, 18 aa, Homo sapiens
  CDR3 for alpha chain variable domain of TCR clone 154614 (TRAV29/DV5, TRAJ52)
CAAGFRGAGGTSYGKLTF

SEQ ID NO: 309228 - protein, 14 aa, Homo sapiens
  CDR3 for beta chain variable domain of TCR clone 154614 (TRBV4-2, TRBJ2-1)
CARGLDRAYNEQFF

SEQ ID NO: 309229 - protein, 14 aa, Homo sapiens
  CDR3 for alpha chain variable domain of TCR clone 154615 (TRAV20, TRAJ22)
CAVALGGSARQLTV

SEQ ID NO: 309230 - protein, 15 aa, Homo sapiens
  CDR3 for beta chain variable domain of TCR clone 154615 (TRBV7-2, TRBJ1-1)
CASSFAGDRDTEAFF

SEQ ID NO: 309231 - protein, 14 aa, Homo sapiens
  CDR3 for alpha chain variable domain of TCR clone 154616 (TRAV13-1, TRAJ13)
CAASRGGGYQKVTF

SEQ ID NO: 309232 - protein, 14 aa, Homo sapiens
  CDR3 for beta chain variable domain of TCR clone 154616 (TRBV5-1, TRBJ2-7)
CASSATGGYDEQYF

SEQ ID NO: 309233 - protein, 13 aa, Homo sapiens
  CDR3 for alpha chain variable domain of TCR clone 154617 (TRAV8-4, TRAJ34)
YAVTLYNTDKLIF

SEQ ID NO: 309234 - protein, 17 aa, Homo sapiens
  CDR3 for beta chain variable domain of TCR clone 154617 (TRBV7-2, TRBJ2-2)
CASSPSWRGGGTGELFF

SEQ ID NO: 309235 - protein, 16 aa, Homo sapiens
  CDR3 for alpha chain variable domain of TCR clone 154618 (TRAV26-1, TRAJ48)
CIVREPPNFGNEKLTF

SEQ ID NO: 309236 - protein, 14 aa, Homo sapiens
  CDR3 for beta chain variable domain of TCR clone 154618 (TRBV3-1, TRBJ2-5)
CASSQAGPPETQYF

SEQ ID NO: 309237 - protein, 14 aa, Homo sapiens
  CDR3 for alpha chain variable domain of TCR clone 154619 (TRAV1-2, TRAJ33)
CAVRAPDSNYQLIW

SEQ ID NO: 309238 - protein, 14 aa, Homo sapiens
  CDR3 for beta chain variable domain of TCR clone 154619 (TRBV11-3, TRBJ1-6)
CASSFSGGDSPLHF

SEQ ID NO: 309239 - protein, 16 aa, Homo sapiens
  CDR3 for alpha chain variable domain of TCR clone 154620 (TRAV8-1, TRAJ18)
CAVNAGRGSTLGRRYF

SEQ ID NO: 309240 - protein, 15 aa, Homo sapiens
  CDR3 for beta chain variable domain of TCR clone 154620 (TRBV7-2, TRBJ2-5)
CASTPRGASGETQYF

SEQ ID NO: 309241 - protein, 11 aa, Homo sapiens
  CDR3 for alpha chain variable domain of TCR clone 154621 (TRAV21, TRAJ7)
CAAYGNNRLAF

SEQ ID NO: 309242 - protein, 13 aa, Homo sapiens
  CDR3 for beta chain variable domain of TCR clone 154621 (TRBV20-1, TRBJ1-1)
CSAPLGGGTEAFF

SEQ ID NO: 309243 - protein, 11 aa, Homo sapiens
  CDR3 for alpha chain variable domain of TCR clone 154622 (TRAV30, TRAJ43)
CGTDGNKDMRF

SEQ ID NO: 309244 - protein, 11 aa, Homo sapiens
  CDR3 for beta chain variable domain of TCR clone 154622 (TRBV7-9, TRBJ2-3)
CASSPTDTQYF

SEQ ID NO: 309245 - protein, 12 aa, Homo sapiens
  CDR3 for alpha chain variable domain of TCR clone 154623 (TRAV12-3, TRAJ17)
CAMTLTGNKLTF

SEQ ID NO: 309246 - protein, 12 aa, Homo sapiens
  CDR3 for beta chain variable domain of TCR clone 154623 (TRBV6-5, TRBJ2-5)
CASSEGSETQYF

SEQ ID NO: 309247 - protein, 15 aa, Homo sapiens
  CDR3 for alpha chain variable domain of TCR clone 154624 (TRAV12-1, TRAJ41)
CVVNSRAGSGYALNF

SEQ ID NO: 309248 - protein, 14 aa, Homo sapiens
  CDR3 for beta chain variable domain of TCR clone 154624 (TRBV11-3, TRBJ2-7)
CASSPDRNTYEQYF

SEQ ID NO: 309249 - protein, 14 aa, Homo sapiens
  CDR3 for alpha chain variable domain of TCR clone 154625 (TRAV12-2, TRAJ9)
CAVNMEGGGFKTIF

SEQ ID NO: 309250 - protein, 14 aa, Homo sapiens
  CDR3 for beta chain variable domain of TCR clone 154625 (TRBV2, TRBJ2-5)
CASSEILAQETQYF

SEQ ID NO: 309251 - protein, 12 aa, Homo sapiens
  CDR3 for alpha chain variable domain of TCR clone 154626 (TRAV12-3, TRAJ43)
CAISSNNNDMRF

SEQ ID NO: 309252 - protein, 17 aa, Homo sapiens
  CDR3 for beta chain variable domain of TCR clone 154626 (TRBV11-2, TRBJ2-1)
CASSLYPPGVEYNEQFF

SEQ ID NO: 309253 - protein, 14 aa, Homo sapiens
  CDR3 for alpha chain variable domain of TCR clone 154627 (TRAV1-2, TRAJ16)
CAVNRFSDGPKLLF

SEQ ID NO: 309254 - protein, 13 aa, Homo sapiens
  CDR3 for beta chain variable domain of TCR clone 154627 (TRBV19, TRBJ1-2)
CASSVPGQDGYTF

SEQ ID NO: 309255 - protein, 10 aa, Homo sapiens
  CDR3 for alpha chain variable domain of TCR clone 154628 (TRAV1-2, TRAJ34)
CAVNTDKPIL

SEQ ID NO: 309256 - protein, 18 aa, Homo sapiens
  CDR3 for beta chain variable domain of TCR clone 154628 (TRBV7-9, TRBJ2-7)
CASSLTTSGSRTWYEQYF

SEQ ID NO: 309257 - protein, 15 aa, Homo sapiens
  CDR3 for alpha chain variable domain of TCR clone 154629 (TRAV8-3, TRAJ45)
CASSYSGGGSVGLTF

SEQ ID NO: 309258 - protein, 13 aa, Homo sapiens
  CDR3 for beta chain variable domain of TCR clone 154629 (TRBV10-3, TRBJ2-7)
CASKLAVNYEQYF

SEQ ID NO: 309259 - protein, 12 aa, Homo sapiens
  CDR3 for alpha chain variable domain of TCR clone 154630 (TRAV12-3, TRAJ29)
CAAAKGNTPLVF

SEQ ID NO: 309260 - protein, 15 aa, Homo sapiens
  CDR3 for beta chain variable domain of TCR clone 154630 (TRBV5-5, TRBJ2-2)
CASSRQASGAGELFF

SEQ ID NO: 309261 - protein, 13 aa, Homo sapiens
  CDR3 for alpha chain variable domain of TCR clone 154631 (TRAV36/DV7, TRAJ37)
CAVFSSNTGKLIF

SEQ ID NO: 309262 - protein, 16 aa, Homo sapiens
  CDR3 for beta chain variable domain of TCR clone 154631 (TRBV12-4, TRBJ2-5)
CASGPRTSGNQETQYF

SEQ ID NO: 309263 - protein, 16 aa, Homo sapiens
  CDR3 for alpha chain variable domain of TCR clone 154632 (TRAV3, TRAJ10)
CAVRDMRAGGGNKLTF

SEQ ID NO: 309264 - protein, 19 aa, Homo sapiens
  CDR3 for beta chain variable domain of TCR clone 154632 (TRBV19, TRBJ2-5)
CASSIGQVTDFFLGETQYF

SEQ ID NO: 309265 - protein, 11 aa, Homo sapiens
  CDR3 for alpha chain variable domain of TCR clone 154633 (TRAV20, TRAJ39)
CAVKCRQHAHL

SEQ ID NO: 309266 - protein, 15 aa, Homo sapiens
  CDR3 for beta chain variable domain of TCR clone 154633 (TRBV5-1, TRBJ2-3)
CASSVTSGSTDTQYF

SEQ ID NO: 309267 - protein, 13 aa, Homo sapiens
  CDR3 for alpha chain variable domain of TCR clone 154634 (TRAV36/DV7, TRAJ49)
CAGDSKTGNQFYF

SEQ ID NO: 309268 - protein, 12 aa, Homo sapiens
  CDR3 for beta chain variable domain of TCR clone 154634 (TRBV11-3, TRBJ2-2)
CASSLGGGELFF

SEQ ID NO: 309269 - protein, 15 aa, Homo sapiens
  CDR3 for alpha chain variable domain of TCR clone 154635 (TRAV12-2, TRAJ45)
CAVKRTGGGADGLTF

SEQ ID NO: 309270 - protein, 16 aa, Homo sapiens
  CDR3 for beta chain variable domain of TCR clone 154635 (TRBV7-3, TRBJ2-2)
CASSLKRGALSGELFF

SEQ ID NO: 309271 - protein, 14 aa, Homo sapiens
  CDR3 for alpha chain variable domain of TCR clone 154636 (TRAV8-4, TRAJ45)
CASGGGGGSDGLTF

SEQ ID NO: 309272 - protein, 20 aa, Homo sapiens
  CDR3 for beta chain variable domain of TCR clone 154636 (TRBV4-3, TRBJ2-3)
CASSPRVEMRASGRPDTQYF

SEQ ID NO: 309273 - protein, 13 aa, Homo sapiens
  CDR3 for alpha chain variable domain of TCR clone 154637 (TRAV27, TRAJ45)
CRSSGGGADGLTF

SEQ ID NO: 309274 - protein, 19 aa, Homo sapiens
  CDR3 for beta chain variable domain of TCR clone 154637 (TRBV11-2, TRBJ2-1)
CASSLYPQGSSTMSSSSGH

SEQ ID NO: 309275 - protein, 15 aa, Homo sapiens
  CDR3 for alpha chain variable domain of TCR clone 154638 (TRAV8-4, TRAJ3)
CAVTGENLVQQCFQD

SEQ ID NO: 309276 - protein, 16 aa, Homo sapiens
  CDR3 for beta chain variable domain of TCR clone 154638 (TRBV4-2, TRBJ1-1)
CSSSQAGFGMNTEAFF

SEQ ID NO: 309277 - protein, 15 aa, Homo sapiens
  CDR3 for alpha chain variable domain of TCR clone 154639 (TRAV27, TRAJ38)
CAARRNAGNNRKLIC

SEQ ID NO: 309278 - protein, 11 aa, Homo sapiens
  CDR3 for beta chain variable domain of TCR clone 154639 (TRBV12-4, TRBJ2-2)
CASSSAGELFF

SEQ ID NO: 309279 - protein, 13 aa, Homo sapiens
  CDR3 for alpha chain variable domain of TCR clone 154640 (TRAV3, TRAJ21)
CAVREPDFNKFYF

SEQ ID NO: 309280 - protein, 14 aa, Homo sapiens
  CDR3 for beta chain variable domain of TCR clone 154640 (TRBV4-1, TRBJ2-2)
CASSLAVNTGELFF

SEQ ID NO: 309281 - protein, 11 aa, Homo sapiens
  CDR3 for alpha chain variable domain of TCR clone 154641 (TRAV21, TRAJ31)
CAVRNNARLMF

SEQ ID NO: 309282 - protein, 15 aa, Homo sapiens
  CDR3 for beta chain variable domain of TCR clone 154641 (TRBV29-1, TRBJ2-1)
CSVGRHALFYNEQFF

SEQ ID NO: 309283 - protein, 16 aa, Homo sapiens
  CDR3 for alpha chain variable domain of TCR clone 154642 (TRAV4, TRAJ22)
CLVGDLYSGAARQLTF

SEQ ID NO: 309284 - protein, 17 aa, Homo sapiens
  CDR3 for beta chain variable domain of TCR clone 154642 (TRBV11-2, TRBJ2-1)
CASSLYPPGVEYNEQFF

SEQ ID NO: 309285 - protein, 13 aa, Homo sapiens
  CDR3 for alpha chain variable domain of TCR clone 154643 (TRAV27, TRAJ49)
CAPRPYTGNQFYS

SEQ ID NO: 309286 - protein, 18 aa, Homo sapiens
  CDR3 for beta chain variable domain of TCR clone 154643 (TRBV7-3, TRBJ2-5)
CASSLGGAAQGRWETQYF

SEQ ID NO: 309287 - protein, 15 aa, Homo sapiens
  CDR3 for alpha chain variable domain of TCR clone 154644 (TRAV20, TRAJ4)
CAVQVLSGGYNKLIF

SEQ ID NO: 309288 - protein, 13 aa, Homo sapiens
  CDR3 for beta chain variable domain of TCR clone 154644 (TRBV24-1, TRBJ2-2)
CATSDWSTGELFF

SEQ ID NO: 309289 - protein, 14 aa, Homo sapiens
  CDR3 for alpha chain variable domain of TCR clone 154645 (TRAV3, TRAJ21)
CAVRDKDNFNKFYF

SEQ ID NO: 309290 - protein, 15 aa, Homo sapiens
  CDR3 for beta chain variable domain of TCR clone 154645 (TRBV19, TRBJ1-2)
CASSVGQVLNYGYTF

SEQ ID NO: 309291 - protein, 13 aa, Homo sapiens
  CDR3 for alpha chain variable domain of TCR clone 154646 (TRAV2, TRAJ29)
CAAQHSGNTPLVF

SEQ ID NO: 309292 - protein, 14 aa, Homo sapiens
  CDR3 for beta chain variable domain of TCR clone 154646 (TRBV7-9, TRBJ2-4)
CASSLAMGGNMQYF

SEQ ID NO: 309293 - protein, 10 aa, Homo sapiens
  CDR3 for alpha chain variable domain of TCR clone 154647 (TRAV2, TRAJ34)
CAVVNDKLIF

SEQ ID NO: 309294 - protein, 12 aa, Homo sapiens
  CDR3 for beta chain variable domain of TCR clone 154647 (TRBV7-8, TRBJ2-7)
CASSIGDREQYF

SEQ ID NO: 309295 - protein, 13 aa, Homo sapiens
  CDR3 for alpha chain variable domain of TCR clone 154648 (TRAV36/DV7, TRAJ54)
CAVDIQGAQKLVF

SEQ ID NO: 309296 - protein, 13 aa, Homo sapiens
  CDR3 for beta chain variable domain of TCR clone 154648 (TRBV11-2, TRBJ2-5)
CASGHGAKETQYF

SEQ ID NO: 309297 - protein, 16 aa, Homo sapiens
  CDR3 for alpha chain variable domain of TCR clone 154649 (TRAV35, TRAJ28)
CAGYLYSGAGSYQFTL

SEQ ID NO: 309298 - protein, 16 aa, Homo sapiens
  CDR3 for beta chain variable domain of TCR clone 154649 (TRBV5-1, TRBJ2-1)
CASSHGLAGPQNEQFF

SEQ ID NO: 309299 - protein, 14 aa, Homo sapiens
  CDR3 for alpha chain variable domain of TCR clone 154650 (TRAV17, TRAJ37)
CATDGSSNTGKLIF

SEQ ID NO: 309300 - protein, 13 aa, Homo sapiens
  CDR3 for beta chain variable domain of TCR clone 154650 (TRBV28, TRBJ2-7)
CASSPSGTYEQYF

SEQ ID NO: 309301 - protein, 12 aa, Homo sapiens
  CDR3 for alpha chain variable domain of TCR clone 154651 (TRAV12-3, TRAJ17)
CAMTLTVNKLTF

SEQ ID NO: 309302 - protein, 20 aa, Homo sapiens
  CDR3 for beta chain variable domain of TCR clone 154651 (TRBV28, TRBJ2-1)
CASTPIGRSPGLAGGNEQFF

SEQ ID NO: 309303 - protein, 15 aa, Homo sapiens
  CDR3 for alpha chain variable domain of TCR clone 154652 (TRAV17, TRAJ57)
CATGPSQGGSEKLVF

SEQ ID NO: 309304 - protein, 16 aa, Homo sapiens
  CDR3 for beta chain variable domain of TCR clone 154652 (TRBV12-4, TRBJ1-5)
CAGSRPVGRSNQTQHF

SEQ ID NO: 309305 - protein, 17 aa, Homo sapiens
  CDR3 for alpha chain variable domain of TCR clone 154653 (TRAV38-2/DV8, TRAJ28)
CAFLTLYSGSGSYQLTF

SEQ ID NO: 309306 - protein, 14 aa, Homo sapiens
  CDR3 for beta chain variable domain of TCR clone 154653 (TRBV7-2, TRBJ2-5)
CASSLSGGGETQYF

SEQ ID NO: 309307 - protein, 14 aa, Homo sapiens
  CDR3 for alpha chain variable domain of TCR clone 154654 (TRAV12-2, TRAJ13)
CAVKQTGGYQKVTF

SEQ ID NO: 309308 - protein, 15 aa, Homo sapiens
  CDR3 for beta chain variable domain of TCR clone 154654 (TRBV27, TRBJ2-1)
CASSNGGGSANEQFF

SEQ ID NO: 309309 - protein, 15 aa, Homo sapiens
  CDR3 for alpha chain variable domain of TCR clone 154655 (TRAV26-1, TRAJ39)
CTVRVARNAGNMLTF

SEQ ID NO: 309310 - protein, 16 aa, Homo sapiens
  CDR3 for beta chain variable domain of TCR clone 154655 (TRBV5-1, TRBJ2-1)
CASSLTLAGAGMSSSS

SEQ ID NO: 309311 - protein, 14 aa, Homo sapiens
  CDR3 for alpha chain variable domain of TCR clone 154656 (TRAV13-1, TRAJ20)
CSARPGSNDYKLSF

SEQ ID NO: 309312 - protein, 17 aa, Homo sapiens
  CDR3 for beta chain variable domain of TCR clone 154656 (TRBV11-2, TRBJ2-1)
CASSLSPPGVEYNEQFF

SEQ ID NO: 309313 - protein, 17 aa, Homo sapiens
  CDR3 for alpha chain variable domain of TCR clone 154657 (TRAV38-1, TRAJ28)
CAFMKATSGAGSYQLTF

SEQ ID NO: 309314 - protein, 15 aa, Homo sapiens
  CDR3 for beta chain variable domain of TCR clone 154657 (TRBV5-1, TRBJ2-4)
CASSLGGGGSYIQYF

SEQ ID NO: 309315 - protein, 13 aa, Homo sapiens
  CDR3 for alpha chain variable domain of TCR clone 154658 (TRAV35, TRAJ27)
CAGQEGDAGKSTF

SEQ ID NO: 309316 - protein, 13 aa, Homo sapiens
  CDR3 for beta chain variable domain of TCR clone 154658 (TRBV28, TRBJ1-1)
CASSKQGWTEAFF

SEQ ID NO: 309317 - protein, 15 aa, Homo sapiens
  CDR3 for alpha chain variable domain of TCR clone 154659 (TRAV8-3, TRAJ27)
CAVGPSKTNAGTSTF

SEQ ID NO: 309318 - protein, 15 aa, Homo sapiens
  CDR3 for beta chain variable domain of TCR clone 154659 (TRBV7-2, TRBJ2-1)
CASSSGQAGGNEQFF

SEQ ID NO: 309319 - protein, 16 aa, Homo sapiens
  CDR3 for alpha chain variable domain of TCR clone 154660 (TRAV3, TRAJ37)
CAVRGKGSGNTGKLIF

SEQ ID NO: 309320 - protein, 15 aa, Homo sapiens
  CDR3 for beta chain variable domain of TCR clone 154660 (TRBV2, TRBJ2-5)
CASSSSVAGGETQYF

SEQ ID NO: 309321 - protein, 14 aa, Homo sapiens
  CDR3 for alpha chain variable domain of TCR clone 154661 (TRAV8-3, TRAJ4)
CAVGAAGGYIKRIF

SEQ ID NO: 309322 - protein, 15 aa, Homo sapiens
  CDR3 for beta chain variable domain of TCR clone 154661 (TRBV6-5, TRBJ1-2)
CASSYSPPRFYGYTF

SEQ ID NO: 309323 - protein, 15 aa, Homo sapiens
  CDR3 for alpha chain variable domain of TCR clone 154662 (TRAV8-3, TRAJ45)
CASSYSGGGADGLPF

SEQ ID NO: 309324 - protein, 13 aa, Homo sapiens
  CDR3 for beta chain variable domain of TCR clone 154662 (TRBV7-9, TRBJ1-2)
CASSLKQNYGYTF

SEQ ID NO: 309325 - protein, 13 aa, Homo sapiens
  CDR3 for alpha chain variable domain of TCR clone 154663 (TRAV4, TRAJ41)
CLVGENSGYALNF

SEQ ID NO: 309326 - protein, 18 aa, Homo sapiens
  CDR3 for beta chain variable domain of TCR clone 154663 (TRBV11-2, TRBJ2-3)
CASSLGGASRGAPNTQYF

SEQ ID NO: 309327 - protein, 13 aa, Homo sapiens
  CDR3 for alpha chain variable domain of TCR clone 154664 (TRAV14/DV4, TRAJ20)
CAMRESNDYKLSF

SEQ ID NO: 309328 - protein, 15 aa, Homo sapiens
  CDR3 for beta chain variable domain of TCR clone 154664 (TRBV7-9, TRBJ1-1)
SASSRPGTANTEAFF

SEQ ID NO: 309329 - protein, 11 aa, Homo sapiens
  CDR3 for alpha chain variable domain of TCR clone 154665 (TRAV21, TRAJ31)
CAVRNNARLMF

SEQ ID NO: 309330 - protein, 14 aa, Homo sapiens
  CDR3 for beta chain variable domain of TCR clone 154665 (TRBV18, TRBJ2-5)
CASSPGVSQETQYF

SEQ ID NO: 309331 - protein, 16 aa, Homo sapiens
  CDR3 for alpha chain variable domain of TCR clone 154666 (TRAV1-2, TRAJ10)
CAVRGVLTGGGNKLTF

SEQ ID NO: 309332 - protein, 15 aa, Homo sapiens
  CDR3 for beta chain variable domain of TCR clone 154666 (TRBV7-9, TRBJ1-6)
CASSSPGRGNPPLHF

SEQ ID NO: 309333 - protein, 17 aa, Homo sapiens
  CDR3 for alpha chain variable domain of TCR clone 154667 (TRAV3, TRAJ12)
CAVRDGGRLDSSYKLIF

SEQ ID NO: 309334 - protein, 19 aa, Homo sapiens
  CDR3 for beta chain variable domain of TCR clone 154667 (TRBV6-5, TRBJ2-1)
CASRSGGLAGESSYNEQFF

SEQ ID NO: 309335 - protein, 15 aa, Homo sapiens
  CDR3 for alpha chain variable domain of TCR clone 154668 (TRAV25, TRAJ52)
CAGRPGGTSYVELTF

SEQ ID NO: 309336 - protein, 17 aa, Homo sapiens
  CDR3 for beta chain variable domain of TCR clone 154668 (TRBV7-8, TRBJ2-6)
CASSAGTGGAGANVLTL

SEQ ID NO: 309337 - protein, 13 aa, Homo sapiens
  CDR3 for alpha chain variable domain of TCR clone 154669 (TRAV20, TRAJ21)
CAVEGYNFNKFYF

SEQ ID NO: 309338 - protein, 14 aa, Homo sapiens
  CDR3 for beta chain variable domain of TCR clone 154669 (TRBV12-5, TRBJ2-5)
CASGSRTHQETLYF

SEQ ID NO: 309339 - protein, 16 aa, Homo sapiens
  CDR3 for alpha chain variable domain of TCR clone 154670 (TRAV38-1, TRAJ32)
CALMKGGGGATNNLIF

SEQ ID NO: 309340 - protein, 13 aa, Homo sapiens
  CDR3 for beta chain variable domain of TCR clone 154670 (TRBV20-1, TRBJ2-5)
CSAREAFQETQYF

SEQ ID NO: 309341 - protein, 16 aa, Homo sapiens
  CDR3 for alpha chain variable domain of TCR clone 154671 (TRAV30, TRAJ24)
CGTEIVDADSGGKFQF

SEQ ID NO: 309342 - protein, 12 aa, Homo sapiens
  CDR3 for beta chain variable domain of TCR clone 154671 (TRBV11-2, TRBJ2-2)
CASSLPTGELFF

SEQ ID NO: 309343 - protein, 12 aa, Homo sapiens
  CDR3 for alpha chain variable domain of TCR clone 154672 (TRAV16, TRAJ26)
CALRSYGQNFVF

SEQ ID NO: 309344 - protein, 15 aa, Homo sapiens
  CDR3 for beta chain variable domain of TCR clone 154672 (TRBV7-2, TRBJ2-1)
CASSLVAGRYNEQFF

SEQ ID NO: 309345 - protein, 13 aa, Homo sapiens
  CDR3 for alpha chain variable domain of TCR clone 154673 (TRAV25, TRAJ26)
CAGVDNYGQNFVF

SEQ ID NO: 309346 - protein, 15 aa, Homo sapiens
  CDR3 for beta chain variable domain of TCR clone 154673 (TRBV10-3, TRBJ2-1)
CAIRNGTSGHNEQFF

SEQ ID NO: 309347 - protein, 17 aa, Homo sapiens
  CDR3 for alpha chain variable domain of TCR clone 154674 (TRAV36/DV7, TRAJ52)
CAVAQRAGRTSYGKLTF

SEQ ID NO: 309348 - protein, 14 aa, Homo sapiens
  CDR3 for beta chain variable domain of TCR clone 154674 (TRBV19, TRBJ2-1)
CASPTFVLSGEQFF

SEQ ID NO: 309349 - protein, 11 aa, Homo sapiens
  CDR3 for alpha chain variable domain of TCR clone 154675 (TRAV17, TRAJ39)
CATGAGNMLTF

SEQ ID NO: 309350 - protein, 16 aa, Homo sapiens
  CDR3 for beta chain variable domain of TCR clone 154675 (TRBV5-1, TRBJ2-1)
CASSFGVSGSYNEQFS

SEQ ID NO: 309351 - protein, 14 aa, Homo sapiens
  CDR3 for alpha chain variable domain of TCR clone 154676 (TRAV16, TRAJ32)
CALKSGGATNKLIF

SEQ ID NO: 309352 - protein, 14 aa, Homo sapiens
  CDR3 for beta chain variable domain of TCR clone 154676 (TRBV19, TRBJ2-7)
CASSMGQGASEQYF

SEQ ID NO: 309353 - protein, 14 aa, Homo sapiens
  CDR3 for alpha chain variable domain of TCR clone 154677 (TRAV8-4, TRAJ4)
CAVSPSGGYNKLIF

SEQ ID NO: 309354 - protein, 14 aa, Homo sapiens
  CDR3 for beta chain variable domain of TCR clone 154677 (TRBV19, TRBJ2-1)
CASPTFVLSGEQFF

SEQ ID NO: 309355 - protein, 13 aa, Homo sapiens
  CDR3 for alpha chain variable domain of TCR clone 154678 (TRAV21, TRAJ27)
CAARPGNAGKSPF

SEQ ID NO: 309356 - protein, 15 aa, Homo sapiens
  CDR3 for beta chain variable domain of TCR clone 154678 (TRBV6-3, TRBJ2-7)
CASSSPGTVFYEQYF

SEQ ID NO: 309357 - protein, 15 aa, Homo sapiens
  CDR3 for alpha chain variable domain of TCR clone 154679 (TRAV26-2, TRAJ57)
CILRDIRGGSEKLVF

SEQ ID NO: 309358 - protein, 16 aa, Homo sapiens
  CDR3 for beta chain variable domain of TCR clone 154679 (TRBV7-3, TRBJ2-2)
CASSLKRGTLAGELFF

SEQ ID NO: 309359 - protein, 11 aa, Homo sapiens
  CDR3 for alpha chain variable domain of TCR clone 154680 (TRAV20, TRAJ34)
CTRANTDKLIF

SEQ ID NO: 309360 - protein, 15 aa, Homo sapiens
  CDR3 for beta chain variable domain of TCR clone 154680 (TRBV2, TRBJ2-1)
CASSVTSEGTDEQFF

SEQ ID NO: 309361 - protein, 14 aa, Homo sapiens
  CDR3 for alpha chain variable domain of TCR clone 154681 (TRAV8-6, TRAJ21)
CHKFYFGSGTKLNV

SEQ ID NO: 309362 - protein, 15 aa, Homo sapiens
  CDR3 for beta chain variable domain of TCR clone 154681 (TRBV12-4, TRBJ2-7)
CASSQTGAISYEQYF

SEQ ID NO: 309363 - protein, 17 aa, Homo sapiens
  CDR3 for alpha chain variable domain of TCR clone 154682 (TRAV8-6, TRAJ58)
CAVSSWVGETSGSRLTF

SEQ ID NO: 309364 - protein, 16 aa, Homo sapiens
  CDR3 for beta chain variable domain of TCR clone 154682 (TRBV12-4, TRBJ2-5)
CASSFCVRGRQETQYF

SEQ ID NO: 309365 - protein, 14 aa, Homo sapiens
  CDR3 for alpha chain variable domain of TCR clone 154683 (TRAV12-1, TRAJ43)
CVVNGRSNNNDMRC

SEQ ID NO: 309366 - protein, 13 aa, Homo sapiens
  CDR3 for beta chain variable domain of TCR clone 154683 (TRBV27, TRBJ1-1)
CASSLSIGAEAFF

SEQ ID NO: 309367 - protein, 13 aa, Homo sapiens
  CDR3 for alpha chain variable domain of TCR clone 154684 (TRAV12-2, TRAJ27)
CAVTYNNAGKSTF

SEQ ID NO: 309368 - protein, 15 aa, Homo sapiens
  CDR3 for beta chain variable domain of TCR clone 154684 (TRBV10-3, TRBJ2-3)
CAISLTSGGTDTQYF

SEQ ID NO: 309369 - protein, 12 aa, Homo sapiens
  CDR3 for alpha chain variable domain of TCR clone 154685 (TRAV12-2, TRAJ31)
YAVNTPDARLMF

SEQ ID NO: 309370 - protein, 12 aa, Homo sapiens
  CDR3 for beta chain variable domain of TCR clone 154685 (TRBV12-4, TRBJ2-7)
CASSLGGYEQYF

SEQ ID NO: 309371 - protein, 15 aa, Homo sapiens
  CDR3 for alpha chain variable domain of TCR clone 154686 (TRAV2, TRAJ22)
CAVPSRGGSATQLTF

SEQ ID NO: 309372 - protein, 11 aa, Homo sapiens
  CDR3 for beta chain variable domain of TCR clone 154686 (TRBV27, TRBJ2-3)
CASSLGDTQYF

SEQ ID NO: 309373 - protein, 13 aa, Homo sapiens
  CDR3 for alpha chain variable domain of TCR clone 154687 (TRAV21, TRAJ45)
CAAPGGGADGLTF

SEQ ID NO: 309374 - protein, 12 aa, Homo sapiens
  CDR3 for beta chain variable domain of TCR clone 154687 (TRBV7-9, TRBJ1-5)
CASSPQGQTQHF

SEQ ID NO: 309375 - protein, 12 aa, Homo sapiens
  CDR3 for alpha chain variable domain of TCR clone 154688 (TRAV12-1, TRAJ40)
CVFYSGTYKYIF

SEQ ID NO: 309376 - protein, 15 aa, Homo sapiens
  CDR3 for beta chain variable domain of TCR clone 154688 (TRBV4-1, TRBJ2-3)
CASSRGQGIPDTQYF

SEQ ID NO: 309377 - protein, 14 aa, Homo sapiens
  CDR3 for alpha chain variable domain of TCR clone 154689 (TRAV17, TRAJ35)
CATDRPGFGNVLHC

SEQ ID NO: 309378 - protein, 14 aa, Homo sapiens
  CDR3 for beta chain variable domain of TCR clone 154689 (TRBV4-1, TRBJ2-2)
CASSQAVNTGELFF

SEQ ID NO: 309379 - protein, 16 aa, Homo sapiens
  CDR3 for alpha chain variable domain of TCR clone 154690 (TRAV21, TRAJ37)
CTVRPRGSSNTGKLIF

SEQ ID NO: 309380 - protein, 13 aa, Homo sapiens
  CDR3 for beta chain variable domain of TCR clone 154690 (TRBV7-9, TRBJ2-5)
CASLSPGQETQYF

SEQ ID NO: 309381 - protein, 11 aa, Homo sapiens
  CDR3 for alpha chain variable domain of TCR clone 154691 (TRAV20, TRAJ31)
CAVQMRARLMF

SEQ ID NO: 309382 - protein, 17 aa, Homo sapiens
  CDR3 for beta chain variable domain of TCR clone 154691 (TRBV4-1, TRBJ2-7)
CASSRDPLGVRGEEQYF

SEQ ID NO: 309383 - protein, 12 aa, Homo sapiens
  CDR3 for alpha chain variable domain of TCR clone 154692 (TRAV13-2, TRAJ23)
CAERHRGGKPIF

SEQ ID NO: 309384 - protein, 13 aa, Homo sapiens
  CDR3 for beta chain variable domain of TCR clone 154692 (TRBV4-2, TRBJ1-1)
CASSQAGNTEAFF

SEQ ID NO: 309385 - protein, 11 aa, Homo sapiens
  CDR3 for alpha chain variable domain of TCR clone 154693 (TRAV3, TRAJ21)
CAVGNFNKFYF

SEQ ID NO: 309386 - protein, 15 aa, Homo sapiens
  CDR3 for beta chain variable domain of TCR clone 154693 (TRBV5-1, TRBJ2-1)
CASSLVASSYNEQFF

SEQ ID NO: 309387 - protein, 15 aa, Homo sapiens
  CDR3 for alpha chain variable domain of TCR clone 154694 (TRAV13-1, TRAJ42)
CAASIAGGSQGNLIL

SEQ ID NO: 309388 - protein, 15 aa, Homo sapiens
  CDR3 for beta chain variable domain of TCR clone 154694 (TRBV19, TRBJ2-1)
CASSIVRGEGREQFF

SEQ ID NO: 309389 - protein, 15 aa, Homo sapiens
  CDR3 for alpha chain variable domain of TCR clone 154695 (TRAV23/DV6, TRAJ18)
CAASMNHRGSTLVRL

SEQ ID NO: 309390 - protein, 15 aa, Homo sapiens
  CDR3 for beta chain variable domain of TCR clone 154695 (TRBV27, TRBJ2-7)
CASSPDQGRLYEQYF

SEQ ID NO: 309391 - protein, 17 aa, Homo sapiens
  CDR3 for alpha chain variable domain of TCR clone 154696 (TRAV4, TRAJ13)
CLVGVQGSSGGCQKVTF

SEQ ID NO: 309392 - protein, 18 aa, Homo sapiens
  CDR3 for beta chain variable domain of TCR clone 154696 (TRBV15, TRBJ2-3)
CATSRDGARSWDTDTQYF

SEQ ID NO: 309393 - protein, 15 aa, Homo sapiens
  CDR3 for alpha chain variable domain of TCR clone 154697 (TRAV12-1, TRAJ4)
CVVTPWMGGYNKLIF

SEQ ID NO: 309394 - protein, 15 aa, Homo sapiens
  CDR3 for beta chain variable domain of TCR clone 154697 (TRBV6-1, TRBJ2-3)
CASSERGGITDTQYF

SEQ ID NO: 309395 - protein, 14 aa, Homo sapiens
  CDR3 for alpha chain variable domain of TCR clone 154698 (TRAV1-2, TRAJ8)
CAVREDTGFQKLVF

SEQ ID NO: 309396 - protein, 14 aa, Homo sapiens
  CDR3 for beta chain variable domain of TCR clone 154698 (TRBV5-4, TRBJ1-1)
CASSLDSRRDEAFC

SEQ ID NO: 309397 - protein, 16 aa, Homo sapiens
  CDR3 for alpha chain variable domain of TCR clone 154699 (TRAV8-3, TRAJ8)
CAVPRDGNTGFQKLVF

SEQ ID NO: 309398 - protein, 15 aa, Homo sapiens
  CDR3 for beta chain variable domain of TCR clone 154699 (TRBV6-1, TRBJ2-6)
CASSARPSGANVLTF

SEQ ID NO: 309399 - protein, 14 aa, Homo sapiens
  CDR3 for alpha chain variable domain of TCR clone 154700 (TRAV13-1, TRAJ44)
CAAKAAGTASKLTF

SEQ ID NO: 309400 - protein, 16 aa, Homo sapiens
  CDR3 for beta chain variable domain of TCR clone 154700 (TRBV12-4, TRBJ2-5)
CASSFFVRGRQETQYF

SEQ ID NO: 309401 - protein, 14 aa, Homo sapiens
  CDR3 for alpha chain variable domain of TCR clone 154701 (TRAV38-1, TRAJ40)
CALRPTSGTYKYIF

SEQ ID NO: 309402 - protein, 14 aa, Homo sapiens
  CDR3 for beta chain variable domain of TCR clone 154701 (TRBV25-1, TRBJ1-1)
CAITHLGENTEAFF

SEQ ID NO: 309403 - protein, 17 aa, Homo sapiens
  CDR3 for alpha chain variable domain of TCR clone 154702 (TRAV17, TRAJ52)
CATERPSGGTSYGKLTF

SEQ ID NO: 309404 - protein, 13 aa, Homo sapiens
  CDR3 for beta chain variable domain of TCR clone 154702 (TRBV7-9, TRBJ1-2)
CASSLKHNYGYTF

SEQ ID NO: 309405 - protein, 12 aa, Homo sapiens
  CDR3 for alpha chain variable domain of TCR clone 154703 (TRAV13-1, TRAJ15)
CAASQAGTALIF

SEQ ID NO: 309406 - protein, 18 aa, Homo sapiens
  CDR3 for beta chain variable domain of TCR clone 154703 (TRBV7-9, TRBJ2-3)
CASSLPNNGQISTDTQYF

SEQ ID NO: 309407 - protein, 12 aa, Homo sapiens
  CDR3 for alpha chain variable domain of TCR clone 154704 (TRAV4, TRAJ26)
CLVGDYGQNFVF

SEQ ID NO: 309408 - protein, 17 aa, Homo sapiens
  CDR3 for beta chain variable domain of TCR clone 154704 (TRBV20-1, TRBJ2-1)
CSASSSGLAGSYNEQFF

SEQ ID NO: 309409 - protein, 13 aa, Homo sapiens
  CDR3 for alpha chain variable domain of TCR clone 154705 (TRAV8-6, TRAJ49)
CAVITNTGNQFYF

SEQ ID NO: 309410 - protein, 15 aa, Homo sapiens
  CDR3 for beta chain variable domain of TCR clone 154705 (TRBV28, TRBJ2-1)
CASRVGLDEYNEQFF

SEQ ID NO: 309411 - protein, 14 aa, Homo sapiens
  CDR3 for alpha chain variable domain of TCR clone 154706 (TRAV17, TRAJ54)
CAMDATQGAQKLVF

SEQ ID NO: 309412 - protein, 12 aa, Homo sapiens
  CDR3 for beta chain variable domain of TCR clone 154706 (TRBV7-9, TRBJ2-7)
CASSIKREEQYF

SEQ ID NO: 309413 - protein, 12 aa, Homo sapiens
  CDR3 for alpha chain variable domain of TCR clone 154707 (TRAV13-2, TRAJ23)
CAERHRGGNLIF

SEQ ID NO: 309414 - protein, 19 aa, Homo sapiens
  CDR3 for beta chain variable domain of TCR clone 154707 (TRBV19, TRBJ2-5)
CASSIGQVTDLFLGETQYF

SEQ ID NO: 309415 - protein, 14 aa, Homo sapiens
  CDR3 for alpha chain variable domain of TCR clone 154708 (TRAV8-3, TRAJ9)
CAVVYRTGGFKTIF

SEQ ID NO: 309416 - protein, 14 aa, Homo sapiens
  CDR3 for beta chain variable domain of TCR clone 154708 (TRBV7-3, TRBJ2-2)
CASSSGGYTGELFF

SEQ ID NO: 309417 - protein, 15 aa, Homo sapiens
  CDR3 for alpha chain variable domain of TCR clone 154709 (TRAV12-3, TRAJ6)
CAMSATTGGSYIPTF

SEQ ID NO: 309418 - protein, 15 aa, Homo sapiens
  CDR3 for beta chain variable domain of TCR clone 154709 (TRBV7-9, TRBJ2-1)
CASSLGWGRANEQFF

SEQ ID NO: 309419 - protein, 11 aa, Homo sapiens
  CDR3 for alpha chain variable domain of TCR clone 154710 (TRAV1-2, TRAJ40)
CAVPGTYNYIF

SEQ ID NO: 309420 - protein, 15 aa, Homo sapiens
  CDR3 for beta chain variable domain of TCR clone 154710 (TRBV28, TRBJ1-3)
CASSLAGSSGNTIYF

SEQ ID NO: 309421 - protein, 14 aa, Homo sapiens
  CDR3 for alpha chain variable domain of TCR clone 154711 (TRAV29/DV5, TRAJ36)
WAARRKTGANNLFF

SEQ ID NO: 309422 - protein, 15 aa, Homo sapiens
  CDR3 for beta chain variable domain of TCR clone 154711 (TRBV9, TRBJ1-6)
CASSVAGTGDSPLHV

SEQ ID NO: 309423 - protein, 17 aa, Homo sapiens
  CDR3 for alpha chain variable domain of TCR clone 154712 (TRAV3, TRAJ12)
GAVRDGGRMDSSYKLIF

SEQ ID NO: 309424 - protein, 14 aa, Homo sapiens
  CDR3 for beta chain variable domain of TCR clone 154712 (TRBV7-9, TRBJ1-2)
CASSRQGANYGYTF

SEQ ID NO: 309425 - protein, 12 aa, Homo sapiens
  CDR3 for alpha chain variable domain of TCR clone 154713 (TRAV8-3, TRAJ20)
CAVGANDFELSF

SEQ ID NO: 309426 - protein, 16 aa, Homo sapiens
  CDR3 for beta chain variable domain of TCR clone 154713 (TRBV19, TRBJ2-2)
CASRSPGTGATGELFF

SEQ ID NO: 309427 - protein, 15 aa, Homo sapiens
  CDR3 for alpha chain variable domain of TCR clone 154714 (TRAV19, TRAJ13)
CALSGHSGGYQKVTF

SEQ ID NO: 309428 - protein, 14 aa, Homo sapiens
  CDR3 for beta chain variable domain of TCR clone 154714 (TRBV19, TRBJ2-1)
CASPTFVLSGEQFF

SEQ ID NO: 309429 - protein, 15 aa, Homo sapiens
  CDR3 for alpha chain variable domain of TCR clone 154715 (TRAV26-1, TRAJ38)
CIVRAEGGNNRKLIW

SEQ ID NO: 309430 - protein, 14 aa, Homo sapiens
  CDR3 for beta chain variable domain of TCR clone 154715 (TRBV7-6, TRBJ2-5)
CASSSPSGSETQCF

SEQ ID NO: 309431 - protein, 12 aa, Homo sapiens
  CDR3 for alpha chain variable domain of TCR clone 154716 (TRAV21, TRAJ43)
CAVSWNNNDMRF

SEQ ID NO: 309432 - protein, 15 aa, Homo sapiens
  CDR3 for beta chain variable domain of TCR clone 154716 (TRBV20-1, TRBJ2-1)
CSASPPSGGYNEQFV

SEQ ID NO: 309433 - protein, 18 aa, Homo sapiens
  CDR3 for alpha chain variable domain of TCR clone 154717 (TRAV21, TRAJ52)
CAVRPSPAGGTSYGKLTF

SEQ ID NO: 309434 - protein, 13 aa, Homo sapiens
  CDR3 for beta chain variable domain of TCR clone 154717 (TRBV5-1, TRBJ1-3)
CASSPRERSTMYF

SEQ ID NO: 309435 - protein, 12 aa, Homo sapiens
  CDR3 for alpha chain variable domain of TCR clone 154718 (TRAV27, TRAJ35)
GAGADWGNVLHC

SEQ ID NO: 309436 - protein, 15 aa, Homo sapiens
  CDR3 for beta chain variable domain of TCR clone 154718 (TRBV20-1, TRBJ2-7)
CSARDRVSGMDEQYF

SEQ ID NO: 309437 - protein, 12 aa, Homo sapiens
  CDR3 for alpha chain variable domain of TCR clone 154719 (TRAV27, TRAJ9)
CAGESGGFKTIF

SEQ ID NO: 309438 - protein, 14 aa, Homo sapiens
  CDR3 for beta chain variable domain of TCR clone 154719 (TRBV19, TRBJ2-5)
CASSMTGQQETQYF

SEQ ID NO: 309439 - protein, 16 aa, Homo sapiens
  CDR3 for alpha chain variable domain of TCR clone 154720 (TRAV26-1, TRAJ53)
CIVRVAMGGSNYKLTF

SEQ ID NO: 309440 - protein, 17 aa, Homo sapiens
  CDR3 for beta chain variable domain of TCR clone 154720 (TRBV4-1, TRBJ1-4)
CASSQEGPRGVEEKLFF

SEQ ID NO: 309441 - protein, 17 aa, Homo sapiens
  CDR3 for alpha chain variable domain of TCR clone 154721 (TRAV3, TRAJ38)
CAVRDCLNAGNNRKLIW

SEQ ID NO: 309442 - protein, 13 aa, Homo sapiens
  CDR3 for beta chain variable domain of TCR clone 154721 (TRBV24-1, TRBJ2-2)
CATSDWSTGELFF

SEQ ID NO: 309443 - protein, 13 aa, Homo sapiens
  CDR3 for alpha chain variable domain of TCR clone 154722 (TRAV8-3, TRAJ30)
CDVGGWRDDKIIF

SEQ ID NO: 309444 - protein, 14 aa, Homo sapiens
  CDR3 for beta chain variable domain of TCR clone 154722 (TRBV20-1, TRBJ1-1)
CSAPPADMNTEAFF

SEQ ID NO: 309445 - protein, 12 aa, Homo sapiens
  CDR3 for alpha chain variable domain of TCR clone 154723 (TRAV1-1, TRAJ8)
CAGGTGFQKLVF

SEQ ID NO: 309446 - protein, 13 aa, Homo sapiens
  CDR3 for beta chain variable domain of TCR clone 154723 (TRBV3-1, TRBJ2-2)
CASRQTNTGELFF

SEQ ID NO: 309447 - protein, 12 aa, Homo sapiens
  CDR3 for alpha chain variable domain of TCR clone 154724 (TRAV8-3, TRAJ20)
CAVGAHDYKLSF

SEQ ID NO: 309448 - protein, 15 aa, Homo sapiens
  CDR3 for beta chain variable domain of TCR clone 154724 (TRBV11-2, TRBJ2-1)
CASSLGTSGLNEQFF

SEQ ID NO: 309449 - protein, 14 aa, Homo sapiens
  CDR3 for alpha chain variable domain of TCR clone 154725 (TRAV26-1, TRAJ39)
CIVRGSRAGNKHTF

SEQ ID NO: 309450 - protein, 15 aa, Homo sapiens
  CDR3 for beta chain variable domain of TCR clone 154725 (TRBV7-9, TRBJ1-5)
CASSQGHQPNQPQHF

SEQ ID NO: 309451 - protein, 14 aa, Homo sapiens
  CDR3 for alpha chain variable domain of TCR clone 154726 (TRAV12-2, TRAJ40)
CAVKIPSGTYRYIF

SEQ ID NO: 309452 - protein, 11 aa, Homo sapiens
  CDR3 for beta chain variable domain of TCR clone 154726 (TRBV29-1, TRBJ2-5)
CSEDRTGTQYF

SEQ ID NO: 309453 - protein, 12 aa, Homo sapiens
  CDR3 for alpha chain variable domain of TCR clone 154727 (TRAV12-3, TRAJ17)
CAITLTGNKLTF

SEQ ID NO: 309454 - protein, 17 aa, Homo sapiens
  CDR3 for beta chain variable domain of TCR clone 154727 (TRBV11-2, TRBJ2-1)
CASSLYPPGVEYNEQFF

SEQ ID NO: 309455 - protein, 11 aa, Homo sapiens
  CDR3 for alpha chain variable domain of TCR clone 154728 (TRAV20, TRAJ26)
WWDNYGQNFVF

SEQ ID NO: 309456 - protein, 16 aa, Homo sapiens
  CDR3 for beta chain variable domain of TCR clone 154728 (TRBV13, TRBJ2-2)
CASSPRTGEHTGELFF

SEQ ID NO: 309457 - protein, 13 aa, Homo sapiens
  CDR3 for alpha chain variable domain of TCR clone 154729 (TRAV27, TRAJ11)
CAGARSGYSTLAF

SEQ ID NO: 309458 - protein, 16 aa, Homo sapiens
  CDR3 for beta chain variable domain of TCR clone 154729 (TRBV10-2, TRBJ2-2)
CASSESRDRGSGELFF

SEQ ID NO: 309459 - protein, 12 aa, Homo sapiens
  CDR3 for alpha chain variable domain of TCR clone 154730 (TRAV21, TRAJ49)
CAVSWTGNQFYF

SEQ ID NO: 309460 - protein, 15 aa, Homo sapiens
  CDR3 for beta chain variable domain of TCR clone 154730 (TRBV7-2, TRBJ2-1)
CASSLASGRVNEQFF

SEQ ID NO: 309461 - protein, 13 aa, Homo sapiens
  CDR3 for alpha chain variable domain of TCR clone 154731 (TRAV21, TRAJ20)
CAVGLRVDYKLSF

SEQ ID NO: 309462 - protein, 12 aa, Homo sapiens
  CDR3 for beta chain variable domain of TCR clone 154731 (TRBV12-4, TRBJ2-7)
CASSLGGYEQYF

SEQ ID NO: 309463 - protein, 15 aa, Homo sapiens
  CDR3 for alpha chain variable domain of TCR clone 154732 (TRAV8-3, TRAJ45)
CASSYSGGGADGLTF

SEQ ID NO: 309464 - protein, 16 aa, Homo sapiens
  CDR3 for beta chain variable domain of TCR clone 154732 (TRBV7-3, TRBJ2-1)
RASSLLVGELVDEQFF

SEQ ID NO: 309465 - protein, 14 aa, Homo sapiens
  CDR3 for alpha chain variable domain of TCR clone 154733 (TRAV8-1, TRAJ48)
CAVNAGFGNEKLTF

SEQ ID NO: 309466 - protein, 16 aa, Homo sapiens
  CDR3 for beta chain variable domain of TCR clone 154733 (TRBV5-1, TRBJ2-5)
CASSLALLRAGETQYF

SEQ ID NO: 309467 - protein, 23 aa, Homo sapiens
  CDR3 for alpha chain variable domain of TCR clone 154734 (TRAV2, TRAJ13)
CASGVYQKVTLELEQSSKSSQIS

SEQ ID NO: 309468 - protein, 15 aa, Homo sapiens
  CDR3 for beta chain variable domain of TCR clone 154734 (TRBV20-1, TRBJ2-7)
CSARVPAAYFYEQYF

SEQ ID NO: 309469 - protein, 14 aa, Homo sapiens
  CDR3 for alpha chain variable domain of TCR clone 154735 (TRAV8-3, TRAJ4)
CAVGASGGYNKLIL

SEQ ID NO: 309470 - protein, 13 aa, Homo sapiens
  CDR3 for beta chain variable domain of TCR clone 154735 (TRBV12-5, TRBJ2-3)
CASGDRQSDTQYF

SEQ ID NO: 309471 - protein, 13 aa, Homo sapiens
  CDR3 for alpha chain variable domain of TCR clone 154736 (TRAV12-3, TRAJ33)
CAMSVNSNYQLIW

SEQ ID NO: 309472 - protein, 11 aa, Homo sapiens
  CDR3 for beta chain variable domain of TCR clone 154736 (TRBV7-3, TRBJ2-5)
CGSSLSETQYF

SEQ ID NO: 309473 - protein, 11 aa, Homo sapiens
  CDR3 for alpha chain variable domain of TCR clone 154737 (TRAV35, TRAJ34)
CWARNTDNLIF

SEQ ID NO: 309474 - protein, 14 aa, Homo sapiens
  CDR3 for beta chain variable domain of TCR clone 154737 (TRBV5-1, TRBJ2-7)
CSSSRGESLYEQYF

SEQ ID NO: 309475 - protein, 14 aa, Homo sapiens
  CDR3 for alpha chain variable domain of TCR clone 154738 (TRAV12-3, TRAJ54)
CAMRIIQGAQKLVF

SEQ ID NO: 309476 - protein, 16 aa, Homo sapiens
  CDR3 for beta chain variable domain of TCR clone 154738 (TRBV28, TRBJ2-1)
CASRVPASRRIGEQFF

SEQ ID NO: 309477 - protein, 14 aa, Homo sapiens
  CDR3 for alpha chain variable domain of TCR clone 154739 (TRAV8-3, TRAJ4)
CAVGAAGGYNKLIF

SEQ ID NO: 309478 - protein, 16 aa, Homo sapiens
  CDR3 for beta chain variable domain of TCR clone 154739 (TRBV7-9, TRBJ2-5)
CASSPSGQGVKGTQYF

SEQ ID NO: 309479 - protein, 15 aa, Homo sapiens
  CDR3 for alpha chain variable domain of TCR clone 154740 (TRAV21, TRAJ56)
CAVIKYTGANSKLTF

SEQ ID NO: 309480 - protein, 14 aa, Homo sapiens
  CDR3 for beta chain variable domain of TCR clone 154740 (TRBV20-1, TRBJ2-3)
CSARVRGSTDTQYF

SEQ ID NO: 309481 - protein, 14 aa, Homo sapiens
  CDR3 for alpha chain variable domain of TCR clone 154741 (TRAV38-1, TRAJ40)
CALRPASGTYKYIF

SEQ ID NO: 309482 - protein, 14 aa, Homo sapiens
  CDR3 for beta chain variable domain of TCR clone 154741 (TRBV19, TRBJ2-1)
CASPTFVLSGEQFF

SEQ ID NO: 309483 - protein, 14 aa, Homo sapiens
  CDR3 for alpha chain variable domain of TCR clone 154742 (TRAV8-2, TRAJ37)
CVVSISGHTGKLIF

SEQ ID NO: 309484 - protein, 11 aa, Homo sapiens
  CDR3 for beta chain variable domain of TCR clone 154742 (TRBV18, TRBJ2-5)
CASSPRETQYF

SEQ ID NO: 309485 - protein, 11 aa, Homo sapiens
  CDR3 for alpha chain variable domain of TCR clone 154743 (TRAV4, TRAJ23)
CLVAPGGKLIF

SEQ ID NO: 309486 - protein, 15 aa, Homo sapiens
  CDR3 for beta chain variable domain of TCR clone 154743 (TRBV20-1, TRBJ2-7)
CSARDRASGMDEQYF

SEQ ID NO: 309487 - protein, 16 aa, Homo sapiens
  CDR3 for alpha chain variable domain of TCR clone 154744 (TRAV12-3, TRAJ53)
CAMSPGSGGSNFKLTF

SEQ ID NO: 309488 - protein, 13 aa, Homo sapiens
  CDR3 for beta chain variable domain of TCR clone 154744 (TRBV12-5, TRBJ2-3)
CASGDRQSDTQYF

SEQ ID NO: 309489 - protein, 11 aa, Homo sapiens
  CDR3 for alpha chain variable domain of TCR clone 154745 (TRAV1-1, TRAJ27)
CAGSEMTRSSL

SEQ ID NO: 309490 - protein, 14 aa, Homo sapiens
  CDR3 for beta chain variable domain of TCR clone 154745 (TRBV11-3, TRBJ1-6)
CASSFSGGDSPLHF

SEQ ID NO: 309491 - protein, 17 aa, Homo sapiens
  CDR3 for alpha chain variable domain of TCR clone 154746 (TRAV3, TRAJ38)
CAVRDCLNAGNNRKLIW

SEQ ID NO: 309492 - protein, 16 aa, Homo sapiens
  CDR3 for beta chain variable domain of TCR clone 154746 (TRBV7-2, TRBJ2-6)
CAILSGVSSGANVLTF

SEQ ID NO: 309493 - protein, 13 aa, Homo sapiens
  CDR3 for alpha chain variable domain of TCR clone 154747 (TRAV14/DV4, TRAJ34)
CAMRDYNTDKLIF

SEQ ID NO: 309494 - protein, 14 aa, Homo sapiens
  CDR3 for beta chain variable domain of TCR clone 154747 (TRBV5-1, TRBJ2-3)
CASSLFGPTDTQYF

SEQ ID NO: 309495 - protein, 13 aa, Homo sapiens
  CDR3 for alpha chain variable domain of TCR clone 154748 (TRAV23/DV6, TRAJ15)
CAALPAGRNCSDL

SEQ ID NO: 309496 - protein, 14 aa, Homo sapiens
  CDR3 for beta chain variable domain of TCR clone 154748 (TRBV4-1, TRBJ2-7)
CASRLTSGSYEQYF

SEQ ID NO: 309497 - protein, 14 aa, Homo sapiens
  CDR3 for alpha chain variable domain of TCR clone 154749 (TRAV4, TRAJ17)
CLVGDMAAGNKLTF

SEQ ID NO: 309498 - protein, 12 aa, Homo sapiens
  CDR3 for beta chain variable domain of TCR clone 154749 (TRBV11-2, TRBJ2-2)
CASSLGGGELFF

SEQ ID NO: 309499 - protein, 11 aa, Homo sapiens
  CDR3 for alpha chain variable domain of TCR clone 154750 (TRAV1-2, TRAJ31)
CAVNNNARLMF

SEQ ID NO: 309500 - protein, 16 aa, Homo sapiens
  CDR3 for beta chain variable domain of TCR clone 154750 (TRBV11-2, TRBJ2-1)
CASSPRLAGVYKEQFF

SEQ ID NO: 309501 - protein, 16 aa, Homo sapiens
  CDR3 for alpha chain variable domain of TCR clone 154751 (TRAV3, TRAJ37)
CAVRGKGSGNTGKLIF

SEQ ID NO: 309502 - protein, 13 aa, Homo sapiens
  CDR3 for beta chain variable domain of TCR clone 154751 (TRBV4-3, TRBJ1-1)
CASSQAGNTEAFF

SEQ ID NO: 309503 - protein, 14 aa, Homo sapiens
  CDR3 for alpha chain variable domain of TCR clone 154752 (TRAV27, TRAJ17)
CRSTIRAAGNKLTF

SEQ ID NO: 309504 - protein, 16 aa, Homo sapiens
  CDR3 for beta chain variable domain of TCR clone 154752 (TRBV7-3, TRBJ2-1)
CASSLEGYRSYNEQFF

SEQ ID NO: 309505 - protein, 13 aa, Homo sapiens
  CDR3 for alpha chain variable domain of TCR clone 154753 (TRAV5, TRAJ30)
CAEIATRDDKIIF

SEQ ID NO: 309506 - protein, 14 aa, Homo sapiens
  CDR3 for beta chain variable domain of TCR clone 154753 (TRBV4-1, TRBJ2-2)
CASSQAVNTGELFF

SEQ ID NO: 309507 - protein, 16 aa, Homo sapiens
  CDR3 for alpha chain variable domain of TCR clone 154754 (TRAV4, TRAJ22)
CLVGDLYSGSARQLTF

SEQ ID NO: 309508 - protein, 17 aa, Homo sapiens
  CDR3 for beta chain variable domain of TCR clone 154754 (TRBV15, TRBJ1-4)
CATSRYGTGDPNEKLFF

SEQ ID NO: 309509 - protein, 14 aa, Homo sapiens
  CDR3 for alpha chain variable domain of TCR clone 154755 (TRAV2, TRAJ37)
CAVDFTSNTGKLIF

SEQ ID NO: 309510 - protein, 15 aa, Homo sapiens
  CDR3 for beta chain variable domain of TCR clone 154755 (TRBV20-1, TRBJ1-1)
CGASRGVTGNTEDFF

SEQ ID NO: 309511 - protein, 11 aa, Homo sapiens
  CDR3 for alpha chain variable domain of TCR clone 154756 (TRAV4, TRAJ23)
CLVAPGGKLIF

SEQ ID NO: 309512 - protein, 15 aa, Homo sapiens
  CDR3 for beta chain variable domain of TCR clone 154756 (TRBV7-2, TRBJ2-1)
CASSFRADEYNEQFF

SEQ ID NO: 309513 - protein, 15 aa, Homo sapiens
  CDR3 for alpha chain variable domain of TCR clone 154757 (TRAV20, TRAJ16)
CAVQIRFSDGQKLLF

SEQ ID NO: 309514 - protein, 15 aa, Homo sapiens
  CDR3 for beta chain variable domain of TCR clone 154757 (TRBV2, TRBJ1-2)
CASSEIGGANYGYTF

SEQ ID NO: 309515 - protein, 14 aa, Homo sapiens
  CDR3 for alpha chain variable domain of TCR clone 154758 (TRAV1-2, TRAJ16)
CAVNRFSDGQKLLF

SEQ ID NO: 309516 - protein, 14 aa, Homo sapiens
  CDR3 for beta chain variable domain of TCR clone 154758 (TRBV4-1, TRBJ2-7)
CASRLTSGSYEQYF

SEQ ID NO: 309517 - protein, 14 aa, Homo sapiens
  CDR3 for alpha chain variable domain of TCR clone 154759 (TRAV20, TRAJ22)
CAVQGAGSARQLTF

SEQ ID NO: 309518 - protein, 15 aa, Homo sapiens
  CDR3 for beta chain variable domain of TCR clone 154759 (TRBV11-2, TRBJ1-6)
CASSLDPWAVSPLHF

SEQ ID NO: 309519 - protein, 13 aa, Homo sapiens
  CDR3 for alpha chain variable domain of TCR clone 154760 (TRAV12-3, TRAJ13)
CAMTSGGYQKVTF

SEQ ID NO: 309520 - protein, 12 aa, Homo sapiens
  CDR3 for beta chain variable domain of TCR clone 154760 (TRBV11-2, TRBJ2-1)
CASSPGNNEQFF

SEQ ID NO: 309521 - protein, 14 aa, Homo sapiens
  CDR3 for alpha chain variable domain of TCR clone 154761 (TRAV26-1, TRAJ45)
CIEVTGGGADGTTF

SEQ ID NO: 309522 - protein, 13 aa, Homo sapiens
  CDR3 for beta chain variable domain of TCR clone 154761 (TRBV7-6, TRBJ1-2)
CASSLVADYGYTF

SEQ ID NO: 309523 - protein, 12 aa, Homo sapiens
  CDR3 for alpha chain variable domain of TCR clone 154762 (TRAV21, TRAJ31)
CAVWGNNARFMF

SEQ ID NO: 309524 - protein, 16 aa, Homo sapiens
  CDR3 for beta chain variable domain of TCR clone 154762 (TRBV27, TRBJ2-5)
CASSYGPGGQKETQYF

SEQ ID NO: 309525 - protein, 16 aa, Homo sapiens
  CDR3 for alpha chain variable domain of TCR clone 154763 (TRAV30, TRAJ24)
CGTEVVDADSWGKFQF

SEQ ID NO: 309526 - protein, 13 aa, Homo sapiens
  CDR3 for beta chain variable domain of TCR clone 154763 (TRBV7-7, TRBJ1-1)
CASSLGANTEAFF

SEQ ID NO: 309527 - protein, 20 aa, Homo sapiens
  CDR3 for alpha chain variable domain of TCR clone 154764 (TRAV12-1, TRAJ42)
NSVIQPPTSVKGGSQGNLIF

SEQ ID NO: 309528 - protein, 18 aa, Homo sapiens
  CDR3 for beta chain variable domain of TCR clone 154764 (TRBV11-2, TRBJ2-3)
CAGSLGGASRGAPNTQYF

SEQ ID NO: 309529 - protein, 13 aa, Homo sapiens
  CDR3 for alpha chain variable domain of TCR clone 154765 (TRAV13-1, TRAJ6)
CARGSGGSYIPTF

SEQ ID NO: 309530 - protein, 17 aa, Homo sapiens
  CDR3 for beta chain variable domain of TCR clone 154765 (TRBV7-8, TRBJ2-1)
CASSPPTGTLAYNEQFF

SEQ ID NO: 309531 - protein, 15 aa, Homo sapiens
  CDR3 for alpha chain variable domain of TCR clone 154766 (TRAV12-1, TRAJ44)
CVVFVNTGTASKLTF

SEQ ID NO: 309532 - protein, 16 aa, Homo sapiens
  CDR3 for beta chain variable domain of TCR clone 154766 (TRBV19, TRBJ2-2)
CASRSPGTGATGELFF

SEQ ID NO: 309533 - protein, 16 aa, Homo sapiens
  CDR3 for alpha chain variable domain of TCR clone 154767 (TRAV14/DV4, TRAJ54)
CAMREGRIQGAQKLVF

SEQ ID NO: 309534 - protein, 19 aa, Homo sapiens
  CDR3 for beta chain variable domain of TCR clone 154767 (TRBV25-1, TRBJ2-2)
CAILVYRVDRGRKTGELFF

SEQ ID NO: 309535 - protein, 16 aa, Homo sapiens
  CDR3 for alpha chain variable domain of TCR clone 154768 (TRAV12-3, TRAJ53)
CAMSPESGGSNYKLTF

SEQ ID NO: 309536 - protein, 16 aa, Homo sapiens
  CDR3 for beta chain variable domain of TCR clone 154768 (TRBV5-1, TRBJ2-7)
CASSLEGLAGLYEQYF

SEQ ID NO: 309537 - protein, 13 aa, Homo sapiens
  CDR3 for alpha chain variable domain of TCR clone 154769 (TRAV8-3, TRAJ43)
CAVGPDNNNDMRF

SEQ ID NO: 309538 - protein, 13 aa, Homo sapiens
  CDR3 for beta chain variable domain of TCR clone 154769 (TRBV20-1, TRBJ1-3)
CSASPTGGNTIYF

SEQ ID NO: 309539 - protein, 14 aa, Homo sapiens
  CDR3 for alpha chain variable domain of TCR clone 154770 (TRAV1-2, TRAJ16)
CAVNRFSDGQKLLF

SEQ ID NO: 309540 - protein, 17 aa, Homo sapiens
  CDR3 for beta chain variable domain of TCR clone 154770 (TRBV7-8, TRBJ2-6)
CAGSAGTGGAGANVLTF

SEQ ID NO: 309541 - protein, 15 aa, Homo sapiens
  CDR3 for alpha chain variable domain of TCR clone 154771 (TRAV21, TRAJ24)
CAARSSTDSWGKLQF

SEQ ID NO: 309542 - protein, 16 aa, Homo sapiens
  CDR3 for beta chain variable domain of TCR clone 154771 (TRBV19, TRBJ2-1)
CTSSKAGPSSYNEQFF

SEQ ID NO: 309543 - protein, 14 aa, Homo sapiens
  CDR3 for alpha chain variable domain of TCR clone 154772 (TRAV30, TRAJ33)
CGTVAPRSNYQLIW

SEQ ID NO: 309544 - protein, 18 aa, Homo sapiens
  CDR3 for beta chain variable domain of TCR clone 154772 (TRBV11-2, TRBJ2-3)
CACSLGGASRGAPNTQYF

SEQ ID NO: 309545 - protein, 15 aa, Homo sapiens
  CDR3 for alpha chain variable domain of TCR clone 154773 (TRAV8-4, TRAJ40)
CAVSDDTSGTYKYIF

SEQ ID NO: 309546 - protein, 17 aa, Homo sapiens
  CDR3 for beta chain variable domain of TCR clone 154773 (TRBV11-3, TRBJ2-3)
CASSPGSSGGRTDTQYF

SEQ ID NO: 309547 - protein, 16 aa, Homo sapiens
  CDR3 for alpha chain variable domain of TCR clone 154774 (TRAV3, TRAJ37)
CAVRPHGSGNTGKLIF

SEQ ID NO: 309548 - protein, 14 aa, Homo sapiens
  CDR3 for beta chain variable domain of TCR clone 154774 (TRBV25-1, TRBJ1-1)
CASTHLGGDTEAFF

SEQ ID NO: 309549 - protein, 17 aa, Homo sapiens
  CDR3 for alpha chain variable domain of TCR clone 154775 (TRAV23/DV6, TRAJ57)
CAASSTLSQGGSDRLVF

SEQ ID NO: 309550 - protein, 14 aa, Homo sapiens
  CDR3 for beta chain variable domain of TCR clone 154775 (TRBV25-1, TRBJ1-1)
CASTHLGGNTEAFF

SEQ ID NO: 309551 - protein, 13 aa, Homo sapiens
  CDR3 for alpha chain variable domain of TCR clone 154776 (TRAV17, TRAJ9)
CATDYTGGFKTIF

SEQ ID NO: 309552 - protein, 15 aa, Homo sapiens
  CDR3 for beta chain variable domain of TCR clone 154776 (TRBV5-5, TRBJ1-5)
CASSSTPGSNQPQHF

SEQ ID NO: 309553 - protein, 13 aa, Homo sapiens
  CDR3 for alpha chain variable domain of TCR clone 154777 (TRAV30, TRAJ24)
CGTVTDSGGKLQF

SEQ ID NO: 309554 - protein, 14 aa, Homo sapiens
  CDR3 for beta chain variable domain of TCR clone 154777 (TRBV6-3, TRBJ2-2)
CASTYTPDTGELLF

SEQ ID NO: 309555 - protein, 15 aa, Homo sapiens
  CDR3 for alpha chain variable domain of TCR clone 154778 (TRAV13-1, TRAJ43)
CAASGGFGAGTRLTG

SEQ ID NO: 309556 - protein, 18 aa, Homo sapiens
  CDR3 for beta chain variable domain of TCR clone 154778 (TRBV11-2, TRBJ1-6)
CASSLAVQGLSLNSPLHF

SEQ ID NO: 309557 - protein, 15 aa, Homo sapiens
  CDR3 for alpha chain variable domain of TCR clone 154779 (TRAV27, TRAJ38)
CAGRFNAGNNRKLMW

SEQ ID NO: 309558 - protein, 13 aa, Homo sapiens
  CDR3 for beta chain variable domain of TCR clone 154779 (TRBV12-5, TRBJ2-3)
CASQNRGTDTQYF

SEQ ID NO: 309559 - protein, 13 aa, Homo sapiens
  CDR3 for alpha chain variable domain of TCR clone 154780 (TRAV13-1, TRAJ5)
CAARVTGRRALTF

SEQ ID NO: 309560 - protein, 15 aa, Homo sapiens
  CDR3 for beta chain variable domain of TCR clone 154780 (TRBV7-9, TRBJ2-7)
CASSPGGGFTYEQYF

SEQ ID NO: 309561 - protein, 14 aa, Homo sapiens
  CDR3 for alpha chain variable domain of TCR clone 154781 (TRAV8-3, TRAJ4)
CAVGAAVGYNKLIF

SEQ ID NO: 309562 - protein, 15 aa, Homo sapiens
  CDR3 for beta chain variable domain of TCR clone 154781 (TRBV5-1, TRBJ2-1)
CASSPPSAPYNEQFF

SEQ ID NO: 309563 - protein, 12 aa, Homo sapiens
  CDR3 for alpha chain variable domain of TCR clone 154782 (TRAV13-1, TRAJ21)
CAAEEGFNKFYF

SEQ ID NO: 309564 - protein, 17 aa, Homo sapiens
  CDR3 for beta chain variable domain of TCR clone 154782 (TRBV20-1, TRBJ2-1)
CSASSSGLAGSYNKQFF

SEQ ID NO: 309565 - protein, 15 aa, Homo sapiens
  CDR3 for alpha chain variable domain of TCR clone 154783 (TRAV12-1, TRAJ48)
CVVNKVNFGNEKLTF

SEQ ID NO: 309566 - protein, 12 aa, Homo sapiens
  CDR3 for beta chain variable domain of TCR clone 154783 (TRBV7-2, TRBJ2-5)
CASSQYQETQYF

SEQ ID NO: 309567 - protein, 10 aa, Homo sapiens
  CDR3 for alpha chain variable domain of TCR clone 154784 (TRAV12-1, TRAJ37)
CVGWAGKLIF

SEQ ID NO: 309568 - protein, 14 aa, Homo sapiens
  CDR3 for beta chain variable domain of TCR clone 154784 (TRBV7-7, TRBJ2-2)
CATRQDSDTGELFF

SEQ ID NO: 309569 - protein, 16 aa, Homo sapiens
  CDR3 for alpha chain variable domain of TCR clone 154785 (TRAV30, TRAJ24)
CGTGIVDADSWGKFQF

SEQ ID NO: 309570 - protein, 14 aa, Homo sapiens
  CDR3 for beta chain variable domain of TCR clone 154785 (TRBV12-5, TRBJ2-5)
CAIVSRTHQETQYF

SEQ ID NO: 309571 - protein, 20 aa, Homo sapiens
  CDR3 for alpha chain variable domain of TCR clone 154786 (TRAV26-1, TRAJ42)
CCVLLHRQTYYGGSQGNLIF

SEQ ID NO: 309572 - protein, 14 aa, Homo sapiens
  CDR3 for beta chain variable domain of TCR clone 154786 (TRBV5-4, TRBJ1-1)
CASSLDSRRDEAFF

SEQ ID NO: 309573 - protein, 11 aa, Homo sapiens
  CDR3 for alpha chain variable domain of TCR clone 154787 (TRAV17, TRAJ9)
CATTGGFKTIF

SEQ ID NO: 309574 - protein, 17 aa, Homo sapiens
  CDR3 for beta chain variable domain of TCR clone 154787 (TRBV28, TRBJ2-3)
CASSPTPAGGRVDTQYF

SEQ ID NO: 309575 - protein, 14 aa, Homo sapiens
  CDR3 for alpha chain variable domain of TCR clone 154788 (TRAV12-2, TRAJ17)
CAVLFKAAGNKLTF

SEQ ID NO: 309576 - protein, 14 aa, Homo sapiens
  CDR3 for beta chain variable domain of TCR clone 154788 (TRBV20-1, TRBJ2-2)
CGSGQGGLTGELFF

SEQ ID NO: 309577 - protein, 15 aa, Homo sapiens
  CDR3 for alpha chain variable domain of TCR clone 154789 (TRAV12-2, TRAJ42)
CAVNSHGGSQGNLIF

SEQ ID NO: 309578 - protein, 13 aa, Homo sapiens
  CDR3 for beta chain variable domain of TCR clone 154789 (TRBV27, TRBJ1-1)
CASSVSANAEAFF

SEQ ID NO: 309579 - protein, 18 aa, Homo sapiens
  CDR3 for alpha chain variable domain of TCR clone 154790 (TRAV26-1, TRAJ5)
CIVRVVPPPDTGRRALTF

SEQ ID NO: 309580 - protein, 15 aa, Homo sapiens
  CDR3 for beta chain variable domain of TCR clone 154790 (TRBV7-9, TRBJ2-7)
CASSLPMGQANEQYF

SEQ ID NO: 309581 - protein, 14 aa, Homo sapiens
  CDR3 for alpha chain variable domain of TCR clone 154791 (TRAV12-3, TRAJ10)
SHLPLTGGGNNLTF

SEQ ID NO: 309582 - protein, 17 aa, Homo sapiens
  CDR3 for beta chain variable domain of TCR clone 154791 (TRBV25-1, TRBJ2-1)
CASSAYGQGRGVYEQFF

SEQ ID NO: 309583 - protein, 13 aa, Homo sapiens
  CDR3 for alpha chain variable domain of TCR clone 154792 (TRAV16, TRAJ22)
CVFRKGSARQLTF

SEQ ID NO: 309584 - protein, 14 aa, Homo sapiens
  CDR3 for beta chain variable domain of TCR clone 154792 (TRBV4-1, TRBJ2-3)
CASSQDWSTDTQYF

SEQ ID NO: 309585 - protein, 17 aa, Homo sapiens
  CDR3 for alpha chain variable domain of TCR clone 154793 (TRAV13-1, TRAJ52)
CAAGRNAGGTSYGKLTF

SEQ ID NO: 309586 - protein, 15 aa, Homo sapiens
  CDR3 for beta chain variable domain of TCR clone 154793 (TRBV6-3, TRBJ2-7)
YASSSPGTVFYEQYF

SEQ ID NO: 309587 - protein, 23 aa, Homo sapiens
  CDR3 for alpha chain variable domain of TCR clone 154794 (TRAV26-1, TRAJ38)
CIADNAGNNHIQNPDPAVYQLRD

SEQ ID NO: 309588 - protein, 12 aa, Homo sapiens
  CDR3 for beta chain variable domain of TCR clone 154794 (TRBV7-9, TRBJ2-7)
CASSIKREEQYF

SEQ ID NO: 309589 - protein, 11 aa, Homo sapiens
  CDR3 for alpha chain variable domain of TCR clone 154795 (TRAV1-1, TRAJ39)
CAPGAGNMLTF

SEQ ID NO: 309590 - protein, 16 aa, Homo sapiens
  CDR3 for beta chain variable domain of TCR clone 154795 (TRBV12-5, TRBJ2-5)
CASGPRTSGNQETQYF

SEQ ID NO: 309591 - protein, 13 aa, Homo sapiens
  CDR3 for alpha chain variable domain of TCR clone 154796 (TRAV2, TRAJ29)
CAEQNSGNTPLIF

SEQ ID NO: 309592 - protein, 13 aa, Homo sapiens
  CDR3 for beta chain variable domain of TCR clone 154796 (TRBV28, TRBJ1-2)
CASSPGSRNGYTF

SEQ ID NO: 309593 - protein, 16 aa, Homo sapiens
  CDR3 for alpha chain variable domain of TCR clone 154797 (TRAV30, TRAJ24)
CGTEIGDADSWGKFQF

SEQ ID NO: 309594 - protein, 15 aa, Homo sapiens
  CDR3 for beta chain variable domain of TCR clone 154797 (TRBV7-9, TRBJ1-4)
CASSARTGGNEKLFF

SEQ ID NO: 309595 - protein, 13 aa, Homo sapiens
  CDR3 for alpha chain variable domain of TCR clone 154798 (TRAV30, TRAJ24)
CGTVTDSWWKLQF

SEQ ID NO: 309596 - protein, 15 aa, Homo sapiens
  CDR3 for beta chain variable domain of TCR clone 154798 (TRBV19, TRBJ1-1)
CASTSGQIQNTEAFF

SEQ ID NO: 309597 - protein, 14 aa, Homo sapiens
  CDR3 for alpha chain variable domain of TCR clone 154799 (TRAV26-2, TRAJ27)
CILRDISDAGKSTF

SEQ ID NO: 309598 - protein, 12 aa, Homo sapiens
  CDR3 for beta chain variable domain of TCR clone 154799 (TRBV11-2, TRBJ2-2)
CASSLPTGELFF

SEQ ID NO: 309599 - protein, 15 aa, Homo sapiens
  CDR3 for alpha chain variable domain of TCR clone 154800 (TRAV25, TRAJ53)
CPTSNSGGSNYKLTF

SEQ ID NO: 309600 - protein, 15 aa, Homo sapiens
  CDR3 for beta chain variable domain of TCR clone 154800 (TRBV6-4, TRBJ2-7)
CASSDQGPPNYEQYF

SEQ ID NO: 309601 - protein, 16 aa, Homo sapiens
  CDR3 for alpha chain variable domain of TCR clone 154801 (TRAV22, TRAJ45)
CAVERGKRGGADGPTF

SEQ ID NO: 309602 - protein, 16 aa, Homo sapiens
  CDR3 for beta chain variable domain of TCR clone 154801 (TRBV5-1, TRBJ2-5)
CASSLRRTSGQETQYF

SEQ ID NO: 309603 - protein, 13 aa, Homo sapiens
  CDR3 for alpha chain variable domain of TCR clone 154802 (TRAV35, TRAJ37)
CAGSSGNTGKLIF

SEQ ID NO: 309604 - protein, 16 aa, Homo sapiens
  CDR3 for beta chain variable domain of TCR clone 154802 (TRBV10-3, TRBJ2-1)
CAISLTSGNPYNEQFF

SEQ ID NO: 309605 - protein, 17 aa, Homo sapiens
  CDR3 for alpha chain variable domain of TCR clone 154803 (TRAV3, TRAJ6)
CAVSRRTDTGGSYIHTF

SEQ ID NO: 309606 - protein, 18 aa, Homo sapiens
  CDR3 for beta chain variable domain of TCR clone 154803 (TRBV7-2, TRBJ2-3)
CAGSLETSRGRKADTQYF

SEQ ID NO: 309607 - protein, 13 aa, Homo sapiens
  CDR3 for alpha chain variable domain of TCR clone 154804 (TRAV27, TRAJ45)
CRSSGGGGDGLTF

SEQ ID NO: 309608 - protein, 17 aa, Homo sapiens
  CDR3 for beta chain variable domain of TCR clone 154804 (TRBV10-3, TRBJ2-4)
CTSVPSVNKGSKNIQYF

SEQ ID NO: 309609 - protein, 13 aa, Homo sapiens
  CDR3 for alpha chain variable domain of TCR clone 154805 (TRAV12-3, TRAJ16)
CAVQLSDGQKLLF

SEQ ID NO: 309610 - protein, 14 aa, Homo sapiens
  CDR3 for beta chain variable domain of TCR clone 154805 (TRBV13, TRBJ2-3)
CASSLGGPQRPQYF

SEQ ID NO: 309611 - protein, 17 aa, Homo sapiens
  CDR3 for alpha chain variable domain of TCR clone 154806 (TRAV8-6, TRAJ58)
CAVSSWVGETSGSRLTF

SEQ ID NO: 309612 - protein, 15 aa, Homo sapiens
  CDR3 for beta chain variable domain of TCR clone 154806 (TRBV7-2, TRBJ2-1)
CASSLASGRVNEQFF

SEQ ID NO: 309613 - protein, 14 aa, Homo sapiens
  CDR3 for alpha chain variable domain of TCR clone 154807 (TRAV3, TRAJ33)
CAVRDMDSNYQLIW

SEQ ID NO: 309614 - protein, 17 aa, Homo sapiens
  CDR3 for beta chain variable domain of TCR clone 154807 (TRBV11-2, TRBJ2-1)
CASSLYPPGVEYNEQFF

SEQ ID NO: 309615 - protein, 13 aa, Homo sapiens
  CDR3 for alpha chain variable domain of TCR clone 154808 (TRAV16, TRAJ48)
CSPLNFGNEKLTF

SEQ ID NO: 309616 - protein, 11 aa, Homo sapiens
  CDR3 for beta chain variable domain of TCR clone 154808 (TRBV7-9, TRBJ2-3)
CASSPKDTQYF

SEQ ID NO: 309617 - protein, 16 aa, Homo sapiens
  CDR3 for alpha chain variable domain of TCR clone 154809 (TRAV8-6, TRAJ37)
CAVSGLGSSNTGKLIF

SEQ ID NO: 309618 - protein, 14 aa, Homo sapiens
  CDR3 for beta chain variable domain of TCR clone 154809 (TRBV25-1, TRBJ1-1)
CASTHLGGNTEAFF

SEQ ID NO: 309619 - protein, 11 aa, Homo sapiens
  CDR3 for alpha chain variable domain of TCR clone 154810 (TRAV12-1, TRAJ21)
CVVNNFHKFYF

SEQ ID NO: 309620 - protein, 14 aa, Homo sapiens
  CDR3 for beta chain variable domain of TCR clone 154810 (TRBV18, TRBJ2-7)
CASSPRGGAYEQYF

SEQ ID NO: 309621 - protein, 13 aa, Homo sapiens
  CDR3 for alpha chain variable domain of TCR clone 154811 (TRAV1-2, TRAJ20)
CAVRDGNDYKLSF

SEQ ID NO: 309622 - protein, 14 aa, Homo sapiens
  CDR3 for beta chain variable domain of TCR clone 154811 (TRBV19, TRBJ2-1)
CASPTFVLSGEQFF

SEQ ID NO: 309623 - protein, 13 aa, Homo sapiens
  CDR3 for alpha chain variable domain of TCR clone 154812 (TRAV21, TRAJ20)
CAVGLRVDYKLSF

SEQ ID NO: 309624 - protein, 12 aa, Homo sapiens
  CDR3 for beta chain variable domain of TCR clone 154812 (TRBV5-7, TRBJ1-2)
CASSDRIHGYTF

SEQ ID NO: 309625 - protein, 16 aa, Homo sapiens
  CDR3 for alpha chain variable domain of TCR clone 154813 (TRAV12-3, TRAJ45)
CAMGWGSGGGADGLTF

SEQ ID NO: 309626 - protein, 13 aa, Homo sapiens
  CDR3 for beta chain variable domain of TCR clone 154813 (TRBV4-1, TRBJ2-1)
CASSQAGGDEQFF

SEQ ID NO: 309627 - protein, 16 aa, Homo sapiens
  CDR3 for alpha chain variable domain of TCR clone 154814 (TRAV12-1, TRAJ22)
CVVNTISSGSARQLAF

SEQ ID NO: 309628 - protein, 13 aa, Homo sapiens
  CDR3 for beta chain variable domain of TCR clone 154814 (TRBV19, TRBJ2-1)
CASNGGVFSEQFF

SEQ ID NO: 309629 - protein, 14 aa, Homo sapiens
  CDR3 for alpha chain variable domain of TCR clone 154815 (TRAV1-2, TRAJ8)
CAMREDTGFQRLVF

SEQ ID NO: 309630 - protein, 15 aa, Homo sapiens
  CDR3 for beta chain variable domain of TCR clone 154815 (TRBV20-1, TRBJ2-7)
CSARDRVSGMDEQYF

SEQ ID NO: 309631 - protein, 14 aa, Homo sapiens
  CDR3 for alpha chain variable domain of TCR clone 154816 (TRAV2, TRAJ22)
CAVEDSGSARQLTF

SEQ ID NO: 309632 - protein, 15 aa, Homo sapiens
  CDR3 for beta chain variable domain of TCR clone 154816 (TRBV28, TRBJ1-2)
CASSLPVGHGDGYAF

SEQ ID NO: 309633 - protein, 12 aa, Homo sapiens
  CDR3 for alpha chain variable domain of TCR clone 154817 (TRAV29/DV5, TRAJ43)
CAAPYNNNDMRF

SEQ ID NO: 309634 - protein, 17 aa, Homo sapiens
  CDR3 for beta chain variable domain of TCR clone 154817 (TRBV19, TRBJ2-6)
CASSTGQVVSGANDLTF

SEQ ID NO: 309635 - protein, 12 aa, Homo sapiens
  CDR3 for alpha chain variable domain of TCR clone 154818 (TRAV8-3, TRAJ26)
CAGENYGQNFVF

SEQ ID NO: 309636 - protein, 17 aa, Homo sapiens
  CDR3 for beta chain variable domain of TCR clone 154818 (TRBV20-1, TRBJ2-1)
CSASSSGLAGSYNEQFF

SEQ ID NO: 309637 - protein, 18 aa, Homo sapiens
  CDR3 for alpha chain variable domain of TCR clone 154819 (TRAV13-1, TRAJ52)
CAASKRSAGGTSGGKLTF

SEQ ID NO: 309638 - protein, 13 aa, Homo sapiens
  CDR3 for beta chain variable domain of TCR clone 154819 (TRBV12-4, TRBJ1-2)
CASSLRQGKGYTF

SEQ ID NO: 309639 - protein, 13 aa, Homo sapiens
  CDR3 for alpha chain variable domain of TCR clone 154820 (TRAV12-3, TRAJ7)
CAMTPYGNNRLAF

SEQ ID NO: 309640 - protein, 16 aa, Homo sapiens
  CDR3 for beta chain variable domain of TCR clone 154820 (TRBV25-1, TRBJ1-1)
CASSGDRDRGRIEAFF

SEQ ID NO: 309641 - protein, 14 aa, Homo sapiens
  CDR3 for alpha chain variable domain of TCR clone 154821 (TRAV12-2, TRAJ17)
CAVLFKAAGNRLTF

SEQ ID NO: 309642 - protein, 15 aa, Homo sapiens
  CDR3 for beta chain variable domain of TCR clone 154821 (TRBV6-3, TRBJ2-7)
CASSSPGTVFYEQYF

SEQ ID NO: 309643 - protein, 17 aa, Homo sapiens
  CDR3 for alpha chain variable domain of TCR clone 154822 (TRAV3, TRAJ42)
CAVRDRHYGGSQGNLIF

SEQ ID NO: 309644 - protein, 14 aa, Homo sapiens
  CDR3 for beta chain variable domain of TCR clone 154822 (TRBV25-1, TRBJ1-1)
CASTHLGGNTEAFF

SEQ ID NO: 309645 - protein, 12 aa, Homo sapiens
  CDR3 for alpha chain variable domain of TCR clone 154823 (TRAV27, TRAJ35)
CAGADFGNVLHC

SEQ ID NO: 309646 - protein, 15 aa, Homo sapiens
  CDR3 for beta chain variable domain of TCR clone 154823 (TRBV7-2, TRBJ1-2)
FASSLVSGGDYGYTF

SEQ ID NO: 309647 - protein, 11 aa, Homo sapiens
  CDR3 for alpha chain variable domain of TCR clone 154824 (TRAV12-3, TRAJ43)
CAMSVSNDIRF

SEQ ID NO: 309648 - protein, 17 aa, Homo sapiens
  CDR3 for beta chain variable domain of TCR clone 154824 (TRBV11-2, TRBJ2-1)
CASSLYPPGVEYNEQFF

SEQ ID NO: 309649 - protein, 15 aa, Homo sapiens
  CDR3 for alpha chain variable domain of TCR clone 154825 (TRAV3, TRAJ22)
CAVRDRGGSARKLTF

SEQ ID NO: 309650 - protein, 14 aa, Homo sapiens
  CDR3 for beta chain variable domain of TCR clone 154825 (TRBV7-2, TRBJ2-7)
CASRSQGAAYEQYF

SEQ ID NO: 309651 - protein, 13 aa, Homo sapiens
  CDR3 for alpha chain variable domain of TCR clone 154826 (TRAV12-2, TRAJ40)
CREDPLRNLQYIF

SEQ ID NO: 309652 - protein, 14 aa, Homo sapiens
  CDR3 for beta chain variable domain of TCR clone 154826 (TRBV20-1, TRBJ1-1)
CSAQTRIGGTEAFF

SEQ ID NO: 309653 - protein, 12 aa, Homo sapiens
  CDR3 for alpha chain variable domain of TCR clone 154827 (TRAV2, TRAJ33)
CAVPDSNFQLIW

SEQ ID NO: 309654 - protein, 16 aa, Homo sapiens
  CDR3 for beta chain variable domain of TCR clone 154827 (TRBV12-4, TRBJ2-7)
CASSPEGQGSSYEQYF

SEQ ID NO: 309655 - protein, 13 aa, Homo sapiens
  CDR3 for alpha chain variable domain of TCR clone 154828 (TRAV21, TRAJ20)
CAVGLRVDYKLSF

SEQ ID NO: 309656 - protein, 14 aa, Homo sapiens
  CDR3 for beta chain variable domain of TCR clone 154828 (TRBV4-1, TRBJ1-5)
CASSQGPTNQPQHF

SEQ ID NO: 309657 - protein, 13 aa, Homo sapiens
  CDR3 for alpha chain variable domain of TCR clone 154829 (TRAV29/DV5, TRAJ31)
CAASRNNTARLMF

SEQ ID NO: 309658 - protein, 13 aa, Homo sapiens
  CDR3 for beta chain variable domain of TCR clone 154829 (TRBV7-2, TRBJ2-4)
CASSREHANIQYF

SEQ ID NO: 309659 - protein, 17 aa, Homo sapiens
  CDR3 for alpha chain variable domain of TCR clone 154830 (TRAV12-2, TRAJ48)
CASNEKLTFGTGTRLNI

SEQ ID NO: 309660 - protein, 14 aa, Homo sapiens
  CDR3 for beta chain variable domain of TCR clone 154830 (TRBV5-1, TRBJ2-5)
CASSLAGKQETQYF

SEQ ID NO: 309661 - protein, 16 aa, Homo sapiens
  CDR3 for alpha chain variable domain of TCR clone 154831 (TRAV13-2, TRAJ32)
CAANMNYGVATNKLIF

SEQ ID NO: 309662 - protein, 14 aa, Homo sapiens
  CDR3 for beta chain variable domain of TCR clone 154831 (TRBV15, TRBJ2-5)
CATSSTGYQETQYF

SEQ ID NO: 309663 - protein, 17 aa, Homo sapiens
  CDR3 for alpha chain variable domain of TCR clone 154832 (TRAV3, TRAJ6)
CSVRDGPRAGGSYIPTF

SEQ ID NO: 309664 - protein, 14 aa, Homo sapiens
  CDR3 for beta chain variable domain of TCR clone 154832 (TRBV7-2, TRBJ2-7)
CASSPKTSFYEPYF

SEQ ID NO: 309665 - protein, 13 aa, Homo sapiens
  CDR3 for alpha chain variable domain of TCR clone 154833 (TRAV38-1, TRAJ42)
CARWGGSQGNFIF

SEQ ID NO: 309666 - protein, 18 aa, Homo sapiens
  CDR3 for beta chain variable domain of TCR clone 154833 (TRBV7-6, TRBJ2-2)
CASSSSRQGGGNTGELFF

SEQ ID NO: 309667 - protein, 14 aa, Homo sapiens
  CDR3 for alpha chain variable domain of TCR clone 154834 (TRAV16, TRAJ57)
CALPTQGGSEKLVF

SEQ ID NO: 309668 - protein, 15 aa, Homo sapiens
  CDR3 for beta chain variable domain of TCR clone 154834 (TRBV28, TRBJ1-3)
CASWGGHPSGNTIYF

SEQ ID NO: 309669 - protein, 13 aa, Homo sapiens
  CDR3 for alpha chain variable domain of TCR clone 154835 (TRAV27, TRAJ45)
CRSSGGGADGFTF

SEQ ID NO: 309670 - protein, 15 aa, Homo sapiens
  CDR3 for beta chain variable domain of TCR clone 154835 (TRBV9, TRBJ2-2)
CASSDFAGASGELFF

SEQ ID NO: 309671 - protein, 16 aa, Homo sapiens
  CDR3 for alpha chain variable domain of TCR clone 154836 (TRAV17, TRAJ35)
CATAEGGIGVGNVLHC

SEQ ID NO: 309672 - protein, 16 aa, Homo sapiens
  CDR3 for beta chain variable domain of TCR clone 154836 (TRBV6-5, TRBJ2-7)
CASSSDPTSGFYEQYF

SEQ ID NO: 309673 - protein, 17 aa, Homo sapiens
  CDR3 for alpha chain variable domain of TCR clone 154837 (TRAV13-1, TRAJ28)
CAASPPYSGAGSYQLTF

SEQ ID NO: 309674 - protein, 16 aa, Homo sapiens
  CDR3 for beta chain variable domain of TCR clone 154837 (TRBV5-1, TRBJ2-2)
CASSSYREGDTGELFF

SEQ ID NO: 309675 - protein, 16 aa, Homo sapiens
  CDR3 for alpha chain variable domain of TCR clone 154838 (TRAV26-1, TRAJ37)
CIVRGDGSGNTGKLIF

SEQ ID NO: 309676 - protein, 13 aa, Homo sapiens
  CDR3 for beta chain variable domain of TCR clone 154838 (TRBV7-9, TRBJ1-2)
CASSLKQNYGYTF

SEQ ID NO: 309677 - protein, 14 aa, Homo sapiens
  CDR3 for alpha chain variable domain of TCR clone 154839 (TRAV8-1, TRAJ5)
CAVRTDTSRRALTF

SEQ ID NO: 309678 - protein, 12 aa, Homo sapiens
  CDR3 for beta chain variable domain of TCR clone 154839 (TRBV11-2, TRBJ2-1)
CASSPGNNEQFF

SEQ ID NO: 309679 - protein, 15 aa, Homo sapiens
  CDR3 for alpha chain variable domain of TCR clone 154840 (TRAV26-2, TRAJ13)
CILRDLSGGYPKVTF

SEQ ID NO: 309680 - protein, 11 aa, Homo sapiens
  CDR3 for beta chain variable domain of TCR clone 154840 (TRBV7-9, TRBJ2-3)
CASSYTDTQYF

SEQ ID NO: 309681 - protein, 15 aa, Homo sapiens
  CDR3 for alpha chain variable domain of TCR clone 154841 (TRAV29/DV5, TRAJ24)
CAASGASDSWGKFQF

SEQ ID NO: 309682 - protein, 12 aa, Homo sapiens
  CDR3 for beta chain variable domain of TCR clone 154841 (TRBV11-2, TRBJ2-2)
CASSLPTGELFF

SEQ ID NO: 309683 - protein, 15 aa, Homo sapiens
  CDR3 for alpha chain variable domain of TCR clone 154842 (TRAV20, TRAJ43)
CAVQAGKSSNNDMRF

SEQ ID NO: 309684 - protein, 14 aa, Homo sapiens
  CDR3 for beta chain variable domain of TCR clone 154842 (TRBV27, TRBJ2-1)
CASRHLGVGKEQFF

SEQ ID NO: 309685 - protein, 16 aa, Homo sapiens
  CDR3 for alpha chain variable domain of TCR clone 154843 (TRAV4, TRAJ9)
CLVGDPNRPGGFKTIF

SEQ ID NO: 309686 - protein, 13 aa, Homo sapiens
  CDR3 for beta chain variable domain of TCR clone 154843 (TRBV9, TRBJ2-1)
CASSPSGGNEQFF

SEQ ID NO: 309687 - protein, 12 aa, Homo sapiens
  CDR3 for alpha chain variable domain of TCR clone 154844 (TRAV3, TRAJ20)
CAVRDPDYKLSF

SEQ ID NO: 309688 - protein, 13 aa, Homo sapiens
  CDR3 for beta chain variable domain of TCR clone 154844 (TRBV2, TRBJ2-5)
CASGTPYQETQYF

SEQ ID NO: 309689 - protein, 13 aa, Homo sapiens
  CDR3 for alpha chain variable domain of TCR clone 154845 (TRAV27, TRAJ41)
CAGQGNSGYALNF

SEQ ID NO: 309690 - protein, 14 aa, Homo sapiens
  CDR3 for beta chain variable domain of TCR clone 154845 (TRBV7-2, TRBJ1-1)
CASSFLTGTTEAFF

SEQ ID NO: 309691 - protein, 15 aa, Homo sapiens
  CDR3 for alpha chain variable domain of TCR clone 154846 (TRAV12-1, TRAJ15)
CVVTRANQAGTALIF

SEQ ID NO: 309692 - protein, 16 aa, Homo sapiens
  CDR3 for beta chain variable domain of TCR clone 154846 (TRBV19, TRBJ1-1)
CASRFGGPVTGTEAFF

SEQ ID NO: 309693 - protein, 16 aa, Homo sapiens
  CDR3 for alpha chain variable domain of TCR clone 154847 (TRAV1-1, TRAJ29)
CAVRSTRNSGNTPLVF

SEQ ID NO: 309694 - protein, 15 aa, Homo sapiens
  CDR3 for beta chain variable domain of TCR clone 154847 (TRBV29-1, TRBJ2-1)
CSVGRHALFYNEQFF

SEQ ID NO: 309695 - protein, 14 aa, Homo sapiens
  CDR3 for alpha chain variable domain of TCR clone 154848 (TRAV12-3, TRAJ10)
SHLPLTGGGNKLNF

SEQ ID NO: 309696 - protein, 11 aa, Homo sapiens
  CDR3 for beta chain variable domain of TCR clone 154848 (TRBV20-1, TRBJ2-5)
CSADRAETQYF

SEQ ID NO: 309697 - protein, 14 aa, Homo sapiens
  CDR3 for alpha chain variable domain of TCR clone 154849 (TRAV1-2, TRAJ16)
CAVNRFSDGQKLLF

SEQ ID NO: 309698 - protein, 17 aa, Homo sapiens
  CDR3 for beta chain variable domain of TCR clone 154849 (TRBV5-1, TRBJ2-5)
CASSPVALGQNQETQYF

SEQ ID NO: 309699 - protein, 14 aa, Homo sapiens
  CDR3 for alpha chain variable domain of TCR clone 154850 (TRAV2, TRAJ37)
CAVDFTSNTGKLIF

SEQ ID NO: 309700 - protein, 19 aa, Homo sapiens
  CDR3 for beta chain variable domain of TCR clone 154850 (TRBV11-3, TRBJ2-2)
CASSTRPGAKTTNTGELFF

SEQ ID NO: 309701 - protein, 13 aa, Homo sapiens
  CDR3 for alpha chain variable domain of TCR clone 154851 (TRAV26-2, TRAJ43)
CMLRAVNNNDMRF

SEQ ID NO: 309702 - protein, 14 aa, Homo sapiens
  CDR3 for beta chain variable domain of TCR clone 154851 (TRBV19, TRBJ2-1)
CASPTFVLSGEQFF

SEQ ID NO: 309703 - protein, 14 aa, Homo sapiens
  CDR3 for alpha chain variable domain of TCR clone 154852 (TRAV21, TRAJ15)
CAVSLNQAGAALIF

SEQ ID NO: 309704 - protein, 11 aa, Homo sapiens
  CDR3 for beta chain variable domain of TCR clone 154852 (TRBV20-1, TRBJ2-7)
RSARTSYEQYF

SEQ ID NO: 309705 - protein, 12 aa, Homo sapiens
  CDR3 for alpha chain variable domain of TCR clone 154853 (TRAV12-2, TRAJ31)
CAVNTPDARLMF

SEQ ID NO: 309706 - protein, 14 aa, Homo sapiens
  CDR3 for beta chain variable domain of TCR clone 154853 (TRBV19, TRBJ2-2)
CASSTLHRSGELFF

SEQ ID NO: 309707 - protein, 13 aa, Homo sapiens
  CDR3 for alpha chain variable domain of TCR clone 154854 (TRAV21, TRAJ20)
CAVGLRVDYKLSF

SEQ ID NO: 309708 - protein, 14 aa, Homo sapiens
  CDR3 for beta chain variable domain of TCR clone 154854 (TRBV5-1, TRBJ2-7)
CASRWDWQFHEQYF

SEQ ID NO: 309709 - protein, 11 aa, Homo sapiens
  CDR3 for alpha chain variable domain of TCR clone 154855 (TRAV14/DV4, TRAJ26)
CAMRGPSEFFF

SEQ ID NO: 309710 - protein, 14 aa, Homo sapiens
  CDR3 for beta chain variable domain of TCR clone 154855 (TRBV12-4, TRBJ1-3)
CASTLTGAGNTIYF

SEQ ID NO: 309711 - protein, 12 aa, Homo sapiens
  CDR3 for alpha chain variable domain of TCR clone 154856 (TRAV13-2, TRAJ23)
CAERHRGGKLIF

SEQ ID NO: 309712 - protein, 13 aa, Homo sapiens
  CDR3 for beta chain variable domain of TCR clone 154856 (TRBV7-7, TRBJ2-5)
CASSRSGQETQYF

SEQ ID NO: 309713 - protein, 17 aa, Homo sapiens
  CDR3 for alpha chain variable domain of TCR clone 154857 (TRAV3, TRAJ12)
CAVREIGGMDSSYKLIF

SEQ ID NO: 309714 - protein, 13 aa, Homo sapiens
  CDR3 for beta chain variable domain of TCR clone 154857 (TRBV7-9, TRBJ1-2)
CASSLKQNYGYTF

SEQ ID NO: 309715 - protein, 13 aa, Homo sapiens
  CDR3 for alpha chain variable domain of TCR clone 154858 (TRAV8-3, TRAJ36)
CAVGATGANNLSL

SEQ ID NO: 309716 - protein, 15 aa, Homo sapiens
  CDR3 for beta chain variable domain of TCR clone 154858 (TRBV12-4, TRBJ2-5)
CASSPPTGLQETQYF

SEQ ID NO: 309717 - protein, 14 aa, Homo sapiens
  CDR3 for alpha chain variable domain of TCR clone 154859 (TRAV8-6, TRAJ6)
CAVHASGGSYIPTF

SEQ ID NO: 309718 - protein, 15 aa, Homo sapiens
  CDR3 for beta chain variable domain of TCR clone 154859 (TRBV7-2, TRBJ2-1)
CASSLVGSSYNEQFF

SEQ ID NO: 309719 - protein, 13 aa, Homo sapiens
  CDR3 for alpha chain variable domain of TCR clone 154860 (TRAV13-1, TRAJ6)
CAASRGGSYIPTF

SEQ ID NO: 309720 - protein, 15 aa, Homo sapiens
  CDR3 for beta chain variable domain of TCR clone 154860 (TRBV25-1, TRBJ2-5)
CASSDTGTHQETKYF

SEQ ID NO: 309721 - protein, 14 aa, Homo sapiens
  CDR3 for alpha chain variable domain of TCR clone 154861 (TRAV12-3, TRAJ10)
SHLPLTGGGNKLTF

SEQ ID NO: 309722 - protein, 15 aa, Homo sapiens
  CDR3 for beta chain variable domain of TCR clone 154861 (TRBV6-6, TRBJ1-5)
CASSSIQGTNQPQYV

SEQ ID NO: 309723 - protein, 23 aa, Homo sapiens
  CDR3 for alpha chain variable domain of TCR clone 154862 (TRAV12-2, TRAJ36)
SLLIRDSQPSDSATLERANNLFF

SEQ ID NO: 309724 - protein, 16 aa, Homo sapiens
  CDR3 for beta chain variable domain of TCR clone 154862 (TRBV12-4, TRBJ1-5)
CASSRPVGGSNQPQHF

SEQ ID NO: 309725 - protein, 13 aa, Homo sapiens
  CDR3 for alpha chain variable domain of TCR clone 154863 (TRAV9-2, TRAJ37)
CALHSSNTGKLIF

SEQ ID NO: 309726 - protein, 15 aa, Homo sapiens
  CDR3 for beta chain variable domain of TCR clone 154863 (TRBV7-2, TRBJ2-7)
CASSAPGLTRGEQYF

SEQ ID NO: 309727 - protein, 20 aa, Homo sapiens
  CDR3 for alpha chain variable domain of TCR clone 154864 (TRAV12-1, TRAJ42)
SSVIQPPTSVKGGSQGNLIF

SEQ ID NO: 309728 - protein, 18 aa, Homo sapiens
  CDR3 for beta chain variable domain of TCR clone 154864 (TRBV11-2, TRBJ2-3)
CASSSGGASRGAPNTQYF

SEQ ID NO: 309729 - protein, 16 aa, Homo sapiens
  CDR3 for alpha chain variable domain of TCR clone 154865 (TRAV12-2, TRAJ45)
CAVNMYSGGGADGLTF

SEQ ID NO: 309730 - protein, 14 aa, Homo sapiens
  CDR3 for beta chain variable domain of TCR clone 154865 (TRBV7-2, TRBJ2-7)
CASRSQGAAYEQYF

SEQ ID NO: 309731 - protein, 14 aa, Homo sapiens
  CDR3 for alpha chain variable domain of TCR clone 154866 (TRAV22, TRAJ24)
FALDSSNSWGKLQF

SEQ ID NO: 309732 - protein, 11 aa, Homo sapiens
  CDR3 for beta chain variable domain of TCR clone 154866 (TRBV29-1, TRBJ2-3)
CSVEIGDTQYF

SEQ ID NO: 309733 - protein, 14 aa, Homo sapiens
  CDR3 for alpha chain variable domain of TCR clone 154867 (TRAV26-1, TRAJ38)
CIADNAGNNRKLIW

SEQ ID NO: 309734 - protein, 15 aa, Homo sapiens
  CDR3 for beta chain variable domain of TCR clone 154867 (TRBV13, TRBJ2-1)
CASSLLSGLNNEQFF

SEQ ID NO: 309735 - protein, 13 aa, Homo sapiens
  CDR3 for alpha chain variable domain of TCR clone 154868 (TRAV2, TRAJ40)
CAVVTSGTHKYIF

SEQ ID NO: 309736 - protein, 14 aa, Homo sapiens
  CDR3 for beta chain variable domain of TCR clone 154868 (TRBV19, TRBJ2-1)
CASPTFVLSGEQLF

SEQ ID NO: 309737 - protein, 13 aa, Homo sapiens
  CDR3 for alpha chain variable domain of TCR clone 154869 (TRAV8-3, TRAJ43)
CAVVPYNNNDMRF

SEQ ID NO: 309738 - protein, 13 aa, Homo sapiens
  CDR3 for beta chain variable domain of TCR clone 154869 (TRBV20-1, TRBJ2-7)
CSATHTSGYEQYF

SEQ ID NO: 309739 - protein, 15 aa, Homo sapiens
  CDR3 for alpha chain variable domain of TCR clone 154870 (TRAV3, TRAJ30)
CAVRDRVERGDKIIF

SEQ ID NO: 309740 - protein, 13 aa, Homo sapiens
  CDR3 for beta chain variable domain of TCR clone 154870 (TRBV29-1, TRBJ2-5)
CSACTSRRETQYF

SEQ ID NO: 309741 - protein, 16 aa, Homo sapiens
  CDR3 for alpha chain variable domain of TCR clone 154871 (TRAV26-2, TRAJ45)
CTTASPIGGGADGLTF

SEQ ID NO: 309742 - protein, 14 aa, Homo sapiens
  CDR3 for beta chain variable domain of TCR clone 154871 (TRBV25-1, TRBJ1-1)
CASTHLGGNTEAFF

SEQ ID NO: 309743 - protein, 15 aa, Homo sapiens
  CDR3 for alpha chain variable domain of TCR clone 154872 (TRAV12-2, TRAJ53)
CSVNGGGGSNYKLTF

SEQ ID NO: 309744 - protein, 15 aa, Homo sapiens
  CDR3 for beta chain variable domain of TCR clone 154872 (TRBV20-1, TRBJ2-7)
CSARDRVSGMDEQYF

SEQ ID NO: 309745 - protein, 15 aa, Homo sapiens
  CDR3 for alpha chain variable domain of TCR clone 154873 (TRAV3, TRAJ22)
CAVRDRGGSAKQLTF

SEQ ID NO: 309746 - protein, 15 aa, Homo sapiens
  CDR3 for beta chain variable domain of TCR clone 154873 (TRBV7-3, TRBJ2-1)
CASSPTGGGEVEQFF

SEQ ID NO: 309747 - protein, 15 aa, Homo sapiens
  CDR3 for alpha chain variable domain of TCR clone 154874 (TRAV2, TRAJ15)
CAVVDREQAGTALIF

SEQ ID NO: 309748 - protein, 13 aa, Homo sapiens
  CDR3 for beta chain variable domain of TCR clone 154874 (TRBV10-2, TRBJ2-3)
CASSESGDHTQYF

SEQ ID NO: 309749 - protein, 14 aa, Homo sapiens
  CDR3 for alpha chain variable domain of TCR clone 154875 (TRAV13-2, TRAJ10)
FAETFTGGGNKLTF

SEQ ID NO: 309750 - protein, 16 aa, Homo sapiens
  CDR3 for beta chain variable domain of TCR clone 154875 (TRBV19, TRBJ2-2)
CASRSPGTGATGELFF

SEQ ID NO: 309751 - protein, 21 aa, Homo sapiens
  CDR3 for alpha chain variable domain of TCR clone 154876 (TRAV8-3, TRAJ10)
CAVGHTHGRRKQTHLWDRNSA

SEQ ID NO: 309752 - protein, 10 aa, Homo sapiens
  CDR3 for beta chain variable domain of TCR clone 154876 (TRBV20-1, TRBJ2-5)
CSARFETQYF

SEQ ID NO: 309753 - protein, 13 aa, Homo sapiens
  CDR3 for alpha chain variable domain of TCR clone 154877 (TRAV23/DV6, TRAJ27)
CAASKPMQANQPL

SEQ ID NO: 309754 - protein, 12 aa, Homo sapiens
  CDR3 for beta chain variable domain of TCR clone 154877 (TRBV7-8, TRBJ2-7)
CASSLGDREQYF

SEQ ID NO: 309755 - protein, 18 aa, Homo sapiens
  CDR3 for alpha chain variable domain of TCR clone 154878 (TRAV26-1, TRAJ23)
CIVRVGLEVWNQGGKLIF

SEQ ID NO: 309756 - protein, 16 aa, Homo sapiens
  CDR3 for beta chain variable domain of TCR clone 154878 (TRBV12-4, TRBJ2-5)
CASSFFVRGRQETQYI

SEQ ID NO: 309757 - protein, 12 aa, Homo sapiens
  CDR3 for alpha chain variable domain of TCR clone 154879 (TRAV13-1, TRAJ21)
CAAKEAFNKFYF

SEQ ID NO: 309758 - protein, 17 aa, Homo sapiens
  CDR3 for beta chain variable domain of TCR clone 154879 (TRBV19, TRBJ2-7)
CASSISFYDSYPYEQYF

SEQ ID NO: 309759 - protein, 23 aa, Homo sapiens
  CDR3 for alpha chain variable domain of TCR clone 154880 (TRAV14/DV4, TRAJ34)
CAMREGRPHRQAHLWDWAQITSL

SEQ ID NO: 309760 - protein, 14 aa, Homo sapiens
  CDR3 for beta chain variable domain of TCR clone 154880 (TRBV19, TRBJ2-1)
CASPTFVLSGEQFF

SEQ ID NO: 309761 - protein, 12 aa, Homo sapiens
  CDR3 for alpha chain variable domain of TCR clone 154881 (TRAV13-1, TRAJ43)
CAAGRFNNDMRF

SEQ ID NO: 309762 - protein, 16 aa, Homo sapiens
  CDR3 for beta chain variable domain of TCR clone 154881 (TRBV2, TRBJ1-1)
CASSPPNRGMNTEAFF

SEQ ID NO: 309763 - protein, 13 aa, Homo sapiens
  CDR3 for alpha chain variable domain of TCR clone 154882 (TRAV2, TRAJ40)
CAVVTSGTYKYIF

SEQ ID NO: 309764 - protein, 15 aa, Homo sapiens
  CDR3 for beta chain variable domain of TCR clone 154882 (TRBV19, TRBJ1-2)
CASSVGQVLNYGYTC

SEQ ID NO: 309765 - protein, 16 aa, Homo sapiens
  CDR3 for alpha chain variable domain of TCR clone 154883 (TRAV12-2, TRAJ6)
CAAPLAGSGGRYIPTF

SEQ ID NO: 309766 - protein, 10 aa, Homo sapiens
  CDR3 for beta chain variable domain of TCR clone 154883 (TRBV28, TRBJ1-2)
CASSSDRAVF

SEQ ID NO: 309767 - protein, 15 aa, Homo sapiens
  CDR3 for alpha chain variable domain of TCR clone 154884 (TRAV16, TRAJ12)
CSKWPLRDSSYKLIF

SEQ ID NO: 309768 - protein, 16 aa, Homo sapiens
  CDR3 for beta chain variable domain of TCR clone 154884 (TRBV7-3, TRBJ2-2)
CASSLKRGTLSGELSF

SEQ ID NO: 309769 - protein, 11 aa, Homo sapiens
  CDR3 for alpha chain variable domain of TCR clone 154885 (TRAV13-1, TRAJ23)
CAASSRGKLIF

SEQ ID NO: 309770 - protein, 16 aa, Homo sapiens
  CDR3 for beta chain variable domain of TCR clone 154885 (TRBV7-3, TRBJ2-5)
CISGPAASGGGETQYF

SEQ ID NO: 309771 - protein, 13 aa, Homo sapiens
  CDR3 for alpha chain variable domain of TCR clone 154886 (TRAV1-2, TRAJ9)
CAALNTGGFKTIF

SEQ ID NO: 309772 - protein, 15 aa, Homo sapiens
  CDR3 for beta chain variable domain of TCR clone 154886 (TRBV7-3, TRBJ2-2)
CASSLEVLPTGELFF

SEQ ID NO: 309773 - protein, 14 aa, Homo sapiens
  CDR3 for alpha chain variable domain of TCR clone 154887 (TRAV13-2, TRAJ32)
CAENYGGATNQLIF

SEQ ID NO: 309774 - protein, 15 aa, Homo sapiens
  CDR3 for beta chain variable domain of TCR clone 154887 (TRBV12-4, TRBJ2-5)
CASTLNSGRGETQYF

SEQ ID NO: 309775 - protein, 14 aa, Homo sapiens
  CDR3 for alpha chain variable domain of TCR clone 154888 (TRAV38-1, TRAJ40)
CALRPPSGTSKYIF

SEQ ID NO: 309776 - protein, 14 aa, Homo sapiens
  CDR3 for beta chain variable domain of TCR clone 154888 (TRBV19, TRBJ2-1)
CASPTCVLSGEQFF

SEQ ID NO: 309777 - protein, 15 aa, Homo sapiens
  CDR3 for alpha chain variable domain of TCR clone 154889 (TRAV6, TRAJ52)
CALTAGGTSYGKLTF

SEQ ID NO: 309778 - protein, 14 aa, Homo sapiens
  CDR3 for beta chain variable domain of TCR clone 154889 (TRBV7-2, TRBJ2-1)
CASSPGTFYNEQFF

SEQ ID NO: 309779 - protein, 16 aa, Homo sapiens
  CDR3 for alpha chain variable domain of TCR clone 154890 (TRAV12-1, TRAJ45)
CVVNGGIGGGADGLTF

SEQ ID NO: 309780 - protein, 14 aa, Homo sapiens
  CDR3 for beta chain variable domain of TCR clone 154890 (TRBV6-1, TRBJ1-3)
CASVQGGGGNTIYF

SEQ ID NO: 309781 - protein, 12 aa, Homo sapiens
  CDR3 for alpha chain variable domain of TCR clone 154891 (TRAV2, TRAJ33)
CAVPDSNYQLIW

SEQ ID NO: 309782 - protein, 15 aa, Homo sapiens
  CDR3 for beta chain variable domain of TCR clone 154891 (TRBV15, TRBJ1-5)
CATSRDPVSDQPQHF

SEQ ID NO: 309783 - protein, 20 aa, Homo sapiens
  CDR3 for alpha chain variable domain of TCR clone 154892 (TRAV21, TRAJ35)
AASQPGDSATYRTRGNVLHC

SEQ ID NO: 309784 - protein, 13 aa, Homo sapiens
  CDR3 for beta chain variable domain of TCR clone 154892 (TRBV10-3, TRBJ2-7)
CASKLAVNYEQYF

SEQ ID NO: 309785 - protein, 14 aa, Homo sapiens
  CDR3 for alpha chain variable domain of TCR clone 154893 (TRAV17, TRAJ57)
CATDPQGGYEKLVF

SEQ ID NO: 309786 - protein, 17 aa, Homo sapiens
  CDR3 for beta chain variable domain of TCR clone 154893 (TRBV5-1, TRBJ2-2)
CASSLAGLSGGTGELFF

SEQ ID NO: 309787 - protein, 11 aa, Homo sapiens
  CDR3 for alpha chain variable domain of TCR clone 154894 (TRAV2, TRAJ13)
CTPGGYQKVTF

SEQ ID NO: 309788 - protein, 16 aa, Homo sapiens
  CDR3 for beta chain variable domain of TCR clone 154894 (TRBV6-1, TRBJ2-5)
CASSETLDRGAETQYF

SEQ ID NO: 309789 - protein, 11 aa, Homo sapiens
  CDR3 for alpha chain variable domain of TCR clone 154895 (TRAV13-1, TRAJ52)
PGGTNYGKLTF

SEQ ID NO: 309790 - protein, 16 aa, Homo sapiens
  CDR3 for beta chain variable domain of TCR clone 154895 (TRBV28, TRBJ2-7)
CASSPWVATGDRAQYF

SEQ ID NO: 309791 - protein, 13 aa, Homo sapiens
  CDR3 for alpha chain variable domain of TCR clone 154896 (TRAV8-3, TRAJ36)
CAVGATGANNLFF

SEQ ID NO: 309792 - protein, 18 aa, Homo sapiens
  CDR3 for beta chain variable domain of TCR clone 154896 (TRBV3-1, TRBJ2-1)
CASSQDLPGRPLFDEQFF

SEQ ID NO: 309793 - protein, 18 aa, Homo sapiens
  CDR3 for alpha chain variable domain of TCR clone 154897 (TRAV29/DV5, TRAJ53)
CSVLLCSKRGGSNYKLTF

SEQ ID NO: 309794 - protein, 17 aa, Homo sapiens
  CDR3 for beta chain variable domain of TCR clone 154897 (TRBV7-8, TRBJ2-6)
CASSDGTGGAGANVLTF

SEQ ID NO: 309795 - protein, 13 aa, Homo sapiens
  CDR3 for alpha chain variable domain of TCR clone 154898 (TRAV1-1, TRAJ30)
CAVRSDRDVKIIF

SEQ ID NO: 309796 - protein, 14 aa, Homo sapiens
  CDR3 for beta chain variable domain of TCR clone 154898 (TRBV28, TRBJ2-7)
CASTFYGRAHEQYF

SEQ ID NO: 309797 - protein, 17 aa, Homo sapiens
  CDR3 for alpha chain variable domain of TCR clone 154899 (TRAV4, TRAJ13)
CLVGVQGSSGGYQKVTF

SEQ ID NO: 309798 - protein, 13 aa, Homo sapiens
  CDR3 for beta chain variable domain of TCR clone 154899 (TRBV10-3, TRBJ2-7)
CASKPAVNYEQYF

SEQ ID NO: 309799 - protein, 17 aa, Homo sapiens
  CDR3 for alpha chain variable domain of TCR clone 154900 (TRAV26-1, TRAJ37)
CIVRVITVSSNTGKLIF

SEQ ID NO: 309800 - protein, 13 aa, Homo sapiens
  CDR3 for beta chain variable domain of TCR clone 154900 (TRBV7-9, TRBJ2-5)
CASLSPGQETQYF

SEQ ID NO: 309801 - protein, 14 aa, Homo sapiens
  CDR3 for alpha chain variable domain of TCR clone 154901 (TRAV23/DV6, TRAJ13)
CAASETGGYQKVTF

SEQ ID NO: 309802 - protein, 16 aa, Homo sapiens
  CDR3 for beta chain variable domain of TCR clone 154901 (TRBV5-1, TRBJ1-3)
CASSAWAPSSGNTIYF

SEQ ID NO: 309803 - protein, 14 aa, Homo sapiens
  CDR3 for alpha chain variable domain of TCR clone 154902 (TRAV8-4, TRAJ9)
CAVRINTGGFKTIF

SEQ ID NO: 309804 - protein, 15 aa, Homo sapiens
  CDR3 for beta chain variable domain of TCR clone 154902 (TRBV12-4, TRBJ2-5)
CASSPPTGLQGTQYF

SEQ ID NO: 309805 - protein, 16 aa, Homo sapiens
  CDR3 for alpha chain variable domain of TCR clone 154903 (TRAV30, TRAJ24)
CGTEIVDADSWGKFQF

SEQ ID NO: 309806 - protein, 12 aa, Homo sapiens
  CDR3 for beta chain variable domain of TCR clone 154903 (TRBV11-2, TRBJ2-2)
CARSLPTGELFF

SEQ ID NO: 309807 - protein, 15 aa, Homo sapiens
  CDR3 for alpha chain variable domain of TCR clone 154904 (TRAV12-2, TRAJ50)
CAVNGLETSYDKVIF

SEQ ID NO: 309808 - protein, 15 aa, Homo sapiens
  CDR3 for beta chain variable domain of TCR clone 154904 (TRBV5-4, TRBJ1-6)
CASTLRGTGNSPLHF

SEQ ID NO: 309809 - protein, 13 aa, Homo sapiens
  CDR3 for alpha chain variable domain of TCR clone 154905 (TRAV8-3, TRAJ43)
CAVVPYNNNDMRF

SEQ ID NO: 309810 - protein, 17 aa, Homo sapiens
  CDR3 for beta chain variable domain of TCR clone 154905 (TRBV7-2, TRBJ2-3)
CASSSYSGTRRADTQYF

SEQ ID NO: 309811 - protein, 14 aa, Homo sapiens
  CDR3 for alpha chain variable domain of TCR clone 154906 (TRAV1-2, TRAJ16)
CAVNRFSDGQKLLF

SEQ ID NO: 309812 - protein, 14 aa, Homo sapiens
  CDR3 for beta chain variable domain of TCR clone 154906 (TRBV7-9, TRBJ1-4)
CAMTEGEANEKLFF

SEQ ID NO: 309813 - protein, 18 aa, Homo sapiens
  CDR3 for alpha chain variable domain of TCR clone 154907 (TRAV16, TRAJ26)
CALTRWSEFCLCSRNQIV

SEQ ID NO: 309814 - protein, 13 aa, Homo sapiens
  CDR3 for beta chain variable domain of TCR clone 154907 (TRBV7-9, TRBJ1-1)
CASSLASNTEAFF

SEQ ID NO: 309815 - protein, 14 aa, Homo sapiens
  CDR3 for alpha chain variable domain of TCR clone 154908 (TRAV8-2, TRAJ45)
CVVSAGGGADGLTF

SEQ ID NO: 309816 - protein, 16 aa, Homo sapiens
  CDR3 for beta chain variable domain of TCR clone 154908 (TRBV4-3, TRBJ2-7)
CASSPRTSGRSYEQYF

SEQ ID NO: 309817 - protein, 12 aa, Homo sapiens
  CDR3 for alpha chain variable domain of TCR clone 154909 (TRAV12-3, TRAJ17)
CAMTLTGNKLTF

SEQ ID NO: 309818 - protein, 15 aa, Homo sapiens
  CDR3 for beta chain variable domain of TCR clone 154909 (TRBV11-3, TRBJ2-7)
CASSPGTASSYEQYF

SEQ ID NO: 309819 - protein, 12 aa, Homo sapiens
  CDR3 for alpha chain variable domain of TCR clone 154910 (TRAV38-1, TRAJ20)
CAFIWNDYKLSF

SEQ ID NO: 309820 - protein, 15 aa, Homo sapiens
  CDR3 for beta chain variable domain of TCR clone 154910 (TRBV4-1, TRBJ2-5)
CASSQWDLYQETQYF

SEQ ID NO: 309821 - protein, 13 aa, Homo sapiens
  CDR3 for alpha chain variable domain of TCR clone 154911 (TRAV27, TRAJ23)
WAGVLPKGGKLIF

SEQ ID NO: 309822 - protein, 14 aa, Homo sapiens
  CDR3 for beta chain variable domain of TCR clone 154911 (TRBV5-8, TRBJ2-3)
CASSVSPSTDTQYF

SEQ ID NO: 309823 - protein, 13 aa, Homo sapiens
  CDR3 for alpha chain variable domain of TCR clone 154912 (TRAV12-3, TRAJ13)
CAMTSGGYQKVTF

SEQ ID NO: 309824 - protein, 13 aa, Homo sapiens
  CDR3 for beta chain variable domain of TCR clone 154912 (TRBV4-2, TRBJ1-1)
CASSQAGNTEAFF

SEQ ID NO: 309825 - protein, 15 aa, Homo sapiens
  CDR3 for alpha chain variable domain of TCR clone 154913 (TRAV8-3, TRAJ45)
CASSYSGGGADGLTF

SEQ ID NO: 309826 - protein, 16 aa, Homo sapiens
  CDR3 for beta chain variable domain of TCR clone 154913 (TRBV12-4, TRBJ1-5)
CASSRPVGGSNQPQHF

SEQ ID NO: 309827 - protein, 11 aa, Homo sapiens
  CDR3 for alpha chain variable domain of TCR clone 154914 (TRAV35, TRAJ34)
CWARNTDKLIF

SEQ ID NO: 309828 - protein, 14 aa, Homo sapiens
  CDR3 for beta chain variable domain of TCR clone 154914 (TRBV5-1, TRBJ2-7)
CASSRGESSYEQYF

SEQ ID NO: 309829 - protein, 15 aa, Homo sapiens
  CDR3 for alpha chain variable domain of TCR clone 154915 (TRAV6, TRAJ13)
CALGGDSGGYQKVTF

SEQ ID NO: 309830 - protein, 15 aa, Homo sapiens
  CDR3 for beta chain variable domain of TCR clone 154915 (TRBV4-2, TRBJ1-1)
CASSQLQGASAEAFF

SEQ ID NO: 309831 - protein, 13 aa, Homo sapiens
  CDR3 for alpha chain variable domain of TCR clone 154916 (TRAV27, TRAJ45)
CRSSGGGADGLTF

SEQ ID NO: 309832 - protein, 14 aa, Homo sapiens
  CDR3 for beta chain variable domain of TCR clone 154916 (TRBV5-1, TRBJ2-5)
CASSLWQIQETQYF

SEQ ID NO: 309833 - protein, 13 aa, Homo sapiens
  CDR3 for alpha chain variable domain of TCR clone 154917 (TRAV12-3, TRAJ7)
CAMTPYGNNRLDF

SEQ ID NO: 309834 - protein, 16 aa, Homo sapiens
  CDR3 for beta chain variable domain of TCR clone 154917 (TRBV7-9, TRBJ1-2)
CASSLGFSSGEDGYTF

SEQ ID NO: 309835 - protein, 15 aa, Homo sapiens
  CDR3 for alpha chain variable domain of TCR clone 154918 (TRAV12-2, TRAJ3)
CAVHPPGSSASKIIF

SEQ ID NO: 309836 - protein, 12 aa, Homo sapiens
  CDR3 for beta chain variable domain of TCR clone 154918 (TRBV11-2, TRBJ2-4)
CASSSASGSEYF

SEQ ID NO: 309837 - protein, 15 aa, Homo sapiens
  CDR3 for alpha chain variable domain of TCR clone 154919 (TRAV8-3, TRAJ41)
CAVGSNSNSGYALNF

SEQ ID NO: 309838 - protein, 17 aa, Homo sapiens
  CDR3 for beta chain variable domain of TCR clone 154919 (TRBV25-1, TRBJ2-1)
CASSAYGQGRGFYEQFF

SEQ ID NO: 309839 - protein, 10 aa, Homo sapiens
  CDR3 for alpha chain variable domain of TCR clone 154920 (TRAV2, TRAJ33)
CAVNRIATIS

SEQ ID NO: 309840 - protein, 14 aa, Homo sapiens
  CDR3 for beta chain variable domain of TCR clone 154920 (TRBV18, TRBJ1-2)
CASSPDRVVYGYTF

SEQ ID NO: 309841 - protein, 16 aa, Homo sapiens
  CDR3 for alpha chain variable domain of TCR clone 154921 (TRAV17, TRAJ28)
CVTASVSGAGSYQLTF

SEQ ID NO: 309842 - protein, 11 aa, Homo sapiens
  CDR3 for beta chain variable domain of TCR clone 154921 (TRBV7-9, TRBJ2-5)
CASSLGEAQYF

SEQ ID NO: 309843 - protein, 10 aa, Homo sapiens
  CDR3 for alpha chain variable domain of TCR clone 154922 (TRAV1-2, TRAJ23)
CAGQGGKLIF

SEQ ID NO: 309844 - protein, 18 aa, Homo sapiens
  CDR3 for beta chain variable domain of TCR clone 154922 (TRBV11-2, TRBJ1-1)
CASSLGRGGNTRKLSLDK

SEQ ID NO: 309845 - protein, 16 aa, Homo sapiens
  CDR3 for alpha chain variable domain of TCR clone 154923 (TRAV3, TRAJ10)
CAVRNMNAGGGNKLTF

SEQ ID NO: 309846 - protein, 12 aa, Homo sapiens
  CDR3 for beta chain variable domain of TCR clone 154923 (TRBV12-5, TRBJ2-5)
CASGQGVETQYF

SEQ ID NO: 309847 - protein, 11 aa, Homo sapiens
  CDR3 for alpha chain variable domain of TCR clone 154924 (TRAV8-6, TRAJ42)
CAVRGRKQRKY

SEQ ID NO: 309848 - protein, 13 aa, Homo sapiens
  CDR3 for beta chain variable domain of TCR clone 154924 (TRBV7-3, TRBJ1-1)
CASSQDWGAEAFF

SEQ ID NO: 309849 - protein, 14 aa, Homo sapiens
  CDR3 for alpha chain variable domain of TCR clone 154925 (TRAV38-1, TRAJ40)
CALRPTSGTYKYIF

SEQ ID NO: 309850 - protein, 14 aa, Homo sapiens
  CDR3 for beta chain variable domain of TCR clone 154925 (TRBV7-2, TRBJ2-7)
CASSLYPGCYEQYF

SEQ ID NO: 309851 - protein, 14 aa, Homo sapiens
  CDR3 for alpha chain variable domain of TCR clone 154926 (TRAV38-1, TRAJ57)
CAFMNTGGSEKLVF

SEQ ID NO: 309852 - protein, 12 aa, Homo sapiens
  CDR3 for beta chain variable domain of TCR clone 154926 (TRBV20-1, TRBJ1-5)
CSTSQRNQPQHF

SEQ ID NO: 309853 - protein, 10 aa, Homo sapiens
  CDR3 for alpha chain variable domain of TCR clone 154927 (TRAV5, TRAJ34)
CAEDTDKLIF

SEQ ID NO: 309854 - protein, 15 aa, Homo sapiens
  CDR3 for beta chain variable domain of TCR clone 154927 (TRBV11-3, TRBJ2-2)
CASSLSGLATGELFF

SEQ ID NO: 309855 - protein, 11 aa, Homo sapiens
  CDR3 for alpha chain variable domain of TCR clone 154928 (TRAV3, TRAJ21)
CAVGTFNKFYF

SEQ ID NO: 309856 - protein, 15 aa, Homo sapiens
  CDR3 for beta chain variable domain of TCR clone 154928 (TRBV19, TRBJ1-2)
CASSVGQVLNYGYTF

SEQ ID NO: 309857 - protein, 10 aa, Homo sapiens
  CDR3 for alpha chain variable domain of TCR clone 154929 (TRAV21, TRAJ43)
CAVSANDMRF

SEQ ID NO: 309858 - protein, 15 aa, Homo sapiens
  CDR3 for beta chain variable domain of TCR clone 154929 (TRBV7-9, TRBJ1-6)
CASSSPGRGNSPLHF

SEQ ID NO: 309859 - protein, 17 aa, Homo sapiens
  CDR3 for alpha chain variable domain of TCR clone 154930 (TRAV26-1, TRAJ53)
CIVRVDDSGGSNYKLTF

SEQ ID NO: 309860 - protein, 15 aa, Homo sapiens
  CDR3 for beta chain variable domain of TCR clone 154930 (TRBV20-1, TRBJ1-2)
CSARDPLRQGYGDTF

SEQ ID NO: 309861 - protein, 13 aa, Homo sapiens
  CDR3 for alpha chain variable domain of TCR clone 154931 (TRAV21, TRAJ27)
CAARPGNSGKSTF

SEQ ID NO: 309862 - protein, 14 aa, Homo sapiens
  CDR3 for beta chain variable domain of TCR clone 154931 (TRBV7-2, TRBJ2-7)
CASSPKTSFYEQYF

SEQ ID NO: 309863 - protein, 13 aa, Homo sapiens
  CDR3 for alpha chain variable domain of TCR clone 154932 (TRAV23/DV6, TRAJ15)
CAALPAGRNCSDL

SEQ ID NO: 309864 - protein, 14 aa, Homo sapiens
  CDR3 for beta chain variable domain of TCR clone 154932 (TRBV7-9, TRBJ1-2)
CARSRQGAPYGYTF

SEQ ID NO: 309865 - protein, 15 aa, Homo sapiens
  CDR3 for alpha chain variable domain of TCR clone 154933 (TRAV8-3, TRAJ45)
CAPSYSGGGADGLTF

SEQ ID NO: 309866 - protein, 14 aa, Homo sapiens
  CDR3 for beta chain variable domain of TCR clone 154933 (TRBV11-2, TRBJ2-1)
CASSLEVANNEQFF

SEQ ID NO: 309867 - protein, 11 aa, Homo sapiens
  CDR3 for alpha chain variable domain of TCR clone 154934 (TRAV8-2, TRAJ26)
CVVTLLLGSEF

SEQ ID NO: 309868 - protein, 14 aa, Homo sapiens
  CDR3 for beta chain variable domain of TCR clone 154934 (TRBV15, TRBJ2-4)
CATEGGQGANIQYF

SEQ ID NO: 309869 - protein, 18 aa, Homo sapiens
  CDR3 for alpha chain variable domain of TCR clone 154935 (TRAV21, TRAJ52)
CAVRPSPAGGTSYGKLTF

SEQ ID NO: 309870 - protein, 17 aa, Homo sapiens
  CDR3 for beta chain variable domain of TCR clone 154935 (TRBV7-8, TRBJ2-6)
GASSAGTGGAGANVLTF

SEQ ID NO: 309871 - protein, 13 aa, Homo sapiens
  CDR3 for alpha chain variable domain of TCR clone 154936 (TRAV20, TRAJ49)
CAVQARTGNQFYF

SEQ ID NO: 309872 - protein, 14 aa, Homo sapiens
  CDR3 for beta chain variable domain of TCR clone 154936 (TRBV5-1, TRBJ1-1)
CASSLQGASTEAFF

SEQ ID NO: 309873 - protein, 15 aa, Homo sapiens
  CDR3 for alpha chain variable domain of TCR clone 154937 (TRAV17, TRAJ40)
CASKYIFGTGNRLKV

SEQ ID NO: 309874 - protein, 14 aa, Homo sapiens
  CDR3 for beta chain variable domain of TCR clone 154937 (TRBV6-1, TRBJ1-3)
CASVQGGGGNTIYF

SEQ ID NO: 309875 - protein, 14 aa, Homo sapiens
  CDR3 for alpha chain variable domain of TCR clone 154938 (TRAV3, TRAJ36)
CAVRDGTGANNLFF

SEQ ID NO: 309876 - protein, 16 aa, Homo sapiens
  CDR3 for beta chain variable domain of TCR clone 154938 (TRBV7-3, TRBJ2-5)
CASIQPGGSVQENQYF

SEQ ID NO: 309877 - protein, 10 aa, Homo sapiens
  CDR3 for alpha chain variable domain of TCR clone 154939 (TRAV8-3, TRAJ27)
CAVGPSKTNA

SEQ ID NO: 309878 - protein, 16 aa, Homo sapiens
  CDR3 for beta chain variable domain of TCR clone 154939 (TRBV6-6, TRBJ2-1)
CASSLLSDSSYNEQFF

SEQ ID NO: 309879 - protein, 15 aa, Homo sapiens
  CDR3 for alpha chain variable domain of TCR clone 154940 (TRAV12-3, TRAJ6)
CAMSATTGRSYIPTF

SEQ ID NO: 309880 - protein, 16 aa, Homo sapiens
  CDR3 for beta chain variable domain of TCR clone 154940 (TRBV27, TRBJ2-5)
CASSFGPGGTKETQYF

SEQ ID NO: 309881 - protein, 14 aa, Homo sapiens
  CDR3 for alpha chain variable domain of TCR clone 154941 (TRAV13-1, TRAJ13)
CAASRVGGYQKVTF

SEQ ID NO: 309882 - protein, 17 aa, Homo sapiens
  CDR3 for beta chain variable domain of TCR clone 154941 (TRBV15, TRBJ1-5)
CATSRAPPGTRNQPQYF

SEQ ID NO: 309883 - protein, 16 aa, Homo sapiens
  CDR3 for alpha chain variable domain of TCR clone 154942 (TRAV30, TRAJ24)
CGTEIVDADSWGKFQF

SEQ ID NO: 309884 - protein, 17 aa, Homo sapiens
  CDR3 for beta chain variable domain of TCR clone 154942 (TRBV28, TRBJ2-3)
CASTASGRDLSTDTQYF

SEQ ID NO: 309885 - protein, 13 aa, Homo sapiens
  CDR3 for alpha chain variable domain of TCR clone 154943 (TRAV21, TRAJ34)
CAVTNTTSSSLGL

SEQ ID NO: 309886 - protein, 16 aa, Homo sapiens
  CDR3 for beta chain variable domain of TCR clone 154943 (TRBV18, TRBJ1-1)
CASSPGVGGRGGEAFF

SEQ ID NO: 309887 - protein, 15 aa, Homo sapiens
  CDR3 for alpha chain variable domain of TCR clone 154944 (TRAV13-1, TRAJ42)
CAASIAGGSQGNLIF

SEQ ID NO: 309888 - protein, 15 aa, Homo sapiens
  CDR3 for beta chain variable domain of TCR clone 154944 (TRBV19, TRBJ2-1)
CASSIVRGERREQFF

SEQ ID NO: 309889 - protein, 15 aa, Homo sapiens
  CDR3 for alpha chain variable domain of TCR clone 154945 (TRAV26-1, TRAJ22)
CIVRVSFWFCKATDL

SEQ ID NO: 309890 - protein, 13 aa, Homo sapiens
  CDR3 for beta chain variable domain of TCR clone 154945 (TRBV7-9, TRBJ1-2)
CASSFQDGYGYTF

SEQ ID NO: 309891 - protein, 15 aa, Homo sapiens
  CDR3 for alpha chain variable domain of TCR clone 154946 (TRAV3, TRAJ40)
CAVRDVTSGTYKYIF

SEQ ID NO: 309892 - protein, 15 aa, Homo sapiens
  CDR3 for beta chain variable domain of TCR clone 154946 (TRBV7-9, TRBJ1-6)
CASSSPGRGNSPLHF

SEQ ID NO: 309893 - protein, 14 aa, Homo sapiens
  CDR3 for alpha chain variable domain of TCR clone 154947 (TRAV8-3, TRAJ36)
CAVGPITRANNVFF

SEQ ID NO: 309894 - protein, 15 aa, Homo sapiens
  CDR3 for beta chain variable domain of TCR clone 154947 (TRBV4-1, TRBJ2-1)
CASSQDPGNYNEQFF

SEQ ID NO: 309895 - protein, 15 aa, Homo sapiens
  CDR3 for alpha chain variable domain of TCR clone 154948 (TRAV2, TRAJ15)
CAVEDREQAGTALIF

SEQ ID NO: 309896 - protein, 15 aa, Homo sapiens
  CDR3 for beta chain variable domain of TCR clone 154948 (TRBV3-1, TRBJ1-2)
CASSHPGTPGYGDTF

SEQ ID NO: 309897 - protein, 13 aa, Homo sapiens
  CDR3 for alpha chain variable domain of TCR clone 154949 (TRAV12-3, TRAJ47)
CAMKKEYGKKLVF

SEQ ID NO: 309898 - protein, 15 aa, Homo sapiens
  CDR3 for beta chain variable domain of TCR clone 154949 (TRBV20-1, TRBJ2-7)
CSARDRVSGMDEQYF

SEQ ID NO: 309899 - protein, 10 aa, Homo sapiens
  CDR3 for alpha chain variable domain of TCR clone 154950 (TRAV8-3, TRAJ43)
GAVNNNDMRF

SEQ ID NO: 309900 - protein, 17 aa, Homo sapiens
  CDR3 for beta chain variable domain of TCR clone 154950 (TRBV7-7, TRBJ1-1)
CASIGDRPNLGVTEAFF

SEQ ID NO: 309901 - protein, 13 aa, Homo sapiens
  CDR3 for alpha chain variable domain of TCR clone 154951 (TRAV21, TRAJ27)
CAARPGNAGKSTF

SEQ ID NO: 309902 - protein, 13 aa, Homo sapiens
  CDR3 for beta chain variable domain of TCR clone 154951 (TRBV24-1, TRBJ2-2)
CATSDWSTGELFF

SEQ ID NO: 309903 - protein, 16 aa, Homo sapiens
  CDR3 for alpha chain variable domain of TCR clone 154952 (TRAV35, TRAJ28)
CAGQRYSGAGSYQLTF

SEQ ID NO: 309904 - protein, 14 aa, Homo sapiens
  CDR3 for beta chain variable domain of TCR clone 154952 (TRBV18, TRBJ2-7)
CASSPRGGAYEQCF

SEQ ID NO: 309905 - protein, 12 aa, Homo sapiens
  CDR3 for alpha chain variable domain of TCR clone 154953 (TRAV8-6, TRAJ43)
CAVSHNNNDMRF

SEQ ID NO: 309906 - protein, 13 aa, Homo sapiens
  CDR3 for beta chain variable domain of TCR clone 154953 (TRBV7-3, TRBJ1-1)
CASSQDWGAEAVF

SEQ ID NO: 309907 - protein, 18 aa, Homo sapiens
  CDR3 for alpha chain variable domain of TCR clone 154954 (TRAV21, TRAJ52)
CAVRPSLAGGTSYGKLTF

SEQ ID NO: 309908 - protein, 16 aa, Homo sapiens
  CDR3 for beta chain variable domain of TCR clone 154954 (TRBV7-3, TRBJ2-1)
CASSLEGYGSYNEQFF

SEQ ID NO: 309909 - protein, 14 aa, Homo sapiens
  CDR3 for alpha chain variable domain of TCR clone 154955 (TRAV2, TRAJ3)
CAVDRYSSASKIIF

SEQ ID NO: 309910 - protein, 16 aa, Homo sapiens
  CDR3 for beta chain variable domain of TCR clone 154955 (TRBV20-1, TRBJ1-5)
CSAALPGQQTNQPQHF

SEQ ID NO: 309911 - protein, 12 aa, Homo sapiens
  CDR3 for alpha chain variable domain of TCR clone 154956 (TRAV21, TRAJ31)
CAVWGNNARLMF

SEQ ID NO: 309912 - protein, 15 aa, Homo sapiens
  CDR3 for beta chain variable domain of TCR clone 154956 (TRBV9, TRBJ1-6)
CASSVAGTGDSPLHF

SEQ ID NO: 309913 - protein, 12 aa, Homo sapiens
  CDR3 for alpha chain variable domain of TCR clone 154957 (TRAV26-2, TRAJ47)
CILVEYGNKLVF

SEQ ID NO: 309914 - protein, 15 aa, Homo sapiens
  CDR3 for beta chain variable domain of TCR clone 154957 (TRBV7-2, TRBJ2-7)
CASSWGQGAIYEQYF

SEQ ID NO: 309915 - protein, 14 aa, Homo sapiens
  CDR3 for alpha chain variable domain of TCR clone 154958 (TRAV8-4, TRAJ43)
CAVRDPRNNNDMRF

SEQ ID NO: 309916 - protein, 15 aa, Homo sapiens
  CDR3 for beta chain variable domain of TCR clone 154958 (TRBV4-2, TRBJ1-2)
CASSQRTGGRDGYTF

SEQ ID NO: 309917 - protein, 13 aa, Homo sapiens
  CDR3 for alpha chain variable domain of TCR clone 154959 (TRAV3, TRAJ16)
CAVRDRNGQKLLF

SEQ ID NO: 309918 - protein, 15 aa, Homo sapiens
  CDR3 for beta chain variable domain of TCR clone 154959 (TRBV5-1, TRBJ2-1)
CASSTPRAPYNEQFF

SEQ ID NO: 309919 - protein, 17 aa, Homo sapiens
  CDR3 for alpha chain variable domain of TCR clone 154960 (TRAV8-1, TRAJ43)
CAVTNDMRFGAGTRLTV

SEQ ID NO: 309920 - protein, 16 aa, Homo sapiens
  CDR3 for beta chain variable domain of TCR clone 154960 (TRBV7-3, TRBJ2-2)
CASSLKRGTLSGELFF

SEQ ID NO: 309921 - protein, 15 aa, Homo sapiens
  CDR3 for alpha chain variable domain of TCR clone 154961 (TRAV23/DV6, TRAJ38)
CAASGGAGNNRKLIW

SEQ ID NO: 309922 - protein, 13 aa, Homo sapiens
  CDR3 for beta chain variable domain of TCR clone 154961 (TRBV24-1, TRBJ2-2)
CATSDWSTGELFF

SEQ ID NO: 309923 - protein, 10 aa, Homo sapiens
  CDR3 for alpha chain variable domain of TCR clone 154962 (TRAV23/DV6, TRAJ39)
ALRAGNMLTF

SEQ ID NO: 309924 - protein, 18 aa, Homo sapiens
  CDR3 for beta chain variable domain of TCR clone 154962 (TRBV11-2, TRBJ2-3)
CASSLGGASRGAPNTQYF

SEQ ID NO: 309925 - protein, 15 aa, Homo sapiens
  CDR3 for alpha chain variable domain of TCR clone 154963 (TRAV8-3, TRAJ6)
CAVGPLGGGSYIPTF

SEQ ID NO: 309926 - protein, 14 aa, Homo sapiens
  CDR3 for beta chain variable domain of TCR clone 154963 (TRBV19, TRBJ2-2)
CASSTGEGAGELFF

SEQ ID NO: 309927 - protein, 16 aa, Homo sapiens
  CDR3 for alpha chain variable domain of TCR clone 154964 (TRAV21, TRAJ45)
CAVRPDAGGGADGLTF

SEQ ID NO: 309928 - protein, 16 aa, Homo sapiens
  CDR3 for beta chain variable domain of TCR clone 154964 (TRBV11-2, TRBJ1-2)
CASSLDTGGADYGYTF

SEQ ID NO: 309929 - protein, 11 aa, Homo sapiens
  CDR3 for alpha chain variable domain of TCR clone 154965 (TRAV2, TRAJ13)
CASGGYKKVTF

SEQ ID NO: 309930 - protein, 13 aa, Homo sapiens
  CDR3 for beta chain variable domain of TCR clone 154965 (TRBV7-3, TRBJ1-1)
CASSQDWGAEAFF

SEQ ID NO: 309931 - protein, 13 aa, Homo sapiens
  CDR3 for alpha chain variable domain of TCR clone 154966 (TRAV39, TRAJ58)
CAGEETSGSRLTF

SEQ ID NO: 309932 - protein, 16 aa, Homo sapiens
  CDR3 for beta chain variable domain of TCR clone 154966 (TRBV9, TRBJ2-1)
CASSVGGGGNYNEQFF

SEQ ID NO: 309933 - protein, 14 aa, Homo sapiens
  CDR3 for alpha chain variable domain of TCR clone 154967 (TRAV1-2, TRAJ16)
CAVNRFSDGQKLLF

SEQ ID NO: 309934 - protein, 16 aa, Homo sapiens
  CDR3 for beta chain variable domain of TCR clone 154967 (TRBV7-3, TRBJ2-1)
CAGSFTGRRSYNEQFF

SEQ ID NO: 309935 - protein, 12 aa, Homo sapiens
  CDR3 for alpha chain variable domain of TCR clone 154968 (TRAV12-3, TRAJ17)
CAMTLTGNKLTF

SEQ ID NO: 309936 - protein, 15 aa, Homo sapiens
  CDR3 for beta chain variable domain of TCR clone 154968 (TRBV20-1, TRBJ2-7)
CSARDWVSGMDEHYF

SEQ ID NO: 309937 - protein, 14 aa, Homo sapiens
  CDR3 for alpha chain variable domain of TCR clone 154969 (TRAV16, TRAJ33)
CALSAMDSNYQLIW

SEQ ID NO: 309938 - protein, 14 aa, Homo sapiens
  CDR3 for beta chain variable domain of TCR clone 154969 (TRBV5-1, TRBJ2-1)
CASSALWAGNEQFF

SEQ ID NO: 309939 - protein, 14 aa, Homo sapiens
  CDR3 for alpha chain variable domain of TCR clone 154970 (TRAV12-3, TRAJ10)
SHLPLPGGGNKLTF

SEQ ID NO: 309940 - protein, 13 aa, Homo sapiens
  CDR3 for beta chain variable domain of TCR clone 154970 (TRBV20-1, TRBJ2-2)
CSASAAGTGELFF

SEQ ID NO: 309941 - protein, 14 aa, Homo sapiens
  CDR3 for alpha chain variable domain of TCR clone 154971 (TRAV1-2, TRAJ8)
CAVREDTGFQKLVF

SEQ ID NO: 309942 - protein, 15 aa, Homo sapiens
  CDR3 for beta chain variable domain of TCR clone 154971 (TRBV7-9, TRBJ1-4)
CASSARTGGNEKLSF

SEQ ID NO: 309943 - protein, 14 aa, Homo sapiens
  CDR3 for alpha chain variable domain of TCR clone 154972 (TRAV3, TRAJ21)
CAVRDWDNFNKFYF

SEQ ID NO: 309944 - protein, 11 aa, Homo sapiens
  CDR3 for beta chain variable domain of TCR clone 154972 (TRBV12-4, TRBJ2-3)
CASTATDTQYF

SEQ ID NO: 309945 - protein, 10 aa, Homo sapiens
  CDR3 for alpha chain variable domain of TCR clone 154973 (TRAV1-2, TRAJ34)
CAVNTDKLIF

SEQ ID NO: 309946 - protein, 13 aa, Homo sapiens
  CDR3 for beta chain variable domain of TCR clone 154973 (TRBV10-1, TRBJ2-1)
CASSAGPTMSSSS

SEQ ID NO: 309947 - protein, 11 aa, Homo sapiens
  CDR3 for alpha chain variable domain of TCR clone 154974 (TRAV21, TRAJ34)
CAVTNTDKLIF

SEQ ID NO: 309948 - protein, 13 aa, Homo sapiens
  CDR3 for beta chain variable domain of TCR clone 154974 (TRBV11-2, TRBJ2-5)
CASSSTGEETQYF

SEQ ID NO: 309949 - protein, 14 aa, Homo sapiens
  CDR3 for alpha chain variable domain of TCR clone 154975 (TRAV8-3, TRAJ4)
CAVGAAGGYNKLIF

SEQ ID NO: 309950 - protein, 16 aa, Homo sapiens
  CDR3 for beta chain variable domain of TCR clone 154975 (TRBV7-3, TRBJ2-3)
CASSLSGYRPEDTQYF

SEQ ID NO: 309951 - protein, 12 aa, Homo sapiens
  CDR3 for alpha chain variable domain of TCR clone 154976 (TRAV13-1, TRAJ9)
CASHTGGFKTIF

SEQ ID NO: 309952 - protein, 18 aa, Homo sapiens
  CDR3 for beta chain variable domain of TCR clone 154976 (TRBV11-2, TRBJ2-3)
CANSLGGASRGAPNTQYF

SEQ ID NO: 309953 - protein, 14 aa, Homo sapiens
  CDR3 for alpha chain variable domain of TCR clone 154977 (TRAV26-1, TRAJ34)
CIVRVAYNTDKIIF

SEQ ID NO: 309954 - protein, 19 aa, Homo sapiens
  CDR3 for beta chain variable domain of TCR clone 154977 (TRBV25-1, TRBJ2-2)
CAILVYRVDRGRKTGELFF

SEQ ID NO: 309955 - protein, 13 aa, Homo sapiens
  CDR3 for alpha chain variable domain of TCR clone 154978 (TRAV3, TRAJ21)
CAVREPDFNKFYS

SEQ ID NO: 309956 - protein, 15 aa, Homo sapiens
  CDR3 for beta chain variable domain of TCR clone 154978 (TRBV7-9, TRBJ1-6)
CASSSPGRGNSPLHF

SEQ ID NO: 309957 - protein, 16 aa, Homo sapiens
  CDR3 for alpha chain variable domain of TCR clone 154979 (TRAV27, TRAJ52)
CAGAPAGGTSYGKLTC

SEQ ID NO: 309958 - protein, 12 aa, Homo sapiens
  CDR3 for beta chain variable domain of TCR clone 154979 (TRBV27, TRBJ2-1)
CASRGFYNEQFF

SEQ ID NO: 309959 - protein, 16 aa, Homo sapiens
  CDR3 for alpha chain variable domain of TCR clone 154980 (TRAV23/DV6, TRAJ9)
CAASIGGNTGGFKTIF

SEQ ID NO: 309960 - protein, 18 aa, Homo sapiens
  CDR3 for beta chain variable domain of TCR clone 154980 (TRBV6-6, TRBJ1-3)
CASSYSKWDSISGNTIYF

SEQ ID NO: 309961 - protein, 14 aa, Homo sapiens
  CDR3 for alpha chain variable domain of TCR clone 154981 (TRAV1-2, TRAJ16)
CAVNRFSDGQKLLF

SEQ ID NO: 309962 - protein, 15 aa, Homo sapiens
  CDR3 for beta chain variable domain of TCR clone 154981 (TRBV12-4, TRBJ2-5)
CAGSPPTGLQETQYF

SEQ ID NO: 309963 - protein, 15 aa, Homo sapiens
  CDR3 for alpha chain variable domain of TCR clone 154982 (TRAV3, TRAJ4)
CAVRDGTGGYNKLIF

SEQ ID NO: 309964 - protein, 15 aa, Homo sapiens
  CDR3 for beta chain variable domain of TCR clone 154982 (TRBV7-9, TRBJ2-1)
CASSLGWGRANEQFF

SEQ ID NO: 309965 - protein, 16 aa, Homo sapiens
  CDR3 for alpha chain variable domain of TCR clone 154983 (TRAV30, TRAJ24)
CGTEIVDADSWGKFQV

SEQ ID NO: 309966 - protein, 14 aa, Homo sapiens
  CDR3 for beta chain variable domain of TCR clone 154983 (TRBV7-9, TRBJ2-4)
CASSLAMGGNIQYF

SEQ ID NO: 309967 - protein, 14 aa, Homo sapiens
  CDR3 for alpha chain variable domain of TCR clone 154984 (TRAV1-2, TRAJ10)
CAVRVTGGGNKLTF

SEQ ID NO: 309968 - protein, 12 aa, Homo sapiens
  CDR3 for beta chain variable domain of TCR clone 154984 (TRBV5-4, TRBJ1-1)
CASSVGQTEAFF

SEQ ID NO: 309969 - protein, 15 aa, Homo sapiens
  CDR3 for alpha chain variable domain of TCR clone 154985 (TRAV8-3, TRAJ44)
FAVGAGAGTASKLTF

SEQ ID NO: 309970 - protein, 12 aa, Homo sapiens
  CDR3 for beta chain variable domain of TCR clone 154985 (TRBV7-8, TRBJ2-4)
CASSLGGNSQYF

SEQ ID NO: 309971 - protein, 11 aa, Homo sapiens
  CDR3 for alpha chain variable domain of TCR clone 154986 (TRAV29/DV5, TRAJ31)
CAASYRDRLMF

SEQ ID NO: 309972 - protein, 19 aa, Homo sapiens
  CDR3 for beta chain variable domain of TCR clone 154986 (TRBV19, TRBJ2-5)
CASSIGQVTDFFLGETQYC

SEQ ID NO: 309973 - protein, 14 aa, Homo sapiens
  CDR3 for alpha chain variable domain of TCR clone 154987 (TRAV12-2, TRAJ53)
CAVKGGGSNYKLKF

SEQ ID NO: 309974 - protein, 14 aa, Homo sapiens
  CDR3 for beta chain variable domain of TCR clone 154987 (TRBV19, TRBJ2-1)
CASPTFVLSGEQFF

SEQ ID NO: 309975 - protein, 14 aa, Homo sapiens
  CDR3 for alpha chain variable domain of TCR clone 154988 (TRAV1-2, TRAJ16)
CAANRFSDGQKLLF

SEQ ID NO: 309976 - protein, 14 aa, Homo sapiens
  CDR3 for beta chain variable domain of TCR clone 154988 (TRBV7-2, TRBJ2-7)
CASRSQGAAYEQYF

SEQ ID NO: 309977 - protein, 13 aa, Homo sapiens
  CDR3 for alpha chain variable domain of TCR clone 154989 (TRAV8-1, TRAJ30)
CAVNGRRDDKIIF

SEQ ID NO: 309978 - protein, 15 aa, Homo sapiens
  CDR3 for beta chain variable domain of TCR clone 154989 (TRBV5-7, TRBJ1-5)
CASSYGKVWDQPQHF

SEQ ID NO: 309979 - protein, 15 aa, Homo sapiens
  CDR3 for alpha chain variable domain of TCR clone 154990 (TRAV13-1, TRAJ43)
CAASGGFGAGTRLTV

SEQ ID NO: 309980 - protein, 16 aa, Homo sapiens
  CDR3 for beta chain variable domain of TCR clone 154990 (TRBV13, TRBJ2-2)
CASSLGRGYGTGELFF

SEQ ID NO: 309981 - protein, 15 aa, Homo sapiens
  CDR3 for alpha chain variable domain of TCR clone 154991 (TRAV4, TRAJ39)
CLVGPNNNAGNILTF

SEQ ID NO: 309982 - protein, 14 aa, Homo sapiens
  CDR3 for beta chain variable domain of TCR clone 154991 (TRBV19, TRBJ2-7)
CASNFRDTFTGMYF

SEQ ID NO: 309983 - protein, 15 aa, Homo sapiens
  CDR3 for alpha chain variable domain of TCR clone 154992 (TRAV35, TRAJ50)
CAGQLRKTSDDKVIF

SEQ ID NO: 309984 - protein, 12 aa, Homo sapiens
  CDR3 for beta chain variable domain of TCR clone 154992 (TRBV5-1, TRBJ2-5)
CASSLGLETQYF

SEQ ID NO: 309985 - protein, 14 aa, Homo sapiens
  CDR3 for alpha chain variable domain of TCR clone 154993 (TRAV38-1, TRAJ40)
CALRPTSGTYKKIF

SEQ ID NO: 309986 - protein, 14 aa, Homo sapiens
  CDR3 for beta chain variable domain of TCR clone 154993 (TRBV25-1, TRBJ1-1)
CASPHLGGNTEAFF

SEQ ID NO: 309987 - protein, 14 aa, Homo sapiens
  CDR3 for alpha chain variable domain of TCR clone 154994 (TRAV17, TRAJ56)
CAAVPAGANSKLTF

SEQ ID NO: 309988 - protein, 13 aa, Homo sapiens
  CDR3 for beta chain variable domain of TCR clone 154994 (TRBV12-4, TRBJ2-2)
CASSITGSGELFF

SEQ ID NO: 309989 - protein, 14 aa, Homo sapiens
  CDR3 for alpha chain variable domain of TCR clone 154995 (TRAV3, TRAJ33)
WAGRDMDSNYQLIW

SEQ ID NO: 309990 - protein, 19 aa, Homo sapiens
  CDR3 for beta chain variable domain of TCR clone 154995 (TRBV7-3, TRBJ1-2)
CASSFPQGNDGELWLHLRF

SEQ ID NO: 309991 - protein, 15 aa, Homo sapiens
  CDR3 for alpha chain variable domain of TCR clone 154996 (TRAV3, TRAJ23)
CAVRDWGNQGGKLIF

SEQ ID NO: 309992 - protein, 15 aa, Homo sapiens
  CDR3 for beta chain variable domain of TCR clone 154996 (TRBV7-3, TRBJ2-1)
CQQLAPSGSYNEQFF

SEQ ID NO: 309993 - protein, 10 aa, Homo sapiens
  CDR3 for alpha chain variable domain of TCR clone 154997 (TRAV21, TRAJ43)
CAVRIGDIPF

SEQ ID NO: 309994 - protein, 13 aa, Homo sapiens
  CDR3 for beta chain variable domain of TCR clone 154997 (TRBV20-1, TRBJ2-7)
CSAPGLADYEQYF

SEQ ID NO: 309995 - protein, 16 aa, Homo sapiens
  CDR3 for alpha chain variable domain of TCR clone 154998 (TRAV8-3, TRAJ10)
CAVGPGVTGGGNKLTF

SEQ ID NO: 309996 - protein, 13 aa, Homo sapiens
  CDR3 for beta chain variable domain of TCR clone 154998 (TRBV18, TRBJ1-1)
CASSPSPSGEAFF

SEQ ID NO: 309997 - protein, 14 aa, Homo sapiens
  CDR3 for alpha chain variable domain of TCR clone 154999 (TRAV26-1, TRAJ38)
CIADNAGNKRKLIW

SEQ ID NO: 309998 - protein, 13 aa, Homo sapiens
  CDR3 for beta chain variable domain of TCR clone 154999 (TRBV20-1, TRBJ1-1)
CSARSGGNTEAFF

SEQ ID NO: 309999 - protein, 12 aa, Homo sapiens
  CDR3 for alpha chain variable domain of TCR clone 155000 (TRAV21, TRAJ49)
CAVSNTGNQCYF

SEQ ID NO: 310000 - protein, 16 aa, Homo sapiens
  CDR3 for beta chain variable domain of TCR clone 155000 (TRBV4-2, TRBJ1-1)
CASSQAGFGMNTEAFF

SEQ ID NO: 310001 - protein, 10 aa, Homo sapiens
  CDR3 for alpha chain variable domain of TCR clone 155001 (TRAV8-3, TRAJ43)
CDVALADMRF

SEQ ID NO: 310002 - protein, 14 aa, Homo sapiens
  CDR3 for beta chain variable domain of TCR clone 155001 (TRBV4-2, TRBJ2-1)
CASGLDRAYNEQFF

SEQ ID NO: 310003 - protein, 15 aa, Homo sapiens
  CDR3 for alpha chain variable domain of TCR clone 155002 (TRAV3, TRAJ5)
CAVRDRKTGRRALTF

SEQ ID NO: 310004 - protein, 15 aa, Homo sapiens
  CDR3 for beta chain variable domain of TCR clone 155002 (TRBV20-1, TRBJ2-7)
CSARDRVSGMDEQYF

SEQ ID NO: 310005 - protein, 13 aa, Homo sapiens
  CDR3 for alpha chain variable domain of TCR clone 155003 (TRAV29/DV5, TRAJ31)
CAASRNSNARLMF

SEQ ID NO: 310006 - protein, 12 aa, Homo sapiens
  CDR3 for beta chain variable domain of TCR clone 155003 (TRBV14, TRBJ2-5)
CASSQLKETQYF

SEQ ID NO: 310007 - protein, 13 aa, Homo sapiens
  CDR3 for alpha chain variable domain of TCR clone 155004 (TRAV3, TRAJ21)
CAVREPDFNKFYF

SEQ ID NO: 310008 - protein, 16 aa, Homo sapiens
  CDR3 for beta chain variable domain of TCR clone 155004 (TRBV19, TRBJ2-3)
CASSFYTTGIGDTQYF

SEQ ID NO: 310009 - protein, 10 aa, Homo sapiens
  CDR3 for alpha chain variable domain of TCR clone 155005 (TRAV1-2, TRAJ31)
CVSEDARLMS

SEQ ID NO: 310010 - protein, 14 aa, Homo sapiens
  CDR3 for beta chain variable domain of TCR clone 155005 (TRBV19, TRBJ2-1)
CASPTFVLSGEQFF

SEQ ID NO: 310011 - protein, 16 aa, Homo sapiens
  CDR3 for alpha chain variable domain of TCR clone 155006 (TRAV12-2, TRAJ45)
CAVQRNPGGGADGLTF

SEQ ID NO: 310012 - protein, 12 aa, Homo sapiens
  CDR3 for beta chain variable domain of TCR clone 155006 (TRBV6-1, TRBJ2-5)
CASSEGRETQYF

SEQ ID NO: 310013 - protein, 12 aa, Homo sapiens
  CDR3 for alpha chain variable domain of TCR clone 155007 (TRAV21, TRAJ13)
PGPSGGYQKVTF

SEQ ID NO: 310014 - protein, 22 aa, Homo sapiens
  CDR3 for beta chain variable domain of TCR clone 155007 (TRBV25-1, TRBJ1-3)
CASSGSGPWKHHIFLRGKLAHC

SEQ ID NO: 310015 - protein, 11 aa, Homo sapiens
  CDR3 for alpha chain variable domain of TCR clone 155008 (TRAV12-3, TRAJ41)
CAMNAREALNF

SEQ ID NO: 310016 - protein, 16 aa, Homo sapiens
  CDR3 for beta chain variable domain of TCR clone 155008 (TRBV7-8, TRBJ2-3)
CASSTEGRRGTDTQYF

SEQ ID NO: 310017 - protein, 15 aa, Homo sapiens
  CDR3 for alpha chain variable domain of TCR clone 155009 (TRAV16, TRAJ48)
CALFISNFGNEKLTF

SEQ ID NO: 310018 - protein, 13 aa, Homo sapiens
  CDR3 for beta chain variable domain of TCR clone 155009 (TRBV2, TRBJ1-1)
CASSVSGYTEAFF

SEQ ID NO: 310019 - protein, 13 aa, Homo sapiens
  CDR3 for alpha chain variable domain of TCR clone 155010 (TRAV9-2, TRAJ53)
CALSGGSNYRLTF

SEQ ID NO: 310020 - protein, 17 aa, Homo sapiens
  CDR3 for beta chain variable domain of TCR clone 155010 (TRBV11-2, TRBJ2-1)
CASSLYPPGVEYNEQFF

SEQ ID NO: 310021 - protein, 14 aa, Homo sapiens
  CDR3 for alpha chain variable domain of TCR clone 155011 (TRAV12-1, TRAJ3)
CVVNPGSSASKIIF

SEQ ID NO: 310022 - protein, 14 aa, Homo sapiens
  CDR3 for beta chain variable domain of TCR clone 155011 (TRBV5-7, TRBJ1-2)
CGSSPGQGNYGYTF

SEQ ID NO: 310023 - protein, 11 aa, Homo sapiens
  CDR3 for alpha chain variable domain of TCR clone 155012 (TRAV35, TRAJ52)
CAGTPKGKLTF

SEQ ID NO: 310024 - protein, 14 aa, Homo sapiens
  CDR3 for beta chain variable domain of TCR clone 155012 (TRBV12-4, TRBJ2-5)
CASSFGASGGTQYF

SEQ ID NO: 310025 - protein, 16 aa, Homo sapiens
  CDR3 for alpha chain variable domain of TCR clone 155013 (TRAV30, TRAJ24)
CGTEIVDADSWGKFQF

SEQ ID NO: 310026 - protein, 18 aa, Homo sapiens
  CDR3 for beta chain variable domain of TCR clone 155013 (TRBV7-9, TRBJ2-7)
CASSRTTSGSRTWYEQYF

SEQ ID NO: 310027 - protein, 14 aa, Homo sapiens
  CDR3 for alpha chain variable domain of TCR clone 155014 (TRAV1-2, TRAJ16)
CAGNRFSDGQKLLF

SEQ ID NO: 310028 - protein, 13 aa, Homo sapiens
  CDR3 for beta chain variable domain of TCR clone 155014 (TRBV9, TRBJ2-1)
CASSPSGGSEQFF

SEQ ID NO: 310029 - protein, 12 aa, Homo sapiens
  CDR3 for alpha chain variable domain of TCR clone 155015 (TRAV21, TRAJ15)
CAVNQAGTALIC

SEQ ID NO: 310030 - protein, 13 aa, Homo sapiens
  CDR3 for beta chain variable domain of TCR clone 155015 (TRBV11-2, TRBJ2-5)
CASSSTGEETQYF

SEQ ID NO: 310031 - protein, 13 aa, Homo sapiens
  CDR3 for alpha chain variable domain of TCR clone 155016 (TRAV20, TRAJ20)
CAVQAGSGYKLSF

SEQ ID NO: 310032 - protein, 17 aa, Homo sapiens
  CDR3 for beta chain variable domain of TCR clone 155016 (TRBV7-2, TRBJ2-2)
CASSPRGAGEGTGELFF

SEQ ID NO: 310033 - protein, 18 aa, Homo sapiens
  CDR3 for alpha chain variable domain of TCR clone 155017 (TRAV21, TRAJ52)
CAVRPSPAGGTSYGKLTF

SEQ ID NO: 310034 - protein, 16 aa, Homo sapiens
  CDR3 for beta chain variable domain of TCR clone 155017 (TRBV19, TRBJ1-1)
CASRVDVTGAAWGAFF

SEQ ID NO: 310035 - protein, 14 aa, Homo sapiens
  CDR3 for alpha chain variable domain of TCR clone 155018 (TRAV26-1, TRAJ54)
CIVRRTQGAQKLVF

SEQ ID NO: 310036 - protein, 15 aa, Homo sapiens
  CDR3 for beta chain variable domain of TCR clone 155018 (TRBV12-4, TRBJ2-5)
CASSPPTGLQETHYF

SEQ ID NO: 310037 - protein, 11 aa, Homo sapiens
  CDR3 for alpha chain variable domain of TCR clone 155019 (TRAV3, TRAJ21)
CAVGNFNKFYF

SEQ ID NO: 310038 - protein, 14 aa, Homo sapiens
  CDR3 for beta chain variable domain of TCR clone 155019 (TRBV7-2, TRBJ2-7)
CASSGLAGRGEQYF

SEQ ID NO: 310039 - protein, 14 aa, Homo sapiens
  CDR3 for alpha chain variable domain of TCR clone 155020 (TRAV1-2, TRAJ16)
CAVNRFSDGQKLLF

SEQ ID NO: 310040 - protein, 16 aa, Homo sapiens
  CDR3 for beta chain variable domain of TCR clone 155020 (TRBV18, TRBJ1-5)
CASSPQGERGGQPQHF

SEQ ID NO: 310041 - protein, 13 aa, Homo sapiens
  CDR3 for alpha chain variable domain of TCR clone 155021 (TRAV17, TRAJ26)
CATVDNYGQNFVF

SEQ ID NO: 310042 - protein, 14 aa, Homo sapiens
  CDR3 for beta chain variable domain of TCR clone 155021 (TRBV6-1, TRBJ1-3)
CASVQGGGGNTTYF

SEQ ID NO: 310043 - protein, 12 aa, Homo sapiens
  CDR3 for alpha chain variable domain of TCR clone 155022 (TRAV25, TRAJ30)
CAGRVRDDKIIF

SEQ ID NO: 310044 - protein, 13 aa, Homo sapiens
  CDR3 for beta chain variable domain of TCR clone 155022 (TRBV11-2, TRBJ2-5)
CASGHGAKEAQYF

SEQ ID NO: 310045 - protein, 17 aa, Homo sapiens
  CDR3 for alpha chain variable domain of TCR clone 155023 (TRAV12-2, TRAJ4)
CAVNVRPVSGGDNKLIF

SEQ ID NO: 310046 - protein, 17 aa, Homo sapiens
  CDR3 for beta chain variable domain of TCR clone 155023 (TRBV6-3, TRBJ2-1)
CASSYSSGTKGLDEQFF

SEQ ID NO: 310047 - protein, 16 aa, Homo sapiens
  CDR3 for alpha chain variable domain of TCR clone 155024 (TRAV12-3, TRAJ53)
CAMSAGSGGSNYKLTC

SEQ ID NO: 310048 - protein, 13 aa, Homo sapiens
  CDR3 for beta chain variable domain of TCR clone 155024 (TRBV29-1, TRBJ2-3)
CSVGPRGTDTQYF

SEQ ID NO: 310049 - protein, 14 aa, Homo sapiens
  CDR3 for alpha chain variable domain of TCR clone 155025 (TRAV8-1, TRAJ5)
CAVSMDTGRRALTF

SEQ ID NO: 310050 - protein, 14 aa, Homo sapiens
  CDR3 for beta chain variable domain of TCR clone 155025 (TRBV6-6, TRBJ2-7)
CASSDSGAGYEQYF

SEQ ID NO: 310051 - protein, 11 aa, Homo sapiens
  CDR3 for alpha chain variable domain of TCR clone 155026 (TRAV2, TRAJ13)
CASVGYQKVTF

SEQ ID NO: 310052 - protein, 15 aa, Homo sapiens
  CDR3 for beta chain variable domain of TCR clone 155026 (TRBV11-1, TRBJ2-7)
CASSLNYGASYEQYF

SEQ ID NO: 310053 - protein, 23 aa, Homo sapiens
  CDR3 for alpha chain variable domain of TCR clone 155027 (TRAV12-2, TRAJ36)
SLLIRDSQPSDSATLERANNLFF

SEQ ID NO: 310054 - protein, 13 aa, Homo sapiens
  CDR3 for beta chain variable domain of TCR clone 155027 (TRBV7-9, TRBJ2-1)
CASSLDVGNEQFF

SEQ ID NO: 310055 - protein, 14 aa, Homo sapiens
  CDR3 for alpha chain variable domain of TCR clone 155028 (TRAV12-2, TRAJ24)
CAVTPADSWGKLQF

SEQ ID NO: 310056 - protein, 14 aa, Homo sapiens
  CDR3 for beta chain variable domain of TCR clone 155028 (TRBV6-1, TRBJ2-1)
CATFTSGQNNEQFF

SEQ ID NO: 310057 - protein, 11 aa, Homo sapiens
  CDR3 for alpha chain variable domain of TCR clone 155029 (TRAV21, TRAJ34)
CAHYNTDKLIF

SEQ ID NO: 310058 - protein, 16 aa, Homo sapiens
  CDR3 for beta chain variable domain of TCR clone 155029 (TRBV7-2, TRBJ2-7)
CASSLGLAGGAYEQYF

SEQ ID NO: 310059 - protein, 15 aa, Homo sapiens
  CDR3 for alpha chain variable domain of TCR clone 155030 (TRAV8-6, TRAJ10)
CAVRDQAGGGNKLTF

SEQ ID NO: 310060 - protein, 14 aa, Homo sapiens
  CDR3 for beta chain variable domain of TCR clone 155030 (TRBV19, TRBJ2-1)
CASPTFVLSGEQFF

SEQ ID NO: 310061 - protein, 13 aa, Homo sapiens
  CDR3 for alpha chain variable domain of TCR clone 155031 (TRAV3, TRAJ33)
CAVRDRSNYQLIW

SEQ ID NO: 310062 - protein, 16 aa, Homo sapiens
  CDR3 for beta chain variable domain of TCR clone 155031 (TRBV4-2, TRBJ2-7)
CAGSQDRGTSSYEQYF

SEQ ID NO: 310063 - protein, 14 aa, Homo sapiens
  CDR3 for alpha chain variable domain of TCR clone 155032 (TRAV12-3, TRAJ10)
SHLPLPGGGNKLTF

SEQ ID NO: 310064 - protein, 15 aa, Homo sapiens
  CDR3 for beta chain variable domain of TCR clone 155032 (TRBV13, TRBJ2-1)
CASSLLSGLNNEQFF

SEQ ID NO: 310065 - protein, 18 aa, Homo sapiens
  CDR3 for alpha chain variable domain of TCR clone 155033 (TRAV21, TRAJ52)
CAVRPSPAGGTSYGKLTF

SEQ ID NO: 310066 - protein, 16 aa, Homo sapiens
  CDR3 for beta chain variable domain of TCR clone 155033 (TRBV7-9, TRBJ2-7)
CASSNHGGQEKYEQYF

SEQ ID NO: 310067 - protein, 13 aa, Homo sapiens
  CDR3 for alpha chain variable domain of TCR clone 155034 (TRAV12-2, TRAJ24)
CAVSTDGWGKLQF

SEQ ID NO: 310068 - protein, 15 aa, Homo sapiens
  CDR3 for beta chain variable domain of TCR clone 155034 (TRBV7-2, TRBJ2-2)
CASSPTGANTGELFF

SEQ ID NO: 310069 - protein, 13 aa, Homo sapiens
  CDR3 for alpha chain variable domain of TCR clone 155035 (TRAV13-1, TRAJ10)
FAATAGGGNKLTF

SEQ ID NO: 310070 - protein, 14 aa, Homo sapiens
  CDR3 for beta chain variable domain of TCR clone 155035 (TRBV12-4, TRBJ2-7)
CASSPAGLKYEQYF

SEQ ID NO: 310071 - protein, 14 aa, Homo sapiens
  CDR3 for alpha chain variable domain of TCR clone 155036 (TRAV12-2, TRAJ40)
CAVKIPSGTYKYIF

SEQ ID NO: 310072 - protein, 13 aa, Homo sapiens
  CDR3 for beta chain variable domain of TCR clone 155036 (TRBV11-2, TRBJ1-5)
CSSLDRGRQPQHF

SEQ ID NO: 310073 - protein, 13 aa, Homo sapiens
  CDR3 for alpha chain variable domain of TCR clone 155037 (TRAV13-1, TRAJ6)
SAASKGGSYIPTF

SEQ ID NO: 310074 - protein, 14 aa, Homo sapiens
  CDR3 for beta chain variable domain of TCR clone 155037 (TRBV7-2, TRBJ2-1)
CASSLGVGYNEQFF

SEQ ID NO: 310075 - protein, 11 aa, Homo sapiens
  CDR3 for alpha chain variable domain of TCR clone 155038 (TRAV2, TRAJ33)
CSVDRNYQLIW

SEQ ID NO: 310076 - protein, 15 aa, Homo sapiens
  CDR3 for beta chain variable domain of TCR clone 155038 (TRBV19, TRBJ1-2)
CASSVGQVLNYGYTF

SEQ ID NO: 310077 - protein, 16 aa, Homo sapiens
  CDR3 for alpha chain variable domain of TCR clone 155039 (TRAV12-3, TRAJ53)
CAMSLGSGGSNHKLTF

SEQ ID NO: 310078 - protein, 11 aa, Homo sapiens
  CDR3 for beta chain variable domain of TCR clone 155039 (TRBV29-1, TRBJ2-5)
CSEDRTGTQYF

SEQ ID NO: 310079 - protein, 13 aa, Homo sapiens
  CDR3 for alpha chain variable domain of TCR clone 155040 (TRAV12-2, TRAJ53)
CAGVGGSNYKLTF

SEQ ID NO: 310080 - protein, 11 aa, Homo sapiens
  CDR3 for beta chain variable domain of TCR clone 155040 (TRBV20-1, TRBJ2-7)
CSARTSYEQYF

SEQ ID NO: 310081 - protein, 10 aa, Homo sapiens
  CDR3 for alpha chain variable domain of TCR clone 155041 (TRAV23/DV6, TRAJ57)
CAASSTLSQG

SEQ ID NO: 310082 - protein, 15 aa, Homo sapiens
  CDR3 for beta chain variable domain of TCR clone 155041 (TRBV27, TRBJ1-4)
CASSAQQGLNEKLFF

SEQ ID NO: 310083 - protein, 15 aa, Homo sapiens
  CDR3 for alpha chain variable domain of TCR clone 155042 (TRAV38-2/DV8, TRAJ28)
CAYRDAGAGSYQLTF

SEQ ID NO: 310084 - protein, 19 aa, Homo sapiens
  CDR3 for beta chain variable domain of TCR clone 155042 (TRBV25-1, TRBJ2-2)
CAILVYRVDRGRKTGELFF

SEQ ID NO: 310085 - protein, 15 aa, Homo sapiens
  CDR3 for alpha chain variable domain of TCR clone 155043 (TRAV3, TRAJ22)
CAVRDRGGCARQLTF

SEQ ID NO: 310086 - protein, 14 aa, Homo sapiens
  CDR3 for beta chain variable domain of TCR clone 155043 (TRBV19, TRBJ2-1)
CASSRLASINEQFF

SEQ ID NO: 310087 - protein, 16 aa, Homo sapiens
  CDR3 for alpha chain variable domain of TCR clone 155044 (TRAV16, TRAJ4)
CALSRMFSGGYNKLIF

SEQ ID NO: 310088 - protein, 15 aa, Homo sapiens
  CDR3 for beta chain variable domain of TCR clone 155044 (TRBV2, TRBJ2-7)
CASSEGLARSYEQYF

SEQ ID NO: 310089 - protein, 13 aa, Homo sapiens
  CDR3 for alpha chain variable domain of TCR clone 155045 (TRAV20, TRAJ31)
CAVQAWNNARHMF

SEQ ID NO: 310090 - protein, 12 aa, Homo sapiens
  CDR3 for beta chain variable domain of TCR clone 155045 (TRBV11-2, TRBJ2-2)
CASSLGGGELFF

SEQ ID NO: 310091 - protein, 15 aa, Homo sapiens
  CDR3 for alpha chain variable domain of TCR clone 155046 (TRAV8-4, TRAJ37)
CAVTYGSSNTGRLIF

SEQ ID NO: 310092 - protein, 13 aa, Homo sapiens
  CDR3 for beta chain variable domain of TCR clone 155046 (TRBV12-4, TRBJ2-5)
CASSLGGSRTQYF

SEQ ID NO: 310093 - protein, 16 aa, Homo sapiens
  CDR3 for alpha chain variable domain of TCR clone 155047 (TRAV26-2, TRAJ45)
CTTASPIGGGADGLTF

SEQ ID NO: 310094 - protein, 15 aa, Homo sapiens
  CDR3 for beta chain variable domain of TCR clone 155047 (TRBV3-1, TRBJ2-5)
CASSANLGGPETQYF

SEQ ID NO: 310095 - protein, 14 aa, Homo sapiens
  CDR3 for alpha chain variable domain of TCR clone 155048 (TRAV12-3, TRAJ29)
CAMSPYSGNTPLVF

SEQ ID NO: 310096 - protein, 13 aa, Homo sapiens
  CDR3 for beta chain variable domain of TCR clone 155048 (TRBV4-2, TRBJ1-1)
CASSQAGNTEAFL

SEQ ID NO: 310097 - protein, 13 aa, Homo sapiens
  CDR3 for alpha chain variable domain of TCR clone 155049 (TRAV8-4, TRAJ30)
CAVSVNRDDKIIF

SEQ ID NO: 310098 - protein, 16 aa, Homo sapiens
  CDR3 for beta chain variable domain of TCR clone 155049 (TRBV7-9, TRBJ1-2)
CASSLGFSSGEDGYTF

SEQ ID NO: 310099 - protein, 16 aa, Homo sapiens
  CDR3 for alpha chain variable domain of TCR clone 155050 (TRAV3, TRAJ37)
CDVRGKGSGNTGKPIF

SEQ ID NO: 310100 - protein, 13 aa, Homo sapiens
  CDR3 for beta chain variable domain of TCR clone 155050 (TRBV14, TRBJ2-7)
CASSQDRRYEQYF

SEQ ID NO: 310101 - protein, 15 aa, Homo sapiens
  CDR3 for alpha chain variable domain of TCR clone 155051 (TRAV27, TRAJ38)
CAARRNAGNNRKLIC

SEQ ID NO: 310102 - protein, 15 aa, Homo sapiens
  CDR3 for beta chain variable domain of TCR clone 155051 (TRBV7-9, TRBJ1-5)
CASSQGHQPNQPQHF

SEQ ID NO: 310103 - protein, 18 aa, Homo sapiens
  CDR3 for alpha chain variable domain of TCR clone 155052 (TRAV14/DV4, TRAJ11)
CAMREAHHRNSGYSTLTF

SEQ ID NO: 310104 - protein, 13 aa, Homo sapiens
  CDR3 for beta chain variable domain of TCR clone 155052 (TRBV15, TRBJ1-6)
CATSGGLNSPLHF

SEQ ID NO: 310105 - protein, 12 aa, Homo sapiens
  CDR3 for alpha chain variable domain of TCR clone 155053 (TRAV12-2, TRAJ10)
WGVTGGGNKLTF

SEQ ID NO: 310106 - protein, 14 aa, Homo sapiens
  CDR3 for beta chain variable domain of TCR clone 155053 (TRBV27, TRBJ2-7)
CASATGAERREQYF

SEQ ID NO: 310107 - protein, 14 aa, Homo sapiens
  CDR3 for alpha chain variable domain of TCR clone 155054 (TRAV2, TRAJ28)
CAATSGAGSYQLTF

SEQ ID NO: 310108 - protein, 17 aa, Homo sapiens
  CDR3 for beta chain variable domain of TCR clone 155054 (TRBV28, TRBJ2-1)
CASSSARQALTYNEQFF

SEQ ID NO: 310109 - protein, 13 aa, Homo sapiens
  CDR3 for alpha chain variable domain of TCR clone 155055 (TRAV8-3, TRAJ21)
WAVGIYNFNKFYF

SEQ ID NO: 310110 - protein, 13 aa, Homo sapiens
  CDR3 for beta chain variable domain of TCR clone 155055 (TRBV7-7, TRBJ2-5)
CASSLRAIETQYF

SEQ ID NO: 310111 - protein, 14 aa, Homo sapiens
  CDR3 for alpha chain variable domain of TCR clone 155056 (TRAV1-2, TRAJ16)
CAVNRFSDGQKLLF

SEQ ID NO: 310112 - protein, 13 aa, Homo sapiens
  CDR3 for beta chain variable domain of TCR clone 155056 (TRBV12-4, TRBJ2-5)
CASRLGGSRTQYF

SEQ ID NO: 310113 - protein, 12 aa, Homo sapiens
  CDR3 for alpha chain variable domain of TCR clone 155057 (TRAV17, TRAJ39)
CATGAAGNMLTF

SEQ ID NO: 310114 - protein, 19 aa, Homo sapiens
  CDR3 for beta chain variable domain of TCR clone 155057 (TRBV4-2, TRBJ2-5)
CASSPIKTGPGAKQETQYF

SEQ ID NO: 310115 - protein, 13 aa, Homo sapiens
  CDR3 for alpha chain variable domain of TCR clone 155058 (TRAV12-3, TRAJ33)
CAMSVNSNYQLIW

SEQ ID NO: 310116 - protein, 14 aa, Homo sapiens
  CDR3 for beta chain variable domain of TCR clone 155058 (TRBV6-1, TRBJ1-3)
CASVQGGGGNTIYF

SEQ ID NO: 310117 - protein, 13 aa, Homo sapiens
  CDR3 for alpha chain variable domain of TCR clone 155059 (TRAV3, TRAJ27)
CAVRPFGAGKSTF

SEQ ID NO: 310118 - protein, 15 aa, Homo sapiens
  CDR3 for beta chain variable domain of TCR clone 155059 (TRBV20-1, TRBJ2-7)
CSARDRVSGMDEQYF

SEQ ID NO: 310119 - protein, 11 aa, Homo sapiens
  CDR3 for alpha chain variable domain of TCR clone 155060 (TRAV12-2, TRAJ10)
RGHGGGNKLTF

SEQ ID NO: 310120 - protein, 14 aa, Homo sapiens
  CDR3 for beta chain variable domain of TCR clone 155060 (TRBV27, TRBJ2-7)
CASATGTERREQYF

SEQ ID NO: 310121 - protein, 16 aa, Homo sapiens
  CDR3 for alpha chain variable domain of TCR clone 155061 (TRAV26-1, TRAJ38)
CIVRVELGGSNRKLIW

SEQ ID NO: 310122 - protein, 14 aa, Homo sapiens
  CDR3 for beta chain variable domain of TCR clone 155061 (TRBV5-1, TRBJ2-3)
CASSPGLAADTQYF

SEQ ID NO: 310123 - protein, 13 aa, Homo sapiens
  CDR3 for alpha chain variable domain of TCR clone 155062 (TRAV8-3, TRAJ36)
CAVGATGANNLFF

SEQ ID NO: 310124 - protein, 15 aa, Homo sapiens
  CDR3 for beta chain variable domain of TCR clone 155062 (TRBV11-3, TRBJ2-7)
CASSPGPASSYEQYF

SEQ ID NO: 310125 - protein, 14 aa, Homo sapiens
  CDR3 for alpha chain variable domain of TCR clone 155063 (TRAV8-6, TRAJ49)
CAVSDPNTGNQFYF

SEQ ID NO: 310126 - protein, 15 aa, Homo sapiens
  CDR3 for beta chain variable domain of TCR clone 155063 (TRBV10-2, TRBJ2-6)
CASSEQGTGANVLTF

SEQ ID NO: 310127 - protein, 15 aa, Homo sapiens
  CDR3 for alpha chain variable domain of TCR clone 155064 (TRAV1-2, TRAJ32)
CAVRGYGGATNKLIF

SEQ ID NO: 310128 - protein, 15 aa, Homo sapiens
  CDR3 for beta chain variable domain of TCR clone 155064 (TRBV25-1, TRBJ2-5)
CASSDTGTHKETQYF

SEQ ID NO: 310129 - protein, 14 aa, Homo sapiens
  CDR3 for alpha chain variable domain of TCR clone 155065 (TRAV17, TRAJ56)
CATVPAGANSKLPF

SEQ ID NO: 310130 - protein, 16 aa, Homo sapiens
  CDR3 for beta chain variable domain of TCR clone 155065 (TRBV12-5, TRBJ2-5)
CASGPRTSGNQETQYF

SEQ ID NO: 310131 - protein, 16 aa, Homo sapiens
  CDR3 for alpha chain variable domain of TCR clone 155066 (TRAV29/DV5, TRAJ28)
CAADAYSGAGSYQLTF

SEQ ID NO: 310132 - protein, 14 aa, Homo sapiens
  CDR3 for beta chain variable domain of TCR clone 155066 (TRBV19, TRBJ1-5)
CASRAPDSFLSQHF

SEQ ID NO: 310133 - protein, 13 aa, Homo sapiens
  CDR3 for alpha chain variable domain of TCR clone 155067 (TRAV20, TRAJ54)
CAVQAGGAQKLVF

SEQ ID NO: 310134 - protein, 13 aa, Homo sapiens
  CDR3 for beta chain variable domain of TCR clone 155067 (TRBV5-5, TRBJ1-2)
CASSFWRGEDYTF

SEQ ID NO: 310135 - protein, 12 aa, Homo sapiens
  CDR3 for alpha chain variable domain of TCR clone 155068 (TRAV12-3, TRAJ17)
CAMTLTGNKLTF

SEQ ID NO: 310136 - protein, 13 aa, Homo sapiens
  CDR3 for beta chain variable domain of TCR clone 155068 (TRBV20-1, TRBJ2-1)
CSASTGTSNEQFF

SEQ ID NO: 310137 - protein, 14 aa, Homo sapiens
  CDR3 for alpha chain variable domain of TCR clone 155069 (TRAV1-2, TRAJ16)
FAVNRFSDGQKLLF

SEQ ID NO: 310138 - protein, 14 aa, Homo sapiens
  CDR3 for beta chain variable domain of TCR clone 155069 (TRBV20-1, TRBJ1-1)
CSAQTRIGGTEAFF

SEQ ID NO: 310139 - protein, 16 aa, Homo sapiens
  CDR3 for alpha chain variable domain of TCR clone 155070 (TRAV12-2, TRAJ40)
CAVIRGGTSGTYKYIF

SEQ ID NO: 310140 - protein, 13 aa, Homo sapiens
  CDR3 for beta chain variable domain of TCR clone 155070 (TRBV12-4, TRBJ1-2)
CASSSGPNYGYTF

SEQ ID NO: 310141 - protein, 11 aa, Homo sapiens
  CDR3 for alpha chain variable domain of TCR clone 155071 (TRAV3, TRAJ21)
GAVGNFNKFYF

SEQ ID NO: 310142 - protein, 14 aa, Homo sapiens
  CDR3 for beta chain variable domain of TCR clone 155071 (TRBV6-3, TRBJ1-1)
CASSYHSKNTEAFF

SEQ ID NO: 310143 - protein, 14 aa, Homo sapiens
  CDR3 for alpha chain variable domain of TCR clone 155072 (TRAV12-2, TRAJ4)
CAVKKTGGYQKVTF

SEQ ID NO: 310144 - protein, 15 aa, Homo sapiens
  CDR3 for beta chain variable domain of TCR clone 155072 (TRBV6-5, TRBJ2-1)
CASSYDAGAGNEQFF

SEQ ID NO: 310145 - protein, 11 aa, Homo sapiens
  CDR3 for alpha chain variable domain of TCR clone 155073 (TRAV16, TRAJ49)
CSLNTGNQFYF

SEQ ID NO: 310146 - protein, 15 aa, Homo sapiens
  CDR3 for beta chain variable domain of TCR clone 155073 (TRBV7-3, TRBJ2-1)
CASSPTGGGEAEQFF

SEQ ID NO: 310147 - protein, 13 aa, Homo sapiens
  CDR3 for alpha chain variable domain of TCR clone 155074 (TRAV2, TRAJ15)
CAVASQAGTALIF

SEQ ID NO: 310148 - protein, 17 aa, Homo sapiens
  CDR3 for beta chain variable domain of TCR clone 155074 (TRBV7-7, TRBJ2-2)
CASSSVPAGGEIGELFF

SEQ ID NO: 310149 - protein, 14 aa, Homo sapiens
  CDR3 for alpha chain variable domain of TCR clone 155075 (TRAV1-2, TRAJ15)
CAVRDRQAGTALIF

SEQ ID NO: 310150 - protein, 14 aa, Homo sapiens
  CDR3 for beta chain variable domain of TCR clone 155075 (TRBV11-2, TRBJ2-5)
CASSRTGGIETQYF

SEQ ID NO: 310151 - protein, 15 aa, Homo sapiens
  CDR3 for alpha chain variable domain of TCR clone 155076 (TRAV29/DV5, TRAJ40)
CAASAQGSGTYKYIF

SEQ ID NO: 310152 - protein, 15 aa, Homo sapiens
  CDR3 for beta chain variable domain of TCR clone 155076 (TRBV5-4, TRBJ2-1)
CASSREGLPYNEQFF

SEQ ID NO: 310153 - protein, 18 aa, Homo sapiens
  CDR3 for alpha chain variable domain of TCR clone 155077 (TRAV26-1, TRAJ52)
CIVRVEGAGGTSYGKLTF

SEQ ID NO: 310154 - protein, 12 aa, Homo sapiens
  CDR3 for beta chain variable domain of TCR clone 155077 (TRBV7-3, TRBJ1-2)
CSSLKRGYGYTF

SEQ ID NO: 310155 - protein, 15 aa, Homo sapiens
  CDR3 for alpha chain variable domain of TCR clone 155078 (TRAV13-2, TRAJ45)
CAENNSGGGAEGLTF

SEQ ID NO: 310156 - protein, 13 aa, Homo sapiens
  CDR3 for beta chain variable domain of TCR clone 155078 (TRBV25-1, TRBJ2-6)
CASRGPGANVLTF

SEQ ID NO: 310157 - protein, 12 aa, Homo sapiens
  CDR3 for alpha chain variable domain of TCR clone 155079 (TRAV12-3, TRAJ17)
RAMTLTGNTLTF

SEQ ID NO: 310158 - protein, 15 aa, Homo sapiens
  CDR3 for beta chain variable domain of TCR clone 155079 (TRBV20-1, TRBJ2-7)
CSARDRVSGMDEQYF

SEQ ID NO: 310159 - protein, 15 aa, Homo sapiens
  CDR3 for alpha chain variable domain of TCR clone 155080 (TRAV4, TRAJ8)
CLVGEQHTGFQKLVF

SEQ ID NO: 310160 - protein, 15 aa, Homo sapiens
  CDR3 for beta chain variable domain of TCR clone 155080 (TRBV7-9, TRBJ2-5)
CASSNRDYLQEAQYF

SEQ ID NO: 310161 - protein, 17 aa, Homo sapiens
  CDR3 for alpha chain variable domain of TCR clone 155081 (TRAV3, TRAJ6)
CAVRDGPRAGGSYIPTF

SEQ ID NO: 310162 - protein, 20 aa, Homo sapiens
  CDR3 for beta chain variable domain of TCR clone 155081 (TRBV7-8, TRBJ2-1)
CASSLAHRLAGVRSYNEQFF

SEQ ID NO: 310163 - protein, 13 aa, Homo sapiens
  CDR3 for alpha chain variable domain of TCR clone 155082 (TRAV36/DV7, TRAJ34)
CAGRPYNTDKLIF

SEQ ID NO: 310164 - protein, 15 aa, Homo sapiens
  CDR3 for beta chain variable domain of TCR clone 155082 (TRBV27, TRBJ1-6)
CASSVDRGLGSPLHF

SEQ ID NO: 310165 - protein, 14 aa, Homo sapiens
  CDR3 for alpha chain variable domain of TCR clone 155083 (TRAV12-2, TRAJ13)
CAVKKTGGYQKVTF

SEQ ID NO: 310166 - protein, 13 aa, Homo sapiens
  CDR3 for beta chain variable domain of TCR clone 155083 (TRBV4-2, TRBJ2-1)
CASSPGGYNEQFF

SEQ ID NO: 310167 - protein, 13 aa, Homo sapiens
  CDR3 for alpha chain variable domain of TCR clone 155084 (TRAV27, TRAJ56)
CAGKPGANSKLTF

SEQ ID NO: 310168 - protein, 18 aa, Homo sapiens
  CDR3 for beta chain variable domain of TCR clone 155084 (TRBV11-2, TRBJ2-3)
CASSLGWASRGAPNTQYF

SEQ ID NO: 310169 - protein, 14 aa, Homo sapiens
  CDR3 for alpha chain variable domain of TCR clone 155085 (TRAV9-2, TRAJ13)
CALSDSGGYQKVTF

SEQ ID NO: 310170 - protein, 16 aa, Homo sapiens
  CDR3 for beta chain variable domain of TCR clone 155085 (TRBV18, TRBJ2-7)
CASSPTVGQGMYEQYF

SEQ ID NO: 310171 - protein, 11 aa, Homo sapiens
  CDR3 for alpha chain variable domain of TCR clone 155086 (TRAV12-1, TRAJ37)
CVVNTPGKLIF

SEQ ID NO: 310172 - protein, 13 aa, Homo sapiens
  CDR3 for beta chain variable domain of TCR clone 155086 (TRBV10-3, TRBJ2-7)
CASKLAVNYEQYF

SEQ ID NO: 310173 - protein, 13 aa, Homo sapiens
  CDR3 for alpha chain variable domain of TCR clone 155087 (TRAV12-2, TRAJ9)
CAVLATGGFKTIF

SEQ ID NO: 310174 - protein, 15 aa, Homo sapiens
  CDR3 for beta chain variable domain of TCR clone 155087 (TRBV6-3, TRBJ2-7)
CASSRTGANLYEQYF

SEQ ID NO: 310175 - protein, 13 aa, Homo sapiens
  CDR3 for alpha chain variable domain of TCR clone 155088 (TRAV39, TRAJ48)
CAAVNFVNEKLTF

SEQ ID NO: 310176 - protein, 12 aa, Homo sapiens
  CDR3 for beta chain variable domain of TCR clone 155088 (TRBV5-5, TRBJ2-5)
CASSYFGETQYF

SEQ ID NO: 310177 - protein, 13 aa, Homo sapiens
  CDR3 for alpha chain variable domain of TCR clone 155089 (TRAV8-3, TRAJ43)
CAVVPYNDNDMRF

SEQ ID NO: 310178 - protein, 16 aa, Homo sapiens
  CDR3 for beta chain variable domain of TCR clone 155089 (TRBV7-2, TRBJ2-5)
CASSPFPTGGEETQYF

SEQ ID NO: 310179 - protein, 15 aa, Homo sapiens
  CDR3 for alpha chain variable domain of TCR clone 155090 (TRAV20, TRAJ43)
FAVQAGKSSNNDMRF

SEQ ID NO: 310180 - protein, 14 aa, Homo sapiens
  CDR3 for beta chain variable domain of TCR clone 155090 (TRBV27, TRBJ2-1)
CASRHLGGGKEQFF

SEQ ID NO: 310181 - protein, 14 aa, Homo sapiens
  CDR3 for alpha chain variable domain of TCR clone 155091 (TRAV1-2, TRAJ8)
CAVREDTGFQKLVF

SEQ ID NO: 310182 - protein, 16 aa, Homo sapiens
  CDR3 for beta chain variable domain of TCR clone 155091 (TRBV6-1, TRBJ2-5)
CASSLRTGGVGETQYF

SEQ ID NO: 310183 - protein, 14 aa, Homo sapiens
  CDR3 for alpha chain variable domain of TCR clone 155092 (TRAV12-1, TRAJ38)
CVVNNAGNNRKLIW

SEQ ID NO: 310184 - protein, 16 aa, Homo sapiens
  CDR3 for beta chain variable domain of TCR clone 155092 (TRBV7-2, TRBJ1-2)
CASSRQGGGANYSYAF

SEQ ID NO: 310185 - protein, 12 aa, Homo sapiens
  CDR3 for alpha chain variable domain of TCR clone 155093 (TRAV12-3, TRAJ21)
CAMFKNFNKFYF

SEQ ID NO: 310186 - protein, 14 aa, Homo sapiens
  CDR3 for beta chain variable domain of TCR clone 155093 (TRBV28, TRBJ2-1)
CASSIQGTVGEQFF

SEQ ID NO: 310187 - protein, 21 aa, Homo sapiens
  CDR3 for alpha chain variable domain of TCR clone 155094 (TRAV1-1, TRAJ6)
CLLLLRCERLERTGGSYIPTF

SEQ ID NO: 310188 - protein, 12 aa, Homo sapiens
  CDR3 for beta chain variable domain of TCR clone 155094 (TRBV28, TRBJ2-6)
CAIQAGANVLTF

SEQ ID NO: 310189 - protein, 17 aa, Homo sapiens
  CDR3 for alpha chain variable domain of TCR clone 155095 (TRAV38-1, TRAJ57)
CAFMKHGLQGGSEKLVF

SEQ ID NO: 310190 - protein, 14 aa, Homo sapiens
  CDR3 for beta chain variable domain of TCR clone 155095 (TRBV19, TRBJ2-1)
CASPTFVLSGEQFF

SEQ ID NO: 310191 - protein, 12 aa, Homo sapiens
  CDR3 for alpha chain variable domain of TCR clone 155096 (TRAV26-1, TRAJ17)
CIVRSAGNKLTF

SEQ ID NO: 310192 - protein, 14 aa, Homo sapiens
  CDR3 for beta chain variable domain of TCR clone 155096 (TRBV18, TRBJ2-7)
CASSSRTLAYEQYF

SEQ ID NO: 310193 - protein, 17 aa, Homo sapiens
  CDR3 for alpha chain variable domain of TCR clone 155097 (TRAV8-1, TRAJ43)
CAVTNDMRFGAGTRLTV

SEQ ID NO: 310194 - protein, 12 aa, Homo sapiens
  CDR3 for beta chain variable domain of TCR clone 155097 (TRBV19, TRBJ2-1)
CASSRQGAEQFF

SEQ ID NO: 310195 - protein, 12 aa, Homo sapiens
  CDR3 for alpha chain variable domain of TCR clone 155098 (TRAV21, TRAJ23)
CAVMLQGGELIF

SEQ ID NO: 310196 - protein, 14 aa, Homo sapiens
  CDR3 for beta chain variable domain of TCR clone 155098 (TRBV7-9, TRBJ1-4)
CAITEGEANEKLFF

SEQ ID NO: 310197 - protein, 17 aa, Homo sapiens
  CDR3 for alpha chain variable domain of TCR clone 155099 (TRAV3, TRAJ6)
CAVRDGPGAGGSYIPTF

SEQ ID NO: 310198 - protein, 20 aa, Homo sapiens
  CDR3 for beta chain variable domain of TCR clone 155099 (TRBV28, TRBJ2-1)
CASTPIGRSSGLAGGNEQFF

SEQ ID NO: 310199 - protein, 14 aa, Homo sapiens
  CDR3 for alpha chain variable domain of TCR clone 155100 (TRAV3, TRAJ34)
CAVRAPGNTDKLIF

SEQ ID NO: 310200 - protein, 14 aa, Homo sapiens
  CDR3 for beta chain variable domain of TCR clone 155100 (TRBV5-4, TRBJ1-1)
CASSLESRRDEAFF

SEQ ID NO: 310201 - protein, 15 aa, Homo sapiens
  CDR3 for alpha chain variable domain of TCR clone 155101 (TRAV12-3, TRAJ6)
CAMSATTGGSYIPTL

SEQ ID NO: 310202 - protein, 18 aa, Homo sapiens
  CDR3 for beta chain variable domain of TCR clone 155101 (TRBV28, TRBJ2-1)
CASSSTSGRANSYNEQFF

SEQ ID NO: 310203 - protein, 14 aa, Homo sapiens
  CDR3 for alpha chain variable domain of TCR clone 155102 (TRAV13-2, TRAJ41)
CAERPDWAGYALNF

SEQ ID NO: 310204 - protein, 15 aa, Homo sapiens
  CDR3 for beta chain variable domain of TCR clone 155102 (TRBV28, TRBJ2-5)
CASSPPWSYQETQYF

SEQ ID NO: 310205 - protein, 11 aa, Homo sapiens
  CDR3 for alpha chain variable domain of TCR clone 155103 (TRAV12-2, TRAJ23)
CARGRGGKLIF

SEQ ID NO: 310206 - protein, 14 aa, Homo sapiens
  CDR3 for beta chain variable domain of TCR clone 155103 (TRBV7-2, TRBJ2-5)
CASSLSGGGETQYF

SEQ ID NO: 310207 - protein, 11 aa, Homo sapiens
  CDR3 for alpha chain variable domain of TCR clone 155104 (TRAV2, TRAJ13)
CASGGYQKVTF

SEQ ID NO: 310208 - protein, 20 aa, Homo sapiens
  CDR3 for beta chain variable domain of TCR clone 155104 (TRBV11-2, TRBJ2-7)
CASSPVGRERAGGPSYEQYF

SEQ ID NO: 310209 - protein, 13 aa, Homo sapiens
  CDR3 for alpha chain variable domain of TCR clone 155105 (TRAV8-6, TRAJ49)
CAVITNTGNQFYF

SEQ ID NO: 310210 - protein, 12 aa, Homo sapiens
  CDR3 for beta chain variable domain of TCR clone 155105 (TRBV12-4, TRBJ2-1)
CASSPGRNEQFF

SEQ ID NO: 310211 - protein, 15 aa, Homo sapiens
  CDR3 for alpha chain variable domain of TCR clone 155106 (TRAV21, TRAJ53)
CATLNSGGSNYKLTF

SEQ ID NO: 310212 - protein, 13 aa, Homo sapiens
  CDR3 for beta chain variable domain of TCR clone 155106 (TRBV5-1, TRBJ2-7)
CASSLEDNQEQYF

SEQ ID NO: 310213 - protein, 11 aa, Homo sapiens
  CDR3 for alpha chain variable domain of TCR clone 155107 (TRAV21, TRAJ11)
CAVNGSSTLTF

SEQ ID NO: 310214 - protein, 13 aa, Homo sapiens
  CDR3 for beta chain variable domain of TCR clone 155107 (TRBV10-3, TRBJ2-7)
CASKLAVNYEQYF

SEQ ID NO: 310215 - protein, 16 aa, Homo sapiens
  CDR3 for alpha chain variable domain of TCR clone 155108 (TRAV8-4, TRAJ5)
CAVSPLTDTGRRALTF

SEQ ID NO: 310216 - protein, 14 aa, Homo sapiens
  CDR3 for beta chain variable domain of TCR clone 155108 (TRBV19, TRBJ1-6)
CASSNDGWNSPLHF

SEQ ID NO: 310217 - protein, 13 aa, Homo sapiens
  CDR3 for alpha chain variable domain of TCR clone 155109 (TRAV23/DV6, TRAJ45)
CAARRGGSDGLTF

SEQ ID NO: 310218 - protein, 14 aa, Homo sapiens
  CDR3 for beta chain variable domain of TCR clone 155109 (TRBV7-2, TRBJ2-3)
CASSLARGTDTQYF

SEQ ID NO: 310219 - protein, 12 aa, Homo sapiens
  CDR3 for alpha chain variable domain of TCR clone 155110 (TRAV17, TRAJ20)
CATDGDDYKLSF

SEQ ID NO: 310220 - protein, 16 aa, Homo sapiens
  CDR3 for beta chain variable domain of TCR clone 155110 (TRBV20-1, TRBJ1-4)
CSSPGQGLLTNEELFF

SEQ ID NO: 310221 - protein, 14 aa, Homo sapiens
  CDR3 for alpha chain variable domain of TCR clone 155111 (TRAV38-1, TRAJ40)
CALRPTSGTYKYIF

SEQ ID NO: 310222 - protein, 20 aa, Homo sapiens
  CDR3 for beta chain variable domain of TCR clone 155111 (TRBV19, TRBJ2-1)
CASSISRTVTSTRLNNEQFF

SEQ ID NO: 310223 - protein, 13 aa, Homo sapiens
  CDR3 for alpha chain variable domain of TCR clone 155112 (TRAV8-6, TRAJ50)
CAVIKTSYDKVIF

SEQ ID NO: 310224 - protein, 15 aa, Homo sapiens
  CDR3 for beta chain variable domain of TCR clone 155112 (TRBV9, TRBJ1-6)
CASSVAGTGDSPLHF

SEQ ID NO: 310225 - protein, 13 aa, Homo sapiens
  CDR3 for alpha chain variable domain of TCR clone 155113 (TRAV8-3, TRAJ48)
CAVVPFGNEKLTF

SEQ ID NO: 310226 - protein, 19 aa, Homo sapiens
  CDR3 for beta chain variable domain of TCR clone 155113 (TRBV25-1, TRBJ2-2)
CAILVYRVDRGRKNGELFF

SEQ ID NO: 310227 - protein, 14 aa, Homo sapiens
  CDR3 for alpha chain variable domain of TCR clone 155114 (TRAV2, TRAJ37)
CAVDFTSNTGKLIF

SEQ ID NO: 310228 - protein, 14 aa, Homo sapiens
  CDR3 for beta chain variable domain of TCR clone 155114 (TRBV20-1, TRBJ2-5)
CSALVPGYQETQYF

SEQ ID NO: 310229 - protein, 14 aa, Homo sapiens
  CDR3 for alpha chain variable domain of TCR clone 155115 (TRAV38-1, TRAJ45)
CAYYSGGGADGLTF

SEQ ID NO: 310230 - protein, 15 aa, Homo sapiens
  CDR3 for beta chain variable domain of TCR clone 155115 (TRBV3-1, TRBJ2-2)
CASSQAVRETGELFF

SEQ ID NO: 310231 - protein, 16 aa, Homo sapiens
  CDR3 for alpha chain variable domain of TCR clone 155116 (TRAV36/DV7, TRAJ30)
CAVETYGLDRDDKIIF

SEQ ID NO: 310232 - protein, 14 aa, Homo sapiens
  CDR3 for beta chain variable domain of TCR clone 155116 (TRBV5-1, TRBJ2-3)
CASRGQTSTDTQYF

SEQ ID NO: 310233 - protein, 14 aa, Homo sapiens
  CDR3 for alpha chain variable domain of TCR clone 155117 (TRAV35, TRAJ46)
WAGPQKSSGDKLTF

SEQ ID NO: 310234 - protein, 16 aa, Homo sapiens
  CDR3 for beta chain variable domain of TCR clone 155117 (TRBV13, TRBJ2-2)
CASSPRTGEHTGKLFF

SEQ ID NO: 310235 - protein, 15 aa, Homo sapiens
  CDR3 for alpha chain variable domain of TCR clone 155118 (TRAV38-1, TRAJ37)
CAFIFGSGNTGKLIF

SEQ ID NO: 310236 - protein, 11 aa, Homo sapiens
  CDR3 for beta chain variable domain of TCR clone 155118 (TRBV7-9, TRBJ2-6)
CASPRANVLTF

SEQ ID NO: 310237 - protein, 14 aa, Homo sapiens
  CDR3 for alpha chain variable domain of TCR clone 155119 (TRAV8-2, TRAJ4)
CVVSPPGGYNKLIF

SEQ ID NO: 310238 - protein, 14 aa, Homo sapiens
  CDR3 for beta chain variable domain of TCR clone 155119 (TRBV12-4, TRBJ1-1)
CASSLGTGGTEAFF

SEQ ID NO: 310239 - protein, 18 aa, Homo sapiens
  CDR3 for alpha chain variable domain of TCR clone 155120 (TRAV13-1, TRAJ52)
CAASKRSAGGTSYGKLTC

SEQ ID NO: 310240 - protein, 13 aa, Homo sapiens
  CDR3 for beta chain variable domain of TCR clone 155120 (TRBV6-5, TRBJ2-5)
CASSPQGGETQYF

SEQ ID NO: 310241 - protein, 14 aa, Homo sapiens
  CDR3 for alpha chain variable domain of TCR clone 155121 (TRAV14/DV4, TRAJ42)
CPRGSLRSQGNLIF

SEQ ID NO: 310242 - protein, 12 aa, Homo sapiens
  CDR3 for beta chain variable domain of TCR clone 155121 (TRBV7-8, TRBJ2-7)
CASSLGDREQYF

SEQ ID NO: 310243 - protein, 14 aa, Homo sapiens
  CDR3 for alpha chain variable domain of TCR clone 155122 (TRAV8-3, TRAJ9)
CAAVYNTGGFKTTF

SEQ ID NO: 310244 - protein, 16 aa, Homo sapiens
  CDR3 for beta chain variable domain of TCR clone 155122 (TRBV7-3, TRBJ2-2)
CASSLKRGTLSGELFF

SEQ ID NO: 310245 - protein, 13 aa, Homo sapiens
  CDR3 for alpha chain variable domain of TCR clone 155123 (TRAV12-2, TRAJ49)
CAVKPNTGNQFYF

SEQ ID NO: 310246 - protein, 18 aa, Homo sapiens
  CDR3 for beta chain variable domain of TCR clone 155123 (TRBV20-1, TRBJ2-3)
CSASGLAGGPGTTDTQYF

SEQ ID NO: 310247 - protein, 13 aa, Homo sapiens
  CDR3 for alpha chain variable domain of TCR clone 155124 (TRAV12-1, TRAJ3)
CVVNPRGASKIIF

SEQ ID NO: 310248 - protein, 14 aa, Homo sapiens
  CDR3 for beta chain variable domain of TCR clone 155124 (TRBV19, TRBJ2-1)
CASPTFVLSGEQFF

SEQ ID NO: 310249 - protein, 12 aa, Homo sapiens
  CDR3 for alpha chain variable domain of TCR clone 155125 (TRAV12-1, TRAJ29)
CVADSGNTPLVF

SEQ ID NO: 310250 - protein, 16 aa, Homo sapiens
  CDR3 for beta chain variable domain of TCR clone 155125 (TRBV28, TRBJ2-7)
CASSFPDRRLTYEQYF

SEQ ID NO: 310251 - protein, 12 aa, Homo sapiens
  CDR3 for alpha chain variable domain of TCR clone 155126 (TRAV21, TRAJ37)
CAVRGNTGTLIF

SEQ ID NO: 310252 - protein, 16 aa, Homo sapiens
  CDR3 for beta chain variable domain of TCR clone 155126 (TRBV19, TRBJ2-2)
CASRSPGTGATGELFF

SEQ ID NO: 310253 - protein, 12 aa, Homo sapiens
  CDR3 for alpha chain variable domain of TCR clone 155127 (TRAV16, TRAJ9)
CALGSGGFKTIF

SEQ ID NO: 310254 - protein, 14 aa, Homo sapiens
  CDR3 for beta chain variable domain of TCR clone 155127 (TRBV7-9, TRBJ2-1)
CASSVAGPYNEQFF

SEQ ID NO: 310255 - protein, 15 aa, Homo sapiens
  CDR3 for alpha chain variable domain of TCR clone 155128 (TRAV4, TRAJ39)
CLVGPNNNSGNMLTF

SEQ ID NO: 310256 - protein, 16 aa, Homo sapiens
  CDR3 for beta chain variable domain of TCR clone 155128 (TRBV10-3, TRBJ1-6)
CAISERRGQGNSPLHF

SEQ ID NO: 310257 - protein, 11 aa, Homo sapiens
  CDR3 for alpha chain variable domain of TCR clone 155129 (TRAV1-2, TRAJ20)
FAVANDYKLSF

SEQ ID NO: 310258 - protein, 18 aa, Homo sapiens
  CDR3 for beta chain variable domain of TCR clone 155129 (TRBV20-1, TRBJ2-6)
CSAETTPTHGSGANGLTF

SEQ ID NO: 310259 - protein, 16 aa, Homo sapiens
  CDR3 for alpha chain variable domain of TCR clone 155130 (TRAV21, TRAJ17)
CAVRPGEEAAGNKLTF

SEQ ID NO: 310260 - protein, 13 aa, Homo sapiens
  CDR3 for beta chain variable domain of TCR clone 155130 (TRBV7-2, TRBJ1-5)
CASSFARNQPQHF

SEQ ID NO: 310261 - protein, 13 aa, Homo sapiens
  CDR3 for alpha chain variable domain of TCR clone 155131 (TRAV38-2/DV8, TRAJ34)
CAYRNYNTDKLIF

SEQ ID NO: 310262 - protein, 17 aa, Homo sapiens
  CDR3 for beta chain variable domain of TCR clone 155131 (TRBV11-2, TRBJ2-1)
CASSLYPPGVEYNEQFF

SEQ ID NO: 310263 - protein, 14 aa, Homo sapiens
  CDR3 for alpha chain variable domain of TCR clone 155132 (TRAV12-3, TRAJ6)
CAMSATGGSYIPTF

SEQ ID NO: 310264 - protein, 16 aa, Homo sapiens
  CDR3 for beta chain variable domain of TCR clone 155132 (TRBV4-2, TRBJ2-1)
FASSPRAGQGANEQFF

SEQ ID NO: 310265 - protein, 11 aa, Homo sapiens
  CDR3 for alpha chain variable domain of TCR clone 155133 (TRAV2, TRAJ4)
CAVGWYNELMF

SEQ ID NO: 310266 - protein, 15 aa, Homo sapiens
  CDR3 for beta chain variable domain of TCR clone 155133 (TRBV7-2, TRBJ2-2)
CASSFQRGETGELFF

SEQ ID NO: 310267 - protein, 15 aa, Homo sapiens
  CDR3 for alpha chain variable domain of TCR clone 155134 (TRAV25, TRAJ53)
CAATGGGGSNYKLTF

SEQ ID NO: 310268 - protein, 19 aa, Homo sapiens
  CDR3 for beta chain variable domain of TCR clone 155134 (TRBV7-2, TRBJ2-3)
YASSFLSRNWGGGTDTQYF

SEQ ID NO: 310269 - protein, 12 aa, Homo sapiens
  CDR3 for alpha chain variable domain of TCR clone 155135 (TRAV3, TRAJ31)
CAVRDGNARLMF

SEQ ID NO: 310270 - protein, 15 aa, Homo sapiens
  CDR3 for beta chain variable domain of TCR clone 155135 (TRBV7-9, TRBJ1-4)
CASGGQRQGTEKLFF

SEQ ID NO: 310271 - protein, 14 aa, Homo sapiens
  CDR3 for alpha chain variable domain of TCR clone 155136 (TRAV35, TRAJ22)
CAGLRPGSARKLTF

SEQ ID NO: 310272 - protein, 15 aa, Homo sapiens
  CDR3 for beta chain variable domain of TCR clone 155136 (TRBV12-4, TRBJ2-5)
CASSPPTGLQETQYV

SEQ ID NO: 310273 - protein, 15 aa, Homo sapiens
  CDR3 for alpha chain variable domain of TCR clone 155137 (TRAV26-1, TRAJ29)
CIVRVEGSGNTPLVF

SEQ ID NO: 310274 - protein, 14 aa, Homo sapiens
  CDR3 for beta chain variable domain of TCR clone 155137 (TRBV19, TRBJ1-5)
CASGTEVYNQPQHF

SEQ ID NO: 310275 - protein, 15 aa, Homo sapiens
  CDR3 for alpha chain variable domain of TCR clone 155138 (TRAV12-2, TRAJ53)
CAVNGGGGSNYKLIF

SEQ ID NO: 310276 - protein, 13 aa, Homo sapiens
  CDR3 for beta chain variable domain of TCR clone 155138 (TRBV7-9, TRBJ1-2)
CASSLKQNYGYTF

SEQ ID NO: 310277 - protein, 16 aa, Homo sapiens
  CDR3 for alpha chain variable domain of TCR clone 155139 (TRAV3, TRAJ27)
CAVRDPQGTNAGKSTF

SEQ ID NO: 310278 - protein, 19 aa, Homo sapiens
  CDR3 for beta chain variable domain of TCR clone 155139 (TRBV25-1, TRBJ2-2)
CAILVYRVDRGRKTGELFF

SEQ ID NO: 310279 - protein, 14 aa, Homo sapiens
  CDR3 for alpha chain variable domain of TCR clone 155140 (TRAV23/DV6, TRAJ44)
CSKNLTGTASKLTF

SEQ ID NO: 310280 - protein, 17 aa, Homo sapiens
  CDR3 for beta chain variable domain of TCR clone 155140 (TRBV24-1, TRBJ2-1)
CATSDVSTSGTYNEQFF

SEQ ID NO: 310281 - protein, 11 aa, Homo sapiens
  CDR3 for alpha chain variable domain of TCR clone 155141 (TRAV21, TRAJ34)
CAVTNTDKLIF

SEQ ID NO: 310282 - protein, 11 aa, Homo sapiens
  CDR3 for beta chain variable domain of TCR clone 155141 (TRBV7-9, TRBJ2-5)
CASSLSATQYF

SEQ ID NO: 310283 - protein, 14 aa, Homo sapiens
  CDR3 for alpha chain variable domain of TCR clone 155142 (TRAV13-1, TRAJ35)
CAASKGGFGNVLHC

SEQ ID NO: 310284 - protein, 11 aa, Homo sapiens
  CDR3 for beta chain variable domain of TCR clone 155142 (TRBV25-1, TRBJ1-1)
PTWGGNTEAFF

SEQ ID NO: 310285 - protein, 16 aa, Homo sapiens
  CDR3 for alpha chain variable domain of TCR clone 155143 (TRAV26-1, TRAJ32)
CIVRTNYGGATNKLIF

SEQ ID NO: 310286 - protein, 17 aa, Homo sapiens
  CDR3 for beta chain variable domain of TCR clone 155143 (TRBV7-9, TRBJ2-5)
CASSPGLAGGGRETQYF

SEQ ID NO: 310287 - protein, 11 aa, Homo sapiens
  CDR3 for alpha chain variable domain of TCR clone 155144 (TRAV3, TRAJ32)
CAVREGIMLVL

SEQ ID NO: 310288 - protein, 13 aa, Homo sapiens
  CDR3 for beta chain variable domain of TCR clone 155144 (TRBV2, TRBJ1-1)
CASSEGGNTEAFF

SEQ ID NO: 310289 - protein, 14 aa, Homo sapiens
  CDR3 for alpha chain variable domain of TCR clone 155145 (TRAV8-3, TRAJ4)
CAVGAAGGSNNLIF

SEQ ID NO: 310290 - protein, 15 aa, Homo sapiens
  CDR3 for beta chain variable domain of TCR clone 155145 (TRBV6-5, TRBJ2-1)
CASSYDAGAGNEQFF

SEQ ID NO: 310291 - protein, 11 aa, Homo sapiens
  CDR3 for alpha chain variable domain of TCR clone 155146 (TRAV27, TRAJ42)
CRRGSQGNLIF

SEQ ID NO: 310292 - protein, 13 aa, Homo sapiens
  CDR3 for beta chain variable domain of TCR clone 155146 (TRBV19, TRBJ2-7)
CASSIRSSYEQYF

SEQ ID NO: 310293 - protein, 15 aa, Homo sapiens
  CDR3 for alpha chain variable domain of TCR clone 155147 (TRAV26-1, TRAJ42)
CIVRVKGGSQGNLIF

SEQ ID NO: 310294 - protein, 13 aa, Homo sapiens
  CDR3 for beta chain variable domain of TCR clone 155147 (TRBV19, TRBJ2-2)
CHHGTCDTGELFF

SEQ ID NO: 310295 - protein, 12 aa, Homo sapiens
  CDR3 for alpha chain variable domain of TCR clone 155148 (TRAV25, TRAJ30)
CAGKNRDDKIIF

SEQ ID NO: 310296 - protein, 15 aa, Homo sapiens
  CDR3 for beta chain variable domain of TCR clone 155148 (TRBV13, TRBJ1-5)
CASSFGQGGVQPQHF

SEQ ID NO: 310297 - protein, 22 aa, Homo sapiens
  CDR3 for alpha chain variable domain of TCR clone 155149 (TRAV13-1, TRAJ35)
CAASKGGFGNVLHCGSVTQVIF

SEQ ID NO: 310298 - protein, 13 aa, Homo sapiens
  CDR3 for beta chain variable domain of TCR clone 155149 (TRBV7-3, TRBJ1-1)
CASSQDWGAEAFF

SEQ ID NO: 310299 - protein, 12 aa, Homo sapiens
  CDR3 for alpha chain variable domain of TCR clone 155150 (TRAV1-2, TRAJ33)
CAALDSNNQLIW

SEQ ID NO: 310300 - protein, 16 aa, Homo sapiens
  CDR3 for beta chain variable domain of TCR clone 155150 (TRBV6-4, TRBJ1-2)
CASSEAVGDPNYGYTF

SEQ ID NO: 310301 - protein, 16 aa, Homo sapiens
  CDR3 for alpha chain variable domain of TCR clone 155151 (TRAV16, TRAJ52)
CALSAAGGTSYGKLTF

SEQ ID NO: 310302 - protein, 16 aa, Homo sapiens
  CDR3 for beta chain variable domain of TCR clone 155151 (TRBV12-4, TRBJ1-5)
CASSQPVGGSNQPQHF

SEQ ID NO: 310303 - protein, 18 aa, Homo sapiens
  CDR3 for alpha chain variable domain of TCR clone 155152 (TRAV1-2, TRAJ18)
CAVPPSADRGSTLGRLYF

SEQ ID NO: 310304 - protein, 15 aa, Homo sapiens
  CDR3 for beta chain variable domain of TCR clone 155152 (TRBV4-1, TRBJ1-4)
CASSDTGGTNEKLFF

SEQ ID NO: 310305 - protein, 16 aa, Homo sapiens
  CDR3 for alpha chain variable domain of TCR clone 155153 (TRAV13-1, TRAJ48)
CAASIFGNFGNEKLTF

SEQ ID NO: 310306 - protein, 17 aa, Homo sapiens
  CDR3 for beta chain variable domain of TCR clone 155153 (TRBV18, TRBJ1-5)
CASSPTMGQGTNQPQHF

SEQ ID NO: 310307 - protein, 14 aa, Homo sapiens
  CDR3 for alpha chain variable domain of TCR clone 155154 (TRAV8-4, TRAJ8)
CAVSEDTGFQTLVF

SEQ ID NO: 310308 - protein, 13 aa, Homo sapiens
  CDR3 for beta chain variable domain of TCR clone 155154 (TRBV6-1, TRBJ2-7)
CASSEARTGEQYF

SEQ ID NO: 310309 - protein, 12 aa, Homo sapiens
  CDR3 for alpha chain variable domain of TCR clone 155155 (TRAV17, TRAJ39)
CATGAAGNMLTF

SEQ ID NO: 310310 - protein, 13 aa, Homo sapiens
  CDR3 for beta chain variable domain of TCR clone 155155 (TRBV27, TRBJ2-7)
CASSFSQGYEQYF

SEQ ID NO: 310311 - protein, 15 aa, Homo sapiens
  CDR3 for alpha chain variable domain of TCR clone 155156 (TRAV8-3, TRAJ40)
CAVGPYTSGTYKYIF

SEQ ID NO: 310312 - protein, 12 aa, Homo sapiens
  CDR3 for beta chain variable domain of TCR clone 155156 (TRBV28, TRBJ2-3)
CASSLYRDTQYF

SEQ ID NO: 310313 - protein, 14 aa, Homo sapiens
  CDR3 for alpha chain variable domain of TCR clone 155157 (TRAV1-1, TRAJ28)
CAAPSGAGSYQLTF

SEQ ID NO: 310314 - protein, 14 aa, Homo sapiens
  CDR3 for beta chain variable domain of TCR clone 155157 (TRBV7-9, TRBJ1-1)
CASNPLQSYTGAFF

SEQ ID NO: 310315 - protein, 15 aa, Homo sapiens
  CDR3 for alpha chain variable domain of TCR clone 155158 (TRAV26-1, TRAJ29)
CIVRVEGSGNTPLVF

SEQ ID NO: 310316 - protein, 14 aa, Homo sapiens
  CDR3 for beta chain variable domain of TCR clone 155158 (TRBV6-3, TRBJ1-1)
CASSYQRRDTEAFF

SEQ ID NO: 310317 - protein, 13 aa, Homo sapiens
  CDR3 for alpha chain variable domain of TCR clone 155159 (TRAV35, TRAJ57)
CAGSQGGSEKLVF

SEQ ID NO: 310318 - protein, 15 aa, Homo sapiens
  CDR3 for beta chain variable domain of TCR clone 155159 (TRBV28, TRBJ2-5)
CASSSGRTIQETQYF

SEQ ID NO: 310319 - protein, 14 aa, Homo sapiens
  CDR3 for alpha chain variable domain of TCR clone 155160 (TRAV8-2, TRAJ40)
CCVGYYLRNLKYIF

SEQ ID NO: 310320 - protein, 16 aa, Homo sapiens
  CDR3 for beta chain variable domain of TCR clone 155160 (TRBV7-3, TRBJ2-1)
CASSLEGYRSYNEQFF

SEQ ID NO: 310321 - protein, 14 aa, Homo sapiens
  CDR3 for alpha chain variable domain of TCR clone 155161 (TRAV27, TRAJ44)
CAASFTGTASKLTF

SEQ ID NO: 310322 - protein, 13 aa, Homo sapiens
  CDR3 for beta chain variable domain of TCR clone 155161 (TRBV27, TRBJ2-3)
CATARGGLYTQYF

SEQ ID NO: 310323 - protein, 14 aa, Homo sapiens
  CDR3 for alpha chain variable domain of TCR clone 155162 (TRAV12-1, TRAJ17)
CVVNPKAAGNKLTF

SEQ ID NO: 310324 - protein, 14 aa, Homo sapiens
  CDR3 for beta chain variable domain of TCR clone 155162 (TRBV4-1, TRBJ2-3)
CASSQDWSTDTQYF

SEQ ID NO: 310325 - protein, 13 aa, Homo sapiens
  CDR3 for alpha chain variable domain of TCR clone 155163 (TRAV1-2, TRAJ9)
CAVLNTGGFKTIF

SEQ ID NO: 310326 - protein, 14 aa, Homo sapiens
  CDR3 for beta chain variable domain of TCR clone 155163 (TRBV5-4, TRBJ1-1)
CASSLDSRRDEAFF

SEQ ID NO: 310327 - protein, 12 aa, Homo sapiens
  CDR3 for alpha chain variable domain of TCR clone 155164 (TRAV8-6, TRAJ36)
CAVSDWLGQTTS

SEQ ID NO: 310328 - protein, 16 aa, Homo sapiens
  CDR3 for beta chain variable domain of TCR clone 155164 (TRBV7-9, TRBJ2-1)
CASSLGTGWDYNEQFF

SEQ ID NO: 310329 - protein, 16 aa, Homo sapiens
  CDR3 for alpha chain variable domain of TCR clone 155165 (TRAV30, TRAJ24)
CGTEIVDADSWGKFQF

SEQ ID NO: 310330 - protein, 15 aa, Homo sapiens
  CDR3 for beta chain variable domain of TCR clone 155165 (TRBV10-3, TRBJ2-3)
CAISLTSGGTGTQYF

SEQ ID NO: 310331 - protein, 15 aa, Homo sapiens
  CDR3 for alpha chain variable domain of TCR clone 155166 (TRAV1-2, TRAJ12)
CADARWMDSSYKLIF

SEQ ID NO: 310332 - protein, 16 aa, Homo sapiens
  CDR3 for beta chain variable domain of TCR clone 155166 (TRBV29-1, TRBJ2-5)
SAARTERDPVLRARHA

SEQ ID NO: 310333 - protein, 15 aa, Homo sapiens
  CDR3 for alpha chain variable domain of TCR clone 155167 (TRAV25, TRAJ52)
CAGTSGGTSYGKLTF

SEQ ID NO: 310334 - protein, 15 aa, Homo sapiens
  CDR3 for beta chain variable domain of TCR clone 155167 (TRBV27, TRBJ2-1)
CASSNGGGSSNEQFF

SEQ ID NO: 310335 - protein, 11 aa, Homo sapiens
  CDR3 for alpha chain variable domain of TCR clone 155168 (TRAV1-1, TRAJ23)
CAVRQGGKLIF

SEQ ID NO: 310336 - protein, 14 aa, Homo sapiens
  CDR3 for beta chain variable domain of TCR clone 155168 (TRBV7-2, TRBJ2-5)
CASSFTQGQETQYF

SEQ ID NO: 310337 - protein, 14 aa, Homo sapiens
  CDR3 for alpha chain variable domain of TCR clone 155169 (TRAV12-2, TRAJ13)
CAVMKTGGYQKVTF

SEQ ID NO: 310338 - protein, 13 aa, Homo sapiens
  CDR3 for beta chain variable domain of TCR clone 155169 (TRBV10-3, TRBJ2-7)
CASKLAVNYEQYF

SEQ ID NO: 310339 - protein, 11 aa, Homo sapiens
  CDR3 for alpha chain variable domain of TCR clone 155170 (TRAV29/DV5, TRAJ31)
CAAMNNAILMF

SEQ ID NO: 310340 - protein, 15 aa, Homo sapiens
  CDR3 for beta chain variable domain of TCR clone 155170 (TRBV20-1, TRBJ2-7)
CSARGPLAGGREQYF

SEQ ID NO: 310341 - protein, 18 aa, Homo sapiens
  CDR3 for alpha chain variable domain of TCR clone 155171 (TRAV12-1, TRAJ52)
CVVKLINAGGTSYGKLTF

SEQ ID NO: 310342 - protein, 14 aa, Homo sapiens
  CDR3 for beta chain variable domain of TCR clone 155171 (TRBV7-8, TRBJ2-7)
CASSLGRASYEQYF

SEQ ID NO: 310343 - protein, 14 aa, Homo sapiens
  CDR3 for alpha chain variable domain of TCR clone 155172 (TRAV35, TRAJ22)
CAGHLSGSARQLTF

SEQ ID NO: 310344 - protein, 14 aa, Homo sapiens
  CDR3 for beta chain variable domain of TCR clone 155172 (TRBV19, TRBJ2-7)
CASNFRDTFTGMYF

SEQ ID NO: 310345 - protein, 12 aa, Homo sapiens
  CDR3 for alpha chain variable domain of TCR clone 155173 (TRAV38-2/DV8, TRAJ47)
CVLMEYGNKLFF

SEQ ID NO: 310346 - protein, 14 aa, Homo sapiens
  CDR3 for beta chain variable domain of TCR clone 155173 (TRBV20-1, TRBJ1-5)
CSATDRGSNQPQHF

SEQ ID NO: 310347 - protein, 16 aa, Homo sapiens
  CDR3 for alpha chain variable domain of TCR clone 155174 (TRAV3, TRAJ5)
CAVRNLMDTGRRALTF

SEQ ID NO: 310348 - protein, 13 aa, Homo sapiens
  CDR3 for beta chain variable domain of TCR clone 155174 (TRBV6-3, TRBJ2-7)
CASRGTANYEQYF

SEQ ID NO: 310349 - protein, 13 aa, Homo sapiens
  CDR3 for alpha chain variable domain of TCR clone 155175 (TRAV20, TRAJ34)
CTVSSYNTDKLIF

SEQ ID NO: 310350 - protein, 14 aa, Homo sapiens
  CDR3 for beta chain variable domain of TCR clone 155175 (TRBV7-9, TRBJ2-7)
CASSSFRVGYEQYF

SEQ ID NO: 310351 - protein, 14 aa, Homo sapiens
  CDR3 for alpha chain variable domain of TCR clone 155176 (TRAV12-2, TRAJ13)
CAVKKTGGYQKVTF

SEQ ID NO: 310352 - protein, 15 aa, Homo sapiens
  CDR3 for beta chain variable domain of TCR clone 155176 (TRBV27, TRBJ2-1)
CASSNGGGYYNEQFF

SEQ ID NO: 310353 - protein, 13 aa, Homo sapiens
  CDR3 for alpha chain variable domain of TCR clone 155177 (TRAV1-1, TRAJ9)
CAAKNTGCFKTIF

SEQ ID NO: 310354 - protein, 13 aa, Homo sapiens
  CDR3 for beta chain variable domain of TCR clone 155177 (TRBV7-9, TRBJ1-2)
CASSLKQNYGYTF

SEQ ID NO: 310355 - protein, 16 aa, Homo sapiens
  CDR3 for alpha chain variable domain of TCR clone 155178 (TRAV3, TRAJ37)
CAVRPHGSGNTGKLIF

SEQ ID NO: 310356 - protein, 13 aa, Homo sapiens
  CDR3 for beta chain variable domain of TCR clone 155178 (TRBV4-1, TRBJ2-2)
CASSQENTGELFF

SEQ ID NO: 310357 - protein, 17 aa, Homo sapiens
  CDR3 for alpha chain variable domain of TCR clone 155179 (TRAV29/DV5, TRAJ52)
CAASARAGGTSYGKLTF

SEQ ID NO: 310358 - protein, 16 aa, Homo sapiens
  CDR3 for beta chain variable domain of TCR clone 155179 (TRBV7-9, TRBJ1-2)
CASSLGFSSGEDGYTF

SEQ ID NO: 310359 - protein, 13 aa, Homo sapiens
  CDR3 for alpha chain variable domain of TCR clone 155180 (TRAV25, TRAJ30)
CAGRVDSDDKIIF

SEQ ID NO: 310360 - protein, 17 aa, Homo sapiens
  CDR3 for beta chain variable domain of TCR clone 155180 (TRBV7-9, TRBJ2-6)
CASSFGAGYSGANVLTF

SEQ ID NO: 310361 - protein, 17 aa, Homo sapiens
  CDR3 for alpha chain variable domain of TCR clone 155181 (TRAV4, TRAJ13)
RIVGVQGSSGGYQKVTF

SEQ ID NO: 310362 - protein, 18 aa, Homo sapiens
  CDR3 for beta chain variable domain of TCR clone 155181 (TRBV15, TRBJ2-3)
CATSRDGARSWDTDTQYF

SEQ ID NO: 310363 - protein, 16 aa, Homo sapiens
  CDR3 for alpha chain variable domain of TCR clone 155182 (TRAV26-1, TRAJ23)
CIVRPHGNNQGGTLIF

SEQ ID NO: 310364 - protein, 14 aa, Homo sapiens
  CDR3 for beta chain variable domain of TCR clone 155182 (TRBV19, TRBJ2-1)
CASPTFVLSGEQFF

SEQ ID NO: 310365 - protein, 14 aa, Homo sapiens
  CDR3 for alpha chain variable domain of TCR clone 155183 (TRAV8-1, TRAJ5)
CAVSMDTGRRALTF

SEQ ID NO: 310366 - protein, 15 aa, Homo sapiens
  CDR3 for beta chain variable domain of TCR clone 155183 (TRBV19, TRBJ2-4)
CASRGPRRAENIQYF

SEQ ID NO: 310367 - protein, 17 aa, Homo sapiens
  CDR3 for alpha chain variable domain of TCR clone 155184 (TRAV1-1, TRAJ28)
CAVDPAYSGAGSYQLTF

SEQ ID NO: 310368 - protein, 14 aa, Homo sapiens
  CDR3 for beta chain variable domain of TCR clone 155184 (TRBV19, TRBJ2-1)
CASPTFVWSGEQFF

SEQ ID NO: 310369 - protein, 14 aa, Homo sapiens
  CDR3 for alpha chain variable domain of TCR clone 155185 (TRAV40, TRAJ34)
SSGCRPCNTDKLIF

SEQ ID NO: 310370 - protein, 11 aa, Homo sapiens
  CDR3 for beta chain variable domain of TCR clone 155185 (TRBV29-1, TRBJ2-5)
CSEDRTGTQYF

SEQ ID NO: 310371 - protein, 13 aa, Homo sapiens
  CDR3 for alpha chain variable domain of TCR clone 155186 (TRAV12-1, TRAJ26)
CVVRRNYGQNFVF

SEQ ID NO: 310372 - protein, 14 aa, Homo sapiens
  CDR3 for beta chain variable domain of TCR clone 155186 (TRBV7-2, TRBJ1-6)
CASSLQGANSPLHF

SEQ ID NO: 310373 - protein, 13 aa, Homo sapiens
  CDR3 for alpha chain variable domain of TCR clone 155187 (TRAV13-1, TRAJ40)
CAVVTSGTYRYIF

SEQ ID NO: 310374 - protein, 14 aa, Homo sapiens
  CDR3 for beta chain variable domain of TCR clone 155187 (TRBV19, TRBJ2-1)
CASPTFVLSGEQFF

SEQ ID NO: 310375 - protein, 14 aa, Homo sapiens
  CDR3 for alpha chain variable domain of TCR clone 155188 (TRAV2, TRAJ9)
CAVEDRSGGVKTIF

SEQ ID NO: 310376 - protein, 13 aa, Homo sapiens
  CDR3 for beta chain variable domain of TCR clone 155188 (TRBV25-1, TRBJ1-1)
CQHPPGGNTEAFF

SEQ ID NO: 310377 - protein, 16 aa, Homo sapiens
  CDR3 for alpha chain variable domain of TCR clone 155189 (TRAV30, TRAJ24)
CGTEIVDADSWGNFQF

SEQ ID NO: 310378 - protein, 14 aa, Homo sapiens
  CDR3 for beta chain variable domain of TCR clone 155189 (TRBV12-5, TRBJ2-5)
CASGSRTHQETQSV

SEQ ID NO: 310379 - protein, 14 aa, Homo sapiens
  CDR3 for alpha chain variable domain of TCR clone 155190 (TRAV36/DV7, TRAJ32)
CAVGHVGATNNLIF

SEQ ID NO: 310380 - protein, 16 aa, Homo sapiens
  CDR3 for beta chain variable domain of TCR clone 155190 (TRBV12-4, TRBJ1-4)
CASSLKGIGHGEKLFF

SEQ ID NO: 310381 - protein, 12 aa, Homo sapiens
  CDR3 for alpha chain variable domain of TCR clone 155191 (TRAV12-3, TRAJ17)
CAMTLTGNKLTF

SEQ ID NO: 310382 - protein, 14 aa, Homo sapiens
  CDR3 for beta chain variable domain of TCR clone 155191 (TRBV20-1, TRBJ2-3)
CSAGGRRGTDTQYF

SEQ ID NO: 310383 - protein, 16 aa, Homo sapiens
  CDR3 for alpha chain variable domain of TCR clone 155192 (TRAV1-2, TRAJ10)
CAVRGVLTGGGNKLTF

SEQ ID NO: 310384 - protein, 13 aa, Homo sapiens
  CDR3 for beta chain variable domain of TCR clone 155192 (TRBV5-5, TRBJ1-2)
CASSFWRGEDYTF

SEQ ID NO: 310385 - protein, 10 aa, Homo sapiens
  CDR3 for alpha chain variable domain of TCR clone 155193 (TRAV1-2, TRAJ31)
CAFFDARLMF

SEQ ID NO: 310386 - protein, 16 aa, Homo sapiens
  CDR3 for beta chain variable domain of TCR clone 155193 (TRBV7-6, TRBJ2-3)
CASSARTSRGTDTQYF

SEQ ID NO: 310387 - protein, 13 aa, Homo sapiens
  CDR3 for alpha chain variable domain of TCR clone 155194 (TRAV12-3, TRAJ7)
CAMSASGNNRLAF

SEQ ID NO: 310388 - protein, 13 aa, Homo sapiens
  CDR3 for beta chain variable domain of TCR clone 155194 (TRBV2, TRBJ1-1)
CARNPTGGFHAFF

SEQ ID NO: 310389 - protein, 17 aa, Homo sapiens
  CDR3 for alpha chain variable domain of TCR clone 155195 (TRAV26-1, TRAJ27)
CIVSTPWINTNAGKSTF

SEQ ID NO: 310390 - protein, 17 aa, Homo sapiens
  CDR3 for beta chain variable domain of TCR clone 155195 (TRBV7-7, TRBJ1-1)
CASIGDRPNLGVTEAFF

SEQ ID NO: 310391 - protein, 17 aa, Homo sapiens
  CDR3 for alpha chain variable domain of TCR clone 155196 (TRAV3, TRAJ42)
CAVRDRDYGGSQGNLIF

SEQ ID NO: 310392 - protein, 15 aa, Homo sapiens
  CDR3 for beta chain variable domain of TCR clone 155196 (TRBV20-1, TRBJ2-2)
CSAIPGHSNTGELFF

SEQ ID NO: 310393 - protein, 14 aa, Homo sapiens
  CDR3 for alpha chain variable domain of TCR clone 155197 (TRAV1-2, TRAJ18)
CAVRGEAQPWEAIL

SEQ ID NO: 310394 - protein, 13 aa, Homo sapiens
  CDR3 for beta chain variable domain of TCR clone 155197 (TRBV20-1, TRBJ1-1)
CSARVGGNTEAFF

SEQ ID NO: 310395 - protein, 11 aa, Homo sapiens
  CDR3 for alpha chain variable domain of TCR clone 155198 (TRAV17, TRAJ9)
CGFTGGFKTIF

SEQ ID NO: 310396 - protein, 14 aa, Homo sapiens
  CDR3 for beta chain variable domain of TCR clone 155198 (TRBV7-9, TRBJ2-2)
CASSLVQDTGELCF

SEQ ID NO: 310397 - protein, 15 aa, Homo sapiens
  CDR3 for alpha chain variable domain of TCR clone 155199 (TRAV14/DV4, TRAJ12)
CAMREERDSSYKLIF

SEQ ID NO: 310398 - protein, 13 aa, Homo sapiens
  CDR3 for beta chain variable domain of TCR clone 155199 (TRBV7-9, TRBJ1-2)
CTSSLKQNYGYTF

SEQ ID NO: 310399 - protein, 12 aa, Homo sapiens
  CDR3 for alpha chain variable domain of TCR clone 155200 (TRAV13-1, TRAJ49)
CAASIRSNQFYF

SEQ ID NO: 310400 - protein, 13 aa, Homo sapiens
  CDR3 for beta chain variable domain of TCR clone 155200 (TRBV7-2, TRBJ2-4)
CASSREHANIQYF

SEQ ID NO: 310401 - protein, 18 aa, Homo sapiens
  CDR3 for alpha chain variable domain of TCR clone 155201 (TRAV29/DV5, TRAJ52)
CAAGFRDAGGTSYGKMTF

SEQ ID NO: 310402 - protein, 16 aa, Homo sapiens
  CDR3 for beta chain variable domain of TCR clone 155201 (TRBV7-3, TRBJ2-2)
CASSLKRGTLSGELFF

SEQ ID NO: 310403 - protein, 13 aa, Homo sapiens
  CDR3 for alpha chain variable domain of TCR clone 155202 (TRAV13-1, TRAJ11)
CAASIRGYSTLTF

SEQ ID NO: 310404 - protein, 17 aa, Homo sapiens
  CDR3 for beta chain variable domain of TCR clone 155202 (TRBV4-3, TRBJ1-2)
CASSSRLQAGGSVVYTF

SEQ ID NO: 310405 - protein, 15 aa, Homo sapiens
  CDR3 for alpha chain variable domain of TCR clone 155203 (TRAV3, TRAJ22)
CAVRDRGGSARPLTF

SEQ ID NO: 310406 - protein, 12 aa, Homo sapiens
  CDR3 for beta chain variable domain of TCR clone 155203 (TRBV28, TRBJ2-1)
CASSVQINEQFF

SEQ ID NO: 310407 - protein, 15 aa, Homo sapiens
  CDR3 for alpha chain variable domain of TCR clone 155204 (TRAV26-1, TRAJ29)
CIVRVEGSGDIPLVC

SEQ ID NO: 310408 - protein, 14 aa, Homo sapiens
  CDR3 for beta chain variable domain of TCR clone 155204 (TRBV18, TRBJ2-5)
CASSPGVSQETQYF

SEQ ID NO: 310409 - protein, 15 aa, Homo sapiens
  CDR3 for alpha chain variable domain of TCR clone 155205 (TRAV8-4, TRAJ8)
CALSDLNTGFQQLVF

SEQ ID NO: 310410 - protein, 14 aa, Homo sapiens
  CDR3 for beta chain variable domain of TCR clone 155205 (TRBV7-2, TRBJ2-3)
CASSQTGSSYTQYF

SEQ ID NO: 310411 - protein, 13 aa, Homo sapiens
  CDR3 for alpha chain variable domain of TCR clone 155206 (TRAV12-2, TRAJ39)
CAVNNNAGNMLTF

SEQ ID NO: 310412 - protein, 15 aa, Homo sapiens
  CDR3 for beta chain variable domain of TCR clone 155206 (TRBV6-1, TRBJ1-5)
CASSELREGNQPQHF

SEQ ID NO: 310413 - protein, 10 aa, Homo sapiens
  CDR3 for alpha chain variable domain of TCR clone 155207 (TRAV8-4, TRAJ43)
CAVSADDMRF

SEQ ID NO: 310414 - protein, 15 aa, Homo sapiens
  CDR3 for beta chain variable domain of TCR clone 155207 (TRBV5-1, TRBJ2-3)
CASSVPSGSTDTQYF

SEQ ID NO: 310415 - protein, 15 aa, Homo sapiens
  CDR3 for alpha chain variable domain of TCR clone 155208 (TRAV3, TRAJ5)
CAVRDLDPGSRALTF

SEQ ID NO: 310416 - protein, 13 aa, Homo sapiens
  CDR3 for beta chain variable domain of TCR clone 155208 (TRBV12-4, TRBJ2-7)
CASSPTETYEQYF

SEQ ID NO: 310417 - protein, 16 aa, Homo sapiens
  CDR3 for alpha chain variable domain of TCR clone 155209 (TRAV3, TRAJ37)
CAVREGTYGNTGKLIF

SEQ ID NO: 310418 - protein, 15 aa, Homo sapiens
  CDR3 for beta chain variable domain of TCR clone 155209 (TRBV6-1, TRBJ2-2)
CASIVTSGITGELFF

SEQ ID NO: 310419 - protein, 16 aa, Homo sapiens
  CDR3 for alpha chain variable domain of TCR clone 155210 (TRAV26-1, TRAJ53)
CIVRVAMGGSNYKLTF

SEQ ID NO: 310420 - protein, 16 aa, Homo sapiens
  CDR3 for beta chain variable domain of TCR clone 155210 (TRBV7-9, TRBJ2-1)
CASSDVAGGSYNEQFF

SEQ ID NO: 310421 - protein, 14 aa, Homo sapiens
  CDR3 for alpha chain variable domain of TCR clone 155211 (TRAV12-2, TRAJ36)
CAVKISTGANNLFF

SEQ ID NO: 310422 - protein, 14 aa, Homo sapiens
  CDR3 for beta chain variable domain of TCR clone 155211 (TRBV25-1, TRBJ1-2)
CASCDTTGVVGYTF

SEQ ID NO: 310423 - protein, 12 aa, Homo sapiens
  CDR3 for alpha chain variable domain of TCR clone 155212 (TRAV21, TRAJ39)
CAADNAGNMLTF

SEQ ID NO: 310424 - protein, 13 aa, Homo sapiens
  CDR3 for beta chain variable domain of TCR clone 155212 (TRBV2, TRBJ2-1)
CASTRDRNNEQFF

SEQ ID NO: 310425 - protein, 10 aa, Homo sapiens
  CDR3 for alpha chain variable domain of TCR clone 155213 (TRAV8-4, TRAJ43)
CAVSADDMRF

SEQ ID NO: 310426 - protein, 14 aa, Homo sapiens
  CDR3 for beta chain variable domain of TCR clone 155213 (TRBV6-3, TRBJ2-7)
CASGGGLPASEQYF

SEQ ID NO: 310427 - protein, 13 aa, Homo sapiens
  CDR3 for alpha chain variable domain of TCR clone 155214 (TRAV13-1, TRAJ20)
CAARVSNDYKLSF

SEQ ID NO: 310428 - protein, 12 aa, Homo sapiens
  CDR3 for beta chain variable domain of TCR clone 155214 (TRBV20-1, TRBJ2-1)
CSAGLGTDEQFF

SEQ ID NO: 310429 - protein, 15 aa, Homo sapiens
  CDR3 for alpha chain variable domain of TCR clone 155215 (TRAV38-1, TRAJ37)
CAFIHGSGNTGKLIF

SEQ ID NO: 310430 - protein, 16 aa, Homo sapiens
  CDR3 for beta chain variable domain of TCR clone 155215 (TRBV6-4, TRBJ2-3)
APSEGGRAWGTDTQYF

SEQ ID NO: 310431 - protein, 11 aa, Homo sapiens
  CDR3 for alpha chain variable domain of TCR clone 155216 (TRAV3, TRAJ32)
CAVSPKGMVVL

SEQ ID NO: 310432 - protein, 15 aa, Homo sapiens
  CDR3 for beta chain variable domain of TCR clone 155216 (TRBV7-2, TRBJ2-3)
CASSLNLRDTDTQYF

SEQ ID NO: 310433 - protein, 15 aa, Homo sapiens
  CDR3 for alpha chain variable domain of TCR clone 155217 (TRAV13-1, TRAJ3)
CSKYPGYSSASKIIF

SEQ ID NO: 310434 - protein, 12 aa, Homo sapiens
  CDR3 for beta chain variable domain of TCR clone 155217 (TRBV7-8, TRBJ2-7)
CASSLGDREQYF

SEQ ID NO: 310435 - protein, 14 aa, Homo sapiens
  CDR3 for alpha chain variable domain of TCR clone 155218 (TRAV12-1, TRAJ17)
CVVIFKAAGNKLTF

SEQ ID NO: 310436 - protein, 14 aa, Homo sapiens
  CDR3 for beta chain variable domain of TCR clone 155218 (TRBV7-9, TRBJ2-1)
CASSPRDSLYEQFF

SEQ ID NO: 310437 - protein, 14 aa, Homo sapiens
  CDR3 for alpha chain variable domain of TCR clone 155219 (TRAV1-2, TRAJ8)
CAVREDTGFQKLVF

SEQ ID NO: 310438 - protein, 11 aa, Homo sapiens
  CDR3 for beta chain variable domain of TCR clone 155219 (TRBV24-1, TRBJ2-3)
CATASTDTQYF

SEQ ID NO: 310439 - protein, 16 aa, Homo sapiens
  CDR3 for alpha chain variable domain of TCR clone 155220 (TRAV3, TRAJ10)
CAVRDMRAGGGNKLTF

SEQ ID NO: 310440 - protein, 16 aa, Homo sapiens
  CDR3 for beta chain variable domain of TCR clone 155220 (TRBV19, TRBJ2-3)
CASSPGAASRTDTQYF

SEQ ID NO: 310441 - protein, 12 aa, Homo sapiens
  CDR3 for alpha chain variable domain of TCR clone 155221 (TRAV13-1, TRAJ21)
CAAFFHFNKFYF

SEQ ID NO: 310442 - protein, 14 aa, Homo sapiens
  CDR3 for beta chain variable domain of TCR clone 155221 (TRBV4-1, TRBJ2-7)
CASRLTSGSYEQYF

SEQ ID NO: 310443 - protein, 15 aa, Homo sapiens
  CDR3 for alpha chain variable domain of TCR clone 155222 (TRAV3, TRAJ22)
CAVRDRGGSARPLTF

SEQ ID NO: 310444 - protein, 14 aa, Homo sapiens
  CDR3 for beta chain variable domain of TCR clone 155222 (TRBV4-1, TRBJ2-2)
CASSQAVNTGELFF

SEQ ID NO: 310445 - protein, 14 aa, Homo sapiens
  CDR3 for alpha chain variable domain of TCR clone 155223 (TRAV20, TRAJ22)
CAVALGGSARQLTF

SEQ ID NO: 310446 - protein, 15 aa, Homo sapiens
  CDR3 for beta chain variable domain of TCR clone 155223 (TRBV7-2, TRBJ1-1)
CASSFAGDRDTEAFC

SEQ ID NO: 310447 - protein, 14 aa, Homo sapiens
  CDR3 for alpha chain variable domain of TCR clone 155224 (TRAV4, TRAJ17)
CLVGDMAAGNKLTF

SEQ ID NO: 310448 - protein, 13 aa, Homo sapiens
  CDR3 for beta chain variable domain of TCR clone 155224 (TRBV18, TRBJ2-7)
CPSQSGGGYEQYF

SEQ ID NO: 310449 - protein, 13 aa, Homo sapiens
  CDR3 for alpha chain variable domain of TCR clone 155225 (TRAV2, TRAJ40)
CAVVTSGTYKYIF

SEQ ID NO: 310450 - protein, 13 aa, Homo sapiens
  CDR3 for beta chain variable domain of TCR clone 155225 (TRBV12-4, TRBJ2-5)
CASSLQGRETQYF

SEQ ID NO: 310451 - protein, 15 aa, Homo sapiens
  CDR3 for alpha chain variable domain of TCR clone 155226 (TRAV12-3, TRAJ22)
CAMRSSSGSARQLTF

SEQ ID NO: 310452 - protein, 18 aa, Homo sapiens
  CDR3 for beta chain variable domain of TCR clone 155226 (TRBV27, TRBJ2-1)
CASRRSGRGGSSGNEQFF

SEQ ID NO: 310453 - protein, 14 aa, Homo sapiens
  CDR3 for alpha chain variable domain of TCR clone 155227 (TRAV38-1, TRAJ40)
CALRPTSGTYKYIF

SEQ ID NO: 310454 - protein, 14 aa, Homo sapiens
  CDR3 for beta chain variable domain of TCR clone 155227 (TRBV19, TRBJ2-1)
CASPSFVLSGEQFF

SEQ ID NO: 310455 - protein, 14 aa, Homo sapiens
  CDR3 for alpha chain variable domain of TCR clone 155228 (TRAV26-1, TRAJ38)
CIADNAGNNHIQTP

SEQ ID NO: 310456 - protein, 13 aa, Homo sapiens
  CDR3 for beta chain variable domain of TCR clone 155228 (TRBV20-1, TRBJ1-1)
CSARGGGNTEAFF

SEQ ID NO: 310457 - protein, 14 aa, Homo sapiens
  CDR3 for alpha chain variable domain of TCR clone 155229 (TRAV12-2, TRAJ13)
CAVHPSGGYQKVTF

SEQ ID NO: 310458 - protein, 13 aa, Homo sapiens
  CDR3 for beta chain variable domain of TCR clone 155229 (TRBV20-1, TRBJ1-6)
CSAKLGGTSPLHF

SEQ ID NO: 310459 - protein, 14 aa, Homo sapiens
  CDR3 for alpha chain variable domain of TCR clone 155230 (TRAV38-1, TRAJ43)
CAFMKHNNNNGMRF

SEQ ID NO: 310460 - protein, 17 aa, Homo sapiens
  CDR3 for beta chain variable domain of TCR clone 155230 (TRBV7-7, TRBJ1-4)
CASSLVGQGASNEKLFF

SEQ ID NO: 310461 - protein, 14 aa, Homo sapiens
  CDR3 for alpha chain variable domain of TCR clone 155231 (TRAV2, TRAJ37)
CAVDFTSNTGQLIF

SEQ ID NO: 310462 - protein, 16 aa, Homo sapiens
  CDR3 for beta chain variable domain of TCR clone 155231 (TRBV7-9, TRBJ1-2)
CASSLGFSSGEDGYTF

SEQ ID NO: 310463 - protein, 16 aa, Homo sapiens
  CDR3 for alpha chain variable domain of TCR clone 155232 (TRAV3, TRAJ10)
CAVRDMRAGGGNKLTF

SEQ ID NO: 310464 - protein, 14 aa, Homo sapiens
  CDR3 for beta chain variable domain of TCR clone 155232 (TRBV4-3, TRBJ2-2)
CASSPGGVNGELFF

SEQ ID NO: 310465 - protein, 13 aa, Homo sapiens
  CDR3 for alpha chain variable domain of TCR clone 155233 (TRAV3, TRAJ15)
CAVRDQAGTALIF

SEQ ID NO: 310466 - protein, 16 aa, Homo sapiens
  CDR3 for beta chain variable domain of TCR clone 155233 (TRBV3-1, TRBJ1-5)
CASSQEFGQGNQPQHF

SEQ ID NO: 310467 - protein, 15 aa, Homo sapiens
  CDR3 for alpha chain variable domain of TCR clone 155234 (TRAV26-1, TRAJ21)
CIVRVPNYNLNKLYF

SEQ ID NO: 310468 - protein, 16 aa, Homo sapiens
  CDR3 for beta chain variable domain of TCR clone 155234 (TRBV7-9, TRBJ2-3)
CASSLQGNPGTDTQYF

SEQ ID NO: 310469 - protein, 13 aa, Homo sapiens
  CDR3 for alpha chain variable domain of TCR clone 155235 (TRAV12-1, TRAJ12)
CVVNIESSYKLIF

SEQ ID NO: 310470 - protein, 15 aa, Homo sapiens
  CDR3 for beta chain variable domain of TCR clone 155235 (TRBV2, TRBJ2-5)
CASSSSVAGGETQYL

SEQ ID NO: 310471 - protein, 12 aa, Homo sapiens
  CDR3 for alpha chain variable domain of TCR clone 155236 (TRAV13-1, TRAJ21)
CAAKEGSNKFYF

SEQ ID NO: 310472 - protein, 18 aa, Homo sapiens
  CDR3 for beta chain variable domain of TCR clone 155236 (TRBV20-1, TRBJ2-6)
CSAETTPTHGSGANVLTF

SEQ ID NO: 310473 - protein, 10 aa, Homo sapiens
  CDR3 for alpha chain variable domain of TCR clone 155237 (TRAV12-1, TRAJ49)
CVVNPNQFYF

SEQ ID NO: 310474 - protein, 18 aa, Homo sapiens
  CDR3 for beta chain variable domain of TCR clone 155237 (TRBV7-9, TRBJ2-7)
CASSLTTSGSRTWYEQYF

SEQ ID NO: 310475 - protein, 16 aa, Homo sapiens
  CDR3 for alpha chain variable domain of TCR clone 155238 (TRAV30, TRAJ24)
CGTEIVDADSWGKFQV

SEQ ID NO: 310476 - protein, 15 aa, Homo sapiens
  CDR3 for beta chain variable domain of TCR clone 155238 (TRBV5-1, TRBJ2-7)
CASSLNGGPAREQYF

SEQ ID NO: 310477 - protein, 15 aa, Homo sapiens
  CDR3 for alpha chain variable domain of TCR clone 155239 (TRAV4, TRAJ39)
CLVGPNNNAGNMLTF

SEQ ID NO: 310478 - protein, 13 aa, Homo sapiens
  CDR3 for beta chain variable domain of TCR clone 155239 (TRBV7-6, TRBJ2-7)
CASSLDHTHEQYF

SEQ ID NO: 310479 - protein, 15 aa, Homo sapiens
  CDR3 for alpha chain variable domain of TCR clone 155240 (TRAV27, TRAJ38)
RAARRNAGNNRKLIW

SEQ ID NO: 310480 - protein, 13 aa, Homo sapiens
  CDR3 for beta chain variable domain of TCR clone 155240 (TRBV20-1, TRBJ1-5)
CSARTGVNQPQHF

SEQ ID NO: 310481 - protein, 14 aa, Homo sapiens
  CDR3 for alpha chain variable domain of TCR clone 155241 (TRAV13-1, TRAJ30)
CAASPQNRDDKIIF

SEQ ID NO: 310482 - protein, 16 aa, Homo sapiens
  CDR3 for beta chain variable domain of TCR clone 155241 (TRBV13, TRBJ2-2)
CASSPRTGEHTGELFF

SEQ ID NO: 310483 - protein, 11 aa, Homo sapiens
  CDR3 for alpha chain variable domain of TCR clone 155242 (TRAV21, TRAJ48)
CAVDGNEKLTF

SEQ ID NO: 310484 - protein, 16 aa, Homo sapiens
  CDR3 for beta chain variable domain of TCR clone 155242 (TRBV19, TRBJ2-1)
CGSSSKGTRSYNEQFF

SEQ ID NO: 310485 - protein, 11 aa, Homo sapiens
  CDR3 for alpha chain variable domain of TCR clone 155243 (TRAV17, TRAJ9)
CATTGGFKTIF

SEQ ID NO: 310486 - protein, 13 aa, Homo sapiens
  CDR3 for beta chain variable domain of TCR clone 155243 (TRBV7-9, TRBJ2-7)
CASSFYGSYEQYF

SEQ ID NO: 310487 - protein, 14 aa, Homo sapiens
  CDR3 for alpha chain variable domain of TCR clone 155244 (TRAV17, TRAJ54)
CATDANQGAQKLVF

SEQ ID NO: 310488 - protein, 11 aa, Homo sapiens
  CDR3 for beta chain variable domain of TCR clone 155244 (TRBV12-4, TRBJ1-2)
CASRGDRGYTF

SEQ ID NO: 310489 - protein, 15 aa, Homo sapiens
  CDR3 for alpha chain variable domain of TCR clone 155245 (TRAV3, TRAJ13)
CAVRDIGGGYQKVTF

SEQ ID NO: 310490 - protein, 18 aa, Homo sapiens
  CDR3 for beta chain variable domain of TCR clone 155245 (TRBV10-1, TRBJ2-1)
CASSWVGGALFSTMSSSS

SEQ ID NO: 310491 - protein, 11 aa, Homo sapiens
  CDR3 for alpha chain variable domain of TCR clone 155246 (TRAV12-3, TRAJ27)
CAMANAGKSTF

SEQ ID NO: 310492 - protein, 15 aa, Homo sapiens
  CDR3 for beta chain variable domain of TCR clone 155246 (TRBV19, TRBJ1-1)
CASTSGQIQNTEAFF

SEQ ID NO: 310493 - protein, 13 aa, Homo sapiens
  CDR3 for alpha chain variable domain of TCR clone 155247 (TRAV21, TRAJ26)
CATEDNYGQNFVF

SEQ ID NO: 310494 - protein, 14 aa, Homo sapiens
  CDR3 for beta chain variable domain of TCR clone 155247 (TRBV7-2, TRBJ2-7)
CASSPKTSFYEQYF

SEQ ID NO: 310495 - protein, 14 aa, Homo sapiens
  CDR3 for alpha chain variable domain of TCR clone 155248 (TRAV26-1, TRAJ38)
CIAVNAGNNRKLIW

SEQ ID NO: 310496 - protein, 15 aa, Homo sapiens
  CDR3 for beta chain variable domain of TCR clone 155248 (TRBV4-1, TRBJ1-1)
CASSQEWGHYTEAFF

SEQ ID NO: 310497 - protein, 14 aa, Homo sapiens
  CDR3 for alpha chain variable domain of TCR clone 155249 (TRAV13-1, TRAJ35)
CQQVKEALGMCCIA

SEQ ID NO: 310498 - protein, 13 aa, Homo sapiens
  CDR3 for beta chain variable domain of TCR clone 155249 (TRBV7-3, TRBJ1-1)
CASSQDWGAEAFF

SEQ ID NO: 310499 - protein, 17 aa, Homo sapiens
  CDR3 for alpha chain variable domain of TCR clone 155250 (TRAV13-1, TRAJ28)
CSASPPYSGAGSYQPTF

SEQ ID NO: 310500 - protein, 14 aa, Homo sapiens
  CDR3 for beta chain variable domain of TCR clone 155250 (TRBV24-1, TRBJ1-1)
CATSIPRGDTEAFF

SEQ ID NO: 310501 - protein, 11 aa, Homo sapiens
  CDR3 for alpha chain variable domain of TCR clone 155251 (TRAV3, TRAJ21)
CAMGNFNKFYF

SEQ ID NO: 310502 - protein, 13 aa, Homo sapiens
  CDR3 for beta chain variable domain of TCR clone 155251 (TRBV20-1, TRBJ2-2)
CSASAAGTGELFF

SEQ ID NO: 310503 - protein, 12 aa, Homo sapiens
  CDR3 for alpha chain variable domain of TCR clone 155252 (TRAV27, TRAJ34)
CAGAKNTDKLIF

SEQ ID NO: 310504 - protein, 15 aa, Homo sapiens
  CDR3 for beta chain variable domain of TCR clone 155252 (TRBV6-5, TRBJ2-1)
CASSYDAGAGNEQFF

SEQ ID NO: 310505 - protein, 14 aa, Homo sapiens
  CDR3 for alpha chain variable domain of TCR clone 155253 (TRAV12-3, TRAJ42)
CAMNYGGSQGNLIF

SEQ ID NO: 310506 - protein, 15 aa, Homo sapiens
  CDR3 for beta chain variable domain of TCR clone 155253 (TRBV7-3, TRBJ2-1)
CQQLQTSGRYNEQFF

SEQ ID NO: 310507 - protein, 18 aa, Homo sapiens
  CDR3 for alpha chain variable domain of TCR clone 155254 (TRAV12-2, )
CAVEVIQNPDPAVYQLRD

SEQ ID NO: 310508 - protein, 16 aa, Homo sapiens
  CDR3 for beta chain variable domain of TCR clone 155254 (TRBV6-1, TRBJ1-2)
CASSGAWQGRSHGYTF

SEQ ID NO: 310509 - protein, 10 aa, Homo sapiens
  CDR3 for alpha chain variable domain of TCR clone 155255 (TRAV23/DV6, TRAJ31)
CARGGARLMF

SEQ ID NO: 310510 - protein, 14 aa, Homo sapiens
  CDR3 for beta chain variable domain of TCR clone 155255 (TRBV7-8, TRBJ1-2)
CASSPDSLTYGYTF

SEQ ID NO: 310511 - protein, 16 aa, Homo sapiens
  CDR3 for alpha chain variable domain of TCR clone 155256 (TRAV3, TRAJ4)
CAVRAFFSGGYNKLIF

SEQ ID NO: 310512 - protein, 16 aa, Homo sapiens
  CDR3 for beta chain variable domain of TCR clone 155256 (TRBV20-1, TRBJ2-2)
CSARDRASGLTGELFF

SEQ ID NO: 310513 - protein, 14 aa, Homo sapiens
  CDR3 for alpha chain variable domain of TCR clone 155257 (TRAV21, TRAJ15)
CAVSLNQAGTALIF

SEQ ID NO: 310514 - protein, 11 aa, Homo sapiens
  CDR3 for beta chain variable domain of TCR clone 155257 (TRBV20-1, TRBJ2-7)
GSARTSYEQYF

SEQ ID NO: 310515 - protein, 14 aa, Homo sapiens
  CDR3 for alpha chain variable domain of TCR clone 155258 (TRAV1-1, TRAJ27)
CAVIYNTNAGKSTF

SEQ ID NO: 310516 - protein, 16 aa, Homo sapiens
  CDR3 for beta chain variable domain of TCR clone 155258 (TRBV7-2, TRBJ2-1)
CASSLVAGAGYNEQFF

SEQ ID NO: 310517 - protein, 16 aa, Homo sapiens
  CDR3 for alpha chain variable domain of TCR clone 155259 (TRAV16, TRAJ42)
CALCGLLGGSQGNLIF

SEQ ID NO: 310518 - protein, 15 aa, Homo sapiens
  CDR3 for beta chain variable domain of TCR clone 155259 (TRBV5-1, TRBJ2-1)
CASSPGGLAGNEQFF

SEQ ID NO: 310519 - protein, 19 aa, Homo sapiens
  CDR3 for alpha chain variable domain of TCR clone 155260 (TRAV13-1, TRAJ52)
CAASPYQNAGGTSYGKLTF

SEQ ID NO: 310520 - protein, 14 aa, Homo sapiens
  CDR3 for beta chain variable domain of TCR clone 155260 (TRBV19, TRBJ2-7)
CASTVQGRPYEHYF

SEQ ID NO: 310521 - protein, 14 aa, Homo sapiens
  CDR3 for alpha chain variable domain of TCR clone 155261 (TRAV12-2, TRAJ44)
CAVNKAGTASKLTF

SEQ ID NO: 310522 - protein, 15 aa, Homo sapiens
  CDR3 for beta chain variable domain of TCR clone 155261 (TRBV6-1, TRBJ2-1)
CASSELRGQYNEQFF

SEQ ID NO: 310523 - protein, 14 aa, Homo sapiens
  CDR3 for alpha chain variable domain of TCR clone 155262 (TRAV1-2, TRAJ17)
CALRRGAAGNKLTF

SEQ ID NO: 310524 - protein, 14 aa, Homo sapiens
  CDR3 for beta chain variable domain of TCR clone 155262 (TRBV7-2, TRBJ2-7)
CSSSLYPGRYEQYF

SEQ ID NO: 310525 - protein, 12 aa, Homo sapiens
  CDR3 for alpha chain variable domain of TCR clone 155263 (TRAV27, TRAJ41)
CAGRNYGYALNF

SEQ ID NO: 310526 - protein, 15 aa, Homo sapiens
  CDR3 for beta chain variable domain of TCR clone 155263 (TRBV20-1, TRBJ1-5)
CSATSDRGLGQPQHF

SEQ ID NO: 310527 - protein, 15 aa, Homo sapiens
  CDR3 for alpha chain variable domain of TCR clone 155264 (TRAV35, TRAJ23)
CAGPLGNNQGGKLIF

SEQ ID NO: 310528 - protein, 14 aa, Homo sapiens
  CDR3 for beta chain variable domain of TCR clone 155264 (TRBV7-9, TRBJ1-1)
CASAPLQSYTEAFF

SEQ ID NO: 310529 - protein, 14 aa, Homo sapiens
  CDR3 for alpha chain variable domain of TCR clone 155265 (TRAV12-2, TRAJ11)
CAVNRESGYSTLTF

SEQ ID NO: 310530 - protein, 10 aa, Homo sapiens
  CDR3 for beta chain variable domain of TCR clone 155265 (TRBV20-1, TRBJ2-5)
CSARFETLYF

SEQ ID NO: 310531 - protein, 13 aa, Homo sapiens
  CDR3 for alpha chain variable domain of TCR clone 155266 (TRAV12-1, TRAJ34)
CVVNNWDTDKPIF

SEQ ID NO: 310532 - protein, 15 aa, Homo sapiens
  CDR3 for beta chain variable domain of TCR clone 155266 (TRBV2, TRBJ1-2)
CASSARRGANYGYTF

SEQ ID NO: 310533 - protein, 11 aa, Homo sapiens
  CDR3 for alpha chain variable domain of TCR clone 155267 (TRAV29/DV5, TRAJ31)
CAASYSDRLMF

SEQ ID NO: 310534 - protein, 19 aa, Homo sapiens
  CDR3 for beta chain variable domain of TCR clone 155267 (TRBV19, TRBJ2-5)
CASSIGQVTDFFLGETQYF

SEQ ID NO: 310535 - protein, 14 aa, Homo sapiens
  CDR3 for alpha chain variable domain of TCR clone 155268 (TRAV2, TRAJ9)
CAVEDRSGGFKTIF

SEQ ID NO: 310536 - protein, 13 aa, Homo sapiens
  CDR3 for beta chain variable domain of TCR clone 155268 (TRBV3-1, TRBJ1-5)
YAITRRDGQPQHF

SEQ ID NO: 310537 - protein, 18 aa, Homo sapiens
  CDR3 for alpha chain variable domain of TCR clone 155269 (TRAV26-1, TRAJ52)
CIVRVEGAGGTSYGKQTF

SEQ ID NO: 310538 - protein, 13 aa, Homo sapiens
  CDR3 for beta chain variable domain of TCR clone 155269 (TRBV7-3, TRBJ1-1)
CASSLGANTEAFF

SEQ ID NO: 310539 - protein, 15 aa, Homo sapiens
  CDR3 for alpha chain variable domain of TCR clone 155270 (TRAV30, TRAJ32)
CGTEILGGAANKLIF

SEQ ID NO: 310540 - protein, 17 aa, Homo sapiens
  CDR3 for beta chain variable domain of TCR clone 155270 (TRBV5-4, TRBJ2-1)
CASSSAGGRGPYNEQFF

SEQ ID NO: 310541 - protein, 14 aa, Homo sapiens
  CDR3 for alpha chain variable domain of TCR clone 155271 (TRAV21, TRAJ15)
CAVSLNHAGTALIF

SEQ ID NO: 310542 - protein, 11 aa, Homo sapiens
  CDR3 for beta chain variable domain of TCR clone 155271 (TRBV20-1, TRBJ2-7)
CSARTSYEQYF

SEQ ID NO: 310543 - protein, 17 aa, Homo sapiens
  CDR3 for alpha chain variable domain of TCR clone 155272 (TRAV3, TRAJ42)
CAVRDRDYGGSQGNLIL

SEQ ID NO: 310544 - protein, 15 aa, Homo sapiens
  CDR3 for beta chain variable domain of TCR clone 155272 (TRBV3-1, TRBJ2-1)
CASSQVVDDGEEQFF

SEQ ID NO: 310545 - protein, 11 aa, Homo sapiens
  CDR3 for alpha chain variable domain of TCR clone 155273 (TRAV12-3, TRAJ43)
CAMIVSNDMRF

SEQ ID NO: 310546 - protein, 13 aa, Homo sapiens
  CDR3 for beta chain variable domain of TCR clone 155273 (TRBV20-1, TRBJ1-1)
CSAPLGGGTEAFF

SEQ ID NO: 310547 - protein, 15 aa, Homo sapiens
  CDR3 for alpha chain variable domain of TCR clone 155274 (TRAV3, TRAJ13)
CAVRVYSGGYQKVTF

SEQ ID NO: 310548 - protein, 15 aa, Homo sapiens
  CDR3 for beta chain variable domain of TCR clone 155274 (TRBV5-7, TRBJ1-2)
CASSLGVAANDGYTF

SEQ ID NO: 310549 - protein, 18 aa, Homo sapiens
  CDR3 for alpha chain variable domain of TCR clone 155275 (TRAV26-2, TRAJ45)
CILRVDKYSGGGADGLTF

SEQ ID NO: 310550 - protein, 16 aa, Homo sapiens
  CDR3 for beta chain variable domain of TCR clone 155275 (TRBV7-9, TRBJ2-1)
CASSDVAGGSYNEQFF

SEQ ID NO: 310551 - protein, 13 aa, Homo sapiens
  CDR3 for alpha chain variable domain of TCR clone 155276 (TRAV26-2, TRAJ43)
CILRAVNNNEMRF

SEQ ID NO: 310552 - protein, 17 aa, Homo sapiens
  CDR3 for beta chain variable domain of TCR clone 155276 (TRBV20-1, TRBJ2-2)
CSASGSGQGGLTGELFF

SEQ ID NO: 310553 - protein, 13 aa, Homo sapiens
  CDR3 for alpha chain variable domain of TCR clone 155277 (TRAV35, TRAJ43)
CAGYPYNNNDRRF

SEQ ID NO: 310554 - protein, 15 aa, Homo sapiens
  CDR3 for beta chain variable domain of TCR clone 155277 (TRBV25-1, TRBJ1-4)
CASSKRIATNEKLFF

SEQ ID NO: 310555 - protein, 11 aa, Homo sapiens
  CDR3 for alpha chain variable domain of TCR clone 155278 (TRAV13-1, TRAJ15)
CAATPGTALIF

SEQ ID NO: 310556 - protein, 17 aa, Homo sapiens
  CDR3 for beta chain variable domain of TCR clone 155278 (TRBV13, TRBJ2-3)
CASTLSRVAGGRNTQYF

SEQ ID NO: 310557 - protein, 13 aa, Homo sapiens
  CDR3 for alpha chain variable domain of TCR clone 155279 (TRAV36/DV7, TRAJ49)
CAGDSNTGNQFYF

SEQ ID NO: 310558 - protein, 14 aa, Homo sapiens
  CDR3 for beta chain variable domain of TCR clone 155279 (TRBV10-1, TRBJ2-2)
CASTSGQNTGELFF

SEQ ID NO: 310559 - protein, 18 aa, Homo sapiens
  CDR3 for alpha chain variable domain of TCR clone 155280 (TRAV21, TRAJ52)
CAVRPSPAGGTSYGKPTF

SEQ ID NO: 310560 - protein, 15 aa, Homo sapiens
  CDR3 for beta chain variable domain of TCR clone 155280 (TRBV6-6, TRBJ2-7)
CASSYSYGGSYEQYF

SEQ ID NO: 310561 - protein, 12 aa, Homo sapiens
  CDR3 for alpha chain variable domain of TCR clone 155281 (TRAV12-3, TRAJ17)
FAMTPTGNKLTF

SEQ ID NO: 310562 - protein, 15 aa, Homo sapiens
  CDR3 for beta chain variable domain of TCR clone 155281 (TRBV20-1, TRBJ2-7)
CSARDRVSGMDEQYF

SEQ ID NO: 310563 - protein, 13 aa, Homo sapiens
  CDR3 for alpha chain variable domain of TCR clone 155282 (TRAV17, TRAJ5)
CALRGTSRRALTF

SEQ ID NO: 310564 - protein, 14 aa, Homo sapiens
  CDR3 for beta chain variable domain of TCR clone 155282 (TRBV25-1, TRBJ1-2)
CASSEAGTAYGYTF

SEQ ID NO: 310565 - protein, 12 aa, Homo sapiens
  CDR3 for alpha chain variable domain of TCR clone 155283 (TRAV13-1, TRAJ11)
CAGPSGYSTLTF

SEQ ID NO: 310566 - protein, 15 aa, Homo sapiens
  CDR3 for beta chain variable domain of TCR clone 155283 (TRBV12-4, TRBJ2-1)
CASSLSTGVSNEQFF

SEQ ID NO: 310567 - protein, 13 aa, Homo sapiens
  CDR3 for alpha chain variable domain of TCR clone 155284 (TRAV12-3, TRAJ54)
CAMTLQGAQKLVF

SEQ ID NO: 310568 - protein, 13 aa, Homo sapiens
  CDR3 for beta chain variable domain of TCR clone 155284 (TRBV10-3, TRBJ2-7)
CASKLAVNYEQYF

SEQ ID NO: 310569 - protein, 14 aa, Homo sapiens
  CDR3 for alpha chain variable domain of TCR clone 155285 (TRAV30, TRAJ26)
CGTEIVSYGQNFVF

SEQ ID NO: 310570 - protein, 15 aa, Homo sapiens
  CDR3 for beta chain variable domain of TCR clone 155285 (TRBV19, TRBJ2-4)
CASRGPRRGENIQYF

SEQ ID NO: 310571 - protein, 12 aa, Homo sapiens
  CDR3 for alpha chain variable domain of TCR clone 155286 (TRAV25, TRAJ11)
CAGASGYSTLTF

SEQ ID NO: 310572 - protein, 16 aa, Homo sapiens
  CDR3 for beta chain variable domain of TCR clone 155286 (TRBV15, TRBJ1-2)
CATSRGPRTGGGGHTF

SEQ ID NO: 310573 - protein, 13 aa, Homo sapiens
  CDR3 for alpha chain variable domain of TCR clone 155287 (TRAV20, TRAJ40)
CAVPFSGTYKYIF

SEQ ID NO: 310574 - protein, 13 aa, Homo sapiens
  CDR3 for beta chain variable domain of TCR clone 155287 (TRBV15, TRBJ2-5)
CDTSKIGEETQYF

SEQ ID NO: 310575 - protein, 14 aa, Homo sapiens
  CDR3 for alpha chain variable domain of TCR clone 155288 (TRAV29/DV5, TRAJ48)
CAAMALFGNEKLTF

SEQ ID NO: 310576 - protein, 14 aa, Homo sapiens
  CDR3 for beta chain variable domain of TCR clone 155288 (TRBV18, TRBJ2-7)
CASSPRGGAYEQYF

SEQ ID NO: 310577 - protein, 23 aa, Homo sapiens
  CDR3 for alpha chain variable domain of TCR clone 155289 (TRAV26-1, TRAJ38)
CIADNAGNNHIQNHDPAVYQLRD

SEQ ID NO: 310578 - protein, 13 aa, Homo sapiens
  CDR3 for beta chain variable domain of TCR clone 155289 (TRBV20-1, TRBJ2-1)
CSARSSPRDEQFF

SEQ ID NO: 310579 - protein, 17 aa, Homo sapiens
  CDR3 for alpha chain variable domain of TCR clone 155290 (TRAV14/DV4, TRAJ28)
CAMREVSSGAGRYQLTF

SEQ ID NO: 310580 - protein, 13 aa, Homo sapiens
  CDR3 for beta chain variable domain of TCR clone 155290 (TRBV7-9, TRBJ1-2)
CASSLKQNYGYTF

SEQ ID NO: 310581 - protein, 12 aa, Homo sapiens
  CDR3 for alpha chain variable domain of TCR clone 155291 (TRAV2, TRAJ10)
CASTGGGNKLTI

SEQ ID NO: 310582 - protein, 14 aa, Homo sapiens
  CDR3 for beta chain variable domain of TCR clone 155291 (TRBV7-2, TRBJ2-2)
CASRGQGAAGELFF

SEQ ID NO: 310583 - protein, 11 aa, Homo sapiens
  CDR3 for alpha chain variable domain of TCR clone 155292 (TRAV27, TRAJ52)
CAGAVAGVTSY

SEQ ID NO: 310584 - protein, 17 aa, Homo sapiens
  CDR3 for beta chain variable domain of TCR clone 155292 (TRBV24-1, TRBJ2-3)
CATSDLPSGEDTDTQYF

SEQ ID NO: 310585 - protein, 16 aa, Homo sapiens
  CDR3 for alpha chain variable domain of TCR clone 155293 (TRAV30, TRAJ24)
CGTEIVDADSWGKFQF

SEQ ID NO: 310586 - protein, 13 aa, Homo sapiens
  CDR3 for beta chain variable domain of TCR clone 155293 (TRBV7-9, TRBJ1-2)
CASSLKQNCGYTF

SEQ ID NO: 310587 - protein, 14 aa, Homo sapiens
  CDR3 for alpha chain variable domain of TCR clone 155294 (TRAV25, TRAJ45)
CAGNSGGGADGPTF

SEQ ID NO: 310588 - protein, 14 aa, Homo sapiens
  CDR3 for beta chain variable domain of TCR clone 155294 (TRBV29-1, TRBJ1-2)
CSARRGTQTSGYTF

SEQ ID NO: 310589 - protein, 14 aa, Homo sapiens
  CDR3 for alpha chain variable domain of TCR clone 155295 (TRAV12-3, TRAJ6)
CAMSATGGSYIPTF

SEQ ID NO: 310590 - protein, 15 aa, Homo sapiens
  CDR3 for beta chain variable domain of TCR clone 155295 (TRBV7-2, TRBJ2-1)
CASTHGTGIYNEQFF

SEQ ID NO: 310591 - protein, 23 aa, Homo sapiens
  CDR3 for alpha chain variable domain of TCR clone 155296 (TRAV1-2, TRAJ26)
CAVRDLITMVRILSLVPEPDCPF

SEQ ID NO: 310592 - protein, 11 aa, Homo sapiens
  CDR3 for beta chain variable domain of TCR clone 155296 (TRBV29-1, TRBJ2-5)
CSEDRTGTQYF

SEQ ID NO: 310593 - protein, 13 aa, Homo sapiens
  CDR3 for alpha chain variable domain of TCR clone 155297 (TRAV35, TRAJ22)
CAGLSGSARQLTF

SEQ ID NO: 310594 - protein, 16 aa, Homo sapiens
  CDR3 for beta chain variable domain of TCR clone 155297 (TRBV7-9, TRBJ2-1)
CASSLVLAGQGNEQFF

SEQ ID NO: 310595 - protein, 14 aa, Homo sapiens
  CDR3 for alpha chain variable domain of TCR clone 155298 (TRAV1-2, TRAJ16)
CTVNRFSDGQKLLF

SEQ ID NO: 310596 - protein, 13 aa, Homo sapiens
  CDR3 for beta chain variable domain of TCR clone 155298 (TRBV7-9, TRBJ1-2)
CASSLKQNYGYTF

SEQ ID NO: 310597 - protein, 14 aa, Homo sapiens
  CDR3 for alpha chain variable domain of TCR clone 155299 (TRAV20, TRAJ20)
CAVRRGNNDYKPSF

SEQ ID NO: 310598 - protein, 13 aa, Homo sapiens
  CDR3 for beta chain variable domain of TCR clone 155299 (TRBV19, TRBJ2-5)
CASSETAPETQYF

SEQ ID NO: 310599 - protein, 11 aa, Homo sapiens
  CDR3 for alpha chain variable domain of TCR clone 155300 (TRAV1-1, TRAJ23)
CAVRQGGRLIF

SEQ ID NO: 310600 - protein, 20 aa, Homo sapiens
  CDR3 for beta chain variable domain of TCR clone 155300 (TRBV7-8, TRBJ2-2)
CASSHLFTGPTIHITGELFF

SEQ ID NO: 310601 - protein, 14 aa, Homo sapiens
  CDR3 for alpha chain variable domain of TCR clone 155301 (TRAV8-6, TRAJ48)
CAVISNFGNEKLTF

SEQ ID NO: 310602 - protein, 14 aa, Homo sapiens
  CDR3 for beta chain variable domain of TCR clone 155301 (TRBV4-1, TRBJ1-5)
CASSQGPTNQPQHF

SEQ ID NO: 310603 - protein, 16 aa, Homo sapiens
  CDR3 for alpha chain variable domain of TCR clone 155302 (TRAV30, TRAJ24)
CGPEIVAADSWGKFQF

SEQ ID NO: 310604 - protein, 14 aa, Homo sapiens
  CDR3 for beta chain variable domain of TCR clone 155302 (TRBV12-5, TRBJ2-5)
CASGSRTHQETQYF

SEQ ID NO: 310605 - protein, 13 aa, Homo sapiens
  CDR3 for alpha chain variable domain of TCR clone 155303 (TRAV27, TRAJ29)
CTGAHSGNTPLVF

SEQ ID NO: 310606 - protein, 14 aa, Homo sapiens
  CDR3 for beta chain variable domain of TCR clone 155303 (TRBV7-9, TRBJ2-7)
CASSIGQGAGEQYF

SEQ ID NO: 310607 - protein, 14 aa, Homo sapiens
  CDR3 for alpha chain variable domain of TCR clone 155304 (TRAV1-2, TRAJ8)
CAVREDTGFRKLVF

SEQ ID NO: 310608 - protein, 13 aa, Homo sapiens
  CDR3 for beta chain variable domain of TCR clone 155304 (TRBV12-5, TRBJ2-3)
CASGDRQSDTQYF

SEQ ID NO: 310609 - protein, 15 aa, Homo sapiens
  CDR3 for alpha chain variable domain of TCR clone 155305 (TRAV25, TRAJ52)
CAGRPGGTSYGKLTF

SEQ ID NO: 310610 - protein, 15 aa, Homo sapiens
  CDR3 for beta chain variable domain of TCR clone 155305 (TRBV11-3, TRBJ2-3)
CASLKDGREGDTQYF

SEQ ID NO: 310611 - protein, 14 aa, Homo sapiens
  CDR3 for alpha chain variable domain of TCR clone 155306 (TRAV8-1, TRAJ5)
CAVSMDTGRRALTF

SEQ ID NO: 310612 - protein, 12 aa, Homo sapiens
  CDR3 for beta chain variable domain of TCR clone 155306 (TRBV11-2, TRBJ2-2)
CASSLPTGELFF

SEQ ID NO: 310613 - protein, 12 aa, Homo sapiens
  CDR3 for alpha chain variable domain of TCR clone 155307 (TRAV8-3, TRAJ26)
CAGDNYCQNFVF

SEQ ID NO: 310614 - protein, 15 aa, Homo sapiens
  CDR3 for beta chain variable domain of TCR clone 155307 (TRBV12-4, TRBJ2-1)
CASSLSGGASNEQFF

SEQ ID NO: 310615 - protein, 12 aa, Homo sapiens
  CDR3 for alpha chain variable domain of TCR clone 155308 (TRAV12-3, TRAJ17)
CAMTLTGNKLTF

SEQ ID NO: 310616 - protein, 17 aa, Homo sapiens
  CDR3 for beta chain variable domain of TCR clone 155308 (TRBV11-2, TRBJ2-1)
CASSLYPPGVVYNEQLF

SEQ ID NO: 310617 - protein, 10 aa, Homo sapiens
  CDR3 for alpha chain variable domain of TCR clone 155309 (TRAV23/DV6, TRAJ57)
CAASSTLSQG

SEQ ID NO: 310618 - protein, 14 aa, Homo sapiens
  CDR3 for beta chain variable domain of TCR clone 155309 (TRBV25-1, TRBJ1-1)
CASTHLGGNTEAYF

SEQ ID NO: 310619 - protein, 13 aa, Homo sapiens
  CDR3 for alpha chain variable domain of TCR clone 155310 (TRAV13-1, TRAJ43)
CAASKNNNNDMRL

SEQ ID NO: 310620 - protein, 13 aa, Homo sapiens
  CDR3 for beta chain variable domain of TCR clone 155310 (TRBV4-2, TRBJ1-1)
CASSQAGNTEAFF

SEQ ID NO: 310621 - protein, 11 aa, Homo sapiens
  CDR3 for alpha chain variable domain of TCR clone 155311 (TRAV2, TRAJ13)
CASGGYQKVTF

SEQ ID NO: 310622 - protein, 14 aa, Homo sapiens
  CDR3 for beta chain variable domain of TCR clone 155311 (TRBV6-1, TRBJ2-1)
CAGSIAETYNEQFF

SEQ ID NO: 310623 - protein, 10 aa, Homo sapiens
  CDR3 for alpha chain variable domain of TCR clone 155312 (TRAV26-2, TRAJ20)
CILGGYKLSF

SEQ ID NO: 310624 - protein, 14 aa, Homo sapiens
  CDR3 for beta chain variable domain of TCR clone 155312 (TRBV25-1, TRBJ1-1)
CASTHLGGNTEAFF

SEQ ID NO: 310625 - protein, 12 aa, Homo sapiens
  CDR3 for alpha chain variable domain of TCR clone 155313 (TRAV1-1, TRAJ43)
CAPRVSSNDMRF

SEQ ID NO: 310626 - protein, 12 aa, Homo sapiens
  CDR3 for beta chain variable domain of TCR clone 155313 (TRBV11-2, TRBJ2-2)
CASSLGGGELFF

SEQ ID NO: 310627 - protein, 14 aa, Homo sapiens
  CDR3 for alpha chain variable domain of TCR clone 155314 (TRAV20, TRAJ42)
CAVQAGGSHGNLIF

SEQ ID NO: 310628 - protein, 14 aa, Homo sapiens
  CDR3 for beta chain variable domain of TCR clone 155314 (TRBV28, TRBJ1-2)
CASRRQGANYGYTF

SEQ ID NO: 310629 - protein, 17 aa, Homo sapiens
  CDR3 for alpha chain variable domain of TCR clone 155315 (TRAV26-1, TRAJ28)
CIVRALYSGAGSYHLTF

SEQ ID NO: 310630 - protein, 12 aa, Homo sapiens
  CDR3 for beta chain variable domain of TCR clone 155315 (TRBV12-4, TRBJ2-1)
CASRQTENEQFF

SEQ ID NO: 310631 - protein, 12 aa, Homo sapiens
  CDR3 for alpha chain variable domain of TCR clone 155316 (TRAV27, TRAJ33)
CAGEDSNYQLIW

SEQ ID NO: 310632 - protein, 16 aa, Homo sapiens
  CDR3 for beta chain variable domain of TCR clone 155316 (TRBV20-1, TRBJ2-3)
CSARLHSAGAIDTQHF

SEQ ID NO: 310633 - protein, 14 aa, Homo sapiens
  CDR3 for alpha chain variable domain of TCR clone 155317 (TRAV12-2, TRAJ13)
CAVKKTGGYQKVTF

SEQ ID NO: 310634 - protein, 13 aa, Homo sapiens
  CDR3 for beta chain variable domain of TCR clone 155317 (TRBV7-9, TRBJ2-3)
CASSAAGSDTQYF

SEQ ID NO: 310635 - protein, 15 aa, Homo sapiens
  CDR3 for alpha chain variable domain of TCR clone 155318 (TRAV26-2, TRAJ39)
CSLRGNNNAGNMLTF

SEQ ID NO: 310636 - protein, 15 aa, Homo sapiens
  CDR3 for beta chain variable domain of TCR clone 155318 (TRBV5-4, TRBJ1-1)
CAISSLGWANTEAFF

SEQ ID NO: 310637 - protein, 11 aa, Homo sapiens
  CDR3 for alpha chain variable domain of TCR clone 155319 (TRAV21, TRAJ41)
CAVRSGYALNF

SEQ ID NO: 310638 - protein, 13 aa, Homo sapiens
  CDR3 for beta chain variable domain of TCR clone 155319 (TRBV7-9, TRBJ1-2)
CASSLKQNYCYTF

SEQ ID NO: 310639 - protein, 17 aa, Homo sapiens
  CDR3 for alpha chain variable domain of TCR clone 155320 (TRAV14/DV4, TRAJ3)
CAMREVPEYSSASKIIF

SEQ ID NO: 310640 - protein, 17 aa, Homo sapiens
  CDR3 for beta chain variable domain of TCR clone 155320 (TRBV20-1, TRBJ1-5)
CSARVGGERQGNQPQHF

SEQ ID NO: 310641 - protein, 20 aa, Homo sapiens
  CDR3 for alpha chain variable domain of TCR clone 155321 (TRAV12-3, TRAJ41)
SLFIRDSQPSDSATPEALNF

SEQ ID NO: 310642 - protein, 12 aa, Homo sapiens
  CDR3 for beta chain variable domain of TCR clone 155321 (TRBV7-9, TRBJ1-5)
CASSPQGQPQHF

SEQ ID NO: 310643 - protein, 15 aa, Homo sapiens
  CDR3 for alpha chain variable domain of TCR clone 155322 (TRAV3, TRAJ12)
CAVRDIRDSSYKLIF

SEQ ID NO: 310644 - protein, 15 aa, Homo sapiens
  CDR3 for beta chain variable domain of TCR clone 155322 (TRBV27, TRBJ2-7)
CASSLRNEQGYERYF

SEQ ID NO: 310645 - protein, 11 aa, Homo sapiens
  CDR3 for alpha chain variable domain of TCR clone 155323 (TRAV12-2, TRAJ42)
CAPGSQGNLIF

SEQ ID NO: 310646 - protein, 15 aa, Homo sapiens
  CDR3 for beta chain variable domain of TCR clone 155323 (TRBV7-3, TRBJ2-1)
CASSPTGGGEVEQFF

SEQ ID NO: 310647 - protein, 14 aa, Homo sapiens
  CDR3 for alpha chain variable domain of TCR clone 155324 (TRAV12-2, TRAJ13)
CAVKKTGGYQKVTF

SEQ ID NO: 310648 - protein, 15 aa, Homo sapiens
  CDR3 for beta chain variable domain of TCR clone 155324 (TRBV2, TRBJ2-5)
CASTRDGGPQETQYF

SEQ ID NO: 310649 - protein, 16 aa, Homo sapiens
  CDR3 for alpha chain variable domain of TCR clone 155325 (TRAV21, TRAJ33)
CAVSSASMDSNYQLIW

SEQ ID NO: 310650 - protein, 17 aa, Homo sapiens
  CDR3 for beta chain variable domain of TCR clone 155325 (TRBV2, TRBJ1-4)
CASSKRELTQGEEKLFF

SEQ ID NO: 310651 - protein, 17 aa, Homo sapiens
  CDR3 for alpha chain variable domain of TCR clone 155326 (TRAV1-1, TRAJ11)
CAGYSTLTFWKGTMLLV

SEQ ID NO: 310652 - protein, 15 aa, Homo sapiens
  CDR3 for beta chain variable domain of TCR clone 155326 (TRBV6-5, TRBJ2-1)
CASRGDFDSYNEQFS

SEQ ID NO: 310653 - protein, 17 aa, Homo sapiens
  CDR3 for alpha chain variable domain of TCR clone 155327 (TRAV3, TRAJ42)
CAVRDRDYGGSQGNLIF

SEQ ID NO: 310654 - protein, 15 aa, Homo sapiens
  CDR3 for beta chain variable domain of TCR clone 155327 (TRBV19, TRBJ1-6)
CASSTQGAVGSPLHF

SEQ ID NO: 310655 - protein, 14 aa, Homo sapiens
  CDR3 for alpha chain variable domain of TCR clone 155328 (TRAV2, TRAJ9)
CAVEDRSGGFKTIS

SEQ ID NO: 310656 - protein, 15 aa, Homo sapiens
  CDR3 for beta chain variable domain of TCR clone 155328 (TRBV10-3, TRBJ2-1)
CAIRNGTSGHNEQFF

SEQ ID NO: 310657 - protein, 15 aa, Homo sapiens
  CDR3 for alpha chain variable domain of TCR clone 155329 (TRAV21, TRAJ37)
CAPARALATQANKSL

SEQ ID NO: 310658 - protein, 16 aa, Homo sapiens
  CDR3 for beta chain variable domain of TCR clone 155329 (TRBV6-6, TRBJ2-3)
CASSYSHAGSTDTQYF

SEQ ID NO: 310659 - protein, 13 aa, Homo sapiens
  CDR3 for alpha chain variable domain of TCR clone 155330 (TRAV3, TRAJ21)
LAVREPGFNKFYF

SEQ ID NO: 310660 - protein, 13 aa, Homo sapiens
  CDR3 for beta chain variable domain of TCR clone 155330 (TRBV9, TRBJ2-1)
CASSPSGGNEQFF

SEQ ID NO: 310661 - protein, 14 aa, Homo sapiens
  CDR3 for alpha chain variable domain of TCR clone 155331 (TRAV2, TRAJ9)
CAVEDRSGGFKTIF

SEQ ID NO: 310662 - protein, 13 aa, Homo sapiens
  CDR3 for beta chain variable domain of TCR clone 155331 (TRBV7-3, TRBJ2-1)
CASSPVAYNEQFF

SEQ ID NO: 310663 - protein, 13 aa, Homo sapiens
  CDR3 for alpha chain variable domain of TCR clone 155332 (TRAV12-2, TRAJ42)
CPVKRGSQGNLIF

SEQ ID NO: 310664 - protein, 13 aa, Homo sapiens
  CDR3 for beta chain variable domain of TCR clone 155332 (TRBV7-9, TRBJ2-3)
CASSPGSTDTQYF

SEQ ID NO: 310665 - protein, 15 aa, Homo sapiens
  CDR3 for alpha chain variable domain of TCR clone 155333 (TRAV17, TRAJ22)
CATVAPSGAARQLTF

SEQ ID NO: 310666 - protein, 16 aa, Homo sapiens
  CDR3 for beta chain variable domain of TCR clone 155333 (TRBV10-3, TRBJ2-7)
CAISADFADRPYEQYF

SEQ ID NO: 310667 - protein, 15 aa, Homo sapiens
  CDR3 for alpha chain variable domain of TCR clone 155334 (TRAV21, TRAJ10)
CAVPLPTGGGNKPTF

SEQ ID NO: 310668 - protein, 14 aa, Homo sapiens
  CDR3 for beta chain variable domain of TCR clone 155334 (TRBV12-4, TRBJ1-1)
CASSLGTGGTEAFF

SEQ ID NO: 310669 - protein, 17 aa, Homo sapiens
  CDR3 for alpha chain variable domain of TCR clone 155335 (TRAV3, TRAJ12)
CAVIDGGRMDSSYKLTF

SEQ ID NO: 310670 - protein, 17 aa, Homo sapiens
  CDR3 for beta chain variable domain of TCR clone 155335 (TRBV13, TRBJ2-3)
CASSLSRVAGGRNTQYF

SEQ ID NO: 310671 - protein, 14 aa, Homo sapiens
  CDR3 for alpha chain variable domain of TCR clone 155336 (TRAV8-4, TRAJ9)
CAVRINTGGFKTIF

SEQ ID NO: 310672 - protein, 15 aa, Homo sapiens
  CDR3 for beta chain variable domain of TCR clone 155336 (TRBV10-2, TRBJ2-6)
CASIEQGTGANVLTF

SEQ ID NO: 310673 - protein, 13 aa, Homo sapiens
  CDR3 for alpha chain variable domain of TCR clone 155337 (TRAV13-2, TRAJ48)
CAEMDFGNEKLTL

SEQ ID NO: 310674 - protein, 18 aa, Homo sapiens
  CDR3 for beta chain variable domain of TCR clone 155337 (TRBV12-4, TRBJ2-2)
CASSLVAGTRGRTGELFF

SEQ ID NO: 310675 - protein, 10 aa, Homo sapiens
  CDR3 for alpha chain variable domain of TCR clone 155338 (TRAV13-1, TRAJ52)
CAAKTTMLVV

SEQ ID NO: 310676 - protein, 14 aa, Homo sapiens
  CDR3 for beta chain variable domain of TCR clone 155338 (TRBV6-5, TRBJ1-1)
CASSFGQGLTEAFF

SEQ ID NO: 310677 - protein, 16 aa, Homo sapiens
  CDR3 for alpha chain variable domain of TCR clone 155339 (TRAV3, TRAJ37)
CAVRGRGSGNTGKLIF

SEQ ID NO: 310678 - protein, 15 aa, Homo sapiens
  CDR3 for beta chain variable domain of TCR clone 155339 (TRBV3-1, TRBJ2-1)
CASSPRDSGFNEQFF

SEQ ID NO: 310679 - protein, 13 aa, Homo sapiens
  CDR3 for alpha chain variable domain of TCR clone 155340 (TRAV36/DV7, TRAJ37)
CAVFSSNTGKPIF

SEQ ID NO: 310680 - protein, 12 aa, Homo sapiens
  CDR3 for beta chain variable domain of TCR clone 155340 (TRBV11-2, TRBJ2-2)
CASSLGGGELFF

SEQ ID NO: 310681 - protein, 12 aa, Homo sapiens
  CDR3 for alpha chain variable domain of TCR clone 155341 (TRAV14/DV4, TRAJ11)
CAMRLYDSTLTF

SEQ ID NO: 310682 - protein, 15 aa, Homo sapiens
  CDR3 for beta chain variable domain of TCR clone 155341 (TRBV19, TRBJ2-1)
CASSRPGQNYNEQFF

SEQ ID NO: 310683 - protein, 14 aa, Homo sapiens
  CDR3 for alpha chain variable domain of TCR clone 155342 (TRAV1-2, TRAJ16)
CAVNRFSDGQKLLF

SEQ ID NO: 310684 - protein, 14 aa, Homo sapiens
  CDR3 for beta chain variable domain of TCR clone 155342 (TRBV7-2, TRBJ2-7)
CASSLPPGQGPQYF

SEQ ID NO: 310685 - protein, 13 aa, Homo sapiens
  CDR3 for alpha chain variable domain of TCR clone 155343 (TRAV29/DV5, TRAJ31)
CAASRNSNARLMF

SEQ ID NO: 310686 - protein, 14 aa, Homo sapiens
  CDR3 for beta chain variable domain of TCR clone 155343 (TRBV25-1, TRBJ1-1)
CASTHLGGNTEAFF

SEQ ID NO: 310687 - protein, 14 aa, Homo sapiens
  CDR3 for alpha chain variable domain of TCR clone 155344 (TRAV8-3, TRAJ4)
CAVGAAGGYNKLIF

SEQ ID NO: 310688 - protein, 11 aa, Homo sapiens
  CDR3 for beta chain variable domain of TCR clone 155344 (TRBV5-1, TRBJ2-1)
CASSIGQEQFF

SEQ ID NO: 310689 - protein, 14 aa, Homo sapiens
  CDR3 for alpha chain variable domain of TCR clone 155345 (TRAV2, TRAJ9)
CAVEDRSGGFNTIF

SEQ ID NO: 310690 - protein, 15 aa, Homo sapiens
  CDR3 for beta chain variable domain of TCR clone 155345 (TRBV7-2, TRBJ2-1)
CASSSGLAGGNEQFF

SEQ ID NO: 310691 - protein, 15 aa, Homo sapiens
  CDR3 for alpha chain variable domain of TCR clone 155346 (TRAV3, TRAJ3)
CAVRDRDSSASKIIF

SEQ ID NO: 310692 - protein, 14 aa, Homo sapiens
  CDR3 for beta chain variable domain of TCR clone 155346 (TRBV4-1, TRBJ2-2)
CASSQAVNTGELFF

SEQ ID NO: 310693 - protein, 12 aa, Homo sapiens
  CDR3 for alpha chain variable domain of TCR clone 155347 (TRAV13-1, TRAJ21)
CAAKEGFNKFYF

SEQ ID NO: 310694 - protein, 13 aa, Homo sapiens
  CDR3 for beta chain variable domain of TCR clone 155347 (TRBV28, TRBJ2-5)
CASSFAGGETQYF

SEQ ID NO: 310695 - protein, 10 aa, Homo sapiens
  CDR3 for alpha chain variable domain of TCR clone 155348 (TRAV1-2, TRAJ23)
CAGQGGKLIF

SEQ ID NO: 310696 - protein, 16 aa, Homo sapiens
  CDR3 for beta chain variable domain of TCR clone 155348 (TRBV18, TRBJ1-5)
CASSPRTGGGNQPQHF

SEQ ID NO: 310697 - protein, 18 aa, Homo sapiens
  CDR3 for alpha chain variable domain of TCR clone 155349 (TRAV13-1, TRAJ52)
CAASKRSAGGTSYGKLTF

SEQ ID NO: 310698 - protein, 12 aa, Homo sapiens
  CDR3 for beta chain variable domain of TCR clone 155349 (TRBV29-1, TRBJ2-3)
CNVTGGADTQYF

SEQ ID NO: 310699 - protein, 14 aa, Homo sapiens
  CDR3 for alpha chain variable domain of TCR clone 155350 (TRAV12-3, TRAJ12)
CAMSRMDSCYKLIF

SEQ ID NO: 310700 - protein, 14 aa, Homo sapiens
  CDR3 for beta chain variable domain of TCR clone 155350 (TRBV20-1, TRBJ1-4)
CSARSGQSNEKLFF

SEQ ID NO: 310701 - protein, 12 aa, Homo sapiens
  CDR3 for alpha chain variable domain of TCR clone 155351 (TRAV1-1, TRAJ8)
CAGGTGFQKLVF

SEQ ID NO: 310702 - protein, 11 aa, Homo sapiens
  CDR3 for beta chain variable domain of TCR clone 155351 (TRBV12-4, TRBJ2-2)
CASSSAGELFF

SEQ ID NO: 310703 - protein, 11 aa, Homo sapiens
  CDR3 for alpha chain variable domain of TCR clone 155352 (TRAV2, TRAJ13)
CASGGYQKVTF

SEQ ID NO: 310704 - protein, 13 aa, Homo sapiens
  CDR3 for beta chain variable domain of TCR clone 155352 (TRBV7-7, TRBJ1-1)
CASSLGANTEAFF

SEQ ID NO: 310705 - protein, 15 aa, Homo sapiens
  CDR3 for alpha chain variable domain of TCR clone 155353 (TRAV8-4, TRAJ47)
GAVSDPEEYGNKLIF

SEQ ID NO: 310706 - protein, 15 aa, Homo sapiens
  CDR3 for beta chain variable domain of TCR clone 155353 (TRBV11-2, TRBJ2-1)
CASSLGPDSYNEQFF

SEQ ID NO: 310707 - protein, 13 aa, Homo sapiens
  CDR3 for alpha chain variable domain of TCR clone 155354 (TRAV12-2, TRAJ9)
CAGGNTGGFKTIF

SEQ ID NO: 310708 - protein, 17 aa, Homo sapiens
  CDR3 for beta chain variable domain of TCR clone 155354 (TRBV4-1, TRBJ2-1)
CASSQCRGGGLYNEQFF

SEQ ID NO: 310709 - protein, 11 aa, Homo sapiens
  CDR3 for alpha chain variable domain of TCR clone 155355 (TRAV23/DV6, TRAJ56)
CAAPANSKLTF

SEQ ID NO: 310710 - protein, 12 aa, Homo sapiens
  CDR3 for beta chain variable domain of TCR clone 155355 (TRBV7-3, TRBJ2-1)
CASSFQSGPQFF

SEQ ID NO: 310711 - protein, 16 aa, Homo sapiens
  CDR3 for alpha chain variable domain of TCR clone 155356 (TRAV3, TRAJ18)
CAVRVGRGSTLGRLYF

SEQ ID NO: 310712 - protein, 15 aa, Homo sapiens
  CDR3 for beta chain variable domain of TCR clone 155356 (TRBV7-9, TRBJ1-6)
CASSSPGRGNSPLHF

SEQ ID NO: 310713 - protein, 13 aa, Homo sapiens
  CDR3 for alpha chain variable domain of TCR clone 155357 (TRAV2, TRAJ40)
CAVVTSGTYEYIF

SEQ ID NO: 310714 - protein, 14 aa, Homo sapiens
  CDR3 for beta chain variable domain of TCR clone 155357 (TRBV19, TRBJ2-1)
CASPTFVLSGERFF

SEQ ID NO: 310715 - protein, 14 aa, Homo sapiens
  CDR3 for alpha chain variable domain of TCR clone 155358 (TRAV4, TRAJ32)
CLVGLGGATNKLIF

SEQ ID NO: 310716 - protein, 11 aa, Homo sapiens
  CDR3 for beta chain variable domain of TCR clone 155358 (TRBV12-4, TRBJ2-3)
CASTATDTQYF

SEQ ID NO: 310717 - protein, 12 aa, Homo sapiens
  CDR3 for alpha chain variable domain of TCR clone 155359 (TRAV1-1, TRAJ43)
CAPRASSNDMRF

SEQ ID NO: 310718 - protein, 14 aa, Homo sapiens
  CDR3 for beta chain variable domain of TCR clone 155359 (TRBV4-2, TRBJ2-1)
CASGLDRAYNEQFF

SEQ ID NO: 310719 - protein, 13 aa, Homo sapiens
  CDR3 for alpha chain variable domain of TCR clone 155360 (TRAV27, TRAJ42)
CAGARGSQGKLIF

SEQ ID NO: 310720 - protein, 14 aa, Homo sapiens
  CDR3 for beta chain variable domain of TCR clone 155360 (TRBV20-1, TRBJ1-1)
CSAQTRIGGTEAFF

SEQ ID NO: 310721 - protein, 16 aa, Homo sapiens
  CDR3 for alpha chain variable domain of TCR clone 155361 (TRAV30, TRAJ24)
CGTEIVDADSWGKFQF

SEQ ID NO: 310722 - protein, 14 aa, Homo sapiens
  CDR3 for beta chain variable domain of TCR clone 155361 (TRBV13, TRBJ2-3)
CASSLGGPQRPQYF

SEQ ID NO: 310723 - protein, 13 aa, Homo sapiens
  CDR3 for alpha chain variable domain of TCR clone 155362 (TRAV27, TRAJ54)
CAGAGQGAQKLEF

SEQ ID NO: 310724 - protein, 15 aa, Homo sapiens
  CDR3 for beta chain variable domain of TCR clone 155362 (TRBV18, TRBJ2-6)
CASSPSYAGANVLTS

SEQ ID NO: 310725 - protein, 14 aa, Homo sapiens
  CDR3 for alpha chain variable domain of TCR clone 155363 (TRAV13-1, TRAJ13)
CAASRVGGYQKVTF

SEQ ID NO: 310726 - protein, 17 aa, Homo sapiens
  CDR3 for beta chain variable domain of TCR clone 155363 (TRBV7-8, TRBJ2-6)
CASSAGTGGAGANVLTF

SEQ ID NO: 310727 - protein, 13 aa, Homo sapiens
  CDR3 for alpha chain variable domain of TCR clone 155364 (TRAV8-3, TRAJ43)
CAVGPDNNNDMRF

SEQ ID NO: 310728 - protein, 12 aa, Homo sapiens
  CDR3 for beta chain variable domain of TCR clone 155364 (TRBV25-1, TRBJ1-1)
CASRHMNTEAFF

SEQ ID NO: 310729 - protein, 13 aa, Homo sapiens
  CDR3 for alpha chain variable domain of TCR clone 155365 (TRAV22, TRAJ29)
CAVGGSGNTPLVF

SEQ ID NO: 310730 - protein, 15 aa, Homo sapiens
  CDR3 for beta chain variable domain of TCR clone 155365 (TRBV7-2, TRBJ2-7)
CASSLSGALTYEQYF

SEQ ID NO: 310731 - protein, 17 aa, Homo sapiens
  CDR3 for alpha chain variable domain of TCR clone 155366 (TRAV3, TRAJ42)
CAWGDRDYGGSQGNLIF

SEQ ID NO: 310732 - protein, 12 aa, Homo sapiens
  CDR3 for beta chain variable domain of TCR clone 155366 (TRBV29-1, TRBJ2-2)
CSVDKYTGELFF

SEQ ID NO: 310733 - protein, 14 aa, Homo sapiens
  CDR3 for alpha chain variable domain of TCR clone 155367 (TRAV21, TRAJ21)
CAVGVEDNFNKFYF

SEQ ID NO: 310734 - protein, 18 aa, Homo sapiens
  CDR3 for beta chain variable domain of TCR clone 155367 (TRBV12-4, TRBJ2-2)
CASSLVAGTRGRTGELFF

SEQ ID NO: 310735 - protein, 14 aa, Homo sapiens
  CDR3 for alpha chain variable domain of TCR clone 155368 (TRAV1-2, TRAJ16)
CAVNWFSDGQKLLF

SEQ ID NO: 310736 - protein, 11 aa, Homo sapiens
  CDR3 for beta chain variable domain of TCR clone 155368 (TRBV11-2, TRBJ2-2)
CASSLPGELFF

SEQ ID NO: 310737 - protein, 15 aa, Homo sapiens
  CDR3 for alpha chain variable domain of TCR clone 155369 (TRAV3, TRAJ40)
CAVRDVTSGTYKYIF

SEQ ID NO: 310738 - protein, 13 aa, Homo sapiens
  CDR3 for beta chain variable domain of TCR clone 155369 (TRBV7-9, TRBJ1-2)
CASSLKPNYGYTF

SEQ ID NO: 310739 - protein, 13 aa, Homo sapiens
  CDR3 for alpha chain variable domain of TCR clone 155370 (TRAV8-3, TRAJ48)
CAVVPVGNERLTF

SEQ ID NO: 310740 - protein, 15 aa, Homo sapiens
  CDR3 for beta chain variable domain of TCR clone 155370 (TRBV11-2, TRBJ2-1)
CASSSPSTRYNEQFF

SEQ ID NO: 310741 - protein, 13 aa, Homo sapiens
  CDR3 for alpha chain variable domain of TCR clone 155371 (TRAV8-3, TRAJ20)
CAVGAQEDYKLSF

SEQ ID NO: 310742 - protein, 16 aa, Homo sapiens
  CDR3 for beta chain variable domain of TCR clone 155371 (TRBV2, TRBJ2-5)
CASSEGISGAQETQYF

SEQ ID NO: 310743 - protein, 15 aa, Homo sapiens
  CDR3 for alpha chain variable domain of TCR clone 155372 (TRAV3, TRAJ3)
CAVRDMSSSASKIIF

SEQ ID NO: 310744 - protein, 12 aa, Homo sapiens
  CDR3 for beta chain variable domain of TCR clone 155372 (TRBV27, TRBJ2-7)
CASSGGFYEQYF

SEQ ID NO: 310745 - protein, 13 aa, Homo sapiens
  CDR3 for alpha chain variable domain of TCR clone 155373 (TRAV12-2, TRAJ42)
CAVKRGSQGNLIF

SEQ ID NO: 310746 - protein, 15 aa, Homo sapiens
  CDR3 for beta chain variable domain of TCR clone 155373 (TRBV6-3, TRBJ1-5)
CASRVDRWSNQPQHF

SEQ ID NO: 310747 - protein, 16 aa, Homo sapiens
  CDR3 for alpha chain variable domain of TCR clone 155374 (TRAV26-1, TRAJ36)
CIVRVSYQTGENNLFF

SEQ ID NO: 310748 - protein, 16 aa, Homo sapiens
  CDR3 for beta chain variable domain of TCR clone 155374 (TRBV27, TRBJ2-5)
CASSYGPGGQKETQYF

SEQ ID NO: 310749 - protein, 17 aa, Homo sapiens
  CDR3 for alpha chain variable domain of TCR clone 155375 (TRAV23/DV6, TRAJ57)
CAASSTLSQGGSERLFF

SEQ ID NO: 310750 - protein, 14 aa, Homo sapiens
  CDR3 for beta chain variable domain of TCR clone 155375 (TRBV25-1, TRBJ1-1)
CASTHLGGNTEAFF

SEQ ID NO: 310751 - protein, 13 aa, Homo sapiens
  CDR3 for alpha chain variable domain of TCR clone 155376 (TRAV13-1, TRAJ20)
CAARVSNDYKPSF

SEQ ID NO: 310752 - protein, 12 aa, Homo sapiens
  CDR3 for beta chain variable domain of TCR clone 155376 (TRBV20-1, TRBJ2-1)
CSARLGTDEQFF

SEQ ID NO: 310753 - protein, 18 aa, Homo sapiens
  CDR3 for alpha chain variable domain of TCR clone 155377 (TRAV26-1, TRAJ52)
CIVRGRNAGGTSYGKLTF

SEQ ID NO: 310754 - protein, 14 aa, Homo sapiens
  CDR3 for beta chain variable domain of TCR clone 155377 (TRBV6-6, TRBJ1-3)
CASVAGDSGNTMYF

SEQ ID NO: 310755 - protein, 17 aa, Homo sapiens
  CDR3 for alpha chain variable domain of TCR clone 155378 (TRAV3, TRAJ6)
CAVRDGPRAGGSYIPTF

SEQ ID NO: 310756 - protein, 20 aa, Homo sapiens
  CDR3 for beta chain variable domain of TCR clone 155378 (TRBV28, TRBJ2-1)
CPSTPIGRSPGLAGGNEQFF

SEQ ID NO: 310757 - protein, 15 aa, Homo sapiens
  CDR3 for alpha chain variable domain of TCR clone 155379 (TRAV21, TRAJ53)
CATLTSGGSNYKLTF

SEQ ID NO: 310758 - protein, 14 aa, Homo sapiens
  CDR3 for beta chain variable domain of TCR clone 155379 (TRBV7-2, TRBJ2-7)
CASRSQGAAYEQYF

SEQ ID NO: 310759 - protein, 13 aa, Homo sapiens
  CDR3 for alpha chain variable domain of TCR clone 155380 (TRAV2, TRAJ15)
CAVASQAGTALIF

SEQ ID NO: 310760 - protein, 14 aa, Homo sapiens
  CDR3 for beta chain variable domain of TCR clone 155380 (TRBV7-9, TRBJ2-5)
CASSLDTAQETQYF

SEQ ID NO: 310761 - protein, 12 aa, Homo sapiens
  CDR3 for alpha chain variable domain of TCR clone 155381 (TRAV26-1, TRAJ35)
CIGLSFGNGLHC

SEQ ID NO: 310762 - protein, 17 aa, Homo sapiens
  CDR3 for beta chain variable domain of TCR clone 155381 (TRBV11-3, TRBJ2-5)
CASSLPGVRGGKETQYF

SEQ ID NO: 310763 - protein, 18 aa, Homo sapiens
  CDR3 for alpha chain variable domain of TCR clone 155382 (TRAV12-3, TRAJ52)
CAMSVGGAGGTSYGKLTF

SEQ ID NO: 310764 - protein, 15 aa, Homo sapiens
  CDR3 for beta chain variable domain of TCR clone 155382 (TRBV27, TRBJ1-6)
CASSFDRGLASPLHF

SEQ ID NO: 310765 - protein, 14 aa, Homo sapiens
  CDR3 for alpha chain variable domain of TCR clone 155383 (TRAV35, TRAJ22)
CAGLRPGSAGQLTF

SEQ ID NO: 310766 - protein, 14 aa, Homo sapiens
  CDR3 for beta chain variable domain of TCR clone 155383 (TRBV11-3, TRBJ2-3)
CASSSGQGPDTQYF

SEQ ID NO: 310767 - protein, 15 aa, Homo sapiens
  CDR3 for alpha chain variable domain of TCR clone 155384 (TRAV21, TRAJ33)
CAVSPAHGLQLSVNL

SEQ ID NO: 310768 - protein, 17 aa, Homo sapiens
  CDR3 for beta chain variable domain of TCR clone 155384 (TRBV2, TRBJ1-4)
CASSKRELTQGEEKLFF

SEQ ID NO: 310769 - protein, 13 aa, Homo sapiens
  CDR3 for alpha chain variable domain of TCR clone 155385 (TRAV17, TRAJ5)
CALRGTGRRALTF

SEQ ID NO: 310770 - protein, 15 aa, Homo sapiens
  CDR3 for beta chain variable domain of TCR clone 155385 (TRBV10-3, TRBJ2-3)
CAISLTSGGTDTQYF

SEQ ID NO: 310771 - protein, 17 aa, Homo sapiens
  CDR3 for alpha chain variable domain of TCR clone 155386 (TRAV13-1, TRAJ52)
CAASSGAGGTSYGKLTF

SEQ ID NO: 310772 - protein, 20 aa, Homo sapiens
  CDR3 for beta chain variable domain of TCR clone 155386 (TRBV7-8, TRBJ2-2)
CASSHLFPGPTIHITGELFF

SEQ ID NO: 310773 - protein, 14 aa, Homo sapiens
  CDR3 for alpha chain variable domain of TCR clone 155387 (TRAV13-1, TRAJ35)
CAASKGGFGNVLHC

SEQ ID NO: 310774 - protein, 14 aa, Homo sapiens
  CDR3 for beta chain variable domain of TCR clone 155387 (TRBV7-2, TRBJ2-7)
CASSLRRGFGEQYF

SEQ ID NO: 310775 - protein, 12 aa, Homo sapiens
  CDR3 for alpha chain variable domain of TCR clone 155388 (TRAV2, TRAJ31)
CAVEENNARLMV

SEQ ID NO: 310776 - protein, 16 aa, Homo sapiens
  CDR3 for beta chain variable domain of TCR clone 155388 (TRBV10-3, TRBJ2-1)
CAISGVGDGGGGEQFF

SEQ ID NO: 310777 - protein, 15 aa, Homo sapiens
  CDR3 for alpha chain variable domain of TCR clone 155389 (TRAV26-1, TRAJ40)
CIVRAVPSGTYKYIF

SEQ ID NO: 310778 - protein, 14 aa, Homo sapiens
  CDR3 for beta chain variable domain of TCR clone 155389 (TRBV19, TRBJ2-1)
CASKEPGLANEQFF

SEQ ID NO: 310779 - protein, 16 aa, Homo sapiens
  CDR3 for alpha chain variable domain of TCR clone 155390 (TRAV3, TRAJ10)
CAVRDMRAGGGNKLTF

SEQ ID NO: 310780 - protein, 14 aa, Homo sapiens
  CDR3 for beta chain variable domain of TCR clone 155390 (TRBV4-2, TRBJ1-2)
CASSQDDRAYGYTF

SEQ ID NO: 310781 - protein, 20 aa, Homo sapiens
  CDR3 for alpha chain variable domain of TCR clone 155391 (TRAV4, TRAJ29)
CCVLLPRGRHPYSGNTPLVF

SEQ ID NO: 310782 - protein, 12 aa, Homo sapiens
  CDR3 for beta chain variable domain of TCR clone 155391 (TRBV29-1, TRBJ2-3)
CSVTGGADTQYF

SEQ ID NO: 310783 - protein, 12 aa, Homo sapiens
  CDR3 for alpha chain variable domain of TCR clone 155392 (TRAV8-3, TRAJ26)
CAGDNYGQYFVF

SEQ ID NO: 310784 - protein, 15 aa, Homo sapiens
  CDR3 for beta chain variable domain of TCR clone 155392 (TRBV5-1, TRBJ2-3)
CASSVTSGSTDTQYF

SEQ ID NO: 310785 - protein, 18 aa, Homo sapiens
  CDR3 for alpha chain variable domain of TCR clone 155393 (TRAV26-1, TRAJ23)
CIVRVGLEVWNQGGKLIF

SEQ ID NO: 310786 - protein, 15 aa, Homo sapiens
  CDR3 for beta chain variable domain of TCR clone 155393 (TRBV10-3, TRBJ2-3)
CASSDWDRDTDTQYF

SEQ ID NO: 310787 - protein, 14 aa, Homo sapiens
  CDR3 for alpha chain variable domain of TCR clone 155394 (TRAV23/DV6, TRAJ17)
CAASIGAAGNKLTF

SEQ ID NO: 310788 - protein, 14 aa, Homo sapiens
  CDR3 for beta chain variable domain of TCR clone 155394 (TRBV28, TRBJ1-2)
CASRIQGANYGYTF

SEQ ID NO: 310789 - protein, 14 aa, Homo sapiens
  CDR3 for alpha chain variable domain of TCR clone 155395 (TRAV29/DV5, TRAJ36)
CAARRKTGANNPLF

SEQ ID NO: 310790 - protein, 16 aa, Homo sapiens
  CDR3 for beta chain variable domain of TCR clone 155395 (TRBV15, TRBJ1-2)
CATSRGPRTGGGGYTF

SEQ ID NO: 310791 - protein, 14 aa, Homo sapiens
  CDR3 for alpha chain variable domain of TCR clone 155396 (TRAV35, TRAJ35)
CAGRAEAVGMCCIA

SEQ ID NO: 310792 - protein, 15 aa, Homo sapiens
  CDR3 for beta chain variable domain of TCR clone 155396 (TRBV6-1, TRBJ1-5)
CASSELREGNQPQHF

SEQ ID NO: 310793 - protein, 21 aa, Homo sapiens
  CDR3 for alpha chain variable domain of TCR clone 155397 (TRAV12-1, TRAJ37)
CVVNGGLWQHRQTNLWARDNF

SEQ ID NO: 310794 - protein, 12 aa, Homo sapiens
  CDR3 for beta chain variable domain of TCR clone 155397 (TRBV20-1, TRBJ1-2)
GSAPGFNYGYTF

SEQ ID NO: 310795 - protein, 15 aa, Homo sapiens
  CDR3 for alpha chain variable domain of TCR clone 155398 (TRAV16, TRAJ42)
CALRRGGGSQGNLIF

SEQ ID NO: 310796 - protein, 17 aa, Homo sapiens
  CDR3 for beta chain variable domain of TCR clone 155398 (TRBV13, TRBJ2-3)
CASSLSRVAGGRNTQYF

SEQ ID NO: 310797 - protein, 16 aa, Homo sapiens
  CDR3 for alpha chain variable domain of TCR clone 155399 (TRAV3, TRAJ21)
CAVRDIERGNFNKFYF

SEQ ID NO: 310798 - protein, 16 aa, Homo sapiens
  CDR3 for beta chain variable domain of TCR clone 155399 (TRBV19, TRBJ2-4)
CATGGLAGGTKNIQYF

SEQ ID NO: 310799 - protein, 21 aa, Homo sapiens
  CDR3 for alpha chain variable domain of TCR clone 155400 (TRAV8-3, TRAJ32)
CAVEVVLQTSSSLELALCLLS

SEQ ID NO: 310800 - protein, 16 aa, Homo sapiens
  CDR3 for beta chain variable domain of TCR clone 155400 (TRBV20-1, TRBJ2-2)
CSARDLQGVDTGELFF

SEQ ID NO: 310801 - protein, 14 aa, Homo sapiens
  CDR3 for alpha chain variable domain of TCR clone 155401 (TRAV34, TRAJ44)
CGADGTGTASKLTF

SEQ ID NO: 310802 - protein, 20 aa, Homo sapiens
  CDR3 for beta chain variable domain of TCR clone 155401 (TRBV7-4, TRBJ1-5)
CISVSEAGQGAPYSNQPQHF

SEQ ID NO: 310803 - protein, 19 aa, Homo sapiens
  CDR3 for alpha chain variable domain of TCR clone 155402 (TRAV12-1, TRAJ58)
SSVIQPPTSVRTSGSRLTF

SEQ ID NO: 310804 - protein, 15 aa, Homo sapiens
  CDR3 for beta chain variable domain of TCR clone 155402 (TRBV7-8, TRBJ1-1)
CASSLGDSRNTEAFF

SEQ ID NO: 310805 - protein, 14 aa, Homo sapiens
  CDR3 for alpha chain variable domain of TCR clone 155403 (TRAV12-2, TRAJ17)
CAVLFKAAGNKLTF

SEQ ID NO: 310806 - protein, 13 aa, Homo sapiens
  CDR3 for beta chain variable domain of TCR clone 155403 (TRBV10-3, TRBJ2-7)
CASNLAVNYEQYF

SEQ ID NO: 310807 - protein, 13 aa, Homo sapiens
  CDR3 for alpha chain variable domain of TCR clone 155404 (TRAV17, TRAJ7)
CATDNYGNNRLAF

SEQ ID NO: 310808 - protein, 15 aa, Homo sapiens
  CDR3 for beta chain variable domain of TCR clone 155404 (TRBV7-3, TRBJ2-1)
CQQLQTSGRYNEQFF

SEQ ID NO: 310809 - protein, 14 aa, Homo sapiens
  CDR3 for alpha chain variable domain of TCR clone 155405 (TRAV3, TRAJ37)
CAVKESGNTGKLIF

SEQ ID NO: 310810 - protein, 15 aa, Homo sapiens
  CDR3 for beta chain variable domain of TCR clone 155405 (TRBV7-9, TRBJ1-5)
CASSLAGGGRQPQHF

SEQ ID NO: 310811 - protein, 16 aa, Homo sapiens
  CDR3 for alpha chain variable domain of TCR clone 155406 (TRAV30, TRAJ24)
CGTEMVDADSWGKFQF

SEQ ID NO: 310812 - protein, 14 aa, Homo sapiens
  CDR3 for beta chain variable domain of TCR clone 155406 (TRBV19, TRBJ2-1)
CASPTFVLSGEQFF

SEQ ID NO: 310813 - protein, 16 aa, Homo sapiens
  CDR3 for alpha chain variable domain of TCR clone 155407 (TRAV13-1, TRAJ22)
CAAKGGRSGSARQMTF

SEQ ID NO: 310814 - protein, 15 aa, Homo sapiens
  CDR3 for beta chain variable domain of TCR clone 155407 (TRBV9, TRBJ1-6)
CASSVAGTGDSPLHF

SEQ ID NO: 310815 - protein, 14 aa, Homo sapiens
  CDR3 for alpha chain variable domain of TCR clone 155408 (TRAV2, TRAJ9)
CAVEDRSGGFKTIF

SEQ ID NO: 310816 - protein, 14 aa, Homo sapiens
  CDR3 for beta chain variable domain of TCR clone 155408 (TRBV7-3, TRBJ2-1)
CASSSAGGTNEQFF

SEQ ID NO: 310817 - protein, 13 aa, Homo sapiens
  CDR3 for alpha chain variable domain of TCR clone 155409 (TRAV13-1, TRAJ39)
CSKYSNAGNMLTF

SEQ ID NO: 310818 - protein, 16 aa, Homo sapiens
  CDR3 for beta chain variable domain of TCR clone 155409 (TRBV7-2, TRBJ2-3)
CASSLVALYSTGTQYF

SEQ ID NO: 310819 - protein, 14 aa, Homo sapiens
  CDR3 for alpha chain variable domain of TCR clone 155410 (TRAV12-1, TRAJ3)
CVVSGYSSASKIIF

SEQ ID NO: 310820 - protein, 14 aa, Homo sapiens
  CDR3 for beta chain variable domain of TCR clone 155410 (TRBV6-6, TRBJ1-3)
CSSSRQGSGNTIYF

SEQ ID NO: 310821 - protein, 10 aa, Homo sapiens
  CDR3 for alpha chain variable domain of TCR clone 155411 (TRAV12-1, TRAJ20)
CVVNPRKLSF

SEQ ID NO: 310822 - protein, 13 aa, Homo sapiens
  CDR3 for beta chain variable domain of TCR clone 155411 (TRBV7-3, TRBJ1-1)
CASSQDWGAEAFF

SEQ ID NO: 310823 - protein, 14 aa, Homo sapiens
  CDR3 for alpha chain variable domain of TCR clone 155412 (TRAV13-1, TRAJ35)
CAASKGGFGNVLHC

SEQ ID NO: 310824 - protein, 15 aa, Homo sapiens
  CDR3 for beta chain variable domain of TCR clone 155412 (TRBV11-2, TRBJ2-3)
CASSARRGRGDTQYF

SEQ ID NO: 310825 - protein, 16 aa, Homo sapiens
  CDR3 for alpha chain variable domain of TCR clone 155413 (TRAV30, TRAJ24)
CGTEIVDADSWGKFQF

SEQ ID NO: 310826 - protein, 16 aa, Homo sapiens
  CDR3 for beta chain variable domain of TCR clone 155413 (TRBV6-3, TRBJ2-2)
CASSFSGTDNTGELFF

SEQ ID NO: 310827 - protein, 20 aa, Homo sapiens
  CDR3 for alpha chain variable domain of TCR clone 155414 (TRAV12-1, TRAJ42)
SSVIQPPTSVKGGSQGNLIF

SEQ ID NO: 310828 - protein, 13 aa, Homo sapiens
  CDR3 for beta chain variable domain of TCR clone 155414 (TRBV12-4, TRBJ1-2)
CASSLREGKGYTF

SEQ ID NO: 310829 - protein, 16 aa, Homo sapiens
  CDR3 for alpha chain variable domain of TCR clone 155415 (TRAV16, TRAJ52)
CALSAAGGTSYGKLTF

SEQ ID NO: 310830 - protein, 12 aa, Homo sapiens
  CDR3 for beta chain variable domain of TCR clone 155415 (TRBV12-4, TRBJ1-3)
SASSFSGNTIYF

SEQ ID NO: 310831 - protein, 16 aa, Homo sapiens
  CDR3 for alpha chain variable domain of TCR clone 155416 (TRAV1-2, TRAJ10)
CAVRGVLTGGGNKLTF

SEQ ID NO: 310832 - protein, 13 aa, Homo sapiens
  CDR3 for beta chain variable domain of TCR clone 155416 (TRBV20-1, TRBJ1-6)
CSAPLGVGSPLYF

SEQ ID NO: 310833 - protein, 14 aa, Homo sapiens
  CDR3 for alpha chain variable domain of TCR clone 155417 (TRAV3, TRAJ40)
CAVRDRRGTYKYIF

SEQ ID NO: 310834 - protein, 11 aa, Homo sapiens
  CDR3 for beta chain variable domain of TCR clone 155417 (TRBV7-2, TRBJ2-7)
CASSSGLWQYF

SEQ ID NO: 310835 - protein, 12 aa, Homo sapiens
  CDR3 for alpha chain variable domain of TCR clone 155418 (TRAV2, TRAJ9)
CAVGAGGFKTIF

SEQ ID NO: 310836 - protein, 14 aa, Homo sapiens
  CDR3 for beta chain variable domain of TCR clone 155418 (TRBV18, TRBJ1-5)
CASSPGNSNQPQHF

SEQ ID NO: 310837 - protein, 16 aa, Homo sapiens
  CDR3 for alpha chain variable domain of TCR clone 155419 (TRAV12-3, TRAJ53)
CAMSPGSGGSNYKLTF

SEQ ID NO: 310838 - protein, 17 aa, Homo sapiens
  CDR3 for beta chain variable domain of TCR clone 155419 (TRBV28, TRBJ2-5)
CASSTPEGDALQETQNF

SEQ ID NO: 310839 - protein, 12 aa, Homo sapiens
  CDR3 for alpha chain variable domain of TCR clone 155420 (TRAV12-3, TRAJ17)
CAMSLTGNKLTF

SEQ ID NO: 310840 - protein, 13 aa, Homo sapiens
  CDR3 for beta chain variable domain of TCR clone 155420 (TRBV7-9, TRBJ2-7)
CASSFAGAYEQYF

SEQ ID NO: 310841 - protein, 13 aa, Homo sapiens
  CDR3 for alpha chain variable domain of TCR clone 155421 (TRAV12-1, TRAJ40)
CVVPISGTYKYIF

SEQ ID NO: 310842 - protein, 16 aa, Homo sapiens
  CDR3 for beta chain variable domain of TCR clone 155421 (TRBV7-9, TRBJ1-2)
CASSLGFSSGEDGYTF

SEQ ID NO: 310843 - protein, 17 aa, Homo sapiens
  CDR3 for alpha chain variable domain of TCR clone 155422 (TRAV3, TRAJ6)
CAVSRRTDTGGSYIPTF

SEQ ID NO: 310844 - protein, 12 aa, Homo sapiens
  CDR3 for beta chain variable domain of TCR clone 155422 (TRBV11-2, TRBJ2-2)
CASSLGGGELFF

SEQ ID NO: 310845 - protein, 14 aa, Homo sapiens
  CDR3 for alpha chain variable domain of TCR clone 155423 (TRAV8-3, TRAJ10)
CAVGNAGGGNKLTF

SEQ ID NO: 310846 - protein, 10 aa, Homo sapiens
  CDR3 for beta chain variable domain of TCR clone 155423 (TRBV12-4, TRBJ1-2)
CASSFIWLHL

SEQ ID NO: 310847 - protein, 12 aa, Homo sapiens
  CDR3 for alpha chain variable domain of TCR clone 155424 (TRAV12-1, TRAJ40)
CVVPSRTYKYIF

SEQ ID NO: 310848 - protein, 15 aa, Homo sapiens
  CDR3 for beta chain variable domain of TCR clone 155424 (TRBV12-4, TRBJ2-1)
CASSPLSGRNSEQFF

SEQ ID NO: 310849 - protein, 14 aa, Homo sapiens
  CDR3 for alpha chain variable domain of TCR clone 155425 (TRAV12-3, TRAJ10)
SHLPLTGGGNKLTF

SEQ ID NO: 310850 - protein, 17 aa, Homo sapiens
  CDR3 for beta chain variable domain of TCR clone 155425 (TRBV25-1, TRBJ2-4)
CASSETESAKTFSTSAP

SEQ ID NO: 310851 - protein, 12 aa, Homo sapiens
  CDR3 for alpha chain variable domain of TCR clone 155426 (TRAV17, TRAJ30)
CATDARDDKIIF

SEQ ID NO: 310852 - protein, 15 aa, Homo sapiens
  CDR3 for beta chain variable domain of TCR clone 155426 (TRBV4-1, TRBJ2-1)
RASSQGGELYNEQFF

SEQ ID NO: 310853 - protein, 14 aa, Homo sapiens
  CDR3 for alpha chain variable domain of TCR clone 155427 (TRAV12-1, TRAJ26)
CVVKGINYGQNFVF

SEQ ID NO: 310854 - protein, 17 aa, Homo sapiens
  CDR3 for beta chain variable domain of TCR clone 155427 (TRBV11-2, TRBJ2-6)
CASSQRDIFSGANVLTF

SEQ ID NO: 310855 - protein, 12 aa, Homo sapiens
  CDR3 for alpha chain variable domain of TCR clone 155428 (TRAV8-3, TRAJ4)
PAFSVGYIKLIF

SEQ ID NO: 310856 - protein, 13 aa, Homo sapiens
  CDR3 for beta chain variable domain of TCR clone 155428 (TRBV20-1, TRBJ1-3)
CSAGAYSGNTIYF

SEQ ID NO: 310857 - protein, 13 aa, Homo sapiens
  CDR3 for alpha chain variable domain of TCR clone 155429 (TRAV1-2, TRAJ24)
CAVRAYSWGKFQF

SEQ ID NO: 310858 - protein, 13 aa, Homo sapiens
  CDR3 for beta chain variable domain of TCR clone 155429 (TRBV20-1, TRBJ2-1)
CSATGLAGDEQFF

SEQ ID NO: 310859 - protein, 15 aa, Homo sapiens
  CDR3 for alpha chain variable domain of TCR clone 155430 (TRAV8-4, TRAJ3)
CAVTGENLVQLCFQD

SEQ ID NO: 310860 - protein, 16 aa, Homo sapiens
  CDR3 for beta chain variable domain of TCR clone 155430 (TRBV4-2, TRBJ1-1)
CASSQAGFGMNTEAFF

SEQ ID NO: 310861 - protein, 15 aa, Homo sapiens
  CDR3 for alpha chain variable domain of TCR clone 155431 (TRAV16, TRAJ23)
CALSGPYNQGGKLIF

SEQ ID NO: 310862 - protein, 14 aa, Homo sapiens
  CDR3 for beta chain variable domain of TCR clone 155431 (TRBV7-2, TRBJ2-7)
CASSPKTSFYEQYF

SEQ ID NO: 310863 - protein, 15 aa, Homo sapiens
  CDR3 for alpha chain variable domain of TCR clone 155432 (TRAV12-3, TRAJ6)
CAMSATSGGSYIPTF

SEQ ID NO: 310864 - protein, 15 aa, Homo sapiens
  CDR3 for beta chain variable domain of TCR clone 155432 (TRBV27, TRBJ1-6)
CASRNYRVENSPLHF

SEQ ID NO: 310865 - protein, 13 aa, Homo sapiens
  CDR3 for alpha chain variable domain of TCR clone 155433 (TRAV1-2, TRAJ9)
CAVLNTGGFKTIF

SEQ ID NO: 310866 - protein, 14 aa, Homo sapiens
  CDR3 for beta chain variable domain of TCR clone 155433 (TRBV20-1, TRBJ2-3)
SSARGGTSTDTQYF

SEQ ID NO: 310867 - protein, 15 aa, Homo sapiens
  CDR3 for alpha chain variable domain of TCR clone 155434 (TRAV8-6, TRAJ23)
CAGREFYNQGGKLIF

SEQ ID NO: 310868 - protein, 15 aa, Homo sapiens
  CDR3 for beta chain variable domain of TCR clone 155434 (TRBV20-1, TRBJ2-1)
CSAITGTSGSNEQFF

SEQ ID NO: 310869 - protein, 21 aa, Homo sapiens
  CDR3 for alpha chain variable domain of TCR clone 155435 (TRAV26-1, TRAJ38)
CIADNAGNNHIQNPDPAVYQL

SEQ ID NO: 310870 - protein, 13 aa, Homo sapiens
  CDR3 for beta chain variable domain of TCR clone 155435 (TRBV20-1, TRBJ1-1)
CSARGGGNTKAFF

SEQ ID NO: 310871 - protein, 16 aa, Homo sapiens
  CDR3 for alpha chain variable domain of TCR clone 155436 (TRAV1-2, TRAJ4)
CAVRDSLSGGYNKLIF

SEQ ID NO: 310872 - protein, 13 aa, Homo sapiens
  CDR3 for beta chain variable domain of TCR clone 155436 (TRBV10-3, TRBJ2-7)
CASKLAVNYEQYF

SEQ ID NO: 310873 - protein, 17 aa, Homo sapiens
  CDR3 for alpha chain variable domain of TCR clone 155437 (TRAV26-1, TRAJ37)
FIVRVITVSSNTGKLIF

SEQ ID NO: 310874 - protein, 15 aa, Homo sapiens
  CDR3 for beta chain variable domain of TCR clone 155437 (TRBV10-1, TRBJ2-3)
CASSATSGGFDTQYF

SEQ ID NO: 310875 - protein, 13 aa, Homo sapiens
  CDR3 for alpha chain variable domain of TCR clone 155438 (TRAV17, TRAJ5)
CAPMDTGRRALTF

SEQ ID NO: 310876 - protein, 16 aa, Homo sapiens
  CDR3 for beta chain variable domain of TCR clone 155438 (TRBV27, TRBJ2-7)
CASSSERRESAYEQYF

SEQ ID NO: 310877 - protein, 12 aa, Homo sapiens
  CDR3 for alpha chain variable domain of TCR clone 155439 (TRAV21, TRAJ35)
CAVVGFGNVLHC

SEQ ID NO: 310878 - protein, 16 aa, Homo sapiens
  CDR3 for beta chain variable domain of TCR clone 155439 (TRBV6-1, TRBJ2-5)
CASSKTLDRGAETQYF

SEQ ID NO: 310879 - protein, 16 aa, Homo sapiens
  CDR3 for alpha chain variable domain of TCR clone 155440 (TRAV3, TRAJ37)
CAVRPHGSGNTGKLLF

SEQ ID NO: 310880 - protein, 17 aa, Homo sapiens
  CDR3 for beta chain variable domain of TCR clone 155440 (TRBV11-2, TRBJ2-1)
CASSLYPPGVEYNEQFF

SEQ ID NO: 310881 - protein, 18 aa, Homo sapiens
  CDR3 for alpha chain variable domain of TCR clone 155441 (TRAV13-1, TRAJ52)
CAAKNPNAGGTSYGKLTF

SEQ ID NO: 310882 - protein, 15 aa, Homo sapiens
  CDR3 for beta chain variable domain of TCR clone 155441 (TRBV6-1, TRBJ2-1)
CASSELRGQYNEQFL

SEQ ID NO: 310883 - protein, 19 aa, Homo sapiens
  CDR3 for alpha chain variable domain of TCR clone 155442 (TRAV29/DV5, TRAJ49)
CSVLLCSKLTVDTGNQFYF

SEQ ID NO: 310884 - protein, 14 aa, Homo sapiens
  CDR3 for beta chain variable domain of TCR clone 155442 (TRBV4-2, TRBJ2-1)
CASGLDRAYNEQFF

SEQ ID NO: 310885 - protein, 17 aa, Homo sapiens
  CDR3 for alpha chain variable domain of TCR clone 155443 (TRAV3, TRAJ42)
CAVRDRDYGGSQGNLIF

SEQ ID NO: 310886 - protein, 15 aa, Homo sapiens
  CDR3 for beta chain variable domain of TCR clone 155443 (TRBV6-6, TRBJ2-7)
CASSYWYGGSYEQYF

SEQ ID NO: 310887 - protein, 13 aa, Homo sapiens
  CDR3 for alpha chain variable domain of TCR clone 155444 (TRAV12-2, TRAJ30)
CAVNLNRDNKITF

SEQ ID NO: 310888 - protein, 14 aa, Homo sapiens
  CDR3 for beta chain variable domain of TCR clone 155444 (TRBV7-8, TRBJ2-7)
CASSLGRASYEQYF

SEQ ID NO: 310889 - protein, 13 aa, Homo sapiens
  CDR3 for alpha chain variable domain of TCR clone 155445 (TRAV13-2, TRAJ48)
CAEMDFGNEKLTF

SEQ ID NO: 310890 - protein, 12 aa, Homo sapiens
  CDR3 for beta chain variable domain of TCR clone 155445 (TRBV5-1, TRBJ1-2)
CASSLDSYGYTF

SEQ ID NO: 310891 - protein, 15 aa, Homo sapiens
  CDR3 for alpha chain variable domain of TCR clone 155446 (TRAV26-1, TRAJ44)
CIARANTGTASKLTF

SEQ ID NO: 310892 - protein, 16 aa, Homo sapiens
  CDR3 for beta chain variable domain of TCR clone 155446 (TRBV7-7, TRBJ2-1)
RASSLASGTSYNEQFF

SEQ ID NO: 310893 - protein, 17 aa, Homo sapiens
  CDR3 for alpha chain variable domain of TCR clone 155447 (TRAV8-6, TRAJ58)
CAVSSWVGETSGSRMTF

SEQ ID NO: 310894 - protein, 14 aa, Homo sapiens
  CDR3 for beta chain variable domain of TCR clone 155447 (TRBV4-2, TRBJ2-1)
CAGGLDRAYNEQFF

SEQ ID NO: 310895 - protein, 12 aa, Homo sapiens
  CDR3 for alpha chain variable domain of TCR clone 155448 (TRAV12-3, TRAJ5)
CAMDTGRRARTF

SEQ ID NO: 310896 - protein, 13 aa, Homo sapiens
  CDR3 for beta chain variable domain of TCR clone 155448 (TRBV7-7, TRBJ2-2)
CASSLTSAGELFF

SEQ ID NO: 310897 - protein, 12 aa, Homo sapiens
  CDR3 for alpha chain variable domain of TCR clone 155449 (TRAV21, TRAJ33)
CAKMDSNYQLIW

SEQ ID NO: 310898 - protein, 15 aa, Homo sapiens
  CDR3 for beta chain variable domain of TCR clone 155449 (TRBV7-2, TRBJ2-3)
CASSLRGGSTDTQYF

SEQ ID NO: 310899 - protein, 18 aa, Homo sapiens
  CDR3 for alpha chain variable domain of TCR clone 155450 (TRAV29/DV5, TRAJ52)
CAAGFRGAGGTSYGKLTF

SEQ ID NO: 310900 - protein, 12 aa, Homo sapiens
  CDR3 for beta chain variable domain of TCR clone 155450 (TRBV7-8, TRBJ2-7)
YASSLGDREHYF

SEQ ID NO: 310901 - protein, 11 aa, Homo sapiens
  CDR3 for alpha chain variable domain of TCR clone 155451 (TRAV12-3, TRAJ17)
CNDAYINKLTF

SEQ ID NO: 310902 - protein, 15 aa, Homo sapiens
  CDR3 for beta chain variable domain of TCR clone 155451 (TRBV20-1, TRBJ2-7)
CSARDWVSGMDEQYF

SEQ ID NO: 310903 - protein, 14 aa, Homo sapiens
  CDR3 for alpha chain variable domain of TCR clone 155452 (TRAV9-2, TRAJ39)
CALYLYNAGNMLTF

SEQ ID NO: 310904 - protein, 13 aa, Homo sapiens
  CDR3 for beta chain variable domain of TCR clone 155452 (TRBV7-2, TRBJ2-2)
CASSLAVTGELFF

SEQ ID NO: 310905 - protein, 13 aa, Homo sapiens
  CDR3 for alpha chain variable domain of TCR clone 155453 (TRAV17, TRAJ9)
CATDYTGGFKTIF

SEQ ID NO: 310906 - protein, 14 aa, Homo sapiens
  CDR3 for beta chain variable domain of TCR clone 155453 (TRBV7-2, TRBJ2-7)
RASRSQGAAYEQYF

SEQ ID NO: 310907 - protein, 15 aa, Homo sapiens
  CDR3 for alpha chain variable domain of TCR clone 155454 (TRAV26-1, TRAJ29)
CIVRVEGSGNTPLVF

SEQ ID NO: 310908 - protein, 12 aa, Homo sapiens
  CDR3 for beta chain variable domain of TCR clone 155454 (TRBV7-2, TRBJ2-2)
CASSLPPGMLFF

SEQ ID NO: 310909 - protein, 14 aa, Homo sapiens
  CDR3 for alpha chain variable domain of TCR clone 155455 (TRAV12-2, TRAJ45)
CAVTIGGGADGLTF

SEQ ID NO: 310910 - protein, 13 aa, Homo sapiens
  CDR3 for beta chain variable domain of TCR clone 155455 (TRBV19, TRBJ2-2)
CASGIWSTGELFF

SEQ ID NO: 310911 - protein, 14 aa, Homo sapiens
  CDR3 for alpha chain variable domain of TCR clone 155456 (TRAV12-2, TRAJ17)
CAVLFKAAGNKLTF

SEQ ID NO: 310912 - protein, 19 aa, Homo sapiens
  CDR3 for beta chain variable domain of TCR clone 155456 (TRBV19, TRBJ2-5)
CASSIGQVTDFFLGETQYF

SEQ ID NO: 310913 - protein, 14 aa, Homo sapiens
  CDR3 for alpha chain variable domain of TCR clone 155457 (TRAV1-2, TRAJ8)
CAVREDTGFQKLVF

SEQ ID NO: 310914 - protein, 14 aa, Homo sapiens
  CDR3 for beta chain variable domain of TCR clone 155457 (TRBV7-2, TRBJ2-7)
CASSFGAKSYEQYF

SEQ ID NO: 310915 - protein, 18 aa, Homo sapiens
  CDR3 for alpha chain variable domain of TCR clone 155458 (TRAV26-2, TRAJ45)
CILRLWGYSGGGADGLTF

SEQ ID NO: 310916 - protein, 17 aa, Homo sapiens
  CDR3 for beta chain variable domain of TCR clone 155458 (TRBV28, TRBJ2-3)
CGSSPTPAGGRVDTQYF

SEQ ID NO: 310917 - protein, 14 aa, Homo sapiens
  CDR3 for alpha chain variable domain of TCR clone 155459 (TRAV8-2, TRAJ4)
CVVSPSGGYNKLIF

SEQ ID NO: 310918 - protein, 13 aa, Homo sapiens
  CDR3 for beta chain variable domain of TCR clone 155459 (TRBV12-5, TRBJ2-3)
CASGDRQSDTQYF

SEQ ID NO: 310919 - protein, 13 aa, Homo sapiens
  CDR3 for alpha chain variable domain of TCR clone 155460 (TRAV35, TRAJ36)
CARPRIGADNLFF

SEQ ID NO: 310920 - protein, 15 aa, Homo sapiens
  CDR3 for beta chain variable domain of TCR clone 155460 (TRBV28, TRBJ2-5)
CASSPPWSYQETQYF

SEQ ID NO: 310921 - protein, 18 aa, Homo sapiens
  CDR3 for alpha chain variable domain of TCR clone 155461 (TRAV8-4, TRAJ52)
CAVTRANAGGTSYGKLTF

SEQ ID NO: 310922 - protein, 15 aa, Homo sapiens
  CDR3 for beta chain variable domain of TCR clone 155461 (TRBV20-1, TRBJ1-1)
CSASRGVTGNTEAFF

SEQ ID NO: 310923 - protein, 19 aa, Homo sapiens
  CDR3 for alpha chain variable domain of TCR clone 155462 (TRAV26-1, TRAJ52)
CIVRAHRNAGGTSYGKLTF

SEQ ID NO: 310924 - protein, 15 aa, Homo sapiens
  CDR3 for beta chain variable domain of TCR clone 155462 (TRBV29-1, TRBJ2-1)
CSGRDRKRSYNEQFF

SEQ ID NO: 310925 - protein, 14 aa, Homo sapiens
  CDR3 for alpha chain variable domain of TCR clone 155463 (TRAV23/DV6, TRAJ4)
CAAPSSGGYNKLIL

SEQ ID NO: 310926 - protein, 16 aa, Homo sapiens
  CDR3 for beta chain variable domain of TCR clone 155463 (TRBV19, TRBJ1-1)
CASRFGGPVTGTEAFF

SEQ ID NO: 310927 - protein, 15 aa, Homo sapiens
  CDR3 for alpha chain variable domain of TCR clone 155464 (TRAV20, TRAJ4)
CAVEGSSGGYNKLIF

SEQ ID NO: 310928 - protein, 14 aa, Homo sapiens
  CDR3 for beta chain variable domain of TCR clone 155464 (TRBV7-8, TRBJ2-7)
CDSTLGGALGEQYS

SEQ ID NO: 310929 - protein, 16 aa, Homo sapiens
  CDR3 for alpha chain variable domain of TCR clone 155465 (TRAV3, TRAJ18)
CAVRDGRGSTLGRLYF

SEQ ID NO: 310930 - protein, 12 aa, Homo sapiens
  CDR3 for beta chain variable domain of TCR clone 155465 (TRBV12-4, TRBJ2-7)
CASSLGGYEQYF

SEQ ID NO: 310931 - protein, 12 aa, Homo sapiens
  CDR3 for alpha chain variable domain of TCR clone 155466 (TRAV21, TRAJ29)
CAVTSGNSPLVF

SEQ ID NO: 310932 - protein, 15 aa, Homo sapiens
  CDR3 for beta chain variable domain of TCR clone 155466 (TRBV10-2, TRBJ2-6)
CASSEQGTGANVLTF

SEQ ID NO: 310933 - protein, 14 aa, Homo sapiens
  CDR3 for alpha chain variable domain of TCR clone 155467 (TRAV38-1, TRAJ40)
CALRPTSGTYKYIF

SEQ ID NO: 310934 - protein, 13 aa, Homo sapiens
  CDR3 for beta chain variable domain of TCR clone 155467 (TRBV2, TRBJ1-5)
CATAGPGNQPQHF

SEQ ID NO: 310935 - protein, 17 aa, Homo sapiens
  CDR3 for alpha chain variable domain of TCR clone 155468 (TRAV3, TRAJ6)
CAVRDGPRAGGSYIPTF

SEQ ID NO: 310936 - protein, 14 aa, Homo sapiens
  CDR3 for beta chain variable domain of TCR clone 155468 (TRBV7-6, TRBJ2-7)
CASSFRQGADEQYF

SEQ ID NO: 310937 - protein, 17 aa, Homo sapiens
  CDR3 for alpha chain variable domain of TCR clone 155469 (TRAV3, TRAJ6)
CAVREGPRAGGSYIPTF

SEQ ID NO: 310938 - protein, 14 aa, Homo sapiens
  CDR3 for beta chain variable domain of TCR clone 155469 (TRBV7-2, TRBJ2-7)
CASGPKTSFYEQYF

SEQ ID NO: 310939 - protein, 15 aa, Homo sapiens
  CDR3 for alpha chain variable domain of TCR clone 155470 (TRAV12-2, TRAJ53)
CAVNGGGGSNYKLTF

SEQ ID NO: 310940 - protein, 16 aa, Homo sapiens
  CDR3 for beta chain variable domain of TCR clone 155470 (TRBV7-2, TRBJ2-5)
CASSSKWLSGQETQYF

SEQ ID NO: 310941 - protein, 15 aa, Homo sapiens
  CDR3 for alpha chain variable domain of TCR clone 155471 (TRAV2, TRAJ15)
CAVEDREQAGSALIF

SEQ ID NO: 310942 - protein, 13 aa, Homo sapiens
  CDR3 for beta chain variable domain of TCR clone 155471 (TRBV10-2, TRBJ2-3)
CASSESGDHTQYF

SEQ ID NO: 310943 - protein, 13 aa, Homo sapiens
  CDR3 for alpha chain variable domain of TCR clone 155472 (TRAV17, TRAJ22)
CAHHSGSARQLTF

SEQ ID NO: 310944 - protein, 14 aa, Homo sapiens
  CDR3 for beta chain variable domain of TCR clone 155472 (TRBV7-9, TRBJ2-2)
CASSGLADTGELFF

SEQ ID NO: 310945 - protein, 14 aa, Homo sapiens
  CDR3 for alpha chain variable domain of TCR clone 155473 (TRAV38-1, TRAJ45)
CASHSGGGADGLPF

SEQ ID NO: 310946 - protein, 17 aa, Homo sapiens
  CDR3 for beta chain variable domain of TCR clone 155473 (TRBV28, TRBJ2-1)
CASTGPGLAVSEDEQFF

SEQ ID NO: 310947 - protein, 12 aa, Homo sapiens
  CDR3 for alpha chain variable domain of TCR clone 155474 (TRAV27, TRAJ34)
CAGAKNTDKLIF

SEQ ID NO: 310948 - protein, 13 aa, Homo sapiens
  CDR3 for beta chain variable domain of TCR clone 155474 (TRBV4-1, TRBJ2-1)
CASSQGVQYEQFF

SEQ ID NO: 310949 - protein, 13 aa, Homo sapiens
  CDR3 for alpha chain variable domain of TCR clone 155475 (TRAV35, TRAJ37)
CAGSSGNTGKLIF

SEQ ID NO: 310950 - protein, 16 aa, Homo sapiens
  CDR3 for beta chain variable domain of TCR clone 155475 (TRBV10-3, TRBJ2-1)
CAIRLTSGNSYNEQFF

SEQ ID NO: 310951 - protein, 15 aa, Homo sapiens
  CDR3 for alpha chain variable domain of TCR clone 155476 (TRAV8-6, TRAJ9)
CAVSDRDTGGFKTIF

SEQ ID NO: 310952 - protein, 16 aa, Homo sapiens
  CDR3 for beta chain variable domain of TCR clone 155476 (TRBV19, TRBJ2-3)
CASSPEWDRGTHTQYF

SEQ ID NO: 310953 - protein, 14 aa, Homo sapiens
  CDR3 for alpha chain variable domain of TCR clone 155477 (TRAV14/DV4, TRAJ20)
CAMRESLNDYKLSF

SEQ ID NO: 310954 - protein, 15 aa, Homo sapiens
  CDR3 for beta chain variable domain of TCR clone 155477 (TRBV4-1, TRBJ1-4)
CASSDTGGTNEKLFF

SEQ ID NO: 310955 - protein, 14 aa, Homo sapiens
  CDR3 for alpha chain variable domain of TCR clone 155478 (TRAV26-2, TRAJ38)
CILYNAGNNRKLIW

SEQ ID NO: 310956 - protein, 14 aa, Homo sapiens
  CDR3 for beta chain variable domain of TCR clone 155478 (TRBV19, TRBJ2-1)
YASPTFVLSGEQFF

SEQ ID NO: 310957 - protein, 16 aa, Homo sapiens
  CDR3 for alpha chain variable domain of TCR clone 155479 (TRAV3, TRAJ37)
CAVRVRGSGNTGKLLF

SEQ ID NO: 310958 - protein, 13 aa, Homo sapiens
  CDR3 for beta chain variable domain of TCR clone 155479 (TRBV7-9, TRBJ1-2)
CASSLKQNYGYTF

SEQ ID NO: 310959 - protein, 21 aa, Homo sapiens
  CDR3 for alpha chain variable domain of TCR clone 155480 (TRAV3, )
CAVRPTPDIQNPDPAVYPLRD

SEQ ID NO: 310960 - protein, 15 aa, Homo sapiens
  CDR3 for beta chain variable domain of TCR clone 155480 (TRBV7-2, TRBJ1-2)
CASSPRASWNYGYTF

SEQ ID NO: 310961 - protein, 14 aa, Homo sapiens
  CDR3 for alpha chain variable domain of TCR clone 155481 (TRAV12-3, TRAJ54)
CAMRIIQGAQKLLF

SEQ ID NO: 310962 - protein, 16 aa, Homo sapiens
  CDR3 for beta chain variable domain of TCR clone 155481 (TRBV28, TRBJ2-1)
CASRVPASGRIGEQFF

SEQ ID NO: 310963 - protein, 12 aa, Homo sapiens
  CDR3 for alpha chain variable domain of TCR clone 155482 (TRAV3, TRAJ43)
CAVRDPNNDMRF

SEQ ID NO: 310964 - protein, 14 aa, Homo sapiens
  CDR3 for beta chain variable domain of TCR clone 155482 (TRBV7-2, TRBJ2-7)
CASSLRWEVNEQYF

SEQ ID NO: 310965 - protein, 13 aa, Homo sapiens
  CDR3 for alpha chain variable domain of TCR clone 155483 (TRAV21, TRAJ57)
CAVTQGGSEKLVF

SEQ ID NO: 310966 - protein, 14 aa, Homo sapiens
  CDR3 for beta chain variable domain of TCR clone 155483 (TRBV2, TRBJ2-5)
CASSEVLAQETQYF

SEQ ID NO: 310967 - protein, 15 aa, Homo sapiens
  CDR3 for alpha chain variable domain of TCR clone 155484 (TRAV13-2, TRAJ10)
CAENRDTGGGNKLTF

SEQ ID NO: 310968 - protein, 16 aa, Homo sapiens
  CDR3 for beta chain variable domain of TCR clone 155484 (TRBV2, TRBJ1-3)
CASSRTGGSTGNTKYF

SEQ ID NO: 310969 - protein, 15 aa, Homo sapiens
  CDR3 for alpha chain variable domain of TCR clone 155485 (TRAV8-6, TRAJ45)
CAVSGAGGGADGLTF

SEQ ID NO: 310970 - protein, 13 aa, Homo sapiens
  CDR3 for beta chain variable domain of TCR clone 155485 (TRBV12-4, TRBJ2-1)
CASSHYTDNEQFF

SEQ ID NO: 310971 - protein, 15 aa, Homo sapiens
  CDR3 for alpha chain variable domain of TCR clone 155486 (TRAV21, TRAJ24)
CAARSSTDSWGNLQF

SEQ ID NO: 310972 - protein, 15 aa, Homo sapiens
  CDR3 for beta chain variable domain of TCR clone 155486 (TRBV5-1, TRBJ2-1)
CASSPPRAPYNEQFF

SEQ ID NO: 310973 - protein, 13 aa, Homo sapiens
  CDR3 for alpha chain variable domain of TCR clone 155487 (TRAV8-1, TRAJ34)
CAVRPYNTAKLIF

SEQ ID NO: 310974 - protein, 15 aa, Homo sapiens
  CDR3 for beta chain variable domain of TCR clone 155487 (TRBV7-9, TRBJ1-3)
CASSLRSGSGNTIYF

SEQ ID NO: 310975 - protein, 15 aa, Homo sapiens
  CDR3 for alpha chain variable domain of TCR clone 155488 (TRAV21, TRAJ53)
CATLNSGGSNYKLTF

SEQ ID NO: 310976 - protein, 16 aa, Homo sapiens
  CDR3 for beta chain variable domain of TCR clone 155488 (TRBV9, TRBJ2-1)
CASSVGGGGNSNEQFF

SEQ ID NO: 310977 - protein, 14 aa, Homo sapiens
  CDR3 for alpha chain variable domain of TCR clone 155489 (TRAV1-2, TRAJ16)
CAVNRFSDGQKLLF

SEQ ID NO: 310978 - protein, 15 aa, Homo sapiens
  CDR3 for beta chain variable domain of TCR clone 155489 (TRBV7-9, TRBJ1-6)
CASSSPGRVNSTLHF

SEQ ID NO: 310979 - protein, 13 aa, Homo sapiens
  CDR3 for alpha chain variable domain of TCR clone 155490 (TRAV26-1, TRAJ40)
CIVRGTGTYKYIF

SEQ ID NO: 310980 - protein, 16 aa, Homo sapiens
  CDR3 for beta chain variable domain of TCR clone 155490 (TRBV20-1, TRBJ1-1)
CSARDRTLAMNTEAFF

SEQ ID NO: 310981 - protein, 16 aa, Homo sapiens
  CDR3 for alpha chain variable domain of TCR clone 155491 (TRAV21, TRAJ52)
CAVTNAGGTSYGKLTF

SEQ ID NO: 310982 - protein, 13 aa, Homo sapiens
  CDR3 for beta chain variable domain of TCR clone 155491 (TRBV20-1, TRBJ2-3)
CGARLAGTDTQYF

SEQ ID NO: 310983 - protein, 15 aa, Homo sapiens
  CDR3 for alpha chain variable domain of TCR clone 155492 (TRAV38-2/DV8, TRAJ48)
CAYRSGGFGNDKLTF

SEQ ID NO: 310984 - protein, 16 aa, Homo sapiens
  CDR3 for beta chain variable domain of TCR clone 155492 (TRBV28, TRBJ2-7)
CASSPWVATGDLSQYF

SEQ ID NO: 310985 - protein, 12 aa, Homo sapiens
  CDR3 for alpha chain variable domain of TCR clone 155493 (TRAV12-2, TRAJ21)
CAVRYNFNKFYF

SEQ ID NO: 310986 - protein, 14 aa, Homo sapiens
  CDR3 for beta chain variable domain of TCR clone 155493 (TRBV28, TRBJ2-1)
CASGYYTPYNEQFS

SEQ ID NO: 310987 - protein, 14 aa, Homo sapiens
  CDR3 for alpha chain variable domain of TCR clone 155494 (TRAV12-1, TRAJ17)
CVVNYKAAGNKLTF

SEQ ID NO: 310988 - protein, 16 aa, Homo sapiens
  CDR3 for beta chain variable domain of TCR clone 155494 (TRBV12-4, TRBJ1-5)
CASSRPVGGSNQPQQF

SEQ ID NO: 310989 - protein, 12 aa, Homo sapiens
  CDR3 for alpha chain variable domain of TCR clone 155495 (TRAV17, TRAJ34)
CATDAKCDKLIF

SEQ ID NO: 310990 - protein, 12 aa, Homo sapiens
  CDR3 for beta chain variable domain of TCR clone 155495 (TRBV7-2, TRBJ2-7)
CASSSHSYEQYF

SEQ ID NO: 310991 - protein, 16 aa, Homo sapiens
  CDR3 for alpha chain variable domain of TCR clone 155496 (TRAV30, TRAJ24)
CGTEIVDAASWGKFKF

SEQ ID NO: 310992 - protein, 14 aa, Homo sapiens
  CDR3 for beta chain variable domain of TCR clone 155496 (TRBV12-5, TRBJ2-5)
CASGSRTHQETQYF

SEQ ID NO: 310993 - protein, 16 aa, Homo sapiens
  CDR3 for alpha chain variable domain of TCR clone 155497 (TRAV30, TRAJ24)
CGKEIVDADSWGKFQF

SEQ ID NO: 310994 - protein, 16 aa, Homo sapiens
  CDR3 for beta chain variable domain of TCR clone 155497 (TRBV4-2, TRBJ2-1)
CASSQDGTGGYNEQFF

SEQ ID NO: 310995 - protein, 17 aa, Homo sapiens
  CDR3 for alpha chain variable domain of TCR clone 155498 (TRAV4, TRAJ42)
CLVGVLNNGGSQGNLIF

SEQ ID NO: 310996 - protein, 12 aa, Homo sapiens
  CDR3 for beta chain variable domain of TCR clone 155498 (TRBV20-1, TRBJ2-1)
CSAQYTYNEQFF

SEQ ID NO: 310997 - protein, 15 aa, Homo sapiens
  CDR3 for alpha chain variable domain of TCR clone 155499 (TRAV21, TRAJ24)
CAARSSPDSWGKLQF

SEQ ID NO: 310998 - protein, 15 aa, Homo sapiens
  CDR3 for beta chain variable domain of TCR clone 155499 (TRBV20-1, TRBJ1-1)
CSASRGVTGNTEAFF

SEQ ID NO: 310999 - protein, 16 aa, Homo sapiens
  CDR3 for alpha chain variable domain of TCR clone 155500 (TRAV3, TRAJ37)
CAVRGKGSGNTGKLIF

SEQ ID NO: 311000 - protein, 17 aa, Homo sapiens
  CDR3 for beta chain variable domain of TCR clone 155500 (TRBV7-6, TRBJ2-5)
CASSPGLADPWGETQYF

SEQ ID NO: 311001 - protein, 14 aa, Homo sapiens
  CDR3 for alpha chain variable domain of TCR clone 155501 (TRAV21, TRAJ45)
CAVSSGGGADGLTF

SEQ ID NO: 311002 - protein, 15 aa, Homo sapiens
  CDR3 for beta chain variable domain of TCR clone 155501 (TRBV6-1, TRBJ1-2)
CASTYEWEANYGYTF

SEQ ID NO: 311003 - protein, 12 aa, Homo sapiens
  CDR3 for alpha chain variable domain of TCR clone 155502 (TRAV13-1, TRAJ21)
CAAKEGFNKFYF

SEQ ID NO: 311004 - protein, 14 aa, Homo sapiens
  CDR3 for beta chain variable domain of TCR clone 155502 (TRBV7-7, TRBJ2-2)
CATRQDSDTGELFF

SEQ ID NO: 311005 - protein, 13 aa, Homo sapiens
  CDR3 for alpha chain variable domain of TCR clone 155503 (TRAV2, TRAJ15)
CAVASQAGTALFF

SEQ ID NO: 311006 - protein, 15 aa, Homo sapiens
  CDR3 for beta chain variable domain of TCR clone 155503 (TRBV20-1, TRBJ2-7)
CSARDRVSGMDEQYF

SEQ ID NO: 311007 - protein, 15 aa, Homo sapiens
  CDR3 for alpha chain variable domain of TCR clone 155504 (TRAV8-6, TRAJ38)
CAVSSNAGNNRKLIW

SEQ ID NO: 311008 - protein, 18 aa, Homo sapiens
  CDR3 for beta chain variable domain of TCR clone 155504 (TRBV11-2, TRBJ2-3)
CASSLGGASRGAPNTQYF

SEQ ID NO: 311009 - protein, 16 aa, Homo sapiens
  CDR3 for alpha chain variable domain of TCR clone 155505 (TRAV12-3, TRAJ53)
CAMSPGSGGSNYKLTF

SEQ ID NO: 311010 - protein, 16 aa, Homo sapiens
  CDR3 for beta chain variable domain of TCR clone 155505 (TRBV29-1, TRBJ2-7)
CSVEDAEGGTAYEQYF

SEQ ID NO: 311011 - protein, 11 aa, Homo sapiens
  CDR3 for alpha chain variable domain of TCR clone 155506 (TRAV21, TRAJ39)
LLVNAGNMLTF

SEQ ID NO: 311012 - protein, 15 aa, Homo sapiens
  CDR3 for beta chain variable domain of TCR clone 155506 (TRBV7-2, TRBJ2-3)
CASSSTGLETDTQYF

SEQ ID NO: 311013 - protein, 17 aa, Homo sapiens
  CDR3 for alpha chain variable domain of TCR clone 155507 (TRAV13-1, TRAJ28)
CAAGPPYSGAGSYQLTF

SEQ ID NO: 311014 - protein, 12 aa, Homo sapiens
  CDR3 for beta chain variable domain of TCR clone 155507 (TRBV11-2, TRBJ2-2)
CASSLPTGELFF

SEQ ID NO: 311015 - protein, 12 aa, Homo sapiens
  CDR3 for alpha chain variable domain of TCR clone 155508 (TRAV8-3, TRAJ26)
CAGYNYGQNFVF

SEQ ID NO: 311016 - protein, 15 aa, Homo sapiens
  CDR3 for beta chain variable domain of TCR clone 155508 (TRBV5-1, TRBJ2-3)
CASSVTSGSTDTQYF

SEQ ID NO: 311017 - protein, 13 aa, Homo sapiens
  CDR3 for alpha chain variable domain of TCR clone 155509 (TRAV12-1, TRAJ3)
CVVNPRGASKIIF

SEQ ID NO: 311018 - protein, 13 aa, Homo sapiens
  CDR3 for beta chain variable domain of TCR clone 155509 (TRBV28, TRBJ1-5)
CASSDRGNQPQHC

SEQ ID NO: 311019 - protein, 13 aa, Homo sapiens
  CDR3 for alpha chain variable domain of TCR clone 155510 (TRAV21, TRAJ34)
CAVSEGDTDKLIF

SEQ ID NO: 311020 - protein, 14 aa, Homo sapiens
  CDR3 for beta chain variable domain of TCR clone 155510 (TRBV19, TRBJ1-2)
CASSLQGQAYGYTF

SEQ ID NO: 311021 - protein, 18 aa, Homo sapiens
  CDR3 for alpha chain variable domain of TCR clone 155511 (TRAV8-3, TRAJ4)
WVRDPTSNDPGGYNKLIF

SEQ ID NO: 311022 - protein, 13 aa, Homo sapiens
  CDR3 for beta chain variable domain of TCR clone 155511 (TRBV20-1, TRBJ1-2)
CSATGIQGSGYTV

SEQ ID NO: 311023 - protein, 13 aa, Homo sapiens
  CDR3 for alpha chain variable domain of TCR clone 155512 (TRAV27, TRAJ45)
CRSSGGGADGLTF

SEQ ID NO: 311024 - protein, 14 aa, Homo sapiens
  CDR3 for beta chain variable domain of TCR clone 155512 (TRBV7-9, TRBJ2-1)
CASSSMGGFGEQFF

SEQ ID NO: 311025 - protein, 16 aa, Homo sapiens
  CDR3 for alpha chain variable domain of TCR clone 155513 (TRAV12-1, TRAJ42)
CVVTPYYGGSQGKLIF

SEQ ID NO: 311026 - protein, 15 aa, Homo sapiens
  CDR3 for beta chain variable domain of TCR clone 155513 (TRBV4-3, TRBJ2-7)
CASSQGGRGIYEQYF

SEQ ID NO: 311027 - protein, 13 aa, Homo sapiens
  CDR3 for alpha chain variable domain of TCR clone 155514 (TRAV21, TRAJ57)
CAVTQGGSEKLVF

SEQ ID NO: 311028 - protein, 18 aa, Homo sapiens
  CDR3 for beta chain variable domain of TCR clone 155514 (TRBV29-1, TRBJ2-7)
CSVKMLRTVRPTSSTSGR

SEQ ID NO: 311029 - protein, 15 aa, Homo sapiens
  CDR3 for alpha chain variable domain of TCR clone 155515 (TRAV14/DV4, TRAJ26)
CAMREGQNYGQNFVF

SEQ ID NO: 311030 - protein, 12 aa, Homo sapiens
  CDR3 for beta chain variable domain of TCR clone 155515 (TRBV11-2, TRBJ2-2)
CASSLGGGELFF

SEQ ID NO: 311031 - protein, 14 aa, Homo sapiens
  CDR3 for alpha chain variable domain of TCR clone 155516 (TRAV13-1, TRAJ29)
CAASKDSGNTPLVF

SEQ ID NO: 311032 - protein, 14 aa, Homo sapiens
  CDR3 for beta chain variable domain of TCR clone 155516 (TRBV29-1, TRBJ2-2)
CSVGAGTNTGELFF

SEQ ID NO: 311033 - protein, 13 aa, Homo sapiens
  CDR3 for alpha chain variable domain of TCR clone 155517 (TRAV29/DV5, TRAJ31)
CAASRNNNARLMF

SEQ ID NO: 311034 - protein, 17 aa, Homo sapiens
  CDR3 for beta chain variable domain of TCR clone 155517 (TRBV25-1, TRBJ2-7)
CASSDARVVFSSYEQYF

SEQ ID NO: 311035 - protein, 14 aa, Homo sapiens
  CDR3 for alpha chain variable domain of TCR clone 155518 (TRAV12-1, TRAJ4)
CVVPLKSCYNKLIF

SEQ ID NO: 311036 - protein, 13 aa, Homo sapiens
  CDR3 for beta chain variable domain of TCR clone 155518 (TRBV27, TRBJ2-7)
CASGRGGAYEQYF

SEQ ID NO: 311037 - protein, 17 aa, Homo sapiens
  CDR3 for alpha chain variable domain of TCR clone 155519 (TRAV3, TRAJ12)
CAVRDGGRMDSGYKLIF

SEQ ID NO: 311038 - protein, 14 aa, Homo sapiens
  CDR3 for beta chain variable domain of TCR clone 155519 (TRBV7-9, TRBJ1-2)
CASSRQGANYGYTF

SEQ ID NO: 311039 - protein, 11 aa, Homo sapiens
  CDR3 for alpha chain variable domain of TCR clone 155520 (TRAV3, TRAJ21)
CSVGNFNKLYF

SEQ ID NO: 311040 - protein, 17 aa, Homo sapiens
  CDR3 for beta chain variable domain of TCR clone 155520 (TRBV24-1, TRBJ2-1)
CATSDVSTSGTYNEQFF

SEQ ID NO: 311041 - protein, 13 aa, Homo sapiens
  CDR3 for alpha chain variable domain of TCR clone 155521 (TRAV21, TRAJ36)
CAVIMTGANNLFF

SEQ ID NO: 311042 - protein, 13 aa, Homo sapiens
  CDR3 for beta chain variable domain of TCR clone 155521 (TRBV29-1, TRBJ2-3)
CSATRGGRDTQYF

SEQ ID NO: 311043 - protein, 14 aa, Homo sapiens
  CDR3 for alpha chain variable domain of TCR clone 155522 (TRAV2, TRAJ9)
CAVEDRSGGFKTSF

SEQ ID NO: 311044 - protein, 15 aa, Homo sapiens
  CDR3 for beta chain variable domain of TCR clone 155522 (TRBV20-1, TRBJ2-7)
CSARDRVSGMDEQYF

SEQ ID NO: 311045 - protein, 11 aa, Homo sapiens
  CDR3 for alpha chain variable domain of TCR clone 155523 (TRAV13-1, TRAJ39)
CASHAGNMLHF

SEQ ID NO: 311046 - protein, 15 aa, Homo sapiens
  CDR3 for beta chain variable domain of TCR clone 155523 (TRBV20-1, TRBJ2-7)
CSARDRVSGMDEQYL

SEQ ID NO: 311047 - protein, 18 aa, Homo sapiens
  CDR3 for alpha chain variable domain of TCR clone 155524 (TRAV26-2, TRAJ54)
CILRDVEVGIQGAQKLVF

SEQ ID NO: 311048 - protein, 14 aa, Homo sapiens
  CDR3 for beta chain variable domain of TCR clone 155524 (TRBV11-2, TRBJ1-4)
CASSFLAGYEKLFF

SEQ ID NO: 311049 - protein, 11 aa, Homo sapiens
  CDR3 for alpha chain variable domain of TCR clone 155525 (TRAV3, TRAJ21)
CAVGNFNKFYF

SEQ ID NO: 311050 - protein, 14 aa, Homo sapiens
  CDR3 for beta chain variable domain of TCR clone 155525 (TRBV12-4, TRBJ1-2)
CASTHGTSNYGYTF

SEQ ID NO: 311051 - protein, 15 aa, Homo sapiens
  CDR3 for alpha chain variable domain of TCR clone 155526 (TRAV8-3, TRAJ37)
CAVGARASNTGKLIC

SEQ ID NO: 311052 - protein, 15 aa, Homo sapiens
  CDR3 for beta chain variable domain of TCR clone 155526 (TRBV5-4, TRBJ2-3)
CASSLAGRVTDTQYF

SEQ ID NO: 311053 - protein, 14 aa, Homo sapiens
  CDR3 for alpha chain variable domain of TCR clone 155527 (TRAV1-2, TRAJ8)
CAVREDTGFQKLVF

SEQ ID NO: 311054 - protein, 12 aa, Homo sapiens
  CDR3 for beta chain variable domain of TCR clone 155527 (TRBV11-2, TRBJ2-2)
CASSLEGGELFF

SEQ ID NO: 311055 - protein, 13 aa, Homo sapiens
  CDR3 for alpha chain variable domain of TCR clone 155528 (TRAV36/DV7, TRAJ30)
CAVEPVRDDKIIF

SEQ ID NO: 311056 - protein, 11 aa, Homo sapiens
  CDR3 for beta chain variable domain of TCR clone 155528 (TRBV10-3, TRBJ2-7)
CAISEGLEQYF

SEQ ID NO: 311057 - protein, 12 aa, Homo sapiens
  CDR3 for alpha chain variable domain of TCR clone 155529 (TRAV16, TRAJ56)
CAPTGANNKLTF

SEQ ID NO: 311058 - protein, 17 aa, Homo sapiens
  CDR3 for beta chain variable domain of TCR clone 155529 (TRBV27, TRBJ2-6)
CASSLTGFASGANVLTF

SEQ ID NO: 311059 - protein, 11 aa, Homo sapiens
  CDR3 for alpha chain variable domain of TCR clone 155530 (TRAV21, TRAJ49)
CAVSFGNQLYF

SEQ ID NO: 311060 - protein, 13 aa, Homo sapiens
  CDR3 for beta chain variable domain of TCR clone 155530 (TRBV7-9, TRBJ1-2)
CASSLKQNYGYTF

SEQ ID NO: 311061 - protein, 14 aa, Homo sapiens
  CDR3 for alpha chain variable domain of TCR clone 155531 (TRAV12-1, TRAJ24)
CVVRSTDSWGKFQF

SEQ ID NO: 311062 - protein, 14 aa, Homo sapiens
  CDR3 for beta chain variable domain of TCR clone 155531 (TRBV11-2, TRBJ2-5)
CASSRTGGIETQYF

SEQ ID NO: 311063 - protein, 22 aa, Homo sapiens
  CDR3 for alpha chain variable domain of TCR clone 155532 (TRAV8-2, TRAJ45)
HLTKPSAHMSDAAEYSANGLTF

SEQ ID NO: 311064 - protein, 13 aa, Homo sapiens
  CDR3 for beta chain variable domain of TCR clone 155532 (TRBV7-3, TRBJ2-1)
CASSPVAYNEQFF

SEQ ID NO: 311065 - protein, 17 aa, Homo sapiens
  CDR3 for alpha chain variable domain of TCR clone 155533 (TRAV23/DV6, TRAJ57)
CAASPTLSQGGSEKLVF

SEQ ID NO: 311066 - protein, 14 aa, Homo sapiens
  CDR3 for beta chain variable domain of TCR clone 155533 (TRBV13, TRBJ2-5)
CASSLGQGKETQYF

SEQ ID NO: 311067 - protein, 13 aa, Homo sapiens
  CDR3 for alpha chain variable domain of TCR clone 155534 (TRAV29/DV5, TRAJ47)
CAASAEYGNKLVL

SEQ ID NO: 311068 - protein, 13 aa, Homo sapiens
  CDR3 for beta chain variable domain of TCR clone 155534 (TRBV27, TRBJ1-4)
CASSLMGDEKLFF

SEQ ID NO: 311069 - protein, 14 aa, Homo sapiens
  CDR3 for alpha chain variable domain of TCR clone 155535 (TRAV8-4, TRAJ9)
CAVRITTGDFKTIF

SEQ ID NO: 311070 - protein, 15 aa, Homo sapiens
  CDR3 for beta chain variable domain of TCR clone 155535 (TRBV10-2, TRBJ2-6)
CASSEQGTGANVLTF

SEQ ID NO: 311071 - protein, 14 aa, Homo sapiens
  CDR3 for alpha chain variable domain of TCR clone 155536 (TRAV4, TRAJ17)
CLVGDMAAGNKLTF

SEQ ID NO: 311072 - protein, 16 aa, Homo sapiens
  CDR3 for beta chain variable domain of TCR clone 155536 (TRBV20-1, TRBJ1-4)
CSAPGQGLLTNEKLFF

SEQ ID NO: 311073 - protein, 15 aa, Homo sapiens
  CDR3 for alpha chain variable domain of TCR clone 155537 (TRAV13-1, TRAJ3)
CAASKLASSDSKITF

SEQ ID NO: 311074 - protein, 16 aa, Homo sapiens
  CDR3 for beta chain variable domain of TCR clone 155537 (TRBV25-1, TRBJ1-5)
CASGAPTVNSNQPQHF

SEQ ID NO: 311075 - protein, 12 aa, Homo sapiens
  CDR3 for alpha chain variable domain of TCR clone 155538 (TRAV17, TRAJ39)
CATGAAGNMLTF

SEQ ID NO: 311076 - protein, 14 aa, Homo sapiens
  CDR3 for beta chain variable domain of TCR clone 155538 (TRBV7-9, TRBJ1-2)
CASSRQGANDGYTF

SEQ ID NO: 311077 - protein, 13 aa, Homo sapiens
  CDR3 for alpha chain variable domain of TCR clone 155539 (TRAV26-2, TRAJ37)
CIRGSSNTGKRIF

SEQ ID NO: 311078 - protein, 16 aa, Homo sapiens
  CDR3 for beta chain variable domain of TCR clone 155539 (TRBV7-2, TRBJ2-5)
CASSPGGARRGETQYF

SEQ ID NO: 311079 - protein, 10 aa, Homo sapiens
  CDR3 for alpha chain variable domain of TCR clone 155540 (TRAV29/DV5, TRAJ54)
LIQGAQKLVF

SEQ ID NO: 311080 - protein, 18 aa, Homo sapiens
  CDR3 for beta chain variable domain of TCR clone 155540 (TRBV3-1, TRBJ1-2)
YASSQDVIGWNGDYGYTF

SEQ ID NO: 311081 - protein, 13 aa, Homo sapiens
  CDR3 for alpha chain variable domain of TCR clone 155541 (TRAV16, TRAJ34)
CITVLSHTDKLIF

SEQ ID NO: 311082 - protein, 11 aa, Homo sapiens
  CDR3 for beta chain variable domain of TCR clone 155541 (TRBV11-2, TRBJ2-2)
CASSLPGELFF

SEQ ID NO: 311083 - protein, 15 aa, Homo sapiens
  CDR3 for alpha chain variable domain of TCR clone 155542 (TRAV8-2, TRAJ10)
CVVSHSTGGGNKLTF

SEQ ID NO: 311084 - protein, 13 aa, Homo sapiens
  CDR3 for beta chain variable domain of TCR clone 155542 (TRBV7-9, TRBJ1-2)
CASSLKQNYGYTF

SEQ ID NO: 311085 - protein, 16 aa, Homo sapiens
  CDR3 for alpha chain variable domain of TCR clone 155543 (TRAV12-3, TRAJ53)
CAMSPGSGGSNYKLTF

SEQ ID NO: 311086 - protein, 11 aa, Homo sapiens
  CDR3 for beta chain variable domain of TCR clone 155543 (TRBV29-1, TRBJ2-5)
CSEGRTGTQCF

SEQ ID NO: 311087 - protein, 16 aa, Homo sapiens
  CDR3 for alpha chain variable domain of TCR clone 155544 (TRAV12-3, TRAJ53)
RAMSPGSGGSNYRLTF

SEQ ID NO: 311088 - protein, 14 aa, Homo sapiens
  CDR3 for beta chain variable domain of TCR clone 155544 (TRBV2, TRBJ2-7)
CASSLTAGGYEQYF

SEQ ID NO: 311089 - protein, 14 aa, Homo sapiens
  CDR3 for alpha chain variable domain of TCR clone 155545 (TRAV25, TRAJ52)
CAGRPGGSYGKLTF

SEQ ID NO: 311090 - protein, 17 aa, Homo sapiens
  CDR3 for beta chain variable domain of TCR clone 155545 (TRBV7-8, TRBJ2-6)
CASSAGTGGAGANVLTF

SEQ ID NO: 311091 - protein, 18 aa, Homo sapiens
  CDR3 for alpha chain variable domain of TCR clone 155546 (TRAV26-2, TRAJ45)
CILRVDKYSGGGADGRTF

SEQ ID NO: 311092 - protein, 13 aa, Homo sapiens
  CDR3 for beta chain variable domain of TCR clone 155546 (TRBV7-2, TRBJ1-1)
CASSRNTNTEAFF

SEQ ID NO: 311093 - protein, 17 aa, Homo sapiens
  CDR3 for alpha chain variable domain of TCR clone 155547 (TRAV3, TRAJ6)
CAVRDGPRAGGSYIPTF

SEQ ID NO: 311094 - protein, 12 aa, Homo sapiens
  CDR3 for beta chain variable domain of TCR clone 155547 (TRBV27, TRBJ2-7)
CASSGGFYEQYF

SEQ ID NO: 311095 - protein, 13 aa, Homo sapiens
  CDR3 for alpha chain variable domain of TCR clone 155548 (TRAV8-3, TRAJ36)
CAVGATGANNLFS

SEQ ID NO: 311096 - protein, 14 aa, Homo sapiens
  CDR3 for beta chain variable domain of TCR clone 155548 (TRBV7-2, TRBJ2-7)
CASSPKTSFYEQYF

SEQ ID NO: 311097 - protein, 12 aa, Homo sapiens
  CDR3 for alpha chain variable domain of TCR clone 155549 (TRAV12-3, TRAJ17)
CAMTLTGNKLTF

SEQ ID NO: 311098 - protein, 13 aa, Homo sapiens
  CDR3 for beta chain variable domain of TCR clone 155549 (TRBV27, TRBJ2-1)
CASWTLGVGEQFF

SEQ ID NO: 311099 - protein, 12 aa, Homo sapiens
  CDR3 for alpha chain variable domain of TCR clone 155550 (TRAV1-1, TRAJ39)
CAVPVVGNMLTF

SEQ ID NO: 311100 - protein, 20 aa, Homo sapiens
  CDR3 for beta chain variable domain of TCR clone 155550 (TRBV28, TRBJ2-1)
CASTPIGRSPGLAGGNEQFF

SEQ ID NO: 311101 - protein, 15 aa, Homo sapiens
  CDR3 for alpha chain variable domain of TCR clone 155551 (TRAV12-3, TRAJ6)
CAMSATTGGSYIPTF

SEQ ID NO: 311102 - protein, 13 aa, Homo sapiens
  CDR3 for beta chain variable domain of TCR clone 155551 (TRBV6-3, TRBJ2-7)
CASSVSGGYEQYF

SEQ ID NO: 311103 - protein, 14 aa, Homo sapiens
  CDR3 for alpha chain variable domain of TCR clone 155552 (TRAV13-1, TRAJ32)
CAARGSGATNKRIF

SEQ ID NO: 311104 - protein, 15 aa, Homo sapiens
  CDR3 for beta chain variable domain of TCR clone 155552 (TRBV5-5, TRBJ1-1)
CASSLVGKDNTEAFF

SEQ ID NO: 311105 - protein, 14 aa, Homo sapiens
  CDR3 for alpha chain variable domain of TCR clone 155553 (TRAV35, TRAJ22)
CAGLRPCSARQLTF

SEQ ID NO: 311106 - protein, 13 aa, Homo sapiens
  CDR3 for beta chain variable domain of TCR clone 155553 (TRBV20-1, TRBJ1-1)
CSARGGGNTEAFF

SEQ ID NO: 311107 - protein, 14 aa, Homo sapiens
  CDR3 for alpha chain variable domain of TCR clone 155554 (TRAV8-3, TRAJ42)
CAVGAWGIQGNLIF

SEQ ID NO: 311108 - protein, 15 aa, Homo sapiens
  CDR3 for beta chain variable domain of TCR clone 155554 (TRBV29-1, TRBJ1-2)
CSVVLEAGSNYGYTF

SEQ ID NO: 311109 - protein, 11 aa, Homo sapiens
  CDR3 for alpha chain variable domain of TCR clone 155555 (TRAV12-1, TRAJ21)
CVVNNFNKFYF

SEQ ID NO: 311110 - protein, 15 aa, Homo sapiens
  CDR3 for beta chain variable domain of TCR clone 155555 (TRBV5-1, TRBJ2-3)
CASSVTSGSTDTQYF

SEQ ID NO: 311111 - protein, 15 aa, Homo sapiens
  CDR3 for alpha chain variable domain of TCR clone 155556 (TRAV26-1, TRAJ37)
CFVKTGSSNTGKLIF

SEQ ID NO: 311112 - protein, 12 aa, Homo sapiens
  CDR3 for beta chain variable domain of TCR clone 155556 (TRBV7-8, TRBJ2-7)
CASSLGDREQYF

SEQ ID NO: 311113 - protein, 14 aa, Homo sapiens
  CDR3 for alpha chain variable domain of TCR clone 155557 (TRAV4, TRAJ26)
CLVGPHNYGQNFVF

SEQ ID NO: 311114 - protein, 17 aa, Homo sapiens
  CDR3 for beta chain variable domain of TCR clone 155557 (TRBV20-1, TRBJ2-2)
CSASGSGQGGLTGELFF

SEQ ID NO: 311115 - protein, 14 aa, Homo sapiens
  CDR3 for alpha chain variable domain of TCR clone 155558 (TRAV1-2, TRAJ8)
CAVREDTGFQKLVF

SEQ ID NO: 311116 - protein, 15 aa, Homo sapiens
  CDR3 for beta chain variable domain of TCR clone 155558 (TRBV28, TRBJ2-5)
CASSLGLGNQETQYF

SEQ ID NO: 311117 - protein, 12 aa, Homo sapiens
  CDR3 for alpha chain variable domain of TCR clone 155559 (TRAV8-4, TRAJ43)
CAVSVNNHDMRF

SEQ ID NO: 311118 - protein, 14 aa, Homo sapiens
  CDR3 for beta chain variable domain of TCR clone 155559 (TRBV11-2, TRBJ1-2)
CASSLGTANYGYTF

SEQ ID NO: 311119 - protein, 13 aa, Homo sapiens
  CDR3 for alpha chain variable domain of TCR clone 155560 (TRAV23/DV6, TRAJ16)
CAASISDGQKLRF

SEQ ID NO: 311120 - protein, 15 aa, Homo sapiens
  CDR3 for beta chain variable domain of TCR clone 155560 (TRBV2, TRBJ2-2)
CASSRETVGTGELFF

SEQ ID NO: 311121 - protein, 17 aa, Homo sapiens
  CDR3 for alpha chain variable domain of TCR clone 155561 (TRAV4, TRAJ18)
CLVVAAGRGSTLGRLYF

SEQ ID NO: 311122 - protein, 17 aa, Homo sapiens
  CDR3 for beta chain variable domain of TCR clone 155561 (TRBV28, TRBJ2-2)
CASSLATGMGDAGELFV

SEQ ID NO: 311123 - protein, 18 aa, Homo sapiens
  CDR3 for alpha chain variable domain of TCR clone 155562 (TRAV21, TRAJ52)
CAVRPSPASGTSYGKLTF

SEQ ID NO: 311124 - protein, 16 aa, Homo sapiens
  CDR3 for beta chain variable domain of TCR clone 155562 (TRBV7-3, TRBJ2-1)
CASSLEGYRSYNEQFF

SEQ ID NO: 311125 - protein, 13 aa, Homo sapiens
  CDR3 for alpha chain variable domain of TCR clone 155563 (TRAV21, TRAJ20)
CAVGLRVDYTLSF

SEQ ID NO: 311126 - protein, 15 aa, Homo sapiens
  CDR3 for beta chain variable domain of TCR clone 155563 (TRBV7-8, TRBJ2-1)
CASSPSGTIYNEQFF

SEQ ID NO: 311127 - protein, 15 aa, Homo sapiens
  CDR3 for alpha chain variable domain of TCR clone 155564 (TRAV8-3, TRAJ45)
CASSYSGGGVEGLTF

SEQ ID NO: 311128 - protein, 13 aa, Homo sapiens
  CDR3 for beta chain variable domain of TCR clone 155564 (TRBV10-3, TRBJ2-7)
CASKLAVNYEQYF

SEQ ID NO: 311129 - protein, 16 aa, Homo sapiens
  CDR3 for alpha chain variable domain of TCR clone 155565 (TRAV3, TRAJ37)
CAVRPHGSGNTGKLTF

SEQ ID NO: 311130 - protein, 13 aa, Homo sapiens
  CDR3 for beta chain variable domain of TCR clone 155565 (TRBV12-4, TRBJ2-3)
CASSSPLGGTQYF

SEQ ID NO: 311131 - protein, 13 aa, Homo sapiens
  CDR3 for alpha chain variable domain of TCR clone 155566 (TRAV27, TRAJ41)
CAGEGNSGDALNF

SEQ ID NO: 311132 - protein, 14 aa, Homo sapiens
  CDR3 for beta chain variable domain of TCR clone 155566 (TRBV12-4, TRBJ2-7)
CASSPRQDLYEQYF

SEQ ID NO: 311133 - protein, 16 aa, Homo sapiens
  CDR3 for alpha chain variable domain of TCR clone 155567 (TRAV30, TRAJ24)
CGTEIVDADSWGKFQF

SEQ ID NO: 311134 - protein, 16 aa, Homo sapiens
  CDR3 for beta chain variable domain of TCR clone 155567 (TRBV12-5, TRBJ2-5)
CASGPRTRGNKETQYC

SEQ ID NO: 311135 - protein, 14 aa, Homo sapiens
  CDR3 for alpha chain variable domain of TCR clone 155568 (TRAV26-1, TRAJ5)
CIVRVRFNRRALTF

SEQ ID NO: 311136 - protein, 17 aa, Homo sapiens
  CDR3 for beta chain variable domain of TCR clone 155568 (TRBV11-2, TRBJ2-1)
CASSLYPPGVEYNEQFF

SEQ ID NO: 311137 - protein, 17 aa, Homo sapiens
  CDR3 for alpha chain variable domain of TCR clone 155569 (TRAV26-1, TRAJ37)
CIVRVITVSSNTGKPIF

SEQ ID NO: 311138 - protein, 15 aa, Homo sapiens
  CDR3 for beta chain variable domain of TCR clone 155569 (TRBV10-1, TRBJ2-3)
CASSATSGGFDTQYF

SEQ ID NO: 311139 - protein, 13 aa, Homo sapiens
  CDR3 for alpha chain variable domain of TCR clone 155570 (TRAV27, TRAJ57)
CRSGQGGSEKLVF

SEQ ID NO: 311140 - protein, 11 aa, Homo sapiens
  CDR3 for beta chain variable domain of TCR clone 155570 (TRBV11-2, TRBJ1-1)
CASSINTEAFF

SEQ ID NO: 311141 - protein, 21 aa, Homo sapiens
  CDR3 for alpha chain variable domain of TCR clone 155571 (TRAV13-1, TRAJ9)
CAASGTEASKLSLEQEQDYLL

SEQ ID NO: 311142 - protein, 13 aa, Homo sapiens
  CDR3 for beta chain variable domain of TCR clone 155571 (TRBV12-4, TRBJ2-7)
CASSLERVREQYF

SEQ ID NO: 311143 - protein, 18 aa, Homo sapiens
  CDR3 for alpha chain variable domain of TCR clone 155572 (TRAV21, TRAJ52)
CDVRPSPAGGTSYGKLTF

SEQ ID NO: 311144 - protein, 17 aa, Homo sapiens
  CDR3 for beta chain variable domain of TCR clone 155572 (TRBV13, TRBJ2-3)
CASSLSRVAGGRNTQYV

SEQ ID NO: 311145 - protein, 15 aa, Homo sapiens
  CDR3 for alpha chain variable domain of TCR clone 155573 (TRAV12-1, TRAJ43)
CVVNRGRYNNNDMRF

SEQ ID NO: 311146 - protein, 16 aa, Homo sapiens
  CDR3 for beta chain variable domain of TCR clone 155573 (TRBV19, TRBJ2-3)
RASSFYTTGIGDTQYF

SEQ ID NO: 311147 - protein, 14 aa, Homo sapiens
  CDR3 for alpha chain variable domain of TCR clone 155574 (TRAV8-4, TRAJ26)
CAVSEDNYGQNFVF

SEQ ID NO: 311148 - protein, 12 aa, Homo sapiens
  CDR3 for beta chain variable domain of TCR clone 155574 (TRBV11-2, TRBJ2-2)
CASSLGGGELFF

SEQ ID NO: 311149 - protein, 13 aa, Homo sapiens
  CDR3 for alpha chain variable domain of TCR clone 155575 (TRAV35, TRAJ33)
CAGRHDRNYQLIW

SEQ ID NO: 311150 - protein, 19 aa, Homo sapiens
  CDR3 for beta chain variable domain of TCR clone 155575 (TRBV6-3, TRBJ2-1)
CASSYSWTSGRATYNEQFF

SEQ ID NO: 311151 - protein, 14 aa, Homo sapiens
  CDR3 for alpha chain variable domain of TCR clone 155576 (TRAV12-2, TRAJ13)
CAVKKTGGYQKVIF

SEQ ID NO: 311152 - protein, 16 aa, Homo sapiens
  CDR3 for beta chain variable domain of TCR clone 155576 (TRBV4-1, TRBJ2-3)
CASSQSTSGAEDTQYF

SEQ ID NO: 311153 - protein, 14 aa, Homo sapiens
  CDR3 for alpha chain variable domain of TCR clone 155577 (TRAV8-6, TRAJ4)
CAVSGSGGHNKLIF

SEQ ID NO: 311154 - protein, 13 aa, Homo sapiens
  CDR3 for beta chain variable domain of TCR clone 155577 (TRBV3-1, TRBJ2-5)
CASSPGLQETQYF

SEQ ID NO: 311155 - protein, 12 aa, Homo sapiens
  CDR3 for alpha chain variable domain of TCR clone 155578 (TRAV23/DV6, TRAJ53)
CAASKLGSGGSN

SEQ ID NO: 311156 - protein, 18 aa, Homo sapiens
  CDR3 for beta chain variable domain of TCR clone 155578 (TRBV11-2, TRBJ2-3)
CASSIGGASRGAPNTQYF

SEQ ID NO: 311157 - protein, 14 aa, Homo sapiens
  CDR3 for alpha chain variable domain of TCR clone 155579 (TRAV1-2, TRAJ33)
CAVRAPDSNYQLIW

SEQ ID NO: 311158 - protein, 15 aa, Homo sapiens
  CDR3 for beta chain variable domain of TCR clone 155579 (TRBV27, TRBJ2-7)
CASTQRGPEYYEQYF

SEQ ID NO: 311159 - protein, 14 aa, Homo sapiens
  CDR3 for alpha chain variable domain of TCR clone 155580 (TRAV12-3, TRAJ10)
SHLPLTGGGKKLTF

SEQ ID NO: 311160 - protein, 12 aa, Homo sapiens
  CDR3 for beta chain variable domain of TCR clone 155580 (TRBV12-4, TRBJ1-3)
CASSFSGNTMYF

SEQ ID NO: 311161 - protein, 13 aa, Homo sapiens
  CDR3 for alpha chain variable domain of TCR clone 155581 (TRAV39, TRAJ58)
CAGEEASGSRLTF

SEQ ID NO: 311162 - protein, 17 aa, Homo sapiens
  CDR3 for beta chain variable domain of TCR clone 155581 (TRBV13, TRBJ2-3)
CASSLSRVAGGRNTQYF

SEQ ID NO: 311163 - protein, 14 aa, Homo sapiens
  CDR3 for alpha chain variable domain of TCR clone 155582 (TRAV38-1, TRAJ29)
CAFMTPSGNTPLVF

SEQ ID NO: 311164 - protein, 14 aa, Homo sapiens
  CDR3 for beta chain variable domain of TCR clone 155582 (TRBV18, TRBJ2-7)
CASSPRGGAYEQYL

SEQ ID NO: 311165 - protein, 15 aa, Homo sapiens
  CDR3 for alpha chain variable domain of TCR clone 155583 (TRAV17, TRAJ57)
CATGPSQGGSEKLVF

SEQ ID NO: 311166 - protein, 15 aa, Homo sapiens
  CDR3 for beta chain variable domain of TCR clone 155583 (TRBV28, TRBJ2-4)
CASRGLAGVKNIQYF

SEQ ID NO: 311167 - protein, 14 aa, Homo sapiens
  CDR3 for alpha chain variable domain of TCR clone 155584 (TRAV1-1, TRAJ33)
CAVRPEDSNYQLIW

SEQ ID NO: 311168 - protein, 15 aa, Homo sapiens
  CDR3 for beta chain variable domain of TCR clone 155584 (TRBV20-1, TRBJ2-1)
CSARSPGGPGNEQVF

SEQ ID NO: 311169 - protein, 14 aa, Homo sapiens
  CDR3 for alpha chain variable domain of TCR clone 155585 (TRAV38-1, TRAJ40)
CALRPTSGTYKYIY

SEQ ID NO: 311170 - protein, 13 aa, Homo sapiens
  CDR3 for beta chain variable domain of TCR clone 155585 (TRBV7-9, TRBJ1-2)
CASSLKQNYGYTF

SEQ ID NO: 311171 - protein, 16 aa, Homo sapiens
  CDR3 for alpha chain variable domain of TCR clone 155586 (TRAV30, TRAJ24)
CGTEIVDADSWGKFQF

SEQ ID NO: 311172 - protein, 15 aa, Homo sapiens
  CDR3 for beta chain variable domain of TCR clone 155586 (TRBV28, TRBJ2-2)
CQQFRGGFEHRELFF

SEQ ID NO: 311173 - protein, 14 aa, Homo sapiens
  CDR3 for alpha chain variable domain of TCR clone 155587 (TRAV1-2, TRAJ8)
CAVREDTGFQKLVF

SEQ ID NO: 311174 - protein, 16 aa, Homo sapiens
  CDR3 for beta chain variable domain of TCR clone 155587 (TRBV28, TRBJ1-4)
CVSSPPYRGRSEKLFF

SEQ ID NO: 311175 - protein, 13 aa, Homo sapiens
  CDR3 for alpha chain variable domain of TCR clone 155588 (TRAV13-1, TRAJ6)
CAASRGGSYIPTF

SEQ ID NO: 311176 - protein, 16 aa, Homo sapiens
  CDR3 for beta chain variable domain of TCR clone 155588 (TRBV20-1, TRBJ1-4)
CSAPGQGLLTNEKLFF

SEQ ID NO: 311177 - protein, 13 aa, Homo sapiens
  CDR3 for alpha chain variable domain of TCR clone 155589 (TRAV29/DV5, TRAJ31)
CAASRNNNARLMF

SEQ ID NO: 311178 - protein, 16 aa, Homo sapiens
  CDR3 for beta chain variable domain of TCR clone 155589 (TRBV5-1, TRBJ2-1)
CASSLEGRGLYNEQFF

SEQ ID NO: 311179 - protein, 15 aa, Homo sapiens
  CDR3 for alpha chain variable domain of TCR clone 155590 (TRAV17, TRAJ57)
CATGPSQGGSEKLVF

SEQ ID NO: 311180 - protein, 13 aa, Homo sapiens
  CDR3 for beta chain variable domain of TCR clone 155590 (TRBV7-3, TRBJ1-1)
CASSQNWGAEAFF

SEQ ID NO: 311181 - protein, 15 aa, Homo sapiens
  CDR3 for alpha chain variable domain of TCR clone 155591 (TRAV26-1, TRAJ29)
CIVRVEGSGNTPLVF

SEQ ID NO: 311182 - protein, 19 aa, Homo sapiens
  CDR3 for beta chain variable domain of TCR clone 155591 (TRBV18, TRBJ2-5)
CASSPGGVPRDPVLRARHA

SEQ ID NO: 311183 - protein, 14 aa, Homo sapiens
  CDR3 for alpha chain variable domain of TCR clone 155592 (TRAV1-2, TRAJ8)
CAVREDKGFQKLVF

SEQ ID NO: 311184 - protein, 13 aa, Homo sapiens
  CDR3 for beta chain variable domain of TCR clone 155592 (TRBV10-3, TRBJ2-7)
CASKLAVNYEQYF

SEQ ID NO: 311185 - protein, 16 aa, Homo sapiens
  CDR3 for alpha chain variable domain of TCR clone 155593 (TRAV12-3, TRAJ53)
CALSPGSGGSNYKLTF

SEQ ID NO: 311186 - protein, 11 aa, Homo sapiens
  CDR3 for beta chain variable domain of TCR clone 155593 (TRBV29-1, TRBJ2-5)
CSEDRKGTQYF

SEQ ID NO: 311187 - protein, 15 aa, Homo sapiens
  CDR3 for alpha chain variable domain of TCR clone 155594 (TRAV12-1, TRAJ26)
CVVNSWVTMFRILSL

SEQ ID NO: 311188 - protein, 13 aa, Homo sapiens
  CDR3 for beta chain variable domain of TCR clone 155594 (TRBV10-3, TRBJ2-7)
CASKLAVNYEQYF

SEQ ID NO: 311189 - protein, 13 aa, Homo sapiens
  CDR3 for alpha chain variable domain of TCR clone 155595 (TRAV3, TRAJ5)
CAVRDTGRRALTF

SEQ ID NO: 311190 - protein, 19 aa, Homo sapiens
  CDR3 for beta chain variable domain of TCR clone 155595 (TRBV7-2, TRBJ2-3)
CASSFLSRNWGGGTDTQYF

SEQ ID NO: 311191 - protein, 20 aa, Homo sapiens
  CDR3 for alpha chain variable domain of TCR clone 155596 (TRAV12-1, TRAJ42)
SSVIQPPTSVKGGSQGNLIF

SEQ ID NO: 311192 - protein, 18 aa, Homo sapiens
  CDR3 for beta chain variable domain of TCR clone 155596 (TRBV11-2, TRBJ2-3)
CASSLGGASRRAPNTQYF

SEQ ID NO: 311193 - protein, 14 aa, Homo sapiens
  CDR3 for alpha chain variable domain of TCR clone 155597 (TRAV3, TRAJ33)
CAVRDMGSNYQLIW

SEQ ID NO: 311194 - protein, 17 aa, Homo sapiens
  CDR3 for beta chain variable domain of TCR clone 155597 (TRBV19, TRBJ2-1)
CASSIWSAQPTHNEQFS

SEQ ID NO: 311195 - protein, 12 aa, Homo sapiens
  CDR3 for alpha chain variable domain of TCR clone 155598 (TRAV23/DV6, TRAJ49)
CAASSTGNQFYF

SEQ ID NO: 311196 - protein, 15 aa, Homo sapiens
  CDR3 for beta chain variable domain of TCR clone 155598 (TRBV7-3, TRBJ2-1)
CASSLSSGSFDEQFF

SEQ ID NO: 311197 - protein, 12 aa, Homo sapiens
  CDR3 for alpha chain variable domain of TCR clone 155599 (TRAV21, TRAJ33)
CAKMYSNYQLIW

SEQ ID NO: 311198 - protein, 18 aa, Homo sapiens
  CDR3 for beta chain variable domain of TCR clone 155599 (TRBV15, TRBJ2-3)
CATSRDGARSWDTDTQYF

SEQ ID NO: 311199 - protein, 13 aa, Homo sapiens
  CDR3 for alpha chain variable domain of TCR clone 155600 (TRAV13-2, TRAJ40)
CAELISGTYKYIF

SEQ ID NO: 311200 - protein, 14 aa, Homo sapiens
  CDR3 for beta chain variable domain of TCR clone 155600 (TRBV19, TRBJ1-5)
CASGTEVYKQPQHF

SEQ ID NO: 311201 - protein, 14 aa, Homo sapiens
  CDR3 for alpha chain variable domain of TCR clone 155601 (TRAV12-2, TRAJ48)
CPVNAFFGNEKLTF

SEQ ID NO: 311202 - protein, 15 aa, Homo sapiens
  CDR3 for beta chain variable domain of TCR clone 155601 (TRBV7-2, TRBJ2-3)
CASSSTGLETDTQYF

SEQ ID NO: 311203 - protein, 11 aa, Homo sapiens
  CDR3 for alpha chain variable domain of TCR clone 155602 (TRAV2, TRAJ20)
CAVSDDYKLSF

SEQ ID NO: 311204 - protein, 20 aa, Homo sapiens
  CDR3 for beta chain variable domain of TCR clone 155602 (TRBV19, TRBJ2-1)
CASSISRTVTSTRLNNERFF

SEQ ID NO: 311205 - protein, 15 aa, Homo sapiens
  CDR3 for alpha chain variable domain of TCR clone 155603 (TRAV4, TRAJ31)
CLVGGFLNNNARLMF

SEQ ID NO: 311206 - protein, 14 aa, Homo sapiens
  CDR3 for beta chain variable domain of TCR clone 155603 (TRBV19, TRBJ2-1)
CASPTLVLSGEQFF

SEQ ID NO: 311207 - protein, 13 aa, Homo sapiens
  CDR3 for alpha chain variable domain of TCR clone 155604 (TRAV30, TRAJ6)
CGTEAGGSYIPTF

SEQ ID NO: 311208 - protein, 13 aa, Homo sapiens
  CDR3 for beta chain variable domain of TCR clone 155604 (TRBV10-3, TRBJ2-7)
CASKLAVNYEQYF

SEQ ID NO: 311209 - protein, 13 aa, Homo sapiens
  CDR3 for alpha chain variable domain of TCR clone 155605 (TRAV39, TRAJ58)
CAGEETGGSRLTF

SEQ ID NO: 311210 - protein, 12 aa, Homo sapiens
  CDR3 for beta chain variable domain of TCR clone 155605 (TRBV7-9, TRBJ2-7)
CASSIKREEQYF

SEQ ID NO: 311211 - protein, 14 aa, Homo sapiens
  CDR3 for alpha chain variable domain of TCR clone 155606 (TRAV16, TRAJ33)
CALSAMDSNYQLIW

SEQ ID NO: 311212 - protein, 17 aa, Homo sapiens
  CDR3 for beta chain variable domain of TCR clone 155606 (TRBV25-1, TRBJ2-7)
CASSDARVAFSSYEQYF

SEQ ID NO: 311213 - protein, 13 aa, Homo sapiens
  CDR3 for alpha chain variable domain of TCR clone 155607 (TRAV30, TRAJ31)
CGTEITNNARLLF

SEQ ID NO: 311214 - protein, 13 aa, Homo sapiens
  CDR3 for beta chain variable domain of TCR clone 155607 (TRBV12-5, TRBJ2-3)
CASGDRQSDTQYF

SEQ ID NO: 311215 - protein, 11 aa, Homo sapiens
  CDR3 for alpha chain variable domain of TCR clone 155608 (TRAV12-2, TRAJ21)
CAVINFNKFYF

SEQ ID NO: 311216 - protein, 13 aa, Homo sapiens
  CDR3 for beta chain variable domain of TCR clone 155608 (TRBV20-1, TRBJ2-5)
CSAREGGKETQYF

SEQ ID NO: 311217 - protein, 14 aa, Homo sapiens
  CDR3 for alpha chain variable domain of TCR clone 155609 (TRAV26-1, TRAJ26)
CIVRATFLGKNFVF

SEQ ID NO: 311218 - protein, 16 aa, Homo sapiens
  CDR3 for beta chain variable domain of TCR clone 155609 (TRBV12-4, TRBJ2-7)
CASRSTVTGPSYEQYF

SEQ ID NO: 311219 - protein, 23 aa, Homo sapiens
  CDR3 for alpha chain variable domain of TCR clone 155610 (TRAV41, TRAJ32)
CAVRIMVVLQTSSYLELSLCLLS

SEQ ID NO: 311220 - protein, 15 aa, Homo sapiens
  CDR3 for beta chain variable domain of TCR clone 155610 (TRBV11-2, TRBJ2-1)
CASSKNRGLIYEQFF

SEQ ID NO: 311221 - protein, 15 aa, Homo sapiens
  CDR3 for alpha chain variable domain of TCR clone 155611 (TRAV3, TRAJ5)
CAVRDLDAGRRALTF

SEQ ID NO: 311222 - protein, 15 aa, Homo sapiens
  CDR3 for beta chain variable domain of TCR clone 155611 (TRBV20-1, TRBJ2-1)
CSARSPGGPGNEQFF

SEQ ID NO: 311223 - protein, 13 aa, Homo sapiens
  CDR3 for alpha chain variable domain of TCR clone 155612 (TRAV8-3, TRAJ28)
CAVGAVGGYQFTF

SEQ ID NO: 311224 - protein, 15 aa, Homo sapiens
  CDR3 for beta chain variable domain of TCR clone 155612 (TRBV7-9, TRBJ1-5)
CASSQGHQPNQPQHF

SEQ ID NO: 311225 - protein, 11 aa, Homo sapiens
  CDR3 for alpha chain variable domain of TCR clone 155613 (TRAV21, TRAJ34)
CAVTNTDKLIF

SEQ ID NO: 311226 - protein, 15 aa, Homo sapiens
  CDR3 for beta chain variable domain of TCR clone 155613 (TRBV10-3, TRBJ2-3)
CAISLTSGGTDTQYF

SEQ ID NO: 311227 - protein, 16 aa, Homo sapiens
  CDR3 for alpha chain variable domain of TCR clone 155614 (TRAV8-3, TRAJ48)
CAVGLISNFGNEKLTF

SEQ ID NO: 311228 - protein, 13 aa, Homo sapiens
  CDR3 for beta chain variable domain of TCR clone 155614 (TRBV20-1, TRBJ1-5)
CSASWGRSKPQHF

SEQ ID NO: 311229 - protein, 13 aa, Homo sapiens
  CDR3 for alpha chain variable domain of TCR clone 155615 (TRAV39, TRAJ33)
CAANPDSNYQLIW

SEQ ID NO: 311230 - protein, 15 aa, Homo sapiens
  CDR3 for beta chain variable domain of TCR clone 155615 (TRBV29-1, TRBJ2-1)
CSVPTGLALYNEQFF

SEQ ID NO: 311231 - protein, 15 aa, Homo sapiens
  CDR3 for alpha chain variable domain of TCR clone 155616 (TRAV3, TRAJ24)
CAGGMTTDSWGKFQF

SEQ ID NO: 311232 - protein, 14 aa, Homo sapiens
  CDR3 for beta chain variable domain of TCR clone 155616 (TRBV4-1, TRBJ2-2)
CASRRVRASGELFF

SEQ ID NO: 311233 - protein, 14 aa, Homo sapiens
  CDR3 for alpha chain variable domain of TCR clone 155617 (TRAV12-2, TRAJ6)
CAVIASGGSYIPPF

SEQ ID NO: 311234 - protein, 16 aa, Homo sapiens
  CDR3 for beta chain variable domain of TCR clone 155617 (TRBV7-2, TRBJ2-3)
CASSLAGAGSGDTQYF

SEQ ID NO: 311235 - protein, 16 aa, Homo sapiens
  CDR3 for alpha chain variable domain of TCR clone 155618 (TRAV3, TRAJ4)
CAVRPSPSGGYNKLIF

SEQ ID NO: 311236 - protein, 11 aa, Homo sapiens
  CDR3 for beta chain variable domain of TCR clone 155618 (TRBV7-9, TRBJ2-3)
CASSGPDTQYF

SEQ ID NO: 311237 - protein, 14 aa, Homo sapiens
  CDR3 for alpha chain variable domain of TCR clone 155619 (TRAV26-1, TRAJ34)
CIVRVAYNTDKLIF

SEQ ID NO: 311238 - protein, 10 aa, Homo sapiens
  CDR3 for beta chain variable domain of TCR clone 155619 (TRBV20-1, TRBJ2-7)
SAAYFYEQYF

SEQ ID NO: 311239 - protein, 13 aa, Homo sapiens
  CDR3 for alpha chain variable domain of TCR clone 155620 (TRAV2, TRAJ23)
CAVVGNQGGKLIF

SEQ ID NO: 311240 - protein, 15 aa, Homo sapiens
  CDR3 for beta chain variable domain of TCR clone 155620 (TRBV11-2, TRBJ2-1)
CASSSSTISYNEQFF

SEQ ID NO: 311241 - protein, 14 aa, Homo sapiens
  CDR3 for alpha chain variable domain of TCR clone 155621 (TRAV10, TRAJ36)
WVVKYEGGANNLFF

SEQ ID NO: 311242 - protein, 16 aa, Homo sapiens
  CDR3 for beta chain variable domain of TCR clone 155621 (TRBV7-3, TRBJ2-2)
CASSLKRGTLSGELFF

SEQ ID NO: 311243 - protein, 13 aa, Homo sapiens
  CDR3 for alpha chain variable domain of TCR clone 155622 (TRAV3, TRAJ16)
CAVRERNGQKLLF

SEQ ID NO: 311244 - protein, 15 aa, Homo sapiens
  CDR3 for beta chain variable domain of TCR clone 155622 (TRBV5-1, TRBJ2-1)
CASSPPRAPYNEQFF

SEQ ID NO: 311245 - protein, 16 aa, Homo sapiens
  CDR3 for alpha chain variable domain of TCR clone 155623 (TRAV12-1, TRAJ43)
CVVNPHRFGAGPRLTV

SEQ ID NO: 311246 - protein, 13 aa, Homo sapiens
  CDR3 for beta chain variable domain of TCR clone 155623 (TRBV12-4, TRBJ1-2)
CASSSGPNYGYTF

SEQ ID NO: 311247 - protein, 14 aa, Homo sapiens
  CDR3 for alpha chain variable domain of TCR clone 155624 (TRAV29/DV5, TRAJ45)
CAASFRGGADGLTF

SEQ ID NO: 311248 - protein, 11 aa, Homo sapiens
  CDR3 for beta chain variable domain of TCR clone 155624 (TRBV11-2, TRBJ2-2)
CASSLPGELIF

SEQ ID NO: 311249 - protein, 15 aa, Homo sapiens
  CDR3 for alpha chain variable domain of TCR clone 155625 (TRAV27, TRAJ38)
CAARGNAGNNRKLIW

SEQ ID NO: 311250 - protein, 13 aa, Homo sapiens
  CDR3 for beta chain variable domain of TCR clone 155625 (TRBV12-5, TRBJ2-3)
CASGDRQSDTQYL

SEQ ID NO: 311251 - protein, 14 aa, Homo sapiens
  CDR3 for alpha chain variable domain of TCR clone 155626 (TRAV16, TRAJ33)
CALSAMDSNYPLIW

SEQ ID NO: 311252 - protein, 16 aa, Homo sapiens
  CDR3 for beta chain variable domain of TCR clone 155626 (TRBV12-4, TRBJ2-3)
CASSFPSNTNTDTQYF

SEQ ID NO: 311253 - protein, 15 aa, Homo sapiens
  CDR3 for alpha chain variable domain of TCR clone 155627 (TRAV4, TRAJ39)
CLVGPNNNAGNMLTL

SEQ ID NO: 311254 - protein, 19 aa, Homo sapiens
  CDR3 for beta chain variable domain of TCR clone 155627 (TRBV14, TRBJ2-1)
CASSQDQLWEAPEYNEQFF

SEQ ID NO: 311255 - protein, 16 aa, Homo sapiens
  CDR3 for alpha chain variable domain of TCR clone 155628 (TRAV3, TRAJ37)
CAVRVRGSGNTGKLIF

SEQ ID NO: 311256 - protein, 11 aa, Homo sapiens
  CDR3 for beta chain variable domain of TCR clone 155628 (TRBV11-2, TRBJ2-2)
CSSSLPGELFF

SEQ ID NO: 311257 - protein, 14 aa, Homo sapiens
  CDR3 for alpha chain variable domain of TCR clone 155629 (TRAV16, TRAJ31)
CALSGRGDNARLMF

SEQ ID NO: 311258 - protein, 16 aa, Homo sapiens
  CDR3 for beta chain variable domain of TCR clone 155629 (TRBV28, TRBJ2-7)
CASSLFFETGGPEQYF

SEQ ID NO: 311259 - protein, 14 aa, Homo sapiens
  CDR3 for alpha chain variable domain of TCR clone 155630 (TRAV17, TRAJ35)
CATDRPGFGNVLHC

SEQ ID NO: 311260 - protein, 19 aa, Homo sapiens
  CDR3 for beta chain variable domain of TCR clone 155630 (TRBV11-3, TRBJ2-2)
CASSTRPGAKTTNTRELFF

SEQ ID NO: 311261 - protein, 13 aa, Homo sapiens
  CDR3 for alpha chain variable domain of TCR clone 155631 (TRAV13-1, TRAJ21)
CAASIFNFNKFYF

SEQ ID NO: 311262 - protein, 13 aa, Homo sapiens
  CDR3 for beta chain variable domain of TCR clone 155631 (TRBV10-3, TRBJ2-7)
CASKLAVNYEQYF

SEQ ID NO: 311263 - protein, 13 aa, Homo sapiens
  CDR3 for alpha chain variable domain of TCR clone 155632 (TRAV1-1, TRAJ9)
CAAKNTGGFHTIF

SEQ ID NO: 311264 - protein, 14 aa, Homo sapiens
  CDR3 for beta chain variable domain of TCR clone 155632 (TRBV20-1, TRBJ2-1)
CSAQIGGSANEQFF

SEQ ID NO: 311265 - protein, 14 aa, Homo sapiens
  CDR3 for alpha chain variable domain of TCR clone 155633 (TRAV25, TRAJ27)
CAGEHLTNAGKATF

SEQ ID NO: 311266 - protein, 23 aa, Homo sapiens
  CDR3 for beta chain variable domain of TCR clone 155633 (TRBV7-8, TRBJ2-3)
CASRNSGTSGKNWLAQIRSILAQ

SEQ ID NO: 311267 - protein, 16 aa, Homo sapiens
  CDR3 for alpha chain variable domain of TCR clone 155634 (TRAV23/DV6, TRAJ48)
CAASGVVNFGNEKLTF

SEQ ID NO: 311268 - protein, 13 aa, Homo sapiens
  CDR3 for beta chain variable domain of TCR clone 155634 (TRBV6-1, TRBJ1-3)
CRRARGGGNTIYF

SEQ ID NO: 311269 - protein, 12 aa, Homo sapiens
  CDR3 for alpha chain variable domain of TCR clone 155635 (TRAV1-2, TRAJ24)
CAVGGSWGKFQF

SEQ ID NO: 311270 - protein, 13 aa, Homo sapiens
  CDR3 for beta chain variable domain of TCR clone 155635 (TRBV12-4, TRBJ2-7)
CASSPTETYEQYF

SEQ ID NO: 311271 - protein, 14 aa, Homo sapiens
  CDR3 for alpha chain variable domain of TCR clone 155636 (TRAV12-2, TRAJ13)
CAVNPSGGYQKVTF

SEQ ID NO: 311272 - protein, 13 aa, Homo sapiens
  CDR3 for beta chain variable domain of TCR clone 155636 (TRBV19, TRBJ1-2)
CASSVPGQDGYTF

SEQ ID NO: 311273 - protein, 11 aa, Homo sapiens
  CDR3 for alpha chain variable domain of TCR clone 155637 (TRAV12-1, TRAJ8)
CVVSGFQKLVF

SEQ ID NO: 311274 - protein, 14 aa, Homo sapiens
  CDR3 for beta chain variable domain of TCR clone 155637 (TRBV19, TRBJ2-1)
CASGKSTQYNEQFF

SEQ ID NO: 311275 - protein, 12 aa, Homo sapiens
  CDR3 for alpha chain variable domain of TCR clone 155638 (TRAV2, TRAJ33)
CAFMASNYQLIW

SEQ ID NO: 311276 - protein, 15 aa, Homo sapiens
  CDR3 for beta chain variable domain of TCR clone 155638 (TRBV6-5, TRBJ1-1)
CASSYLRGSVPEAFF

SEQ ID NO: 311277 - protein, 15 aa, Homo sapiens
  CDR3 for alpha chain variable domain of TCR clone 155639 (TRAV17, TRAJ16)
CATALRFSDGQKLPF

SEQ ID NO: 311278 - protein, 15 aa, Homo sapiens
  CDR3 for beta chain variable domain of TCR clone 155639 (TRBV20-1, TRBJ2-7)
CSARDRVSGMDEQYF

SEQ ID NO: 311279 - protein, 14 aa, Homo sapiens
  CDR3 for alpha chain variable domain of TCR clone 155640 (TRAV1-1, TRAJ27)
CAVIYNTNAGKSTF

SEQ ID NO: 311280 - protein, 15 aa, Homo sapiens
  CDR3 for beta chain variable domain of TCR clone 155640 (TRBV6-3, TRBJ2-7)
CASSSPGTVFYGQYF

SEQ ID NO: 311281 - protein, 13 aa, Homo sapiens
  CDR3 for alpha chain variable domain of TCR clone 155641 (TRAV13-2, TRAJ48)
CAEMDFGNEKLTF

SEQ ID NO: 311282 - protein, 18 aa, Homo sapiens
  CDR3 for beta chain variable domain of TCR clone 155641 (TRBV12-4, TRBJ2-4)
CASSRTGAADVAKNIQYF

SEQ ID NO: 311283 - protein, 23 aa, Homo sapiens
  CDR3 for alpha chain variable domain of TCR clone 155642 (TRAV8-3, TRAJ36)
CAVGPITGQTTSSLGLERDSPLF

SEQ ID NO: 311284 - protein, 15 aa, Homo sapiens
  CDR3 for beta chain variable domain of TCR clone 155642 (TRBV4-1, TRBJ2-1)
CASSQDPGNYNEQFF

SEQ ID NO: 311285 - protein, 15 aa, Homo sapiens
  CDR3 for alpha chain variable domain of TCR clone 155643 (TRAV3, TRAJ32)
CAVRDPGGATNKLIF

SEQ ID NO: 311286 - protein, 13 aa, Homo sapiens
  CDR3 for beta chain variable domain of TCR clone 155643 (TRBV4-1, TRBJ2-2)
CASSQENTGELFF

SEQ ID NO: 311287 - protein, 17 aa, Homo sapiens
  CDR3 for alpha chain variable domain of TCR clone 155644 (TRAV21, TRAJ52)
CAVRPSPAGGSYGKLTF

SEQ ID NO: 311288 - protein, 17 aa, Homo sapiens
  CDR3 for beta chain variable domain of TCR clone 155644 (TRBV13, TRBJ2-3)
CASSLSRVAGGRNTQYF

SEQ ID NO: 311289 - protein, 12 aa, Homo sapiens
  CDR3 for alpha chain variable domain of TCR clone 155645 (TRAV30, TRAJ15)
CGTNQAGTALIF

SEQ ID NO: 311290 - protein, 13 aa, Homo sapiens
  CDR3 for beta chain variable domain of TCR clone 155645 (TRBV24-1, TRBJ2-7)
CATSDWGPYEQYF

SEQ ID NO: 311291 - protein, 17 aa, Homo sapiens
  CDR3 for alpha chain variable domain of TCR clone 155646 (TRAV3, TRAJ6)
CAVRDGPRAGGSYILTF

SEQ ID NO: 311292 - protein, 14 aa, Homo sapiens
  CDR3 for beta chain variable domain of TCR clone 155646 (TRBV11-2, TRBJ2-3)
CASSRLARTDTQYF

SEQ ID NO: 311293 - protein, 14 aa, Homo sapiens
  CDR3 for alpha chain variable domain of TCR clone 155647 (TRAV12-2, TRAJ9)
CAVSFGTGGFKTIF

SEQ ID NO: 311294 - protein, 14 aa, Homo sapiens
  CDR3 for beta chain variable domain of TCR clone 155647 (TRBV6-3, TRBJ2-1)
CASLHSAYYNEQFF

SEQ ID NO: 311295 - protein, 11 aa, Homo sapiens
  CDR3 for alpha chain variable domain of TCR clone 155648 (TRAV13-2, TRAJ23)
CAESTRGKLIF

SEQ ID NO: 311296 - protein, 18 aa, Homo sapiens
  CDR3 for beta chain variable domain of TCR clone 155648 (TRBV6-5, TRBJ1-1)
CASSYSAPGGTGGTEAFF

SEQ ID NO: 311297 - protein, 13 aa, Homo sapiens
  CDR3 for alpha chain variable domain of TCR clone 155649 (TRAV1-1, TRAJ11)
CAVLNSGYSTLTF

SEQ ID NO: 311298 - protein, 14 aa, Homo sapiens
  CDR3 for beta chain variable domain of TCR clone 155649 (TRBV6-1, TRBJ1-3)
CASVQGGGGNTIYF

SEQ ID NO: 311299 - protein, 15 aa, Homo sapiens
  CDR3 for alpha chain variable domain of TCR clone 155650 (TRAV3, TRAJ5)
CAVRDLDTGRRALTF

SEQ ID NO: 311300 - protein, 15 aa, Homo sapiens
  CDR3 for beta chain variable domain of TCR clone 155650 (TRBV11-3, TRBJ2-3)
CASLKDGREGGTQYF

SEQ ID NO: 311301 - protein, 11 aa, Homo sapiens
  CDR3 for alpha chain variable domain of TCR clone 155651 (TRAV1-2, TRAJ20)
CAVSNDYKLSF

SEQ ID NO: 311302 - protein, 13 aa, Homo sapiens
  CDR3 for beta chain variable domain of TCR clone 155651 (TRBV7-9, TRBJ1-2)
CASSLKQNYGHTF

SEQ ID NO: 311303 - protein, 14 aa, Homo sapiens
  CDR3 for alpha chain variable domain of TCR clone 155652 (TRAV1-2, TRAJ8)
CAAREDTGFQKLVF

SEQ ID NO: 311304 - protein, 15 aa, Homo sapiens
  CDR3 for beta chain variable domain of TCR clone 155652 (TRBV11-2, TRBJ2-2)
CASSSDRVNAGELFF

SEQ ID NO: 311305 - protein, 14 aa, Homo sapiens
  CDR3 for alpha chain variable domain of TCR clone 155653 (TRAV29/DV5, TRAJ36)
CAARRKTGANNLFF

SEQ ID NO: 311306 - protein, 16 aa, Homo sapiens
  CDR3 for beta chain variable domain of TCR clone 155653 (TRBV7-7, TRBJ2-1)
CASSLASGTSYNEQFL

SEQ ID NO: 311307 - protein, 10 aa, Homo sapiens
  CDR3 for alpha chain variable domain of TCR clone 155654 (TRAV1-2, TRAJ34)
CAVNTDKLIF

SEQ ID NO: 311308 - protein, 16 aa, Homo sapiens
  CDR3 for beta chain variable domain of TCR clone 155654 (TRBV19, TRBJ2-2)
CASRSPGTGATGELFF

SEQ ID NO: 311309 - protein, 15 aa, Homo sapiens
  CDR3 for alpha chain variable domain of TCR clone 155655 (TRAV38-1, TRAJ37)
CAFIHGSGNKGKPIF

SEQ ID NO: 311310 - protein, 12 aa, Homo sapiens
  CDR3 for beta chain variable domain of TCR clone 155655 (TRBV7-9, TRBJ2-7)
CASSFGSYEQYF

SEQ ID NO: 311311 - protein, 14 aa, Homo sapiens
  CDR3 for alpha chain variable domain of TCR clone 155656 (TRAV13-2, TRAJ22)
CADGTLGSAGQLTF

SEQ ID NO: 311312 - protein, 16 aa, Homo sapiens
  CDR3 for beta chain variable domain of TCR clone 155656 (TRBV19, TRBJ2-1)
CASSSKGTRSYNEQFF

SEQ ID NO: 311313 - protein, 16 aa, Homo sapiens
  CDR3 for alpha chain variable domain of TCR clone 155657 (TRAV26-1, TRAJ23)
CIVRPQGNNQGGKLIF

SEQ ID NO: 311314 - protein, 19 aa, Homo sapiens
  CDR3 for beta chain variable domain of TCR clone 155657 (TRBV5-4, TRBJ2-7)
CASSLGQSPGAPTSSTSGR

SEQ ID NO: 311315 - protein, 15 aa, Homo sapiens
  CDR3 for alpha chain variable domain of TCR clone 155658 (TRAV12-3, TRAJ6)
CAMSATTGGSYIPTF

SEQ ID NO: 311316 - protein, 19 aa, Homo sapiens
  CDR3 for beta chain variable domain of TCR clone 155658 (TRBV25-1, TRBJ2-2)
CAMLVYRVDRGRKPGELFF

SEQ ID NO: 311317 - protein, 14 aa, Homo sapiens
  CDR3 for alpha chain variable domain of TCR clone 155659 (TRAV12-3, TRAJ54)
CAMRGIQGAQKLVF

SEQ ID NO: 311318 - protein, 13 aa, Homo sapiens
  CDR3 for beta chain variable domain of TCR clone 155659 (TRBV19, TRBJ1-1)
CGSSPSNGGEAFF

SEQ ID NO: 311319 - protein, 14 aa, Homo sapiens
  CDR3 for alpha chain variable domain of TCR clone 155660 (TRAV1-2, TRAJ16)
CAVNRFSDGQKLLF

SEQ ID NO: 311320 - protein, 15 aa, Homo sapiens
  CDR3 for beta chain variable domain of TCR clone 155660 (TRBV19, TRBJ1-5)
CASSIVWADKQPQHF

SEQ ID NO: 311321 - protein, 14 aa, Homo sapiens
  CDR3 for alpha chain variable domain of TCR clone 155661 (TRAV30, TRAJ33)
CGTERRFSNYQLIW

SEQ ID NO: 311322 - protein, 16 aa, Homo sapiens
  CDR3 for beta chain variable domain of TCR clone 155661 (TRBV4-2, TRBJ1-1)
CASSQAGFGMNTEAFF

SEQ ID NO: 311323 - protein, 13 aa, Homo sapiens
  CDR3 for alpha chain variable domain of TCR clone 155662 (TRAV2, TRAJ40)
CAVVTSGTYKYIF

SEQ ID NO: 311324 - protein, 15 aa, Homo sapiens
  CDR3 for beta chain variable domain of TCR clone 155662 (TRBV20-1, TRBJ1-2)
CSAAGEGARIYGYTF

SEQ ID NO: 311325 - protein, 13 aa, Homo sapiens
  CDR3 for alpha chain variable domain of TCR clone 155663 (TRAV26-2, TRAJ43)
CILRAVNNNDMRF

SEQ ID NO: 311326 - protein, 14 aa, Homo sapiens
  CDR3 for beta chain variable domain of TCR clone 155663 (TRBV2, TRBJ2-5)
CASSEGSYQETQYF

SEQ ID NO: 311327 - protein, 11 aa, Homo sapiens
  CDR3 for alpha chain variable domain of TCR clone 155664 (TRAV13-1, TRAJ40)
CAVSGTYKYIF

SEQ ID NO: 311328 - protein, 16 aa, Homo sapiens
  CDR3 for beta chain variable domain of TCR clone 155664 (TRBV7-9, TRBJ1-2)
CASSLGFSSGEDGYTF

SEQ ID NO: 311329 - protein, 16 aa, Homo sapiens
  CDR3 for alpha chain variable domain of TCR clone 155665 (TRAV3, TRAJ37)
CAVRPHGSGHTGNLIF

SEQ ID NO: 311330 - protein, 16 aa, Homo sapiens
  CDR3 for beta chain variable domain of TCR clone 155665 (TRBV9, TRBJ1-2)
CASSVEEKVSPYGYTF

SEQ ID NO: 311331 - protein, 14 aa, Homo sapiens
  CDR3 for alpha chain variable domain of TCR clone 155666 (TRAV2, TRAJ37)
CAVDFTSNTGKLIF

SEQ ID NO: 311332 - protein, 13 aa, Homo sapiens
  CDR3 for beta chain variable domain of TCR clone 155666 (TRBV7-3, TRBJ2-1)
CQQLSGGTNEQFF

SEQ ID NO: 311333 - protein, 12 aa, Homo sapiens
  CDR3 for alpha chain variable domain of TCR clone 155667 (TRAV23/DV6, TRAJ30)
CAASKGDDKSIF

SEQ ID NO: 311334 - protein, 12 aa, Homo sapiens
  CDR3 for beta chain variable domain of TCR clone 155667 (TRBV11-2, TRBJ2-2)
CASSLGGGELFF

SEQ ID NO: 311335 - protein, 12 aa, Homo sapiens
  CDR3 for alpha chain variable domain of TCR clone 155668 (TRAV12-2, TRAJ47)
CAVAEYGNKLVF

SEQ ID NO: 311336 - protein, 14 aa, Homo sapiens
  CDR3 for beta chain variable domain of TCR clone 155668 (TRBV20-1, TRBJ1-1)
CTAMGGTANTEAFF

SEQ ID NO: 311337 - protein, 12 aa, Homo sapiens
  CDR3 for alpha chain variable domain of TCR clone 155669 (TRAV13-1, TRAJ48)
CAANFGNEKLTF

SEQ ID NO: 311338 - protein, 13 aa, Homo sapiens
  CDR3 for beta chain variable domain of TCR clone 155669 (TRBV7-3, TRBJ1-1)
CASSQDWGAEAFF

SEQ ID NO: 311339 - protein, 14 aa, Homo sapiens
  CDR3 for alpha chain variable domain of TCR clone 155670 (TRAV1-2, TRAJ16)
CAVNRFSDGQKLLF

SEQ ID NO: 311340 - protein, 17 aa, Homo sapiens
  CDR3 for beta chain variable domain of TCR clone 155670 (TRBV4-1, TRBJ2-3)
RASSQGYVSGGTDTQYF

SEQ ID NO: 311341 - protein, 15 aa, Homo sapiens
  CDR3 for alpha chain variable domain of TCR clone 155671 (TRAV17, TRAJ16)
CATALRFTDGQKLLF

SEQ ID NO: 311342 - protein, 12 aa, Homo sapiens
  CDR3 for beta chain variable domain of TCR clone 155671 (TRBV2, TRBJ2-7)
CASSDPDYEQYF

SEQ ID NO: 311343 - protein, 13 aa, Homo sapiens
  CDR3 for alpha chain variable domain of TCR clone 155672 (TRAV3, TRAJ20)
CAVRDTPRYKLSF

SEQ ID NO: 311344 - protein, 17 aa, Homo sapiens
  CDR3 for beta chain variable domain of TCR clone 155672 (TRBV20-1, TRBJ2-1)
CSASSSGLAGSYNEQFF

SEQ ID NO: 311345 - protein, 15 aa, Homo sapiens
  CDR3 for alpha chain variable domain of TCR clone 155673 (TRAV8-3, TRAJ45)
CASTYSGGGADGLTF

SEQ ID NO: 311346 - protein, 13 aa, Homo sapiens
  CDR3 for beta chain variable domain of TCR clone 155673 (TRBV7-8, TRBJ2-7)
CASSLTGGREQYL

SEQ ID NO: 311347 - protein, 14 aa, Homo sapiens
  CDR3 for alpha chain variable domain of TCR clone 155674 (TRAV17, TRAJ11)
CDTDTSRGYSTLTF

SEQ ID NO: 311348 - protein, 13 aa, Homo sapiens
  CDR3 for beta chain variable domain of TCR clone 155674 (TRBV19, TRBJ2-5)
CASRDSRRETQYF

SEQ ID NO: 311349 - protein, 11 aa, Homo sapiens
  CDR3 for alpha chain variable domain of TCR clone 155675 (TRAV17, TRAJ9)
CGFTGGFKTNF

SEQ ID NO: 311350 - protein, 14 aa, Homo sapiens
  CDR3 for beta chain variable domain of TCR clone 155675 (TRBV7-9, TRBJ2-2)
CAGSLVQDTGELFF

SEQ ID NO: 311351 - protein, 13 aa, Homo sapiens
  CDR3 for alpha chain variable domain of TCR clone 155676 (TRAV29/DV5, TRAJ31)
CAASRNNNARLMC

SEQ ID NO: 311352 - protein, 16 aa, Homo sapiens
  CDR3 for beta chain variable domain of TCR clone 155676 (TRBV19, TRBJ2-2)
CASRSPGTGATGELFF

SEQ ID NO: 311353 - protein, 16 aa, Homo sapiens
  CDR3 for alpha chain variable domain of TCR clone 155677 (TRAV8-6, TRAJ37)
CAVSGLGSSNTGKLIF

SEQ ID NO: 311354 - protein, 15 aa, Homo sapiens
  CDR3 for beta chain variable domain of TCR clone 155677 (TRBV20-1, TRBJ1-5)
CSARSGPSMNQPQHL

SEQ ID NO: 311355 - protein, 17 aa, Homo sapiens
  CDR3 for alpha chain variable domain of TCR clone 155678 (TRAV3, TRAJ6)
CDVRDGPRAGGSYIPTF

SEQ ID NO: 311356 - protein, 15 aa, Homo sapiens
  CDR3 for beta chain variable domain of TCR clone 155678 (TRBV27, TRBJ2-1)
CASSNGGGSSNEQFF

SEQ ID NO: 311357 - protein, 14 aa, Homo sapiens
  CDR3 for alpha chain variable domain of TCR clone 155679 (TRAV8-2, TRAJ11)
CVVSEKSGYSTLTF

SEQ ID NO: 311358 - protein, 16 aa, Homo sapiens
  CDR3 for beta chain variable domain of TCR clone 155679 (TRBV28, TRBJ2-1)
CASSSPEYPRHNEQFF

SEQ ID NO: 311359 - protein, 13 aa, Homo sapiens
  CDR3 for alpha chain variable domain of TCR clone 155680 (TRAV17, TRAJ9)
CATAITGGFKTIF

SEQ ID NO: 311360 - protein, 15 aa, Homo sapiens
  CDR3 for beta chain variable domain of TCR clone 155680 (TRBV15, TRBJ2-1)
CHQQNLAGGYNEQFF

SEQ ID NO: 311361 - protein, 16 aa, Homo sapiens
  CDR3 for alpha chain variable domain of TCR clone 155681 (TRAV30, TRAJ24)
CGTEIVDADSWGKFQF

SEQ ID NO: 311362 - protein, 13 aa, Homo sapiens
  CDR3 for beta chain variable domain of TCR clone 155681 (TRBV25-1, TRBJ2-6)
CASRGPGANVLTF

SEQ ID NO: 311363 - protein, 15 aa, Homo sapiens
  CDR3 for alpha chain variable domain of TCR clone 155682 (TRAV30, TRAJ13)
CGTQGVTGGYQKVTF

SEQ ID NO: 311364 - protein, 16 aa, Homo sapiens
  CDR3 for beta chain variable domain of TCR clone 155682 (TRBV5-1, TRBJ2-3)
CASSLGLAVYTDTQYS

SEQ ID NO: 311365 - protein, 17 aa, Homo sapiens
  CDR3 for alpha chain variable domain of TCR clone 155683 (TRAV13-1, TRAJ52)
CAAGRNAGGTSYGKLTF

SEQ ID NO: 311366 - protein, 16 aa, Homo sapiens
  CDR3 for beta chain variable domain of TCR clone 155683 (TRBV7-9, TRBJ2-1)
CASSDVAGGSYNEQFF

SEQ ID NO: 311367 - protein, 14 aa, Homo sapiens
  CDR3 for alpha chain variable domain of TCR clone 155684 (TRAV12-2, TRAJ40)
CAVKIPSGTYKYIF

SEQ ID NO: 311368 - protein, 19 aa, Homo sapiens
  CDR3 for beta chain variable domain of TCR clone 155684 (TRBV5-1, TRBJ2-2)
CASSLAPGLAGVRTGELFF

SEQ ID NO: 311369 - protein, 15 aa, Homo sapiens
  CDR3 for alpha chain variable domain of TCR clone 155685 (TRAV8-2, TRAJ40)
CVVLGTTPGTYKYTF

SEQ ID NO: 311370 - protein, 16 aa, Homo sapiens
  CDR3 for beta chain variable domain of TCR clone 155685 (TRBV7-3, TRBJ2-1)
CASSLEGYRSYNEQFF

SEQ ID NO: 311371 - protein, 14 aa, Homo sapiens
  CDR3 for alpha chain variable domain of TCR clone 155686 (TRAV1-2, TRAJ16)
CAVNQFSDGRKLLF

SEQ ID NO: 311372 - protein, 14 aa, Homo sapiens
  CDR3 for beta chain variable domain of TCR clone 155686 (TRBV5-1, TRBJ2-7)
CASSLEGRTYEQYF

SEQ ID NO: 311373 - protein, 17 aa, Homo sapiens
  CDR3 for alpha chain variable domain of TCR clone 155687 (TRAV23/DV6, TRAJ58)
CAARLLRGETSGSRSTF

SEQ ID NO: 311374 - protein, 14 aa, Homo sapiens
  CDR3 for beta chain variable domain of TCR clone 155687 (TRBV7-3, TRBJ2-1)
CASSLAGGTNEQFF

SEQ ID NO: 311375 - protein, 13 aa, Homo sapiens
  CDR3 for alpha chain variable domain of TCR clone 155688 (TRAV17, TRAJ9)
CATDYTGGFKTIF

SEQ ID NO: 311376 - protein, 13 aa, Homo sapiens
  CDR3 for beta chain variable domain of TCR clone 155688 (TRBV10-3, TRBJ2-7)
CTISEKGGYEQYF

SEQ ID NO: 311377 - protein, 15 aa, Homo sapiens
  CDR3 for alpha chain variable domain of TCR clone 155689 (TRAV26-1, TRAJ29)
CIVRVEGSGNTPLVF

SEQ ID NO: 311378 - protein, 13 aa, Homo sapiens
  CDR3 for beta chain variable domain of TCR clone 155689 (TRBV4-1, TRBJ2-1)
CASSQEVQYEQFF

SEQ ID NO: 311379 - protein, 13 aa, Homo sapiens
  CDR3 for alpha chain variable domain of TCR clone 155690 (TRAV38-1, TRAJ42)
CARWGGSQGNLIF

SEQ ID NO: 311380 - protein, 17 aa, Homo sapiens
  CDR3 for beta chain variable domain of TCR clone 155690 (TRBV20-1, TRBJ2-1)
CSARYPLAGFWDNEQFF

SEQ ID NO: 311381 - protein, 15 aa, Homo sapiens
  CDR3 for alpha chain variable domain of TCR clone 155691 (TRAV30, TRAJ57)
CGTAIPQGGPEKLVF

SEQ ID NO: 311382 - protein, 13 aa, Homo sapiens
  CDR3 for beta chain variable domain of TCR clone 155691 (TRBV7-9, TRBJ1-2)
CASSPSNFWGYTF

SEQ ID NO: 311383 - protein, 15 aa, Homo sapiens
  CDR3 for alpha chain variable domain of TCR clone 155692 (TRAV17, TRAJ42)
CATDHYGGSQGNLIF

SEQ ID NO: 311384 - protein, 14 aa, Homo sapiens
  CDR3 for beta chain variable domain of TCR clone 155692 (TRBV19, TRBJ2-5)
CASSIEHSQKTQYF

SEQ ID NO: 311385 - protein, 15 aa, Homo sapiens
  CDR3 for alpha chain variable domain of TCR clone 155693 (TRAV12-3, TRAJ5)
CAMSGLGTGRRALTF

SEQ ID NO: 311386 - protein, 16 aa, Homo sapiens
  CDR3 for beta chain variable domain of TCR clone 155693 (TRBV20-1, TRBJ2-3)
CSARLHSVGAIDTQYF

SEQ ID NO: 311387 - protein, 14 aa, Homo sapiens
  CDR3 for alpha chain variable domain of TCR clone 155694 (TRAV12-3, TRAJ10)
SHLPLTGGGNKLTF

SEQ ID NO: 311388 - protein, 16 aa, Homo sapiens
  CDR3 for beta chain variable domain of TCR clone 155694 (TRBV27, TRBJ2-2)
CASSSSGVSNTGELFL

SEQ ID NO: 311389 - protein, 16 aa, Homo sapiens
  CDR3 for alpha chain variable domain of TCR clone 155695 (TRAV22, TRAJ45)
CAVERGKRGGADGLTF

SEQ ID NO: 311390 - protein, 12 aa, Homo sapiens
  CDR3 for beta chain variable domain of TCR clone 155695 (TRBV29-1, TRBJ2-3)
CSVTGGADTQYF

SEQ ID NO: 311391 - protein, 13 aa, Homo sapiens
  CDR3 for alpha chain variable domain of TCR clone 155696 (TRAV17, TRAJ9)
CATDYTGGFKTIF

SEQ ID NO: 311392 - protein, 16 aa, Homo sapiens
  CDR3 for beta chain variable domain of TCR clone 155696 (TRBV9, TRBJ2-1)
CASSVGGGRNYNEQFF

SEQ ID NO: 311393 - protein, 14 aa, Homo sapiens
  CDR3 for alpha chain variable domain of TCR clone 155697 (TRAV1-2, TRAJ17)
CALRRGAAGNKLTF

SEQ ID NO: 311394 - protein, 15 aa, Homo sapiens
  CDR3 for beta chain variable domain of TCR clone 155697 (TRBV9, TRBJ1-6)
CASSVAGTGDSPLHF

SEQ ID NO: 311395 - protein, 15 aa, Homo sapiens
  CDR3 for alpha chain variable domain of TCR clone 155698 (TRAV17, TRAJ10)
CATDASGGGGNKLTF

SEQ ID NO: 311396 - protein, 14 aa, Homo sapiens
  CDR3 for beta chain variable domain of TCR clone 155698 (TRBV20-1, TRBJ2-7)
CSVPYRGRAETQYF

SEQ ID NO: 311397 - protein, 14 aa, Homo sapiens
  CDR3 for alpha chain variable domain of TCR clone 155699 (TRAV8-2, TRAJ11)
CVVSEKSGYSTPTS

SEQ ID NO: 311398 - protein, 16 aa, Homo sapiens
  CDR3 for beta chain variable domain of TCR clone 155699 (TRBV28, TRBJ2-1)
CASSSPEYPRDNEQFF

SEQ ID NO: 311399 - protein, 16 aa, Homo sapiens
  CDR3 for alpha chain variable domain of TCR clone 155700 (TRAV12-1, TRAJ53)
CVVTSVAGGSNYKLTF

SEQ ID NO: 311400 - protein, 17 aa, Homo sapiens
  CDR3 for beta chain variable domain of TCR clone 155700 (TRBV13, TRBJ2-3)
CASSLSRVAGGRNTQYF

SEQ ID NO: 311401 - protein, 17 aa, Homo sapiens
  CDR3 for alpha chain variable domain of TCR clone 155701 (TRAV26-2, TRAJ42)
CILRDVGYGGSPGNLIF

SEQ ID NO: 311402 - protein, 16 aa, Homo sapiens
  CDR3 for beta chain variable domain of TCR clone 155701 (TRBV12-4, TRBJ2-7)
CTSSLIGGTGTYEQYF

SEQ ID NO: 311403 - protein, 14 aa, Homo sapiens
  CDR3 for alpha chain variable domain of TCR clone 155702 (TRAV12-3, TRAJ10)
SHLPLTGGGKKLTF

SEQ ID NO: 311404 - protein, 12 aa, Homo sapiens
  CDR3 for beta chain variable domain of TCR clone 155702 (TRBV6-6, TRBJ2-3)
CASSSRGDTQYF

SEQ ID NO: 311405 - protein, 14 aa, Homo sapiens
  CDR3 for alpha chain variable domain of TCR clone 155703 (TRAV2, TRAJ22)
CAVGRGGSASQLTF

SEQ ID NO: 311406 - protein, 12 aa, Homo sapiens
  CDR3 for beta chain variable domain of TCR clone 155703 (TRBV19, TRBJ2-1)
CASSMQDTEQFF

SEQ ID NO: 311407 - protein, 14 aa, Homo sapiens
  CDR3 for alpha chain variable domain of TCR clone 155704 (TRAV2, TRAJ9)
CAVEDRSGGFKTIF

SEQ ID NO: 311408 - protein, 12 aa, Homo sapiens
  CDR3 for beta chain variable domain of TCR clone 155704 (TRBV11-3, TRBJ2-1)
CASSPVNNEQFF

SEQ ID NO: 311409 - protein, 12 aa, Homo sapiens
  CDR3 for alpha chain variable domain of TCR clone 155705 (TRAV12-3, TRAJ48)
CAVRIGNEKLTF

SEQ ID NO: 311410 - protein, 12 aa, Homo sapiens
  CDR3 for beta chain variable domain of TCR clone 155705 (TRBV13, TRBJ2-7)
CASSLQAYEQYF

SEQ ID NO: 311411 - protein, 14 aa, Homo sapiens
  CDR3 for alpha chain variable domain of TCR clone 155706 (TRAV16, TRAJ15)
CALSGPQAGTALIF

SEQ ID NO: 311412 - protein, 12 aa, Homo sapiens
  CDR3 for beta chain variable domain of TCR clone 155706 (TRBV18, TRBJ2-5)
CASSPSTETQYF

SEQ ID NO: 311413 - protein, 16 aa, Homo sapiens
  CDR3 for alpha chain variable domain of TCR clone 155707 (TRAV30, TRAJ24)
CGTEIVDADSWGEFKF

SEQ ID NO: 311414 - protein, 13 aa, Homo sapiens
  CDR3 for beta chain variable domain of TCR clone 155707 (TRBV7-3, TRBJ1-1)
CASSQDWGAEAFF

SEQ ID NO: 311415 - protein, 11 aa, Homo sapiens
  CDR3 for alpha chain variable domain of TCR clone 155708 (TRAV12-1, TRAJ30)
CVVNGQDKIIF

SEQ ID NO: 311416 - protein, 15 aa, Homo sapiens
  CDR3 for beta chain variable domain of TCR clone 155708 (TRBV18, TRBJ1-6)
CASSPGGVVNSPLHF

SEQ ID NO: 311417 - protein, 15 aa, Homo sapiens
  CDR3 for alpha chain variable domain of TCR clone 155709 (TRAV23/DV6, TRAJ4)
CAASPLRGGYNKLIF

SEQ ID NO: 311418 - protein, 13 aa, Homo sapiens
  CDR3 for beta chain variable domain of TCR clone 155709 (TRBV11-2, TRBJ1-1)
CASSLGNGAEAFF

SEQ ID NO: 311419 - protein, 12 aa, Homo sapiens
  CDR3 for alpha chain variable domain of TCR clone 155710 (TRAV8-3, TRAJ20)
CAVGANDYKLSF

SEQ ID NO: 311420 - protein, 15 aa, Homo sapiens
  CDR3 for beta chain variable domain of TCR clone 155710 (TRBV11-2, TRBJ2-1)
CASSLGTRGLNEQFF

SEQ ID NO: 311421 - protein, 12 aa, Homo sapiens
  CDR3 for alpha chain variable domain of TCR clone 155711 (TRAV10, TRAJ31)
CVVRAHRARLRF

SEQ ID NO: 311422 - protein, 17 aa, Homo sapiens
  CDR3 for beta chain variable domain of TCR clone 155711 (TRBV14, TRBJ2-1)
CASSQDRRDAIYNEQFF

SEQ ID NO: 311423 - protein, 13 aa, Homo sapiens
  CDR3 for alpha chain variable domain of TCR clone 155712 (TRAV21, TRAJ45)
CAVMGGGADGLTF

SEQ ID NO: 311424 - protein, 13 aa, Homo sapiens
  CDR3 for beta chain variable domain of TCR clone 155712 (TRBV19, TRBJ2-7)
CASSPRQSYEQYF

SEQ ID NO: 311425 - protein, 14 aa, Homo sapiens
  CDR3 for alpha chain variable domain of TCR clone 155713 (TRAV8-3, TRAJ39)
CAVGANNAGTMLTF

SEQ ID NO: 311426 - protein, 12 aa, Homo sapiens
  CDR3 for beta chain variable domain of TCR clone 155713 (TRBV11-3, TRBJ1-1)
CASSHRQGEAFF

SEQ ID NO: 311427 - protein, 12 aa, Homo sapiens
  CDR3 for alpha chain variable domain of TCR clone 155714 (TRAV17, TRAJ28)
WESGAGSYQLTF

SEQ ID NO: 311428 - protein, 13 aa, Homo sapiens
  CDR3 for beta chain variable domain of TCR clone 155714 (TRBV11-3, TRBJ1-1)
CASSRQPNTEAFF

SEQ ID NO: 311429 - protein, 18 aa, Homo sapiens
  CDR3 for alpha chain variable domain of TCR clone 155715 (TRAV12-3, TRAJ52)
CAMSRTNAGGTSYGKLTF

SEQ ID NO: 311430 - protein, 15 aa, Homo sapiens
  CDR3 for beta chain variable domain of TCR clone 155715 (TRBV2, TRBJ2-1)
CATQARRGMIGEQFF

SEQ ID NO: 311431 - protein, 14 aa, Homo sapiens
  CDR3 for alpha chain variable domain of TCR clone 155716 (TRAV8-6, TRAJ34)
CAVSDQGNTDKLIF

SEQ ID NO: 311432 - protein, 15 aa, Homo sapiens
  CDR3 for beta chain variable domain of TCR clone 155716 (TRBV5-1, TRBJ2-3)
CASSVTSGSTDTQYF

SEQ ID NO: 311433 - protein, 13 aa, Homo sapiens
  CDR3 for alpha chain variable domain of TCR clone 155717 (TRAV12-3, TRAJ13)
CAMTSGGYQKVTF

SEQ ID NO: 311434 - protein, 13 aa, Homo sapiens
  CDR3 for beta chain variable domain of TCR clone 155717 (TRBV20-1, TRBJ2-2)
CSALSGGAGVLFF

SEQ ID NO: 311435 - protein, 15 aa, Homo sapiens
  CDR3 for alpha chain variable domain of TCR clone 155718 (TRAV3, TRAJ36)
CAVRASQTGANNLFF

SEQ ID NO: 311436 - protein, 12 aa, Homo sapiens
  CDR3 for beta chain variable domain of TCR clone 155718 (TRBV11-3, TRBJ2-4)
CASSAGRVIRYF

SEQ ID NO: 311437 - protein, 14 aa, Homo sapiens
  CDR3 for alpha chain variable domain of TCR clone 155719 (TRAV2, TRAJ9)
CAVEHRSGGFKTIF

SEQ ID NO: 311438 - protein, 11 aa, Homo sapiens
  CDR3 for beta chain variable domain of TCR clone 155719 (TRBV7-9, TRBJ2-5)
CASSLGETQYF

SEQ ID NO: 311439 - protein, 14 aa, Homo sapiens
  CDR3 for alpha chain variable domain of TCR clone 155720 (TRAV1-2, TRAJ26)
CGERPDNYGQNFVF

SEQ ID NO: 311440 - protein, 11 aa, Homo sapiens
  CDR3 for beta chain variable domain of TCR clone 155720 (TRBV29-1, TRBJ2-5)
CSEDRTGTQYF

SEQ ID NO: 311441 - protein, 14 aa, Homo sapiens
  CDR3 for alpha chain variable domain of TCR clone 155721 (TRAV21, TRAJ38)
CAVMGAGNNRKLIW

SEQ ID NO: 311442 - protein, 15 aa, Homo sapiens
  CDR3 for beta chain variable domain of TCR clone 155721 (TRBV7-9, TRBJ2-3)
CASSHGDRVPDTQYF

SEQ ID NO: 311443 - protein, 14 aa, Homo sapiens
  CDR3 for alpha chain variable domain of TCR clone 155722 (TRAV16, TRAJ40)
CALHESYYLRNLQI

SEQ ID NO: 311444 - protein, 12 aa, Homo sapiens
  CDR3 for beta chain variable domain of TCR clone 155722 (TRBV7-3, TRBJ2-3)
CASSSLTETQYF

SEQ ID NO: 311445 - protein, 14 aa, Homo sapiens
  CDR3 for alpha chain variable domain of TCR clone 155723 (TRAV17, TRAJ57)
CATDPQGGSEKLVF

SEQ ID NO: 311446 - protein, 18 aa, Homo sapiens
  CDR3 for beta chain variable domain of TCR clone 155723 (TRBV6-6, TRBJ1-3)
CASSYSKWDSISGNTIYL

SEQ ID NO: 311447 - protein, 17 aa, Homo sapiens
  CDR3 for alpha chain variable domain of TCR clone 155724 (TRAV13-1, TRAJ52)
CAAGRNAGGTSYGRLKF

SEQ ID NO: 311448 - protein, 13 aa, Homo sapiens
  CDR3 for beta chain variable domain of TCR clone 155724 (TRBV7-2, TRBJ1-1)
CASNLKGAKVAFF

SEQ ID NO: 311449 - protein, 15 aa, Homo sapiens
  CDR3 for alpha chain variable domain of TCR clone 155725 (TRAV17, TRAJ29)
LLLCYASSGNTPLVF

SEQ ID NO: 311450 - protein, 17 aa, Homo sapiens
  CDR3 for beta chain variable domain of TCR clone 155725 (TRBV20-1, TRBJ2-2)
CSASGSGQGGLTGELFF

SEQ ID NO: 311451 - protein, 15 aa, Homo sapiens
  CDR3 for alpha chain variable domain of TCR clone 155726 (TRAV30, TRAJ32)
CGKEILGGATNKLIF

SEQ ID NO: 311452 - protein, 17 aa, Homo sapiens
  CDR3 for beta chain variable domain of TCR clone 155726 (TRBV5-4, TRBJ2-1)
CASSSAGGRGPYNEQFF

SEQ ID NO: 311453 - protein, 14 aa, Homo sapiens
  CDR3 for alpha chain variable domain of TCR clone 155727 (TRAV17, TRAJ4)
CATAPLGGYNKLIF

SEQ ID NO: 311454 - protein, 13 aa, Homo sapiens
  CDR3 for beta chain variable domain of TCR clone 155727 (TRBV12-4, TRBJ1-3)
CASSLASVNTIYF

SEQ ID NO: 311455 - protein, 15 aa, Homo sapiens
  CDR3 for alpha chain variable domain of TCR clone 155728 (TRAV17, TRAJ17)
CATDASIIRRQQANF

SEQ ID NO: 311456 - protein, 13 aa, Homo sapiens
  CDR3 for beta chain variable domain of TCR clone 155728 (TRBV4-2, TRBJ1-1)
CASSQAGNTEAFF

SEQ ID NO: 311457 - protein, 14 aa, Homo sapiens
  CDR3 for alpha chain variable domain of TCR clone 155729 (TRAV35, TRAJ33)
CAGSSQDSNHQLIW

SEQ ID NO: 311458 - protein, 15 aa, Homo sapiens
  CDR3 for beta chain variable domain of TCR clone 155729 (TRBV20-1, TRBJ2-7)
CSAEAGTSGAYEQYF

SEQ ID NO: 311459 - protein, 14 aa, Homo sapiens
  CDR3 for alpha chain variable domain of TCR clone 155730 (TRAV23/DV6, TRAJ6)
CSASRSGGSYITTF

SEQ ID NO: 311460 - protein, 17 aa, Homo sapiens
  CDR3 for beta chain variable domain of TCR clone 155730 (TRBV20-1, TRBJ2-1)
CSASASGLAGSYNEQFF

SEQ ID NO: 311461 - protein, 15 aa, Homo sapiens
  CDR3 for alpha chain variable domain of TCR clone 155731 (TRAV27, TRAJ38)
CAARRNAGKHRKLIW

SEQ ID NO: 311462 - protein, 17 aa, Homo sapiens
  CDR3 for beta chain variable domain of TCR clone 155731 (TRBV20-1, TRBJ2-2)
CSASGSGQGGLTGELFF

SEQ ID NO: 311463 - protein, 12 aa, Homo sapiens
  CDR3 for alpha chain variable domain of TCR clone 155732 (TRAV13-1, TRAJ21)
CAAKEGFNKFYF

SEQ ID NO: 311464 - protein, 15 aa, Homo sapiens
  CDR3 for beta chain variable domain of TCR clone 155732 (TRBV25-1, TRBJ1-4)
CASSPEDSTNEKLFF

SEQ ID NO: 311465 - protein, 12 aa, Homo sapiens
  CDR3 for alpha chain variable domain of TCR clone 155733 (TRAV26-1, TRAJ13)
CIVSRGYQKVTF

SEQ ID NO: 311466 - protein, 14 aa, Homo sapiens
  CDR3 for beta chain variable domain of TCR clone 155733 (TRBV7-9, TRBJ2-3)
CASSLEDGTDTQYF

SEQ ID NO: 311467 - protein, 13 aa, Homo sapiens
  CDR3 for alpha chain variable domain of TCR clone 155734 (TRAV20, TRAJ21)
CAVEGYNFNKFYF

SEQ ID NO: 311468 - protein, 15 aa, Homo sapiens
  CDR3 for beta chain variable domain of TCR clone 155734 (TRBV12-4, TRBJ2-5)
CASSPPTGLQETQYF

SEQ ID NO: 311469 - protein, 12 aa, Homo sapiens
  CDR3 for alpha chain variable domain of TCR clone 155735 (TRAV16, TRAJ22)
CAIEVSARQLTF

SEQ ID NO: 311470 - protein, 14 aa, Homo sapiens
  CDR3 for beta chain variable domain of TCR clone 155735 (TRBV11-2, TRBJ2-3)
CASSSIASTDTQYF

SEQ ID NO: 311471 - protein, 16 aa, Homo sapiens
  CDR3 for alpha chain variable domain of TCR clone 155736 (TRAV3, TRAJ18)
CAVRVGRGSTLGRLYF

SEQ ID NO: 311472 - protein, 17 aa, Homo sapiens
  CDR3 for beta chain variable domain of TCR clone 155736 (TRBV5-1, TRBJ2-3)
CASSKIGLADRTDTQYF

SEQ ID NO: 311473 - protein, 14 aa, Homo sapiens
  CDR3 for alpha chain variable domain of TCR clone 155737 (TRAV8-4, TRAJ13)
CAVTLSGGDQKVTF

SEQ ID NO: 311474 - protein, 14 aa, Homo sapiens
  CDR3 for beta chain variable domain of TCR clone 155737 (TRBV7-2, TRBJ1-2)
FASSQTGSTYGYTF

SEQ ID NO: 311475 - protein, 15 aa, Homo sapiens
  CDR3 for alpha chain variable domain of TCR clone 155738 (TRAV26-2, TRAJ39)
CSLRGHNNAGNMLTF

SEQ ID NO: 311476 - protein, 15 aa, Homo sapiens
  CDR3 for beta chain variable domain of TCR clone 155738 (TRBV5-4, TRBJ1-1)
CASSSLGWANTEAFF

SEQ ID NO: 311477 - protein, 15 aa, Homo sapiens
  CDR3 for alpha chain variable domain of TCR clone 155739 (TRAV8-3, TRAJ45)
FASSYSGGGADGLTF

SEQ ID NO: 311478 - protein, 13 aa, Homo sapiens
  CDR3 for beta chain variable domain of TCR clone 155739 (TRBV10-3, TRBJ2-7)
YASKLAVNYEQYF

SEQ ID NO: 311479 - protein, 16 aa, Homo sapiens
  CDR3 for alpha chain variable domain of TCR clone 155740 (TRAV3, TRAJ37)
CAVRPHGSGTTGTLIF

SEQ ID NO: 311480 - protein, 13 aa, Homo sapiens
  CDR3 for beta chain variable domain of TCR clone 155740 (TRBV2, TRBJ1-5)
CASGTGGYQPQHF

SEQ ID NO: 311481 - protein, 13 aa, Homo sapiens
  CDR3 for alpha chain variable domain of TCR clone 155741 (TRAV8-3, TRAJ30)
CAVGGWRDDKIIF

SEQ ID NO: 311482 - protein, 14 aa, Homo sapiens
  CDR3 for beta chain variable domain of TCR clone 155741 (TRBV20-1, TRBJ1-1)
CSAPPADMSTEAFF

SEQ ID NO: 311483 - protein, 15 aa, Homo sapiens
  CDR3 for alpha chain variable domain of TCR clone 155742 (TRAV8-3, TRAJ44)
CAVGSGAGTASKLTF

SEQ ID NO: 311484 - protein, 12 aa, Homo sapiens
  CDR3 for beta chain variable domain of TCR clone 155742 (TRBV7-8, TRBJ2-4)
CASSLGGNIQYF

SEQ ID NO: 311485 - protein, 17 aa, Homo sapiens
  CDR3 for alpha chain variable domain of TCR clone 155743 (TRAV3, TRAJ6)
CAVRDGPRAGGSYIPTF

SEQ ID NO: 311486 - protein, 17 aa, Homo sapiens
  CDR3 for beta chain variable domain of TCR clone 155743 (TRBV7-6, TRBJ2-5)
CASSPGLADPWGETQYF

SEQ ID NO: 311487 - protein, 12 aa, Homo sapiens
  CDR3 for alpha chain variable domain of TCR clone 155744 (TRAV8-3, TRAJ26)
CAGDNYGQNFVF

SEQ ID NO: 311488 - protein, 14 aa, Homo sapiens
  CDR3 for beta chain variable domain of TCR clone 155744 (TRBV15, TRBJ2-7)
CATSPDRGLYEQYF

SEQ ID NO: 311489 - protein, 13 aa, Homo sapiens
  CDR3 for alpha chain variable domain of TCR clone 155745 (TRAV2, TRAJ13)
CAVESGGYQTVTF

SEQ ID NO: 311490 - protein, 12 aa, Homo sapiens
  CDR3 for beta chain variable domain of TCR clone 155745 (TRBV29-1, TRBJ2-3)
CSVTGGADTQYF

SEQ ID NO: 311491 - protein, 14 aa, Homo sapiens
  CDR3 for alpha chain variable domain of TCR clone 155746 (TRAV29/DV5, TRAJ36)
CAARRKTGANNSSF

SEQ ID NO: 311492 - protein, 14 aa, Homo sapiens
  CDR3 for beta chain variable domain of TCR clone 155746 (TRBV12-5, TRBJ2-5)
CASGSRTHQETQYF

SEQ ID NO: 311493 - protein, 12 aa, Homo sapiens
  CDR3 for alpha chain variable domain of TCR clone 155747 (TRAV12-1, TRAJ40)
CVFYSGTYKYIF

SEQ ID NO: 311494 - protein, 15 aa, Homo sapiens
  CDR3 for beta chain variable domain of TCR clone 155747 (TRBV7-2, TRBJ2-7)
CASSLKGALTYEQYF

SEQ ID NO: 311495 - protein, 16 aa, Homo sapiens
  CDR3 for alpha chain variable domain of TCR clone 155748 (TRAV12-1, TRAJ48)
CVVNMVSNFGNEKLTF

SEQ ID NO: 311496 - protein, 18 aa, Homo sapiens
  CDR3 for beta chain variable domain of TCR clone 155748 (TRBV11-2, TRBJ2-6)
CASSLNPFLGTGANVLTV

SEQ ID NO: 311497 - protein, 10 aa, Homo sapiens
  CDR3 for alpha chain variable domain of TCR clone 155749 (TRAV12-2, TRAJ22)
CAVNETQLNF

SEQ ID NO: 311498 - protein, 15 aa, Homo sapiens
  CDR3 for beta chain variable domain of TCR clone 155749 (TRBV27, TRBJ2-1)
CASSNGGGSSNEQFF

SEQ ID NO: 311499 - protein, 17 aa, Homo sapiens
  CDR3 for alpha chain variable domain of TCR clone 155750 (TRAV38-2/DV8, TRAJ23)
CTLSRKLIFGQGTELSV

SEQ ID NO: 311500 - protein, 17 aa, Homo sapiens
  CDR3 for beta chain variable domain of TCR clone 155750 (TRBV5-4, TRBJ2-1)
CASSSAGGRGPYNEQFF

SEQ ID NO: 311501 - protein, 16 aa, Homo sapiens
  CDR3 for alpha chain variable domain of TCR clone 155751 (TRAV13-1, TRAJ48)
CSKYREYNFGNEKLTF

SEQ ID NO: 311502 - protein, 17 aa, Homo sapiens
  CDR3 for beta chain variable domain of TCR clone 155751 (TRBV28, TRBJ2-1)
CASSSARQALTYNEQFF

SEQ ID NO: 311503 - protein, 11 aa, Homo sapiens
  CDR3 for alpha chain variable domain of TCR clone 155752 (TRAV23/DV6, TRAJ58)
CAARLLRGETS

SEQ ID NO: 311504 - protein, 12 aa, Homo sapiens
  CDR3 for beta chain variable domain of TCR clone 155752 (TRBV28, TRBJ2-3)
CASSLYRDTQYF

SEQ ID NO: 311505 - protein, 16 aa, Homo sapiens
  CDR3 for alpha chain variable domain of TCR clone 155753 (TRAV12-1, TRAJ12)
CVVDTLLMDSSYKLIF

SEQ ID NO: 311506 - protein, 13 aa, Homo sapiens
  CDR3 for beta chain variable domain of TCR clone 155753 (TRBV11-2, TRBJ2-1)
CASSSGAYNEQFF

SEQ ID NO: 311507 - protein, 14 aa, Homo sapiens
  CDR3 for alpha chain variable domain of TCR clone 155754 (TRAV3, TRAJ17)
CAVRDAAAGNKLTF

SEQ ID NO: 311508 - protein, 13 aa, Homo sapiens
  CDR3 for beta chain variable domain of TCR clone 155754 (TRBV2, TRBJ1-1)
CASSVSGYTQAFF

SEQ ID NO: 311509 - protein, 14 aa, Homo sapiens
  CDR3 for alpha chain variable domain of TCR clone 155755 (TRAV3, TRAJ9)
CAVRLNTGGFKTIF

SEQ ID NO: 311510 - protein, 13 aa, Homo sapiens
  CDR3 for beta chain variable domain of TCR clone 155755 (TRBV7-3, TRBJ1-1)
CASSQDWGPEAFF

SEQ ID NO: 311511 - protein, 12 aa, Homo sapiens
  CDR3 for alpha chain variable domain of TCR clone 155756 (TRAV3, TRAJ31)
CAVRPRGPRLLF

SEQ ID NO: 311512 - protein, 17 aa, Homo sapiens
  CDR3 for beta chain variable domain of TCR clone 155756 (TRBV7-9, TRBJ1-5)
CASSASQGGYSNQPQHF

SEQ ID NO: 311513 - protein, 13 aa, Homo sapiens
  CDR3 for alpha chain variable domain of TCR clone 155757 (TRAV8-3, TRAJ36)
CAVGATGANNLFF

SEQ ID NO: 311514 - protein, 15 aa, Homo sapiens
  CDR3 for beta chain variable domain of TCR clone 155757 (TRBV5-7, TRBJ2-3)
CASSPWARATDTQYF

SEQ ID NO: 311515 - protein, 15 aa, Homo sapiens
  CDR3 for alpha chain variable domain of TCR clone 155758 (TRAV20, TRAJ40)
CAVQRGTSGTYNYIF

SEQ ID NO: 311516 - protein, 15 aa, Homo sapiens
  CDR3 for beta chain variable domain of TCR clone 155758 (TRBV25-1, TRBJ1-4)
CASSPGDSTNEKLFF

SEQ ID NO: 311517 - protein, 15 aa, Homo sapiens
  CDR3 for alpha chain variable domain of TCR clone 155759 (TRAV23/DV6, TRAJ42)
CAANYYGGSQGNLIF

SEQ ID NO: 311518 - protein, 15 aa, Homo sapiens
  CDR3 for beta chain variable domain of TCR clone 155759 (TRBV2, TRBJ2-3)
CASSERSGHTDTQYF

SEQ ID NO: 311519 - protein, 14 aa, Homo sapiens
  CDR3 for alpha chain variable domain of TCR clone 155760 (TRAV3, TRAJ27)
CAVRGFTPMQANNL

SEQ ID NO: 311520 - protein, 12 aa, Homo sapiens
  CDR3 for beta chain variable domain of TCR clone 155760 (TRBV11-2, TRBJ2-2)
CASSLGGGELFF

SEQ ID NO: 311521 - protein, 13 aa, Homo sapiens
  CDR3 for alpha chain variable domain of TCR clone 155761 (TRAV16, TRAJ54)
CALMVQGAQKLVF

SEQ ID NO: 311522 - protein, 17 aa, Homo sapiens
  CDR3 for beta chain variable domain of TCR clone 155761 (TRBV18, TRBJ2-6)
CASSPDRGVGGANVLTF

SEQ ID NO: 311523 - protein, 13 aa, Homo sapiens
  CDR3 for alpha chain variable domain of TCR clone 155762 (TRAV26-1, TRAJ48)
CIVRVVGDEKLTF

SEQ ID NO: 311524 - protein, 13 aa, Homo sapiens
  CDR3 for beta chain variable domain of TCR clone 155762 (TRBV20-1, TRBJ2-2)
CSASAAGTGELFF

SEQ ID NO: 311525 - protein, 14 aa, Homo sapiens
  CDR3 for alpha chain variable domain of TCR clone 155763 (TRAV8-2, TRAJ11)
CVVSEKSGYSTLTF

SEQ ID NO: 311526 - protein, 16 aa, Homo sapiens
  CDR3 for beta chain variable domain of TCR clone 155763 (TRBV28, TRBJ2-1)
CASSSPEYPRDNEQVF

SEQ ID NO: 311527 - protein, 14 aa, Homo sapiens
  CDR3 for alpha chain variable domain of TCR clone 155764 (TRAV1-2, TRAJ8)
CAVREDKGFQKLVF

SEQ ID NO: 311528 - protein, 15 aa, Homo sapiens
  CDR3 for beta chain variable domain of TCR clone 155764 (TRBV6-3, TRBJ2-7)
GASSSPGTVFYEQYF

SEQ ID NO: 311529 - protein, 14 aa, Homo sapiens
  CDR3 for alpha chain variable domain of TCR clone 155765 (TRAV8-3, TRAJ4)
CAVGSAGGYNKLIF

SEQ ID NO: 311530 - protein, 15 aa, Homo sapiens
  CDR3 for beta chain variable domain of TCR clone 155765 (TRBV20-1, TRBJ2-5)
CSAPPRTGFGETQYF

SEQ ID NO: 311531 - protein, 12 aa, Homo sapiens
  CDR3 for alpha chain variable domain of TCR clone 155766 (TRAV26-1, TRAJ36)
CIVRVRADNLSF

SEQ ID NO: 311532 - protein, 14 aa, Homo sapiens
  CDR3 for beta chain variable domain of TCR clone 155766 (TRBV14, TRBJ2-3)
CASSRKLAADTQYF

SEQ ID NO: 311533 - protein, 14 aa, Homo sapiens
  CDR3 for alpha chain variable domain of TCR clone 155767 (TRAV12-2, TRAJ13)
CAVKQTGGYQKVTF

SEQ ID NO: 311534 - protein, 14 aa, Homo sapiens
  CDR3 for beta chain variable domain of TCR clone 155767 (TRBV5-5, TRBJ2-7)
CASSLGQGTYEQYF

SEQ ID NO: 311535 - protein, 13 aa, Homo sapiens
  CDR3 for alpha chain variable domain of TCR clone 155768 (TRAV12-1, TRAJ6)
CVVFPGGSYIPTF

SEQ ID NO: 311536 - protein, 14 aa, Homo sapiens
  CDR3 for beta chain variable domain of TCR clone 155768 (TRBV20-1, TRBJ1-3)
CSASPTGAGNAIYF

SEQ ID NO: 311537 - protein, 15 aa, Homo sapiens
  CDR3 for alpha chain variable domain of TCR clone 155769 (TRAV12-3, TRAJ42)
CAMITSVGSQGNLIF

SEQ ID NO: 311538 - protein, 13 aa, Homo sapiens
  CDR3 for beta chain variable domain of TCR clone 155769 (TRBV11-3, TRBJ1-1)
CASSSNRDTEAFF

SEQ ID NO: 311539 - protein, 16 aa, Homo sapiens
  CDR3 for alpha chain variable domain of TCR clone 155770 (TRAV30, TRAJ24)
CGTEIVDADSWGKFQF

SEQ ID NO: 311540 - protein, 15 aa, Homo sapiens
  CDR3 for beta chain variable domain of TCR clone 155770 (TRBV20-1, TRBJ2-5)
CSAGLAGVSQETQYF

SEQ ID NO: 311541 - protein, 15 aa, Homo sapiens
  CDR3 for alpha chain variable domain of TCR clone 155771 (TRAV3, TRAJ22)
CAVRDRGGSARQLTF

SEQ ID NO: 311542 - protein, 12 aa, Homo sapiens
  CDR3 for beta chain variable domain of TCR clone 155771 (TRBV7-2, TRBJ2-1)
CASSPQDIAQFF

SEQ ID NO: 311543 - protein, 12 aa, Homo sapiens
  CDR3 for alpha chain variable domain of TCR clone 155772 (TRAV8-3, TRAJ26)
CAGDNYGQNFVF

SEQ ID NO: 311544 - protein, 15 aa, Homo sapiens
  CDR3 for beta chain variable domain of TCR clone 155772 (TRBV11-2, TRBJ2-1)
CASSLGTSGPNEQFF

SEQ ID NO: 311545 - protein, 16 aa, Homo sapiens
  CDR3 for alpha chain variable domain of TCR clone 155773 (TRAV12-3, TRAJ53)
CAMSPGSGGSNYKLTF

SEQ ID NO: 311546 - protein, 17 aa, Homo sapiens
  CDR3 for beta chain variable domain of TCR clone 155773 (TRBV20-1, TRBJ2-2)
CSASGSRQGGLTGELFF

SEQ ID NO: 311547 - protein, 14 aa, Homo sapiens
  CDR3 for alpha chain variable domain of TCR clone 155774 (TRAV12-3, TRAJ50)
CAMSPKTSYDKVIF

SEQ ID NO: 311548 - protein, 14 aa, Homo sapiens
  CDR3 for beta chain variable domain of TCR clone 155774 (TRBV18, TRBJ2-7)
CASSPRGGAYEQYF

SEQ ID NO: 311549 - protein, 12 aa, Homo sapiens
  CDR3 for alpha chain variable domain of TCR clone 155775 (TRAV36/DV7, TRAJ54)
CAVVRGAQKMVF

SEQ ID NO: 311550 - protein, 14 aa, Homo sapiens
  CDR3 for beta chain variable domain of TCR clone 155775 (TRBV12-5, TRBJ2-5)
CASGSRTHQETQYF

SEQ ID NO: 311551 - protein, 13 aa, Homo sapiens
  CDR3 for alpha chain variable domain of TCR clone 155776 (TRAV13-2, TRAJ41)
CAESINSGYALNF

SEQ ID NO: 311552 - protein, 14 aa, Homo sapiens
  CDR3 for beta chain variable domain of TCR clone 155776 (TRBV2, TRBJ2-1)
WASSEALDGNEQFF

SEQ ID NO: 311553 - protein, 16 aa, Homo sapiens
  CDR3 for alpha chain variable domain of TCR clone 155777 (TRAV12-3, TRAJ58)
CAMTDTEETSGSRLTV

SEQ ID NO: 311554 - protein, 22 aa, Homo sapiens
  CDR3 for beta chain variable domain of TCR clone 155777 (TRBV23-1, TRBJ2-7)
CASSRRLDSGQGYVGGGYEQYF

SEQ ID NO: 311555 - protein, 14 aa, Homo sapiens
  CDR3 for alpha chain variable domain of TCR clone 155778 (TRAV12-3, TRAJ56)
CAMSVTGANSKLTF

SEQ ID NO: 311556 - protein, 13 aa, Homo sapiens
  CDR3 for beta chain variable domain of TCR clone 155778 (TRBV12-4, TRBJ1-2)
CASSSGLTVIATF

SEQ ID NO: 311557 - protein, 13 aa, Homo sapiens
  CDR3 for alpha chain variable domain of TCR clone 155779 (TRAV27, TRAJ53)
CAGQGGRNYKLTF

SEQ ID NO: 311558 - protein, 13 aa, Homo sapiens
  CDR3 for beta chain variable domain of TCR clone 155779 (TRBV29-1, TRBJ1-1)
CSVESGFGTEAFF

SEQ ID NO: 311559 - protein, 10 aa, Homo sapiens
  CDR3 for alpha chain variable domain of TCR clone 155780 (TRAV14/DV4, TRAJ42)
CAMREGQLWR

SEQ ID NO: 311560 - protein, 15 aa, Homo sapiens
  CDR3 for beta chain variable domain of TCR clone 155780 (TRBV4-1, TRBJ1-4)
CASSDTGGTNEKLFF

SEQ ID NO: 311561 - protein, 15 aa, Homo sapiens
  CDR3 for alpha chain variable domain of TCR clone 155781 (TRAV17, TRAJ16)
CATALRFSDGQKLLF

SEQ ID NO: 311562 - protein, 12 aa, Homo sapiens
  CDR3 for beta chain variable domain of TCR clone 155781 (TRBV14, TRBJ1-1)
CASSQLKGLAFF

SEQ ID NO: 311563 - protein, 14 aa, Homo sapiens
  CDR3 for alpha chain variable domain of TCR clone 155782 (TRAV3, TRAJ6)
CAVRDWGGSYLPTF

SEQ ID NO: 311564 - protein, 17 aa, Homo sapiens
  CDR3 for beta chain variable domain of TCR clone 155782 (TRBV6-5, TRBJ2-1)
CASRLSGRFESYNEQFF

SEQ ID NO: 311565 - protein, 13 aa, Homo sapiens
  CDR3 for alpha chain variable domain of TCR clone 155783 (TRAV8-3, TRAJ28)
CAVGAVGSYQLTF

SEQ ID NO: 311566 - protein, 15 aa, Homo sapiens
  CDR3 for beta chain variable domain of TCR clone 155783 (TRBV9, TRBJ1-6)
CSSSVAGTGDSPLHF

SEQ ID NO: 311567 - protein, 15 aa, Homo sapiens
  CDR3 for alpha chain variable domain of TCR clone 155784 (TRAV2, TRAJ9)
CAVEDRGTGGFKTIF

SEQ ID NO: 311568 - protein, 14 aa, Homo sapiens
  CDR3 for beta chain variable domain of TCR clone 155784 (TRBV12-4, TRBJ1-4)
CASSRTTTNEKLFF

SEQ ID NO: 311569 - protein, 11 aa, Homo sapiens
  CDR3 for alpha chain variable domain of TCR clone 155785 (TRAV4, TRAJ31)
CLVGDNARLMF

SEQ ID NO: 311570 - protein, 15 aa, Homo sapiens
  CDR3 for beta chain variable domain of TCR clone 155785 (TRBV10-2, TRBJ2-6)
CASSEQGTGANDLTF

SEQ ID NO: 311571 - protein, 12 aa, Homo sapiens
  CDR3 for alpha chain variable domain of TCR clone 155786 (TRAV26-1, TRAJ13)
CIVSRGYQKVTF

SEQ ID NO: 311572 - protein, 14 aa, Homo sapiens
  CDR3 for beta chain variable domain of TCR clone 155786 (TRBV7-2, TRBJ1-2)
CASSQTGSTYGYTF

SEQ ID NO: 311573 - protein, 16 aa, Homo sapiens
  CDR3 for alpha chain variable domain of TCR clone 155787 (TRAV3, TRAJ37)
CAVRPHGSGTTGKQIF

SEQ ID NO: 311574 - protein, 17 aa, Homo sapiens
  CDR3 for beta chain variable domain of TCR clone 155787 (TRBV5-1, TRBJ2-5)
CASSPVALGQNQETQYF

SEQ ID NO: 311575 - protein, 11 aa, Homo sapiens
  CDR3 for alpha chain variable domain of TCR clone 155788 (TRAV21, TRAJ34)
CAHNNTDKLIF

SEQ ID NO: 311576 - protein, 13 aa, Homo sapiens
  CDR3 for beta chain variable domain of TCR clone 155788 (TRBV7-6, TRBJ1-2)
CASSLVADYGYTF

SEQ ID NO: 311577 - protein, 12 aa, Homo sapiens
  CDR3 for alpha chain variable domain of TCR clone 155789 (TRAV23/DV6, TRAJ30)
CAASKGDDKIIF

SEQ ID NO: 311578 - protein, 15 aa, Homo sapiens
  CDR3 for beta chain variable domain of TCR clone 155789 (TRBV29-1, TRBJ2-1)
CSGRDRKSSYKEQFF

SEQ ID NO: 311579 - protein, 14 aa, Homo sapiens
  CDR3 for alpha chain variable domain of TCR clone 155790 (TRAV17, TRAJ54)
CATDANQGAQKLVV

SEQ ID NO: 311580 - protein, 12 aa, Homo sapiens
  CDR3 for beta chain variable domain of TCR clone 155790 (TRBV7-9, TRBJ2-7)
CASSIKREEQYF

SEQ ID NO: 311581 - protein, 13 aa, Homo sapiens
  CDR3 for alpha chain variable domain of TCR clone 155791 (TRAV12-3, TRAJ9)
CAMRNTGGFKTIF

SEQ ID NO: 311582 - protein, 14 aa, Homo sapiens
  CDR3 for beta chain variable domain of TCR clone 155791 (TRBV19, TRBJ2-7)
CASTVQGRPYEQYF

SEQ ID NO: 311583 - protein, 12 aa, Homo sapiens
  CDR3 for alpha chain variable domain of TCR clone 155792 (TRAV16, TRAJ56)
CAPTGANSKLTF

SEQ ID NO: 311584 - protein, 17 aa, Homo sapiens
  CDR3 for beta chain variable domain of TCR clone 155792 (TRBV27, TRBJ2-6)
CASSLTGFASGASVLTF

SEQ ID NO: 311585 - protein, 17 aa, Homo sapiens
  CDR3 for alpha chain variable domain of TCR clone 155793 (TRAV38-2/DV8, TRAJ28)
CAFLTLYSGAGSYQLTF

SEQ ID NO: 311586 - protein, 14 aa, Homo sapiens
  CDR3 for beta chain variable domain of TCR clone 155793 (TRBV7-2, TRBJ2-7)
CASSPKTSFYEQYF

SEQ ID NO: 311587 - protein, 14 aa, Homo sapiens
  CDR3 for alpha chain variable domain of TCR clone 155794 (TRAV26-1, TRAJ6)
CILSPVGGSYIPTF

SEQ ID NO: 311588 - protein, 16 aa, Homo sapiens
  CDR3 for beta chain variable domain of TCR clone 155794 (TRBV4-1, TRBJ2-5)
CASSSGLAGVLGTQYF

SEQ ID NO: 311589 - protein, 12 aa, Homo sapiens
  CDR3 for alpha chain variable domain of TCR clone 155795 (TRAV35, TRAJ30)
CAGLNRDDKIIL

SEQ ID NO: 311590 - protein, 15 aa, Homo sapiens
  CDR3 for beta chain variable domain of TCR clone 155795 (TRBV9, TRBJ1-6)
CASSVAGTGDSPLHF

SEQ ID NO: 311591 - protein, 16 aa, Homo sapiens
  CDR3 for alpha chain variable domain of TCR clone 155796 (TRAV23/DV6, TRAJ21)
CAASSGGGTTSTNFTL

SEQ ID NO: 311592 - protein, 16 aa, Homo sapiens
  CDR3 for beta chain variable domain of TCR clone 155796 (TRBV7-3, TRBJ2-2)
CASSLKRGTLSGELFF

SEQ ID NO: 311593 - protein, 15 aa, Homo sapiens
  CDR3 for alpha chain variable domain of TCR clone 155797 (TRAV26-1, TRAJ29)
CIVRVEGSGNTPLVF

SEQ ID NO: 311594 - protein, 13 aa, Homo sapiens
  CDR3 for beta chain variable domain of TCR clone 155797 (TRBV4-2, TRBJ1-1)
CASSQAGNTEASF

SEQ ID NO: 311595 - protein, 15 aa, Homo sapiens
  CDR3 for alpha chain variable domain of TCR clone 155798 (TRAV8-6, TRAJ53)
CAVSVKGGSNYKLTF

SEQ ID NO: 311596 - protein, 17 aa, Homo sapiens
  CDR3 for beta chain variable domain of TCR clone 155798 (TRBV12-4, TRBJ2-7)
CASSLGGRRRVHYEQYF

SEQ ID NO: 311597 - protein, 22 aa, Homo sapiens
  CDR3 for alpha chain variable domain of TCR clone 155799 (TRAV8-6, TRAJ6)
CAVTLGEEATYLHLEEEPALLF

SEQ ID NO: 311598 - protein, 15 aa, Homo sapiens
  CDR3 for beta chain variable domain of TCR clone 155799 (TRBV7-2, TRBJ1-1)
CASSPKGGANTEAFF

SEQ ID NO: 311599 - protein, 11 aa, Homo sapiens
  CDR3 for alpha chain variable domain of TCR clone 155800 (TRAV13-1, TRAJ15)
FAATPGTALIF

SEQ ID NO: 311600 - protein, 13 aa, Homo sapiens
  CDR3 for beta chain variable domain of TCR clone 155800 (TRBV7-2, TRBJ2-1)
CASSLGVYNEQFF

SEQ ID NO: 311601 - protein, 13 aa, Homo sapiens
  CDR3 for alpha chain variable domain of TCR clone 155801 (TRAV3, TRAJ27)
CAVRPLGAGKSTF

SEQ ID NO: 311602 - protein, 13 aa, Homo sapiens
  CDR3 for beta chain variable domain of TCR clone 155801 (TRBV7-7, TRBJ2-3)
CASSLSRADTQYF

SEQ ID NO: 311603 - protein, 14 aa, Homo sapiens
  CDR3 for alpha chain variable domain of TCR clone 155802 (TRAV12-2, TRAJ53)
CAVKGGGSKYKLTF

SEQ ID NO: 311604 - protein, 15 aa, Homo sapiens
  CDR3 for beta chain variable domain of TCR clone 155802 (TRBV11-2, TRBJ2-2)
CASSLDTGNTGELFF

SEQ ID NO: 311605 - protein, 16 aa, Homo sapiens
  CDR3 for alpha chain variable domain of TCR clone 155803 (TRAV12-3, TRAJ53)
CAMSPGSGGSNYKLTF

SEQ ID NO: 311606 - protein, 11 aa, Homo sapiens
  CDR3 for beta chain variable domain of TCR clone 155803 (TRBV29-1, TRBJ2-5)
CSEDRTGTQSF

SEQ ID NO: 311607 - protein, 14 aa, Homo sapiens
  CDR3 for alpha chain variable domain of TCR clone 155804 (TRAV8-4, TRAJ29)
CAVSAVEGNTPLVF

SEQ ID NO: 311608 - protein, 13 aa, Homo sapiens
  CDR3 for beta chain variable domain of TCR clone 155804 (TRBV12-4, TRBJ2-7)
CASRFQGRYEQYF

SEQ ID NO: 311609 - protein, 14 aa, Homo sapiens
  CDR3 for alpha chain variable domain of TCR clone 155805 (TRAV12-2, TRAJ13)
CAVKKTGGYQKVTF

SEQ ID NO: 311610 - protein, 17 aa, Homo sapiens
  CDR3 for beta chain variable domain of TCR clone 155805 (TRBV18, TRBJ1-5)
CQLTTCRVRQNNQPQHF

SEQ ID NO: 311611 - protein, 15 aa, Homo sapiens
  CDR3 for alpha chain variable domain of TCR clone 155806 (TRAV26-1, TRAJ29)
CIVRVEGSGNTPLVL

SEQ ID NO: 311612 - protein, 15 aa, Homo sapiens
  CDR3 for beta chain variable domain of TCR clone 155806 (TRBV7-9, TRBJ1-5)
CASSQGHQPNQPQHV

SEQ ID NO: 311613 - protein, 14 aa, Homo sapiens
  CDR3 for alpha chain variable domain of TCR clone 155807 (TRAV29/DV5, TRAJ36)
CAARRKTGAYNLFF

SEQ ID NO: 311614 - protein, 12 aa, Homo sapiens
  CDR3 for beta chain variable domain of TCR clone 155807 (TRBV12-5, TRBJ2-5)
CASGQGVETQYF

SEQ ID NO: 311615 - protein, 10 aa, Homo sapiens
  CDR3 for alpha chain variable domain of TCR clone 155808 (TRAV25, TRAJ21)
CLYNFNKFYF

SEQ ID NO: 311616 - protein, 14 aa, Homo sapiens
  CDR3 for beta chain variable domain of TCR clone 155808 (TRBV10-2, TRBJ1-5)
CASSSTGRNQPQHF

SEQ ID NO: 311617 - protein, 18 aa, Homo sapiens
  CDR3 for alpha chain variable domain of TCR clone 155809 (TRAV13-1, TRAJ52)
YAASKRSAGGTSYGKLTF

SEQ ID NO: 311618 - protein, 13 aa, Homo sapiens
  CDR3 for beta chain variable domain of TCR clone 155809 (TRBV12-4, TRBJ1-2)
CASSLRQGKGYTF

SEQ ID NO: 311619 - protein, 18 aa, Homo sapiens
  CDR3 for alpha chain variable domain of TCR clone 155810 (TRAV26-2, TRAJ45)
CILRLWGDSGGGADGLTF

SEQ ID NO: 311620 - protein, 13 aa, Homo sapiens
  CDR3 for beta chain variable domain of TCR clone 155810 (TRBV7-8, TRBJ2-7)
CASSLTGGREQYF

SEQ ID NO: 311621 - protein, 14 aa, Homo sapiens
  CDR3 for alpha chain variable domain of TCR clone 155811 (TRAV17, TRAJ22)
WSTVLSGSARQLTF

SEQ ID NO: 311622 - protein, 13 aa, Homo sapiens
  CDR3 for beta chain variable domain of TCR clone 155811 (TRBV15, TRBJ1-6)
CATSGGLNSPLHF

SEQ ID NO: 311623 - protein, 15 aa, Homo sapiens
  CDR3 for alpha chain variable domain of TCR clone 155812 (TRAV17, TRAJ57)
CATGPSQGGSVKLVF

SEQ ID NO: 311624 - protein, 14 aa, Homo sapiens
  CDR3 for beta chain variable domain of TCR clone 155812 (TRBV19, TRBJ2-7)
CASTVQGRPYEQYY

SEQ ID NO: 311625 - protein, 13 aa, Homo sapiens
  CDR3 for alpha chain variable domain of TCR clone 155813 (TRAV12-1, TRAJ9)
CVVLNTGGFKTIF

SEQ ID NO: 311626 - protein, 12 aa, Homo sapiens
  CDR3 for beta chain variable domain of TCR clone 155813 (TRBV7-2, TRBJ2-3)
CASSLTGDTQYF

SEQ ID NO: 311627 - protein, 13 aa, Homo sapiens
  CDR3 for alpha chain variable domain of TCR clone 155814 (TRAV29/DV5, TRAJ49)
CAASTNTGNQFYF

SEQ ID NO: 311628 - protein, 12 aa, Homo sapiens
  CDR3 for beta chain variable domain of TCR clone 155814 (TRBV29-1, TRBJ2-3)
CSVTGGADTQYF

SEQ ID NO: 311629 - protein, 14 aa, Homo sapiens
  CDR3 for alpha chain variable domain of TCR clone 155815 (TRAV12-3, TRAJ10)
SHLPLTGGGNKLTF

SEQ ID NO: 311630 - protein, 13 aa, Homo sapiens
  CDR3 for beta chain variable domain of TCR clone 155815 (TRBV7-2, TRBJ2-5)
CASSFRGGETQYF

SEQ ID NO: 311631 - protein, 15 aa, Homo sapiens
  CDR3 for alpha chain variable domain of TCR clone 155816 (TRAV8-4, TRAJ3)
CAVTGENLVQQCFQD

SEQ ID NO: 311632 - protein, 16 aa, Homo sapiens
  CDR3 for beta chain variable domain of TCR clone 155816 (TRBV4-2, TRBJ1-1)
CANSQAGFGMNTEAFF

SEQ ID NO: 311633 - protein, 16 aa, Homo sapiens
  CDR3 for alpha chain variable domain of TCR clone 155817 (TRAV3, TRAJ37)
CAVRPHGSGNTGKLIF

SEQ ID NO: 311634 - protein, 15 aa, Homo sapiens
  CDR3 for beta chain variable domain of TCR clone 155817 (TRBV27, TRBJ2-7)
CASSTAGTGSYEQYF

SEQ ID NO: 311635 - protein, 14 aa, Homo sapiens
  CDR3 for alpha chain variable domain of TCR clone 155818 (TRAV12-3, TRAJ9)
CAMSVETGGFKTIF

SEQ ID NO: 311636 - protein, 11 aa, Homo sapiens
  CDR3 for beta chain variable domain of TCR clone 155818 (TRBV7-8, TRBJ2-7)
CASSLSLEQYF

SEQ ID NO: 311637 - protein, 11 aa, Homo sapiens
  CDR3 for alpha chain variable domain of TCR clone 155819 (TRAV2, TRAJ13)
CASGGYQKVTF

SEQ ID NO: 311638 - protein, 12 aa, Homo sapiens
  CDR3 for beta chain variable domain of TCR clone 155819 (TRBV12-4, TRBJ2-1)
CASSLVRVEQFF

SEQ ID NO: 311639 - protein, 15 aa, Homo sapiens
  CDR3 for alpha chain variable domain of TCR clone 155820 (TRAV26-1, TRAJ42)
FIVRVKGGSQGNLIL

SEQ ID NO: 311640 - protein, 14 aa, Homo sapiens
  CDR3 for beta chain variable domain of TCR clone 155820 (TRBV19, TRBJ2-2)
CATTGHANTGELFF

SEQ ID NO: 311641 - protein, 14 aa, Homo sapiens
  CDR3 for alpha chain variable domain of TCR clone 155821 (TRAV12-3, TRAJ58)
CAMSTETSGARLTF

SEQ ID NO: 311642 - protein, 11 aa, Homo sapiens
  CDR3 for beta chain variable domain of TCR clone 155821 (TRBV29-1, TRBJ2-5)
CSEDRTGTQYF

SEQ ID NO: 311643 - protein, 11 aa, Homo sapiens
  CDR3 for alpha chain variable domain of TCR clone 155822 (TRAV1-1, TRAJ23)
CAVRQGGKLIF

SEQ ID NO: 311644 - protein, 14 aa, Homo sapiens
  CDR3 for beta chain variable domain of TCR clone 155822 (TRBV19, TRBJ2-1)
CARPTFVLSGEQFF

SEQ ID NO: 311645 - protein, 17 aa, Homo sapiens
  CDR3 for alpha chain variable domain of TCR clone 155823 (TRAV2, TRAJ10)
CAVEDQRSREEETNSPF

SEQ ID NO: 311646 - protein, 16 aa, Homo sapiens
  CDR3 for beta chain variable domain of TCR clone 155823 (TRBV18, TRBJ1-5)
CASSPSTGNSNQPQHF

SEQ ID NO: 311647 - protein, 18 aa, Homo sapiens
  CDR3 for alpha chain variable domain of TCR clone 155824 (TRAV21, TRAJ52)
CAVRPSSAGGTSYGKLTF

SEQ ID NO: 311648 - protein, 16 aa, Homo sapiens
  CDR3 for beta chain variable domain of TCR clone 155824 (TRBV13, TRBJ2-2)
CASSPRTGEHTGELFF

SEQ ID NO: 311649 - protein, 13 aa, Homo sapiens
  CDR3 for alpha chain variable domain of TCR clone 155825 (TRAV8-3, TRAJ43)
CAVGPDNNNDMRF

SEQ ID NO: 311650 - protein, 15 aa, Homo sapiens
  CDR3 for beta chain variable domain of TCR clone 155825 (TRBV4-2, TRBJ2-4)
CASSPLGAAKNIQYF

SEQ ID NO: 311651 - protein, 16 aa, Homo sapiens
  CDR3 for alpha chain variable domain of TCR clone 155826 (TRAV21, TRAJ37)
CAVRPRGSSNTGKLIF

SEQ ID NO: 311652 - protein, 15 aa, Homo sapiens
  CDR3 for beta chain variable domain of TCR clone 155826 (TRBV7-8, TRBJ1-5)
CASSLEGSGNQPQHF

SEQ ID NO: 311653 - protein, 15 aa, Homo sapiens
  CDR3 for alpha chain variable domain of TCR clone 155827 (TRAV23/DV6, TRAJ18)
CAAGYRGSTLGRRYF

SEQ ID NO: 311654 - protein, 13 aa, Homo sapiens
  CDR3 for beta chain variable domain of TCR clone 155827 (TRBV7-2, TRBJ2-7)
CASSSPSGSEQYF

SEQ ID NO: 311655 - protein, 11 aa, Homo sapiens
  CDR3 for alpha chain variable domain of TCR clone 155828 (TRAV13-1, TRAJ6)
FATLGSYIPTF

SEQ ID NO: 311656 - protein, 12 aa, Homo sapiens
  CDR3 for beta chain variable domain of TCR clone 155828 (TRBV11-2, TRBJ2-1)
CASSPGNNEQFF

SEQ ID NO: 311657 - protein, 11 aa, Homo sapiens
  CDR3 for alpha chain variable domain of TCR clone 155829 (TRAV21, TRAJ34)
CAVTNTDKLIF

SEQ ID NO: 311658 - protein, 15 aa, Homo sapiens
  CDR3 for beta chain variable domain of TCR clone 155829 (TRBV11-2, TRBJ2-1)
CASSKNRGLIYEQFF

SEQ ID NO: 311659 - protein, 14 aa, Homo sapiens
  CDR3 for alpha chain variable domain of TCR clone 155830 (TRAV17, TRAJ6)
CATPAMGGRYIPTF

SEQ ID NO: 311660 - protein, 13 aa, Homo sapiens
  CDR3 for beta chain variable domain of TCR clone 155830 (TRBV6-3, TRBJ1-1)
CASSYGRGSGAFF

SEQ ID NO: 311661 - protein, 15 aa, Homo sapiens
  CDR3 for alpha chain variable domain of TCR clone 155831 (TRAV4, TRAJ8)
CLVGEQHTDFQKLVF

SEQ ID NO: 311662 - protein, 15 aa, Homo sapiens
  CDR3 for beta chain variable domain of TCR clone 155831 (TRBV7-9, TRBJ2-5)
CASSNRDYLQETQYF

SEQ ID NO: 311663 - protein, 12 aa, Homo sapiens
  CDR3 for alpha chain variable domain of TCR clone 155832 (TRAV16, TRAJ10)
CSRTGGGNKLTF

SEQ ID NO: 311664 - protein, 13 aa, Homo sapiens
  CDR3 for beta chain variable domain of TCR clone 155832 (TRBV15, TRBJ1-1)
CATSRGIQARAFF

SEQ ID NO: 311665 - protein, 14 aa, Homo sapiens
  CDR3 for alpha chain variable domain of TCR clone 155833 (TRAV17, TRAJ31)
CATVLRNNNARLMF

SEQ ID NO: 311666 - protein, 14 aa, Homo sapiens
  CDR3 for beta chain variable domain of TCR clone 155833 (TRBV5-1, TRBJ2-7)
CASSRGESLYEQYF

SEQ ID NO: 311667 - protein, 15 aa, Homo sapiens
  CDR3 for alpha chain variable domain of TCR clone 155834 (TRAV26-1, TRAJ44)
CIVRANTGTASTLTF

SEQ ID NO: 311668 - protein, 16 aa, Homo sapiens
  CDR3 for beta chain variable domain of TCR clone 155834 (TRBV7-7, TRBJ2-1)
CASSLASGTYYNEQFF

SEQ ID NO: 311669 - protein, 15 aa, Homo sapiens
  CDR3 for alpha chain variable domain of TCR clone 155835 (TRAV20, TRAJ54)
CAVQARIQGAQKLVF

SEQ ID NO: 311670 - protein, 16 aa, Homo sapiens
  CDR3 for beta chain variable domain of TCR clone 155835 (TRBV7-9, TRBJ2-1)
CASSDVAGGSYNEQFF

SEQ ID NO: 311671 - protein, 10 aa, Homo sapiens
  CDR3 for alpha chain variable domain of TCR clone 155836 (TRAV1-2, TRAJ20)
CALNDYKLSF

SEQ ID NO: 311672 - protein, 19 aa, Homo sapiens
  CDR3 for beta chain variable domain of TCR clone 155836 (TRBV7-9, TRBJ2-6)
CASSLESATVLPGANVLTF

SEQ ID NO: 311673 - protein, 13 aa, Homo sapiens
  CDR3 for alpha chain variable domain of TCR clone 155837 (TRAV30, TRAJ24)
CGTVTDSWGKLQF

SEQ ID NO: 311674 - protein, 12 aa, Homo sapiens
  CDR3 for beta chain variable domain of TCR clone 155837 (TRBV7-3, TRBJ2-1)
CASSFQSGPQFF

SEQ ID NO: 311675 - protein, 16 aa, Homo sapiens
  CDR3 for alpha chain variable domain of TCR clone 155838 (TRAV22, TRAJ45)
CAVERGKRGGADGLTF

SEQ ID NO: 311676 - protein, 15 aa, Homo sapiens
  CDR3 for beta chain variable domain of TCR clone 155838 (TRBV28, TRBJ2-5)
CASSSGRTIQETQYF

SEQ ID NO: 311677 - protein, 22 aa, Homo sapiens
  CDR3 for alpha chain variable domain of TCR clone 155839 (TRAV12-2, TRAJ53)
SPVIQPPTSVPPILSNNYKLTF

SEQ ID NO: 311678 - protein, 13 aa, Homo sapiens
  CDR3 for beta chain variable domain of TCR clone 155839 (TRBV7-7, TRBJ2-3)
CASSLSRADTQYF

SEQ ID NO: 311679 - protein, 17 aa, Homo sapiens
  CDR3 for alpha chain variable domain of TCR clone 155840 (TRAV26-1, TRAJ37)
CIVRVITVSSNTGKLIF

SEQ ID NO: 311680 - protein, 13 aa, Homo sapiens
  CDR3 for beta chain variable domain of TCR clone 155840 (TRBV27, TRBJ1-4)
CASSLMGDEKLFF

SEQ ID NO: 311681 - protein, 18 aa, Homo sapiens
  CDR3 for alpha chain variable domain of TCR clone 155841 (TRAV8-3, TRAJ4)
WVRDPTSNDPGGYNKLIF

SEQ ID NO: 311682 - protein, 13 aa, Homo sapiens
  CDR3 for beta chain variable domain of TCR clone 155841 (TRBV12-5, TRBJ2-3)
CASGDRQSDTQYF

SEQ ID NO: 311683 - protein, 14 aa, Homo sapiens
  CDR3 for alpha chain variable domain of TCR clone 155842 (TRAV26-1, TRAJ48)
CIVSSNFGNEKLTF

SEQ ID NO: 311684 - protein, 13 aa, Homo sapiens
  CDR3 for beta chain variable domain of TCR clone 155842 (TRBV7-9, TRBJ1-2)
CASSLKQNYGYTF

SEQ ID NO: 311685 - protein, 10 aa, Homo sapiens
  CDR3 for alpha chain variable domain of TCR clone 155843 (TRAV3, TRAJ30)
CAVREIEIIF

SEQ ID NO: 311686 - protein, 14 aa, Homo sapiens
  CDR3 for beta chain variable domain of TCR clone 155843 (TRBV15, TRBJ2-3)
CATRSGTSTDTHYF

SEQ ID NO: 311687 - protein, 17 aa, Homo sapiens
  CDR3 for alpha chain variable domain of TCR clone 155844 (TRAV13-1, TRAJ31)
CAPRDRLMFGDGTQLVV

SEQ ID NO: 311688 - protein, 15 aa, Homo sapiens
  CDR3 for beta chain variable domain of TCR clone 155844 (TRBV7-2, TRBJ1-5)
CASSSGQGHAQPQHF

SEQ ID NO: 311689 - protein, 15 aa, Homo sapiens
  CDR3 for alpha chain variable domain of TCR clone 155845 (TRAV27, TRAJ38)
CAGRFNAGNNRKLIW

SEQ ID NO: 311690 - protein, 13 aa, Homo sapiens
  CDR3 for beta chain variable domain of TCR clone 155845 (TRBV12-5, TRBJ2-3)
CDSQNRGTDTQYF

SEQ ID NO: 311691 - protein, 14 aa, Homo sapiens
  CDR3 for alpha chain variable domain of TCR clone 155846 (TRAV8-4, TRAJ45)
CASGGGGGADGLTF

SEQ ID NO: 311692 - protein, 20 aa, Homo sapiens
  CDR3 for beta chain variable domain of TCR clone 155846 (TRBV4-3, TRBJ2-3)
RASSPRVEMRASGRPDTQYF

SEQ ID NO: 311693 - protein, 13 aa, Homo sapiens
  CDR3 for alpha chain variable domain of TCR clone 155847 (TRAV13-2, TRAJ54)
CAENYQGAQRLVF

SEQ ID NO: 311694 - protein, 14 aa, Homo sapiens
  CDR3 for beta chain variable domain of TCR clone 155847 (TRBV4-2, TRBJ2-1)
CASGLDRAYNEQFF

SEQ ID NO: 311695 - protein, 14 aa, Homo sapiens
  CDR3 for alpha chain variable domain of TCR clone 155848 (TRAV26-1, TRAJ45)
CLEVTGGGADGPTF

SEQ ID NO: 311696 - protein, 13 aa, Homo sapiens
  CDR3 for beta chain variable domain of TCR clone 155848 (TRBV7-6, TRBJ1-2)
CASSLVADYGYTF

SEQ ID NO: 311697 - protein, 14 aa, Homo sapiens
  CDR3 for alpha chain variable domain of TCR clone 155849 (TRAV13-1, TRAJ48)
CAASRSFGNEKLTF

SEQ ID NO: 311698 - protein, 18 aa, Homo sapiens
  CDR3 for beta chain variable domain of TCR clone 155849 (TRBV11-2, TRBJ2-6)
CASSLNPFLGTGANVLTF

SEQ ID NO: 311699 - protein, 14 aa, Homo sapiens
  CDR3 for alpha chain variable domain of TCR clone 155850 (TRAV12-2, TRAJ17)
CAVLFKAAGNKLTF

SEQ ID NO: 311700 - protein, 14 aa, Homo sapiens
  CDR3 for beta chain variable domain of TCR clone 155850 (TRBV18, TRBJ2-3)
CASSRDRGTDTQYF

SEQ ID NO: 311701 - protein, 12 aa, Homo sapiens
  CDR3 for alpha chain variable domain of TCR clone 155851 (TRAV29/DV5, TRAJ49)
CAATDTGNQFYF

SEQ ID NO: 311702 - protein, 19 aa, Homo sapiens
  CDR3 for beta chain variable domain of TCR clone 155851 (TRBV25-1, TRBJ2-2)
CVILVYRVDRGRKTGELFF

SEQ ID NO: 311703 - protein, 11 aa, Homo sapiens
  CDR3 for alpha chain variable domain of TCR clone 155852 (TRAV2, TRAJ33)
CAVDSNYQLIW

SEQ ID NO: 311704 - protein, 14 aa, Homo sapiens
  CDR3 for beta chain variable domain of TCR clone 155852 (TRBV7-6, TRBJ2-3)
CASSLGTVTDTRYF

SEQ ID NO: 311705 - protein, 13 aa, Homo sapiens
  CDR3 for alpha chain variable domain of TCR clone 155853 (TRAV13-2, TRAJ13)
CAERPGGYQEVTF

SEQ ID NO: 311706 - protein, 15 aa, Homo sapiens
  CDR3 for beta chain variable domain of TCR clone 155853 (TRBV4-1, TRBJ1-4)
CASSDTGETNEKLFF

SEQ ID NO: 311707 - protein, 14 aa, Homo sapiens
  CDR3 for alpha chain variable domain of TCR clone 155854 (TRAV2, TRAJ9)
CAVEDRSGGFKTIF

SEQ ID NO: 311708 - protein, 12 aa, Homo sapiens
  CDR3 for beta chain variable domain of TCR clone 155854 (TRBV12-4, TRBJ2-4)
CASSASGSIQYF

SEQ ID NO: 311709 - protein, 13 aa, Homo sapiens
  CDR3 for alpha chain variable domain of TCR clone 155855 (TRAV8-3, TRAJ43)
CAVVPYNNNDMRF

SEQ ID NO: 311710 - protein, 16 aa, Homo sapiens
  CDR3 for beta chain variable domain of TCR clone 155855 (TRBV20-1, TRBJ2-2)
CSASASGIPGAGELFF

SEQ ID NO: 311711 - protein, 11 aa, Homo sapiens
  CDR3 for alpha chain variable domain of TCR clone 155856 (TRAV3, TRAJ21)
CAVGNFNKFYF

SEQ ID NO: 311712 - protein, 16 aa, Homo sapiens
  CDR3 for beta chain variable domain of TCR clone 155856 (TRBV5-1, TRBJ2-1)
CASSIRSGGSYNEQFF

SEQ ID NO: 311713 - protein, 13 aa, Homo sapiens
  CDR3 for alpha chain variable domain of TCR clone 155857 (TRAV20, TRAJ49)
CAVQARTGNQFYF

SEQ ID NO: 311714 - protein, 14 aa, Homo sapiens
  CDR3 for beta chain variable domain of TCR clone 155857 (TRBV5-1, TRBJ1-1)
CASSLQGASTETFF

SEQ ID NO: 311715 - protein, 13 aa, Homo sapiens
  CDR3 for alpha chain variable domain of TCR clone 155858 (TRAV2, TRAJ40)
CAVVTSGTYKYIF

SEQ ID NO: 311716 - protein, 15 aa, Homo sapiens
  CDR3 for beta chain variable domain of TCR clone 155858 (TRBV27, TRBJ2-1)
CASSSGTSRYNEQFF

SEQ ID NO: 311717 - protein, 17 aa, Homo sapiens
  CDR3 for alpha chain variable domain of TCR clone 155859 (TRAV3, TRAJ13)
CAVRDMRRTGGYQKVTF

SEQ ID NO: 311718 - protein, 15 aa, Homo sapiens
  CDR3 for beta chain variable domain of TCR clone 155859 (TRBV4-2, TRBJ1-2)
CASSQRTGGRDGYTF

SEQ ID NO: 311719 - protein, 17 aa, Homo sapiens
  CDR3 for alpha chain variable domain of TCR clone 155860 (TRAV23/DV6, TRAJ57)
CASSSTLSQGGSEKLVF

SEQ ID NO: 311720 - protein, 14 aa, Homo sapiens
  CDR3 for beta chain variable domain of TCR clone 155860 (TRBV25-1, TRBJ1-1)
CASTHLGGNTEAFL

SEQ ID NO: 311721 - protein, 16 aa, Homo sapiens
  CDR3 for alpha chain variable domain of TCR clone 155861 (TRAV26-1, TRAJ23)
CIVRVHPYNQGGKLIL

SEQ ID NO: 311722 - protein, 16 aa, Homo sapiens
  CDR3 for beta chain variable domain of TCR clone 155861 (TRBV7-7, TRBJ2-3)
CASSPGTSGSTDTQYF

SEQ ID NO: 311723 - protein, 11 aa, Homo sapiens
  CDR3 for alpha chain variable domain of TCR clone 155862 (TRAV12-2, TRAJ39)
CAGNNMLTFGG

SEQ ID NO: 311724 - protein, 16 aa, Homo sapiens
  CDR3 for beta chain variable domain of TCR clone 155862 (TRBV9, TRBJ2-7)
CASSAGPDRSPYEQYF

SEQ ID NO: 311725 - protein, 14 aa, Homo sapiens
  CDR3 for alpha chain variable domain of TCR clone 155863 (TRAV12-2, TRAJ23)
CAVGGYNQGGKLIF

SEQ ID NO: 311726 - protein, 15 aa, Homo sapiens
  CDR3 for beta chain variable domain of TCR clone 155863 (TRBV20-1, TRBJ2-3)
CSASSGWPRTDTQYF

SEQ ID NO: 311727 - protein, 11 aa, Homo sapiens
  CDR3 for alpha chain variable domain of TCR clone 155864 (TRAV3, TRAJ21)
CAVGNFNKFYF

SEQ ID NO: 311728 - protein, 16 aa, Homo sapiens
  CDR3 for beta chain variable domain of TCR clone 155864 (TRBV19, TRBJ2-1)
CASSKAGPSSYNRQFF

SEQ ID NO: 311729 - protein, 13 aa, Homo sapiens
  CDR3 for alpha chain variable domain of TCR clone 155865 (TRAV27, TRAJ57)
CRSAQGGSEKLVF

SEQ ID NO: 311730 - protein, 17 aa, Homo sapiens
  CDR3 for beta chain variable domain of TCR clone 155865 (TRBV11-2, TRBJ2-1)
CASSLYPPGVEYNEQFF

SEQ ID NO: 311731 - protein, 16 aa, Homo sapiens
  CDR3 for alpha chain variable domain of TCR clone 155866 (TRAV17, TRAJ22)
CATDAISSGSARQLTF

SEQ ID NO: 311732 - protein, 15 aa, Homo sapiens
  CDR3 for beta chain variable domain of TCR clone 155866 (TRBV20-1, TRBJ2-7)
CSAESGTSGAYEQYF

SEQ ID NO: 311733 - protein, 11 aa, Homo sapiens
  CDR3 for alpha chain variable domain of TCR clone 155867 (TRAV21, TRAJ39)
LLVNAGNMLTF

SEQ ID NO: 311734 - protein, 15 aa, Homo sapiens
  CDR3 for beta chain variable domain of TCR clone 155867 (TRBV4-1, TRBJ1-2)
CASSQGQGAAYGYTF

SEQ ID NO: 311735 - protein, 14 aa, Homo sapiens
  CDR3 for alpha chain variable domain of TCR clone 155868 (TRAV12-1, TRAJ23)
CVVMIYNQGGKLIF

SEQ ID NO: 311736 - protein, 23 aa, Homo sapiens
  CDR3 for beta chain variable domain of TCR clone 155868 (TRBV7-3, TRBJ1-6)
CASSLTARDEASDPSSYNSPLHF

SEQ ID NO: 311737 - protein, 15 aa, Homo sapiens
  CDR3 for alpha chain variable domain of TCR clone 155869 (TRAV3, TRAJ22)
CAVRDRGGSARQLTC

SEQ ID NO: 311738 - protein, 13 aa, Homo sapiens
  CDR3 for beta chain variable domain of TCR clone 155869 (TRBV12-4, TRBJ1-2)
CASSLRQGKGYTF

SEQ ID NO: 311739 - protein, 13 aa, Homo sapiens
  CDR3 for alpha chain variable domain of TCR clone 155870 (TRAV12-2, TRAJ24)
CAVSTDSWGKLQF

SEQ ID NO: 311740 - protein, 12 aa, Homo sapiens
  CDR3 for beta chain variable domain of TCR clone 155870 (TRBV7-6, TRBJ2-7)
CASSVADSEQYF

SEQ ID NO: 311741 - protein, 13 aa, Homo sapiens
  CDR3 for alpha chain variable domain of TCR clone 155871 (TRAV12-3, TRAJ33)
CAMSVNSNYQLIW

SEQ ID NO: 311742 - protein, 15 aa, Homo sapiens
  CDR3 for beta chain variable domain of TCR clone 155871 (TRBV20-1, TRBJ2-7)
CSARGPLAGGREQYF

SEQ ID NO: 311743 - protein, 15 aa, Homo sapiens
  CDR3 for alpha chain variable domain of TCR clone 155872 (TRAV25, TRAJ53)
CAATGGGGSNYKMTF

SEQ ID NO: 311744 - protein, 12 aa, Homo sapiens
  CDR3 for beta chain variable domain of TCR clone 155872 (TRBV7-8, TRBJ2-7)
CASSLGDREQYF

SEQ ID NO: 311745 - protein, 13 aa, Homo sapiens
  CDR3 for alpha chain variable domain of TCR clone 155873 (TRAV12-3, TRAJ33)
CAMSVNGNYQLIW

SEQ ID NO: 311746 - protein, 13 aa, Homo sapiens
  CDR3 for beta chain variable domain of TCR clone 155873 (TRBV7-2, TRBJ2-2)
CASSLAVTGELYF

SEQ ID NO: 311747 - protein, 13 aa, Homo sapiens
  CDR3 for alpha chain variable domain of TCR clone 155874 (TRAV8-1, TRAJ13)
CAVSKGGYQKVNF

SEQ ID NO: 311748 - protein, 18 aa, Homo sapiens
  CDR3 for beta chain variable domain of TCR clone 155874 (TRBV11-2, TRBJ2-7)
CASSWRTVQTGQSYEQYF

SEQ ID NO: 311749 - protein, 15 aa, Homo sapiens
  CDR3 for alpha chain variable domain of TCR clone 155875 (TRAV17, TRAJ54)
CATTRSEQGAQKLVF

SEQ ID NO: 311750 - protein, 18 aa, Homo sapiens
  CDR3 for beta chain variable domain of TCR clone 155875 (TRBV3-1, TRBJ2-7)
CASSRISAGGRSSYEQYF

SEQ ID NO: 311751 - protein, 14 aa, Homo sapiens
  CDR3 for alpha chain variable domain of TCR clone 155876 (TRAV26-1, TRAJ49)
CIVRPSNTGDQFYF

SEQ ID NO: 311752 - protein, 15 aa, Homo sapiens
  CDR3 for beta chain variable domain of TCR clone 155876 (TRBV19, TRBJ1-1)
CASMGFRDANTEAFF

SEQ ID NO: 311753 - protein, 15 aa, Homo sapiens
  CDR3 for alpha chain variable domain of TCR clone 155877 (TRAV21, TRAJ53)
CATSNSGGSNYKLTF

SEQ ID NO: 311754 - protein, 16 aa, Homo sapiens
  CDR3 for beta chain variable domain of TCR clone 155877 (TRBV9, TRBJ2-1)
CASSVGGGGNYNEQFV

SEQ ID NO: 311755 - protein, 12 aa, Homo sapiens
  CDR3 for alpha chain variable domain of TCR clone 155878 (TRAV8-4, TRAJ43)
CAVSVNNNDMRF

SEQ ID NO: 311756 - protein, 16 aa, Homo sapiens
  CDR3 for beta chain variable domain of TCR clone 155878 (TRBV12-4, TRBJ2-5)
CASSFFVRGRQETQYF

SEQ ID NO: 311757 - protein, 15 aa, Homo sapiens
  CDR3 for alpha chain variable domain of TCR clone 155879 (TRAV12-1, TRAJ44)
CVVFVNTGTASKLTF

SEQ ID NO: 311758 - protein, 14 aa, Homo sapiens
  CDR3 for beta chain variable domain of TCR clone 155879 (TRBV7-9, TRBJ2-7)
CASSLSQGSYEQYF

SEQ ID NO: 311759 - protein, 15 aa, Homo sapiens
  CDR3 for alpha chain variable domain of TCR clone 155880 (TRAV26-1, TRAJ29)
CIVRVEGSGNTPLVF

SEQ ID NO: 311760 - protein, 13 aa, Homo sapiens
  CDR3 for beta chain variable domain of TCR clone 155880 (TRBV29-1, TRBJ1-3)
CSADVDSGNTIYF

SEQ ID NO: 311761 - protein, 12 aa, Homo sapiens
  CDR3 for alpha chain variable domain of TCR clone 155881 (TRAV12-2, TRAJ8)
CAVNTGFQKLVF

SEQ ID NO: 311762 - protein, 12 aa, Homo sapiens
  CDR3 for beta chain variable domain of TCR clone 155881 (TRBV29-1, TRBJ2-3)
CSVTGGADTQYF

SEQ ID NO: 311763 - protein, 13 aa, Homo sapiens
  CDR3 for alpha chain variable domain of TCR clone 155882 (TRAV8-3, TRAJ21)
CAVGAYNFNKFYF

SEQ ID NO: 311764 - protein, 16 aa, Homo sapiens
  CDR3 for beta chain variable domain of TCR clone 155882 (TRBV6-1, TRBJ2-5)
CASSETLDRGAETQYF

SEQ ID NO: 311765 - protein, 14 aa, Homo sapiens
  CDR3 for alpha chain variable domain of TCR clone 155883 (TRAV3, TRAJ17)
CAVRDAAAGNKLNF

SEQ ID NO: 311766 - protein, 16 aa, Homo sapiens
  CDR3 for beta chain variable domain of TCR clone 155883 (TRBV20-1, TRBJ1-2)
CSASMGQGVANYGYAF

SEQ ID NO: 311767 - protein, 16 aa, Homo sapiens
  CDR3 for alpha chain variable domain of TCR clone 155884 (TRAV26-1, TRAJ52)
CIVSNAGGTSYGKLTF

SEQ ID NO: 311768 - protein, 16 aa, Homo sapiens
  CDR3 for beta chain variable domain of TCR clone 155884 (TRBV5-1, TRBJ2-1)
CASSLAGRGLYNEQFF

SEQ ID NO: 311769 - protein, 13 aa, Homo sapiens
  CDR3 for alpha chain variable domain of TCR clone 155885 (TRAV29/DV5, TRAJ48)
CTASLFGNEKLTF

SEQ ID NO: 311770 - protein, 15 aa, Homo sapiens
  CDR3 for beta chain variable domain of TCR clone 155885 (TRBV20-1, TRBJ1-1)
CSAKPGQKMNTEAFF

SEQ ID NO: 311771 - protein, 15 aa, Homo sapiens
  CDR3 for alpha chain variable domain of TCR clone 155886 (TRAV8-3, TRAJ11)
CAVGLLNSGYSTLTF

SEQ ID NO: 311772 - protein, 15 aa, Homo sapiens
  CDR3 for beta chain variable domain of TCR clone 155886 (TRBV7-2, TRBJ2-3)
CASSLAGAFIDTQYF

SEQ ID NO: 311773 - protein, 15 aa, Homo sapiens
  CDR3 for alpha chain variable domain of TCR clone 155887 (TRAV17, TRAJ57)
CATGPSQGGSEKLVF

SEQ ID NO: 311774 - protein, 15 aa, Homo sapiens
  CDR3 for beta chain variable domain of TCR clone 155887 (TRBV19, TRBJ2-4)
CASRGPRRGENIQFF

SEQ ID NO: 311775 - protein, 18 aa, Homo sapiens
  CDR3 for alpha chain variable domain of TCR clone 155888 (TRAV29/DV5, TRAJ52)
QCTSVQQADGTSYGKLTF

SEQ ID NO: 311776 - protein, 14 aa, Homo sapiens
  CDR3 for beta chain variable domain of TCR clone 155888 (TRBV7-2, TRBJ2-7)
CASSPKTSFYEQYF

SEQ ID NO: 311777 - protein, 13 aa, Homo sapiens
  CDR3 for alpha chain variable domain of TCR clone 155889 (TRAV2, TRAJ5)
CAAPDTGRRALTF

SEQ ID NO: 311778 - protein, 15 aa, Homo sapiens
  CDR3 for beta chain variable domain of TCR clone 155889 (TRBV7-2, TRBJ2-2)
CASSTRTGYTGELFF

SEQ ID NO: 311779 - protein, 13 aa, Homo sapiens
  CDR3 for alpha chain variable domain of TCR clone 155890 (TRAV13-2, TRAJ13)
CAERAGGYQKVTF

SEQ ID NO: 311780 - protein, 15 aa, Homo sapiens
  CDR3 for beta chain variable domain of TCR clone 155890 (TRBV11-3, TRBJ2-7)
CASSPGPASSYEQYF

SEQ ID NO: 311781 - protein, 10 aa, Homo sapiens
  CDR3 for alpha chain variable domain of TCR clone 155891 (TRAV3, TRAJ30)
CAVREIEIIF

SEQ ID NO: 311782 - protein, 14 aa, Homo sapiens
  CDR3 for beta chain variable domain of TCR clone 155891 (TRBV25-1, TRBJ1-1)
CASTHLGGNTEAFF

SEQ ID NO: 311783 - protein, 13 aa, Homo sapiens
  CDR3 for alpha chain variable domain of TCR clone 155892 (TRAV13-1, TRAJ40)
CAESKGGTYKYIF

SEQ ID NO: 311784 - protein, 13 aa, Homo sapiens
  CDR3 for beta chain variable domain of TCR clone 155892 (TRBV7-6, TRBJ1-2)
CASSLVADYGYTF

SEQ ID NO: 311785 - protein, 11 aa, Homo sapiens
  CDR3 for alpha chain variable domain of TCR clone 155893 (TRAV12-3, TRAJ26)
CAMSHGQNFVF

SEQ ID NO: 311786 - protein, 14 aa, Homo sapiens
  CDR3 for beta chain variable domain of TCR clone 155893 (TRBV4-3, TRBJ2-2)
CASGQGHVTGELFF

SEQ ID NO: 311787 - protein, 16 aa, Homo sapiens
  CDR3 for alpha chain variable domain of TCR clone 155894 (TRAV13-1, TRAJ18)
CAASRMRGSTLGRLYF

SEQ ID NO: 311788 - protein, 16 aa, Homo sapiens
  CDR3 for beta chain variable domain of TCR clone 155894 (TRBV27, TRBJ1-1)
CASSSRGRTGYNEAFF

SEQ ID NO: 311789 - protein, 14 aa, Homo sapiens
  CDR3 for alpha chain variable domain of TCR clone 155895 (TRAV8-3, TRAJ48)
CCGCGQFGNEKLTF

SEQ ID NO: 311790 - protein, 17 aa, Homo sapiens
  CDR3 for beta chain variable domain of TCR clone 155895 (TRBV28, TRBJ2-4)
CAGVPGHSLWAFSTSAP

SEQ ID NO: 311791 - protein, 16 aa, Homo sapiens
  CDR3 for alpha chain variable domain of TCR clone 155896 (TRAV3, TRAJ37)
CAVRGKGSGNTGKLLF

SEQ ID NO: 311792 - protein, 14 aa, Homo sapiens
  CDR3 for beta chain variable domain of TCR clone 155896 (TRBV20-1, TRBJ2-3)
CSARGGTSTDTQYF

SEQ ID NO: 311793 - protein, 19 aa, Homo sapiens
  CDR3 for alpha chain variable domain of TCR clone 155897 (TRAV26-1, TRAJ50)
CCVLLHRQNPKTYYDKVIF

SEQ ID NO: 311794 - protein, 17 aa, Homo sapiens
  CDR3 for beta chain variable domain of TCR clone 155897 (TRBV4-1, TRBJ1-4)
CASSQEGPRVVEEKLFF

SEQ ID NO: 311795 - protein, 14 aa, Homo sapiens
  CDR3 for alpha chain variable domain of TCR clone 155898 (TRAV12-2, TRAJ44)
CAVNPAGTASKLPF

SEQ ID NO: 311796 - protein, 15 aa, Homo sapiens
  CDR3 for beta chain variable domain of TCR clone 155898 (TRBV28, TRBJ2-7)
CASSVRQVSSYEQYF

SEQ ID NO: 311797 - protein, 14 aa, Homo sapiens
  CDR3 for alpha chain variable domain of TCR clone 155899 (TRAV29/DV5, TRAJ45)
CAASFRGGADGLTF

SEQ ID NO: 311798 - protein, 15 aa, Homo sapiens
  CDR3 for beta chain variable domain of TCR clone 155899 (TRBV7-3, TRBJ1-1)
CASSPRADRNTEAFF

SEQ ID NO: 311799 - protein, 14 aa, Homo sapiens
  CDR3 for alpha chain variable domain of TCR clone 155900 (TRAV12-2, TRAJ13)
CAVKKTGGYQKVTS

SEQ ID NO: 311800 - protein, 16 aa, Homo sapiens
  CDR3 for beta chain variable domain of TCR clone 155900 (TRBV12-5, TRBJ2-5)
CASGPRTSGNQETQYF

SEQ ID NO: 311801 - protein, 18 aa, Homo sapiens
  CDR3 for alpha chain variable domain of TCR clone 155901 (TRAV9-2, TRAJ52)
CALSRHNAGGTSYGKLTF

SEQ ID NO: 311802 - protein, 19 aa, Homo sapiens
  CDR3 for beta chain variable domain of TCR clone 155901 (TRBV2, TRBJ2-7)
CASSDDETSGRANDYEQYF

SEQ ID NO: 311803 - protein, 13 aa, Homo sapiens
  CDR3 for alpha chain variable domain of TCR clone 155902 (TRAV8-4, TRAJ10)
CAACKGGGNKLTF

SEQ ID NO: 311804 - protein, 15 aa, Homo sapiens
  CDR3 for beta chain variable domain of TCR clone 155902 (TRBV2, TRBJ2-3)
CASSDFEKATDTQYF

SEQ ID NO: 311805 - protein, 16 aa, Homo sapiens
  CDR3 for alpha chain variable domain of TCR clone 155903 (TRAV30, TRAJ24)
CGTEIVDADSWGKFQF

SEQ ID NO: 311806 - protein, 16 aa, Homo sapiens
  CDR3 for beta chain variable domain of TCR clone 155903 (TRBV7-3, TRBJ2-2)
CASNLKRGTLSGELFF

SEQ ID NO: 311807 - protein, 14 aa, Homo sapiens
  CDR3 for alpha chain variable domain of TCR clone 155904 (TRAV12-2, TRAJ24)
CAVTPADSWGKLQF

SEQ ID NO: 311808 - protein, 12 aa, Homo sapiens
  CDR3 for beta chain variable domain of TCR clone 155904 (TRBV3-1, TRBJ2-1)
CAISQGSSGQFF

SEQ ID NO: 311809 - protein, 12 aa, Homo sapiens
  CDR3 for alpha chain variable domain of TCR clone 155905 (TRAV12-3, TRAJ40)
CAMSSGTYKYIF

SEQ ID NO: 311810 - protein, 15 aa, Homo sapiens
  CDR3 for beta chain variable domain of TCR clone 155905 (TRBV7-3, TRBJ2-2)
CASSETGQGTGEMFF

SEQ ID NO: 311811 - protein, 12 aa, Homo sapiens
  CDR3 for alpha chain variable domain of TCR clone 155906 (TRAV8-3, TRAJ26)
CAGDNYGPNFVF

SEQ ID NO: 311812 - protein, 12 aa, Homo sapiens
  CDR3 for beta chain variable domain of TCR clone 155906 (TRBV11-2, TRBJ2-1)
CASSPGNNEQFF

SEQ ID NO: 311813 - protein, 14 aa, Homo sapiens
  CDR3 for alpha chain variable domain of TCR clone 155907 (TRAV26-1, TRAJ38)
CIADNAGKKSKLIW

SEQ ID NO: 311814 - protein, 13 aa, Homo sapiens
  CDR3 for beta chain variable domain of TCR clone 155907 (TRBV2, TRBJ1-5)
CATAGPGNQPQHF

SEQ ID NO: 311815 - protein, 15 aa, Homo sapiens
  CDR3 for alpha chain variable domain of TCR clone 155908 (TRAV3, TRAJ22)
CAVRDRGGSARQLTF

SEQ ID NO: 311816 - protein, 15 aa, Homo sapiens
  CDR3 for beta chain variable domain of TCR clone 155908 (TRBV29-1, TRBJ2-1)
CSGRDRKSSYNEQFF

SEQ ID NO: 311817 - protein, 14 aa, Homo sapiens
  CDR3 for alpha chain variable domain of TCR clone 155909 (TRAV26-2, TRAJ38)
CILYNAGNNRKLVW

SEQ ID NO: 311818 - protein, 14 aa, Homo sapiens
  CDR3 for beta chain variable domain of TCR clone 155909 (TRBV19, TRBJ2-1)
CASPTFVLSGEQFF

SEQ ID NO: 311819 - protein, 13 aa, Homo sapiens
  CDR3 for alpha chain variable domain of TCR clone 155910 (TRAV8-3, TRAJ28)
CAVGAVGSYPLTF

SEQ ID NO: 311820 - protein, 14 aa, Homo sapiens
  CDR3 for beta chain variable domain of TCR clone 155910 (TRBV7-2, TRBJ2-7)
CASRSRGAAYEQYF

SEQ ID NO: 311821 - protein, 16 aa, Homo sapiens
  CDR3 for alpha chain variable domain of TCR clone 155911 (TRAV3, TRAJ37)
CAVRGKGSGNTGKLIF

SEQ ID NO: 311822 - protein, 15 aa, Homo sapiens
  CDR3 for beta chain variable domain of TCR clone 155911 (TRBV11-2, TRBJ2-2)
CASSSDRVNAGELFL

SEQ ID NO: 311823 - protein, 10 aa, Homo sapiens
  CDR3 for alpha chain variable domain of TCR clone 155912 (TRAV2, TRAJ34)
CAVVNDKLIF

SEQ ID NO: 311824 - protein, 15 aa, Homo sapiens
  CDR3 for beta chain variable domain of TCR clone 155912 (TRBV15, TRBJ1-2)
CATSRVRASGSGYTF

SEQ ID NO: 311825 - protein, 15 aa, Homo sapiens
  CDR3 for alpha chain variable domain of TCR clone 155913 (TRAV26-1, TRAJ44)
CIVRIGTGTASKPTF

SEQ ID NO: 311826 - protein, 15 aa, Homo sapiens
  CDR3 for beta chain variable domain of TCR clone 155913 (TRBV7-6, TRBJ2-1)
CASSSLAGEGNEQFF

SEQ ID NO: 311827 - protein, 13 aa, Homo sapiens
  CDR3 for alpha chain variable domain of TCR clone 155914 (TRAV12-1, TRAJ26)
CVVRRNYGQNFVF

SEQ ID NO: 311828 - protein, 12 aa, Homo sapiens
  CDR3 for beta chain variable domain of TCR clone 155914 (TRBV11-2, TRBJ2-1)
CASSPGNNEQFF

SEQ ID NO: 311829 - protein, 13 aa, Homo sapiens
  CDR3 for alpha chain variable domain of TCR clone 155915 (TRAV16, TRAJ9)
CALRATGGFKTIF

SEQ ID NO: 311830 - protein, 16 aa, Homo sapiens
  CDR3 for beta chain variable domain of TCR clone 155915 (TRBV5-1, TRBJ1-3)
CGSSRSGEDSGNTIYF

SEQ ID NO: 311831 - protein, 12 aa, Homo sapiens
  CDR3 for alpha chain variable domain of TCR clone 155916 (TRAV17, TRAJ30)
CFPERRDDKIIF

SEQ ID NO: 311832 - protein, 14 aa, Homo sapiens
  CDR3 for beta chain variable domain of TCR clone 155916 (TRBV7-7, TRBJ2-2)
CASSRDRSTGELFF

SEQ ID NO: 311833 - protein, 11 aa, Homo sapiens
  CDR3 for alpha chain variable domain of TCR clone 155917 (TRAV1-1, TRAJ23)
CAVRQGGKLIF

SEQ ID NO: 311834 - protein, 13 aa, Homo sapiens
  CDR3 for beta chain variable domain of TCR clone 155917 (TRBV20-1, TRBJ2-2)
CSASAAGTGELFF

SEQ ID NO: 311835 - protein, 15 aa, Homo sapiens
  CDR3 for alpha chain variable domain of TCR clone 155918 (TRAV8-3, TRAJ11)
CAVGLLNSGYSTLPF

SEQ ID NO: 311836 - protein, 15 aa, Homo sapiens
  CDR3 for beta chain variable domain of TCR clone 155918 (TRBV7-9, TRBJ1-2)
CASSQRAGGRDGYTF

SEQ ID NO: 311837 - protein, 16 aa, Homo sapiens
  CDR3 for alpha chain variable domain of TCR clone 155919 (TRAV3, TRAJ21)
CAVRDIERGNFNKFYF

SEQ ID NO: 311838 - protein, 15 aa, Homo sapiens
  CDR3 for beta chain variable domain of TCR clone 155919 (TRBV7-3, TRBJ2-1)
CASSPTGGGEVEQFF

SEQ ID NO: 311839 - protein, 17 aa, Homo sapiens
  CDR3 for alpha chain variable domain of TCR clone 155920 (TRAV26-1, TRAJ28)
CIVRALYSGAGSYQITF

SEQ ID NO: 311840 - protein, 12 aa, Homo sapiens
  CDR3 for beta chain variable domain of TCR clone 155920 (TRBV12-4, TRBJ2-1)
CASRQTENEQFF

SEQ ID NO: 311841 - protein, 17 aa, Homo sapiens
  CDR3 for alpha chain variable domain of TCR clone 155921 (TRAV26-1, TRAJ53)
CIVRVDASGGSNYKLTF

SEQ ID NO: 311842 - protein, 15 aa, Homo sapiens
  CDR3 for beta chain variable domain of TCR clone 155921 (TRBV20-1, TRBJ2-7)
CSARVPAAYFYEQYF

SEQ ID NO: 311843 - protein, 16 aa, Homo sapiens
  CDR3 for alpha chain variable domain of TCR clone 155922 (TRAV3, TRAJ37)
CAVRPHGSGNTGKLIF

SEQ ID NO: 311844 - protein, 12 aa, Homo sapiens
  CDR3 for beta chain variable domain of TCR clone 155922 (TRBV7-3, TRBJ2-5)
CQQLPGGETQYF

SEQ ID NO: 311845 - protein, 13 aa, Homo sapiens
  CDR3 for alpha chain variable domain of TCR clone 155923 (TRAV26-1, TRAJ33)
CIVRVEGNYQLIW

SEQ ID NO: 311846 - protein, 14 aa, Homo sapiens
  CDR3 for beta chain variable domain of TCR clone 155923 (TRBV5-5, TRBJ1-5)
CASSGQGVDQPQHF

SEQ ID NO: 311847 - protein, 14 aa, Homo sapiens
  CDR3 for alpha chain variable domain of TCR clone 155924 (TRAV1-2, TRAJ8)
CAVREDTGFQKIVF

SEQ ID NO: 311848 - protein, 12 aa, Homo sapiens
  CDR3 for beta chain variable domain of TCR clone 155924 (TRBV11-2, TRBJ2-2)
CASSLPTGELFF

SEQ ID NO: 311849 - protein, 13 aa, Homo sapiens
  CDR3 for alpha chain variable domain of TCR clone 155925 (TRAV35, TRAJ42)
CAGFPGSQGNLIF

SEQ ID NO: 311850 - protein, 14 aa, Homo sapiens
  CDR3 for beta chain variable domain of TCR clone 155925 (TRBV19, TRBJ2-1)
RASPTFVLSGEQFF

SEQ ID NO: 311851 - protein, 13 aa, Homo sapiens
  CDR3 for alpha chain variable domain of TCR clone 155926 (TRAV3, TRAJ15)
CAVRDQAGTALIF

SEQ ID NO: 311852 - protein, 15 aa, Homo sapiens
  CDR3 for beta chain variable domain of TCR clone 155926 (TRBV11-1, TRBJ2-7)
CASSLNYGASYEQSF

SEQ ID NO: 311853 - protein, 12 aa, Homo sapiens
  CDR3 for alpha chain variable domain of TCR clone 155927 (TRAV12-3, TRAJ17)
CAMTLTGNKLTF

SEQ ID NO: 311854 - protein, 15 aa, Homo sapiens
  CDR3 for beta chain variable domain of TCR clone 155927 (TRBV2, TRBJ2-1)
CASTELAGSYNEQFF

SEQ ID NO: 311855 - protein, 15 aa, Homo sapiens
  CDR3 for alpha chain variable domain of TCR clone 155928 (TRAV12-3, TRAJ5)
CAMSGLGTGRRALTF

SEQ ID NO: 311856 - protein, 16 aa, Homo sapiens
  CDR3 for beta chain variable domain of TCR clone 155928 (TRBV20-1, TRBJ2-3)
CSARLHSAGARDTQYF

SEQ ID NO: 311857 - protein, 12 aa, Homo sapiens
  CDR3 for alpha chain variable domain of TCR clone 155929 (TRAV12-1, TRAJ8)
CVVNKGFQKLVF

SEQ ID NO: 311858 - protein, 16 aa, Homo sapiens
  CDR3 for beta chain variable domain of TCR clone 155929 (TRBV12-5, TRBJ2-5)
CASGPRTSGNQETQYF

SEQ ID NO: 311859 - protein, 15 aa, Homo sapiens
  CDR3 for alpha chain variable domain of TCR clone 155930 (TRAV4, TRAJ39)
CLVGPNNNAGNMLTF

SEQ ID NO: 311860 - protein, 14 aa, Homo sapiens
  CDR3 for beta chain variable domain of TCR clone 155930 (TRBV19, TRBJ2-1)
CASPSFVLSGEQFF

SEQ ID NO: 311861 - protein, 23 aa, Homo sapiens
  CDR3 for alpha chain variable domain of TCR clone 155931 (TRAV12-2, TRAJ36)
SLLIRDSQPSDSATLERANNLFF

SEQ ID NO: 311862 - protein, 13 aa, Homo sapiens
  CDR3 for beta chain variable domain of TCR clone 155931 (TRBV7-3, TRBJ2-5)
CASSFRGGETHYF

SEQ ID NO: 311863 - protein, 13 aa, Homo sapiens
  CDR3 for alpha chain variable domain of TCR clone 155932 (TRAV12-2, TRAJ33)
CGDAPDSNYPLIW

SEQ ID NO: 311864 - protein, 15 aa, Homo sapiens
  CDR3 for beta chain variable domain of TCR clone 155932 (TRBV27, TRBJ2-1)
CASSNGGGSSNEQFF

SEQ ID NO: 311865 - protein, 19 aa, Homo sapiens
  CDR3 for alpha chain variable domain of TCR clone 155933 (TRAV26-1, TRAJ28)
CIVRVAHAYSGAGSYQLTF

SEQ ID NO: 311866 - protein, 17 aa, Homo sapiens
  CDR3 for beta chain variable domain of TCR clone 155933 (TRBV9, TRBJ2-2)
CASSVWGQGTDTGELFF

SEQ ID NO: 311867 - protein, 14 aa, Homo sapiens
  CDR3 for alpha chain variable domain of TCR clone 155934 (TRAV12-1, TRAJ36)
CVVNYWGKQPLLWD

SEQ ID NO: 311868 - protein, 13 aa, Homo sapiens
  CDR3 for beta chain variable domain of TCR clone 155934 (TRBV19, TRBJ1-2)
CPSSVPGQDGYTF

SEQ ID NO: 311869 - protein, 14 aa, Homo sapiens
  CDR3 for alpha chain variable domain of TCR clone 155935 (TRAV13-2, TRAJ10)
CAENITGGGNKLTF

SEQ ID NO: 311870 - protein, 15 aa, Homo sapiens
  CDR3 for beta chain variable domain of TCR clone 155935 (TRBV6-3, TRBJ2-1)
CASSYASDSYNEQFF

SEQ ID NO: 311871 - protein, 13 aa, Homo sapiens
  CDR3 for alpha chain variable domain of TCR clone 155936 (TRAV26-2, TRAJ43)
CTLRAVNNNDMRF

SEQ ID NO: 311872 - protein, 14 aa, Homo sapiens
  CDR3 for beta chain variable domain of TCR clone 155936 (TRBV11-2, TRBJ2-5)
CASSRTGGIETQYF

SEQ ID NO: 311873 - protein, 15 aa, Homo sapiens
  CDR3 for alpha chain variable domain of TCR clone 155937 (TRAV3, TRAJ29)
CAVRDINSGNTPLVF

SEQ ID NO: 311874 - protein, 16 aa, Homo sapiens
  CDR3 for beta chain variable domain of TCR clone 155937 (TRBV4-1, TRBJ2-5)
CASSQTFFGDKETQYF

SEQ ID NO: 311875 - protein, 12 aa, Homo sapiens
  CDR3 for alpha chain variable domain of TCR clone 155938 (TRAV25, TRAJ31)
CAGHLNNARLMF

SEQ ID NO: 311876 - protein, 15 aa, Homo sapiens
  CDR3 for beta chain variable domain of TCR clone 155938 (TRBV28, TRBJ2-7)
CASSLISGGSYEQYF

SEQ ID NO: 311877 - protein, 11 aa, Homo sapiens
  CDR3 for alpha chain variable domain of TCR clone 155939 (TRAV13-1, TRAJ30)
CATSRDDKIIF

SEQ ID NO: 311878 - protein, 15 aa, Homo sapiens
  CDR3 for beta chain variable domain of TCR clone 155939 (TRBV18, TRBJ1-1)
CASSPSSWVNTEAFF

SEQ ID NO: 311879 - protein, 14 aa, Homo sapiens
  CDR3 for alpha chain variable domain of TCR clone 155940 (TRAV8-4, TRAJ9)
CAVTFNTGGFNTIF

SEQ ID NO: 311880 - protein, 15 aa, Homo sapiens
  CDR3 for beta chain variable domain of TCR clone 155940 (TRBV7-9, TRBJ2-2)
CASSPETGAGGGLFF

SEQ ID NO: 311881 - protein, 11 aa, Homo sapiens
  CDR3 for alpha chain variable domain of TCR clone 155941 (TRAV17, TRAJ9)
CGFTGGFKTIF

SEQ ID NO: 311882 - protein, 13 aa, Homo sapiens
  CDR3 for beta chain variable domain of TCR clone 155941 (TRBV12-4, TRBJ2-2)
CASSITGSGELFF

SEQ ID NO: 311883 - protein, 12 aa, Homo sapiens
  CDR3 for alpha chain variable domain of TCR clone 155942 (TRAV13-1, TRAJ21)
CAAKEGFNRFYF

SEQ ID NO: 311884 - protein, 13 aa, Homo sapiens
  CDR3 for beta chain variable domain of TCR clone 155942 (TRBV7-7, TRBJ2-3)
CASSLSRADTQYF

SEQ ID NO: 311885 - protein, 12 aa, Homo sapiens
  CDR3 for alpha chain variable domain of TCR clone 155943 (TRAV2, TRAJ24)
WSVKNSWGKLQF

SEQ ID NO: 311886 - protein, 16 aa, Homo sapiens
  CDR3 for beta chain variable domain of TCR clone 155943 (TRBV7-7, TRBJ2-3)
CASSPGTSGSTDTQYF

SEQ ID NO: 311887 - protein, 15 aa, Homo sapiens
  CDR3 for alpha chain variable domain of TCR clone 155944 (TRAV23/DV6, TRAJ37)
CAAGEGPSNTGKLLF

SEQ ID NO: 311888 - protein, 17 aa, Homo sapiens
  CDR3 for beta chain variable domain of TCR clone 155944 (TRBV20-1, TRBJ2-7)
CSATRAGGVAGVEEQYF

SEQ ID NO: 311889 - protein, 13 aa, Homo sapiens
  CDR3 for alpha chain variable domain of TCR clone 155945 (TRAV29/DV5, TRAJ31)
CAASRNNNARLML

SEQ ID NO: 311890 - protein, 12 aa, Homo sapiens
  CDR3 for beta chain variable domain of TCR clone 155945 (TRBV14, TRBJ2-5)
CASSHLKETQYF

SEQ ID NO: 311891 - protein, 14 aa, Homo sapiens
  CDR3 for alpha chain variable domain of TCR clone 155946 (TRAV12-3, TRAJ54)
CAMSAQQGAQKLVF

SEQ ID NO: 311892 - protein, 14 aa, Homo sapiens
  CDR3 for beta chain variable domain of TCR clone 155946 (TRBV12-5, TRBJ2-5)
CASGSRTHQETQYF

SEQ ID NO: 311893 - protein, 13 aa, Homo sapiens
  CDR3 for alpha chain variable domain of TCR clone 155947 (TRAV27, TRAJ45)
CSSSGGGADGLTF

SEQ ID NO: 311894 - protein, 15 aa, Homo sapiens
  CDR3 for beta chain variable domain of TCR clone 155947 (TRBV9, TRBJ2-2)
CASSDFAGASGELFF

SEQ ID NO: 311895 - protein, 11 aa, Homo sapiens
  CDR3 for alpha chain variable domain of TCR clone 155948 (TRAV2, TRAJ20)
CAVLNDYKLCF

SEQ ID NO: 311896 - protein, 16 aa, Homo sapiens
  CDR3 for beta chain variable domain of TCR clone 155948 (TRBV11-1, TRBJ2-2)
CASSAEGLKNTGELFF

SEQ ID NO: 311897 - protein, 12 aa, Homo sapiens
  CDR3 for alpha chain variable domain of TCR clone 155949 (TRAV12-3, TRAJ41)
CAMSYSGYALNF

SEQ ID NO: 311898 - protein, 13 aa, Homo sapiens
  CDR3 for beta chain variable domain of TCR clone 155949 (TRBV7-3, TRBJ2-1)
CASSLDSYNEQFC

SEQ ID NO: 311899 - protein, 13 aa, Homo sapiens
  CDR3 for alpha chain variable domain of TCR clone 155950 (TRAV1-1, TRAJ9)
CAAKNTVGFKTIF

SEQ ID NO: 311900 - protein, 13 aa, Homo sapiens
  CDR3 for beta chain variable domain of TCR clone 155950 (TRBV7-9, TRBJ1-2)
CASSLKQNYGYTF

SEQ ID NO: 311901 - protein, 15 aa, Homo sapiens
  CDR3 for alpha chain variable domain of TCR clone 155951 (TRAV17, TRAJ22)
CATAPISGSARQLTF

SEQ ID NO: 311902 - protein, 14 aa, Homo sapiens
  CDR3 for beta chain variable domain of TCR clone 155951 (TRBV7-2, TRBJ1-2)
CASSQTGSTYGYTF

SEQ ID NO: 311903 - protein, 10 aa, Homo sapiens
  CDR3 for alpha chain variable domain of TCR clone 155952 (TRAV13-1, TRAJ15)
INQAGTALIF

SEQ ID NO: 311904 - protein, 12 aa, Homo sapiens
  CDR3 for beta chain variable domain of TCR clone 155952 (TRBV19, TRBJ2-7)
CASTDRGYEQYF

SEQ ID NO: 311905 - protein, 16 aa, Homo sapiens
  CDR3 for alpha chain variable domain of TCR clone 155953 (TRAV12-2, TRAJ10)
CAVNRVLTGGGNKLTF

SEQ ID NO: 311906 - protein, 11 aa, Homo sapiens
  CDR3 for beta chain variable domain of TCR clone 155953 (TRBV12-4, TRBJ2-3)
CASTATDTQYF

SEQ ID NO: 311907 - protein, 13 aa, Homo sapiens
  CDR3 for alpha chain variable domain of TCR clone 155954 (TRAV13-2, TRAJ53)
CAENMGSNYKLTF

SEQ ID NO: 311908 - protein, 16 aa, Homo sapiens
  CDR3 for beta chain variable domain of TCR clone 155954 (TRBV20-1, TRBJ1-2)
CSASMGQGVANYGYTF

SEQ ID NO: 311909 - protein, 13 aa, Homo sapiens
  CDR3 for alpha chain variable domain of TCR clone 155955 (TRAV21, TRAJ15)
CAVTNQAGTALIF

SEQ ID NO: 311910 - protein, 16 aa, Homo sapiens
  CDR3 for beta chain variable domain of TCR clone 155955 (TRBV28, TRBJ2-1)
CASSSPEYPRDNEQFF

SEQ ID NO: 311911 - protein, 13 aa, Homo sapiens
  CDR3 for alpha chain variable domain of TCR clone 155956 (TRAV2, TRAJ29)
CAAGSSGNTPLVF

SEQ ID NO: 311912 - protein, 16 aa, Homo sapiens
  CDR3 for beta chain variable domain of TCR clone 155956 (TRBV7-9, TRBJ1-2)
CASSPGGGAINYGYTF

SEQ ID NO: 311913 - protein, 16 aa, Homo sapiens
  CDR3 for alpha chain variable domain of TCR clone 155957 (TRAV3, TRAJ6)
CAERRPQGRRKLHTYI

SEQ ID NO: 311914 - protein, 14 aa, Homo sapiens
  CDR3 for beta chain variable domain of TCR clone 155957 (TRBV7-2, TRBJ2-7)
CASSPKTSFYEQYF

SEQ ID NO: 311915 - protein, 13 aa, Homo sapiens
  CDR3 for alpha chain variable domain of TCR clone 155958 (TRAV4, TRAJ22)
CLGGSGSARQLTF

SEQ ID NO: 311916 - protein, 15 aa, Homo sapiens
  CDR3 for beta chain variable domain of TCR clone 155958 (TRBV7-9, TRBJ1-6)
CASGSPGRGNSQLHF

SEQ ID NO: 311917 - protein, 13 aa, Homo sapiens
  CDR3 for alpha chain variable domain of TCR clone 155959 (TRAV36/DV7, TRAJ44)
CGANTGTASKLTF

SEQ ID NO: 311918 - protein, 14 aa, Homo sapiens
  CDR3 for beta chain variable domain of TCR clone 155959 (TRBV20-1, TRBJ1-3)
CSASPTGAGNTIYF

SEQ ID NO: 311919 - protein, 13 aa, Homo sapiens
  CDR3 for alpha chain variable domain of TCR clone 155960 (TRAV1-2, TRAJ12)
CAVSMDSSYKLIF

SEQ ID NO: 311920 - protein, 15 aa, Homo sapiens
  CDR3 for beta chain variable domain of TCR clone 155960 (TRBV11-3, TRBJ2-3)
CASLKDGREGDTQYF

SEQ ID NO: 311921 - protein, 13 aa, Homo sapiens
  CDR3 for alpha chain variable domain of TCR clone 155961 (TRAV3, TRAJ43)
CAVKARNNNDMRF

SEQ ID NO: 311922 - protein, 16 aa, Homo sapiens
  CDR3 for beta chain variable domain of TCR clone 155961 (TRBV7-9, TRBJ2-3)
CASSFSVAGGTDTQYL

SEQ ID NO: 311923 - protein, 14 aa, Homo sapiens
  CDR3 for alpha chain variable domain of TCR clone 155962 (TRAV35, TRAJ13)
CAGSPSVGYQKVTF

SEQ ID NO: 311924 - protein, 17 aa, Homo sapiens
  CDR3 for beta chain variable domain of TCR clone 155962 (TRBV7-6, TRBJ2-5)
WASSPGLADPWGETQYF

SEQ ID NO: 311925 - protein, 11 aa, Homo sapiens
  CDR3 for alpha chain variable domain of TCR clone 155963 (TRAV21, TRAJ31)
CAVRNNARLMF

SEQ ID NO: 311926 - protein, 12 aa, Homo sapiens
  CDR3 for beta chain variable domain of TCR clone 155963 (TRBV5-1, TRBJ2-3)
CASSLAADTQYF

SEQ ID NO: 311927 - protein, 13 aa, Homo sapiens
  CDR3 for alpha chain variable domain of TCR clone 155964 (TRAV2, TRAJ40)
CAVVTSGTYKYIF

SEQ ID NO: 311928 - protein, 12 aa, Homo sapiens
  CDR3 for beta chain variable domain of TCR clone 155964 (TRBV7-9, TRBJ2-7)
RASSIKREEQYF

SEQ ID NO: 311929 - protein, 14 aa, Homo sapiens
  CDR3 for alpha chain variable domain of TCR clone 155965 (TRAV12-1, TRAJ8)
CVVNSNTSFQKLVF

SEQ ID NO: 311930 - protein, 16 aa, Homo sapiens
  CDR3 for beta chain variable domain of TCR clone 155965 (TRBV20-1, TRBJ2-2)
CSARDDRVGLTGELFF

SEQ ID NO: 311931 - protein, 17 aa, Homo sapiens
  CDR3 for alpha chain variable domain of TCR clone 155966 (TRAV13-1, TRAJ31)
CAPRDRLMFGNGTQLVV

SEQ ID NO: 311932 - protein, 12 aa, Homo sapiens
  CDR3 for beta chain variable domain of TCR clone 155966 (TRBV7-9, TRBJ2-7)
CASSLEGYEQYF

SEQ ID NO: 311933 - protein, 11 aa, Homo sapiens
  CDR3 for alpha chain variable domain of TCR clone 155967 (TRAV4, TRAJ31)
CLVVLNARLMF

SEQ ID NO: 311934 - protein, 16 aa, Homo sapiens
  CDR3 for beta chain variable domain of TCR clone 155967 (TRBV15, TRBJ2-6)
CATSVNGGFLANVLTF

SEQ ID NO: 311935 - protein, 13 aa, Homo sapiens
  CDR3 for alpha chain variable domain of TCR clone 155968 (TRAV17, TRAJ33)
CATDADSNYQLIW

SEQ ID NO: 311936 - protein, 17 aa, Homo sapiens
  CDR3 for beta chain variable domain of TCR clone 155968 (TRBV20-1, TRBJ2-3)
CSAVSPGLAGGKDTQYF

SEQ ID NO: 311937 - protein, 15 aa, Homo sapiens
  CDR3 for alpha chain variable domain of TCR clone 155969 (TRAV25, TRAJ53)
CPTSNSGGSNYKLTF

SEQ ID NO: 311938 - protein, 14 aa, Homo sapiens
  CDR3 for beta chain variable domain of TCR clone 155969 (TRBV11-2, TRBJ2-3)
CTSSRLARTDTQYF

SEQ ID NO: 311939 - protein, 13 aa, Homo sapiens
  CDR3 for alpha chain variable domain of TCR clone 155970 (TRAV12-2, TRAJ10)
CAVPTGGGNKLTF

SEQ ID NO: 311940 - protein, 11 aa, Homo sapiens
  CDR3 for beta chain variable domain of TCR clone 155970 (TRBV6-1, TRBJ2-1)
CAGIGSNEQFF

SEQ ID NO: 311941 - protein, 13 aa, Homo sapiens
  CDR3 for alpha chain variable domain of TCR clone 155971 (TRAV1-1, TRAJ23)
CAVVANQGGKLIF

SEQ ID NO: 311942 - protein, 15 aa, Homo sapiens
  CDR3 for beta chain variable domain of TCR clone 155971 (TRBV19, TRBJ1-6)
CASSTQGAVGSPLHF

SEQ ID NO: 311943 - protein, 16 aa, Homo sapiens
  CDR3 for alpha chain variable domain of TCR clone 155972 (TRAV30, TRAJ24)
CGTEIVDAESWGKFQC

SEQ ID NO: 311944 - protein, 14 aa, Homo sapiens
  CDR3 for beta chain variable domain of TCR clone 155972 (TRBV12-5, TRBJ2-5)
CASGSRTHQETQYF

SEQ ID NO: 311945 - protein, 14 aa, Homo sapiens
  CDR3 for alpha chain variable domain of TCR clone 155973 (TRAV17, TRAJ11)
CATEGESGHSALTF

SEQ ID NO: 311946 - protein, 14 aa, Homo sapiens
  CDR3 for beta chain variable domain of TCR clone 155973 (TRBV5-8, TRBJ2-3)
CASSLGQGTDTQYF

SEQ ID NO: 311947 - protein, 10 aa, Homo sapiens
  CDR3 for alpha chain variable domain of TCR clone 155974 (TRAV13-1, TRAJ27)
CAPLARQINL

SEQ ID NO: 311948 - protein, 13 aa, Homo sapiens
  CDR3 for beta chain variable domain of TCR clone 155974 (TRBV7-3, TRBJ1-1)
CASSQDWGAESFF

SEQ ID NO: 311949 - protein, 20 aa, Homo sapiens
  CDR3 for alpha chain variable domain of TCR clone 155975 (TRAV8-2, TRAJ8)
CVVSDRSADEHRLSETCIWN

SEQ ID NO: 311950 - protein, 13 aa, Homo sapiens
  CDR3 for beta chain variable domain of TCR clone 155975 (TRBV2, TRBJ1-5)
CATAGPGNQPQHF

SEQ ID NO: 311951 - protein, 17 aa, Homo sapiens
  CDR3 for alpha chain variable domain of TCR clone 155976 (TRAV26-2, TRAJ42)
CILRDVGYGGSQGNLIF

SEQ ID NO: 311952 - protein, 15 aa, Homo sapiens
  CDR3 for beta chain variable domain of TCR clone 155976 (TRBV7-9, TRBJ1-5)
CASSQGHQPNQPQHF

SEQ ID NO: 311953 - protein, 12 aa, Homo sapiens
  CDR3 for alpha chain variable domain of TCR clone 155977 (TRAV21, TRAJ11)
CAVSGGNSTLTF

SEQ ID NO: 311954 - protein, 15 aa, Homo sapiens
  CDR3 for beta chain variable domain of TCR clone 155977 (TRBV6-1, TRBJ2-7)
CASSEPIAATTEQYF

SEQ ID NO: 311955 - protein, 15 aa, Homo sapiens
  CDR3 for alpha chain variable domain of TCR clone 155978 (TRAV38-1, TRAJ37)
CAVIHGSGNTGKLIF

SEQ ID NO: 311956 - protein, 12 aa, Homo sapiens
  CDR3 for beta chain variable domain of TCR clone 155978 (TRBV7-9, TRBJ2-7)
CASSFGSYEQYF

SEQ ID NO: 311957 - protein, 13 aa, Homo sapiens
  CDR3 for alpha chain variable domain of TCR clone 155979 (TRAV26-1, )
CIVSHRVEGFWNQ

SEQ ID NO: 311958 - protein, 14 aa, Homo sapiens
  CDR3 for beta chain variable domain of TCR clone 155979 (TRBV20-1, TRBJ2-7)
CSAWTALSSCEQYF

SEQ ID NO: 311959 - protein, 13 aa, Homo sapiens
  CDR3 for alpha chain variable domain of TCR clone 155980 (TRAV1-1, TRAJ9)
CAAKNTGGFKPIF

SEQ ID NO: 311960 - protein, 14 aa, Homo sapiens
  CDR3 for beta chain variable domain of TCR clone 155980 (TRBV20-1, TRBJ2-1)
CSAQTGGSANEQFF

SEQ ID NO: 311961 - protein, 15 aa, Homo sapiens
  CDR3 for alpha chain variable domain of TCR clone 155981 (TRAV12-3, TRAJ6)
CAMSATTGGIYIPTF

SEQ ID NO: 311962 - protein, 15 aa, Homo sapiens
  CDR3 for beta chain variable domain of TCR clone 155981 (TRBV5-1, TRBJ2-7)
CASSLNGGPAREQYF

SEQ ID NO: 311963 - protein, 16 aa, Homo sapiens
  CDR3 for alpha chain variable domain of TCR clone 155982 (TRAV30, TRAJ24)
CGTEIVDADSWGKFQF

SEQ ID NO: 311964 - protein, 14 aa, Homo sapiens
  CDR3 for beta chain variable domain of TCR clone 155982 (TRBV7-2, TRBJ2-7)
CASSHKTSFYEQYF

SEQ ID NO: 311965 - protein, 17 aa, Homo sapiens
  CDR3 for alpha chain variable domain of TCR clone 155983 (TRAV4, TRAJ42)
CLVGVLNYGGSQGNLTF

SEQ ID NO: 311966 - protein, 12 aa, Homo sapiens
  CDR3 for beta chain variable domain of TCR clone 155983 (TRBV20-1, TRBJ2-1)
CSAQDTYNEQFF

SEQ ID NO: 311967 - protein, 16 aa, Homo sapiens
  CDR3 for alpha chain variable domain of TCR clone 155984 (TRAV17, TRAJ53)
CATDGGSGGSNYRLTF

SEQ ID NO: 311968 - protein, 14 aa, Homo sapiens
  CDR3 for beta chain variable domain of TCR clone 155984 (TRBV6-1, TRBJ2-2)
CASRELAYTGELFF

SEQ ID NO: 311969 - protein, 15 aa, Homo sapiens
  CDR3 for alpha chain variable domain of TCR clone 155985 (TRAV17, TRAJ22)
CATVAPSGSARQLTF

SEQ ID NO: 311970 - protein, 19 aa, Homo sapiens
  CDR3 for beta chain variable domain of TCR clone 155985 (TRBV25-1, TRBJ2-2)
CAILVYRVDRGRKTGELFF

SEQ ID NO: 311971 - protein, 14 aa, Homo sapiens
  CDR3 for alpha chain variable domain of TCR clone 155986 (TRAV26-1, TRAJ39)
CIVRGPRAGNMLTF

SEQ ID NO: 311972 - protein, 15 aa, Homo sapiens
  CDR3 for beta chain variable domain of TCR clone 155986 (TRBV7-9, TRBJ1-5)
CASSQGHQPNQTQHF

SEQ ID NO: 311973 - protein, 13 aa, Homo sapiens
  CDR3 for alpha chain variable domain of TCR clone 155987 (TRAV13-2, TRAJ53)
CAENMGSNYKLTF

SEQ ID NO: 311974 - protein, 13 aa, Homo sapiens
  CDR3 for beta chain variable domain of TCR clone 155987 (TRBV4-1, TRBJ2-2)
CASSQENTGELFC

SEQ ID NO: 311975 - protein, 12 aa, Homo sapiens
  CDR3 for alpha chain variable domain of TCR clone 155988 (TRAV1-1, TRAJ23)
CAVTNQGGKLIF

SEQ ID NO: 311976 - protein, 14 aa, Homo sapiens
  CDR3 for beta chain variable domain of TCR clone 155988 (TRBV4-1, TRBJ2-2)
CASSQAVNTGELFF

SEQ ID NO: 311977 - protein, 15 aa, Homo sapiens
  CDR3 for alpha chain variable domain of TCR clone 155989 (TRAV36/DV7, TRAJ53)
CAVEGSGGSNYKLTF

SEQ ID NO: 311978 - protein, 15 aa, Homo sapiens
  CDR3 for beta chain variable domain of TCR clone 155989 (TRBV5-7, TRBJ2-7)
CASSLGPGRGHEQYF

SEQ ID NO: 311979 - protein, 13 aa, Homo sapiens
  CDR3 for alpha chain variable domain of TCR clone 155990 (TRAV23/DV6, TRAJ45)
CAARRGGADGLTF

SEQ ID NO: 311980 - protein, 14 aa, Homo sapiens
  CDR3 for beta chain variable domain of TCR clone 155990 (TRBV7-2, TRBJ1-1)
CASSFLTGTTEAFF

SEQ ID NO: 311981 - protein, 13 aa, Homo sapiens
  CDR3 for alpha chain variable domain of TCR clone 155991 (TRAV6, TRAJ20)
CALAFSNDYKLSF

SEQ ID NO: 311982 - protein, 16 aa, Homo sapiens
  CDR3 for beta chain variable domain of TCR clone 155991 (TRBV7-9, TRBJ2-1)
CASSDVAGGSYNEQFF

SEQ ID NO: 311983 - protein, 13 aa, Homo sapiens
  CDR3 for alpha chain variable domain of TCR clone 155992 (TRAV8-6, TRAJ49)
CAVITNTGNQFYF

SEQ ID NO: 311984 - protein, 22 aa, Homo sapiens
  CDR3 for beta chain variable domain of TCR clone 155992 (TRBV23-1, TRBJ2-3)
TVSLRQQSRTSGRAGGRDTQYF

SEQ ID NO: 311985 - protein, 16 aa, Homo sapiens
  CDR3 for alpha chain variable domain of TCR clone 155993 (TRAV16, TRAJ21)
CACGWATTPTNFTLDL

SEQ ID NO: 311986 - protein, 15 aa, Homo sapiens
  CDR3 for beta chain variable domain of TCR clone 155993 (TRBV19, TRBJ2-1)
CASSIQATSYNEQFF

SEQ ID NO: 311987 - protein, 13 aa, Homo sapiens
  CDR3 for alpha chain variable domain of TCR clone 155994 (TRAV12-2, TRAJ10)
CAVPTGGGNKLTF

SEQ ID NO: 311988 - protein, 16 aa, Homo sapiens
  CDR3 for beta chain variable domain of TCR clone 155994 (TRBV13, TRBJ2-2)
CASSPRTGEHTGELFF

SEQ ID NO: 311989 - protein, 13 aa, Homo sapiens
  CDR3 for alpha chain variable domain of TCR clone 155995 (TRAV12-1, TRAJ39)
CVALNNAGNMLTF

SEQ ID NO: 311990 - protein, 13 aa, Homo sapiens
  CDR3 for beta chain variable domain of TCR clone 155995 (TRBV6-1, TRBJ2-3)
VNSTGGPTDTQYF

SEQ ID NO: 311991 - protein, 11 aa, Homo sapiens
  CDR3 for alpha chain variable domain of TCR clone 155996 (TRAV16, TRAJ49)
CSLNTGNQFYF

SEQ ID NO: 311992 - protein, 12 aa, Homo sapiens
  CDR3 for beta chain variable domain of TCR clone 155996 (TRBV7-9, TRBJ1-4)
CASSTDREKLFF

SEQ ID NO: 311993 - protein, 11 aa, Homo sapiens
  CDR3 for alpha chain variable domain of TCR clone 155997 (TRAV12-2, TRAJ49)
CAVPGGNQFYF

SEQ ID NO: 311994 - protein, 15 aa, Homo sapiens
  CDR3 for beta chain variable domain of TCR clone 155997 (TRBV7-8, TRBJ1-5)
CASSLERRGLEPQHF

SEQ ID NO: 311995 - protein, 16 aa, Homo sapiens
  CDR3 for alpha chain variable domain of TCR clone 155998 (TRAV3, TRAJ37)
WAVRGKGSGNTGKLIF

SEQ ID NO: 311996 - protein, 14 aa, Homo sapiens
  CDR3 for beta chain variable domain of TCR clone 155998 (TRBV6-1, TRBJ1-3)
CASVQGGGGNTIYF

SEQ ID NO: 311997 - protein, 14 aa, Homo sapiens
  CDR3 for alpha chain variable domain of TCR clone 155999 (TRAV26-1, TRAJ21)
CIVRPPYNLNKFYF

SEQ ID NO: 311998 - protein, 11 aa, Homo sapiens
  CDR3 for beta chain variable domain of TCR clone 155999 (TRBV10-3, TRBJ2-7)
CAISEGLEQYF

SEQ ID NO: 311999 - protein, 13 aa, Homo sapiens
  CDR3 for alpha chain variable domain of TCR clone 156000 (TRAV1-1, TRAJ31)
CASYLNNNARLMY

SEQ ID NO: 312000 - protein, 14 aa, Homo sapiens
  CDR3 for beta chain variable domain of TCR clone 156000 (TRBV4-1, TRBJ2-5)
CASSRSGSGETQYF

SEQ ID NO: 312001 - protein, 15 aa, Homo sapiens
  CDR3 for alpha chain variable domain of TCR clone 156001 (TRAV8-2, TRAJ24)
CVVRDRTDSWGKLQF

SEQ ID NO: 312002 - protein, 13 aa, Homo sapiens
  CDR3 for beta chain variable domain of TCR clone 156001 (TRBV7-9, TRBJ1-2)
CASSLKQNYGYTF

SEQ ID NO: 312003 - protein, 13 aa, Homo sapiens
  CDR3 for alpha chain variable domain of TCR clone 156002 (TRAV35, TRAJ42)
CAGFPGSQGNLIF

SEQ ID NO: 312004 - protein, 13 aa, Homo sapiens
  CDR3 for beta chain variable domain of TCR clone 156002 (TRBV7-3, TRBJ2-5)
CASSFRGGETQYF

SEQ ID NO: 312005 - protein, 17 aa, Homo sapiens
  CDR3 for alpha chain variable domain of TCR clone 156003 (TRAV13-1, TRAJ52)
CAASAGAGGTCYGKLTF

SEQ ID NO: 312006 - protein, 15 aa, Homo sapiens
  CDR3 for beta chain variable domain of TCR clone 156003 (TRBV7-2, TRBJ2-1)
CASSSGLAGGNEQFF

SEQ ID NO: 312007 - protein, 12 aa, Homo sapiens
  CDR3 for alpha chain variable domain of TCR clone 156004 (TRAV3, TRAJ20)
CAVRDPDYKLSF

SEQ ID NO: 312008 - protein, 14 aa, Homo sapiens
  CDR3 for beta chain variable domain of TCR clone 156004 (TRBV4-3, TRBJ1-1)
CASSQGWTPARAFF

SEQ ID NO: 312009 - protein, 16 aa, Homo sapiens
  CDR3 for alpha chain variable domain of TCR clone 156005 (TRAV26-1, TRAJ32)
CIVRTTYGGATNTLIF

SEQ ID NO: 312010 - protein, 14 aa, Homo sapiens
  CDR3 for beta chain variable domain of TCR clone 156005 (TRBV27, TRBJ1-1)
CASSLLSGLSEAFF

SEQ ID NO: 312011 - protein, 15 aa, Homo sapiens
  CDR3 for alpha chain variable domain of TCR clone 156006 (TRAV13-2, TRAJ10)
CAENRDTRGGNKLTF

SEQ ID NO: 312012 - protein, 20 aa, Homo sapiens
  CDR3 for beta chain variable domain of TCR clone 156006 (TRBV28, TRBJ2-1)
CASTPIGRSPGLAGGNEQFF

SEQ ID NO: 312013 - protein, 12 aa, Homo sapiens
  CDR3 for alpha chain variable domain of TCR clone 156007 (TRAV12-3, TRAJ17)
CAMTLTGNKPTF

SEQ ID NO: 312014 - protein, 15 aa, Homo sapiens
  CDR3 for beta chain variable domain of TCR clone 156007 (TRBV20-1, TRBJ2-7)
CSARDRGSGMDEQYF

SEQ ID NO: 312015 - protein, 14 aa, Homo sapiens
  CDR3 for alpha chain variable domain of TCR clone 156008 (TRAV20, TRAJ9)
CAVQAHTGGFKTIF

SEQ ID NO: 312016 - protein, 12 aa, Homo sapiens
  CDR3 for beta chain variable domain of TCR clone 156008 (TRBV14, TRBJ2-7)
CASSSLKGEQYF

SEQ ID NO: 312017 - protein, 13 aa, Homo sapiens
  CDR3 for alpha chain variable domain of TCR clone 156009 (TRAV1-2, TRAJ9)
CAALNTGGFKTIF

SEQ ID NO: 312018 - protein, 17 aa, Homo sapiens
  CDR3 for beta chain variable domain of TCR clone 156009 (TRBV18, TRBJ2-1)
CASSKGLSGGADNEQFF

SEQ ID NO: 312019 - protein, 14 aa, Homo sapiens
  CDR3 for alpha chain variable domain of TCR clone 156010 (TRAV3, TRAJ36)
CAVRAGTGANNLFF

SEQ ID NO: 312020 - protein, 16 aa, Homo sapiens
  CDR3 for beta chain variable domain of TCR clone 156010 (TRBV20-1, TRBJ2-6)
CSAREGPGVGANVLTF

SEQ ID NO: 312021 - protein, 15 aa, Homo sapiens
  CDR3 for alpha chain variable domain of TCR clone 156011 (TRAV12-3, TRAJ49)
CAMAVTPNSGNQFYF

SEQ ID NO: 312022 - protein, 18 aa, Homo sapiens
  CDR3 for beta chain variable domain of TCR clone 156011 (TRBV4-1, TRBJ1-5)
CASSQDPRGQGLNQPQHF

SEQ ID NO: 312023 - protein, 12 aa, Homo sapiens
  CDR3 for alpha chain variable domain of TCR clone 156012 (TRAV13-2, TRAJ42)
CAEGGSQGNLTF

SEQ ID NO: 312024 - protein, 13 aa, Homo sapiens
  CDR3 for beta chain variable domain of TCR clone 156012 (TRBV27, TRBJ2-1)
CASSLSRSHEQFF

SEQ ID NO: 312025 - protein, 13 aa, Homo sapiens
  CDR3 for alpha chain variable domain of TCR clone 156013 (TRAV8-3, TRAJ28)
CAVGAVGSYQLTF

SEQ ID NO: 312026 - protein, 15 aa, Homo sapiens
  CDR3 for beta chain variable domain of TCR clone 156013 (TRBV7-2, TRBJ2-3)
CASSSTGLETDTQYF

SEQ ID NO: 312027 - protein, 14 aa, Homo sapiens
  CDR3 for alpha chain variable domain of TCR clone 156014 (TRAV2, TRAJ37)
CAVAFTSNTGKLIF

SEQ ID NO: 312028 - protein, 12 aa, Homo sapiens
  CDR3 for beta chain variable domain of TCR clone 156014 (TRBV29-1, TRBJ2-3)
CSVTGGADTQYF

SEQ ID NO: 312029 - protein, 14 aa, Homo sapiens
  CDR3 for alpha chain variable domain of TCR clone 156015 (TRAV17, TRAJ54)
CDTDANQGAQKLVF

SEQ ID NO: 312030 - protein, 12 aa, Homo sapiens
  CDR3 for beta chain variable domain of TCR clone 156015 (TRBV7-9, TRBJ2-7)
CASSIKREEQYF

SEQ ID NO: 312031 - protein, 14 aa, Homo sapiens
  CDR3 for alpha chain variable domain of TCR clone 156016 (TRAV22, TRAJ57)
CAVELQGGSEKLVF

SEQ ID NO: 312032 - protein, 14 aa, Homo sapiens
  CDR3 for beta chain variable domain of TCR clone 156016 (TRBV11-2, TRBJ1-2)
CASSLYRGNYGYTF

SEQ ID NO: 312033 - protein, 15 aa, Homo sapiens
  CDR3 for alpha chain variable domain of TCR clone 156017 (TRAV8-3, TRAJ45)
CASSYSGGGADGLTF

SEQ ID NO: 312034 - protein, 17 aa, Homo sapiens
  CDR3 for beta chain variable domain of TCR clone 156017 (TRBV20-1, TRBJ2-6)
CSARDRDRAAGANVLTF

SEQ ID NO: 312035 - protein, 15 aa, Homo sapiens
  CDR3 for alpha chain variable domain of TCR clone 156018 (TRAV27, TRAJ53)
CRAINSGGSKYKLTF

SEQ ID NO: 312036 - protein, 14 aa, Homo sapiens
  CDR3 for beta chain variable domain of TCR clone 156018 (TRBV7-3, TRBJ2-1)
CASSLAGGTNEQFF

SEQ ID NO: 312037 - protein, 11 aa, Homo sapiens
  CDR3 for alpha chain variable domain of TCR clone 156019 (TRAV35, TRAJ34)
CWARKTDKLIF

SEQ ID NO: 312038 - protein, 14 aa, Homo sapiens
  CDR3 for beta chain variable domain of TCR clone 156019 (TRBV5-1, TRBJ2-7)
CASSRGESLYEQYF

SEQ ID NO: 312039 - protein, 21 aa, Homo sapiens
  CDR3 for alpha chain variable domain of TCR clone 156020 (TRAV3, )
CAVRPTPDNQNPDPAVYQLRD

SEQ ID NO: 312040 - protein, 15 aa, Homo sapiens
  CDR3 for beta chain variable domain of TCR clone 156020 (TRBV11-3, TRBJ2-5)
CASSDTSGGIETQYF

SEQ ID NO: 312041 - protein, 13 aa, Homo sapiens
  CDR3 for alpha chain variable domain of TCR clone 156021 (TRAV12-1, TRAJ7)
CVVNMRGNNRLAF

SEQ ID NO: 312042 - protein, 13 aa, Homo sapiens
  CDR3 for beta chain variable domain of TCR clone 156021 (TRBV11-2, TRBJ2-2)
CASGRDREEELFF

SEQ ID NO: 312043 - protein, 14 aa, Homo sapiens
  CDR3 for alpha chain variable domain of TCR clone 156022 (TRAV12-2, TRAJ17)
CAVLFKAAGNKLTF

SEQ ID NO: 312044 - protein, 17 aa, Homo sapiens
  CDR3 for beta chain variable domain of TCR clone 156022 (TRBV20-1, TRBJ2-2)
CSVSGPGQGGLTGELFF

SEQ ID NO: 312045 - protein, 15 aa, Homo sapiens
  CDR3 for alpha chain variable domain of TCR clone 156023 (TRAV12-3, TRAJ6)
CAMSATSGGSYKPTF

SEQ ID NO: 312046 - protein, 15 aa, Homo sapiens
  CDR3 for beta chain variable domain of TCR clone 156023 (TRBV5-1, TRBJ2-6)
CASSLDPSGANVLTF

SEQ ID NO: 312047 - protein, 12 aa, Homo sapiens
  CDR3 for alpha chain variable domain of TCR clone 156024 (TRAV27, TRAJ35)
CAGADFGNVLHC

SEQ ID NO: 312048 - protein, 16 aa, Homo sapiens
  CDR3 for beta chain variable domain of TCR clone 156024 (TRBV6-1, TRBJ2-1)
CASISRQGSSYNEQLF

SEQ ID NO: 312049 - protein, 16 aa, Homo sapiens
  CDR3 for alpha chain variable domain of TCR clone 156025 (TRAV14/DV4, TRAJ37)
CAMREYGSGNTGKRIF

SEQ ID NO: 312050 - protein, 15 aa, Homo sapiens
  CDR3 for beta chain variable domain of TCR clone 156025 (TRBV2, TRBJ2-5)
CASSEQGLIGETQYF

SEQ ID NO: 312051 - protein, 14 aa, Homo sapiens
  CDR3 for alpha chain variable domain of TCR clone 156026 (TRAV26-1, TRAJ34)
CIVIVAYKTDKLIF

SEQ ID NO: 312052 - protein, 15 aa, Homo sapiens
  CDR3 for beta chain variable domain of TCR clone 156026 (TRBV20-1, TRBJ2-7)
CSARVPAAYFYKQYF

SEQ ID NO: 312053 - protein, 12 aa, Homo sapiens
  CDR3 for alpha chain variable domain of TCR clone 156027 (TRAV21, TRAJ45)
CAAGGGADGLTF

SEQ ID NO: 312054 - protein, 13 aa, Homo sapiens
  CDR3 for beta chain variable domain of TCR clone 156027 (TRBV12-4, TRBJ1-1)
CASSPGTGFEAFF

SEQ ID NO: 312055 - protein, 13 aa, Homo sapiens
  CDR3 for alpha chain variable domain of TCR clone 156028 (TRAV21, TRAJ27)
FAARPGNAGQSTF

SEQ ID NO: 312056 - protein, 14 aa, Homo sapiens
  CDR3 for beta chain variable domain of TCR clone 156028 (TRBV7-6, TRBJ2-3)
CASSLGTVTDTQYF

SEQ ID NO: 312057 - protein, 13 aa, Homo sapiens
  CDR3 for alpha chain variable domain of TCR clone 156029 (TRAV3, TRAJ21)
CAVREPDFNKLYF

SEQ ID NO: 312058 - protein, 15 aa, Homo sapiens
  CDR3 for beta chain variable domain of TCR clone 156029 (TRBV28, TRBJ2-1)
CASSLDTSSYNEQFF

SEQ ID NO: 312059 - protein, 16 aa, Homo sapiens
  CDR3 for alpha chain variable domain of TCR clone 156030 (TRAV3, TRAJ6)
CAVRDRMGRRKLHTYI

SEQ ID NO: 312060 - protein, 15 aa, Homo sapiens
  CDR3 for beta chain variable domain of TCR clone 156030 (TRBV9, TRBJ2-1)
CASSLAGSSYNEQFL

SEQ ID NO: 312061 - protein, 12 aa, Homo sapiens
  CDR3 for alpha chain variable domain of TCR clone 156031 (TRAV35, TRAJ49)
CAGWNTGNQFYF

SEQ ID NO: 312062 - protein, 16 aa, Homo sapiens
  CDR3 for beta chain variable domain of TCR clone 156031 (TRBV5-1, TRBJ2-2)
CASILWDTTNTGELFF

SEQ ID NO: 312063 - protein, 12 aa, Homo sapiens
  CDR3 for alpha chain variable domain of TCR clone 156032 (TRAV23/DV6, TRAJ16)
CAATGTGKKLLF

SEQ ID NO: 312064 - protein, 15 aa, Homo sapiens
  CDR3 for beta chain variable domain of TCR clone 156032 (TRBV28, TRBJ1-2)
CASSSYRGLVYGYTF

SEQ ID NO: 312065 - protein, 15 aa, Homo sapiens
  CDR3 for alpha chain variable domain of TCR clone 156033 (TRAV12-1, TRAJ42)
CVVTRDGGSQGNLIF

SEQ ID NO: 312066 - protein, 14 aa, Homo sapiens
  CDR3 for beta chain variable domain of TCR clone 156033 (TRBV11-2, TRBJ2-3)
CASSLGGRANTQYF

SEQ ID NO: 312067 - protein, 18 aa, Homo sapiens
  CDR3 for alpha chain variable domain of TCR clone 156034 (TRAV26-1, TRAJ22)
CIVRVSFWFCKATDLWIW

SEQ ID NO: 312068 - protein, 16 aa, Homo sapiens
  CDR3 for beta chain variable domain of TCR clone 156034 (TRBV24-1, TRBJ2-3)
CATSDPGTGATDTQYF

SEQ ID NO: 312069 - protein, 15 aa, Homo sapiens
  CDR3 for alpha chain variable domain of TCR clone 156035 (TRAV26-1, TRAJ37)
CIVKTGSSNKGKLIF

SEQ ID NO: 312070 - protein, 12 aa, Homo sapiens
  CDR3 for beta chain variable domain of TCR clone 156035 (TRBV7-8, TRBJ2-7)
CASSLGDREQYF

SEQ ID NO: 312071 - protein, 13 aa, Homo sapiens
  CDR3 for alpha chain variable domain of TCR clone 156036 (TRAV12-1, TRAJ39)
CVALNNAGNMLTF

SEQ ID NO: 312072 - protein, 15 aa, Homo sapiens
  CDR3 for beta chain variable domain of TCR clone 156036 (TRBV6-3, TRBJ2-2)
CASSFLATLTGELFF

SEQ ID NO: 312073 - protein, 14 aa, Homo sapiens
  CDR3 for alpha chain variable domain of TCR clone 156037 (TRAV35, TRAJ22)
CAWLRPGSARQLTF

SEQ ID NO: 312074 - protein, 15 aa, Homo sapiens
  CDR3 for beta chain variable domain of TCR clone 156037 (TRBV12-4, TRBJ2-5)
CASSPPTGLQETQCF

SEQ ID NO: 312075 - protein, 10 aa, Homo sapiens
  CDR3 for alpha chain variable domain of TCR clone 156038 (TRAV23/DV6, TRAJ31)
CARGVARLMF

SEQ ID NO: 312076 - protein, 14 aa, Homo sapiens
  CDR3 for beta chain variable domain of TCR clone 156038 (TRBV7-8, TRBJ1-2)
CASSPDSLSYGYTF

SEQ ID NO: 312077 - protein, 15 aa, Homo sapiens
  CDR3 for alpha chain variable domain of TCR clone 156039 (TRAV8-6, TRAJ26)
CAVSAQSPGGQNFVF

SEQ ID NO: 312078 - protein, 13 aa, Homo sapiens
  CDR3 for beta chain variable domain of TCR clone 156039 (TRBV27, TRBJ2-7)
CASSLRHRYEQYF

SEQ ID NO: 312079 - protein, 14 aa, Homo sapiens
  CDR3 for alpha chain variable domain of TCR clone 156040 (TRAV1-2, TRAJ16)
CAVNRFSDGQKLLF

SEQ ID NO: 312080 - protein, 13 aa, Homo sapiens
  CDR3 for beta chain variable domain of TCR clone 156040 (TRBV20-1, TRBJ1-1)
CSARLGQGTDAFF

SEQ ID NO: 312081 - protein, 14 aa, Homo sapiens
  CDR3 for alpha chain variable domain of TCR clone 156041 (TRAV13-2, TRAJ4)
CAEKGPKGYNKLIF

SEQ ID NO: 312082 - protein, 13 aa, Homo sapiens
  CDR3 for beta chain variable domain of TCR clone 156041 (TRBV18, TRBJ2-5)
CASSPPGKETRYF

SEQ ID NO: 312083 - protein, 15 aa, Homo sapiens
  CDR3 for alpha chain variable domain of TCR clone 156042 (TRAV13-1, TRAJ32)
CAASNGWWCYKQAHL

SEQ ID NO: 312084 - protein, 14 aa, Homo sapiens
  CDR3 for beta chain variable domain of TCR clone 156042 (TRBV20-1, TRBJ2-1)
CSAQIGGSANEQLF

SEQ ID NO: 312085 - protein, 14 aa, Homo sapiens
  CDR3 for alpha chain variable domain of TCR clone 156043 (TRAV38-1, TRAJ40)
CALRPTSGTYKYIF

SEQ ID NO: 312086 - protein, 12 aa, Homo sapiens
  CDR3 for beta chain variable domain of TCR clone 156043 (TRBV20-1, TRBJ2-5)
CSAPRSQETQYF

SEQ ID NO: 312087 - protein, 14 aa, Homo sapiens
  CDR3 for alpha chain variable domain of TCR clone 156044 (TRAV26-1, TRAJ21)
CIVRPPNNFNKFYF

SEQ ID NO: 312088 - protein, 14 aa, Homo sapiens
  CDR3 for beta chain variable domain of TCR clone 156044 (TRBV11-3, TRBJ2-1)
CASSATTSGSIQFF

SEQ ID NO: 312089 - protein, 11 aa, Homo sapiens
  CDR3 for alpha chain variable domain of TCR clone 156045 (TRAV3, TRAJ21)
CAVGNFNKFNF

SEQ ID NO: 312090 - protein, 16 aa, Homo sapiens
  CDR3 for beta chain variable domain of TCR clone 156045 (TRBV19, TRBJ2-1)
CASSKAGPSSYNEQFF

SEQ ID NO: 312091 - protein, 14 aa, Homo sapiens
  CDR3 for alpha chain variable domain of TCR clone 156046 (TRAV1-1, TRAJ27)
CAVIYNTNAVKSTF

SEQ ID NO: 312092 - protein, 13 aa, Homo sapiens
  CDR3 for beta chain variable domain of TCR clone 156046 (TRBV12-5, TRBJ1-2)
CASGVRTGNGYTF

SEQ ID NO: 312093 - protein, 17 aa, Homo sapiens
  CDR3 for alpha chain variable domain of TCR clone 156047 (TRAV13-1, TRAJ52)
CAASSGAGGTSYGKLKF

SEQ ID NO: 312094 - protein, 17 aa, Homo sapiens
  CDR3 for beta chain variable domain of TCR clone 156047 (TRBV11-2, TRBJ2-1)
CASSLYPPGVEYNEQFF

SEQ ID NO: 312095 - protein, 11 aa, Homo sapiens
  CDR3 for alpha chain variable domain of TCR clone 156048 (TRAV21, TRAJ31)
CAVRNNARLMF

SEQ ID NO: 312096 - protein, 15 aa, Homo sapiens
  CDR3 for beta chain variable domain of TCR clone 156048 (TRBV20-1, TRBJ2-7)
CGARDRVSGMDEQYF

SEQ ID NO: 312097 - protein, 14 aa, Homo sapiens
  CDR3 for alpha chain variable domain of TCR clone 156049 (TRAV38-1, TRAJ40)
CALRPTSGTYKYIF

SEQ ID NO: 312098 - protein, 15 aa, Homo sapiens
  CDR3 for beta chain variable domain of TCR clone 156049 (TRBV10-3, TRBJ1-5)
CAISEVGGREQPQHF

SEQ ID NO: 312099 - protein, 15 aa, Homo sapiens
  CDR3 for alpha chain variable domain of TCR clone 156050 (TRAV29/DV5, TRAJ30)
CSVLLCSKREDKIIF

SEQ ID NO: 312100 - protein, 15 aa, Homo sapiens
  CDR3 for beta chain variable domain of TCR clone 156050 (TRBV15, TRBJ2-7)
CATSSGTTTTYEQYF

SEQ ID NO: 312101 - protein, 13 aa, Homo sapiens
  CDR3 for alpha chain variable domain of TCR clone 156051 (TRAV23/DV6, TRAJ34)
CSASIEGTDKLIF

SEQ ID NO: 312102 - protein, 15 aa, Homo sapiens
  CDR3 for beta chain variable domain of TCR clone 156051 (TRBV20-1, TRBJ2-7)
CSAESGTSGAYEQYF

SEQ ID NO: 312103 - protein, 12 aa, Homo sapiens
  CDR3 for alpha chain variable domain of TCR clone 156052 (TRAV21, TRAJ33)
CAKMDSNYQLIW

SEQ ID NO: 312104 - protein, 14 aa, Homo sapiens
  CDR3 for beta chain variable domain of TCR clone 156052 (TRBV5-5, TRBJ1-5)
CASSGQGVDQPQHF

SEQ ID NO: 312105 - protein, 12 aa, Homo sapiens
  CDR3 for alpha chain variable domain of TCR clone 156053 (TRAV12-3, TRAJ17)
CAMTLTGNKLTF

SEQ ID NO: 312106 - protein, 13 aa, Homo sapiens
  CDR3 for beta chain variable domain of TCR clone 156053 (TRBV7-9, TRBJ2-7)
CASSAGLQYEQYF

SEQ ID NO: 312107 - protein, 12 aa, Homo sapiens
  CDR3 for alpha chain variable domain of TCR clone 156054 (TRAV27, TRAJ24)
CAGEGSWGKFQF

SEQ ID NO: 312108 - protein, 15 aa, Homo sapiens
  CDR3 for beta chain variable domain of TCR clone 156054 (TRBV11-3, TRBJ2-3)
CASLKDGREGDTQYF

SEQ ID NO: 312109 - protein, 14 aa, Homo sapiens
  CDR3 for alpha chain variable domain of TCR clone 156055 (TRAV35, TRAJ33)
CWPRGRDSNHQLIW

SEQ ID NO: 312110 - protein, 11 aa, Homo sapiens
  CDR3 for beta chain variable domain of TCR clone 156055 (TRBV10-3, TRBJ2-7)
CAISEGLEQYF

SEQ ID NO: 312111 - protein, 12 aa, Homo sapiens
  CDR3 for alpha chain variable domain of TCR clone 156056 (TRAV12-3, TRAJ21)
CALVNNFNKFYF

SEQ ID NO: 312112 - protein, 16 aa, Homo sapiens
  CDR3 for beta chain variable domain of TCR clone 156056 (TRBV7-9, TRBJ1-2)
CASSLAPLRAAYGYTF

SEQ ID NO: 312113 - protein, 11 aa, Homo sapiens
  CDR3 for alpha chain variable domain of TCR clone 156057 (TRAV23/DV6, TRAJ48)
CAPRLGEKLTF

SEQ ID NO: 312114 - protein, 14 aa, Homo sapiens
  CDR3 for beta chain variable domain of TCR clone 156057 (TRBV29-1, TRBJ1-3)
CSVADRVVGNTIYF

SEQ ID NO: 312115 - protein, 16 aa, Homo sapiens
  CDR3 for alpha chain variable domain of TCR clone 156058 (TRAV3, TRAJ10)
CAVRDMRAGGGNKLTY

SEQ ID NO: 312116 - protein, 17 aa, Homo sapiens
  CDR3 for beta chain variable domain of TCR clone 156058 (TRBV13, TRBJ2-3)
CASSLSRVAGGRNTQYF

SEQ ID NO: 312117 - protein, 18 aa, Homo sapiens
  CDR3 for alpha chain variable domain of TCR clone 156059 (TRAV12-3, TRAJ52)
CAMSRTNAGGTSYGKLTF

SEQ ID NO: 312118 - protein, 14 aa, Homo sapiens
  CDR3 for beta chain variable domain of TCR clone 156059 (TRBV5-1, TRBJ2-3)
CASSLFGPTDTQYF

SEQ ID NO: 312119 - protein, 13 aa, Homo sapiens
  CDR3 for alpha chain variable domain of TCR clone 156060 (TRAV27, TRAJ6)
CAGGTRGSYIPTF

SEQ ID NO: 312120 - protein, 14 aa, Homo sapiens
  CDR3 for beta chain variable domain of TCR clone 156060 (TRBV12-4, TRBJ1-1)
CASRQTGLNTEAFF

SEQ ID NO: 312121 - protein, 11 aa, Homo sapiens
  CDR3 for alpha chain variable domain of TCR clone 156061 (TRAV1-2, TRAJ20)
CAVANDYKLSF

SEQ ID NO: 312122 - protein, 18 aa, Homo sapiens
  CDR3 for beta chain variable domain of TCR clone 156061 (TRBV20-1, TRBJ2-6)
CSAETTPTHGSGADGLTF

SEQ ID NO: 312123 - protein, 14 aa, Homo sapiens
  CDR3 for alpha chain variable domain of TCR clone 156062 (TRAV12-2, TRAJ45)
CAVYSGGGADGLTF

SEQ ID NO: 312124 - protein, 13 aa, Homo sapiens
  CDR3 for beta chain variable domain of TCR clone 156062 (TRBV7-3, TRBJ1-1)
CASSQDWGAEAFF

SEQ ID NO: 312125 - protein, 13 aa, Homo sapiens
  CDR3 for alpha chain variable domain of TCR clone 156063 (TRAV20, TRAJ34)
CAVQAGNTDKLIF

SEQ ID NO: 312126 - protein, 17 aa, Homo sapiens
  CDR3 for beta chain variable domain of TCR clone 156063 (TRBV7-3, TRBJ2-3)
RASSLMKRMRGADTQYF

SEQ ID NO: 312127 - protein, 15 aa, Homo sapiens
  CDR3 for alpha chain variable domain of TCR clone 156064 (TRAV21, TRAJ53)
CATLNSGGSNYKLTF

SEQ ID NO: 312128 - protein, 18 aa, Homo sapiens
  CDR3 for beta chain variable domain of TCR clone 156064 (TRBV5-1, TRBJ1-6)
CASSVGGGYGERNSPLHF

SEQ ID NO: 312129 - protein, 15 aa, Homo sapiens
  CDR3 for alpha chain variable domain of TCR clone 156065 (TRAV12-3, TRAJ11)
CAMSEENSGYSTLTF

SEQ ID NO: 312130 - protein, 13 aa, Homo sapiens
  CDR3 for beta chain variable domain of TCR clone 156065 (TRBV7-3, TRBJ1-1)
CASSQDWGAEAFF

SEQ ID NO: 312131 - protein, 15 aa, Homo sapiens
  CDR3 for alpha chain variable domain of TCR clone 156066 (TRAV17, TRAJ57)
CATGPSQGGSEKLVF

SEQ ID NO: 312132 - protein, 15 aa, Homo sapiens
  CDR3 for beta chain variable domain of TCR clone 156066 (TRBV29-1, TRBJ1-2)
CSVVLEAGSNYGYTF

SEQ ID NO: 312133 - protein, 14 aa, Homo sapiens
  CDR3 for alpha chain variable domain of TCR clone 156067 (TRAV12-2, TRAJ13)
CAVKKTGGYKKVTF

SEQ ID NO: 312134 - protein, 13 aa, Homo sapiens
  CDR3 for beta chain variable domain of TCR clone 156067 (TRBV12-4, TRBJ1-2)
CTSVPAVSYGYTF

SEQ ID NO: 312135 - protein, 18 aa, Homo sapiens
  CDR3 for alpha chain variable domain of TCR clone 156068 (TRAV2, TRAJ32)
CCLLLCFHYGGATNKIIF

SEQ ID NO: 312136 - protein, 16 aa, Homo sapiens
  CDR3 for beta chain variable domain of TCR clone 156068 (TRBV7-9, TRBJ2-7)
CASSYPDREGGYEQYF

SEQ ID NO: 312137 - protein, 16 aa, Homo sapiens
  CDR3 for alpha chain variable domain of TCR clone 156069 (TRAV12-3, TRAJ53)
CAVSPGSGGSNYKLTF

SEQ ID NO: 312138 - protein, 11 aa, Homo sapiens
  CDR3 for beta chain variable domain of TCR clone 156069 (TRBV29-1, TRBJ2-5)
CSEERTGTQYF

SEQ ID NO: 312139 - protein, 13 aa, Homo sapiens
  CDR3 for alpha chain variable domain of TCR clone 156070 (TRAV13-1, TRAJ21)
CAASIYNFNKFYF

SEQ ID NO: 312140 - protein, 13 aa, Homo sapiens
  CDR3 for beta chain variable domain of TCR clone 156070 (TRBV9, TRBJ2-1)
CASSPSGGNEQFF

SEQ ID NO: 312141 - protein, 15 aa, Homo sapiens
  CDR3 for alpha chain variable domain of TCR clone 156071 (TRAV1-2, TRAJ30)
CAVRPHGNRDDKIIF

SEQ ID NO: 312142 - protein, 15 aa, Homo sapiens
  CDR3 for beta chain variable domain of TCR clone 156071 (TRBV19, TRBJ1-1)
CASTSGQIQNTEAFF

SEQ ID NO: 312143 - protein, 14 aa, Homo sapiens
  CDR3 for alpha chain variable domain of TCR clone 156072 (TRAV8-4, TRAJ13)
CAVTLSGGYQKVTF

SEQ ID NO: 312144 - protein, 15 aa, Homo sapiens
  CDR3 for beta chain variable domain of TCR clone 156072 (TRBV7-2, TRBJ2-3)
CASSSTGLETDTQYF

SEQ ID NO: 312145 - protein, 11 aa, Homo sapiens
  CDR3 for alpha chain variable domain of TCR clone 156073 (TRAV2, TRAJ13)
CASVCYQKVTF

SEQ ID NO: 312146 - protein, 15 aa, Homo sapiens
  CDR3 for beta chain variable domain of TCR clone 156073 (TRBV7-9, TRBJ1-6)
CASSSPGRGNSPLHF

SEQ ID NO: 312147 - protein, 16 aa, Homo sapiens
  CDR3 for alpha chain variable domain of TCR clone 156074 (TRAV17, TRAJ28)
CATASVPGAGGYQLTF

SEQ ID NO: 312148 - protein, 11 aa, Homo sapiens
  CDR3 for beta chain variable domain of TCR clone 156074 (TRBV7-9, TRBJ2-5)
CASSLGETQYF

SEQ ID NO: 312149 - protein, 14 aa, Homo sapiens
  CDR3 for alpha chain variable domain of TCR clone 156075 (TRAV26-1, TRAJ44)
CIVRSTGTASKLTF

SEQ ID NO: 312150 - protein, 15 aa, Homo sapiens
  CDR3 for beta chain variable domain of TCR clone 156075 (TRBV7-2, TRBJ1-6)
CASSLGPDRGMPLHF

SEQ ID NO: 312151 - protein, 15 aa, Homo sapiens
  CDR3 for alpha chain variable domain of TCR clone 156076 (TRAV13-1, TRAJ27)
CAARELNTNAGKSTF

SEQ ID NO: 312152 - protein, 14 aa, Homo sapiens
  CDR3 for beta chain variable domain of TCR clone 156076 (TRBV2, TRBJ2-5)
CASSEVLAQETQYF

SEQ ID NO: 312153 - protein, 13 aa, Homo sapiens
  CDR3 for alpha chain variable domain of TCR clone 156077 (TRAV13-2, TRAJ48)
CAEMYFGNEKLNF

SEQ ID NO: 312154 - protein, 15 aa, Homo sapiens
  CDR3 for beta chain variable domain of TCR clone 156077 (TRBV7-9, TRBJ1-6)
CASSSPGRGNSPLHF

SEQ ID NO: 312155 - protein, 14 aa, Homo sapiens
  CDR3 for alpha chain variable domain of TCR clone 156078 (TRAV12-2, TRAJ13)
CAVKKTGGYQKVTL

SEQ ID NO: 312156 - protein, 15 aa, Homo sapiens
  CDR3 for beta chain variable domain of TCR clone 156078 (TRBV27, TRBJ2-1)
CARRNGGGSSNEQFF

SEQ ID NO: 312157 - protein, 15 aa, Homo sapiens
  CDR3 for alpha chain variable domain of TCR clone 156079 (TRAV25, TRAJ53)
CPTSNSGGSNYKLTF

SEQ ID NO: 312158 - protein, 16 aa, Homo sapiens
  CDR3 for beta chain variable domain of TCR clone 156079 (TRBV4-3, TRBJ2-1)
CASSPALDRGVNEQFF

SEQ ID NO: 312159 - protein, 11 aa, Homo sapiens
  CDR3 for alpha chain variable domain of TCR clone 156080 (TRAV2, TRAJ13)
CASGGYQKVTF

SEQ ID NO: 312160 - protein, 18 aa, Homo sapiens
  CDR3 for beta chain variable domain of TCR clone 156080 (TRBV11-2, TRBJ2-3)
CARSLGGASRGAPNTQYF

SEQ ID NO: 312161 - protein, 12 aa, Homo sapiens
  CDR3 for alpha chain variable domain of TCR clone 156081 (TRAV13-1, TRAJ21)
CAAKEGFNKFYF

SEQ ID NO: 312162 - protein, 13 aa, Homo sapiens
  CDR3 for beta chain variable domain of TCR clone 156081 (TRBV7-9, TRBJ2-1)
CASSLGTVNEHFF

SEQ ID NO: 312163 - protein, 13 aa, Homo sapiens
  CDR3 for alpha chain variable domain of TCR clone 156082 (TRAV26-1, TRAJ29)
CIVRRSGNTPLVF

SEQ ID NO: 312164 - protein, 15 aa, Homo sapiens
  CDR3 for beta chain variable domain of TCR clone 156082 (TRBV11-2, TRBJ2-7)
CSSLAPTGVNYEQYF

SEQ ID NO: 312165 - protein, 12 aa, Homo sapiens
  CDR3 for alpha chain variable domain of TCR clone 156083 (TRAV12-2, TRAJ21)
CAVRDNSNKFYF

SEQ ID NO: 312166 - protein, 14 aa, Homo sapiens
  CDR3 for beta chain variable domain of TCR clone 156083 (TRBV28, TRBJ2-1)
CASSYYTAYNEQFF

SEQ ID NO: 312167 - protein, 12 aa, Homo sapiens
  CDR3 for alpha chain variable domain of TCR clone 156084 (TRAV2, TRAJ31)
CAVEDNNARLMF

SEQ ID NO: 312168 - protein, 16 aa, Homo sapiens
  CDR3 for beta chain variable domain of TCR clone 156084 (TRBV10-3, TRBJ2-1)
CAISGVGDVGGGEQFV

SEQ ID NO: 312169 - protein, 18 aa, Homo sapiens
  CDR3 for alpha chain variable domain of TCR clone 156085 (TRAV12-3, TRAJ52)
CALSVGGAGGTSCGKLTF

SEQ ID NO: 312170 - protein, 15 aa, Homo sapiens
  CDR3 for beta chain variable domain of TCR clone 156085 (TRBV27, TRBJ1-6)
CASSFDRGLGSPLHF

SEQ ID NO: 312171 - protein, 16 aa, Homo sapiens
  CDR3 for alpha chain variable domain of TCR clone 156086 (TRAV36/DV7, TRAJ33)
WRPGNKVQDSNYQLIW

SEQ ID NO: 312172 - protein, 15 aa, Homo sapiens
  CDR3 for beta chain variable domain of TCR clone 156086 (TRBV7-9, TRBJ1-5)
CASSQGHQTNQPQHF

SEQ ID NO: 312173 - protein, 15 aa, Homo sapiens
  CDR3 for alpha chain variable domain of TCR clone 156087 (TRAV25, TRAJ53)
CAATGGGGSNYKLTF

SEQ ID NO: 312174 - protein, 16 aa, Homo sapiens
  CDR3 for beta chain variable domain of TCR clone 156087 (TRBV4-3, TRBJ2-1)
CASSPALDRGVNEQFF

SEQ ID NO: 312175 - protein, 14 aa, Homo sapiens
  CDR3 for alpha chain variable domain of TCR clone 156088 (TRAV12-3, TRAJ42)
CAMNYGGSQGNLIF

SEQ ID NO: 312176 - protein, 13 aa, Homo sapiens
  CDR3 for beta chain variable domain of TCR clone 156088 (TRBV20-1, TRBJ2-2)
CSASAAGTGGLFF

SEQ ID NO: 312177 - protein, 12 aa, Homo sapiens
  CDR3 for alpha chain variable domain of TCR clone 156089 (TRAV8-3, TRAJ40)
CAVTSGTYKYIF

SEQ ID NO: 312178 - protein, 15 aa, Homo sapiens
  CDR3 for beta chain variable domain of TCR clone 156089 (TRBV2, TRBJ2-1)
CASSELAGSYNEQFF

SEQ ID NO: 312179 - protein, 16 aa, Homo sapiens
  CDR3 for alpha chain variable domain of TCR clone 156090 (TRAV38-1, TRAJ32)
CAFMKGGGGATNKPIF

SEQ ID NO: 312180 - protein, 13 aa, Homo sapiens
  CDR3 for beta chain variable domain of TCR clone 156090 (TRBV29-1, TRBJ2-1)
CSVEGGRVNEQFF

SEQ ID NO: 312181 - protein, 14 aa, Homo sapiens
  CDR3 for alpha chain variable domain of TCR clone 156091 (TRAV38-1, TRAJ40)
CALRPTSGTYKYIF

SEQ ID NO: 312182 - protein, 15 aa, Homo sapiens
  CDR3 for beta chain variable domain of TCR clone 156091 (TRBV27, TRBJ1-4)
CASSAQQDLNEKLFF

SEQ ID NO: 312183 - protein, 15 aa, Homo sapiens
  CDR3 for alpha chain variable domain of TCR clone 156092 (TRAV13-1, TRAJ49)
CAASTEGNTGNQLYF

SEQ ID NO: 312184 - protein, 12 aa, Homo sapiens
  CDR3 for beta chain variable domain of TCR clone 156092 (TRBV11-2, TRBJ2-2)
CASSLGGGELFF

SEQ ID NO: 312185 - protein, 15 aa, Homo sapiens
  CDR3 for alpha chain variable domain of TCR clone 156093 (TRAV25, TRAJ53)
CPTSNSGGSNYKLTC

SEQ ID NO: 312186 - protein, 14 aa, Homo sapiens
  CDR3 for beta chain variable domain of TCR clone 156093 (TRBV11-2, TRBJ2-3)
CASSRLARTDTQYF

SEQ ID NO: 312187 - protein, 12 aa, Homo sapiens
  CDR3 for alpha chain variable domain of TCR clone 156094 (TRAV12-2, TRAJ10)
WGVTGGGNKLTF

SEQ ID NO: 312188 - protein, 16 aa, Homo sapiens
  CDR3 for beta chain variable domain of TCR clone 156094 (TRBV24-1, TRBJ2-3)
CATSDRRQDITDTQYF

SEQ ID NO: 312189 - protein, 17 aa, Homo sapiens
  CDR3 for alpha chain variable domain of TCR clone 156095 (TRAV8-6, TRAJ58)
CAVSSWVGETSGSRLTF

SEQ ID NO: 312190 - protein, 17 aa, Homo sapiens
  CDR3 for beta chain variable domain of TCR clone 156095 (TRBV28, TRBJ2-2)
CTSVPAVCRGTPGSCFF

SEQ ID NO: 312191 - protein, 13 aa, Homo sapiens
  CDR3 for alpha chain variable domain of TCR clone 156096 (TRAV3, TRAJ21)
CAVREPDFNKFYF

SEQ ID NO: 312192 - protein, 15 aa, Homo sapiens
  CDR3 for beta chain variable domain of TCR clone 156096 (TRBV6-3, TRBJ2-2)
CASSFLATLTGELFF

SEQ ID NO: 312193 - protein, 13 aa, Homo sapiens
  CDR3 for alpha chain variable domain of TCR clone 156097 (TRAV36/DV7, TRAJ49)
CAGDSNTGIQFYF

SEQ ID NO: 312194 - protein, 14 aa, Homo sapiens
  CDR3 for beta chain variable domain of TCR clone 156097 (TRBV18, TRBJ2-7)
CASSPRGGAYEQYF

SEQ ID NO: 312195 - protein, 14 aa, Homo sapiens
  CDR3 for alpha chain variable domain of TCR clone 156098 (TRAV12-2, TRAJ4)
CAEDLSGGYNKLIF

SEQ ID NO: 312196 - protein, 13 aa, Homo sapiens
  CDR3 for beta chain variable domain of TCR clone 156098 (TRBV7-9, TRBJ1-2)
CASSLKQSYGYTF

SEQ ID NO: 312197 - protein, 11 aa, Homo sapiens
  CDR3 for alpha chain variable domain of TCR clone 156099 (TRAV21, TRAJ33)
WAVLSNYQLIW

SEQ ID NO: 312198 - protein, 15 aa, Homo sapiens
  CDR3 for beta chain variable domain of TCR clone 156099 (TRBV11-2, TRBJ2-7)
CASSLMVGGSYEQYF

SEQ ID NO: 312199 - protein, 13 aa, Homo sapiens
  CDR3 for alpha chain variable domain of TCR clone 156100 (TRAV12-1, TRAJ13)
CVVTSGGYQKVTF

SEQ ID NO: 312200 - protein, 14 aa, Homo sapiens
  CDR3 for beta chain variable domain of TCR clone 156100 (TRBV27, TRBJ2-7)
CSSSLAGLSYEQYF

SEQ ID NO: 312201 - protein, 20 aa, Homo sapiens
  CDR3 for alpha chain variable domain of TCR clone 156101 (TRAV27, TRAJ41)
CAVRTQIPDIQNPDPAVFQL

SEQ ID NO: 312202 - protein, 16 aa, Homo sapiens
  CDR3 for beta chain variable domain of TCR clone 156101 (TRBV5-1, TRBJ2-3)
CASSLGLAVYTDTQYF

SEQ ID NO: 312203 - protein, 12 aa, Homo sapiens
  CDR3 for alpha chain variable domain of TCR clone 156102 (TRAV12-2, TRAJ21)
CAVNRNFNKFYF

SEQ ID NO: 312204 - protein, 14 aa, Homo sapiens
  CDR3 for beta chain variable domain of TCR clone 156102 (TRBV19, TRBJ2-7)
CASTVQGRPYEQYF

SEQ ID NO: 312205 - protein, 13 aa, Homo sapiens
  CDR3 for alpha chain variable domain of TCR clone 156103 (TRAV12-3, TRAJ13)
CAMSSGGYQKVTF

SEQ ID NO: 312206 - protein, 13 aa, Homo sapiens
  CDR3 for beta chain variable domain of TCR clone 156103 (TRBV7-2, TRBJ2-2)
CASSSVRAGELFF

SEQ ID NO: 312207 - protein, 17 aa, Homo sapiens
  CDR3 for alpha chain variable domain of TCR clone 156104 (TRAV3, TRAJ38)
CAVRDCLNAGNNRKLFW

SEQ ID NO: 312208 - protein, 15 aa, Homo sapiens
  CDR3 for beta chain variable domain of TCR clone 156104 (TRBV27, TRBJ2-1)
CASSNGGGSSNEQFF

SEQ ID NO: 312209 - protein, 13 aa, Homo sapiens
  CDR3 for alpha chain variable domain of TCR clone 156105 (TRAV20, TRAJ37)
CAGCSSNTGKLIF

SEQ ID NO: 312210 - protein, 10 aa, Homo sapiens
  CDR3 for beta chain variable domain of TCR clone 156105 (TRBV12-4, TRBJ2-3)
CQHRQDTQYF

SEQ ID NO: 312211 - protein, 14 aa, Homo sapiens
  CDR3 for alpha chain variable domain of TCR clone 156106 (TRAV4, TRAJ32)
CLVNYGGATNKLIF

SEQ ID NO: 312212 - protein, 14 aa, Homo sapiens
  CDR3 for beta chain variable domain of TCR clone 156106 (TRBV15, TRBJ2-5)
CAASGGRRTETQYF

SEQ ID NO: 312213 - protein, 15 aa, Homo sapiens
  CDR3 for alpha chain variable domain of TCR clone 156107 (TRAV8-2, TRAJ39)
CVVSDPGNAGNMLTF

SEQ ID NO: 312214 - protein, 16 aa, Homo sapiens
  CDR3 for beta chain variable domain of TCR clone 156107 (TRBV7-2, TRBJ2-3)
CASSESGPTGTDTQYF

SEQ ID NO: 312215 - protein, 13 aa, Homo sapiens
  CDR3 for alpha chain variable domain of TCR clone 156108 (TRAV12-3, TRAJ9)
CAMSADGGFKTIF

SEQ ID NO: 312216 - protein, 14 aa, Homo sapiens
  CDR3 for beta chain variable domain of TCR clone 156108 (TRBV7-6, TRBJ2-3)
CASSLGTVTDTQYF

SEQ ID NO: 312217 - protein, 14 aa, Homo sapiens
  CDR3 for alpha chain variable domain of TCR clone 156109 (TRAV13-1, TRAJ16)
CAAAYFFRWPEAAL

SEQ ID NO: 312218 - protein, 13 aa, Homo sapiens
  CDR3 for beta chain variable domain of TCR clone 156109 (TRBV7-2, TRBJ2-2)
CASSLAVTGELFF

SEQ ID NO: 312219 - protein, 14 aa, Homo sapiens
  CDR3 for alpha chain variable domain of TCR clone 156110 (TRAV12-2, TRAJ13)
CAVKKTGGYQKVTF

SEQ ID NO: 312220 - protein, 15 aa, Homo sapiens
  CDR3 for beta chain variable domain of TCR clone 156110 (TRBV27, TRBJ2-2)
CQQFSGTSSHRGAVF

SEQ ID NO: 312221 - protein, 14 aa, Homo sapiens
  CDR3 for alpha chain variable domain of TCR clone 156111 (TRAV8-2, TRAJ4)
CVVSPSGGYIKLIF

SEQ ID NO: 312222 - protein, 15 aa, Homo sapiens
  CDR3 for beta chain variable domain of TCR clone 156111 (TRBV2, TRBJ2-1)
CASSELAGSYNEQFF

SEQ ID NO: 312223 - protein, 18 aa, Homo sapiens
  CDR3 for alpha chain variable domain of TCR clone 156112 (TRAV21, TRAJ52)
CAVRPSPAGGTSYGKLTF

SEQ ID NO: 312224 - protein, 16 aa, Homo sapiens
  CDR3 for beta chain variable domain of TCR clone 156112 (TRBV19, TRBJ2-2)
CASSFPGQGLAGELFF

SEQ ID NO: 312225 - protein, 14 aa, Homo sapiens
  CDR3 for alpha chain variable domain of TCR clone 156113 (TRAV12-1, TRAJ8)
CVVNSNTGFQKLVF

SEQ ID NO: 312226 - protein, 16 aa, Homo sapiens
  CDR3 for beta chain variable domain of TCR clone 156113 (TRBV20-1, TRBJ2-2)
CSARDDSVGLTGELFF

SEQ ID NO: 312227 - protein, 16 aa, Homo sapiens
  CDR3 for alpha chain variable domain of TCR clone 156114 (TRAV1-1, TRAJ29)
CAVRSTRNSGNTPLVF

SEQ ID NO: 312228 - protein, 11 aa, Homo sapiens
  CDR3 for beta chain variable domain of TCR clone 156114 (TRBV11-2, TRBJ2-2)
CASSLPGELFF

SEQ ID NO: 312229 - protein, 16 aa, Homo sapiens
  CDR3 for alpha chain variable domain of TCR clone 156115 (TRAV30, TRAJ24)
CGTDIVDADSWGKFQF

SEQ ID NO: 312230 - protein, 19 aa, Homo sapiens
  CDR3 for beta chain variable domain of TCR clone 156115 (TRBV25-1, TRBJ2-2)
CAILVYRVDRGRKTGELFF

SEQ ID NO: 312231 - protein, 14 aa, Homo sapiens
  CDR3 for alpha chain variable domain of TCR clone 156116 (TRAV2, TRAJ9)
CAEEDRSGGFKTIF

SEQ ID NO: 312232 - protein, 16 aa, Homo sapiens
  CDR3 for beta chain variable domain of TCR clone 156116 (TRBV5-1, TRBJ2-2)
CASSSRTGGRTGELFF

SEQ ID NO: 312233 - protein, 13 aa, Homo sapiens
  CDR3 for alpha chain variable domain of TCR clone 156117 (TRAV2, TRAJ24)
CDLQLTAGGNSSL

SEQ ID NO: 312234 - protein, 16 aa, Homo sapiens
  CDR3 for beta chain variable domain of TCR clone 156117 (TRBV12-4, TRBJ1-5)
CASSRPVGGSNQPQHF

SEQ ID NO: 312235 - protein, 12 aa, Homo sapiens
  CDR3 for alpha chain variable domain of TCR clone 156118 (TRAV17, TRAJ57)
CATDGGSEKLVF

SEQ ID NO: 312236 - protein, 13 aa, Homo sapiens
  CDR3 for beta chain variable domain of TCR clone 156118 (TRBV7-9, TRBJ2-7)
CASSFAGAYEQNF

SEQ ID NO: 312237 - protein, 12 aa, Homo sapiens
  CDR3 for alpha chain variable domain of TCR clone 156119 (TRAV2, TRAJ9)
CAVGAGGFKTIF

SEQ ID NO: 312238 - protein, 13 aa, Homo sapiens
  CDR3 for beta chain variable domain of TCR clone 156119 (TRBV4-2, TRBJ1-1)
CASSQAGNTEAVF

SEQ ID NO: 312239 - protein, 14 aa, Homo sapiens
  CDR3 for alpha chain variable domain of TCR clone 156120 (TRAV2, TRAJ12)
CAMDAMDSSYKLIF

SEQ ID NO: 312240 - protein, 13 aa, Homo sapiens
  CDR3 for beta chain variable domain of TCR clone 156120 (TRBV19, TRBJ2-1)
CASKVGAGGEQFF

SEQ ID NO: 312241 - protein, 11 aa, Homo sapiens
  CDR3 for alpha chain variable domain of TCR clone 156121 (TRAV12-1, TRAJ15)
CVVNAGTALIF

SEQ ID NO: 312242 - protein, 16 aa, Homo sapiens
  CDR3 for beta chain variable domain of TCR clone 156121 (TRBV28, TRBJ2-1)
SASSSRVRDSYNEQFF

SEQ ID NO: 312243 - protein, 15 aa, Homo sapiens
  CDR3 for alpha chain variable domain of TCR clone 156122 (TRAV4, TRAJ10)
CLVGDGSGGGNKLTF

SEQ ID NO: 312244 - protein, 15 aa, Homo sapiens
  CDR3 for beta chain variable domain of TCR clone 156122 (TRBV28, TRBJ1-3)
CASSMGWASGNTIYF

SEQ ID NO: 312245 - protein, 11 aa, Homo sapiens
  CDR3 for alpha chain variable domain of TCR clone 156123 (TRAV12-3, TRAJ27)
CAMANAGESTF

SEQ ID NO: 312246 - protein, 12 aa, Homo sapiens
  CDR3 for beta chain variable domain of TCR clone 156123 (TRBV12-4, TRBJ2-7)
CASSLGGYEQYF

SEQ ID NO: 312247 - protein, 11 aa, Homo sapiens
  CDR3 for alpha chain variable domain of TCR clone 156124 (TRAV1-2, TRAJ40)
CAVPGTYKYIF

SEQ ID NO: 312248 - protein, 15 aa, Homo sapiens
  CDR3 for beta chain variable domain of TCR clone 156124 (TRBV5-7, TRBJ1-5)
CASSYGKLWAQPQHF

SEQ ID NO: 312249 - protein, 16 aa, Homo sapiens
  CDR3 for alpha chain variable domain of TCR clone 156125 (TRAV3, TRAJ10)
CAVRDMRAGGGNKLTF

SEQ ID NO: 312250 - protein, 14 aa, Homo sapiens
  CDR3 for beta chain variable domain of TCR clone 156125 (TRBV25-1, TRBJ1-1)
SASTHLGGNTEALF

SEQ ID NO: 312251 - protein, 15 aa, Homo sapiens
  CDR3 for alpha chain variable domain of TCR clone 156126 (TRAV8-3, TRAJ41)
CAVGSNSNSGYALNF

SEQ ID NO: 312252 - protein, 17 aa, Homo sapiens
  CDR3 for beta chain variable domain of TCR clone 156126 (TRBV25-1, TRBJ2-1)
YASSAYGQGRGVYEQFF

SEQ ID NO: 312253 - protein, 15 aa, Homo sapiens
  CDR3 for alpha chain variable domain of TCR clone 156127 (TRAV17, TRAJ6)
CATDLPSGGSYIPTF

SEQ ID NO: 312254 - protein, 15 aa, Homo sapiens
  CDR3 for beta chain variable domain of TCR clone 156127 (TRBV4-1, TRBJ1-4)
CASSDTGGTNEKLFF

SEQ ID NO: 312255 - protein, 19 aa, Homo sapiens
  CDR3 for alpha chain variable domain of TCR clone 156128 (TRAV26-1, TRAJ52)
CIVRAHRNAGGTSYGKLTF

SEQ ID NO: 312256 - protein, 13 aa, Homo sapiens
  CDR3 for beta chain variable domain of TCR clone 156128 (TRBV20-1, TRBJ1-6)
CSATLGVGSPLHF

SEQ ID NO: 312257 - protein, 16 aa, Homo sapiens
  CDR3 for alpha chain variable domain of TCR clone 156129 (TRAV30, TRAJ24)
CGTEIVDADSWGKFQF

SEQ ID NO: 312258 - protein, 18 aa, Homo sapiens
  CDR3 for beta chain variable domain of TCR clone 156129 (TRBV11-2, TRBJ2-3)
CASSLGGASRGASNTQYF

SEQ ID NO: 312259 - protein, 16 aa, Homo sapiens
  CDR3 for alpha chain variable domain of TCR clone 156130 (TRAV20, TRAJ53)
CAVQAESGGSNYKLTF

SEQ ID NO: 312260 - protein, 14 aa, Homo sapiens
  CDR3 for beta chain variable domain of TCR clone 156130 (TRBV7-2, TRBJ1-1)
CASSFLTGTTEAFF

SEQ ID NO: 312261 - protein, 13 aa, Homo sapiens
  CDR3 for alpha chain variable domain of TCR clone 156131 (TRAV22, TRAJ29)
CAVGGSGNTPLVF

SEQ ID NO: 312262 - protein, 15 aa, Homo sapiens
  CDR3 for beta chain variable domain of TCR clone 156131 (TRBV13, TRBJ2-1)
CASSLLSGLNNEQFF

SEQ ID NO: 312263 - protein, 10 aa, Homo sapiens
  CDR3 for alpha chain variable domain of TCR clone 156132 (TRAV30, TRAJ48)
CGIGNEKLTF

SEQ ID NO: 312264 - protein, 13 aa, Homo sapiens
  CDR3 for beta chain variable domain of TCR clone 156132 (TRBV2, TRBJ1-1)
CASSVLMNIEAFF

SEQ ID NO: 312265 - protein, 13 aa, Homo sapiens
  CDR3 for alpha chain variable domain of TCR clone 156133 (TRAV30, TRAJ6)
FGFIEGGSYIPTF

SEQ ID NO: 312266 - protein, 13 aa, Homo sapiens
  CDR3 for beta chain variable domain of TCR clone 156133 (TRBV5-4, TRBJ2-5)
CASSPVSQETQYF

SEQ ID NO: 312267 - protein, 12 aa, Homo sapiens
  CDR3 for alpha chain variable domain of TCR clone 156134 (TRAV20, TRAJ39)
CAVGNAGNMLTF

SEQ ID NO: 312268 - protein, 14 aa, Homo sapiens
  CDR3 for beta chain variable domain of TCR clone 156134 (TRBV12-5, TRBJ2-5)
CASGSRTHQETQYF

SEQ ID NO: 312269 - protein, 12 aa, Homo sapiens
  CDR3 for alpha chain variable domain of TCR clone 156135 (TRAV21, TRAJ11)
CAATSGYSTLTF

SEQ ID NO: 312270 - protein, 13 aa, Homo sapiens
  CDR3 for beta chain variable domain of TCR clone 156135 (TRBV27, TRBJ1-4)
CASSLMGDEKLFF

SEQ ID NO: 312271 - protein, 11 aa, Homo sapiens
  CDR3 for alpha chain variable domain of TCR clone 156136 (TRAV1-2, TRAJ20)
CAVANDYKLSF

SEQ ID NO: 312272 - protein, 14 aa, Homo sapiens
  CDR3 for beta chain variable domain of TCR clone 156136 (TRBV4-2, TRBJ2-1)
CASGLDRAYNEQFF

SEQ ID NO: 312273 - protein, 14 aa, Homo sapiens
  CDR3 for alpha chain variable domain of TCR clone 156137 (TRAV17, TRAJ40)
CATALTSGTYKYIF

SEQ ID NO: 312274 - protein, 14 aa, Homo sapiens
  CDR3 for beta chain variable domain of TCR clone 156137 (TRBV7-2, TRBJ2-7)
CASRSQGAAYEQYF

SEQ ID NO: 312275 - protein, 18 aa, Homo sapiens
  CDR3 for alpha chain variable domain of TCR clone 156138 (TRAV4, TRAJ26)
CCVLLPRGPHNYGQNFVF

SEQ ID NO: 312276 - protein, 17 aa, Homo sapiens
  CDR3 for beta chain variable domain of TCR clone 156138 (TRBV24-1, TRBJ2-1)
CATSDVWTSGTYNEQFF

SEQ ID NO: 312277 - protein, 14 aa, Homo sapiens
  CDR3 for alpha chain variable domain of TCR clone 156139 (TRAV12-3, TRAJ10)
SHLPLTGGGNKLTF

SEQ ID NO: 312278 - protein, 16 aa, Homo sapiens
  CDR3 for beta chain variable domain of TCR clone 156139 (TRBV27, TRBJ2-5)
CASSSVAGRGGETQYF

SEQ ID NO: 312279 - protein, 17 aa, Homo sapiens
  CDR3 for alpha chain variable domain of TCR clone 156140 (TRAV23/DV6, TRAJ57)
CAASSTLSQGGSEKLVF

SEQ ID NO: 312280 - protein, 14 aa, Homo sapiens
  CDR3 for beta chain variable domain of TCR clone 156140 (TRBV25-1, TRBJ1-1)
CASTHQGGNTEAFF

SEQ ID NO: 312281 - protein, 14 aa, Homo sapiens
  CDR3 for alpha chain variable domain of TCR clone 156141 (TRAV35, TRAJ22)
CAGLRPGSARQLTF

SEQ ID NO: 312282 - protein, 15 aa, Homo sapiens
  CDR3 for beta chain variable domain of TCR clone 156141 (TRBV2, TRBJ2-5)
CASSGTVAAGETQYF

SEQ ID NO: 312283 - protein, 14 aa, Homo sapiens
  CDR3 for alpha chain variable domain of TCR clone 156142 (TRAV8-4, TRAJ54)
CAVSEVLGAQKLVF

SEQ ID NO: 312284 - protein, 15 aa, Homo sapiens
  CDR3 for beta chain variable domain of TCR clone 156142 (TRBV20-1, TRBJ2-5)
CSASGTSGGGETQYF

SEQ ID NO: 312285 - protein, 15 aa, Homo sapiens
  CDR3 for alpha chain variable domain of TCR clone 156143 (TRAV25, TRAJ10)
CAGPLLTGGGNKLTF

SEQ ID NO: 312286 - protein, 15 aa, Homo sapiens
  CDR3 for beta chain variable domain of TCR clone 156143 (TRBV5-1, TRBJ2-3)
CASSSTSGSTDTQYF

SEQ ID NO: 312287 - protein, 15 aa, Homo sapiens
  CDR3 for alpha chain variable domain of TCR clone 156144 (TRAV36/DV7, TRAJ21)
CALKFYFGSGTKLNV

SEQ ID NO: 312288 - protein, 13 aa, Homo sapiens
  CDR3 for beta chain variable domain of TCR clone 156144 (TRBV11-3, TRBJ2-5)
CASSSGLQETLYF

SEQ ID NO: 312289 - protein, 14 aa, Homo sapiens
  CDR3 for alpha chain variable domain of TCR clone 156145 (TRAV19, TRAJ20)
CALSGAPRGRTTTS

SEQ ID NO: 312290 - protein, 15 aa, Homo sapiens
  CDR3 for beta chain variable domain of TCR clone 156145 (TRBV10-3, TRBJ2-3)
CAISLTSGGTDTQYF

SEQ ID NO: 312291 - protein, 13 aa, Homo sapiens
  CDR3 for alpha chain variable domain of TCR clone 156146 (TRAV12-3, TRAJ7)
CAMTPYGNNRLPF

SEQ ID NO: 312292 - protein, 16 aa, Homo sapiens
  CDR3 for beta chain variable domain of TCR clone 156146 (TRBV20-1, TRBJ1-4)
CSARPYGGEPNEKLFF

SEQ ID NO: 312293 - protein, 16 aa, Homo sapiens
  CDR3 for alpha chain variable domain of TCR clone 156147 (TRAV3, TRAJ21)
CAVRDIERGNFNKFYF

SEQ ID NO: 312294 - protein, 12 aa, Homo sapiens
  CDR3 for beta chain variable domain of TCR clone 156147 (TRBV7-3, TRBJ2-1)
CASSFINNEQFF

SEQ ID NO: 312295 - protein, 17 aa, Homo sapiens
  CDR3 for alpha chain variable domain of TCR clone 156148 (TRAV36/DV7, TRAJ52)
CAVAQRAGGTSYGKLTF

SEQ ID NO: 312296 - protein, 15 aa, Homo sapiens
  CDR3 for beta chain variable domain of TCR clone 156148 (TRBV9, TRBJ2-1)
CASSLAGSSYNEQFF

SEQ ID NO: 312297 - protein, 11 aa, Homo sapiens
  CDR3 for alpha chain variable domain of TCR clone 156149 (TRAV17, TRAJ9)
CGFTGGFKTIF

SEQ ID NO: 312298 - protein, 13 aa, Homo sapiens
  CDR3 for beta chain variable domain of TCR clone 156149 (TRBV6-3, TRBJ1-4)
CASSPGPGEKLFF

SEQ ID NO: 312299 - protein, 14 aa, Homo sapiens
  CDR3 for alpha chain variable domain of TCR clone 156150 (TRAV8-6, TRAJ49)
CAVSDPNTGNQFYF

SEQ ID NO: 312300 - protein, 14 aa, Homo sapiens
  CDR3 for beta chain variable domain of TCR clone 156150 (TRBV13, TRBJ2-5)
CASSLGPRGETQYF

SEQ ID NO: 312301 - protein, 11 aa, Homo sapiens
  CDR3 for alpha chain variable domain of TCR clone 156151 (TRAV2, TRAJ13)
CASGGYQRVTF

SEQ ID NO: 312302 - protein, 12 aa, Homo sapiens
  CDR3 for beta chain variable domain of TCR clone 156151 (TRBV14, TRBJ1-1)
CASSQLKGLAFF

SEQ ID NO: 312303 - protein, 12 aa, Homo sapiens
  CDR3 for alpha chain variable domain of TCR clone 156152 (TRAV13-1, TRAJ53)
AASGSSNYKLTF

SEQ ID NO: 312304 - protein, 13 aa, Homo sapiens
  CDR3 for beta chain variable domain of TCR clone 156152 (TRBV6-1, TRBJ1-1)
CASSRQGNTEAFF

SEQ ID NO: 312305 - protein, 15 aa, Homo sapiens
  CDR3 for alpha chain variable domain of TCR clone 156153 (TRAV8-3, TRAJ45)
CALSYSGVGADGLTF

SEQ ID NO: 312306 - protein, 13 aa, Homo sapiens
  CDR3 for beta chain variable domain of TCR clone 156153 (TRBV10-3, TRBJ2-7)
CASKLAVNYEQYF

SEQ ID NO: 312307 - protein, 14 aa, Homo sapiens
  CDR3 for alpha chain variable domain of TCR clone 156154 (TRAV3, TRAJ32)
CCERRAGATKKLIF

SEQ ID NO: 312308 - protein, 12 aa, Homo sapiens
  CDR3 for beta chain variable domain of TCR clone 156154 (TRBV6-1, TRBJ2-7)
CASSDYSYEQYF

SEQ ID NO: 312309 - protein, 11 aa, Homo sapiens
  CDR3 for alpha chain variable domain of TCR clone 156155 (TRAV3, TRAJ21)
CAVCNFNKFYF

SEQ ID NO: 312310 - protein, 12 aa, Homo sapiens
  CDR3 for beta chain variable domain of TCR clone 156155 (TRBV11-2, TRBJ2-1)
CASSPGNNEQFF

SEQ ID NO: 312311 - protein, 14 aa, Homo sapiens
  CDR3 for alpha chain variable domain of TCR clone 156156 (TRAV1-2, TRAJ8)
CAVREDTGFRKLVF

SEQ ID NO: 312312 - protein, 14 aa, Homo sapiens
  CDR3 for beta chain variable domain of TCR clone 156156 (TRBV29-1, TRBJ1-4)
CSVTGTGGNEKLFF

SEQ ID NO: 312313 - protein, 21 aa, Homo sapiens
  CDR3 for alpha chain variable domain of TCR clone 156157 (TRAV8-4, TRAJ47)
HLTKPSAHMSDAAERGNKLVC

SEQ ID NO: 312314 - protein, 14 aa, Homo sapiens
  CDR3 for beta chain variable domain of TCR clone 156157 (TRBV7-9, TRBJ2-1)
CASSPRDSLYEQFF

SEQ ID NO: 312315 - protein, 12 aa, Homo sapiens
  CDR3 for alpha chain variable domain of TCR clone 156158 (TRAV2, TRAJ33)
CAFMDSNYQLIW

SEQ ID NO: 312316 - protein, 18 aa, Homo sapiens
  CDR3 for beta chain variable domain of TCR clone 156158 (TRBV25-1, TRBJ1-2)
CASSGLQNGQGLIFGYTF

SEQ ID NO: 312317 - protein, 14 aa, Homo sapiens
  CDR3 for alpha chain variable domain of TCR clone 156159 (TRAV26-1, TRAJ11)
CIVPLYSGYSTLTF

SEQ ID NO: 312318 - protein, 15 aa, Homo sapiens
  CDR3 for beta chain variable domain of TCR clone 156159 (TRBV9, TRBJ1-6)
CASSVAGTGDSPLHF

SEQ ID NO: 312319 - protein, 12 aa, Homo sapiens
  CDR3 for alpha chain variable domain of TCR clone 156160 (TRAV13-1, TRAJ15)
CAASQAGSALIF

SEQ ID NO: 312320 - protein, 14 aa, Homo sapiens
  CDR3 for beta chain variable domain of TCR clone 156160 (TRBV19, TRBJ2-1)
CASPTFVLSGEQFF

SEQ ID NO: 312321 - protein, 15 aa, Homo sapiens
  CDR3 for alpha chain variable domain of TCR clone 156161 (TRAV27, TRAJ38)
CAARRNAGDNRKLIW

SEQ ID NO: 312322 - protein, 14 aa, Homo sapiens
  CDR3 for beta chain variable domain of TCR clone 156161 (TRBV5-1, TRBJ2-7)
CASSRGESLYEQYF

SEQ ID NO: 312323 - protein, 12 aa, Homo sapiens
  CDR3 for alpha chain variable domain of TCR clone 156162 (TRAV21, TRAJ13)
PGPSGCYQKVTF

SEQ ID NO: 312324 - protein, 13 aa, Homo sapiens
  CDR3 for beta chain variable domain of TCR clone 156162 (TRBV7-9, TRBJ1-2)
CASSLKQNYGYTF

SEQ ID NO: 312325 - protein, 14 aa, Homo sapiens
  CDR3 for alpha chain variable domain of TCR clone 156163 (TRAV3, TRAJ36)
CAVRDGTGANNLFF

SEQ ID NO: 312326 - protein, 16 aa, Homo sapiens
  CDR3 for beta chain variable domain of TCR clone 156163 (TRBV20-1, TRBJ2-6)
CSAREGPGVGANVLIF

SEQ ID NO: 312327 - protein, 13 aa, Homo sapiens
  CDR3 for alpha chain variable domain of TCR clone 156164 (TRAV38-1, TRAJ20)
SAFMKPNDYKLSF

SEQ ID NO: 312328 - protein, 16 aa, Homo sapiens
  CDR3 for beta chain variable domain of TCR clone 156164 (TRBV12-4, TRBJ1-1)
CASSHRRDRQGTEAFF

SEQ ID NO: 312329 - protein, 15 aa, Homo sapiens
  CDR3 for alpha chain variable domain of TCR clone 156165 (TRAV8-3, TRAJ6)
CAVGSAGGGSYIPTF

SEQ ID NO: 312330 - protein, 14 aa, Homo sapiens
  CDR3 for beta chain variable domain of TCR clone 156165 (TRBV7-2, TRBJ2-7)
CASSPKTSFYEQYF

SEQ ID NO: 312331 - protein, 15 aa, Homo sapiens
  CDR3 for alpha chain variable domain of TCR clone 156166 (TRAV8-4, TRAJ13)
CAVSDWSGGYQKVTF

SEQ ID NO: 312332 - protein, 14 aa, Homo sapiens
  CDR3 for beta chain variable domain of TCR clone 156166 (TRBV7-2, TRBJ2-7)
CASSSISGFSEQYF

SEQ ID NO: 312333 - protein, 15 aa, Homo sapiens
  CDR3 for alpha chain variable domain of TCR clone 156167 (TRAV12-3, TRAJ6)
CAMSATTGGRYIPTF

SEQ ID NO: 312334 - protein, 15 aa, Homo sapiens
  CDR3 for beta chain variable domain of TCR clone 156167 (TRBV5-1, TRBJ2-7)
CASSLNGGPAREQYF

SEQ ID NO: 312335 - protein, 12 aa, Homo sapiens
  CDR3 for alpha chain variable domain of TCR clone 156168 (TRAV8-4, TRAJ43)
CAVSVNNNDMRF

SEQ ID NO: 312336 - protein, 15 aa, Homo sapiens
  CDR3 for beta chain variable domain of TCR clone 156168 (TRBV19, TRBJ2-7)
CASSPAGSGEALRYF

SEQ ID NO: 312337 - protein, 12 aa, Homo sapiens
  CDR3 for alpha chain variable domain of TCR clone 156169 (TRAV12-3, TRAJ41)
CEMSYSGYALNF

SEQ ID NO: 312338 - protein, 13 aa, Homo sapiens
  CDR3 for beta chain variable domain of TCR clone 156169 (TRBV7-3, TRBJ2-1)
CASSLDSYNEQFF

SEQ ID NO: 312339 - protein, 17 aa, Homo sapiens
  CDR3 for alpha chain variable domain of TCR clone 156170 (TRAV35, TRAJ28)
CAGLQVYSGAGRYQPTF

SEQ ID NO: 312340 - protein, 15 aa, Homo sapiens
  CDR3 for beta chain variable domain of TCR clone 156170 (TRBV2, TRBJ1-2)
CASSEIGGANYGYTF

SEQ ID NO: 312341 - protein, 14 aa, Homo sapiens
  CDR3 for alpha chain variable domain of TCR clone 156171 (TRAV12-2, TRAJ40)
CAVKIPSGTYKYIF

SEQ ID NO: 312342 - protein, 14 aa, Homo sapiens
  CDR3 for beta chain variable domain of TCR clone 156171 (TRBV7-9, TRBJ1-2)
CASSRQGADYGYTF

SEQ ID NO: 312343 - protein, 16 aa, Homo sapiens
  CDR3 for alpha chain variable domain of TCR clone 156172 (TRAV3, TRAJ37)
CAVRGKGPGNTGKLIF

SEQ ID NO: 312344 - protein, 17 aa, Homo sapiens
  CDR3 for beta chain variable domain of TCR clone 156172 (TRBV4-2, TRBJ1-1)
CASTQFGGGSGNTEAFF

SEQ ID NO: 312345 - protein, 15 aa, Homo sapiens
  CDR3 for alpha chain variable domain of TCR clone 156173 (TRAV3, TRAJ40)
CAVGDVTSGTYKYIF

SEQ ID NO: 312346 - protein, 13 aa, Homo sapiens
  CDR3 for beta chain variable domain of TCR clone 156173 (TRBV7-9, TRBJ1-2)
CASSLKQNYGYTF

SEQ ID NO: 312347 - protein, 17 aa, Homo sapiens
  CDR3 for alpha chain variable domain of TCR clone 156174 (TRAV8-4, TRAJ11)
CAVSDRGEKSGYSTLTF

SEQ ID NO: 312348 - protein, 14 aa, Homo sapiens
  CDR3 for beta chain variable domain of TCR clone 156174 (TRBV20-1, TRBJ2-1)
CSPNDEASYNEQFF

SEQ ID NO: 312349 - protein, 17 aa, Homo sapiens
  CDR3 for alpha chain variable domain of TCR clone 156175 (TRAV13-1, TRAJ52)
CAASSGAGGTSYGKLTF

SEQ ID NO: 312350 - protein, 15 aa, Homo sapiens
  CDR3 for beta chain variable domain of TCR clone 156175 (TRBV2, TRBJ2-1)
CASSELAVSYNEQFF

SEQ ID NO: 312351 - protein, 17 aa, Homo sapiens
  CDR3 for alpha chain variable domain of TCR clone 156176 (TRAV13-1, TRAJ42)
CAASELWRKPRKSHLWK

SEQ ID NO: 312352 - protein, 12 aa, Homo sapiens
  CDR3 for beta chain variable domain of TCR clone 156176 (TRBV7-9, TRBJ1-5)
CASSSDQAPQHF

SEQ ID NO: 312353 - protein, 13 aa, Homo sapiens
  CDR3 for alpha chain variable domain of TCR clone 156177 (TRAV8-6, TRAJ21)
CAVSPSSLNNFYF

SEQ ID NO: 312354 - protein, 13 aa, Homo sapiens
  CDR3 for beta chain variable domain of TCR clone 156177 (TRBV29-1, TRBJ2-1)
CSVEGGRVNEQFF

SEQ ID NO: 312355 - protein, 13 aa, Homo sapiens
  CDR3 for alpha chain variable domain of TCR clone 156178 (TRAV12-1, TRAJ29)
CVVRNSGNTPLVV

SEQ ID NO: 312356 - protein, 14 aa, Homo sapiens
  CDR3 for beta chain variable domain of TCR clone 156178 (TRBV7-2, TRBJ2-7)
CASRSQGAAYEQYF

SEQ ID NO: 312357 - protein, 12 aa, Homo sapiens
  CDR3 for alpha chain variable domain of TCR clone 156179 (TRAV3, TRAJ27)
CAVRDKSGKSTF

SEQ ID NO: 312358 - protein, 13 aa, Homo sapiens
  CDR3 for beta chain variable domain of TCR clone 156179 (TRBV6-5, TRBJ2-5)
CASSPQGGETQYF

SEQ ID NO: 312359 - protein, 12 aa, Homo sapiens
  CDR3 for alpha chain variable domain of TCR clone 156180 (TRAV27, TRAJ35)
CAGADFGNVLHC

SEQ ID NO: 312360 - protein, 13 aa, Homo sapiens
  CDR3 for beta chain variable domain of TCR clone 156180 (TRBV20-1, TRBJ1-1)
CSAPLGGGTEAFF

SEQ ID NO: 312361 - protein, 12 aa, Homo sapiens
  CDR3 for alpha chain variable domain of TCR clone 156181 (TRAV12-3, TRAJ17)
CAMTLLGNKLTF

SEQ ID NO: 312362 - protein, 15 aa, Homo sapiens
  CDR3 for beta chain variable domain of TCR clone 156181 (TRBV20-1, TRBJ2-7)
CSARDRVSGMDEQYF

SEQ ID NO: 312363 - protein, 17 aa, Homo sapiens
  CDR3 for alpha chain variable domain of TCR clone 156182 (TRAV3, TRAJ6)
CAVRDGPRAGGSYIPTF

SEQ ID NO: 312364 - protein, 15 aa, Homo sapiens
  CDR3 for beta chain variable domain of TCR clone 156182 (TRBV10-2, TRBJ2-7)
CASWNRGQATYEQYF

SEQ ID NO: 312365 - protein, 20 aa, Homo sapiens
  CDR3 for alpha chain variable domain of TCR clone 156183 (TRAV14/DV4, TRAJ22)
CAMREGPFSISSGSSRQLTF

SEQ ID NO: 312366 - protein, 13 aa, Homo sapiens
  CDR3 for beta chain variable domain of TCR clone 156183 (TRBV4-2, TRBJ2-3)
CASSQDWQHTQYF

SEQ ID NO: 312367 - protein, 14 aa, Homo sapiens
  CDR3 for alpha chain variable domain of TCR clone 156184 (TRAV2, TRAJ9)
CAVEDRSGGFKTIF

SEQ ID NO: 312368 - protein, 15 aa, Homo sapiens
  CDR3 for beta chain variable domain of TCR clone 156184 (TRBV25-1, TRBJ1-4)
CASSGSGTGIEKLFF

SEQ ID NO: 312369 - protein, 12 aa, Homo sapiens
  CDR3 for alpha chain variable domain of TCR clone 156185 (TRAV1-1, TRAJ20)
CAVREDDYKLSF

SEQ ID NO: 312370 - protein, 16 aa, Homo sapiens
  CDR3 for beta chain variable domain of TCR clone 156185 (TRBV19, TRBJ2-2)
CASRSPGTGATGELFF

SEQ ID NO: 312371 - protein, 14 aa, Homo sapiens
  CDR3 for alpha chain variable domain of TCR clone 156186 (TRAV9-2, TRAJ39)
CALHIYNAGNMLTF

SEQ ID NO: 312372 - protein, 11 aa, Homo sapiens
  CDR3 for beta chain variable domain of TCR clone 156186 (TRBV19, TRBJ1-1)
CASSIGSEAFF

SEQ ID NO: 312373 - protein, 13 aa, Homo sapiens
  CDR3 for alpha chain variable domain of TCR clone 156187 (TRAV8-3, TRAJ44)
CAVVPGTASKLTF

SEQ ID NO: 312374 - protein, 17 aa, Homo sapiens
  CDR3 for beta chain variable domain of TCR clone 156187 (TRBV9, TRBJ1-2)
CASSRGAADSPSYGYTF

SEQ ID NO: 312375 - protein, 13 aa, Homo sapiens
  CDR3 for alpha chain variable domain of TCR clone 156188 (TRAV1-2, TRAJ9)
CAALNTGGFKTIF

SEQ ID NO: 312376 - protein, 17 aa, Homo sapiens
  CDR3 for beta chain variable domain of TCR clone 156188 (TRBV7-3, TRBJ2-3)
CASSLMKGMRGADTQYF

SEQ ID NO: 312377 - protein, 16 aa, Homo sapiens
  CDR3 for alpha chain variable domain of TCR clone 156189 (TRAV16, TRAJ4)
CALSRMFSGGYNKLIF

SEQ ID NO: 312378 - protein, 15 aa, Homo sapiens
  CDR3 for beta chain variable domain of TCR clone 156189 (TRBV7-9, TRBJ2-2)
CASRPADRDTGELFF

SEQ ID NO: 312379 - protein, 11 aa, Homo sapiens
  CDR3 for alpha chain variable domain of TCR clone 156190 (TRAV13-2, TRAJ39)
CAENAGNMLTF

SEQ ID NO: 312380 - protein, 15 aa, Homo sapiens
  CDR3 for beta chain variable domain of TCR clone 156190 (TRBV10-2, TRBJ2-6)
CASSEQGTGANVLTF

SEQ ID NO: 312381 - protein, 15 aa, Homo sapiens
  CDR3 for alpha chain variable domain of TCR clone 156191 (TRAV27, TRAJ50)
CAGRERGTSYDKVIF

SEQ ID NO: 312382 - protein, 16 aa, Homo sapiens
  CDR3 for beta chain variable domain of TCR clone 156191 (TRBV10-3, TRBJ1-5)
CAISDQVGATNQPQHF

SEQ ID NO: 312383 - protein, 13 aa, Homo sapiens
  CDR3 for alpha chain variable domain of TCR clone 156192 (TRAV2, TRAJ40)
CAVAASGTYKCIF

SEQ ID NO: 312384 - protein, 14 aa, Homo sapiens
  CDR3 for beta chain variable domain of TCR clone 156192 (TRBV19, TRBJ2-1)
CASPTFVLSGEQFF

SEQ ID NO: 312385 - protein, 13 aa, Homo sapiens
  CDR3 for alpha chain variable domain of TCR clone 156193 (TRAV12-2, TRAJ11)
CAVPNSGYSTLTF

SEQ ID NO: 312386 - protein, 15 aa, Homo sapiens
  CDR3 for beta chain variable domain of TCR clone 156193 (TRBV7-3, TRBJ2-1)
CASSPTGGGEVEQFF

SEQ ID NO: 312387 - protein, 14 aa, Homo sapiens
  CDR3 for alpha chain variable domain of TCR clone 156194 (TRAV12-3, TRAJ10)
SHLPLTGGGNKLTF

SEQ ID NO: 312388 - protein, 14 aa, Homo sapiens
  CDR3 for beta chain variable domain of TCR clone 156194 (TRBV10-3, TRBJ2-1)
CAISDRGGVTEQFF

SEQ ID NO: 312389 - protein, 12 aa, Homo sapiens
  CDR3 for alpha chain variable domain of TCR clone 156195 (TRAV12-2, TRAJ47)
CAAKKYGNKLVF

SEQ ID NO: 312390 - protein, 16 aa, Homo sapiens
  CDR3 for beta chain variable domain of TCR clone 156195 (TRBV7-2, TRBJ2-5)
CASSPFPTGGEETQYF

SEQ ID NO: 312391 - protein, 17 aa, Homo sapiens
  CDR3 for alpha chain variable domain of TCR clone 156196 (TRAV3, TRAJ6)
CAVRDGPRAGGSCIPTF

SEQ ID NO: 312392 - protein, 18 aa, Homo sapiens
  CDR3 for beta chain variable domain of TCR clone 156196 (TRBV7-9, TRBJ2-7)
CASSLTTSGSRTWYEQYF

SEQ ID NO: 312393 - protein, 15 aa, Homo sapiens
  CDR3 for alpha chain variable domain of TCR clone 156197 (TRAV12-1, TRAJ44)
CVVFVNTGTASKLTF

SEQ ID NO: 312394 - protein, 17 aa, Homo sapiens
  CDR3 for beta chain variable domain of TCR clone 156197 (TRBV7-8, TRBJ2-6)
CASSAGTGGAGVNVLTF

SEQ ID NO: 312395 - protein, 15 aa, Homo sapiens
  CDR3 for alpha chain variable domain of TCR clone 156198 (TRAV23/DV6, TRAJ18)
CAARYRGSTLGRLYF

SEQ ID NO: 312396 - protein, 17 aa, Homo sapiens
  CDR3 for beta chain variable domain of TCR clone 156198 (TRBV12-4, TRBJ2-2)
CQQNGTSGGPEHRGAVF

SEQ ID NO: 312397 - protein, 16 aa, Homo sapiens
  CDR3 for alpha chain variable domain of TCR clone 156199 (TRAV30, TRAJ24)
CGTEIVDADSWGKFQF

SEQ ID NO: 312398 - protein, 15 aa, Homo sapiens
  CDR3 for beta chain variable domain of TCR clone 156199 (TRBV5-1, TRBJ2-3)
CASSVTAGSTDTQYF

SEQ ID NO: 312399 - protein, 11 aa, Homo sapiens
  CDR3 for alpha chain variable domain of TCR clone 156200 (TRAV12-3, TRAJ27)
CAMANAGKSTF

SEQ ID NO: 312400 - protein, 15 aa, Homo sapiens
  CDR3 for beta chain variable domain of TCR clone 156200 (TRBV24-1, TRBJ2-1)
CATRASGGQYNEQFF

SEQ ID NO: 312401 - protein, 12 aa, Homo sapiens
  CDR3 for alpha chain variable domain of TCR clone 156201 (TRAV13-2, TRAJ23)
CAERHRGGKLIF

SEQ ID NO: 312402 - protein, 12 aa, Homo sapiens
  CDR3 for beta chain variable domain of TCR clone 156201 (TRBV12-4, TRBJ1-3)
CASSFSGNTIYF

SEQ ID NO: 312403 - protein, 14 aa, Homo sapiens
  CDR3 for alpha chain variable domain of TCR clone 156202 (TRAV8-4, TRAJ8)
CAVSGDTGFQKLVF

SEQ ID NO: 312404 - protein, 12 aa, Homo sapiens
  CDR3 for beta chain variable domain of TCR clone 156202 (TRBV14, TRBJ1-1)
CASRPYETEAFF

SEQ ID NO: 312405 - protein, 13 aa, Homo sapiens
  CDR3 for alpha chain variable domain of TCR clone 156203 (TRAV12-1, TRAJ33)
CGDAPDSNYQLIW

SEQ ID NO: 312406 - protein, 12 aa, Homo sapiens
  CDR3 for beta chain variable domain of TCR clone 156203 (TRBV11-2, TRBJ2-2)
CASSLGGGDLFF

SEQ ID NO: 312407 - protein, 13 aa, Homo sapiens
  CDR3 for alpha chain variable domain of TCR clone 156204 (TRAV3, TRAJ27)
CAVRPLGVGKSTF

SEQ ID NO: 312408 - protein, 17 aa, Homo sapiens
  CDR3 for beta chain variable domain of TCR clone 156204 (TRBV27, TRBJ2-6)
CASSLTGFASGANVLTF

SEQ ID NO: 312409 - protein, 10 aa, Homo sapiens
  CDR3 for alpha chain variable domain of TCR clone 156205 (TRAV23/DV6, TRAJ45)
TGGGADGLTF

SEQ ID NO: 312410 - protein, 15 aa, Homo sapiens
  CDR3 for beta chain variable domain of TCR clone 156205 (TRBV3-1, TRBJ2-1)
CASSQDYTPRGEQFF

SEQ ID NO: 312411 - protein, 16 aa, Homo sapiens
  CDR3 for alpha chain variable domain of TCR clone 156206 (TRAV20, TRAJ28)
CAVRDPSGAGSYQLTF

SEQ ID NO: 312412 - protein, 13 aa, Homo sapiens
  CDR3 for beta chain variable domain of TCR clone 156206 (TRBV12-4, TRBJ1-2)
CASSSGLTVISTF

SEQ ID NO: 312413 - protein, 13 aa, Homo sapiens
  CDR3 for alpha chain variable domain of TCR clone 156207 (TRAV4, TRAJ13)
CLVESGGYQKVTF

SEQ ID NO: 312414 - protein, 15 aa, Homo sapiens
  CDR3 for beta chain variable domain of TCR clone 156207 (TRBV20-1, TRBJ2-7)
CSARDRVSGMDEQYF

SEQ ID NO: 312415 - protein, 10 aa, Homo sapiens
  CDR3 for alpha chain variable domain of TCR clone 156208 (TRAV36/DV7, TRAJ48)
CAVGNEKLTF

SEQ ID NO: 312416 - protein, 11 aa, Homo sapiens
  CDR3 for beta chain variable domain of TCR clone 156208 (TRBV6-9, TRBJ2-7)
CARRVAGEQYF

SEQ ID NO: 312417 - protein, 14 aa, Homo sapiens
  CDR3 for alpha chain variable domain of TCR clone 156209 (TRAV1-2, TRAJ16)
CAVNRFSDGQKLLF

SEQ ID NO: 312418 - protein, 17 aa, Homo sapiens
  CDR3 for beta chain variable domain of TCR clone 156209 (TRBV7-9, TRBJ2-5)
CASSTKLAAGGQETQYF

SEQ ID NO: 312419 - protein, 15 aa, Homo sapiens
  CDR3 for alpha chain variable domain of TCR clone 156210 (TRAV12-2, TRAJ50)
CAVNGLETSYDKVIF

SEQ ID NO: 312420 - protein, 12 aa, Homo sapiens
  CDR3 for beta chain variable domain of TCR clone 156210 (TRBV12-4, TRBJ2-7)
CASSLGGYEQYF

SEQ ID NO: 312421 - protein, 15 aa, Homo sapiens
  CDR3 for alpha chain variable domain of TCR clone 156211 (TRAV3, TRAJ17)
CAVRDTGAACNKLTF

SEQ ID NO: 312422 - protein, 14 aa, Homo sapiens
  CDR3 for beta chain variable domain of TCR clone 156211 (TRBV6-3, TRBJ1-1)
CASSNLLPGAEAFF

SEQ ID NO: 312423 - protein, 14 aa, Homo sapiens
  CDR3 for alpha chain variable domain of TCR clone 156212 (TRAV1-2, TRAJ16)
CAVNRFSDGQKLLF

SEQ ID NO: 312424 - protein, 16 aa, Homo sapiens
  CDR3 for beta chain variable domain of TCR clone 156212 (TRBV2, TRBJ1-2)
CASTRGDSGFNYGDTF

SEQ ID NO: 312425 - protein, 17 aa, Homo sapiens
  CDR3 for alpha chain variable domain of TCR clone 156213 (TRAV26-1, TRAJ37)
CIVRVITVSSNTGKIIF

SEQ ID NO: 312426 - protein, 11 aa, Homo sapiens
  CDR3 for beta chain variable domain of TCR clone 156213 (TRBV29-1, TRBJ2-5)
CSEDRTGTQYF

SEQ ID NO: 312427 - protein, 14 aa, Homo sapiens
  CDR3 for alpha chain variable domain of TCR clone 156214 (TRAV12-3, TRAJ10)
SHLPLTGGGNKLSF

SEQ ID NO: 312428 - protein, 13 aa, Homo sapiens
  CDR3 for beta chain variable domain of TCR clone 156214 (TRBV7-7, TRBJ2-5)
CASSRSGQETQYF

SEQ ID NO: 312429 - protein, 13 aa, Homo sapiens
  CDR3 for alpha chain variable domain of TCR clone 156215 (TRAV12-2, TRAJ4)
CAVRSGGYNNLIF

SEQ ID NO: 312430 - protein, 15 aa, Homo sapiens
  CDR3 for beta chain variable domain of TCR clone 156215 (TRBV10-3, TRBJ2-1)
CAISDVQDRAYEQFF

SEQ ID NO: 312431 - protein, 14 aa, Homo sapiens
  CDR3 for alpha chain variable domain of TCR clone 156216 (TRAV23/DV6, TRAJ17)
CAASVQAAGNKLTF

SEQ ID NO: 312432 - protein, 18 aa, Homo sapiens
  CDR3 for beta chain variable domain of TCR clone 156216 (TRBV20-1, TRBJ2-7)
CRAGLPPRGGGSPYEQYF

SEQ ID NO: 312433 - protein, 13 aa, Homo sapiens
  CDR3 for alpha chain variable domain of TCR clone 156217 (TRAV21, TRAJ57)
CAVTHGGSEKLVV

SEQ ID NO: 312434 - protein, 16 aa, Homo sapiens
  CDR3 for beta chain variable domain of TCR clone 156217 (TRBV29-1, TRBJ2-7)
CSVEDAEDGTAYEQYF

SEQ ID NO: 312435 - protein, 15 aa, Homo sapiens
  CDR3 for alpha chain variable domain of TCR clone 156218 (TRAV2, TRAJ9)
CAVEDRGTGGFKPIF

SEQ ID NO: 312436 - protein, 16 aa, Homo sapiens
  CDR3 for beta chain variable domain of TCR clone 156218 (TRBV24-1, TRBJ2-3)
CATSDPGTGATDTQCF

SEQ ID NO: 312437 - protein, 14 aa, Homo sapiens
  CDR3 for alpha chain variable domain of TCR clone 156219 (TRAV12-2, TRAJ40)
CAVKIPSGTYKYIF

SEQ ID NO: 312438 - protein, 13 aa, Homo sapiens
  CDR3 for beta chain variable domain of TCR clone 156219 (TRBV7-3, TRBJ1-1)
CASSQDWGAETFF

SEQ ID NO: 312439 - protein, 17 aa, Homo sapiens
  CDR3 for alpha chain variable domain of TCR clone 156220 (TRAV8-2, )
CVVNIQNPDPAVYQLRD

SEQ ID NO: 312440 - protein, 14 aa, Homo sapiens
  CDR3 for beta chain variable domain of TCR clone 156220 (TRBV7-9, TRBJ2-5)
CASSLVGGEETEYF

SEQ ID NO: 312441 - protein, 13 aa, Homo sapiens
  CDR3 for alpha chain variable domain of TCR clone 156221 (TRAV8-6, TRAJ50)
CAVIKTSYDKVIF

SEQ ID NO: 312442 - protein, 13 aa, Homo sapiens
  CDR3 for beta chain variable domain of TCR clone 156221 (TRBV6-5, TRBJ2-2)
CASSLPGVGELFF

SEQ ID NO: 312443 - protein, 15 aa, Homo sapiens
  CDR3 for alpha chain variable domain of TCR clone 156222 (TRAV26-1, TRAJ37)
CIVENGSGNTGKLIF

SEQ ID NO: 312444 - protein, 13 aa, Homo sapiens
  CDR3 for beta chain variable domain of TCR clone 156222 (TRBV20-1, TRBJ1-1)
CSAGTVGNTEAFF

SEQ ID NO: 312445 - protein, 16 aa, Homo sapiens
  CDR3 for alpha chain variable domain of TCR clone 156223 (TRAV30, TRAJ49)
SAAQRVGPNTGNQFYF

SEQ ID NO: 312446 - protein, 15 aa, Homo sapiens
  CDR3 for beta chain variable domain of TCR clone 156223 (TRBV2, TRBJ2-1)
CASSELAGSCNEQFF

SEQ ID NO: 312447 - protein, 12 aa, Homo sapiens
  CDR3 for alpha chain variable domain of TCR clone 156224 (TRAV1-1, TRAJ30)
CAVRGRDDKIIF

SEQ ID NO: 312448 - protein, 15 aa, Homo sapiens
  CDR3 for beta chain variable domain of TCR clone 156224 (TRBV7-8, TRBJ1-2)
CASSLVRDGGLGYTF

SEQ ID NO: 312449 - protein, 17 aa, Homo sapiens
  CDR3 for alpha chain variable domain of TCR clone 156225 (TRAV3, TRAJ6)
CAVRDGPRAGGSYIPTF

SEQ ID NO: 312450 - protein, 16 aa, Homo sapiens
  CDR3 for beta chain variable domain of TCR clone 156225 (TRBV20-1, TRBJ2-4)
CSATSLAELAKNIQYF

SEQ ID NO: 312451 - protein, 12 aa, Homo sapiens
  CDR3 for alpha chain variable domain of TCR clone 156226 (TRAV14/DV4, TRAJ50)
CAMREGNSNVIF

SEQ ID NO: 312452 - protein, 16 aa, Homo sapiens
  CDR3 for beta chain variable domain of TCR clone 156226 (TRBV28, TRBJ2-3)
CASSLSGQTSTDTQYF

SEQ ID NO: 312453 - protein, 13 aa, Homo sapiens
  CDR3 for alpha chain variable domain of TCR clone 156227 (TRAV12-1, TRAJ13)
CVVGTGGYQKVTF

SEQ ID NO: 312454 - protein, 16 aa, Homo sapiens
  CDR3 for beta chain variable domain of TCR clone 156227 (TRBV25-1, TRBJ1-3)
CQQCSRDILSGNTIYF

SEQ ID NO: 312455 - protein, 13 aa, Homo sapiens
  CDR3 for alpha chain variable domain of TCR clone 156228 (TRAV27, TRAJ40)
CAGPPSGTYKYIF

SEQ ID NO: 312456 - protein, 14 aa, Homo sapiens
  CDR3 for beta chain variable domain of TCR clone 156228 (TRBV5-1, TRBJ2-5)
CASSLSLNQETQYF

SEQ ID NO: 312457 - protein, 17 aa, Homo sapiens
  CDR3 for alpha chain variable domain of TCR clone 156229 (TRAV3, TRAJ42)
CAVRDRDYVGSQGNLIF

SEQ ID NO: 312458 - protein, 12 aa, Homo sapiens
  CDR3 for beta chain variable domain of TCR clone 156229 (TRBV11-2, TRBJ2-1)
CASSPGTNEQFF

SEQ ID NO: 312459 - protein, 14 aa, Homo sapiens
  CDR3 for alpha chain variable domain of TCR clone 156230 (TRAV1-2, TRAJ16)
CAVYRFSDGQKLLF

SEQ ID NO: 312460 - protein, 14 aa, Homo sapiens
  CDR3 for beta chain variable domain of TCR clone 156230 (TRBV6-6, TRBJ1-5)
CASSYGPANQPQHF

SEQ ID NO: 312461 - protein, 14 aa, Homo sapiens
  CDR3 for alpha chain variable domain of TCR clone 156231 (TRAV17, TRAJ57)
CATDPQGGSEKLVF

SEQ ID NO: 312462 - protein, 12 aa, Homo sapiens
  CDR3 for beta chain variable domain of TCR clone 156231 (TRBV28, TRBJ2-6)
CAIQAGANVLTF

SEQ ID NO: 312463 - protein, 18 aa, Homo sapiens
  CDR3 for alpha chain variable domain of TCR clone 156232 (TRAV29/DV5, TRAJ52)
CAACFRGAGGTSYGKLTF

SEQ ID NO: 312464 - protein, 14 aa, Homo sapiens
  CDR3 for beta chain variable domain of TCR clone 156232 (TRBV27, TRBJ2-2)
CASRPGVNTGELFF

SEQ ID NO: 312465 - protein, 13 aa, Homo sapiens
  CDR3 for alpha chain variable domain of TCR clone 156233 (TRAV9-2, TRAJ53)
CALSGGSNYKLTF

SEQ ID NO: 312466 - protein, 14 aa, Homo sapiens
  CDR3 for beta chain variable domain of TCR clone 156233 (TRBV7-8, TRBJ2-3)
CASSLEAGTDTQYF

SEQ ID NO: 312467 - protein, 10 aa, Homo sapiens
  CDR3 for alpha chain variable domain of TCR clone 156234 (TRAV1-2, TRAJ23)
CAAWAGKLIF

SEQ ID NO: 312468 - protein, 14 aa, Homo sapiens
  CDR3 for beta chain variable domain of TCR clone 156234 (TRBV20-1, TRBJ2-7)
CSAKTGTGVYEQYF

SEQ ID NO: 312469 - protein, 15 aa, Homo sapiens
  CDR3 for alpha chain variable domain of TCR clone 156235 (TRAV12-1, TRAJ44)
CVADLPTGTASKLTF

SEQ ID NO: 312470 - protein, 17 aa, Homo sapiens
  CDR3 for beta chain variable domain of TCR clone 156235 (TRBV6-5, TRBJ2-5)
CASSPQGGETVLRARHA

SEQ ID NO: 312471 - protein, 15 aa, Homo sapiens
  CDR3 for alpha chain variable domain of TCR clone 156236 (TRAV8-4, TRAJ37)
CAVSKVPGNTGKLIF

SEQ ID NO: 312472 - protein, 12 aa, Homo sapiens
  CDR3 for beta chain variable domain of TCR clone 156236 (TRBV11-2, TRBJ2-2)
CASSLGGGELFF

SEQ ID NO: 312473 - protein, 13 aa, Homo sapiens
  CDR3 for alpha chain variable domain of TCR clone 156237 (TRAV17, TRAJ9)
CATHYTGGFKTIF

SEQ ID NO: 312474 - protein, 14 aa, Homo sapiens
  CDR3 for beta chain variable domain of TCR clone 156237 (TRBV19, TRBJ2-5)
CASSMTGQQETQYF

SEQ ID NO: 312475 - protein, 10 aa, Homo sapiens
  CDR3 for alpha chain variable domain of TCR clone 156238 (TRAV8-4, TRAJ43)
CAVSAVDMRF

SEQ ID NO: 312476 - protein, 15 aa, Homo sapiens
  CDR3 for beta chain variable domain of TCR clone 156238 (TRBV5-1, TRBJ2-3)
CASSVTSGSTDTQYF

SEQ ID NO: 312477 - protein, 13 aa, Homo sapiens
  CDR3 for alpha chain variable domain of TCR clone 156239 (TRAV1-1, TRAJ9)
CAAKNTAGFKTIF

SEQ ID NO: 312478 - protein, 13 aa, Homo sapiens
  CDR3 for beta chain variable domain of TCR clone 156239 (TRBV12-4, TRBJ1-5)
CASSPDRAQPQHF

SEQ ID NO: 312479 - protein, 16 aa, Homo sapiens
  CDR3 for alpha chain variable domain of TCR clone 156240 (TRAV30, TRAJ24)
CGTEIVDADSWGKFQF

SEQ ID NO: 312480 - protein, 11 aa, Homo sapiens
  CDR3 for beta chain variable domain of TCR clone 156240 (TRBV6-5, TRBJ1-1)
CATGTGGAAFF

SEQ ID NO: 312481 - protein, 23 aa, Homo sapiens
  CDR3 for alpha chain variable domain of TCR clone 156241 (TRAV26-1, TRAJ38)
CIADNAGNNHIQNPDPAVYQLRD

SEQ ID NO: 312482 - protein, 13 aa, Homo sapiens
  CDR3 for beta chain variable domain of TCR clone 156241 (TRBV10-3, TRBJ2-7)
CASKLAVIYEQYF

SEQ ID NO: 312483 - protein, 16 aa, Homo sapiens
  CDR3 for alpha chain variable domain of TCR clone 156242 (TRAV1-2, TRAJ10)
CAVRGVLTGGGNKLTL

SEQ ID NO: 312484 - protein, 13 aa, Homo sapiens
  CDR3 for beta chain variable domain of TCR clone 156242 (TRBV20-1, TRBJ1-6)
CSAPLGVGSPLHF

SEQ ID NO: 312485 - protein, 11 aa, Homo sapiens
  CDR3 for alpha chain variable domain of TCR clone 156243 (TRAV35, TRAJ30)
CAGPGDDKIIF

SEQ ID NO: 312486 - protein, 13 aa, Homo sapiens
  CDR3 for beta chain variable domain of TCR clone 156243 (TRBV12-4, TRBJ1-1)
CASSPGTGFEAFF

SEQ ID NO: 312487 - protein, 14 aa, Homo sapiens
  CDR3 for alpha chain variable domain of TCR clone 156244 (TRAV8-6, TRAJ54)
CALTEGRGAQKLVF

SEQ ID NO: 312488 - protein, 14 aa, Homo sapiens
  CDR3 for beta chain variable domain of TCR clone 156244 (TRBV27, TRBJ2-7)
CASSIGQGAQKQYF

SEQ ID NO: 312489 - protein, 14 aa, Homo sapiens
  CDR3 for alpha chain variable domain of TCR clone 156245 (TRAV8-3, TRAJ27)
CAGGRNTNACKSTF

SEQ ID NO: 312490 - protein, 15 aa, Homo sapiens
  CDR3 for beta chain variable domain of TCR clone 156245 (TRBV11-3, TRBJ2-5)
CASSLRGRVQETQYF

SEQ ID NO: 312491 - protein, 12 aa, Homo sapiens
  CDR3 for alpha chain variable domain of TCR clone 156246 (TRAV8-6, TRAJ43)
CAVSHNNNDMRF

SEQ ID NO: 312492 - protein, 14 aa, Homo sapiens
  CDR3 for beta chain variable domain of TCR clone 156246 (TRBV7-9, TRBJ2-5)
CASSLVGGEETQYF

SEQ ID NO: 312493 - protein, 14 aa, Homo sapiens
  CDR3 for alpha chain variable domain of TCR clone 156247 (TRAV12-1, TRAJ9)
GVVTGYTGGFKTIF

SEQ ID NO: 312494 - protein, 13 aa, Homo sapiens
  CDR3 for beta chain variable domain of TCR clone 156247 (TRBV20-1, TRBJ1-1)
CSARAGGNTEAFF

SEQ ID NO: 312495 - protein, 15 aa, Homo sapiens
  CDR3 for alpha chain variable domain of TCR clone 156248 (TRAV8-6, TRAJ10)
CAVSDQAGGGNKLTF

SEQ ID NO: 312496 - protein, 15 aa, Homo sapiens
  CDR3 for beta chain variable domain of TCR clone 156248 (TRBV7-6, TRBJ2-1)
CASSLAQNSYNEQFF

SEQ ID NO: 312497 - protein, 11 aa, Homo sapiens
  CDR3 for alpha chain variable domain of TCR clone 156249 (TRAV3, TRAJ21)
CAVGNCNKFYF

SEQ ID NO: 312498 - protein, 16 aa, Homo sapiens
  CDR3 for beta chain variable domain of TCR clone 156249 (TRBV19, TRBJ2-1)
CASSKAGPGSYNEQFF

SEQ ID NO: 312499 - protein, 13 aa, Homo sapiens
  CDR3 for alpha chain variable domain of TCR clone 156250 (TRAV8-4, TRAJ48)
CAVSLFGNEKLTF

SEQ ID NO: 312500 - protein, 16 aa, Homo sapiens
  CDR3 for beta chain variable domain of TCR clone 156250 (TRBV18, TRBJ1-5)
CASSPRTGGGNQPQHF

SEQ ID NO: 312501 - protein, 13 aa, Homo sapiens
  CDR3 for alpha chain variable domain of TCR clone 156251 (TRAV12-3, TRAJ33)
CAMSVNSNYQLIW

SEQ ID NO: 312502 - protein, 14 aa, Homo sapiens
  CDR3 for beta chain variable domain of TCR clone 156251 (TRBV7-6, TRBJ2-1)
CASSLGGGADEQFF

SEQ ID NO: 312503 - protein, 17 aa, Homo sapiens
  CDR3 for alpha chain variable domain of TCR clone 156252 (TRAV3, TRAJ6)
CAVRDGPRAGGSYIPTF

SEQ ID NO: 312504 - protein, 14 aa, Homo sapiens
  CDR3 for beta chain variable domain of TCR clone 156252 (TRBV28, TRBJ2-1)
CASSPGEGGNEQFF

SEQ ID NO: 312505 - protein, 11 aa, Homo sapiens
  CDR3 for alpha chain variable domain of TCR clone 156253 (TRAV13-1, TRAJ6)
CATLGSYIPTS

SEQ ID NO: 312506 - protein, 12 aa, Homo sapiens
  CDR3 for beta chain variable domain of TCR clone 156253 (TRBV11-2, TRBJ2-1)
CASSPGNNEQFF

SEQ ID NO: 312507 - protein, 12 aa, Homo sapiens
  CDR3 for alpha chain variable domain of TCR clone 156254 (TRAV1-1, TRAJ8)
CAGGKGFQKLVF

SEQ ID NO: 312508 - protein, 13 aa, Homo sapiens
  CDR3 for beta chain variable domain of TCR clone 156254 (TRBV19, TRBJ1-2)
CASSQGQVYGYTF

SEQ ID NO: 312509 - protein, 14 aa, Homo sapiens
  CDR3 for alpha chain variable domain of TCR clone 156255 (TRAV12-1, TRAJ42)
CVVIYGGSQGNLIF

SEQ ID NO: 312510 - protein, 17 aa, Homo sapiens
  CDR3 for beta chain variable domain of TCR clone 156255 (TRBV13, TRBJ2-3)
CASSLSRVAGGRNTQYF

SEQ ID NO: 312511 - protein, 13 aa, Homo sapiens
  CDR3 for alpha chain variable domain of TCR clone 156256 (TRAV35, TRAJ44)
CAGLSGTASKLTF

SEQ ID NO: 312512 - protein, 15 aa, Homo sapiens
  CDR3 for beta chain variable domain of TCR clone 156256 (TRBV7-8, TRBJ1-4)
CASSRTGGFNEKLFF

SEQ ID NO: 312513 - protein, 14 aa, Homo sapiens
  CDR3 for alpha chain variable domain of TCR clone 156257 (TRAV1-2, TRAJ8)
CAVREDKGFQKLVF

SEQ ID NO: 312514 - protein, 15 aa, Homo sapiens
  CDR3 for beta chain variable domain of TCR clone 156257 (TRBV5-1, TRBJ2-1)
CASSPPRAPYNEQFF

SEQ ID NO: 312515 - protein, 17 aa, Homo sapiens
  CDR3 for alpha chain variable domain of TCR clone 156258 (TRAV12-3, TRAJ26)
CAMSGGGWDNYGQNFVF

SEQ ID NO: 312516 - protein, 15 aa, Homo sapiens
  CDR3 for beta chain variable domain of TCR clone 156258 (TRBV6-5, TRBJ2-1)
CASSYDAGAGNEQFF

SEQ ID NO: 312517 - protein, 14 aa, Homo sapiens
  CDR3 for alpha chain variable domain of TCR clone 156259 (TRAV8-1, TRAJ34)
CAVNPSYNTDKLIF

SEQ ID NO: 312518 - protein, 16 aa, Homo sapiens
  CDR3 for beta chain variable domain of TCR clone 156259 (TRBV7-2, TRBJ2-2)
CASSLKRGTLSGELFF

SEQ ID NO: 312519 - protein, 15 aa, Homo sapiens
  CDR3 for alpha chain variable domain of TCR clone 156260 (TRAV12-3, TRAJ6)
CAMSATTGGSYIPTF

SEQ ID NO: 312520 - protein, 15 aa, Homo sapiens
  CDR3 for beta chain variable domain of TCR clone 156260 (TRBV5-1, TRBJ2-3)
CASSVTSRSTDTQYF

SEQ ID NO: 312521 - protein, 14 aa, Homo sapiens
  CDR3 for alpha chain variable domain of TCR clone 156261 (TRAV1-2, TRAJ8)
CAVREDTGFQKFVF

SEQ ID NO: 312522 - protein, 15 aa, Homo sapiens
  CDR3 for beta chain variable domain of TCR clone 156261 (TRBV10-2, TRBJ2-6)
CASSEQGTGANVLTF

SEQ ID NO: 312523 - protein, 22 aa, Homo sapiens
  CDR3 for alpha chain variable domain of TCR clone 156262 (TRAV39, TRAJ49)
PCMTSLPPTSVPWTNTGNQFYF

SEQ ID NO: 312524 - protein, 17 aa, Homo sapiens
  CDR3 for beta chain variable domain of TCR clone 156262 (TRBV20-1, TRBJ2-1)
CSARDRLRASSYNEQFF

SEQ ID NO: 312525 - protein, 15 aa, Homo sapiens
  CDR3 for alpha chain variable domain of TCR clone 156263 (TRAV17, TRAJ57)
CATGPSQGGSEKLVF

SEQ ID NO: 312526 - protein, 18 aa, Homo sapiens
  CDR3 for beta chain variable domain of TCR clone 156263 (TRBV7-9, TRBJ2-7)
CSSSLTTSGSRTWYEQYF

SEQ ID NO: 312527 - protein, 14 aa, Homo sapiens
  CDR3 for alpha chain variable domain of TCR clone 156264 (TRAV9-2, TRAJ36)
CALPWRTGANNLFF

SEQ ID NO: 312528 - protein, 14 aa, Homo sapiens
  CDR3 for beta chain variable domain of TCR clone 156264 (TRBV2, TRBJ1-2)
CASSELQVNYGYSF

SEQ ID NO: 312529 - protein, 14 aa, Homo sapiens
  CDR3 for alpha chain variable domain of TCR clone 156265 (TRAV2, TRAJ9)
SAVEDRSGGFKTIF

SEQ ID NO: 312530 - protein, 13 aa, Homo sapiens
  CDR3 for beta chain variable domain of TCR clone 156265 (TRBV12-4, TRBJ1-5)
CASSPDRAQPQHF

SEQ ID NO: 312531 - protein, 10 aa, Homo sapiens
  CDR3 for alpha chain variable domain of TCR clone 156266 (TRAV8-2, TRAJ29)
CTGENTPLVF

SEQ ID NO: 312532 - protein, 17 aa, Homo sapiens
  CDR3 for beta chain variable domain of TCR clone 156266 (TRBV2, TRBJ2-7)
CASSQALTGWDSYEQYF

SEQ ID NO: 312533 - protein, 15 aa, Homo sapiens
  CDR3 for alpha chain variable domain of TCR clone 156267 (TRAV9-2, TRAJ57)
CALRPNQGGSEKLVF

SEQ ID NO: 312534 - protein, 14 aa, Homo sapiens
  CDR3 for beta chain variable domain of TCR clone 156267 (TRBV29-1, TRBJ2-2)
CSVGVFANTGELFF

SEQ ID NO: 312535 - protein, 13 aa, Homo sapiens
  CDR3 for alpha chain variable domain of TCR clone 156268 (TRAV21, TRAJ27)
CAARPGNAGKSTF

SEQ ID NO: 312536 - protein, 15 aa, Homo sapiens
  CDR3 for beta chain variable domain of TCR clone 156268 (TRBV19, TRBJ2-5)
CASSIGGGPRETQYF

SEQ ID NO: 312537 - protein, 18 aa, Homo sapiens
  CDR3 for alpha chain variable domain of TCR clone 156269 (TRAV13-1, TRAJ52)
CAASKRSAAGTSYGKLTF

SEQ ID NO: 312538 - protein, 13 aa, Homo sapiens
  CDR3 for beta chain variable domain of TCR clone 156269 (TRBV12-4, TRBJ1-2)
CASSLRQGKGYTF

SEQ ID NO: 312539 - protein, 13 aa, Homo sapiens
  CDR3 for alpha chain variable domain of TCR clone 156270 (TRAV8-1, TRAJ47)
CAVGREYGNKLVF

SEQ ID NO: 312540 - protein, 13 aa, Homo sapiens
  CDR3 for beta chain variable domain of TCR clone 156270 (TRBV20-1, TRBJ2-2)
CSARVANTGELFF

SEQ ID NO: 312541 - protein, 18 aa, Homo sapiens
  CDR3 for alpha chain variable domain of TCR clone 156271 (TRAV13-1, TRAJ52)
CAAKNPNAGGTSYGKLTF

SEQ ID NO: 312542 - protein, 11 aa, Homo sapiens
  CDR3 for beta chain variable domain of TCR clone 156271 (TRBV19, TRBJ1-1)
CASSIGSEAFF

SEQ ID NO: 312543 - protein, 15 aa, Homo sapiens
  CDR3 for alpha chain variable domain of TCR clone 156272 (TRAV34, TRAJ38)
CGADFTPGNNRKLIR

SEQ ID NO: 312544 - protein, 16 aa, Homo sapiens
  CDR3 for beta chain variable domain of TCR clone 156272 (TRBV6-1, TRBJ2-3)
CASSEVIGQGTDTQYF

SEQ ID NO: 312545 - protein, 16 aa, Homo sapiens
  CDR3 for alpha chain variable domain of TCR clone 156273 (TRAV23/DV6, TRAJ9)
CAASIGGNTGGFKTIF

SEQ ID NO: 312546 - protein, 15 aa, Homo sapiens
  CDR3 for beta chain variable domain of TCR clone 156273 (TRBV29-1, TRBJ1-2)
CSVVLEAGSNYGYTF

SEQ ID NO: 312547 - protein, 15 aa, Homo sapiens
  CDR3 for alpha chain variable domain of TCR clone 156274 (TRAV10, TRAJ39)
WVVSASGNAGNMLTF

SEQ ID NO: 312548 - protein, 13 aa, Homo sapiens
  CDR3 for beta chain variable domain of TCR clone 156274 (TRBV18, TRBJ2-7)
CASQAGGGYEQYF

SEQ ID NO: 312549 - protein, 12 aa, Homo sapiens
  CDR3 for alpha chain variable domain of TCR clone 156275 (TRAV12-3, TRAJ40)
CAMSSGTYKFIF

SEQ ID NO: 312550 - protein, 15 aa, Homo sapiens
  CDR3 for beta chain variable domain of TCR clone 156275 (TRBV7-3, TRBJ2-2)
CASSETGQGTGELFF

SEQ ID NO: 312551 - protein, 13 aa, Homo sapiens
  CDR3 for alpha chain variable domain of TCR clone 156276 (TRAV29/DV5, TRAJ48)
CAASLFGNEKLTF

SEQ ID NO: 312552 - protein, 16 aa, Homo sapiens
  CDR3 for beta chain variable domain of TCR clone 156276 (TRBV20-1, TRBJ1-1)
SAVLNRDRKMNTEAFF

SEQ ID NO: 312553 - protein, 12 aa, Homo sapiens
  CDR3 for alpha chain variable domain of TCR clone 156277 (TRAV17, TRAJ39)
CATGAAGNMLTF

SEQ ID NO: 312554 - protein, 13 aa, Homo sapiens
  CDR3 for beta chain variable domain of TCR clone 156277 (TRBV27, TRBJ1-4)
CASSLMGDEKLFF

SEQ ID NO: 312555 - protein, 15 aa, Homo sapiens
  CDR3 for alpha chain variable domain of TCR clone 156278 (TRAV12-2, TRAJ23)
CAVRPIYNLGGKLIF

SEQ ID NO: 312556 - protein, 15 aa, Homo sapiens
  CDR3 for beta chain variable domain of TCR clone 156278 (TRBV5-1, TRBJ1-2)
CASSLVGGQSQGYTF

SEQ ID NO: 312557 - protein, 15 aa, Homo sapiens
  CDR3 for alpha chain variable domain of TCR clone 156279 (TRAV8-1, TRAJ6)
CAVNTPPGGSYIPTV

SEQ ID NO: 312558 - protein, 14 aa, Homo sapiens
  CDR3 for beta chain variable domain of TCR clone 156279 (TRBV12-4, TRBJ2-1)
CASSLGEGASEQFF

SEQ ID NO: 312559 - protein, 14 aa, Homo sapiens
  CDR3 for alpha chain variable domain of TCR clone 156280 (TRAV8-3, TRAJ21)
CAVGLNPRSDKFYF

SEQ ID NO: 312560 - protein, 16 aa, Homo sapiens
  CDR3 for beta chain variable domain of TCR clone 156280 (TRBV7-9, TRBJ2-7)
CASSSPSANTVNEQYV

SEQ ID NO: 312561 - protein, 15 aa, Homo sapiens
  CDR3 for alpha chain variable domain of TCR clone 156281 (TRAV3, TRAJ20)
CAVRDIKFSDYKLSF

SEQ ID NO: 312562 - protein, 15 aa, Homo sapiens
  CDR3 for beta chain variable domain of TCR clone 156281 (TRBV7-9, TRBJ1-6)
CGSSSPGRGNSPLHF

SEQ ID NO: 312563 - protein, 14 aa, Homo sapiens
  CDR3 for alpha chain variable domain of TCR clone 156282 (TRAV8-2, TRAJ11)
CVVREKSGYSTLTF

SEQ ID NO: 312564 - protein, 16 aa, Homo sapiens
  CDR3 for beta chain variable domain of TCR clone 156282 (TRBV28, TRBJ2-1)
CASSSPEYPRDNEQLF

SEQ ID NO: 312565 - protein, 13 aa, Homo sapiens
  CDR3 for alpha chain variable domain of TCR clone 156283 (TRAV8-4, TRAJ10)
CAAFTGGGNKLTF

SEQ ID NO: 312566 - protein, 16 aa, Homo sapiens
  CDR3 for beta chain variable domain of TCR clone 156283 (TRBV20-1, TRBJ1-4)
CSAPGQGLLTNEKLFF

SEQ ID NO: 312567 - protein, 15 aa, Homo sapiens
  CDR3 for alpha chain variable domain of TCR clone 156284 (TRAV3, TRAJ5)
CAVRDRKTGRRALTF

SEQ ID NO: 312568 - protein, 19 aa, Homo sapiens
  CDR3 for beta chain variable domain of TCR clone 156284 (TRBV25-1, TRBJ2-2)
CAILVYRVDRGRKTGELFF

SEQ ID NO: 312569 - protein, 12 aa, Homo sapiens
  CDR3 for alpha chain variable domain of TCR clone 156285 (TRAV21, TRAJ33)
CAKMDSNYQLIW

SEQ ID NO: 312570 - protein, 15 aa, Homo sapiens
  CDR3 for beta chain variable domain of TCR clone 156285 (TRBV27, TRBJ2-7)
CASSPQREGQREQYF

SEQ ID NO: 312571 - protein, 15 aa, Homo sapiens
  CDR3 for alpha chain variable domain of TCR clone 156286 (TRAV8-3, TRAJ45)
CASSYSGGGADRLPF

SEQ ID NO: 312572 - protein, 18 aa, Homo sapiens
  CDR3 for beta chain variable domain of TCR clone 156286 (TRBV18, TRBJ1-3)
CASSPRGGAGPSGNTIYF

SEQ ID NO: 312573 - protein, 16 aa, Homo sapiens
  CDR3 for alpha chain variable domain of TCR clone 156287 (TRAV1-2, TRAJ10)
CAVRGVLMGGGNKLTF

SEQ ID NO: 312574 - protein, 13 aa, Homo sapiens
  CDR3 for beta chain variable domain of TCR clone 156287 (TRBV20-1, TRBJ1-6)
CSAPLGVGSPLHF

SEQ ID NO: 312575 - protein, 11 aa, Homo sapiens
  CDR3 for alpha chain variable domain of TCR clone 156288 (TRAV1-1, TRAJ23)
CAVRQGGKLIF

SEQ ID NO: 312576 - protein, 15 aa, Homo sapiens
  CDR3 for beta chain variable domain of TCR clone 156288 (TRBV7-8, TRBJ2-1)
CASSLADSLYNEHFF

SEQ ID NO: 312577 - protein, 15 aa, Homo sapiens
  CDR3 for alpha chain variable domain of TCR clone 156289 (TRAV12-1, TRAJ42)
CVVTRDGGSQGNLIF

SEQ ID NO: 312578 - protein, 15 aa, Homo sapiens
  CDR3 for beta chain variable domain of TCR clone 156289 (TRBV4-1, TRBJ1-4)
CASSDTGGTNEKLFF

SEQ ID NO: 312579 - protein, 13 aa, Homo sapiens
  CDR3 for alpha chain variable domain of TCR clone 156290 (TRAV9-2, TRAJ53)
CALSGGSNYKLTF

SEQ ID NO: 312580 - protein, 15 aa, Homo sapiens
  CDR3 for beta chain variable domain of TCR clone 156290 (TRBV27, TRBJ1-6)
CASSFDRGLGSPLHF

SEQ ID NO: 312581 - protein, 14 aa, Homo sapiens
  CDR3 for alpha chain variable domain of TCR clone 156291 (TRAV12-3, TRAJ20)
CAMSARRGHYKLSF

SEQ ID NO: 312582 - protein, 14 aa, Homo sapiens
  CDR3 for beta chain variable domain of TCR clone 156291 (TRBV7-3, TRBJ2-3)
CASSPSARTDTQYF

SEQ ID NO: 312583 - protein, 13 aa, Homo sapiens
  CDR3 for alpha chain variable domain of TCR clone 156292 (TRAV3, TRAJ21)
CAVREPDFIKFYF

SEQ ID NO: 312584 - protein, 16 aa, Homo sapiens
  CDR3 for beta chain variable domain of TCR clone 156292 (TRBV15, TRBJ1-2)
CATSRGPRTGGGGYTF

SEQ ID NO: 312585 - protein, 14 aa, Homo sapiens
  CDR3 for alpha chain variable domain of TCR clone 156293 (TRAV20, TRAJ57)
CAVQGQGGSEKLVF

SEQ ID NO: 312586 - protein, 13 aa, Homo sapiens
  CDR3 for beta chain variable domain of TCR clone 156293 (TRBV3-1, TRBJ2-2)
CASLARGSGELFF

SEQ ID NO: 312587 - protein, 13 aa, Homo sapiens
  CDR3 for alpha chain variable domain of TCR clone 156294 (TRAV20, TRAJ37)
CAGCSSNKGKLIF

SEQ ID NO: 312588 - protein, 14 aa, Homo sapiens
  CDR3 for beta chain variable domain of TCR clone 156294 (TRBV20-1, TRBJ2-5)
CSARDGRAGETQCF

SEQ ID NO: 312589 - protein, 18 aa, Homo sapiens
  CDR3 for alpha chain variable domain of TCR clone 156295 (TRAV3, TRAJ42)
CAVRDPENYGGSQGNLIF

SEQ ID NO: 312590 - protein, 16 aa, Homo sapiens
  CDR3 for beta chain variable domain of TCR clone 156295 (TRBV3-1, TRBJ2-5)
CASSPGQFNGFGTQYF

SEQ ID NO: 312591 - protein, 15 aa, Homo sapiens
  CDR3 for alpha chain variable domain of TCR clone 156296 (TRAV17, TRAJ57)
CATGPSPGGSENLVF

SEQ ID NO: 312592 - protein, 14 aa, Homo sapiens
  CDR3 for beta chain variable domain of TCR clone 156296 (TRBV12-5, TRBJ2-5)
CASGSRTHQETQYF

SEQ ID NO: 312593 - protein, 13 aa, Homo sapiens
  CDR3 for alpha chain variable domain of TCR clone 156297 (TRAV21, TRAJ20)
CAVGLRVDYKLSF

SEQ ID NO: 312594 - protein, 12 aa, Homo sapiens
  CDR3 for beta chain variable domain of TCR clone 156297 (TRBV27, TRBJ2-1)
CASRGFYNEQFF

SEQ ID NO: 312595 - protein, 15 aa, Homo sapiens
  CDR3 for alpha chain variable domain of TCR clone 156298 (TRAV12-2, TRAJ53)
CAVNGGGGSNFKLRF

SEQ ID NO: 312596 - protein, 13 aa, Homo sapiens
  CDR3 for beta chain variable domain of TCR clone 156298 (TRBV3-1, TRBJ1-1)
CASSPGVITEAFF

SEQ ID NO: 312597 - protein, 15 aa, Homo sapiens
  CDR3 for alpha chain variable domain of TCR clone 156299 (TRAV3, TRAJ5)
CAVRDRKTGRRALTF

SEQ ID NO: 312598 - protein, 15 aa, Homo sapiens
  CDR3 for beta chain variable domain of TCR clone 156299 (TRBV7-8, TRBJ2-1)
CASSLAASLYNEQFF

SEQ ID NO: 312599 - protein, 13 aa, Homo sapiens
  CDR3 for alpha chain variable domain of TCR clone 156300 (TRAV12-3, TRAJ9)
CAMRNTGGFKTIF

SEQ ID NO: 312600 - protein, 15 aa, Homo sapiens
  CDR3 for beta chain variable domain of TCR clone 156300 (TRBV20-1, TRBJ2-7)
CSARARVSGMDEQYF

SEQ ID NO: 312601 - protein, 13 aa, Homo sapiens
  CDR3 for alpha chain variable domain of TCR clone 156301 (TRAV8-4, TRAJ48)
CAVSLFGNEKLTF

SEQ ID NO: 312602 - protein, 16 aa, Homo sapiens
  CDR3 for beta chain variable domain of TCR clone 156301 (TRBV7-3, TRBJ2-2)
CASSLKRGTLSGELFF

SEQ ID NO: 312603 - protein, 10 aa, Homo sapiens
  CDR3 for alpha chain variable domain of TCR clone 156302 (TRAV23/DV6, TRAJ57)
CAASSTLSQG

SEQ ID NO: 312604 - protein, 14 aa, Homo sapiens
  CDR3 for beta chain variable domain of TCR clone 156302 (TRBV7-9, TRBJ2-3)
CASSLEQGTNTQYF

SEQ ID NO: 312605 - protein, 18 aa, Homo sapiens
  CDR3 for alpha chain variable domain of TCR clone 156303 (TRAV21, TRAJ52)
CAVRPSPAGGTSYGKLTF

SEQ ID NO: 312606 - protein, 17 aa, Homo sapiens
  CDR3 for beta chain variable domain of TCR clone 156303 (TRBV13, TRBJ2-3)
CASSLARVAGGRNTQNF

SEQ ID NO: 312607 - protein, 15 aa, Homo sapiens
  CDR3 for alpha chain variable domain of TCR clone 156304 (TRAV13-1, TRAJ10)
CAATILTGGGNKLTF

SEQ ID NO: 312608 - protein, 13 aa, Homo sapiens
  CDR3 for beta chain variable domain of TCR clone 156304 (TRBV5-5, TRBJ2-2)
CASTLGGAGELFF

SEQ ID NO: 312609 - protein, 15 aa, Homo sapiens
  CDR3 for alpha chain variable domain of TCR clone 156305 (TRAV12-3, TRAJ49)
RAMAVTPNTGNQFYF

SEQ ID NO: 312610 - protein, 18 aa, Homo sapiens
  CDR3 for beta chain variable domain of TCR clone 156305 (TRBV4-1, TRBJ1-5)
CASSQDPRGQGLNQPQHF

SEQ ID NO: 312611 - protein, 16 aa, Homo sapiens
  CDR3 for alpha chain variable domain of TCR clone 156306 (TRAV26-1, TRAJ37)
CIVRGDGSGHTGKLIF

SEQ ID NO: 312612 - protein, 17 aa, Homo sapiens
  CDR3 for beta chain variable domain of TCR clone 156306 (TRBV4-1, TRBJ2-7)
CASSRDPLGVRGGEQYF

SEQ ID NO: 312613 - protein, 14 aa, Homo sapiens
  CDR3 for alpha chain variable domain of TCR clone 156307 (TRAV12-3, TRAJ10)
SHLPLTGGGNKFTF

SEQ ID NO: 312614 - protein, 12 aa, Homo sapiens
  CDR3 for beta chain variable domain of TCR clone 156307 (TRBV7-8, TRBJ2-7)
CASSLGDREQYF

SEQ ID NO: 312615 - protein, 14 aa, Homo sapiens
  CDR3 for alpha chain variable domain of TCR clone 156308 (TRAV14/DV4, TRAJ34)
CAMRGGRPHRQAHL

SEQ ID NO: 312616 - protein, 14 aa, Homo sapiens
  CDR3 for beta chain variable domain of TCR clone 156308 (TRBV19, TRBJ2-1)
CASPTFVLGGEQFF

SEQ ID NO: 312617 - protein, 11 aa, Homo sapiens
  CDR3 for alpha chain variable domain of TCR clone 156309 (TRAV2, TRAJ3)
CAVRKEQCFQD

SEQ ID NO: 312618 - protein, 16 aa, Homo sapiens
  CDR3 for beta chain variable domain of TCR clone 156309 (TRBV12-4, TRBJ2-7)
CASSLIGGTGTYEQYF

SEQ ID NO: 312619 - protein, 11 aa, Homo sapiens
  CDR3 for alpha chain variable domain of TCR clone 156310 (TRAV12-2, TRAJ33)
CAVGSNYQLIW

SEQ ID NO: 312620 - protein, 14 aa, Homo sapiens
  CDR3 for beta chain variable domain of TCR clone 156310 (TRBV6-1, TRBJ2-2)
CASVVHIESGELFF

SEQ ID NO: 312621 - protein, 13 aa, Homo sapiens
  CDR3 for alpha chain variable domain of TCR clone 156311 (TRAV1-2, TRAJ9)
CAALNTGGFKTIF

SEQ ID NO: 312622 - protein, 16 aa, Homo sapiens
  CDR3 for beta chain variable domain of TCR clone 156311 (TRBV29-1, TRBJ1-2)
CSVAANRDIANYGYTF

SEQ ID NO: 312623 - protein, 11 aa, Homo sapiens
  CDR3 for alpha chain variable domain of TCR clone 156312 (TRAV17, TRAJ49)
CATDAGNQFYF

SEQ ID NO: 312624 - protein, 16 aa, Homo sapiens
  CDR3 for beta chain variable domain of TCR clone 156312 (TRBV7-2, TRBJ1-2)
CASSPTSGTPLGGYTF

SEQ ID NO: 312625 - protein, 16 aa, Homo sapiens
  CDR3 for alpha chain variable domain of TCR clone 156313 (TRAV4, TRAJ22)
CLVGDLYSGSARQLTF

SEQ ID NO: 312626 - protein, 16 aa, Homo sapiens
  CDR3 for beta chain variable domain of TCR clone 156313 (TRBV7-9, TRBJ2-1)
CACGDVAGGSYNEQFF

SEQ ID NO: 312627 - protein, 11 aa, Homo sapiens
  CDR3 for alpha chain variable domain of TCR clone 156314 (TRAV12-3, TRAJ43)
CAMSVSNDMRF

SEQ ID NO: 312628 - protein, 14 aa, Homo sapiens
  CDR3 for beta chain variable domain of TCR clone 156314 (TRBV11-2, TRBJ1-2)
CASSLGTANYGYTF

SEQ ID NO: 312629 - protein, 18 aa, Homo sapiens
  CDR3 for alpha chain variable domain of TCR clone 156315 (TRAV13-1, TRAJ52)
CAAKNPNAGGTSYGKLTF

SEQ ID NO: 312630 - protein, 15 aa, Homo sapiens
  CDR3 for beta chain variable domain of TCR clone 156315 (TRBV28, TRBJ2-4)
CAAGSGTLRMGIQYF

SEQ ID NO: 312631 - protein, 17 aa, Homo sapiens
  CDR3 for alpha chain variable domain of TCR clone 156316 (TRAV4, )
CLVDIQNPDPAEYQLRD

SEQ ID NO: 312632 - protein, 15 aa, Homo sapiens
  CDR3 for beta chain variable domain of TCR clone 156316 (TRBV20-1, TRBJ1-5)
CSASRRGDLGQPQHF

SEQ ID NO: 312633 - protein, 15 aa, Homo sapiens
  CDR3 for alpha chain variable domain of TCR clone 156317 (TRAV35, TRAJ41)
CAGQLSSNSGYALNF

SEQ ID NO: 312634 - protein, 14 aa, Homo sapiens
  CDR3 for beta chain variable domain of TCR clone 156317 (TRBV7-2, TRBJ1-2)
CASSRGGTNYGYTF

SEQ ID NO: 312635 - protein, 15 aa, Homo sapiens
  CDR3 for alpha chain variable domain of TCR clone 156318 (TRAV26-2, TRAJ26)
CILRDFDNYGQNFVF

SEQ ID NO: 312636 - protein, 14 aa, Homo sapiens
  CDR3 for beta chain variable domain of TCR clone 156318 (TRBV29-1, TRBJ2-5)
CSFWTPYAGETQDF

SEQ ID NO: 312637 - protein, 14 aa, Homo sapiens
  CDR3 for alpha chain variable domain of TCR clone 156319 (TRAV1-2, TRAJ16)
CAVNRVSDDQKLLF

SEQ ID NO: 312638 - protein, 13 aa, Homo sapiens
  CDR3 for beta chain variable domain of TCR clone 156319 (TRBV4-1, TRBJ2-1)
CASSQAGGDEQFF

SEQ ID NO: 312639 - protein, 16 aa, Homo sapiens
  CDR3 for alpha chain variable domain of TCR clone 156320 (TRAV13-2, TRAJ32)
CAENMNYGGATNKLIF

SEQ ID NO: 312640 - protein, 14 aa, Homo sapiens
  CDR3 for beta chain variable domain of TCR clone 156320 (TRBV15, TRBJ2-5)
CATSSTGYQATQYF

SEQ ID NO: 312641 - protein, 14 aa, Homo sapiens
  CDR3 for alpha chain variable domain of TCR clone 156321 (TRAV3, TRAJ36)
CAVRDGTGANNLFF

SEQ ID NO: 312642 - protein, 13 aa, Homo sapiens
  CDR3 for beta chain variable domain of TCR clone 156321 (TRBV15, TRBJ1-6)
CATSGGLNSPLHF

SEQ ID NO: 312643 - protein, 12 aa, Homo sapiens
  CDR3 for alpha chain variable domain of TCR clone 156322 (TRAV27, TRAJ36)
ASTPARANNLFF

SEQ ID NO: 312644 - protein, 13 aa, Homo sapiens
  CDR3 for beta chain variable domain of TCR clone 156322 (TRBV7-9, TRBJ2-3)
CASSPGSTDTQYF

SEQ ID NO: 312645 - protein, 16 aa, Homo sapiens
  CDR3 for alpha chain variable domain of TCR clone 156323 (TRAV30, TRAJ24)
CGTEIVDADSWGKFHF

SEQ ID NO: 312646 - protein, 16 aa, Homo sapiens
  CDR3 for beta chain variable domain of TCR clone 156323 (TRBV20-1, TRBJ1-4)
CSAPGQGLLTNEKLFF

SEQ ID NO: 312647 - protein, 14 aa, Homo sapiens
  CDR3 for alpha chain variable domain of TCR clone 156324 (TRAV6, TRAJ6)
CALPTSGGRYIPTF

SEQ ID NO: 312648 - protein, 17 aa, Homo sapiens
  CDR3 for beta chain variable domain of TCR clone 156324 (TRBV5-1, TRBJ2-5)
CASSPVALGQNQETQYF

SEQ ID NO: 312649 - protein, 13 aa, Homo sapiens
  CDR3 for alpha chain variable domain of TCR clone 156325 (TRAV30, TRAJ24)
CGTVTDRWGKLQF

SEQ ID NO: 312650 - protein, 14 aa, Homo sapiens
  CDR3 for beta chain variable domain of TCR clone 156325 (TRBV6-3, TRBJ2-2)
CASTYTPDTGELFF

SEQ ID NO: 312651 - protein, 15 aa, Homo sapiens
  CDR3 for alpha chain variable domain of TCR clone 156326 (TRAV8-6, TRAJ10)
CAVSDQAGGGNKLTF

SEQ ID NO: 312652 - protein, 14 aa, Homo sapiens
  CDR3 for beta chain variable domain of TCR clone 156326 (TRBV7-8, TRBJ2-3)
CASSVEAGTDTQYF

SEQ ID NO: 312653 - protein, 14 aa, Homo sapiens
  CDR3 for alpha chain variable domain of TCR clone 156327 (TRAV21, TRAJ37)
CAVKGSSNTGKLIF

SEQ ID NO: 312654 - protein, 13 aa, Homo sapiens
  CDR3 for beta chain variable domain of TCR clone 156327 (TRBV7-2, TRBJ2-1)
CASSRGGARNEQF

SEQ ID NO: 312655 - protein, 16 aa, Homo sapiens
  CDR3 for alpha chain variable domain of TCR clone 156328 (TRAV26-1, TRAJ36)
FIVRVPDQTGANNLFF

SEQ ID NO: 312656 - protein, 21 aa, Homo sapiens
  CDR3 for beta chain variable domain of TCR clone 156328 (TRBV6-1, TRBJ1-1)
CASSGVGNYKGISGFDTEAFF

SEQ ID NO: 312657 - protein, 12 aa, Homo sapiens
  CDR3 for alpha chain variable domain of TCR clone 156329 (TRAV2, TRAJ9)
CAVGAGGFKTIF

SEQ ID NO: 312658 - protein, 16 aa, Homo sapiens
  CDR3 for beta chain variable domain of TCR clone 156329 (TRBV19, TRBJ1-2)
CASSKFRDTTNYGYTF

SEQ ID NO: 312659 - protein, 14 aa, Homo sapiens
  CDR3 for alpha chain variable domain of TCR clone 156330 (TRAV9-2, TRAJ39)
CALYIYNAGNMLNF

SEQ ID NO: 312660 - protein, 13 aa, Homo sapiens
  CDR3 for beta chain variable domain of TCR clone 156330 (TRBV29-1, TRBJ2-5)
CSVTIASEETQYF

SEQ ID NO: 312661 - protein, 16 aa, Homo sapiens
  CDR3 for alpha chain variable domain of TCR clone 156331 (TRAV3, TRAJ10)
CAVRDMRAGGGNKLTF

SEQ ID NO: 312662 - protein, 14 aa, Homo sapiens
  CDR3 for beta chain variable domain of TCR clone 156331 (TRBV7-2, TRBJ2-2)
CASSLNSNTGELFF

SEQ ID NO: 312663 - protein, 14 aa, Homo sapiens
  CDR3 for alpha chain variable domain of TCR clone 156332 (TRAV17, TRAJ22)
CATARSGSARQLTF

SEQ ID NO: 312664 - protein, 13 aa, Homo sapiens
  CDR3 for beta chain variable domain of TCR clone 156332 (TRBV19, TRBJ2-1)
CASSMYRVNEQFF

SEQ ID NO: 312665 - protein, 16 aa, Homo sapiens
  CDR3 for alpha chain variable domain of TCR clone 156333 (TRAV12-3, TRAJ58)
CAMTDTEETSGSRMTF

SEQ ID NO: 312666 - protein, 22 aa, Homo sapiens
  CDR3 for beta chain variable domain of TCR clone 156333 (TRBV23-1, TRBJ2-7)
CASSRRLDSGQGYVGGGYEQYF

SEQ ID NO: 312667 - protein, 14 aa, Homo sapiens
  CDR3 for alpha chain variable domain of TCR clone 156334 (TRAV2, TRAJ29)
CSVTPPSGNTPLVF

SEQ ID NO: 312668 - protein, 13 aa, Homo sapiens
  CDR3 for beta chain variable domain of TCR clone 156334 (TRBV13, TRBJ2-7)
CASSSGLTHEQYF

SEQ ID NO: 312669 - protein, 15 aa, Homo sapiens
  CDR3 for alpha chain variable domain of TCR clone 156335 (TRAV8-4, TRAJ3)
CAVTGENLVQQCFQD

SEQ ID NO: 312670 - protein, 12 aa, Homo sapiens
  CDR3 for beta chain variable domain of TCR clone 156335 (TRBV5-5, TRBJ2-5)
CASSYFGETQYF

SEQ ID NO: 312671 - protein, 16 aa, Homo sapiens
  CDR3 for alpha chain variable domain of TCR clone 156336 (TRAV30, TRAJ24)
CGTEIVDADSWGKFQF

SEQ ID NO: 312672 - protein, 13 aa, Homo sapiens
  CDR3 for beta chain variable domain of TCR clone 156336 (TRBV20-1, TRBJ2-2)
CSALSGGAGELFF

SEQ ID NO: 312673 - protein, 12 aa, Homo sapiens
  CDR3 for alpha chain variable domain of TCR clone 156337 (TRAV12-3, TRAJ34)
CAMGYNTDKLIF

SEQ ID NO: 312674 - protein, 14 aa, Homo sapiens
  CDR3 for beta chain variable domain of TCR clone 156337 (TRBV4-1, TRBJ2-2)
FASSQAVNTGELFF

SEQ ID NO: 312675 - protein, 13 aa, Homo sapiens
  CDR3 for alpha chain variable domain of TCR clone 156338 (TRAV12-3, TRAJ48)
CAMSLVGNEKLTF

SEQ ID NO: 312676 - protein, 11 aa, Homo sapiens
  CDR3 for beta chain variable domain of TCR clone 156338 (TRBV7-2, TRBJ2-7)
CASSSGRWQYF

SEQ ID NO: 312677 - protein, 14 aa, Homo sapiens
  CDR3 for alpha chain variable domain of TCR clone 156339 (TRAV26-1, TRAJ44)
CISPLPGTASKLTF

SEQ ID NO: 312678 - protein, 16 aa, Homo sapiens
  CDR3 for beta chain variable domain of TCR clone 156339 (TRBV19, TRBJ2-1)
CASSKAGPSYYNEQFF

SEQ ID NO: 312679 - protein, 17 aa, Homo sapiens
  CDR3 for alpha chain variable domain of TCR clone 156340 (TRAV20, TRAJ45)
CAVQAPDSGGGADGLTF

SEQ ID NO: 312680 - protein, 16 aa, Homo sapiens
  CDR3 for beta chain variable domain of TCR clone 156340 (TRBV7-2, TRBJ2-3)
CASSLVALYSTDTQYF

SEQ ID NO: 312681 - protein, 12 aa, Homo sapiens
  CDR3 for alpha chain variable domain of TCR clone 156341 (TRAV16, TRAJ26)
CALRSHGQNFVF

SEQ ID NO: 312682 - protein, 13 aa, Homo sapiens
  CDR3 for beta chain variable domain of TCR clone 156341 (TRBV12-4, TRBJ1-1)
CASSPGTGFEAFF

SEQ ID NO: 312683 - protein, 12 aa, Homo sapiens
  CDR3 for alpha chain variable domain of TCR clone 156342 (TRAV12-3, TRAJ17)
CAMTLTGNKLTF

SEQ ID NO: 312684 - protein, 16 aa, Homo sapiens
  CDR3 for beta chain variable domain of TCR clone 156342 (TRBV5-1, TRBJ2-3)
CASSLGLAVYRDTQYF

SEQ ID NO: 312685 - protein, 15 aa, Homo sapiens
  CDR3 for alpha chain variable domain of TCR clone 156343 (TRAV8-3, TRAJ11)
CAVGLLKSGYSALTF

SEQ ID NO: 312686 - protein, 16 aa, Homo sapiens
  CDR3 for beta chain variable domain of TCR clone 156343 (TRBV7-9, TRBJ1-2)
CASSLGFSSGEDGYTF

SEQ ID NO: 312687 - protein, 16 aa, Homo sapiens
  CDR3 for alpha chain variable domain of TCR clone 156344 (TRAV30, TRAJ24)
CGTEIVDADSWGKFQF

SEQ ID NO: 312688 - protein, 14 aa, Homo sapiens
  CDR3 for beta chain variable domain of TCR clone 156344 (TRBV9, TRBJ2-7)
CASSVAGVPYEQYF

SEQ ID NO: 312689 - protein, 13 aa, Homo sapiens
  CDR3 for alpha chain variable domain of TCR clone 156345 (TRAV2, TRAJ40)
CALVTSVTYKYIF

SEQ ID NO: 312690 - protein, 14 aa, Homo sapiens
  CDR3 for beta chain variable domain of TCR clone 156345 (TRBV19, TRBJ2-1)
CASPTFVLSGEQFF

SEQ ID NO: 312691 - protein, 12 aa, Homo sapiens
  CDR3 for alpha chain variable domain of TCR clone 156346 (TRAV12-1, TRAJ40)
CVVYSGTYKYIF

SEQ ID NO: 312692 - protein, 18 aa, Homo sapiens
  CDR3 for beta chain variable domain of TCR clone 156346 (TRBV11-3, TRBJ2-3)
CASSVGGASRGAPNTQYF

SEQ ID NO: 312693 - protein, 16 aa, Homo sapiens
  CDR3 for alpha chain variable domain of TCR clone 156347 (TRAV38-2/DV8, TRAJ57)
CAYRSVGQGGSEKLVF

SEQ ID NO: 312694 - protein, 16 aa, Homo sapiens
  CDR3 for beta chain variable domain of TCR clone 156347 (TRBV5-1, TRBJ1-1)
CASSSGGNSLNTEAFF

SEQ ID NO: 312695 - protein, 16 aa, Homo sapiens
  CDR3 for alpha chain variable domain of TCR clone 156348 (TRAV30, TRAJ24)
CGTEIVDADSWGKFQF

SEQ ID NO: 312696 - protein, 14 aa, Homo sapiens
  CDR3 for beta chain variable domain of TCR clone 156348 (TRBV19, TRBJ2-7)
CASNFRDTFAGMYF

SEQ ID NO: 312697 - protein, 15 aa, Homo sapiens
  CDR3 for alpha chain variable domain of TCR clone 156349 (TRAV21, TRAJ40)
CAVRPQTSGTYKYIF

SEQ ID NO: 312698 - protein, 15 aa, Homo sapiens
  CDR3 for beta chain variable domain of TCR clone 156349 (TRBV11-1, TRBJ2-1)
CASSLLWGLGYEQFF

SEQ ID NO: 312699 - protein, 14 aa, Homo sapiens
  CDR3 for alpha chain variable domain of TCR clone 156350 (TRAV12-1, TRAJ10)
CVAILTGGGNNITF

SEQ ID NO: 312700 - protein, 15 aa, Homo sapiens
  CDR3 for beta chain variable domain of TCR clone 156350 (TRBV20-1, TRBJ2-7)
CSARGFRPQTYEQYF

SEQ ID NO: 312701 - protein, 14 aa, Homo sapiens
  CDR3 for alpha chain variable domain of TCR clone 156351 (TRAV1-1, TRAJ34)
CAVSPSYNTDKLIF

SEQ ID NO: 312702 - protein, 16 aa, Homo sapiens
  CDR3 for beta chain variable domain of TCR clone 156351 (TRBV19, TRBJ2-1)
CASSSKCTRSYNEQFF

SEQ ID NO: 312703 - protein, 16 aa, Homo sapiens
  CDR3 for alpha chain variable domain of TCR clone 156352 (TRAV3, TRAJ18)
CAVRDGRGSTLGRLYF

SEQ ID NO: 312704 - protein, 15 aa, Homo sapiens
  CDR3 for beta chain variable domain of TCR clone 156352 (TRBV20-1, TRBJ2-7)
CSARDRVSGMDEQYF

SEQ ID NO: 312705 - protein, 11 aa, Homo sapiens
  CDR3 for alpha chain variable domain of TCR clone 156353 (TRAV2, TRAJ21)
CAVFNFNKFYF

SEQ ID NO: 312706 - protein, 14 aa, Homo sapiens
  CDR3 for beta chain variable domain of TCR clone 156353 (TRBV15, TRBJ2-3)
SATRSGTSTDTQYF

SEQ ID NO: 312707 - protein, 12 aa, Homo sapiens
  CDR3 for alpha chain variable domain of TCR clone 156354 (TRAV1-1, TRAJ8)
CAGGTGFQKLVL

SEQ ID NO: 312708 - protein, 17 aa, Homo sapiens
  CDR3 for beta chain variable domain of TCR clone 156354 (TRBV18, TRBJ2-2)
CASSQRSSGQGPGELFF

SEQ ID NO: 312709 - protein, 14 aa, Homo sapiens
  CDR3 for alpha chain variable domain of TCR clone 156355 (TRAV35, TRAJ42)
CVGRYGGSQGNLIF

SEQ ID NO: 312710 - protein, 15 aa, Homo sapiens
  CDR3 for beta chain variable domain of TCR clone 156355 (TRBV7-9, TRBJ2-1)
CASSLGWGRANEQFF

SEQ ID NO: 312711 - protein, 14 aa, Homo sapiens
  CDR3 for alpha chain variable domain of TCR clone 156356 (TRAV4, TRAJ6)
CLVGEAGGSYIPTF

SEQ ID NO: 312712 - protein, 16 aa, Homo sapiens
  CDR3 for beta chain variable domain of TCR clone 156356 (TRBV7-6, TRBJ2-1)
CASSLNAGPSYNEQFF

SEQ ID NO: 312713 - protein, 20 aa, Homo sapiens
  CDR3 for alpha chain variable domain of TCR clone 156357 (TRAV25, TRAJ21)
TATQTTDVGTYPLSFNKFYF

SEQ ID NO: 312714 - protein, 14 aa, Homo sapiens
  CDR3 for beta chain variable domain of TCR clone 156357 (TRBV11-2, TRBJ1-2)
CASSLGTANYGYTF

SEQ ID NO: 312715 - protein, 16 aa, Homo sapiens
  CDR3 for alpha chain variable domain of TCR clone 156358 (TRAV27, TRAJ52)
FAGAPAGGTSYGKLSF

SEQ ID NO: 312716 - protein, 12 aa, Homo sapiens
  CDR3 for beta chain variable domain of TCR clone 156358 (TRBV27, TRBJ2-1)
CASRGFYNEQFF

SEQ ID NO: 312717 - protein, 14 aa, Homo sapiens
  CDR3 for alpha chain variable domain of TCR clone 156359 (TRAV3, TRAJ9)
CAVRLNTGGFKTIF

SEQ ID NO: 312718 - protein, 14 aa, Homo sapiens
  CDR3 for beta chain variable domain of TCR clone 156359 (TRBV7-8, TRBJ2-3)
CASSLEAGTDTQYF

SEQ ID NO: 312719 - protein, 13 aa, Homo sapiens
  CDR3 for alpha chain variable domain of TCR clone 156360 (TRAV20, TRAJ37)
CAVCASNTGKLIF

SEQ ID NO: 312720 - protein, 11 aa, Homo sapiens
  CDR3 for beta chain variable domain of TCR clone 156360 (TRBV12-4, TRBJ2-3)
CASTATDTQYF

SEQ ID NO: 312721 - protein, 12 aa, Homo sapiens
  CDR3 for alpha chain variable domain of TCR clone 156361 (TRAV27, TRAJ13)
CAGVRGYQKVTY

SEQ ID NO: 312722 - protein, 16 aa, Homo sapiens
  CDR3 for beta chain variable domain of TCR clone 156361 (TRBV28, TRBJ2-1)
CASSSSYSGSLNEQFF

SEQ ID NO: 312723 - protein, 15 aa, Homo sapiens
  CDR3 for alpha chain variable domain of TCR clone 156362 (TRAV3, TRAJ17)
CAVRDGPAAGIKLTF

SEQ ID NO: 312724 - protein, 12 aa, Homo sapiens
  CDR3 for beta chain variable domain of TCR clone 156362 (TRBV12-4, TRBJ2-1)
CASSPGRNEQFF

SEQ ID NO: 312725 - protein, 13 aa, Homo sapiens
  CDR3 for alpha chain variable domain of TCR clone 156363 (TRAV26-2, TRAJ43)
CILRAVNNNDMRF

SEQ ID NO: 312726 - protein, 15 aa, Homo sapiens
  CDR3 for beta chain variable domain of TCR clone 156363 (TRBV7-2, TRBJ2-1)
CASTHGTVIYSEQFF

SEQ ID NO: 312727 - protein, 16 aa, Homo sapiens
  CDR3 for alpha chain variable domain of TCR clone 156364 (TRAV29/DV5, TRAJ36)
CAASAGVATGANNLCF

SEQ ID NO: 312728 - protein, 16 aa, Homo sapiens
  CDR3 for beta chain variable domain of TCR clone 156364 (TRBV5-1, TRBJ2-3)
CASSLGLAVYTDTQYF

SEQ ID NO: 312729 - protein, 16 aa, Homo sapiens
  CDR3 for alpha chain variable domain of TCR clone 156365 (TRAV3, TRAJ37)
CAVRPHGSGNPGKLIF

SEQ ID NO: 312730 - protein, 14 aa, Homo sapiens
  CDR3 for beta chain variable domain of TCR clone 156365 (TRBV20-1, TRBJ2-1)
CSARGGSSYNEQFF

SEQ ID NO: 312731 - protein, 11 aa, Homo sapiens
  CDR3 for alpha chain variable domain of TCR clone 156366 (TRAV13-1, TRAJ24)
CAASGWGKLQF

SEQ ID NO: 312732 - protein, 12 aa, Homo sapiens
  CDR3 for beta chain variable domain of TCR clone 156366 (TRBV5-1, TRBJ1-2)
CASSQDTYGYTF

SEQ ID NO: 312733 - protein, 14 aa, Homo sapiens
  CDR3 for alpha chain variable domain of TCR clone 156367 (TRAV1-2, TRAJ16)
CAVNRFSDGQKLLF

SEQ ID NO: 312734 - protein, 16 aa, Homo sapiens
  CDR3 for beta chain variable domain of TCR clone 156367 (TRBV7-8, TRBJ2-1)
CACSLVGGGPYNEQFF

SEQ ID NO: 312735 - protein, 11 aa, Homo sapiens
  CDR3 for alpha chain variable domain of TCR clone 156368 (TRAV12-3, TRAJ27)
CAMANAGKSTF

SEQ ID NO: 312736 - protein, 17 aa, Homo sapiens
  CDR3 for beta chain variable domain of TCR clone 156368 (TRBV28, TRBJ2-5)
CASSTPEGDALQETQYF

SEQ ID NO: 312737 - protein, 12 aa, Homo sapiens
  CDR3 for alpha chain variable domain of TCR clone 156369 (TRAV10, TRAJ31)
CVVSANNARLMF

SEQ ID NO: 312738 - protein, 15 aa, Homo sapiens
  CDR3 for beta chain variable domain of TCR clone 156369 (TRBV5-5, TRBJ1-2)
CASSWVGTDVYGYTF

SEQ ID NO: 312739 - protein, 15 aa, Homo sapiens
  CDR3 for alpha chain variable domain of TCR clone 156370 (TRAV27, TRAJ38)
CAARRNAGNNRRLIW

SEQ ID NO: 312740 - protein, 15 aa, Homo sapiens
  CDR3 for beta chain variable domain of TCR clone 156370 (TRBV9, TRBJ1-6)
CASSVAGTGDSPLHF

SEQ ID NO: 312741 - protein, 13 aa, Homo sapiens
  CDR3 for alpha chain variable domain of TCR clone 156371 (TRAV21, TRAJ34)
CAVSDGDTDKLIF

SEQ ID NO: 312742 - protein, 17 aa, Homo sapiens
  CDR3 for beta chain variable domain of TCR clone 156371 (TRBV20-1, TRBJ1-5)
CSARDPSAQGFNQPQHF

SEQ ID NO: 312743 - protein, 14 aa, Homo sapiens
  CDR3 for alpha chain variable domain of TCR clone 156372 (TRAV13-1, TRAJ35)
CAASKGGFGNVLHC

SEQ ID NO: 312744 - protein, 13 aa, Homo sapiens
  CDR3 for beta chain variable domain of TCR clone 156372 (TRBV7-3, TRBJ1-1)
CASSQDWGAKAVF

SEQ ID NO: 312745 - protein, 11 aa, Homo sapiens
  CDR3 for alpha chain variable domain of TCR clone 156373 (TRAV30, TRAJ24)
WMLTAGGKFQF

SEQ ID NO: 312746 - protein, 14 aa, Homo sapiens
  CDR3 for beta chain variable domain of TCR clone 156373 (TRBV7-2, TRBJ1-1)
CASSFLTGTTEAFF

SEQ ID NO: 312747 - protein, 12 aa, Homo sapiens
  CDR3 for alpha chain variable domain of TCR clone 156374 (TRAV24, TRAJ40)
CAFMPGTDKYIF

SEQ ID NO: 312748 - protein, 11 aa, Homo sapiens
  CDR3 for beta chain variable domain of TCR clone 156374 (TRBV10-1, TRBJ2-3)
CASSDSDTQYF

SEQ ID NO: 312749 - protein, 13 aa, Homo sapiens
  CDR3 for alpha chain variable domain of TCR clone 156375 (TRAV8-3, TRAJ43)
CAVGPDNNNDMRL

SEQ ID NO: 312750 - protein, 14 aa, Homo sapiens
  CDR3 for beta chain variable domain of TCR clone 156375 (TRBV20-1, TRBJ1-3)
CSASPTGAGNTIYF

SEQ ID NO: 312751 - protein, 13 aa, Homo sapiens
  CDR3 for alpha chain variable domain of TCR clone 156376 (TRAV3, TRAJ27)
CAVRPLGAGKSTF

SEQ ID NO: 312752 - protein, 16 aa, Homo sapiens
  CDR3 for beta chain variable domain of TCR clone 156376 (TRBV15, TRBJ2-7)
CATSRDRGRRRGEQYF

SEQ ID NO: 312753 - protein, 12 aa, Homo sapiens
  CDR3 for alpha chain variable domain of TCR clone 156377 (TRAV20, TRAJ39)
CAVGDAGNMLTF

SEQ ID NO: 312754 - protein, 16 aa, Homo sapiens
  CDR3 for beta chain variable domain of TCR clone 156377 (TRBV15, TRBJ1-2)
CATSRGPRTGGGGYTF

SEQ ID NO: 312755 - protein, 12 aa, Homo sapiens
  CDR3 for alpha chain variable domain of TCR clone 156378 (TRAV3, TRAJ43)
CAVRDPNNDMRF

SEQ ID NO: 312756 - protein, 12 aa, Homo sapiens
  CDR3 for beta chain variable domain of TCR clone 156378 (TRBV18, TRBJ2-1)
CASSSDEDEQFF

SEQ ID NO: 312757 - protein, 13 aa, Homo sapiens
  CDR3 for alpha chain variable domain of TCR clone 156379 (TRAV9-2, TRAJ49)
CALIQIGGNQFYF

SEQ ID NO: 312758 - protein, 13 aa, Homo sapiens
  CDR3 for beta chain variable domain of TCR clone 156379 (TRBV5-5, TRBJ1-2)
CASSFWRGEDDTF

SEQ ID NO: 312759 - protein, 16 aa, Homo sapiens
  CDR3 for alpha chain variable domain of TCR clone 156380 (TRAV1-2, TRAJ10)
CAVRGVLTGGGNKLTF

SEQ ID NO: 312760 - protein, 12 aa, Homo sapiens
  CDR3 for beta chain variable domain of TCR clone 156380 (TRBV7-8, TRBJ2-7)
CASSLGDRQQYF

SEQ ID NO: 312761 - protein, 14 aa, Homo sapiens
  CDR3 for alpha chain variable domain of TCR clone 156381 (TRAV13-1, TRAJ44)
CAAKATGTASKLTF

SEQ ID NO: 312762 - protein, 14 aa, Homo sapiens
  CDR3 for beta chain variable domain of TCR clone 156381 (TRBV7-9, TRBJ1-2)
CASSRQGANYGYTF

SEQ ID NO: 312763 - protein, 16 aa, Homo sapiens
  CDR3 for alpha chain variable domain of TCR clone 156382 (TRAV1-2, TRAJ10)
CAVRGVLTGGGNKLTF

SEQ ID NO: 312764 - protein, 13 aa, Homo sapiens
  CDR3 for beta chain variable domain of TCR clone 156382 (TRBV25-1, TRBJ2-5)
CASSESGRETQYF

SEQ ID NO: 312765 - protein, 17 aa, Homo sapiens
  CDR3 for alpha chain variable domain of TCR clone 156383 (TRAV8-6, TRAJ8)
CAVKEGIENTGLQKLVF

SEQ ID NO: 312766 - protein, 12 aa, Homo sapiens
  CDR3 for beta chain variable domain of TCR clone 156383 (TRBV19, TRBJ1-4)
CASKDWPGRLFF

SEQ ID NO: 312767 - protein, 12 aa, Homo sapiens
  CDR3 for alpha chain variable domain of TCR clone 156384 (TRAV16, TRAJ26)
CSLRSYVQNFVF

SEQ ID NO: 312768 - protein, 14 aa, Homo sapiens
  CDR3 for beta chain variable domain of TCR clone 156384 (TRBV10-3, TRBJ2-1)
CAISSDLAYNEQFF

SEQ ID NO: 312769 - protein, 18 aa, Homo sapiens
  CDR3 for alpha chain variable domain of TCR clone 156385 (TRAV21, TRAJ52)
CAVRPSPAGGTSYGKLTF

SEQ ID NO: 312770 - protein, 13 aa, Homo sapiens
  CDR3 for beta chain variable domain of TCR clone 156385 (TRBV29-1, TRBJ2-2)
CSVYREDTVELFF

SEQ ID NO: 312771 - protein, 13 aa, Homo sapiens
  CDR3 for alpha chain variable domain of TCR clone 156386 (TRAV12-3, TRAJ47)
CAMKKEYGNKLVF

SEQ ID NO: 312772 - protein, 15 aa, Homo sapiens
  CDR3 for beta chain variable domain of TCR clone 156386 (TRBV20-1, TRBJ2-7)
CSAGDRVSGMDEQYF

SEQ ID NO: 312773 - protein, 11 aa, Homo sapiens
  CDR3 for alpha chain variable domain of TCR clone 156387 (TRAV21, TRAJ41)
CAVRSGYALNF

SEQ ID NO: 312774 - protein, 15 aa, Homo sapiens
  CDR3 for beta chain variable domain of TCR clone 156387 (TRBV4-1, TRBJ1-4)
CASSDTGGTNEKLFF

SEQ ID NO: 312775 - protein, 15 aa, Homo sapiens
  CDR3 for alpha chain variable domain of TCR clone 156388 (TRAV12-3, TRAJ11)
CAMSEENSGYSTLTF

SEQ ID NO: 312776 - protein, 14 aa, Homo sapiens
  CDR3 for beta chain variable domain of TCR clone 156388 (TRBV18, TRBJ2-5)
CASSPGVAQETQYF

SEQ ID NO: 312777 - protein, 13 aa, Homo sapiens
  CDR3 for alpha chain variable domain of TCR clone 156389 (TRAV21, TRAJ27)
CAARPSNAGKSTF

SEQ ID NO: 312778 - protein, 13 aa, Homo sapiens
  CDR3 for beta chain variable domain of TCR clone 156389 (TRBV27, TRBJ2-1)
CASRTLVVGEQFI

SEQ ID NO: 312779 - protein, 10 aa, Homo sapiens
  CDR3 for alpha chain variable domain of TCR clone 156390 (TRAV26-2, TRAJ20)
CIQNDYKLSF

SEQ ID NO: 312780 - protein, 16 aa, Homo sapiens
  CDR3 for beta chain variable domain of TCR clone 156390 (TRBV28, TRBJ2-7)
CASSLFFETGGPEQYF

SEQ ID NO: 312781 - protein, 11 aa, Homo sapiens
  CDR3 for alpha chain variable domain of TCR clone 156391 (TRAV3, TRAJ21)
CAVGTFNKFYF

SEQ ID NO: 312782 - protein, 16 aa, Homo sapiens
  CDR3 for beta chain variable domain of TCR clone 156391 (TRBV12-5, TRBJ2-5)
CASGPRTSGNQETQYF

SEQ ID NO: 312783 - protein, 13 aa, Homo sapiens
  CDR3 for alpha chain variable domain of TCR clone 156392 (TRAV13-1, TRAJ6)
CAASKGGSYIPTF

SEQ ID NO: 312784 - protein, 14 aa, Homo sapiens
  CDR3 for beta chain variable domain of TCR clone 156392 (TRBV7-2, TRBJ2-1)
CASSLGVGYNEQIF

SEQ ID NO: 312785 - protein, 13 aa, Homo sapiens
  CDR3 for alpha chain variable domain of TCR clone 156393 (TRAV23/DV6, TRAJ16)
CAASGSDGQKLLF

SEQ ID NO: 312786 - protein, 16 aa, Homo sapiens
  CDR3 for beta chain variable domain of TCR clone 156393 (TRBV27, TRBJ2-2)
CASSFRGLVRTGELYF

SEQ ID NO: 312787 - protein, 15 aa, Homo sapiens
  CDR3 for alpha chain variable domain of TCR clone 156394 (TRAV17, TRAJ22)
CATVAPSGSARQLTF

SEQ ID NO: 312788 - protein, 15 aa, Homo sapiens
  CDR3 for beta chain variable domain of TCR clone 156394 (TRBV7-2, TRBJ1-5)
CASSPLGGLNQPQHF

SEQ ID NO: 312789 - protein, 15 aa, Homo sapiens
  CDR3 for alpha chain variable domain of TCR clone 156395 (TRAV21, TRAJ13)
CAVRPTSGGYQKVTF

SEQ ID NO: 312790 - protein, 13 aa, Homo sapiens
  CDR3 for beta chain variable domain of TCR clone 156395 (TRBV6-3, TRBJ2-3)
CASEGELKDTQYF

SEQ ID NO: 312791 - protein, 16 aa, Homo sapiens
  CDR3 for alpha chain variable domain of TCR clone 156396 (TRAV21, TRAJ52)
CAVTNAGGTSFGKLTF

SEQ ID NO: 312792 - protein, 17 aa, Homo sapiens
  CDR3 for beta chain variable domain of TCR clone 156396 (TRBV28, TRBJ2-5)
CASSRQGGLAGAETQYF

SEQ ID NO: 312793 - protein, 17 aa, Homo sapiens
  CDR3 for alpha chain variable domain of TCR clone 156397 (TRAV3, TRAJ42)
LAVRDRDYGGSQGNLIF

SEQ ID NO: 312794 - protein, 15 aa, Homo sapiens
  CDR3 for beta chain variable domain of TCR clone 156397 (TRBV6-6, TRBJ2-7)
CASSYSYGGSYEQYF

SEQ ID NO: 312795 - protein, 15 aa, Homo sapiens
  CDR3 for alpha chain variable domain of TCR clone 156398 (TRAV2, TRAJ22)
CAVPSRGGSARQLTF

SEQ ID NO: 312796 - protein, 15 aa, Homo sapiens
  CDR3 for beta chain variable domain of TCR clone 156398 (TRBV27, TRBJ2-1)
CASSNGGGSSNEQFF

SEQ ID NO: 312797 - protein, 19 aa, Homo sapiens
  CDR3 for alpha chain variable domain of TCR clone 156399 (TRAV26-1, TRAJ22)
CCVLLHRWVFSGSARQLTF

SEQ ID NO: 312798 - protein, 13 aa, Homo sapiens
  CDR3 for beta chain variable domain of TCR clone 156399 (TRBV7-9, TRBJ1-2)
CASSLKQNYGYTF

SEQ ID NO: 312799 - protein, 14 aa, Homo sapiens
  CDR3 for alpha chain variable domain of TCR clone 156400 (TRAV38-1, TRAJ45)
CAYYSGGGADGLTF

SEQ ID NO: 312800 - protein, 16 aa, Homo sapiens
  CDR3 for beta chain variable domain of TCR clone 156400 (TRBV19, TRBJ1-1)
CASSPTRFWPGTEAFF

SEQ ID NO: 312801 - protein, 17 aa, Homo sapiens
  CDR3 for alpha chain variable domain of TCR clone 156401 (TRAV26-1, TRAJ46)
IASSESEKKSSGDKLTF

SEQ ID NO: 312802 - protein, 13 aa, Homo sapiens
  CDR3 for beta chain variable domain of TCR clone 156401 (TRBV11-2, TRBJ2-1)
CASSLDLVNEQFF

SEQ ID NO: 312803 - protein, 17 aa, Homo sapiens
  CDR3 for alpha chain variable domain of TCR clone 156402 (TRAV23/DV6, TRAJ57)
CAASSTLSQGGSENLVF

SEQ ID NO: 312804 - protein, 14 aa, Homo sapiens
  CDR3 for beta chain variable domain of TCR clone 156402 (TRBV11-2, TRBJ2-3)
CASSLGGGANTQYF

SEQ ID NO: 312805 - protein, 12 aa, Homo sapiens
  CDR3 for alpha chain variable domain of TCR clone 156403 (TRAV23/DV6, TRAJ17)
CAAKAAGNKLTF

SEQ ID NO: 312806 - protein, 17 aa, Homo sapiens
  CDR3 for beta chain variable domain of TCR clone 156403 (TRBV5-5, TRBJ1-1)
CASSLRFRGLMNTEAVF

SEQ ID NO: 312807 - protein, 13 aa, Homo sapiens
  CDR3 for alpha chain variable domain of TCR clone 156404 (TRAV17, TRAJ7)
CATDNYGNNRLAF

SEQ ID NO: 312808 - protein, 13 aa, Homo sapiens
  CDR3 for beta chain variable domain of TCR clone 156404 (TRBV27, TRBJ2-1)
CAISSGSYNEQFF

SEQ ID NO: 312809 - protein, 17 aa, Homo sapiens
  CDR3 for alpha chain variable domain of TCR clone 156405 (TRAV38-2/DV8, TRAJ38)
CAYRSARGARNNRKLIW

SEQ ID NO: 312810 - protein, 13 aa, Homo sapiens
  CDR3 for beta chain variable domain of TCR clone 156405 (TRBV6-5, TRBJ2-1)
CASRGRVGNEQFF

SEQ ID NO: 312811 - protein, 12 aa, Homo sapiens
  CDR3 for alpha chain variable domain of TCR clone 156406 (TRAV3, TRAJ27)
CAVRDKAGKSNF

SEQ ID NO: 312812 - protein, 14 aa, Homo sapiens
  CDR3 for beta chain variable domain of TCR clone 156406 (TRBV5-1, TRBJ1-2)
CASSVDSTNYGYTF

SEQ ID NO: 312813 - protein, 23 aa, Homo sapiens
  CDR3 for alpha chain variable domain of TCR clone 156407 (TRAV30, TRAJ43)
CTLRPPSSVTQEPTSAALSDMRF

SEQ ID NO: 312814 - protein, 13 aa, Homo sapiens
  CDR3 for beta chain variable domain of TCR clone 156407 (TRBV12-4, TRBJ2-2)
CTSSITGSGELFF

SEQ ID NO: 312815 - protein, 13 aa, Homo sapiens
  CDR3 for alpha chain variable domain of TCR clone 156408 (TRAV8-3, TRAJ10)
WAILTGGGNKLTF

SEQ ID NO: 312816 - protein, 10 aa, Homo sapiens
  CDR3 for beta chain variable domain of TCR clone 156408 (TRBV20-1, TRBJ2-5)
CSARFETQYV

SEQ ID NO: 312817 - protein, 13 aa, Homo sapiens
  CDR3 for alpha chain variable domain of TCR clone 156409 (TRAV3, TRAJ15)
CAVRDQAGTALIF

SEQ ID NO: 312818 - protein, 11 aa, Homo sapiens
  CDR3 for beta chain variable domain of TCR clone 156409 (TRBV2, TRBJ1-1)
CASREGTEAFF

SEQ ID NO: 312819 - protein, 12 aa, Homo sapiens
  CDR3 for alpha chain variable domain of TCR clone 156410 (TRAV12-1, TRAJ40)
CVAYSGTYKYIF

SEQ ID NO: 312820 - protein, 14 aa, Homo sapiens
  CDR3 for beta chain variable domain of TCR clone 156410 (TRBV7-6, TRBJ2-1)
CASSLGGGADEQFF

SEQ ID NO: 312821 - protein, 13 aa, Homo sapiens
  CDR3 for alpha chain variable domain of TCR clone 156411 (TRAV1-2, TRAJ9)
CAALNTGGFKTIF

SEQ ID NO: 312822 - protein, 15 aa, Homo sapiens
  CDR3 for beta chain variable domain of TCR clone 156411 (TRBV19, TRBJ1-1)
CASASGQIQITEAFF

SEQ ID NO: 312823 - protein, 14 aa, Homo sapiens
  CDR3 for alpha chain variable domain of TCR clone 156412 (TRAV8-3, TRAJ4)
CAVGAAGGYNKLIF

SEQ ID NO: 312824 - protein, 15 aa, Homo sapiens
  CDR3 for beta chain variable domain of TCR clone 156412 (TRBV2, TRBJ2-1)
CASSEARSAYNEQFF

SEQ ID NO: 312825 - protein, 13 aa, Homo sapiens
  CDR3 for alpha chain variable domain of TCR clone 156413 (TRAV12-2, TRAJ9)
CAVLVTGGFKTIF

SEQ ID NO: 312826 - protein, 15 aa, Homo sapiens
  CDR3 for beta chain variable domain of TCR clone 156413 (TRBV6-3, TRBJ2-7)
CASSRTGVNLYEQYF

SEQ ID NO: 312827 - protein, 15 aa, Homo sapiens
  CDR3 for alpha chain variable domain of TCR clone 156414 (TRAV38-2/DV8, TRAJ47)
CAYMSAKGYGNKLVF

SEQ ID NO: 312828 - protein, 15 aa, Homo sapiens
  CDR3 for beta chain variable domain of TCR clone 156414 (TRBV6-6, TRBJ2-7)
CASSYSYGGSYEQYF

SEQ ID NO: 312829 - protein, 14 aa, Homo sapiens
  CDR3 for alpha chain variable domain of TCR clone 156415 (TRAV9-2, TRAJ39)
CALYIYNAGTMLTF

SEQ ID NO: 312830 - protein, 15 aa, Homo sapiens
  CDR3 for beta chain variable domain of TCR clone 156415 (TRBV9, TRBJ1-6)
CASSVAGTGDSPLHF

SEQ ID NO: 312831 - protein, 12 aa, Homo sapiens
  CDR3 for alpha chain variable domain of TCR clone 156416 (TRAV17, TRAJ45)
CAAGGGADGLTF

SEQ ID NO: 312832 - protein, 15 aa, Homo sapiens
  CDR3 for beta chain variable domain of TCR clone 156416 (TRBV20-1, TRBJ2-7)
CSARDRVPGMDEQYF

SEQ ID NO: 312833 - protein, 16 aa, Homo sapiens
  CDR3 for alpha chain variable domain of TCR clone 156417 (TRAV22, TRAJ45)
CAVERGKRGGADGLTF

SEQ ID NO: 312834 - protein, 12 aa, Homo sapiens
  CDR3 for beta chain variable domain of TCR clone 156417 (TRBV7-3, TRBJ2-3)
CASSSLTDTQYF

SEQ ID NO: 312835 - protein, 13 aa, Homo sapiens
  CDR3 for alpha chain variable domain of TCR clone 156418 (TRAV12-1, TRAJ5)
CVVNLPGRRALTF

SEQ ID NO: 312836 - protein, 14 aa, Homo sapiens
  CDR3 for beta chain variable domain of TCR clone 156418 (TRBV11-2, TRBJ2-3)
CASSRLARTDTQYF

SEQ ID NO: 312837 - protein, 12 aa, Homo sapiens
  CDR3 for alpha chain variable domain of TCR clone 156419 (TRAV13-2, TRAJ23)
CAERHRGGKLIF

SEQ ID NO: 312838 - protein, 13 aa, Homo sapiens
  CDR3 for beta chain variable domain of TCR clone 156419 (TRBV7-2, TRBJ1-1)
CASNLKGAKVAFF

SEQ ID NO: 312839 - protein, 12 aa, Homo sapiens
  CDR3 for alpha chain variable domain of TCR clone 156420 (TRAV8-3, TRAJ26)
CAGDNYGQNFVY

SEQ ID NO: 312840 - protein, 15 aa, Homo sapiens
  CDR3 for beta chain variable domain of TCR clone 156420 (TRBV9, TRBJ2-1)
CASSLAGSSYNEQFF

SEQ ID NO: 312841 - protein, 14 aa, Homo sapiens
  CDR3 for alpha chain variable domain of TCR clone 156421 (TRAV3, TRAJ27)
CAVRDDTNAGTSTF

SEQ ID NO: 312842 - protein, 15 aa, Homo sapiens
  CDR3 for beta chain variable domain of TCR clone 156421 (TRBV7-7, TRBJ2-2)
CATSKLAKNTGELFF

SEQ ID NO: 312843 - protein, 16 aa, Homo sapiens
  CDR3 for alpha chain variable domain of TCR clone 156422 (TRAV8-3, TRAJ10)
CAVGAILTGGGNKLTF

SEQ ID NO: 312844 - protein, 16 aa, Homo sapiens
  CDR3 for beta chain variable domain of TCR clone 156422 (TRBV7-2, TRBJ2-5)
CASSSKWLSGQETQYF

SEQ ID NO: 312845 - protein, 15 aa, Homo sapiens
  CDR3 for alpha chain variable domain of TCR clone 156423 (TRAV12-1, TRAJ8)
CVVNVENTGFQKLVF

SEQ ID NO: 312846 - protein, 15 aa, Homo sapiens
  CDR3 for beta chain variable domain of TCR clone 156423 (TRBV9, TRBJ1-4)
CASSVGGSTNEKLFF

SEQ ID NO: 312847 - protein, 11 aa, Homo sapiens
  CDR3 for alpha chain variable domain of TCR clone 156424 (TRAV13-2, TRAJ20)
CAENMSYKLSF

SEQ ID NO: 312848 - protein, 13 aa, Homo sapiens
  CDR3 for beta chain variable domain of TCR clone 156424 (TRBV20-1, TRBJ2-5)
CSAGYTGEETQYF

SEQ ID NO: 312849 - protein, 17 aa, Homo sapiens
  CDR3 for alpha chain variable domain of TCR clone 156425 (TRAV17, TRAJ7)
CAMLGRLAFGKGNQVVV

SEQ ID NO: 312850 - protein, 13 aa, Homo sapiens
  CDR3 for beta chain variable domain of TCR clone 156425 (TRBV12-4, TRBJ2-7)
CASSLERVREQYF

SEQ ID NO: 312851 - protein, 12 aa, Homo sapiens
  CDR3 for alpha chain variable domain of TCR clone 156426 (TRAV12-1, TRAJ20)
CVVNPEDYKLSF

SEQ ID NO: 312852 - protein, 12 aa, Homo sapiens
  CDR3 for beta chain variable domain of TCR clone 156426 (TRBV11-2, TRBJ2-2)
CASSLGGGELFF

SEQ ID NO: 312853 - protein, 12 aa, Homo sapiens
  CDR3 for alpha chain variable domain of TCR clone 156427 (TRAV13-1, TRAJ48)
CAANFGNEKLTF

SEQ ID NO: 312854 - protein, 11 aa, Homo sapiens
  CDR3 for beta chain variable domain of TCR clone 156427 (TRBV20-1, TRBJ1-5)
CGAQGDQPQHF

SEQ ID NO: 312855 - protein, 14 aa, Homo sapiens
  CDR3 for alpha chain variable domain of TCR clone 156428 (TRAV8-4, TRAJ13)
CSVTLSGGYQKVTF

SEQ ID NO: 312856 - protein, 13 aa, Homo sapiens
  CDR3 for beta chain variable domain of TCR clone 156428 (TRBV7-9, TRBJ1-2)
CASSLKQNYGYTF

SEQ ID NO: 312857 - protein, 16 aa, Homo sapiens
  CDR3 for alpha chain variable domain of TCR clone 156429 (TRAV30, TRAJ24)
CGTEIVDADSWGKFQF

SEQ ID NO: 312858 - protein, 13 aa, Homo sapiens
  CDR3 for beta chain variable domain of TCR clone 156429 (TRBV4-1, TRBJ2-2)
CASSQENTGELFL

SEQ ID NO: 312859 - protein, 14 aa, Homo sapiens
  CDR3 for alpha chain variable domain of TCR clone 156430 (TRAV17, TRAJ54)
CATDANQGAQKLVF

SEQ ID NO: 312860 - protein, 14 aa, Homo sapiens
  CDR3 for beta chain variable domain of TCR clone 156430 (TRBV7-9, TRBJ2-4)
CASSLAMGGNIQYF

SEQ ID NO: 312861 - protein, 21 aa, Homo sapiens
  CDR3 for alpha chain variable domain of TCR clone 156431 (TRAV12-1, TRAJ32)
SSVIQPPTSMTYGGATNKLIF

SEQ ID NO: 312862 - protein, 18 aa, Homo sapiens
  CDR3 for beta chain variable domain of TCR clone 156431 (TRBV20-1, TRBJ2-3)
CSASGLAGGPGTTDTQYF

SEQ ID NO: 312863 - protein, 16 aa, Homo sapiens
  CDR3 for alpha chain variable domain of TCR clone 156432 (TRAV30, TRAJ24)
CGTEIVDADSWGKFHL

SEQ ID NO: 312864 - protein, 12 aa, Homo sapiens
  CDR3 for beta chain variable domain of TCR clone 156432 (TRBV29-1, TRBJ2-7)
CSVGQTNYEQYF

SEQ ID NO: 312865 - protein, 22 aa, Homo sapiens
  CDR3 for alpha chain variable domain of TCR clone 156433 (TRAV3, TRAJ38)
CAVRDCLNAGNNHIQNPDPAVY

SEQ ID NO: 312866 - protein, 19 aa, Homo sapiens
  CDR3 for beta chain variable domain of TCR clone 156433 (TRBV7-2, TRBJ2-3)
CASSFLSRNWGGGTETQYF

SEQ ID NO: 312867 - protein, 17 aa, Homo sapiens
  CDR3 for alpha chain variable domain of TCR clone 156434 (TRAV26-1, TRAJ37)
CIVRVITVSSNTGKLIF

SEQ ID NO: 312868 - protein, 15 aa, Homo sapiens
  CDR3 for beta chain variable domain of TCR clone 156434 (TRBV7-2, TRBJ1-2)
CASSLVSGGDYGYTF

SEQ ID NO: 312869 - protein, 12 aa, Homo sapiens
  CDR3 for alpha chain variable domain of TCR clone 156435 (TRAV12-3, TRAJ17)
CAMTLTGSKLTF

SEQ ID NO: 312870 - protein, 13 aa, Homo sapiens
  CDR3 for beta chain variable domain of TCR clone 156435 (TRBV5-1, TRBJ1-1)
CASSADWDTEAFF

SEQ ID NO: 312871 - protein, 15 aa, Homo sapiens
  CDR3 for alpha chain variable domain of TCR clone 156436 (TRAV12-2, TRAJ53)
CAVNGGGGSNYKLTF

SEQ ID NO: 312872 - protein, 13 aa, Homo sapiens
  CDR3 for beta chain variable domain of TCR clone 156436 (TRBV4-1, TRBJ1-1)
CASSRKMNTEAFF

SEQ ID NO: 312873 - protein, 16 aa, Homo sapiens
  CDR3 for alpha chain variable domain of TCR clone 156437 (TRAV12-3, TRAJ53)
CAMSPGSGGSNHKMTF

SEQ ID NO: 312874 - protein, 11 aa, Homo sapiens
  CDR3 for beta chain variable domain of TCR clone 156437 (TRBV29-1, TRBJ2-5)
CSEDRTGTQYF

SEQ ID NO: 312875 - protein, 17 aa, Homo sapiens
  CDR3 for alpha chain variable domain of TCR clone 156438 (TRAV3, TRAJ6)
CAVRDGPRAVGSYIPTF

SEQ ID NO: 312876 - protein, 15 aa, Homo sapiens
  CDR3 for beta chain variable domain of TCR clone 156438 (TRBV6-3, TRBJ2-7)
CASSSPGTVFYEQYF

SEQ ID NO: 312877 - protein, 11 aa, Homo sapiens
  CDR3 for alpha chain variable domain of TCR clone 156439 (TRAV29/DV5, TRAJ49)
CAAFTGNQFYF

SEQ ID NO: 312878 - protein, 18 aa, Homo sapiens
  CDR3 for beta chain variable domain of TCR clone 156439 (TRBV20-1, TRBJ2-6)
CSAETTPTRGSGANVLTF

SEQ ID NO: 312879 - protein, 14 aa, Homo sapiens
  CDR3 for alpha chain variable domain of TCR clone 156440 (TRAV23/DV6, TRAJ4)
CAAPSSGGYNKLIF

SEQ ID NO: 312880 - protein, 14 aa, Homo sapiens
  CDR3 for beta chain variable domain of TCR clone 156440 (TRBV20-1, TRBJ2-7)
RSAKTGTGGYEQYF

SEQ ID NO: 312881 - protein, 13 aa, Homo sapiens
  CDR3 for alpha chain variable domain of TCR clone 156441 (TRAV8-1, TRAJ23)
CAVTGGQGGKLIF

SEQ ID NO: 312882 - protein, 14 aa, Homo sapiens
  CDR3 for beta chain variable domain of TCR clone 156441 (TRBV20-1, TRBJ1-1)
CSAQTRIGGTVAFF

SEQ ID NO: 312883 - protein, 15 aa, Homo sapiens
  CDR3 for alpha chain variable domain of TCR clone 156442 (TRAV12-3, TRAJ48)
CAMNAKNFGNEKLTF

SEQ ID NO: 312884 - protein, 14 aa, Homo sapiens
  CDR3 for beta chain variable domain of TCR clone 156442 (TRBV2, TRBJ1-6)
GASSESRNNSTLHF

SEQ ID NO: 312885 - protein, 18 aa, Homo sapiens
  CDR3 for alpha chain variable domain of TCR clone 156443 (TRAV13-1, TRAJ52)
CAAKNPNAGGTSYGKLTL

SEQ ID NO: 312886 - protein, 13 aa, Homo sapiens
  CDR3 for beta chain variable domain of TCR clone 156443 (TRBV27, TRBJ1-1)
CASSLSIGAEAFF

SEQ ID NO: 312887 - protein, 18 aa, Homo sapiens
  CDR3 for alpha chain variable domain of TCR clone 156444 (TRAV21, TRAJ52)
CAVRPSPAGGTSYGKLTF

SEQ ID NO: 312888 - protein, 14 aa, Homo sapiens
  CDR3 for beta chain variable domain of TCR clone 156444 (TRBV28, TRBJ1-1)
CASSPRTRWSEAFF

SEQ ID NO: 312889 - protein, 15 aa, Homo sapiens
  CDR3 for alpha chain variable domain of TCR clone 156445 (TRAV35, TRAJ58)
CAGRSQETSGSRLTF

SEQ ID NO: 312890 - protein, 11 aa, Homo sapiens
  CDR3 for beta chain variable domain of TCR clone 156445 (TRBV11-2, TRBJ1-1)
CASSINTEAFF

SEQ ID NO: 312891 - protein, 11 aa, Homo sapiens
  CDR3 for alpha chain variable domain of TCR clone 156446 (TRAV35, TRAJ33)
DRPDSNYQLIW

SEQ ID NO: 312892 - protein, 15 aa, Homo sapiens
  CDR3 for beta chain variable domain of TCR clone 156446 (TRBV20-1, TRBJ2-7)
CSAESGTSGAYEQYF

SEQ ID NO: 312893 - protein, 14 aa, Homo sapiens
  CDR3 for alpha chain variable domain of TCR clone 156447 (TRAV14/DV4, TRAJ26)
CAMREGTYGQNFVF

SEQ ID NO: 312894 - protein, 14 aa, Homo sapiens
  CDR3 for beta chain variable domain of TCR clone 156447 (TRBV7-3, TRBJ1-1)
CASSLGTGYTEAFF

SEQ ID NO: 312895 - protein, 21 aa, Homo sapiens
  CDR3 for alpha chain variable domain of TCR clone 156448 (TRAV1-1, TRAJ6)
CLLLLRCERLERTGGSYIPTF

SEQ ID NO: 312896 - protein, 15 aa, Homo sapiens
  CDR3 for beta chain variable domain of TCR clone 156448 (TRBV10-2, TRBJ2-7)
CASGARGATSSTSGR

SEQ ID NO: 312897 - protein, 12 aa, Homo sapiens
  CDR3 for alpha chain variable domain of TCR clone 156449 (TRAV8-3, TRAJ26)
CAGDNYGQNFVF

SEQ ID NO: 312898 - protein, 15 aa, Homo sapiens
  CDR3 for beta chain variable domain of TCR clone 156449 (TRBV25-1, TRBJ1-4)
CASSPGDSTNDKLFF

SEQ ID NO: 312899 - protein, 14 aa, Homo sapiens
  CDR3 for alpha chain variable domain of TCR clone 156450 (TRAV27, TRAJ23)
CAGAFDNQGGKLMF

SEQ ID NO: 312900 - protein, 15 aa, Homo sapiens
  CDR3 for beta chain variable domain of TCR clone 156450 (TRBV7-3, TRBJ2-7)
CASSLTGQGKYEQYF

SEQ ID NO: 312901 - protein, 12 aa, Homo sapiens
  CDR3 for alpha chain variable domain of TCR clone 156451 (TRAV12-3, TRAJ20)
CAMVREDYKLSF

SEQ ID NO: 312902 - protein, 13 aa, Homo sapiens
  CDR3 for beta chain variable domain of TCR clone 156451 (TRBV23-1, TRBJ1-4)
CASRGKFNEKLFF

SEQ ID NO: 312903 - protein, 13 aa, Homo sapiens
  CDR3 for alpha chain variable domain of TCR clone 156452 (TRAV27, TRAJ41)
CAGEGDSGYALNF

SEQ ID NO: 312904 - protein, 17 aa, Homo sapiens
  CDR3 for beta chain variable domain of TCR clone 156452 (TRBV5-5, TRBJ1-1)
CASSLRFRGLMNTEAFF

SEQ ID NO: 312905 - protein, 12 aa, Homo sapiens
  CDR3 for alpha chain variable domain of TCR clone 156453 (TRAV8-3, TRAJ20)
CAVGGGDYKLSF

SEQ ID NO: 312906 - protein, 14 aa, Homo sapiens
  CDR3 for beta chain variable domain of TCR clone 156453 (TRBV5-1, TRBJ2-7)
CASSRGESLYERYF

SEQ ID NO: 312907 - protein, 14 aa, Homo sapiens
  CDR3 for alpha chain variable domain of TCR clone 156454 (TRAV26-1, TRAJ54)
CIVRRTQGAQKLVF

SEQ ID NO: 312908 - protein, 16 aa, Homo sapiens
  CDR3 for beta chain variable domain of TCR clone 156454 (TRBV29-1, TRBJ1-2)
CSVEANRDIANYGYTF

SEQ ID NO: 312909 - protein, 17 aa, Homo sapiens
  CDR3 for alpha chain variable domain of TCR clone 156455 (TRAV3, TRAJ28)
CAVREAYSGAGSYQLTF

SEQ ID NO: 312910 - protein, 18 aa, Homo sapiens
  CDR3 for beta chain variable domain of TCR clone 156455 (TRBV27, TRBJ2-1)
CASGNGAVGVGSKNEQFF

SEQ ID NO: 312911 - protein, 10 aa, Homo sapiens
  CDR3 for alpha chain variable domain of TCR clone 156456 (TRAV12-3, TRAJ34)
CAMSADKLIF

SEQ ID NO: 312912 - protein, 15 aa, Homo sapiens
  CDR3 for beta chain variable domain of TCR clone 156456 (TRBV11-3, TRBJ2-3)
CASLKDGREGDTQYF

SEQ ID NO: 312913 - protein, 14 aa, Homo sapiens
  CDR3 for alpha chain variable domain of TCR clone 156457 (TRAV8-3, TRAJ13)
CAVGAAGGYQKVTF

SEQ ID NO: 312914 - protein, 14 aa, Homo sapiens
  CDR3 for beta chain variable domain of TCR clone 156457 (TRBV7-8, TRBJ2-2)
WASSLDPNTGELFF

SEQ ID NO: 312915 - protein, 15 aa, Homo sapiens
  CDR3 for alpha chain variable domain of TCR clone 156458 (TRAV21, TRAJ24)
CAARPSTDRWGKLQF

SEQ ID NO: 312916 - protein, 13 aa, Homo sapiens
  CDR3 for beta chain variable domain of TCR clone 156458 (TRBV11-2, TRBJ2-5)
CASSSTGEETQYF

SEQ ID NO: 312917 - protein, 23 aa, Homo sapiens
  CDR3 for alpha chain variable domain of TCR clone 156459 (TRAV3, TRAJ38)
CAVRDCLNAGNNHIQNPDPAVYQ

SEQ ID NO: 312918 - protein, 13 aa, Homo sapiens
  CDR3 for beta chain variable domain of TCR clone 156459 (TRBV23-1, TRBJ1-4)
CASRGKFNEELFF

SEQ ID NO: 312919 - protein, 14 aa, Homo sapiens
  CDR3 for alpha chain variable domain of TCR clone 156460 (TRAV2, TRAJ9)
CAVEGRSGGFKTIF

SEQ ID NO: 312920 - protein, 17 aa, Homo sapiens
  CDR3 for beta chain variable domain of TCR clone 156460 (TRBV7-8, TRBJ2-6)
CASSAGTGGAGANVLTL

SEQ ID NO: 312921 - protein, 13 aa, Homo sapiens
  CDR3 for alpha chain variable domain of TCR clone 156461 (TRAV3, TRAJ43)
CAVKARNNNDMRF

SEQ ID NO: 312922 - protein, 13 aa, Homo sapiens
  CDR3 for beta chain variable domain of TCR clone 156461 (TRBV7-9, TRBJ2-2)
CASSFSVAGDLVR

SEQ ID NO: 312923 - protein, 11 aa, Homo sapiens
  CDR3 for alpha chain variable domain of TCR clone 156462 (TRAV35, TRAJ30)
CAGPGDDTIIF

SEQ ID NO: 312924 - protein, 14 aa, Homo sapiens
  CDR3 for beta chain variable domain of TCR clone 156462 (TRBV7-6, TRBJ1-6)
CASSQAGGGSPLHF

SEQ ID NO: 312925 - protein, 17 aa, Homo sapiens
  CDR3 for alpha chain variable domain of TCR clone 156463 (TRAV3, TRAJ6)
CAVRDGPRAGGSYTPTF

SEQ ID NO: 312926 - protein, 15 aa, Homo sapiens
  CDR3 for beta chain variable domain of TCR clone 156463 (TRBV27, TRBJ2-1)
CASSNGGGSSNEQFF

SEQ ID NO: 312927 - protein, 17 aa, Homo sapiens
  CDR3 for alpha chain variable domain of TCR clone 156464 (TRAV13-2, TRAJ5)
CAESVVIVGHGQESTYF

SEQ ID NO: 312928 - protein, 18 aa, Homo sapiens
  CDR3 for beta chain variable domain of TCR clone 156464 (TRBV4-1, TRBJ2-3)
CASSHQLAGGRSTDTQYF

SEQ ID NO: 312929 - protein, 10 aa, Homo sapiens
  CDR3 for alpha chain variable domain of TCR clone 156465 (TRAV8-2, TRAJ41)
CVVSELRRTQ

SEQ ID NO: 312930 - protein, 14 aa, Homo sapiens
  CDR3 for beta chain variable domain of TCR clone 156465 (TRBV28, TRBJ1-5)
CASSLFPGVQPQHC

SEQ ID NO: 312931 - protein, 12 aa, Homo sapiens
  CDR3 for alpha chain variable domain of TCR clone 156466 (TRAV2, TRAJ10)
CASTGGGNKLTF

SEQ ID NO: 312932 - protein, 17 aa, Homo sapiens
  CDR3 for beta chain variable domain of TCR clone 156466 (TRBV7-8, TRBJ2-6)
CASSAGTGGAGANVLTF

SEQ ID NO: 312933 - protein, 13 aa, Homo sapiens
  CDR3 for alpha chain variable domain of TCR clone 156467 (TRAV12-2, TRAJ10)
CAVPTGGGNKLTF

SEQ ID NO: 312934 - protein, 15 aa, Homo sapiens
  CDR3 for beta chain variable domain of TCR clone 156467 (TRBV19, TRBJ1-6)
CASSTQGAVGSPLHF

SEQ ID NO: 312935 - protein, 13 aa, Homo sapiens
  CDR3 for alpha chain variable domain of TCR clone 156468 (TRAV13-1, TRAJ42)
CAASELWRKPRTP

SEQ ID NO: 312936 - protein, 12 aa, Homo sapiens
  CDR3 for beta chain variable domain of TCR clone 156468 (TRBV7-9, TRBJ2-7)
CASSLEGYEQYF

SEQ ID NO: 312937 - protein, 17 aa, Homo sapiens
  CDR3 for alpha chain variable domain of TCR clone 156469 (TRAV13-1, TRAJ31)
CAPRDILMFGDGTQLVV

SEQ ID NO: 312938 - protein, 12 aa, Homo sapiens
  CDR3 for beta chain variable domain of TCR clone 156469 (TRBV7-9, TRBJ2-7)
CASSLEGYEQYF

SEQ ID NO: 312939 - protein, 18 aa, Homo sapiens
  CDR3 for alpha chain variable domain of TCR clone 156470 (TRAV13-1, TRAJ52)
CAAKNPNAGSTSYGKLTF

SEQ ID NO: 312940 - protein, 15 aa, Homo sapiens
  CDR3 for beta chain variable domain of TCR clone 156470 (TRBV28, TRBJ2-1)
CASSIIAGGRSEQFF

SEQ ID NO: 312941 - protein, 15 aa, Homo sapiens
  CDR3 for alpha chain variable domain of TCR clone 156471 (TRAV14/DV4, TRAJ33)
CAMREGRGSNYQLIW

SEQ ID NO: 312942 - protein, 15 aa, Homo sapiens
  CDR3 for beta chain variable domain of TCR clone 156471 (TRBV5-5, TRBJ1-5)
CASSSTPGSNQPQHF

SEQ ID NO: 312943 - protein, 13 aa, Homo sapiens
  CDR3 for alpha chain variable domain of TCR clone 156472 (TRAV36/DV7, TRAJ45)
CVHSGGGADGLTF

SEQ ID NO: 312944 - protein, 13 aa, Homo sapiens
  CDR3 for beta chain variable domain of TCR clone 156472 (TRBV12-5, TRBJ2-3)
CASQNRGTDTQYF

SEQ ID NO: 312945 - protein, 16 aa, Homo sapiens
  CDR3 for alpha chain variable domain of TCR clone 156473 (TRAV38-1, TRAJ42)
CAFPLNYGGSQGNLIF

SEQ ID NO: 312946 - protein, 15 aa, Homo sapiens
  CDR3 for beta chain variable domain of TCR clone 156473 (TRBV7-9, TRBJ2-1)
CASSFVGAGKNEQFF

SEQ ID NO: 312947 - protein, 14 aa, Homo sapiens
  CDR3 for alpha chain variable domain of TCR clone 156474 (TRAV17, TRAJ22)
CATSPSGSARQLPF

SEQ ID NO: 312948 - protein, 15 aa, Homo sapiens
  CDR3 for beta chain variable domain of TCR clone 156474 (TRBV6-3, TRBJ2-7)
CASSSPGTVFYEQYF

SEQ ID NO: 312949 - protein, 15 aa, Homo sapiens
  CDR3 for alpha chain variable domain of TCR clone 156475 (TRAV13-1, TRAJ44)
CAASRNTGTASKLTF

SEQ ID NO: 312950 - protein, 14 aa, Homo sapiens
  CDR3 for beta chain variable domain of TCR clone 156475 (TRBV2, TRBJ2-7)
CASSLASGGYEQYF

SEQ ID NO: 312951 - protein, 17 aa, Homo sapiens
  CDR3 for alpha chain variable domain of TCR clone 156476 (TRAV13-1, TRAJ52)
CAAGRNAGGTSYGKLTF

SEQ ID NO: 312952 - protein, 16 aa, Homo sapiens
  CDR3 for beta chain variable domain of TCR clone 156476 (TRBV7-2, TRBJ1-3)
CASSRLEASSGNTIYF

SEQ ID NO: 312953 - protein, 14 aa, Homo sapiens
  CDR3 for alpha chain variable domain of TCR clone 156477 (TRAV12-2, TRAJ3)
CAVSIYSSASKIIF

SEQ ID NO: 312954 - protein, 14 aa, Homo sapiens
  CDR3 for beta chain variable domain of TCR clone 156477 (TRBV27, TRBJ2-1)
CAGSIAETYNEQFF

SEQ ID NO: 312955 - protein, 12 aa, Homo sapiens
  CDR3 for alpha chain variable domain of TCR clone 156478 (TRAV38-1, TRAJ34)
CSFMKETDKLIF

SEQ ID NO: 312956 - protein, 17 aa, Homo sapiens
  CDR3 for beta chain variable domain of TCR clone 156478 (TRBV7-8, TRBJ2-6)
CASSAGTGGAGANVLTF

SEQ ID NO: 312957 - protein, 23 aa, Homo sapiens
  CDR3 for alpha chain variable domain of TCR clone 156479 (TRAV41, TRAJ32)
CAVRIMVVLQTSSSLELALCLLS

SEQ ID NO: 312958 - protein, 14 aa, Homo sapiens
  CDR3 for beta chain variable domain of TCR clone 156479 (TRBV11-2, TRBJ2-1)
CQQQNRGLIYEQFF

SEQ ID NO: 312959 - protein, 12 aa, Homo sapiens
  CDR3 for alpha chain variable domain of TCR clone 156480 (TRAV12-2, TRAJ10)
WGVTGGGNKLTF

SEQ ID NO: 312960 - protein, 16 aa, Homo sapiens
  CDR3 for beta chain variable domain of TCR clone 156480 (TRBV24-1, TRBJ2-3)
CATSDRRQDLTDTQHF

SEQ ID NO: 312961 - protein, 18 aa, Homo sapiens
  CDR3 for alpha chain variable domain of TCR clone 156481 (TRAV9-2, TRAJ52)
CALSRHNAGGTSYGKLTF

SEQ ID NO: 312962 - protein, 14 aa, Homo sapiens
  CDR3 for beta chain variable domain of TCR clone 156481 (TRBV19, TRBJ2-1)
CAGPTFVLSGEQFF

SEQ ID NO: 312963 - protein, 13 aa, Homo sapiens
  CDR3 for alpha chain variable domain of TCR clone 156482 (TRAV8-3, TRAJ43)
CAVGPDNNNDMRF

SEQ ID NO: 312964 - protein, 13 aa, Homo sapiens
  CDR3 for beta chain variable domain of TCR clone 156482 (TRBV20-1, TRBJ1-1)
CSARGGGNTEAFF

SEQ ID NO: 312965 - protein, 13 aa, Homo sapiens
  CDR3 for alpha chain variable domain of TCR clone 156483 (TRAV23/DV6, TRAJ12)
CAPRVDSSYKLIF

SEQ ID NO: 312966 - protein, 12 aa, Homo sapiens
  CDR3 for beta chain variable domain of TCR clone 156483 (TRBV7-6, TRBJ2-5)
CASSLSQETQYF

SEQ ID NO: 312967 - protein, 16 aa, Homo sapiens
  CDR3 for alpha chain variable domain of TCR clone 156484 (TRAV13-2, TRAJ53)
CAENANSGGSNYKLTF

SEQ ID NO: 312968 - protein, 13 aa, Homo sapiens
  CDR3 for beta chain variable domain of TCR clone 156484 (TRBV7-9, TRBJ1-2)
CASSLKQNYGYTF

SEQ ID NO: 312969 - protein, 12 aa, Homo sapiens
  CDR3 for alpha chain variable domain of TCR clone 156485 (TRAV3, TRAJ20)
CAVRDPDYKLIF

SEQ ID NO: 312970 - protein, 15 aa, Homo sapiens
  CDR3 for beta chain variable domain of TCR clone 156485 (TRBV7-9, TRBJ1-6)
CASSSPGRGNSPLHF

SEQ ID NO: 312971 - protein, 12 aa, Homo sapiens
  CDR3 for alpha chain variable domain of TCR clone 156486 (TRAV36/DV7, TRAJ37)
CASYANTGKLIF

SEQ ID NO: 312972 - protein, 14 aa, Homo sapiens
  CDR3 for beta chain variable domain of TCR clone 156486 (TRBV6-3, TRBJ1-4)
CASSGQNLNEKLFF

SEQ ID NO: 312973 - protein, 16 aa, Homo sapiens
  CDR3 for alpha chain variable domain of TCR clone 156487 (TRAV26-1, TRAJ45)
CIVEKYSGGGADGRTF

SEQ ID NO: 312974 - protein, 15 aa, Homo sapiens
  CDR3 for beta chain variable domain of TCR clone 156487 (TRBV23-1, TRBJ2-7)
CASKVGVGGGYEQYF

SEQ ID NO: 312975 - protein, 14 aa, Homo sapiens
  CDR3 for alpha chain variable domain of TCR clone 156488 (TRAV8-3, TRAJ11)
CCGLLNSGYSTLTF

SEQ ID NO: 312976 - protein, 16 aa, Homo sapiens
  CDR3 for beta chain variable domain of TCR clone 156488 (TRBV7-9, TRBJ1-2)
CASSLGFSSGEDGYTF

SEQ ID NO: 312977 - protein, 14 aa, Homo sapiens
  CDR3 for alpha chain variable domain of TCR clone 156489 (TRAV16, TRAJ32)
CALKSGGATNKIIF

SEQ ID NO: 312978 - protein, 13 aa, Homo sapiens
  CDR3 for beta chain variable domain of TCR clone 156489 (TRBV15, TRBJ1-6)
CATSGGLNSPLHF

SEQ ID NO: 312979 - protein, 12 aa, Homo sapiens
  CDR3 for alpha chain variable domain of TCR clone 156490 (TRAV13-1, TRAJ17)
CAARTAGNKRTF

SEQ ID NO: 312980 - protein, 15 aa, Homo sapiens
  CDR3 for beta chain variable domain of TCR clone 156490 (TRBV7-6, TRBJ1-1)
CASSPQGGANTEAFF

SEQ ID NO: 312981 - protein, 15 aa, Homo sapiens
  CDR3 for alpha chain variable domain of TCR clone 156491 (TRAV12-3, TRAJ6)
CAMSATTGGSDIPTC

SEQ ID NO: 312982 - protein, 16 aa, Homo sapiens
  CDR3 for beta chain variable domain of TCR clone 156491 (TRBV27, TRBJ2-5)
CASSFGPGGTKETQYF

SEQ ID NO: 312983 - protein, 13 aa, Homo sapiens
  CDR3 for alpha chain variable domain of TCR clone 156492 (TRAV1-1, TRAJ27)
CAVRKHQCRQINL

SEQ ID NO: 312984 - protein, 14 aa, Homo sapiens
  CDR3 for beta chain variable domain of TCR clone 156492 (TRBV7-6, TRBJ2-6)
RASSLSGGANVLTF

SEQ ID NO: 312985 - protein, 11 aa, Homo sapiens
  CDR3 for alpha chain variable domain of TCR clone 156493 (TRAV12-3, TRAJ16)
LTGGDGQKLLF

SEQ ID NO: 312986 - protein, 20 aa, Homo sapiens
  CDR3 for beta chain variable domain of TCR clone 156493 (TRBV7-8, TRBJ2-2)
CASSHLFPGPTIHITGELFF

SEQ ID NO: 312987 - protein, 12 aa, Homo sapiens
  CDR3 for alpha chain variable domain of TCR clone 156494 (TRAV27, TRAJ9)
CAGESGGFKTIF

SEQ ID NO: 312988 - protein, 16 aa, Homo sapiens
  CDR3 for beta chain variable domain of TCR clone 156494 (TRBV12-4, TRBJ2-3)
CASSFISGSGTDTQYF

SEQ ID NO: 312989 - protein, 18 aa, Homo sapiens
  CDR3 for alpha chain variable domain of TCR clone 156495 (TRAV21, TRAJ52)
CAVRPSPAGGTSYGKLTF

SEQ ID NO: 312990 - protein, 17 aa, Homo sapiens
  CDR3 for beta chain variable domain of TCR clone 156495 (TRBV13, TRBJ2-3)
CASSLSRVSGGKNTQYF

SEQ ID NO: 312991 - protein, 14 aa, Homo sapiens
  CDR3 for alpha chain variable domain of TCR clone 156496 (TRAV21, TRAJ37)
CPRPGPGNTGKLIF

SEQ ID NO: 312992 - protein, 16 aa, Homo sapiens
  CDR3 for beta chain variable domain of TCR clone 156496 (TRBV6-6, TRBJ2-3)
CASSYSHAGSTDTQYF

SEQ ID NO: 312993 - protein, 11 aa, Homo sapiens
  CDR3 for alpha chain variable domain of TCR clone 156497 (TRAV2, TRAJ13)
CASGGYQKVTF

SEQ ID NO: 312994 - protein, 17 aa, Homo sapiens
  CDR3 for beta chain variable domain of TCR clone 156497 (TRBV20-1, TRBJ2-2)
CSASGSGQGGLTGELVF

SEQ ID NO: 312995 - protein, 12 aa, Homo sapiens
  CDR3 for alpha chain variable domain of TCR clone 156498 (TRAV16, TRAJ10)
CSRTGGGTKLTF

SEQ ID NO: 312996 - protein, 12 aa, Homo sapiens
  CDR3 for beta chain variable domain of TCR clone 156498 (TRBV2, TRBJ1-1)
YCRWTVNTEAFF

SEQ ID NO: 312997 - protein, 14 aa, Homo sapiens
  CDR3 for alpha chain variable domain of TCR clone 156499 (TRAV12-2, TRAJ17)
CAVLFKAAGNKLTI

SEQ ID NO: 312998 - protein, 17 aa, Homo sapiens
  CDR3 for beta chain variable domain of TCR clone 156499 (TRBV20-1, TRBJ2-2)
CSASGSGQGGLTGELFF

SEQ ID NO: 312999 - protein, 15 aa, Homo sapiens
  CDR3 for alpha chain variable domain of TCR clone 156500 (TRAV27, TRAJ38)
CAACRNAGNNRKLIW

SEQ ID NO: 313000 - protein, 13 aa, Homo sapiens
  CDR3 for beta chain variable domain of TCR clone 156500 (TRBV20-1, TRBJ1-1)
CSARAGGNTEAFF

SEQ ID NO: 313001 - protein, 12 aa, Homo sapiens
  CDR3 for alpha chain variable domain of TCR clone 156501 (TRAV23/DV6, TRAJ49)
CSASSTGNQSYF

SEQ ID NO: 313002 - protein, 15 aa, Homo sapiens
  CDR3 for beta chain variable domain of TCR clone 156501 (TRBV10-3, TRBJ2-3)
CAIDTSGRRTDTQYS

SEQ ID NO: 313003 - protein, 13 aa, Homo sapiens
  CDR3 for alpha chain variable domain of TCR clone 156502 (TRAV3, TRAJ27)
CAVRPLGAGKSTF

SEQ ID NO: 313004 - protein, 14 aa, Homo sapiens
  CDR3 for beta chain variable domain of TCR clone 156502 (TRBV18, TRBJ1-2)
CASSPDRVVYGYTF

SEQ ID NO: 313005 - protein, 19 aa, Homo sapiens
  CDR3 for alpha chain variable domain of TCR clone 156503 (TRAV26-1, TRAJ52)
CIVRAHRNAGGTSSGKLTF

SEQ ID NO: 313006 - protein, 13 aa, Homo sapiens
  CDR3 for beta chain variable domain of TCR clone 156503 (TRBV20-1, TRBJ1-6)
CSAPLGVGSPLHF

SEQ ID NO: 313007 - protein, 10 aa, Homo sapiens
  CDR3 for alpha chain variable domain of TCR clone 156504 (TRAV3, TRAJ3)
CAVVQQCFQD

SEQ ID NO: 313008 - protein, 14 aa, Homo sapiens
  CDR3 for beta chain variable domain of TCR clone 156504 (TRBV6-1, TRBJ1-3)
CASVQGGGGNTIYF

SEQ ID NO: 313009 - protein, 14 aa, Homo sapiens
  CDR3 for alpha chain variable domain of TCR clone 156505 (TRAV8-3, TRAJ10)
CAVGNAGGGNKLTF

SEQ ID NO: 313010 - protein, 15 aa, Homo sapiens
  CDR3 for beta chain variable domain of TCR clone 156505 (TRBV4-2, TRBJ1-2)
CASSQRTGGRDGYTF

SEQ ID NO: 313011 - protein, 11 aa, Homo sapiens
  CDR3 for alpha chain variable domain of TCR clone 156506 (TRAV21, TRAJ39)
LLVNAGNMLPF

SEQ ID NO: 313012 - protein, 14 aa, Homo sapiens
  CDR3 for beta chain variable domain of TCR clone 156506 (TRBV19, TRBJ2-1)
CASPTFVLSGEQFF

SEQ ID NO: 313013 - protein, 16 aa, Homo sapiens
  CDR3 for alpha chain variable domain of TCR clone 156507 (TRAV30, TRAJ24)
CGTEIVDADSWGKFQF

SEQ ID NO: 313014 - protein, 19 aa, Homo sapiens
  CDR3 for beta chain variable domain of TCR clone 156507 (TRBV25-1, TRBJ2-2)
CASLVYRVDRGRKTGELFF

SEQ ID NO: 313015 - protein, 14 aa, Homo sapiens
  CDR3 for alpha chain variable domain of TCR clone 156508 (TRAV26-1, TRAJ40)
CIVRVGEGTYKYIF

SEQ ID NO: 313016 - protein, 14 aa, Homo sapiens
  CDR3 for beta chain variable domain of TCR clone 156508 (TRBV19, TRBJ2-1)
CASPTFVLSGEQFF

SEQ ID NO: 313017 - protein, 13 aa, Homo sapiens
  CDR3 for alpha chain variable domain of TCR clone 156509 (TRAV3, TRAJ36)
CAVRHTGAHNLFF

SEQ ID NO: 313018 - protein, 15 aa, Homo sapiens
  CDR3 for beta chain variable domain of TCR clone 156509 (TRBV24-1, TRBJ2-1)
CATSGSGGFYNEQFF

SEQ ID NO: 313019 - protein, 14 aa, Homo sapiens
  CDR3 for alpha chain variable domain of TCR clone 156510 (TRAV13-1, TRAJ22)
CAASYSGSARHLTF

SEQ ID NO: 313020 - protein, 13 aa, Homo sapiens
  CDR3 for beta chain variable domain of TCR clone 156510 (TRBV6-3, TRBJ1-2)
CASSLTGDYGYTF

SEQ ID NO: 313021 - protein, 16 aa, Homo sapiens
  CDR3 for alpha chain variable domain of TCR clone 156511 (TRAV13-1, TRAJ13)
CTAFFLGVTRKLPLEL

SEQ ID NO: 313022 - protein, 16 aa, Homo sapiens
  CDR3 for beta chain variable domain of TCR clone 156511 (TRBV5-1, TRBJ2-3)
CASSLGLAVYTDTQYF

SEQ ID NO: 313023 - protein, 13 aa, Homo sapiens
  CDR3 for alpha chain variable domain of TCR clone 156512 (TRAV36/DV7, TRAJ49)
CAVEANTGYQFYF

SEQ ID NO: 313024 - protein, 14 aa, Homo sapiens
  CDR3 for beta chain variable domain of TCR clone 156512 (TRBV20-1, TRBJ2-5)
CSASSGRAAETQYF

SEQ ID NO: 313025 - protein, 13 aa, Homo sapiens
  CDR3 for alpha chain variable domain of TCR clone 156513 (TRAV2, TRAJ40)
CAVVTSGTYKYIF

SEQ ID NO: 313026 - protein, 13 aa, Homo sapiens
  CDR3 for beta chain variable domain of TCR clone 156513 (TRBV20-1, TRBJ1-1)
CSAPLGGGTGAFF

SEQ ID NO: 313027 - protein, 15 aa, Homo sapiens
  CDR3 for alpha chain variable domain of TCR clone 156514 (TRAV21, TRAJ24)
CAARSSTDSWGKFQF

SEQ ID NO: 313028 - protein, 13 aa, Homo sapiens
  CDR3 for beta chain variable domain of TCR clone 156514 (TRBV11-3, TRBJ2-5)
CASSSTGEETQYF

SEQ ID NO: 313029 - protein, 14 aa, Homo sapiens
  CDR3 for alpha chain variable domain of TCR clone 156515 (TRAV26-1, TRAJ52)
CIVKGGTSYGKLTF

SEQ ID NO: 313030 - protein, 16 aa, Homo sapiens
  CDR3 for beta chain variable domain of TCR clone 156515 (TRBV2, TRBJ2-7)
CASSEPWTGPSYEQYF

SEQ ID NO: 313031 - protein, 14 aa, Homo sapiens
  CDR3 for alpha chain variable domain of TCR clone 156516 (TRAV1-1, TRAJ27)
CAVIYNTNAGKSTF

SEQ ID NO: 313032 - protein, 15 aa, Homo sapiens
  CDR3 for beta chain variable domain of TCR clone 156516 (TRBV7-2, TRBJ2-1)
CASSSGLAGGNESSS

SEQ ID NO: 313033 - protein, 13 aa, Homo sapiens
  CDR3 for alpha chain variable domain of TCR clone 156517 (TRAV27, TRAJ39)
CAGVNNAGNMLTF

SEQ ID NO: 313034 - protein, 15 aa, Homo sapiens
  CDR3 for beta chain variable domain of TCR clone 156517 (TRBV9, TRBJ2-1)
CASSLAGSSYNEQFF

SEQ ID NO: 313035 - protein, 17 aa, Homo sapiens
  CDR3 for alpha chain variable domain of TCR clone 156518 (TRAV3, TRAJ28)
CAVREAYSGAGSYQRTF

SEQ ID NO: 313036 - protein, 18 aa, Homo sapiens
  CDR3 for beta chain variable domain of TCR clone 156518 (TRBV27, TRBJ2-1)
CASGNRAVGVGSKNEQFF

SEQ ID NO: 313037 - protein, 16 aa, Homo sapiens
  CDR3 for alpha chain variable domain of TCR clone 156519 (TRAV4, TRAJ18)
CCVLLIGGSTQGRLYF

SEQ ID NO: 313038 - protein, 12 aa, Homo sapiens
  CDR3 for beta chain variable domain of TCR clone 156519 (TRBV6-3, TRBJ2-7)
CASSLTPYEQYF

SEQ ID NO: 313039 - protein, 16 aa, Homo sapiens
  CDR3 for alpha chain variable domain of TCR clone 156520 (TRAV17, TRAJ35)
CATAEGGIGFGNVLHC

SEQ ID NO: 313040 - protein, 20 aa, Homo sapiens
  CDR3 for beta chain variable domain of TCR clone 156520 (TRBV28, TRBJ2-1)
CASTPIGRSPGLAGGNEQFF

SEQ ID NO: 313041 - protein, 14 aa, Homo sapiens
  CDR3 for alpha chain variable domain of TCR clone 156521 (TRAV34, TRAJ44)
CGADGTGTASKLTF

SEQ ID NO: 313042 - protein, 17 aa, Homo sapiens
  CDR3 for beta chain variable domain of TCR clone 156521 (TRBV11-2, TRBJ2-1)
CASSLYPPGVEYNEQFL

SEQ ID NO: 313043 - protein, 14 aa, Homo sapiens
  CDR3 for alpha chain variable domain of TCR clone 156522 (TRAV12-2, TRAJ45)
CAVNIGGGADRLTF

SEQ ID NO: 313044 - protein, 17 aa, Homo sapiens
  CDR3 for beta chain variable domain of TCR clone 156522 (TRBV7-8, TRBJ2-6)
CASSAGTGGAGANVLTF

SEQ ID NO: 313045 - protein, 12 aa, Homo sapiens
  CDR3 for alpha chain variable domain of TCR clone 156523 (TRAV30, TRAJ43)
CGTEERGNDMRF

SEQ ID NO: 313046 - protein, 15 aa, Homo sapiens
  CDR3 for beta chain variable domain of TCR clone 156523 (TRBV6-1, TRBJ2-3)
CASSERGGITDTQYF

SEQ ID NO: 313047 - protein, 21 aa, Homo sapiens
  CDR3 for alpha chain variable domain of TCR clone 156524 (TRAV1-1, TRAJ6)
CAVRREEATYLHLEEEPALLF

SEQ ID NO: 313048 - protein, 15 aa, Homo sapiens
  CDR3 for beta chain variable domain of TCR clone 156524 (TRBV6-6, TRBJ2-1)
CATRQGVSSYNEQFL

SEQ ID NO: 313049 - protein, 19 aa, Homo sapiens
  CDR3 for alpha chain variable domain of TCR clone 156525 (TRAV38-2/DV8, TRAJ45)
CAYRRSYEYSGGGADGLTF

SEQ ID NO: 313050 - protein, 13 aa, Homo sapiens
  CDR3 for beta chain variable domain of TCR clone 156525 (TRBV27, TRBJ1-4)
CASSLMGDEKLFF

SEQ ID NO: 313051 - protein, 12 aa, Homo sapiens
  CDR3 for alpha chain variable domain of TCR clone 156526 (TRAV35, TRAJ39)
LAPNNAGNMLTF

SEQ ID NO: 313052 - protein, 16 aa, Homo sapiens
  CDR3 for beta chain variable domain of TCR clone 156526 (TRBV5-1, TRBJ2-3)
CASSLGLAVYTDTQYF

SEQ ID NO: 313053 - protein, 11 aa, Homo sapiens
  CDR3 for alpha chain variable domain of TCR clone 156527 (TRAV12-3, TRAJ27)
CAMANAGKSTF

SEQ ID NO: 313054 - protein, 16 aa, Homo sapiens
  CDR3 for beta chain variable domain of TCR clone 156527 (TRBV5-4, TRBJ2-3)
CASQQPGAGGADTQYF

SEQ ID NO: 313055 - protein, 12 aa, Homo sapiens
  CDR3 for alpha chain variable domain of TCR clone 156528 (TRAV12-2, TRAJ53)
CAVNGGEVATIT

SEQ ID NO: 313056 - protein, 17 aa, Homo sapiens
  CDR3 for beta chain variable domain of TCR clone 156528 (TRBV7-3, TRBJ2-3)
CASSLMKRMRGADTQYF

SEQ ID NO: 313057 - protein, 14 aa, Homo sapiens
  CDR3 for alpha chain variable domain of TCR clone 156529 (TRAV12-3, TRAJ10)
SHLPLTGGGNKLTF

SEQ ID NO: 313058 - protein, 13 aa, Homo sapiens
  CDR3 for beta chain variable domain of TCR clone 156529 (TRBV10-3, TRBJ2-7)
CAISEKGGYEQYF

SEQ ID NO: 313059 - protein, 11 aa, Homo sapiens
  CDR3 for alpha chain variable domain of TCR clone 156530 (TRAV3, TRAJ21)
CAVGNFKKFYF

SEQ ID NO: 313060 - protein, 16 aa, Homo sapiens
  CDR3 for beta chain variable domain of TCR clone 156530 (TRBV19, TRBJ2-1)
CASSKAGPSSYNEQFF

SEQ ID NO: 313061 - protein, 16 aa, Homo sapiens
  CDR3 for alpha chain variable domain of TCR clone 156531 (TRAV3, TRAJ3)
CAVRDRAKSSASKIIF

SEQ ID NO: 313062 - protein, 13 aa, Homo sapiens
  CDR3 for beta chain variable domain of TCR clone 156531 (TRBV10-3, TRBJ2-7)
CASKLTVNYEQYF

SEQ ID NO: 313063 - protein, 13 aa, Homo sapiens
  CDR3 for alpha chain variable domain of TCR clone 156532 (TRAV13-2, TRAJ53)
CAENMGSDYKLTF

SEQ ID NO: 313064 - protein, 13 aa, Homo sapiens
  CDR3 for beta chain variable domain of TCR clone 156532 (TRBV4-1, TRBJ2-2)
CASSQENTGELFF

SEQ ID NO: 313065 - protein, 12 aa, Homo sapiens
  CDR3 for alpha chain variable domain of TCR clone 156533 (TRAV13-1, TRAJ27)
CADHTNAGKSTF

SEQ ID NO: 313066 - protein, 14 aa, Homo sapiens
  CDR3 for beta chain variable domain of TCR clone 156533 (TRBV19, TRBJ2-2)
CASSGQGIAGELFF

SEQ ID NO: 313067 - protein, 17 aa, Homo sapiens
  CDR3 for alpha chain variable domain of TCR clone 156534 (TRAV38-1, TRAJ52)
CAFPPTAGGTSYGKLTF

SEQ ID NO: 313068 - protein, 14 aa, Homo sapiens
  CDR3 for beta chain variable domain of TCR clone 156534 (TRBV13, TRBJ2-7)
CASSLKGASYEQYF

SEQ ID NO: 313069 - protein, 15 aa, Homo sapiens
  CDR3 for alpha chain variable domain of TCR clone 156535 (TRAV12-1, TRAJ44)
CVADSPTGTASKPTF

SEQ ID NO: 313070 - protein, 13 aa, Homo sapiens
  CDR3 for beta chain variable domain of TCR clone 156535 (TRBV6-5, TRBJ2-5)
CASSPQGGETQYF

SEQ ID NO: 313071 - protein, 15 aa, Homo sapiens
  CDR3 for alpha chain variable domain of TCR clone 156536 (TRAV8-6, TRAJ6)
CAVRFTSGGSYIPTF

SEQ ID NO: 313072 - protein, 16 aa, Homo sapiens
  CDR3 for beta chain variable domain of TCR clone 156536 (TRBV5-1, TRBJ2-1)
CASSLTLAGGRNEQFF

SEQ ID NO: 313073 - protein, 14 aa, Homo sapiens
  CDR3 for alpha chain variable domain of TCR clone 156537 (TRAV12-2, TRAJ44)
CAVNKAGTASKLTF

SEQ ID NO: 313074 - protein, 15 aa, Homo sapiens
  CDR3 for beta chain variable domain of TCR clone 156537 (TRBV15, TRBJ2-7)
CATSSGTTTTYEQYF

SEQ ID NO: 313075 - protein, 16 aa, Homo sapiens
  CDR3 for alpha chain variable domain of TCR clone 156538 (TRAV30, TRAJ24)
CGTEIVDADSWGKFQY

SEQ ID NO: 313076 - protein, 11 aa, Homo sapiens
  CDR3 for beta chain variable domain of TCR clone 156538 (TRBV11-2, TRBJ1-1)
CASSINTEAFF

SEQ ID NO: 313077 - protein, 11 aa, Homo sapiens
  CDR3 for alpha chain variable domain of TCR clone 156539 (TRAV35, TRAJ30)
CAGHGDDKIIF

SEQ ID NO: 313078 - protein, 18 aa, Homo sapiens
  CDR3 for beta chain variable domain of TCR clone 156539 (TRBV7-6, TRBJ2-1)
CASSPRTSGMSSYNEQFF

SEQ ID NO: 313079 - protein, 14 aa, Homo sapiens
  CDR3 for alpha chain variable domain of TCR clone 156540 (TRAV26-1, TRAJ26)
CIVRATSLGQNFVF

SEQ ID NO: 313080 - protein, 16 aa, Homo sapiens
  CDR3 for beta chain variable domain of TCR clone 156540 (TRBV12-4, TRBJ2-7)
CASRSTGTGPSYEQYF

SEQ ID NO: 313081 - protein, 13 aa, Homo sapiens
  CDR3 for alpha chain variable domain of TCR clone 156541 (TRAV21, TRAJ27)
CAARPGNAGKSTF

SEQ ID NO: 313082 - protein, 13 aa, Homo sapiens
  CDR3 for beta chain variable domain of TCR clone 156541 (TRBV7-9, TRBJ1-2)
CASSLRQNYGYTF

SEQ ID NO: 313083 - protein, 13 aa, Homo sapiens
  CDR3 for alpha chain variable domain of TCR clone 156542 (TRAV27, TRAJ6)
CAGGTRGSYIPTF

SEQ ID NO: 313084 - protein, 14 aa, Homo sapiens
  CDR3 for beta chain variable domain of TCR clone 156542 (TRBV7-8, TRBJ2-3)
CASSLEAGTDTQYF

SEQ ID NO: 313085 - protein, 13 aa, Homo sapiens
  CDR3 for alpha chain variable domain of TCR clone 156543 (TRAV12-2, TRAJ52)
CAAHGTSYGKLTF

SEQ ID NO: 313086 - protein, 15 aa, Homo sapiens
  CDR3 for beta chain variable domain of TCR clone 156543 (TRBV10-3, TRBJ2-7)
CAVSTFSGVKGEQYF

SEQ ID NO: 313087 - protein, 13 aa, Homo sapiens
  CDR3 for alpha chain variable domain of TCR clone 156544 (TRAV8-4, TRAJ49)
CAVRTLTGNQFYF

SEQ ID NO: 313088 - protein, 13 aa, Homo sapiens
  CDR3 for beta chain variable domain of TCR clone 156544 (TRBV7-3, TRBJ2-5)
CASSFRGGETQYF

SEQ ID NO: 313089 - protein, 13 aa, Homo sapiens
  CDR3 for alpha chain variable domain of TCR clone 156545 (TRAV26-2, TRAJ54)
CILRDQGAQKLVF

SEQ ID NO: 313090 - protein, 15 aa, Homo sapiens
  CDR3 for beta chain variable domain of TCR clone 156545 (TRBV28, TRBJ1-5)
CASSFSGYSNQTQHF

SEQ ID NO: 313091 - protein, 16 aa, Homo sapiens
  CDR3 for alpha chain variable domain of TCR clone 156546 (TRAV1-1, TRAJ45)
CAVRAYSGGGADGLTF

SEQ ID NO: 313092 - protein, 13 aa, Homo sapiens
  CDR3 for beta chain variable domain of TCR clone 156546 (TRBV20-1, TRBJ1-2)
CSARGTADYGYSF

SEQ ID NO: 313093 - protein, 14 aa, Homo sapiens
  CDR3 for alpha chain variable domain of TCR clone 156547 (TRAV13-1, TRAJ48)
CAASTDFGNEKLTF

SEQ ID NO: 313094 - protein, 14 aa, Homo sapiens
  CDR3 for beta chain variable domain of TCR clone 156547 (TRBV7-2, TRBJ1-1)
CASSFLTGTTEAFF

SEQ ID NO: 313095 - protein, 14 aa, Homo sapiens
  CDR3 for alpha chain variable domain of TCR clone 156548 (TRAV23/DV6, TRAJ37)
CAASTSSNTGKLNF

SEQ ID NO: 313096 - protein, 12 aa, Homo sapiens
  CDR3 for beta chain variable domain of TCR clone 156548 (TRBV27, TRBJ2-2)
CASKLFTGELFF

SEQ ID NO: 313097 - protein, 15 aa, Homo sapiens
  CDR3 for alpha chain variable domain of TCR clone 156549 (TRAV12-1, TRAJ3)
CVVPPGTAVLPRYSL

SEQ ID NO: 313098 - protein, 15 aa, Homo sapiens
  CDR3 for beta chain variable domain of TCR clone 156549 (TRBV7-2, TRBJ2-6)
CASSREGSGANVLTF

SEQ ID NO: 313099 - protein, 13 aa, Homo sapiens
  CDR3 for alpha chain variable domain of TCR clone 156550 (TRAV2, TRAJ40)
CAVVTSGTYKYIF

SEQ ID NO: 313100 - protein, 15 aa, Homo sapiens
  CDR3 for beta chain variable domain of TCR clone 156550 (TRBV27, TRBJ2-1)
CASSNGGGSTNEQFF

SEQ ID NO: 313101 - protein, 12 aa, Homo sapiens
  CDR3 for alpha chain variable domain of TCR clone 156551 (TRAV12-1, TRAJ40)
CVVYSGTYKYIF

SEQ ID NO: 313102 - protein, 13 aa, Homo sapiens
  CDR3 for beta chain variable domain of TCR clone 156551 (TRBV7-8, TRBJ2-7)
CASSFAGLYEQYF

SEQ ID NO: 313103 - protein, 14 aa, Homo sapiens
  CDR3 for alpha chain variable domain of TCR clone 156552 (TRAV35, TRAJ22)
CAGLRPGSARPLTF

SEQ ID NO: 313104 - protein, 13 aa, Homo sapiens
  CDR3 for beta chain variable domain of TCR clone 156552 (TRBV20-1, TRBJ2-7)
CSATHTSGYEQYF

SEQ ID NO: 313105 - protein, 10 aa, Homo sapiens
  CDR3 for alpha chain variable domain of TCR clone 156553 (TRAV21, TRAJ31)
FAVDNARLMF

SEQ ID NO: 313106 - protein, 13 aa, Homo sapiens
  CDR3 for beta chain variable domain of TCR clone 156553 (TRBV4-1, TRBJ1-1)
CASSRKMTTEAFF

SEQ ID NO: 313107 - protein, 12 aa, Homo sapiens
  CDR3 for alpha chain variable domain of TCR clone 156554 (TRAV13-1, TRAJ27)
CAAHTNAGKSTF

SEQ ID NO: 313108 - protein, 14 aa, Homo sapiens
  CDR3 for beta chain variable domain of TCR clone 156554 (TRBV12-5, TRBJ2-5)
CASGSRTHQETQYS

SEQ ID NO: 313109 - protein, 22 aa, Homo sapiens
  CDR3 for alpha chain variable domain of TCR clone 156555 (TRAV2, TRAJ10)
ILQVREADAAVYYTGGGNKLTF

SEQ ID NO: 313110 - protein, 17 aa, Homo sapiens
  CDR3 for beta chain variable domain of TCR clone 156555 (TRBV13, TRBJ2-3)
CASSLSRVAGGRNTQYF

SEQ ID NO: 313111 - protein, 16 aa, Homo sapiens
  CDR3 for alpha chain variable domain of TCR clone 156556 (TRAV30, TRAJ24)
CGTESVYADSWGKFQF

SEQ ID NO: 313112 - protein, 14 aa, Homo sapiens
  CDR3 for beta chain variable domain of TCR clone 156556 (TRBV12-5, TRBJ2-5)
CASGSRTHQETQYF

SEQ ID NO: 313113 - protein, 16 aa, Homo sapiens
  CDR3 for alpha chain variable domain of TCR clone 156557 (TRAV3, TRAJ10)
CAVRDIRAGGGNKLTF

SEQ ID NO: 313114 - protein, 14 aa, Homo sapiens
  CDR3 for beta chain variable domain of TCR clone 156557 (TRBV6-1, TRBJ1-3)
CASVQGGGGNTIYF

SEQ ID NO: 313115 - protein, 12 aa, Homo sapiens
  CDR3 for alpha chain variable domain of TCR clone 156558 (TRAV8-3, TRAJ26)
CAGDNYGQNFVF

SEQ ID NO: 313116 - protein, 11 aa, Homo sapiens
  CDR3 for beta chain variable domain of TCR clone 156558 (TRBV29-1, TRBJ2-5)
CSEDRTGTQFF

SEQ ID NO: 313117 - protein, 17 aa, Homo sapiens
  CDR3 for alpha chain variable domain of TCR clone 156559 (TRAV3, TRAJ12)
CAVRDGGRMDSSSKLIF

SEQ ID NO: 313118 - protein, 13 aa, Homo sapiens
  CDR3 for beta chain variable domain of TCR clone 156559 (TRBV7-3, TRBJ1-1)
CASSQDWGAEAFF

SEQ ID NO: 313119 - protein, 13 aa, Homo sapiens
  CDR3 for alpha chain variable domain of TCR clone 156560 (TRAV25, TRAJ30)
CAGRVDRDDKIIF

SEQ ID NO: 313120 - protein, 17 aa, Homo sapiens
  CDR3 for beta chain variable domain of TCR clone 156560 (TRBV7-9, TRBJ2-6)
CAGSFGAGYSGANVLTF

SEQ ID NO: 313121 - protein, 13 aa, Homo sapiens
  CDR3 for alpha chain variable domain of TCR clone 156561 (TRAV26-1, )
CIVSHRVEGFWNQ

SEQ ID NO: 313122 - protein, 14 aa, Homo sapiens
  CDR3 for beta chain variable domain of TCR clone 156561 (TRBV20-1, TRBJ2-7)
CSAWTALRSYEQYF

SEQ ID NO: 313123 - protein, 15 aa, Homo sapiens
  CDR3 for alpha chain variable domain of TCR clone 156562 (TRAV8-2, TRAJ9)
CVVSDPGTGGFKTIF

SEQ ID NO: 313124 - protein, 14 aa, Homo sapiens
  CDR3 for beta chain variable domain of TCR clone 156562 (TRBV6-6, TRBJ2-7)
CASSYGGSSYEQYF

SEQ ID NO: 313125 - protein, 14 aa, Homo sapiens
  CDR3 for alpha chain variable domain of TCR clone 156563 (TRAV12-3, TRAJ5)
CAMSTYTGRRAITF

SEQ ID NO: 313126 - protein, 13 aa, Homo sapiens
  CDR3 for beta chain variable domain of TCR clone 156563 (TRBV28, TRBJ2-3)
CASSTGGGDTQYF

SEQ ID NO: 313127 - protein, 12 aa, Homo sapiens
  CDR3 for alpha chain variable domain of TCR clone 156564 (TRAV22, TRAJ22)
CAPGGSARQLTF

SEQ ID NO: 313128 - protein, 12 aa, Homo sapiens
  CDR3 for beta chain variable domain of TCR clone 156564 (TRBV15, TRBJ2-1)
CHLGGPGDEQFF

SEQ ID NO: 313129 - protein, 12 aa, Homo sapiens
  CDR3 for alpha chain variable domain of TCR clone 156565 (TRAV12-3, TRAJ42)
CAPGGSQGNLIF

SEQ ID NO: 313130 - protein, 16 aa, Homo sapiens
  CDR3 for beta chain variable domain of TCR clone 156565 (TRBV12-5, TRBJ2-5)
CASGPRTSGNQETQYF

SEQ ID NO: 313131 - protein, 11 aa, Homo sapiens
  CDR3 for alpha chain variable domain of TCR clone 156566 (TRAV21, TRAJ34)
CAHYNTAKPIF

SEQ ID NO: 313132 - protein, 13 aa, Homo sapiens
  CDR3 for beta chain variable domain of TCR clone 156566 (TRBV7-6, TRBJ1-2)
CASSLVADYGYTF

SEQ ID NO: 313133 - protein, 16 aa, Homo sapiens
  CDR3 for alpha chain variable domain of TCR clone 156567 (TRAV26-1, TRAJ53)
CIVRVAMGGSNYKLTF

SEQ ID NO: 313134 - protein, 14 aa, Homo sapiens
  CDR3 for beta chain variable domain of TCR clone 156567 (TRBV11-2, TRBJ2-5)
CASSRTGGIETQYF

SEQ ID NO: 313135 - protein, 13 aa, Homo sapiens
  CDR3 for alpha chain variable domain of TCR clone 156568 (TRAV8-4, TRAJ20)
CAVSFSNDYKLSF

SEQ ID NO: 313136 - protein, 14 aa, Homo sapiens
  CDR3 for beta chain variable domain of TCR clone 156568 (TRBV18, TRBJ2-7)
CASSPRGGAYERCF

SEQ ID NO: 313137 - protein, 15 aa, Homo sapiens
  CDR3 for alpha chain variable domain of TCR clone 156569 (TRAV12-2, TRAJ53)
CAVNGGGGGNYKLTL

SEQ ID NO: 313138 - protein, 17 aa, Homo sapiens
  CDR3 for beta chain variable domain of TCR clone 156569 (TRBV7-3, TRBJ2-3)
RASSLMKRMRGADTQYF

SEQ ID NO: 313139 - protein, 13 aa, Homo sapiens
  CDR3 for alpha chain variable domain of TCR clone 156570 (TRAV13-2, TRAJ5)
CAVMDTGRRALTF

SEQ ID NO: 313140 - protein, 16 aa, Homo sapiens
  CDR3 for beta chain variable domain of TCR clone 156570 (TRBV12-5, TRBJ2-5)
CASGPRTSGNQETQYF

SEQ ID NO: 313141 - protein, 15 aa, Homo sapiens
  CDR3 for alpha chain variable domain of TCR clone 156571 (TRAV35, TRAJ50)
CAGQLRKTPYDKVLF

SEQ ID NO: 313142 - protein, 12 aa, Homo sapiens
  CDR3 for beta chain variable domain of TCR clone 156571 (TRBV5-1, TRBJ2-5)
CASSLGLETQYF

SEQ ID NO: 313143 - protein, 14 aa, Homo sapiens
  CDR3 for alpha chain variable domain of TCR clone 156572 (TRAV1-2, TRAJ16)
CAVNRFSDGQKLLF

SEQ ID NO: 313144 - protein, 13 aa, Homo sapiens
  CDR3 for beta chain variable domain of TCR clone 156572 (TRBV7-2, TRBJ2-1)
CASSLGVYNEQFF

SEQ ID NO: 313145 - protein, 14 aa, Homo sapiens
  CDR3 for alpha chain variable domain of TCR clone 156573 (TRAV1-2, TRAJ8)
CAVREDTGFQKLVC

SEQ ID NO: 313146 - protein, 13 aa, Homo sapiens
  CDR3 for beta chain variable domain of TCR clone 156573 (TRBV7-7, TRBJ2-5)
CASSRSGQETQYF

SEQ ID NO: 313147 - protein, 16 aa, Homo sapiens
  CDR3 for alpha chain variable domain of TCR clone 156574 (TRAV12-2, TRAJ32)
CAVSLGQGGAINKLIF

SEQ ID NO: 313148 - protein, 15 aa, Homo sapiens
  CDR3 for beta chain variable domain of TCR clone 156574 (TRBV20-1, TRBJ2-7)
CSARGPLAGGREQYF

SEQ ID NO: 313149 - protein, 14 aa, Homo sapiens
  CDR3 for alpha chain variable domain of TCR clone 156575 (TRAV12-2, TRAJ40)
CAVKIPSGTYKYIF

SEQ ID NO: 313150 - protein, 14 aa, Homo sapiens
  CDR3 for beta chain variable domain of TCR clone 156575 (TRBV6-5, TRBJ1-2)
CASSYDGTGGGYTF

SEQ ID NO: 313151 - protein, 15 aa, Homo sapiens
  CDR3 for alpha chain variable domain of TCR clone 156576 (TRAV27, TRAJ38)
CAARRNAGNNRKLIL

SEQ ID NO: 313152 - protein, 15 aa, Homo sapiens
  CDR3 for beta chain variable domain of TCR clone 156576 (TRBV9, TRBJ1-6)
CASSVAGTGDSPLHF

SEQ ID NO: 313153 - protein, 14 aa, Homo sapiens
  CDR3 for alpha chain variable domain of TCR clone 156577 (TRAV17, TRAJ23)
CATALGGQGGKLIF

SEQ ID NO: 313154 - protein, 11 aa, Homo sapiens
  CDR3 for beta chain variable domain of TCR clone 156577 (TRBV11-2, TRBJ2-2)
CASSLPGELFF

SEQ ID NO: 313155 - protein, 17 aa, Homo sapiens
  CDR3 for alpha chain variable domain of TCR clone 156578 (TRAV1-2, TRAJ23)
CAVRPHSIYNQGGKLIF

SEQ ID NO: 313156 - protein, 14 aa, Homo sapiens
  CDR3 for beta chain variable domain of TCR clone 156578 (TRBV4-2, TRBJ2-1)
CASGLDRAYNEQFF

SEQ ID NO: 313157 - protein, 16 aa, Homo sapiens
  CDR3 for alpha chain variable domain of TCR clone 156579 (TRAV3, TRAJ23)
CAVKIGIYNQGGKLIF

SEQ ID NO: 313158 - protein, 17 aa, Homo sapiens
  CDR3 for beta chain variable domain of TCR clone 156579 (TRBV10-3, TRBJ2-6)
CAISESTAPSGANVLTV

SEQ ID NO: 313159 - protein, 13 aa, Homo sapiens
  CDR3 for alpha chain variable domain of TCR clone 156580 (TRAV1-2, TRAJ9)
CAALNTGGFKTIF

SEQ ID NO: 313160 - protein, 17 aa, Homo sapiens
  CDR3 for beta chain variable domain of TCR clone 156580 (TRBV13, TRBJ2-3)
CSSSLSRVAGGRNTQYF

SEQ ID NO: 313161 - protein, 15 aa, Homo sapiens
  CDR3 for alpha chain variable domain of TCR clone 156581 (TRAV29/DV5, TRAJ24)
CAASGATDSWGKFQF

SEQ ID NO: 313162 - protein, 13 aa, Homo sapiens
  CDR3 for beta chain variable domain of TCR clone 156581 (TRBV19, TRBJ1-2)
CAGSVPGQDGYTF

SEQ ID NO: 313163 - protein, 14 aa, Homo sapiens
  CDR3 for alpha chain variable domain of TCR clone 156582 (TRAV12-3, TRAJ15)
CAMIPPQAGTALIF

SEQ ID NO: 313164 - protein, 12 aa, Homo sapiens
  CDR3 for beta chain variable domain of TCR clone 156582 (TRBV11-2, TRBJ2-2)
CASRLGGGELFF

SEQ ID NO: 313165 - protein, 16 aa, Homo sapiens
  CDR3 for alpha chain variable domain of TCR clone 156583 (TRAV12-3, TRAJ45)
CAMGWGSGGGADGLNF

SEQ ID NO: 313166 - protein, 15 aa, Homo sapiens
  CDR3 for beta chain variable domain of TCR clone 156583 (TRBV3-1, TRBJ1-2)
CASSHPGTPGYGYTF

SEQ ID NO: 313167 - protein, 13 aa, Homo sapiens
  CDR3 for alpha chain variable domain of TCR clone 156584 (TRAV8-3, TRAJ28)
CAVGAVGSHQLTF

SEQ ID NO: 313168 - protein, 14 aa, Homo sapiens
  CDR3 for beta chain variable domain of TCR clone 156584 (TRBV7-3, TRBJ1-1)
CASSLKGGNTEAFF

SEQ ID NO: 313169 - protein, 14 aa, Homo sapiens
  CDR3 for alpha chain variable domain of TCR clone 156585 (TRAV8-4, TRAJ17)
CAVSDQAAGNKLTF

SEQ ID NO: 313170 - protein, 15 aa, Homo sapiens
  CDR3 for beta chain variable domain of TCR clone 156585 (TRBV7-2, TRBJ1-2)
CASSLAPDRVLGYTF

SEQ ID NO: 313171 - protein, 17 aa, Homo sapiens
  CDR3 for alpha chain variable domain of TCR clone 156586 (TRAV3, TRAJ38)
CAVRDCLNAGNNRKLIW

SEQ ID NO: 313172 - protein, 14 aa, Homo sapiens
  CDR3 for beta chain variable domain of TCR clone 156586 (TRBV20-1, TRBJ1-1)
CSAQTRIGGTEAFF

SEQ ID NO: 313173 - protein, 13 aa, Homo sapiens
  CDR3 for alpha chain variable domain of TCR clone 156587 (TRAV20, TRAJ35)
CAVQEGFGNVLHC

SEQ ID NO: 313174 - protein, 17 aa, Homo sapiens
  CDR3 for beta chain variable domain of TCR clone 156587 (TRBV2, TRBJ1-4)
CASSKRELTQGEEKLFF

SEQ ID NO: 313175 - protein, 14 aa, Homo sapiens
  CDR3 for alpha chain variable domain of TCR clone 156588 (TRAV21, TRAJ45)
CAVSSGGGADGLTF

SEQ ID NO: 313176 - protein, 15 aa, Homo sapiens
  CDR3 for beta chain variable domain of TCR clone 156588 (TRBV6-1, TRBJ2-4)
CASSEAVWTINIQYL

SEQ ID NO: 313177 - protein, 15 aa, Homo sapiens
  CDR3 for alpha chain variable domain of TCR clone 156589 (TRAV38-1, TRAJ37)
CAFIFGSGNTGNPIF

SEQ ID NO: 313178 - protein, 12 aa, Homo sapiens
  CDR3 for beta chain variable domain of TCR clone 156589 (TRBV7-9, TRBJ2-7)
CASSLEGYEQYF

SEQ ID NO: 313179 - protein, 16 aa, Homo sapiens
  CDR3 for alpha chain variable domain of TCR clone 156590 (TRAV12-3, TRAJ53)
CAMSQGRGGSNYKLTF

SEQ ID NO: 313180 - protein, 17 aa, Homo sapiens
  CDR3 for beta chain variable domain of TCR clone 156590 (TRBV28, TRBJ2-5)
CASSTPEGDALQETQYF

SEQ ID NO: 313181 - protein, 13 aa, Homo sapiens
  CDR3 for alpha chain variable domain of TCR clone 156591 (TRAV12-1, TRAJ17)
CVNYKAAGNKLTF

SEQ ID NO: 313182 - protein, 15 aa, Homo sapiens
  CDR3 for beta chain variable domain of TCR clone 156591 (TRBV20-1, TRBJ2-7)
CSARDRVSGMDEQYF

SEQ ID NO: 313183 - protein, 12 aa, Homo sapiens
  CDR3 for alpha chain variable domain of TCR clone 156592 (TRAV1-1, TRAJ15)
RAVGQAGTALIF

SEQ ID NO: 313184 - protein, 16 aa, Homo sapiens
  CDR3 for beta chain variable domain of TCR clone 156592 (TRBV12-4, TRBJ2-7)
CASSPEGQGSSYEQYF

SEQ ID NO: 313185 - protein, 17 aa, Homo sapiens
  CDR3 for alpha chain variable domain of TCR clone 156593 (TRAV26-1, TRAJ37)
CIVRAITVSSNTGKLIF

SEQ ID NO: 313186 - protein, 13 aa, Homo sapiens
  CDR3 for beta chain variable domain of TCR clone 156593 (TRBV2, TRBJ2-7)
CASSVGGSGEQYF

SEQ ID NO: 313187 - protein, 15 aa, Homo sapiens
  CDR3 for alpha chain variable domain of TCR clone 156594 (TRAV20, TRAJ52)
CAVQAGGTSYGKLTF

SEQ ID NO: 313188 - protein, 15 aa, Homo sapiens
  CDR3 for beta chain variable domain of TCR clone 156594 (TRBV5-1, TRBJ2-3)
CASSVTSGSTDTQYF

SEQ ID NO: 313189 - protein, 13 aa, Homo sapiens
  CDR3 for alpha chain variable domain of TCR clone 156595 (TRAV26-1, TRAJ34)
CIVRPWITDKLIF

SEQ ID NO: 313190 - protein, 13 aa, Homo sapiens
  CDR3 for beta chain variable domain of TCR clone 156595 (TRBV5-1, TRBJ2-1)
CASSLGSYSEQFF

SEQ ID NO: 313191 - protein, 14 aa, Homo sapiens
  CDR3 for alpha chain variable domain of TCR clone 156596 (TRAV1-2, TRAJ8)
CAVREDTGFQKLVF

SEQ ID NO: 313192 - protein, 15 aa, Homo sapiens
  CDR3 for beta chain variable domain of TCR clone 156596 (TRBV20-1, TRBJ2-7)
CSARDRVSGMEEQYF

SEQ ID NO: 313193 - protein, 14 aa, Homo sapiens
  CDR3 for alpha chain variable domain of TCR clone 156597 (TRAV12-3, TRAJ6)
CAMSATGGSYIPTF

SEQ ID NO: 313194 - protein, 16 aa, Homo sapiens
  CDR3 for beta chain variable domain of TCR clone 156597 (TRBV4-2, TRBJ2-1)
CANSPRAGQGANEQFF

SEQ ID NO: 313195 - protein, 18 aa, Homo sapiens
  CDR3 for alpha chain variable domain of TCR clone 156598 (TRAV26-2, TRAJ54)
CILRDVEVGIQGAQKLVC

SEQ ID NO: 313196 - protein, 16 aa, Homo sapiens
  CDR3 for beta chain variable domain of TCR clone 156598 (TRBV6-1, TRBJ2-5)
CASSETLDRGAETQYF

SEQ ID NO: 313197 - protein, 16 aa, Homo sapiens
  CDR3 for alpha chain variable domain of TCR clone 156599 (TRAV1-2, TRAJ10)
CAVGGVLTGGGNKLTF

SEQ ID NO: 313198 - protein, 17 aa, Homo sapiens
  CDR3 for beta chain variable domain of TCR clone 156599 (TRBV11-3, TRBJ2-3)
CASSPGSSGGRTDTQYF

SEQ ID NO: 313199 - protein, 15 aa, Homo sapiens
  CDR3 for alpha chain variable domain of TCR clone 156600 (TRAV17, TRAJ35)
CATAFVIGFGNGLHC

SEQ ID NO: 313200 - protein, 15 aa, Homo sapiens
  CDR3 for beta chain variable domain of TCR clone 156600 (TRBV7-9, TRBJ2-7)
CASSLALAEAYEQYF

SEQ ID NO: 313201 - protein, 14 aa, Homo sapiens
  CDR3 for alpha chain variable domain of TCR clone 156601 (TRAV1-2, TRAJ16)
CAVNWSSDGQKLLF

SEQ ID NO: 313202 - protein, 13 aa, Homo sapiens
  CDR3 for beta chain variable domain of TCR clone 156601 (TRBV20-1, TRBJ1-1)
CSARGGGNTEAFF

SEQ ID NO: 313203 - protein, 15 aa, Homo sapiens
  CDR3 for alpha chain variable domain of TCR clone 156602 (TRAV12-1, TRAJ45)
CVVLSGGGGADGLTF

SEQ ID NO: 313204 - protein, 13 aa, Homo sapiens
  CDR3 for beta chain variable domain of TCR clone 156602 (TRBV7-2, TRBJ2-5)
CASSQTSVETQYF

SEQ ID NO: 313205 - protein, 15 aa, Homo sapiens
  CDR3 for alpha chain variable domain of TCR clone 156603 (TRAV35, TRAJ38)
CAGFSNAGNNRKLIW

SEQ ID NO: 313206 - protein, 15 aa, Homo sapiens
  CDR3 for beta chain variable domain of TCR clone 156603 (TRBV9, TRBJ1-6)
CASSVAGTGDSPLHF

SEQ ID NO: 313207 - protein, 14 aa, Homo sapiens
  CDR3 for alpha chain variable domain of TCR clone 156604 (TRAV14/DV4, TRAJ15)
CAMRRDQAGTALIF

SEQ ID NO: 313208 - protein, 16 aa, Homo sapiens
  CDR3 for beta chain variable domain of TCR clone 156604 (TRBV12-5, TRBJ2-5)
CASGPRTSGSQETQYF

SEQ ID NO: 313209 - protein, 10 aa, Homo sapiens
  CDR3 for alpha chain variable domain of TCR clone 156605 (TRAV9-2, TRAJ34)
CALSDDKLII

SEQ ID NO: 313210 - protein, 14 aa, Homo sapiens
  CDR3 for beta chain variable domain of TCR clone 156605 (TRBV7-8, TRBJ2-7)
CASSVGQGAYEQYF

SEQ ID NO: 313211 - protein, 13 aa, Homo sapiens
  CDR3 for alpha chain variable domain of TCR clone 156606 (TRAV19, TRAJ26)
CALTFDYGQNFVF

SEQ ID NO: 313212 - protein, 14 aa, Homo sapiens
  CDR3 for beta chain variable domain of TCR clone 156606 (TRBV7-9, TRBJ2-1)
CASSPRDSLYEQFF

SEQ ID NO: 313213 - protein, 23 aa, Homo sapiens
  CDR3 for alpha chain variable domain of TCR clone 156607 (TRAV26-1, TRAJ38)
CIVRPLNAGNNHIQDPDPAVYQL

SEQ ID NO: 313214 - protein, 13 aa, Homo sapiens
  CDR3 for beta chain variable domain of TCR clone 156607 (TRBV18, TRBJ1-1)
CASSPNGDTEAFF

SEQ ID NO: 313215 - protein, 17 aa, Homo sapiens
  CDR3 for alpha chain variable domain of TCR clone 156608 (TRAV3, TRAJ12)
CAVRDGGRMDSSYKLIF

SEQ ID NO: 313216 - protein, 14 aa, Homo sapiens
  CDR3 for beta chain variable domain of TCR clone 156608 (TRBV7-9, TRBJ1-2)
CASSRQGANYGFTF

SEQ ID NO: 313217 - protein, 14 aa, Homo sapiens
  CDR3 for alpha chain variable domain of TCR clone 156609 (TRAV13-1, TRAJ44)
CAAKPTGTASKLTF

SEQ ID NO: 313218 - protein, 12 aa, Homo sapiens
  CDR3 for beta chain variable domain of TCR clone 156609 (TRBV7-8, TRBJ2-7)
CASSLGDREQYF

SEQ ID NO: 313219 - protein, 16 aa, Homo sapiens
  CDR3 for alpha chain variable domain of TCR clone 156610 (TRAV8-6, TRAJ39)
CAVMPMNNNAGNMLIF

SEQ ID NO: 313220 - protein, 16 aa, Homo sapiens
  CDR3 for beta chain variable domain of TCR clone 156610 (TRBV15, TRBJ2-5)
CATSRYLEAAQETQYF

SEQ ID NO: 313221 - protein, 14 aa, Homo sapiens
  CDR3 for alpha chain variable domain of TCR clone 156611 (TRAV3, TRAJ22)
CCERPRGSARQLTF

SEQ ID NO: 313222 - protein, 16 aa, Homo sapiens
  CDR3 for beta chain variable domain of TCR clone 156611 (TRBV5-4, TRBJ2-3)
CASQQPGAGGADTQYF

SEQ ID NO: 313223 - protein, 13 aa, Homo sapiens
  CDR3 for alpha chain variable domain of TCR clone 156612 (TRAV21, TRAJ45)
CAVMGGGADGLTF

SEQ ID NO: 313224 - protein, 14 aa, Homo sapiens
  CDR3 for beta chain variable domain of TCR clone 156612 (TRBV4-3, TRBJ1-4)
CASSPLKRNEKLFF

SEQ ID NO: 313225 - protein, 13 aa, Homo sapiens
  CDR3 for alpha chain variable domain of TCR clone 156613 (TRAV12-3, TRAJ33)
CAMSVNSNYQLIW

SEQ ID NO: 313226 - protein, 13 aa, Homo sapiens
  CDR3 for beta chain variable domain of TCR clone 156613 (TRBV7-2, TRBJ2-2)
RASSLVVTGELFF

SEQ ID NO: 313227 - protein, 17 aa, Homo sapiens
  CDR3 for alpha chain variable domain of TCR clone 156614 (TRAV35, TRAJ28)
CAGLQVYSGAGSYQLTL

SEQ ID NO: 313228 - protein, 15 aa, Homo sapiens
  CDR3 for beta chain variable domain of TCR clone 156614 (TRBV2, TRBJ1-2)
CASSEIGGANYGYTF

SEQ ID NO: 313229 - protein, 14 aa, Homo sapiens
  CDR3 for alpha chain variable domain of TCR clone 156615 (TRAV8-3, TRAJ11)
CAVGSNSGYSTLTF

SEQ ID NO: 313230 - protein, 17 aa, Homo sapiens
  CDR3 for beta chain variable domain of TCR clone 156615 (TRBV28, TRBJ2-5)
CASSTPEGDALQETQYF

SEQ ID NO: 313231 - protein, 16 aa, Homo sapiens
  CDR3 for alpha chain variable domain of TCR clone 156616 (TRAV30, TRAJ24)
CGTEIGDADSWGEFQF

SEQ ID NO: 313232 - protein, 19 aa, Homo sapiens
  CDR3 for beta chain variable domain of TCR clone 156616 (TRBV25-1, TRBJ2-2)
CAILVYRVDRGRKTGELFF

SEQ ID NO: 313233 - protein, 16 aa, Homo sapiens
  CDR3 for alpha chain variable domain of TCR clone 156617 (TRAV12-3, TRAJ53)
CAMSPGSGGSNYKLTF

SEQ ID NO: 313234 - protein, 15 aa, Homo sapiens
  CDR3 for beta chain variable domain of TCR clone 156617 (TRBV27, TRBJ2-1)
CASSNGGGSSNEQFL

SEQ ID NO: 313235 - protein, 14 aa, Homo sapiens
  CDR3 for alpha chain variable domain of TCR clone 156618 (TRAV3, TRAJ32)
CCERRAGATNKLIF

SEQ ID NO: 313236 - protein, 11 aa, Homo sapiens
  CDR3 for beta chain variable domain of TCR clone 156618 (TRBV7-8, TRBJ2-7)
CASSLSLEQYF

SEQ ID NO: 313237 - protein, 16 aa, Homo sapiens
  CDR3 for alpha chain variable domain of TCR clone 156619 (TRAV8-6, TRAJ58)
CAVSDHTETSGSRLTL

SEQ ID NO: 313238 - protein, 12 aa, Homo sapiens
  CDR3 for beta chain variable domain of TCR clone 156619 (TRBV29-1, TRBJ2-3)
CSVTGGADTQYF

SEQ ID NO: 313239 - protein, 17 aa, Homo sapiens
  CDR3 for alpha chain variable domain of TCR clone 156620 (TRAV36/DV7, TRAJ52)
CAVAQRAGGTSYGKLTF

SEQ ID NO: 313240 - protein, 15 aa, Homo sapiens
  CDR3 for beta chain variable domain of TCR clone 156620 (TRBV19, TRBJ1-5)
CASSIVWADNQPQHF

SEQ ID NO: 313241 - protein, 14 aa, Homo sapiens
  CDR3 for alpha chain variable domain of TCR clone 156621 (TRAV23/DV6, TRAJ13)
CAAMYYGGYQKVTF

SEQ ID NO: 313242 - protein, 14 aa, Homo sapiens
  CDR3 for beta chain variable domain of TCR clone 156621 (TRBV7-9, TRBJ2-1)
CASSPRDSLYEQFF

SEQ ID NO: 313243 - protein, 15 aa, Homo sapiens
  CDR3 for alpha chain variable domain of TCR clone 156622 (TRAV12-2, TRAJ57)
CAVSRGQGGSEKLVF

SEQ ID NO: 313244 - protein, 14 aa, Homo sapiens
  CDR3 for beta chain variable domain of TCR clone 156622 (TRBV29-1, TRBJ2-5)
CSVETSGSGETQYF

SEQ ID NO: 313245 - protein, 15 aa, Homo sapiens
  CDR3 for alpha chain variable domain of TCR clone 156623 (TRAV2, TRAJ15)
CAVEERGRAGTALIF

SEQ ID NO: 313246 - protein, 13 aa, Homo sapiens
  CDR3 for beta chain variable domain of TCR clone 156623 (TRBV10-2, TRBJ2-7)
CASGASGGYEQYF

SEQ ID NO: 313247 - protein, 14 aa, Homo sapiens
  CDR3 for alpha chain variable domain of TCR clone 156624 (TRAV12-1, TRAJ26)
CVVKGSNYGQNFIF

SEQ ID NO: 313248 - protein, 17 aa, Homo sapiens
  CDR3 for beta chain variable domain of TCR clone 156624 (TRBV11-2, TRBJ2-6)
CASSQRDIFSGANVLTF

SEQ ID NO: 313249 - protein, 15 aa, Homo sapiens
  CDR3 for alpha chain variable domain of TCR clone 156625 (TRAV2, TRAJ32)
CAVANYGGDTNKLIF

SEQ ID NO: 313250 - protein, 15 aa, Homo sapiens
  CDR3 for beta chain variable domain of TCR clone 156625 (TRBV7-7, TRBJ2-5)
CASSQLERAEETQYF

SEQ ID NO: 313251 - protein, 14 aa, Homo sapiens
  CDR3 for alpha chain variable domain of TCR clone 156626 (TRAV21, TRAJ28)
CAVGSGAGSYQLTF

SEQ ID NO: 313252 - protein, 14 aa, Homo sapiens
  CDR3 for beta chain variable domain of TCR clone 156626 (TRBV18, TRBJ1-4)
CDSSPGPNGEKLFF

SEQ ID NO: 313253 - protein, 11 aa, Homo sapiens
  CDR3 for alpha chain variable domain of TCR clone 156627 (TRAV2, TRAJ13)
CASGGYQKVTF

SEQ ID NO: 313254 - protein, 11 aa, Homo sapiens
  CDR3 for beta chain variable domain of TCR clone 156627 (TRBV6-3, TRBJ2-3)
CATGQVDTQYF

SEQ ID NO: 313255 - protein, 17 aa, Homo sapiens
  CDR3 for alpha chain variable domain of TCR clone 156628 (TRAV3, TRAJ6)
CAVRDGPRAGGSFITTF

SEQ ID NO: 313256 - protein, 14 aa, Homo sapiens
  CDR3 for beta chain variable domain of TCR clone 156628 (TRBV7-2, TRBJ2-7)
CASSPKTSFYEQYF

SEQ ID NO: 313257 - protein, 12 aa, Homo sapiens
  CDR3 for alpha chain variable domain of TCR clone 156629 (TRAV13-1, TRAJ49)
CAAPNTGNQFYF

SEQ ID NO: 313258 - protein, 17 aa, Homo sapiens
  CDR3 for beta chain variable domain of TCR clone 156629 (TRBV4-1, TRBJ1-4)
CASSQEGPRGVEEKLFF

SEQ ID NO: 313259 - protein, 13 aa, Homo sapiens
  CDR3 for alpha chain variable domain of TCR clone 156630 (TRAV3, TRAJ20)
CAVRDWAAGKLSF

SEQ ID NO: 313260 - protein, 16 aa, Homo sapiens
  CDR3 for beta chain variable domain of TCR clone 156630 (TRBV7-3, TRBJ2-2)
CASSLKRGTLSGELFF

SEQ ID NO: 313261 - protein, 12 aa, Homo sapiens
  CDR3 for alpha chain variable domain of TCR clone 156631 (TRAV12-3, TRAJ17)
CAMTLTGNELTF

SEQ ID NO: 313262 - protein, 15 aa, Homo sapiens
  CDR3 for beta chain variable domain of TCR clone 156631 (TRBV20-1, TRBJ2-7)
CSARDRVSGMDEPYF

SEQ ID NO: 313263 - protein, 14 aa, Homo sapiens
  CDR3 for alpha chain variable domain of TCR clone 156632 (TRAV8-3, TRAJ4)
CAVGASGGYNKLLF

SEQ ID NO: 313264 - protein, 16 aa, Homo sapiens
  CDR3 for beta chain variable domain of TCR clone 156632 (TRBV2, TRBJ2-1)
CASSVGGSLSYNEQFF

SEQ ID NO: 313265 - protein, 16 aa, Homo sapiens
  CDR3 for alpha chain variable domain of TCR clone 156633 (TRAV8-3, TRAJ8)
CAVPRDGNTGFQKLVF

SEQ ID NO: 313266 - protein, 15 aa, Homo sapiens
  CDR3 for beta chain variable domain of TCR clone 156633 (TRBV6-1, TRBJ2-6)
CAGSSRPSGANVLTF

SEQ ID NO: 313267 - protein, 15 aa, Homo sapiens
  CDR3 for alpha chain variable domain of TCR clone 156634 (TRAV3, TRAJ5)
CAVRDLDTGRRALTV

SEQ ID NO: 313268 - protein, 15 aa, Homo sapiens
  CDR3 for beta chain variable domain of TCR clone 156634 (TRBV20-1, TRBJ2-1)
CSARSPGGPGNEQFF

SEQ ID NO: 313269 - protein, 16 aa, Homo sapiens
  CDR3 for alpha chain variable domain of TCR clone 156635 (TRAV26-1, TRAJ32)
CIVRTNYGGATNKLIF

SEQ ID NO: 313270 - protein, 16 aa, Homo sapiens
  CDR3 for beta chain variable domain of TCR clone 156635 (TRBV7-3, TRBJ2-3)
CASSLSGYRPEDTQYF

SEQ ID NO: 313271 - protein, 14 aa, Homo sapiens
  CDR3 for alpha chain variable domain of TCR clone 156636 (TRAV9-2, TRAJ39)
CALYIYNAGNMLPF

SEQ ID NO: 313272 - protein, 14 aa, Homo sapiens
  CDR3 for beta chain variable domain of TCR clone 156636 (TRBV7-2, TRBJ2-7)
CASRSQGAAYEQYF

SEQ ID NO: 313273 - protein, 14 aa, Homo sapiens
  CDR3 for alpha chain variable domain of TCR clone 156637 (TRAV13-1, TRAJ24)
CAASRTESWGKLQF

SEQ ID NO: 313274 - protein, 15 aa, Homo sapiens
  CDR3 for beta chain variable domain of TCR clone 156637 (TRBV7-9, TRBJ1-5)
CASSQGHQPNQPQHF

SEQ ID NO: 313275 - protein, 14 aa, Homo sapiens
  CDR3 for alpha chain variable domain of TCR clone 156638 (TRAV3, TRAJ34)
CAVRDINNTDKLIF

SEQ ID NO: 313276 - protein, 17 aa, Homo sapiens
  CDR3 for beta chain variable domain of TCR clone 156638 (TRBV20-1, TRBJ2-7)
CSARDRVSGWTSSTSGR

SEQ ID NO: 313277 - protein, 13 aa, Homo sapiens
  CDR3 for alpha chain variable domain of TCR clone 156639 (TRAV13-1, TRAJ41)
CAAILNSGYALNF

SEQ ID NO: 313278 - protein, 15 aa, Homo sapiens
  CDR3 for beta chain variable domain of TCR clone 156639 (TRBV12-4, TRBJ2-5)
CASSPPTGLQETQYF

SEQ ID NO: 313279 - protein, 12 aa, Homo sapiens
  CDR3 for alpha chain variable domain of TCR clone 156640 (TRAV21, TRAJ23)
CAVMLQGGKLIF

SEQ ID NO: 313280 - protein, 12 aa, Homo sapiens
  CDR3 for beta chain variable domain of TCR clone 156640 (TRBV11-2, TRBJ2-2)
CASSRGGGELFF

SEQ ID NO: 313281 - protein, 13 aa, Homo sapiens
  CDR3 for alpha chain variable domain of TCR clone 156641 (TRAV21, TRAJ20)
CAVGLRVDYKLSF

SEQ ID NO: 313282 - protein, 13 aa, Homo sapiens
  CDR3 for beta chain variable domain of TCR clone 156641 (TRBV7-3, TRBJ2-5)
CASSSDREETQYF

SEQ ID NO: 313283 - protein, 17 aa, Homo sapiens
  CDR3 for alpha chain variable domain of TCR clone 156642 (TRAV12-2, TRAJ36)
CAVKDNLFFGTGTRLPV

SEQ ID NO: 313284 - protein, 15 aa, Homo sapiens
  CDR3 for beta chain variable domain of TCR clone 156642 (TRBV28, TRBJ2-2)
CASTVAGANTGELFF

SEQ ID NO: 313285 - protein, 13 aa, Homo sapiens
  CDR3 for alpha chain variable domain of TCR clone 156643 (TRAV2, TRAJ40)
CAVVTSGTYKYIF

SEQ ID NO: 313286 - protein, 15 aa, Homo sapiens
  CDR3 for beta chain variable domain of TCR clone 156643 (TRBV5-1, TRBJ2-7)
CASSPQGRPLDEQYF

SEQ ID NO: 313287 - protein, 15 aa, Homo sapiens
  CDR3 for alpha chain variable domain of TCR clone 156644 (TRAV13-1, TRAJ17)
CAASIERAAGNKLTF

SEQ ID NO: 313288 - protein, 13 aa, Homo sapiens
  CDR3 for beta chain variable domain of TCR clone 156644 (TRBV13, TRBJ2-3)
CASSPGSTDTQYF

SEQ ID NO: 313289 - protein, 11 aa, Homo sapiens
  CDR3 for alpha chain variable domain of TCR clone 156645 (TRAV16, TRAJ49)
CALSSGNQFYF

SEQ ID NO: 313290 - protein, 16 aa, Homo sapiens
  CDR3 for beta chain variable domain of TCR clone 156645 (TRBV20-1, TRBJ1-5)
CSARDVGGGWIQPQHF

SEQ ID NO: 313291 - protein, 12 aa, Homo sapiens
  CDR3 for alpha chain variable domain of TCR clone 156646 (TRAV12-2, TRAJ42)
CAVGGSQGNLIF

SEQ ID NO: 313292 - protein, 16 aa, Homo sapiens
  CDR3 for beta chain variable domain of TCR clone 156646 (TRBV19, TRBJ2-2)
CASRSPGTGATGELFF

SEQ ID NO: 313293 - protein, 15 aa, Homo sapiens
  CDR3 for alpha chain variable domain of TCR clone 156647 (TRAV23/DV6, TRAJ30)
CAASSQESRDNKIIF

SEQ ID NO: 313294 - protein, 17 aa, Homo sapiens
  CDR3 for beta chain variable domain of TCR clone 156647 (TRBV4-3, TRBJ2-1)
CASSQFSSGRASGEQFF

SEQ ID NO: 313295 - protein, 15 aa, Homo sapiens
  CDR3 for alpha chain variable domain of TCR clone 156648 (TRAV8-3, TRAJ11)
CAVSLLNSGYSTLTF

SEQ ID NO: 313296 - protein, 23 aa, Homo sapiens
  CDR3 for beta chain variable domain of TCR clone 156648 (TRBV7-9, TRBJ1-2)
EAQLEKSRLLSDRFSSGEDGYTF

SEQ ID NO: 313297 - protein, 12 aa, Homo sapiens
  CDR3 for alpha chain variable domain of TCR clone 156649 (TRAV13-2, TRAJ23)
CAERHRGGKLIF

SEQ ID NO: 313298 - protein, 16 aa, Homo sapiens
  CDR3 for beta chain variable domain of TCR clone 156649 (TRBV20-1, TRBJ1-4)
CSAPGQGLLTIEKLFF

SEQ ID NO: 313299 - protein, 14 aa, Homo sapiens
  CDR3 for alpha chain variable domain of TCR clone 156650 (TRAV8-1, TRAJ34)
CAVITTYNTDKLIF

SEQ ID NO: 313300 - protein, 14 aa, Homo sapiens
  CDR3 for beta chain variable domain of TCR clone 156650 (TRBV11-3, TRBJ1-3)
CASSHNVQGNTIYF

SEQ ID NO: 313301 - protein, 15 aa, Homo sapiens
  CDR3 for alpha chain variable domain of TCR clone 156651 (TRAV21, TRAJ53)
CATLNSGVSNYNLTF

SEQ ID NO: 313302 - protein, 14 aa, Homo sapiens
  CDR3 for beta chain variable domain of TCR clone 156651 (TRBV15, TRBJ2-5)
CATSIGGLGETQYF

SEQ ID NO: 313303 - protein, 13 aa, Homo sapiens
  CDR3 for alpha chain variable domain of TCR clone 156652 (TRAV3, TRAJ29)
CAVRDIIDTPLVV

SEQ ID NO: 313304 - protein, 14 aa, Homo sapiens
  CDR3 for beta chain variable domain of TCR clone 156652 (TRBV27, TRBJ2-1)
CASSATGGYNEQFF

SEQ ID NO: 313305 - protein, 14 aa, Homo sapiens
  CDR3 for alpha chain variable domain of TCR clone 156653 (TRAV26-1, TRAJ38)
CIADNAGNNRKLIW

SEQ ID NO: 313306 - protein, 16 aa, Homo sapiens
  CDR3 for beta chain variable domain of TCR clone 156653 (TRBV7-9, TRBJ1-2)
CASSLGFSSGEDGYTF

SEQ ID NO: 313307 - protein, 14 aa, Homo sapiens
  CDR3 for alpha chain variable domain of TCR clone 156654 (TRAV12-2, TRAJ17)
CAVNIKAAVTKLTF

SEQ ID NO: 313308 - protein, 16 aa, Homo sapiens
  CDR3 for beta chain variable domain of TCR clone 156654 (TRBV20-1, TRBJ2-6)
CSASSQGYDGANVLTF

SEQ ID NO: 313309 - protein, 14 aa, Homo sapiens
  CDR3 for alpha chain variable domain of TCR clone 156655 (TRAV1-2, TRAJ16)
FAVNRFSDGKKLLF

SEQ ID NO: 313310 - protein, 15 aa, Homo sapiens
  CDR3 for beta chain variable domain of TCR clone 156655 (TRBV9, TRBJ1-6)
CASSVAGTGDSPLHF

SEQ ID NO: 313311 - protein, 14 aa, Homo sapiens
  CDR3 for alpha chain variable domain of TCR clone 156656 (TRAV13-1, TRAJ35)
CAASKGGFGNVLQF

SEQ ID NO: 313312 - protein, 13 aa, Homo sapiens
  CDR3 for beta chain variable domain of TCR clone 156656 (TRBV7-3, TRBJ1-1)
CASSQDWGAEAFF

SEQ ID NO: 313313 - protein, 12 aa, Homo sapiens
  CDR3 for alpha chain variable domain of TCR clone 156657 (TRAV12-2, TRAJ8)
CAVNTGFQKLVF

SEQ ID NO: 313314 - protein, 15 aa, Homo sapiens
  CDR3 for beta chain variable domain of TCR clone 156657 (TRBV7-8, TRBJ1-5)
CASSLKRRGLEPQHF

SEQ ID NO: 313315 - protein, 15 aa, Homo sapiens
  CDR3 for alpha chain variable domain of TCR clone 156658 (TRAV21, TRAJ53)
CATLNSGGSNYKLTF

SEQ ID NO: 313316 - protein, 15 aa, Homo sapiens
  CDR3 for beta chain variable domain of TCR clone 156658 (TRBV11-2, TRBJ2-2)
CASSSDRVNAGELFF

SEQ ID NO: 313317 - protein, 12 aa, Homo sapiens
  CDR3 for alpha chain variable domain of TCR clone 156659 (TRAV12-3, TRAJ17)
CAMTLTGNKLTF

SEQ ID NO: 313318 - protein, 15 aa, Homo sapiens
  CDR3 for beta chain variable domain of TCR clone 156659 (TRBV9, TRBJ1-2)
CASSVVGQANYGYTF

SEQ ID NO: 313319 - protein, 14 aa, Homo sapiens
  CDR3 for alpha chain variable domain of TCR clone 156660 (TRAV12-2, TRAJ17)
CAVLFKAAGNKLSF

SEQ ID NO: 313320 - protein, 15 aa, Homo sapiens
  CDR3 for beta chain variable domain of TCR clone 156660 (TRBV28, TRBJ2-1)
CASSLDTSSYNEQFF

SEQ ID NO: 313321 - protein, 16 aa, Homo sapiens
  CDR3 for alpha chain variable domain of TCR clone 156661 (TRAV26-1, TRAJ33)
CIVPFWGEDSNYQVIW

SEQ ID NO: 313322 - protein, 14 aa, Homo sapiens
  CDR3 for beta chain variable domain of TCR clone 156661 (TRBV6-3, TRBJ1-1)
CASSYHSKNTEAFF

SEQ ID NO: 313323 - protein, 13 aa, Homo sapiens
  CDR3 for alpha chain variable domain of TCR clone 156662 (TRAV3, TRAJ15)
WAVRDQAGTALIF

SEQ ID NO: 313324 - protein, 18 aa, Homo sapiens
  CDR3 for beta chain variable domain of TCR clone 156662 (TRBV23-1, TRBJ2-5)
PAPAVPERVLLIQETQYF

SEQ ID NO: 313325 - protein, 13 aa, Homo sapiens
  CDR3 for alpha chain variable domain of TCR clone 156663 (TRAV12-3, TRAJ30)
CAMSAKWDDKIIF

SEQ ID NO: 313326 - protein, 12 aa, Homo sapiens
  CDR3 for beta chain variable domain of TCR clone 156663 (TRBV11-2, TRBJ2-2)
CASSLGGGELFF

SEQ ID NO: 313327 - protein, 13 aa, Homo sapiens
  CDR3 for alpha chain variable domain of TCR clone 156664 (TRAV29/DV5, TRAJ31)
CAASRNNNARLMF

SEQ ID NO: 313328 - protein, 16 aa, Homo sapiens
  CDR3 for beta chain variable domain of TCR clone 156664 (TRBV7-9, TRBJ1-2)
CASSLGFSSGEDGYTF

SEQ ID NO: 313329 - protein, 16 aa, Homo sapiens
  CDR3 for alpha chain variable domain of TCR clone 156665 (TRAV20, TRAJ22)
CAVQASSSGSARQLTF

SEQ ID NO: 313330 - protein, 16 aa, Homo sapiens
  CDR3 for beta chain variable domain of TCR clone 156665 (TRBV7-3, TRBJ2-2)
CASSLKRGTLSGELFF

SEQ ID NO: 313331 - protein, 12 aa, Homo sapiens
  CDR3 for alpha chain variable domain of TCR clone 156666 (TRAV12-2, TRAJ31)
CAVNKPDARLMF

SEQ ID NO: 313332 - protein, 17 aa, Homo sapiens
  CDR3 for beta chain variable domain of TCR clone 156666 (TRBV20-1, TRBJ1-6)
CSARGGYTFSYNSPLHF

SEQ ID NO: 313333 - protein, 18 aa, Homo sapiens
  CDR3 for alpha chain variable domain of TCR clone 156667 (TRAV21, TRAJ53)
CAVKGGENSGGSNYKLTF

SEQ ID NO: 313334 - protein, 12 aa, Homo sapiens
  CDR3 for beta chain variable domain of TCR clone 156667 (TRBV24-1, TRBJ2-3)
CASSDSTDTQYF

SEQ ID NO: 313335 - protein, 14 aa, Homo sapiens
  CDR3 for alpha chain variable domain of TCR clone 156668 (TRAV23/DV6, TRAJ57)
CAAALKGGSEKLVF

SEQ ID NO: 313336 - protein, 14 aa, Homo sapiens
  CDR3 for beta chain variable domain of TCR clone 156668 (TRBV7-6, TRBJ2-1)
CASSLGGGADEQFF

SEQ ID NO: 313337 - protein, 15 aa, Homo sapiens
  CDR3 for alpha chain variable domain of TCR clone 156669 (TRAV12-2, TRAJ23)
CAVKQGDNQGGKLIF

SEQ ID NO: 313338 - protein, 13 aa, Homo sapiens
  CDR3 for beta chain variable domain of TCR clone 156669 (TRBV25-1, TRBJ1-4)
CATRVGANEKLFF

SEQ ID NO: 313339 - protein, 11 aa, Homo sapiens
  CDR3 for alpha chain variable domain of TCR clone 156670 (TRAV2, TRAJ13)
CASGGYQKVTF

SEQ ID NO: 313340 - protein, 16 aa, Homo sapiens
  CDR3 for beta chain variable domain of TCR clone 156670 (TRBV19, TRBJ2-2)
CASSPSGGLNTGELFF

SEQ ID NO: 313341 - protein, 16 aa, Homo sapiens
  CDR3 for alpha chain variable domain of TCR clone 156671 (TRAV3, TRAJ37)
CAVRPHGSGNKGKLIF

SEQ ID NO: 313342 - protein, 11 aa, Homo sapiens
  CDR3 for beta chain variable domain of TCR clone 156671 (TRBV10-3, TRBJ2-7)
CAISEGLEQYF

SEQ ID NO: 313343 - protein, 13 aa, Homo sapiens
  CDR3 for alpha chain variable domain of TCR clone 156672 (TRAV29/DV5, TRAJ31)
CAASRNNNARLMF

SEQ ID NO: 313344 - protein, 12 aa, Homo sapiens
  CDR3 for beta chain variable domain of TCR clone 156672 (TRBV11-2, TRBJ2-2)
CAGSLGGGELFF

SEQ ID NO: 313345 - protein, 13 aa, Homo sapiens
  CDR3 for alpha chain variable domain of TCR clone 156673 (TRAV1-2, TRAJ9)
CAALNTGGFKTIF

SEQ ID NO: 313346 - protein, 11 aa, Homo sapiens
  CDR3 for beta chain variable domain of TCR clone 156673 (TRBV11-2, TRBJ1-1)
CASSINTEAFF

SEQ ID NO: 313347 - protein, 14 aa, Homo sapiens
  CDR3 for alpha chain variable domain of TCR clone 156674 (TRAV12-1, TRAJ34)
CVVNLDYNTDKLIF

SEQ ID NO: 313348 - protein, 17 aa, Homo sapiens
  CDR3 for beta chain variable domain of TCR clone 156674 (TRBV20-1, TRBJ2-7)
CSAAGTSGGGSSCEQYF

SEQ ID NO: 313349 - protein, 13 aa, Homo sapiens
  CDR3 for alpha chain variable domain of TCR clone 156675 (TRAV1-1, TRAJ30)
CAVRSDRDDKIIF

SEQ ID NO: 313350 - protein, 14 aa, Homo sapiens
  CDR3 for beta chain variable domain of TCR clone 156675 (TRBV28, TRBJ2-7)
CASTFYGRANEQYF

SEQ ID NO: 313351 - protein, 18 aa, Homo sapiens
  CDR3 for alpha chain variable domain of TCR clone 156676 (TRAV13-1, TRAJ52)
CAAKNPNAGGTSYGKLTF

SEQ ID NO: 313352 - protein, 15 aa, Homo sapiens
  CDR3 for beta chain variable domain of TCR clone 156676 (TRBV10-3, TRBJ2-7)
CATREQGLRSYEQYF

SEQ ID NO: 313353 - protein, 19 aa, Homo sapiens
  CDR3 for alpha chain variable domain of TCR clone 156677 (TRAV2, TRAJ20)
ILQVREADAAVYQDCKLSF

SEQ ID NO: 313354 - protein, 13 aa, Homo sapiens
  CDR3 for beta chain variable domain of TCR clone 156677 (TRBV15, TRBJ1-6)
CATSGGLNSPLHF

SEQ ID NO: 313355 - protein, 14 aa, Homo sapiens
  CDR3 for alpha chain variable domain of TCR clone 156678 (TRAV12-2, TRAJ44)
CAVNPAGTASKLTF

SEQ ID NO: 313356 - protein, 17 aa, Homo sapiens
  CDR3 for beta chain variable domain of TCR clone 156678 (TRBV7-8, TRBJ2-6)
CASSAGTGGAGANVLTF

SEQ ID NO: 313357 - protein, 14 aa, Homo sapiens
  CDR3 for alpha chain variable domain of TCR clone 156679 (TRAV26-1, TRAJ45)
CIEVTGGGADGLTF

SEQ ID NO: 313358 - protein, 12 aa, Homo sapiens
  CDR3 for beta chain variable domain of TCR clone 156679 (TRBV11-2, TRBJ2-5)
CASSLGQETQYF

SEQ ID NO: 313359 - protein, 16 aa, Homo sapiens
  CDR3 for alpha chain variable domain of TCR clone 156680 (TRAV4, TRAJ22)
CLVGDLYSGSARQLTF

SEQ ID NO: 313360 - protein, 16 aa, Homo sapiens
  CDR3 for beta chain variable domain of TCR clone 156680 (TRBV20-1, TRBJ1-2)
CSASTFGGAENYGYTF

SEQ ID NO: 313361 - protein, 11 aa, Homo sapiens
  CDR3 for alpha chain variable domain of TCR clone 156681 (TRAV21, TRAJ4)
HVSCGYNKLIF

SEQ ID NO: 313362 - protein, 13 aa, Homo sapiens
  CDR3 for beta chain variable domain of TCR clone 156681 (TRBV7-3, TRBJ2-5)
CASSLTAGETQYF

SEQ ID NO: 313363 - protein, 11 aa, Homo sapiens
  CDR3 for alpha chain variable domain of TCR clone 156682 (TRAV26-1, TRAJ27)
CIDPNAGKSTF

SEQ ID NO: 313364 - protein, 18 aa, Homo sapiens
  CDR3 for beta chain variable domain of TCR clone 156682 (TRBV7-9, TRBJ2-6)
CASSFPGAGISGANGLTF

SEQ ID NO: 313365 - protein, 13 aa, Homo sapiens
  CDR3 for alpha chain variable domain of TCR clone 156683 (TRAV21, TRAJ27)
CAARPGNAGKSTL

SEQ ID NO: 313366 - protein, 11 aa, Homo sapiens
  CDR3 for beta chain variable domain of TCR clone 156683 (TRBV11-2, TRBJ2-2)
CASSLPGELFC

SEQ ID NO: 313367 - protein, 14 aa, Homo sapiens
  CDR3 for alpha chain variable domain of TCR clone 156684 (TRAV12-2, TRAJ41)
CAVNRANSGYALNF

SEQ ID NO: 313368 - protein, 14 aa, Homo sapiens
  CDR3 for beta chain variable domain of TCR clone 156684 (TRBV19, TRBJ2-1)
CASPTFVLSGEQFF

SEQ ID NO: 313369 - protein, 13 aa, Homo sapiens
  CDR3 for alpha chain variable domain of TCR clone 156685 (TRAV35, TRAJ57)
CWSPQGGSEKLVF

SEQ ID NO: 313370 - protein, 12 aa, Homo sapiens
  CDR3 for beta chain variable domain of TCR clone 156685 (TRBV7-3, TRBJ2-1)
CASSFINNEQFF

SEQ ID NO: 313371 - protein, 11 aa, Homo sapiens
  CDR3 for alpha chain variable domain of TCR clone 156686 (TRAV12-2, TRAJ39)
CAVNNMLTFGG

SEQ ID NO: 313372 - protein, 16 aa, Homo sapiens
  CDR3 for beta chain variable domain of TCR clone 156686 (TRBV9, TRBJ2-7)
CASSAGPDRSPYAQYF

SEQ ID NO: 313373 - protein, 13 aa, Homo sapiens
  CDR3 for alpha chain variable domain of TCR clone 156687 (TRAV13-2, TRAJ48)
CAEMDFGNEKLTF

SEQ ID NO: 313374 - protein, 14 aa, Homo sapiens
  CDR3 for beta chain variable domain of TCR clone 156687 (TRBV20-1, TRBJ2-2)
CSAPDTANTGELFF

SEQ ID NO: 313375 - protein, 13 aa, Homo sapiens
  CDR3 for alpha chain variable domain of TCR clone 156688 (TRAV12-3, TRAJ13)
CAMSSGGYQKVTF

SEQ ID NO: 313376 - protein, 15 aa, Homo sapiens
  CDR3 for beta chain variable domain of TCR clone 156688 (TRBV19, TRBJ2-7)
CASSIGGGLVNEQYF

SEQ ID NO: 313377 - protein, 12 aa, Homo sapiens
  CDR3 for alpha chain variable domain of TCR clone 156689 (TRAV1-2, TRAJ33)
CAALDSNYQLIR

SEQ ID NO: 313378 - protein, 16 aa, Homo sapiens
  CDR3 for beta chain variable domain of TCR clone 156689 (TRBV6-4, TRBJ1-2)
CASSEAVGDPNYGYTF

SEQ ID NO: 313379 - protein, 15 aa, Homo sapiens
  CDR3 for alpha chain variable domain of TCR clone 156690 (TRAV2, TRAJ15)
CAVDDRGQAGTALIF

SEQ ID NO: 313380 - protein, 13 aa, Homo sapiens
  CDR3 for beta chain variable domain of TCR clone 156690 (TRBV10-2, TRBJ2-7)
CASGASGGYEQYL

SEQ ID NO: 313381 - protein, 16 aa, Homo sapiens
  CDR3 for alpha chain variable domain of TCR clone 156691 (TRAV30, TRAJ24)
CGTEIVDADSWGKFPF

SEQ ID NO: 313382 - protein, 16 aa, Homo sapiens
  CDR3 for beta chain variable domain of TCR clone 156691 (TRBV12-4, TRBJ1-5)
CASSRPVGGSNQPQHF

SEQ ID NO: 313383 - protein, 14 aa, Homo sapiens
  CDR3 for alpha chain variable domain of TCR clone 156692 (TRAV38-1, TRAJ45)
CAYYSGGGADGLTF

SEQ ID NO: 313384 - protein, 14 aa, Homo sapiens
  CDR3 for beta chain variable domain of TCR clone 156692 (TRBV28, TRBJ2-7)
CASTRQGAPYEQYF

SEQ ID NO: 313385 - protein, 18 aa, Homo sapiens
  CDR3 for alpha chain variable domain of TCR clone 156693 (TRAV29/DV5, TRAJ26)
CSVLLCRKRKPEGQNFVF

SEQ ID NO: 313386 - protein, 17 aa, Homo sapiens
  CDR3 for beta chain variable domain of TCR clone 156693 (TRBV20-1, TRBJ2-2)
CSASGSGQGGLTGELFF

SEQ ID NO: 313387 - protein, 10 aa, Homo sapiens
  CDR3 for alpha chain variable domain of TCR clone 156694 (TRAV29/DV5, TRAJ34)
CAEDTDKLIF

SEQ ID NO: 313388 - protein, 16 aa, Homo sapiens
  CDR3 for beta chain variable domain of TCR clone 156694 (TRBV12-5, TRBJ2-5)
CASGPRTSGNQETQYF

SEQ ID NO: 313389 - protein, 14 aa, Homo sapiens
  CDR3 for alpha chain variable domain of TCR clone 156695 (TRAV12-2, TRAJ13)
CAVKTTGGYKKVTF

SEQ ID NO: 313390 - protein, 15 aa, Homo sapiens
  CDR3 for beta chain variable domain of TCR clone 156695 (TRBV27, TRBJ2-1)
CASSNGGGSSNEQFF

SEQ ID NO: 313391 - protein, 13 aa, Homo sapiens
  CDR3 for alpha chain variable domain of TCR clone 156696 (TRAV1-2, TRAJ9)
CAALNTGGFKTIF

SEQ ID NO: 313392 - protein, 17 aa, Homo sapiens
  CDR3 for beta chain variable domain of TCR clone 156696 (TRBV5-1, TRBJ1-6)
CASSPSLQGSDNSPLHF

SEQ ID NO: 313393 - protein, 15 aa, Homo sapiens
  CDR3 for alpha chain variable domain of TCR clone 156697 (TRAV21, TRAJ40)
CAVRPQTSGTYKYIF

SEQ ID NO: 313394 - protein, 13 aa, Homo sapiens
  CDR3 for beta chain variable domain of TCR clone 156697 (TRBV7-2, TRBJ2-2)
CASSSVGAGELFF

SEQ ID NO: 313395 - protein, 13 aa, Homo sapiens
  CDR3 for alpha chain variable domain of TCR clone 156698 (TRAV17, TRAJ40)
CAMRPSGTYKYIF

SEQ ID NO: 313396 - protein, 14 aa, Homo sapiens
  CDR3 for beta chain variable domain of TCR clone 156698 (TRBV7-6, TRBJ2-3)
CASSLGTVTDTQYF

SEQ ID NO: 313397 - protein, 16 aa, Homo sapiens
  CDR3 for alpha chain variable domain of TCR clone 156699 (TRAV12-3, TRAJ58)
CAMTDTEETSGSRLTF

SEQ ID NO: 313398 - protein, 22 aa, Homo sapiens
  CDR3 for beta chain variable domain of TCR clone 156699 (TRBV23-1, TRBJ2-7)
CASSRLLDSGQGYVGGGYEQYF

SEQ ID NO: 313399 - protein, 14 aa, Homo sapiens
  CDR3 for alpha chain variable domain of TCR clone 156700 (TRAV1-2, TRAJ16)
CAVNRFSDGHNLLF

SEQ ID NO: 313400 - protein, 12 aa, Homo sapiens
  CDR3 for beta chain variable domain of TCR clone 156700 (TRBV28, TRBJ2-6)
CAIQAGANVLTF

SEQ ID NO: 313401 - protein, 11 aa, Homo sapiens
  CDR3 for alpha chain variable domain of TCR clone 156701 (TRAV3, TRAJ17)
PRGAAGNKLTC

SEQ ID NO: 313402 - protein, 13 aa, Homo sapiens
  CDR3 for beta chain variable domain of TCR clone 156701 (TRBV7-2, TRBJ2-4)
CASSREHANIQYF

SEQ ID NO: 313403 - protein, 18 aa, Homo sapiens
  CDR3 for alpha chain variable domain of TCR clone 156702 (TRAV26-2, TRAJ54)
CILRDVEVGIQGAQKLVF

SEQ ID NO: 313404 - protein, 13 aa, Homo sapiens
  CDR3 for beta chain variable domain of TCR clone 156702 (TRBV7-9, TRBJ1-2)
CAGSLKQNYGYTF

SEQ ID NO: 313405 - protein, 15 aa, Homo sapiens
  CDR3 for alpha chain variable domain of TCR clone 156703 (TRAV8-4, TRAJ12)
CAVSDRVDSSYKLIF

SEQ ID NO: 313406 - protein, 15 aa, Homo sapiens
  CDR3 for beta chain variable domain of TCR clone 156703 (TRBV11-3, TRBJ2-1)
YASSLAGQTYNEQFF

SEQ ID NO: 313407 - protein, 10 aa, Homo sapiens
  CDR3 for alpha chain variable domain of TCR clone 156704 (TRAV36/DV7, TRAJ49)
CALTGNQFCF

SEQ ID NO: 313408 - protein, 14 aa, Homo sapiens
  CDR3 for beta chain variable domain of TCR clone 156704 (TRBV4-2, TRBJ2-5)
YASSQDRGRETQYF

SEQ ID NO: 313409 - protein, 13 aa, Homo sapiens
  CDR3 for alpha chain variable domain of TCR clone 156705 (TRAV27, TRAJ6)
CAGGTRGSYIPKF

SEQ ID NO: 313410 - protein, 14 aa, Homo sapiens
  CDR3 for beta chain variable domain of TCR clone 156705 (TRBV6-3, TRBJ1-1)
CASSYQRRDTEAFF

SEQ ID NO: 313411 - protein, 13 aa, Homo sapiens
  CDR3 for alpha chain variable domain of TCR clone 156706 (TRAV3, TRAJ20)
CAVRDWAAGKLSF

SEQ ID NO: 313412 - protein, 13 aa, Homo sapiens
  CDR3 for beta chain variable domain of TCR clone 156706 (TRBV7-2, TRBJ1-4)
CASSLAGLEKLFF

SEQ ID NO: 313413 - protein, 16 aa, Homo sapiens
  CDR3 for alpha chain variable domain of TCR clone 156707 (TRAV3, TRAJ37)
CAVRGKGSGNTGKLIF

SEQ ID NO: 313414 - protein, 15 aa, Homo sapiens
  CDR3 for beta chain variable domain of TCR clone 156707 (TRBV7-9, TRBJ1-6)
CASSSPGRGKSPLHF

SEQ ID NO: 313415 - protein, 14 aa, Homo sapiens
  CDR3 for alpha chain variable domain of TCR clone 156708 (TRAV38-1, TRAJ48)
CAFMANFGNEKLTF

SEQ ID NO: 313416 - protein, 13 aa, Homo sapiens
  CDR3 for beta chain variable domain of TCR clone 156708 (TRBV6-6, TRBJ1-2)
CASSYGWGDDGDF

SEQ ID NO: 313417 - protein, 15 aa, Homo sapiens
  CDR3 for alpha chain variable domain of TCR clone 156709 (TRAV29/DV5, TRAJ42)
CAAKTEGGSQGNLIF

SEQ ID NO: 313418 - protein, 16 aa, Homo sapiens
  CDR3 for beta chain variable domain of TCR clone 156709 (TRBV7-9, TRBJ2-1)
CASSLVSGPSYNEQFF

SEQ ID NO: 313419 - protein, 17 aa, Homo sapiens
  CDR3 for alpha chain variable domain of TCR clone 156710 (TRAV13-1, TRAJ31)
CAPRDRLMFGDGTQLVV

SEQ ID NO: 313420 - protein, 15 aa, Homo sapiens
  CDR3 for beta chain variable domain of TCR clone 156710 (TRBV6-3, TRBJ2-7)
CASSSPGTVFYEQYF

SEQ ID NO: 313421 - protein, 14 aa, Homo sapiens
  CDR3 for alpha chain variable domain of TCR clone 156711 (TRAV12-3, TRAJ42)
CAMNYGGSQGNLIF

SEQ ID NO: 313422 - protein, 18 aa, Homo sapiens
  CDR3 for beta chain variable domain of TCR clone 156711 (TRBV20-1, TRBJ2-5)
CSAKTGTTTNLYQETQYF

SEQ ID NO: 313423 - protein, 14 aa, Homo sapiens
  CDR3 for alpha chain variable domain of TCR clone 156712 (TRAV23/DV6, TRAJ45)
CAASWGGGADGLTF

SEQ ID NO: 313424 - protein, 17 aa, Homo sapiens
  CDR3 for beta chain variable domain of TCR clone 156712 (TRBV11-2, TRBJ2-1)
CASSLYPPGVEYNEQFF

SEQ ID NO: 313425 - protein, 13 aa, Homo sapiens
  CDR3 for alpha chain variable domain of TCR clone 156713 (TRAV27, TRAJ57)
CRGAQGGSEKLAF

SEQ ID NO: 313426 - protein, 15 aa, Homo sapiens
  CDR3 for beta chain variable domain of TCR clone 156713 (TRBV5-1, TRBJ2-1)
CASSQAGYWWNEQFF

SEQ ID NO: 313427 - protein, 16 aa, Homo sapiens
  CDR3 for alpha chain variable domain of TCR clone 156714 (TRAV12-3, TRAJ53)
CAMSPGSGGSNYKLTF

SEQ ID NO: 313428 - protein, 13 aa, Homo sapiens
  CDR3 for beta chain variable domain of TCR clone 156714 (TRBV4-3, TRBJ1-1)
CASRQAGNTEAFF

SEQ ID NO: 313429 - protein, 15 aa, Homo sapiens
  CDR3 for alpha chain variable domain of TCR clone 156715 (TRAV14/DV4, TRAJ12)
CAMREERDSSYKLIF

SEQ ID NO: 313430 - protein, 16 aa, Homo sapiens
  CDR3 for beta chain variable domain of TCR clone 156715 (TRBV11-2, TRBJ1-2)
CASSLDTGGADYDYTF

SEQ ID NO: 313431 - protein, 14 aa, Homo sapiens
  CDR3 for alpha chain variable domain of TCR clone 156716 (TRAV12-1, TRAJ17)
CVVNYKDAGNKLTF

SEQ ID NO: 313432 - protein, 17 aa, Homo sapiens
  CDR3 for beta chain variable domain of TCR clone 156716 (TRBV20-1, TRBJ2-1)
CSASSSGLAGAYNEQFF

SEQ ID NO: 313433 - protein, 13 aa, Homo sapiens
  CDR3 for alpha chain variable domain of TCR clone 156717 (TRAV36/DV7, TRAJ37)
CAVFSSNTGKLIF

SEQ ID NO: 313434 - protein, 15 aa, Homo sapiens
  CDR3 for beta chain variable domain of TCR clone 156717 (TRBV19, TRBJ2-1)
CASSSPGVPLDEQFF

SEQ ID NO: 313435 - protein, 16 aa, Homo sapiens
  CDR3 for alpha chain variable domain of TCR clone 156718 (TRAV20, TRAJ22)
CAVQASSSGSARQLTF

SEQ ID NO: 313436 - protein, 15 aa, Homo sapiens
  CDR3 for beta chain variable domain of TCR clone 156718 (TRBV7-2, TRBJ2-2)
CASRRPGQNTGELFF

SEQ ID NO: 313437 - protein, 13 aa, Homo sapiens
  CDR3 for alpha chain variable domain of TCR clone 156719 (TRAV3, TRAJ30)
CAVRDRGDDQIIF

SEQ ID NO: 313438 - protein, 16 aa, Homo sapiens
  CDR3 for beta chain variable domain of TCR clone 156719 (TRBV7-3, TRBJ2-2)
CASSLKRGTLSGELFF

SEQ ID NO: 313439 - protein, 12 aa, Homo sapiens
  CDR3 for alpha chain variable domain of TCR clone 156720 (TRAV30, TRAJ43)
CGTEERGNDMRF

SEQ ID NO: 313440 - protein, 13 aa, Homo sapiens
  CDR3 for beta chain variable domain of TCR clone 156720 (TRBV27, TRBJ2-7)
CASSFSQGYAQYF

SEQ ID NO: 313441 - protein, 16 aa, Homo sapiens
  CDR3 for alpha chain variable domain of TCR clone 156721 (TRAV16, TRAJ57)
CAPYLITQGGSEKLVF

SEQ ID NO: 313442 - protein, 14 aa, Homo sapiens
  CDR3 for beta chain variable domain of TCR clone 156721 (TRBV7-3, TRBJ1-1)
CASSLKGGNTEAFF

SEQ ID NO: 313443 - protein, 15 aa, Homo sapiens
  CDR3 for alpha chain variable domain of TCR clone 156722 (TRAV1-2, TRAJ38)
CAARENAGNNRKLIW

SEQ ID NO: 313444 - protein, 13 aa, Homo sapiens
  CDR3 for beta chain variable domain of TCR clone 156722 (TRBV27, TRBJ1-2)
CASSPSHRGRYTF

SEQ ID NO: 313445 - protein, 15 aa, Homo sapiens
  CDR3 for alpha chain variable domain of TCR clone 156723 (TRAV4, TRAJ26)
CVVGGLDNYGQNFVF

SEQ ID NO: 313446 - protein, 13 aa, Homo sapiens
  CDR3 for beta chain variable domain of TCR clone 156723 (TRBV20-1, TRBJ2-5)
CSASLTGREAQYF

SEQ ID NO: 313447 - protein, 11 aa, Homo sapiens
  CDR3 for alpha chain variable domain of TCR clone 156724 (TRAV35, TRAJ57)
GPQGGSEKLVF

SEQ ID NO: 313448 - protein, 13 aa, Homo sapiens
  CDR3 for beta chain variable domain of TCR clone 156724 (TRBV7-9, TRBJ1-2)
CASSLKQNYGYTF

SEQ ID NO: 313449 - protein, 18 aa, Homo sapiens
  CDR3 for alpha chain variable domain of TCR clone 156725 (TRAV21, TRAJ52)
CAVRPSPAGGTSYGKLTF

SEQ ID NO: 313450 - protein, 13 aa, Homo sapiens
  CDR3 for beta chain variable domain of TCR clone 156725 (TRBV3-1, TRBJ2-2)
CASLARGSGELFF

SEQ ID NO: 313451 - protein, 15 aa, Homo sapiens
  CDR3 for alpha chain variable domain of TCR clone 156726 (TRAV4, TRAJ39)
CLVGPNHNAGNMLTF

SEQ ID NO: 313452 - protein, 14 aa, Homo sapiens
  CDR3 for beta chain variable domain of TCR clone 156726 (TRBV19, TRBJ2-1)
CASPTFVLSGEQFF

SEQ ID NO: 313453 - protein, 14 aa, Homo sapiens
  CDR3 for alpha chain variable domain of TCR clone 156727 (TRAV8-2, TRAJ4)
CVGSPSGGYNKLMF

SEQ ID NO: 313454 - protein, 15 aa, Homo sapiens
  CDR3 for beta chain variable domain of TCR clone 156727 (TRBV4-1, TRBJ1-4)
CASSDTGGTNEKLFF

SEQ ID NO: 313455 - protein, 14 aa, Homo sapiens
  CDR3 for alpha chain variable domain of TCR clone 156728 (TRAV8-2, TRAJ37)
CVVSISVNTGKLIS

SEQ ID NO: 313456 - protein, 11 aa, Homo sapiens
  CDR3 for beta chain variable domain of TCR clone 156728 (TRBV18, TRBJ2-5)
CASSPRETQYF

SEQ ID NO: 313457 - protein, 14 aa, Homo sapiens
  CDR3 for alpha chain variable domain of TCR clone 156729 (TRAV2, TRAJ9)
CAVEDRSGGFKTIF

SEQ ID NO: 313458 - protein, 17 aa, Homo sapiens
  CDR3 for beta chain variable domain of TCR clone 156729 (TRBV11-2, TRBJ2-1)
CASSLYPPGVEYNEQFC

SEQ ID NO: 313459 - protein, 16 aa, Homo sapiens
  CDR3 for alpha chain variable domain of TCR clone 156730 (TRAV22, TRAJ45)
CAAERGKRGGADGLTF

SEQ ID NO: 313460 - protein, 13 aa, Homo sapiens
  CDR3 for beta chain variable domain of TCR clone 156730 (TRBV27, TRBJ1-1)
CASSLSIGAEAFF

SEQ ID NO: 313461 - protein, 13 aa, Homo sapiens
  CDR3 for alpha chain variable domain of TCR clone 156731 (TRAV4, TRAJ27)
CLVGDPGAGKSTF

SEQ ID NO: 313462 - protein, 15 aa, Homo sapiens
  CDR3 for beta chain variable domain of TCR clone 156731 (TRBV7-9, TRBJ2-7)
CASSLALAEAYEQYF

SEQ ID NO: 313463 - protein, 16 aa, Homo sapiens
  CDR3 for alpha chain variable domain of TCR clone 156732 (TRAV26-1, TRAJ32)
CIVRTNYGGATTKLIF

SEQ ID NO: 313464 - protein, 14 aa, Homo sapiens
  CDR3 for beta chain variable domain of TCR clone 156732 (TRBV27, TRBJ1-1)
CASSLLSGLSEAFF

SEQ ID NO: 313465 - protein, 11 aa, Homo sapiens
  CDR3 for alpha chain variable domain of TCR clone 156733 (TRAV12-2, TRAJ31)
CAVPRWARLMF

SEQ ID NO: 313466 - protein, 15 aa, Homo sapiens
  CDR3 for beta chain variable domain of TCR clone 156733 (TRBV19, TRBJ2-7)
CASSSGGGLVNEQYF

SEQ ID NO: 313467 - protein, 18 aa, Homo sapiens
  CDR3 for alpha chain variable domain of TCR clone 156734 (TRAV12-3, TRAJ52)
CAMSRTNAGGTSYGKPTF

SEQ ID NO: 313468 - protein, 16 aa, Homo sapiens
  CDR3 for beta chain variable domain of TCR clone 156734 (TRBV7-3, TRBJ2-3)
ELSLMKRMRGADTQYF

SEQ ID NO: 313469 - protein, 12 aa, Homo sapiens
  CDR3 for alpha chain variable domain of TCR clone 156735 (TRAV12-1, TRAJ40)
CVVPSGTYKYIF

SEQ ID NO: 313470 - protein, 15 aa, Homo sapiens
  CDR3 for beta chain variable domain of TCR clone 156735 (TRBV12-4, TRBJ2-1)
CASSPLSGRKSEQFF

SEQ ID NO: 313471 - protein, 11 aa, Homo sapiens
  CDR3 for alpha chain variable domain of TCR clone 156736 (TRAV36/DV7, TRAJ54)
CCGPGSQKLVF

SEQ ID NO: 313472 - protein, 14 aa, Homo sapiens
  CDR3 for beta chain variable domain of TCR clone 156736 (TRBV7-3, TRBJ1-1)
CASSLKGGNTEAFF

SEQ ID NO: 313473 - protein, 16 aa, Homo sapiens
  CDR3 for alpha chain variable domain of TCR clone 156737 (TRAV16, TRAJ24)
CALCGGSTDSWGKLQF

SEQ ID NO: 313474 - protein, 15 aa, Homo sapiens
  CDR3 for beta chain variable domain of TCR clone 156737 (TRBV27, TRBJ2-1)
CASSNGGGSSNEQFF

SEQ ID NO: 313475 - protein, 12 aa, Homo sapiens
  CDR3 for alpha chain variable domain of TCR clone 156738 (TRAV29/DV5, TRAJ31)
CVASSHNARLMF

SEQ ID NO: 313476 - protein, 17 aa, Homo sapiens
  CDR3 for beta chain variable domain of TCR clone 156738 (TRBV18, TRBJ2-6)
CASSPRQGAGGANVLTF

SEQ ID NO: 313477 - protein, 13 aa, Homo sapiens
  CDR3 for alpha chain variable domain of TCR clone 156739 (TRAV1-2, TRAJ9)
CAALNIGGFKTIF

SEQ ID NO: 313478 - protein, 13 aa, Homo sapiens
  CDR3 for beta chain variable domain of TCR clone 156739 (TRBV15, TRBJ1-6)
CATSGCLNSPLHF

SEQ ID NO: 313479 - protein, 13 aa, Homo sapiens
  CDR3 for alpha chain variable domain of TCR clone 156740 (TRAV12-3, TRAJ7)
CAMTPYGNNRLAF

SEQ ID NO: 313480 - protein, 16 aa, Homo sapiens
  CDR3 for beta chain variable domain of TCR clone 156740 (TRBV20-1, TRBJ1-4)
CSARPYGGERNEKLFF

SEQ ID NO: 313481 - protein, 15 aa, Homo sapiens
  CDR3 for alpha chain variable domain of TCR clone 156741 (TRAV27, TRAJ38)
CAARRSAGNNRKLIG

SEQ ID NO: 313482 - protein, 13 aa, Homo sapiens
  CDR3 for beta chain variable domain of TCR clone 156741 (TRBV12-5, TRBJ2-3)
CASGDRQSDTQYF

SEQ ID NO: 313483 - protein, 16 aa, Homo sapiens
  CDR3 for alpha chain variable domain of TCR clone 156742 (TRAV12-2, TRAJ10)
CAVNRVLAGGGNKLTF

SEQ ID NO: 313484 - protein, 12 aa, Homo sapiens
  CDR3 for beta chain variable domain of TCR clone 156742 (TRBV28, TRBJ2-7)
CASSFSSYEQYF

SEQ ID NO: 313485 - protein, 16 aa, Homo sapiens
  CDR3 for alpha chain variable domain of TCR clone 156743 (TRAV30, TRAJ24)
CGTEIVDADSCGKFKF

SEQ ID NO: 313486 - protein, 14 aa, Homo sapiens
  CDR3 for beta chain variable domain of TCR clone 156743 (TRBV12-5, TRBJ2-5)
CASGSRTHQETQYF

SEQ ID NO: 313487 - protein, 15 aa, Homo sapiens
  CDR3 for alpha chain variable domain of TCR clone 156744 (TRAV3, TRAJ9)
CAVRARNTGGFKTIF

SEQ ID NO: 313488 - protein, 12 aa, Homo sapiens
  CDR3 for beta chain variable domain of TCR clone 156744 (TRBV11-2, TRBJ2-7)
CASSVTTYEQYF

SEQ ID NO: 313489 - protein, 14 aa, Homo sapiens
  CDR3 for alpha chain variable domain of TCR clone 156745 (TRAV27, TRAJ49)
CAGRPEGTGNQFYF

SEQ ID NO: 313490 - protein, 13 aa, Homo sapiens
  CDR3 for beta chain variable domain of TCR clone 156745 (TRBV4-2, TRBJ1-1)
CASSQAGNTEAFF

SEQ ID NO: 313491 - protein, 14 aa, Homo sapiens
  CDR3 for alpha chain variable domain of TCR clone 156746 (TRAV35, TRAJ41)
CAGQASVRRNALNF

SEQ ID NO: 313492 - protein, 14 aa, Homo sapiens
  CDR3 for beta chain variable domain of TCR clone 156746 (TRBV20-1, TRBJ1-2)
CSASEQGAVYGYTF

SEQ ID NO: 313493 - protein, 15 aa, Homo sapiens
  CDR3 for alpha chain variable domain of TCR clone 156747 (TRAV8-3, TRAJ7)
CAVGSSSYGNNRLAF

SEQ ID NO: 313494 - protein, 15 aa, Homo sapiens
  CDR3 for beta chain variable domain of TCR clone 156747 (TRBV4-2, TRBJ1-1)
CASSQEDLPRTEAFF

SEQ ID NO: 313495 - protein, 14 aa, Homo sapiens
  CDR3 for alpha chain variable domain of TCR clone 156748 (TRAV35, TRAJ22)
CAGLRPGSARQLTF

SEQ ID NO: 313496 - protein, 12 aa, Homo sapiens
  CDR3 for beta chain variable domain of TCR clone 156748 (TRBV28, TRBJ2-3)
CASSLYRDTQYF

SEQ ID NO: 313497 - protein, 13 aa, Homo sapiens
  CDR3 for alpha chain variable domain of TCR clone 156749 (TRAV13-2, TRAJ13)
CAERPGGYHKVTF

SEQ ID NO: 313498 - protein, 15 aa, Homo sapiens
  CDR3 for beta chain variable domain of TCR clone 156749 (TRBV11-3, TRBJ2-7)
CASSPGPASSYEQYF

SEQ ID NO: 313499 - protein, 16 aa, Homo sapiens
  CDR3 for alpha chain variable domain of TCR clone 156750 (TRAV8-6, TRAJ53)
CAVREDSGGSNYKLTF

SEQ ID NO: 313500 - protein, 15 aa, Homo sapiens
  CDR3 for beta chain variable domain of TCR clone 156750 (TRBV20-1, TRBJ2-7)
CSARDRVSGMDEQYF

SEQ ID NO: 313501 - protein, 14 aa, Homo sapiens
  CDR3 for alpha chain variable domain of TCR clone 156751 (TRAV12-1, TRAJ43)
CVVNGRSNNNDMRF

SEQ ID NO: 313502 - protein, 13 aa, Homo sapiens
  CDR3 for beta chain variable domain of TCR clone 156751 (TRBV27, TRBJ1-1)
RASSLSIGAEAFF

SEQ ID NO: 313503 - protein, 17 aa, Homo sapiens
  CDR3 for alpha chain variable domain of TCR clone 156752 (TRAV3, TRAJ6)
CAVRDGPRAGGSYIHTF

SEQ ID NO: 313504 - protein, 14 aa, Homo sapiens
  CDR3 for beta chain variable domain of TCR clone 156752 (TRBV7-2, TRBJ2-7)
CASSLKTSFYEQYF

SEQ ID NO: 313505 - protein, 13 aa, Homo sapiens
  CDR3 for alpha chain variable domain of TCR clone 156753 (TRAV29/DV5, TRAJ52)
CAAGFRGAGGTSY

SEQ ID NO: 313506 - protein, 15 aa, Homo sapiens
  CDR3 for beta chain variable domain of TCR clone 156753 (TRBV9, TRBJ1-6)
CASNVAGTGDSPLHF

SEQ ID NO: 313507 - protein, 15 aa, Homo sapiens
  CDR3 for alpha chain variable domain of TCR clone 156754 (TRAV29/DV5, TRAJ29)
CAASERSSGNTPLVF

SEQ ID NO: 313508 - protein, 13 aa, Homo sapiens
  CDR3 for beta chain variable domain of TCR clone 156754 (TRBV3-1, TRBJ2-2)
CASLARGSGELFF

SEQ ID NO: 313509 - protein, 19 aa, Homo sapiens
  CDR3 for alpha chain variable domain of TCR clone 156755 (TRAV26-1, TRAJ52)
CIVRAHRNAGGTSYGKLTF

SEQ ID NO: 313510 - protein, 15 aa, Homo sapiens
  CDR3 for beta chain variable domain of TCR clone 156755 (TRBV29-1, TRBJ2-1)
CGGRDRKSSYNEQFF

SEQ ID NO: 313511 - protein, 14 aa, Homo sapiens
  CDR3 for alpha chain variable domain of TCR clone 156756 (TRAV13-2, TRAJ17)
CAENSKAAGNKPTF

SEQ ID NO: 313512 - protein, 14 aa, Homo sapiens
  CDR3 for beta chain variable domain of TCR clone 156756 (TRBV7-2, TRBJ2-5)
CASSPGGNQETQYF

SEQ ID NO: 313513 - protein, 13 aa, Homo sapiens
  CDR3 for alpha chain variable domain of TCR clone 156757 (TRAV17, TRAJ9)
CATDYTGGFKTIF

SEQ ID NO: 313514 - protein, 14 aa, Homo sapiens
  CDR3 for beta chain variable domain of TCR clone 156757 (TRBV2, TRBJ2-3)
CASSEGQNTDTQYF

SEQ ID NO: 313515 - protein, 12 aa, Homo sapiens
  CDR3 for alpha chain variable domain of TCR clone 156758 (TRAV17, TRAJ30)
CVPERRDDTIIF

SEQ ID NO: 313516 - protein, 14 aa, Homo sapiens
  CDR3 for beta chain variable domain of TCR clone 156758 (TRBV7-7, TRBJ2-2)
CASSRDRSTGELFF

SEQ ID NO: 313517 - protein, 14 aa, Homo sapiens
  CDR3 for alpha chain variable domain of TCR clone 156759 (TRAV12-1, TRAJ27)
CGEHIGTNAGKSTF

SEQ ID NO: 313518 - protein, 15 aa, Homo sapiens
  CDR3 for beta chain variable domain of TCR clone 156759 (TRBV19, TRBJ1-1)
CASTSGQIQNTEAFF

SEQ ID NO: 313519 - protein, 16 aa, Homo sapiens
  CDR3 for alpha chain variable domain of TCR clone 156760 (TRAV20, TRAJ26)
CAVQHRRDNYGQNLVF

SEQ ID NO: 313520 - protein, 15 aa, Homo sapiens
  CDR3 for beta chain variable domain of TCR clone 156760 (TRBV7-2, TRBJ2-7)
CASSWGQGAIYEQYF

SEQ ID NO: 313521 - protein, 15 aa, Homo sapiens
  CDR3 for alpha chain variable domain of TCR clone 156761 (TRAV8-3, TRAJ40)
CAAPSLGSGTYKYIF

SEQ ID NO: 313522 - protein, 12 aa, Homo sapiens
  CDR3 for beta chain variable domain of TCR clone 156761 (TRBV11-2, TRBJ2-2)
CASSLGGWELFF

SEQ ID NO: 313523 - protein, 10 aa, Homo sapiens
  CDR3 for alpha chain variable domain of TCR clone 156762 (TRAV23/DV6, TRAJ43)
CAAAVAALEQ

SEQ ID NO: 313524 - protein, 16 aa, Homo sapiens
  CDR3 for beta chain variable domain of TCR clone 156762 (TRBV18, TRBJ1-2)
CASSPPERVTIYGYSF

SEQ ID NO: 313525 - protein, 16 aa, Homo sapiens
  CDR3 for alpha chain variable domain of TCR clone 156763 (TRAV16, TRAJ4)
CALSRMFSGGYYKLIF

SEQ ID NO: 313526 - protein, 16 aa, Homo sapiens
  CDR3 for beta chain variable domain of TCR clone 156763 (TRBV24-1, TRBJ2-3)
CATSDPGAGATDTQYF

SEQ ID NO: 313527 - protein, 12 aa, Homo sapiens
  CDR3 for alpha chain variable domain of TCR clone 156764 (TRAV13-1, TRAJ21)
CAAKEGFNKFYF

SEQ ID NO: 313528 - protein, 19 aa, Homo sapiens
  CDR3 for beta chain variable domain of TCR clone 156764 (TRBV2, TRBJ2-7)
YASSDDETSGRANDYEQYF

SEQ ID NO: 313529 - protein, 12 aa, Homo sapiens
  CDR3 for alpha chain variable domain of TCR clone 156765 (TRAV35, TRAJ49)
CAGWNTGNQFYF

SEQ ID NO: 313530 - protein, 15 aa, Homo sapiens
  CDR3 for beta chain variable domain of TCR clone 156765 (TRBV19, TRBJ1-1)
CASTSGQIQNTEAFF

SEQ ID NO: 313531 - protein, 14 aa, Homo sapiens
  CDR3 for alpha chain variable domain of TCR clone 156766 (TRAV9-2, TRAJ39)
CALYIYNAGNMFTF

SEQ ID NO: 313532 - protein, 16 aa, Homo sapiens
  CDR3 for beta chain variable domain of TCR clone 156766 (TRBV7-3, TRBJ2-3)
CASSPGAGRFTDTLYF

SEQ ID NO: 313533 - protein, 13 aa, Homo sapiens
  CDR3 for alpha chain variable domain of TCR clone 156767 (TRAV8-1, TRAJ23)
CAWRDNQGGKLIF

SEQ ID NO: 313534 - protein, 13 aa, Homo sapiens
  CDR3 for beta chain variable domain of TCR clone 156767 (TRBV19, TRBJ1-2)
CASSQGQVYGYTF

SEQ ID NO: 313535 - protein, 15 aa, Homo sapiens
  CDR3 for alpha chain variable domain of TCR clone 156768 (TRAV13-2, TRAJ45)
CAENNSGGGADGLTF

SEQ ID NO: 313536 - protein, 16 aa, Homo sapiens
  CDR3 for beta chain variable domain of TCR clone 156768 (TRBV6-1, TRBJ2-1)
CASILRQGSSYNEQFF

SEQ ID NO: 313537 - protein, 15 aa, Homo sapiens
  CDR3 for alpha chain variable domain of TCR clone 156769 (TRAV10, TRAJ6)
CVVIGGSGGSYIPTF

SEQ ID NO: 313538 - protein, 14 aa, Homo sapiens
  CDR3 for beta chain variable domain of TCR clone 156769 (TRBV28, TRBJ2-7)
CASSLLRISYEQYF

SEQ ID NO: 313539 - protein, 11 aa, Homo sapiens
  CDR3 for alpha chain variable domain of TCR clone 156770 (TRAV2, TRAJ13)
CASGGYQKVTF

SEQ ID NO: 313540 - protein, 11 aa, Homo sapiens
  CDR3 for beta chain variable domain of TCR clone 156770 (TRBV20-1, TRBJ1-1)
CSARVRVGAFF

SEQ ID NO: 313541 - protein, 14 aa, Homo sapiens
  CDR3 for alpha chain variable domain of TCR clone 156771 (TRAV13-1, TRAJ4)
CAATLPSGHNRLIF

SEQ ID NO: 313542 - protein, 14 aa, Homo sapiens
  CDR3 for beta chain variable domain of TCR clone 156771 (TRBV19, TRBJ2-1)
CASPTFVLSGEQFF

SEQ ID NO: 313543 - protein, 15 aa, Homo sapiens
  CDR3 for alpha chain variable domain of TCR clone 156772 (TRAV27, TRAJ38)
CAARRNAGNNRKLIW

SEQ ID NO: 313544 - protein, 15 aa, Homo sapiens
  CDR3 for beta chain variable domain of TCR clone 156772 (TRBV5-1, TRBJ2-1)
CASTPPRAPYNEQFF

SEQ ID NO: 313545 - protein, 14 aa, Homo sapiens
  CDR3 for alpha chain variable domain of TCR clone 156773 (TRAV9-2, TRAJ24)
CALNPRGSWGKLQF

SEQ ID NO: 313546 - protein, 17 aa, Homo sapiens
  CDR3 for beta chain variable domain of TCR clone 156773 (TRBV10-3, TRBJ2-4)
CTSVPSVNKGSKNMQYF

SEQ ID NO: 313547 - protein, 13 aa, Homo sapiens
  CDR3 for alpha chain variable domain of TCR clone 156774 (TRAV13-1, TRAJ39)
CAAPFECRQHAHL

SEQ ID NO: 313548 - protein, 16 aa, Homo sapiens
  CDR3 for beta chain variable domain of TCR clone 156774 (TRBV7-3, TRBJ2-2)
CASSLKRGTLSGELFF

SEQ ID NO: 313549 - protein, 14 aa, Homo sapiens
  CDR3 for alpha chain variable domain of TCR clone 156775 (TRAV1-2, TRAJ6)
CAVSLSGGSYIPTF

SEQ ID NO: 313550 - protein, 15 aa, Homo sapiens
  CDR3 for beta chain variable domain of TCR clone 156775 (TRBV28, TRBJ2-7)
CASSPGGVGFYEQYF

SEQ ID NO: 313551 - protein, 14 aa, Homo sapiens
  CDR3 for alpha chain variable domain of TCR clone 156776 (TRAV41, TRAJ48)
CAVISNFGNEKLTF

SEQ ID NO: 313552 - protein, 12 aa, Homo sapiens
  CDR3 for beta chain variable domain of TCR clone 156776 (TRBV7-8, TRBJ2-7)
CASSLGDREQYF

SEQ ID NO: 313553 - protein, 15 aa, Homo sapiens
  CDR3 for alpha chain variable domain of TCR clone 156777 (TRAV3, TRAJ29)
CAVRAPLSGNTPLVF

SEQ ID NO: 313554 - protein, 12 aa, Homo sapiens
  CDR3 for beta chain variable domain of TCR clone 156777 (TRBV28, TRBJ2-3)
CASSLYRDTQYF

SEQ ID NO: 313555 - protein, 13 aa, Homo sapiens
  CDR3 for alpha chain variable domain of TCR clone 156778 (TRAV21, TRAJ57)
CAVTQGGSEKLVF

SEQ ID NO: 313556 - protein, 16 aa, Homo sapiens
  CDR3 for beta chain variable domain of TCR clone 156778 (TRBV19, TRBJ2-5)
CASSIGGLAAQETQYF

SEQ ID NO: 313557 - protein, 13 aa, Homo sapiens
  CDR3 for alpha chain variable domain of TCR clone 156779 (TRAV2, TRAJ40)
CAVVTSGTYKYIF

SEQ ID NO: 313558 - protein, 16 aa, Homo sapiens
  CDR3 for beta chain variable domain of TCR clone 156779 (TRBV19, TRBJ2-1)
CAWSKAGPRSYNEQFF

SEQ ID NO: 313559 - protein, 12 aa, Homo sapiens
  CDR3 for alpha chain variable domain of TCR clone 156780 (TRAV21, TRAJ39)
CAADNAGNMLTF

SEQ ID NO: 313560 - protein, 15 aa, Homo sapiens
  CDR3 for beta chain variable domain of TCR clone 156780 (TRBV10-3, TRBJ2-3)
CAISLTSGGTDTQYF

SEQ ID NO: 313561 - protein, 12 aa, Homo sapiens
  CDR3 for alpha chain variable domain of TCR clone 156781 (TRAV13-1, TRAJ27)
CAAHTNAGNSTF

SEQ ID NO: 313562 - protein, 14 aa, Homo sapiens
  CDR3 for beta chain variable domain of TCR clone 156781 (TRBV12-5, TRBJ2-5)
CASGSRTHQETQYF

SEQ ID NO: 313563 - protein, 14 aa, Homo sapiens
  CDR3 for alpha chain variable domain of TCR clone 156782 (TRAV8-4, TRAJ9)
CAVRINTGGFKTIF

SEQ ID NO: 313564 - protein, 16 aa, Homo sapiens
  CDR3 for beta chain variable domain of TCR clone 156782 (TRBV4-2, TRBJ1-2)
CASSQAGTKANYGYTF

SEQ ID NO: 313565 - protein, 14 aa, Homo sapiens
  CDR3 for alpha chain variable domain of TCR clone 156783 (TRAV8-2, TRAJ32)
CVVSAGGATNKLIL

SEQ ID NO: 313566 - protein, 18 aa, Homo sapiens
  CDR3 for beta chain variable domain of TCR clone 156783 (TRBV28, TRBJ2-1)
CASSSTSGRANSYNEQFF

SEQ ID NO: 313567 - protein, 14 aa, Homo sapiens
  CDR3 for alpha chain variable domain of TCR clone 156784 (TRAV1-2, TRAJ8)
CAVREDTGFQKLVF

SEQ ID NO: 313568 - protein, 15 aa, Homo sapiens
  CDR3 for beta chain variable domain of TCR clone 156784 (TRBV4-1, TRBJ2-5)
CASSQWGPYQETQYF

SEQ ID NO: 313569 - protein, 12 aa, Homo sapiens
  CDR3 for alpha chain variable domain of TCR clone 156785 (TRAV3, TRAJ20)
CAVRDPDYKLSF

SEQ ID NO: 313570 - protein, 14 aa, Homo sapiens
  CDR3 for beta chain variable domain of TCR clone 156785 (TRBV19, TRBJ1-2)
CASSIGAGSYGYTF

SEQ ID NO: 313571 - protein, 15 aa, Homo sapiens
  CDR3 for alpha chain variable domain of TCR clone 156786 (TRAV8-3, TRAJ45)
CASSYSGGGAYGLTF

SEQ ID NO: 313572 - protein, 13 aa, Homo sapiens
  CDR3 for beta chain variable domain of TCR clone 156786 (TRBV7-8, TRBJ2-7)
CASSLTGGREQYF

SEQ ID NO: 313573 - protein, 14 aa, Homo sapiens
  CDR3 for alpha chain variable domain of TCR clone 156787 (TRAV12-1, TRAJ45)
CVVNIGGGADGLTF

SEQ ID NO: 313574 - protein, 15 aa, Homo sapiens
  CDR3 for beta chain variable domain of TCR clone 156787 (TRBV11-3, TRBJ2-7)
CASCPGPASSYEQYV

SEQ ID NO: 313575 - protein, 12 aa, Homo sapiens
  CDR3 for alpha chain variable domain of TCR clone 156788 (TRAV17, TRAJ12)
CATLRSSYKLIF

SEQ ID NO: 313576 - protein, 13 aa, Homo sapiens
  CDR3 for beta chain variable domain of TCR clone 156788 (TRBV10-3, TRBJ2-7)
CASKLAVNYEQYF

SEQ ID NO: 313577 - protein, 14 aa, Homo sapiens
  CDR3 for alpha chain variable domain of TCR clone 156789 (TRAV8-4, TRAJ34)
CAVSDPGDTDKLIF

SEQ ID NO: 313578 - protein, 13 aa, Homo sapiens
  CDR3 for beta chain variable domain of TCR clone 156789 (TRBV7-9, TRBJ2-5)
CASLSPGQETQYC

SEQ ID NO: 313579 - protein, 17 aa, Homo sapiens
  CDR3 for alpha chain variable domain of TCR clone 156790 (TRAV13-1, TRAJ31)
CAPRDRLMFGDGTQLVV

SEQ ID NO: 313580 - protein, 15 aa, Homo sapiens
  CDR3 for beta chain variable domain of TCR clone 156790 (TRBV11-2, TRBJ1-4)
CASSPAPGPGEKLFF

SEQ ID NO: 313581 - protein, 14 aa, Homo sapiens
  CDR3 for alpha chain variable domain of TCR clone 156791 (TRAV12-2, TRAJ17)
CAVNTKAAGNNLTF

SEQ ID NO: 313582 - protein, 16 aa, Homo sapiens
  CDR3 for beta chain variable domain of TCR clone 156791 (TRBV20-1, TRBJ2-6)
CSASSQGYDGANVLTF

SEQ ID NO: 313583 - protein, 16 aa, Homo sapiens
  CDR3 for alpha chain variable domain of TCR clone 156792 (TRAV21, TRAJ37)
CADRTAGFSNTGKLIF

SEQ ID NO: 313584 - protein, 13 aa, Homo sapiens
  CDR3 for beta chain variable domain of TCR clone 156792 (TRBV7-9, TRBJ2-5)
CASLPSGRETQYF

SEQ ID NO: 313585 - protein, 14 aa, Homo sapiens
  CDR3 for alpha chain variable domain of TCR clone 156793 (TRAV21, TRAJ35)
CAVMPIGLGNVLPC

SEQ ID NO: 313586 - protein, 12 aa, Homo sapiens
  CDR3 for beta chain variable domain of TCR clone 156793 (TRBV7-9, TRBJ2-7)
CASSIKREEQYF

SEQ ID NO: 313587 - protein, 17 aa, Homo sapiens
  CDR3 for alpha chain variable domain of TCR clone 156794 (TRAV26-1, TRAJ58)
CIVRVGAEETRGPRLTF

SEQ ID NO: 313588 - protein, 18 aa, Homo sapiens
  CDR3 for beta chain variable domain of TCR clone 156794 (TRBV7-9, TRBJ2-7)
CASSLTTSGSRTWYEQYF

SEQ ID NO: 313589 - protein, 15 aa, Homo sapiens
  CDR3 for alpha chain variable domain of TCR clone 156795 (TRAV13-2, TRAJ16)
CAENDRFSDGQKLLF

SEQ ID NO: 313590 - protein, 13 aa, Homo sapiens
  CDR3 for beta chain variable domain of TCR clone 156795 (TRBV7-9, TRBJ1-2)
CASSLKQNYGYTF

SEQ ID NO: 313591 - protein, 14 aa, Homo sapiens
  CDR3 for alpha chain variable domain of TCR clone 156796 (TRAV13-1, TRAJ35)
CAAVKEALGMCCIA

SEQ ID NO: 313592 - protein, 13 aa, Homo sapiens
  CDR3 for beta chain variable domain of TCR clone 156796 (TRBV7-3, TRBJ1-1)
CASSQDWGAEAFF

SEQ ID NO: 313593 - protein, 11 aa, Homo sapiens
  CDR3 for alpha chain variable domain of TCR clone 156797 (TRAV12-2, TRAJ29)
CAVTLRSPLVF

SEQ ID NO: 313594 - protein, 17 aa, Homo sapiens
  CDR3 for beta chain variable domain of TCR clone 156797 (TRBV7-8, TRBJ2-6)
CASSAGTGGAGANVLTF

SEQ ID NO: 313595 - protein, 14 aa, Homo sapiens
  CDR3 for alpha chain variable domain of TCR clone 156798 (TRAV8-1, TRAJ5)
CAVRTDTGRRALTF

SEQ ID NO: 313596 - protein, 16 aa, Homo sapiens
  CDR3 for beta chain variable domain of TCR clone 156798 (TRBV12-4, TRBJ2-1)
CASSLPGDPSYNEQFF

SEQ ID NO: 313597 - protein, 13 aa, Homo sapiens
  CDR3 for alpha chain variable domain of TCR clone 156799 (TRAV36/DV7, TRAJ57)
CAVVLGGSEKLVF

SEQ ID NO: 313598 - protein, 19 aa, Homo sapiens
  CDR3 for beta chain variable domain of TCR clone 156799 (TRBV2, TRBJ2-2)
CASSQPGLAGGGNTGELFF

SEQ ID NO: 313599 - protein, 14 aa, Homo sapiens
  CDR3 for alpha chain variable domain of TCR clone 156800 (TRAV2, TRAJ21)
CAVEDLNNFNKFYF

SEQ ID NO: 313600 - protein, 11 aa, Homo sapiens
  CDR3 for beta chain variable domain of TCR clone 156800 (TRBV10-3, TRBJ2-1)
CTISDRGWQFF

SEQ ID NO: 313601 - protein, 12 aa, Homo sapiens
  CDR3 for alpha chain variable domain of TCR clone 156801 (TRAV17, TRAJ12)
CATLRSSYKLMF

SEQ ID NO: 313602 - protein, 16 aa, Homo sapiens
  CDR3 for beta chain variable domain of TCR clone 156801 (TRBV28, TRBJ2-7)
SASSLFFETGGPEQYF

SEQ ID NO: 313603 - protein, 19 aa, Homo sapiens
  CDR3 for alpha chain variable domain of TCR clone 156802 (TRAV4, TRAJ5)
CTTTSWGRTMDTGRRALTF

SEQ ID NO: 313604 - protein, 15 aa, Homo sapiens
  CDR3 for beta chain variable domain of TCR clone 156802 (TRBV27, TRBJ2-5)
CASSLIPAGGETQYF

SEQ ID NO: 313605 - protein, 16 aa, Homo sapiens
  CDR3 for alpha chain variable domain of TCR clone 156803 (TRAV26-1, TRAJ53)
CIVRVAMGGGNYKLTF

SEQ ID NO: 313606 - protein, 16 aa, Homo sapiens
  CDR3 for beta chain variable domain of TCR clone 156803 (TRBV28, TRBJ2-7)
CASSLFFETGGPEQYF

SEQ ID NO: 313607 - protein, 14 aa, Homo sapiens
  CDR3 for alpha chain variable domain of TCR clone 156804 (TRAV17, TRAJ24)
CVTLTTDSWGKFQF

SEQ ID NO: 313608 - protein, 16 aa, Homo sapiens
  CDR3 for beta chain variable domain of TCR clone 156804 (TRBV4-2, TRBJ2-7)
CASSQDGGSLRGEQYF

SEQ ID NO: 313609 - protein, 16 aa, Homo sapiens
  CDR3 for alpha chain variable domain of TCR clone 156805 (TRAV16, TRAJ52)
CALSGVGGTSYGKLTF

SEQ ID NO: 313610 - protein, 14 aa, Homo sapiens
  CDR3 for beta chain variable domain of TCR clone 156805 (TRBV25-1, TRBJ1-1)
CASTHLGGNTEAFF

SEQ ID NO: 313611 - protein, 14 aa, Homo sapiens
  CDR3 for alpha chain variable domain of TCR clone 156806 (TRAV2, TRAJ29)
CAGPFQYGNTPLVF

SEQ ID NO: 313612 - protein, 11 aa, Homo sapiens
  CDR3 for beta chain variable domain of TCR clone 156806 (TRBV29-1, TRBJ2-5)
CSEDRTGTQFF

SEQ ID NO: 313613 - protein, 12 aa, Homo sapiens
  CDR3 for alpha chain variable domain of TCR clone 156807 (TRAV39, TRAJ49)
CAVAMTGNQFYF

SEQ ID NO: 313614 - protein, 15 aa, Homo sapiens
  CDR3 for beta chain variable domain of TCR clone 156807 (TRBV7-9, TRBJ1-5)
CASSQGHQPNQPQHF

SEQ ID NO: 313615 - protein, 14 aa, Homo sapiens
  CDR3 for alpha chain variable domain of TCR clone 156808 (TRAV12-1, TRAJ43)
CVVNGRSNNNDMRF

SEQ ID NO: 313616 - protein, 13 aa, Homo sapiens
  CDR3 for beta chain variable domain of TCR clone 156808 (TRBV27, TRBJ1-1)
CASSLSIGAEAFL

SEQ ID NO: 313617 - protein, 15 aa, Homo sapiens
  CDR3 for alpha chain variable domain of TCR clone 156809 (TRAV26-1, TRAJ17)
CIVRVVKAARNKLTI

SEQ ID NO: 313618 - protein, 16 aa, Homo sapiens
  CDR3 for beta chain variable domain of TCR clone 156809 (TRBV7-9, TRBJ2-1)
CASSLVSGPSYNEQFF

SEQ ID NO: 313619 - protein, 14 aa, Homo sapiens
  CDR3 for alpha chain variable domain of TCR clone 156810 (TRAV13-1, TRAJ9)
CAASALTGVFKTIF

SEQ ID NO: 313620 - protein, 13 aa, Homo sapiens
  CDR3 for beta chain variable domain of TCR clone 156810 (TRBV20-1, TRBJ1-1)
CSAGTVGNAEAFF

SEQ ID NO: 313621 - protein, 14 aa, Homo sapiens
  CDR3 for alpha chain variable domain of TCR clone 156811 (TRAV1-2, TRAJ16)
CAVNRFSYGQKLLF

SEQ ID NO: 313622 - protein, 14 aa, Homo sapiens
  CDR3 for beta chain variable domain of TCR clone 156811 (TRBV12-4, TRBJ1-1)
CASSLGTGGTEAFF

SEQ ID NO: 313623 - protein, 17 aa, Homo sapiens
  CDR3 for alpha chain variable domain of TCR clone 156812 (TRAV23/DV6, TRAJ58)
CAARLLRGETSGSRLTF

SEQ ID NO: 313624 - protein, 18 aa, Homo sapiens
  CDR3 for beta chain variable domain of TCR clone 156812 (TRBV19, TRBJ2-4)
CASTPVGRDREWVNIQYF

SEQ ID NO: 313625 - protein, 14 aa, Homo sapiens
  CDR3 for alpha chain variable domain of TCR clone 156813 (TRAV26-1, TRAJ45)
CIEVTGGGADGLTF

SEQ ID NO: 313626 - protein, 14 aa, Homo sapiens
  CDR3 for beta chain variable domain of TCR clone 156813 (TRBV5-7, TRBJ2-1)
CASSSVANYNEQFF

SEQ ID NO: 313627 - protein, 14 aa, Homo sapiens
  CDR3 for alpha chain variable domain of TCR clone 156814 (TRAV1-2, TRAJ16)
CAVNRFSDGQKLLF

SEQ ID NO: 313628 - protein, 16 aa, Homo sapiens
  CDR3 for beta chain variable domain of TCR clone 156814 (TRBV12-4, TRBJ1-5)
CAISRPVGGSNQPQHF

SEQ ID NO: 313629 - protein, 12 aa, Homo sapiens
  CDR3 for alpha chain variable domain of TCR clone 156815 (TRAV12-3, TRAJ17)
CEMTLTGNKLTF

SEQ ID NO: 313630 - protein, 15 aa, Homo sapiens
  CDR3 for beta chain variable domain of TCR clone 156815 (TRBV10-2, TRBJ2-6)
CASSEQGTGANVLTF

SEQ ID NO: 313631 - protein, 13 aa, Homo sapiens
  CDR3 for alpha chain variable domain of TCR clone 156816 (TRAV30, TRAJ6)
CGTEAGGSYIPTF

SEQ ID NO: 313632 - protein, 16 aa, Homo sapiens
  CDR3 for beta chain variable domain of TCR clone 156816 (TRBV4-3, TRBJ2-3)
CASSLGLAGEGDTQYF

SEQ ID NO: 313633 - protein, 10 aa, Homo sapiens
  CDR3 for alpha chain variable domain of TCR clone 156817 (TRAV1-2, TRAJ31)
CAFFDARPMF

SEQ ID NO: 313634 - protein, 15 aa, Homo sapiens
  CDR3 for beta chain variable domain of TCR clone 156817 (TRBV9, TRBJ1-6)
CASSVAGTGDSPLHF

SEQ ID NO: 313635 - protein, 15 aa, Homo sapiens
  CDR3 for alpha chain variable domain of TCR clone 156818 (TRAV26-1, TRAJ22)
CIVRVSFWFCKATDL

SEQ ID NO: 313636 - protein, 13 aa, Homo sapiens
  CDR3 for beta chain variable domain of TCR clone 156818 (TRBV7-9, TRBJ1-2)
CASSLKQNYGYTI

SEQ ID NO: 313637 - protein, 14 aa, Homo sapiens
  CDR3 for alpha chain variable domain of TCR clone 156819 (TRAV3, TRAJ36)
CAVRDGTGANNLFL

SEQ ID NO: 313638 - protein, 16 aa, Homo sapiens
  CDR3 for beta chain variable domain of TCR clone 156819 (TRBV7-3, TRBJ2-5)
CASIQPGGSVQETQYF

SEQ ID NO: 313639 - protein, 15 aa, Homo sapiens
  CDR3 for alpha chain variable domain of TCR clone 156820 (TRAV23/DV6, TRAJ13)
CAAWPGGGGYQKVTF

SEQ ID NO: 313640 - protein, 14 aa, Homo sapiens
  CDR3 for beta chain variable domain of TCR clone 156820 (TRBV7-2, TRBJ1-1)
CASSFLTGTTEAFV

SEQ ID NO: 313641 - protein, 15 aa, Homo sapiens
  CDR3 for alpha chain variable domain of TCR clone 156821 (TRAV13-2, TRAJ5)
CEENPHWTGRRALTF

SEQ ID NO: 313642 - protein, 14 aa, Homo sapiens
  CDR3 for beta chain variable domain of TCR clone 156821 (TRBV5-7, TRBJ2-7)
CASSFKGATGEQYF

SEQ ID NO: 313643 - protein, 13 aa, Homo sapiens
  CDR3 for alpha chain variable domain of TCR clone 156822 (TRAV1-2, TRAJ9)
CAALNTGGFKTIF

SEQ ID NO: 313644 - protein, 13 aa, Homo sapiens
  CDR3 for beta chain variable domain of TCR clone 156822 (TRBV15, TRBJ1-6)
CAPSGGLNSPLHF

SEQ ID NO: 313645 - protein, 17 aa, Homo sapiens
  CDR3 for alpha chain variable domain of TCR clone 156823 (TRAV12-3, TRAJ6)
CAMSARGGAGGSYIPTF

SEQ ID NO: 313646 - protein, 17 aa, Homo sapiens
  CDR3 for beta chain variable domain of TCR clone 156823 (TRBV11-2, TRBJ2-1)
CASSLYPPGVEYNEQFV

SEQ ID NO: 313647 - protein, 13 aa, Homo sapiens
  CDR3 for alpha chain variable domain of TCR clone 156824 (TRAV35, TRAJ42)
CAGFPGSQGNLIF

SEQ ID NO: 313648 - protein, 13 aa, Homo sapiens
  CDR3 for beta chain variable domain of TCR clone 156824 (TRBV2, TRBJ2-5)
CASGTPYQETQYF

SEQ ID NO: 313649 - protein, 16 aa, Homo sapiens
  CDR3 for alpha chain variable domain of TCR clone 156825 (TRAV3, TRAJ10)
CAVRDMRAGGGNKLTF

SEQ ID NO: 313650 - protein, 13 aa, Homo sapiens
  CDR3 for beta chain variable domain of TCR clone 156825 (TRBV28, TRBJ1-2)
CAGRDRGNYGYTF

SEQ ID NO: 313651 - protein, 13 aa, Homo sapiens
  CDR3 for alpha chain variable domain of TCR clone 156826 (TRAV27, TRAJ49)
CAPRPYTGNQFYF

SEQ ID NO: 313652 - protein, 18 aa, Homo sapiens
  CDR3 for beta chain variable domain of TCR clone 156826 (TRBV7-3, TRBJ2-5)
CASSLGGAAQGRWETQYV

SEQ ID NO: 313653 - protein, 12 aa, Homo sapiens
  CDR3 for alpha chain variable domain of TCR clone 156827 (TRAV8-6, TRAJ36)
CAVSDWLGQTTS

SEQ ID NO: 313654 - protein, 16 aa, Homo sapiens
  CDR3 for beta chain variable domain of TCR clone 156827 (TRBV12-4, TRBJ1-5)
RASSSGPRGSNQPQHF

SEQ ID NO: 313655 - protein, 13 aa, Homo sapiens
  CDR3 for alpha chain variable domain of TCR clone 156828 (TRAV17, TRAJ5)
CAPMDTGRRALTF

SEQ ID NO: 313656 - protein, 12 aa, Homo sapiens
  CDR3 for beta chain variable domain of TCR clone 156828 (TRBV11-3, TRBJ1-1)
CASSHRQGEAFF

SEQ ID NO: 313657 - protein, 13 aa, Homo sapiens
  CDR3 for alpha chain variable domain of TCR clone 156829 (TRAV20, TRAJ48)
CAVQGVGNEKLTS

SEQ ID NO: 313658 - protein, 14 aa, Homo sapiens
  CDR3 for beta chain variable domain of TCR clone 156829 (TRBV27, TRBJ2-7)
CASSFRDGPYEQYF

SEQ ID NO: 313659 - protein, 17 aa, Homo sapiens
  CDR3 for alpha chain variable domain of TCR clone 156830 (TRAV3, TRAJ42)
CAVRDRDYVGSQGNLIV

SEQ ID NO: 313660 - protein, 15 aa, Homo sapiens
  CDR3 for beta chain variable domain of TCR clone 156830 (TRBV6-6, TRBJ2-7)
CASSYSYGGSYEQYF

SEQ ID NO: 313661 - protein, 14 aa, Homo sapiens
  CDR3 for alpha chain variable domain of TCR clone 156831 (TRAV14/DV4, TRAJ49)
CAFNRYLTGNQFYF

SEQ ID NO: 313662 - protein, 14 aa, Homo sapiens
  CDR3 for beta chain variable domain of TCR clone 156831 (TRBV20-1, TRBJ1-1)
CSAQTRIGGTEAFF

SEQ ID NO: 313663 - protein, 14 aa, Homo sapiens
  CDR3 for alpha chain variable domain of TCR clone 156832 (TRAV12-2, TRAJ45)
CALPERGGADGLTF

SEQ ID NO: 313664 - protein, 13 aa, Homo sapiens
  CDR3 for beta chain variable domain of TCR clone 156832 (TRBV18, TRBJ2-5)
CASSPAGKETQYF

SEQ ID NO: 313665 - protein, 12 aa, Homo sapiens
  CDR3 for alpha chain variable domain of TCR clone 156833 (TRAV40, TRAJ20)
CLRGLNDYKPSF

SEQ ID NO: 313666 - protein, 14 aa, Homo sapiens
  CDR3 for beta chain variable domain of TCR clone 156833 (TRBV7-8, TRBJ1-2)
CASSPDSLSYGYTF

SEQ ID NO: 313667 - protein, 15 aa, Homo sapiens
  CDR3 for alpha chain variable domain of TCR clone 156834 (TRAV16, TRAJ16)
CAFQGGGSDGQKLLF

SEQ ID NO: 313668 - protein, 15 aa, Homo sapiens
  CDR3 for beta chain variable domain of TCR clone 156834 (TRBV20-1, TRBJ2-7)
CSARDRVSGMDEQYF

SEQ ID NO: 313669 - protein, 15 aa, Homo sapiens
  CDR3 for alpha chain variable domain of TCR clone 156835 (TRAV17, TRAJ37)
CATDGGSSNTGKLIF

SEQ ID NO: 313670 - protein, 14 aa, Homo sapiens
  CDR3 for beta chain variable domain of TCR clone 156835 (TRBV10-2, TRBJ1-5)
CASSSTGRNQPQHF

SEQ ID NO: 313671 - protein, 13 aa, Homo sapiens
  CDR3 for alpha chain variable domain of TCR clone 156836 (TRAV26-1, TRAJ30)
CIVNMNRYDKIIF

SEQ ID NO: 313672 - protein, 16 aa, Homo sapiens
  CDR3 for beta chain variable domain of TCR clone 156836 (TRBV16, TRBJ2-7)
CASSRPAGGSSYEQYF

SEQ ID NO: 313673 - protein, 13 aa, Homo sapiens
  CDR3 for alpha chain variable domain of TCR clone 156837 (TRAV30, TRAJ24)
CGTVTDSWGQLQF

SEQ ID NO: 313674 - protein, 14 aa, Homo sapiens
  CDR3 for beta chain variable domain of TCR clone 156837 (TRBV6-3, TRBJ2-2)
CASTYTPYTGELFF

SEQ ID NO: 313675 - protein, 13 aa, Homo sapiens
  CDR3 for alpha chain variable domain of TCR clone 156838 (TRAV12-3, TRAJ46)
CAMKKSSGDKLTF

SEQ ID NO: 313676 - protein, 16 aa, Homo sapiens
  CDR3 for beta chain variable domain of TCR clone 156838 (TRBV3-1, TRBJ2-5)
CQQPRTSGDVQETQYF

SEQ ID NO: 313677 - protein, 13 aa, Homo sapiens
  CDR3 for alpha chain variable domain of TCR clone 156839 (TRAV13-1, TRAJ4)
CAASIGGYNKLIF

SEQ ID NO: 313678 - protein, 13 aa, Homo sapiens
  CDR3 for beta chain variable domain of TCR clone 156839 (TRBV7-2, TRBJ1-1)
CASNLKGAKVAFF

SEQ ID NO: 313679 - protein, 11 aa, Homo sapiens
  CDR3 for alpha chain variable domain of TCR clone 156840 (TRAV12-3, TRAJ27)
CAMANAGKSTF

SEQ ID NO: 313680 - protein, 15 aa, Homo sapiens
  CDR3 for beta chain variable domain of TCR clone 156840 (TRBV6-5, TRBJ2-5)
CASSLYPRGGETQYF

SEQ ID NO: 313681 - protein, 12 aa, Homo sapiens
  CDR3 for alpha chain variable domain of TCR clone 156841 (TRAV13-1, TRAJ16)
CAAVSDGQKLLF

SEQ ID NO: 313682 - protein, 13 aa, Homo sapiens
  CDR3 for beta chain variable domain of TCR clone 156841 (TRBV4-2, TRBJ1-1)
CASSQAGNTEAFF

SEQ ID NO: 313683 - protein, 15 aa, Homo sapiens
  CDR3 for alpha chain variable domain of TCR clone 156842 (TRAV13-1, TRAJ36)
CAASIRQTGANNLFF

SEQ ID NO: 313684 - protein, 14 aa, Homo sapiens
  CDR3 for beta chain variable domain of TCR clone 156842 (TRBV6-1, TRBJ1-3)
CGSVQGGGGNTIYF

SEQ ID NO: 313685 - protein, 15 aa, Homo sapiens
  CDR3 for alpha chain variable domain of TCR clone 156843 (TRAV3, TRAJ17)
CAVSPKEAAGNKLTF

SEQ ID NO: 313686 - protein, 15 aa, Homo sapiens
  CDR3 for beta chain variable domain of TCR clone 156843 (TRBV28, TRBJ2-7)
CASSPGGRGFYEQYF

SEQ ID NO: 313687 - protein, 10 aa, Homo sapiens
  CDR3 for alpha chain variable domain of TCR clone 156844 (TRAV3, TRAJ13)
RPGGYQKVTF

SEQ ID NO: 313688 - protein, 13 aa, Homo sapiens
  CDR3 for beta chain variable domain of TCR clone 156844 (TRBV19, TRBJ2-2)
CASSIWSTGELFF

SEQ ID NO: 313689 - protein, 11 aa, Homo sapiens
  CDR3 for alpha chain variable domain of TCR clone 156845 (TRAV17, TRAJ9)
CGFTGGFKTIF

SEQ ID NO: 313690 - protein, 18 aa, Homo sapiens
  CDR3 for beta chain variable domain of TCR clone 156845 (TRBV12-4, TRBJ2-2)
CACSLVAGTRGRTGELFF

SEQ ID NO: 313691 - protein, 12 aa, Homo sapiens
  CDR3 for alpha chain variable domain of TCR clone 156846 (TRAV30, TRAJ39)
CGRGNAGNMPTF

SEQ ID NO: 313692 - protein, 12 aa, Homo sapiens
  CDR3 for beta chain variable domain of TCR clone 156846 (TRBV10-3, TRBJ1-1)
CATMDRPPEAFF

SEQ ID NO: 313693 - protein, 14 aa, Homo sapiens
  CDR3 for alpha chain variable domain of TCR clone 156847 (TRAV12-3, TRAJ10)
SHLPLTGGGNKLTF

SEQ ID NO: 313694 - protein, 19 aa, Homo sapiens
  CDR3 for beta chain variable domain of TCR clone 156847 (TRBV4-1, TRBJ1-1)
CASSRITLTPRGVNTEAFF

SEQ ID NO: 313695 - protein, 16 aa, Homo sapiens
  CDR3 for alpha chain variable domain of TCR clone 156848 (TRAV1-2, TRAJ10)
CAVRGVLTGGGNKLTF

SEQ ID NO: 313696 - protein, 18 aa, Homo sapiens
  CDR3 for beta chain variable domain of TCR clone 156848 (TRBV7-9, TRBJ2-7)
CASSLTTSGSRTWYEQYF

SEQ ID NO: 313697 - protein, 13 aa, Homo sapiens
  CDR3 for alpha chain variable domain of TCR clone 156849 (TRAV21, TRAJ56)
CAVRTGANSKLTF

SEQ ID NO: 313698 - protein, 15 aa, Homo sapiens
  CDR3 for beta chain variable domain of TCR clone 156849 (TRBV7-9, TRBJ1-1)
CASSHGGTVNTEAFF

SEQ ID NO: 313699 - protein, 13 aa, Homo sapiens
  CDR3 for alpha chain variable domain of TCR clone 156850 (TRAV3, TRAJ29)
CAVRDIIDTPLVF

SEQ ID NO: 313700 - protein, 14 aa, Homo sapiens
  CDR3 for beta chain variable domain of TCR clone 156850 (TRBV27, TRBJ2-1)
CARSATGGYNEQFF

SEQ ID NO: 313701 - protein, 13 aa, Homo sapiens
  CDR3 for alpha chain variable domain of TCR clone 156851 (TRAV1-2, TRAJ9)
CAVLNTGGFKTIF

SEQ ID NO: 313702 - protein, 15 aa, Homo sapiens
  CDR3 for beta chain variable domain of TCR clone 156851 (TRBV7-3, TRBJ2-1)
WASSPTGGGEVEQFF

SEQ ID NO: 313703 - protein, 14 aa, Homo sapiens
  CDR3 for alpha chain variable domain of TCR clone 156852 (TRAV23/DV6, TRAJ24)
CAASLSDSWGKLQF

SEQ ID NO: 313704 - protein, 15 aa, Homo sapiens
  CDR3 for beta chain variable domain of TCR clone 156852 (TRBV9, TRBJ1-6)
CASSVAGTEDSPLHF

SEQ ID NO: 313705 - protein, 12 aa, Homo sapiens
  CDR3 for alpha chain variable domain of TCR clone 156853 (TRAV12-3, TRAJ17)
CAMTLTGNKLTF

SEQ ID NO: 313706 - protein, 13 aa, Homo sapiens
  CDR3 for beta chain variable domain of TCR clone 156853 (TRBV10-3, TRBJ2-7)
CDSKLAVNYEQYF

SEQ ID NO: 313707 - protein, 16 aa, Homo sapiens
  CDR3 for alpha chain variable domain of TCR clone 156854 (TRAV30, TRAJ24)
CGTEIVDADSGGKFQF

SEQ ID NO: 313708 - protein, 15 aa, Homo sapiens
  CDR3 for beta chain variable domain of TCR clone 156854 (TRBV20-1, TRBJ2-6)
CSARDRGPGANVLTF

SEQ ID NO: 313709 - protein, 15 aa, Homo sapiens
  CDR3 for alpha chain variable domain of TCR clone 156855 (TRAV17, TRAJ57)
CATGPSQGGSETLVF

SEQ ID NO: 313710 - protein, 17 aa, Homo sapiens
  CDR3 for beta chain variable domain of TCR clone 156855 (TRBV20-1, TRBJ2-1)
CSASSSGLAGSYKEQFF

SEQ ID NO: 313711 - protein, 21 aa, Homo sapiens
  CDR3 for alpha chain variable domain of TCR clone 156856 (TRAV1-1, TRAJ6)
CLLLLRCERLERTGGSYIPTF

SEQ ID NO: 313712 - protein, 16 aa, Homo sapiens
  CDR3 for beta chain variable domain of TCR clone 156856 (TRBV7-8, TRBJ2-4)
CASSAERTLAKNIQYF

SEQ ID NO: 313713 - protein, 15 aa, Homo sapiens
  CDR3 for alpha chain variable domain of TCR clone 156857 (TRAV8-6, TRAJ4)
CAVRSFSGGYNKLIF

SEQ ID NO: 313714 - protein, 13 aa, Homo sapiens
  CDR3 for beta chain variable domain of TCR clone 156857 (TRBV7-2, TRBJ2-3)
CASSTDDLDTQYF

SEQ ID NO: 313715 - protein, 16 aa, Homo sapiens
  CDR3 for alpha chain variable domain of TCR clone 156858 (TRAV3, TRAJ10)
CAVRDMRAVGGNKLTF

SEQ ID NO: 313716 - protein, 15 aa, Homo sapiens
  CDR3 for beta chain variable domain of TCR clone 156858 (TRBV6-6, TRBJ2-5)
CASSPGGGLEETQYF

SEQ ID NO: 313717 - protein, 13 aa, Homo sapiens
  CDR3 for alpha chain variable domain of TCR clone 156859 (TRAV1-2, TRAJ9)
RAALNTGGFKTIV

SEQ ID NO: 313718 - protein, 13 aa, Homo sapiens
  CDR3 for beta chain variable domain of TCR clone 156859 (TRBV19, TRBJ1-2)
CASSVPGQDGYTF

SEQ ID NO: 313719 - protein, 18 aa, Homo sapiens
  CDR3 for alpha chain variable domain of TCR clone 156860 (TRAV21, TRAJ52)
CAVRPSPAGGTSYGKLTF

SEQ ID NO: 313720 - protein, 13 aa, Homo sapiens
  CDR3 for beta chain variable domain of TCR clone 156860 (TRBV5-5, TRBJ2-7)
CASSSQTRQRQYF

SEQ ID NO: 313721 - protein, 15 aa, Homo sapiens
  CDR3 for alpha chain variable domain of TCR clone 156861 (TRAV12-3, TRAJ27)
CAMRAYNTNAGKSTF

SEQ ID NO: 313722 - protein, 13 aa, Homo sapiens
  CDR3 for beta chain variable domain of TCR clone 156861 (TRBV11-2, TRBJ2-5)
CASSRGPSEIQYF

SEQ ID NO: 313723 - protein, 17 aa, Homo sapiens
  CDR3 for alpha chain variable domain of TCR clone 156862 (TRAV4, TRAJ42)
CLVGVLNYGGSQGNLIF

SEQ ID NO: 313724 - protein, 15 aa, Homo sapiens
  CDR3 for beta chain variable domain of TCR clone 156862 (TRBV7-9, TRBJ1-5)
CASSQGHQPNQPQHF

SEQ ID NO: 313725 - protein, 17 aa, Homo sapiens
  CDR3 for alpha chain variable domain of TCR clone 156863 (TRAV12-2, TRAJ36)
CAVKDNLFFGTGTRLTV

SEQ ID NO: 313726 - protein, 12 aa, Homo sapiens
  CDR3 for beta chain variable domain of TCR clone 156863 (TRBV5-1, TRBJ2-5)
CASSLGLETQYF

SEQ ID NO: 313727 - protein, 13 aa, Homo sapiens
  CDR3 for alpha chain variable domain of TCR clone 156864 (TRAV21, TRAJ44)
CAGMTGTASKLTF

SEQ ID NO: 313728 - protein, 14 aa, Homo sapiens
  CDR3 for beta chain variable domain of TCR clone 156864 (TRBV4-1, TRBJ2-2)
CASSQAVNTGELFF

SEQ ID NO: 313729 - protein, 12 aa, Homo sapiens
  CDR3 for alpha chain variable domain of TCR clone 156865 (TRAV16, TRAJ10)
CSRTGGGNKLTF

SEQ ID NO: 313730 - protein, 13 aa, Homo sapiens
  CDR3 for beta chain variable domain of TCR clone 156865 (TRBV6-5, TRBJ2-1)
CASRGRVGNEQFF

SEQ ID NO: 313731 - protein, 14 aa, Homo sapiens
  CDR3 for alpha chain variable domain of TCR clone 156866 (TRAV12-2, TRAJ24)
CAVNPADSWGKLQF

SEQ ID NO: 313732 - protein, 12 aa, Homo sapiens
  CDR3 for beta chain variable domain of TCR clone 156866 (TRBV19, TRBJ2-1)
CASSQISNEQFF

SEQ ID NO: 313733 - protein, 21 aa, Homo sapiens
  CDR3 for alpha chain variable domain of TCR clone 156867 (TRAV1-1, TRAJ6)
CPLLLRCERLERTGGSYIPTF

SEQ ID NO: 313734 - protein, 13 aa, Homo sapiens
  CDR3 for beta chain variable domain of TCR clone 156867 (TRBV10-2, TRBJ2-7)
CASGASGGYEQYF

SEQ ID NO: 313735 - protein, 15 aa, Homo sapiens
  CDR3 for alpha chain variable domain of TCR clone 156868 (TRAV20, TRAJ50)
CAVRQMKTSYDKVIF

SEQ ID NO: 313736 - protein, 16 aa, Homo sapiens
  CDR3 for beta chain variable domain of TCR clone 156868 (TRBV15, TRBJ1-2)
CATSRGPRTGGGGYTV

SEQ ID NO: 313737 - protein, 13 aa, Homo sapiens
  CDR3 for alpha chain variable domain of TCR clone 156869 (TRAV13-1, TRAJ37)
CAARSGNAGKLSF

SEQ ID NO: 313738 - protein, 14 aa, Homo sapiens
  CDR3 for beta chain variable domain of TCR clone 156869 (TRBV12-4, TRBJ2-3)
CASSLGQGTDTQYF

SEQ ID NO: 313739 - protein, 18 aa, Homo sapiens
  CDR3 for alpha chain variable domain of TCR clone 156870 (TRAV21, TRAJ52)
CAVRPSPAGGTSYGKLTF

SEQ ID NO: 313740 - protein, 17 aa, Homo sapiens
  CDR3 for beta chain variable domain of TCR clone 156870 (TRBV13, TRBJ2-3)
WSSSLSRVAGGRNTQYF

SEQ ID NO: 313741 - protein, 13 aa, Homo sapiens
  CDR3 for alpha chain variable domain of TCR clone 156871 (TRAV1-2, TRAJ11)
CAVRRAVYSTLTF

SEQ ID NO: 313742 - protein, 14 aa, Homo sapiens
  CDR3 for beta chain variable domain of TCR clone 156871 (TRBV25-1, TRBJ1-1)
CASTHLGGNTEAFF

SEQ ID NO: 313743 - protein, 18 aa, Homo sapiens
  CDR3 for alpha chain variable domain of TCR clone 156872 (TRAV13-1, TRAJ52)
CAASKRSAGGTSYGKRTF

SEQ ID NO: 313744 - protein, 15 aa, Homo sapiens
  CDR3 for beta chain variable domain of TCR clone 156872 (TRBV11-3, TRBJ2-5)
CASSDTSGGIETQYF

SEQ ID NO: 313745 - protein, 12 aa, Homo sapiens
  CDR3 for alpha chain variable domain of TCR clone 156873 (TRAV12-3, TRAJ20)
CAMVRGDYKLSF

SEQ ID NO: 313746 - protein, 11 aa, Homo sapiens
  CDR3 for beta chain variable domain of TCR clone 156873 (TRBV27, TRBJ2-3)
CASSLGDTQYF

SEQ ID NO: 313747 - protein, 14 aa, Homo sapiens
  CDR3 for alpha chain variable domain of TCR clone 156874 (TRAV29/DV5, TRAJ47)
CAASSIEYGNKLVF

SEQ ID NO: 313748 - protein, 15 aa, Homo sapiens
  CDR3 for beta chain variable domain of TCR clone 156874 (TRBV19, TRBJ2-7)
CASSPAGSGEALRYF

SEQ ID NO: 313749 - protein, 12 aa, Homo sapiens
  CDR3 for alpha chain variable domain of TCR clone 156875 (TRAV21, TRAJ33)
CAKMDSNYQLIW

SEQ ID NO: 313750 - protein, 14 aa, Homo sapiens
  CDR3 for beta chain variable domain of TCR clone 156875 (TRBV15, TRBJ2-3)
CATRSGTSTDTQYF

SEQ ID NO: 313751 - protein, 12 aa, Homo sapiens
  CDR3 for alpha chain variable domain of TCR clone 156876 (TRAV12-3, TRAJ5)
CAMDTGRRALTF

SEQ ID NO: 313752 - protein, 13 aa, Homo sapiens
  CDR3 for beta chain variable domain of TCR clone 156876 (TRBV7-7, TRBJ2-2)
CASSITSAGELFF

SEQ ID NO: 313753 - protein, 17 aa, Homo sapiens
  CDR3 for alpha chain variable domain of TCR clone 156877 (TRAV23/DV6, TRAJ53)
CAASKQGSGGSNYKLAF

SEQ ID NO: 313754 - protein, 14 aa, Homo sapiens
  CDR3 for beta chain variable domain of TCR clone 156877 (TRBV7-9, TRBJ2-3)
CASSLEQGTNTQYF

SEQ ID NO: 313755 - protein, 15 aa, Homo sapiens
  CDR3 for alpha chain variable domain of TCR clone 156878 (TRAV14/DV4, TRAJ12)
CAMREERDSSYKLIF

SEQ ID NO: 313756 - protein, 16 aa, Homo sapiens
  CDR3 for beta chain variable domain of TCR clone 156878 (TRBV11-2, TRBJ1-2)
CPSSLDTGGADYGYTF

SEQ ID NO: 313757 - protein, 14 aa, Homo sapiens
  CDR3 for alpha chain variable domain of TCR clone 156879 (TRAV2, TRAJ44)
CAVRNTGTASKLTF

SEQ ID NO: 313758 - protein, 19 aa, Homo sapiens
  CDR3 for beta chain variable domain of TCR clone 156879 (TRBV4-1, TRBJ2-7)
CASSPVAGGGRAVLRAGHQ

SEQ ID NO: 313759 - protein, 15 aa, Homo sapiens
  CDR3 for alpha chain variable domain of TCR clone 156880 (TRAV16, TRAJ17)
CALSGNKAACNKLTF

SEQ ID NO: 313760 - protein, 16 aa, Homo sapiens
  CDR3 for beta chain variable domain of TCR clone 156880 (TRBV7-6, TRBJ1-6)
CASSSLPAGEYSPLHF

SEQ ID NO: 313761 - protein, 13 aa, Homo sapiens
  CDR3 for alpha chain variable domain of TCR clone 156881 (TRAV12-2, TRAJ52)
CAVGGTSYGKLTF

SEQ ID NO: 313762 - protein, 17 aa, Homo sapiens
  CDR3 for beta chain variable domain of TCR clone 156881 (TRBV7-8, TRBJ2-6)
CASSAGTGGAGANVLTF

SEQ ID NO: 313763 - protein, 14 aa, Homo sapiens
  CDR3 for alpha chain variable domain of TCR clone 156882 (TRAV9-2, TRAJ13)
CALFNSGGYQKVTF

SEQ ID NO: 313764 - protein, 13 aa, Homo sapiens
  CDR3 for beta chain variable domain of TCR clone 156882 (TRBV4-2, TRBJ1-1)
CASSQAGNTEAFF

SEQ ID NO: 313765 - protein, 17 aa, Homo sapiens
  CDR3 for alpha chain variable domain of TCR clone 156883 (TRAV26-1, TRAJ37)
CIVRVTTVSSNTGKLIF

SEQ ID NO: 313766 - protein, 14 aa, Homo sapiens
  CDR3 for beta chain variable domain of TCR clone 156883 (TRBV19, TRBJ2-1)
CASPTFVLSGEQFF

SEQ ID NO: 313767 - protein, 12 aa, Homo sapiens
  CDR3 for alpha chain variable domain of TCR clone 156884 (TRAV21, TRAJ31)
CAVSPARGRLMF

SEQ ID NO: 313768 - protein, 14 aa, Homo sapiens
  CDR3 for beta chain variable domain of TCR clone 156884 (TRBV28, TRBJ2-7)
CASSLLRISYEQYC

SEQ ID NO: 313769 - protein, 15 aa, Homo sapiens
  CDR3 for alpha chain variable domain of TCR clone 156885 (TRAV26-1, TRAJ22)
CIVRVSVWFCKATDL

SEQ ID NO: 313770 - protein, 13 aa, Homo sapiens
  CDR3 for beta chain variable domain of TCR clone 156885 (TRBV7-9, TRBJ1-2)
CASSLKRNYGYTF

SEQ ID NO: 313771 - protein, 14 aa, Homo sapiens
  CDR3 for alpha chain variable domain of TCR clone 156886 (TRAV3, TRAJ22)
CAVRDYGSARQLTF

SEQ ID NO: 313772 - protein, 13 aa, Homo sapiens
  CDR3 for beta chain variable domain of TCR clone 156886 (TRBV11-2, TRBJ2-5)
CASGHVAKETQYF

SEQ ID NO: 313773 - protein, 14 aa, Homo sapiens
  CDR3 for alpha chain variable domain of TCR clone 156887 (TRAV12-2, TRAJ13)
CAVKKTGGYQKVTF

SEQ ID NO: 313774 - protein, 19 aa, Homo sapiens
  CDR3 for beta chain variable domain of TCR clone 156887 (TRBV25-1, TRBJ2-2)
CAILVYRVDRGRKAGELFF

SEQ ID NO: 313775 - protein, 16 aa, Homo sapiens
  CDR3 for alpha chain variable domain of TCR clone 156888 (TRAV3, TRAJ10)
CAVRDMNGGGGNKLTF

SEQ ID NO: 313776 - protein, 15 aa, Homo sapiens
  CDR3 for beta chain variable domain of TCR clone 156888 (TRBV5-1, TRBJ1-2)
CASSLGSVTNYGYTF

SEQ ID NO: 313777 - protein, 14 aa, Homo sapiens
  CDR3 for alpha chain variable domain of TCR clone 156889 (TRAV3, TRAJ28)
CAVRRGAGSYQLTF

SEQ ID NO: 313778 - protein, 16 aa, Homo sapiens
  CDR3 for beta chain variable domain of TCR clone 156889 (TRBV4-1, TRBJ2-7)
CTSSQEWTSGPLEQYF

SEQ ID NO: 313779 - protein, 13 aa, Homo sapiens
  CDR3 for alpha chain variable domain of TCR clone 156890 (TRAV2, TRAJ40)
CAVVTSGTYKYIF

SEQ ID NO: 313780 - protein, 15 aa, Homo sapiens
  CDR3 for beta chain variable domain of TCR clone 156890 (TRBV28, TRBJ2-1)
CASSGLAKVDNEQFF

SEQ ID NO: 313781 - protein, 11 aa, Homo sapiens
  CDR3 for alpha chain variable domain of TCR clone 156891 (TRAV2, TRAJ13)
CSSGGYQKVTF

SEQ ID NO: 313782 - protein, 16 aa, Homo sapiens
  CDR3 for beta chain variable domain of TCR clone 156891 (TRBV27, TRBJ2-2)
CASSLSGFWVTGELFF

SEQ ID NO: 313783 - protein, 13 aa, Homo sapiens
  CDR3 for alpha chain variable domain of TCR clone 156892 (TRAV26-1, TRAJ48)
CIVRVVGDEKLTL

SEQ ID NO: 313784 - protein, 13 aa, Homo sapiens
  CDR3 for beta chain variable domain of TCR clone 156892 (TRBV7-9, TRBJ1-2)
CASSLKQNYGYTF

SEQ ID NO: 313785 - protein, 13 aa, Homo sapiens
  CDR3 for alpha chain variable domain of TCR clone 156893 (TRAV8-3, TRAJ39)
CAVGANNAGNMLT

SEQ ID NO: 313786 - protein, 12 aa, Homo sapiens
  CDR3 for beta chain variable domain of TCR clone 156893 (TRBV28, TRBJ1-3)
CASVSSGNTIYF

SEQ ID NO: 313787 - protein, 13 aa, Homo sapiens
  CDR3 for alpha chain variable domain of TCR clone 156894 (TRAV36/DV7, TRAJ53)
CALSGGSNYKLTF

SEQ ID NO: 313788 - protein, 13 aa, Homo sapiens
  CDR3 for beta chain variable domain of TCR clone 156894 (TRBV28, TRBJ2-4)
CASSQSSENIQYF

SEQ ID NO: 313789 - protein, 14 aa, Homo sapiens
  CDR3 for alpha chain variable domain of TCR clone 156895 (TRAV4, TRAJ9)
CLVGSGTGGFKTTF

SEQ ID NO: 313790 - protein, 15 aa, Homo sapiens
  CDR3 for beta chain variable domain of TCR clone 156895 (TRBV7-2, TRBJ2-1)
CASSLASGRVNEQFF

SEQ ID NO: 313791 - protein, 13 aa, Homo sapiens
  CDR3 for alpha chain variable domain of TCR clone 156896 (TRAV25, TRAJ47)
CAGHREYGHKLVF

SEQ ID NO: 313792 - protein, 17 aa, Homo sapiens
  CDR3 for beta chain variable domain of TCR clone 156896 (TRBV7-8, TRBJ2-5)
CASSLASGGRFQETQYF

SEQ ID NO: 313793 - protein, 13 aa, Homo sapiens
  CDR3 for alpha chain variable domain of TCR clone 156897 (TRAV20, TRAJ37)
CAGCSSNTGKLIF

SEQ ID NO: 313794 - protein, 17 aa, Homo sapiens
  CDR3 for beta chain variable domain of TCR clone 156897 (TRBV28, TRBJ2-5)
CAGSRQGGLAGAETQYF

SEQ ID NO: 313795 - protein, 16 aa, Homo sapiens
  CDR3 for alpha chain variable domain of TCR clone 156898 (TRAV30, TRAJ24)
CGTAIVDADSWGKFQF

SEQ ID NO: 313796 - protein, 13 aa, Homo sapiens
  CDR3 for beta chain variable domain of TCR clone 156898 (TRBV12-4, TRBJ2-5)
CASSPGTEETQYF

SEQ ID NO: 313797 - protein, 14 aa, Homo sapiens
  CDR3 for alpha chain variable domain of TCR clone 156899 (TRAV4, TRAJ9)
CLVGSGTGGFKTIF

SEQ ID NO: 313798 - protein, 17 aa, Homo sapiens
  CDR3 for beta chain variable domain of TCR clone 156899 (TRBV28, TRBJ2-5)
CASSTPEGDALQETQYF

SEQ ID NO: 313799 - protein, 14 aa, Homo sapiens
  CDR3 for alpha chain variable domain of TCR clone 156900 (TRAV8-1, TRAJ5)
CAVRTDTGRRALTF

SEQ ID NO: 313800 - protein, 14 aa, Homo sapiens
  CDR3 for beta chain variable domain of TCR clone 156900 (TRBV5-5, TRBJ1-2)
CASSLDPYNYGYTV

SEQ ID NO: 313801 - protein, 15 aa, Homo sapiens
  CDR3 for alpha chain variable domain of TCR clone 156901 (TRAV12-1, TRAJ8)
CVVNVENTGFQKLVF

SEQ ID NO: 313802 - protein, 15 aa, Homo sapiens
  CDR3 for beta chain variable domain of TCR clone 156901 (TRBV12-4, TRBJ1-6)
CASSLGQGFRSTLHF

SEQ ID NO: 313803 - protein, 14 aa, Homo sapiens
  CDR3 for alpha chain variable domain of TCR clone 156902 (TRAV23/DV6, TRAJ8)
CAASKATGFQKLVF

SEQ ID NO: 313804 - protein, 15 aa, Homo sapiens
  CDR3 for beta chain variable domain of TCR clone 156902 (TRBV28, TRBJ2-3)
CASSPDRQGANTQYF

SEQ ID NO: 313805 - protein, 14 aa, Homo sapiens
  CDR3 for alpha chain variable domain of TCR clone 156903 (TRAV4, TRAJ6)
CLVGEAGGSYIPAF

SEQ ID NO: 313806 - protein, 17 aa, Homo sapiens
  CDR3 for beta chain variable domain of TCR clone 156903 (TRBV11-2, TRBJ2-1)
CASSLYPPGVEYNEQFF

SEQ ID NO: 313807 - protein, 18 aa, Homo sapiens
  CDR3 for alpha chain variable domain of TCR clone 156904 (TRAV3, TRAJ17)
CAVRARRGGRSCRQQANF

SEQ ID NO: 313808 - protein, 14 aa, Homo sapiens
  CDR3 for beta chain variable domain of TCR clone 156904 (TRBV4-1, TRBJ2-2)
CASSHAVNTGELFL

SEQ ID NO: 313809 - protein, 12 aa, Homo sapiens
  CDR3 for alpha chain variable domain of TCR clone 156905 (TRAV29/DV5, TRAJ49)
CAATDTGNQFFF

SEQ ID NO: 313810 - protein, 19 aa, Homo sapiens
  CDR3 for beta chain variable domain of TCR clone 156905 (TRBV25-1, TRBJ2-2)
CAILVYRVGRGRKTGELFF

SEQ ID NO: 313811 - protein, 14 aa, Homo sapiens
  CDR3 for alpha chain variable domain of TCR clone 156906 (TRAV12-2, TRAJ13)
CAVKKTGGHQKVTF

SEQ ID NO: 313812 - protein, 15 aa, Homo sapiens
  CDR3 for beta chain variable domain of TCR clone 156906 (TRBV12-4, TRBJ2-5)
CASSPPTGLQETQYC

SEQ ID NO: 313813 - protein, 13 aa, Homo sapiens
  CDR3 for alpha chain variable domain of TCR clone 156907 (TRAV35, TRAJ42)
CAGFPGSQGNLIF

SEQ ID NO: 313814 - protein, 16 aa, Homo sapiens
  CDR3 for beta chain variable domain of TCR clone 156907 (TRBV5-1, TRBJ1-1)
CASSSGGNSLNTEAFF

SEQ ID NO: 313815 - protein, 16 aa, Homo sapiens
  CDR3 for alpha chain variable domain of TCR clone 156908 (TRAV14/DV4, TRAJ17)
CAMREAGRAAGNKLTF

SEQ ID NO: 313816 - protein, 14 aa, Homo sapiens
  CDR3 for beta chain variable domain of TCR clone 156908 (TRBV20-1, TRBJ1-1)
CSAQTRIGGTEAFF

SEQ ID NO: 313817 - protein, 14 aa, Homo sapiens
  CDR3 for alpha chain variable domain of TCR clone 156909 (TRAV12-3, TRAJ10)
SHLPLTEGGNKLTF

SEQ ID NO: 313818 - protein, 13 aa, Homo sapiens
  CDR3 for beta chain variable domain of TCR clone 156909 (TRBV12-4, TRBJ2-5)
CASSPGTEETRYF

SEQ ID NO: 313819 - protein, 16 aa, Homo sapiens
  CDR3 for alpha chain variable domain of TCR clone 156910 (TRAV3, TRAJ37)
CAVRSHGSGNTGKLIF

SEQ ID NO: 313820 - protein, 14 aa, Homo sapiens
  CDR3 for beta chain variable domain of TCR clone 156910 (TRBV2, TRBJ2-1)
CASSDRAYYNEQFF

SEQ ID NO: 313821 - protein, 14 aa, Homo sapiens
  CDR3 for alpha chain variable domain of TCR clone 156911 (TRAV12-3, TRAJ13)
CAMRNSGGYQTVTF

SEQ ID NO: 313822 - protein, 14 aa, Homo sapiens
  CDR3 for beta chain variable domain of TCR clone 156911 (TRBV4-1, TRBJ1-6)
CASGPGSDSSPLHF

SEQ ID NO: 313823 - protein, 12 aa, Homo sapiens
  CDR3 for alpha chain variable domain of TCR clone 156912 (TRAV20, TRAJ39)
CAVGNAGNMLTF

SEQ ID NO: 313824 - protein, 12 aa, Homo sapiens
  CDR3 for beta chain variable domain of TCR clone 156912 (TRBV7-9, TRBJ2-7)
CASSLEGYEQYF

SEQ ID NO: 313825 - protein, 16 aa, Homo sapiens
  CDR3 for alpha chain variable domain of TCR clone 156913 (TRAV12-3, TRAJ53)
CAMSPGSGGSNYKLTF

SEQ ID NO: 313826 - protein, 15 aa, Homo sapiens
  CDR3 for beta chain variable domain of TCR clone 156913 (TRBV7-8, TRBJ2-7)
CASSLSSGRTYEQYF

SEQ ID NO: 313827 - protein, 18 aa, Homo sapiens
  CDR3 for alpha chain variable domain of TCR clone 156914 (TRAV13-1, TRAJ52)
CAAKNPNAGGTSYGKLTF

SEQ ID NO: 313828 - protein, 13 aa, Homo sapiens
  CDR3 for beta chain variable domain of TCR clone 156914 (TRBV20-1, TRBJ2-7)
CSARIITGTREYF

SEQ ID NO: 313829 - protein, 12 aa, Homo sapiens
  CDR3 for alpha chain variable domain of TCR clone 156915 (TRAV3, TRAJ20)
CAVRDPDYKLSF

SEQ ID NO: 313830 - protein, 16 aa, Homo sapiens
  CDR3 for beta chain variable domain of TCR clone 156915 (TRBV5-1, TRBJ2-3)
CASSLGLAVYTDTQYF

SEQ ID NO: 313831 - protein, 19 aa, Homo sapiens
  CDR3 for alpha chain variable domain of TCR clone 156916 (TRAV26-1, TRAJ52)
CIVRAHRNAGGTSYGKLTF

SEQ ID NO: 313832 - protein, 16 aa, Homo sapiens
  CDR3 for beta chain variable domain of TCR clone 156916 (TRBV7-8, TRBJ2-4)
CASSAERTLAKNIQYF

SEQ ID NO: 313833 - protein, 12 aa, Homo sapiens
  CDR3 for alpha chain variable domain of TCR clone 156917 (TRAV21, TRAJ33)
CAKMDSNYQLIW

SEQ ID NO: 313834 - protein, 15 aa, Homo sapiens
  CDR3 for beta chain variable domain of TCR clone 156917 (TRBV5-4, TRBJ1-2)
CASRGSRGTSGGYTF

SEQ ID NO: 313835 - protein, 20 aa, Homo sapiens
  CDR3 for alpha chain variable domain of TCR clone 156918 (TRAV8-3, TRAJ44)
LSTSVLWVRLYTGTASKLTF

SEQ ID NO: 313836 - protein, 16 aa, Homo sapiens
  CDR3 for beta chain variable domain of TCR clone 156918 (TRBV15, TRBJ2-3)
CATRLSGGRAPDTQYF

SEQ ID NO: 313837 - protein, 21 aa, Homo sapiens
  CDR3 for alpha chain variable domain of TCR clone 156919 (TRAV12-1, TRAJ9)
CVVLNTGGFKTILEQEQDYLL

SEQ ID NO: 313838 - protein, 13 aa, Homo sapiens
  CDR3 for beta chain variable domain of TCR clone 156919 (TRBV20-1, TRBJ1-1)
CSARGGGNTEAFF

SEQ ID NO: 313839 - protein, 16 aa, Homo sapiens
  CDR3 for alpha chain variable domain of TCR clone 156920 (TRAV23/DV6, TRAJ21)
CSASGGGGTTSTNFTL

SEQ ID NO: 313840 - protein, 15 aa, Homo sapiens
  CDR3 for beta chain variable domain of TCR clone 156920 (TRBV7-8, TRBJ1-5)
CASSSGTGGGQPQHF

SEQ ID NO: 313841 - protein, 16 aa, Homo sapiens
  CDR3 for alpha chain variable domain of TCR clone 156921 (TRAV1-2, TRAJ10)
CAVRGVLMGGGNKLTF

SEQ ID NO: 313842 - protein, 14 aa, Homo sapiens
  CDR3 for beta chain variable domain of TCR clone 156921 (TRBV25-1, TRBJ1-1)
CASTHLGGNTEAFF

SEQ ID NO: 313843 - protein, 13 aa, Homo sapiens
  CDR3 for alpha chain variable domain of TCR clone 156922 (TRAV12-2, TRAJ18)
CAVRGSTLGRLYF

SEQ ID NO: 313844 - protein, 16 aa, Homo sapiens
  CDR3 for beta chain variable domain of TCR clone 156922 (TRBV4-3, TRBJ2-2)
CASSHLQGSGTGELFF

SEQ ID NO: 313845 - protein, 12 aa, Homo sapiens
  CDR3 for alpha chain variable domain of TCR clone 156923 (TRAV12-2, TRAJ42)
CAVGGSQGNLIF

SEQ ID NO: 313846 - protein, 18 aa, Homo sapiens
  CDR3 for beta chain variable domain of TCR clone 156923 (TRBV7-9, TRBJ2-7)
CASSLTTSGSRTWYEQYF

SEQ ID NO: 313847 - protein, 16 aa, Homo sapiens
  CDR3 for alpha chain variable domain of TCR clone 156924 (TRAV8-4, TRAJ16)
CAVSPVGRWPEAALCK

SEQ ID NO: 313848 - protein, 14 aa, Homo sapiens
  CDR3 for beta chain variable domain of TCR clone 156924 (TRBV19, TRBJ2-1)
CASPTFVLSGEQFF

SEQ ID NO: 313849 - protein, 12 aa, Homo sapiens
  CDR3 for alpha chain variable domain of TCR clone 156925 (TRAV23/DV6, TRAJ30)
CAASKGDDKIIF

SEQ ID NO: 313850 - protein, 18 aa, Homo sapiens
  CDR3 for beta chain variable domain of TCR clone 156925 (TRBV10-3, TRBJ2-3)
CAISESMVGPMRGDTQYF

SEQ ID NO: 313851 - protein, 14 aa, Homo sapiens
  CDR3 for alpha chain variable domain of TCR clone 156926 (TRAV13-1, TRAJ9)
CAASALTGGFKTIF

SEQ ID NO: 313852 - protein, 16 aa, Homo sapiens
  CDR3 for beta chain variable domain of TCR clone 156926 (TRBV7-8, TRBJ2-4)
CASSAERTLAKNIQFF

SEQ ID NO: 313853 - protein, 16 aa, Homo sapiens
  CDR3 for alpha chain variable domain of TCR clone 156927 (TRAV30, TRAJ24)
CGTEIVDADSWGKFQF

SEQ ID NO: 313854 - protein, 15 aa, Homo sapiens
  CDR3 for beta chain variable domain of TCR clone 156927 (TRBV7-3, TRBJ2-2)
CASSLGQGRAGELFF

SEQ ID NO: 313855 - protein, 18 aa, Homo sapiens
  CDR3 for alpha chain variable domain of TCR clone 156928 (TRAV21, TRAJ52)
CAVRPSPAGGTSYGKLTF

SEQ ID NO: 313856 - protein, 15 aa, Homo sapiens
  CDR3 for beta chain variable domain of TCR clone 156928 (TRBV7-9, TRBJ1-4)
CASSRAGGFNEKLFF

SEQ ID NO: 313857 - protein, 14 aa, Homo sapiens
  CDR3 for alpha chain variable domain of TCR clone 156929 (TRAV13-2, TRAJ9)
CSENLETGGFKTIF

SEQ ID NO: 313858 - protein, 16 aa, Homo sapiens
  CDR3 for beta chain variable domain of TCR clone 156929 (TRBV28, TRBJ2-5)
CASSFSPAGGWETQYF

SEQ ID NO: 313859 - protein, 11 aa, Homo sapiens
  CDR3 for alpha chain variable domain of TCR clone 156930 (TRAV23/DV6, TRAJ58)
CAARLLRGETS

SEQ ID NO: 313860 - protein, 14 aa, Homo sapiens
  CDR3 for beta chain variable domain of TCR clone 156930 (TRBV7-7, TRBJ2-2)
CATRQDSDTGELFF

SEQ ID NO: 313861 - protein, 16 aa, Homo sapiens
  CDR3 for alpha chain variable domain of TCR clone 156931 (TRAV3, TRAJ32)
CAVRENYGGATNKLIF

SEQ ID NO: 313862 - protein, 12 aa, Homo sapiens
  CDR3 for beta chain variable domain of TCR clone 156931 (TRBV20-1, TRBJ1-2)
CSVTTEGYGYTF

SEQ ID NO: 313863 - protein, 11 aa, Homo sapiens
  CDR3 for alpha chain variable domain of TCR clone 156932 (TRAV12-2, TRAJ29)
CAVTLRSPLVL

SEQ ID NO: 313864 - protein, 15 aa, Homo sapiens
  CDR3 for beta chain variable domain of TCR clone 156932 (TRBV20-1, TRBJ2-7)
CSARDRVSGMDEQYF

SEQ ID NO: 313865 - protein, 14 aa, Homo sapiens
  CDR3 for alpha chain variable domain of TCR clone 156933 (TRAV35, TRAJ13)
CAGSPSGGYQRVTF

SEQ ID NO: 313866 - protein, 15 aa, Homo sapiens
  CDR3 for beta chain variable domain of TCR clone 156933 (TRBV6-5, TRBJ2-1)
CASSYDAGAGNEQFF

SEQ ID NO: 313867 - protein, 15 aa, Homo sapiens
  CDR3 for alpha chain variable domain of TCR clone 156934 (TRAV17, TRAJ45)
CATAYSGGGSDGLTF

SEQ ID NO: 313868 - protein, 11 aa, Homo sapiens
  CDR3 for beta chain variable domain of TCR clone 156934 (TRBV7-8, TRBJ2-7)
CASSLSLEQYF

SEQ ID NO: 313869 - protein, 15 aa, Homo sapiens
  CDR3 for alpha chain variable domain of TCR clone 156935 (TRAV3, TRAJ22)
CAVRDRGGSARQPTF

SEQ ID NO: 313870 - protein, 14 aa, Homo sapiens
  CDR3 for beta chain variable domain of TCR clone 156935 (TRBV19, TRBJ1-5)
CASSLGLIGQPQYF

SEQ ID NO: 313871 - protein, 14 aa, Homo sapiens
  CDR3 for alpha chain variable domain of TCR clone 156936 (TRAV38-1, TRAJ45)
CAYYSGGVADGLTF

SEQ ID NO: 313872 - protein, 15 aa, Homo sapiens
  CDR3 for beta chain variable domain of TCR clone 156936 (TRBV15, TRBJ1-4)
CATSRDMGSYEKLFF

SEQ ID NO: 313873 - protein, 16 aa, Homo sapiens
  CDR3 for alpha chain variable domain of TCR clone 156937 (TRAV3, TRAJ37)
CAVRGKGSGNTGKLIF

SEQ ID NO: 313874 - protein, 14 aa, Homo sapiens
  CDR3 for beta chain variable domain of TCR clone 156937 (TRBV15, TRBJ2-5)
CATSSTGYQETQYF

SEQ ID NO: 313875 - protein, 15 aa, Homo sapiens
  CDR3 for alpha chain variable domain of TCR clone 156938 (TRAV27, TRAJ38)
CAARRNAGNNRKLIW

SEQ ID NO: 313876 - protein, 13 aa, Homo sapiens
  CDR3 for beta chain variable domain of TCR clone 156938 (TRBV12-5, TRBJ2-3)
RASGNRQSDTQYF

SEQ ID NO: 313877 - protein, 12 aa, Homo sapiens
  CDR3 for alpha chain variable domain of TCR clone 156939 (TRAV3, TRAJ31)
CAERDGNARLMF

SEQ ID NO: 313878 - protein, 18 aa, Homo sapiens
  CDR3 for beta chain variable domain of TCR clone 156939 (TRBV7-2, TRBJ2-3)
CASSLKREGSGITDTQYF

SEQ ID NO: 313879 - protein, 13 aa, Homo sapiens
  CDR3 for alpha chain variable domain of TCR clone 156940 (TRAV3, TRAJ40)
CAVRGSGAYKSIF

SEQ ID NO: 313880 - protein, 15 aa, Homo sapiens
  CDR3 for beta chain variable domain of TCR clone 156940 (TRBV27, TRBJ1-5)
CASSSSGTGNQPQHF

SEQ ID NO: 313881 - protein, 11 aa, Homo sapiens
  CDR3 for alpha chain variable domain of TCR clone 156941 (TRAV1-2, TRAJ20)
CAVSNDYKLSF

SEQ ID NO: 313882 - protein, 17 aa, Homo sapiens
  CDR3 for beta chain variable domain of TCR clone 156941 (TRBV28, TRBJ2-7)
CASSPRHRASGVYEQYF

SEQ ID NO: 313883 - protein, 16 aa, Homo sapiens
  CDR3 for alpha chain variable domain of TCR clone 156942 (TRAV3, TRAJ37)
CAVRPHGSGNTGKLIF

SEQ ID NO: 313884 - protein, 14 aa, Homo sapiens
  CDR3 for beta chain variable domain of TCR clone 156942 (TRBV2, TRBJ2-1)
CASSDRAYYNEKFF

SEQ ID NO: 313885 - protein, 12 aa, Homo sapiens
  CDR3 for alpha chain variable domain of TCR clone 156943 (TRAV2, TRAJ31)
CAVEDSNARLMF

SEQ ID NO: 313886 - protein, 16 aa, Homo sapiens
  CDR3 for beta chain variable domain of TCR clone 156943 (TRBV10-3, TRBJ2-1)
CAISRVGGGGGGEQFF

SEQ ID NO: 313887 - protein, 13 aa, Homo sapiens
  CDR3 for alpha chain variable domain of TCR clone 156944 (TRAV13-1, TRAJ5)
CAARVTGRRALSF

SEQ ID NO: 313888 - protein, 15 aa, Homo sapiens
  CDR3 for beta chain variable domain of TCR clone 156944 (TRBV7-9, TRBJ2-7)
CASSPGGGLTYEQYF

SEQ ID NO: 313889 - protein, 14 aa, Homo sapiens
  CDR3 for alpha chain variable domain of TCR clone 156945 (TRAV12-2, TRAJ52)
CAVPGGTSYGKLTF

SEQ ID NO: 313890 - protein, 15 aa, Homo sapiens
  CDR3 for beta chain variable domain of TCR clone 156945 (TRBV14, TRBJ2-5)
CASSQGEAVQETQYF

SEQ ID NO: 313891 - protein, 14 aa, Homo sapiens
  CDR3 for alpha chain variable domain of TCR clone 156946 (TRAV8-4, TRAJ13)
CAVTLSGGYQKVTF

SEQ ID NO: 313892 - protein, 13 aa, Homo sapiens
  CDR3 for beta chain variable domain of TCR clone 156946 (TRBV4-1, TRBJ2-1)
CASSQAGGDEQFF

SEQ ID NO: 313893 - protein, 13 aa, Homo sapiens
  CDR3 for alpha chain variable domain of TCR clone 156947 (TRAV8-4, TRAJ36)
CAVSVDGANNLFF

SEQ ID NO: 313894 - protein, 15 aa, Homo sapiens
  CDR3 for beta chain variable domain of TCR clone 156947 (TRBV7-2, TRBJ2-5)
CASSLEGRGVETQYF

SEQ ID NO: 313895 - protein, 15 aa, Homo sapiens
  CDR3 for alpha chain variable domain of TCR clone 156948 (TRAV21, TRAJ53)
CATLNSGGSNYKLTF

SEQ ID NO: 313896 - protein, 12 aa, Homo sapiens
  CDR3 for beta chain variable domain of TCR clone 156948 (TRBV14, TRBJ2-5)
CASSQLKETQYF

SEQ ID NO: 313897 - protein, 12 aa, Homo sapiens
  CDR3 for alpha chain variable domain of TCR clone 156949 (TRAV2, TRAJ9)
CAVGAGGFTTIF

SEQ ID NO: 313898 - protein, 16 aa, Homo sapiens
  CDR3 for beta chain variable domain of TCR clone 156949 (TRBV13, TRBJ2-2)
CASSPRTREHTGELFF

SEQ ID NO: 313899 - protein, 15 aa, Homo sapiens
  CDR3 for alpha chain variable domain of TCR clone 156950 (TRAV38-1, TRAJ37)
CAFIFGSGNTGKLIF

SEQ ID NO: 313900 - protein, 12 aa, Homo sapiens
  CDR3 for beta chain variable domain of TCR clone 156950 (TRBV12-4, TRBJ1-3)
CASSFSGNTIYF

SEQ ID NO: 313901 - protein, 13 aa, Homo sapiens
  CDR3 for alpha chain variable domain of TCR clone 156951 (TRAV2, TRAJ29)
CAVEPSGNTPLVF

SEQ ID NO: 313902 - protein, 14 aa, Homo sapiens
  CDR3 for beta chain variable domain of TCR clone 156951 (TRBV7-8, TRBJ2-3)
CASSLEAGTDTQYF

SEQ ID NO: 313903 - protein, 13 aa, Homo sapiens
  CDR3 for alpha chain variable domain of TCR clone 156952 (TRAV17, TRAJ5)
CATDARGRRALTF

SEQ ID NO: 313904 - protein, 13 aa, Homo sapiens
  CDR3 for beta chain variable domain of TCR clone 156952 (TRBV12-4, TRBJ2-3)
FASSLGAVDTQYF

SEQ ID NO: 313905 - protein, 15 aa, Homo sapiens
  CDR3 for alpha chain variable domain of TCR clone 156953 (TRAV3, TRAJ20)
CAVRDIKLSDYKLSF

SEQ ID NO: 313906 - protein, 15 aa, Homo sapiens
  CDR3 for beta chain variable domain of TCR clone 156953 (TRBV4-2, TRBJ1-1)
CASSQEDLPRTEAFF

SEQ ID NO: 313907 - protein, 14 aa, Homo sapiens
  CDR3 for alpha chain variable domain of TCR clone 156954 (TRAV8-6, TRAJ54)
CAVTEGRGAQKLVF

SEQ ID NO: 313908 - protein, 14 aa, Homo sapiens
  CDR3 for beta chain variable domain of TCR clone 156954 (TRBV27, TRBJ2-7)
CASSIGQGVQKQYF

SEQ ID NO: 313909 - protein, 13 aa, Homo sapiens
  CDR3 for alpha chain variable domain of TCR clone 156955 (TRAV2, TRAJ40)
CAVVTSGTYKYIF

SEQ ID NO: 313910 - protein, 12 aa, Homo sapiens
  CDR3 for beta chain variable domain of TCR clone 156955 (TRBV6-1, TRBJ2-7)
CASSEPLYEQYF

SEQ ID NO: 313911 - protein, 15 aa, Homo sapiens
  CDR3 for alpha chain variable domain of TCR clone 156956 (TRAV3, TRAJ22)
CAVRDRGGSARQLTF

SEQ ID NO: 313912 - protein, 14 aa, Homo sapiens
  CDR3 for beta chain variable domain of TCR clone 156956 (TRBV19, TRBJ2-1)
CASSRLASIDEQFF

SEQ ID NO: 313913 - protein, 14 aa, Homo sapiens
  CDR3 for alpha chain variable domain of TCR clone 156957 (TRAV22, TRAJ6)
CAGVGPGGSYIPTF

SEQ ID NO: 313914 - protein, 14 aa, Homo sapiens
  CDR3 for beta chain variable domain of TCR clone 156957 (TRBV5-4, TRBJ1-2)
CASTRQTDNYGYTF

SEQ ID NO: 313915 - protein, 13 aa, Homo sapiens
  CDR3 for alpha chain variable domain of TCR clone 156958 (TRAV8-3, TRAJ4)
WVFYSGGYNKLSF

SEQ ID NO: 313916 - protein, 14 aa, Homo sapiens
  CDR3 for beta chain variable domain of TCR clone 156958 (TRBV7-9, TRBJ2-3)
CASSLEDGTDTQYF

SEQ ID NO: 313917 - protein, 14 aa, Homo sapiens
  CDR3 for alpha chain variable domain of TCR clone 156959 (TRAV1-2, TRAJ27)
CAPAEYTNAGKSTF

SEQ ID NO: 313918 - protein, 18 aa, Homo sapiens
  CDR3 for beta chain variable domain of TCR clone 156959 (TRBV28, TRBJ1-2)
CASRQQQGKRGANYGYTF

SEQ ID NO: 313919 - protein, 15 aa, Homo sapiens
  CDR3 for alpha chain variable domain of TCR clone 156960 (TRAV8-3, TRAJ45)
CASSYSGGGADGLPF

SEQ ID NO: 313920 - protein, 20 aa, Homo sapiens
  CDR3 for beta chain variable domain of TCR clone 156960 (TRBV28, TRBJ2-1)
CASTPIGRSPGLAGGNEQFF

SEQ ID NO: 313921 - protein, 11 aa, Homo sapiens
  CDR3 for alpha chain variable domain of TCR clone 156961 (TRAV3, TRAJ17)
PRGAAGNKLTF

SEQ ID NO: 313922 - protein, 13 aa, Homo sapiens
  CDR3 for beta chain variable domain of TCR clone 156961 (TRBV4-1, TRBJ1-1)
CASSRKMNTEAFF

SEQ ID NO: 313923 - protein, 12 aa, Homo sapiens
  CDR3 for alpha chain variable domain of TCR clone 156962 (TRAV16, TRAJ10)
CSRTGGGNKLTF

SEQ ID NO: 313924 - protein, 17 aa, Homo sapiens
  CDR3 for beta chain variable domain of TCR clone 156962 (TRBV4-1, TRBJ2-7)
CASSQPTSGSRGYEQYF

SEQ ID NO: 313925 - protein, 14 aa, Homo sapiens
  CDR3 for alpha chain variable domain of TCR clone 156963 (TRAV1-2, TRAJ16)
CAVNRFSDGHNLLF

SEQ ID NO: 313926 - protein, 14 aa, Homo sapiens
  CDR3 for beta chain variable domain of TCR clone 156963 (TRBV23-1, TRBJ2-5)
CASSFLRSQETQYF

SEQ ID NO: 313927 - protein, 15 aa, Homo sapiens
  CDR3 for alpha chain variable domain of TCR clone 156964 (TRAV9-2, TRAJ49)
CALSPPDHTGNQVYF

SEQ ID NO: 313928 - protein, 13 aa, Homo sapiens
  CDR3 for beta chain variable domain of TCR clone 156964 (TRBV29-1, TRBJ2-5)
CSVGGTSAETQYF

SEQ ID NO: 313929 - protein, 13 aa, Homo sapiens
  CDR3 for alpha chain variable domain of TCR clone 156965 (TRAV35, TRAJ44)
CAGLSGTASTLTF

SEQ ID NO: 313930 - protein, 17 aa, Homo sapiens
  CDR3 for beta chain variable domain of TCR clone 156965 (TRBV7-8, TRBJ1-2)
CASSLRPLQGHLYGYTF

SEQ ID NO: 313931 - protein, 16 aa, Homo sapiens
  CDR3 for alpha chain variable domain of TCR clone 156966 (TRAV21, TRAJ37)
CAVRPRGSSNTGKLIF

SEQ ID NO: 313932 - protein, 12 aa, Homo sapiens
  CDR3 for beta chain variable domain of TCR clone 156966 (TRBV11-2, TRBJ2-2)
CASSLGGGELFF

SEQ ID NO: 313933 - protein, 16 aa, Homo sapiens
  CDR3 for alpha chain variable domain of TCR clone 156967 (TRAV30, TRAJ24)
CGTEIVDADSWGKFQF

SEQ ID NO: 313934 - protein, 16 aa, Homo sapiens
  CDR3 for beta chain variable domain of TCR clone 156967 (TRBV7-6, TRBJ1-6)
CASSLSSRIGDSPLHV

SEQ ID NO: 313935 - protein, 13 aa, Homo sapiens
  CDR3 for alpha chain variable domain of TCR clone 156968 (TRAV12-1, TRAJ9)
CVVLNTGGFKTIF

SEQ ID NO: 313936 - protein, 13 aa, Homo sapiens
  CDR3 for beta chain variable domain of TCR clone 156968 (TRBV2, TRBJ1-4)
CASSERAGEKLFF

SEQ ID NO: 313937 - protein, 15 aa, Homo sapiens
  CDR3 for alpha chain variable domain of TCR clone 156969 (TRAV35, TRAJ40)
CAGQLRDSGTYKYIF

SEQ ID NO: 313938 - protein, 12 aa, Homo sapiens
  CDR3 for beta chain variable domain of TCR clone 156969 (TRBV7-8, TRBJ2-7)
CASSLAGYEQYF

SEQ ID NO: 313939 - protein, 11 aa, Homo sapiens
  CDR3 for alpha chain variable domain of TCR clone 156970 (TRAV2, TRAJ40)
CSVEDPGNLQI

SEQ ID NO: 313940 - protein, 14 aa, Homo sapiens
  CDR3 for beta chain variable domain of TCR clone 156970 (TRBV19, TRBJ2-2)
CASSTLHRSGELFF

SEQ ID NO: 313941 - protein, 17 aa, Homo sapiens
  CDR3 for alpha chain variable domain of TCR clone 156971 (TRAV3, TRAJ6)
CAVRDGPRAGGSYIPTF

SEQ ID NO: 313942 - protein, 19 aa, Homo sapiens
  CDR3 for beta chain variable domain of TCR clone 156971 (TRBV12-4, TRBJ2-1)
CASTLAFDPRDKEANEQFF

SEQ ID NO: 313943 - protein, 13 aa, Homo sapiens
  CDR3 for alpha chain variable domain of TCR clone 156972 (TRAV30, TRAJ6)
CGTEAGGSYIPTF

SEQ ID NO: 313944 - protein, 18 aa, Homo sapiens
  CDR3 for beta chain variable domain of TCR clone 156972 (TRBV4-1, TRBJ1-5)
CASSQDPRGQGLNQPQHF

SEQ ID NO: 313945 - protein, 14 aa, Homo sapiens
  CDR3 for alpha chain variable domain of TCR clone 156973 (TRAV35, TRAJ33)
CAGSSQDSNYQLIW

SEQ ID NO: 313946 - protein, 14 aa, Homo sapiens
  CDR3 for beta chain variable domain of TCR clone 156973 (TRBV13, TRBJ2-5)
CASSLERVGETQYF

SEQ ID NO: 313947 - protein, 13 aa, Homo sapiens
  CDR3 for alpha chain variable domain of TCR clone 156974 (TRAV2, TRAJ40)
CAVVTSGSYKYIF

SEQ ID NO: 313948 - protein, 13 aa, Homo sapiens
  CDR3 for beta chain variable domain of TCR clone 156974 (TRBV7-9, TRBJ1-2)
CASSLKQNYGYTF

SEQ ID NO: 313949 - protein, 12 aa, Homo sapiens
  CDR3 for alpha chain variable domain of TCR clone 156975 (TRAV17, TRAJ12)
CATLRSSYKLIF

SEQ ID NO: 313950 - protein, 12 aa, Homo sapiens
  CDR3 for beta chain variable domain of TCR clone 156975 (TRBV12-4, TRBJ1-2)
CASSFIWLHLRF

SEQ ID NO: 313951 - protein, 14 aa, Homo sapiens
  CDR3 for alpha chain variable domain of TCR clone 156976 (TRAV34, TRAJ44)
CGADGTGTASKLTF

SEQ ID NO: 313952 - protein, 14 aa, Homo sapiens
  CDR3 for beta chain variable domain of TCR clone 156976 (TRBV20-1, TRBJ2-7)
CSAPELAGVGEQYF

SEQ ID NO: 313953 - protein, 12 aa, Homo sapiens
  CDR3 for alpha chain variable domain of TCR clone 156977 (TRAV2, TRAJ10)
CASTGGGNKLTF

SEQ ID NO: 313954 - protein, 13 aa, Homo sapiens
  CDR3 for beta chain variable domain of TCR clone 156977 (TRBV18, TRBJ2-7)
CASSPGQDYEQYF

SEQ ID NO: 313955 - protein, 18 aa, Homo sapiens
  CDR3 for alpha chain variable domain of TCR clone 156978 (TRAV26-1, TRAJ23)
CIVRVGLEVWNQGGKLIC

SEQ ID NO: 313956 - protein, 16 aa, Homo sapiens
  CDR3 for beta chain variable domain of TCR clone 156978 (TRBV12-4, TRBJ2-5)
CASSFFVRGRQETQYS

SEQ ID NO: 313957 - protein, 14 aa, Homo sapiens
  CDR3 for alpha chain variable domain of TCR clone 156979 (TRAV35, TRAJ33)
CWPRGRDINYQLIW

SEQ ID NO: 313958 - protein, 11 aa, Homo sapiens
  CDR3 for beta chain variable domain of TCR clone 156979 (TRBV10-3, TRBJ2-7)
CAISEGLEQYF

SEQ ID NO: 313959 - protein, 15 aa, Homo sapiens
  CDR3 for alpha chain variable domain of TCR clone 156980 (TRAV13-1, TRAJ18)
CAARGGGSTLGRLYL

SEQ ID NO: 313960 - protein, 13 aa, Homo sapiens
  CDR3 for beta chain variable domain of TCR clone 156980 (TRBV18, TRBJ2-1)
CASGLASNNEQFF

SEQ ID NO: 313961 - protein, 15 aa, Homo sapiens
  CDR3 for alpha chain variable domain of TCR clone 156981 (TRAV2, TRAJ8)
CAVEVMNTGFQKLVF

SEQ ID NO: 313962 - protein, 11 aa, Homo sapiens
  CDR3 for beta chain variable domain of TCR clone 156981 (TRBV11-2, TRBJ2-2)
CASSLPGELFF

SEQ ID NO: 313963 - protein, 12 aa, Homo sapiens
  CDR3 for alpha chain variable domain of TCR clone 156982 (TRAV29/DV5, TRAJ26)
CAAIPSGQNFVF

SEQ ID NO: 313964 - protein, 14 aa, Homo sapiens
  CDR3 for beta chain variable domain of TCR clone 156982 (TRBV5-7, TRBJ1-1)
CASSLAGDWTEAFF

SEQ ID NO: 313965 - protein, 14 aa, Homo sapiens
  CDR3 for alpha chain variable domain of TCR clone 156983 (TRAV13-2, TRAJ17)
CAENGKAAGNKLTF

SEQ ID NO: 313966 - protein, 15 aa, Homo sapiens
  CDR3 for beta chain variable domain of TCR clone 156983 (TRBV7-9, TRBJ1-4)
CASSRTGGFNEKLFF

SEQ ID NO: 313967 - protein, 14 aa, Homo sapiens
  CDR3 for alpha chain variable domain of TCR clone 156984 (TRAV4, TRAJ26)
CLVGPHNYGQNFFF

SEQ ID NO: 313968 - protein, 17 aa, Homo sapiens
  CDR3 for beta chain variable domain of TCR clone 156984 (TRBV24-1, TRBJ2-1)
CATSDVSTSGTYTEQFF

SEQ ID NO: 313969 - protein, 18 aa, Homo sapiens
  CDR3 for alpha chain variable domain of TCR clone 156985 (TRAV21, TRAJ52)
CAMRPSPAGGTSYGKLTF

SEQ ID NO: 313970 - protein, 12 aa, Homo sapiens
  CDR3 for beta chain variable domain of TCR clone 156985 (TRBV12-4, TRBJ2-7)
CASSLGGHEQYF

SEQ ID NO: 313971 - protein, 16 aa, Homo sapiens
  CDR3 for alpha chain variable domain of TCR clone 156986 (TRAV16, TRAJ52)
CALSAAGGTSYGKLTF

SEQ ID NO: 313972 - protein, 16 aa, Homo sapiens
  CDR3 for beta chain variable domain of TCR clone 156986 (TRBV12-4, TRBJ1-5)
CASCRPVGGSNQPQHF

SEQ ID NO: 313973 - protein, 13 aa, Homo sapiens
  CDR3 for alpha chain variable domain of TCR clone 156987 (TRAV12-3, TRAJ35)
CAMAIGFGNVLHC

SEQ ID NO: 313974 - protein, 15 aa, Homo sapiens
  CDR3 for beta chain variable domain of TCR clone 156987 (TRBV20-1, TRBJ2-1)
CSARGRGTYYNEQFF

SEQ ID NO: 313975 - protein, 15 aa, Homo sapiens
  CDR3 for alpha chain variable domain of TCR clone 156988 (TRAV21, TRAJ53)
CATLNSGGSNYKLTF

SEQ ID NO: 313976 - protein, 11 aa, Homo sapiens
  CDR3 for beta chain variable domain of TCR clone 156988 (TRBV29-1, TRBJ2-5)
CREDRTGTQYF

SEQ ID NO: 313977 - protein, 14 aa, Homo sapiens
  CDR3 for alpha chain variable domain of TCR clone 156989 (TRAV16, TRAJ40)
CALHESYYLRNLQI

SEQ ID NO: 313978 - protein, 12 aa, Homo sapiens
  CDR3 for beta chain variable domain of TCR clone 156989 (TRBV7-3, TRBJ2-3)
CASSSLTDTQYC

SEQ ID NO: 313979 - protein, 14 aa, Homo sapiens
  CDR3 for alpha chain variable domain of TCR clone 156990 (TRAV23/DV6, TRAJ39)
CAASIGNAGNMLTF

SEQ ID NO: 313980 - protein, 14 aa, Homo sapiens
  CDR3 for beta chain variable domain of TCR clone 156990 (TRBV7-3, TRBJ1-1)
CASSLKGGKTEAFF

SEQ ID NO: 313981 - protein, 13 aa, Homo sapiens
  CDR3 for alpha chain variable domain of TCR clone 156991 (TRAV17, TRAJ54)
CATSWGAAQKLVF

SEQ ID NO: 313982 - protein, 15 aa, Homo sapiens
  CDR3 for beta chain variable domain of TCR clone 156991 (TRBV4-3, TRBJ2-3)
CASSPSLLSTDTQYF

SEQ ID NO: 313983 - protein, 14 aa, Homo sapiens
  CDR3 for alpha chain variable domain of TCR clone 156992 (TRAV29/DV5, TRAJ36)
RAARRKTGATNPFF

SEQ ID NO: 313984 - protein, 19 aa, Homo sapiens
  CDR3 for beta chain variable domain of TCR clone 156992 (TRBV11-3, TRBJ2-2)
CASSTRPGAKTTNTGELFF

SEQ ID NO: 313985 - protein, 12 aa, Homo sapiens
  CDR3 for alpha chain variable domain of TCR clone 156993 (TRAV8-6, TRAJ33)
CAVTDSNYQLIW

SEQ ID NO: 313986 - protein, 15 aa, Homo sapiens
  CDR3 for beta chain variable domain of TCR clone 156993 (TRBV4-3, TRBJ1-2)
CASSRGQGRNYGYAF

SEQ ID NO: 313987 - protein, 14 aa, Homo sapiens
  CDR3 for alpha chain variable domain of TCR clone 156994 (TRAV2, TRAJ9)
CAMEDRSGGFKTIF

SEQ ID NO: 313988 - protein, 13 aa, Homo sapiens
  CDR3 for beta chain variable domain of TCR clone 156994 (TRBV19, TRBJ1-2)
CASSVPGQDGYTF

SEQ ID NO: 313989 - protein, 12 aa, Homo sapiens
  CDR3 for alpha chain variable domain of TCR clone 156995 (TRAV16, TRAJ26)
CASKEGGQNFVF

SEQ ID NO: 313990 - protein, 13 aa, Homo sapiens
  CDR3 for beta chain variable domain of TCR clone 156995 (TRBV25-1, TRBJ1-1)
CASSDRGRAEAFF

SEQ ID NO: 313991 - protein, 14 aa, Homo sapiens
  CDR3 for alpha chain variable domain of TCR clone 156996 (TRAV1-2, TRAJ16)
CAVNRFSDGRKLLF

SEQ ID NO: 313992 - protein, 15 aa, Homo sapiens
  CDR3 for beta chain variable domain of TCR clone 156996 (TRBV20-1, TRBJ1-1)
CSASRGVTGNTEAFF

SEQ ID NO: 313993 - protein, 12 aa, Homo sapiens
  CDR3 for alpha chain variable domain of TCR clone 156997 (TRAV8-3, TRAJ26)
CAGDNYGQNFVF

SEQ ID NO: 313994 - protein, 15 aa, Homo sapiens
  CDR3 for beta chain variable domain of TCR clone 156997 (TRBV5-7, TRBJ2-7)
CASSRPGQVFYEQYF

SEQ ID NO: 313995 - protein, 18 aa, Homo sapiens
  CDR3 for alpha chain variable domain of TCR clone 156998 (TRAV21, TRAJ52)
CAVRPSPAGGTSYGKLTF

SEQ ID NO: 313996 - protein, 17 aa, Homo sapiens
  CDR3 for beta chain variable domain of TCR clone 156998 (TRBV13, TRBJ2-3)
CAISLSRVGGGRNTQYF

SEQ ID NO: 313997 - protein, 15 aa, Homo sapiens
  CDR3 for alpha chain variable domain of TCR clone 156999 (TRAV29/DV5, TRAJ57)
CAASLLRGGSEKLFF

SEQ ID NO: 313998 - protein, 15 aa, Homo sapiens
  CDR3 for beta chain variable domain of TCR clone 156999 (TRBV5-1, TRBJ1-3)
CASSLEGGSGNTIYF

SEQ ID NO: 313999 - protein, 12 aa, Homo sapiens
  CDR3 for alpha chain variable domain of TCR clone 157000 (TRAV12-3, TRAJ17)
CAMTLTGNKLTF

SEQ ID NO: 314000 - protein, 13 aa, Homo sapiens
  CDR3 for beta chain variable domain of TCR clone 157000 (TRBV4-1, TRBJ2-3)
CASSQPPTDTQYF

SEQ ID NO: 314001 - protein, 18 aa, Homo sapiens
  CDR3 for alpha chain variable domain of TCR clone 157001 (TRAV21, TRAJ52)
CAVRPSPAGGTSYGKLTF

SEQ ID NO: 314002 - protein, 13 aa, Homo sapiens
  CDR3 for beta chain variable domain of TCR clone 157001 (TRBV7-9, TRBJ2-3)
CASSPRGPDTQYF

SEQ ID NO: 314003 - protein, 13 aa, Homo sapiens
  CDR3 for alpha chain variable domain of TCR clone 157002 (TRAV13-1, TRAJ12)
CAASPDSSYKLFF

SEQ ID NO: 314004 - protein, 16 aa, Homo sapiens
  CDR3 for beta chain variable domain of TCR clone 157002 (TRBV15, TRBJ2-1)
CATSRERLAGAYEQFF

SEQ ID NO: 314005 - protein, 14 aa, Homo sapiens
  CDR3 for alpha chain variable domain of TCR clone 157003 (TRAV1-2, TRAJ16)
CAVNRSSDGQKLLF

SEQ ID NO: 314006 - protein, 16 aa, Homo sapiens
  CDR3 for beta chain variable domain of TCR clone 157003 (TRBV29-1, TRBJ2-7)
CSVEVVGTSGSYEQYF

SEQ ID NO: 314007 - protein, 15 aa, Homo sapiens
  CDR3 for alpha chain variable domain of TCR clone 157004 (TRAV17, TRAJ22)
CATVAPSGSARQLTF

SEQ ID NO: 314008 - protein, 16 aa, Homo sapiens
  CDR3 for beta chain variable domain of TCR clone 157004 (TRBV10-3, TRBJ2-7)
CAMSADFADRPYEQYF

SEQ ID NO: 314009 - protein, 14 aa, Homo sapiens
  CDR3 for alpha chain variable domain of TCR clone 157005 (TRAV2, TRAJ9)
CAVEDRSGGFKTIF

SEQ ID NO: 314010 - protein, 15 aa, Homo sapiens
  CDR3 for beta chain variable domain of TCR clone 157005 (TRBV6-5, TRBJ1-6)
CASSLGQGFRSPLHF

SEQ ID NO: 314011 - protein, 15 aa, Homo sapiens
  CDR3 for alpha chain variable domain of TCR clone 157006 (TRAV29/DV5, TRAJ48)
CAASLGGFGNEKLPF

SEQ ID NO: 314012 - protein, 11 aa, Homo sapiens
  CDR3 for beta chain variable domain of TCR clone 157006 (TRBV20-1, TRBJ2-3)
CSGTSSTTQYF

SEQ ID NO: 314013 - protein, 14 aa, Homo sapiens
  CDR3 for alpha chain variable domain of TCR clone 157007 (TRAV1-1, TRAJ23)
CAVKAYNQGGKLIF

SEQ ID NO: 314014 - protein, 13 aa, Homo sapiens
  CDR3 for beta chain variable domain of TCR clone 157007 (TRBV12-4, TRBJ2-7)
CASSPTETYEQYF

SEQ ID NO: 314015 - protein, 12 aa, Homo sapiens
  CDR3 for alpha chain variable domain of TCR clone 157008 (TRAV14/DV4, TRAJ47)
CAIPGDGNKLVF

SEQ ID NO: 314016 - protein, 14 aa, Homo sapiens
  CDR3 for beta chain variable domain of TCR clone 157008 (TRBV12-5, TRBJ1-3)
CASGPAGSGNTVYF

SEQ ID NO: 314017 - protein, 11 aa, Homo sapiens
  CDR3 for alpha chain variable domain of TCR clone 157009 (TRAV13-1, TRAJ39)
CASHAGNMLTF

SEQ ID NO: 314018 - protein, 14 aa, Homo sapiens
  CDR3 for beta chain variable domain of TCR clone 157009 (TRBV11-2, TRBJ1-5)
CASSLDRGRQDQHF

SEQ ID NO: 314019 - protein, 14 aa, Homo sapiens
  CDR3 for alpha chain variable domain of TCR clone 157010 (TRAV1-2, TRAJ16)
CAVNRFSDGQKLLF

SEQ ID NO: 314020 - protein, 14 aa, Homo sapiens
  CDR3 for beta chain variable domain of TCR clone 157010 (TRBV19, TRBJ2-1)
CASPTFVSSGEQFF

SEQ ID NO: 314021 - protein, 14 aa, Homo sapiens
  CDR3 for alpha chain variable domain of TCR clone 157011 (TRAV2, TRAJ37)
CAVDFTSNTGKLIF

SEQ ID NO: 314022 - protein, 17 aa, Homo sapiens
  CDR3 for beta chain variable domain of TCR clone 157011 (TRBV20-1, TRBJ2-1)
CSARDRRRASSYNEQFF

SEQ ID NO: 314023 - protein, 16 aa, Homo sapiens
  CDR3 for alpha chain variable domain of TCR clone 157012 (TRAV30, TRAJ24)
CGTEIVAADSWGKFQF

SEQ ID NO: 314024 - protein, 13 aa, Homo sapiens
  CDR3 for beta chain variable domain of TCR clone 157012 (TRBV18, TRBJ1-2)
CASSASATEGYTF

SEQ ID NO: 314025 - protein, 13 aa, Homo sapiens
  CDR3 for alpha chain variable domain of TCR clone 157013 (TRAV21, TRAJ57)
CAVTQGGSEKLVF

SEQ ID NO: 314026 - protein, 12 aa, Homo sapiens
  CDR3 for beta chain variable domain of TCR clone 157013 (TRBV5-7, TRBJ1-2)
CASSLVQNGYTF

SEQ ID NO: 314027 - protein, 14 aa, Homo sapiens
  CDR3 for alpha chain variable domain of TCR clone 157014 (TRAV21, TRAJ15)
CAVSLNQAGTARSF

SEQ ID NO: 314028 - protein, 11 aa, Homo sapiens
  CDR3 for beta chain variable domain of TCR clone 157014 (TRBV20-1, TRBJ2-7)
CSARTSYEQYF

SEQ ID NO: 314029 - protein, 12 aa, Homo sapiens
  CDR3 for alpha chain variable domain of TCR clone 157015 (TRAV26-1, TRAJ54)
CIGGWGAQKLVF

SEQ ID NO: 314030 - protein, 15 aa, Homo sapiens
  CDR3 for beta chain variable domain of TCR clone 157015 (TRBV2, TRBJ2-7)
CASSEGLARSYEQYF

SEQ ID NO: 314031 - protein, 16 aa, Homo sapiens
  CDR3 for alpha chain variable domain of TCR clone 157016 (TRAV23/DV6, TRAJ9)
CAASIGGNTGGFKTIF

SEQ ID NO: 314032 - protein, 14 aa, Homo sapiens
  CDR3 for beta chain variable domain of TCR clone 157016 (TRBV4-1, TRBJ2-2)
CASSQAVNTGELFF

SEQ ID NO: 314033 - protein, 15 aa, Homo sapiens
  CDR3 for alpha chain variable domain of TCR clone 157017 (TRAV8-4, TRAJ40)
CAVSDDTSGTYKYIF

SEQ ID NO: 314034 - protein, 13 aa, Homo sapiens
  CDR3 for beta chain variable domain of TCR clone 157017 (TRBV19, TRBJ1-2)
CASSVPGQDGYTF

SEQ ID NO: 314035 - protein, 16 aa, Homo sapiens
  CDR3 for alpha chain variable domain of TCR clone 157018 (TRAV30, TRAJ24)
CGTEIVDADSWGKFQF

SEQ ID NO: 314036 - protein, 17 aa, Homo sapiens
  CDR3 for beta chain variable domain of TCR clone 157018 (TRBV11-2, TRBJ2-5)
CASSNSQENPVLRARHA

SEQ ID NO: 314037 - protein, 11 aa, Homo sapiens
  CDR3 for alpha chain variable domain of TCR clone 157019 (TRAV27, TRAJ45)
CAGAQEEVLTH

SEQ ID NO: 314038 - protein, 11 aa, Homo sapiens
  CDR3 for beta chain variable domain of TCR clone 157019 (TRBV19, TRBJ1-1)
CASSIGSEAFF

SEQ ID NO: 314039 - protein, 14 aa, Homo sapiens
  CDR3 for alpha chain variable domain of TCR clone 157020 (TRAV27, TRAJ13)
CRSSNSGGYQKVTF

SEQ ID NO: 314040 - protein, 16 aa, Homo sapiens
  CDR3 for beta chain variable domain of TCR clone 157020 (TRBV7-6, TRBJ2-1)
CSAVPAAWGGADEQFF

SEQ ID NO: 314041 - protein, 16 aa, Homo sapiens
  CDR3 for alpha chain variable domain of TCR clone 157021 (TRAV12-2, TRAJ40)
CAVIRGGTSGTYKYIF

SEQ ID NO: 314042 - protein, 16 aa, Homo sapiens
  CDR3 for beta chain variable domain of TCR clone 157021 (TRBV7-9, TRBJ2-1)
CASSDVAGGSYNEQCF

SEQ ID NO: 314043 - protein, 15 aa, Homo sapiens
  CDR3 for alpha chain variable domain of TCR clone 157022 (TRAV27, TRAJ38)
CAARRNAGNNRKPIW

SEQ ID NO: 314044 - protein, 13 aa, Homo sapiens
  CDR3 for beta chain variable domain of TCR clone 157022 (TRBV12-5, TRBJ2-3)
CASGDRQSDTQYL

SEQ ID NO: 314045 - protein, 14 aa, Homo sapiens
  CDR3 for alpha chain variable domain of TCR clone 157023 (TRAV12-2, TRAJ13)
CSVKRTGGYQKVTF

SEQ ID NO: 314046 - protein, 15 aa, Homo sapiens
  CDR3 for beta chain variable domain of TCR clone 157023 (TRBV27, TRBJ2-1)
CASSNGGGSSNEQFF

SEQ ID NO: 314047 - protein, 14 aa, Homo sapiens
  CDR3 for alpha chain variable domain of TCR clone 157024 (TRAV1-2, TRAJ8)
CAVREDTGFQKLVF

SEQ ID NO: 314048 - protein, 11 aa, Homo sapiens
  CDR3 for beta chain variable domain of TCR clone 157024 (TRBV20-1, TRBJ2-5)
GSADRAETQYF

SEQ ID NO: 314049 - protein, 13 aa, Homo sapiens
  CDR3 for alpha chain variable domain of TCR clone 157025 (TRAV17, TRAJ15)
CATDARAGTALIF

SEQ ID NO: 314050 - protein, 15 aa, Homo sapiens
  CDR3 for beta chain variable domain of TCR clone 157025 (TRBV6-6, TRBJ1-1)
CASSPRGDVETEAFF

SEQ ID NO: 314051 - protein, 16 aa, Homo sapiens
  CDR3 for alpha chain variable domain of TCR clone 157026 (TRAV4, TRAJ18)
CCVLLIGGSTLGRLYF

SEQ ID NO: 314052 - protein, 12 aa, Homo sapiens
  CDR3 for beta chain variable domain of TCR clone 157026 (TRBV6-3, TRBJ2-7)
CAGSLTPYEQYF

SEQ ID NO: 314053 - protein, 14 aa, Homo sapiens
  CDR3 for alpha chain variable domain of TCR clone 157027 (TRAV12-2, TRAJ13)
CAVKKTGGYQKVTF

SEQ ID NO: 314054 - protein, 15 aa, Homo sapiens
  CDR3 for beta chain variable domain of TCR clone 157027 (TRBV19, TRBJ2-2)
CASRQTGADTGELFF

SEQ ID NO: 314055 - protein, 18 aa, Homo sapiens
  CDR3 for alpha chain variable domain of TCR clone 157028 (TRAV12-3, TRAJ52)
CAMSRTNAGGTSYGKLTF

SEQ ID NO: 314056 - protein, 17 aa, Homo sapiens
  CDR3 for beta chain variable domain of TCR clone 157028 (TRBV7-3, TRBJ2-3)
RASSLMKRTRGADTQYF

SEQ ID NO: 314057 - protein, 12 aa, Homo sapiens
  CDR3 for alpha chain variable domain of TCR clone 157029 (TRAV12-1, TRAJ23)
CVVNIPGGKLIF

SEQ ID NO: 314058 - protein, 12 aa, Homo sapiens
  CDR3 for beta chain variable domain of TCR clone 157029 (TRBV11-2, TRBJ2-2)
CAGSLGGGELFF

SEQ ID NO: 314059 - protein, 12 aa, Homo sapiens
  CDR3 for alpha chain variable domain of TCR clone 157030 (TRAV21, TRAJ11)
CAVRGGNSTLTF

SEQ ID NO: 314060 - protein, 15 aa, Homo sapiens
  CDR3 for beta chain variable domain of TCR clone 157030 (TRBV6-1, TRBJ2-2)
CAILTGTRDTGELFF

SEQ ID NO: 314061 - protein, 17 aa, Homo sapiens
  CDR3 for alpha chain variable domain of TCR clone 157031 (TRAV3, TRAJ6)
CAVRDGPRAGGNYIPTL

SEQ ID NO: 314062 - protein, 14 aa, Homo sapiens
  CDR3 for beta chain variable domain of TCR clone 157031 (TRBV7-2, TRBJ2-7)
CASSPKTSFYEQYF

SEQ ID NO: 314063 - protein, 15 aa, Homo sapiens
  CDR3 for alpha chain variable domain of TCR clone 157032 (TRAV17, TRAJ16)
CATALRFSDGQKLLF

SEQ ID NO: 314064 - protein, 15 aa, Homo sapiens
  CDR3 for beta chain variable domain of TCR clone 157032 (TRBV6-3, TRBJ2-1)
CASSYASDSYNEQFF

SEQ ID NO: 314065 - protein, 11 aa, Homo sapiens
  CDR3 for alpha chain variable domain of TCR clone 157033 (TRAV17, TRAJ9)
CGFTGGFKTIF

SEQ ID NO: 314066 - protein, 13 aa, Homo sapiens
  CDR3 for beta chain variable domain of TCR clone 157033 (TRBV29-1, TRBJ2-3)
SAALQGGADTQYF

SEQ ID NO: 314067 - protein, 14 aa, Homo sapiens
  CDR3 for alpha chain variable domain of TCR clone 157034 (TRAV17, TRAJ42)
CATAGGGSQGNLIF

SEQ ID NO: 314068 - protein, 14 aa, Homo sapiens
  CDR3 for beta chain variable domain of TCR clone 157034 (TRBV7-2, TRBJ2-3)
CASRFSRTSDTQYF

SEQ ID NO: 314069 - protein, 12 aa, Homo sapiens
  CDR3 for alpha chain variable domain of TCR clone 157035 (TRAV25, TRAJ45)
NYSGGGADGLTF

SEQ ID NO: 314070 - protein, 19 aa, Homo sapiens
  CDR3 for beta chain variable domain of TCR clone 157035 (TRBV28, TRBJ2-7)
CASSYSGTSRLGWVYEQYF

SEQ ID NO: 314071 - protein, 15 aa, Homo sapiens
  CDR3 for alpha chain variable domain of TCR clone 157036 (TRAV8-4, TRAJ3)
CAVTGENLVQQCFQT

SEQ ID NO: 314072 - protein, 16 aa, Homo sapiens
  CDR3 for beta chain variable domain of TCR clone 157036 (TRBV4-2, TRBJ1-1)
CASSQAGFGMNTEAFF

SEQ ID NO: 314073 - protein, 15 aa, Homo sapiens
  CDR3 for alpha chain variable domain of TCR clone 157037 (TRAV26-2, TRAJ28)
CILVESGAGSYQSTF

SEQ ID NO: 314074 - protein, 16 aa, Homo sapiens
  CDR3 for beta chain variable domain of TCR clone 157037 (TRBV4-2, TRBJ1-2)
CASSQEIGGASYGYTF

SEQ ID NO: 314075 - protein, 15 aa, Homo sapiens
  CDR3 for alpha chain variable domain of TCR clone 157038 (TRAV12-3, TRAJ52)
CAMSGGGTSYGKLTF

SEQ ID NO: 314076 - protein, 11 aa, Homo sapiens
  CDR3 for beta chain variable domain of TCR clone 157038 (TRBV29-1, TRBJ2-5)
CSEDRTGTQYF

SEQ ID NO: 314077 - protein, 14 aa, Homo sapiens
  CDR3 for alpha chain variable domain of TCR clone 157039 (TRAV38-1, TRAJ40)
CALRPTSGTYKYIS

SEQ ID NO: 314078 - protein, 20 aa, Homo sapiens
  CDR3 for beta chain variable domain of TCR clone 157039 (TRBV7-8, TRBJ2-2)
CASSHLFPGPTIHITGELFF

SEQ ID NO: 314079 - protein, 16 aa, Homo sapiens
  CDR3 for alpha chain variable domain of TCR clone 157040 (TRAV27, TRAJ13)
CAVAKSDSGGYPKVTF

SEQ ID NO: 314080 - protein, 15 aa, Homo sapiens
  CDR3 for beta chain variable domain of TCR clone 157040 (TRBV29-1, TRBJ2-1)
CSVGRHALFYNEQFF

SEQ ID NO: 314081 - protein, 15 aa, Homo sapiens
  CDR3 for alpha chain variable domain of TCR clone 157041 (TRAV8-2, TRAJ44)
CVVSPNTGIASKLTF

SEQ ID NO: 314082 - protein, 12 aa, Homo sapiens
  CDR3 for beta chain variable domain of TCR clone 157041 (TRBV11-2, TRBJ2-2)
CAVPRNTGELFF

SEQ ID NO: 314083 - protein, 13 aa, Homo sapiens
  CDR3 for alpha chain variable domain of TCR clone 157042 (TRAV1-1, TRAJ9)
CAAKNTGGFKTIF

SEQ ID NO: 314084 - protein, 15 aa, Homo sapiens
  CDR3 for beta chain variable domain of TCR clone 157042 (TRBV20-1, TRBJ2-1)
HPSAQIGGSANEQFF

SEQ ID NO: 314085 - protein, 14 aa, Homo sapiens
  CDR3 for alpha chain variable domain of TCR clone 157043 (TRAV12-3, TRAJ10)
SHLPLTGGGNKLTF

SEQ ID NO: 314086 - protein, 13 aa, Homo sapiens
  CDR3 for beta chain variable domain of TCR clone 157043 (TRBV7-2, TRBJ2-4)
CASSLAEGGIQYF

SEQ ID NO: 314087 - protein, 17 aa, Homo sapiens
  CDR3 for alpha chain variable domain of TCR clone 157044 (TRAV3, TRAJ12)
CAVRDGGRMDSSYKLIF

SEQ ID NO: 314088 - protein, 15 aa, Homo sapiens
  CDR3 for beta chain variable domain of TCR clone 157044 (TRBV20-1, TRBJ2-5)
CRAEGTGGLQETQYF

SEQ ID NO: 314089 - protein, 14 aa, Homo sapiens
  CDR3 for alpha chain variable domain of TCR clone 157045 (TRAV12-1, TRAJ42)
CVVIYGGSQGNLIF

SEQ ID NO: 314090 - protein, 13 aa, Homo sapiens
  CDR3 for beta chain variable domain of TCR clone 157045 (TRBV18, TRBJ2-5)
CASSPQGKETQYF

SEQ ID NO: 314091 - protein, 13 aa, Homo sapiens
  CDR3 for alpha chain variable domain of TCR clone 157046 (TRAV21, TRAJ57)
CAVTQGGSEKLVF

SEQ ID NO: 314092 - protein, 15 aa, Homo sapiens
  CDR3 for beta chain variable domain of TCR clone 157046 (TRBV4-1, TRBJ2-7)
CASSQNTGRLYEQYF

SEQ ID NO: 314093 - protein, 13 aa, Homo sapiens
  CDR3 for alpha chain variable domain of TCR clone 157047 (TRAV12-3, TRAJ40)
CAMSDSGTYKYIF

SEQ ID NO: 314094 - protein, 22 aa, Homo sapiens
  CDR3 for beta chain variable domain of TCR clone 157047 (TRBV14, TRBJ1-5)
CASSQDGVTTYLPPIGNQPQHF

SEQ ID NO: 314095 - protein, 15 aa, Homo sapiens
  CDR3 for alpha chain variable domain of TCR clone 157048 (TRAV27, TRAJ33)
CAGADIMDSNYQLIW

SEQ ID NO: 314096 - protein, 13 aa, Homo sapiens
  CDR3 for beta chain variable domain of TCR clone 157048 (TRBV28, TRBJ1-2)
CARSLQGRGGYTF

SEQ ID NO: 314097 - protein, 14 aa, Homo sapiens
  CDR3 for alpha chain variable domain of TCR clone 157049 (TRAV8-3, TRAJ35)
CAVVPQGFGNVLHC

SEQ ID NO: 314098 - protein, 15 aa, Homo sapiens
  CDR3 for beta chain variable domain of TCR clone 157049 (TRBV20-1, TRBJ2-7)
CSARDPVSGMDEQYF

SEQ ID NO: 314099 - protein, 11 aa, Homo sapiens
  CDR3 for alpha chain variable domain of TCR clone 157050 (TRAV21, TRAJ34)
CAHYNTDKLIF

SEQ ID NO: 314100 - protein, 13 aa, Homo sapiens
  CDR3 for beta chain variable domain of TCR clone 157050 (TRBV7-2, TRBJ2-2)
CASSLAVTGELFF

SEQ ID NO: 314101 - protein, 13 aa, Homo sapiens
  CDR3 for alpha chain variable domain of TCR clone 157051 (TRAV8-2, TRAJ49)
CVVTPDTGNQFYF

SEQ ID NO: 314102 - protein, 15 aa, Homo sapiens
  CDR3 for beta chain variable domain of TCR clone 157051 (TRBV11-2, TRBJ2-1)
CASSLTSGGYNEQFF

SEQ ID NO: 314103 - protein, 20 aa, Homo sapiens
  CDR3 for alpha chain variable domain of TCR clone 157052 (TRAV1-1, TRAJ39)
CLLLLRCESSAYNAGNMLTF

SEQ ID NO: 314104 - protein, 13 aa, Homo sapiens
  CDR3 for beta chain variable domain of TCR clone 157052 (TRBV12-4, TRBJ1-5)
CASSPDRAQHQHF

SEQ ID NO: 314105 - protein, 14 aa, Homo sapiens
  CDR3 for alpha chain variable domain of TCR clone 157053 (TRAV12-2, TRAJ45)
CAVYSGGGADGLPF

SEQ ID NO: 314106 - protein, 13 aa, Homo sapiens
  CDR3 for beta chain variable domain of TCR clone 157053 (TRBV7-7, TRBJ2-3)
CASSVSRADTQYF

SEQ ID NO: 314107 - protein, 13 aa, Homo sapiens
  CDR3 for alpha chain variable domain of TCR clone 157054 (TRAV2, TRAJ40)
CAVVTSGTYKSIF

SEQ ID NO: 314108 - protein, 16 aa, Homo sapiens
  CDR3 for beta chain variable domain of TCR clone 157054 (TRBV19, TRBJ2-2)
CASRSPGTGATGELFF

SEQ ID NO: 314109 - protein, 12 aa, Homo sapiens
  CDR3 for alpha chain variable domain of TCR clone 157055 (TRAV12-3, TRAJ29)
CAAREGNTPLVF

SEQ ID NO: 314110 - protein, 11 aa, Homo sapiens
  CDR3 for beta chain variable domain of TCR clone 157055 (TRBV7-9, TRBJ2-1)
CASSSQNEQFF

SEQ ID NO: 314111 - protein, 12 aa, Homo sapiens
  CDR3 for alpha chain variable domain of TCR clone 157056 (TRAV8-3, TRAJ20)
CAVGANDYKLSF

SEQ ID NO: 314112 - protein, 15 aa, Homo sapiens
  CDR3 for beta chain variable domain of TCR clone 157056 (TRBV9, TRBJ1-6)
CASSLAGTGDSPLHF

SEQ ID NO: 314113 - protein, 14 aa, Homo sapiens
  CDR3 for alpha chain variable domain of TCR clone 157057 (TRAV2, TRAJ37)
CAVEDQGNTGKLIF

SEQ ID NO: 314114 - protein, 14 aa, Homo sapiens
  CDR3 for beta chain variable domain of TCR clone 157057 (TRBV18, TRBJ2-1)
CVSSPQGRFNEQFF

SEQ ID NO: 314115 - protein, 14 aa, Homo sapiens
  CDR3 for alpha chain variable domain of TCR clone 157058 (TRAV12-3, TRAJ10)
SHLPVTGGGNKLTF

SEQ ID NO: 314116 - protein, 15 aa, Homo sapiens
  CDR3 for beta chain variable domain of TCR clone 157058 (TRBV25-1, TRBJ2-4)
CASSETESAKNIQYF

SEQ ID NO: 314117 - protein, 12 aa, Homo sapiens
  CDR3 for alpha chain variable domain of TCR clone 157059 (TRAV30, TRAJ43)
CGTEERGNDMRF

SEQ ID NO: 314118 - protein, 13 aa, Homo sapiens
  CDR3 for beta chain variable domain of TCR clone 157059 (TRBV27, TRBJ2-7)
CASSFSQCYEQYF

SEQ ID NO: 314119 - protein, 14 aa, Homo sapiens
  CDR3 for alpha chain variable domain of TCR clone 157060 (TRAV1-2, TRAJ8)
CAVREDTGFQKLVF

SEQ ID NO: 314120 - protein, 13 aa, Homo sapiens
  CDR3 for beta chain variable domain of TCR clone 157060 (TRBV12-4, TRBJ1-5)
CASSPDRAQPQQF

SEQ ID NO: 314121 - protein, 15 aa, Homo sapiens
  CDR3 for alpha chain variable domain of TCR clone 157061 (TRAV25, TRAJ53)
CAATGGGGSNFKLKF

SEQ ID NO: 314122 - protein, 19 aa, Homo sapiens
  CDR3 for beta chain variable domain of TCR clone 157061 (TRBV7-2, TRBJ2-3)
CASSFLSRNWGGGTDTQYF

SEQ ID NO: 314123 - protein, 13 aa, Homo sapiens
  CDR3 for alpha chain variable domain of TCR clone 157062 (TRAV12-1, TRAJ13)
CVVTSVGYQKVTF

SEQ ID NO: 314124 - protein, 14 aa, Homo sapiens
  CDR3 for beta chain variable domain of TCR clone 157062 (TRBV27, TRBJ2-1)
CASSATGGYNEQFF

SEQ ID NO: 314125 - protein, 14 aa, Homo sapiens
  CDR3 for alpha chain variable domain of TCR clone 157063 (TRAV1-2, TRAJ8)
CAVREDTGFQKLVF

SEQ ID NO: 314126 - protein, 13 aa, Homo sapiens
  CDR3 for beta chain variable domain of TCR clone 157063 (TRBV7-3, TRBJ2-2)
CASSSGGYTGELF

SEQ ID NO: 314127 - protein, 16 aa, Homo sapiens
  CDR3 for alpha chain variable domain of TCR clone 157064 (TRAV30, TRAJ24)
CGTEIVDADSWGQFQF

SEQ ID NO: 314128 - protein, 15 aa, Homo sapiens
  CDR3 for beta chain variable domain of TCR clone 157064 (TRBV11-2, TRBJ2-2)
CASRGLAANTGELFF

SEQ ID NO: 314129 - protein, 17 aa, Homo sapiens
  CDR3 for alpha chain variable domain of TCR clone 157065 (TRAV4, TRAJ28)
CLVGDRALGLGVTNSLS

SEQ ID NO: 314130 - protein, 15 aa, Homo sapiens
  CDR3 for beta chain variable domain of TCR clone 157065 (TRBV7-9, TRBJ2-3)
CASSSSGGATDTQYF

SEQ ID NO: 314131 - protein, 18 aa, Homo sapiens
  CDR3 for alpha chain variable domain of TCR clone 157066 (TRAV12-3, TRAJ52)
CAMSVGGAGGTSYGKLTF

SEQ ID NO: 314132 - protein, 16 aa, Homo sapiens
  CDR3 for beta chain variable domain of TCR clone 157066 (TRBV11-2, TRBJ2-2)
CASRKPGQGFTGELFF

SEQ ID NO: 314133 - protein, 13 aa, Homo sapiens
  CDR3 for alpha chain variable domain of TCR clone 157067 (TRAV13-2, TRAJ8)
CAFMNTGFQKLVF

SEQ ID NO: 314134 - protein, 15 aa, Homo sapiens
  CDR3 for beta chain variable domain of TCR clone 157067 (TRBV19, TRBJ2-3)
CGAGDTNAPNDTQYF

SEQ ID NO: 314135 - protein, 11 aa, Homo sapiens
  CDR3 for alpha chain variable domain of TCR clone 157068 (TRAV2, TRAJ13)
CASGGFQKVTF

SEQ ID NO: 314136 - protein, 16 aa, Homo sapiens
  CDR3 for beta chain variable domain of TCR clone 157068 (TRBV19, TRBJ2-1)
CASSKAGPSSYNEQFF

SEQ ID NO: 314137 - protein, 12 aa, Homo sapiens
  CDR3 for alpha chain variable domain of TCR clone 157069 (TRAV17, TRAJ31)
CAMEQGNARLMF

SEQ ID NO: 314138 - protein, 14 aa, Homo sapiens
  CDR3 for beta chain variable domain of TCR clone 157069 (TRBV28, TRBJ2-7)
CASTTDRDGFVQYF

SEQ ID NO: 314139 - protein, 16 aa, Homo sapiens
  CDR3 for alpha chain variable domain of TCR clone 157070 (TRAV12-3, TRAJ28)
CAMRANSGAGSYQLTF

SEQ ID NO: 314140 - protein, 20 aa, Homo sapiens
  CDR3 for beta chain variable domain of TCR clone 157070 (TRBV7-8, TRBJ2-2)
CASSHLFPGPTIHITGELFF

SEQ ID NO: 314141 - protein, 14 aa, Homo sapiens
  CDR3 for alpha chain variable domain of TCR clone 157071 (TRAV2, TRAJ9)
CAVEDRSGGFKTIF

SEQ ID NO: 314142 - protein, 14 aa, Homo sapiens
  CDR3 for beta chain variable domain of TCR clone 157071 (TRBV7-3, TRBJ2-7)
CASSLSGVSYEQYF

SEQ ID NO: 314143 - protein, 16 aa, Homo sapiens
  CDR3 for alpha chain variable domain of TCR clone 157072 (TRAV1-2, TRAJ10)
CAVRGVLTGGGNKLTF

SEQ ID NO: 314144 - protein, 15 aa, Homo sapiens
  CDR3 for beta chain variable domain of TCR clone 157072 (TRBV28, TRBJ2-7)
CASSLISGGSYEQYF

SEQ ID NO: 314145 - protein, 11 aa, Homo sapiens
  CDR3 for alpha chain variable domain of TCR clone 157073 (TRAV17, TRAJ9)
CATTGGFKTIF

SEQ ID NO: 314146 - protein, 11 aa, Homo sapiens
  CDR3 for beta chain variable domain of TCR clone 157073 (TRBV7-9, TRBJ2-5)
CASSLSATQYF

SEQ ID NO: 314147 - protein, 13 aa, Homo sapiens
  CDR3 for alpha chain variable domain of TCR clone 157074 (TRAV13-1, TRAJ39)
CSKYSNAGNMLTF

SEQ ID NO: 314148 - protein, 11 aa, Homo sapiens
  CDR3 for beta chain variable domain of TCR clone 157074 (TRBV11-2, TRBJ1-1)
CASSINTEAFF

SEQ ID NO: 314149 - protein, 15 aa, Homo sapiens
  CDR3 for alpha chain variable domain of TCR clone 157075 (TRAV13-1, TRAJ9)
CAASTLNTGGFKTIF

SEQ ID NO: 314150 - protein, 14 aa, Homo sapiens
  CDR3 for beta chain variable domain of TCR clone 157075 (TRBV11-3, TRBJ2-7)
CASSSRTGRYEQYF

SEQ ID NO: 314151 - protein, 11 aa, Homo sapiens
  CDR3 for alpha chain variable domain of TCR clone 157076 (TRAV23/DV6, TRAJ58)
CAARLLRGETS

SEQ ID NO: 314152 - protein, 11 aa, Homo sapiens
  CDR3 for beta chain variable domain of TCR clone 157076 (TRBV29-1, TRBJ2-5)
CSEDRTGTQYF

SEQ ID NO: 314153 - protein, 12 aa, Homo sapiens
  CDR3 for alpha chain variable domain of TCR clone 157077 (TRAV8-3, TRAJ34)
WASGYNTDTLIL

SEQ ID NO: 314154 - protein, 13 aa, Homo sapiens
  CDR3 for beta chain variable domain of TCR clone 157077 (TRBV6-4, TRBJ2-3)
CASSVSWADTQYF

SEQ ID NO: 314155 - protein, 14 aa, Homo sapiens
  CDR3 for alpha chain variable domain of TCR clone 157078 (TRAV2, TRAJ9)
CALEDRSGGFKTIF

SEQ ID NO: 314156 - protein, 12 aa, Homo sapiens
  CDR3 for beta chain variable domain of TCR clone 157078 (TRBV12-5, TRBJ2-5)
CASGQGVETQYF

SEQ ID NO: 314157 - protein, 17 aa, Homo sapiens
  CDR3 for alpha chain variable domain of TCR clone 157079 (TRAV3, TRAJ6)
CAVRDGPRAGGCYIPTF

SEQ ID NO: 314158 - protein, 20 aa, Homo sapiens
  CDR3 for beta chain variable domain of TCR clone 157079 (TRBV28, TRBJ2-1)
WASTPIGRSPGLAGGNEQFF

SEQ ID NO: 314159 - protein, 11 aa, Homo sapiens
  CDR3 for alpha chain variable domain of TCR clone 157080 (TRAV23/DV6, TRAJ48)
CAPRWGEKLTF

SEQ ID NO: 314160 - protein, 12 aa, Homo sapiens
  CDR3 for beta chain variable domain of TCR clone 157080 (TRBV12-4, TRBJ2-5)
CQQSGTEETQYF

SEQ ID NO: 314161 - protein, 14 aa, Homo sapiens
  CDR3 for alpha chain variable domain of TCR clone 157081 (TRAV21, TRAJ8)
CALQRDTGFQKLVF

SEQ ID NO: 314162 - protein, 15 aa, Homo sapiens
  CDR3 for beta chain variable domain of TCR clone 157081 (TRBV12-4, TRBJ2-5)
CASSPPTGLQETQYF

SEQ ID NO: 314163 - protein, 13 aa, Homo sapiens
  CDR3 for alpha chain variable domain of TCR clone 157082 (TRAV38-1, TRAJ57)
CALVRGGSEKLVF

SEQ ID NO: 314164 - protein, 17 aa, Homo sapiens
  CDR3 for beta chain variable domain of TCR clone 157082 (TRBV29-1, TRBJ2-3)
CSVDSPPRGARTDTQYF

SEQ ID NO: 314165 - protein, 16 aa, Homo sapiens
  CDR3 for alpha chain variable domain of TCR clone 157083 (TRAV17, TRAJ36)
CATVSLNWGKQPLLLD

SEQ ID NO: 314166 - protein, 13 aa, Homo sapiens
  CDR3 for beta chain variable domain of TCR clone 157083 (TRBV4-1, TRBJ1-1)
CASSQLGTGEAFF

SEQ ID NO: 314167 - protein, 13 aa, Homo sapiens
  CDR3 for alpha chain variable domain of TCR clone 157084 (TRAV8-1, TRAJ34)
CAVRPYNTDKLIF

SEQ ID NO: 314168 - protein, 15 aa, Homo sapiens
  CDR3 for beta chain variable domain of TCR clone 157084 (TRBV7-2, TRBJ2-1)
CASSSGLAGGNEQFF

SEQ ID NO: 314169 - protein, 12 aa, Homo sapiens
  CDR3 for alpha chain variable domain of TCR clone 157085 (TRAV1-1, TRAJ39)
CAVPVVGNMLTL

SEQ ID NO: 314170 - protein, 18 aa, Homo sapiens
  CDR3 for beta chain variable domain of TCR clone 157085 (TRBV7-9, TRBJ2-7)
CASSLTTSGSRTWYEQYF

SEQ ID NO: 314171 - protein, 14 aa, Homo sapiens
  CDR3 for alpha chain variable domain of TCR clone 157086 (TRAV38-1, TRAJ29)
CAFITPSGNTHLVF

SEQ ID NO: 314172 - protein, 14 aa, Homo sapiens
  CDR3 for beta chain variable domain of TCR clone 157086 (TRBV25-1, TRBJ1-1)
CASTHLGGNTEAFF

SEQ ID NO: 314173 - protein, 14 aa, Homo sapiens
  CDR3 for alpha chain variable domain of TCR clone 157087 (TRAV29/DV5, TRAJ44)
CAAFLVGTASKLTF

SEQ ID NO: 314174 - protein, 13 aa, Homo sapiens
  CDR3 for beta chain variable domain of TCR clone 157087 (TRBV15, TRBJ1-6)
CATSGGLNSPLHF

SEQ ID NO: 314175 - protein, 13 aa, Homo sapiens
  CDR3 for alpha chain variable domain of TCR clone 157088 (TRAV17, TRAJ5)
CALRGTGRRALTF

SEQ ID NO: 314176 - protein, 15 aa, Homo sapiens
  CDR3 for beta chain variable domain of TCR clone 157088 (TRBV11-2, TRBJ2-1)
CASSLTSGGYNEQFF

SEQ ID NO: 314177 - protein, 11 aa, Homo sapiens
  CDR3 for alpha chain variable domain of TCR clone 157089 (TRAV16, TRAJ33)
CALHSNYQLIW

SEQ ID NO: 314178 - protein, 15 aa, Homo sapiens
  CDR3 for beta chain variable domain of TCR clone 157089 (TRBV7-3, TRBJ2-2)
CASSETGQGTGELFF

SEQ ID NO: 314179 - protein, 13 aa, Homo sapiens
  CDR3 for alpha chain variable domain of TCR clone 157090 (TRAV3, TRAJ30)
CAVRDRGEDKIIF

SEQ ID NO: 314180 - protein, 14 aa, Homo sapiens
  CDR3 for beta chain variable domain of TCR clone 157090 (TRBV5-1, TRBJ1-1)
CASSRTTGDTEAFF

SEQ ID NO: 314181 - protein, 13 aa, Homo sapiens
  CDR3 for alpha chain variable domain of TCR clone 157091 (TRAV21, TRAJ20)
CAVGLRVDYKLSF

SEQ ID NO: 314182 - protein, 14 aa, Homo sapiens
  CDR3 for beta chain variable domain of TCR clone 157091 (TRBV7-8, TRBJ2-5)
CASSATGGQETQYF

SEQ ID NO: 314183 - protein, 11 aa, Homo sapiens
  CDR3 for alpha chain variable domain of TCR clone 157092 (TRAV3, TRAJ21)
CAVGNFNKFYF

SEQ ID NO: 314184 - protein, 14 aa, Homo sapiens
  CDR3 for beta chain variable domain of TCR clone 157092 (TRBV4-2, TRBJ2-1)
CASGLDRAYNGQFF

SEQ ID NO: 314185 - protein, 15 aa, Homo sapiens
  CDR3 for alpha chain variable domain of TCR clone 157093 (TRAV12-3, TRAJ6)
CAMSATTGGSDIPTF

SEQ ID NO: 314186 - protein, 19 aa, Homo sapiens
  CDR3 for beta chain variable domain of TCR clone 157093 (TRBV25-1, TRBJ2-2)
CAILVYRVDRGRKTGELFF

SEQ ID NO: 314187 - protein, 15 aa, Homo sapiens
  CDR3 for alpha chain variable domain of TCR clone 157094 (TRAV12-1, TRAJ44)
CVADLPTGTASKLTF

SEQ ID NO: 314188 - protein, 15 aa, Homo sapiens
  CDR3 for beta chain variable domain of TCR clone 157094 (TRBV5-1, TRBJ2-7)
CASSLNGGPAREQYF

SEQ ID NO: 314189 - protein, 12 aa, Homo sapiens
  CDR3 for alpha chain variable domain of TCR clone 157095 (TRAV9-2, TRAJ26)
CALRGYGQNFVF

SEQ ID NO: 314190 - protein, 17 aa, Homo sapiens
  CDR3 for beta chain variable domain of TCR clone 157095 (TRBV20-1, TRBJ2-1)
CSASSSGLAGSYNEQFF

SEQ ID NO: 314191 - protein, 14 aa, Homo sapiens
  CDR3 for alpha chain variable domain of TCR clone 157096 (TRAV12-1, TRAJ17)
CVVNPKAAGNKLTF

SEQ ID NO: 314192 - protein, 13 aa, Homo sapiens
  CDR3 for beta chain variable domain of TCR clone 157096 (TRBV20-1, TRBJ2-5)
CSVTQGNEETQYF

SEQ ID NO: 314193 - protein, 16 aa, Homo sapiens
  CDR3 for alpha chain variable domain of TCR clone 157097 (TRAV30, TRAJ24)
CGTEIVDADSWGKFQF

SEQ ID NO: 314194 - protein, 17 aa, Homo sapiens
  CDR3 for beta chain variable domain of TCR clone 157097 (TRBV20-1, TRBJ2-1)
CSARDRRRASSYNEQFV

SEQ ID NO: 314195 - protein, 13 aa, Homo sapiens
  CDR3 for alpha chain variable domain of TCR clone 157098 (TRAV8-3, TRAJ10)
WAILTGGGHKLTF

SEQ ID NO: 314196 - protein, 10 aa, Homo sapiens
  CDR3 for beta chain variable domain of TCR clone 157098 (TRBV20-1, TRBJ2-5)
CSARFETQYF

SEQ ID NO: 314197 - protein, 14 aa, Homo sapiens
  CDR3 for alpha chain variable domain of TCR clone 157099 (TRAV38-1, TRAJ40)
CALRPTPGTYKYIF

SEQ ID NO: 314198 - protein, 14 aa, Homo sapiens
  CDR3 for beta chain variable domain of TCR clone 157099 (TRBV19, TRBJ2-1)
CASPTFVLSGEQFF

SEQ ID NO: 314199 - protein, 18 aa, Homo sapiens
  CDR3 for alpha chain variable domain of TCR clone 157100 (TRAV12-3, TRAJ52)
CAMSRTNAGVTSYGKLTF

SEQ ID NO: 314200 - protein, 17 aa, Homo sapiens
  CDR3 for beta chain variable domain of TCR clone 157100 (TRBV7-3, TRBJ2-3)
CASSLMKRMRGADTQYF

SEQ ID NO: 314201 - protein, 14 aa, Homo sapiens
  CDR3 for alpha chain variable domain of TCR clone 157101 (TRAV12-3, TRAJ10)
GHLPLTGGGNKLTF

SEQ ID NO: 314202 - protein, 16 aa, Homo sapiens
  CDR3 for beta chain variable domain of TCR clone 157101 (TRBV19, TRBJ2-1)
CASSKAGPSSYNEQFF

SEQ ID NO: 314203 - protein, 14 aa, Homo sapiens
  CDR3 for alpha chain variable domain of TCR clone 157102 (TRAV8-3, TRAJ4)
CAVGAAGGYNKLIF

SEQ ID NO: 314204 - protein, 15 aa, Homo sapiens
  CDR3 for beta chain variable domain of TCR clone 157102 (TRBV19, TRBJ1-1)
CASRETGGVNTEAFF

SEQ ID NO: 314205 - protein, 16 aa, Homo sapiens
  CDR3 for alpha chain variable domain of TCR clone 157103 (TRAV30, TRAJ24)
CGTEIVDAYSWGKFQF

SEQ ID NO: 314206 - protein, 13 aa, Homo sapiens
  CDR3 for beta chain variable domain of TCR clone 157103 (TRBV10-3, TRBJ1-2)
CAISERDSYGYTF

SEQ ID NO: 314207 - protein, 17 aa, Homo sapiens
  CDR3 for alpha chain variable domain of TCR clone 157104 (TRAV8-3, TRAJ10)
EASNTVILTGGGNKLTF

SEQ ID NO: 314208 - protein, 16 aa, Homo sapiens
  CDR3 for beta chain variable domain of TCR clone 157104 (TRBV7-9, TRBJ1-2)
CASSLGFSSGEDGYTS

SEQ ID NO: 314209 - protein, 13 aa, Homo sapiens
  CDR3 for alpha chain variable domain of TCR clone 157105 (TRAV27, TRAJ8)
CAGGPTGFQKLVF

SEQ ID NO: 314210 - protein, 15 aa, Homo sapiens
  CDR3 for beta chain variable domain of TCR clone 157105 (TRBV6-1, TRBJ2-7)
CASSESMGGFYEQYF

SEQ ID NO: 314211 - protein, 15 aa, Homo sapiens
  CDR3 for alpha chain variable domain of TCR clone 157106 (TRAV8-2, TRAJ42)
CVVSADMGSQGNLIF

SEQ ID NO: 314212 - protein, 11 aa, Homo sapiens
  CDR3 for beta chain variable domain of TCR clone 157106 (TRBV5-1, TRBJ2-1)
CASSIGQEQFF

SEQ ID NO: 314213 - protein, 12 aa, Homo sapiens
  CDR3 for alpha chain variable domain of TCR clone 157107 (TRAV8-3, TRAJ26)
CAGDNYGQNFVF

SEQ ID NO: 314214 - protein, 13 aa, Homo sapiens
  CDR3 for beta chain variable domain of TCR clone 157107 (TRBV7-9, TRBJ2-1)
CASSLDVGNEQFF

SEQ ID NO: 314215 - protein, 14 aa, Homo sapiens
  CDR3 for alpha chain variable domain of TCR clone 157108 (TRAV2, TRAJ8)
CAGRGNTGFQKLVF

SEQ ID NO: 314216 - protein, 13 aa, Homo sapiens
  CDR3 for beta chain variable domain of TCR clone 157108 (TRBV6-5, TRBJ2-7)
CASRTGGIHEQYF

SEQ ID NO: 314217 - protein, 15 aa, Homo sapiens
  CDR3 for alpha chain variable domain of TCR clone 157109 (TRAV19, TRAJ53)
CALSSRGGSNYKLTF

SEQ ID NO: 314218 - protein, 14 aa, Homo sapiens
  CDR3 for beta chain variable domain of TCR clone 157109 (TRBV6-1, TRBJ1-3)
CASVQGGGGNTIYF

SEQ ID NO: 314219 - protein, 11 aa, Homo sapiens
  CDR3 for alpha chain variable domain of TCR clone 157110 (TRAV21, TRAJ11)
CAVNGYSTLIF

SEQ ID NO: 314220 - protein, 11 aa, Homo sapiens
  CDR3 for beta chain variable domain of TCR clone 157110 (TRBV19, TRBJ1-1)
CASSIGSEAFF

SEQ ID NO: 314221 - protein, 14 aa, Homo sapiens
  CDR3 for alpha chain variable domain of TCR clone 157111 (TRAV12-2, TRAJ53)
CAVKGGGSNYKLTF

SEQ ID NO: 314222 - protein, 14 aa, Homo sapiens
  CDR3 for beta chain variable domain of TCR clone 157111 (TRBV7-7, TRBJ2-2)
CATRQDSYTGELFF

SEQ ID NO: 314223 - protein, 14 aa, Homo sapiens
  CDR3 for alpha chain variable domain of TCR clone 157112 (TRAV17, TRAJ57)
CATAPQGGSEKLVF

SEQ ID NO: 314224 - protein, 18 aa, Homo sapiens
  CDR3 for beta chain variable domain of TCR clone 157112 (TRBV6-6, TRBJ1-3)
CASSYSRWDAISGNTIYF

SEQ ID NO: 314225 - protein, 14 aa, Homo sapiens
  CDR3 for alpha chain variable domain of TCR clone 157113 (TRAV12-3, TRAJ57)
CAMSAWGGSEKLVF

SEQ ID NO: 314226 - protein, 14 aa, Homo sapiens
  CDR3 for beta chain variable domain of TCR clone 157113 (TRBV18, TRBJ2-5)
YASSPGVSQETQYF

SEQ ID NO: 314227 - protein, 15 aa, Homo sapiens
  CDR3 for alpha chain variable domain of TCR clone 157114 (TRAV41, TRAJ45)
CAASYSGGGADGLTF

SEQ ID NO: 314228 - protein, 17 aa, Homo sapiens
  CDR3 for beta chain variable domain of TCR clone 157114 (TRBV4-1, TRBJ2-7)
CASSQPTSGSRGYEQYF

SEQ ID NO: 314229 - protein, 14 aa, Homo sapiens
  CDR3 for alpha chain variable domain of TCR clone 157115 (TRAV12-3, TRAJ9)
WAMSPNTGGFKTIF

SEQ ID NO: 314230 - protein, 12 aa, Homo sapiens
  CDR3 for beta chain variable domain of TCR clone 157115 (TRBV11-2, TRBJ2-2)
CASSLGGGELFF

SEQ ID NO: 314231 - protein, 16 aa, Homo sapiens
  CDR3 for alpha chain variable domain of TCR clone 157116 (TRAV12-3, TRAJ53)
CAMSLGSGGSDYKLTF

SEQ ID NO: 314232 - protein, 15 aa, Homo sapiens
  CDR3 for beta chain variable domain of TCR clone 157116 (TRBV5-1, TRBJ2-2)
CASSSQGGNTGELFF

SEQ ID NO: 314233 - protein, 15 aa, Homo sapiens
  CDR3 for alpha chain variable domain of TCR clone 157117 (TRAV13-1, TRAJ57)
CAASNTQGGSEKLVF

SEQ ID NO: 314234 - protein, 16 aa, Homo sapiens
  CDR3 for beta chain variable domain of TCR clone 157117 (TRBV19, TRBJ2-1)
CASSRAGPSSYNEQLF

SEQ ID NO: 314235 - protein, 11 aa, Homo sapiens
  CDR3 for alpha chain variable domain of TCR clone 157118 (TRAV12-2, TRAJ33)
CAGTSNYQLIW

SEQ ID NO: 314236 - protein, 14 aa, Homo sapiens
  CDR3 for beta chain variable domain of TCR clone 157118 (TRBV12-4, TRBJ2-2)
CASNQGANTGELFF

SEQ ID NO: 314237 - protein, 17 aa, Homo sapiens
  CDR3 for alpha chain variable domain of TCR clone 157119 (TRAV3, TRAJ6)
CAVRDGPRAGGSYIPTF

SEQ ID NO: 314238 - protein, 13 aa, Homo sapiens
  CDR3 for beta chain variable domain of TCR clone 157119 (TRBV7-2, TRBJ2-2)
CASSLNVLGELFF

SEQ ID NO: 314239 - protein, 13 aa, Homo sapiens
  CDR3 for alpha chain variable domain of TCR clone 157120 (TRAV13-2, TRAJ13)
CAETAGGYQKVTF

SEQ ID NO: 314240 - protein, 14 aa, Homo sapiens
  CDR3 for beta chain variable domain of TCR clone 157120 (TRBV4-1, TRBJ2-2)
CASSQAVNTGELFF

SEQ ID NO: 314241 - protein, 14 aa, Homo sapiens
  CDR3 for alpha chain variable domain of TCR clone 157121 (TRAV23/DV6, TRAJ22)
CAASVSGSARQLTF

SEQ ID NO: 314242 - protein, 16 aa, Homo sapiens
  CDR3 for beta chain variable domain of TCR clone 157121 (TRBV19, TRBJ2-2)
CASSFPGQGLAGEMFF

SEQ ID NO: 314243 - protein, 11 aa, Homo sapiens
  CDR3 for alpha chain variable domain of TCR clone 157122 (TRAV1-2, TRAJ34)
CAGYNTDKLIF

SEQ ID NO: 314244 - protein, 13 aa, Homo sapiens
  CDR3 for beta chain variable domain of TCR clone 157122 (TRBV11-2, TRBJ1-1)
YASSLGNGAEAFF

SEQ ID NO: 314245 - protein, 15 aa, Homo sapiens
  CDR3 for alpha chain variable domain of TCR clone 157123 (TRAV20, TRAJ53)
CAVQASGGSNYKLTL

SEQ ID NO: 314246 - protein, 12 aa, Homo sapiens
  CDR3 for beta chain variable domain of TCR clone 157123 (TRBV7-6, TRBJ2-5)
CASSLSQETQYF

SEQ ID NO: 314247 - protein, 15 aa, Homo sapiens
  CDR3 for alpha chain variable domain of TCR clone 157124 (TRAV13-1, TRAJ44)
CAASRWGGTASKLTF

SEQ ID NO: 314248 - protein, 14 aa, Homo sapiens
  CDR3 for beta chain variable domain of TCR clone 157124 (TRBV7-2, TRBJ2-5)
CASSPRGSSETQYF

SEQ ID NO: 314249 - protein, 14 aa, Homo sapiens
  CDR3 for alpha chain variable domain of TCR clone 157125 (TRAV2, TRAJ37)
CAVAFTSNTGKLIF

SEQ ID NO: 314250 - protein, 15 aa, Homo sapiens
  CDR3 for beta chain variable domain of TCR clone 157125 (TRBV20-1, TRBJ1-1)
CSASRGVTGNTEAFL

SEQ ID NO: 314251 - protein, 15 aa, Homo sapiens
  CDR3 for alpha chain variable domain of TCR clone 157126 (TRAV21, TRAJ24)
CDARSSTDSWGTLQF

SEQ ID NO: 314252 - protein, 13 aa, Homo sapiens
  CDR3 for beta chain variable domain of TCR clone 157126 (TRBV11-2, TRBJ2-5)
CASSSTGEETQYF

SEQ ID NO: 314253 - protein, 14 aa, Homo sapiens
  CDR3 for alpha chain variable domain of TCR clone 157127 (TRAV14/DV4, TRAJ15)
CAMRRDQAGTALIV

SEQ ID NO: 314254 - protein, 16 aa, Homo sapiens
  CDR3 for beta chain variable domain of TCR clone 157127 (TRBV15, TRBJ2-3)
CATSRDLGIVTDTQYF

SEQ ID NO: 314255 - protein, 14 aa, Homo sapiens
  CDR3 for alpha chain variable domain of TCR clone 157128 (TRAV8-4, TRAJ5)
CAVSTDTGRRALTF

SEQ ID NO: 314256 - protein, 12 aa, Homo sapiens
  CDR3 for beta chain variable domain of TCR clone 157128 (TRBV18, TRBJ2-5)
CASSPNQETQYF

SEQ ID NO: 314257 - protein, 14 aa, Homo sapiens
  CDR3 for alpha chain variable domain of TCR clone 157129 (TRAV12-2, TRAJ13)
CAVQKTGGYQKVTF

SEQ ID NO: 314258 - protein, 14 aa, Homo sapiens
  CDR3 for beta chain variable domain of TCR clone 157129 (TRBV6-1, TRBJ1-3)
CASVQGGGGNTIYF

SEQ ID NO: 314259 - protein, 15 aa, Homo sapiens
  CDR3 for alpha chain variable domain of TCR clone 157130 (TRAV2, TRAJ24)
CAVEVLTDSWGKFQF

SEQ ID NO: 314260 - protein, 16 aa, Homo sapiens
  CDR3 for beta chain variable domain of TCR clone 157130 (TRBV12-4, TRBJ2-5)
CASSFFVRGRQETQYF

SEQ ID NO: 314261 - protein, 15 aa, Homo sapiens
  CDR3 for alpha chain variable domain of TCR clone 157131 (TRAV3, TRAJ3)
CAVRDRDSSASKIIL

SEQ ID NO: 314262 - protein, 18 aa, Homo sapiens
  CDR3 for beta chain variable domain of TCR clone 157131 (TRBV25-1, TRBJ1-2)
CASSGLQNGQGLICGYTF

SEQ ID NO: 314263 - protein, 13 aa, Homo sapiens
  CDR3 for alpha chain variable domain of TCR clone 157132 (TRAV12-2, TRAJ42)
CAVKRGSQGNLIF

SEQ ID NO: 314264 - protein, 12 aa, Homo sapiens
  CDR3 for beta chain variable domain of TCR clone 157132 (TRBV5-7, TRBJ1-2)
CASCLVQNGYTF

SEQ ID NO: 314265 - protein, 15 aa, Homo sapiens
  CDR3 for alpha chain variable domain of TCR clone 157133 (TRAV17, TRAJ56)
CATDANTGANSKLTF

SEQ ID NO: 314266 - protein, 15 aa, Homo sapiens
  CDR3 for beta chain variable domain of TCR clone 157133 (TRBV12-4, TRBJ2-5)
CASSPSTGLQETQYF

SEQ ID NO: 314267 - protein, 14 aa, Homo sapiens
  CDR3 for alpha chain variable domain of TCR clone 157134 (TRAV8-4, TRAJ13)
CAVTLSEGYQKVTF

SEQ ID NO: 314268 - protein, 14 aa, Homo sapiens
  CDR3 for beta chain variable domain of TCR clone 157134 (TRBV7-2, TRBJ1-2)
CASSQTGSTYGYTF

SEQ ID NO: 314269 - protein, 16 aa, Homo sapiens
  CDR3 for alpha chain variable domain of TCR clone 157135 (TRAV13-1, TRAJ15)
CAANGGPVRAGTALIF

SEQ ID NO: 314270 - protein, 13 aa, Homo sapiens
  CDR3 for beta chain variable domain of TCR clone 157135 (TRBV20-1, TRBJ2-3)
CSATSGSRETQYF

SEQ ID NO: 314271 - protein, 11 aa, Homo sapiens
  CDR3 for alpha chain variable domain of TCR clone 157136 (TRAV3, TRAJ21)
CAVGNFNKFYF

SEQ ID NO: 314272 - protein, 16 aa, Homo sapiens
  CDR3 for beta chain variable domain of TCR clone 157136 (TRBV19, TRBJ2-1)
CASSTAVPSSYNEQFF

SEQ ID NO: 314273 - protein, 11 aa, Homo sapiens
  CDR3 for alpha chain variable domain of TCR clone 157137 (TRAV16, TRAJ33)
CALHSNYQLIW

SEQ ID NO: 314274 - protein, 16 aa, Homo sapiens
  CDR3 for beta chain variable domain of TCR clone 157137 (TRBV13, TRBJ2-2)
CASSPRTGEHTGELFF

SEQ ID NO: 314275 - protein, 12 aa, Homo sapiens
  CDR3 for alpha chain variable domain of TCR clone 157138 (TRAV12-3, TRAJ17)
CAMTLTGNKLTF

SEQ ID NO: 314276 - protein, 15 aa, Homo sapiens
  CDR3 for beta chain variable domain of TCR clone 157138 (TRBV20-1, TRBJ2-7)
YSARDRVSGMDEKYF

SEQ ID NO: 314277 - protein, 11 aa, Homo sapiens
  CDR3 for alpha chain variable domain of TCR clone 157139 (TRAV35, TRAJ34)
CWARNTDKLIF

SEQ ID NO: 314278 - protein, 18 aa, Homo sapiens
  CDR3 for beta chain variable domain of TCR clone 157139 (TRBV7-9, TRBJ2-7)
CASSLTTSGSRTWYEQYF

SEQ ID NO: 314279 - protein, 10 aa, Homo sapiens
  CDR3 for alpha chain variable domain of TCR clone 157140 (TRAV23/DV6, TRAJ57)
CAASSTLSQG

SEQ ID NO: 314280 - protein, 15 aa, Homo sapiens
  CDR3 for beta chain variable domain of TCR clone 157140 (TRBV7-9, TRBJ1-6)
CASSSPGLGNSPLHF

SEQ ID NO: 314281 - protein, 17 aa, Homo sapiens
  CDR3 for alpha chain variable domain of TCR clone 157141 (TRAV26-1, TRAJ53)
CIVRVDDSGGSNYKLKF

SEQ ID NO: 314282 - protein, 15 aa, Homo sapiens
  CDR3 for beta chain variable domain of TCR clone 157141 (TRBV20-1, TRBJ2-7)
CSAGVPAAYFYEQYF

SEQ ID NO: 314283 - protein, 14 aa, Homo sapiens
  CDR3 for alpha chain variable domain of TCR clone 157142 (TRAV30, TRAJ33)
CGTVAPRSNYQLIW

SEQ ID NO: 314284 - protein, 13 aa, Homo sapiens
  CDR3 for beta chain variable domain of TCR clone 157142 (TRBV12-5, TRBJ2-3)
CASGDRQSDTQYF

SEQ ID NO: 314285 - protein, 14 aa, Homo sapiens
  CDR3 for alpha chain variable domain of TCR clone 157143 (TRAV1-2, TRAJ16)
CAVNRFSDGQKLLF

SEQ ID NO: 314286 - protein, 15 aa, Homo sapiens
  CDR3 for beta chain variable domain of TCR clone 157143 (TRBV19, TRBJ1-1)
CASSIRRQMNTEAFF

SEQ ID NO: 314287 - protein, 14 aa, Homo sapiens
  CDR3 for alpha chain variable domain of TCR clone 157144 (TRAV12-2, TRAJ44)
CAVNPAGTASKLTF

SEQ ID NO: 314288 - protein, 16 aa, Homo sapiens
  CDR3 for beta chain variable domain of TCR clone 157144 (TRBV2, TRBJ2-1)
CASSVGGSLSYNAQFF

SEQ ID NO: 314289 - protein, 14 aa, Homo sapiens
  CDR3 for alpha chain variable domain of TCR clone 157145 (TRAV17, TRAJ37)
CATDGSSNTGKLIF

SEQ ID NO: 314290 - protein, 15 aa, Homo sapiens
  CDR3 for beta chain variable domain of TCR clone 157145 (TRBV9, TRBJ2-1)
CASSLAGSSYNEQFF

SEQ ID NO: 314291 - protein, 14 aa, Homo sapiens
  CDR3 for alpha chain variable domain of TCR clone 157146 (TRAV4, TRAJ17)
CLVGDMAAGNKLTF

SEQ ID NO: 314292 - protein, 14 aa, Homo sapiens
  CDR3 for beta chain variable domain of TCR clone 157146 (TRBV7-6, TRBJ2-3)
CASSLGTGTDTQYF

SEQ ID NO: 314293 - protein, 17 aa, Homo sapiens
  CDR3 for alpha chain variable domain of TCR clone 157147 (TRAV8-4, TRAJ22)
CAVSESPFAGSARQLTF

SEQ ID NO: 314294 - protein, 14 aa, Homo sapiens
  CDR3 for beta chain variable domain of TCR clone 157147 (TRBV19, TRBJ2-1)
CASPTFVLSGEQFF

SEQ ID NO: 314295 - protein, 13 aa, Homo sapiens
  CDR3 for alpha chain variable domain of TCR clone 157148 (TRAV12-2, TRAJ20)
CAVYPSNDYKLSF

SEQ ID NO: 314296 - protein, 16 aa, Homo sapiens
  CDR3 for beta chain variable domain of TCR clone 157148 (TRBV4-3, TRBJ2-1)
CASSPALDRGVNEQFF

SEQ ID NO: 314297 - protein, 13 aa, Homo sapiens
  CDR3 for alpha chain variable domain of TCR clone 157149 (TRAV8-3, TRAJ5)
CAVGPRGRRALTF

SEQ ID NO: 314298 - protein, 14 aa, Homo sapiens
  CDR3 for beta chain variable domain of TCR clone 157149 (TRBV28, TRBJ2-7)
CASSPYGMAYEQYF

SEQ ID NO: 314299 - protein, 12 aa, Homo sapiens
  CDR3 for alpha chain variable domain of TCR clone 157150 (TRAV13-1, TRAJ21)
CAAKEGFNKFYF

SEQ ID NO: 314300 - protein, 14 aa, Homo sapiens
  CDR3 for beta chain variable domain of TCR clone 157150 (TRBV28, TRBJ1-4)
CASSFGTFDAKLFF

SEQ ID NO: 314301 - protein, 17 aa, Homo sapiens
  CDR3 for alpha chain variable domain of TCR clone 157151 (TRAV4, TRAJ13)
CLVGVQGSSGGYQKVTF

SEQ ID NO: 314302 - protein, 18 aa, Homo sapiens
  CDR3 for beta chain variable domain of TCR clone 157151 (TRBV15, TRBJ2-3)
CATSRDGARSWDTDKQYF

SEQ ID NO: 314303 - protein, 14 aa, Homo sapiens
  CDR3 for alpha chain variable domain of TCR clone 157152 (TRAV12-1, TRAJ3)
CLVNPGSSASKIIF

SEQ ID NO: 314304 - protein, 18 aa, Homo sapiens
  CDR3 for beta chain variable domain of TCR clone 157152 (TRBV4-2, TRBJ1-2)
CASSQDKVGHTVNYGYTF

SEQ ID NO: 314305 - protein, 15 aa, Homo sapiens
  CDR3 for alpha chain variable domain of TCR clone 157153 (TRAV40, TRAJ39)
CLLPPRGNAGNMLTF

SEQ ID NO: 314306 - protein, 11 aa, Homo sapiens
  CDR3 for beta chain variable domain of TCR clone 157153 (TRBV7-8, TRBJ2-7)
CASSLSLEQYF

SEQ ID NO: 314307 - protein, 18 aa, Homo sapiens
  CDR3 for alpha chain variable domain of TCR clone 157154 (TRAV13-1, TRAJ52)
CAAKNPNAGGTSSGKLKF

SEQ ID NO: 314308 - protein, 15 aa, Homo sapiens
  CDR3 for beta chain variable domain of TCR clone 157154 (TRBV6-1, TRBJ2-3)
CAISERGGITDTQYF

SEQ ID NO: 314309 - protein, 14 aa, Homo sapiens
  CDR3 for alpha chain variable domain of TCR clone 157155 (TRAV12-1, TRAJ15)
CVVNRNQAGTALLF

SEQ ID NO: 314310 - protein, 14 aa, Homo sapiens
  CDR3 for beta chain variable domain of TCR clone 157155 (TRBV19, TRBJ1-1)
CATTSGTRGTEAFF

SEQ ID NO: 314311 - protein, 13 aa, Homo sapiens
  CDR3 for alpha chain variable domain of TCR clone 157156 (TRAV16, TRAJ58)
CALSIPRGSRLTF

SEQ ID NO: 314312 - protein, 14 aa, Homo sapiens
  CDR3 for beta chain variable domain of TCR clone 157156 (TRBV6-5, TRBJ2-7)
CASSPHRGLREQYF

SEQ ID NO: 314313 - protein, 14 aa, Homo sapiens
  CDR3 for alpha chain variable domain of TCR clone 157157 (TRAV12-2, TRAJ40)
CAVKIPSGTYKYIF

SEQ ID NO: 314314 - protein, 14 aa, Homo sapiens
  CDR3 for beta chain variable domain of TCR clone 157157 (TRBV5-1, TRBJ2-7)
CASSRGESLYEQYF

SEQ ID NO: 314315 - protein, 14 aa, Homo sapiens
  CDR3 for alpha chain variable domain of TCR clone 157158 (TRAV1-2, TRAJ16)
CAVNRFSDGQKLLF

SEQ ID NO: 314316 - protein, 20 aa, Homo sapiens
  CDR3 for beta chain variable domain of TCR clone 157158 (TRBV7-8, TRBJ2-2)
CASSNLFPGPTIHITGELFF

SEQ ID NO: 314317 - protein, 13 aa, Homo sapiens
  CDR3 for alpha chain variable domain of TCR clone 157159 (TRAV8-2, TRAJ9)
CVVRATGGFKTIF

SEQ ID NO: 314318 - protein, 14 aa, Homo sapiens
  CDR3 for beta chain variable domain of TCR clone 157159 (TRBV7-2, TRBJ2-7)
CASSPKTSFYEQYF

SEQ ID NO: 314319 - protein, 17 aa, Homo sapiens
  CDR3 for alpha chain variable domain of TCR clone 157160 (TRAV3, TRAJ6)
CAVRDGPRAGGSYIPTF

SEQ ID NO: 314320 - protein, 14 aa, Homo sapiens
  CDR3 for beta chain variable domain of TCR clone 157160 (TRBV7-2, TRBJ2-7)
CASGPKTSFYEQYL

SEQ ID NO: 314321 - protein, 13 aa, Homo sapiens
  CDR3 for alpha chain variable domain of TCR clone 157161 (TRAV12-1, TRAJ26)
CVVRRNYGQNFAF

SEQ ID NO: 314322 - protein, 14 aa, Homo sapiens
  CDR3 for beta chain variable domain of TCR clone 157161 (TRBV6-3, TRBJ1-1)
CASRYTGESTEAFF

SEQ ID NO: 314323 - protein, 14 aa, Homo sapiens
  CDR3 for alpha chain variable domain of TCR clone 157162 (TRAV38-1, TRAJ48)
CAFMANFGNEKLNF

SEQ ID NO: 314324 - protein, 14 aa, Homo sapiens
  CDR3 for beta chain variable domain of TCR clone 157162 (TRBV5-1, TRBJ2-7)
CASSRGESLYEQYF

SEQ ID NO: 314325 - protein, 13 aa, Homo sapiens
  CDR3 for alpha chain variable domain of TCR clone 157163 (TRAV27, TRAJ24)
CAGDRDSWGKLQF

SEQ ID NO: 314326 - protein, 18 aa, Homo sapiens
  CDR3 for beta chain variable domain of TCR clone 157163 (TRBV5-7, TRBJ2-1)
CASSLDFRRLTGGNEQFF

SEQ ID NO: 314327 - protein, 16 aa, Homo sapiens
  CDR3 for alpha chain variable domain of TCR clone 157164 (TRAV16, TRAJ52)
CALSGVGGTSYGKLTF

SEQ ID NO: 314328 - protein, 18 aa, Homo sapiens
  CDR3 for beta chain variable domain of TCR clone 157164 (TRBV7-6, TRBJ2-1)
CASSPRTSGMSSYNEQFF

SEQ ID NO: 314329 - protein, 12 aa, Homo sapiens
  CDR3 for alpha chain variable domain of TCR clone 157165 (TRAV12-1, TRAJ40)
CVVYSGTYKSIF

SEQ ID NO: 314330 - protein, 14 aa, Homo sapiens
  CDR3 for beta chain variable domain of TCR clone 157165 (TRBV20-1, TRBJ2-3)
CSARGGTSTDTQYF

SEQ ID NO: 314331 - protein, 13 aa, Homo sapiens
  CDR3 for alpha chain variable domain of TCR clone 157166 (TRAV26-2, TRAJ43)
CILRAGTNNDMRF

SEQ ID NO: 314332 - protein, 15 aa, Homo sapiens
  CDR3 for beta chain variable domain of TCR clone 157166 (TRBV7-2, TRBJ2-1)
CASTHGTGIYNEQFF

SEQ ID NO: 314333 - protein, 13 aa, Homo sapiens
  CDR3 for alpha chain variable domain of TCR clone 157167 (TRAV20, TRAJ20)
CAVQAGSGYKPSF

SEQ ID NO: 314334 - protein, 13 aa, Homo sapiens
  CDR3 for beta chain variable domain of TCR clone 157167 (TRBV20-1, TRBJ1-3)
CSARVQGRDTIYF

SEQ ID NO: 314335 - protein, 15 aa, Homo sapiens
  CDR3 for alpha chain variable domain of TCR clone 157168 (TRAV26-1, TRAJ56)
CIVRVATGAYSKLTF

SEQ ID NO: 314336 - protein, 16 aa, Homo sapiens
  CDR3 for beta chain variable domain of TCR clone 157168 (TRBV7-9, TRBJ2-1)
CASSDVAGGSYNEQFF

SEQ ID NO: 314337 - protein, 13 aa, Homo sapiens
  CDR3 for alpha chain variable domain of TCR clone 157169 (TRAV2, TRAJ15)
CALASQAGTALIF

SEQ ID NO: 314338 - protein, 16 aa, Homo sapiens
  CDR3 for beta chain variable domain of TCR clone 157169 (TRBV7-3, TRBJ2-2)
CASSLKRGTLSGELFF

SEQ ID NO: 314339 - protein, 15 aa, Homo sapiens
  CDR3 for alpha chain variable domain of TCR clone 157170 (TRAV12-2, TRAJ53)
CAVNGGGGSNYKLTF

SEQ ID NO: 314340 - protein, 14 aa, Homo sapiens
  CDR3 for beta chain variable domain of TCR clone 157170 (TRBV6-1, TRBJ1-3)
CASVQGGGGNTIHF

SEQ ID NO: 314341 - protein, 13 aa, Homo sapiens
  CDR3 for alpha chain variable domain of TCR clone 157171 (TRAV17, TRAJ39)
CATEDNAGNLLTF

SEQ ID NO: 314342 - protein, 14 aa, Homo sapiens
  CDR3 for beta chain variable domain of TCR clone 157171 (TRBV19, TRBJ1-2)
CASSPTGGAGVYTF

SEQ ID NO: 314343 - protein, 13 aa, Homo sapiens
  CDR3 for alpha chain variable domain of TCR clone 157172 (TRAV12-2, TRAJ42)
CAVKRGSQGNLIF

SEQ ID NO: 314344 - protein, 16 aa, Homo sapiens
  CDR3 for beta chain variable domain of TCR clone 157172 (TRBV9, TRBJ2-2)
CASSAMGKGNTGELCF

SEQ ID NO: 314345 - protein, 23 aa, Homo sapiens
  CDR3 for alpha chain variable domain of TCR clone 157173 (TRAV12-2, TRAJ36)
SLLIRDSQPSDSATLERANNLFF

SEQ ID NO: 314346 - protein, 12 aa, Homo sapiens
  CDR3 for beta chain variable domain of TCR clone 157173 (TRBV11-2, TRBJ2-1)
CASSPGNNEQFF

SEQ ID NO: 314347 - protein, 11 aa, Homo sapiens
  CDR3 for alpha chain variable domain of TCR clone 157174 (TRAV12-1, TRAJ21)
CVVNNFNKFYF

SEQ ID NO: 314348 - protein, 15 aa, Homo sapiens
  CDR3 for beta chain variable domain of TCR clone 157174 (TRBV7-9, TRBJ2-1)
CASSLGWGRANEQFF

SEQ ID NO: 314349 - protein, 14 aa, Homo sapiens
  CDR3 for alpha chain variable domain of TCR clone 157175 (TRAV12-2, TRAJ3)
CAVNGYSSASKIIF

SEQ ID NO: 314350 - protein, 19 aa, Homo sapiens
  CDR3 for beta chain variable domain of TCR clone 157175 (TRBV28, TRBJ2-5)
CASSLYLRLAGELQETQYF

SEQ ID NO: 314351 - protein, 13 aa, Homo sapiens
  CDR3 for alpha chain variable domain of TCR clone 157176 (TRAV2, TRAJ40)
CAVVTSGTYKYIF

SEQ ID NO: 314352 - protein, 15 aa, Homo sapiens
  CDR3 for beta chain variable domain of TCR clone 157176 (TRBV11-3, TRBJ2-3)
CASLMDGREGDTQYF

SEQ ID NO: 314353 - protein, 10 aa, Homo sapiens
  CDR3 for alpha chain variable domain of TCR clone 157177 (TRAV1-2, TRAJ18)
CAVIGEAQPW

SEQ ID NO: 314354 - protein, 13 aa, Homo sapiens
  CDR3 for beta chain variable domain of TCR clone 157177 (TRBV20-1, TRBJ1-1)
CSARVGGNTEAFF

SEQ ID NO: 314355 - protein, 11 aa, Homo sapiens
  CDR3 for alpha chain variable domain of TCR clone 157178 (TRAV1-2, TRAJ31)
CAVNNNARLMF

SEQ ID NO: 314356 - protein, 18 aa, Homo sapiens
  CDR3 for beta chain variable domain of TCR clone 157178 (TRBV18, TRBJ2-3)
CASSYTSGAAGGTDTQYF

SEQ ID NO: 314357 - protein, 14 aa, Homo sapiens
  CDR3 for alpha chain variable domain of TCR clone 157179 (TRAV12-2, TRAJ13)
CAVKKTGGYQQVTF

SEQ ID NO: 314358 - protein, 16 aa, Homo sapiens
  CDR3 for beta chain variable domain of TCR clone 157179 (TRBV4-1, TRBJ2-3)
CASSQSTSGAEDTQYF

SEQ ID NO: 314359 - protein, 17 aa, Homo sapiens
  CDR3 for alpha chain variable domain of TCR clone 157180 (TRAV26-1, TRAJ53)
CIVRVDDSGGSNYKLTF

SEQ ID NO: 314360 - protein, 15 aa, Homo sapiens
  CDR3 for beta chain variable domain of TCR clone 157180 (TRBV7-9, TRBJ1-4)
CASSRTGGLNEKLFF

SEQ ID NO: 314361 - protein, 14 aa, Homo sapiens
  CDR3 for alpha chain variable domain of TCR clone 157181 (TRAV1-1, TRAJ35)
CAVRSIGFGNVLHC

SEQ ID NO: 314362 - protein, 14 aa, Homo sapiens
  CDR3 for beta chain variable domain of TCR clone 157181 (TRBV6-1, TRBJ1-3)
CASVQGGGGNTIYF

SEQ ID NO: 314363 - protein, 12 aa, Homo sapiens
  CDR3 for alpha chain variable domain of TCR clone 157182 (TRAV13-1, TRAJ21)
CAAKEGVNKFYF

SEQ ID NO: 314364 - protein, 13 aa, Homo sapiens
  CDR3 for beta chain variable domain of TCR clone 157182 (TRBV7-9, TRBJ2-1)
CASSLGTVNEQFF

SEQ ID NO: 314365 - protein, 15 aa, Homo sapiens
  CDR3 for alpha chain variable domain of TCR clone 157183 (TRAV12-1, TRAJ44)
CVADLPTGTASKLTF

SEQ ID NO: 314366 - protein, 16 aa, Homo sapiens
  CDR3 for beta chain variable domain of TCR clone 157183 (TRBV7-3, TRBJ2-1)
CASSLEGYRSYNEQFF

SEQ ID NO: 314367 - protein, 14 aa, Homo sapiens
  CDR3 for alpha chain variable domain of TCR clone 157184 (TRAV12-1, TRAJ12)
CVVTRMDSSYKLIF

SEQ ID NO: 314368 - protein, 14 aa, Homo sapiens
  CDR3 for beta chain variable domain of TCR clone 157184 (TRBV12-4, TRBJ1-1)
CASSLGTGGTEAFF

SEQ ID NO: 314369 - protein, 11 aa, Homo sapiens
  CDR3 for alpha chain variable domain of TCR clone 157185 (TRAV2, TRAJ13)
CASGCYQKVTF

SEQ ID NO: 314370 - protein, 15 aa, Homo sapiens
  CDR3 for beta chain variable domain of TCR clone 157185 (TRBV28, TRBJ1-3)
CASSMGWASGNTIYF

SEQ ID NO: 314371 - protein, 15 aa, Homo sapiens
  CDR3 for alpha chain variable domain of TCR clone 157186 (TRAV3, TRAJ22)
CAVRDRGGSARQLTF

SEQ ID NO: 314372 - protein, 15 aa, Homo sapiens
  CDR3 for beta chain variable domain of TCR clone 157186 (TRBV11-2, TRBJ1-6)
CASSLDPWAVSPLHF

SEQ ID NO: 314373 - protein, 23 aa, Homo sapiens
  CDR3 for alpha chain variable domain of TCR clone 157187 (TRAV26-1, TRAJ38)
CIADNAGNNHIQNPDPAVYQLRD

SEQ ID NO: 314374 - protein, 17 aa, Homo sapiens
  CDR3 for beta chain variable domain of TCR clone 157187 (TRBV11-2, TRBJ2-6)
CASSQRDIFSEANVLTF

SEQ ID NO: 314375 - protein, 13 aa, Homo sapiens
  CDR3 for alpha chain variable domain of TCR clone 157188 (TRAV2, TRAJ15)
CAVASQAGTALIF

SEQ ID NO: 314376 - protein, 14 aa, Homo sapiens
  CDR3 for beta chain variable domain of TCR clone 157188 (TRBV20-1, TRBJ1-1)
SAVLHLGGGTEAFF

SEQ ID NO: 314377 - protein, 11 aa, Homo sapiens
  CDR3 for alpha chain variable domain of TCR clone 157189 (TRAV1-1, TRAJ20)
CAVFNDYKLSF

SEQ ID NO: 314378 - protein, 14 aa, Homo sapiens
  CDR3 for beta chain variable domain of TCR clone 157189 (TRBV19, TRBJ2-1)
CASSKDRGQDVQFF

SEQ ID NO: 314379 - protein, 15 aa, Homo sapiens
  CDR3 for alpha chain variable domain of TCR clone 157190 (TRAV13-1, TRAJ6)
CAAIHPSGGSYIPTF

SEQ ID NO: 314380 - protein, 14 aa, Homo sapiens
  CDR3 for beta chain variable domain of TCR clone 157190 (TRBV7-9, TRBJ2-2)
CASGLAINNGELFF

SEQ ID NO: 314381 - protein, 11 aa, Homo sapiens
  CDR3 for alpha chain variable domain of TCR clone 157191 (TRAV12-3, TRAJ27)
RAMANAGKSTF

SEQ ID NO: 314382 - protein, 12 aa, Homo sapiens
  CDR3 for beta chain variable domain of TCR clone 157191 (TRBV12-4, TRBJ2-7)
CASSLGGYEQYF

SEQ ID NO: 314383 - protein, 13 aa, Homo sapiens
  CDR3 for alpha chain variable domain of TCR clone 157192 (TRAV1-1, TRAJ9)
CAAKNTGGFKTIF

SEQ ID NO: 314384 - protein, 14 aa, Homo sapiens
  CDR3 for beta chain variable domain of TCR clone 157192 (TRBV19, TRBJ1-4)
CASAIEAEGEELFF

SEQ ID NO: 314385 - protein, 15 aa, Homo sapiens
  CDR3 for alpha chain variable domain of TCR clone 157193 (TRAV17, TRAJ57)
CATGPAQGGSEKLVF

SEQ ID NO: 314386 - protein, 13 aa, Homo sapiens
  CDR3 for beta chain variable domain of TCR clone 157193 (TRBV11-2, TRBJ2-5)
CASSSTGEETQYF

SEQ ID NO: 314387 - protein, 12 aa, Homo sapiens
  CDR3 for alpha chain variable domain of TCR clone 157194 (TRAV12-1, TRAJ40)
CVVYSGTYKYIF

SEQ ID NO: 314388 - protein, 15 aa, Homo sapiens
  CDR3 for beta chain variable domain of TCR clone 157194 (TRBV7-2, TRBJ2-2)
CASRRPGQNTGELFF

SEQ ID NO: 314389 - protein, 15 aa, Homo sapiens
  CDR3 for alpha chain variable domain of TCR clone 157195 (TRAV8-2, TRAJ15)
CVVTMGDQAGTALIF

SEQ ID NO: 314390 - protein, 13 aa, Homo sapiens
  CDR3 for beta chain variable domain of TCR clone 157195 (TRBV7-9, TRBJ1-2)
CASSLKQNYGYTF

SEQ ID NO: 314391 - protein, 13 aa, Homo sapiens
  CDR3 for alpha chain variable domain of TCR clone 157196 (TRAV14/DV4, TRAJ4)
CAMKAGGYNKLIF

SEQ ID NO: 314392 - protein, 16 aa, Homo sapiens
  CDR3 for beta chain variable domain of TCR clone 157196 (TRBV12-5, TRBJ2-5)
CASGPRTSGNQETQYF

SEQ ID NO: 314393 - protein, 14 aa, Homo sapiens
  CDR3 for alpha chain variable domain of TCR clone 157197 (TRAV12-2, TRAJ15)
CAPHTGQAGTALIF

SEQ ID NO: 314394 - protein, 20 aa, Homo sapiens
  CDR3 for beta chain variable domain of TCR clone 157197 (TRBV7-8, TRBJ2-2)
CASSHLFPGPTSQITGELFF

SEQ ID NO: 314395 - protein, 14 aa, Homo sapiens
  CDR3 for alpha chain variable domain of TCR clone 157198 (TRAV1-2, TRAJ16)
CAVNRSSDGQKLLF

SEQ ID NO: 314396 - protein, 17 aa, Homo sapiens
  CDR3 for beta chain variable domain of TCR clone 157198 (TRBV28, TRBJ2-5)
CASSTPEGDALQETQYF

SEQ ID NO: 314397 - protein, 15 aa, Homo sapiens
  CDR3 for alpha chain variable domain of TCR clone 157199 (TRAV12-2, TRAJ23)
CAVKPIYNQGEKLIF

SEQ ID NO: 314398 - protein, 15 aa, Homo sapiens
  CDR3 for beta chain variable domain of TCR clone 157199 (TRBV5-1, TRBJ1-2)
CASSLVGGQSKGYTF

SEQ ID NO: 314399 - protein, 16 aa, Homo sapiens
  CDR3 for alpha chain variable domain of TCR clone 157200 (TRAV41, TRAJ58)
CRLHLCCRTSGSRLSF

SEQ ID NO: 314400 - protein, 15 aa, Homo sapiens
  CDR3 for beta chain variable domain of TCR clone 157200 (TRBV29-1, TRBJ2-6)
CSVGDRGSGANVLTF

SEQ ID NO: 314401 - protein, 16 aa, Homo sapiens
  CDR3 for alpha chain variable domain of TCR clone 157201 (TRAV1-2, TRAJ10)
CAVRGVLTGGGNKLTF

SEQ ID NO: 314402 - protein, 12 aa, Homo sapiens
  CDR3 for beta chain variable domain of TCR clone 157201 (TRBV5-4, TRBJ2-5)
CASSSTRETQYF

SEQ ID NO: 314403 - protein, 20 aa, Homo sapiens
  CDR3 for alpha chain variable domain of TCR clone 157202 (TRAV27, TRAJ41)
CAVRTQIPDIQNPDPAVYQL

SEQ ID NO: 314404 - protein, 17 aa, Homo sapiens
  CDR3 for beta chain variable domain of TCR clone 157202 (TRBV11-2, TRBJ2-1)
CASSLYPPGVEYNEQFF

SEQ ID NO: 314405 - protein, 13 aa, Homo sapiens
  CDR3 for alpha chain variable domain of TCR clone 157203 (TRAV35, TRAJ42)
CAGFPGSQGNLIF

SEQ ID NO: 314406 - protein, 15 aa, Homo sapiens
  CDR3 for beta chain variable domain of TCR clone 157203 (TRBV7-3, TRBJ2-1)
CASSLSSGSFDEQFF

SEQ ID NO: 314407 - protein, 10 aa, Homo sapiens
  CDR3 for alpha chain variable domain of TCR clone 157204 (TRAV38-2/DV8, TRAJ40)
CASGTYKYIF

SEQ ID NO: 314408 - protein, 14 aa, Homo sapiens
  CDR3 for beta chain variable domain of TCR clone 157204 (TRBV19, TRBJ2-1)
CASSDNQGANEQFF

SEQ ID NO: 314409 - protein, 15 aa, Homo sapiens
  CDR3 for alpha chain variable domain of TCR clone 157205 (TRAV25, TRAJ10)
CAGPLLTGGGNKLPF

SEQ ID NO: 314410 - protein, 15 aa, Homo sapiens
  CDR3 for beta chain variable domain of TCR clone 157205 (TRBV12-5, TRBJ2-2)
CASGRLGGNTGELFF

SEQ ID NO: 314411 - protein, 15 aa, Homo sapiens
  CDR3 for alpha chain variable domain of TCR clone 157206 (TRAV23/DV6, TRAJ18)
CAASHAGSTLGRPYF

SEQ ID NO: 314412 - protein, 12 aa, Homo sapiens
  CDR3 for beta chain variable domain of TCR clone 157206 (TRBV20-1, TRBJ1-3)
CSATVSGNTIYF

SEQ ID NO: 314413 - protein, 15 aa, Homo sapiens
  CDR3 for alpha chain variable domain of TCR clone 157207 (TRAV21, TRAJ52)
CAVRGGGTSYGKLTF

SEQ ID NO: 314414 - protein, 12 aa, Homo sapiens
  CDR3 for beta chain variable domain of TCR clone 157207 (TRBV7-3, TRBJ2-1)
CASSFQSGPQFF

SEQ ID NO: 314415 - protein, 17 aa, Homo sapiens
  CDR3 for alpha chain variable domain of TCR clone 157208 (TRAV1-1, TRAJ11)
CAGYSTLTFGKGTMLLV

SEQ ID NO: 314416 - protein, 15 aa, Homo sapiens
  CDR3 for beta chain variable domain of TCR clone 157208 (TRBV6-5, TRBJ2-1)
CASRGDFDAYNEQFF

SEQ ID NO: 314417 - protein, 23 aa, Homo sapiens
  CDR3 for alpha chain variable domain of TCR clone 157209 (TRAV8-6, TRAJ36)
CAVSDWLGQTTSSLGLERESPLF

SEQ ID NO: 314418 - protein, 15 aa, Homo sapiens
  CDR3 for beta chain variable domain of TCR clone 157209 (TRBV9, TRBJ1-6)
CASSVAGTGDSPLHF

SEQ ID NO: 314419 - protein, 15 aa, Homo sapiens
  CDR3 for alpha chain variable domain of TCR clone 157210 (TRAV3, TRAJ17)
CAVSPKEAAGNKLTF

SEQ ID NO: 314420 - protein, 13 aa, Homo sapiens
  CDR3 for beta chain variable domain of TCR clone 157210 (TRBV3-1, TRBJ1-1)
CASSPGVITEAFF

SEQ ID NO: 314421 - protein, 13 aa, Homo sapiens
  CDR3 for alpha chain variable domain of TCR clone 157211 (TRAV21, TRAJ27)
CAARPGNAGKSPF

SEQ ID NO: 314422 - protein, 15 aa, Homo sapiens
  CDR3 for beta chain variable domain of TCR clone 157211 (TRBV5-1, TRBJ2-1)
CASSLVANSYNEQFF

SEQ ID NO: 314423 - protein, 14 aa, Homo sapiens
  CDR3 for alpha chain variable domain of TCR clone 157212 (TRAV12-2, TRAJ17)
CAVLFKAAGNKLTL

SEQ ID NO: 314424 - protein, 17 aa, Homo sapiens
  CDR3 for beta chain variable domain of TCR clone 157212 (TRBV20-1, TRBJ2-2)
CSANGSGQGGLTGELFF

SEQ ID NO: 314425 - protein, 14 aa, Homo sapiens
  CDR3 for alpha chain variable domain of TCR clone 157213 (TRAV1-2, TRAJ17)
CALRRGAAGNKLTF

SEQ ID NO: 314426 - protein, 18 aa, Homo sapiens
  CDR3 for beta chain variable domain of TCR clone 157213 (TRBV7-9, TRBJ2-7)
CASSLTTSGSRTWYEQYF

SEQ ID NO: 314427 - protein, 14 aa, Homo sapiens
  CDR3 for alpha chain variable domain of TCR clone 157214 (TRAV8-3, TRAJ47)
CAVGAQGRGNKLVF

SEQ ID NO: 314428 - protein, 13 aa, Homo sapiens
  CDR3 for beta chain variable domain of TCR clone 157214 (TRBV18, TRBJ2-7)
CASSRSGSYEQYF

SEQ ID NO: 314429 - protein, 12 aa, Homo sapiens
  CDR3 for alpha chain variable domain of TCR clone 157215 (TRAV12-2, TRAJ20)
CAVNRNDYKHSF

SEQ ID NO: 314430 - protein, 16 aa, Homo sapiens
  CDR3 for beta chain variable domain of TCR clone 157215 (TRBV7-3, TRBJ1-2)
CASSLGAPVPNYGYTF

SEQ ID NO: 314431 - protein, 12 aa, Homo sapiens
  CDR3 for alpha chain variable domain of TCR clone 157216 (TRAV1-2, TRAJ24)
CSVGGSWGKFQF

SEQ ID NO: 314432 - protein, 15 aa, Homo sapiens
  CDR3 for beta chain variable domain of TCR clone 157216 (TRBV6-1, TRBJ2-7)
CASSEGVGNPYEQYF

SEQ ID NO: 314433 - protein, 12 aa, Homo sapiens
  CDR3 for alpha chain variable domain of TCR clone 157217 (TRAV12-1, TRAJ40)
CVVYSGTYKYIF

SEQ ID NO: 314434 - protein, 15 aa, Homo sapiens
  CDR3 for beta chain variable domain of TCR clone 157217 (TRBV7-2, TRBJ2-5)
CASSFLRGGEETQYF

SEQ ID NO: 314435 - protein, 13 aa, Homo sapiens
  CDR3 for alpha chain variable domain of TCR clone 157218 (TRAV3, TRAJ20)
CCEDFCNDYKLSF

SEQ ID NO: 314436 - protein, 15 aa, Homo sapiens
  CDR3 for beta chain variable domain of TCR clone 157218 (TRBV6-5, TRBJ2-1)
CASSYDAGAGNEQFF

SEQ ID NO: 314437 - protein, 14 aa, Homo sapiens
  CDR3 for alpha chain variable domain of TCR clone 157219 (TRAV12-2, TRAJ13)
CAVKKTGGYQKVTF

SEQ ID NO: 314438 - protein, 15 aa, Homo sapiens
  CDR3 for beta chain variable domain of TCR clone 157219 (TRBV20-1, TRBJ2-7)
CSARDRGSGMDEQYF

SEQ ID NO: 314439 - protein, 10 aa, Homo sapiens
  CDR3 for alpha chain variable domain of TCR clone 157220 (TRAV17, TRAJ36)
CATVAGNLFF

SEQ ID NO: 314440 - protein, 17 aa, Homo sapiens
  CDR3 for beta chain variable domain of TCR clone 157220 (TRBV7-8, TRBJ2-6)
CASSAGTGGAGANVLTF

SEQ ID NO: 314441 - protein, 18 aa, Homo sapiens
  CDR3 for alpha chain variable domain of TCR clone 157221 (TRAV21, TRAJ52)
CAVRPSPAGGTSYGKLTF

SEQ ID NO: 314442 - protein, 14 aa, Homo sapiens
  CDR3 for beta chain variable domain of TCR clone 157221 (TRBV7-2, TRBJ2-1)
CASSRGGARNEQFF

SEQ ID NO: 314443 - protein, 13 aa, Homo sapiens
  CDR3 for alpha chain variable domain of TCR clone 157222 (TRAV13-1, TRAJ24)
CAASDAAGGNCSL

SEQ ID NO: 314444 - protein, 13 aa, Homo sapiens
  CDR3 for beta chain variable domain of TCR clone 157222 (TRBV4-3, TRBJ2-5)
CASSQGGGETQYF

SEQ ID NO: 314445 - protein, 11 aa, Homo sapiens
  CDR3 for alpha chain variable domain of TCR clone 157223 (TRAV3, TRAJ21)
CAVGNFNKLYF

SEQ ID NO: 314446 - protein, 17 aa, Homo sapiens
  CDR3 for beta chain variable domain of TCR clone 157223 (TRBV24-1, TRBJ2-1)
CATSGVPTSGTYNEQFF

SEQ ID NO: 314447 - protein, 15 aa, Homo sapiens
  CDR3 for alpha chain variable domain of TCR clone 157224 (TRAV12-1, TRAJ45)
CVVLSGGGGADGLTF

SEQ ID NO: 314448 - protein, 14 aa, Homo sapiens
  CDR3 for beta chain variable domain of TCR clone 157224 (TRBV11-2, TRBJ2-5)
CASSRTWGIETQYF

SEQ ID NO: 314449 - protein, 15 aa, Homo sapiens
  CDR3 for alpha chain variable domain of TCR clone 157225 (TRAV8-3, TRAJ45)
CASSYSGGGAEGLTF

SEQ ID NO: 314450 - protein, 13 aa, Homo sapiens
  CDR3 for beta chain variable domain of TCR clone 157225 (TRBV20-1, TRBJ2-2)
CSASAAGTGELFY

SEQ ID NO: 314451 - protein, 15 aa, Homo sapiens
  CDR3 for alpha chain variable domain of TCR clone 157226 (TRAV38-1, TRAJ57)
CAFMDSQGGSEKLVF

SEQ ID NO: 314452 - protein, 14 aa, Homo sapiens
  CDR3 for beta chain variable domain of TCR clone 157226 (TRBV4-1, TRBJ2-5)
CASSHYRDQETQYF

SEQ ID NO: 314453 - protein, 12 aa, Homo sapiens
  CDR3 for alpha chain variable domain of TCR clone 157227 (TRAV1-1, TRAJ39)
CAVPLVGNMLTF

SEQ ID NO: 314454 - protein, 15 aa, Homo sapiens
  CDR3 for beta chain variable domain of TCR clone 157227 (TRBV19, TRBJ1-6)
CASSTQGAVGSPLHF

SEQ ID NO: 314455 - protein, 14 aa, Homo sapiens
  CDR3 for alpha chain variable domain of TCR clone 157228 (TRAV23/DV6, TRAJ28)
CAARSGAGSYQLTF

SEQ ID NO: 314456 - protein, 16 aa, Homo sapiens
  CDR3 for beta chain variable domain of TCR clone 157228 (TRBV11-1, TRBJ2-2)
CASSAEGLKNTGELFF

SEQ ID NO: 314457 - protein, 13 aa, Homo sapiens
  CDR3 for alpha chain variable domain of TCR clone 157229 (TRAV2, TRAJ20)
CAVEDPSAYKLSF

SEQ ID NO: 314458 - protein, 16 aa, Homo sapiens
  CDR3 for beta chain variable domain of TCR clone 157229 (TRBV25-1, TRBJ2-7)
RASSELTGGGIYEQYF

SEQ ID NO: 314459 - protein, 14 aa, Homo sapiens
  CDR3 for alpha chain variable domain of TCR clone 157230 (TRAV8-4, TRAJ8)
CAVSVNTGFQKLVF

SEQ ID NO: 314460 - protein, 15 aa, Homo sapiens
  CDR3 for beta chain variable domain of TCR clone 157230 (TRBV20-1, TRBJ2-3)
CSARRTGLSTDTQCF

SEQ ID NO: 314461 - protein, 14 aa, Homo sapiens
  CDR3 for alpha chain variable domain of TCR clone 157231 (TRAV21, TRAJ3)
CAVTGYSSASKIIF

SEQ ID NO: 314462 - protein, 17 aa, Homo sapiens
  CDR3 for beta chain variable domain of TCR clone 157231 (TRBV28, TRBJ2-5)
RASSRQGGLAGAETQYF

SEQ ID NO: 314463 - protein, 15 aa, Homo sapiens
  CDR3 for alpha chain variable domain of TCR clone 157232 (TRAV3, TRAJ23)
CAVRDRGNQGGKLIF

SEQ ID NO: 314464 - protein, 15 aa, Homo sapiens
  CDR3 for beta chain variable domain of TCR clone 157232 (TRBV7-3, TRBJ2-1)
CQQLAPSGSCNEQFF

SEQ ID NO: 314465 - protein, 15 aa, Homo sapiens
  CDR3 for alpha chain variable domain of TCR clone 157233 (TRAV13-1, TRAJ17)
SAASIERAAGNKLTF

SEQ ID NO: 314466 - protein, 12 aa, Homo sapiens
  CDR3 for beta chain variable domain of TCR clone 157233 (TRBV5-7, TRBJ1-1)
CASSLGRGKAFF

SEQ ID NO: 314467 - protein, 11 aa, Homo sapiens
  CDR3 for alpha chain variable domain of TCR clone 157234 (TRAV35, TRAJ34)
CWARNTDKLIF

SEQ ID NO: 314468 - protein, 13 aa, Homo sapiens
  CDR3 for beta chain variable domain of TCR clone 157234 (TRBV7-2, TRBJ2-4)
CASSQEHANIQYF

SEQ ID NO: 314469 - protein, 15 aa, Homo sapiens
  CDR3 for alpha chain variable domain of TCR clone 157235 (TRAV26-1, TRAJ22)
CIVRVSFWFCKATDL

SEQ ID NO: 314470 - protein, 16 aa, Homo sapiens
  CDR3 for beta chain variable domain of TCR clone 157235 (TRBV24-1, TRBJ2-3)
CATSYPGTGATDTQYF

SEQ ID NO: 314471 - protein, 14 aa, Homo sapiens
  CDR3 for alpha chain variable domain of TCR clone 157236 (TRAV27, TRAJ23)
CAGLSYNQGGKLMF

SEQ ID NO: 314472 - protein, 15 aa, Homo sapiens
  CDR3 for beta chain variable domain of TCR clone 157236 (TRBV19, TRBJ2-2)
CASSLNRGVTGELFF

SEQ ID NO: 314473 - protein, 15 aa, Homo sapiens
  CDR3 for alpha chain variable domain of TCR clone 157237 (TRAV29/DV5, TRAJ29)
CAASERSPGDTPLVF

SEQ ID NO: 314474 - protein, 17 aa, Homo sapiens
  CDR3 for beta chain variable domain of TCR clone 157237 (TRBV4-1, TRBJ1-4)
CASSQEGPRGVEEKLFF

SEQ ID NO: 314475 - protein, 20 aa, Homo sapiens
  CDR3 for alpha chain variable domain of TCR clone 157238 (TRAV12-1, TRAJ42)
SSVIQPPTSVKGGSQGNLIF

SEQ ID NO: 314476 - protein, 14 aa, Homo sapiens
  CDR3 for beta chain variable domain of TCR clone 157238 (TRBV25-1, TRBJ1-2)
CASSDTTGVVGYTC

SEQ ID NO: 314477 - protein, 14 aa, Homo sapiens
  CDR3 for alpha chain variable domain of TCR clone 157239 (TRAV12-1, TRAJ17)
CVENYKAAGNKLTF

SEQ ID NO: 314478 - protein, 17 aa, Homo sapiens
  CDR3 for beta chain variable domain of TCR clone 157239 (TRBV20-1, TRBJ2-1)
CSASSSGLAGSYNEQFF

SEQ ID NO: 314479 - protein, 13 aa, Homo sapiens
  CDR3 for alpha chain variable domain of TCR clone 157240 (TRAV27, TRAJ41)
RAGEGNSGYALNF

SEQ ID NO: 314480 - protein, 19 aa, Homo sapiens
  CDR3 for beta chain variable domain of TCR clone 157240 (TRBV25-1, TRBJ2-2)
CAILVYRVDRGRKTGELFF

SEQ ID NO: 314481 - protein, 15 aa, Homo sapiens
  CDR3 for alpha chain variable domain of TCR clone 157241 (TRAV8-3, TRAJ45)
CASSYSGGGAGGLTF

SEQ ID NO: 314482 - protein, 17 aa, Homo sapiens
  CDR3 for beta chain variable domain of TCR clone 157241 (TRBV5-1, TRBJ2-2)
CASSLAGLSGGAGELFF

SEQ ID NO: 314483 - protein, 14 aa, Homo sapiens
  CDR3 for alpha chain variable domain of TCR clone 157242 (TRAV23/DV6, TRAJ8)
CAASKATGFHKLVF

SEQ ID NO: 314484 - protein, 13 aa, Homo sapiens
  CDR3 for beta chain variable domain of TCR clone 157242 (TRBV11-3, TRBJ2-5)
CASSSGLQETQYF

SEQ ID NO: 314485 - protein, 17 aa, Homo sapiens
  CDR3 for alpha chain variable domain of TCR clone 157243 (TRAV26-2, TRAJ42)
FILRDVGYGGSQGSLIF

SEQ ID NO: 314486 - protein, 16 aa, Homo sapiens
  CDR3 for beta chain variable domain of TCR clone 157243 (TRBV12-4, TRBJ2-7)
CASSLIGGTGTYEQYF

SEQ ID NO: 314487 - protein, 19 aa, Homo sapiens
  CDR3 for alpha chain variable domain of TCR clone 157244 (TRAV26-1, TRAJ38)
CIADNAGNNHIQNPAPAVY

SEQ ID NO: 314488 - protein, 15 aa, Homo sapiens
  CDR3 for beta chain variable domain of TCR clone 157244 (TRBV27, TRBJ2-1)
CASSNGGGSSNEQFF

SEQ ID NO: 314489 - protein, 10 aa, Homo sapiens
  CDR3 for alpha chain variable domain of TCR clone 157245 (TRAV26-2, TRAJ20)
CIQNDYKLSF

SEQ ID NO: 314490 - protein, 13 aa, Homo sapiens
  CDR3 for beta chain variable domain of TCR clone 157245 (TRBV12-4, TRBJ2-2)
CASSITGSGELFF

SEQ ID NO: 314491 - protein, 10 aa, Homo sapiens
  CDR3 for alpha chain variable domain of TCR clone 157246 (TRAV16, TRAJ22)
SAMYLRQLTF

SEQ ID NO: 314492 - protein, 15 aa, Homo sapiens
  CDR3 for beta chain variable domain of TCR clone 157246 (TRBV7-9, TRBJ1-6)
CASSSPGRGISPLHF

SEQ ID NO: 314493 - protein, 12 aa, Homo sapiens
  CDR3 for alpha chain variable domain of TCR clone 157247 (TRAV12-3, TRAJ17)
CAMTLTGNKLTF

SEQ ID NO: 314494 - protein, 16 aa, Homo sapiens
  CDR3 for beta chain variable domain of TCR clone 157247 (TRBV20-1, TRBJ1-4)
CSAPGQGLLTNENLFF

SEQ ID NO: 314495 - protein, 19 aa, Homo sapiens
  CDR3 for alpha chain variable domain of TCR clone 157248 (TRAV3, TRAJ37)
CAVRDIVGGYPSNTGKLIF

SEQ ID NO: 314496 - protein, 14 aa, Homo sapiens
  CDR3 for beta chain variable domain of TCR clone 157248 (TRBV7-8, TRBJ2-3)
CASSLEAGKDTQYF

SEQ ID NO: 314497 - protein, 14 aa, Homo sapiens
  CDR3 for alpha chain variable domain of TCR clone 157249 (TRAV8-4, TRAJ13)
CAVTLSGGYQKVTF

SEQ ID NO: 314498 - protein, 13 aa, Homo sapiens
  CDR3 for beta chain variable domain of TCR clone 157249 (TRBV11-2, TRBJ2-1)
CASSLGLAGGRFF

SEQ ID NO: 314499 - protein, 12 aa, Homo sapiens
  CDR3 for alpha chain variable domain of TCR clone 157250 (TRAV16, TRAJ26)
YALRSYGQNFVF

SEQ ID NO: 314500 - protein, 13 aa, Homo sapiens
  CDR3 for beta chain variable domain of TCR clone 157250 (TRBV12-4, TRBJ1-1)
CASSPGTGFEAFF

SEQ ID NO: 314501 - protein, 17 aa, Homo sapiens
  CDR3 for alpha chain variable domain of TCR clone 157251 (TRAV3, TRAJ6)
CAVREGPRAGGSYIPTF

SEQ ID NO: 314502 - protein, 14 aa, Homo sapiens
  CDR3 for beta chain variable domain of TCR clone 157251 (TRBV7-2, TRBJ2-7)
CASSPKTSFYERYF

SEQ ID NO: 314503 - protein, 13 aa, Homo sapiens
  CDR3 for alpha chain variable domain of TCR clone 157252 (TRAV14/DV4, TRAJ22)
CAMRDLSARQLTF

SEQ ID NO: 314504 - protein, 18 aa, Homo sapiens
  CDR3 for beta chain variable domain of TCR clone 157252 (TRBV19, TRBJ1-5)
CASSKGQVSIHSNQLQHF

SEQ ID NO: 314505 - protein, 14 aa, Homo sapiens
  CDR3 for alpha chain variable domain of TCR clone 157253 (TRAV9-2, TRAJ39)
CALYIYNAGNMLTF

SEQ ID NO: 314506 - protein, 15 aa, Homo sapiens
  CDR3 for beta chain variable domain of TCR clone 157253 (TRBV2, TRBJ1-4)
CASSERRGTNEKLFF

SEQ ID NO: 314507 - protein, 12 aa, Homo sapiens
  CDR3 for alpha chain variable domain of TCR clone 157254 (TRAV25, TRAJ7)
CAGSYGNNRLAF

SEQ ID NO: 314508 - protein, 12 aa, Homo sapiens
  CDR3 for beta chain variable domain of TCR clone 157254 (TRBV5-1, TRBJ1-2)
CASSQDTYGYTV

SEQ ID NO: 314509 - protein, 14 aa, Homo sapiens
  CDR3 for alpha chain variable domain of TCR clone 157255 (TRAV8-4, TRAJ13)
CAVTLSGGYQKVTF

SEQ ID NO: 314510 - protein, 18 aa, Homo sapiens
  CDR3 for beta chain variable domain of TCR clone 157255 (TRBV5-1, TRBJ1-6)
CASSVGGGYGERNSPLHF

SEQ ID NO: 314511 - protein, 13 aa, Homo sapiens
  CDR3 for alpha chain variable domain of TCR clone 157256 (TRAV6, TRAJ12)
CSEVLDSSYKLIF

SEQ ID NO: 314512 - protein, 14 aa, Homo sapiens
  CDR3 for beta chain variable domain of TCR clone 157256 (TRBV5-7, TRBJ1-1)
CASSLAGDWTEAFF

SEQ ID NO: 314513 - protein, 15 aa, Homo sapiens
  CDR3 for alpha chain variable domain of TCR clone 157257 (TRAV13-2, TRAJ10)
CAENRDTGGGNKLTF

SEQ ID NO: 314514 - protein, 16 aa, Homo sapiens
  CDR3 for beta chain variable domain of TCR clone 157257 (TRBV2, TRBJ1-3)
CASSRTGGSTGNTIYV

SEQ ID NO: 314515 - protein, 10 aa, Homo sapiens
  CDR3 for alpha chain variable domain of TCR clone 157258 (TRAV8-1, TRAJ21)
CAVNGTKFYF

SEQ ID NO: 314516 - protein, 14 aa, Homo sapiens
  CDR3 for beta chain variable domain of TCR clone 157258 (TRBV5-1, TRBJ2-3)
CASSRGQGGGTQYF

SEQ ID NO: 314517 - protein, 14 aa, Homo sapiens
  CDR3 for alpha chain variable domain of TCR clone 157259 (TRAV1-2, TRAJ16)
CGVNRFSDGQKLLF

SEQ ID NO: 314518 - protein, 15 aa, Homo sapiens
  CDR3 for beta chain variable domain of TCR clone 157259 (TRBV9, TRBJ1-6)
CASSVAGTGDSPLHF

SEQ ID NO: 314519 - protein, 13 aa, Homo sapiens
  CDR3 for alpha chain variable domain of TCR clone 157260 (TRAV13-1, TRAJ9)
CAARITGGFKTIF

SEQ ID NO: 314520 - protein, 13 aa, Homo sapiens
  CDR3 for beta chain variable domain of TCR clone 157260 (TRBV7-9, TRBJ2-7)
CASSFAGAYEQYF

SEQ ID NO: 314521 - protein, 12 aa, Homo sapiens
  CDR3 for alpha chain variable domain of TCR clone 157261 (TRAV3, TRAJ43)
CAVRDPNNDRRF

SEQ ID NO: 314522 - protein, 15 aa, Homo sapiens
  CDR3 for beta chain variable domain of TCR clone 157261 (TRBV6-5, TRBJ2-1)
CASSYDAGAGNEQFF

SEQ ID NO: 314523 - protein, 14 aa, Homo sapiens
  CDR3 for alpha chain variable domain of TCR clone 157262 (TRAV12-2, TRAJ17)
CAVNIKAAGNKLPF

SEQ ID NO: 314524 - protein, 16 aa, Homo sapiens
  CDR3 for beta chain variable domain of TCR clone 157262 (TRBV20-1, TRBJ2-6)
CSASSQGYDGANDLTF

SEQ ID NO: 314525 - protein, 16 aa, Homo sapiens
  CDR3 for alpha chain variable domain of TCR clone 157263 (TRAV12-1, TRAJ22)
CVVNTISSGSARPLTF

SEQ ID NO: 314526 - protein, 13 aa, Homo sapiens
  CDR3 for beta chain variable domain of TCR clone 157263 (TRBV19, TRBJ2-1)
CASNGGVFSEQFF

SEQ ID NO: 314527 - protein, 11 aa, Homo sapiens
  CDR3 for alpha chain variable domain of TCR clone 157264 (TRAV2, TRAJ33)
CAVDSNYQLIW

SEQ ID NO: 314528 - protein, 19 aa, Homo sapiens
  CDR3 for beta chain variable domain of TCR clone 157264 (TRBV7-3, TRBJ2-7)
CASSLTGVAGGWPSYEQYF

SEQ ID NO: 314529 - protein, 15 aa, Homo sapiens
  CDR3 for alpha chain variable domain of TCR clone 157265 (TRAV25, TRAJ53)
CAATGGGGSNYKLTF

SEQ ID NO: 314530 - protein, 11 aa, Homo sapiens
  CDR3 for beta chain variable domain of TCR clone 157265 (TRBV11-3, TRBJ2-2)
CASSSGGELYF

SEQ ID NO: 314531 - protein, 13 aa, Homo sapiens
  CDR3 for alpha chain variable domain of TCR clone 157266 (TRAV35, TRAJ58)
CAGLETSGSRLTF

SEQ ID NO: 314532 - protein, 15 aa, Homo sapiens
  CDR3 for beta chain variable domain of TCR clone 157266 (TRBV20-1, TRBJ2-1)
CSARFSEGGLNEQFF

SEQ ID NO: 314533 - protein, 14 aa, Homo sapiens
  CDR3 for alpha chain variable domain of TCR clone 157267 (TRAV14/DV4, TRAJ54)
CAMREPQGAQKLVF

SEQ ID NO: 314534 - protein, 16 aa, Homo sapiens
  CDR3 for beta chain variable domain of TCR clone 157267 (TRBV5-1, TRBJ2-2)
CASSSRTGGRTGELFF

SEQ ID NO: 314535 - protein, 12 aa, Homo sapiens
  CDR3 for alpha chain variable domain of TCR clone 157268 (TRAV13-1, TRAJ48)
CAAKFGNEKLTF

SEQ ID NO: 314536 - protein, 13 aa, Homo sapiens
  CDR3 for beta chain variable domain of TCR clone 157268 (TRBV7-3, TRBJ1-1)
CASSQDWGAEAFF

SEQ ID NO: 314537 - protein, 17 aa, Homo sapiens
  CDR3 for alpha chain variable domain of TCR clone 157269 (TRAV26-2, TRAJ42)
CILRDESYGGSQGNLIF

SEQ ID NO: 314538 - protein, 15 aa, Homo sapiens
  CDR3 for beta chain variable domain of TCR clone 157269 (TRBV6-6, TRBJ2-7)
CASSYSYGGYYEQYF

SEQ ID NO: 314539 - protein, 12 aa, Homo sapiens
  CDR3 for alpha chain variable domain of TCR clone 157270 (TRAV3, TRAJ20)
CAVRAPDYKLSF

SEQ ID NO: 314540 - protein, 14 aa, Homo sapiens
  CDR3 for beta chain variable domain of TCR clone 157270 (TRBV4-2, TRBJ2-1)
CASGPDRAYNEQFF

SEQ ID NO: 314541 - protein, 12 aa, Homo sapiens
  CDR3 for alpha chain variable domain of TCR clone 157271 (TRAV23/DV6, TRAJ16)
CAATGTGQTLLF

SEQ ID NO: 314542 - protein, 15 aa, Homo sapiens
  CDR3 for beta chain variable domain of TCR clone 157271 (TRBV28, TRBJ1-2)
CASSSYRGLVYGYTF

SEQ ID NO: 314543 - protein, 15 aa, Homo sapiens
  CDR3 for alpha chain variable domain of TCR clone 157272 (TRAV21, TRAJ24)
CAARSSTDSWGKLQF

SEQ ID NO: 314544 - protein, 13 aa, Homo sapiens
  CDR3 for beta chain variable domain of TCR clone 157272 (TRBV11-2, TRBJ2-5)
CDSSSTGEETQYF

SEQ ID NO: 314545 - protein, 15 aa, Homo sapiens
  CDR3 for alpha chain variable domain of TCR clone 157273 (TRAV21, TRAJ52)
CAVRGGGTSYGKLTF

SEQ ID NO: 314546 - protein, 20 aa, Homo sapiens
  CDR3 for beta chain variable domain of TCR clone 157273 (TRBV7-8, TRBJ2-2)
CASSHLFPGPTIHITGELFF

SEQ ID NO: 314547 - protein, 17 aa, Homo sapiens
  CDR3 for alpha chain variable domain of TCR clone 157274 (TRAV12-2, TRAJ52)
CAVNPYAGGTSYGKLTF

SEQ ID NO: 314548 - protein, 12 aa, Homo sapiens
  CDR3 for beta chain variable domain of TCR clone 157274 (TRBV7-2, TRBJ2-5)
CAGSLYGETQYF

SEQ ID NO: 314549 - protein, 18 aa, Homo sapiens
  CDR3 for alpha chain variable domain of TCR clone 157275 (TRAV29/DV5, TRAJ52)
CAAGFRGAGGTSYGKLTF

SEQ ID NO: 314550 - protein, 13 aa, Homo sapiens
  CDR3 for beta chain variable domain of TCR clone 157275 (TRBV11-2, TRBJ1-3)
CASSPTGGNTIYF

SEQ ID NO: 314551 - protein, 16 aa, Homo sapiens
  CDR3 for alpha chain variable domain of TCR clone 157276 (TRAV30, TRAJ24)
CGTVIVDADSWGKFQF

SEQ ID NO: 314552 - protein, 15 aa, Homo sapiens
  CDR3 for beta chain variable domain of TCR clone 157276 (TRBV20-1, TRBJ2-7)
CSARDRVSGMDEQYF

SEQ ID NO: 314553 - protein, 14 aa, Homo sapiens
  CDR3 for alpha chain variable domain of TCR clone 157277 (TRAV12-2, TRAJ40)
CAVKIPSGTYKYIF

SEQ ID NO: 314554 - protein, 13 aa, Homo sapiens
  CDR3 for beta chain variable domain of TCR clone 157277 (TRBV20-1, TRBJ2-5)
CSARGDYQETQYF

SEQ ID NO: 314555 - protein, 12 aa, Homo sapiens
  CDR3 for alpha chain variable domain of TCR clone 157278 (TRAV17, TRAJ4)
CATDGGYNKLIF

SEQ ID NO: 314556 - protein, 16 aa, Homo sapiens
  CDR3 for beta chain variable domain of TCR clone 157278 (TRBV11-1, TRBJ1-1)
CASSPRGAHMNSEAFF

SEQ ID NO: 314557 - protein, 10 aa, Homo sapiens
  CDR3 for alpha chain variable domain of TCR clone 157279 (TRAV12-3, TRAJ49)
CAMNDDQFYF

SEQ ID NO: 314558 - protein, 13 aa, Homo sapiens
  CDR3 for beta chain variable domain of TCR clone 157279 (TRBV12-4, TRBJ1-1)
CASSPGTDFEAFF

SEQ ID NO: 314559 - protein, 19 aa, Homo sapiens
  CDR3 for alpha chain variable domain of TCR clone 157280 (TRAV13-1, TRAJ52)
CAASPYQNAGGTSHGKLTF

SEQ ID NO: 314560 - protein, 14 aa, Homo sapiens
  CDR3 for beta chain variable domain of TCR clone 157280 (TRBV19, TRBJ2-7)
CASTVQGRPYEQYF

SEQ ID NO: 314561 - protein, 14 aa, Homo sapiens
  CDR3 for alpha chain variable domain of TCR clone 157281 (TRAV27, TRAJ37)
CAGERSSNTGKIIF

SEQ ID NO: 314562 - protein, 15 aa, Homo sapiens
  CDR3 for beta chain variable domain of TCR clone 157281 (TRBV11-3, TRBJ1-6)
CASSLDWGANSPLHF

SEQ ID NO: 314563 - protein, 23 aa, Homo sapiens
  CDR3 for alpha chain variable domain of TCR clone 157282 (TRAV20, TRAJ32)
CAVDGMVVLQASSSLELALCLLY

SEQ ID NO: 314564 - protein, 16 aa, Homo sapiens
  CDR3 for beta chain variable domain of TCR clone 157282 (TRBV19, TRBJ2-2)
CASRSPGTGATGELFF

SEQ ID NO: 314565 - protein, 14 aa, Homo sapiens
  CDR3 for alpha chain variable domain of TCR clone 157283 (TRAV1-2, TRAJ16)
CAVNRFSDGQKLLF

SEQ ID NO: 314566 - protein, 16 aa, Homo sapiens
  CDR3 for beta chain variable domain of TCR clone 157283 (TRBV4-2, TRBJ1-2)
CASSQEIGGASYGYTF

SEQ ID NO: 314567 - protein, 12 aa, Homo sapiens
  CDR3 for alpha chain variable domain of TCR clone 157284 (TRAV1-1, TRAJ23)
RAVTNQGGKLIF

SEQ ID NO: 314568 - protein, 16 aa, Homo sapiens
  CDR3 for beta chain variable domain of TCR clone 157284 (TRBV7-3, TRBJ2-2)
CASSLKRGTLSGELFF

SEQ ID NO: 314569 - protein, 13 aa, Homo sapiens
  CDR3 for alpha chain variable domain of TCR clone 157285 (TRAV13-2, TRAJ8)
CAFMNTGFQTLVF

SEQ ID NO: 314570 - protein, 17 aa, Homo sapiens
  CDR3 for beta chain variable domain of TCR clone 157285 (TRBV28, TRBJ2-1)
CASSSARQALTYNEQFF

SEQ ID NO: 314571 - protein, 12 aa, Homo sapiens
  CDR3 for alpha chain variable domain of TCR clone 157286 (TRAV16, TRAJ10)
CSRTGGGNKLTF

SEQ ID NO: 314572 - protein, 16 aa, Homo sapiens
  CDR3 for beta chain variable domain of TCR clone 157286 (TRBV7-3, TRBJ2-2)
CASSLKRGTLSVELFF

SEQ ID NO: 314573 - protein, 11 aa, Homo sapiens
  CDR3 for alpha chain variable domain of TCR clone 157287 (TRAV2, TRAJ13)
CASGGYQQVTF

SEQ ID NO: 314574 - protein, 17 aa, Homo sapiens
  CDR3 for beta chain variable domain of TCR clone 157287 (TRBV20-1, TRBJ2-2)
CSASGSGQGGLTGELFF

SEQ ID NO: 314575 - protein, 19 aa, Homo sapiens
  CDR3 for alpha chain variable domain of TCR clone 157288 (TRAV26-1, TRAJ28)
CIVRVAHAYSGAGSYQLTF

SEQ ID NO: 314576 - protein, 15 aa, Homo sapiens
  CDR3 for beta chain variable domain of TCR clone 157288 (TRBV5-1, TRBJ1-3)
CASGSKTGAGNTIYF

SEQ ID NO: 314577 - protein, 19 aa, Homo sapiens
  CDR3 for alpha chain variable domain of TCR clone 157289 (TRAV2, TRAJ32)
TTVLSTPPSKGGATNKLIF

SEQ ID NO: 314578 - protein, 12 aa, Homo sapiens
  CDR3 for beta chain variable domain of TCR clone 157289 (TRBV20-1, TRBJ2-7)
CSAITPTKEQYF

SEQ ID NO: 314579 - protein, 15 aa, Homo sapiens
  CDR3 for alpha chain variable domain of TCR clone 157290 (TRAV21, TRAJ24)
CAARSSTDSWGKLQF

SEQ ID NO: 314580 - protein, 13 aa, Homo sapiens
  CDR3 for beta chain variable domain of TCR clone 157290 (TRBV11-2, TRBJ2-5)
CASSATGEETQNF

SEQ ID NO: 314581 - protein, 16 aa, Homo sapiens
  CDR3 for alpha chain variable domain of TCR clone 157291 (TRAV13-2, TRAJ37)
CAENIRGSSNTGKLIF

SEQ ID NO: 314582 - protein, 15 aa, Homo sapiens
  CDR3 for beta chain variable domain of TCR clone 157291 (TRBV7-9, TRBJ2-7)
CASSLALAEAYEQYF

SEQ ID NO: 314583 - protein, 12 aa, Homo sapiens
  CDR3 for alpha chain variable domain of TCR clone 157292 (TRAV17, TRAJ20)
CATDSNDYKLSF

SEQ ID NO: 314584 - protein, 14 aa, Homo sapiens
  CDR3 for beta chain variable domain of TCR clone 157292 (TRBV2, TRBJ2-1)
CASRTGSSYNEQFF

SEQ ID NO: 314585 - protein, 13 aa, Homo sapiens
  CDR3 for alpha chain variable domain of TCR clone 157293 (TRAV27, TRAJ17)
CAGAATACNKLTF

SEQ ID NO: 314586 - protein, 15 aa, Homo sapiens
  CDR3 for beta chain variable domain of TCR clone 157293 (TRBV5-1, TRBJ2-3)
CASRNQAGSTDTQYF

SEQ ID NO: 314587 - protein, 15 aa, Homo sapiens
  CDR3 for alpha chain variable domain of TCR clone 157294 (TRAV3, TRAJ5)
CAVRDLDTGRRALTF

SEQ ID NO: 314588 - protein, 15 aa, Homo sapiens
  CDR3 for beta chain variable domain of TCR clone 157294 (TRBV12-4, TRBJ1-2)
CASSPITGGGYGYTF

SEQ ID NO: 314589 - protein, 11 aa, Homo sapiens
  CDR3 for alpha chain variable domain of TCR clone 157295 (TRAV2, TRAJ13)
CASGGYQKVTF

SEQ ID NO: 314590 - protein, 12 aa, Homo sapiens
  CDR3 for beta chain variable domain of TCR clone 157295 (TRBV28, TRBJ2-7)
CASSFSSYEQYF

SEQ ID NO: 314591 - protein, 13 aa, Homo sapiens
  CDR3 for alpha chain variable domain of TCR clone 157296 (TRAV21, TRAJ45)
CAVMVGGADGLTF

SEQ ID NO: 314592 - protein, 16 aa, Homo sapiens
  CDR3 for beta chain variable domain of TCR clone 157296 (TRBV20-1, TRBJ2-1)
CSARDHLAGGRGEQFF

SEQ ID NO: 314593 - protein, 12 aa, Homo sapiens
  CDR3 for alpha chain variable domain of TCR clone 157297 (TRAV26-1, TRAJ26)
CIVFIYGQNFVF

SEQ ID NO: 314594 - protein, 13 aa, Homo sapiens
  CDR3 for beta chain variable domain of TCR clone 157297 (TRBV19, TRBJ2-7)
CAISPRQSYEQYF

SEQ ID NO: 314595 - protein, 14 aa, Homo sapiens
  CDR3 for alpha chain variable domain of TCR clone 157298 (TRAV4, TRAJ17)
CLVGDMSAGNKLTF

SEQ ID NO: 314596 - protein, 14 aa, Homo sapiens
  CDR3 for beta chain variable domain of TCR clone 157298 (TRBV7-6, TRBJ2-3)
CASSLGTVTDTQYF

SEQ ID NO: 314597 - protein, 11 aa, Homo sapiens
  CDR3 for alpha chain variable domain of TCR clone 157299 (TRAV2, TRAJ13)
CASGGYQKVTI

SEQ ID NO: 314598 - protein, 16 aa, Homo sapiens
  CDR3 for beta chain variable domain of TCR clone 157299 (TRBV19, TRBJ1-5)
CASSIDRGGPRQPQHF

SEQ ID NO: 314599 - protein, 13 aa, Homo sapiens
  CDR3 for alpha chain variable domain of TCR clone 157300 (TRAV12-3, TRAJ13)
CAMGTGGYQKVTF

SEQ ID NO: 314600 - protein, 13 aa, Homo sapiens
  CDR3 for beta chain variable domain of TCR clone 157300 (TRBV7-3, TRBJ1-2)
CASSLKRGYGYTF

SEQ ID NO: 314601 - protein, 15 aa, Homo sapiens
  CDR3 for alpha chain variable domain of TCR clone 157301 (TRAV1-2, TRAJ30)
CAVRPHGNRDDKSIF

SEQ ID NO: 314602 - protein, 15 aa, Homo sapiens
  CDR3 for beta chain variable domain of TCR clone 157301 (TRBV10-3, TRBJ2-1)
CAIRNGTSGHNEQFF

SEQ ID NO: 314603 - protein, 17 aa, Homo sapiens
  CDR3 for alpha chain variable domain of TCR clone 157302 (TRAV3, TRAJ6)
CAVRDGPRAGGSYIPTF

SEQ ID NO: 314604 - protein, 14 aa, Homo sapiens
  CDR3 for beta chain variable domain of TCR clone 157302 (TRBV28, TRBJ2-1)
CASSIQGTVGEQFF

SEQ ID NO: 314605 - protein, 14 aa, Homo sapiens
  CDR3 for alpha chain variable domain of TCR clone 157303 (TRAV12-2, TRAJ45)
CSVDIGGGADGLTF

SEQ ID NO: 314606 - protein, 13 aa, Homo sapiens
  CDR3 for beta chain variable domain of TCR clone 157303 (TRBV19, TRBJ2-2)
CASSIWSTGELFF

SEQ ID NO: 314607 - protein, 15 aa, Homo sapiens
  CDR3 for alpha chain variable domain of TCR clone 157304 (TRAV20, TRAJ53)
CAVQASGGSNYNLTF

SEQ ID NO: 314608 - protein, 12 aa, Homo sapiens
  CDR3 for beta chain variable domain of TCR clone 157304 (TRBV7-6, TRBJ2-5)
RASSLSQETQYF

SEQ ID NO: 314609 - protein, 16 aa, Homo sapiens
  CDR3 for alpha chain variable domain of TCR clone 157305 (TRAV14/DV4, TRAJ17)
CAMREAGRAAGNKLTF

SEQ ID NO: 314610 - protein, 14 aa, Homo sapiens
  CDR3 for beta chain variable domain of TCR clone 157305 (TRBV7-3, TRBJ2-1)
CASSLAGGTNEQFF

SEQ ID NO: 314611 - protein, 14 aa, Homo sapiens
  CDR3 for alpha chain variable domain of TCR clone 157306 (TRAV17, TRAJ6)
CATVFQGGSYIPTF

SEQ ID NO: 314612 - protein, 15 aa, Homo sapiens
  CDR3 for beta chain variable domain of TCR clone 157306 (TRBV7-2, TRBJ2-1)
CASSFQADEYNEQFF

SEQ ID NO: 314613 - protein, 15 aa, Homo sapiens
  CDR3 for alpha chain variable domain of TCR clone 157307 (TRAV25, TRAJ53)
CAATGGGGSNYKLTF

SEQ ID NO: 314614 - protein, 14 aa, Homo sapiens
  CDR3 for beta chain variable domain of TCR clone 157307 (TRBV7-6, TRBJ2-3)
CASSLGTVTDTQYF

SEQ ID NO: 314615 - protein, 12 aa, Homo sapiens
  CDR3 for alpha chain variable domain of TCR clone 157308 (TRAV21, TRAJ33)
CSVQDSNYQLIW

SEQ ID NO: 314616 - protein, 14 aa, Homo sapiens
  CDR3 for beta chain variable domain of TCR clone 157308 (TRBV28, TRBJ2-1)
CASSPGEGGNEQFF

SEQ ID NO: 314617 - protein, 11 aa, Homo sapiens
  CDR3 for alpha chain variable domain of TCR clone 157309 (TRAV13-1, TRAJ8)
CAARGFQKLVF

SEQ ID NO: 314618 - protein, 16 aa, Homo sapiens
  CDR3 for beta chain variable domain of TCR clone 157309 (TRBV19, TRBJ1-5)
CASSTRGTGSNQPQHF

SEQ ID NO: 314619 - protein, 17 aa, Homo sapiens
  CDR3 for alpha chain variable domain of TCR clone 157310 (TRAV26-1, TRAJ53)
CIVRVDASGGSNYKLTF

SEQ ID NO: 314620 - protein, 19 aa, Homo sapiens
  CDR3 for beta chain variable domain of TCR clone 157310 (TRBV25-1, TRBJ2-2)
CAILVYRVDRGRKTGELFL

SEQ ID NO: 314621 - protein, 15 aa, Homo sapiens
  CDR3 for alpha chain variable domain of TCR clone 157311 (TRAV3, TRAJ12)
CAVRDIRDRSYKLIF

SEQ ID NO: 314622 - protein, 15 aa, Homo sapiens
  CDR3 for beta chain variable domain of TCR clone 157311 (TRBV27, TRBJ2-7)
CASSLRNEQGYEQYF

SEQ ID NO: 314623 - protein, 14 aa, Homo sapiens
  CDR3 for alpha chain variable domain of TCR clone 157312 (TRAV12-2, TRAJ17)
CAVNIKAAGNKLTF

SEQ ID NO: 314624 - protein, 15 aa, Homo sapiens
  CDR3 for beta chain variable domain of TCR clone 157312 (TRBV7-2, TRBJ2-1)
CASSSRTSREDEQFF

SEQ ID NO: 314625 - protein, 13 aa, Homo sapiens
  CDR3 for alpha chain variable domain of TCR clone 157313 (TRAV9-2, TRAJ4)
CVIRSGGYNKLIF

SEQ ID NO: 314626 - protein, 12 aa, Homo sapiens
  CDR3 for beta chain variable domain of TCR clone 157313 (TRBV11-2, TRBJ2-2)
CASSLGGGELFF

SEQ ID NO: 314627 - protein, 15 aa, Homo sapiens
  CDR3 for alpha chain variable domain of TCR clone 157314 (TRAV8-2, TRAJ16)
CVVSDGVSDGQKLLF

SEQ ID NO: 314628 - protein, 13 aa, Homo sapiens
  CDR3 for beta chain variable domain of TCR clone 157314 (TRBV20-1, TRBJ1-1)
CSAPPGGHTEAFF

SEQ ID NO: 314629 - protein, 12 aa, Homo sapiens
  CDR3 for alpha chain variable domain of TCR clone 157315 (TRAV16, TRAJ27)
CALNTNAGKSTF

SEQ ID NO: 314630 - protein, 14 aa, Homo sapiens
  CDR3 for beta chain variable domain of TCR clone 157315 (TRBV20-1, TRBJ1-1)
CSAQTRIGGTEAFF

SEQ ID NO: 314631 - protein, 10 aa, Homo sapiens
  CDR3 for alpha chain variable domain of TCR clone 157316 (TRAV27, TRAJ28)
SGAGSYQLTF

SEQ ID NO: 314632 - protein, 13 aa, Homo sapiens
  CDR3 for beta chain variable domain of TCR clone 157316 (TRBV7-3, TRBJ2-3)
CASSLRGSQTQYF

SEQ ID NO: 314633 - protein, 23 aa, Homo sapiens
  CDR3 for alpha chain variable domain of TCR clone 157317 (TRAV26-1, TRAJ5)
CIVRVVPPRDTGRRALTLGVEQD

SEQ ID NO: 314634 - protein, 15 aa, Homo sapiens
  CDR3 for beta chain variable domain of TCR clone 157317 (TRBV7-9, TRBJ2-7)
CASSLPMGQANEQYF

SEQ ID NO: 314635 - protein, 22 aa, Homo sapiens
  CDR3 for alpha chain variable domain of TCR clone 157318 (TRAV27, TRAJ38)
CAARRNAGNNHIQNPDPAVYQL

SEQ ID NO: 314636 - protein, 13 aa, Homo sapiens
  CDR3 for beta chain variable domain of TCR clone 157318 (TRBV12-5, TRBJ2-3)
CASGHRQSDTQYF

SEQ ID NO: 314637 - protein, 18 aa, Homo sapiens
  CDR3 for alpha chain variable domain of TCR clone 157319 (TRAV4, TRAJ22)
CLVGDINYFFWVCKATDL

SEQ ID NO: 314638 - protein, 13 aa, Homo sapiens
  CDR3 for beta chain variable domain of TCR clone 157319 (TRBV19, TRBJ1-5)
CASSEGSNQPQHF

SEQ ID NO: 314639 - protein, 14 aa, Homo sapiens
  CDR3 for alpha chain variable domain of TCR clone 157320 (TRAV1-2, TRAJ8)
CAVREDTGFQELVF

SEQ ID NO: 314640 - protein, 13 aa, Homo sapiens
  CDR3 for beta chain variable domain of TCR clone 157320 (TRBV11-2, TRBJ2-5)
CASSRGPSETQYF

SEQ ID NO: 314641 - protein, 12 aa, Homo sapiens
  CDR3 for alpha chain variable domain of TCR clone 157321 (TRAV30, TRAJ43)
CGTEERGNDMRF

SEQ ID NO: 314642 - protein, 12 aa, Homo sapiens
  CDR3 for beta chain variable domain of TCR clone 157321 (TRBV27, TRBJ2-7)
CSSFSQGYEQYF

SEQ ID NO: 314643 - protein, 12 aa, Homo sapiens
  CDR3 for alpha chain variable domain of TCR clone 157322 (TRAV38-1, TRAJ47)
CAFETYGNKLVF

SEQ ID NO: 314644 - protein, 17 aa, Homo sapiens
  CDR3 for beta chain variable domain of TCR clone 157322 (TRBV7-8, TRBJ1-2)
CASSLRPLQGHLYGYTF

SEQ ID NO: 314645 - protein, 16 aa, Homo sapiens
  CDR3 for alpha chain variable domain of TCR clone 157323 (TRAV8-1, TRAJ39)
CAVNVPSYNAGNMLTF

SEQ ID NO: 314646 - protein, 15 aa, Homo sapiens
  CDR3 for beta chain variable domain of TCR clone 157323 (TRBV28, TRBJ1-1)
CASSPPGGLGTEAFF

SEQ ID NO: 314647 - protein, 10 aa, Homo sapiens
  CDR3 for alpha chain variable domain of TCR clone 157324 (TRAV8-4, TRAJ43)
CAVSLGDMRF

SEQ ID NO: 314648 - protein, 12 aa, Homo sapiens
  CDR3 for beta chain variable domain of TCR clone 157324 (TRBV12-4, TRBJ2-1)
CASSPGRNEQFF

SEQ ID NO: 314649 - protein, 15 aa, Homo sapiens
  CDR3 for alpha chain variable domain of TCR clone 157325 (TRAV3, TRAJ47)
CAVRDIGEYGNKQVF

SEQ ID NO: 314650 - protein, 14 aa, Homo sapiens
  CDR3 for beta chain variable domain of TCR clone 157325 (TRBV13, TRBJ2-5)
CASSLERVGETQYS

SEQ ID NO: 314651 - protein, 14 aa, Homo sapiens
  CDR3 for alpha chain variable domain of TCR clone 157326 (TRAV12-2, TRAJ13)
CAVTKTGGYQKVTF

SEQ ID NO: 314652 - protein, 16 aa, Homo sapiens
  CDR3 for beta chain variable domain of TCR clone 157326 (TRBV12-5, TRBJ2-5)
CASGPRTSGNQETQYF

SEQ ID NO: 314653 - protein, 12 aa, Homo sapiens
  CDR3 for alpha chain variable domain of TCR clone 157327 (TRAV21, TRAJ33)
CAKMDSNYQLIW

SEQ ID NO: 314654 - protein, 14 aa, Homo sapiens
  CDR3 for beta chain variable domain of TCR clone 157327 (TRBV11-2, TRBJ2-1)
CASSLSGPYNEQFF

SEQ ID NO: 314655 - protein, 15 aa, Homo sapiens
  CDR3 for alpha chain variable domain of TCR clone 157328 (TRAV13-1, TRAJ32)
CAASIYGGATNKLIF

SEQ ID NO: 314656 - protein, 14 aa, Homo sapiens
  CDR3 for beta chain variable domain of TCR clone 157328 (TRBV6-6, TRBJ2-7)
CASQQGIRSYEQYF

SEQ ID NO: 314657 - protein, 14 aa, Homo sapiens
  CDR3 for alpha chain variable domain of TCR clone 157329 (TRAV2, TRAJ9)
CAVEDRSGGFKTIF

SEQ ID NO: 314658 - protein, 13 aa, Homo sapiens
  CDR3 for beta chain variable domain of TCR clone 157329 (TRBV12-4, TRBJ1-5)
CASSPDRAQIQHF

SEQ ID NO: 314659 - protein, 14 aa, Homo sapiens
  CDR3 for alpha chain variable domain of TCR clone 157330 (TRAV23/DV6, TRAJ6)
CAAGRSGGSYIPTL

SEQ ID NO: 314660 - protein, 17 aa, Homo sapiens
  CDR3 for beta chain variable domain of TCR clone 157330 (TRBV20-1, TRBJ2-1)
CSASASGLAGSYNEQFF

SEQ ID NO: 314661 - protein, 14 aa, Homo sapiens
  CDR3 for alpha chain variable domain of TCR clone 157331 (TRAV12-3, TRAJ33)
CAMSVPGSNYQLIW

SEQ ID NO: 314662 - protein, 14 aa, Homo sapiens
  CDR3 for beta chain variable domain of TCR clone 157331 (TRBV20-1, TRBJ1-5)
CSARGDGNFQPQHF

SEQ ID NO: 314663 - protein, 12 aa, Homo sapiens
  CDR3 for alpha chain variable domain of TCR clone 157332 (TRAV13-1, TRAJ39)
CAASNAGNMLTF

SEQ ID NO: 314664 - protein, 15 aa, Homo sapiens
  CDR3 for beta chain variable domain of TCR clone 157332 (TRBV29-1, TRBJ2-5)
CSVAGASGTQETEYF

SEQ ID NO: 314665 - protein, 14 aa, Homo sapiens
  CDR3 for alpha chain variable domain of TCR clone 157333 (TRAV1-2, TRAJ8)
CAVREDTGFQQLVF

SEQ ID NO: 314666 - protein, 13 aa, Homo sapiens
  CDR3 for beta chain variable domain of TCR clone 157333 (TRBV4-2, TRBJ2-2)
CASEDRGTGELFF

SEQ ID NO: 314667 - protein, 18 aa, Homo sapiens
  CDR3 for alpha chain variable domain of TCR clone 157334 (TRAV12-3, TRAJ52)
CAMSRTNAGGTSYGKLTF

SEQ ID NO: 314668 - protein, 11 aa, Homo sapiens
  CDR3 for beta chain variable domain of TCR clone 157334 (TRBV27, TRBJ2-3)
CASSLGDTQYF

SEQ ID NO: 314669 - protein, 14 aa, Homo sapiens
  CDR3 for alpha chain variable domain of TCR clone 157335 (TRAV29/DV5, TRAJ44)
CAAFLVGTASKLTF

SEQ ID NO: 314670 - protein, 16 aa, Homo sapiens
  CDR3 for beta chain variable domain of TCR clone 157335 (TRBV7-3, TRBJ2-2)
CASSLKRGTLSGELFF

SEQ ID NO: 314671 - protein, 23 aa, Homo sapiens
  CDR3 for alpha chain variable domain of TCR clone 157336 (TRAV8-3, TRAJ4)
GVMLLSTSVLWVFYSGGYNKLIF

SEQ ID NO: 314672 - protein, 14 aa, Homo sapiens
  CDR3 for beta chain variable domain of TCR clone 157336 (TRBV7-9, TRBJ2-3)
CASSLEDGTDTQYF

SEQ ID NO: 314673 - protein, 13 aa, Homo sapiens
  CDR3 for alpha chain variable domain of TCR clone 157337 (TRAV16, TRAJ27)
CALRRTNAGKSTF

SEQ ID NO: 314674 - protein, 15 aa, Homo sapiens
  CDR3 for beta chain variable domain of TCR clone 157337 (TRBV18, TRBJ2-1)
CASSPPSASYNAQFF

SEQ ID NO: 314675 - protein, 13 aa, Homo sapiens
  CDR3 for alpha chain variable domain of TCR clone 157338 (TRAV9-2, TRAJ49)
CALIQIGGNQFYF

SEQ ID NO: 314676 - protein, 14 aa, Homo sapiens
  CDR3 for beta chain variable domain of TCR clone 157338 (TRBV7-8, TRBJ2-7)
CASSLGRASYEQYF

SEQ ID NO: 314677 - protein, 14 aa, Homo sapiens
  CDR3 for alpha chain variable domain of TCR clone 157339 (TRAV3, TRAJ40)
CAVRDRRGTYKYIF

SEQ ID NO: 314678 - protein, 14 aa, Homo sapiens
  CDR3 for beta chain variable domain of TCR clone 157339 (TRBV4-2, TRBJ1-4)
CASSQGATNEKLFF

SEQ ID NO: 314679 - protein, 14 aa, Homo sapiens
  CDR3 for alpha chain variable domain of TCR clone 157340 (TRAV23/DV6, TRAJ4)
CAAPSSGGYHKLIF

SEQ ID NO: 314680 - protein, 16 aa, Homo sapiens
  CDR3 for beta chain variable domain of TCR clone 157340 (TRBV19, TRBJ1-1)
CASRFGGPVTGTEALF

SEQ ID NO: 314681 - protein, 12 aa, Homo sapiens
  CDR3 for alpha chain variable domain of TCR clone 157341 (TRAV20, TRAJ56)
CAVTGANSKLTF

SEQ ID NO: 314682 - protein, 21 aa, Homo sapiens
  CDR3 for beta chain variable domain of TCR clone 157341 (TRBV20-1, TRBJ2-5)
EASRFSICSALVPGYQETQYF

SEQ ID NO: 314683 - protein, 15 aa, Homo sapiens
  CDR3 for alpha chain variable domain of TCR clone 157342 (TRAV8-3, TRAJ21)
CAVGALPPRGYKFFF

SEQ ID NO: 314684 - protein, 15 aa, Homo sapiens
  CDR3 for beta chain variable domain of TCR clone 157342 (TRBV7-8, TRBJ1-5)
CASSLERRGLEPQHF

SEQ ID NO: 314685 - protein, 11 aa, Homo sapiens
  CDR3 for alpha chain variable domain of TCR clone 157343 (TRAV2, TRAJ13)
CASGGYQKVTF

SEQ ID NO: 314686 - protein, 13 aa, Homo sapiens
  CDR3 for beta chain variable domain of TCR clone 157343 (TRBV15, TRBJ2-7)
CATSTTGHYEQYF

SEQ ID NO: 314687 - protein, 14 aa, Homo sapiens
  CDR3 for alpha chain variable domain of TCR clone 157344 (TRAV12-2, TRAJ13)
CAVKKTGGSQKVTF

SEQ ID NO: 314688 - protein, 12 aa, Homo sapiens
  CDR3 for beta chain variable domain of TCR clone 157344 (TRBV11-2, TRBJ2-2)
CASSLPTGELFF

SEQ ID NO: 314689 - protein, 14 aa, Homo sapiens
  CDR3 for alpha chain variable domain of TCR clone 157345 (TRAV2, TRAJ9)
CAVEDRSGGFKTSF

SEQ ID NO: 314690 - protein, 13 aa, Homo sapiens
  CDR3 for beta chain variable domain of TCR clone 157345 (TRBV3-1, TRBJ1-1)
CASSPGVITEAFF

SEQ ID NO: 314691 - protein, 15 aa, Homo sapiens
  CDR3 for alpha chain variable domain of TCR clone 157346 (TRAV23/DV6, TRAJ18)
CTASFRGSTLGRLYF

SEQ ID NO: 314692 - protein, 13 aa, Homo sapiens
  CDR3 for beta chain variable domain of TCR clone 157346 (TRBV28, TRBJ2-7)
CAILDRAGGEQYF

SEQ ID NO: 314693 - protein, 23 aa, Homo sapiens
  CDR3 for alpha chain variable domain of TCR clone 157347 (TRAV30, TRAJ43)
CTLRPPSSVTQEPTSAALSDMRF

SEQ ID NO: 314694 - protein, 12 aa, Homo sapiens
  CDR3 for beta chain variable domain of TCR clone 157347 (TRBV11-2, TRBJ2-7)
CASSLPTYEQYF

SEQ ID NO: 314695 - protein, 19 aa, Homo sapiens
  CDR3 for alpha chain variable domain of TCR clone 157348 (TRAV2, TRAJ20)
ILQVREADAAVYRDFKLSF

SEQ ID NO: 314696 - protein, 17 aa, Homo sapiens
  CDR3 for beta chain variable domain of TCR clone 157348 (TRBV11-2, TRBJ2-1)
CASSLYPPGVEYNEQFF

SEQ ID NO: 314697 - protein, 13 aa, Homo sapiens
  CDR3 for alpha chain variable domain of TCR clone 157349 (TRAV21, TRAJ15)
CAVANQAGTALIF

SEQ ID NO: 314698 - protein, 14 aa, Homo sapiens
  CDR3 for beta chain variable domain of TCR clone 157349 (TRBV27, TRBJ2-2)
CASSLGAATGELFV

SEQ ID NO: 314699 - protein, 14 aa, Homo sapiens
  CDR3 for alpha chain variable domain of TCR clone 157350 (TRAV12-2, TRAJ13)
CAVKKTGGYQEVTF

SEQ ID NO: 314700 - protein, 14 aa, Homo sapiens
  CDR3 for beta chain variable domain of TCR clone 157350 (TRBV19, TRBJ2-1)
CASPTFVLSGEQFF

SEQ ID NO: 314701 - protein, 14 aa, Homo sapiens
  CDR3 for alpha chain variable domain of TCR clone 157351 (TRAV23/DV6, TRAJ58)
CAGMRETSGSRLTF

SEQ ID NO: 314702 - protein, 13 aa, Homo sapiens
  CDR3 for beta chain variable domain of TCR clone 157351 (TRBV28, TRBJ2-7)
CGSRSSGVYEQYF

SEQ ID NO: 314703 - protein, 14 aa, Homo sapiens
  CDR3 for alpha chain variable domain of TCR clone 157352 (TRAV1-2, TRAJ16)
CAVNRFSDGQKLLF

SEQ ID NO: 314704 - protein, 14 aa, Homo sapiens
  CDR3 for beta chain variable domain of TCR clone 157352 (TRBV7-9, TRBJ2-3)
CASSLGDGTDTQYC

SEQ ID NO: 314705 - protein, 13 aa, Homo sapiens
  CDR3 for alpha chain variable domain of TCR clone 157353 (TRAV1-2, TRAJ9)
CAVLNTGGFKTIF

SEQ ID NO: 314706 - protein, 20 aa, Homo sapiens
  CDR3 for beta chain variable domain of TCR clone 157353 (TRBV7-9, TRBJ1-5)
CISVSEAGQGAPYSNQPQHF

SEQ ID NO: 314707 - protein, 17 aa, Homo sapiens
  CDR3 for alpha chain variable domain of TCR clone 157354 (TRAV26-1, TRAJ21)
CIAKGKFYFGSGTKLSV

SEQ ID NO: 314708 - protein, 15 aa, Homo sapiens
  CDR3 for beta chain variable domain of TCR clone 157354 (TRBV7-2, TRBJ2-1)
CASSSGLAGGNEQFF

SEQ ID NO: 314709 - protein, 17 aa, Homo sapiens
  CDR3 for alpha chain variable domain of TCR clone 157355 (TRAV12-1, TRAJ32)
CVVNMQGYGGATNKLIF

SEQ ID NO: 314710 - protein, 15 aa, Homo sapiens
  CDR3 for beta chain variable domain of TCR clone 157355 (TRBV7-9, TRBJ2-7)
CASSSSGLAVYEQYF

SEQ ID NO: 314711 - protein, 16 aa, Homo sapiens
  CDR3 for alpha chain variable domain of TCR clone 157356 (TRAV23/DV6, TRAJ9)
CAASIGGNTGGFKTIF

SEQ ID NO: 314712 - protein, 13 aa, Homo sapiens
  CDR3 for beta chain variable domain of TCR clone 157356 (TRBV11-3, TRBJ2-3)
CASSHDTKDTQYF

SEQ ID NO: 314713 - protein, 18 aa, Homo sapiens
  CDR3 for alpha chain variable domain of TCR clone 157357 (TRAV3, TRAJ17)
CAVRARRGGRSCRQQANF

SEQ ID NO: 314714 - protein, 13 aa, Homo sapiens
  CDR3 for beta chain variable domain of TCR clone 157357 (TRBV11-2, TRBJ2-7)
CASSGTRPYEQYF

SEQ ID NO: 314715 - protein, 13 aa, Homo sapiens
  CDR3 for alpha chain variable domain of TCR clone 157358 (TRAV2, TRAJ40)
FAVVTSGTYKYIF

SEQ ID NO: 314716 - protein, 15 aa, Homo sapiens
  CDR3 for beta chain variable domain of TCR clone 157358 (TRBV11-3, TRBJ2-3)
CASLKDGWEGDTQYF

SEQ ID NO: 314717 - protein, 12 aa, Homo sapiens
  CDR3 for alpha chain variable domain of TCR clone 157359 (TRAV13-1, TRAJ21)
CATTITFNKFYF

SEQ ID NO: 314718 - protein, 14 aa, Homo sapiens
  CDR3 for beta chain variable domain of TCR clone 157359 (TRBV7-2, TRBJ2-7)
CASSPKTSFYEQYF

SEQ ID NO: 314719 - protein, 13 aa, Homo sapiens
  CDR3 for alpha chain variable domain of TCR clone 157360 (TRAV3, TRAJ16)
CAVRDRNGQKLPF

SEQ ID NO: 314720 - protein, 15 aa, Homo sapiens
  CDR3 for beta chain variable domain of TCR clone 157360 (TRBV5-1, TRBJ2-1)
CASSPPGAPYNEQFF

SEQ ID NO: 314721 - protein, 13 aa, Homo sapiens
  CDR3 for alpha chain variable domain of TCR clone 157361 (TRAV8-3, TRAJ43)
CAVVPYNNHDMRF

SEQ ID NO: 314722 - protein, 17 aa, Homo sapiens
  CDR3 for beta chain variable domain of TCR clone 157361 (TRBV7-7, TRBJ1-1)
CASIGDRPNLGVTEAFF

SEQ ID NO: 314723 - protein, 10 aa, Homo sapiens
  CDR3 for alpha chain variable domain of TCR clone 157362 (TRAV3, TRAJ30)
CAVREIEIIF

SEQ ID NO: 314724 - protein, 14 aa, Homo sapiens
  CDR3 for beta chain variable domain of TCR clone 157362 (TRBV19, TRBJ2-7)
CASTVQGRPYEQYF

SEQ ID NO: 314725 - protein, 11 aa, Homo sapiens
  CDR3 for alpha chain variable domain of TCR clone 157363 (TRAV3, TRAJ13)
CAVTSYQKVTF

SEQ ID NO: 314726 - protein, 16 aa, Homo sapiens
  CDR3 for beta chain variable domain of TCR clone 157363 (TRBV11-2, TRBJ2-3)
CASSPRGGGAGDTQYF

SEQ ID NO: 314727 - protein, 16 aa, Homo sapiens
  CDR3 for alpha chain variable domain of TCR clone 157364 (TRAV8-1, TRAJ42)
CAVTARYGGSQGNLIF

SEQ ID NO: 314728 - protein, 12 aa, Homo sapiens
  CDR3 for beta chain variable domain of TCR clone 157364 (TRBV6-3, TRBJ2-7)
CASSLGRRGLYF

SEQ ID NO: 314729 - protein, 13 aa, Homo sapiens
  CDR3 for alpha chain variable domain of TCR clone 157365 (TRAV21, TRAJ27)
CAARPGNAGKSTF

SEQ ID NO: 314730 - protein, 15 aa, Homo sapiens
  CDR3 for beta chain variable domain of TCR clone 157365 (TRBV7-6, TRBJ1-4)
CASSARTGGNEKLFF

SEQ ID NO: 314731 - protein, 14 aa, Homo sapiens
  CDR3 for alpha chain variable domain of TCR clone 157366 (TRAV29/DV5, TRAJ4)
CAATVLGGYYKLIF

SEQ ID NO: 314732 - protein, 17 aa, Homo sapiens
  CDR3 for beta chain variable domain of TCR clone 157366 (TRBV11-2, TRBJ2-1)
CASSLYPPGVEYNEQFF

SEQ ID NO: 314733 - protein, 11 aa, Homo sapiens
  CDR3 for alpha chain variable domain of TCR clone 157367 (TRAV21, TRAJ11)
CAVNGYSTLTF

SEQ ID NO: 314734 - protein, 16 aa, Homo sapiens
  CDR3 for beta chain variable domain of TCR clone 157367 (TRBV4-2, TRBJ2-5)
CASSQGLVGSQETQYF

SEQ ID NO: 314735 - protein, 12 aa, Homo sapiens
  CDR3 for alpha chain variable domain of TCR clone 157368 (TRAV13-2, TRAJ8)
CAPWLGFQKLVF

SEQ ID NO: 314736 - protein, 15 aa, Homo sapiens
  CDR3 for beta chain variable domain of TCR clone 157368 (TRBV27, TRBJ1-6)
CASSFDRGLGSPLHF

SEQ ID NO: 314737 - protein, 12 aa, Homo sapiens
  CDR3 for alpha chain variable domain of TCR clone 157369 (TRAV22, TRAJ22)
CAPGGSARQRTF

SEQ ID NO: 314738 - protein, 13 aa, Homo sapiens
  CDR3 for beta chain variable domain of TCR clone 157369 (TRBV15, TRBJ1-6)
CATSGGLNSPLHF

SEQ ID NO: 314739 - protein, 12 aa, Homo sapiens
  CDR3 for alpha chain variable domain of TCR clone 157370 (TRAV13-1, TRAJ9)
CASHTGGLKTIF

SEQ ID NO: 314740 - protein, 16 aa, Homo sapiens
  CDR3 for beta chain variable domain of TCR clone 157370 (TRBV19, TRBJ2-1)
CASSKAGPSSYNEQFF

SEQ ID NO: 314741 - protein, 14 aa, Homo sapiens
  CDR3 for alpha chain variable domain of TCR clone 157371 (TRAV12-2, TRAJ40)
CAGKIPSGTYKYIF

SEQ ID NO: 314742 - protein, 14 aa, Homo sapiens
  CDR3 for beta chain variable domain of TCR clone 157371 (TRBV20-1, TRBJ1-1)
CSAQTRIGGTEAFS

SEQ ID NO: 314743 - protein, 13 aa, Homo sapiens
  CDR3 for alpha chain variable domain of TCR clone 157372 (TRAV23/DV6, TRAJ34)
CAAIENNTDKLIF

SEQ ID NO: 314744 - protein, 13 aa, Homo sapiens
  CDR3 for beta chain variable domain of TCR clone 157372 (TRBV29-1, TRBJ2-7)
CSVGPSGGYEQYF

SEQ ID NO: 314745 - protein, 12 aa, Homo sapiens
  CDR3 for alpha chain variable domain of TCR clone 157373 (TRAV12-3, TRAJ40)
CAMSSGTYKYIF

SEQ ID NO: 314746 - protein, 16 aa, Homo sapiens
  CDR3 for beta chain variable domain of TCR clone 157373 (TRBV5-4, TRBJ2-3)
ISVPAVLTASTDTQYF

SEQ ID NO: 314747 - protein, 14 aa, Homo sapiens
  CDR3 for alpha chain variable domain of TCR clone 157374 (TRAV8-1, TRAJ5)
CAVRTDTGRRALTF

SEQ ID NO: 314748 - protein, 17 aa, Homo sapiens
  CDR3 for beta chain variable domain of TCR clone 157374 (TRBV5-1, TRBJ2-5)
CASSLLGLAANQDTQYF

SEQ ID NO: 314749 - protein, 15 aa, Homo sapiens
  CDR3 for alpha chain variable domain of TCR clone 157375 (TRAV16, TRAJ4)
CALEDPSGGYTKLIF

SEQ ID NO: 314750 - protein, 13 aa, Homo sapiens
  CDR3 for beta chain variable domain of TCR clone 157375 (TRBV7-3, TRBJ2-7)
CASSQAGGYEQYF

SEQ ID NO: 314751 - protein, 18 aa, Homo sapiens
  CDR3 for alpha chain variable domain of TCR clone 157376 (TRAV13-1, TRAJ52)
CAASKRSAGGTSYGKLTF

SEQ ID NO: 314752 - protein, 14 aa, Homo sapiens
  CDR3 for beta chain variable domain of TCR clone 157376 (TRBV7-3, TRBJ2-1)
CASSLAGGTNEQLF

SEQ ID NO: 314753 - protein, 12 aa, Homo sapiens
  CDR3 for alpha chain variable domain of TCR clone 157377 (TRAV3, TRAJ26)
CAVRDYGQNFVF

SEQ ID NO: 314754 - protein, 13 aa, Homo sapiens
  CDR3 for beta chain variable domain of TCR clone 157377 (TRBV6-4, TRBJ1-5)
CASSADLNQPQHF

SEQ ID NO: 314755 - protein, 14 aa, Homo sapiens
  CDR3 for alpha chain variable domain of TCR clone 157378 (TRAV8-3, TRAJ47)
CAVGARGRGNKLVF

SEQ ID NO: 314756 - protein, 15 aa, Homo sapiens
  CDR3 for beta chain variable domain of TCR clone 157378 (TRBV7-8, TRBJ2-3)
CASSPRTGSTDTQYF

SEQ ID NO: 314757 - protein, 14 aa, Homo sapiens
  CDR3 for alpha chain variable domain of TCR clone 157379 (TRAV12-2, TRAJ3)
CAVSLYSSASKIIF

SEQ ID NO: 314758 - protein, 14 aa, Homo sapiens
  CDR3 for beta chain variable domain of TCR clone 157379 (TRBV27, TRBJ2-1)
CAGSIAETYNEHSF

SEQ ID NO: 314759 - protein, 14 aa, Homo sapiens
  CDR3 for alpha chain variable domain of TCR clone 157380 (TRAV1-2, TRAJ16)
CAVNRFSDGQKLLS

SEQ ID NO: 314760 - protein, 14 aa, Homo sapiens
  CDR3 for beta chain variable domain of TCR clone 157380 (TRBV7-2, TRBJ2-7)
CASSLYPGRYEQYF

SEQ ID NO: 314761 - protein, 14 aa, Homo sapiens
  CDR3 for alpha chain variable domain of TCR clone 157381 (TRAV1-2, TRAJ8)
YAVREDTGFQKLVF

SEQ ID NO: 314762 - protein, 13 aa, Homo sapiens
  CDR3 for beta chain variable domain of TCR clone 157381 (TRBV7-3, TRBJ2-1)
CASSLDSYNEQFF

SEQ ID NO: 314763 - protein, 13 aa, Homo sapiens
  CDR3 for alpha chain variable domain of TCR clone 157382 (TRAV21, TRAJ27)
CAALTPMQANQTL

SEQ ID NO: 314764 - protein, 14 aa, Homo sapiens
  CDR3 for beta chain variable domain of TCR clone 157382 (TRBV27, TRBJ1-1)
CASSLLSGLSEAFF

SEQ ID NO: 314765 - protein, 16 aa, Homo sapiens
  CDR3 for alpha chain variable domain of TCR clone 157383 (TRAV21, TRAJ22)
CAVRLFFWFCKATDLW

SEQ ID NO: 314766 - protein, 14 aa, Homo sapiens
  CDR3 for beta chain variable domain of TCR clone 157383 (TRBV19, TRBJ1-5)
CASRAPDSFLSQHF

SEQ ID NO: 314767 - protein, 16 aa, Homo sapiens
  CDR3 for alpha chain variable domain of TCR clone 157384 (TRAV3, TRAJ28)
CAVLPRSGAGSYQLTF

SEQ ID NO: 314768 - protein, 14 aa, Homo sapiens
  CDR3 for beta chain variable domain of TCR clone 157384 (TRBV7-9, TRBJ2-1)
CASSPRDSLYDQFF

SEQ ID NO: 314769 - protein, 14 aa, Homo sapiens
  CDR3 for alpha chain variable domain of TCR clone 157385 (TRAV29/DV5, TRAJ45)
CAASFRVGPDGLTF

SEQ ID NO: 314770 - protein, 11 aa, Homo sapiens
  CDR3 for beta chain variable domain of TCR clone 157385 (TRBV11-2, TRBJ2-2)
CASSLPGELFF

SEQ ID NO: 314771 - protein, 14 aa, Homo sapiens
  CDR3 for alpha chain variable domain of TCR clone 157386 (TRAV4, TRAJ17)
CLVGDMAAGNKPTF

SEQ ID NO: 314772 - protein, 14 aa, Homo sapiens
  CDR3 for beta chain variable domain of TCR clone 157386 (TRBV7-6, TRBJ2-3)
CASSLGTVTDTQYF

SEQ ID NO: 314773 - protein, 15 aa, Homo sapiens
  CDR3 for alpha chain variable domain of TCR clone 157387 (TRAV3, TRAJ5)
CAVRDLDTGMGALTF

SEQ ID NO: 314774 - protein, 13 aa, Homo sapiens
  CDR3 for beta chain variable domain of TCR clone 157387 (TRBV12-4, TRBJ2-7)
CASSPTETYEQYF

SEQ ID NO: 314775 - protein, 14 aa, Homo sapiens
  CDR3 for alpha chain variable domain of TCR clone 157388 (TRAV35, TRAJ13)
CAGSPSGGYQKVTF

SEQ ID NO: 314776 - protein, 13 aa, Homo sapiens
  CDR3 for beta chain variable domain of TCR clone 157388 (TRBV4-2, TRBJ2-3)
CASSQGNTDTQYS

SEQ ID NO: 314777 - protein, 14 aa, Homo sapiens
  CDR3 for alpha chain variable domain of TCR clone 157389 (TRAV3, TRAJ34)
CAVRAPGNTDKLIF

SEQ ID NO: 314778 - protein, 14 aa, Homo sapiens
  CDR3 for beta chain variable domain of TCR clone 157389 (TRBV5-4, TRBJ1-1)
CASSLYSRRDEAFF

SEQ ID NO: 314779 - protein, 15 aa, Homo sapiens
  CDR3 for alpha chain variable domain of TCR clone 157390 (TRAV8-3, TRAJ11)
CAVGLLNSGYSTLTF

SEQ ID NO: 314780 - protein, 16 aa, Homo sapiens
  CDR3 for beta chain variable domain of TCR clone 157390 (TRBV28, TRBJ2-1)
CASSLWGRTSGTLQSF

SEQ ID NO: 314781 - protein, 14 aa, Homo sapiens
  CDR3 for alpha chain variable domain of TCR clone 157391 (TRAV38-1, TRAJ39)
CAFAYNNAGNMLSF

SEQ ID NO: 314782 - protein, 15 aa, Homo sapiens
  CDR3 for beta chain variable domain of TCR clone 157391 (TRBV19, TRBJ2-6)
CASSIGPSGANVLTF

SEQ ID NO: 314783 - protein, 15 aa, Homo sapiens
  CDR3 for alpha chain variable domain of TCR clone 157392 (TRAV26-1, TRAJ29)
CIVRVEGSGNTPLVF

SEQ ID NO: 314784 - protein, 15 aa, Homo sapiens
  CDR3 for beta chain variable domain of TCR clone 157392 (TRBV12-4, TRBJ2-5)
CASSLGGQGRETQYF

SEQ ID NO: 314785 - protein, 14 aa, Homo sapiens
  CDR3 for alpha chain variable domain of TCR clone 157393 (TRAV1-2, TRAJ8)
CAVREDTGFQKLVF

SEQ ID NO: 314786 - protein, 16 aa, Homo sapiens
  CDR3 for beta chain variable domain of TCR clone 157393 (TRBV19, TRBJ2-1)
CASSNAGPSSYNEQFF

SEQ ID NO: 314787 - protein, 11 aa, Homo sapiens
  CDR3 for alpha chain variable domain of TCR clone 157394 (TRAV23/DV6, TRAJ58)
CAARLLRGETS

SEQ ID NO: 314788 - protein, 14 aa, Homo sapiens
  CDR3 for beta chain variable domain of TCR clone 157394 (TRBV5-1, TRBJ2-7)
CASSVWGAQDEQYF

SEQ ID NO: 314789 - protein, 12 aa, Homo sapiens
  CDR3 for alpha chain variable domain of TCR clone 157395 (TRAV12-3, TRAJ17)
CAMTLKGNKLTF

SEQ ID NO: 314790 - protein, 13 aa, Homo sapiens
  CDR3 for beta chain variable domain of TCR clone 157395 (TRBV5-1, TRBJ1-1)
CASSADWDTEAFF

SEQ ID NO: 314791 - protein, 14 aa, Homo sapiens
  CDR3 for alpha chain variable domain of TCR clone 157396 (TRAV12-3, TRAJ10)
SHLPLTGGGDKLTF

SEQ ID NO: 314792 - protein, 16 aa, Homo sapiens
  CDR3 for beta chain variable domain of TCR clone 157396 (TRBV27, TRBJ2-2)
CASSSSGVSNTGELFF

SEQ ID NO: 314793 - protein, 13 aa, Homo sapiens
  CDR3 for alpha chain variable domain of TCR clone 157397 (TRAV12-1, TRAJ22)
CVASGGSARQLTF

SEQ ID NO: 314794 - protein, 14 aa, Homo sapiens
  CDR3 for beta chain variable domain of TCR clone 157397 (TRBV19, TRBJ2-1)
CASPTFVLSGEQFF

SEQ ID NO: 314795 - protein, 14 aa, Homo sapiens
  CDR3 for alpha chain variable domain of TCR clone 157398 (TRAV17, TRAJ11)
CATDTSRGYSTLTF

SEQ ID NO: 314796 - protein, 16 aa, Homo sapiens
  CDR3 for beta chain variable domain of TCR clone 157398 (TRBV4-1, TRBJ2-2)
CASSQESGQTTGELFF

SEQ ID NO: 314797 - protein, 15 aa, Homo sapiens
  CDR3 for alpha chain variable domain of TCR clone 157399 (TRAV12-1, TRAJ9)
CVVSFGDPGGFKTIF

SEQ ID NO: 314798 - protein, 12 aa, Homo sapiens
  CDR3 for beta chain variable domain of TCR clone 157399 (TRBV11-3, TRBJ1-1)
CASSHRQGEAFF

SEQ ID NO: 314799 - protein, 18 aa, Homo sapiens
  CDR3 for alpha chain variable domain of TCR clone 157400 (TRAV12-2, )
CAVDDIQNPDPAVYQLRD

SEQ ID NO: 314800 - protein, 18 aa, Homo sapiens
  CDR3 for beta chain variable domain of TCR clone 157400 (TRBV11-2, TRBJ2-3)
CASSLGGASRGAPNTQYF

SEQ ID NO: 314801 - protein, 14 aa, Homo sapiens
  CDR3 for alpha chain variable domain of TCR clone 157401 (TRAV8-4, TRAJ40)
CAVIPTSGTYKYTF

SEQ ID NO: 314802 - protein, 15 aa, Homo sapiens
  CDR3 for beta chain variable domain of TCR clone 157401 (TRBV7-2, TRBJ2-1)
CASTSASGDYNEQFF

SEQ ID NO: 314803 - protein, 14 aa, Homo sapiens
  CDR3 for alpha chain variable domain of TCR clone 157402 (TRAV4, TRAJ9)
CLVGSGTGGFKTIF

SEQ ID NO: 314804 - protein, 15 aa, Homo sapiens
  CDR3 for beta chain variable domain of TCR clone 157402 (TRBV7-2, TRBJ2-1)
CASSLASGRMNEQFF

SEQ ID NO: 314805 - protein, 16 aa, Homo sapiens
  CDR3 for alpha chain variable domain of TCR clone 157403 (TRAV16, TRAJ28)
CALSNTLGLGVTNSLS

SEQ ID NO: 314806 - protein, 15 aa, Homo sapiens
  CDR3 for beta chain variable domain of TCR clone 157403 (TRBV28, TRBJ2-1)
CASSIIAGGRSEQFF

SEQ ID NO: 314807 - protein, 13 aa, Homo sapiens
  CDR3 for alpha chain variable domain of TCR clone 157404 (TRAV8-6, TRAJ49)
CAVITNTGNQFYF

SEQ ID NO: 314808 - protein, 17 aa, Homo sapiens
  CDR3 for beta chain variable domain of TCR clone 157404 (TRBV15, TRBJ1-5)
CATSRAPPGTRNRPQHF

SEQ ID NO: 314809 - protein, 14 aa, Homo sapiens
  CDR3 for alpha chain variable domain of TCR clone 157405 (TRAV1-2, TRAJ8)
CAVRDPAGFQKLVF

SEQ ID NO: 314810 - protein, 14 aa, Homo sapiens
  CDR3 for beta chain variable domain of TCR clone 157405 (TRBV5-1, TRBJ2-7)
CASSRGESLYEQYF

SEQ ID NO: 314811 - protein, 14 aa, Homo sapiens
  CDR3 for alpha chain variable domain of TCR clone 157406 (TRAV12-2, TRAJ40)
CSVKIPPGTYKYIF

SEQ ID NO: 314812 - protein, 14 aa, Homo sapiens
  CDR3 for beta chain variable domain of TCR clone 157406 (TRBV20-1, TRBJ1-1)
CSAQTRIGGTEAFF

SEQ ID NO: 314813 - protein, 14 aa, Homo sapiens
  CDR3 for alpha chain variable domain of TCR clone 157407 (TRAV12-2, TRAJ17)
CAALFKAAGNKLTF

SEQ ID NO: 314814 - protein, 17 aa, Homo sapiens
  CDR3 for beta chain variable domain of TCR clone 157407 (TRBV19, TRBJ2-7)
CASSISFYDSYPYEQYF

SEQ ID NO: 314815 - protein, 15 aa, Homo sapiens
  CDR3 for alpha chain variable domain of TCR clone 157408 (TRAV26-1, TRAJ29)
CIVRVEGSGNTPLVF

SEQ ID NO: 314816 - protein, 15 aa, Homo sapiens
  CDR3 for beta chain variable domain of TCR clone 157408 (TRBV7-9, TRBJ1-2)
CASSLDREPNYGYTF

SEQ ID NO: 314817 - protein, 14 aa, Homo sapiens
  CDR3 for alpha chain variable domain of TCR clone 157409 (TRAV1-2, TRAJ8)
CAVREDTGFQKLVF

SEQ ID NO: 314818 - protein, 16 aa, Homo sapiens
  CDR3 for beta chain variable domain of TCR clone 157409 (TRBV19, TRBJ2-1)
CASSRAGPSSYNEQFF

SEQ ID NO: 314819 - protein, 12 aa, Homo sapiens
  CDR3 for alpha chain variable domain of TCR clone 157410 (TRAV3, TRAJ31)
CAVRDGNARVMF

SEQ ID NO: 314820 - protein, 18 aa, Homo sapiens
  CDR3 for beta chain variable domain of TCR clone 157410 (TRBV7-2, TRBJ2-3)
CASSLKREGSGITDTQYF

SEQ ID NO: 314821 - protein, 13 aa, Homo sapiens
  CDR3 for alpha chain variable domain of TCR clone 157411 (TRAV14/DV4, TRAJ23)
CAMIDNQGGKLIF

SEQ ID NO: 314822 - protein, 16 aa, Homo sapiens
  CDR3 for beta chain variable domain of TCR clone 157411 (TRBV12-5, TRBJ2-5)
CASGPRTSGNQENQYF

SEQ ID NO: 314823 - protein, 16 aa, Homo sapiens
  CDR3 for alpha chain variable domain of TCR clone 157412 (TRAV26-1, TRAJ32)
CIVRTNCGGATNKLIF

SEQ ID NO: 314824 - protein, 14 aa, Homo sapiens
  CDR3 for beta chain variable domain of TCR clone 157412 (TRBV6-1, TRBJ1-3)
CASVQGGGGNTIYF

SEQ ID NO: 314825 - protein, 15 aa, Homo sapiens
  CDR3 for alpha chain variable domain of TCR clone 157413 (TRAV8-4, TRAJ3)
CAVTGENLVQQCFQD

SEQ ID NO: 314826 - protein, 15 aa, Homo sapiens
  CDR3 for beta chain variable domain of TCR clone 157413 (TRBV6-1, TRBJ2-7)
CASSESMGDFYEQYF

SEQ ID NO: 314827 - protein, 19 aa, Homo sapiens
  CDR3 for alpha chain variable domain of TCR clone 157414 (TRAV10, TRAJ45)
PTSVWCGGYSGGGADGLTF

SEQ ID NO: 314828 - protein, 14 aa, Homo sapiens
  CDR3 for beta chain variable domain of TCR clone 157414 (TRBV7-8, TRBJ2-3)
CASSLGAGTDTQYF

SEQ ID NO: 314829 - protein, 13 aa, Homo sapiens
  CDR3 for alpha chain variable domain of TCR clone 157415 (TRAV12-1, TRAJ6)
CVVFPGGSYIPTF

SEQ ID NO: 314830 - protein, 12 aa, Homo sapiens
  CDR3 for beta chain variable domain of TCR clone 157415 (TRBV5-5, TRBJ2-5)
CASSYFGETQYF

SEQ ID NO: 314831 - protein, 14 aa, Homo sapiens
  CDR3 for alpha chain variable domain of TCR clone 157416 (TRAV27, TRAJ58)
CAGDGETSGSRLTF

SEQ ID NO: 314832 - protein, 14 aa, Homo sapiens
  CDR3 for beta chain variable domain of TCR clone 157416 (TRBV7-9, TRBJ2-1)
CASSPRDSLYEQFF

SEQ ID NO: 314833 - protein, 20 aa, Homo sapiens
  CDR3 for alpha chain variable domain of TCR clone 157417 (TRAV8-2, TRAJ26)
CVVTLFLGSEFCLCSRNQIV

SEQ ID NO: 314834 - protein, 15 aa, Homo sapiens
  CDR3 for beta chain variable domain of TCR clone 157417 (TRBV11-2, TRBJ2-2)
CASSSDRVNAGELFF

SEQ ID NO: 314835 - protein, 14 aa, Homo sapiens
  CDR3 for alpha chain variable domain of TCR clone 157418 (TRAV12-3, TRAJ7)
CAMSEIGGNNRLAL

SEQ ID NO: 314836 - protein, 12 aa, Homo sapiens
  CDR3 for beta chain variable domain of TCR clone 157418 (TRBV7-3, TRBJ2-5)
CASSSPGGTQYF

SEQ ID NO: 314837 - protein, 15 aa, Homo sapiens
  CDR3 for alpha chain variable domain of TCR clone 157419 (TRAV21, TRAJ57)
CAVIITQGGSEKLVF

SEQ ID NO: 314838 - protein, 12 aa, Homo sapiens
  CDR3 for beta chain variable domain of TCR clone 157419 (TRBV3-1, TRBJ2-1)
CASSQGSSGQFF

SEQ ID NO: 314839 - protein, 15 aa, Homo sapiens
  CDR3 for alpha chain variable domain of TCR clone 157420 (TRAV26-1, TRAJ40)
CIVRAVPSGTYKYIF

SEQ ID NO: 314840 - protein, 14 aa, Homo sapiens
  CDR3 for beta chain variable domain of TCR clone 157420 (TRBV19, TRBJ2-1)
CASKDPGHANEQFF

SEQ ID NO: 314841 - protein, 14 aa, Homo sapiens
  CDR3 for alpha chain variable domain of TCR clone 157421 (TRAV1-2, TRAJ16)
RAVNRFSDGQKLLF

SEQ ID NO: 314842 - protein, 14 aa, Homo sapiens
  CDR3 for beta chain variable domain of TCR clone 157421 (TRBV2, TRBJ2-1)
CASSDRAYYNEQFF

SEQ ID NO: 314843 - protein, 18 aa, Homo sapiens
  CDR3 for alpha chain variable domain of TCR clone 157422 (TRAV12-2, )
CAVEDIQNPDPAVYQLRD

SEQ ID NO: 314844 - protein, 17 aa, Homo sapiens
  CDR3 for beta chain variable domain of TCR clone 157422 (TRBV20-1, TRBJ2-1)
CSASSSGLAGSYTEQFF

SEQ ID NO: 314845 - protein, 15 aa, Homo sapiens
  CDR3 for alpha chain variable domain of TCR clone 157423 (TRAV2, TRAJ9)
CAVEDRGTGGFKTIF

SEQ ID NO: 314846 - protein, 15 aa, Homo sapiens
  CDR3 for beta chain variable domain of TCR clone 157423 (TRBV11-2, TRBJ2-2)
CASSLDTGNTGELFF

SEQ ID NO: 314847 - protein, 14 aa, Homo sapiens
  CDR3 for alpha chain variable domain of TCR clone 157424 (TRAV25, TRAJ22)
CAVRSSGSARQLTF

SEQ ID NO: 314848 - protein, 16 aa, Homo sapiens
  CDR3 for beta chain variable domain of TCR clone 157424 (TRBV4-2, TRBJ1-1)
CASSRSPGRAAPEAFF

SEQ ID NO: 314849 - protein, 17 aa, Homo sapiens
  CDR3 for alpha chain variable domain of TCR clone 157425 (TRAV3, TRAJ6)
CAVRDGPRGGGSYIPKF

SEQ ID NO: 314850 - protein, 12 aa, Homo sapiens
  CDR3 for beta chain variable domain of TCR clone 157425 (TRBV11-2, TRBJ2-2)
CASSLGGGELFF

SEQ ID NO: 314851 - protein, 10 aa, Homo sapiens
  CDR3 for alpha chain variable domain of TCR clone 157426 (TRAV12-3, TRAJ49)
CVMNDDHFYF

SEQ ID NO: 314852 - protein, 13 aa, Homo sapiens
  CDR3 for beta chain variable domain of TCR clone 157426 (TRBV12-4, TRBJ1-1)
CASSPGTGFEAFF

SEQ ID NO: 314853 - protein, 16 aa, Homo sapiens
  CDR3 for alpha chain variable domain of TCR clone 157427 (TRAV38-1, TRAJ32)
CAFMKGGGGARNKLIF

SEQ ID NO: 314854 - protein, 13 aa, Homo sapiens
  CDR3 for beta chain variable domain of TCR clone 157427 (TRBV20-1, TRBJ2-5)
CSAREAFQETQYF

SEQ ID NO: 314855 - protein, 14 aa, Homo sapiens
  CDR3 for alpha chain variable domain of TCR clone 157428 (TRAV38-1, TRAJ40)
CALRPTSGTYQYIF

SEQ ID NO: 314856 - protein, 20 aa, Homo sapiens
  CDR3 for beta chain variable domain of TCR clone 157428 (TRBV11-2, TRBJ2-2)
LRTRPCISVPAALEAGSCFF

SEQ ID NO: 314857 - protein, 14 aa, Homo sapiens
  CDR3 for alpha chain variable domain of TCR clone 157429 (TRAV12-1, TRAJ41)
CVVLNSNSGYALNF

SEQ ID NO: 314858 - protein, 17 aa, Homo sapiens
  CDR3 for beta chain variable domain of TCR clone 157429 (TRBV28, TRBJ2-5)
CASSRQGGLAGAETQYF

SEQ ID NO: 314859 - protein, 17 aa, Homo sapiens
  CDR3 for alpha chain variable domain of TCR clone 157430 (TRAV3, TRAJ6)
CAVRDGPRAGGSHIPTC

SEQ ID NO: 314860 - protein, 12 aa, Homo sapiens
  CDR3 for beta chain variable domain of TCR clone 157430 (TRBV11-2, TRBJ2-2)
CASSLGGGELFF

SEQ ID NO: 314861 - protein, 15 aa, Homo sapiens
  CDR3 for alpha chain variable domain of TCR clone 157431 (TRAV13-1, TRAJ22)
CSKGGRSGSARQLTF

SEQ ID NO: 314862 - protein, 15 aa, Homo sapiens
  CDR3 for beta chain variable domain of TCR clone 157431 (TRBV9, TRBJ1-6)
CASSVAGTGDSPLHF

SEQ ID NO: 314863 - protein, 13 aa, Homo sapiens
  CDR3 for alpha chain variable domain of TCR clone 157432 (TRAV23/DV6, TRAJ4)
CAARDFWSRDQAG

SEQ ID NO: 314864 - protein, 13 aa, Homo sapiens
  CDR3 for beta chain variable domain of TCR clone 157432 (TRBV7-2, TRBJ1-1)
CASSRNTNTEAFF

SEQ ID NO: 314865 - protein, 13 aa, Homo sapiens
  CDR3 for alpha chain variable domain of TCR clone 157433 (TRAV8-3, TRAJ20)
CAVGRPNDYKLSF

SEQ ID NO: 314866 - protein, 14 aa, Homo sapiens
  CDR3 for beta chain variable domain of TCR clone 157433 (TRBV12-5, TRBJ2-5)
CASDSRTHQETQYF

SEQ ID NO: 314867 - protein, 13 aa, Homo sapiens
  CDR3 for alpha chain variable domain of TCR clone 157434 (TRAV2, TRAJ40)
CAVVTYGTYKYIF

SEQ ID NO: 314868 - protein, 14 aa, Homo sapiens
  CDR3 for beta chain variable domain of TCR clone 157434 (TRBV7-2, TRBJ2-7)
CASRSQGAAYEQYF

SEQ ID NO: 314869 - protein, 14 aa, Homo sapiens
  CDR3 for alpha chain variable domain of TCR clone 157435 (TRAV1-2, TRAJ8)
CAVREDTGFQKLVF

SEQ ID NO: 314870 - protein, 12 aa, Homo sapiens
  CDR3 for beta chain variable domain of TCR clone 157435 (TRBV5-7, TRBJ1-1)
CASSLGRGKAFF

SEQ ID NO: 314871 - protein, 14 aa, Homo sapiens
  CDR3 for alpha chain variable domain of TCR clone 157436 (TRAV1-2, TRAJ16)
CAVNRFSDRQKLLF

SEQ ID NO: 314872 - protein, 17 aa, Homo sapiens
  CDR3 for beta chain variable domain of TCR clone 157436 (TRBV13, TRBJ2-3)
CASSLSRVAGGRNTQYF

SEQ ID NO: 314873 - protein, 14 aa, Homo sapiens
  CDR3 for alpha chain variable domain of TCR clone 157437 (TRAV9-2, TRAJ6)
CAMSDPGGSYIPTF

SEQ ID NO: 314874 - protein, 13 aa, Homo sapiens
  CDR3 for beta chain variable domain of TCR clone 157437 (TRBV28, TRBJ1-1)
CASGKQGWTEAFF

SEQ ID NO: 314875 - protein, 14 aa, Homo sapiens
  CDR3 for alpha chain variable domain of TCR clone 157438 (TRAV12-3, TRAJ10)
SHLPLTGGGNKLTF

SEQ ID NO: 314876 - protein, 15 aa, Homo sapiens
  CDR3 for beta chain variable domain of TCR clone 157438 (TRBV5-1, TRBJ2-2)
CASSSQGGDTGELFF

SEQ ID NO: 314877 - protein, 16 aa, Homo sapiens
  CDR3 for alpha chain variable domain of TCR clone 157439 (TRAV12-2, TRAJ28)
CAVITDSGAGSYQLTF

SEQ ID NO: 314878 - protein, 14 aa, Homo sapiens
  CDR3 for beta chain variable domain of TCR clone 157439 (TRBV25-1, TRBJ1-1)
CARTHLGGNTEAFF

SEQ ID NO: 314879 - protein, 12 aa, Homo sapiens
  CDR3 for alpha chain variable domain of TCR clone 157440 (TRAV21, TRAJ31)
CVLAGNNARLMF

SEQ ID NO: 314880 - protein, 16 aa, Homo sapiens
  CDR3 for beta chain variable domain of TCR clone 157440 (TRBV27, TRBJ2-5)
CASSFGPGGTKETQFF

SEQ ID NO: 314881 - protein, 13 aa, Homo sapiens
  CDR3 for alpha chain variable domain of TCR clone 157441 (TRAV17, TRAJ5)
CAPMDTGRRALTF

SEQ ID NO: 314882 - protein, 14 aa, Homo sapiens
  CDR3 for beta chain variable domain of TCR clone 157441 (TRBV5-1, TRBJ2-3)
CASSVGTGTDTQYF

SEQ ID NO: 314883 - protein, 14 aa, Homo sapiens
  CDR3 for alpha chain variable domain of TCR clone 157442 (TRAV12-2, TRAJ49)
CAVNPRTPVTSSIL

SEQ ID NO: 314884 - protein, 15 aa, Homo sapiens
  CDR3 for beta chain variable domain of TCR clone 157442 (TRBV6-3, TRBJ2-7)
CASSSPGTVFYEQYF

SEQ ID NO: 314885 - protein, 11 aa, Homo sapiens
  CDR3 for alpha chain variable domain of TCR clone 157443 (TRAV27, TRAJ40)
SLTSGTYKYIF

SEQ ID NO: 314886 - protein, 12 aa, Homo sapiens
  CDR3 for beta chain variable domain of TCR clone 157443 (TRBV18, TRBJ2-3)
CQLNQNTDTHYF

SEQ ID NO: 314887 - protein, 15 aa, Homo sapiens
  CDR3 for alpha chain variable domain of TCR clone 157444 (TRAV12-2, TRAJ43)
CAFDMRFGAGTRLTV

SEQ ID NO: 314888 - protein, 15 aa, Homo sapiens
  CDR3 for beta chain variable domain of TCR clone 157444 (TRBV7-2, TRBJ1-2)
CASSPRAGWNYGDTF

SEQ ID NO: 314889 - protein, 11 aa, Homo sapiens
  CDR3 for alpha chain variable domain of TCR clone 157445 (TRAV21, TRAJ31)
CAVRNNARLMF

SEQ ID NO: 314890 - protein, 15 aa, Homo sapiens
  CDR3 for beta chain variable domain of TCR clone 157445 (TRBV20-1, TRBJ2-7)
CSARDRVSGMDGQYF

SEQ ID NO: 314891 - protein, 14 aa, Homo sapiens
  CDR3 for alpha chain variable domain of TCR clone 157446 (TRAV1-2, TRAJ8)
CAVREDTGFQKLVF

SEQ ID NO: 314892 - protein, 15 aa, Homo sapiens
  CDR3 for beta chain variable domain of TCR clone 157446 (TRBV27, TRBJ2-7)
CASSLSVQGGYEQYF

SEQ ID NO: 314893 - protein, 13 aa, Homo sapiens
  CDR3 for alpha chain variable domain of TCR clone 157447 (TRAV13-1, TRAJ54)
CAASSQGAQKLVF

SEQ ID NO: 314894 - protein, 14 aa, Homo sapiens
  CDR3 for beta chain variable domain of TCR clone 157447 (TRBV12-4, TRBJ1-1)
CASSLWAGFTEAFF

SEQ ID NO: 314895 - protein, 14 aa, Homo sapiens
  CDR3 for alpha chain variable domain of TCR clone 157448 (TRAV12-2, TRAJ5)
CAVNRSTGRRALTF

SEQ ID NO: 314896 - protein, 14 aa, Homo sapiens
  CDR3 for beta chain variable domain of TCR clone 157448 (TRBV19, TRBJ2-2)
CASSTLHRSGELFF

SEQ ID NO: 314897 - protein, 14 aa, Homo sapiens
  CDR3 for alpha chain variable domain of TCR clone 157449 (TRAV26-1, TRAJ38)
CIADNAGNNRKLIW

SEQ ID NO: 314898 - protein, 14 aa, Homo sapiens
  CDR3 for beta chain variable domain of TCR clone 157449 (TRBV10-3, TRBJ2-5)
CATSRDRDRETQYF

SEQ ID NO: 314899 - protein, 13 aa, Homo sapiens
  CDR3 for alpha chain variable domain of TCR clone 157450 (TRAV4, TRAJ15)
CLVGPEAGTALIF

SEQ ID NO: 314900 - protein, 15 aa, Homo sapiens
  CDR3 for beta chain variable domain of TCR clone 157450 (TRBV7-2, TRBJ2-2)
CASSLVAGSAGELFF

SEQ ID NO: 314901 - protein, 16 aa, Homo sapiens
  CDR3 for alpha chain variable domain of TCR clone 157451 (TRAV26-1, TRAJ37)
CIVRGDGSGNTGKLDF

SEQ ID NO: 314902 - protein, 12 aa, Homo sapiens
  CDR3 for beta chain variable domain of TCR clone 157451 (TRBV14, TRBJ1-1)
CASSQLKGLAFF

SEQ ID NO: 314903 - protein, 14 aa, Homo sapiens
  CDR3 for alpha chain variable domain of TCR clone 157452 (TRAV8-1, TRAJ5)
CAVRTDTGRRALTF

SEQ ID NO: 314904 - protein, 15 aa, Homo sapiens
  CDR3 for beta chain variable domain of TCR clone 157452 (TRBV7-9, TRBJ1-4)
CASSRTGGFNEKLFF

SEQ ID NO: 314905 - protein, 14 aa, Homo sapiens
  CDR3 for alpha chain variable domain of TCR clone 157453 (TRAV17, TRAJ23)
CATALGGQGGKLIL

SEQ ID NO: 314906 - protein, 11 aa, Homo sapiens
  CDR3 for beta chain variable domain of TCR clone 157453 (TRBV12-4, TRBJ2-3)
CASTATDTQYF

SEQ ID NO: 314907 - protein, 15 aa, Homo sapiens
  CDR3 for alpha chain variable domain of TCR clone 157454 (TRAV21, TRAJ18)
CAVRDRGSTRGRLYF

SEQ ID NO: 314908 - protein, 17 aa, Homo sapiens
  CDR3 for beta chain variable domain of TCR clone 157454 (TRBV7-2, TRBJ2-3)
CASSSYSGTRRADTQYF

SEQ ID NO: 314909 - protein, 12 aa, Homo sapiens
  CDR3 for alpha chain variable domain of TCR clone 157455 (TRAV12-1, TRAJ40)
CMVNGETYKYIF

SEQ ID NO: 314910 - protein, 14 aa, Homo sapiens
  CDR3 for beta chain variable domain of TCR clone 157455 (TRBV7-9, TRBJ1-1)
CASSSTKGNTEAFF

SEQ ID NO: 314911 - protein, 11 aa, Homo sapiens
  CDR3 for alpha chain variable domain of TCR clone 157456 (TRAV12-1, TRAJ31)
CVGRVQCQTHV

SEQ ID NO: 314912 - protein, 14 aa, Homo sapiens
  CDR3 for beta chain variable domain of TCR clone 157456 (TRBV7-2, TRBJ1-5)
CASSTQGAGQPQHF

SEQ ID NO: 314913 - protein, 12 aa, Homo sapiens
  CDR3 for alpha chain variable domain of TCR clone 157457 (TRAV27, TRAJ36)
CAGLTGANNLFF

SEQ ID NO: 314914 - protein, 14 aa, Homo sapiens
  CDR3 for beta chain variable domain of TCR clone 157457 (TRBV12-4, TRBJ2-3)
CASSLVPSTDTQYF

SEQ ID NO: 314915 - protein, 12 aa, Homo sapiens
  CDR3 for alpha chain variable domain of TCR clone 157458 (TRAV26-1, TRAJ17)
CIGRSAGNKLTF

SEQ ID NO: 314916 - protein, 15 aa, Homo sapiens
  CDR3 for beta chain variable domain of TCR clone 157458 (TRBV7-6, TRBJ1-2)
CASSSGGRGGYGYTF

SEQ ID NO: 314917 - protein, 14 aa, Homo sapiens
  CDR3 for alpha chain variable domain of TCR clone 157459 (TRAV1-2, TRAJ13)
CAVLNSGGYQKVTF

SEQ ID NO: 314918 - protein, 13 aa, Homo sapiens
  CDR3 for beta chain variable domain of TCR clone 157459 (TRBV7-2, TRBJ2-7)
CASSSPSGSEQYF

SEQ ID NO: 314919 - protein, 14 aa, Homo sapiens
  CDR3 for alpha chain variable domain of TCR clone 157460 (TRAV12-3, TRAJ10)
SHLPLTGGGNKLTF

SEQ ID NO: 314920 - protein, 14 aa, Homo sapiens
  CDR3 for beta chain variable domain of TCR clone 157460 (TRBV28, TRBJ2-1)
CASSPGEGGNEQFF

SEQ ID NO: 314921 - protein, 15 aa, Homo sapiens
  CDR3 for alpha chain variable domain of TCR clone 157461 (TRAV8-4, TRAJ36)
CAVRKSWTGANNLFF

SEQ ID NO: 314922 - protein, 17 aa, Homo sapiens
  CDR3 for beta chain variable domain of TCR clone 157461 (TRBV3-1, TRBJ2-2)
CTSSQDSQGPNTGELFF

SEQ ID NO: 314923 - protein, 13 aa, Homo sapiens
  CDR3 for alpha chain variable domain of TCR clone 157462 (TRAV13-2, TRAJ48)
CAEMDFGNEKLTF

SEQ ID NO: 314924 - protein, 13 aa, Homo sapiens
  CDR3 for beta chain variable domain of TCR clone 157462 (TRBV24-1, TRBJ2-2)
CATSDWSTGELFF

SEQ ID NO: 314925 - protein, 14 aa, Homo sapiens
  CDR3 for alpha chain variable domain of TCR clone 157463 (TRAV12-2, TRAJ40)
RAVKIPSGTYKYIL

SEQ ID NO: 314926 - protein, 14 aa, Homo sapiens
  CDR3 for beta chain variable domain of TCR clone 157463 (TRBV20-1, TRBJ1-1)
CSAQTRIGGTEAFF

SEQ ID NO: 314927 - protein, 13 aa, Homo sapiens
  CDR3 for alpha chain variable domain of TCR clone 157464 (TRAV8-4, TRAJ15)
CALTNQAGTALIF

SEQ ID NO: 314928 - protein, 16 aa, Homo sapiens
  CDR3 for beta chain variable domain of TCR clone 157464 (TRBV7-9, TRBJ2-1)
CASSDVAGGSYNEQFF

SEQ ID NO: 314929 - protein, 12 aa, Homo sapiens
  CDR3 for alpha chain variable domain of TCR clone 157465 (TRAV21, TRAJ8)
CAVNTGFQKLVF

SEQ ID NO: 314930 - protein, 14 aa, Homo sapiens
  CDR3 for beta chain variable domain of TCR clone 157465 (TRBV12-5, TRBJ2-5)
CASGSRTHQETQYF

SEQ ID NO: 314931 - protein, 15 aa, Homo sapiens
  CDR3 for alpha chain variable domain of TCR clone 157466 (TRAV21, TRAJ53)
CATLNSGGSIYKLTF

SEQ ID NO: 314932 - protein, 16 aa, Homo sapiens
  CDR3 for beta chain variable domain of TCR clone 157466 (TRBV9, TRBJ2-1)
CASSVGGGGNYNEQFS

SEQ ID NO: 314933 - protein, 16 aa, Homo sapiens
  CDR3 for alpha chain variable domain of TCR clone 157467 (TRAV30, TRAJ57)
CGTGWAPQGGSEKLIF

SEQ ID NO: 314934 - protein, 14 aa, Homo sapiens
  CDR3 for beta chain variable domain of TCR clone 157467 (TRBV18, TRBJ1-1)
CASSPGFQGVEAFF

SEQ ID NO: 314935 - protein, 14 aa, Homo sapiens
  CDR3 for alpha chain variable domain of TCR clone 157468 (TRAV8-2, TRAJ37)
CVVSISGNTGKLIL

SEQ ID NO: 314936 - protein, 14 aa, Homo sapiens
  CDR3 for beta chain variable domain of TCR clone 157468 (TRBV2, TRBJ1-6)
CASSEAYTYWALHF

SEQ ID NO: 314937 - protein, 12 aa, Homo sapiens
  CDR3 for alpha chain variable domain of TCR clone 157469 (TRAV23/DV6, TRAJ16)
CAARGRGQKLLF

SEQ ID NO: 314938 - protein, 15 aa, Homo sapiens
  CDR3 for beta chain variable domain of TCR clone 157469 (TRBV19, TRBJ2-7)
CASSPAGSGEALRYF

SEQ ID NO: 314939 - protein, 13 aa, Homo sapiens
  CDR3 for alpha chain variable domain of TCR clone 157470 (TRAV13-1, TRAJ21)
CAASIYNFNKFYF

SEQ ID NO: 314940 - protein, 14 aa, Homo sapiens
  CDR3 for beta chain variable domain of TCR clone 157470 (TRBV20-1, TRBJ2-1)
CSALDRGTYNDQFF

SEQ ID NO: 314941 - protein, 22 aa, Homo sapiens
  CDR3 for alpha chain variable domain of TCR clone 157471 (TRAV27, TRAJ38)
CAARRNAGNNHNQNPDPAVYQL

SEQ ID NO: 314942 - protein, 13 aa, Homo sapiens
  CDR3 for beta chain variable domain of TCR clone 157471 (TRBV12-5, TRBJ2-3)
CASGDRQSDTQYF

SEQ ID NO: 314943 - protein, 13 aa, Homo sapiens
  CDR3 for alpha chain variable domain of TCR clone 157472 (TRAV17, TRAJ7)
CATANYGNNRLAF

SEQ ID NO: 314944 - protein, 16 aa, Homo sapiens
  CDR3 for beta chain variable domain of TCR clone 157472 (TRBV4-1, TRBJ2-5)
CASSQAIAASSATQYF

SEQ ID NO: 314945 - protein, 11 aa, Homo sapiens
  CDR3 for alpha chain variable domain of TCR clone 157473 (TRAV13-2, TRAJ20)
CADSNDYKLSF

SEQ ID NO: 314946 - protein, 16 aa, Homo sapiens
  CDR3 for beta chain variable domain of TCR clone 157473 (TRBV18, TRBJ2-4)
CASSPPYSGAKNIQYF

SEQ ID NO: 314947 - protein, 16 aa, Homo sapiens
  CDR3 for alpha chain variable domain of TCR clone 157474 (TRAV3, TRAJ37)
CAVRPHGSGNTGKLIF

SEQ ID NO: 314948 - protein, 17 aa, Homo sapiens
  CDR3 for beta chain variable domain of TCR clone 157474 (TRBV9, TRBJ1-2)
CASSVGKGLPLWLHLRF

SEQ ID NO: 314949 - protein, 13 aa, Homo sapiens
  CDR3 for alpha chain variable domain of TCR clone 157475 (TRAV8-3, TRAJ36)
CAGGATGANNPFF

SEQ ID NO: 314950 - protein, 15 aa, Homo sapiens
  CDR3 for beta chain variable domain of TCR clone 157475 (TRBV7-2, TRBJ1-2)
CASSPRAGWNYGYTF

SEQ ID NO: 314951 - protein, 14 aa, Homo sapiens
  CDR3 for alpha chain variable domain of TCR clone 157476 (TRAV12-3, TRAJ58)
CAMSTETSGTRLTF

SEQ ID NO: 314952 - protein, 13 aa, Homo sapiens
  CDR3 for beta chain variable domain of TCR clone 157476 (TRBV27, TRBJ2-3)
CASSWGRTDTQYF

SEQ ID NO: 314953 - protein, 14 aa, Homo sapiens
  CDR3 for alpha chain variable domain of TCR clone 157477 (TRAV13-2, TRAJ39)
CAENHNNSGNMLTF

SEQ ID NO: 314954 - protein, 13 aa, Homo sapiens
  CDR3 for beta chain variable domain of TCR clone 157477 (TRBV4-3, TRBJ2-1)
CASSQKLERQQFF

SEQ ID NO: 314955 - protein, 11 aa, Homo sapiens
  CDR3 for alpha chain variable domain of TCR clone 157478 (TRAV3, TRAJ33)
CAVRRNYQLIW

SEQ ID NO: 314956 - protein, 18 aa, Homo sapiens
  CDR3 for beta chain variable domain of TCR clone 157478 (TRBV25-1, TRBJ1-2)
CASSGLQNGQGLIFGYTF

SEQ ID NO: 314957 - protein, 15 aa, Homo sapiens
  CDR3 for alpha chain variable domain of TCR clone 157479 (TRAV13-1, TRAJ32)
CAASNGWWCYKQAQL

SEQ ID NO: 314958 - protein, 17 aa, Homo sapiens
  CDR3 for beta chain variable domain of TCR clone 157479 (TRBV15, TRBJ1-2)
CATSGRGIDVVNYGYTF

SEQ ID NO: 314959 - protein, 12 aa, Homo sapiens
  CDR3 for alpha chain variable domain of TCR clone 157480 (TRAV12-3, TRAJ17)
CAMTLTGNKLTF

SEQ ID NO: 314960 - protein, 20 aa, Homo sapiens
  CDR3 for beta chain variable domain of TCR clone 157480 (TRBV19, TRBJ2-1)
CDSSISRTVTSTRLNNEQFF

SEQ ID NO: 314961 - protein, 17 aa, Homo sapiens
  CDR3 for alpha chain variable domain of TCR clone 157481 (TRAV4, TRAJ18)
CLVVAAGRGSTLVRLYF

SEQ ID NO: 314962 - protein, 17 aa, Homo sapiens
  CDR3 for beta chain variable domain of TCR clone 157481 (TRBV28, TRBJ2-2)
CASSLATGMGDAGELFF

SEQ ID NO: 314963 - protein, 14 aa, Homo sapiens
  CDR3 for alpha chain variable domain of TCR clone 157482 (TRAV8-2, TRAJ4)
CVVSPSGGYNNLIF

SEQ ID NO: 314964 - protein, 15 aa, Homo sapiens
  CDR3 for beta chain variable domain of TCR clone 157482 (TRBV4-1, TRBJ1-4)
CASSDTGGTDEKLFF

SEQ ID NO: 314965 - protein, 13 aa, Homo sapiens
  CDR3 for alpha chain variable domain of TCR clone 157483 (TRAV25, TRAJ30)
CAGRVDRDDKIIV

SEQ ID NO: 314966 - protein, 17 aa, Homo sapiens
  CDR3 for beta chain variable domain of TCR clone 157483 (TRBV7-9, TRBJ2-6)
CASSFGAGYSGANVLTF

SEQ ID NO: 314967 - protein, 14 aa, Homo sapiens
  CDR3 for alpha chain variable domain of TCR clone 157484 (TRAV12-1, TRAJ9)
CGVNIITGGFKTIF

SEQ ID NO: 314968 - protein, 17 aa, Homo sapiens
  CDR3 for beta chain variable domain of TCR clone 157484 (TRBV9, TRBJ2-1)
CASSVEPTGMARDEQFF

SEQ ID NO: 314969 - protein, 14 aa, Homo sapiens
  CDR3 for alpha chain variable domain of TCR clone 157485 (TRAV12-2, TRAJ6)
CASKWGGGSYIPTF

SEQ ID NO: 314970 - protein, 12 aa, Homo sapiens
  CDR3 for beta chain variable domain of TCR clone 157485 (TRBV11-2, TRBJ2-2)
CASSLGGGELFF

SEQ ID NO: 314971 - protein, 16 aa, Homo sapiens
  CDR3 for alpha chain variable domain of TCR clone 157486 (TRAV12-1, TRAJ12)
CVVNTLLMDSSYKLIF

SEQ ID NO: 314972 - protein, 16 aa, Homo sapiens
  CDR3 for beta chain variable domain of TCR clone 157486 (TRBV7-3, TRBJ2-2)
CASSLKRGTLSGELFF

SEQ ID NO: 314973 - protein, 14 aa, Homo sapiens
  CDR3 for alpha chain variable domain of TCR clone 157487 (TRAV16, TRAJ54)
CALSLIQGAQELVF

SEQ ID NO: 314974 - protein, 14 aa, Homo sapiens
  CDR3 for beta chain variable domain of TCR clone 157487 (TRBV6-1, TRBJ1-3)
CASVQGGGGNTIYF

SEQ ID NO: 314975 - protein, 13 aa, Homo sapiens
  CDR3 for alpha chain variable domain of TCR clone 157488 (TRAV21, TRAJ15)
CAVANQAGTALIF

SEQ ID NO: 314976 - protein, 14 aa, Homo sapiens
  CDR3 for beta chain variable domain of TCR clone 157488 (TRBV27, TRBJ2-2)
CASSLGAATGELCF

SEQ ID NO: 314977 - protein, 16 aa, Homo sapiens
  CDR3 for alpha chain variable domain of TCR clone 157489 (TRAV12-3, TRAJ53)
CAMSPGSGGSNYKLTF

SEQ ID NO: 314978 - protein, 15 aa, Homo sapiens
  CDR3 for beta chain variable domain of TCR clone 157489 (TRBV7-3, TRBJ2-7)
CASSLTPTGYDEQYF

SEQ ID NO: 314979 - protein, 14 aa, Homo sapiens
  CDR3 for alpha chain variable domain of TCR clone 157490 (TRAV13-1, TRAJ35)
CAASKGGFGNVLHC

SEQ ID NO: 314980 - protein, 13 aa, Homo sapiens
  CDR3 for beta chain variable domain of TCR clone 157490 (TRBV7-3, TRBJ1-1)
CASGQDWGAEASF

SEQ ID NO: 314981 - protein, 15 aa, Homo sapiens
  CDR3 for alpha chain variable domain of TCR clone 157491 (TRAV25, TRAJ52)
CAGRPGGTSYGKLTF

SEQ ID NO: 314982 - protein, 15 aa, Homo sapiens
  CDR3 for beta chain variable domain of TCR clone 157491 (TRBV4-1, TRBJ2-1)
CASSQAGREYNEQFF

SEQ ID NO: 314983 - protein, 17 aa, Homo sapiens
  CDR3 for alpha chain variable domain of TCR clone 157492 (TRAV3, TRAJ4)
CAVRDGTGGYNKLILEQ

SEQ ID NO: 314984 - protein, 14 aa, Homo sapiens
  CDR3 for beta chain variable domain of TCR clone 157492 (TRBV27, TRBJ1-1)
CASSLLSGLSEAFF

SEQ ID NO: 314985 - protein, 11 aa, Homo sapiens
  CDR3 for alpha chain variable domain of TCR clone 157493 (TRAV35, TRAJ30)
CAPGEDDKIIF

SEQ ID NO: 314986 - protein, 15 aa, Homo sapiens
  CDR3 for beta chain variable domain of TCR clone 157493 (TRBV19, TRBJ2-1)
CASSIVRGEGREQFF

SEQ ID NO: 314987 - protein, 16 aa, Homo sapiens
  CDR3 for alpha chain variable domain of TCR clone 157494 (TRAV3, TRAJ13)
CAVRDPNSGGYQKVTF

SEQ ID NO: 314988 - protein, 14 aa, Homo sapiens
  CDR3 for beta chain variable domain of TCR clone 157494 (TRBV25-1, TRBJ1-1)
CASTHLGGNTEAFF

SEQ ID NO: 314989 - protein, 13 aa, Homo sapiens
  CDR3 for alpha chain variable domain of TCR clone 157495 (TRAV2, TRAJ15)
CAVASQSGTALIF

SEQ ID NO: 314990 - protein, 14 aa, Homo sapiens
  CDR3 for beta chain variable domain of TCR clone 157495 (TRBV5-1, TRBJ2-3)
CASSRGQGGGTQYF

SEQ ID NO: 314991 - protein, 15 aa, Homo sapiens
  CDR3 for alpha chain variable domain of TCR clone 157496 (TRAV12-3, TRAJ6)
CAMSATTGGSYIPTF

SEQ ID NO: 314992 - protein, 14 aa, Homo sapiens
  CDR3 for beta chain variable domain of TCR clone 157496 (TRBV2, TRBJ2-5)
CASSEVLAQETQYF

SEQ ID NO: 314993 - protein, 17 aa, Homo sapiens
  CDR3 for alpha chain variable domain of TCR clone 157497 (TRAV3, TRAJ6)
CAVRDGPRAGGSYMPTF

SEQ ID NO: 314994 - protein, 14 aa, Homo sapiens
  CDR3 for beta chain variable domain of TCR clone 157497 (TRBV7-2, TRBJ2-7)
CASSPKASFYEQYF

SEQ ID NO: 314995 - protein, 17 aa, Homo sapiens
  CDR3 for alpha chain variable domain of TCR clone 157498 (TRAV13-1, TRAJ52)
CAASSGAGGTSYGKLTF

SEQ ID NO: 314996 - protein, 19 aa, Homo sapiens
  CDR3 for beta chain variable domain of TCR clone 157498 (TRBV28, TRBJ2-1)
CASSFSIRGSGRTRYEQFF

SEQ ID NO: 314997 - protein, 14 aa, Homo sapiens
  CDR3 for alpha chain variable domain of TCR clone 157499 (TRAV8-3, TRAJ42)
CAVGAWGSQGNLIF

SEQ ID NO: 314998 - protein, 14 aa, Homo sapiens
  CDR3 for beta chain variable domain of TCR clone 157499 (TRBV19, TRBJ2-1)
CASGKSTQYNEQFF

SEQ ID NO: 314999 - protein, 14 aa, Homo sapiens
  CDR3 for alpha chain variable domain of TCR clone 157500 (TRAV13-2, TRAJ17)
CAENSKAAGNKLTF

SEQ ID NO: 315000 - protein, 14 aa, Homo sapiens
  CDR3 for beta chain variable domain of TCR clone 157500 (TRBV7-2, TRBJ2-5)
CASSPGVNQETQYF

SEQ ID NO: 315001 - protein, 14 aa, Homo sapiens
  CDR3 for alpha chain variable domain of TCR clone 157501 (TRAV12-3, TRAJ10)
NHLPLTGGGNKLTF

SEQ ID NO: 315002 - protein, 15 aa, Homo sapiens
  CDR3 for beta chain variable domain of TCR clone 157501 (TRBV10-2, TRBJ2-6)
CASSEQGTGANVLTF

SEQ ID NO: 315003 - protein, 13 aa, Homo sapiens
  CDR3 for alpha chain variable domain of TCR clone 157502 (TRAV13-2, TRAJ48)
CAEMDFGNEKLTF

SEQ ID NO: 315004 - protein, 12 aa, Homo sapiens
  CDR3 for beta chain variable domain of TCR clone 157502 (TRBV5-1, TRBJ1-2)
CASSQDAYGYTF

SEQ ID NO: 315005 - protein, 14 aa, Homo sapiens
  CDR3 for alpha chain variable domain of TCR clone 157503 (TRAV1-1, TRAJ28)
CAAPSGAGSYQLTF

SEQ ID NO: 315006 - protein, 15 aa, Homo sapiens
  CDR3 for beta chain variable domain of TCR clone 157503 (TRBV7-2, TRBJ1-2)
CASSLASGGDYGYTF

SEQ ID NO: 315007 - protein, 17 aa, Homo sapiens
  CDR3 for alpha chain variable domain of TCR clone 157504 (TRAV36/DV7, TRAJ52)
CAVAQRAGGTSYGKLTF

SEQ ID NO: 315008 - protein, 14 aa, Homo sapiens
  CDR3 for beta chain variable domain of TCR clone 157504 (TRBV6-1, TRBJ1-3)
CASGQGGGGNTIYF

SEQ ID NO: 315009 - protein, 17 aa, Homo sapiens
  CDR3 for alpha chain variable domain of TCR clone 157505 (TRAV8-6, TRAJ58)
CAVSSWVGETSGSRLTF

SEQ ID NO: 315010 - protein, 14 aa, Homo sapiens
  CDR3 for beta chain variable domain of TCR clone 157505 (TRBV19, TRBJ2-1)
CASPTFVLSGAQFF

SEQ ID NO: 315011 - protein, 11 aa, Homo sapiens
  CDR3 for alpha chain variable domain of TCR clone 157506 (TRAV12-3, TRAJ43)
CAMSVSNDMRF

SEQ ID NO: 315012 - protein, 19 aa, Homo sapiens
  CDR3 for beta chain variable domain of TCR clone 157506 (TRBV28, TRBJ2-7)
CASSYSGTSRLGWVYEQYL

SEQ ID NO: 315013 - protein, 14 aa, Homo sapiens
  CDR3 for alpha chain variable domain of TCR clone 157507 (TRAV12-2, TRAJ13)
CAVKKTGGYQKVTF

SEQ ID NO: 315014 - protein, 13 aa, Homo sapiens
  CDR3 for beta chain variable domain of TCR clone 157507 (TRBV12-4, TRBJ1-2)
CASSSGSKDGYTF

SEQ ID NO: 315015 - protein, 14 aa, Homo sapiens
  CDR3 for alpha chain variable domain of TCR clone 157508 (TRAV25, TRAJ22)
CAVRSSGSARQLTF

SEQ ID NO: 315016 - protein, 16 aa, Homo sapiens
  CDR3 for beta chain variable domain of TCR clone 157508 (TRBV4-2, TRBJ1-1)
CASSPSTGRAAPEAFF

SEQ ID NO: 315017 - protein, 21 aa, Homo sapiens
  CDR3 for alpha chain variable domain of TCR clone 157509 (TRAV8-3, )
CAVVTTRIPDIQNPDPAVFQL

SEQ ID NO: 315018 - protein, 14 aa, Homo sapiens
  CDR3 for beta chain variable domain of TCR clone 157509 (TRBV11-2, TRBJ2-7)
CASSPSTTSYEQYF

SEQ ID NO: 315019 - protein, 11 aa, Homo sapiens
  CDR3 for alpha chain variable domain of TCR clone 157510 (TRAV23/DV6, TRAJ24)
CAASSWGKLQF

SEQ ID NO: 315020 - protein, 14 aa, Homo sapiens
  CDR3 for beta chain variable domain of TCR clone 157510 (TRBV7-9, TRBJ2-2)
CASSLGHRTGELFF

SEQ ID NO: 315021 - protein, 10 aa, Homo sapiens
  CDR3 for alpha chain variable domain of TCR clone 157511 (TRAV36/DV7, TRAJ48)
CAVGNEKLTF

SEQ ID NO: 315022 - protein, 15 aa, Homo sapiens
  CDR3 for beta chain variable domain of TCR clone 157511 (TRBV6-5, TRBJ1-4)
CASSSVGGAGERLFF

SEQ ID NO: 315023 - protein, 14 aa, Homo sapiens
  CDR3 for alpha chain variable domain of TCR clone 157512 (TRAV23/DV6, TRAJ40)
CAASLTSGTYKYIF

SEQ ID NO: 315024 - protein, 13 aa, Homo sapiens
  CDR3 for beta chain variable domain of TCR clone 157512 (TRBV7-2, TRBJ2-2)
CASSLAVTGELFF

SEQ ID NO: 315025 - protein, 15 aa, Homo sapiens
  CDR3 for alpha chain variable domain of TCR clone 157513 (TRAV1-2, TRAJ30)
CAVRPHGNRDDKIIF

SEQ ID NO: 315026 - protein, 13 aa, Homo sapiens
  CDR3 for beta chain variable domain of TCR clone 157513 (TRBV4-1, TRBJ2-7)
CASSQGQAYEQYY

SEQ ID NO: 315027 - protein, 15 aa, Homo sapiens
  CDR3 for alpha chain variable domain of TCR clone 157514 (TRAV23/DV6, TRAJ13)
CAAWPGGGGYQKVTF

SEQ ID NO: 315028 - protein, 14 aa, Homo sapiens
  CDR3 for beta chain variable domain of TCR clone 157514 (TRBV20-1, TRBJ2-3)
CSARGGTSTDTQYF

SEQ ID NO: 315029 - protein, 13 aa, Homo sapiens
  CDR3 for alpha chain variable domain of TCR clone 157515 (TRAV27, TRAJ40)
CAGPPSGTYKYNF

SEQ ID NO: 315030 - protein, 13 aa, Homo sapiens
  CDR3 for beta chain variable domain of TCR clone 157515 (TRBV28, TRBJ1-2)
CAGRDRGNYGYTF

SEQ ID NO: 315031 - protein, 17 aa, Homo sapiens
  CDR3 for alpha chain variable domain of TCR clone 157516 (TRAV17, TRAJ52)
CPTERPSGGTSYGKLTF

SEQ ID NO: 315032 - protein, 15 aa, Homo sapiens
  CDR3 for beta chain variable domain of TCR clone 157516 (TRBV5-1, TRBJ2-1)
CASSLVANSYNEQFF

SEQ ID NO: 315033 - protein, 14 aa, Homo sapiens
  CDR3 for alpha chain variable domain of TCR clone 157517 (TRAV12-2, TRAJ45)
CAVNIGGGADGLTF

SEQ ID NO: 315034 - protein, 13 aa, Homo sapiens
  CDR3 for beta chain variable domain of TCR clone 157517 (TRBV19, TRBJ2-2)
CASGIWRTGELFF

SEQ ID NO: 315035 - protein, 13 aa, Homo sapiens
  CDR3 for alpha chain variable domain of TCR clone 157518 (TRAV2, TRAJ40)
CAVVTSGTYKYIF

SEQ ID NO: 315036 - protein, 13 aa, Homo sapiens
  CDR3 for beta chain variable domain of TCR clone 157518 (TRBV28, TRBJ1-2)
CAGRDRGNYGYTF

SEQ ID NO: 315037 - protein, 17 aa, Homo sapiens
  CDR3 for alpha chain variable domain of TCR clone 157519 (TRAV8-3, TRAJ34)
CAIPGKLIFGTGTRLQV

SEQ ID NO: 315038 - protein, 15 aa, Homo sapiens
  CDR3 for beta chain variable domain of TCR clone 157519 (TRBV5-7, TRBJ2-1)
CASSRRLAGDNKQFF

SEQ ID NO: 315039 - protein, 12 aa, Homo sapiens
  CDR3 for alpha chain variable domain of TCR clone 157520 (TRAV12-3, TRAJ17)
CAMTLTGNKLTC

SEQ ID NO: 315040 - protein, 15 aa, Homo sapiens
  CDR3 for beta chain variable domain of TCR clone 157520 (TRBV19, TRBJ2-1)
CASSILGEGRNEQFF

SEQ ID NO: 315041 - protein, 17 aa, Homo sapiens
  CDR3 for alpha chain variable domain of TCR clone 157521 (TRAV13-1, )
CAANIQNPDPAAYQLRD

SEQ ID NO: 315042 - protein, 14 aa, Homo sapiens
  CDR3 for beta chain variable domain of TCR clone 157521 (TRBV19, TRBJ2-7)
CASSIGPNSCEQYF

SEQ ID NO: 315043 - protein, 14 aa, Homo sapiens
  CDR3 for alpha chain variable domain of TCR clone 157522 (TRAV12-3, TRAJ10)
SHLPLTGGGNKLNF

SEQ ID NO: 315044 - protein, 13 aa, Homo sapiens
  CDR3 for beta chain variable domain of TCR clone 157522 (TRBV9, TRBJ2-1)
CASSPSGGNEQFF

SEQ ID NO: 315045 - protein, 12 aa, Homo sapiens
  CDR3 for alpha chain variable domain of TCR clone 157523 (TRAV3, TRAJ43)
CAVRDPNNDMRF

SEQ ID NO: 315046 - protein, 13 aa, Homo sapiens
  CDR3 for beta chain variable domain of TCR clone 157523 (TRBV19, TRBJ1-2)
CASSAPGQDGYTF

SEQ ID NO: 315047 - protein, 13 aa, Homo sapiens
  CDR3 for alpha chain variable domain of TCR clone 157524 (TRAV12-3, TRAJ33)
CAMSVNSNYQLIL

SEQ ID NO: 315048 - protein, 11 aa, Homo sapiens
  CDR3 for beta chain variable domain of TCR clone 157524 (TRBV7-3, TRBJ2-5)
CASSLSETQYF

SEQ ID NO: 315049 - protein, 16 aa, Homo sapiens
  CDR3 for alpha chain variable domain of TCR clone 157525 (TRAV8-3, TRAJ52)
CAVQPAGGTSYGKLTF

SEQ ID NO: 315050 - protein, 15 aa, Homo sapiens
  CDR3 for beta chain variable domain of TCR clone 157525 (TRBV11-2, TRBJ2-7)
CASSLAGGVASERYF

SEQ ID NO: 315051 - protein, 14 aa, Homo sapiens
  CDR3 for alpha chain variable domain of TCR clone 157526 (TRAV1-2, TRAJ16)
CVVNRFSDGQQLLF

SEQ ID NO: 315052 - protein, 15 aa, Homo sapiens
  CDR3 for beta chain variable domain of TCR clone 157526 (TRBV9, TRBJ1-6)
CASSVAGTGDSPLHF

SEQ ID NO: 315053 - protein, 14 aa, Homo sapiens
  CDR3 for alpha chain variable domain of TCR clone 157527 (TRAV1-2, TRAJ16)
CVVNRFSDGQKLLF

SEQ ID NO: 315054 - protein, 15 aa, Homo sapiens
  CDR3 for beta chain variable domain of TCR clone 157527 (TRBV9, TRBJ1-6)
CASSVAGTGESPLHF

SEQ ID NO: 315055 - protein, 14 aa, Homo sapiens
  CDR3 for alpha chain variable domain of TCR clone 157528 (TRAV12-2, TRAJ6)
CAVMTFGRGTSLIV

SEQ ID NO: 315056 - protein, 15 aa, Homo sapiens
  CDR3 for beta chain variable domain of TCR clone 157528 (TRBV6-1, TRBJ2-5)
CASPRWGTEGQTQYF

SEQ ID NO: 315057 - protein, 12 aa, Homo sapiens
  CDR3 for alpha chain variable domain of TCR clone 157529 (TRAV21, TRAJ20)
CAVRGNDYKLSF

SEQ ID NO: 315058 - protein, 14 aa, Homo sapiens
  CDR3 for beta chain variable domain of TCR clone 157529 (TRBV7-8, TRBJ2-7)
CASSQTQGADEQYL

SEQ ID NO: 315059 - protein, 16 aa, Homo sapiens
  CDR3 for alpha chain variable domain of TCR clone 157530 (TRAV13-1, TRAJ10)
CAASRKRREEETNSPL

SEQ ID NO: 315060 - protein, 14 aa, Homo sapiens
  CDR3 for beta chain variable domain of TCR clone 157530 (TRBV7-3, TRBJ2-1)
CASSLGTSANEQFF

SEQ ID NO: 315061 - protein, 16 aa, Homo sapiens
  CDR3 for alpha chain variable domain of TCR clone 157531 (TRAV30, TRAJ24)
CGTEIVDADSWWKFQF

SEQ ID NO: 315062 - protein, 17 aa, Homo sapiens
  CDR3 for beta chain variable domain of TCR clone 157531 (TRBV20-1, TRBJ2-1)
CSAPPRLAGTRYNEQFF

SEQ ID NO: 315063 - protein, 12 aa, Homo sapiens
  CDR3 for alpha chain variable domain of TCR clone 157532 (TRAV21, TRAJ37)
CAVRGNPGKLIF

SEQ ID NO: 315064 - protein, 14 aa, Homo sapiens
  CDR3 for beta chain variable domain of TCR clone 157532 (TRBV19, TRBJ2-1)
CASEVTGARNEQFF

SEQ ID NO: 315065 - protein, 15 aa, Homo sapiens
  CDR3 for alpha chain variable domain of TCR clone 157533 (TRAV3, TRAJ11)
CAVRDGGSGYSTLTL

SEQ ID NO: 315066 - protein, 13 aa, Homo sapiens
  CDR3 for beta chain variable domain of TCR clone 157533 (TRBV7-9, TRBJ1-2)
CASSLKQNYGYTF

SEQ ID NO: 315067 - protein, 12 aa, Homo sapiens
  CDR3 for alpha chain variable domain of TCR clone 157534 (TRAV13-1, TRAJ21)
CAAKEGFNKFYF

SEQ ID NO: 315068 - protein, 16 aa, Homo sapiens
  CDR3 for beta chain variable domain of TCR clone 157534 (TRBV4-1, TRBJ2-5)
CASSHADRVGGETQYF

SEQ ID NO: 315069 - protein, 14 aa, Homo sapiens
  CDR3 for alpha chain variable domain of TCR clone 157535 (TRAV13-1, TRAJ20)
CAARPGSNDYKLSF

SEQ ID NO: 315070 - protein, 13 aa, Homo sapiens
  CDR3 for beta chain variable domain of TCR clone 157535 (TRBV10-3, TRBJ2-7)
CASKLAVNYEQYF

SEQ ID NO: 315071 - protein, 14 aa, Homo sapiens
  CDR3 for alpha chain variable domain of TCR clone 157536 (TRAV23/DV6, TRAJ8)
CAASKATGFQKLVF

SEQ ID NO: 315072 - protein, 15 aa, Homo sapiens
  CDR3 for beta chain variable domain of TCR clone 157536 (TRBV28, TRBJ2-3)
CASSPERQGANTQYF

SEQ ID NO: 315073 - protein, 15 aa, Homo sapiens
  CDR3 for alpha chain variable domain of TCR clone 157537 (TRAV3, TRAJ4)
CAVRDGTGGYIKLIF

SEQ ID NO: 315074 - protein, 16 aa, Homo sapiens
  CDR3 for beta chain variable domain of TCR clone 157537 (TRBV27, TRBJ2-2)
CASSSSGVSNTGELLF

SEQ ID NO: 315075 - protein, 14 aa, Homo sapiens
  CDR3 for alpha chain variable domain of TCR clone 157538 (TRAV1-1, TRAJ27)
CAVIYNTNAGKSTF

SEQ ID NO: 315076 - protein, 15 aa, Homo sapiens
  CDR3 for beta chain variable domain of TCR clone 157538 (TRBV27, TRBJ2-1)
CASSNGGGSSNEQSF

SEQ ID NO: 315077 - protein, 17 aa, Homo sapiens
  CDR3 for alpha chain variable domain of TCR clone 157539 (TRAV4, TRAJ18)
CLVVAAGRGPTLGRLYF

SEQ ID NO: 315078 - protein, 17 aa, Homo sapiens
  CDR3 for beta chain variable domain of TCR clone 157539 (TRBV28, TRBJ2-2)
CASSLATGMGDAGELSF

SEQ ID NO: 315079 - protein, 19 aa, Homo sapiens
  CDR3 for alpha chain variable domain of TCR clone 157540 (TRAV3, TRAJ37)
CAVRDIVGGHPSNTGTLIF

SEQ ID NO: 315080 - protein, 14 aa, Homo sapiens
  CDR3 for beta chain variable domain of TCR clone 157540 (TRBV7-8, TRBJ2-3)
CASSLEAGTDTQYF

SEQ ID NO: 315081 - protein, 13 aa, Homo sapiens
  CDR3 for alpha chain variable domain of TCR clone 157541 (TRAV13-2, TRAJ31)
CAENLNNNAGLMF

SEQ ID NO: 315082 - protein, 15 aa, Homo sapiens
  CDR3 for beta chain variable domain of TCR clone 157541 (TRBV5-4, TRBJ2-1)
CASSREGLPYNEQFF

SEQ ID NO: 315083 - protein, 14 aa, Homo sapiens
  CDR3 for alpha chain variable domain of TCR clone 157542 (TRAV26-1, TRAJ38)
CIADNAGNNRKLIW

SEQ ID NO: 315084 - protein, 12 aa, Homo sapiens
  CDR3 for beta chain variable domain of TCR clone 157542 (TRBV29-1, TRBJ2-3)
CSVTGGAATQYF

SEQ ID NO: 315085 - protein, 13 aa, Homo sapiens
  CDR3 for alpha chain variable domain of TCR clone 157543 (TRAV27, TRAJ17)
CAGAATAGNKLTF

SEQ ID NO: 315086 - protein, 15 aa, Homo sapiens
  CDR3 for beta chain variable domain of TCR clone 157543 (TRBV5-1, TRBJ2-3)
CSSRNQAGSTDTQYF

SEQ ID NO: 315087 - protein, 17 aa, Homo sapiens
  CDR3 for alpha chain variable domain of TCR clone 157544 (TRAV29/DV5, TRAJ40)
CAASVIYTTSGTYKYIF

SEQ ID NO: 315088 - protein, 13 aa, Homo sapiens
  CDR3 for beta chain variable domain of TCR clone 157544 (TRBV6-1, TRBJ2-1)
CASSHDRNKEQFF

SEQ ID NO: 315089 - protein, 13 aa, Homo sapiens
  CDR3 for alpha chain variable domain of TCR clone 157545 (TRAV21, TRAJ33)
CAVAGDSNYQLIW

SEQ ID NO: 315090 - protein, 16 aa, Homo sapiens
  CDR3 for beta chain variable domain of TCR clone 157545 (TRBV19, TRBJ2-1)
CASSKAGPSSYNEQFF

SEQ ID NO: 315091 - protein, 14 aa, Homo sapiens
  CDR3 for alpha chain variable domain of TCR clone 157546 (TRAV13-1, TRAJ20)
CAARPGSNYYKLSF

SEQ ID NO: 315092 - protein, 13 aa, Homo sapiens
  CDR3 for beta chain variable domain of TCR clone 157546 (TRBV6-6, TRBJ2-7)
CASSSSGSYEQYF

SEQ ID NO: 315093 - protein, 14 aa, Homo sapiens
  CDR3 for alpha chain variable domain of TCR clone 157547 (TRAV13-1, TRAJ39)
CAASKNNAGKMLTF

SEQ ID NO: 315094 - protein, 14 aa, Homo sapiens
  CDR3 for beta chain variable domain of TCR clone 157547 (TRBV20-1, TRBJ2-7)
CSAPELAGVGEQYF

SEQ ID NO: 315095 - protein, 13 aa, Homo sapiens
  CDR3 for alpha chain variable domain of TCR clone 157548 (TRAV13-2, TRAJ15)
GAEKNQAGTALIF

SEQ ID NO: 315096 - protein, 15 aa, Homo sapiens
  CDR3 for beta chain variable domain of TCR clone 157548 (TRBV29-1, TRBJ2-5)
CSVAPGQGARETQYF

SEQ ID NO: 315097 - protein, 14 aa, Homo sapiens
  CDR3 for alpha chain variable domain of TCR clone 157549 (TRAV12-2, TRAJ13)
CAVKKTGGYQKVTF

SEQ ID NO: 315098 - protein, 14 aa, Homo sapiens
  CDR3 for beta chain variable domain of TCR clone 157549 (TRBV19, TRBJ2-3)
CASSAPRGTDTQYF

SEQ ID NO: 315099 - protein, 14 aa, Homo sapiens
  CDR3 for alpha chain variable domain of TCR clone 157550 (TRAV3, TRAJ9)
CAVRGNTGGFKTIF

SEQ ID NO: 315100 - protein, 16 aa, Homo sapiens
  CDR3 for beta chain variable domain of TCR clone 157550 (TRBV7-2, TRBJ2-7)
CASSLGLAGGAYEQYF

SEQ ID NO: 315101 - protein, 14 aa, Homo sapiens
  CDR3 for alpha chain variable domain of TCR clone 157551 (TRAV26-1, TRAJ45)
CIDVTGGGADGLTF

SEQ ID NO: 315102 - protein, 15 aa, Homo sapiens
  CDR3 for beta chain variable domain of TCR clone 157551 (TRBV5-1, TRBJ1-1)
CASSSTTGTNTEAFF

SEQ ID NO: 315103 - protein, 17 aa, Homo sapiens
  CDR3 for alpha chain variable domain of TCR clone 157552 (TRAV13-1, TRAJ28)
CAASPPYSGAGSYQLTF

SEQ ID NO: 315104 - protein, 13 aa, Homo sapiens
  CDR3 for beta chain variable domain of TCR clone 157552 (TRBV14, TRBJ1-1)
CASSREFGTEAFF

SEQ ID NO: 315105 - protein, 14 aa, Homo sapiens
  CDR3 for alpha chain variable domain of TCR clone 157553 (TRAV1-2, TRAJ16)
CAVNRFSDGQELLF

SEQ ID NO: 315106 - protein, 14 aa, Homo sapiens
  CDR3 for beta chain variable domain of TCR clone 157553 (TRBV19, TRBJ2-1)
CASPTFVLSGEQFF

SEQ ID NO: 315107 - protein, 12 aa, Homo sapiens
  CDR3 for alpha chain variable domain of TCR clone 157554 (TRAV8-4, TRAJ31)
CAVSDSNARLMF

SEQ ID NO: 315108 - protein, 14 aa, Homo sapiens
  CDR3 for beta chain variable domain of TCR clone 157554 (TRBV20-1, TRBJ2-7)
CSAKRGRSPYEQYF

SEQ ID NO: 315109 - protein, 13 aa, Homo sapiens
  CDR3 for alpha chain variable domain of TCR clone 157555 (TRAV29/DV5, TRAJ31)
CAASSNNNARLMF

SEQ ID NO: 315110 - protein, 14 aa, Homo sapiens
  CDR3 for beta chain variable domain of TCR clone 157555 (TRBV7-9, TRBJ2-2)
CASSLVQDTGELFF

SEQ ID NO: 315111 - protein, 14 aa, Homo sapiens
  CDR3 for alpha chain variable domain of TCR clone 157556 (TRAV2, TRAJ20)
CAVEDGTNDYKLSF

SEQ ID NO: 315112 - protein, 13 aa, Homo sapiens
  CDR3 for beta chain variable domain of TCR clone 157556 (TRBV7-2, TRBJ1-1)
CASIRNTNTEAFF

SEQ ID NO: 315113 - protein, 11 aa, Homo sapiens
  CDR3 for alpha chain variable domain of TCR clone 157557 (TRAV2, TRAJ13)
CASGGYQKVTF

SEQ ID NO: 315114 - protein, 15 aa, Homo sapiens
  CDR3 for beta chain variable domain of TCR clone 157557 (TRBV28, TRBJ1-3)
CASSMGWASGNAIYF

SEQ ID NO: 315115 - protein, 14 aa, Homo sapiens
  CDR3 for alpha chain variable domain of TCR clone 157558 (TRAV13-2, TRAJ23)
CAENIVPVGGKLIF

SEQ ID NO: 315116 - protein, 17 aa, Homo sapiens
  CDR3 for beta chain variable domain of TCR clone 157558 (TRBV5-1, TRBJ1-1)
CASSFMTGGKRDTEAFF

SEQ ID NO: 315117 - protein, 12 aa, Homo sapiens
  CDR3 for alpha chain variable domain of TCR clone 157559 (TRAV13-1, TRAJ49)
CAAPNTGNLFYF

SEQ ID NO: 315118 - protein, 17 aa, Homo sapiens
  CDR3 for beta chain variable domain of TCR clone 157559 (TRBV25-1, TRBJ2-7)
CASSAARVVFSSYEQYF

SEQ ID NO: 315119 - protein, 17 aa, Homo sapiens
  CDR3 for alpha chain variable domain of TCR clone 157560 (TRAV4, TRAJ18)
RLVVAAGRGSTLGRLYF

SEQ ID NO: 315120 - protein, 17 aa, Homo sapiens
  CDR3 for beta chain variable domain of TCR clone 157560 (TRBV28, TRBJ2-2)
CASSLATGMGDAGELFF

SEQ ID NO: 315121 - protein, 14 aa, Homo sapiens
  CDR3 for alpha chain variable domain of TCR clone 157561 (TRAV1-2, TRAJ8)
CAVREDTGIQKLVF

SEQ ID NO: 315122 - protein, 16 aa, Homo sapiens
  CDR3 for beta chain variable domain of TCR clone 157561 (TRBV19, TRBJ2-1)
CASSKAGPSSYNEQFF

SEQ ID NO: 315123 - protein, 15 aa, Homo sapiens
  CDR3 for alpha chain variable domain of TCR clone 157562 (TRAV8-3, TRAJ6)
CAAGGEEATYLHLEE

SEQ ID NO: 315124 - protein, 14 aa, Homo sapiens
  CDR3 for beta chain variable domain of TCR clone 157562 (TRBV5-1, TRBJ2-7)
CASSWGESLYEQYF

SEQ ID NO: 315125 - protein, 17 aa, Homo sapiens
  CDR3 for alpha chain variable domain of TCR clone 157563 (TRAV3, TRAJ6)
CAVRDGPRAGGSYIPTF

SEQ ID NO: 315126 - protein, 13 aa, Homo sapiens
  CDR3 for beta chain variable domain of TCR clone 157563 (TRBV28, TRBJ2-5)
CASSFAGGETQYF

SEQ ID NO: 315127 - protein, 11 aa, Homo sapiens
  CDR3 for alpha chain variable domain of TCR clone 157564 (TRAV2, TRAJ16)
CAVGDGQKLLF

SEQ ID NO: 315128 - protein, 15 aa, Homo sapiens
  CDR3 for beta chain variable domain of TCR clone 157564 (TRBV11-2, TRBJ2-1)
CASSTAGQSLNEQFF

SEQ ID NO: 315129 - protein, 11 aa, Homo sapiens
  CDR3 for alpha chain variable domain of TCR clone 157565 (TRAV3, TRAJ21)
CAVGNFDKFYF

SEQ ID NO: 315130 - protein, 16 aa, Homo sapiens
  CDR3 for beta chain variable domain of TCR clone 157565 (TRBV12-5, TRBJ2-5)
CASGPRTSGNQETQYF

SEQ ID NO: 315131 - protein, 14 aa, Homo sapiens
  CDR3 for alpha chain variable domain of TCR clone 157566 (TRAV25, TRAJ27)
FAGPGNTNAGKSTF

SEQ ID NO: 315132 - protein, 16 aa, Homo sapiens
  CDR3 for beta chain variable domain of TCR clone 157566 (TRBV4-1, TRBJ2-6)
CASSQDGGPGANVLTF

SEQ ID NO: 315133 - protein, 14 aa, Homo sapiens
  CDR3 for alpha chain variable domain of TCR clone 157567 (TRAV8-6, TRAJ49)
CAVSDPGTGNQFNF

SEQ ID NO: 315134 - protein, 13 aa, Homo sapiens
  CDR3 for beta chain variable domain of TCR clone 157567 (TRBV7-9, TRBJ1-2)
CASSLKQNYGYTF

SEQ ID NO: 315135 - protein, 15 aa, Homo sapiens
  CDR3 for alpha chain variable domain of TCR clone 157568 (TRAV2, TRAJ15)
CAVADREQAGTALIF

SEQ ID NO: 315136 - protein, 14 aa, Homo sapiens
  CDR3 for beta chain variable domain of TCR clone 157568 (TRBV5-1, TRBJ2-7)
CASSRGESLYEQYF

SEQ ID NO: 315137 - protein, 12 aa, Homo sapiens
  CDR3 for alpha chain variable domain of TCR clone 157569 (TRAV25, TRAJ35)
CAGIGFGNVLHC

SEQ ID NO: 315138 - protein, 16 aa, Homo sapiens
  CDR3 for beta chain variable domain of TCR clone 157569 (TRBV27, TRBJ2-2)
CASCFRGLVRTGELFF

SEQ ID NO: 315139 - protein, 17 aa, Homo sapiens
  CDR3 for alpha chain variable domain of TCR clone 157570 (TRAV3, TRAJ42)
CAVRDRDYGGSQGNLIF

SEQ ID NO: 315140 - protein, 14 aa, Homo sapiens
  CDR3 for beta chain variable domain of TCR clone 157570 (TRBV7-3, TRBJ2-2)
CASSLNSSTGELFF

SEQ ID NO: 315141 - protein, 15 aa, Homo sapiens
  CDR3 for alpha chain variable domain of TCR clone 157571 (TRAV27, TRAJ38)
CAARRNAGNNRKLLG

SEQ ID NO: 315142 - protein, 13 aa, Homo sapiens
  CDR3 for beta chain variable domain of TCR clone 157571 (TRBV12-5, TRBJ2-3)
CASGDRQSDTQYF

SEQ ID NO: 315143 - protein, 11 aa, Homo sapiens
  CDR3 for alpha chain variable domain of TCR clone 157572 (TRAV12-1, TRAJ30)
CVVNGQDKIIF

SEQ ID NO: 315144 - protein, 15 aa, Homo sapiens
  CDR3 for beta chain variable domain of TCR clone 157572 (TRBV6-4, TRBJ2-1)
CASSSGTSGYNEQFF

SEQ ID NO: 315145 - protein, 15 aa, Homo sapiens
  CDR3 for alpha chain variable domain of TCR clone 157573 (TRAV35, TRAJ58)
CAGRRQETSGSRLTF

SEQ ID NO: 315146 - protein, 15 aa, Homo sapiens
  CDR3 for beta chain variable domain of TCR clone 157573 (TRBV5-4, TRBJ2-1)
CASSREGLPYNEQFF

SEQ ID NO: 315147 - protein, 13 aa, Homo sapiens
  CDR3 for alpha chain variable domain of TCR clone 157574 (TRAV1-2, TRAJ9)
CAALNTGGFKTIF

SEQ ID NO: 315148 - protein, 12 aa, Homo sapiens
  CDR3 for beta chain variable domain of TCR clone 157574 (TRBV11-3, TRBJ1-1)
CASSHRQDEAFF

SEQ ID NO: 315149 - protein, 17 aa, Homo sapiens
  CDR3 for alpha chain variable domain of TCR clone 157575 (TRAV8-1, TRAJ43)
CAVTNDMRFGAGTRLTV

SEQ ID NO: 315150 - protein, 14 aa, Homo sapiens
  CDR3 for beta chain variable domain of TCR clone 157575 (TRBV18, TRBJ2-7)
CASSPRGGAYEQYF

SEQ ID NO: 315151 - protein, 17 aa, Homo sapiens
  CDR3 for alpha chain variable domain of TCR clone 157576 (TRAV3, TRAJ42)
CAVRDRDYGGSQVNLIF

SEQ ID NO: 315152 - protein, 18 aa, Homo sapiens
  CDR3 for beta chain variable domain of TCR clone 157576 (TRBV20-1, TRBJ2-3)
CSASGLAGGPGTTDTQYF

SEQ ID NO: 315153 - protein, 16 aa, Homo sapiens
  CDR3 for alpha chain variable domain of TCR clone 157577 (TRAV22, TRAJ45)
CAVERGKRGGADGLTF

SEQ ID NO: 315154 - protein, 12 aa, Homo sapiens
  CDR3 for beta chain variable domain of TCR clone 157577 (TRBV11-2, TRBJ2-1)
CASSPGNNEQFF

SEQ ID NO: 315155 - protein, 10 aa, Homo sapiens
  CDR3 for alpha chain variable domain of TCR clone 157578 (TRAV23/DV6, TRAJ31)
CARGGARLMF

SEQ ID NO: 315156 - protein, 14 aa, Homo sapiens
  CDR3 for beta chain variable domain of TCR clone 157578 (TRBV7-8, TRBJ1-2)
CASSPVSLSYGYTF

SEQ ID NO: 315157 - protein, 16 aa, Homo sapiens
  CDR3 for alpha chain variable domain of TCR clone 157579 (TRAV3, TRAJ6)
CCERRPQGRRKLHTYI

SEQ ID NO: 315158 - protein, 14 aa, Homo sapiens
  CDR3 for beta chain variable domain of TCR clone 157579 (TRBV7-2, TRBJ2-7)
CASSPKTSFYEQYF

SEQ ID NO: 315159 - protein, 13 aa, Homo sapiens
  CDR3 for alpha chain variable domain of TCR clone 157580 (TRAV2, TRAJ40)
CAVVTSGTYKYIF

SEQ ID NO: 315160 - protein, 16 aa, Homo sapiens
  CDR3 for beta chain variable domain of TCR clone 157580 (TRBV29-1, TRBJ2-6)
CSVEDITCSVANDLTF

SEQ ID NO: 315161 - protein, 13 aa, Homo sapiens
  CDR3 for alpha chain variable domain of TCR clone 157581 (TRAV8-6, TRAJ34)
CAVSDQGTDTLIF

SEQ ID NO: 315162 - protein, 14 aa, Homo sapiens
  CDR3 for beta chain variable domain of TCR clone 157581 (TRBV12-4, TRBJ1-1)
CASTWTGHDTEAFF

SEQ ID NO: 315163 - protein, 15 aa, Homo sapiens
  CDR3 for alpha chain variable domain of TCR clone 157582 (TRAV26-1, TRAJ56)
CIVRVTTGANSKLTF

SEQ ID NO: 315164 - protein, 15 aa, Homo sapiens
  CDR3 for beta chain variable domain of TCR clone 157582 (TRBV27, TRBJ2-7)
CASSPQREGQREQYF

SEQ ID NO: 315165 - protein, 16 aa, Homo sapiens
  CDR3 for alpha chain variable domain of TCR clone 157583 (TRAV3, TRAJ37)
CAVRGRGSGNIGKLIF

SEQ ID NO: 315166 - protein, 13 aa, Homo sapiens
  CDR3 for beta chain variable domain of TCR clone 157583 (TRBV14, TRBJ2-7)
CASSQDRRGEQYF

SEQ ID NO: 315167 - protein, 13 aa, Homo sapiens
  CDR3 for alpha chain variable domain of TCR clone 157584 (TRAV24, TRAJ22)
CAFGSGSARQLTF

SEQ ID NO: 315168 - protein, 12 aa, Homo sapiens
  CDR3 for beta chain variable domain of TCR clone 157584 (TRBV7-8, TRBJ2-7)
CASSLGDREQYF

SEQ ID NO: 315169 - protein, 14 aa, Homo sapiens
  CDR3 for alpha chain variable domain of TCR clone 157585 (TRAV13-1, TRAJ44)
CAAKATGSASRLTF

SEQ ID NO: 315170 - protein, 12 aa, Homo sapiens
  CDR3 for beta chain variable domain of TCR clone 157585 (TRBV7-8, TRBJ2-7)
CASSLGDREQYF

SEQ ID NO: 315171 - protein, 13 aa, Homo sapiens
  CDR3 for alpha chain variable domain of TCR clone 157586 (TRAV12-2, TRAJ50)
CAVIVPSYDKVIF

SEQ ID NO: 315172 - protein, 15 aa, Homo sapiens
  CDR3 for beta chain variable domain of TCR clone 157586 (TRBV28, TRBJ1-4)
CASSASGVPNEKLFF

SEQ ID NO: 315173 - protein, 12 aa, Homo sapiens
  CDR3 for alpha chain variable domain of TCR clone 157587 (TRAV21, TRAJ11)
CAATSGYSTLTF

SEQ ID NO: 315174 - protein, 14 aa, Homo sapiens
  CDR3 for beta chain variable domain of TCR clone 157587 (TRBV28, TRBJ1-1)
CASSESGRGTEAFF

SEQ ID NO: 315175 - protein, 16 aa, Homo sapiens
  CDR3 for alpha chain variable domain of TCR clone 157588 (TRAV1-1, TRAJ29)
CAVRSTRNSGNTPLVF

SEQ ID NO: 315176 - protein, 14 aa, Homo sapiens
  CDR3 for beta chain variable domain of TCR clone 157588 (TRBV4-3, TRBJ1-5)
CASSQGGQGWPQHF

SEQ ID NO: 315177 - protein, 13 aa, Homo sapiens
  CDR3 for alpha chain variable domain of TCR clone 157589 (TRAV8-6, TRAJ8)
CAVSNKGFQKLVF

SEQ ID NO: 315178 - protein, 15 aa, Homo sapiens
  CDR3 for beta chain variable domain of TCR clone 157589 (TRBV28, TRBJ2-5)
CASSSGRTIQETQYF

SEQ ID NO: 315179 - protein, 14 aa, Homo sapiens
  CDR3 for alpha chain variable domain of TCR clone 157590 (TRAV4, TRAJ30)
CLVGDMNRDDKIIF

SEQ ID NO: 315180 - protein, 15 aa, Homo sapiens
  CDR3 for beta chain variable domain of TCR clone 157590 (TRBV18, TRBJ2-7)
CASSPTFMDSYEQYF

SEQ ID NO: 315181 - protein, 14 aa, Homo sapiens
  CDR3 for alpha chain variable domain of TCR clone 157591 (TRAV1-1, TRAJ27)
CAFSATPMQANQPL

SEQ ID NO: 315182 - protein, 17 aa, Homo sapiens
  CDR3 for beta chain variable domain of TCR clone 157591 (TRBV20-1, TRBJ2-3)
CSARDPKGVSATDTQYF

SEQ ID NO: 315183 - protein, 16 aa, Homo sapiens
  CDR3 for alpha chain variable domain of TCR clone 157592 (TRAV30, TRAJ24)
CGTEMVDADSWGKFQF

SEQ ID NO: 315184 - protein, 17 aa, Homo sapiens
  CDR3 for beta chain variable domain of TCR clone 157592 (TRBV20-1, TRBJ2-1)
CSAPPRLAGTRYNKQFF

SEQ ID NO: 315185 - protein, 13 aa, Homo sapiens
  CDR3 for alpha chain variable domain of TCR clone 157593 (TRAV4, TRAJ34)
CLVGGYNTDKLIF

SEQ ID NO: 315186 - protein, 23 aa, Homo sapiens
  CDR3 for beta chain variable domain of TCR clone 157593 (TRBV4-2, TRBJ2-3)
CASSQDPPRASSISGGRGDTQYF

SEQ ID NO: 315187 - protein, 16 aa, Homo sapiens
  CDR3 for alpha chain variable domain of TCR clone 157594 (TRAV29/DV5, TRAJ36)
CAASAHYQSGANNLFF

SEQ ID NO: 315188 - protein, 17 aa, Homo sapiens
  CDR3 for beta chain variable domain of TCR clone 157594 (TRBV20-1, TRBJ2-1)
CSAPPRLAGTRYNEQFF

SEQ ID NO: 315189 - protein, 18 aa, Homo sapiens
  CDR3 for alpha chain variable domain of TCR clone 157595 (TRAV26-1, TRAJ52)
CIIRVEGAGCTSYGKLTF

SEQ ID NO: 315190 - protein, 13 aa, Homo sapiens
  CDR3 for beta chain variable domain of TCR clone 157595 (TRBV7-3, TRBJ1-2)
CASSLKRGYGYTF

SEQ ID NO: 315191 - protein, 14 aa, Homo sapiens
  CDR3 for alpha chain variable domain of TCR clone 157596 (TRAV29/DV5, TRAJ34)
CAASASRETDKLIF

SEQ ID NO: 315192 - protein, 13 aa, Homo sapiens
  CDR3 for beta chain variable domain of TCR clone 157596 (TRBV20-1, TRBJ2-3)
CSASRQAADTQYF

SEQ ID NO: 315193 - protein, 16 aa, Homo sapiens
  CDR3 for alpha chain variable domain of TCR clone 157597 (TRAV16, TRAJ4)
CITVLPFSGGYNKLIF

SEQ ID NO: 315194 - protein, 15 aa, Homo sapiens
  CDR3 for beta chain variable domain of TCR clone 157597 (TRBV6-3, TRBJ2-7)
CASSSPGTVFYEQYF

SEQ ID NO: 315195 - protein, 15 aa, Homo sapiens
  CDR3 for alpha chain variable domain of TCR clone 157598 (TRAV26-1, TRAJ37)
CIVKTGSSNTGKLIC

SEQ ID NO: 315196 - protein, 12 aa, Homo sapiens
  CDR3 for beta chain variable domain of TCR clone 157598 (TRBV7-8, TRBJ2-7)
CASSLGDREQYF

SEQ ID NO: 315197 - protein, 13 aa, Homo sapiens
  CDR3 for alpha chain variable domain of TCR clone 157599 (TRAV41, TRAJ57)
CAVKEGGSEKLVF

SEQ ID NO: 315198 - protein, 16 aa, Homo sapiens
  CDR3 for beta chain variable domain of TCR clone 157599 (TRBV5-7, TRBJ2-5)
CASIRGQTGYQETQYF

SEQ ID NO: 315199 - protein, 14 aa, Homo sapiens
  CDR3 for alpha chain variable domain of TCR clone 157600 (TRAV12-3, TRAJ48)
CAVSETFGTEKLTF

SEQ ID NO: 315200 - protein, 14 aa, Homo sapiens
  CDR3 for beta chain variable domain of TCR clone 157600 (TRBV13, TRBJ2-7)
CASSLKGASYEQYF

SEQ ID NO: 315201 - protein, 14 aa, Homo sapiens
  CDR3 for alpha chain variable domain of TCR clone 157601 (TRAV16, TRAJ39)
CALSTNNAGNMLTF

SEQ ID NO: 315202 - protein, 19 aa, Homo sapiens
  CDR3 for beta chain variable domain of TCR clone 157601 (TRBV6-6, TRBJ2-1)
AAPSQTSVYVCASSYEQFF

SEQ ID NO: 315203 - protein, 15 aa, Homo sapiens
  CDR3 for alpha chain variable domain of TCR clone 157602 (TRAV23/DV6, TRAJ13)
CAAWPGGGGYQKVTF

SEQ ID NO: 315204 - protein, 16 aa, Homo sapiens
  CDR3 for beta chain variable domain of TCR clone 157602 (TRBV6-1, TRBJ2-5)
CASSETLDRGAETQYF

SEQ ID NO: 315205 - protein, 16 aa, Homo sapiens
  CDR3 for alpha chain variable domain of TCR clone 157603 (TRAV26-1, TRAJ36)
CIVRAIGRSGANNLFF

SEQ ID NO: 315206 - protein, 14 aa, Homo sapiens
  CDR3 for beta chain variable domain of TCR clone 157603 (TRBV25-1, TRBJ2-1)
CASSNTGGYNEQFF

SEQ ID NO: 315207 - protein, 16 aa, Homo sapiens
  CDR3 for alpha chain variable domain of TCR clone 157604 (TRAV27, TRAJ13)
CAGAKSDSGGYHKGTF

SEQ ID NO: 315208 - protein, 15 aa, Homo sapiens
  CDR3 for beta chain variable domain of TCR clone 157604 (TRBV29-1, TRBJ2-1)
CSVGRHALFYNEQFF

SEQ ID NO: 315209 - protein, 13 aa, Homo sapiens
  CDR3 for alpha chain variable domain of TCR clone 157605 (TRAV8-6, TRAJ49)
CAVITNTGNQFYF

SEQ ID NO: 315210 - protein, 17 aa, Homo sapiens
  CDR3 for beta chain variable domain of TCR clone 157605 (TRBV15, TRBJ1-5)
CATSSAPPGTRNQPQHF

SEQ ID NO: 315211 - protein, 13 aa, Homo sapiens
  CDR3 for alpha chain variable domain of TCR clone 157606 (TRAV17, TRAJ26)
CATVDNYGQNFVF

SEQ ID NO: 315212 - protein, 15 aa, Homo sapiens
  CDR3 for beta chain variable domain of TCR clone 157606 (TRBV12-4, TRBJ2-5)
CASSPPTGLQETQYF

SEQ ID NO: 315213 - protein, 15 aa, Homo sapiens
  CDR3 for alpha chain variable domain of TCR clone 157607 (TRAV14/DV4, TRAJ46)
CAMREKKSSGDKLTF

SEQ ID NO: 315214 - protein, 13 aa, Homo sapiens
  CDR3 for beta chain variable domain of TCR clone 157607 (TRBV20-1, TRBJ2-5)
CSAREAFQDTQYF

SEQ ID NO: 315215 - protein, 12 aa, Homo sapiens
  CDR3 for alpha chain variable domain of TCR clone 157608 (TRAV10, TRAJ43)
CVVVRVGNDMRF

SEQ ID NO: 315216 - protein, 12 aa, Homo sapiens
  CDR3 for beta chain variable domain of TCR clone 157608 (TRBV14, TRBJ2-5)
CASSHLKETQYF

SEQ ID NO: 315217 - protein, 15 aa, Homo sapiens
  CDR3 for alpha chain variable domain of TCR clone 157609 (TRAV3, TRAJ5)
CAASDLDTGRRALTF

SEQ ID NO: 315218 - protein, 13 aa, Homo sapiens
  CDR3 for beta chain variable domain of TCR clone 157609 (TRBV12-4, TRBJ2-7)
CASSPTETYEQYF

SEQ ID NO: 315219 - protein, 13 aa, Homo sapiens
  CDR3 for alpha chain variable domain of TCR clone 157610 (TRAV8-3, TRAJ15)
CAVGIQAGTSLIF

SEQ ID NO: 315220 - protein, 17 aa, Homo sapiens
  CDR3 for beta chain variable domain of TCR clone 157610 (TRBV20-1, TRBJ2-1)
CSARDPLAGVSYNEQFF

SEQ ID NO: 315221 - protein, 12 aa, Homo sapiens
  CDR3 for alpha chain variable domain of TCR clone 157611 (TRAV8-3, TRAJ4)
PAFSGGYNKLLF

SEQ ID NO: 315222 - protein, 13 aa, Homo sapiens
  CDR3 for beta chain variable domain of TCR clone 157611 (TRBV20-1, TRBJ1-3)
CSAGAYSGNTIYF

SEQ ID NO: 315223 - protein, 16 aa, Homo sapiens
  CDR3 for alpha chain variable domain of TCR clone 157612 (TRAV12-3, TRAJ53)
CAMSPGSGGSNYKLTF

SEQ ID NO: 315224 - protein, 13 aa, Homo sapiens
  CDR3 for beta chain variable domain of TCR clone 157612 (TRBV7-3, TRBJ1-5)
CASSLDSNQPQHF

SEQ ID NO: 315225 - protein, 14 aa, Homo sapiens
  CDR3 for alpha chain variable domain of TCR clone 157613 (TRAV12-2, TRAJ5)
CAVNRSTGRRALTF

SEQ ID NO: 315226 - protein, 14 aa, Homo sapiens
  CDR3 for beta chain variable domain of TCR clone 157613 (TRBV12-4, TRBJ2-3)
CASSLGQGTDTQYF

SEQ ID NO: 315227 - protein, 14 aa, Homo sapiens
  CDR3 for alpha chain variable domain of TCR clone 157614 (TRAV13-2, TRAJ10)
CAERGTGGGNKLTF

SEQ ID NO: 315228 - protein, 15 aa, Homo sapiens
  CDR3 for beta chain variable domain of TCR clone 157614 (TRBV7-9, TRBJ2-7)
CASSSSGLAVYEQYF

SEQ ID NO: 315229 - protein, 15 aa, Homo sapiens
  CDR3 for alpha chain variable domain of TCR clone 157615 (TRAV1-2, TRAJ9)
CAVRDDGTGGFKTIF

SEQ ID NO: 315230 - protein, 16 aa, Homo sapiens
  CDR3 for beta chain variable domain of TCR clone 157615 (TRBV19, TRBJ2-7)
CASSPALGQGLYEQFF

SEQ ID NO: 315231 - protein, 14 aa, Homo sapiens
  CDR3 for alpha chain variable domain of TCR clone 157616 (TRAV8-6, TRAJ54)
CAVTEGRGAQKRVF

SEQ ID NO: 315232 - protein, 14 aa, Homo sapiens
  CDR3 for beta chain variable domain of TCR clone 157616 (TRBV27, TRBJ2-7)
CASSIGQGAQKQYF

SEQ ID NO: 315233 - protein, 14 aa, Homo sapiens
  CDR3 for alpha chain variable domain of TCR clone 157617 (TRAV2, TRAJ9)
CAVEDRSGGFKTIF

SEQ ID NO: 315234 - protein, 15 aa, Homo sapiens
  CDR3 for beta chain variable domain of TCR clone 157617 (TRBV11-3, TRBJ2-5)
CASSLRGRVQETQYF

SEQ ID NO: 315235 - protein, 19 aa, Homo sapiens
  CDR3 for alpha chain variable domain of TCR clone 157618 (TRAV3, TRAJ6)
GAVRDRNPSRSGGSYIPTF

SEQ ID NO: 315236 - protein, 15 aa, Homo sapiens
  CDR3 for beta chain variable domain of TCR clone 157618 (TRBV18, TRBJ2-7)
CASSPTFMDSYEQYF

SEQ ID NO: 315237 - protein, 12 aa, Homo sapiens
  CDR3 for alpha chain variable domain of TCR clone 157619 (TRAV8-3, TRAJ43)
CAVGAGNNDMRF

SEQ ID NO: 315238 - protein, 14 aa, Homo sapiens
  CDR3 for beta chain variable domain of TCR clone 157619 (TRBV4-2, TRBJ1-5)
CASSRDRGSQPQHF

SEQ ID NO: 315239 - protein, 13 aa, Homo sapiens
  CDR3 for alpha chain variable domain of TCR clone 157620 (TRAV2, TRAJ40)
CAVVTSGTYKYIF

SEQ ID NO: 315240 - protein, 12 aa, Homo sapiens
  CDR3 for beta chain variable domain of TCR clone 157620 (TRBV3-1, TRBJ2-2)
CASSLFPGELFF

SEQ ID NO: 315241 - protein, 14 aa, Homo sapiens
  CDR3 for alpha chain variable domain of TCR clone 157621 (TRAV12-2, TRAJ40)
CAVKIPSGTYKYIF

SEQ ID NO: 315242 - protein, 15 aa, Homo sapiens
  CDR3 for beta chain variable domain of TCR clone 157621 (TRBV4-2, TRBJ1-1)
CASSQRAAGRTEAFF

SEQ ID NO: 315243 - protein, 16 aa, Homo sapiens
  CDR3 for alpha chain variable domain of TCR clone 157622 (TRAV3, TRAJ37)
CAVRGKGSGNTGKLIF

SEQ ID NO: 315244 - protein, 15 aa, Homo sapiens
  CDR3 for beta chain variable domain of TCR clone 157622 (TRBV7-7, TRBJ2-2)
CATSKLVKNTGELFF

SEQ ID NO: 315245 - protein, 14 aa, Homo sapiens
  CDR3 for alpha chain variable domain of TCR clone 157623 (TRAV35, TRAJ33)
CAGSSQDSNYQLIW

SEQ ID NO: 315246 - protein, 15 aa, Homo sapiens
  CDR3 for beta chain variable domain of TCR clone 157623 (TRBV20-1, TRBJ2-7)
CSAESGTSGAYVQYF

SEQ ID NO: 315247 - protein, 13 aa, Homo sapiens
  CDR3 for alpha chain variable domain of TCR clone 157624 (TRAV3, TRAJ27)
CAVRPLGAGKSTF

SEQ ID NO: 315248 - protein, 12 aa, Homo sapiens
  CDR3 for beta chain variable domain of TCR clone 157624 (TRBV12-4, TRBJ2-1)
CASSLVRVEQIF

SEQ ID NO: 315249 - protein, 14 aa, Homo sapiens
  CDR3 for alpha chain variable domain of TCR clone 157625 (TRAV13-1, TRAJ3)
CAASKSNSASKIIF

SEQ ID NO: 315250 - protein, 13 aa, Homo sapiens
  CDR3 for beta chain variable domain of TCR clone 157625 (TRBV25-1, TRBJ2-5)
CASSESGRETQYF

SEQ ID NO: 315251 - protein, 16 aa, Homo sapiens
  CDR3 for alpha chain variable domain of TCR clone 157626 (TRAV3, TRAJ4)
CAVRAFFSGGYNKLIF

SEQ ID NO: 315252 - protein, 15 aa, Homo sapiens
  CDR3 for beta chain variable domain of TCR clone 157626 (TRBV20-1, TRBJ2-7)
CSARDRVSGMDEQYF

SEQ ID NO: 315253 - protein, 15 aa, Homo sapiens
  CDR3 for alpha chain variable domain of TCR clone 157627 (TRAV19, TRAJ9)
CALSLPDTGGFKTIF

SEQ ID NO: 315254 - protein, 17 aa, Homo sapiens
  CDR3 for beta chain variable domain of TCR clone 157627 (TRBV20-1, TRBJ2-1)
CSARDPRAGVWDNEQFF

SEQ ID NO: 315255 - protein, 16 aa, Homo sapiens
  CDR3 for alpha chain variable domain of TCR clone 157628 (TRAV3, TRAJ18)
CALRDGRGSTLGRLYF

SEQ ID NO: 315256 - protein, 14 aa, Homo sapiens
  CDR3 for beta chain variable domain of TCR clone 157628 (TRBV5-7, TRBJ2-4)
CASTLSGVKNIQYF

SEQ ID NO: 315257 - protein, 17 aa, Homo sapiens
  CDR3 for alpha chain variable domain of TCR clone 157629 (TRAV3, TRAJ38)
CAVRDCLNSVNNRKLIW

SEQ ID NO: 315258 - protein, 14 aa, Homo sapiens
  CDR3 for beta chain variable domain of TCR clone 157629 (TRBV5-5, TRBJ1-5)
CASSGQGVDQPQHF

SEQ ID NO: 315259 - protein, 14 aa, Homo sapiens
  CDR3 for alpha chain variable domain of TCR clone 157630 (TRAV12-2, TRAJ44)
CAVNPAGTASKLTF

SEQ ID NO: 315260 - protein, 16 aa, Homo sapiens
  CDR3 for beta chain variable domain of TCR clone 157630 (TRBV2, TRBJ2-6)
CASSEVGWAGANVLTF

SEQ ID NO: 315261 - protein, 17 aa, Homo sapiens
  CDR3 for alpha chain variable domain of TCR clone 157631 (TRAV3, TRAJ6)
CAVRDGPRAGGSYIPTF

SEQ ID NO: 315262 - protein, 13 aa, Homo sapiens
  CDR3 for beta chain variable domain of TCR clone 157631 (TRBV5-1, TRBJ1-1)
CASSADWDTEAFF

SEQ ID NO: 315263 - protein, 13 aa, Homo sapiens
  CDR3 for alpha chain variable domain of TCR clone 157632 (TRAV21, TRAJ15)
CAVANQAGTALIF

SEQ ID NO: 315264 - protein, 15 aa, Homo sapiens
  CDR3 for beta chain variable domain of TCR clone 157632 (TRBV29-1, TRBJ2-7)
CSVEFFDRGSYEQYF

SEQ ID NO: 315265 - protein, 14 aa, Homo sapiens
  CDR3 for alpha chain variable domain of TCR clone 157633 (TRAV17, TRAJ31)
CATVSLSGNARLMF

SEQ ID NO: 315266 - protein, 15 aa, Homo sapiens
  CDR3 for beta chain variable domain of TCR clone 157633 (TRBV15, TRBJ2-2)
CATSGTGGRVGELFF

SEQ ID NO: 315267 - protein, 15 aa, Homo sapiens
  CDR3 for alpha chain variable domain of TCR clone 157634 (TRAV2, TRAJ28)
CAVPYSGAGSYQLTF

SEQ ID NO: 315268 - protein, 17 aa, Homo sapiens
  CDR3 for beta chain variable domain of TCR clone 157634 (TRBV20-1, TRBJ2-4)
CSARDWASGGRESIQYF

SEQ ID NO: 315269 - protein, 13 aa, Homo sapiens
  CDR3 for alpha chain variable domain of TCR clone 157635 (TRAV13-1, TRAJ39)
CAAIIVMQATCSP

SEQ ID NO: 315270 - protein, 14 aa, Homo sapiens
  CDR3 for beta chain variable domain of TCR clone 157635 (TRBV12-4, TRBJ2-7)
CSSSPRQDLYEQYF

SEQ ID NO: 315271 - protein, 13 aa, Homo sapiens
  CDR3 for alpha chain variable domain of TCR clone 157636 (TRAV26-1, TRAJ48)
CIVKVVGDEKLTF

SEQ ID NO: 315272 - protein, 14 aa, Homo sapiens
  CDR3 for beta chain variable domain of TCR clone 157636 (TRBV4-1, TRBJ2-2)
CASSQAVDTGELFF

SEQ ID NO: 315273 - protein, 13 aa, Homo sapiens
  CDR3 for alpha chain variable domain of TCR clone 157637 (TRAV5, TRAJ30)
CAEIASRDDKIIF

SEQ ID NO: 315274 - protein, 14 aa, Homo sapiens
  CDR3 for beta chain variable domain of TCR clone 157637 (TRBV4-1, TRBJ2-2)
CASSQAVNTGELFF

SEQ ID NO: 315275 - protein, 14 aa, Homo sapiens
  CDR3 for alpha chain variable domain of TCR clone 157638 (TRAV29/DV5, TRAJ32)
CAAAYGGATNKLIF

SEQ ID NO: 315276 - protein, 16 aa, Homo sapiens
  CDR3 for beta chain variable domain of TCR clone 157638 (TRBV28, TRBJ2-1)
CASSSPEYPRDNEQFF

SEQ ID NO: 315277 - protein, 16 aa, Homo sapiens
  CDR3 for alpha chain variable domain of TCR clone 157639 (TRAV16, TRAJ57)
CAPYLTTQGGSEKLVF

SEQ ID NO: 315278 - protein, 17 aa, Homo sapiens
  CDR3 for beta chain variable domain of TCR clone 157639 (TRBV24-1, TRBJ2-4)
CATSDAEARGVRNIQYF

SEQ ID NO: 315279 - protein, 16 aa, Homo sapiens
  CDR3 for alpha chain variable domain of TCR clone 157640 (TRAV30, TRAJ24)
CGTEIVDADSWGKFQF

SEQ ID NO: 315280 - protein, 14 aa, Homo sapiens
  CDR3 for beta chain variable domain of TCR clone 157640 (TRBV25-1, TRBJ2-1)
CASSKTGGYNEQFF

SEQ ID NO: 315281 - protein, 11 aa, Homo sapiens
  CDR3 for alpha chain variable domain of TCR clone 157641 (TRAV12-1, TRAJ30)
CVVNGQDKIIF

SEQ ID NO: 315282 - protein, 15 aa, Homo sapiens
  CDR3 for beta chain variable domain of TCR clone 157641 (TRBV28, TRBJ2-5)
CASSSGRTVQETQYF

SEQ ID NO: 315283 - protein, 18 aa, Homo sapiens
  CDR3 for alpha chain variable domain of TCR clone 157642 (TRAV21, TRAJ52)
CAVRPSPAGGTSYGKLPF

SEQ ID NO: 315284 - protein, 15 aa, Homo sapiens
  CDR3 for beta chain variable domain of TCR clone 157642 (TRBV20-1, TRBJ1-5)
CSAFKNGQRNQPQHF

SEQ ID NO: 315285 - protein, 14 aa, Homo sapiens
  CDR3 for alpha chain variable domain of TCR clone 157643 (TRAV27, TRAJ12)
CAGARMDSSYKLIF

SEQ ID NO: 315286 - protein, 18 aa, Homo sapiens
  CDR3 for beta chain variable domain of TCR clone 157643 (TRBV10-3, TRBJ2-7)
CAISECGRPSGGRVEQYF

SEQ ID NO: 315287 - protein, 14 aa, Homo sapiens
  CDR3 for alpha chain variable domain of TCR clone 157644 (TRAV3, TRAJ16)
CCERLKSDGQKLLF

SEQ ID NO: 315288 - protein, 14 aa, Homo sapiens
  CDR3 for beta chain variable domain of TCR clone 157644 (TRBV28, TRBJ2-7)
CASPGGRGFYEQYF

SEQ ID NO: 315289 - protein, 12 aa, Homo sapiens
  CDR3 for alpha chain variable domain of TCR clone 157645 (TRAV25, TRAJ35)
CAGIGFGNVLHC

SEQ ID NO: 315290 - protein, 15 aa, Homo sapiens
  CDR3 for beta chain variable domain of TCR clone 157645 (TRBV20-1, TRBJ2-5)
CSAPPRTGFLETQYF

SEQ ID NO: 315291 - protein, 14 aa, Homo sapiens
  CDR3 for alpha chain variable domain of TCR clone 157646 (TRAV2, TRAJ9)
CAVDPNTGGFKTIF

SEQ ID NO: 315292 - protein, 13 aa, Homo sapiens
  CDR3 for beta chain variable domain of TCR clone 157646 (TRBV7-9, TRBJ2-7)
CASSFAGAYEQYF

SEQ ID NO: 315293 - protein, 14 aa, Homo sapiens
  CDR3 for alpha chain variable domain of TCR clone 157647 (TRAV12-2, TRAJ13)
CAVKKTGGYQKVTF

SEQ ID NO: 315294 - protein, 14 aa, Homo sapiens
  CDR3 for beta chain variable domain of TCR clone 157647 (TRBV2, TRBJ1-6)
CASEVSSYNSPLRF

SEQ ID NO: 315295 - protein, 15 aa, Homo sapiens
  CDR3 for alpha chain variable domain of TCR clone 157648 (TRAV16, TRAJ17)
CALSGQEAAGNKLTF

SEQ ID NO: 315296 - protein, 18 aa, Homo sapiens
  CDR3 for beta chain variable domain of TCR clone 157648 (TRBV7-2, TRBJ2-7)
CASSLDPGGGAVLRAGHQ

SEQ ID NO: 315297 - protein, 10 aa, Homo sapiens
  CDR3 for alpha chain variable domain of TCR clone 157649 (TRAV38-1, TRAJ26)
CAFMHTYLVF

SEQ ID NO: 315298 - protein, 14 aa, Homo sapiens
  CDR3 for beta chain variable domain of TCR clone 157649 (TRBV11-3, TRBJ1-6)
CASSFSGGDSPLHF

SEQ ID NO: 315299 - protein, 12 aa, Homo sapiens
  CDR3 for alpha chain variable domain of TCR clone 157650 (TRAV1-2, TRAJ24)
CAVGGSWGKFQF

SEQ ID NO: 315300 - protein, 15 aa, Homo sapiens
  CDR3 for beta chain variable domain of TCR clone 157650 (TRBV6-1, TRBJ2-7)
CASSEGVGNHYEQYF

SEQ ID NO: 315301 - protein, 13 aa, Homo sapiens
  CDR3 for alpha chain variable domain of TCR clone 157651 (TRAV2, TRAJ23)
CAVMGNQGGKLIF

SEQ ID NO: 315302 - protein, 14 aa, Homo sapiens
  CDR3 for beta chain variable domain of TCR clone 157651 (TRBV11-2, TRBJ2-1)
CASSRATSYDEQFF

SEQ ID NO: 315303 - protein, 14 aa, Homo sapiens
  CDR3 for alpha chain variable domain of TCR clone 157652 (TRAV4, TRAJ32)
CLVNYGGATNKLIF

SEQ ID NO: 315304 - protein, 14 aa, Homo sapiens
  CDR3 for beta chain variable domain of TCR clone 157652 (TRBV15, TRBJ2-5)
CATSVGTRTETQYF

SEQ ID NO: 315305 - protein, 10 aa, Homo sapiens
  CDR3 for alpha chain variable domain of TCR clone 157653 (TRAV1-2, TRAJ31)
CAFFDARLMF

SEQ ID NO: 315306 - protein, 14 aa, Homo sapiens
  CDR3 for beta chain variable domain of TCR clone 157653 (TRBV10-3, TRBJ2-7)
CHQCGTSEAYEQYF

SEQ ID NO: 315307 - protein, 12 aa, Homo sapiens
  CDR3 for alpha chain variable domain of TCR clone 157654 (TRAV12-1, TRAJ40)
CVVNGETYKYIF

SEQ ID NO: 315308 - protein, 14 aa, Homo sapiens
  CDR3 for beta chain variable domain of TCR clone 157654 (TRBV11-2, TRBJ2-7)
CASSSTGEGYEQYF

SEQ ID NO: 315309 - protein, 13 aa, Homo sapiens
  CDR3 for alpha chain variable domain of TCR clone 157655 (TRAV20, TRAJ40)
CAVPFSGTYKYIF

SEQ ID NO: 315310 - protein, 12 aa, Homo sapiens
  CDR3 for beta chain variable domain of TCR clone 157655 (TRBV7-8, TRBJ2-7)
CASSLGDREQYF

SEQ ID NO: 315311 - protein, 12 aa, Homo sapiens
  CDR3 for alpha chain variable domain of TCR clone 157656 (TRAV26-1, TRAJ26)
CIVFIYGQNFVF

SEQ ID NO: 315312 - protein, 13 aa, Homo sapiens
  CDR3 for beta chain variable domain of TCR clone 157656 (TRBV27, TRBJ1-1)
GASSLSMGAEAFF

SEQ ID NO: 315313 - protein, 14 aa, Homo sapiens
  CDR3 for alpha chain variable domain of TCR clone 157657 (TRAV38-2/DV8, TRAJ33)
YAYRILDSNYQLIW

SEQ ID NO: 315314 - protein, 17 aa, Homo sapiens
  CDR3 for beta chain variable domain of TCR clone 157657 (TRBV18, TRBJ2-1)
CASSPRVAGGSYNEQFF

SEQ ID NO: 315315 - protein, 16 aa, Homo sapiens
  CDR3 for alpha chain variable domain of TCR clone 157658 (TRAV26-1, TRAJ45)
CIVDKYSGGGADGLTF

SEQ ID NO: 315316 - protein, 15 aa, Homo sapiens
  CDR3 for beta chain variable domain of TCR clone 157658 (TRBV15, TRBJ2-7)
CHQQRPIQQAYEQYF

SEQ ID NO: 315317 - protein, 13 aa, Homo sapiens
  CDR3 for alpha chain variable domain of TCR clone 157659 (TRAV20, TRAJ20)
CAVQALNDYKLSF

SEQ ID NO: 315318 - protein, 13 aa, Homo sapiens
  CDR3 for beta chain variable domain of TCR clone 157659 (TRBV7-9, TRBJ1-4)
CASSLPGIEKLFS

SEQ ID NO: 315319 - protein, 22 aa, Homo sapiens
  CDR3 for alpha chain variable domain of TCR clone 157660 (TRAV1-1, TRAJ11)
CLLLLRCERLKLMNSGYSTLTF

SEQ ID NO: 315320 - protein, 15 aa, Homo sapiens
  CDR3 for beta chain variable domain of TCR clone 157660 (TRBV6-3, TRBJ2-7)
CASSSPGTVFYEQYF

SEQ ID NO: 315321 - protein, 13 aa, Homo sapiens
  CDR3 for alpha chain variable domain of TCR clone 157661 (TRAV4, TRAJ31)
CLVYRNNNARLMF

SEQ ID NO: 315322 - protein, 16 aa, Homo sapiens
  CDR3 for beta chain variable domain of TCR clone 157661 (TRBV10-3, TRBJ1-6)
CAISERRGQGNSPLHF

SEQ ID NO: 315323 - protein, 11 aa, Homo sapiens
  CDR3 for alpha chain variable domain of TCR clone 157662 (TRAV17, TRAJ43)
CATDVTGDMRF

SEQ ID NO: 315324 - protein, 14 aa, Homo sapiens
  CDR3 for beta chain variable domain of TCR clone 157662 (TRBV12-4, TRBJ1-1)
CASRPGQGRTEAVF

SEQ ID NO: 315325 - protein, 13 aa, Homo sapiens
  CDR3 for alpha chain variable domain of TCR clone 157663 (TRAV25, TRAJ20)
CAGLRSNDYKLSF

SEQ ID NO: 315326 - protein, 13 aa, Homo sapiens
  CDR3 for beta chain variable domain of TCR clone 157663 (TRBV7-9, TRBJ1-2)
CASSLKQNYGYTF

SEQ ID NO: 315327 - protein, 17 aa, Homo sapiens
  CDR3 for alpha chain variable domain of TCR clone 157664 (TRAV12-3, TRAJ6)
SAMSARGGAGGSYIPTF

SEQ ID NO: 315328 - protein, 12 aa, Homo sapiens
  CDR3 for beta chain variable domain of TCR clone 157664 (TRBV12-4, TRBJ2-3)
CASSTLPDTQYF

SEQ ID NO: 315329 - protein, 10 aa, Homo sapiens
  CDR3 for alpha chain variable domain of TCR clone 157665 (TRAV16, TRAJ26)
CAPEELWSEF

SEQ ID NO: 315330 - protein, 15 aa, Homo sapiens
  CDR3 for beta chain variable domain of TCR clone 157665 (TRBV7-2, TRBJ2-3)
CASSLTGTSTDTQYC

SEQ ID NO: 315331 - protein, 14 aa, Homo sapiens
  CDR3 for alpha chain variable domain of TCR clone 157666 (TRAV12-2, TRAJ13)
CAVKKTGGYQKVTF

SEQ ID NO: 315332 - protein, 16 aa, Homo sapiens
  CDR3 for beta chain variable domain of TCR clone 157666 (TRBV9, TRBJ2-3)
CDSSGTSGKDTDTQYF

SEQ ID NO: 315333 - protein, 19 aa, Homo sapiens
  CDR3 for alpha chain variable domain of TCR clone 157667 (TRAV1-2, TRAJ26)
CLLPLCCERADNYGQNFVF

SEQ ID NO: 315334 - protein, 12 aa, Homo sapiens
  CDR3 for beta chain variable domain of TCR clone 157667 (TRBV7-9, TRBJ2-7)
CATRTDAYEQYF

SEQ ID NO: 315335 - protein, 22 aa, Homo sapiens
  CDR3 for alpha chain variable domain of TCR clone 157668 (TRAV21, TRAJ39)
AASQPGDSATPKGAKAGNMLTF

SEQ ID NO: 315336 - protein, 14 aa, Homo sapiens
  CDR3 for beta chain variable domain of TCR clone 157668 (TRBV20-1, TRBJ1-1)
CSAQTRIGGTEAFF

SEQ ID NO: 315337 - protein, 14 aa, Homo sapiens
  CDR3 for alpha chain variable domain of TCR clone 157669 (TRAV17, TRAJ54)
CATDSNQGAQKLVF

SEQ ID NO: 315338 - protein, 12 aa, Homo sapiens
  CDR3 for beta chain variable domain of TCR clone 157669 (TRBV7-9, TRBJ2-7)
CASSIRREEQYF

SEQ ID NO: 315339 - protein, 14 aa, Homo sapiens
  CDR3 for alpha chain variable domain of TCR clone 157670 (TRAV13-1, TRAJ35)
CAASKGGFGNVLHC

SEQ ID NO: 315340 - protein, 13 aa, Homo sapiens
  CDR3 for beta chain variable domain of TCR clone 157670 (TRBV5-5, TRBJ2-2)
CASTLGGAGELFF

SEQ ID NO: 315341 - protein, 15 aa, Homo sapiens
  CDR3 for alpha chain variable domain of TCR clone 157671 (TRAV35, TRAJ28)
CWQKYSGAGSYQLTF

SEQ ID NO: 315342 - protein, 13 aa, Homo sapiens
  CDR3 for beta chain variable domain of TCR clone 157671 (TRBV19, TRBJ1-2)
CASSQGQVYGYTF

SEQ ID NO: 315343 - protein, 16 aa, Homo sapiens
  CDR3 for alpha chain variable domain of TCR clone 157672 (TRAV20, TRAJ53)
CAVQGHSGGSNYKLTF

SEQ ID NO: 315344 - protein, 14 aa, Homo sapiens
  CDR3 for beta chain variable domain of TCR clone 157672 (TRBV6-5, TRBJ2-7)
CASSPHRGLREQYF

SEQ ID NO: 315345 - protein, 13 aa, Homo sapiens
  CDR3 for alpha chain variable domain of TCR clone 157673 (TRAV27, TRAJ41)
CAGEGNSGYPLNF

SEQ ID NO: 315346 - protein, 14 aa, Homo sapiens
  CDR3 for beta chain variable domain of TCR clone 157673 (TRBV7-2, TRBJ1-1)
CASSFLTGTTEAFV

SEQ ID NO: 315347 - protein, 13 aa, Homo sapiens
  CDR3 for alpha chain variable domain of TCR clone 157674 (TRAV20, TRAJ37)
SAGCSSNTGKLIF

SEQ ID NO: 315348 - protein, 14 aa, Homo sapiens
  CDR3 for beta chain variable domain of TCR clone 157674 (TRBV20-1, TRBJ2-3)
CSARDGRAGEIQYF

SEQ ID NO: 315349 - protein, 15 aa, Homo sapiens
  CDR3 for alpha chain variable domain of TCR clone 157675 (TRAV20, TRAJ6)
CAVRLQSGGSYIPTF

SEQ ID NO: 315350 - protein, 14 aa, Homo sapiens
  CDR3 for beta chain variable domain of TCR clone 157675 (TRBV4-1, TRBJ2-2)
CASSQAVNTGELFF

SEQ ID NO: 315351 - protein, 12 aa, Homo sapiens
  CDR3 for alpha chain variable domain of TCR clone 157676 (TRAV13-2, TRAJ23)
CAERHRGGKLIS

SEQ ID NO: 315352 - protein, 15 aa, Homo sapiens
  CDR3 for beta chain variable domain of TCR clone 157676 (TRBV7-9, TRBJ1-6)
CASSSPGRGNSPLLF

SEQ ID NO: 315353 - protein, 17 aa, Homo sapiens
  CDR3 for alpha chain variable domain of TCR clone 157677 (TRAV36/DV7, TRAJ42)
CAGGGMNYGGSQGNLIF

SEQ ID NO: 315354 - protein, 16 aa, Homo sapiens
  CDR3 for beta chain variable domain of TCR clone 157677 (TRBV7-3, TRBJ2-1)
CASSKPLAGGYNEQFF

SEQ ID NO: 315355 - protein, 14 aa, Homo sapiens
  CDR3 for alpha chain variable domain of TCR clone 157678 (TRAV27, TRAJ37)
CAGERSSSTGKLIF

SEQ ID NO: 315356 - protein, 15 aa, Homo sapiens
  CDR3 for beta chain variable domain of TCR clone 157678 (TRBV11-3, TRBJ1-6)
CASSLDWGANSPLHF

SEQ ID NO: 315357 - protein, 12 aa, Homo sapiens
  CDR3 for alpha chain variable domain of TCR clone 157679 (TRAV12-3, TRAJ20)
CAMVRGDYKLSF

SEQ ID NO: 315358 - protein, 20 aa, Homo sapiens
  CDR3 for beta chain variable domain of TCR clone 157679 (TRBV4-1, TRBJ2-2)
CASSQASPPGLASDTGELFF

SEQ ID NO: 315359 - protein, 13 aa, Homo sapiens
  CDR3 for alpha chain variable domain of TCR clone 157680 (TRAV1-2, TRAJ9)
CAALNTVGFKTIF

SEQ ID NO: 315360 - protein, 15 aa, Homo sapiens
  CDR3 for beta chain variable domain of TCR clone 157680 (TRBV11-3, TRBJ2-3)
CASLKDGREGDTQYF

SEQ ID NO: 315361 - protein, 12 aa, Homo sapiens
  CDR3 for alpha chain variable domain of TCR clone 157681 (TRAV21, TRAJ31)
CAVGGNNARLMF

SEQ ID NO: 315362 - protein, 16 aa, Homo sapiens
  CDR3 for beta chain variable domain of TCR clone 157681 (TRBV27, TRBJ2-5)
CASSYGPGGQKETQYF

SEQ ID NO: 315363 - protein, 16 aa, Homo sapiens
  CDR3 for alpha chain variable domain of TCR clone 157682 (TRAV30, TRAJ24)
CGTEIVDADSWGKFQF

SEQ ID NO: 315364 - protein, 14 aa, Homo sapiens
  CDR3 for beta chain variable domain of TCR clone 157682 (TRBV7-8, TRBJ2-3)
CASSFKSGTDTQYF

SEQ ID NO: 315365 - protein, 11 aa, Homo sapiens
  CDR3 for alpha chain variable domain of TCR clone 157683 (TRAV21, TRAJ34)
CAHYNTDKLIF

SEQ ID NO: 315366 - protein, 17 aa, Homo sapiens
  CDR3 for beta chain variable domain of TCR clone 157683 (TRBV18, TRBJ2-1)
CASSKGLSGGADNEQFF

SEQ ID NO: 315367 - protein, 15 aa, Homo sapiens
  CDR3 for alpha chain variable domain of TCR clone 157684 (TRAV26-1, TRAJ29)
CIVRVEGSGNTPLVF

SEQ ID NO: 315368 - protein, 14 aa, Homo sapiens
  CDR3 for beta chain variable domain of TCR clone 157684 (TRBV25-1, TRBJ1-1)
CASTPLGGNTDAFF

SEQ ID NO: 315369 - protein, 14 aa, Homo sapiens
  CDR3 for alpha chain variable domain of TCR clone 157685 (TRAV4, TRAJ9)
CLVGAGTGGFKTIF

SEQ ID NO: 315370 - protein, 14 aa, Homo sapiens
  CDR3 for beta chain variable domain of TCR clone 157685 (TRBV25-1, TRBJ1-1)
CASTHLGGNTEAFF

SEQ ID NO: 315371 - protein, 11 aa, Homo sapiens
  CDR3 for alpha chain variable domain of TCR clone 157686 (TRAV1-1, TRAJ23)
CAVRQGGTLIF

SEQ ID NO: 315372 - protein, 20 aa, Homo sapiens
  CDR3 for beta chain variable domain of TCR clone 157686 (TRBV7-8, TRBJ2-2)
CSSSHLFPGPTIHITGELFF

SEQ ID NO: 315373 - protein, 13 aa, Homo sapiens
  CDR3 for alpha chain variable domain of TCR clone 157687 (TRAV12-2, TRAJ20)
CAVYPSNDYKLSF

SEQ ID NO: 315374 - protein, 16 aa, Homo sapiens
  CDR3 for beta chain variable domain of TCR clone 157687 (TRBV2, TRBJ1-3)
CASSGGAGRSGNTIYF

SEQ ID NO: 315375 - protein, 16 aa, Homo sapiens
  CDR3 for alpha chain variable domain of TCR clone 157688 (TRAV26-1, TRAJ45)
CIVEKYSGGGADGLTF

SEQ ID NO: 315376 - protein, 16 aa, Homo sapiens
  CDR3 for beta chain variable domain of TCR clone 157688 (TRBV10-3, TRBJ1-6)
CAISERRGQGNSPLHC

SEQ ID NO: 315377 - protein, 14 aa, Homo sapiens
  CDR3 for alpha chain variable domain of TCR clone 157689 (TRAV29/DV5, TRAJ49)
CAASLSNTGNQFHF

SEQ ID NO: 315378 - protein, 15 aa, Homo sapiens
  CDR3 for beta chain variable domain of TCR clone 157689 (TRBV20-1, TRBJ2-1)
CSARGIGGTYNEQFF

SEQ ID NO: 315379 - protein, 13 aa, Homo sapiens
  CDR3 for alpha chain variable domain of TCR clone 157690 (TRAV3, TRAJ21)
CAVREPEFNKFYF

SEQ ID NO: 315380 - protein, 16 aa, Homo sapiens
  CDR3 for beta chain variable domain of TCR clone 157690 (TRBV7-2, TRBJ2-6)
CASSLAGRSGANVLTF

SEQ ID NO: 315381 - protein, 14 aa, Homo sapiens
  CDR3 for alpha chain variable domain of TCR clone 157691 (TRAV2, TRAJ9)
CAVEDRSRGFKTIF

SEQ ID NO: 315382 - protein, 16 aa, Homo sapiens
  CDR3 for beta chain variable domain of TCR clone 157691 (TRBV15, TRBJ2-7)
CATSRDGGIPSYEQYF

SEQ ID NO: 315383 - protein, 13 aa, Homo sapiens
  CDR3 for alpha chain variable domain of TCR clone 157692 (TRAV35, TRAJ48)
CAGHEFGNEKLTF

SEQ ID NO: 315384 - protein, 16 aa, Homo sapiens
  CDR3 for beta chain variable domain of TCR clone 157692 (TRBV12-5, TRBJ2-5)
CASGPRSSGNQETQYF

SEQ ID NO: 315385 - protein, 13 aa, Homo sapiens
  CDR3 for alpha chain variable domain of TCR clone 157693 (TRAV12-1, TRAJ33)
CGDAPDSNYQLIW

SEQ ID NO: 315386 - protein, 15 aa, Homo sapiens
  CDR3 for beta chain variable domain of TCR clone 157693 (TRBV27, TRBJ2-1)
CAGSNGGGSSNEQFF

SEQ ID NO: 315387 - protein, 14 aa, Homo sapiens
  CDR3 for alpha chain variable domain of TCR clone 157694 (TRAV8-3, TRAJ30)
CAVGDMNRDDKIIF

SEQ ID NO: 315388 - protein, 15 aa, Homo sapiens
  CDR3 for beta chain variable domain of TCR clone 157694 (TRBV5-7, TRBJ2-7)
CASSLPGQVFYEQYF

SEQ ID NO: 315389 - protein, 15 aa, Homo sapiens
  CDR3 for alpha chain variable domain of TCR clone 157695 (TRAV8-4, TRAJ47)
CAVSDPEEYGNKLVF

SEQ ID NO: 315390 - protein, 15 aa, Homo sapiens
  CDR3 for beta chain variable domain of TCR clone 157695 (TRBV11-2, TRBJ2-1)
RASSLGPDSYNEQFF

SEQ ID NO: 315391 - protein, 14 aa, Homo sapiens
  CDR3 for alpha chain variable domain of TCR clone 157696 (TRAV8-4, TRAJ13)
CAVTLSGGYQKVTF

SEQ ID NO: 315392 - protein, 16 aa, Homo sapiens
  CDR3 for beta chain variable domain of TCR clone 157696 (TRBV5-1, TRBJ2-1)
CASSLSSLRESNEQFF

SEQ ID NO: 315393 - protein, 11 aa, Homo sapiens
  CDR3 for alpha chain variable domain of TCR clone 157697 (TRAV2, TRAJ33)
CAVESNYQLIW

SEQ ID NO: 315394 - protein, 17 aa, Homo sapiens
  CDR3 for beta chain variable domain of TCR clone 157697 (TRBV11-2, TRBJ2-4)
CASSSVGPGGHRNIQYF

SEQ ID NO: 315395 - protein, 17 aa, Homo sapiens
  CDR3 for alpha chain variable domain of TCR clone 157698 (TRAV27, TRAJ26)
CAGARAPLDNYGKNFVF

SEQ ID NO: 315396 - protein, 15 aa, Homo sapiens
  CDR3 for beta chain variable domain of TCR clone 157698 (TRBV11-2, TRBJ2-5)
CASSPRSGGLETQYF

SEQ ID NO: 315397 - protein, 14 aa, Homo sapiens
  CDR3 for alpha chain variable domain of TCR clone 157699 (TRAV26-1, TRAJ39)
CIVRGSRVGNMLTF

SEQ ID NO: 315398 - protein, 15 aa, Homo sapiens
  CDR3 for beta chain variable domain of TCR clone 157699 (TRBV7-9, TRBJ1-5)
CASSQGHQPNQHQHF

SEQ ID NO: 315399 - protein, 14 aa, Homo sapiens
  CDR3 for alpha chain variable domain of TCR clone 157700 (TRAV35, TRAJ22)
CGGLRPGSARQLTF

SEQ ID NO: 315400 - protein, 15 aa, Homo sapiens
  CDR3 for beta chain variable domain of TCR clone 157700 (TRBV12-4, TRBJ2-5)
CASSPPTGLQETQYV

SEQ ID NO: 315401 - protein, 13 aa, Homo sapiens
  CDR3 for alpha chain variable domain of TCR clone 157701 (TRAV12-2, TRAJ52)
CAVGGTSYGKLTF

SEQ ID NO: 315402 - protein, 14 aa, Homo sapiens
  CDR3 for beta chain variable domain of TCR clone 157701 (TRBV19, TRBJ2-1)
CASPTFVLRGEQFF

SEQ ID NO: 315403 - protein, 13 aa, Homo sapiens
  CDR3 for alpha chain variable domain of TCR clone 157702 (TRAV2, TRAJ40)
CAVVTSGTYKYIF

SEQ ID NO: 315404 - protein, 14 aa, Homo sapiens
  CDR3 for beta chain variable domain of TCR clone 157702 (TRBV20-1, TRBJ2-2)
CSAPGEGNTGELFF

SEQ ID NO: 315405 - protein, 13 aa, Homo sapiens
  CDR3 for alpha chain variable domain of TCR clone 157703 (TRAV8-3, TRAJ43)
CAVVPYNNNDMRF

SEQ ID NO: 315406 - protein, 19 aa, Homo sapiens
  CDR3 for beta chain variable domain of TCR clone 157703 (TRBV2, TRBJ2-7)
CASSDDETSGRANDYEQYF

SEQ ID NO: 315407 - protein, 13 aa, Homo sapiens
  CDR3 for alpha chain variable domain of TCR clone 157704 (TRAV3, TRAJ27)
CSVRPLGAGKSTF

SEQ ID NO: 315408 - protein, 16 aa, Homo sapiens
  CDR3 for beta chain variable domain of TCR clone 157704 (TRBV10-3, TRBJ2-1)
CAISLTSGNSYNEQFF

SEQ ID NO: 315409 - protein, 12 aa, Homo sapiens
  CDR3 for alpha chain variable domain of TCR clone 157705 (TRAV8-6, TRAJ43)
CAVSHNNNDMRF

SEQ ID NO: 315410 - protein, 16 aa, Homo sapiens
  CDR3 for beta chain variable domain of TCR clone 157705 (TRBV27, TRBJ2-2)
CASSFRGLVRTGELFF

SEQ ID NO: 315411 - protein, 14 aa, Homo sapiens
  CDR3 for alpha chain variable domain of TCR clone 157706 (TRAV12-2, TRAJ9)
CAVNMEGGGFTTIF

SEQ ID NO: 315412 - protein, 14 aa, Homo sapiens
  CDR3 for beta chain variable domain of TCR clone 157706 (TRBV27, TRBJ2-5)
CASSSLKGWETQYF

SEQ ID NO: 315413 - protein, 17 aa, Homo sapiens
  CDR3 for alpha chain variable domain of TCR clone 157707 (TRAV3, TRAJ6)
CAVRDGPRAGGSYIPTF

SEQ ID NO: 315414 - protein, 18 aa, Homo sapiens
  CDR3 for beta chain variable domain of TCR clone 157707 (TRBV25-1, TRBJ1-2)
CASIGLQNGQGLIFGYTF

SEQ ID NO: 315415 - protein, 16 aa, Homo sapiens
  CDR3 for alpha chain variable domain of TCR clone 157708 (TRAV14/DV4, TRAJ54)
CAMRGGRIQGAQKLVF

SEQ ID NO: 315416 - protein, 20 aa, Homo sapiens
  CDR3 for beta chain variable domain of TCR clone 157708 (TRBV28, TRBJ2-1)
CASTPIRRSPGLAGGNEQFF

SEQ ID NO: 315417 - protein, 13 aa, Homo sapiens
  CDR3 for alpha chain variable domain of TCR clone 157709 (TRAV13-1, TRAJ12)
CAASPDSSHKLIF

SEQ ID NO: 315418 - protein, 16 aa, Homo sapiens
  CDR3 for beta chain variable domain of TCR clone 157709 (TRBV15, TRBJ2-1)
CATSRERLAGAYEQFF

SEQ ID NO: 315419 - protein, 17 aa, Homo sapiens
  CDR3 for alpha chain variable domain of TCR clone 157710 (TRAV13-1, TRAJ52)
CAASSGAGGTSYGKLTF

SEQ ID NO: 315420 - protein, 14 aa, Homo sapiens
  CDR3 for beta chain variable domain of TCR clone 157710 (TRBV12-4, TRBJ2-3)
CASTIAGWGDKQYF

SEQ ID NO: 315421 - protein, 12 aa, Homo sapiens
  CDR3 for alpha chain variable domain of TCR clone 157711 (TRAV1-1, TRAJ39)
CAVPVVGNMLTF

SEQ ID NO: 315422 - protein, 15 aa, Homo sapiens
  CDR3 for beta chain variable domain of TCR clone 157711 (TRBV6-4, TRBJ2-4)
CASPGTELAKNIQYF

SEQ ID NO: 315423 - protein, 14 aa, Homo sapiens
  CDR3 for alpha chain variable domain of TCR clone 157712 (TRAV1-2, TRAJ8)
CAVREDTGFQKLVC

SEQ ID NO: 315424 - protein, 13 aa, Homo sapiens
  CDR3 for beta chain variable domain of TCR clone 157712 (TRBV7-3, TRBJ2-1)
CASSLDSYNEQFF

SEQ ID NO: 315425 - protein, 15 aa, Homo sapiens
  CDR3 for alpha chain variable domain of TCR clone 157713 (TRAV2, TRAJ11)
CAVGGRNLGYSTLTF

SEQ ID NO: 315426 - protein, 14 aa, Homo sapiens
  CDR3 for beta chain variable domain of TCR clone 157713 (TRBV20-1, TRBJ2-1)
CSAQIGGSANEQFF

SEQ ID NO: 315427 - protein, 14 aa, Homo sapiens
  CDR3 for alpha chain variable domain of TCR clone 157714 (TRAV1-1, TRAJ28)
CAAPSGAGSYQLTF

SEQ ID NO: 315428 - protein, 13 aa, Homo sapiens
  CDR3 for beta chain variable domain of TCR clone 157714 (TRBV11-2, TRBJ2-5)
CASSRGPSETQYF

SEQ ID NO: 315429 - protein, 14 aa, Homo sapiens
  CDR3 for alpha chain variable domain of TCR clone 157715 (TRAV1-2, TRAJ8)
CAVREDTGFQKLAF

SEQ ID NO: 315430 - protein, 13 aa, Homo sapiens
  CDR3 for beta chain variable domain of TCR clone 157715 (TRBV19, TRBJ2-7)
CASRKAGGSEQYF

SEQ ID NO: 315431 - protein, 10 aa, Homo sapiens
  CDR3 for alpha chain variable domain of TCR clone 157716 (TRAV16, TRAJ26)
CAVSGSEFCL

SEQ ID NO: 315432 - protein, 12 aa, Homo sapiens
  CDR3 for beta chain variable domain of TCR clone 157716 (TRBV11-2, TRBJ2-1)
CASSPGNNEQFF

SEQ ID NO: 315433 - protein, 15 aa, Homo sapiens
  CDR3 for alpha chain variable domain of TCR clone 157717 (TRAV3, TRAJ13)
CAVRVYSGGYQKVTF

SEQ ID NO: 315434 - protein, 13 aa, Homo sapiens
  CDR3 for beta chain variable domain of TCR clone 157717 (TRBV10-3, TRBJ1-2)
CVISERDSYGYTF

SEQ ID NO: 315435 - protein, 12 aa, Homo sapiens
  CDR3 for alpha chain variable domain of TCR clone 157718 (TRAV12-3, TRAJ17)
CAMTRTGNKLTF

SEQ ID NO: 315436 - protein, 17 aa, Homo sapiens
  CDR3 for beta chain variable domain of TCR clone 157718 (TRBV13, TRBJ2-3)
CASSLSRVAGGRNTQYF

SEQ ID NO: 315437 - protein, 14 aa, Homo sapiens
  CDR3 for alpha chain variable domain of TCR clone 157719 (TRAV12-2, TRAJ40)
CAVKIPSGTYKYIF

SEQ ID NO: 315438 - protein, 16 aa, Homo sapiens
  CDR3 for beta chain variable domain of TCR clone 157719 (TRBV2, TRBJ2-5)
CASSETQGVGEEAQYF

SEQ ID NO: 315439 - protein, 12 aa, Homo sapiens
  CDR3 for alpha chain variable domain of TCR clone 157720 (TRAV3, TRAJ31)
CAVRDGNARLMF

SEQ ID NO: 315440 - protein, 14 aa, Homo sapiens
  CDR3 for beta chain variable domain of TCR clone 157720 (TRBV11-2, TRBJ1-3)
CASSLTQGRNTIYF

SEQ ID NO: 315441 - protein, 13 aa, Homo sapiens
  CDR3 for alpha chain variable domain of TCR clone 157721 (TRAV1-1, TRAJ11)
CAVLNSGYSTLSF

SEQ ID NO: 315442 - protein, 20 aa, Homo sapiens
  CDR3 for beta chain variable domain of TCR clone 157721 (TRBV7-8, TRBJ2-2)
CASSHLFPGPTIHITGELFF

SEQ ID NO: 315443 - protein, 13 aa, Homo sapiens
  CDR3 for alpha chain variable domain of TCR clone 157722 (TRAV12-3, TRAJ47)
CAMKKEYGNKLVF

SEQ ID NO: 315444 - protein, 13 aa, Homo sapiens
  CDR3 for beta chain variable domain of TCR clone 157722 (TRBV28, TRBJ2-7)
CAGAQQGLDEQYF

SEQ ID NO: 315445 - protein, 10 aa, Homo sapiens
  CDR3 for alpha chain variable domain of TCR clone 157723 (TRAV2, TRAJ13)
CLGGYQKVTF

SEQ ID NO: 315446 - protein, 16 aa, Homo sapiens
  CDR3 for beta chain variable domain of TCR clone 157723 (TRBV6-1, TRBJ2-5)
CASSETLDRGAETQYF

SEQ ID NO: 315447 - protein, 12 aa, Homo sapiens
  CDR3 for alpha chain variable domain of TCR clone 157724 (TRAV12-2, TRAJ10)
WGVTGGGNKLTF

SEQ ID NO: 315448 - protein, 15 aa, Homo sapiens
  CDR3 for beta chain variable domain of TCR clone 157724 (TRBV10-3, TRBJ2-3)
CAISLTSGGTDTQYF

SEQ ID NO: 315449 - protein, 14 aa, Homo sapiens
  CDR3 for alpha chain variable domain of TCR clone 157725 (TRAV1-2, TRAJ8)
CAVREDTGFQKLDF

SEQ ID NO: 315450 - protein, 17 aa, Homo sapiens
  CDR3 for beta chain variable domain of TCR clone 157725 (TRBV20-1, TRBJ2-2)
CSASGSGQGGLTGELFF

SEQ ID NO: 315451 - protein, 14 aa, Homo sapiens
  CDR3 for alpha chain variable domain of TCR clone 157726 (TRAV36/DV7, TRAJ57)
CAVGFPGGSEKLVF

SEQ ID NO: 315452 - protein, 15 aa, Homo sapiens
  CDR3 for beta chain variable domain of TCR clone 157726 (TRBV19, TRBJ2-3)
CAAGDTNAPNDTQYF

SEQ ID NO: 315453 - protein, 13 aa, Homo sapiens
  CDR3 for alpha chain variable domain of TCR clone 157727 (TRAV17, TRAJ5)
CALRGTGRRALTF

SEQ ID NO: 315454 - protein, 16 aa, Homo sapiens
  CDR3 for beta chain variable domain of TCR clone 157727 (TRBV19, TRBJ1-2)
CASSIGLFRDAYGYTF

SEQ ID NO: 315455 - protein, 13 aa, Homo sapiens
  CDR3 for alpha chain variable domain of TCR clone 157728 (TRAV13-2, TRAJ22)
CLGWISSARQLTF

SEQ ID NO: 315456 - protein, 13 aa, Homo sapiens
  CDR3 for beta chain variable domain of TCR clone 157728 (TRBV7-3, TRBJ1-1)
CASSQDWGAEAVF

SEQ ID NO: 315457 - protein, 16 aa, Homo sapiens
  CDR3 for alpha chain variable domain of TCR clone 157729 (TRAV12-1, TRAJ4)
CVVNMGPLGGYNKLIF

SEQ ID NO: 315458 - protein, 16 aa, Homo sapiens
  CDR3 for beta chain variable domain of TCR clone 157729 (TRBV4-1, TRBJ2-7)
CASSQDPTGYSYEQYF

SEQ ID NO: 315459 - protein, 11 aa, Homo sapiens
  CDR3 for alpha chain variable domain of TCR clone 157730 (TRAV27, TRAJ45)
CAGAQEEVLTD

SEQ ID NO: 315460 - protein, 17 aa, Homo sapiens
  CDR3 for beta chain variable domain of TCR clone 157730 (TRBV11-2, TRBJ2-1)
CASSLYPPGVEYKEQFF

SEQ ID NO: 315461 - protein, 16 aa, Homo sapiens
  CDR3 for alpha chain variable domain of TCR clone 157731 (TRAV30, TRAJ24)
CGTEIVDADSWGTFQF

SEQ ID NO: 315462 - protein, 13 aa, Homo sapiens
  CDR3 for beta chain variable domain of TCR clone 157731 (TRBV20-1, TRBJ1-1)
CSARGGGNTEAFF

SEQ ID NO: 315463 - protein, 13 aa, Homo sapiens
  CDR3 for alpha chain variable domain of TCR clone 157732 (TRAV27, TRAJ41)
CAGEGNSGYALNF

SEQ ID NO: 315464 - protein, 15 aa, Homo sapiens
  CDR3 for beta chain variable domain of TCR clone 157732 (TRBV7-3, TRBJ2-1)
CASSYSTSAHNEQFF

SEQ ID NO: 315465 - protein, 13 aa, Homo sapiens
  CDR3 for alpha chain variable domain of TCR clone 157733 (TRAV9-2, TRAJ37)
CALRPSNTGKLIF

SEQ ID NO: 315466 - protein, 15 aa, Homo sapiens
  CDR3 for beta chain variable domain of TCR clone 157733 (TRBV7-2, TRBJ2-1)
CASSSGLAGGNEQFF

SEQ ID NO: 315467 - protein, 14 aa, Homo sapiens
  CDR3 for alpha chain variable domain of TCR clone 157734 (TRAV13-1, TRAJ44)
CAAKATGPASKLTF

SEQ ID NO: 315468 - protein, 15 aa, Homo sapiens
  CDR3 for beta chain variable domain of TCR clone 157734 (TRBV10-3, TRBJ2-1)
CAISDVQDRAYEQFF

SEQ ID NO: 315469 - protein, 14 aa, Homo sapiens
  CDR3 for alpha chain variable domain of TCR clone 157735 (TRAV1-2, TRAJ16)
CAVNRFSGGQKLLF

SEQ ID NO: 315470 - protein, 15 aa, Homo sapiens
  CDR3 for beta chain variable domain of TCR clone 157735 (TRBV5-5, TRBJ1-5)
CASSSTPGSNQPQHF

SEQ ID NO: 315471 - protein, 18 aa, Homo sapiens
  CDR3 for alpha chain variable domain of TCR clone 157736 (TRAV9-2, TRAJ52)
CALSRHNAGGTSYGNLTF

SEQ ID NO: 315472 - protein, 16 aa, Homo sapiens
  CDR3 for beta chain variable domain of TCR clone 157736 (TRBV19, TRBJ2-1)
CASSKAGPSSYNEQFF

SEQ ID NO: 315473 - protein, 21 aa, Homo sapiens
  CDR3 for alpha chain variable domain of TCR clone 157737 (TRAV13-1, TRAJ37)
CAATPKEIKHRQTNIWARDNF

SEQ ID NO: 315474 - protein, 13 aa, Homo sapiens
  CDR3 for beta chain variable domain of TCR clone 157737 (TRBV20-1, TRBJ2-7)
CSATSEDSYEQYF

SEQ ID NO: 315475 - protein, 13 aa, Homo sapiens
  CDR3 for alpha chain variable domain of TCR clone 157738 (TRAV12-3, TRAJ56)
CPMSFGANSKLTF

SEQ ID NO: 315476 - protein, 15 aa, Homo sapiens
  CDR3 for beta chain variable domain of TCR clone 157738 (TRBV6-3, TRBJ2-7)
CASSSPGTVFYEQYF

SEQ ID NO: 315477 - protein, 16 aa, Homo sapiens
  CDR3 for alpha chain variable domain of TCR clone 157739 (TRAV27, TRAJ53)
CAAPEGSGGSNYKLTF

SEQ ID NO: 315478 - protein, 17 aa, Homo sapiens
  CDR3 for beta chain variable domain of TCR clone 157739 (TRBV7-8, TRBJ2-6)
CASSAGTGGAGANVLTF

SEQ ID NO: 315479 - protein, 13 aa, Homo sapiens
  CDR3 for alpha chain variable domain of TCR clone 157740 (TRAV16, TRAJ28)
CALTGAGSYQLTF

SEQ ID NO: 315480 - protein, 16 aa, Homo sapiens
  CDR3 for beta chain variable domain of TCR clone 157740 (TRBV28, TRBJ1-5)
CASSLTVQGWNQPQHF

SEQ ID NO: 315481 - protein, 20 aa, Homo sapiens
  CDR3 for alpha chain variable domain of TCR clone 157741 (TRAV14/DV4, TRAJ22)
CAMIEGPFSISSCSARQLTF

SEQ ID NO: 315482 - protein, 13 aa, Homo sapiens
  CDR3 for beta chain variable domain of TCR clone 157741 (TRBV4-2, TRBJ2-3)
CASSQDWQHTQYF

SEQ ID NO: 315483 - protein, 14 aa, Homo sapiens
  CDR3 for alpha chain variable domain of TCR clone 157742 (TRAV12-2, TRAJ44)
CAVNKAGPASKLTF

SEQ ID NO: 315484 - protein, 12 aa, Homo sapiens
  CDR3 for beta chain variable domain of TCR clone 157742 (TRBV19, TRBJ1-4)
CASKDWPGGLFF

SEQ ID NO: 315485 - protein, 14 aa, Homo sapiens
  CDR3 for alpha chain variable domain of TCR clone 157743 (TRAV1-2, TRAJ15)
CAVRDRQAGTALIF

SEQ ID NO: 315486 - protein, 14 aa, Homo sapiens
  CDR3 for beta chain variable domain of TCR clone 157743 (TRBV7-2, TRBJ2-1)
CASSLEGGYNEQFF

SEQ ID NO: 315487 - protein, 11 aa, Homo sapiens
  CDR3 for alpha chain variable domain of TCR clone 157744 (TRAV17, TRAJ31)
CATSNNARVMF

SEQ ID NO: 315488 - protein, 13 aa, Homo sapiens
  CDR3 for beta chain variable domain of TCR clone 157744 (TRBV29-1, TRBJ1-1)
CSVGDSRNTEAFF

SEQ ID NO: 315489 - protein, 13 aa, Homo sapiens
  CDR3 for alpha chain variable domain of TCR clone 157745 (TRAV35, TRAJ36)
CAGPRIGANNLFC

SEQ ID NO: 315490 - protein, 15 aa, Homo sapiens
  CDR3 for beta chain variable domain of TCR clone 157745 (TRBV20-1, TRBJ2-7)
CSARDRVSGMDEQYF

SEQ ID NO: 315491 - protein, 14 aa, Homo sapiens
  CDR3 for alpha chain variable domain of TCR clone 157746 (TRAV29/DV5, TRAJ44)
CAASSLGTASKLTF

SEQ ID NO: 315492 - protein, 11 aa, Homo sapiens
  CDR3 for beta chain variable domain of TCR clone 157746 (TRBV29-1, TRBJ1-3)
CSVAIGNTIYF

SEQ ID NO: 315493 - protein, 11 aa, Homo sapiens
  CDR3 for alpha chain variable domain of TCR clone 157747 (TRAV13-1, TRAJ34)
CAASPTDKLIF

SEQ ID NO: 315494 - protein, 16 aa, Homo sapiens
  CDR3 for beta chain variable domain of TCR clone 157747 (TRBV24-1, TRBJ2-3)
CATSDPGTGATDTQYF

SEQ ID NO: 315495 - protein, 10 aa, Homo sapiens
  CDR3 for alpha chain variable domain of TCR clone 157748 (TRAV30, TRAJ24)
CGTEIGMLTA

SEQ ID NO: 315496 - protein, 14 aa, Homo sapiens
  CDR3 for beta chain variable domain of TCR clone 157748 (TRBV12-5, TRBJ2-5)
CASGSRTHQETQYF

SEQ ID NO: 315497 - protein, 15 aa, Homo sapiens
  CDR3 for alpha chain variable domain of TCR clone 157749 (TRAV27, TRAJ38)
CAARRNAGNNRKLIW

SEQ ID NO: 315498 - protein, 15 aa, Homo sapiens
  CDR3 for beta chain variable domain of TCR clone 157749 (TRBV6-6, TRBJ2-7)
CASSYSYGGSYEQYF

SEQ ID NO: 315499 - protein, 15 aa, Homo sapiens
  CDR3 for alpha chain variable domain of TCR clone 157750 (TRAV3, TRAJ3)
CVVRDMSSSASRIIF

SEQ ID NO: 315500 - protein, 17 aa, Homo sapiens
  CDR3 for beta chain variable domain of TCR clone 157750 (TRBV24-1, TRBJ2-1)
CATSDVSTSGTYNEQFF

SEQ ID NO: 315501 - protein, 11 aa, Homo sapiens
  CDR3 for alpha chain variable domain of TCR clone 157751 (TRAV12-2, TRAJ31)
CAVTRWARLMS

SEQ ID NO: 315502 - protein, 15 aa, Homo sapiens
  CDR3 for beta chain variable domain of TCR clone 157751 (TRBV9, TRBJ1-6)
CASSVAGTGDSPLHF

SEQ ID NO: 315503 - protein, 15 aa, Homo sapiens
  CDR3 for alpha chain variable domain of TCR clone 157752 (TRAV2, TRAJ13)
CCLLLCFRGLRKVTF

SEQ ID NO: 315504 - protein, 13 aa, Homo sapiens
  CDR3 for beta chain variable domain of TCR clone 157752 (TRBV12-4, TRBJ1-2)
CAGSLRQGKGYTF

SEQ ID NO: 315505 - protein, 18 aa, Homo sapiens
  CDR3 for alpha chain variable domain of TCR clone 157753 (TRAV26-2, TRAJ54)
CILRDVEVGIQGAQKLVF

SEQ ID NO: 315506 - protein, 16 aa, Homo sapiens
  CDR3 for beta chain variable domain of TCR clone 157753 (TRBV6-1, TRBJ2-5)
CASSETLDRGAETQYS

SEQ ID NO: 315507 - protein, 16 aa, Homo sapiens
  CDR3 for alpha chain variable domain of TCR clone 157754 (TRAV30, TRAJ24)
CGPEIVDADSWGKFQF

SEQ ID NO: 315508 - protein, 13 aa, Homo sapiens
  CDR3 for beta chain variable domain of TCR clone 157754 (TRBV7-2, TRBJ1-3)
CASSLAPGNTMYF

SEQ ID NO: 315509 - protein, 15 aa, Homo sapiens
  CDR3 for alpha chain variable domain of TCR clone 157755 (TRAV12-1, TRAJ37)
CVVNIMGGNTGNLIF

SEQ ID NO: 315510 - protein, 12 aa, Homo sapiens
  CDR3 for beta chain variable domain of TCR clone 157755 (TRBV2, TRBJ2-7)
CASSRVGYEQYF

SEQ ID NO: 315511 - protein, 16 aa, Homo sapiens
  CDR3 for alpha chain variable domain of TCR clone 157756 (TRAV30, TRAJ24)
CGTEIGDADSWGKFQV

SEQ ID NO: 315512 - protein, 12 aa, Homo sapiens
  CDR3 for beta chain variable domain of TCR clone 157756 (TRBV11-2, TRBJ2-1)
CASSPGNNEQFF

SEQ ID NO: 315513 - protein, 17 aa, Homo sapiens
  CDR3 for alpha chain variable domain of TCR clone 157757 (TRAV4, TRAJ42)
CLEGVLNYGGSQGNLIF

SEQ ID NO: 315514 - protein, 12 aa, Homo sapiens
  CDR3 for beta chain variable domain of TCR clone 157757 (TRBV20-1, TRBJ2-1)
CSAQYTYNEQFF

SEQ ID NO: 315515 - protein, 11 aa, Homo sapiens
  CDR3 for alpha chain variable domain of TCR clone 157758 (TRAV5, TRAJ3)
CGGSSAYKIIF

SEQ ID NO: 315516 - protein, 13 aa, Homo sapiens
  CDR3 for beta chain variable domain of TCR clone 157758 (TRBV27, TRBJ2-1)
CASRTLGVGEQFF

SEQ ID NO: 315517 - protein, 16 aa, Homo sapiens
  CDR3 for alpha chain variable domain of TCR clone 157759 (TRAV30, TRAJ24)
CGTEIVDADSWGKFQF

SEQ ID NO: 315518 - protein, 13 aa, Homo sapiens
  CDR3 for beta chain variable domain of TCR clone 157759 (TRBV20-1, TRBJ1-1)
CSARGRGNTEAFF

SEQ ID NO: 315519 - protein, 15 aa, Homo sapiens
  CDR3 for alpha chain variable domain of TCR clone 157760 (TRAV20, TRAJ53)
CAEQASGGSNYKLTF

SEQ ID NO: 315520 - protein, 14 aa, Homo sapiens
  CDR3 for beta chain variable domain of TCR clone 157760 (TRBV7-2, TRBJ1-2)
CASSQTGSTYGYTF

SEQ ID NO: 315521 - protein, 17 aa, Homo sapiens
  CDR3 for alpha chain variable domain of TCR clone 157761 (TRAV12-3, TRAJ41)
CAMRFTKLKFRISRTLT

SEQ ID NO: 315522 - protein, 16 aa, Homo sapiens
  CDR3 for beta chain variable domain of TCR clone 157761 (TRBV25-1, TRBJ2-7)
CASSELTGGGIYEQYF

SEQ ID NO: 315523 - protein, 16 aa, Homo sapiens
  CDR3 for alpha chain variable domain of TCR clone 157762 (TRAV16, TRAJ52)
CALSAAGGTSYGKLTF

SEQ ID NO: 315524 - protein, 15 aa, Homo sapiens
  CDR3 for beta chain variable domain of TCR clone 157762 (TRBV5-1, TRBJ2-1)
CASSPPRAPFNEQFF

SEQ ID NO: 315525 - protein, 11 aa, Homo sapiens
  CDR3 for alpha chain variable domain of TCR clone 157763 (TRAV12-2, TRAJ23)
CARGRGGKLNF

SEQ ID NO: 315526 - protein, 14 aa, Homo sapiens
  CDR3 for beta chain variable domain of TCR clone 157763 (TRBV28, TRBJ2-5)
CASSLGDRAETQYL

SEQ ID NO: 315527 - protein, 11 aa, Homo sapiens
  CDR3 for alpha chain variable domain of TCR clone 157764 (TRAV12-2, TRAJ31)
CAVTRWARLMF

SEQ ID NO: 315528 - protein, 12 aa, Homo sapiens
  CDR3 for beta chain variable domain of TCR clone 157764 (TRBV11-2, TRBJ2-1)
CASSPGNNEQFF

SEQ ID NO: 315529 - protein, 14 aa, Homo sapiens
  CDR3 for alpha chain variable domain of TCR clone 157765 (TRAV12-2, TRAJ40)
CAVKIPSGTYKYLF

SEQ ID NO: 315530 - protein, 20 aa, Homo sapiens
  CDR3 for beta chain variable domain of TCR clone 157765 (TRBV28, TRBJ2-1)
CASTPIGRSPGLAGGNEQFF

SEQ ID NO: 315531 - protein, 13 aa, Homo sapiens
  CDR3 for alpha chain variable domain of TCR clone 157766 (TRAV8-3, TRAJ44)
CAVVPGTASKLTF

SEQ ID NO: 315532 - protein, 13 aa, Homo sapiens
  CDR3 for beta chain variable domain of TCR clone 157766 (TRBV7-2, TRBJ1-2)
CASSFLGSYGYTF

SEQ ID NO: 315533 - protein, 13 aa, Homo sapiens
  CDR3 for alpha chain variable domain of TCR clone 157767 (TRAV38-2/DV8, TRAJ34)
CAYRTWNTDRLIF

SEQ ID NO: 315534 - protein, 16 aa, Homo sapiens
  CDR3 for beta chain variable domain of TCR clone 157767 (TRBV19, TRBJ2-1)
CASSNAGPSSYNEQFF

SEQ ID NO: 315535 - protein, 16 aa, Homo sapiens
  CDR3 for alpha chain variable domain of TCR clone 157768 (TRAV21, TRAJ49)
CAVNRGLMNTGNQFYF

SEQ ID NO: 315536 - protein, 17 aa, Homo sapiens
  CDR3 for beta chain variable domain of TCR clone 157768 (TRBV10-3, TRBJ1-2)
CAISESTTALANYGYTF

SEQ ID NO: 315537 - protein, 14 aa, Homo sapiens
  CDR3 for alpha chain variable domain of TCR clone 157769 (TRAV23/DV6, TRAJ27)
CAASSDTNAGKSTF

SEQ ID NO: 315538 - protein, 15 aa, Homo sapiens
  CDR3 for beta chain variable domain of TCR clone 157769 (TRBV7-2, TRBJ2-7)
CASSTPGLARGEQYF

SEQ ID NO: 315539 - protein, 14 aa, Homo sapiens
  CDR3 for alpha chain variable domain of TCR clone 157770 (TRAV38-1, TRAJ29)
CAFITPSGNTPLVF

SEQ ID NO: 315540 - protein, 15 aa, Homo sapiens
  CDR3 for beta chain variable domain of TCR clone 157770 (TRBV7-2, TRBJ2-3)
CASSLAGAFIDTQYF

SEQ ID NO: 315541 - protein, 13 aa, Homo sapiens
  CDR3 for alpha chain variable domain of TCR clone 157771 (TRAV13-2, TRAJ17)
CGEFQSCRQQANF

SEQ ID NO: 315542 - protein, 11 aa, Homo sapiens
  CDR3 for beta chain variable domain of TCR clone 157771 (TRBV6-3, TRBJ2-3)
CATGQADTQYF

SEQ ID NO: 315543 - protein, 15 aa, Homo sapiens
  CDR3 for alpha chain variable domain of TCR clone 157772 (TRAV3, TRAJ24)
CAVRDKMTAGGNCSL

SEQ ID NO: 315544 - protein, 14 aa, Homo sapiens
  CDR3 for beta chain variable domain of TCR clone 157772 (TRBV7-2, TRBJ2-3)
CASSRTGSSYTQYF

SEQ ID NO: 315545 - protein, 14 aa, Homo sapiens
  CDR3 for alpha chain variable domain of TCR clone 157773 (TRAV8-3, TRAJ39)
CAVGANNAGNMRTF

SEQ ID NO: 315546 - protein, 16 aa, Homo sapiens
  CDR3 for beta chain variable domain of TCR clone 157773 (TRBV6-1, TRBJ2-5)
CASSETLDRGAETQYF

SEQ ID NO: 315547 - protein, 16 aa, Homo sapiens
  CDR3 for alpha chain variable domain of TCR clone 157774 (TRAV13-1, TRAJ48)
CAASIFGNFGNEKLTF

SEQ ID NO: 315548 - protein, 12 aa, Homo sapiens
  CDR3 for beta chain variable domain of TCR clone 157774 (TRBV14, TRBJ2-4)
CASSNRKSNQYF

SEQ ID NO: 315549 - protein, 14 aa, Homo sapiens
  CDR3 for alpha chain variable domain of TCR clone 157775 (TRAV8-6, TRAJ5)
CAVSVDTARRALTF

SEQ ID NO: 315550 - protein, 11 aa, Homo sapiens
  CDR3 for beta chain variable domain of TCR clone 157775 (TRBV7-3, TRBJ2-5)
CASSLSETQYF

SEQ ID NO: 315551 - protein, 13 aa, Homo sapiens
  CDR3 for alpha chain variable domain of TCR clone 157776 (TRAV8-3, TRAJ43)
CAVGPDNNNDMSF

SEQ ID NO: 315552 - protein, 19 aa, Homo sapiens
  CDR3 for beta chain variable domain of TCR clone 157776 (TRBV7-2, TRBJ2-3)
CASSCLSRNWGGGADTQYF

SEQ ID NO: 315553 - protein, 15 aa, Homo sapiens
  CDR3 for alpha chain variable domain of TCR clone 157777 (TRAV3, TRAJ5)
YAVRDLDTGRRALPF

SEQ ID NO: 315554 - protein, 13 aa, Homo sapiens
  CDR3 for beta chain variable domain of TCR clone 157777 (TRBV12-4, TRBJ2-7)
CASSPTETYEQYF

SEQ ID NO: 315555 - protein, 12 aa, Homo sapiens
  CDR3 for alpha chain variable domain of TCR clone 157778 (TRAV13-1, TRAJ21)
CAAKEGFNKFYF

SEQ ID NO: 315556 - protein, 12 aa, Homo sapiens
  CDR3 for beta chain variable domain of TCR clone 157778 (TRBV4-2, TRBJ2-2)
CASSHLPGELFF

SEQ ID NO: 315557 - protein, 14 aa, Homo sapiens
  CDR3 for alpha chain variable domain of TCR clone 157779 (TRAV2, TRAJ9)
CAVEDRSGGFKTIF

SEQ ID NO: 315558 - protein, 12 aa, Homo sapiens
  CDR3 for beta chain variable domain of TCR clone 157779 (TRBV7-8, TRBJ2-7)
CASEGGPHGQYF

SEQ ID NO: 315559 - protein, 14 aa, Homo sapiens
  CDR3 for alpha chain variable domain of TCR clone 157780 (TRAV1-2, TRAJ8)
CAVREDTGLEKLVF

SEQ ID NO: 315560 - protein, 15 aa, Homo sapiens
  CDR3 for beta chain variable domain of TCR clone 157780 (TRBV6-3, TRBJ2-7)
CASSSPGTVFYEQYF

SEQ ID NO: 315561 - protein, 15 aa, Homo sapiens
  CDR3 for alpha chain variable domain of TCR clone 157781 (TRAV9-2, TRAJ56)
CALSDIDGANSKLTF

SEQ ID NO: 315562 - protein, 16 aa, Homo sapiens
  CDR3 for beta chain variable domain of TCR clone 157781 (TRBV27, TRBJ2-2)
CASSFRGLVRTGELFF

SEQ ID NO: 315563 - protein, 17 aa, Homo sapiens
  CDR3 for alpha chain variable domain of TCR clone 157782 (TRAV26-2, TRAJ42)
CILRDESYGGSQGNLIF

SEQ ID NO: 315564 - protein, 15 aa, Homo sapiens
  CDR3 for beta chain variable domain of TCR clone 157782 (TRBV6-6, TRBJ2-7)
CASSYAYGGSYEQYF

SEQ ID NO: 315565 - protein, 12 aa, Homo sapiens
  CDR3 for alpha chain variable domain of TCR clone 157783 (TRAV3, TRAJ26)
CAVRDYGQNFVF

SEQ ID NO: 315566 - protein, 15 aa, Homo sapiens
  CDR3 for beta chain variable domain of TCR clone 157783 (TRBV10-1, TRBJ2-3)
CASSATSGGFDTQYF

SEQ ID NO: 315567 - protein, 13 aa, Homo sapiens
  CDR3 for alpha chain variable domain of TCR clone 157784 (TRAV3, TRAJ4)
CAVKDGGYNKLIF

SEQ ID NO: 315568 - protein, 14 aa, Homo sapiens
  CDR3 for beta chain variable domain of TCR clone 157784 (TRBV12-4, TRBJ1-2)
CASSSSAAGSSYTF

SEQ ID NO: 315569 - protein, 14 aa, Homo sapiens
  CDR3 for alpha chain variable domain of TCR clone 157785 (TRAV12-3, TRAJ10)
SHLPLTGGGNKLTF

SEQ ID NO: 315570 - protein, 15 aa, Homo sapiens
  CDR3 for beta chain variable domain of TCR clone 157785 (TRBV7-3, TRBJ2-2)
CASSETGQGTGELFS

SEQ ID NO: 315571 - protein, 14 aa, Homo sapiens
  CDR3 for alpha chain variable domain of TCR clone 157786 (TRAV12-2, TRAJ5)
CAVNRSTGRRALTF

SEQ ID NO: 315572 - protein, 15 aa, Homo sapiens
  CDR3 for beta chain variable domain of TCR clone 157786 (TRBV19, TRBJ1-5)
CASSILTGENQPQHF

SEQ ID NO: 315573 - protein, 13 aa, Homo sapiens
  CDR3 for alpha chain variable domain of TCR clone 157787 (TRAV8-3, TRAJ48)
CAVVPFGNEKLTF

SEQ ID NO: 315574 - protein, 12 aa, Homo sapiens
  CDR3 for beta chain variable domain of TCR clone 157787 (TRBV11-2, TRBJ2-2)
CASSLGGWELFF

SEQ ID NO: 315575 - protein, 12 aa, Homo sapiens
  CDR3 for alpha chain variable domain of TCR clone 157788 (TRAV3, TRAJ31)
CAVRDGNARLMF

SEQ ID NO: 315576 - protein, 18 aa, Homo sapiens
  CDR3 for beta chain variable domain of TCR clone 157788 (TRBV7-2, TRBJ2-3)
CASSLKREGSGITDTQYF

SEQ ID NO: 315577 - protein, 16 aa, Homo sapiens
  CDR3 for alpha chain variable domain of TCR clone 157789 (TRAV12-2, TRAJ18)
CAVTTDRGPTLGRLYF

SEQ ID NO: 315578 - protein, 15 aa, Homo sapiens
  CDR3 for beta chain variable domain of TCR clone 157789 (TRBV9, TRBJ1-6)
CASSVAGTGDSPLHF

SEQ ID NO: 315579 - protein, 12 aa, Homo sapiens
  CDR3 for alpha chain variable domain of TCR clone 157790 (TRAV3, TRAJ43)
CAVRGPDNDMRF

SEQ ID NO: 315580 - protein, 15 aa, Homo sapiens
  CDR3 for beta chain variable domain of TCR clone 157790 (TRBV19, TRBJ1-1)
CASTSGQIQNTEAFF

SEQ ID NO: 315581 - protein, 14 aa, Homo sapiens
  CDR3 for alpha chain variable domain of TCR clone 157791 (TRAV8-4, TRAJ34)
CAVSDPGDTDKLIF

SEQ ID NO: 315582 - protein, 15 aa, Homo sapiens
  CDR3 for beta chain variable domain of TCR clone 157791 (TRBV24-1, TRBJ2-1)
CATRASGGQYNEQFF

SEQ ID NO: 315583 - protein, 12 aa, Homo sapiens
  CDR3 for alpha chain variable domain of TCR clone 157792 (TRAV12-3, TRAJ48)
CAMRIGNEKLTL

SEQ ID NO: 315584 - protein, 12 aa, Homo sapiens
  CDR3 for beta chain variable domain of TCR clone 157792 (TRBV13, TRBJ2-7)
CASSLQAYEQYF

SEQ ID NO: 315585 - protein, 13 aa, Homo sapiens
  CDR3 for alpha chain variable domain of TCR clone 157793 (TRAV8-3, TRAJ28)
CTVGAVGSYQLTF

SEQ ID NO: 315586 - protein, 15 aa, Homo sapiens
  CDR3 for beta chain variable domain of TCR clone 157793 (TRBV7-9, TRBJ1-5)
YASSQGHQPNQPQHF

SEQ ID NO: 315587 - protein, 12 aa, Homo sapiens
  CDR3 for alpha chain variable domain of TCR clone 157794 (TRAV35, TRAJ30)
CAGLNRDGKIIF

SEQ ID NO: 315588 - protein, 15 aa, Homo sapiens
  CDR3 for beta chain variable domain of TCR clone 157794 (TRBV9, TRBJ1-6)
CASSVAGTGDSPLHF

SEQ ID NO: 315589 - protein, 14 aa, Homo sapiens
  CDR3 for alpha chain variable domain of TCR clone 157795 (TRAV12-2, TRAJ13)
CAVKKTGGYQRVTF

SEQ ID NO: 315590 - protein, 15 aa, Homo sapiens
  CDR3 for beta chain variable domain of TCR clone 157795 (TRBV20-1, TRBJ2-7)
CSARDRVSGMDEQYF

SEQ ID NO: 315591 - protein, 16 aa, Homo sapiens
  CDR3 for alpha chain variable domain of TCR clone 157796 (TRAV26-2, TRAJ45)
CTPASPIGGGADGLTF

SEQ ID NO: 315592 - protein, 20 aa, Homo sapiens
  CDR3 for beta chain variable domain of TCR clone 157796 (TRBV28, TRBJ2-1)
CASTPIGRSPGLAGGNEQFF

SEQ ID NO: 315593 - protein, 16 aa, Homo sapiens
  CDR3 for alpha chain variable domain of TCR clone 157797 (TRAV1-2, TRAJ10)
CAVRGVLTGGGSKLTF

SEQ ID NO: 315594 - protein, 12 aa, Homo sapiens
  CDR3 for beta chain variable domain of TCR clone 157797 (TRBV7-8, TRBJ2-7)
RASSLGDREQYF

SEQ ID NO: 315595 - protein, 13 aa, Homo sapiens
  CDR3 for alpha chain variable domain of TCR clone 157798 (TRAV12-1, TRAJ21)
CVVTLYNFNKFYF

SEQ ID NO: 315596 - protein, 13 aa, Homo sapiens
  CDR3 for beta chain variable domain of TCR clone 157798 (TRBV7-7, TRBJ2-3)
CASSLSRADTQYF

SEQ ID NO: 315597 - protein, 14 aa, Homo sapiens
  CDR3 for alpha chain variable domain of TCR clone 157799 (TRAV20, TRAJ56)
CAVQFGGANSKLTF

SEQ ID NO: 315598 - protein, 17 aa, Homo sapiens
  CDR3 for beta chain variable domain of TCR clone 157799 (TRBV20-1, TRBJ2-7)
CSATRAGGVAGVEEQYF

SEQ ID NO: 315599 - protein, 13 aa, Homo sapiens
  CDR3 for alpha chain variable domain of TCR clone 157800 (TRAV12-2, TRAJ20)
CAVYPSNDYKLSF

SEQ ID NO: 315600 - protein, 16 aa, Homo sapiens
  CDR3 for beta chain variable domain of TCR clone 157800 (TRBV7-9, TRBJ1-2)
CASSLGFSSGEDGYTF

SEQ ID NO: 315601 - protein, 13 aa, Homo sapiens
  CDR3 for alpha chain variable domain of TCR clone 157801 (TRAV16, TRAJ37)
CALGSGNTGKLIF

SEQ ID NO: 315602 - protein, 19 aa, Homo sapiens
  CDR3 for beta chain variable domain of TCR clone 157801 (TRBV7-3, TRBJ1-2)
CASSFPQGNDGELWLHLRF

SEQ ID NO: 315603 - protein, 20 aa, Homo sapiens
  CDR3 for alpha chain variable domain of TCR clone 157802 (TRAV4, )
CLVGPHNYDIQNPDPALYQL

SEQ ID NO: 315604 - protein, 17 aa, Homo sapiens
  CDR3 for beta chain variable domain of TCR clone 157802 (TRBV24-1, TRBJ2-1)
CATSDVSTSGTYNEQFF

SEQ ID NO: 315605 - protein, 11 aa, Homo sapiens
  CDR3 for alpha chain variable domain of TCR clone 157803 (TRAV1-2, TRAJ11)
CAVRGYSTLTF

SEQ ID NO: 315606 - protein, 16 aa, Homo sapiens
  CDR3 for beta chain variable domain of TCR clone 157803 (TRBV19, TRBJ2-5)
CASSIGGLAAQETQYF

SEQ ID NO: 315607 - protein, 14 aa, Homo sapiens
  CDR3 for alpha chain variable domain of TCR clone 157804 (TRAV26-1, TRAJ11)
CIVPLYSGYSTLTF

SEQ ID NO: 315608 - protein, 16 aa, Homo sapiens
  CDR3 for beta chain variable domain of TCR clone 157804 (TRBV20-1, TRBJ1-4)
CSAPGQGLLTNEKLFF

SEQ ID NO: 315609 - protein, 12 aa, Homo sapiens
  CDR3 for alpha chain variable domain of TCR clone 157805 (TRAV13-1, TRAJ21)
CAAKEGFHKFYF

SEQ ID NO: 315610 - protein, 13 aa, Homo sapiens
  CDR3 for beta chain variable domain of TCR clone 157805 (TRBV7-9, TRBJ2-1)
CASSLGTVNEQFF

SEQ ID NO: 315611 - protein, 14 aa, Homo sapiens
  CDR3 for alpha chain variable domain of TCR clone 157806 (TRAV12-1, TRAJ27)
CGEHIRTNAGKSTF

SEQ ID NO: 315612 - protein, 14 aa, Homo sapiens
  CDR3 for beta chain variable domain of TCR clone 157806 (TRBV11-2, TRBJ2-3)
CASSRLARTDTQYF

SEQ ID NO: 315613 - protein, 10 aa, Homo sapiens
  CDR3 for alpha chain variable domain of TCR clone 157807 (TRAV36/DV7, TRAJ48)
CAVGHEKLTF

SEQ ID NO: 315614 - protein, 14 aa, Homo sapiens
  CDR3 for beta chain variable domain of TCR clone 157807 (TRBV7-2, TRBJ2-7)
CASSPKTSFYEQYF

SEQ ID NO: 315615 - protein, 14 aa, Homo sapiens
  CDR3 for alpha chain variable domain of TCR clone 157808 (TRAV3, TRAJ6)
CAVRDWGGSYITTF

SEQ ID NO: 315616 - protein, 17 aa, Homo sapiens
  CDR3 for beta chain variable domain of TCR clone 157808 (TRBV6-5, TRBJ2-1)
CASRLSGRFESYNEQFF

SEQ ID NO: 315617 - protein, 14 aa, Homo sapiens
  CDR3 for alpha chain variable domain of TCR clone 157809 (TRAV1-2, TRAJ8)
CAVREDTGFQKLVF

SEQ ID NO: 315618 - protein, 13 aa, Homo sapiens
  CDR3 for beta chain variable domain of TCR clone 157809 (TRBV7-9, TRBJ1-1)
CASSLGMNTEAFF

SEQ ID NO: 315619 - protein, 11 aa, Homo sapiens
  CDR3 for alpha chain variable domain of TCR clone 157810 (TRAV2, TRAJ13)
CAPGGYQKVTF

SEQ ID NO: 315620 - protein, 14 aa, Homo sapiens
  CDR3 for beta chain variable domain of TCR clone 157810 (TRBV3-1, TRBJ2-5)
CASSQAVRQETQYF

SEQ ID NO: 315621 - protein, 10 aa, Homo sapiens
  CDR3 for alpha chain variable domain of TCR clone 157811 (TRAV26-1, TRAJ40)
CIAGTYKYIF

SEQ ID NO: 315622 - protein, 14 aa, Homo sapiens
  CDR3 for beta chain variable domain of TCR clone 157811 (TRBV13, TRBJ2-5)
CASSLGPRGETQYF

SEQ ID NO: 315623 - protein, 16 aa, Homo sapiens
  CDR3 for alpha chain variable domain of TCR clone 157812 (TRAV12-3, TRAJ53)
CAMSPGSGGSNYKLPF

SEQ ID NO: 315624 - protein, 11 aa, Homo sapiens
  CDR3 for beta chain variable domain of TCR clone 157812 (TRBV29-1, TRBJ2-5)
YSEDRTGTQYF

SEQ ID NO: 315625 - protein, 12 aa, Homo sapiens
  CDR3 for alpha chain variable domain of TCR clone 157813 (TRAV12-1, TRAJ40)
CVVYSGTYKYIF

SEQ ID NO: 315626 - protein, 18 aa, Homo sapiens
  CDR3 for beta chain variable domain of TCR clone 157813 (TRBV11-2, TRBJ2-3)
CASSVRTSGSKKTDTQYF

SEQ ID NO: 315627 - protein, 16 aa, Homo sapiens
  CDR3 for alpha chain variable domain of TCR clone 157814 (TRAV20, TRAJ28)
CAVRDPSGAGSYQLTF

SEQ ID NO: 315628 - protein, 13 aa, Homo sapiens
  CDR3 for beta chain variable domain of TCR clone 157814 (TRBV27, TRBJ2-7)
CASSLTTGYEQYF

SEQ ID NO: 315629 - protein, 14 aa, Homo sapiens
  CDR3 for alpha chain variable domain of TCR clone 157815 (TRAV12-1, TRAJ34)
CVVNPLETPTSSSF

SEQ ID NO: 315630 - protein, 15 aa, Homo sapiens
  CDR3 for beta chain variable domain of TCR clone 157815 (TRBV3-1, TRBJ2-2)
CTSSQDWTRAGELFF

SEQ ID NO: 315631 - protein, 15 aa, Homo sapiens
  CDR3 for alpha chain variable domain of TCR clone 157816 (TRAV13-1, TRAJ10)
CAAEVVKGGGNKLTF

SEQ ID NO: 315632 - protein, 13 aa, Homo sapiens
  CDR3 for beta chain variable domain of TCR clone 157816 (TRBV28, TRBJ2-5)
CAGVSRGEETQYF

SEQ ID NO: 315633 - protein, 15 aa, Homo sapiens
  CDR3 for alpha chain variable domain of TCR clone 157817 (TRAV12-2, )
CAVEDIQNPDPAVYQ

SEQ ID NO: 315634 - protein, 20 aa, Homo sapiens
  CDR3 for beta chain variable domain of TCR clone 157817 (TRBV11-3, TRBJ2-7)
CASSQRTSGSLRAVLRAGHQ

SEQ ID NO: 315635 - protein, 12 aa, Homo sapiens
  CDR3 for alpha chain variable domain of TCR clone 157818 (TRAV2, TRAJ32)
CAVGGATNKLIF

SEQ ID NO: 315636 - protein, 18 aa, Homo sapiens
  CDR3 for beta chain variable domain of TCR clone 157818 (TRBV20-1, TRBJ2-6)
CSAETTPTHGSGANVLTF

SEQ ID NO: 315637 - protein, 11 aa, Homo sapiens
  CDR3 for alpha chain variable domain of TCR clone 157819 (TRAV1-2, TRAJ40)
FAVPGTDKYIF

SEQ ID NO: 315638 - protein, 16 aa, Homo sapiens
  CDR3 for beta chain variable domain of TCR clone 157819 (TRBV29-1, TRBJ2-7)
CSVEVVGTSGSYEQYF

SEQ ID NO: 315639 - protein, 18 aa, Homo sapiens
  CDR3 for alpha chain variable domain of TCR clone 157820 (TRAV21, TRAJ52)
CAVRPSPAGGTSYGKLTL

SEQ ID NO: 315640 - protein, 17 aa, Homo sapiens
  CDR3 for beta chain variable domain of TCR clone 157820 (TRBV13, TRBJ2-3)
CASSLSRVAGGSNTQYF

SEQ ID NO: 315641 - protein, 14 aa, Homo sapiens
  CDR3 for alpha chain variable domain of TCR clone 157821 (TRAV14/DV4, TRAJ57)
CAMREEGGSEKLVF

SEQ ID NO: 315642 - protein, 15 aa, Homo sapiens
  CDR3 for beta chain variable domain of TCR clone 157821 (TRBV3-1, TRBJ2-2)
CASSQDWTRAGELFF

SEQ ID NO: 315643 - protein, 18 aa, Homo sapiens
  CDR3 for alpha chain variable domain of TCR clone 157822 (TRAV21, TRAJ52)
CAVRPSPAGGTSYGKLTF

SEQ ID NO: 315644 - protein, 15 aa, Homo sapiens
  CDR3 for beta chain variable domain of TCR clone 157822 (TRBV18, TRBJ2-1)
CASLPDRGRDNEQFF

SEQ ID NO: 315645 - protein, 14 aa, Homo sapiens
  CDR3 for alpha chain variable domain of TCR clone 157823 (TRAV27, TRAJ42)
CAGEKVGSQGNLIF

SEQ ID NO: 315646 - protein, 16 aa, Homo sapiens
  CDR3 for beta chain variable domain of TCR clone 157823 (TRBV4-3, TRBJ2-1)
CASSPALDRGVNEQFF

SEQ ID NO: 315647 - protein, 14 aa, Homo sapiens
  CDR3 for alpha chain variable domain of TCR clone 157824 (TRAV35, TRAJ46)
CAGPQKSSGDKLTF

SEQ ID NO: 315648 - protein, 12 aa, Homo sapiens
  CDR3 for beta chain variable domain of TCR clone 157824 (TRBV28, TRBJ2-3)
CASRGTTDTQYF

SEQ ID NO: 315649 - protein, 14 aa, Homo sapiens
  CDR3 for alpha chain variable domain of TCR clone 157825 (TRAV23/DV6, TRAJ58)
CAGMRETSGSRLTF

SEQ ID NO: 315650 - protein, 13 aa, Homo sapiens
  CDR3 for beta chain variable domain of TCR clone 157825 (TRBV28, TRBJ2-7)
CASRSSGVYEQSF

SEQ ID NO: 315651 - protein, 16 aa, Homo sapiens
  CDR3 for alpha chain variable domain of TCR clone 157826 (TRAV30, TRAJ24)
CGTEIVDADSWGKFQF

SEQ ID NO: 315652 - protein, 14 aa, Homo sapiens
  CDR3 for beta chain variable domain of TCR clone 157826 (TRBV5-4, TRBJ2-3)
CASSTTLGGDTQYF

SEQ ID NO: 315653 - protein, 14 aa, Homo sapiens
  CDR3 for alpha chain variable domain of TCR clone 157827 (TRAV17, TRAJ45)
CATYARGGADGLTF

SEQ ID NO: 315654 - protein, 11 aa, Homo sapiens
  CDR3 for beta chain variable domain of TCR clone 157827 (TRBV28, TRBJ2-5)
CATGNQETQYF

SEQ ID NO: 315655 - protein, 12 aa, Homo sapiens
  CDR3 for alpha chain variable domain of TCR clone 157828 (TRAV21, TRAJ13)
PGPSGGYQKVTF

SEQ ID NO: 315656 - protein, 15 aa, Homo sapiens
  CDR3 for beta chain variable domain of TCR clone 157828 (TRBV7-9, TRBJ1-6)
CASSSPGRGNSPLHC

SEQ ID NO: 315657 - protein, 14 aa, Homo sapiens
  CDR3 for alpha chain variable domain of TCR clone 157829 (TRAV12-2, TRAJ13)
CAVKKTGGYQKGTF

SEQ ID NO: 315658 - protein, 15 aa, Homo sapiens
  CDR3 for beta chain variable domain of TCR clone 157829 (TRBV27, TRBJ2-1)
CASSNGGGSSNEQFF

SEQ ID NO: 315659 - protein, 16 aa, Homo sapiens
  CDR3 for alpha chain variable domain of TCR clone 157830 (TRAV20, TRAJ26)
CAVPHRRDNYGQNFVF

SEQ ID NO: 315660 - protein, 15 aa, Homo sapiens
  CDR3 for beta chain variable domain of TCR clone 157830 (TRBV7-2, TRBJ2-7)
CASSWGQGAIYEQYF

SEQ ID NO: 315661 - protein, 13 aa, Homo sapiens
  CDR3 for alpha chain variable domain of TCR clone 157831 (TRAV8-3, TRAJ34)
CAVGPYNTDKLIF

SEQ ID NO: 315662 - protein, 14 aa, Homo sapiens
  CDR3 for beta chain variable domain of TCR clone 157831 (TRBV11-2, TRBJ2-5)
CASSRTGGIETQFF

SEQ ID NO: 315663 - protein, 14 aa, Homo sapiens
  CDR3 for alpha chain variable domain of TCR clone 157832 (TRAV12-1, TRAJ27)
CGEHIRTNAGKSTF

SEQ ID NO: 315664 - protein, 15 aa, Homo sapiens
  CDR3 for beta chain variable domain of TCR clone 157832 (TRBV12-4, TRBJ1-1)
CASSLAVSRGAEAFF

SEQ ID NO: 315665 - protein, 12 aa, Homo sapiens
  CDR3 for alpha chain variable domain of TCR clone 157833 (TRAV8-3, TRAJ41)
CAVAISGYALNF

SEQ ID NO: 315666 - protein, 16 aa, Homo sapiens
  CDR3 for beta chain variable domain of TCR clone 157833 (TRBV27, TRBJ2-7)
CASSSERRDSAYEQYF

SEQ ID NO: 315667 - protein, 15 aa, Homo sapiens
  CDR3 for alpha chain variable domain of TCR clone 157834 (TRAV2, TRAJ44)
CAVEAYTGTASKLTF

SEQ ID NO: 315668 - protein, 17 aa, Homo sapiens
  CDR3 for beta chain variable domain of TCR clone 157834 (TRBV12-4, TRBJ2-1)
CASSPGLAGGRINEQSF

SEQ ID NO: 315669 - protein, 14 aa, Homo sapiens
  CDR3 for alpha chain variable domain of TCR clone 157835 (TRAV29/DV5, TRAJ48)
CASMALFGNKKLTF

SEQ ID NO: 315670 - protein, 15 aa, Homo sapiens
  CDR3 for beta chain variable domain of TCR clone 157835 (TRBV7-2, TRBJ2-1)
CASTHGTGIYNEQFF

SEQ ID NO: 315671 - protein, 20 aa, Homo sapiens
  CDR3 for alpha chain variable domain of TCR clone 157836 (TRAV12-1, TRAJ42)
SSVIQPPTSVKGGSQGNLIF

SEQ ID NO: 315672 - protein, 12 aa, Homo sapiens
  CDR3 for beta chain variable domain of TCR clone 157836 (TRBV7-9, TRBJ1-4)
CASSTDREKLFF

SEQ ID NO: 315673 - protein, 13 aa, Homo sapiens
  CDR3 for alpha chain variable domain of TCR clone 157837 (TRAV29/DV5, TRAJ31)
CAASRNNNARLMF

SEQ ID NO: 315674 - protein, 16 aa, Homo sapiens
  CDR3 for beta chain variable domain of TCR clone 157837 (TRBV7-9, TRBJ2-3)
CASSLGKQGGTDTQYF

SEQ ID NO: 315675 - protein, 13 aa, Homo sapiens
  CDR3 for alpha chain variable domain of TCR clone 157838 (TRAV13-1, TRAJ41)
CAASINSGYALNF

SEQ ID NO: 315676 - protein, 13 aa, Homo sapiens
  CDR3 for beta chain variable domain of TCR clone 157838 (TRBV7-3, TRBJ1-1)
CASSQDWGAEAVF

SEQ ID NO: 315677 - protein, 11 aa, Homo sapiens
  CDR3 for alpha chain variable domain of TCR clone 157839 (TRAV3, TRAJ21)
CAVGNFNKFYF

SEQ ID NO: 315678 - protein, 17 aa, Homo sapiens
  CDR3 for beta chain variable domain of TCR clone 157839 (TRBV4-2, TRBJ1-1)
CASTQFGGGSGDTEAFF

SEQ ID NO: 315679 - protein, 11 aa, Homo sapiens
  CDR3 for alpha chain variable domain of TCR clone 157840 (TRAV13-2, TRAJ15)
CSHQAGTALIF

SEQ ID NO: 315680 - protein, 15 aa, Homo sapiens
  CDR3 for beta chain variable domain of TCR clone 157840 (TRBV20-1, TRBJ1-5)
CCATSDRGLGQPQHF

SEQ ID NO: 315681 - protein, 17 aa, Homo sapiens
  CDR3 for alpha chain variable domain of TCR clone 157841 (TRAV38-2/DV8, TRAJ57)
CAYRSVLTQGGSEKLVF

SEQ ID NO: 315682 - protein, 16 aa, Homo sapiens
  CDR3 for beta chain variable domain of TCR clone 157841 (TRBV27, TRBJ2-2)
CASSFRGLVRTGELFF

SEQ ID NO: 315683 - protein, 23 aa, Homo sapiens
  CDR3 for alpha chain variable domain of TCR clone 157842 (TRAV26-1, TRAJ38)
CIADNAGNNHIQNPDPAVYQLRD

SEQ ID NO: 315684 - protein, 16 aa, Homo sapiens
  CDR3 for beta chain variable domain of TCR clone 157842 (TRBV7-3, TRBJ2-1)
CASSLSSGGGAKEQFF

SEQ ID NO: 315685 - protein, 15 aa, Homo sapiens
  CDR3 for alpha chain variable domain of TCR clone 157843 (TRAV21, TRAJ52)
CAVRGGGTSYGKLTF

SEQ ID NO: 315686 - protein, 15 aa, Homo sapiens
  CDR3 for beta chain variable domain of TCR clone 157843 (TRBV11-2, TRBJ2-1)
CASSLAPRAHNEQFF

SEQ ID NO: 315687 - protein, 13 aa, Homo sapiens
  CDR3 for alpha chain variable domain of TCR clone 157844 (TRAV2, TRAJ40)
CAVVASGTYKYIF

SEQ ID NO: 315688 - protein, 13 aa, Homo sapiens
  CDR3 for beta chain variable domain of TCR clone 157844 (TRBV7-2, TRBJ2-4)
CASSREHANIQYF

SEQ ID NO: 315689 - protein, 18 aa, Homo sapiens
  CDR3 for alpha chain variable domain of TCR clone 157845 (TRAV13-1, TRAJ52)
CAASKRSAGGTSYGKLTF

SEQ ID NO: 315690 - protein, 13 aa, Homo sapiens
  CDR3 for beta chain variable domain of TCR clone 157845 (TRBV12-4, TRBJ1-2)
CPSSLRQGKGYTF

SEQ ID NO: 315691 - protein, 10 aa, Homo sapiens
  CDR3 for alpha chain variable domain of TCR clone 157846 (TRAV30, TRAJ48)
CGIGNEKLTF

SEQ ID NO: 315692 - protein, 23 aa, Homo sapiens
  CDR3 for beta chain variable domain of TCR clone 157846 (TRBV7-9, TRBJ1-2)
EAQLEKSRLLSDRFSSGEDGYTF

SEQ ID NO: 315693 - protein, 13 aa, Homo sapiens
  CDR3 for alpha chain variable domain of TCR clone 157847 (TRAV8-1, TRAJ28)
CAFSGAGSYQLTF

SEQ ID NO: 315694 - protein, 14 aa, Homo sapiens
  CDR3 for beta chain variable domain of TCR clone 157847 (TRBV7-2, TRBJ2-2)
CASRGQGAAGELFF

SEQ ID NO: 315695 - protein, 19 aa, Homo sapiens
  CDR3 for alpha chain variable domain of TCR clone 157848 (TRAV17, TRAJ40)
TASRAADTASYFCASKYIF

SEQ ID NO: 315696 - protein, 13 aa, Homo sapiens
  CDR3 for beta chain variable domain of TCR clone 157848 (TRBV7-2, TRBJ2-2)
CASSLAVTGELFF

SEQ ID NO: 315697 - protein, 18 aa, Homo sapiens
  CDR3 for alpha chain variable domain of TCR clone 157849 (TRAV29/DV5, TRAJ52)
CAAGFRGAGCTSCGKLTF

SEQ ID NO: 315698 - protein, 16 aa, Homo sapiens
  CDR3 for beta chain variable domain of TCR clone 157849 (TRBV7-3, TRBJ2-2)
CASSLKRGTLSGELFF

SEQ ID NO: 315699 - protein, 14 aa, Homo sapiens
  CDR3 for alpha chain variable domain of TCR clone 157850 (TRAV12-3, TRAJ10)
SHLPLTGGGNKLTF

SEQ ID NO: 315700 - protein, 11 aa, Homo sapiens
  CDR3 for beta chain variable domain of TCR clone 157850 (TRBV20-1, TRBJ2-5)
CSANRAETQYF

SEQ ID NO: 315701 - protein, 15 aa, Homo sapiens
  CDR3 for alpha chain variable domain of TCR clone 157851 (TRAV3, TRAJ3)
CAVRDRDSSASKIIF

SEQ ID NO: 315702 - protein, 15 aa, Homo sapiens
  CDR3 for beta chain variable domain of TCR clone 157851 (TRBV4-1, TRBJ2-7)
CASSQNTGRLYEQYF

SEQ ID NO: 315703 - protein, 15 aa, Homo sapiens
  CDR3 for alpha chain variable domain of TCR clone 157852 (TRAV21, TRAJ53)
CATLNSGGSNYKLTI

SEQ ID NO: 315704 - protein, 18 aa, Homo sapiens
  CDR3 for beta chain variable domain of TCR clone 157852 (TRBV7-2, TRBJ2-2)
CASSLASRGAGGPGELFF

SEQ ID NO: 315705 - protein, 14 aa, Homo sapiens
  CDR3 for alpha chain variable domain of TCR clone 157853 (TRAV1-2, TRAJ16)
CAVNRFSDGQKLLF

SEQ ID NO: 315706 - protein, 13 aa, Homo sapiens
  CDR3 for beta chain variable domain of TCR clone 157853 (TRBV19, TRBJ1-2)
CASSVPGQDRYTF

SEQ ID NO: 315707 - protein, 22 aa, Homo sapiens
  CDR3 for alpha chain variable domain of TCR clone 157854 (TRAV21, TRAJ39)
AASQPGDSATPKGAKAGNMLTF

SEQ ID NO: 315708 - protein, 14 aa, Homo sapiens
  CDR3 for beta chain variable domain of TCR clone 157854 (TRBV11-2, TRBJ2-7)
CASSLGAGAYAQYF

SEQ ID NO: 315709 - protein, 17 aa, Homo sapiens
  CDR3 for alpha chain variable domain of TCR clone 157855 (TRAV13-1, TRAJ52)
CAASSVAGGTRYGKLTF

SEQ ID NO: 315710 - protein, 15 aa, Homo sapiens
  CDR3 for beta chain variable domain of TCR clone 157855 (TRBV2, TRBJ2-1)
CASSELAGSYNEQFF

SEQ ID NO: 315711 - protein, 15 aa, Homo sapiens
  CDR3 for alpha chain variable domain of TCR clone 157856 (TRAV26-1, TRAJ29)
CIVRVEGSGNTPLVF

SEQ ID NO: 315712 - protein, 15 aa, Homo sapiens
  CDR3 for beta chain variable domain of TCR clone 157856 (TRBV7-9, TRBJ1-5)
CASGQGHQPNQPQNF

SEQ ID NO: 315713 - protein, 14 aa, Homo sapiens
  CDR3 for alpha chain variable domain of TCR clone 157857 (TRAV1-2, TRAJ8)
CAVREDTGFQKLVF

SEQ ID NO: 315714 - protein, 16 aa, Homo sapiens
  CDR3 for beta chain variable domain of TCR clone 157857 (TRBV15, TRBJ2-3)
CATSRDLGIVTDTHYF

SEQ ID NO: 315715 - protein, 14 aa, Homo sapiens
  CDR3 for alpha chain variable domain of TCR clone 157858 (TRAV13-1, TRAJ35)
CAASKGGFGNGLHC

SEQ ID NO: 315716 - protein, 15 aa, Homo sapiens
  CDR3 for beta chain variable domain of TCR clone 157858 (TRBV7-9, TRBJ1-4)
CASSRTGGFNEKLFF

SEQ ID NO: 315717 - protein, 11 aa, Homo sapiens
  CDR3 for alpha chain variable domain of TCR clone 157859 (TRAV2, TRAJ13)
CASGGYQKVTF

SEQ ID NO: 315718 - protein, 16 aa, Homo sapiens
  CDR3 for beta chain variable domain of TCR clone 157859 (TRBV19, TRBJ2-1)
CASSKAGPSSYNEQFL

SEQ ID NO: 315719 - protein, 12 aa, Homo sapiens
  CDR3 for alpha chain variable domain of TCR clone 157860 (TRAV1-1, TRAJ15)
CAVGQAGTALIF

SEQ ID NO: 315720 - protein, 15 aa, Homo sapiens
  CDR3 for beta chain variable domain of TCR clone 157860 (TRBV10-3, TRBJ2-3)
CAISVLGQETDTQYF

SEQ ID NO: 315721 - protein, 12 aa, Homo sapiens
  CDR3 for alpha chain variable domain of TCR clone 157861 (TRAV13-2, TRAJ41)
CAKNIGRYELNF

SEQ ID NO: 315722 - protein, 12 aa, Homo sapiens
  CDR3 for beta chain variable domain of TCR clone 157861 (TRBV7-9, TRBJ1-1)
CASSLSGGVAFF

SEQ ID NO: 315723 - protein, 14 aa, Homo sapiens
  CDR3 for alpha chain variable domain of TCR clone 157862 (TRAV12-2, TRAJ45)
CALPERGGADGLTF

SEQ ID NO: 315724 - protein, 14 aa, Homo sapiens
  CDR3 for beta chain variable domain of TCR clone 157862 (TRBV18, TRBJ1-5)
CASSPGNSNQPQYF

SEQ ID NO: 315725 - protein, 13 aa, Homo sapiens
  CDR3 for alpha chain variable domain of TCR clone 157863 (TRAV12-1, TRAJ29)
CVVRNSGNTPLVF

SEQ ID NO: 315726 - protein, 14 aa, Homo sapiens
  CDR3 for beta chain variable domain of TCR clone 157863 (TRBV7-2, TRBJ2-7)
CASRSQGAAYEPYF

SEQ ID NO: 315727 - protein, 15 aa, Homo sapiens
  CDR3 for alpha chain variable domain of TCR clone 157864 (TRAV3, TRAJ5)
CAVRDLDTGRRALTF

SEQ ID NO: 315728 - protein, 13 aa, Homo sapiens
  CDR3 for beta chain variable domain of TCR clone 157864 (TRBV11-1, TRBJ2-1)
CASSLEDDTIRFF

SEQ ID NO: 315729 - protein, 14 aa, Homo sapiens
  CDR3 for alpha chain variable domain of TCR clone 157865 (TRAV13-1, TRAJ44)
CAAKATGPASKHTF

SEQ ID NO: 315730 - protein, 17 aa, Homo sapiens
  CDR3 for beta chain variable domain of TCR clone 157865 (TRBV7-3, TRBJ2-3)
CASSLMKRMRGADTQYF

SEQ ID NO: 315731 - protein, 13 aa, Homo sapiens
  CDR3 for alpha chain variable domain of TCR clone 157866 (TRAV8-6, TRAJ54)
CAVIAQGAQKLVL

SEQ ID NO: 315732 - protein, 13 aa, Homo sapiens
  CDR3 for beta chain variable domain of TCR clone 157866 (TRBV7-9, TRBJ1-2)
CASSLKQNYGYTF

SEQ ID NO: 315733 - protein, 22 aa, Homo sapiens
  CDR3 for alpha chain variable domain of TCR clone 157867 (TRAV3, TRAJ38)
CAVRDCLNAGNNHIQNPDHAVY

SEQ ID NO: 315734 - protein, 19 aa, Homo sapiens
  CDR3 for beta chain variable domain of TCR clone 157867 (TRBV7-2, TRBJ2-3)
CASSFLSRNWGGGTDTQYF

SEQ ID NO: 315735 - protein, 12 aa, Homo sapiens
  CDR3 for alpha chain variable domain of TCR clone 157868 (TRAV8-3, TRAJ34)
WASGYNTDKLIL

SEQ ID NO: 315736 - protein, 13 aa, Homo sapiens
  CDR3 for beta chain variable domain of TCR clone 157868 (TRBV6-4, TRBJ2-3)
CASSVSWADTQYF

SEQ ID NO: 315737 - protein, 16 aa, Homo sapiens
  CDR3 for alpha chain variable domain of TCR clone 157869 (TRAV3, TRAJ23)
CAVRDSSYNQGGKLIF

SEQ ID NO: 315738 - protein, 16 aa, Homo sapiens
  CDR3 for beta chain variable domain of TCR clone 157869 (TRBV15, TRBJ1-2)
CATSRGPRTGGGGYTF

SEQ ID NO: 315739 - protein, 15 aa, Homo sapiens
  CDR3 for alpha chain variable domain of TCR clone 157870 (TRAV8-3, TRAJ11)
CAVGLLNSGYSTLTF

SEQ ID NO: 315740 - protein, 23 aa, Homo sapiens
  CDR3 for beta chain variable domain of TCR clone 157870 (TRBV7-9, TRBJ1-2)
EAQLEKSRLLSDRFASGEDGYTF

SEQ ID NO: 315741 - protein, 13 aa, Homo sapiens
  CDR3 for alpha chain variable domain of TCR clone 157871 (TRAV3, TRAJ27)
CAVRPLGAGKSTF

SEQ ID NO: 315742 - protein, 13 aa, Homo sapiens
  CDR3 for beta chain variable domain of TCR clone 157871 (TRBV7-9, TRBJ2-3)
CASSPGCTDTQYF

SEQ ID NO: 315743 - protein, 14 aa, Homo sapiens
  CDR3 for alpha chain variable domain of TCR clone 157872 (TRAV35, TRAJ33)
CAGSSQDSNYQLIW

SEQ ID NO: 315744 - protein, 12 aa, Homo sapiens
  CDR3 for beta chain variable domain of TCR clone 157872 (TRBV27, TRBJ2-7)
CASSGGFYEQYF

SEQ ID NO: 315745 - protein, 14 aa, Homo sapiens
  CDR3 for alpha chain variable domain of TCR clone 157873 (TRAV35, TRAJ22)
CAGLRPGSARQLTF

SEQ ID NO: 315746 - protein, 14 aa, Homo sapiens
  CDR3 for beta chain variable domain of TCR clone 157873 (TRBV13, TRBJ2-7)
CASSLSRISYEQYF

SEQ ID NO: 315747 - protein, 12 aa, Homo sapiens
  CDR3 for alpha chain variable domain of TCR clone 157874 (TRAV20, TRAJ23)
CAVHNQVGKLIF

SEQ ID NO: 315748 - protein, 12 aa, Homo sapiens
  CDR3 for beta chain variable domain of TCR clone 157874 (TRBV7-6, TRBJ2-3)
CASSWAEDTQYF

SEQ ID NO: 315749 - protein, 11 aa, Homo sapiens
  CDR3 for alpha chain variable domain of TCR clone 157875 (TRAV23/DV6, TRAJ9)
CAASLSPPNTG

SEQ ID NO: 315750 - protein, 11 aa, Homo sapiens
  CDR3 for beta chain variable domain of TCR clone 157875 (TRBV12-4, TRBJ2-3)
CASTATDTQYF

SEQ ID NO: 315751 - protein, 17 aa, Homo sapiens
  CDR3 for alpha chain variable domain of TCR clone 157876 (TRAV3, TRAJ12)
CAVRDGGRGDSSYKLIF

SEQ ID NO: 315752 - protein, 14 aa, Homo sapiens
  CDR3 for beta chain variable domain of TCR clone 157876 (TRBV7-9, TRBJ1-2)
CASSRQGANYGYTF

SEQ ID NO: 315753 - protein, 14 aa, Homo sapiens
  CDR3 for alpha chain variable domain of TCR clone 157877 (TRAV9-2, TRAJ39)
CALYIYNAGNMLTF

SEQ ID NO: 315754 - protein, 13 aa, Homo sapiens
  CDR3 for beta chain variable domain of TCR clone 157877 (TRBV19, TRBJ2-2)
CASSIWSTGELCF

SEQ ID NO: 315755 - protein, 22 aa, Homo sapiens
  CDR3 for alpha chain variable domain of TCR clone 157878 (TRAV4, )
CLLGPHNYDIQNPDPAVYQLRD

SEQ ID NO: 315756 - protein, 17 aa, Homo sapiens
  CDR3 for beta chain variable domain of TCR clone 157878 (TRBV24-1, TRBJ2-1)
CATSDVSTSGTYNEQFF

SEQ ID NO: 315757 - protein, 14 aa, Homo sapiens
  CDR3 for alpha chain variable domain of TCR clone 157879 (TRAV21, TRAJ32)
CCGDYGGATNKLIF

SEQ ID NO: 315758 - protein, 13 aa, Homo sapiens
  CDR3 for beta chain variable domain of TCR clone 157879 (TRBV2, TRBJ1-6)
CASGRGGISPLHH

SEQ ID NO: 315759 - protein, 18 aa, Homo sapiens
  CDR3 for alpha chain variable domain of TCR clone 157880 (TRAV21, TRAJ52)
CAVRPSPAGGTRYGKLTF

SEQ ID NO: 315760 - protein, 18 aa, Homo sapiens
  CDR3 for beta chain variable domain of TCR clone 157880 (TRBV12-4, TRBJ2-2)
CASSLVAGTRGRTGELFF

SEQ ID NO: 315761 - protein, 19 aa, Homo sapiens
  CDR3 for alpha chain variable domain of TCR clone 157881 (TRAV17, TRAJ40)
TASRAADTASYFCASKYIF

SEQ ID NO: 315762 - protein, 17 aa, Homo sapiens
  CDR3 for beta chain variable domain of TCR clone 157881 (TRBV11-2, TRBJ2-4)
CASSFLALGGAEDIQYF

SEQ ID NO: 315763 - protein, 13 aa, Homo sapiens
  CDR3 for alpha chain variable domain of TCR clone 157882 (TRAV3, TRAJ27)
CAVRPLGAGKSTF

SEQ ID NO: 315764 - protein, 16 aa, Homo sapiens
  CDR3 for beta chain variable domain of TCR clone 157882 (TRBV7-3, TRBJ2-1)
CASSVEGYRSYNEQFF

SEQ ID NO: 315765 - protein, 14 aa, Homo sapiens
  CDR3 for alpha chain variable domain of TCR clone 157883 (TRAV17, TRAJ40)
CATVRFTGTYKYIF

SEQ ID NO: 315766 - protein, 15 aa, Homo sapiens
  CDR3 for beta chain variable domain of TCR clone 157883 (TRBV5-1, TRBJ1-1)
CASSSTTGTNTEAFF

SEQ ID NO: 315767 - protein, 11 aa, Homo sapiens
  CDR3 for alpha chain variable domain of TCR clone 157884 (TRAV2, TRAJ33)
CAVESNYQLIW

SEQ ID NO: 315768 - protein, 15 aa, Homo sapiens
  CDR3 for beta chain variable domain of TCR clone 157884 (TRBV19, TRBJ1-1)
CASTSGQIQNTEAVV

SEQ ID NO: 315769 - protein, 14 aa, Homo sapiens
  CDR3 for alpha chain variable domain of TCR clone 157885 (TRAV13-1, TRAJ35)
CAASKGGFANVLHC

SEQ ID NO: 315770 - protein, 13 aa, Homo sapiens
  CDR3 for beta chain variable domain of TCR clone 157885 (TRBV7-3, TRBJ1-1)
CASSQDWGAEAFF

SEQ ID NO: 315771 - protein, 12 aa, Homo sapiens
  CDR3 for alpha chain variable domain of TCR clone 157886 (TRAV3, TRAJ31)
CAVRDGNARLMF

SEQ ID NO: 315772 - protein, 18 aa, Homo sapiens
  CDR3 for beta chain variable domain of TCR clone 157886 (TRBV7-2, TRBJ2-3)
CASSLKREGSGITDRQYF

SEQ ID NO: 315773 - protein, 12 aa, Homo sapiens
  CDR3 for alpha chain variable domain of TCR clone 157887 (TRAV2, TRAJ9)
CAVGAGGFKTIF

SEQ ID NO: 315774 - protein, 15 aa, Homo sapiens
  CDR3 for beta chain variable domain of TCR clone 157887 (TRBV7-2, TRBJ2-1)
CASSSGLAGGNEQFF

SEQ ID NO: 315775 - protein, 13 aa, Homo sapiens
  CDR3 for alpha chain variable domain of TCR clone 157888 (TRAV13-1, TRAJ21)
CAASIYNFNKFYF

SEQ ID NO: 315776 - protein, 15 aa, Homo sapiens
  CDR3 for beta chain variable domain of TCR clone 157888 (TRBV7-9, TRBJ1-5)
CASSQGHQPNQPQHF

SEQ ID NO: 315777 - protein, 15 aa, Homo sapiens
  CDR3 for alpha chain variable domain of TCR clone 157889 (TRAV8-3, TRAJ27)
CAVGPSKTNAGKSTF

SEQ ID NO: 315778 - protein, 13 aa, Homo sapiens
  CDR3 for beta chain variable domain of TCR clone 157889 (TRBV3-1, TRBJ2-5)
CASSPVLSETQYF

SEQ ID NO: 315779 - protein, 11 aa, Homo sapiens
  CDR3 for alpha chain variable domain of TCR clone 157890 (TRAV21, TRAJ34)
CAHYNTDKLIF

SEQ ID NO: 315780 - protein, 14 aa, Homo sapiens
  CDR3 for beta chain variable domain of TCR clone 157890 (TRBV7-2, TRBJ2-7)
CVSSPKTSFYEQYF

SEQ ID NO: 315781 - protein, 15 aa, Homo sapiens
  CDR3 for alpha chain variable domain of TCR clone 157891 (TRAV41, TRAJ45)
CAASYSVGGADGLTF

SEQ ID NO: 315782 - protein, 14 aa, Homo sapiens
  CDR3 for beta chain variable domain of TCR clone 157891 (TRBV27, TRBJ2-2)
CASRPGVNTGELFF

SEQ ID NO: 315783 - protein, 14 aa, Homo sapiens
  CDR3 for alpha chain variable domain of TCR clone 157892 (TRAV13-1, TRAJ32)
CAARGSGATNKLIF

SEQ ID NO: 315784 - protein, 15 aa, Homo sapiens
  CDR3 for beta chain variable domain of TCR clone 157892 (TRBV5-5, TRBJ1-1)
CASSLVGKGNTEAFF

SEQ ID NO: 315785 - protein, 12 aa, Homo sapiens
  CDR3 for alpha chain variable domain of TCR clone 157893 (TRAV3, TRAJ26)
CAVRDYGQNFVF

SEQ ID NO: 315786 - protein, 16 aa, Homo sapiens
  CDR3 for beta chain variable domain of TCR clone 157893 (TRBV2, TRBJ2-7)
CASSEPWTGPSYEQYF

SEQ ID NO: 315787 - protein, 13 aa, Homo sapiens
  CDR3 for alpha chain variable domain of TCR clone 157894 (TRAV8-3, TRAJ15)
CAVGIQAGTALIF

SEQ ID NO: 315788 - protein, 17 aa, Homo sapiens
  CDR3 for beta chain variable domain of TCR clone 157894 (TRBV20-1, TRBJ2-1)
CSARDHLAGVSYNEQFF

SEQ ID NO: 315789 - protein, 12 aa, Homo sapiens
  CDR3 for alpha chain variable domain of TCR clone 157895 (TRAV13-1, TRAJ21)
CAAKEGFNKFYF

SEQ ID NO: 315790 - protein, 14 aa, Homo sapiens
  CDR3 for beta chain variable domain of TCR clone 157895 (TRBV25-1, TRBJ1-4)
CQQSGDSTNEKLFF

SEQ ID NO: 315791 - protein, 20 aa, Homo sapiens
  CDR3 for alpha chain variable domain of TCR clone 157896 (TRAV21, TRAJ4)
AASQPGDSATLAGGYNKLIF

SEQ ID NO: 315792 - protein, 19 aa, Homo sapiens
  CDR3 for beta chain variable domain of TCR clone 157896 (TRBV18, TRBJ1-3)
CASSPLSRTDMSSGNTIYF

SEQ ID NO: 315793 - protein, 11 aa, Homo sapiens
  CDR3 for alpha chain variable domain of TCR clone 157897 (TRAV21, TRAJ27)
CAVRMQANQPL

SEQ ID NO: 315794 - protein, 16 aa, Homo sapiens
  CDR3 for beta chain variable domain of TCR clone 157897 (TRBV3-1, TRBJ2-7)
CASGQGATGVAYEQYF

SEQ ID NO: 315795 - protein, 15 aa, Homo sapiens
  CDR3 for alpha chain variable domain of TCR clone 157898 (TRAV12-3, TRAJ42)
CAMITSVGSQGNLIF

SEQ ID NO: 315796 - protein, 16 aa, Homo sapiens
  CDR3 for beta chain variable domain of TCR clone 157898 (TRBV12-5, TRBJ2-5)
CASGPRTSGNQETQYF

SEQ ID NO: 315797 - protein, 15 aa, Homo sapiens
  CDR3 for alpha chain variable domain of TCR clone 157899 (TRAV26-1, TRAJ29)
CIVRVEGSGNTPLVF

SEQ ID NO: 315798 - protein, 14 aa, Homo sapiens
  CDR3 for beta chain variable domain of TCR clone 157899 (TRBV25-1, TRBJ1-1)
CASTHLGGSTEAFF

SEQ ID NO: 315799 - protein, 15 aa, Homo sapiens
  CDR3 for alpha chain variable domain of TCR clone 157900 (TRAV12-3, TRAJ48)
CAMSAKNFGNEKLTF

SEQ ID NO: 315800 - protein, 14 aa, Homo sapiens
  CDR3 for beta chain variable domain of TCR clone 157900 (TRBV2, TRBJ1-6)
CASSESRNNSPLHF

SEQ ID NO: 315801 - protein, 14 aa, Homo sapiens
  CDR3 for alpha chain variable domain of TCR clone 157901 (TRAV16, TRAJ48)
CALTPGFGNEKLTF

SEQ ID NO: 315802 - protein, 15 aa, Homo sapiens
  CDR3 for beta chain variable domain of TCR clone 157901 (TRBV6-6, TRBJ2-7)
CASSYSYGGSYEQYF

SEQ ID NO: 315803 - protein, 13 aa, Homo sapiens
  CDR3 for alpha chain variable domain of TCR clone 157902 (TRAV12-3, TRAJ53)
CAMRGDSNYKLTF

SEQ ID NO: 315804 - protein, 15 aa, Homo sapiens
  CDR3 for beta chain variable domain of TCR clone 157902 (TRBV2, TRBJ2-1)
CATQARLVMIGEQFF

SEQ ID NO: 315805 - protein, 14 aa, Homo sapiens
  CDR3 for alpha chain variable domain of TCR clone 157903 (TRAV38-1, TRAJ40)
CALRPTSGTYKYIF

SEQ ID NO: 315806 - protein, 16 aa, Homo sapiens
  CDR3 for beta chain variable domain of TCR clone 157903 (TRBV11-2, TRBJ2-7)
CASSPTTGGVSYEQYF

SEQ ID NO: 315807 - protein, 12 aa, Homo sapiens
  CDR3 for alpha chain variable domain of TCR clone 157904 (TRAV8-3, TRAJ20)
CTVDFNDYKLSF

SEQ ID NO: 315808 - protein, 12 aa, Homo sapiens
  CDR3 for beta chain variable domain of TCR clone 157904 (TRBV29-1, TRBJ2-3)
CSVTGGADTQYF

SEQ ID NO: 315809 - protein, 13 aa, Homo sapiens
  CDR3 for alpha chain variable domain of TCR clone 157905 (TRAV3, TRAJ27)
CAVRPLGAGKSTF

SEQ ID NO: 315810 - protein, 14 aa, Homo sapiens
  CDR3 for beta chain variable domain of TCR clone 157905 (TRBV12-4, TRBJ1-1)
CASSFSQMNTEAFF

SEQ ID NO: 315811 - protein, 12 aa, Homo sapiens
  CDR3 for alpha chain variable domain of TCR clone 157906 (TRAV12-1, TRAJ6)
CVASERSYIPTF

SEQ ID NO: 315812 - protein, 21 aa, Homo sapiens
  CDR3 for beta chain variable domain of TCR clone 157906 (TRBV7-3, TRBJ2-1)
GGTQPCISVPAAYGLAGAQFF

SEQ ID NO: 315813 - protein, 12 aa, Homo sapiens
  CDR3 for alpha chain variable domain of TCR clone 157907 (TRAV12-3, TRAJ17)
CAMTLTGNKLTF

SEQ ID NO: 315814 - protein, 13 aa, Homo sapiens
  CDR3 for beta chain variable domain of TCR clone 157907 (TRBV27, TRBJ2-1)
CASRTLGVGKQFF

SEQ ID NO: 315815 - protein, 14 aa, Homo sapiens
  CDR3 for alpha chain variable domain of TCR clone 157908 (TRAV17, TRAJ11)
CATDTSRGYSTLTF

SEQ ID NO: 315816 - protein, 14 aa, Homo sapiens
  CDR3 for beta chain variable domain of TCR clone 157908 (TRBV7-2, TRBJ2-5)
CASSFTQGQETQYF

SEQ ID NO: 315817 - protein, 14 aa, Homo sapiens
  CDR3 for alpha chain variable domain of TCR clone 157909 (TRAV3, TRAJ9)
CAVRLNTVGFTTIF

SEQ ID NO: 315818 - protein, 15 aa, Homo sapiens
  CDR3 for beta chain variable domain of TCR clone 157909 (TRBV7-2, TRBJ2-1)
CASSLASGRVNEQFF

SEQ ID NO: 315819 - protein, 14 aa, Homo sapiens
  CDR3 for alpha chain variable domain of TCR clone 157910 (TRAV1-2, TRAJ8)
CAVREDTGFQKLVF

SEQ ID NO: 315820 - protein, 16 aa, Homo sapiens
  CDR3 for beta chain variable domain of TCR clone 157910 (TRBV7-3, TRBJ2-2)
CASSLKRGTLSEELFF

SEQ ID NO: 315821 - protein, 14 aa, Homo sapiens
  CDR3 for alpha chain variable domain of TCR clone 157911 (TRAV8-1, TRAJ15)
CAVNGQQAGTALIF

SEQ ID NO: 315822 - protein, 16 aa, Homo sapiens
  CDR3 for beta chain variable domain of TCR clone 157911 (TRBV12-4, TRBJ2-5)
CASSFFVRGRQETQYF

SEQ ID NO: 315823 - protein, 15 aa, Homo sapiens
  CDR3 for alpha chain variable domain of TCR clone 157912 (TRAV12-3, TRAJ6)
CAMSATTGGSYIPTF

SEQ ID NO: 315824 - protein, 15 aa, Homo sapiens
  CDR3 for beta chain variable domain of TCR clone 157912 (TRBV11-2, TRBJ2-1)
CASSPLRLSYNEQFF

SEQ ID NO: 315825 - protein, 15 aa, Homo sapiens
  CDR3 for alpha chain variable domain of TCR clone 157913 (TRAV21, TRAJ24)
CAARSSTDSGGKLQF

SEQ ID NO: 315826 - protein, 11 aa, Homo sapiens
  CDR3 for beta chain variable domain of TCR clone 157913 (TRBV7-2, TRBJ2-3)
CASSLGDTQYF

SEQ ID NO: 315827 - protein, 11 aa, Homo sapiens
  CDR3 for alpha chain variable domain of TCR clone 157914 (TRAV13-2, TRAJ20)
CADSNDYKISF

SEQ ID NO: 315828 - protein, 13 aa, Homo sapiens
  CDR3 for beta chain variable domain of TCR clone 157914 (TRBV7-9, TRBJ2-3)
CASSPGSTDTQYF

SEQ ID NO: 315829 - protein, 14 aa, Homo sapiens
  CDR3 for alpha chain variable domain of TCR clone 157915 (TRAV12-1, TRAJ44)
CGVRKYRHCSKLTF

SEQ ID NO: 315830 - protein, 16 aa, Homo sapiens
  CDR3 for beta chain variable domain of TCR clone 157915 (TRBV20-1, TRBJ2-5)
CSPGGTSGGYMETQYF

SEQ ID NO: 315831 - protein, 15 aa, Homo sapiens
  CDR3 for alpha chain variable domain of TCR clone 157916 (TRAV20, TRAJ41)
CAVQANSNSGYALNF

SEQ ID NO: 315832 - protein, 18 aa, Homo sapiens
  CDR3 for beta chain variable domain of TCR clone 157916 (TRBV7-9, TRBJ2-7)
CASSRTTRGSRTWYEQYF

SEQ ID NO: 315833 - protein, 16 aa, Homo sapiens
  CDR3 for alpha chain variable domain of TCR clone 157917 (TRAV8-6, TRAJ58)
CAVSDHTETSGPRLTF

SEQ ID NO: 315834 - protein, 14 aa, Homo sapiens
  CDR3 for beta chain variable domain of TCR clone 157917 (TRBV7-2, TRBJ1-5)
CASSPRGGPQPQHF

SEQ ID NO: 315835 - protein, 11 aa, Homo sapiens
  CDR3 for alpha chain variable domain of TCR clone 157918 (TRAV1-2, TRAJ40)
CAVPGTYKYIF

SEQ ID NO: 315836 - protein, 15 aa, Homo sapiens
  CDR3 for beta chain variable domain of TCR clone 157918 (TRBV28, TRBJ1-3)
CASSLAGSSGNTMYF

SEQ ID NO: 315837 - protein, 15 aa, Homo sapiens
  CDR3 for alpha chain variable domain of TCR clone 157919 (TRAV12-3, TRAJ27)
CAMRAYNTNAGKSTF

SEQ ID NO: 315838 - protein, 12 aa, Homo sapiens
  CDR3 for beta chain variable domain of TCR clone 157919 (TRBV11-2, TRBJ2-1)
CASSPGNNEQFF

SEQ ID NO: 315839 - protein, 14 aa, Homo sapiens
  CDR3 for alpha chain variable domain of TCR clone 157920 (TRAV12-3, TRAJ29)
CSMSPYSGNTPLVF

SEQ ID NO: 315840 - protein, 15 aa, Homo sapiens
  CDR3 for beta chain variable domain of TCR clone 157920 (TRBV27, TRBJ2-1)
CASSNGGGSSNEQFF

SEQ ID NO: 315841 - protein, 14 aa, Homo sapiens
  CDR3 for alpha chain variable domain of TCR clone 157921 (TRAV13-1, TRAJ35)
CAASKGGFGNVLHC

SEQ ID NO: 315842 - protein, 13 aa, Homo sapiens
  CDR3 for beta chain variable domain of TCR clone 157921 (TRBV7-3, TRBJ1-1)
CASSQDWGAEYFF

SEQ ID NO: 315843 - protein, 11 aa, Homo sapiens
  CDR3 for alpha chain variable domain of TCR clone 157922 (TRAV23/DV6, TRAJ49)
CAARAGNQFYF

SEQ ID NO: 315844 - protein, 14 aa, Homo sapiens
  CDR3 for beta chain variable domain of TCR clone 157922 (TRBV7-3, TRBJ2-1)
CASSLAGGTNEQFF

SEQ ID NO: 315845 - protein, 13 aa, Homo sapiens
  CDR3 for alpha chain variable domain of TCR clone 157923 (TRAV13-2, TRAJ48)
CAEMDFGNEELTF

SEQ ID NO: 315846 - protein, 12 aa, Homo sapiens
  CDR3 for beta chain variable domain of TCR clone 157923 (TRBV7-8, TRBJ2-7)
CASSLGDREQYF

SEQ ID NO: 315847 - protein, 18 aa, Homo sapiens
  CDR3 for alpha chain variable domain of TCR clone 157924 (TRAV13-1, TRAJ52)
RAAKNPNAGGTSYRKLTF

SEQ ID NO: 315848 - protein, 15 aa, Homo sapiens
  CDR3 for beta chain variable domain of TCR clone 157924 (TRBV6-1, TRBJ2-3)
CASSERGGITDTQYF

SEQ ID NO: 315849 - protein, 14 aa, Homo sapiens
  CDR3 for alpha chain variable domain of TCR clone 157925 (TRAV1-2, TRAJ8)
CAVREDTGFQKLVF

SEQ ID NO: 315850 - protein, 14 aa, Homo sapiens
  CDR3 for beta chain variable domain of TCR clone 157925 (TRBV19, TRBJ1-1)
CASLRTGLNTEAFF

SEQ ID NO: 315851 - protein, 12 aa, Homo sapiens
  CDR3 for alpha chain variable domain of TCR clone 157926 (TRAV4, TRAJ26)
CLVGDYGQNFVF

SEQ ID NO: 315852 - protein, 13 aa, Homo sapiens
  CDR3 for beta chain variable domain of TCR clone 157926 (TRBV7-2, TRBJ2-7)
CASSSPSGSEQYF

SEQ ID NO: 315853 - protein, 17 aa, Homo sapiens
  CDR3 for alpha chain variable domain of TCR clone 157927 (TRAV17, TRAJ13)
FLLCYGRGVWGLPEVTF

SEQ ID NO: 315854 - protein, 17 aa, Homo sapiens
  CDR3 for beta chain variable domain of TCR clone 157927 (TRBV11-2, TRBJ2-1)
CASSLYPPGVEYNEQFF

SEQ ID NO: 315855 - protein, 15 aa, Homo sapiens
  CDR3 for alpha chain variable domain of TCR clone 157928 (TRAV8-3, TRAJ44)
CAVGAGAGTASKLTF

SEQ ID NO: 315856 - protein, 12 aa, Homo sapiens
  CDR3 for beta chain variable domain of TCR clone 157928 (TRBV7-8, TRBJ2-4)
CASSLGGNRQYF

SEQ ID NO: 315857 - protein, 11 aa, Homo sapiens
  CDR3 for alpha chain variable domain of TCR clone 157929 (TRAV17, TRAJ36)
CAPTGANNLFF

SEQ ID NO: 315858 - protein, 15 aa, Homo sapiens
  CDR3 for beta chain variable domain of TCR clone 157929 (TRBV7-2, TRBJ2-1)
CASSSGLAGGNEQFF

SEQ ID NO: 315859 - protein, 14 aa, Homo sapiens
  CDR3 for alpha chain variable domain of TCR clone 157930 (TRAV13-1, TRAJ35)
CAASKGGFGNVLHC

SEQ ID NO: 315860 - protein, 13 aa, Homo sapiens
  CDR3 for beta chain variable domain of TCR clone 157930 (TRBV29-1, TRBJ1-3)
CSVEGGSGNTIYF

SEQ ID NO: 315861 - protein, 11 aa, Homo sapiens
  CDR3 for alpha chain variable domain of TCR clone 157931 (TRAV2, TRAJ13)
CASVGYQKVTL

SEQ ID NO: 315862 - protein, 14 aa, Homo sapiens
  CDR3 for beta chain variable domain of TCR clone 157931 (TRBV6-3, TRBJ1-1)
CASSNLLPGAEAFF

SEQ ID NO: 315863 - protein, 18 aa, Homo sapiens
  CDR3 for alpha chain variable domain of TCR clone 157932 (TRAV26-1, TRAJ23)
CIVRGGLEVWNQGGKLIF

SEQ ID NO: 315864 - protein, 16 aa, Homo sapiens
  CDR3 for beta chain variable domain of TCR clone 157932 (TRBV27, TRBJ2-7)
CASSFQGGRGSYEQYF

SEQ ID NO: 315865 - protein, 13 aa, Homo sapiens
  CDR3 for alpha chain variable domain of TCR clone 157933 (TRAV12-1, TRAJ11)
CVVNWAGYSTLTF

SEQ ID NO: 315866 - protein, 16 aa, Homo sapiens
  CDR3 for beta chain variable domain of TCR clone 157933 (TRBV27, TRBJ2-2)
CASSLRPGGAPGELFF

SEQ ID NO: 315867 - protein, 12 aa, Homo sapiens
  CDR3 for alpha chain variable domain of TCR clone 157934 (TRAV21, TRAJ31)
RVLAGNNARLMF

SEQ ID NO: 315868 - protein, 16 aa, Homo sapiens
  CDR3 for beta chain variable domain of TCR clone 157934 (TRBV27, TRBJ2-5)
CASSFGPGGTKETQYF

SEQ ID NO: 315869 - protein, 12 aa, Homo sapiens
  CDR3 for alpha chain variable domain of TCR clone 157935 (TRAV13-2, TRAJ8)
CAPWLGFQKLVF

SEQ ID NO: 315870 - protein, 14 aa, Homo sapiens
  CDR3 for beta chain variable domain of TCR clone 157935 (TRBV13, TRBJ2-1)
CASSPRPRYNEQFF

SEQ ID NO: 315871 - protein, 15 aa, Homo sapiens
  CDR3 for alpha chain variable domain of TCR clone 157936 (TRAV36/DV7, TRAJ53)
CAVEGSGGSNYKLTF

SEQ ID NO: 315872 - protein, 16 aa, Homo sapiens
  CDR3 for beta chain variable domain of TCR clone 157936 (TRBV27, TRBJ2-2)
CASSLSGFLVTGELFF

SEQ ID NO: 315873 - protein, 16 aa, Homo sapiens
  CDR3 for alpha chain variable domain of TCR clone 157937 (TRAV30, TRAJ24)
CGTEIVDADSGGKFQF

SEQ ID NO: 315874 - protein, 15 aa, Homo sapiens
  CDR3 for beta chain variable domain of TCR clone 157937 (TRBV4-3, TRBJ1-5)
CASSQEAVGGQPQHF

SEQ ID NO: 315875 - protein, 11 aa, Homo sapiens
  CDR3 for alpha chain variable domain of TCR clone 157938 (TRAV2, TRAJ21)
CAVFNFNKFHF

SEQ ID NO: 315876 - protein, 20 aa, Homo sapiens
  CDR3 for beta chain variable domain of TCR clone 157938 (TRBV7-8, TRBJ2-2)
CASSHLFPGPTIHITGELFF

SEQ ID NO: 315877 - protein, 18 aa, Homo sapiens
  CDR3 for alpha chain variable domain of TCR clone 157939 (TRAV13-1, TRAJ52)
CAASTRSAGGTSYGKLTF

SEQ ID NO: 315878 - protein, 14 aa, Homo sapiens
  CDR3 for beta chain variable domain of TCR clone 157939 (TRBV6-1, TRBJ1-3)
CASVQGGGGNTIYF

SEQ ID NO: 315879 - protein, 12 aa, Homo sapiens
  CDR3 for alpha chain variable domain of TCR clone 157940 (TRAV21, TRAJ11)
CAATSGYSTLTF

SEQ ID NO: 315880 - protein, 15 aa, Homo sapiens
  CDR3 for beta chain variable domain of TCR clone 157940 (TRBV10-1, TRBJ2-3)
CASSATSGGFDTQYF

SEQ ID NO: 315881 - protein, 14 aa, Homo sapiens
  CDR3 for alpha chain variable domain of TCR clone 157941 (TRAV1-2, TRAJ16)
CAVNRFSDGQKLLF

SEQ ID NO: 315882 - protein, 18 aa, Homo sapiens
  CDR3 for beta chain variable domain of TCR clone 157941 (TRBV6-5, TRBJ1-1)
CTSVPALFDGLLNTEAFF

SEQ ID NO: 315883 - protein, 14 aa, Homo sapiens
  CDR3 for alpha chain variable domain of TCR clone 157942 (TRAV38-1, TRAJ57)
CAFMNTGGSEKLVL

SEQ ID NO: 315884 - protein, 13 aa, Homo sapiens
  CDR3 for beta chain variable domain of TCR clone 157942 (TRBV25-1, TRBJ2-5)
CASSESGRETQYF

SEQ ID NO: 315885 - protein, 22 aa, Homo sapiens
  CDR3 for alpha chain variable domain of TCR clone 157943 (TRAV2, TRAJ10)
ILQVREADAAVYYTGGGNKLTF

SEQ ID NO: 315886 - protein, 16 aa, Homo sapiens
  CDR3 for beta chain variable domain of TCR clone 157943 (TRBV5-7, TRBJ1-2)
CASSRGVTGGSYGYIF

SEQ ID NO: 315887 - protein, 16 aa, Homo sapiens
  CDR3 for alpha chain variable domain of TCR clone 157944 (TRAV1-2, TRAJ10)
CAVRGAPTGGGNKLTF

SEQ ID NO: 315888 - protein, 12 aa, Homo sapiens
  CDR3 for beta chain variable domain of TCR clone 157944 (TRBV7-8, TRBJ2-7)
CASSLGDREQYF

SEQ ID NO: 315889 - protein, 11 aa, Homo sapiens
  CDR3 for alpha chain variable domain of TCR clone 157945 (TRAV12-1, TRAJ8)
CVVTGFQKLVF

SEQ ID NO: 315890 - protein, 11 aa, Homo sapiens
  CDR3 for beta chain variable domain of TCR clone 157945 (TRBV12-4, TRBJ1-2)
CASRGDRGYTF

SEQ ID NO: 315891 - protein, 13 aa, Homo sapiens
  CDR3 for alpha chain variable domain of TCR clone 157946 (TRAV2, TRAJ40)
CAVVTSGTYKYIF

SEQ ID NO: 315892 - protein, 14 aa, Homo sapiens
  CDR3 for beta chain variable domain of TCR clone 157946 (TRBV20-1, TRBJ1-1)
CSATGGTANTEAFF

SEQ ID NO: 315893 - protein, 10 aa, Homo sapiens
  CDR3 for alpha chain variable domain of TCR clone 157947 (TRAV12-3, TRAJ49)
CAMNDDQFYF

SEQ ID NO: 315894 - protein, 12 aa, Homo sapiens
  CDR3 for beta chain variable domain of TCR clone 157947 (TRBV5-5, TRBJ2-5)
CASSYFGETQYF

SEQ ID NO: 315895 - protein, 14 aa, Homo sapiens
  CDR3 for alpha chain variable domain of TCR clone 157948 (TRAV20, TRAJ26)
CAVQAAIYGQNFVF

SEQ ID NO: 315896 - protein, 14 aa, Homo sapiens
  CDR3 for beta chain variable domain of TCR clone 157948 (TRBV27, TRBJ2-2)
CAGSLGDTTGELFF

SEQ ID NO: 315897 - protein, 17 aa, Homo sapiens
  CDR3 for alpha chain variable domain of TCR clone 157949 (TRAV4, TRAJ42)
CLVGVLYYGGSQGNLIF

SEQ ID NO: 315898 - protein, 12 aa, Homo sapiens
  CDR3 for beta chain variable domain of TCR clone 157949 (TRBV20-1, TRBJ2-1)
CSAQYTYNEQFF

SEQ ID NO: 315899 - protein, 10 aa, Homo sapiens
  CDR3 for alpha chain variable domain of TCR clone 157950 (TRAV1-2, TRAJ31)
CVSEDARLMF

SEQ ID NO: 315900 - protein, 13 aa, Homo sapiens
  CDR3 for beta chain variable domain of TCR clone 157950 (TRBV19, TRBJ1-2)
CASSQGQVYGYTF

SEQ ID NO: 315901 - protein, 13 aa, Homo sapiens
  CDR3 for alpha chain variable domain of TCR clone 157951 (TRAV9-2, TRAJ37)
CALHSSNTGKLIF

SEQ ID NO: 315902 - protein, 17 aa, Homo sapiens
  CDR3 for beta chain variable domain of TCR clone 157951 (TRBV7-8, TRBJ2-6)
CASSAGTGGAGANVLTF

SEQ ID NO: 315903 - protein, 14 aa, Homo sapiens
  CDR3 for alpha chain variable domain of TCR clone 157952 (TRAV17, TRAJ17)
CATDHRAAGNRLTF

SEQ ID NO: 315904 - protein, 14 aa, Homo sapiens
  CDR3 for beta chain variable domain of TCR clone 157952 (TRBV19, TRBJ1-5)
CASSIGGGGQPQHF

SEQ ID NO: 315905 - protein, 15 aa, Homo sapiens
  CDR3 for alpha chain variable domain of TCR clone 157953 (TRAV13-2, TRAJ40)
CAENRSRQGTYKYIF

SEQ ID NO: 315906 - protein, 15 aa, Homo sapiens
  CDR3 for beta chain variable domain of TCR clone 157953 (TRBV19, TRBJ2-1)
CASSMGWYSNNEQFF

SEQ ID NO: 315907 - protein, 11 aa, Homo sapiens
  CDR3 for alpha chain variable domain of TCR clone 157954 (TRAV29/DV5, TRAJ31)
CAASYRDRLMF

SEQ ID NO: 315908 - protein, 19 aa, Homo sapiens
  CDR3 for beta chain variable domain of TCR clone 157954 (TRBV19, TRBJ2-5)
CASSIGRVTDFFLGKTQYF

SEQ ID NO: 315909 - protein, 14 aa, Homo sapiens
  CDR3 for alpha chain variable domain of TCR clone 157955 (TRAV8-4, TRAJ34)
CAVSDPGDTDKLIF

SEQ ID NO: 315910 - protein, 13 aa, Homo sapiens
  CDR3 for beta chain variable domain of TCR clone 157955 (TRBV20-1, TRBJ1-1)
CSAPLGGGTEAFF

SEQ ID NO: 315911 - protein, 15 aa, Homo sapiens
  CDR3 for alpha chain variable domain of TCR clone 157956 (TRAV8-3, TRAJ27)
CAVGPSKTNAGKSTF

SEQ ID NO: 315912 - protein, 15 aa, Homo sapiens
  CDR3 for beta chain variable domain of TCR clone 157956 (TRBV7-9, TRBJ2-7)
CASSLALAEAYEQYF

SEQ ID NO: 315913 - protein, 13 aa, Homo sapiens
  CDR3 for alpha chain variable domain of TCR clone 157957 (TRAV12-1, TRAJ7)
CVVNMRGNNRLAF

SEQ ID NO: 315914 - protein, 16 aa, Homo sapiens
  CDR3 for beta chain variable domain of TCR clone 157957 (TRBV28, TRBJ1-5)
CASSLTGQGWNQPQHF

SEQ ID NO: 315915 - protein, 15 aa, Homo sapiens
  CDR3 for alpha chain variable domain of TCR clone 157958 (TRAV27, TRAJ38)
CAARRNAGNNRKLIW

SEQ ID NO: 315916 - protein, 15 aa, Homo sapiens
  CDR3 for beta chain variable domain of TCR clone 157958 (TRBV2, TRBJ2-1)
CASSGLAGGHNEQFF

SEQ ID NO: 315917 - protein, 13 aa, Homo sapiens
  CDR3 for alpha chain variable domain of TCR clone 157959 (TRAV38-2/DV8, TRAJ34)
CAYRNYNTDKLIF

SEQ ID NO: 315918 - protein, 13 aa, Homo sapiens
  CDR3 for beta chain variable domain of TCR clone 157959 (TRBV4-1, TRBJ2-2)
CASSQENTGELFF

SEQ ID NO: 315919 - protein, 14 aa, Homo sapiens
  CDR3 for alpha chain variable domain of TCR clone 157960 (TRAV12-2, TRAJ13)
CAVKKTGGYQKVTF

SEQ ID NO: 315920 - protein, 12 aa, Homo sapiens
  CDR3 for beta chain variable domain of TCR clone 157960 (TRBV19, TRBJ2-1)
CASSTTGGSPFF

SEQ ID NO: 315921 - protein, 18 aa, Homo sapiens
  CDR3 for alpha chain variable domain of TCR clone 157961 (TRAV8-6, TRAJ36)
CAVSDGLRDWGKQPPLWD

SEQ ID NO: 315922 - protein, 16 aa, Homo sapiens
  CDR3 for beta chain variable domain of TCR clone 157961 (TRBV28, TRBJ2-1)
CASSSPEYPRDNEQFF

SEQ ID NO: 315923 - protein, 16 aa, Homo sapiens
  CDR3 for alpha chain variable domain of TCR clone 157962 (TRAV30, TRAJ24)
CGTEIVYADSWGKFQF

SEQ ID NO: 315924 - protein, 14 aa, Homo sapiens
  CDR3 for beta chain variable domain of TCR clone 157962 (TRBV13, TRBJ2-1)
CASSPRPRYNEQFF

SEQ ID NO: 315925 - protein, 14 aa, Homo sapiens
  CDR3 for alpha chain variable domain of TCR clone 157963 (TRAV1-2, TRAJ8)
YAVREDTGFQKLVF

SEQ ID NO: 315926 - protein, 14 aa, Homo sapiens
  CDR3 for beta chain variable domain of TCR clone 157963 (TRBV13, TRBJ1-1)
CASTVITVNTEAFF

SEQ ID NO: 315927 - protein, 14 aa, Homo sapiens
  CDR3 for alpha chain variable domain of TCR clone 157964 (TRAV8-3, TRAJ4)
CAVGAAGGYNKLIF

SEQ ID NO: 315928 - protein, 17 aa, Homo sapiens
  CDR3 for beta chain variable domain of TCR clone 157964 (TRBV7-2, TRBJ2-3)
CASSSYSGTRRADTQYF

SEQ ID NO: 315929 - protein, 14 aa, Homo sapiens
  CDR3 for alpha chain variable domain of TCR clone 157965 (TRAV21, TRAJ28)
CAVGSGAGSYQLTF

SEQ ID NO: 315930 - protein, 16 aa, Homo sapiens
  CDR3 for beta chain variable domain of TCR clone 157965 (TRBV20-1, TRBJ1-4)
CSAPGQGLLTNEKLFF

SEQ ID NO: 315931 - protein, 15 aa, Homo sapiens
  CDR3 for alpha chain variable domain of TCR clone 157966 (TRAV14/DV4, TRAJ49)
CAMREGRDTGNQFYL

SEQ ID NO: 315932 - protein, 17 aa, Homo sapiens
  CDR3 for beta chain variable domain of TCR clone 157966 (TRBV12-4, TRBJ1-5)
CASSLRGDRGPNQPQHF

SEQ ID NO: 315933 - protein, 14 aa, Homo sapiens
  CDR3 for alpha chain variable domain of TCR clone 157967 (TRAV12-2, TRAJ17)
CAVNIKAAGNKLTF

SEQ ID NO: 315934 - protein, 14 aa, Homo sapiens
  CDR3 for beta chain variable domain of TCR clone 157967 (TRBV18, TRBJ2-7)
CASSPRGGSYEQYF

SEQ ID NO: 315935 - protein, 14 aa, Homo sapiens
  CDR3 for alpha chain variable domain of TCR clone 157968 (TRAV16, TRAJ39)
CALSNNNAGNMLTF

SEQ ID NO: 315936 - protein, 17 aa, Homo sapiens
  CDR3 for beta chain variable domain of TCR clone 157968 (TRBV23-1, TRBJ1-2)
CASSNTGGGLLWLHLRF

SEQ ID NO: 315937 - protein, 14 aa, Homo sapiens
  CDR3 for alpha chain variable domain of TCR clone 157969 (TRAV17, TRAJ6)
CATDERRGSYIPTF

SEQ ID NO: 315938 - protein, 14 aa, Homo sapiens
  CDR3 for beta chain variable domain of TCR clone 157969 (TRBV11-2, TRBJ2-5)
CASSRTGGIETQYF

SEQ ID NO: 315939 - protein, 15 aa, Homo sapiens
  CDR3 for alpha chain variable domain of TCR clone 157970 (TRAV23/DV6, TRAJ18)
CAARYRGSTLGSLYF

SEQ ID NO: 315940 - protein, 16 aa, Homo sapiens
  CDR3 for beta chain variable domain of TCR clone 157970 (TRBV20-1, TRBJ1-2)
CSASMGQGVANYGYTF

SEQ ID NO: 315941 - protein, 12 aa, Homo sapiens
  CDR3 for alpha chain variable domain of TCR clone 157971 (TRAV26-1, TRAJ43)
CNVRGNNNDMRF

SEQ ID NO: 315942 - protein, 13 aa, Homo sapiens
  CDR3 for beta chain variable domain of TCR clone 157971 (TRBV20-1, TRBJ2-3)
CSAIYPGADTQYF

SEQ ID NO: 315943 - protein, 12 aa, Homo sapiens
  CDR3 for alpha chain variable domain of TCR clone 157972 (TRAV13-1, TRAJ48)
CAANFGNEKLTL

SEQ ID NO: 315944 - protein, 14 aa, Homo sapiens
  CDR3 for beta chain variable domain of TCR clone 157972 (TRBV19, TRBJ2-2)
CASSGQGIAGELFF

SEQ ID NO: 315945 - protein, 18 aa, Homo sapiens
  CDR3 for alpha chain variable domain of TCR clone 157973 (TRAV29/DV5, TRAJ52)
CAAGFRGAGSTSYGELAF

SEQ ID NO: 315946 - protein, 16 aa, Homo sapiens
  CDR3 for beta chain variable domain of TCR clone 157973 (TRBV7-3, TRBJ2-2)
CASSLKRGTLSGELFF

SEQ ID NO: 315947 - protein, 14 aa, Homo sapiens
  CDR3 for alpha chain variable domain of TCR clone 157974 (TRAV12-1, TRAJ9)
CVVNIITGGFKTIF

SEQ ID NO: 315948 - protein, 15 aa, Homo sapiens
  CDR3 for beta chain variable domain of TCR clone 157974 (TRBV11-3, TRBJ2-7)
CASSLGGGLNYEQYF

SEQ ID NO: 315949 - protein, 14 aa, Homo sapiens
  CDR3 for alpha chain variable domain of TCR clone 157975 (TRAV13-1, TRAJ36)
CAASINTRANNLFF

SEQ ID NO: 315950 - protein, 18 aa, Homo sapiens
  CDR3 for beta chain variable domain of TCR clone 157975 (TRBV20-1, TRBJ2-3)
CSARDPWGQGLSTDTQYF

SEQ ID NO: 315951 - protein, 16 aa, Homo sapiens
  CDR3 for alpha chain variable domain of TCR clone 157976 (TRAV3, TRAJ10)
CAVRDMRAGGGNKLTF

SEQ ID NO: 315952 - protein, 13 aa, Homo sapiens
  CDR3 for beta chain variable domain of TCR clone 157976 (TRBV6-1, TRBJ2-2)
CANSGHNTGELFF

SEQ ID NO: 315953 - protein, 12 aa, Homo sapiens
  CDR3 for alpha chain variable domain of TCR clone 157977 (TRAV13-1, TRAJ3)
CAATGVQQCFQD

SEQ ID NO: 315954 - protein, 16 aa, Homo sapiens
  CDR3 for beta chain variable domain of TCR clone 157977 (TRBV7-3, TRBJ2-2)
FASSLKRGTLSGELFF

SEQ ID NO: 315955 - protein, 14 aa, Homo sapiens
  CDR3 for alpha chain variable domain of TCR clone 157978 (TRAV27, TRAJ42)
CAGASGGSQGNLIF

SEQ ID NO: 315956 - protein, 13 aa, Homo sapiens
  CDR3 for beta chain variable domain of TCR clone 157978 (TRBV12-4, TRBJ1-2)
CASSLRQGKGYTF

SEQ ID NO: 315957 - protein, 14 aa, Homo sapiens
  CDR3 for alpha chain variable domain of TCR clone 157979 (TRAV4, TRAJ17)
CLVGDMVAGNKLTF

SEQ ID NO: 315958 - protein, 14 aa, Homo sapiens
  CDR3 for beta chain variable domain of TCR clone 157979 (TRBV4-1, TRBJ2-7)
CASSPVAGGDEQYF

SEQ ID NO: 315959 - protein, 14 aa, Homo sapiens
  CDR3 for alpha chain variable domain of TCR clone 157980 (TRAV12-2, TRAJ40)
CAVKIPSGTYKYIF

SEQ ID NO: 315960 - protein, 12 aa, Homo sapiens
  CDR3 for beta chain variable domain of TCR clone 157980 (TRBV5-1, TRBJ2-3)
CASSLAADTQYF

SEQ ID NO: 315961 - protein, 12 aa, Homo sapiens
  CDR3 for alpha chain variable domain of TCR clone 157981 (TRAV12-3, TRAJ20)
CAMVRGDYKLSF

SEQ ID NO: 315962 - protein, 14 aa, Homo sapiens
  CDR3 for beta chain variable domain of TCR clone 157981 (TRBV5-5, TRBJ1-5)
CASRGQGVDQPQHF

SEQ ID NO: 315963 - protein, 13 aa, Homo sapiens
  CDR3 for alpha chain variable domain of TCR clone 157982 (TRAV12-1, TRAJ39)
CVARSGAGNMLTF

SEQ ID NO: 315964 - protein, 12 aa, Homo sapiens
  CDR3 for beta chain variable domain of TCR clone 157982 (TRBV11-3, TRBJ1-1)
CASSHRQGEAFF

SEQ ID NO: 315965 - protein, 15 aa, Homo sapiens
  CDR3 for alpha chain variable domain of TCR clone 157983 (TRAV34, TRAJ38)
CGADFTPGNNRKLIW

SEQ ID NO: 315966 - protein, 14 aa, Homo sapiens
  CDR3 for beta chain variable domain of TCR clone 157983 (TRBV11-2, TRBJ2-3)
CASSLGGGENTQYF

SEQ ID NO: 315967 - protein, 14 aa, Homo sapiens
  CDR3 for alpha chain variable domain of TCR clone 157984 (TRAV3, TRAJ34)
CAVRATGNTDKLIF

SEQ ID NO: 315968 - protein, 14 aa, Homo sapiens
  CDR3 for beta chain variable domain of TCR clone 157984 (TRBV5-4, TRBJ1-1)
CASSLDSRRDEAFF

SEQ ID NO: 315969 - protein, 18 aa, Homo sapiens
  CDR3 for alpha chain variable domain of TCR clone 157985 (TRAV21, TRAJ52)
CAVRPSPAGGTSYGKLTF

SEQ ID NO: 315970 - protein, 14 aa, Homo sapiens
  CDR3 for beta chain variable domain of TCR clone 157985 (TRBV11-2, TRBJ1-4)
CASSPEVKNEKLFF

SEQ ID NO: 315971 - protein, 12 aa, Homo sapiens
  CDR3 for alpha chain variable domain of TCR clone 157986 (TRAV21, TRAJ49)
CAVNDGGNQLYF

SEQ ID NO: 315972 - protein, 14 aa, Homo sapiens
  CDR3 for beta chain variable domain of TCR clone 157986 (TRBV18, TRBJ2-7)
CAGSPRGGSYEQYF

SEQ ID NO: 315973 - protein, 15 aa, Homo sapiens
  CDR3 for alpha chain variable domain of TCR clone 157987 (TRAV27, TRAJ38)
CAARRNAGNNRKLIW

SEQ ID NO: 315974 - protein, 13 aa, Homo sapiens
  CDR3 for beta chain variable domain of TCR clone 157987 (TRBV20-1, TRBJ1-1)
CSARGGGNTKAFF

SEQ ID NO: 315975 - protein, 11 aa, Homo sapiens
  CDR3 for alpha chain variable domain of TCR clone 157988 (TRAV12-3, TRAJ43)
CAMSVSNDMRF

SEQ ID NO: 315976 - protein, 10 aa, Homo sapiens
  CDR3 for beta chain variable domain of TCR clone 157988 (TRBV20-1, TRBJ1-1)
HLGGGTEAFF

SEQ ID NO: 315977 - protein, 16 aa, Homo sapiens
  CDR3 for alpha chain variable domain of TCR clone 157989 (TRAV3, TRAJ10)
CAVRAMRAGGGNKLTF

SEQ ID NO: 315978 - protein, 20 aa, Homo sapiens
  CDR3 for beta chain variable domain of TCR clone 157989 (TRBV11-3, TRBJ2-7)
CASSQRTSGSLRAVLRAGHQ

SEQ ID NO: 315979 - protein, 17 aa, Homo sapiens
  CDR3 for alpha chain variable domain of TCR clone 157990 (TRAV12-2, TRAJ42)
CAVNILNYGGSQGNLIF

SEQ ID NO: 315980 - protein, 13 aa, Homo sapiens
  CDR3 for beta chain variable domain of TCR clone 157990 (TRBV3-1, TRBJ1-5)
CATSQDLDQPQHF

SEQ ID NO: 315981 - protein, 15 aa, Homo sapiens
  CDR3 for alpha chain variable domain of TCR clone 157991 (TRAV23/DV6, TRAJ18)
CAARYRGSTLGRLYF

SEQ ID NO: 315982 - protein, 16 aa, Homo sapiens
  CDR3 for beta chain variable domain of TCR clone 157991 (TRBV4-1, TRBJ2-7)
CASSQNDRDNSYEQYF

SEQ ID NO: 315983 - protein, 15 aa, Homo sapiens
  CDR3 for alpha chain variable domain of TCR clone 157992 (TRAV13-1, TRAJ32)
CAASIYGGATNKLIF

SEQ ID NO: 315984 - protein, 17 aa, Homo sapiens
  CDR3 for beta chain variable domain of TCR clone 157992 (TRBV7-3, TRBJ2-5)
CASSLGSGRSGSETQYC

SEQ ID NO: 315985 - protein, 13 aa, Homo sapiens
  CDR3 for alpha chain variable domain of TCR clone 157993 (TRAV12-1, TRAJ40)
CVVPTSGTYKYVF

SEQ ID NO: 315986 - protein, 18 aa, Homo sapiens
  CDR3 for beta chain variable domain of TCR clone 157993 (TRBV7-6, TRBJ2-1)
CASSPRTSGMGSYNEQFF

SEQ ID NO: 315987 - protein, 16 aa, Homo sapiens
  CDR3 for alpha chain variable domain of TCR clone 157994 (TRAV13-1, TRAJ48)
CAASIFGNFGNKKLTF

SEQ ID NO: 315988 - protein, 16 aa, Homo sapiens
  CDR3 for beta chain variable domain of TCR clone 157994 (TRBV24-1, TRBJ1-1)
CATSIPRGDTKLSLDK

SEQ ID NO: 315989 - protein, 12 aa, Homo sapiens
  CDR3 for alpha chain variable domain of TCR clone 157995 (TRAV1-2, TRAJ33)
CAALDSNYQLIW

SEQ ID NO: 315990 - protein, 12 aa, Homo sapiens
  CDR3 for beta chain variable domain of TCR clone 157995 (TRBV7-9, TRBJ2-7)
CASSIKREEQYF

SEQ ID NO: 315991 - protein, 11 aa, Homo sapiens
  CDR3 for alpha chain variable domain of TCR clone 157996 (TRAV17, TRAJ9)
CATTGGFKTIF

SEQ ID NO: 315992 - protein, 15 aa, Homo sapiens
  CDR3 for beta chain variable domain of TCR clone 157996 (TRBV2, TRBJ2-3)
CASSDFEKATDTQYF

SEQ ID NO: 315993 - protein, 14 aa, Homo sapiens
  CDR3 for alpha chain variable domain of TCR clone 157997 (TRAV2, TRAJ3)
CAVRPYSSASKIIF

SEQ ID NO: 315994 - protein, 16 aa, Homo sapiens
  CDR3 for beta chain variable domain of TCR clone 157997 (TRBV7-6, TRBJ2-5)
CQQLPTGGDPSETQYF

SEQ ID NO: 315995 - protein, 10 aa, Homo sapiens
  CDR3 for alpha chain variable domain of TCR clone 157998 (TRAV13-1, TRAJ41)
CAASGPRRTQ

SEQ ID NO: 315996 - protein, 16 aa, Homo sapiens
  CDR3 for beta chain variable domain of TCR clone 157998 (TRBV18, TRBJ2-3)
CASSPPREGRGNTQYF

SEQ ID NO: 315997 - protein, 16 aa, Homo sapiens
  CDR3 for alpha chain variable domain of TCR clone 157999 (TRAV26-1, TRAJ37)
CIVRGDGSGNTGKLIL

SEQ ID NO: 315998 - protein, 15 aa, Homo sapiens
  CDR3 for beta chain variable domain of TCR clone 157999 (TRBV7-3, TRBJ2-1)
CASSPTGGGEVEQFF

SEQ ID NO: 315999 - protein, 14 aa, Homo sapiens
  CDR3 for alpha chain variable domain of TCR clone 158000 (TRAV12-1, TRAJ17)
CVVNYKAAGNMITF

SEQ ID NO: 316000 - protein, 17 aa, Homo sapiens
  CDR3 for beta chain variable domain of TCR clone 158000 (TRBV20-1, TRBJ2-1)
CSASSSGLAGSYNEQFF

SEQ ID NO: 316001 - protein, 19 aa, Homo sapiens
  CDR3 for alpha chain variable domain of TCR clone 158001 (TRAV1-2, TRAJ16)
LSYNVLDGLEEKDGQKLLF

SEQ ID NO: 316002 - protein, 13 aa, Homo sapiens
  CDR3 for beta chain variable domain of TCR clone 158001 (TRBV7-2, TRBJ2-2)
CASSLAVTGELFF

SEQ ID NO: 316003 - protein, 11 aa, Homo sapiens
  CDR3 for alpha chain variable domain of TCR clone 158002 (TRAV1-1, TRAJ16)
CAAGDGQKQLF

SEQ ID NO: 316004 - protein, 15 aa, Homo sapiens
  CDR3 for beta chain variable domain of TCR clone 158002 (TRBV28, TRBJ1-2)
CASIPQGSDDYGYTF

SEQ ID NO: 316005 - protein, 13 aa, Homo sapiens
  CDR3 for alpha chain variable domain of TCR clone 158003 (TRAV1-1, TRAJ9)
CAAKNTGGLKTIF

SEQ ID NO: 316006 - protein, 11 aa, Homo sapiens
  CDR3 for beta chain variable domain of TCR clone 158003 (TRBV7-6, TRBJ2-5)
CASSLEETQYF

SEQ ID NO: 316007 - protein, 15 aa, Homo sapiens
  CDR3 for alpha chain variable domain of TCR clone 158004 (TRAV35, TRAJ58)
CAGRRQETSGSRLTF

SEQ ID NO: 316008 - protein, 14 aa, Homo sapiens
  CDR3 for beta chain variable domain of TCR clone 158004 (TRBV12-5, TRBJ2-5)
CASGSRTHQETQYF

SEQ ID NO: 316009 - protein, 15 aa, Homo sapiens
  CDR3 for alpha chain variable domain of TCR clone 158005 (TRAV8-3, TRAJ40)
CAAPSLGSGTYKYIF

SEQ ID NO: 316010 - protein, 15 aa, Homo sapiens
  CDR3 for beta chain variable domain of TCR clone 158005 (TRBV7-9, TRBJ1-5)
CASSQGHQPNQPQHF

SEQ ID NO: 316011 - protein, 12 aa, Homo sapiens
  CDR3 for alpha chain variable domain of TCR clone 158006 (TRAV16, TRAJ26)
CALRSYGQNFVF

SEQ ID NO: 316012 - protein, 13 aa, Homo sapiens
  CDR3 for beta chain variable domain of TCR clone 158006 (TRBV19, TRBJ1-2)
CASSVPGQDGYTF

SEQ ID NO: 316013 - protein, 14 aa, Homo sapiens
  CDR3 for alpha chain variable domain of TCR clone 158007 (TRAV17, TRAJ57)
CATDPQGGPEKLVF

SEQ ID NO: 316014 - protein, 14 aa, Homo sapiens
  CDR3 for beta chain variable domain of TCR clone 158007 (TRBV27, TRBJ2-5)
CASSSLKGWETQYF

SEQ ID NO: 316015 - protein, 14 aa, Homo sapiens
  CDR3 for alpha chain variable domain of TCR clone 158008 (TRAV38-1, TRAJ29)
CAFITPSGNTPLVF

SEQ ID NO: 316016 - protein, 16 aa, Homo sapiens
  CDR3 for beta chain variable domain of TCR clone 158008 (TRBV7-2, TRBJ2-5)
CQQPRQGRKSRETQYF

SEQ ID NO: 316017 - protein, 14 aa, Homo sapiens
  CDR3 for alpha chain variable domain of TCR clone 158009 (TRAV23/DV6, TRAJ37)
CAARTSSNTGKLIF

SEQ ID NO: 316018 - protein, 15 aa, Homo sapiens
  CDR3 for beta chain variable domain of TCR clone 158009 (TRBV7-9, TRBJ2-7)
CASSPGGGLTYEQYF

SEQ ID NO: 316019 - protein, 11 aa, Homo sapiens
  CDR3 for alpha chain variable domain of TCR clone 158010 (TRAV3, TRAJ21)
CAVGNFNKFYF

SEQ ID NO: 316020 - protein, 17 aa, Homo sapiens
  CDR3 for beta chain variable domain of TCR clone 158010 (TRBV19, TRBJ1-5)
CASSRDRILSRFQPQHF

SEQ ID NO: 316021 - protein, 13 aa, Homo sapiens
  CDR3 for alpha chain variable domain of TCR clone 158011 (TRAV2, TRAJ9)
CAVVETGGFKTIF

SEQ ID NO: 316022 - protein, 16 aa, Homo sapiens
  CDR3 for beta chain variable domain of TCR clone 158011 (TRBV6-1, TRBJ2-5)
CASSETLDRGAETQYF

SEQ ID NO: 316023 - protein, 14 aa, Homo sapiens
  CDR3 for alpha chain variable domain of TCR clone 158012 (TRAV1-2, TRAJ16)
CAVNRFSDGQKLLF

SEQ ID NO: 316024 - protein, 15 aa, Homo sapiens
  CDR3 for beta chain variable domain of TCR clone 158012 (TRBV27, TRBJ2-1)
CASSNGGGSSNEQFY

SEQ ID NO: 316025 - protein, 14 aa, Homo sapiens
  CDR3 for alpha chain variable domain of TCR clone 158013 (TRAV12-2, TRAJ40)
CAVKIPSGTHKYIF

SEQ ID NO: 316026 - protein, 12 aa, Homo sapiens
  CDR3 for beta chain variable domain of TCR clone 158013 (TRBV11-2, TRBJ2-1)
CASSPGNNEQFF

SEQ ID NO: 316027 - protein, 16 aa, Homo sapiens
  CDR3 for alpha chain variable domain of TCR clone 158014 (TRAV8-2, TRAJ48)
CVVSDVSNFGNEKLTF

SEQ ID NO: 316028 - protein, 16 aa, Homo sapiens
  CDR3 for beta chain variable domain of TCR clone 158014 (TRBV28, TRBJ1-2)
CASSHGQGVYKDGYTF

SEQ ID NO: 316029 - protein, 12 aa, Homo sapiens
  CDR3 for alpha chain variable domain of TCR clone 158015 (TRAV36/DV7, TRAJ54)
CTVVRGAQKLVF

SEQ ID NO: 316030 - protein, 13 aa, Homo sapiens
  CDR3 for beta chain variable domain of TCR clone 158015 (TRBV19, TRBJ2-1)
CASKVGAGGEQFF

SEQ ID NO: 316031 - protein, 12 aa, Homo sapiens
  CDR3 for alpha chain variable domain of TCR clone 158016 (TRAV1-1, TRAJ39)
CAVPVVGNMLTF

SEQ ID NO: 316032 - protein, 16 aa, Homo sapiens
  CDR3 for beta chain variable domain of TCR clone 158016 (TRBV28, TRBJ2-7)
CASSPWVATGDLSQNF

SEQ ID NO: 316033 - protein, 16 aa, Homo sapiens
  CDR3 for alpha chain variable domain of TCR clone 158017 (TRAV26-1, TRAJ53)
CIVRVAMGGSNYKLTF

SEQ ID NO: 316034 - protein, 17 aa, Homo sapiens
  CDR3 for beta chain variable domain of TCR clone 158017 (TRBV7-8, TRBJ2-6)
CASSAGTGGAGANVLTF

SEQ ID NO: 316035 - protein, 12 aa, Homo sapiens
  CDR3 for alpha chain variable domain of TCR clone 158018 (TRAV3, TRAJ20)
CAVRDPDYKLSF

SEQ ID NO: 316036 - protein, 11 aa, Homo sapiens
  CDR3 for beta chain variable domain of TCR clone 158018 (TRBV29-1, TRBJ1-1)
CSVEILTEAFF

SEQ ID NO: 316037 - protein, 11 aa, Homo sapiens
  CDR3 for alpha chain variable domain of TCR clone 158019 (TRAV1-1, TRAJ23)
CAVRQGGKLIF

SEQ ID NO: 316038 - protein, 15 aa, Homo sapiens
  CDR3 for beta chain variable domain of TCR clone 158019 (TRBV2, TRBJ2-1)
CASSEEREGDNEQFF

SEQ ID NO: 316039 - protein, 13 aa, Homo sapiens
  CDR3 for alpha chain variable domain of TCR clone 158020 (TRAV12-1, TRAJ26)
CVVRRNYGQNFVF

SEQ ID NO: 316040 - protein, 14 aa, Homo sapiens
  CDR3 for beta chain variable domain of TCR clone 158020 (TRBV4-2, TRBJ1-5)
CASSQDSINQPQHF

SEQ ID NO: 316041 - protein, 14 aa, Homo sapiens
  CDR3 for alpha chain variable domain of TCR clone 158021 (TRAV23/DV6, TRAJ24)
CPASLSDSWGKLQF

SEQ ID NO: 316042 - protein, 16 aa, Homo sapiens
  CDR3 for beta chain variable domain of TCR clone 158021 (TRBV7-9, TRBJ2-6)
CASSLKGPLRANVLTF

SEQ ID NO: 316043 - protein, 16 aa, Homo sapiens
  CDR3 for alpha chain variable domain of TCR clone 158022 (TRAV30, TRAJ24)
CGTEIVDADSWGKFQF

SEQ ID NO: 316044 - protein, 14 aa, Homo sapiens
  CDR3 for beta chain variable domain of TCR clone 158022 (TRBV3-1, TRBJ2-3)
CASSWSGVGDTQYF

SEQ ID NO: 316045 - protein, 13 aa, Homo sapiens
  CDR3 for alpha chain variable domain of TCR clone 158023 (TRAV16, TRAJ9)
CALRSTGGFKTIF

SEQ ID NO: 316046 - protein, 16 aa, Homo sapiens
  CDR3 for beta chain variable domain of TCR clone 158023 (TRBV5-1, TRBJ1-3)
CASSRSGEDSGNTIYL

SEQ ID NO: 316047 - protein, 11 aa, Homo sapiens
  CDR3 for alpha chain variable domain of TCR clone 158024 (TRAV17, TRAJ49)
CATNTGNQVYF

SEQ ID NO: 316048 - protein, 12 aa, Homo sapiens
  CDR3 for beta chain variable domain of TCR clone 158024 (TRBV2, TRBJ2-7)
CASSGGSGIPYF

SEQ ID NO: 316049 - protein, 13 aa, Homo sapiens
  CDR3 for alpha chain variable domain of TCR clone 158025 (TRAV17, TRAJ40)
CATTPGGTYKYIF

SEQ ID NO: 316050 - protein, 12 aa, Homo sapiens
  CDR3 for beta chain variable domain of TCR clone 158025 (TRBV2, TRBJ1-5)
CASSENRTPQHF

SEQ ID NO: 316051 - protein, 14 aa, Homo sapiens
  CDR3 for alpha chain variable domain of TCR clone 158026 (TRAV8-2, TRAJ37)
CVVSISGNTGKLIF

SEQ ID NO: 316052 - protein, 13 aa, Homo sapiens
  CDR3 for beta chain variable domain of TCR clone 158026 (TRBV7-9, TRBJ1-1)
CASTQGMNTEAFF

SEQ ID NO: 316053 - protein, 23 aa, Homo sapiens
  CDR3 for alpha chain variable domain of TCR clone 158027 (TRAV1-1, TRAJ11)
LLQELQMKDSASYFCAGYSTLTF

SEQ ID NO: 316054 - protein, 15 aa, Homo sapiens
  CDR3 for beta chain variable domain of TCR clone 158027 (TRBV6-5, TRBJ2-1)
CASRGDVDAYNEQFF

SEQ ID NO: 316055 - protein, 14 aa, Homo sapiens
  CDR3 for alpha chain variable domain of TCR clone 158028 (TRAV26-1, TRAJ39)
CIVRGSRAGNMLTF

SEQ ID NO: 316056 - protein, 15 aa, Homo sapiens
  CDR3 for beta chain variable domain of TCR clone 158028 (TRBV18, TRBJ2-5)
CASSPDPGLQETQYS

SEQ ID NO: 316057 - protein, 16 aa, Homo sapiens
  CDR3 for alpha chain variable domain of TCR clone 158029 (TRAV3, TRAJ5)
CAVRNLMDTGRRALTF

SEQ ID NO: 316058 - protein, 16 aa, Homo sapiens
  CDR3 for beta chain variable domain of TCR clone 158029 (TRBV12-5, TRBJ2-5)
CASGPRTSGNQETQYC

SEQ ID NO: 316059 - protein, 14 aa, Homo sapiens
  CDR3 for alpha chain variable domain of TCR clone 158030 (TRAV1-2, TRAJ8)
CAVREDTGFQKLVF

SEQ ID NO: 316060 - protein, 14 aa, Homo sapiens
  CDR3 for beta chain variable domain of TCR clone 158030 (TRBV19, TRBJ2-1)
CASPTFVSSGEQFF

SEQ ID NO: 316061 - protein, 23 aa, Homo sapiens
  CDR3 for alpha chain variable domain of TCR clone 158031 (TRAV8-2, TRAJ34)
HLTKPSAHMSDAAEYFCVVTLIF

SEQ ID NO: 316062 - protein, 14 aa, Homo sapiens
  CDR3 for beta chain variable domain of TCR clone 158031 (TRBV11-2, TRBJ1-1)
CASSLGSRGPEAFF

SEQ ID NO: 316063 - protein, 16 aa, Homo sapiens
  CDR3 for alpha chain variable domain of TCR clone 158032 (TRAV12-3, TRAJ53)
CAMSPGSGGSSYKLTF

SEQ ID NO: 316064 - protein, 12 aa, Homo sapiens
  CDR3 for beta chain variable domain of TCR clone 158032 (TRBV7-8, TRBJ2-7)
CASSLGDREQYF

SEQ ID NO: 316065 - protein, 10 aa, Homo sapiens
  CDR3 for alpha chain variable domain of TCR clone 158033 (TRAV1-2, TRAJ31)
CVSEDARLMF

SEQ ID NO: 316066 - protein, 14 aa, Homo sapiens
  CDR3 for beta chain variable domain of TCR clone 158033 (TRBV20-1, TRBJ1-3)
CSASPTGAGNTIYF

SEQ ID NO: 316067 - protein, 17 aa, Homo sapiens
  CDR3 for alpha chain variable domain of TCR clone 158034 (TRAV13-1, TRAJ31)
CAPRDRLMFGDGTQLVV

SEQ ID NO: 316068 - protein, 14 aa, Homo sapiens
  CDR3 for beta chain variable domain of TCR clone 158034 (TRBV11-2, TRBJ2-5)
CASRPLAGRETQYF

SEQ ID NO: 316069 - protein, 15 aa, Homo sapiens
  CDR3 for alpha chain variable domain of TCR clone 158035 (TRAV26-1, TRAJ56)
CIVRVATGANSKLTF

SEQ ID NO: 316070 - protein, 15 aa, Homo sapiens
  CDR3 for beta chain variable domain of TCR clone 158035 (TRBV27, TRBJ2-7)
CASSPQREGQREKYF

SEQ ID NO: 316071 - protein, 12 aa, Homo sapiens
  CDR3 for alpha chain variable domain of TCR clone 158036 (TRAV8-4, TRAJ43)
CAVSVNNNDMRF

SEQ ID NO: 316072 - protein, 14 aa, Homo sapiens
  CDR3 for beta chain variable domain of TCR clone 158036 (TRBV20-1, TRBJ1-1)
CSAQTLIGGTEAFF

SEQ ID NO: 316073 - protein, 14 aa, Homo sapiens
  CDR3 for alpha chain variable domain of TCR clone 158037 (TRAV1-2, TRAJ16)
CAVNRFSDGEKLLF

SEQ ID NO: 316074 - protein, 15 aa, Homo sapiens
  CDR3 for beta chain variable domain of TCR clone 158037 (TRBV5-1, TRBJ2-2)
CASSSQGGNTGELFF

SEQ ID NO: 316075 - protein, 14 aa, Homo sapiens
  CDR3 for alpha chain variable domain of TCR clone 158038 (TRAV17, TRAJ48)
CATEGNFGNEKLTF

SEQ ID NO: 316076 - protein, 12 aa, Homo sapiens
  CDR3 for beta chain variable domain of TCR clone 158038 (TRBV12-4, TRBJ1-2)
CASSFIWLHLRF

SEQ ID NO: 316077 - protein, 16 aa, Homo sapiens
  CDR3 for alpha chain variable domain of TCR clone 158039 (TRAV30, TRAJ24)
CGTEIVGADSWGKFRF

SEQ ID NO: 316078 - protein, 15 aa, Homo sapiens
  CDR3 for beta chain variable domain of TCR clone 158039 (TRBV7-9, TRBJ1-4)
CASSARTGGNEKLFF

SEQ ID NO: 316079 - protein, 14 aa, Homo sapiens
  CDR3 for alpha chain variable domain of TCR clone 158040 (TRAV12-3, TRAJ57)
CARALEGGSEKLVF

SEQ ID NO: 316080 - protein, 17 aa, Homo sapiens
  CDR3 for beta chain variable domain of TCR clone 158040 (TRBV11-3, TRBJ2-3)
CASSLALTGGGTDTQYF

SEQ ID NO: 316081 - protein, 13 aa, Homo sapiens
  CDR3 for alpha chain variable domain of TCR clone 158041 (TRAV36/DV7, TRAJ34)
CAVGEVNTDKLIF

SEQ ID NO: 316082 - protein, 15 aa, Homo sapiens
  CDR3 for beta chain variable domain of TCR clone 158041 (TRBV18, TRBJ2-7)
CASSPRSGTAYEQYF

SEQ ID NO: 316083 - protein, 17 aa, Homo sapiens
  CDR3 for alpha chain variable domain of TCR clone 158042 (TRAV3, TRAJ6)
CAVRDGPRAGGSYIPTI

SEQ ID NO: 316084 - protein, 14 aa, Homo sapiens
  CDR3 for beta chain variable domain of TCR clone 158042 (TRBV7-2, TRBJ2-7)
CASSPETSFYEQYF

SEQ ID NO: 316085 - protein, 14 aa, Homo sapiens
  CDR3 for alpha chain variable domain of TCR clone 158043 (TRAV38-1, TRAJ45)
CASHSGGGAYGLTF

SEQ ID NO: 316086 - protein, 13 aa, Homo sapiens
  CDR3 for beta chain variable domain of TCR clone 158043 (TRBV10-3, TRBJ1-2)
CAISERDSYGDTF

SEQ ID NO: 316087 - protein, 17 aa, Homo sapiens
  CDR3 for alpha chain variable domain of TCR clone 158044 (TRAV38-1, TRAJ28)
CAFMKPTSGAGSYQLTF

SEQ ID NO: 316088 - protein, 15 aa, Homo sapiens
  CDR3 for beta chain variable domain of TCR clone 158044 (TRBV5-1, TRBJ2-4)
CASSLGGGGSHIQYF

SEQ ID NO: 316089 - protein, 12 aa, Homo sapiens
  CDR3 for alpha chain variable domain of TCR clone 158045 (TRAV1-1, TRAJ8)
CAGGTGFQTLGF

SEQ ID NO: 316090 - protein, 16 aa, Homo sapiens
  CDR3 for beta chain variable domain of TCR clone 158045 (TRBV12-5, TRBJ2-5)
CASGPRTSGNQETQYF

SEQ ID NO: 316091 - protein, 18 aa, Homo sapiens
  CDR3 for alpha chain variable domain of TCR clone 158046 (TRAV13-1, TRAJ52)
CAAKNPNAGGTSYGKMTF

SEQ ID NO: 316092 - protein, 15 aa, Homo sapiens
  CDR3 for beta chain variable domain of TCR clone 158046 (TRBV20-1, TRBJ2-7)
CSARDRVSGMDEQYF

SEQ ID NO: 316093 - protein, 13 aa, Homo sapiens
  CDR3 for alpha chain variable domain of TCR clone 158047 (TRAV13-2, TRAJ40)
CAEFTSGTYKYIF

SEQ ID NO: 316094 - protein, 14 aa, Homo sapiens
  CDR3 for beta chain variable domain of TCR clone 158047 (TRBV10-2, TRBJ1-5)
CASSSTVRNQPQHF

SEQ ID NO: 316095 - protein, 11 aa, Homo sapiens
  CDR3 for alpha chain variable domain of TCR clone 158048 (TRAV3, TRAJ17)
CAEAAGNKLTF

SEQ ID NO: 316096 - protein, 15 aa, Homo sapiens
  CDR3 for beta chain variable domain of TCR clone 158048 (TRBV12-4, TRBJ2-7)
CASSLGSGGAYEQYF

SEQ ID NO: 316097 - protein, 14 aa, Homo sapiens
  CDR3 for alpha chain variable domain of TCR clone 158049 (TRAV9-2, TRAJ39)
CALYIYNAGNMLTF

SEQ ID NO: 316098 - protein, 15 aa, Homo sapiens
  CDR3 for beta chain variable domain of TCR clone 158049 (TRBV7-2, TRBJ2-7)
CASSLAVGQVYEQYF

SEQ ID NO: 316099 - protein, 13 aa, Homo sapiens
  CDR3 for alpha chain variable domain of TCR clone 158050 (TRAV12-3, TRAJ7)
CAMTPYGNNRLAF

SEQ ID NO: 316100 - protein, 14 aa, Homo sapiens
  CDR3 for beta chain variable domain of TCR clone 158050 (TRBV24-1, TRBJ1-1)
CATSIPRGDTEAFF

SEQ ID NO: 316101 - protein, 12 aa, Homo sapiens
  CDR3 for alpha chain variable domain of TCR clone 158051 (TRAV27, TRAJ33)
CAGDGSNYQLIW

SEQ ID NO: 316102 - protein, 15 aa, Homo sapiens
  CDR3 for beta chain variable domain of TCR clone 158051 (TRBV6-5, TRBJ2-7)
CASSYPTSGNYEQYF

SEQ ID NO: 316103 - protein, 14 aa, Homo sapiens
  CDR3 for alpha chain variable domain of TCR clone 158052 (TRAV27, TRAJ15)
CAGFDNQAGTALIF

SEQ ID NO: 316104 - protein, 15 aa, Homo sapiens
  CDR3 for beta chain variable domain of TCR clone 158052 (TRBV7-2, TRBJ2-1)
CASTHGTGIYNEQFF

SEQ ID NO: 316105 - protein, 12 aa, Homo sapiens
  CDR3 for alpha chain variable domain of TCR clone 158053 (TRAV12-1, TRAJ20)
CVVNPDDYKLSF

SEQ ID NO: 316106 - protein, 14 aa, Homo sapiens
  CDR3 for beta chain variable domain of TCR clone 158053 (TRBV7-6, TRBJ2-3)
CASSLGTVTDTQYF

SEQ ID NO: 316107 - protein, 16 aa, Homo sapiens
  CDR3 for alpha chain variable domain of TCR clone 158054 (TRAV3, TRAJ42)
CAVRDIEGGSQGNLIF

SEQ ID NO: 316108 - protein, 15 aa, Homo sapiens
  CDR3 for beta chain variable domain of TCR clone 158054 (TRBV6-3, TRBJ2-1)
CASSYASDSYNEQFF

SEQ ID NO: 316109 - protein, 17 aa, Homo sapiens
  CDR3 for alpha chain variable domain of TCR clone 158055 (TRAV29/DV5, TRAJ12)
QCTSVQQAKDSSYKLIF

SEQ ID NO: 316110 - protein, 14 aa, Homo sapiens
  CDR3 for beta chain variable domain of TCR clone 158055 (TRBV19, TRBJ2-1)
CASPTFVLSGEQFF

SEQ ID NO: 316111 - protein, 10 aa, Homo sapiens
  CDR3 for alpha chain variable domain of TCR clone 158056 (TRAV1-2, TRAJ31)
CVSEDARIMF

SEQ ID NO: 316112 - protein, 14 aa, Homo sapiens
  CDR3 for beta chain variable domain of TCR clone 158056 (TRBV19, TRBJ2-1)
CASPTFVLSGEQFF

SEQ ID NO: 316113 - protein, 12 aa, Homo sapiens
  CDR3 for alpha chain variable domain of TCR clone 158057 (TRAV27, TRAJ35)
CAGADFLNVLHC

SEQ ID NO: 316114 - protein, 16 aa, Homo sapiens
  CDR3 for beta chain variable domain of TCR clone 158057 (TRBV6-1, TRBJ2-1)
CASILRQGSSYNEQFF

SEQ ID NO: 316115 - protein, 14 aa, Homo sapiens
  CDR3 for alpha chain variable domain of TCR clone 158058 (TRAV3, TRAJ9)
CAVRLNTGGFKTTF

SEQ ID NO: 316116 - protein, 15 aa, Homo sapiens
  CDR3 for beta chain variable domain of TCR clone 158058 (TRBV7-2, TRBJ2-1)
CASGLASGRVNEQFF

SEQ ID NO: 316117 - protein, 17 aa, Homo sapiens
  CDR3 for alpha chain variable domain of TCR clone 158059 (TRAV27, TRAJ18)
CAGLHRGRCSTLGRLYF

SEQ ID NO: 316118 - protein, 14 aa, Homo sapiens
  CDR3 for beta chain variable domain of TCR clone 158059 (TRBV20-1, TRBJ1-5)
CSARGRGSNQPQHF

SEQ ID NO: 316119 - protein, 14 aa, Homo sapiens
  CDR3 for alpha chain variable domain of TCR clone 158060 (TRAV12-3, TRAJ10)
SHLPLTGGGNKLTF

SEQ ID NO: 316120 - protein, 13 aa, Homo sapiens
  CDR3 for beta chain variable domain of TCR clone 158060 (TRBV15, TRBJ1-6)
CATSGGLNSPLHL

SEQ ID NO: 316121 - protein, 15 aa, Homo sapiens
  CDR3 for alpha chain variable domain of TCR clone 158061 (TRAV12-1, TRAJ45)
CVVLSGGGGADGLTF

SEQ ID NO: 316122 - protein, 14 aa, Homo sapiens
  CDR3 for beta chain variable domain of TCR clone 158061 (TRBV11-2, TRBJ1-2)
CASSSGQAGDGYTF

SEQ ID NO: 316123 - protein, 15 aa, Homo sapiens
  CDR3 for alpha chain variable domain of TCR clone 158062 (TRAV16, TRAJ18)
CSMKGRGSTLGRLYF

SEQ ID NO: 316124 - protein, 15 aa, Homo sapiens
  CDR3 for beta chain variable domain of TCR clone 158062 (TRBV20-1, TRBJ2-7)
CSARDRVSGMDEQYF

SEQ ID NO: 316125 - protein, 11 aa, Homo sapiens
  CDR3 for alpha chain variable domain of TCR clone 158063 (TRAV12-1, TRAJ47)
CVVNDGNKLVF

SEQ ID NO: 316126 - protein, 15 aa, Homo sapiens
  CDR3 for beta chain variable domain of TCR clone 158063 (TRBV20-1, TRBJ2-7)
CSARDRVSGMDEQYF

SEQ ID NO: 316127 - protein, 16 aa, Homo sapiens
  CDR3 for alpha chain variable domain of TCR clone 158064 (TRAV8-3, TRAJ13)
CAVGAYASGGYQKVTF

SEQ ID NO: 316128 - protein, 15 aa, Homo sapiens
  CDR3 for beta chain variable domain of TCR clone 158064 (TRBV19, TRBJ1-5)
CASSIVWADNQPQHS

SEQ ID NO: 316129 - protein, 15 aa, Homo sapiens
  CDR3 for alpha chain variable domain of TCR clone 158065 (TRAV8-6, TRAJ6)
CAVSGESGGSYIPTC

SEQ ID NO: 316130 - protein, 14 aa, Homo sapiens
  CDR3 for beta chain variable domain of TCR clone 158065 (TRBV7-9, TRBJ2-1)
CASSSMVGFGEQFF

SEQ ID NO: 316131 - protein, 14 aa, Homo sapiens
  CDR3 for alpha chain variable domain of TCR clone 158066 (TRAV1-2, TRAJ8)
CAVRGDTGFQKLVF

SEQ ID NO: 316132 - protein, 14 aa, Homo sapiens
  CDR3 for beta chain variable domain of TCR clone 158066 (TRBV7-2, TRBJ1-2)
CASSQTGSTYRYTF

SEQ ID NO: 316133 - protein, 12 aa, Homo sapiens
  CDR3 for alpha chain variable domain of TCR clone 158067 (TRAV17, TRAJ57)
CVSQGGSEKLVF

SEQ ID NO: 316134 - protein, 15 aa, Homo sapiens
  CDR3 for beta chain variable domain of TCR clone 158067 (TRBV12-4, TRBJ1-1)
CASSLAVSRGAEAFF

SEQ ID NO: 316135 - protein, 13 aa, Homo sapiens
  CDR3 for alpha chain variable domain of TCR clone 158068 (TRAV21, TRAJ20)
CAVGLRVDYKLSF

SEQ ID NO: 316136 - protein, 13 aa, Homo sapiens
  CDR3 for beta chain variable domain of TCR clone 158068 (TRBV7-9, TRBJ2-3)
CASGPGSTDTQYF

SEQ ID NO: 316137 - protein, 11 aa, Homo sapiens
  CDR3 for alpha chain variable domain of TCR clone 158069 (TRAV35, TRAJ34)
CWASNTDKLIF

SEQ ID NO: 316138 - protein, 13 aa, Homo sapiens
  CDR3 for beta chain variable domain of TCR clone 158069 (TRBV19, TRBJ2-7)
CASSIDRTYEQYF

SEQ ID NO: 316139 - protein, 13 aa, Homo sapiens
  CDR3 for alpha chain variable domain of TCR clone 158070 (TRAV35, TRAJ42)
CAWFPGSHGNLIF

SEQ ID NO: 316140 - protein, 13 aa, Homo sapiens
  CDR3 for beta chain variable domain of TCR clone 158070 (TRBV29-1, TRBJ2-1)
CSVEGGRVNEQFF

SEQ ID NO: 316141 - protein, 13 aa, Homo sapiens
  CDR3 for alpha chain variable domain of TCR clone 158071 (TRAV26-1, )
CIVSHRVEGFWNL

SEQ ID NO: 316142 - protein, 14 aa, Homo sapiens
  CDR3 for beta chain variable domain of TCR clone 158071 (TRBV20-1, TRBJ2-7)
CSAWTALSSYEQYF

SEQ ID NO: 316143 - protein, 13 aa, Homo sapiens
  CDR3 for alpha chain variable domain of TCR clone 158072 (TRAV21, TRAJ27)
CAALPGNAGKSTF

SEQ ID NO: 316144 - protein, 14 aa, Homo sapiens
  CDR3 for beta chain variable domain of TCR clone 158072 (TRBV11-2, TRBJ2-7)
CASSLGAGAYEQYF

SEQ ID NO: 316145 - protein, 11 aa, Homo sapiens
  CDR3 for alpha chain variable domain of TCR clone 158073 (TRAV3, TRAJ21)
CAVGNFDKFYF

SEQ ID NO: 316146 - protein, 13 aa, Homo sapiens
  CDR3 for beta chain variable domain of TCR clone 158073 (TRBV2, TRBJ1-5)
CASGTGGYQPQHF

SEQ ID NO: 316147 - protein, 13 aa, Homo sapiens
  CDR3 for alpha chain variable domain of TCR clone 158074 (TRAV26-1, TRAJ12)
CIVRPDSSYKLIF

SEQ ID NO: 316148 - protein, 11 aa, Homo sapiens
  CDR3 for beta chain variable domain of TCR clone 158074 (TRBV7-8, TRBJ2-7)
CASSLSLEQYF

SEQ ID NO: 316149 - protein, 14 aa, Homo sapiens
  CDR3 for alpha chain variable domain of TCR clone 158075 (TRAV1-2, TRAJ8)
CAVREDTGFEKLVF

SEQ ID NO: 316150 - protein, 16 aa, Homo sapiens
  CDR3 for beta chain variable domain of TCR clone 158075 (TRBV12-4, TRBJ1-5)
CASSRPVGGSNQPQHF

SEQ ID NO: 316151 - protein, 13 aa, Homo sapiens
  CDR3 for alpha chain variable domain of TCR clone 158076 (TRAV20, TRAJ29)
CAVQAVGNTPLVF

SEQ ID NO: 316152 - protein, 15 aa, Homo sapiens
  CDR3 for beta chain variable domain of TCR clone 158076 (TRBV7-8, TRBJ2-1)
CASSLAGGLYNEQFF

SEQ ID NO: 316153 - protein, 16 aa, Homo sapiens
  CDR3 for alpha chain variable domain of TCR clone 158077 (TRAV14/DV4, TRAJ53)
CAMREGGGGSNYKLTF

SEQ ID NO: 316154 - protein, 13 aa, Homo sapiens
  CDR3 for beta chain variable domain of TCR clone 158077 (TRBV7-7, TRBJ2-3)
CASSLSRADTQYF

SEQ ID NO: 316155 - protein, 13 aa, Homo sapiens
  CDR3 for alpha chain variable domain of TCR clone 158078 (TRAV22, TRAJ29)
CAVGGPGNTPLVF

SEQ ID NO: 316156 - protein, 13 aa, Homo sapiens
  CDR3 for beta chain variable domain of TCR clone 158078 (TRBV4-1, TRBJ2-2)
CASSQENTGELFF

SEQ ID NO: 316157 - protein, 16 aa, Homo sapiens
  CDR3 for alpha chain variable domain of TCR clone 158079 (TRAV8-3, TRAJ13)
CAVGAYPSGGYQKVTF

SEQ ID NO: 316158 - protein, 14 aa, Homo sapiens
  CDR3 for beta chain variable domain of TCR clone 158079 (TRBV7-9, TRBJ1-2)
CASSLVQINYGYTF

SEQ ID NO: 316159 - protein, 15 aa, Homo sapiens
  CDR3 for alpha chain variable domain of TCR clone 158080 (TRAV21, TRAJ53)
CATLNSGGSNYKLTF

SEQ ID NO: 316160 - protein, 16 aa, Homo sapiens
  CDR3 for beta chain variable domain of TCR clone 158080 (TRBV7-2, TRBJ2-7)
CASSFPLAGGPLEQYF

SEQ ID NO: 316161 - protein, 14 aa, Homo sapiens
  CDR3 for alpha chain variable domain of TCR clone 158081 (TRAV17, TRAJ45)
CATDASGGADGLTF

SEQ ID NO: 316162 - protein, 11 aa, Homo sapiens
  CDR3 for beta chain variable domain of TCR clone 158081 (TRBV28, TRBJ2-5)
CATGNQETQYF

SEQ ID NO: 316163 - protein, 11 aa, Homo sapiens
  CDR3 for alpha chain variable domain of TCR clone 158082 (TRAV23/DV6, TRAJ37)
CLVNTPGKLIF

SEQ ID NO: 316164 - protein, 13 aa, Homo sapiens
  CDR3 for beta chain variable domain of TCR clone 158082 (TRBV12-4, TRBJ1-5)
CASSPDRAQPQHF

SEQ ID NO: 316165 - protein, 16 aa, Homo sapiens
  CDR3 for alpha chain variable domain of TCR clone 158083 (TRAV20, TRAJ22)
CAVQASSSGPARQLTF

SEQ ID NO: 316166 - protein, 16 aa, Homo sapiens
  CDR3 for beta chain variable domain of TCR clone 158083 (TRBV20-1, TRBJ1-5)
CSASRGTGYSNQPQHF

SEQ ID NO: 316167 - protein, 17 aa, Homo sapiens
  CDR3 for alpha chain variable domain of TCR clone 158084 (TRAV12-2, TRAJ39)
CAVNNMLTFGGGTRLML

SEQ ID NO: 316168 - protein, 17 aa, Homo sapiens
  CDR3 for beta chain variable domain of TCR clone 158084 (TRBV20-1, TRBJ2-4)
CSARDWASGGRENIQYF

SEQ ID NO: 316169 - protein, 14 aa, Homo sapiens
  CDR3 for alpha chain variable domain of TCR clone 158085 (TRAV12-2, TRAJ17)
CAVNIKAAGNKLTF

SEQ ID NO: 316170 - protein, 13 aa, Homo sapiens
  CDR3 for beta chain variable domain of TCR clone 158085 (TRBV12-4, TRBJ2-5)
CASRLAVQETQYF

SEQ ID NO: 316171 - protein, 11 aa, Homo sapiens
  CDR3 for alpha chain variable domain of TCR clone 158086 (TRAV1-2, TRAJ20)
CAVSNDYKLSF

SEQ ID NO: 316172 - protein, 15 aa, Homo sapiens
  CDR3 for beta chain variable domain of TCR clone 158086 (TRBV2, TRBJ2-1)
CASSELAGSYNEQFF

SEQ ID NO: 316173 - protein, 13 aa, Homo sapiens
  CDR3 for alpha chain variable domain of TCR clone 158087 (TRAV30, TRAJ24)
CGTVTDSWGKLQF

SEQ ID NO: 316174 - protein, 14 aa, Homo sapiens
  CDR3 for beta chain variable domain of TCR clone 158087 (TRBV6-3, TRBJ2-2)
CASTYTPDTGELVF

SEQ ID NO: 316175 - protein, 13 aa, Homo sapiens
  CDR3 for alpha chain variable domain of TCR clone 158088 (TRAV13-1, TRAJ39)
CSKYSNAGNMLTF

SEQ ID NO: 316176 - protein, 14 aa, Homo sapiens
  CDR3 for beta chain variable domain of TCR clone 158088 (TRBV6-1, TRBJ1-3)
CASVQGGGGNTIYF

SEQ ID NO: 316177 - protein, 13 aa, Homo sapiens
  CDR3 for alpha chain variable domain of TCR clone 158089 (TRAV21, TRAJ15)
CAVANQAGTALIF

SEQ ID NO: 316178 - protein, 14 aa, Homo sapiens
  CDR3 for beta chain variable domain of TCR clone 158089 (TRBV4-2, TRBJ2-1)
CASGLNRAYNEQFF

SEQ ID NO: 316179 - protein, 13 aa, Homo sapiens
  CDR3 for alpha chain variable domain of TCR clone 158090 (TRAV8-1, TRAJ23)
CAVPGGQGGKLIF

SEQ ID NO: 316180 - protein, 15 aa, Homo sapiens
  CDR3 for beta chain variable domain of TCR clone 158090 (TRBV20-1, TRBJ2-2)
CSAIPGHSNTGELFF

SEQ ID NO: 316181 - protein, 15 aa, Homo sapiens
  CDR3 for alpha chain variable domain of TCR clone 158091 (TRAV8-6, TRAJ10)
CAVSSKGGGGNKLTF

SEQ ID NO: 316182 - protein, 15 aa, Homo sapiens
  CDR3 for beta chain variable domain of TCR clone 158091 (TRBV28, TRBJ1-2)
CASSSHSIVNYGYTF

SEQ ID NO: 316183 - protein, 11 aa, Homo sapiens
  CDR3 for alpha chain variable domain of TCR clone 158092 (TRAV3, TRAJ21)
CAVGNFNKFYF

SEQ ID NO: 316184 - protein, 14 aa, Homo sapiens
  CDR3 for beta chain variable domain of TCR clone 158092 (TRBV19, TRBJ2-7)
CASTVQGRPYEQYF

SEQ ID NO: 316185 - protein, 16 aa, Homo sapiens
  CDR3 for alpha chain variable domain of TCR clone 158093 (TRAV3, TRAJ10)
CAVRDMRAGGGNKLTF

SEQ ID NO: 316186 - protein, 15 aa, Homo sapiens
  CDR3 for beta chain variable domain of TCR clone 158093 (TRBV6-6, TRBJ1-5)
CASSSIQGTNQPQHF

SEQ ID NO: 316187 - protein, 18 aa, Homo sapiens
  CDR3 for alpha chain variable domain of TCR clone 158094 (TRAV12-3, TRAJ52)
CAISVGGAGGTSYGKLTF

SEQ ID NO: 316188 - protein, 14 aa, Homo sapiens
  CDR3 for beta chain variable domain of TCR clone 158094 (TRBV4-1, TRBJ2-2)
CASSQAVNTGELFF

SEQ ID NO: 316189 - protein, 15 aa, Homo sapiens
  CDR3 for alpha chain variable domain of TCR clone 158095 (TRAV29/DV5, TRAJ8)
CAASGRNTGFQKLVF

SEQ ID NO: 316190 - protein, 14 aa, Homo sapiens
  CDR3 for beta chain variable domain of TCR clone 158095 (TRBV7-2, TRBJ2-7)
CASSPKTSFYEQYF

SEQ ID NO: 316191 - protein, 10 aa, Homo sapiens
  CDR3 for alpha chain variable domain of TCR clone 158096 (TRAV23/DV6, TRAJ57)
CAASSTLSQG

SEQ ID NO: 316192 - protein, 14 aa, Homo sapiens
  CDR3 for beta chain variable domain of TCR clone 158096 (TRBV19, TRBJ2-7)
CASSMGQGAIEQYF

SEQ ID NO: 316193 - protein, 17 aa, Homo sapiens
  CDR3 for alpha chain variable domain of TCR clone 158097 (TRAV23/DV6, TRAJ12)
CAAIDLGAMDSSYKLIF

SEQ ID NO: 316194 - protein, 16 aa, Homo sapiens
  CDR3 for beta chain variable domain of TCR clone 158097 (TRBV6-6, TRBJ2-4)
CASSNAGQGAKNIQYF

SEQ ID NO: 316195 - protein, 15 aa, Homo sapiens
  CDR3 for alpha chain variable domain of TCR clone 158098 (TRAV8-4, TRAJ12)
CAVSDRVDSSYNLIF

SEQ ID NO: 316196 - protein, 15 aa, Homo sapiens
  CDR3 for beta chain variable domain of TCR clone 158098 (TRBV11-3, TRBJ2-1)
CASSLAGQTYNEQFF

SEQ ID NO: 316197 - protein, 13 aa, Homo sapiens
  CDR3 for alpha chain variable domain of TCR clone 158099 (TRAV24, TRAJ37)
CAPLSSNTGKLIF

SEQ ID NO: 316198 - protein, 16 aa, Homo sapiens
  CDR3 for beta chain variable domain of TCR clone 158099 (TRBV12-5, TRBJ2-5)
CASGPRTSGNQETQYF

SEQ ID NO: 316199 - protein, 13 aa, Homo sapiens
  CDR3 for alpha chain variable domain of TCR clone 158100 (TRAV2, TRAJ12)
CAVGADSSYKLIF

SEQ ID NO: 316200 - protein, 12 aa, Homo sapiens
  CDR3 for beta chain variable domain of TCR clone 158100 (TRBV5-1, TRBJ2-5)
CASSLGLETQYF

SEQ ID NO: 316201 - protein, 18 aa, Homo sapiens
  CDR3 for alpha chain variable domain of TCR clone 158101 (TRAV8-3, TRAJ6)
CAVDAEHQEEATYLHLEE

SEQ ID NO: 316202 - protein, 14 aa, Homo sapiens
  CDR3 for beta chain variable domain of TCR clone 158101 (TRBV6-6, TRBJ2-7)
CASSDSGAGYEQYF

SEQ ID NO: 316203 - protein, 14 aa, Homo sapiens
  CDR3 for alpha chain variable domain of TCR clone 158102 (TRAV12-2, TRAJ9)
CAVNLNTGGFKTIF

SEQ ID NO: 316204 - protein, 14 aa, Homo sapiens
  CDR3 for beta chain variable domain of TCR clone 158102 (TRBV10-3, TRBJ1-2)
CAISAGGRVDGYTF

SEQ ID NO: 316205 - protein, 14 aa, Homo sapiens
  CDR3 for alpha chain variable domain of TCR clone 158103 (TRAV26-1, TRAJ38)
CIADNAGNNRTLIW

SEQ ID NO: 316206 - protein, 13 aa, Homo sapiens
  CDR3 for beta chain variable domain of TCR clone 158103 (TRBV20-1, TRBJ1-1)
CSARSGGNTEAFF

SEQ ID NO: 316207 - protein, 12 aa, Homo sapiens
  CDR3 for alpha chain variable domain of TCR clone 158104 (TRAV27, TRAJ29)
CAGVGGNTPLVF

SEQ ID NO: 316208 - protein, 13 aa, Homo sapiens
  CDR3 for beta chain variable domain of TCR clone 158104 (TRBV12-4, TRBJ1-2)
CASSLRQGKGYTF

SEQ ID NO: 316209 - protein, 12 aa, Homo sapiens
  CDR3 for alpha chain variable domain of TCR clone 158105 (TRAV12-1, TRAJ40)
CVFYSGTYKYIF

SEQ ID NO: 316210 - protein, 12 aa, Homo sapiens
  CDR3 for beta chain variable domain of TCR clone 158105 (TRBV12-4, TRBJ2-7)
CASSLGDREQYF

SEQ ID NO: 316211 - protein, 14 aa, Homo sapiens
  CDR3 for alpha chain variable domain of TCR clone 158106 (TRAV4, TRAJ17)
CLVGDMAAGNKLTF

SEQ ID NO: 316212 - protein, 13 aa, Homo sapiens
  CDR3 for beta chain variable domain of TCR clone 158106 (TRBV20-1, TRBJ1-6)
CSAPLGVGSPLHF

SEQ ID NO: 316213 - protein, 15 aa, Homo sapiens
  CDR3 for alpha chain variable domain of TCR clone 158107 (TRAV12-1, TRAJ42)
CVVTRDGGSQGNLIF

SEQ ID NO: 316214 - protein, 14 aa, Homo sapiens
  CDR3 for beta chain variable domain of TCR clone 158107 (TRBV5-1, TRBJ1-2)
CASSLEPVNYGYTF

SEQ ID NO: 316215 - protein, 14 aa, Homo sapiens
  CDR3 for alpha chain variable domain of TCR clone 158108 (TRAV27, TRAJ22)
CAGLPSGSARQLTF

SEQ ID NO: 316216 - protein, 12 aa, Homo sapiens
  CDR3 for beta chain variable domain of TCR clone 158108 (TRBV11-2, TRBJ2-2)
CASSLGGGELFF

SEQ ID NO: 316217 - protein, 14 aa, Homo sapiens
  CDR3 for alpha chain variable domain of TCR clone 158109 (TRAV1-2, TRAJ16)
CAVNRFSDGQKLLF

SEQ ID NO: 316218 - protein, 16 aa, Homo sapiens
  CDR3 for beta chain variable domain of TCR clone 158109 (TRBV19, TRBJ2-3)
CASSLEWDRGTDTQYF

SEQ ID NO: 316219 - protein, 17 aa, Homo sapiens
  CDR3 for alpha chain variable domain of TCR clone 158110 (TRAV3, TRAJ42)
WAVRDRDYGGSQGNLIF

SEQ ID NO: 316220 - protein, 14 aa, Homo sapiens
  CDR3 for beta chain variable domain of TCR clone 158110 (TRBV25-1, TRBJ1-1)
CASTHLGGNTEAFF

SEQ ID NO: 316221 - protein, 11 aa, Homo sapiens
  CDR3 for alpha chain variable domain of TCR clone 158111 (TRAV4, TRAJ31)
CLVGLNARLMF

SEQ ID NO: 316222 - protein, 17 aa, Homo sapiens
  CDR3 for beta chain variable domain of TCR clone 158111 (TRBV7-8, TRBJ2-6)
CASSAGTGGAGANVLTF

SEQ ID NO: 316223 - protein, 14 aa, Homo sapiens
  CDR3 for alpha chain variable domain of TCR clone 158112 (TRAV12-1, TRAJ12)
CVVTRMDSSYELIF

SEQ ID NO: 316224 - protein, 13 aa, Homo sapiens
  CDR3 for beta chain variable domain of TCR clone 158112 (TRBV20-1, TRBJ1-1)
CSARGGGNTEAFF

SEQ ID NO: 316225 - protein, 12 aa, Homo sapiens
  CDR3 for alpha chain variable domain of TCR clone 158113 (TRAV29/DV5, TRAJ15)
CASNQAGTALIF

SEQ ID NO: 316226 - protein, 15 aa, Homo sapiens
  CDR3 for beta chain variable domain of TCR clone 158113 (TRBV7-9, TRBJ1-5)
CASSQGHQPNQPQHF

SEQ ID NO: 316227 - protein, 14 aa, Homo sapiens
  CDR3 for alpha chain variable domain of TCR clone 158114 (TRAV17, TRAJ34)
CATDSLEGTDKLIF

SEQ ID NO: 316228 - protein, 13 aa, Homo sapiens
  CDR3 for beta chain variable domain of TCR clone 158114 (TRBV11-2, TRBJ2-7)
SASSGTRPYEQYF

SEQ ID NO: 316229 - protein, 16 aa, Homo sapiens
  CDR3 for alpha chain variable domain of TCR clone 158115 (TRAV26-1, TRAJ28)
CIVRVGLWGWGLPTHF

SEQ ID NO: 316230 - protein, 16 aa, Homo sapiens
  CDR3 for beta chain variable domain of TCR clone 158115 (TRBV20-1, TRBJ1-2)
CSASMGQGVANYGYTF

SEQ ID NO: 316231 - protein, 13 aa, Homo sapiens
  CDR3 for alpha chain variable domain of TCR clone 158116 (TRAV21, TRAJ27)
CAARPGNAGKSTF

SEQ ID NO: 316232 - protein, 13 aa, Homo sapiens
  CDR3 for beta chain variable domain of TCR clone 158116 (TRBV28, TRBJ1-1)
CASSKQGWTEAFF

SEQ ID NO: 316233 - protein, 11 aa, Homo sapiens
  CDR3 for alpha chain variable domain of TCR clone 158117 (TRAV12-2, TRAJ10)
GVTGGGNKLTF

SEQ ID NO: 316234 - protein, 15 aa, Homo sapiens
  CDR3 for beta chain variable domain of TCR clone 158117 (TRBV6-3, TRBJ2-7)
CVSSSPGTVFYEQYF

SEQ ID NO: 316235 - protein, 11 aa, Homo sapiens
  CDR3 for alpha chain variable domain of TCR clone 158118 (TRAV12-3, TRAJ42)
CPGGSQGNLIF

SEQ ID NO: 316236 - protein, 13 aa, Homo sapiens
  CDR3 for beta chain variable domain of TCR clone 158118 (TRBV5-7, TRBJ2-6)
CASTSSGANVLTF

SEQ ID NO: 316237 - protein, 12 aa, Homo sapiens
  CDR3 for alpha chain variable domain of TCR clone 158119 (TRAV8-3, TRAJ26)
CAGDNYGQNFVF

SEQ ID NO: 316238 - protein, 15 aa, Homo sapiens
  CDR3 for beta chain variable domain of TCR clone 158119 (TRBV28, TRBJ1-3)
CASSMGWASGNTIYF

SEQ ID NO: 316239 - protein, 12 aa, Homo sapiens
  CDR3 for alpha chain variable domain of TCR clone 158120 (TRAV2, TRAJ34)
CAVERNTDKLIF

SEQ ID NO: 316240 - protein, 14 aa, Homo sapiens
  CDR3 for beta chain variable domain of TCR clone 158120 (TRBV7-9, TRBJ2-1)
CASSGNAGYNEQFF

SEQ ID NO: 316241 - protein, 14 aa, Homo sapiens
  CDR3 for alpha chain variable domain of TCR clone 158121 (TRAV23/DV6, TRAJ22)
CAASRSGSARQLTL

SEQ ID NO: 316242 - protein, 13 aa, Homo sapiens
  CDR3 for beta chain variable domain of TCR clone 158121 (TRBV15, TRBJ1-6)
CATSGGLNSPLHF

SEQ ID NO: 316243 - protein, 15 aa, Homo sapiens
  CDR3 for alpha chain variable domain of TCR clone 158122 (TRAV3, TRAJ5)
CAVRDLDTGGRALTF

SEQ ID NO: 316244 - protein, 14 aa, Homo sapiens
  CDR3 for beta chain variable domain of TCR clone 158122 (TRBV12-5, TRBJ2-5)
CASGPRTHQETQYF

SEQ ID NO: 316245 - protein, 14 aa, Homo sapiens
  CDR3 for alpha chain variable domain of TCR clone 158123 (TRAV1-2, TRAJ8)
CAVREDTGFQKLAF

SEQ ID NO: 316246 - protein, 15 aa, Homo sapiens
  CDR3 for beta chain variable domain of TCR clone 158123 (TRBV6-3, TRBJ2-7)
YASSSPGTVFYEQYF

SEQ ID NO: 316247 - protein, 15 aa, Homo sapiens
  CDR3 for alpha chain variable domain of TCR clone 158124 (TRAV3, TRAJ5)
CAVRDRKTGRRAFTF

SEQ ID NO: 316248 - protein, 15 aa, Homo sapiens
  CDR3 for beta chain variable domain of TCR clone 158124 (TRBV7-8, TRBJ2-1)
CASSLADSLYNEQFF

SEQ ID NO: 316249 - protein, 12 aa, Homo sapiens
  CDR3 for alpha chain variable domain of TCR clone 158125 (TRAV12-3, TRAJ17)
CAMTLTGNKLTF

SEQ ID NO: 316250 - protein, 14 aa, Homo sapiens
  CDR3 for beta chain variable domain of TCR clone 158125 (TRBV4-2, TRBJ2-7)
CASSQGQTAYEQYF

SEQ ID NO: 316251 - protein, 16 aa, Homo sapiens
  CDR3 for alpha chain variable domain of TCR clone 158126 (TRAV3, TRAJ21)
CAVRDIERGNFTKFYF

SEQ ID NO: 316252 - protein, 20 aa, Homo sapiens
  CDR3 for beta chain variable domain of TCR clone 158126 (TRBV4-1, TRBJ2-2)
CASSQASPPGLASNTGELFF

SEQ ID NO: 316253 - protein, 14 aa, Homo sapiens
  CDR3 for alpha chain variable domain of TCR clone 158127 (TRAV29/DV5, TRAJ36)
CAARRKTGANNLFF

SEQ ID NO: 316254 - protein, 13 aa, Homo sapiens
  CDR3 for beta chain variable domain of TCR clone 158127 (TRBV20-1, TRBJ2-2)
CSASAAGTGELFF

SEQ ID NO: 316255 - protein, 11 aa, Homo sapiens
  CDR3 for alpha chain variable domain of TCR clone 158128 (TRAV23/DV6, TRAJ58)
CAARLLRGETS

SEQ ID NO: 316256 - protein, 15 aa, Homo sapiens
  CDR3 for beta chain variable domain of TCR clone 158128 (TRBV9, TRBJ1-6)
CASSVAGTGDSTLHF

SEQ ID NO: 316257 - protein, 11 aa, Homo sapiens
  CDR3 for alpha chain variable domain of TCR clone 158129 (TRAV17, TRAJ36)
CAPTGAHNLSF

SEQ ID NO: 316258 - protein, 12 aa, Homo sapiens
  CDR3 for beta chain variable domain of TCR clone 158129 (TRBV29-1, TRBJ2-3)
CSVTGGADTQYF

SEQ ID NO: 316259 - protein, 14 aa, Homo sapiens
  CDR3 for alpha chain variable domain of TCR clone 158130 (TRAV26-1, TRAJ38)
CIADNAGNNRKLIW

SEQ ID NO: 316260 - protein, 15 aa, Homo sapiens
  CDR3 for beta chain variable domain of TCR clone 158130 (TRBV7-2, TRBJ2-7)
CASSSPRTARDEQYF

SEQ ID NO: 316261 - protein, 14 aa, Homo sapiens
  CDR3 for alpha chain variable domain of TCR clone 158131 (TRAV12-1, TRAJ17)
CVVNYKAAGNKLTF

SEQ ID NO: 316262 - protein, 15 aa, Homo sapiens
  CDR3 for beta chain variable domain of TCR clone 158131 (TRBV19, TRBJ1-1)
CASASGQIQNTEAFF

SEQ ID NO: 316263 - protein, 12 aa, Homo sapiens
  CDR3 for alpha chain variable domain of TCR clone 158132 (TRAV27, TRAJ35)
WAGADFGNVLHC

SEQ ID NO: 316264 - protein, 15 aa, Homo sapiens
  CDR3 for beta chain variable domain of TCR clone 158132 (TRBV4-1, TRBJ1-2)
CASSLNTGQGYGYTF

SEQ ID NO: 316265 - protein, 12 aa, Homo sapiens
  CDR3 for alpha chain variable domain of TCR clone 158133 (TRAV21, TRAJ49)
CAVNDGGNQFYF

SEQ ID NO: 316266 - protein, 13 aa, Homo sapiens
  CDR3 for beta chain variable domain of TCR clone 158133 (TRBV2, TRBJ1-1)
RASSVLMNTEAFF

SEQ ID NO: 316267 - protein, 14 aa, Homo sapiens
  CDR3 for alpha chain variable domain of TCR clone 158134 (TRAV17, TRAJ11)
CATDTSRGYSTLTF

SEQ ID NO: 316268 - protein, 13 aa, Homo sapiens
  CDR3 for beta chain variable domain of TCR clone 158134 (TRBV15, TRBJ1-6)
CATSGGLNSPLHF

SEQ ID NO: 316269 - protein, 11 aa, Homo sapiens
  CDR3 for alpha chain variable domain of TCR clone 158135 (TRAV21, TRAJ48)
CAVDGNEKLTF

SEQ ID NO: 316270 - protein, 14 aa, Homo sapiens
  CDR3 for beta chain variable domain of TCR clone 158135 (TRBV27, TRBJ2-7)
CASSLRQGSYEQYF

SEQ ID NO: 316271 - protein, 14 aa, Homo sapiens
  CDR3 for alpha chain variable domain of TCR clone 158136 (TRAV8-1, TRAJ15)
CAVNGQQAGTALIF

SEQ ID NO: 316272 - protein, 12 aa, Homo sapiens
  CDR3 for beta chain variable domain of TCR clone 158136 (TRBV12-4, TRBJ2-7)
CASSLGGYEQYF

SEQ ID NO: 316273 - protein, 16 aa, Homo sapiens
  CDR3 for alpha chain variable domain of TCR clone 158137 (TRAV26-1, TRAJ32)
CIVRKNYGGATNKLIF

SEQ ID NO: 316274 - protein, 14 aa, Homo sapiens
  CDR3 for beta chain variable domain of TCR clone 158137 (TRBV27, TRBJ1-1)
CASSLLSGLYEAFF

SEQ ID NO: 316275 - protein, 13 aa, Homo sapiens
  CDR3 for alpha chain variable domain of TCR clone 158138 (TRAV25, TRAJ10)
CAGRTGGGSKLTF

SEQ ID NO: 316276 - protein, 13 aa, Homo sapiens
  CDR3 for beta chain variable domain of TCR clone 158138 (TRBV7-9, TRBJ1-2)
FASSLKQNYGYTF

SEQ ID NO: 316277 - protein, 14 aa, Homo sapiens
  CDR3 for alpha chain variable domain of TCR clone 158139 (TRAV2, TRAJ9)
CAVEDRSGGFKTIF

SEQ ID NO: 316278 - protein, 13 aa, Homo sapiens
  CDR3 for beta chain variable domain of TCR clone 158139 (TRBV7-3, TRBJ2-5)
CASSSDREETQYF

SEQ ID NO: 316279 - protein, 15 aa, Homo sapiens
  CDR3 for alpha chain variable domain of TCR clone 158140 (TRAV36/DV7, TRAJ53)
CAVEGSGGSNYKLTI

SEQ ID NO: 316280 - protein, 16 aa, Homo sapiens
  CDR3 for beta chain variable domain of TCR clone 158140 (TRBV27, TRBJ2-2)
CASSLSGFWVTGELFF

SEQ ID NO: 316281 - protein, 15 aa, Homo sapiens
  CDR3 for alpha chain variable domain of TCR clone 158141 (TRAV21, TRAJ10)
CAVRGLTGGGNKLTF

SEQ ID NO: 316282 - protein, 16 aa, Homo sapiens
  CDR3 for beta chain variable domain of TCR clone 158141 (TRBV7-9, TRBJ2-1)
CASSDVAGGSYNEQFF

SEQ ID NO: 316283 - protein, 15 aa, Homo sapiens
  CDR3 for alpha chain variable domain of TCR clone 158142 (TRAV3, TRAJ24)
CAVRDKMTAGGGCSL

SEQ ID NO: 316284 - protein, 14 aa, Homo sapiens
  CDR3 for beta chain variable domain of TCR clone 158142 (TRBV7-2, TRBJ2-3)
CASSQTGSSYTQYF

SEQ ID NO: 316285 - protein, 15 aa, Homo sapiens
  CDR3 for alpha chain variable domain of TCR clone 158143 (TRAV26-1, TRAJ29)
CIDRVEGSGNTPLVF

SEQ ID NO: 316286 - protein, 14 aa, Homo sapiens
  CDR3 for beta chain variable domain of TCR clone 158143 (TRBV19, TRBJ2-1)
CASPTFILSGEQFF

SEQ ID NO: 316287 - protein, 13 aa, Homo sapiens
  CDR3 for alpha chain variable domain of TCR clone 158144 (TRAV23/DV6, TRAJ43)
CAASMGGKNDMRF

SEQ ID NO: 316288 - protein, 14 aa, Homo sapiens
  CDR3 for beta chain variable domain of TCR clone 158144 (TRBV3-1, TRBJ2-3)
CASSWSGVGDTQYF

SEQ ID NO: 316289 - protein, 15 aa, Homo sapiens
  CDR3 for alpha chain variable domain of TCR clone 158145 (TRAV3, TRAJ17)
CAVRDTGAAGNKLTF

SEQ ID NO: 316290 - protein, 14 aa, Homo sapiens
  CDR3 for beta chain variable domain of TCR clone 158145 (TRBV6-3, TRBJ1-1)
CASSNLLSGAEAFF

SEQ ID NO: 316291 - protein, 12 aa, Homo sapiens
  CDR3 for alpha chain variable domain of TCR clone 158146 (TRAV12-3, TRAJ17)
RAMTLTGNKLTF

SEQ ID NO: 316292 - protein, 14 aa, Homo sapiens
  CDR3 for beta chain variable domain of TCR clone 158146 (TRBV4-1, TRBJ2-7)
CASSQDREHVEQYF

SEQ ID NO: 316293 - protein, 14 aa, Homo sapiens
  CDR3 for alpha chain variable domain of TCR clone 158147 (TRAV12-2, TRAJ29)
CAVRRNAGNTPLVF

SEQ ID NO: 316294 - protein, 13 aa, Homo sapiens
  CDR3 for beta chain variable domain of TCR clone 158147 (TRBV12-4, TRBJ2-1)
CASSHYTDNEQFF

SEQ ID NO: 316295 - protein, 12 aa, Homo sapiens
  CDR3 for alpha chain variable domain of TCR clone 158148 (TRAV17, TRAJ39)
CATGAAGNMLTF

SEQ ID NO: 316296 - protein, 18 aa, Homo sapiens
  CDR3 for beta chain variable domain of TCR clone 158148 (TRBV25-1, TRBJ1-2)
CASSGLQNGQGLIFGYTF

SEQ ID NO: 316297 - protein, 12 aa, Homo sapiens
  CDR3 for alpha chain variable domain of TCR clone 158149 (TRAV13-1, TRAJ21)
CAAKEGFNKFYF

SEQ ID NO: 316298 - protein, 12 aa, Homo sapiens
  CDR3 for beta chain variable domain of TCR clone 158149 (TRBV7-6, TRBJ2-3)
CASSTGTDTQNF

SEQ ID NO: 316299 - protein, 10 aa, Homo sapiens
  CDR3 for alpha chain variable domain of TCR clone 158150 (TRAV2, TRAJ15)
RGQAGTALIF

SEQ ID NO: 316300 - protein, 13 aa, Homo sapiens
  CDR3 for beta chain variable domain of TCR clone 158150 (TRBV27, TRBJ2-1)
CASRALGVGEQFF

SEQ ID NO: 316301 - protein, 13 aa, Homo sapiens
  CDR3 for alpha chain variable domain of TCR clone 158151 (TRAV3, TRAJ21)
CAVREPDFNKFYF

SEQ ID NO: 316302 - protein, 16 aa, Homo sapiens
  CDR3 for beta chain variable domain of TCR clone 158151 (TRBV5-1, TRBJ2-1)
CASSIRSGGSYNEQFF

SEQ ID NO: 316303 - protein, 18 aa, Homo sapiens
  CDR3 for alpha chain variable domain of TCR clone 158152 (TRAV8-6, TRAJ52)
CAVSRVGAGGTSYGKLTF

SEQ ID NO: 316304 - protein, 13 aa, Homo sapiens
  CDR3 for beta chain variable domain of TCR clone 158152 (TRBV7-9, TRBJ1-2)
CASSLKQNYGYTF

SEQ ID NO: 316305 - protein, 17 aa, Homo sapiens
  CDR3 for alpha chain variable domain of TCR clone 158153 (TRAV13-1, TRAJ52)
CAAGRNAGGTSYGKLTF

SEQ ID NO: 316306 - protein, 13 aa, Homo sapiens
  CDR3 for beta chain variable domain of TCR clone 158153 (TRBV19, TRBJ2-5)
CASSETAPETQYF

SEQ ID NO: 316307 - protein, 11 aa, Homo sapiens
  CDR3 for alpha chain variable domain of TCR clone 158154 (TRAV1-1, TRAJ23)
CAVRQGGKLIF

SEQ ID NO: 316308 - protein, 14 aa, Homo sapiens
  CDR3 for beta chain variable domain of TCR clone 158154 (TRBV7-9, TRBJ2-3)
CASSLEDGTDTQYF

SEQ ID NO: 316309 - protein, 16 aa, Homo sapiens
  CDR3 for alpha chain variable domain of TCR clone 158155 (TRAV30, TRAJ24)
CGTEIVDADSWGKFKF

SEQ ID NO: 316310 - protein, 14 aa, Homo sapiens
  CDR3 for beta chain variable domain of TCR clone 158155 (TRBV12-5, TRBJ2-5)
CASGSRTHQENQYF

SEQ ID NO: 316311 - protein, 15 aa, Homo sapiens
  CDR3 for alpha chain variable domain of TCR clone 158156 (TRAV38-2/DV8, TRAJ33)
CAYRIPMDSNYQLIW

SEQ ID NO: 316312 - protein, 16 aa, Homo sapiens
  CDR3 for beta chain variable domain of TCR clone 158156 (TRBV4-1, TRBJ2-7)
CASSQNDRDNSYEQYF

SEQ ID NO: 316313 - protein, 15 aa, Homo sapiens
  CDR3 for alpha chain variable domain of TCR clone 158157 (TRAV26-1, TRAJ40)
CIVRAVPSGTYKYIF

SEQ ID NO: 316314 - protein, 13 aa, Homo sapiens
  CDR3 for beta chain variable domain of TCR clone 158157 (TRBV6-4, TRBJ1-5)
CASSADLNQPQHF

SEQ ID NO: 316315 - protein, 14 aa, Homo sapiens
  CDR3 for alpha chain variable domain of TCR clone 158158 (TRAV12-2, TRAJ13)
CAVNKTGGYQKVTF

SEQ ID NO: 316316 - protein, 13 aa, Homo sapiens
  CDR3 for beta chain variable domain of TCR clone 158158 (TRBV28, TRBJ2-7)
CASKAGGVYEQYF

SEQ ID NO: 316317 - protein, 16 aa, Homo sapiens
  CDR3 for alpha chain variable domain of TCR clone 158159 (TRAV38-1, TRAJ32)
CAFMPFLGGATNKLIF

SEQ ID NO: 316318 - protein, 13 aa, Homo sapiens
  CDR3 for beta chain variable domain of TCR clone 158159 (TRBV7-9, TRBJ2-7)
CASSFAGAYEKYF

SEQ ID NO: 316319 - protein, 15 aa, Homo sapiens
  CDR3 for alpha chain variable domain of TCR clone 158160 (TRAV12-3, TRAJ6)
CASSATTGGSYKPTF

SEQ ID NO: 316320 - protein, 16 aa, Homo sapiens
  CDR3 for beta chain variable domain of TCR clone 158160 (TRBV20-1, TRBJ1-2)
CSASMGQGVANYGYTF

SEQ ID NO: 316321 - protein, 12 aa, Homo sapiens
  CDR3 for alpha chain variable domain of TCR clone 158161 (TRAV3, TRAJ20)
CAVRDGDYKLSF

SEQ ID NO: 316322 - protein, 15 aa, Homo sapiens
  CDR3 for beta chain variable domain of TCR clone 158161 (TRBV11-2, TRBJ1-2)
CASSLEGVQRNGYTF

SEQ ID NO: 316323 - protein, 16 aa, Homo sapiens
  CDR3 for alpha chain variable domain of TCR clone 158162 (TRAV3, TRAJ37)
CAVRGKGSGNTGKLIF

SEQ ID NO: 316324 - protein, 13 aa, Homo sapiens
  CDR3 for beta chain variable domain of TCR clone 158162 (TRBV19, TRBJ1-2)
CASSVPGQDGYTC

SEQ ID NO: 316325 - protein, 13 aa, Homo sapiens
  CDR3 for alpha chain variable domain of TCR clone 158163 (TRAV21, TRAJ34)
CAVSEGDTDKLTF

SEQ ID NO: 316326 - protein, 17 aa, Homo sapiens
  CDR3 for beta chain variable domain of TCR clone 158163 (TRBV20-1, TRBJ1-5)
CSARDPSAQGFNQPQHF

SEQ ID NO: 316327 - protein, 15 aa, Homo sapiens
  CDR3 for alpha chain variable domain of TCR clone 158164 (TRAV8-3, TRAJ27)
CAVGPSKTNAGKSTF

SEQ ID NO: 316328 - protein, 18 aa, Homo sapiens
  CDR3 for beta chain variable domain of TCR clone 158164 (TRBV5-5, TRBJ1-5)
CASSLRQVKGSSNQPQHF

SEQ ID NO: 316329 - protein, 12 aa, Homo sapiens
  CDR3 for alpha chain variable domain of TCR clone 158165 (TRAV1-2, TRAJ7)
CAVKLGTTDSLL

SEQ ID NO: 316330 - protein, 16 aa, Homo sapiens
  CDR3 for beta chain variable domain of TCR clone 158165 (TRBV7-8, TRBJ1-4)
CASSLGVGTSNEKLFF

SEQ ID NO: 316331 - protein, 19 aa, Homo sapiens
  CDR3 for alpha chain variable domain of TCR clone 158166 (TRAV12-1, TRAJ45)
CVVTMGALRSGGGADGLTF

SEQ ID NO: 316332 - protein, 15 aa, Homo sapiens
  CDR3 for beta chain variable domain of TCR clone 158166 (TRBV7-2, TRBJ2-2)
CASRRPGQNTGELFF

SEQ ID NO: 316333 - protein, 14 aa, Homo sapiens
  CDR3 for alpha chain variable domain of TCR clone 158167 (TRAV12-2, TRAJ33)
CAVKRARSNYKLIW

SEQ ID NO: 316334 - protein, 15 aa, Homo sapiens
  CDR3 for beta chain variable domain of TCR clone 158167 (TRBV20-1, TRBJ2-7)
CSARDRVSGMDEQYF

SEQ ID NO: 316335 - protein, 17 aa, Homo sapiens
  CDR3 for alpha chain variable domain of TCR clone 158168 (TRAV20, TRAJ4)
CAVQLVLFSGGYNKLIF

SEQ ID NO: 316336 - protein, 13 aa, Homo sapiens
  CDR3 for beta chain variable domain of TCR clone 158168 (TRBV7-3, TRBJ1-1)
CASSQDWGAEAFF

SEQ ID NO: 316337 - protein, 14 aa, Homo sapiens
  CDR3 for alpha chain variable domain of TCR clone 158169 (TRAV21, TRAJ58)
CAVRRGRSGSRLTF

SEQ ID NO: 316338 - protein, 16 aa, Homo sapiens
  CDR3 for beta chain variable domain of TCR clone 158169 (TRBV24-1, TRBJ2-1)
WATSGVAGANYNEQFF

SEQ ID NO: 316339 - protein, 17 aa, Homo sapiens
  CDR3 for alpha chain variable domain of TCR clone 158170 (TRAV3, TRAJ6)
CAVRDVPRAGGSYMTTF

SEQ ID NO: 316340 - protein, 15 aa, Homo sapiens
  CDR3 for beta chain variable domain of TCR clone 158170 (TRBV7-9, TRBJ2-7)
CASSSALAEAYEQYF

SEQ ID NO: 316341 - protein, 15 aa, Homo sapiens
  CDR3 for alpha chain variable domain of TCR clone 158171 (TRAV26-1, TRAJ48)
CIVGVGDFGNEKLTF

SEQ ID NO: 316342 - protein, 16 aa, Homo sapiens
  CDR3 for beta chain variable domain of TCR clone 158171 (TRBV4-1, TRBJ2-3)
CASSQRAGGLTDTQYF

SEQ ID NO: 316343 - protein, 16 aa, Homo sapiens
  CDR3 for alpha chain variable domain of TCR clone 158172 (TRAV12-2, TRAJ6)
CAGPLAGSGGSYIPTF

SEQ ID NO: 316344 - protein, 10 aa, Homo sapiens
  CDR3 for beta chain variable domain of TCR clone 158172 (TRBV28, TRBJ1-2)
CASSSDRAVF

SEQ ID NO: 316345 - protein, 14 aa, Homo sapiens
  CDR3 for alpha chain variable domain of TCR clone 158173 (TRAV12-3, TRAJ10)
SHLPLTGGGNKLTF

SEQ ID NO: 316346 - protein, 15 aa, Homo sapiens
  CDR3 for beta chain variable domain of TCR clone 158173 (TRBV7-6, TRBJ2-3)
CASSSEGGLAHTQYF

SEQ ID NO: 316347 - protein, 13 aa, Homo sapiens
  CDR3 for alpha chain variable domain of TCR clone 158174 (TRAV13-1, TRAJ21)
CAASIYNFNKFYF

SEQ ID NO: 316348 - protein, 14 aa, Homo sapiens
  CDR3 for beta chain variable domain of TCR clone 158174 (TRBV5-4, TRBJ1-1)
CANSLDSRRDEAFF

SEQ ID NO: 316349 - protein, 15 aa, Homo sapiens
  CDR3 for alpha chain variable domain of TCR clone 158175 (TRAV3, TRAJ4)
CAVIDGTGGYNNLIF

SEQ ID NO: 316350 - protein, 16 aa, Homo sapiens
  CDR3 for beta chain variable domain of TCR clone 158175 (TRBV27, TRBJ2-2)
CASSSSGVSNTGELFF

SEQ ID NO: 316351 - protein, 15 aa, Homo sapiens
  CDR3 for alpha chain variable domain of TCR clone 158176 (TRAV8-3, TRAJ20)
CAVEAKGSNDYKLSF

SEQ ID NO: 316352 - protein, 14 aa, Homo sapiens
  CDR3 for beta chain variable domain of TCR clone 158176 (TRBV20-1, TRBJ2-4)
CSARDRGQGGIQYF

SEQ ID NO: 316353 - protein, 14 aa, Homo sapiens
  CDR3 for alpha chain variable domain of TCR clone 158177 (TRAV29/DV5, TRAJ49)
CAASAQNTSNQFYF

SEQ ID NO: 316354 - protein, 16 aa, Homo sapiens
  CDR3 for beta chain variable domain of TCR clone 158177 (TRBV12-4, TRBJ1-5)
CASRQPVEGSNQPQHF

SEQ ID NO: 316355 - protein, 12 aa, Homo sapiens
  CDR3 for alpha chain variable domain of TCR clone 158178 (TRAV26-1, TRAJ17)
CIVRSAGTKLTF

SEQ ID NO: 316356 - protein, 15 aa, Homo sapiens
  CDR3 for beta chain variable domain of TCR clone 158178 (TRBV7-6, TRBJ1-2)
CASSSGGRGGYGYTF

SEQ ID NO: 316357 - protein, 21 aa, Homo sapiens
  CDR3 for alpha chain variable domain of TCR clone 158179 (TRAV3, TRAJ17)
CAVRARRGGRSCRQQANFLRR

SEQ ID NO: 316358 - protein, 14 aa, Homo sapiens
  CDR3 for beta chain variable domain of TCR clone 158179 (TRBV4-1, TRBJ2-2)
CASSQAVNTGELFF

SEQ ID NO: 316359 - protein, 14 aa, Homo sapiens
  CDR3 for alpha chain variable domain of TCR clone 158180 (TRAV12-1, TRAJ12)
CVVNGRDSSYKLIF

SEQ ID NO: 316360 - protein, 13 aa, Homo sapiens
  CDR3 for beta chain variable domain of TCR clone 158180 (TRBV28, TRBJ2-2)
CASIRESTVELFF

SEQ ID NO: 316361 - protein, 18 aa, Homo sapiens
  CDR3 for alpha chain variable domain of TCR clone 158181 (TRAV21, TRAJ52)
CAVRPSPAGGTSYGKLTF

SEQ ID NO: 316362 - protein, 14 aa, Homo sapiens
  CDR3 for beta chain variable domain of TCR clone 158181 (TRBV12-5, TRBJ2-5)
CASGSRTHQATQYF

SEQ ID NO: 316363 - protein, 18 aa, Homo sapiens
  CDR3 for alpha chain variable domain of TCR clone 158182 (TRAV13-1, TRAJ52)
CAASKRSAGGTSYGKLTF

SEQ ID NO: 316364 - protein, 12 aa, Homo sapiens
  CDR3 for beta chain variable domain of TCR clone 158182 (TRBV24-1, TRBJ1-1)
CATSDPGLEAFF

SEQ ID NO: 316365 - protein, 14 aa, Homo sapiens
  CDR3 for alpha chain variable domain of TCR clone 158183 (TRAV35, TRAJ22)
CAGLRPGSARQLTF

SEQ ID NO: 316366 - protein, 15 aa, Homo sapiens
  CDR3 for beta chain variable domain of TCR clone 158183 (TRBV12-3, TRBJ2-5)
CASSPPTGLLETQYF

SEQ ID NO: 316367 - protein, 13 aa, Homo sapiens
  CDR3 for alpha chain variable domain of TCR clone 158184 (TRAV12-3, TRAJ33)
CAMSVNSKYQLIW

SEQ ID NO: 316368 - protein, 14 aa, Homo sapiens
  CDR3 for beta chain variable domain of TCR clone 158184 (TRBV12-5, TRBJ2-5)
CASGSRTHQETQYF

SEQ ID NO: 316369 - protein, 11 aa, Homo sapiens
  CDR3 for alpha chain variable domain of TCR clone 158185 (TRAV12-2, TRAJ54)
CAVEGAQKMVF

SEQ ID NO: 316370 - protein, 17 aa, Homo sapiens
  CDR3 for beta chain variable domain of TCR clone 158185 (TRBV18, TRBJ1-3)
CASSPYPTGPSGNTIYV

SEQ ID NO: 316371 - protein, 14 aa, Homo sapiens
  CDR3 for alpha chain variable domain of TCR clone 158186 (TRAV1-2, TRAJ8)
CAVREDTGFQKLVF

SEQ ID NO: 316372 - protein, 16 aa, Homo sapiens
  CDR3 for beta chain variable domain of TCR clone 158186 (TRBV19, TRBJ2-3)
CASSPGAASRTDTQYF

SEQ ID NO: 316373 - protein, 13 aa, Homo sapiens
  CDR3 for alpha chain variable domain of TCR clone 158187 (TRAV17, TRAJ9)
CATAITGGFKTIF

SEQ ID NO: 316374 - protein, 16 aa, Homo sapiens
  CDR3 for beta chain variable domain of TCR clone 158187 (TRBV15, TRBJ2-1)
CATSRNLAGGYDEQFF

SEQ ID NO: 316375 - protein, 16 aa, Homo sapiens
  CDR3 for alpha chain variable domain of TCR clone 158188 (TRAV30, TRAJ24)
CGTEIVDADSWGKLQF

SEQ ID NO: 316376 - protein, 15 aa, Homo sapiens
  CDR3 for beta chain variable domain of TCR clone 158188 (TRBV7-2, TRBJ2-3)
CASSLRGGSTDTQYF

SEQ ID NO: 316377 - protein, 13 aa, Homo sapiens
  CDR3 for alpha chain variable domain of TCR clone 158189 (TRAV21, TRAJ35)
CAVVGGVGNVLHC

SEQ ID NO: 316378 - protein, 15 aa, Homo sapiens
  CDR3 for beta chain variable domain of TCR clone 158189 (TRBV10-3, TRBJ2-3)
CAISLTSGGTDTQYF

SEQ ID NO: 316379 - protein, 16 aa, Homo sapiens
  CDR3 for alpha chain variable domain of TCR clone 158190 (TRAV8-3, TRAJ8)
CAVPRDGNTGFQKLVF

SEQ ID NO: 316380 - protein, 13 aa, Homo sapiens
  CDR3 for beta chain variable domain of TCR clone 158190 (TRBV20-1, TRBJ2-7)
CSARGDTQDEQYF

SEQ ID NO: 316381 - protein, 13 aa, Homo sapiens
  CDR3 for alpha chain variable domain of TCR clone 158191 (TRAV27, TRAJ17)
CAGAATAGNKLTF

SEQ ID NO: 316382 - protein, 15 aa, Homo sapiens
  CDR3 for beta chain variable domain of TCR clone 158191 (TRBV5-1, TRBJ2-3)
CASRNQAGSTDTQYF

SEQ ID NO: 316383 - protein, 12 aa, Homo sapiens
  CDR3 for alpha chain variable domain of TCR clone 158192 (TRAV12-3, TRAJ17)
CAMTLTGNKLTF

SEQ ID NO: 316384 - protein, 17 aa, Homo sapiens
  CDR3 for beta chain variable domain of TCR clone 158192 (TRBV19, TRBJ2-1)
CASSIQGLAGGYNEQFF

SEQ ID NO: 316385 - protein, 15 aa, Homo sapiens
  CDR3 for alpha chain variable domain of TCR clone 158193 (TRAV12-1, TRAJ44)
CVVDEYTGTASKLTF

SEQ ID NO: 316386 - protein, 13 aa, Homo sapiens
  CDR3 for beta chain variable domain of TCR clone 158193 (TRBV7-9, TRBJ1-2)
CASSLKQNYGYTF

SEQ ID NO: 316387 - protein, 15 aa, Homo sapiens
  CDR3 for alpha chain variable domain of TCR clone 158194 (TRAV25, TRAJ52)
CAGTLGGTSYGKLTF

SEQ ID NO: 316388 - protein, 16 aa, Homo sapiens
  CDR3 for beta chain variable domain of TCR clone 158194 (TRBV15, TRBJ1-2)
CATSRGPRTGGGGDTF

SEQ ID NO: 316389 - protein, 16 aa, Homo sapiens
  CDR3 for alpha chain variable domain of TCR clone 158195 (TRAV3, TRAJ10)
CAVRDMRAGGGNKLTF

SEQ ID NO: 316390 - protein, 16 aa, Homo sapiens
  CDR3 for beta chain variable domain of TCR clone 158195 (TRBV12-4, TRBJ1-5)
CASSRPVGGSNQTQHF

SEQ ID NO: 316391 - protein, 15 aa, Homo sapiens
  CDR3 for alpha chain variable domain of TCR clone 158196 (TRAV25, TRAJ52)
CAGRPGGTSYGKLTF

SEQ ID NO: 316392 - protein, 14 aa, Homo sapiens
  CDR3 for beta chain variable domain of TCR clone 158196 (TRBV11-2, TRBJ2-1)
CASSLEPSGREKFF

SEQ ID NO: 316393 - protein, 13 aa, Homo sapiens
  CDR3 for alpha chain variable domain of TCR clone 158197 (TRAV12-1, TRAJ31)
CVVNMNNNTRLMF

SEQ ID NO: 316394 - protein, 15 aa, Homo sapiens
  CDR3 for beta chain variable domain of TCR clone 158197 (TRBV4-1, TRBJ1-2)
CASSQGQGAAYGYAF

SEQ ID NO: 316395 - protein, 13 aa, Homo sapiens
  CDR3 for alpha chain variable domain of TCR clone 158198 (TRAV35, TRAJ36)
CAGPRIGANNLFF

SEQ ID NO: 316396 - protein, 14 aa, Homo sapiens
  CDR3 for beta chain variable domain of TCR clone 158198 (TRBV19, TRBJ2-1)
CASPTFVLSGEHFF

SEQ ID NO: 316397 - protein, 14 aa, Homo sapiens
  CDR3 for alpha chain variable domain of TCR clone 158199 (TRAV27, TRAJ39)
CAGRPTGAGNMLTF

SEQ ID NO: 316398 - protein, 13 aa, Homo sapiens
  CDR3 for beta chain variable domain of TCR clone 158199 (TRBV5-4, TRBJ2-5)
CASSRQEGETQYF

SEQ ID NO: 316399 - protein, 16 aa, Homo sapiens
  CDR3 for alpha chain variable domain of TCR clone 158200 (TRAV25, TRAJ24)
CAQRRGTTDSWGKLHF

SEQ ID NO: 316400 - protein, 14 aa, Homo sapiens
  CDR3 for beta chain variable domain of TCR clone 158200 (TRBV6-6, TRBJ1-5)
CASSYGPANQPQHF

SEQ ID NO: 316401 - protein, 16 aa, Homo sapiens
  CDR3 for alpha chain variable domain of TCR clone 158201 (TRAV35, TRAJ28)
CAGQKYSGTGSYQLTF

SEQ ID NO: 316402 - protein, 16 aa, Homo sapiens
  CDR3 for beta chain variable domain of TCR clone 158201 (TRBV7-3, TRBJ2-2)
CASSLKRGTLSGELFF

SEQ ID NO: 316403 - protein, 16 aa, Homo sapiens
  CDR3 for alpha chain variable domain of TCR clone 158202 (TRAV23/DV6, TRAJ48)
CAASGVVNFGNETLTF

SEQ ID NO: 316404 - protein, 15 aa, Homo sapiens
  CDR3 for beta chain variable domain of TCR clone 158202 (TRBV20-1, TRBJ2-5)
CSAGLAGVSQETQYF

SEQ ID NO: 316405 - protein, 12 aa, Homo sapiens
  CDR3 for alpha chain variable domain of TCR clone 158203 (TRAV12-3, TRAJ17)
CAMTLTGNKLTF

SEQ ID NO: 316406 - protein, 14 aa, Homo sapiens
  CDR3 for beta chain variable domain of TCR clone 158203 (TRBV4-1, TRBJ2-7)
CASSQDREHVEQYI

SEQ ID NO: 316407 - protein, 16 aa, Homo sapiens
  CDR3 for alpha chain variable domain of TCR clone 158204 (TRAV20, TRAJ10)
CAVLRGLTGGGNKLTF

SEQ ID NO: 316408 - protein, 14 aa, Homo sapiens
  CDR3 for beta chain variable domain of TCR clone 158204 (TRBV7-2, TRBJ1-1)
CASSFLTGTTEAFF

SEQ ID NO: 316409 - protein, 11 aa, Homo sapiens
  CDR3 for alpha chain variable domain of TCR clone 158205 (TRAV2, TRAJ33)
CAVESNYQLIW

SEQ ID NO: 316410 - protein, 14 aa, Homo sapiens
  CDR3 for beta chain variable domain of TCR clone 158205 (TRBV19, TRBJ2-1)
CARGARSFQWEQFF

SEQ ID NO: 316411 - protein, 16 aa, Homo sapiens
  CDR3 for alpha chain variable domain of TCR clone 158206 (TRAV23/DV6, TRAJ9)
CAASIGGNTGGFKTIF

SEQ ID NO: 316412 - protein, 13 aa, Homo sapiens
  CDR3 for beta chain variable domain of TCR clone 158206 (TRBV7-9, TRBJ1-2)
RASSLKQNYGCTF

SEQ ID NO: 316413 - protein, 19 aa, Homo sapiens
  CDR3 for alpha chain variable domain of TCR clone 158207 (TRAV26-1, TRAJ38)
CIADNAGNNHIQNPDPTVY

SEQ ID NO: 316414 - protein, 14 aa, Homo sapiens
  CDR3 for beta chain variable domain of TCR clone 158207 (TRBV4-1, TRBJ2-2)
CASSQAVNTGELFF

SEQ ID NO: 316415 - protein, 23 aa, Homo sapiens
  CDR3 for alpha chain variable domain of TCR clone 158208 (TRAV12-2, TRAJ53)
PSPVIQPPTSVPPILSSNYKLTF

SEQ ID NO: 316416 - protein, 13 aa, Homo sapiens
  CDR3 for beta chain variable domain of TCR clone 158208 (TRBV7-7, TRBJ2-3)
CASSLSRADTQYF

SEQ ID NO: 316417 - protein, 11 aa, Homo sapiens
  CDR3 for alpha chain variable domain of TCR clone 158209 (TRAV1-1, TRAJ23)
CAVRQGGKLIF

SEQ ID NO: 316418 - protein, 15 aa, Homo sapiens
  CDR3 for beta chain variable domain of TCR clone 158209 (TRBV28, TRBJ2-1)
CASSLGTRLYNEQFF

SEQ ID NO: 316419 - protein, 15 aa, Homo sapiens
  CDR3 for alpha chain variable domain of TCR clone 158210 (TRAV14/DV4, TRAJ12)
CAMREERDSSYKLIF

SEQ ID NO: 316420 - protein, 16 aa, Homo sapiens
  CDR3 for beta chain variable domain of TCR clone 158210 (TRBV7-9, TRBJ1-2)
CASSLGFSSGEDGYAF

SEQ ID NO: 316421 - protein, 16 aa, Homo sapiens
  CDR3 for alpha chain variable domain of TCR clone 158211 (TRAV30, TRAJ24)
CGTEIVDADSWGKFQF

SEQ ID NO: 316422 - protein, 15 aa, Homo sapiens
  CDR3 for beta chain variable domain of TCR clone 158211 (TRBV12-3, TRBJ2-7)
CASSHRTSGNYEQYF

SEQ ID NO: 316423 - protein, 10 aa, Homo sapiens
  CDR3 for alpha chain variable domain of TCR clone 158212 (TRAV23/DV6, TRAJ57)
CAASSTLSQG

SEQ ID NO: 316424 - protein, 13 aa, Homo sapiens
  CDR3 for beta chain variable domain of TCR clone 158212 (TRBV7-8, TRBJ2-5)
CQQRYRGQETQYF

SEQ ID NO: 316425 - protein, 11 aa, Homo sapiens
  CDR3 for alpha chain variable domain of TCR clone 158213 (TRAV4, TRAJ31)
RLVGDNARLMF

SEQ ID NO: 316426 - protein, 13 aa, Homo sapiens
  CDR3 for beta chain variable domain of TCR clone 158213 (TRBV28, TRBJ2-2)
CASIRESTGELFF

SEQ ID NO: 316427 - protein, 14 aa, Homo sapiens
  CDR3 for alpha chain variable domain of TCR clone 158214 (TRAV3, TRAJ20)
CAVPPAPNDYKLSF

SEQ ID NO: 316428 - protein, 13 aa, Homo sapiens
  CDR3 for beta chain variable domain of TCR clone 158214 (TRBV5-1, TRBJ1-5)
CASSLAQDQPQHF

SEQ ID NO: 316429 - protein, 14 aa, Homo sapiens
  CDR3 for alpha chain variable domain of TCR clone 158215 (TRAV17, TRAJ57)
CATDSQGGSEKLVF

SEQ ID NO: 316430 - protein, 18 aa, Homo sapiens
  CDR3 for beta chain variable domain of TCR clone 158215 (TRBV6-6, TRBJ1-3)
CASSYSKWESISGNTIYF

SEQ ID NO: 316431 - protein, 13 aa, Homo sapiens
  CDR3 for alpha chain variable domain of TCR clone 158216 (TRAV27, TRAJ45)
CRSSGGGADGLTF

SEQ ID NO: 316432 - protein, 13 aa, Homo sapiens
  CDR3 for beta chain variable domain of TCR clone 158216 (TRBV10-3, TRBJ2-5)
CAMTSGAGETQYF

SEQ ID NO: 316433 - protein, 15 aa, Homo sapiens
  CDR3 for alpha chain variable domain of TCR clone 158217 (TRAV27, TRAJ38)
CAARRNAGNNRKLIW

SEQ ID NO: 316434 - protein, 15 aa, Homo sapiens
  CDR3 for beta chain variable domain of TCR clone 158217 (TRBV20-1, TRBJ2-1)
CSARGIGGTYNEQFF

SEQ ID NO: 316435 - protein, 14 aa, Homo sapiens
  CDR3 for alpha chain variable domain of TCR clone 158218 (TRAV3, TRAJ17)
CAVRDAAAGNKLTF

SEQ ID NO: 316436 - protein, 13 aa, Homo sapiens
  CDR3 for beta chain variable domain of TCR clone 158218 (TRBV2, TRBJ1-1)
FASSVSGYTEAFF

SEQ ID NO: 316437 - protein, 16 aa, Homo sapiens
  CDR3 for alpha chain variable domain of TCR clone 158219 (TRAV12-3, TRAJ53)
CAMSPGNGGSNYKLTF

SEQ ID NO: 316438 - protein, 16 aa, Homo sapiens
  CDR3 for beta chain variable domain of TCR clone 158219 (TRBV7-9, TRBJ1-2)
CASSLGFSSGEDGYTF

SEQ ID NO: 316439 - protein, 10 aa, Homo sapiens
  CDR3 for alpha chain variable domain of TCR clone 158220 (TRAV21, TRAJ31)
CAVDNARLMF

SEQ ID NO: 316440 - protein, 15 aa, Homo sapiens
  CDR3 for beta chain variable domain of TCR clone 158220 (TRBV5-1, TRBJ2-2)
CASSSQGGNTGELFF

SEQ ID NO: 316441 - protein, 13 aa, Homo sapiens
  CDR3 for alpha chain variable domain of TCR clone 158221 (TRAV3, TRAJ27)
CAVTNTNAGRSTF

SEQ ID NO: 316442 - protein, 13 aa, Homo sapiens
  CDR3 for beta chain variable domain of TCR clone 158221 (TRBV18, TRBJ2-7)
CASSPLGDYEQYF

SEQ ID NO: 316443 - protein, 12 aa, Homo sapiens
  CDR3 for alpha chain variable domain of TCR clone 158222 (TRAV12-3, TRAJ42)
CAPGGSEGNFIF

SEQ ID NO: 316444 - protein, 13 aa, Homo sapiens
  CDR3 for beta chain variable domain of TCR clone 158222 (TRBV5-7, TRBJ2-6)
CASTCSGANVLTF

SEQ ID NO: 316445 - protein, 14 aa, Homo sapiens
  CDR3 for alpha chain variable domain of TCR clone 158223 (TRAV35, TRAJ33)
CAGSSQDSNYQLIW

SEQ ID NO: 316446 - protein, 15 aa, Homo sapiens
  CDR3 for beta chain variable domain of TCR clone 158223 (TRBV15, TRBJ2-7)
CATSSGTTTTYEQYF

SEQ ID NO: 316447 - protein, 12 aa, Homo sapiens
  CDR3 for alpha chain variable domain of TCR clone 158224 (TRAV35, TRAJ30)
CAGQLADDKIIF

SEQ ID NO: 316448 - protein, 13 aa, Homo sapiens
  CDR3 for beta chain variable domain of TCR clone 158224 (TRBV20-1, TRBJ1-1)
CSARGGGNTEAFF

SEQ ID NO: 316449 - protein, 14 aa, Homo sapiens
  CDR3 for alpha chain variable domain of TCR clone 158225 (TRAV30, TRAJ26)
CGPEIVSYGQNFVF

SEQ ID NO: 316450 - protein, 13 aa, Homo sapiens
  CDR3 for beta chain variable domain of TCR clone 158225 (TRBV10-3, TRBJ2-7)
CASKLAVNYEQYF

SEQ ID NO: 316451 - protein, 12 aa, Homo sapiens
  CDR3 for alpha chain variable domain of TCR clone 158226 (TRAV41, TRAJ58)
CAVETSGARLTF

SEQ ID NO: 316452 - protein, 15 aa, Homo sapiens
  CDR3 for beta chain variable domain of TCR clone 158226 (TRBV29-1, TRBJ2-6)
CSVGDRGSGANGLTF

SEQ ID NO: 316453 - protein, 12 aa, Homo sapiens
  CDR3 for alpha chain variable domain of TCR clone 158227 (TRAV2, TRAJ33)
CAVPDSNYQLIW

SEQ ID NO: 316454 - protein, 17 aa, Homo sapiens
  CDR3 for beta chain variable domain of TCR clone 158227 (TRBV6-5, TRBJ2-3)
CASSYRTSLYKSDTQYF

SEQ ID NO: 316455 - protein, 14 aa, Homo sapiens
  CDR3 for alpha chain variable domain of TCR clone 158228 (TRAV20, TRAJ22)
CAVALGGSARQLTF

SEQ ID NO: 316456 - protein, 15 aa, Homo sapiens
  CDR3 for beta chain variable domain of TCR clone 158228 (TRBV7-9, TRBJ2-7)
CASSPGGGLTYEQYF

SEQ ID NO: 316457 - protein, 18 aa, Homo sapiens
  CDR3 for alpha chain variable domain of TCR clone 158229 (TRAV26-2, TRAJ45)
CIRRVDKYSGGGADGLTF

SEQ ID NO: 316458 - protein, 16 aa, Homo sapiens
  CDR3 for beta chain variable domain of TCR clone 158229 (TRBV2, TRBJ1-4)
CASNRLQGATNEKLFF

SEQ ID NO: 316459 - protein, 14 aa, Homo sapiens
  CDR3 for alpha chain variable domain of TCR clone 158230 (TRAV35, TRAJ33)
CLPRGRDSNYQLIW

SEQ ID NO: 316460 - protein, 11 aa, Homo sapiens
  CDR3 for beta chain variable domain of TCR clone 158230 (TRBV10-3, TRBJ2-7)
CAISEGLEQYF

SEQ ID NO: 316461 - protein, 15 aa, Homo sapiens
  CDR3 for alpha chain variable domain of TCR clone 158231 (TRAV20, TRAJ23)
CAVQAVRNQGGKLIF

SEQ ID NO: 316462 - protein, 13 aa, Homo sapiens
  CDR3 for beta chain variable domain of TCR clone 158231 (TRBV9, TRBJ2-7)
CASSASDSYEQYV

SEQ ID NO: 316463 - protein, 12 aa, Homo sapiens
  CDR3 for alpha chain variable domain of TCR clone 158232 (TRAV8-4, TRAJ43)
CAVSVNNNDMRF

SEQ ID NO: 316464 - protein, 13 aa, Homo sapiens
  CDR3 for beta chain variable domain of TCR clone 158232 (TRBV11-3, TRBJ2-3)
CASSHDTKDTQYF

SEQ ID NO: 316465 - protein, 13 aa, Homo sapiens
  CDR3 for alpha chain variable domain of TCR clone 158233 (TRAV12-2, TRAJ37)
CAGGSGNTGQLIL

SEQ ID NO: 316466 - protein, 14 aa, Homo sapiens
  CDR3 for beta chain variable domain of TCR clone 158233 (TRBV6-1, TRBJ2-6)
CASQQGAGANVLTF

SEQ ID NO: 316467 - protein, 14 aa, Homo sapiens
  CDR3 for alpha chain variable domain of TCR clone 158234 (TRAV13-2, TRAJ11)
CSETRNSGYSTLTF

SEQ ID NO: 316468 - protein, 11 aa, Homo sapiens
  CDR3 for beta chain variable domain of TCR clone 158234 (TRBV10-3, TRBJ2-7)
CAISEGLEQYF

SEQ ID NO: 316469 - protein, 17 aa, Homo sapiens
  CDR3 for alpha chain variable domain of TCR clone 158235 (TRAV26-2, TRAJ42)
CILRDESYGGSQGNLIF

SEQ ID NO: 316470 - protein, 15 aa, Homo sapiens
  CDR3 for beta chain variable domain of TCR clone 158235 (TRBV6-6, TRBJ2-7)
CAISYSYGGSYEQYF

SEQ ID NO: 316471 - protein, 15 aa, Homo sapiens
  CDR3 for alpha chain variable domain of TCR clone 158236 (TRAV3, TRAJ5)
CAVRDLDTGRRALTL

SEQ ID NO: 316472 - protein, 17 aa, Homo sapiens
  CDR3 for beta chain variable domain of TCR clone 158236 (TRBV13, TRBJ2-3)
CASSLSRVAGGRNTQYF

SEQ ID NO: 316473 - protein, 14 aa, Homo sapiens
  CDR3 for alpha chain variable domain of TCR clone 158237 (TRAV38-1, TRAJ45)
CAYNSGGGADGLPF

SEQ ID NO: 316474 - protein, 17 aa, Homo sapiens
  CDR3 for beta chain variable domain of TCR clone 158237 (TRBV7-7, TRBJ2-2)
CASSSVPAGGEIGELFF

SEQ ID NO: 316475 - protein, 13 aa, Homo sapiens
  CDR3 for alpha chain variable domain of TCR clone 158238 (TRAV12-2, TRAJ10)
CAVPTGGGNNLTF

SEQ ID NO: 316476 - protein, 14 aa, Homo sapiens
  CDR3 for beta chain variable domain of TCR clone 158238 (TRBV25-1, TRBJ1-1)
CASTHLGGNTEAFF

SEQ ID NO: 316477 - protein, 13 aa, Homo sapiens
  CDR3 for alpha chain variable domain of TCR clone 158239 (TRAV20, TRAJ26)
CAVPTSYGQNFVF

SEQ ID NO: 316478 - protein, 16 aa, Homo sapiens
  CDR3 for beta chain variable domain of TCR clone 158239 (TRBV28, TRBJ2-7)
CTSSSPQGRDVYEQYF

SEQ ID NO: 316479 - protein, 11 aa, Homo sapiens
  CDR3 for alpha chain variable domain of TCR clone 158240 (TRAV29/DV5, TRAJ49)
CAAVPGNQFYF

SEQ ID NO: 316480 - protein, 16 aa, Homo sapiens
  CDR3 for beta chain variable domain of TCR clone 158240 (TRBV7-2, TRBJ1-4)
CASSPVGRFDREKLFF

SEQ ID NO: 316481 - protein, 14 aa, Homo sapiens
  CDR3 for alpha chain variable domain of TCR clone 158241 (TRAV27, TRAJ44)
CPRRNTGTASKLTF

SEQ ID NO: 316482 - protein, 11 aa, Homo sapiens
  CDR3 for beta chain variable domain of TCR clone 158241 (TRBV12-4, TRBJ2-3)
CAGTATDTQYF

SEQ ID NO: 316483 - protein, 16 aa, Homo sapiens
  CDR3 for alpha chain variable domain of TCR clone 158242 (TRAV30, TRAJ24)
CGTAIVDADSWGKFQF

SEQ ID NO: 316484 - protein, 14 aa, Homo sapiens
  CDR3 for beta chain variable domain of TCR clone 158242 (TRBV12-5, TRBJ2-5)
CASGSRTHQETQYS

SEQ ID NO: 316485 - protein, 12 aa, Homo sapiens
  CDR3 for alpha chain variable domain of TCR clone 158243 (TRAV8-6, TRAJ43)
CAVSPNNNDMTF

SEQ ID NO: 316486 - protein, 14 aa, Homo sapiens
  CDR3 for beta chain variable domain of TCR clone 158243 (TRBV10-3, TRBJ1-1)
CAISDGSGVTEAFF

SEQ ID NO: 316487 - protein, 14 aa, Homo sapiens
  CDR3 for alpha chain variable domain of TCR clone 158244 (TRAV3, TRAJ17)
CSVRDAAAGNKLTF

SEQ ID NO: 316488 - protein, 13 aa, Homo sapiens
  CDR3 for beta chain variable domain of TCR clone 158244 (TRBV2, TRBJ1-1)
CASSVSGYTEAFF

SEQ ID NO: 316489 - protein, 16 aa, Homo sapiens
  CDR3 for alpha chain variable domain of TCR clone 158245 (TRAV30, TRAJ24)
CGTETVDAASWGKFQF

SEQ ID NO: 316490 - protein, 14 aa, Homo sapiens
  CDR3 for beta chain variable domain of TCR clone 158245 (TRBV12-5, TRBJ2-5)
CASGSRTHQETQYF

SEQ ID NO: 316491 - protein, 14 aa, Homo sapiens
  CDR3 for alpha chain variable domain of TCR clone 158246 (TRAV13-1, TRAJ6)
CAASIPGGIYIPTF

SEQ ID NO: 316492 - protein, 14 aa, Homo sapiens
  CDR3 for beta chain variable domain of TCR clone 158246 (TRBV6-3, TRBJ2-1)
CASLHSAYYNEQFF

SEQ ID NO: 316493 - protein, 15 aa, Homo sapiens
  CDR3 for alpha chain variable domain of TCR clone 158247 (TRAV20, TRAJ40)
CAVQRGTSGTYKYIF

SEQ ID NO: 316494 - protein, 12 aa, Homo sapiens
  CDR3 for beta chain variable domain of TCR clone 158247 (TRBV25-1, TRBJ1-1)
CASRHMNTEAFF

SEQ ID NO: 316495 - protein, 15 aa, Homo sapiens
  CDR3 for alpha chain variable domain of TCR clone 158248 (TRAV23/DV6, TRAJ18)
CAARYRGSTLGRLYF

SEQ ID NO: 316496 - protein, 13 aa, Homo sapiens
  CDR3 for beta chain variable domain of TCR clone 158248 (TRBV7-2, TRBJ2-7)
CASSSPSGCEQYF

SEQ ID NO: 316497 - protein, 16 aa, Homo sapiens
  CDR3 for alpha chain variable domain of TCR clone 158249 (TRAV12-3, TRAJ53)
CAMSPGSGGSHYKLPF

SEQ ID NO: 316498 - protein, 12 aa, Homo sapiens
  CDR3 for beta chain variable domain of TCR clone 158249 (TRBV11-2, TRBJ2-2)
CASSLGGGELFF

SEQ ID NO: 316499 - protein, 12 aa, Homo sapiens
  CDR3 for alpha chain variable domain of TCR clone 158250 (TRAV12-1, TRAJ34)
CVVAGATDKLIF

SEQ ID NO: 316500 - protein, 16 aa, Homo sapiens
  CDR3 for beta chain variable domain of TCR clone 158250 (TRBV7-2, TRBJ1-2)
CSSSSNQDRRGDGYTF

SEQ ID NO: 316501 - protein, 17 aa, Homo sapiens
  CDR3 for alpha chain variable domain of TCR clone 158251 (TRAV26-1, TRAJ53)
CIVRVDDSGGSNYKLTF

SEQ ID NO: 316502 - protein, 13 aa, Homo sapiens
  CDR3 for beta chain variable domain of TCR clone 158251 (TRBV7-2, TRBJ2-5)
CQQLVRGGGTQYF

SEQ ID NO: 316503 - protein, 13 aa, Homo sapiens
  CDR3 for alpha chain variable domain of TCR clone 158252 (TRAV2, TRAJ40)
CAVFTSGTYKYIF

SEQ ID NO: 316504 - protein, 15 aa, Homo sapiens
  CDR3 for beta chain variable domain of TCR clone 158252 (TRBV28, TRBJ2-1)
CASSGLAEVDNEQFF

SEQ ID NO: 316505 - protein, 13 aa, Homo sapiens
  CDR3 for alpha chain variable domain of TCR clone 158253 (TRAV27, TRAJ6)
CAGGTRGSYIPTF

SEQ ID NO: 316506 - protein, 13 aa, Homo sapiens
  CDR3 for beta chain variable domain of TCR clone 158253 (TRBV19, TRBJ2-7)
CASSTKQGYEQYF

SEQ ID NO: 316507 - protein, 14 aa, Homo sapiens
  CDR3 for alpha chain variable domain of TCR clone 158254 (TRAV9-2, TRAJ39)
CALYIYNAGNMLTF

SEQ ID NO: 316508 - protein, 14 aa, Homo sapiens
  CDR3 for beta chain variable domain of TCR clone 158254 (TRBV19, TRBJ2-1)
CASPTFVLGGEQFF

SEQ ID NO: 316509 - protein, 13 aa, Homo sapiens
  CDR3 for alpha chain variable domain of TCR clone 158255 (TRAV8-3, TRAJ53)
CAFSGGSNYKLTF

SEQ ID NO: 316510 - protein, 13 aa, Homo sapiens
  CDR3 for beta chain variable domain of TCR clone 158255 (TRBV12-4, TRBJ1-5)
CASSPDRAQPQHF

SEQ ID NO: 316511 - protein, 14 aa, Homo sapiens
  CDR3 for alpha chain variable domain of TCR clone 158256 (TRAV26-1, TRAJ54)
CIVRRTQGAQKLVF

SEQ ID NO: 316512 - protein, 13 aa, Homo sapiens
  CDR3 for beta chain variable domain of TCR clone 158256 (TRBV25-1, TRBJ1-1)
CASSGQVRAEAFF

SEQ ID NO: 316513 - protein, 19 aa, Homo sapiens
  CDR3 for alpha chain variable domain of TCR clone 158257 (TRAV2, TRAJ20)
TLQVREADAAVYRDCKLSF

SEQ ID NO: 316514 - protein, 13 aa, Homo sapiens
  CDR3 for beta chain variable domain of TCR clone 158257 (TRBV29-1, TRBJ2-1)
CSVEGGRVNEQFF

SEQ ID NO: 316515 - protein, 13 aa, Homo sapiens
  CDR3 for alpha chain variable domain of TCR clone 158258 (TRAV21, TRAJ15)
CAVANQAGTAPIF

SEQ ID NO: 316516 - protein, 15 aa, Homo sapiens
  CDR3 for beta chain variable domain of TCR clone 158258 (TRBV27, TRBJ2-7)
CASSLGSSVSPEQYF

SEQ ID NO: 316517 - protein, 10 aa, Homo sapiens
  CDR3 for alpha chain variable domain of TCR clone 158259 (TRAV12-3, )
CAMIPDRFLS

SEQ ID NO: 316518 - protein, 19 aa, Homo sapiens
  CDR3 for beta chain variable domain of TCR clone 158259 (TRBV28, TRBJ2-7)
CASGYSGTSRLGWVYEQYF

SEQ ID NO: 316519 - protein, 13 aa, Homo sapiens
  CDR3 for alpha chain variable domain of TCR clone 158260 (TRAV2, TRAJ40)
CAVVNSGTYKYIL

SEQ ID NO: 316520 - protein, 14 aa, Homo sapiens
  CDR3 for beta chain variable domain of TCR clone 158260 (TRBV19, TRBJ2-1)
CASPTFVLSGEQFF

SEQ ID NO: 316521 - protein, 14 aa, Homo sapiens
  CDR3 for alpha chain variable domain of TCR clone 158261 (TRAV12-2, TRAJ13)
CAVKKTGGYKKVTF

SEQ ID NO: 316522 - protein, 15 aa, Homo sapiens
  CDR3 for beta chain variable domain of TCR clone 158261 (TRBV11-2, TRBJ2-2)
CASSSDRVNAGEPFF

SEQ ID NO: 316523 - protein, 23 aa, Homo sapiens
  CDR3 for alpha chain variable domain of TCR clone 158262 (TRAV26-1, TRAJ38)
CIADNAGNNHIQNPDPAVYQLRD

SEQ ID NO: 316524 - protein, 12 aa, Homo sapiens
  CDR3 for beta chain variable domain of TCR clone 158262 (TRBV6-6, TRBJ2-5)
CASNRQSGTQYF

SEQ ID NO: 316525 - protein, 14 aa, Homo sapiens
  CDR3 for alpha chain variable domain of TCR clone 158263 (TRAV20, TRAJ42)
CAVQAGGSQGNLIF

SEQ ID NO: 316526 - protein, 19 aa, Homo sapiens
  CDR3 for beta chain variable domain of TCR clone 158263 (TRBV25-1, TRBJ2-2)
CAILVYRVDRGRKTGELFF

SEQ ID NO: 316527 - protein, 13 aa, Homo sapiens
  CDR3 for alpha chain variable domain of TCR clone 158264 (TRAV12-3, TRAJ43)
CAMIRPNNNDMRF

SEQ ID NO: 316528 - protein, 12 aa, Homo sapiens
  CDR3 for beta chain variable domain of TCR clone 158264 (TRBV11-2, TRBJ2-5)
CASILGQETQYF

SEQ ID NO: 316529 - protein, 19 aa, Homo sapiens
  CDR3 for alpha chain variable domain of TCR clone 158265 (TRAV13-1, TRAJ52)
CAASSSPNAGGTSYGKLTF

SEQ ID NO: 316530 - protein, 15 aa, Homo sapiens
  CDR3 for beta chain variable domain of TCR clone 158265 (TRBV9, TRBJ1-6)
CASSTGGGVDSPLQF

SEQ ID NO: 316531 - protein, 19 aa, Homo sapiens
  CDR3 for alpha chain variable domain of TCR clone 158266 (TRAV2, TRAJ20)
ILQVREADAAVYRDSKLSF

SEQ ID NO: 316532 - protein, 12 aa, Homo sapiens
  CDR3 for beta chain variable domain of TCR clone 158266 (TRBV11-2, TRBJ2-1)
CASSPGNNEQFF

SEQ ID NO: 316533 - protein, 14 aa, Homo sapiens
  CDR3 for alpha chain variable domain of TCR clone 158267 (TRAV13-2, TRAJ43)
CAEIPTYNNNDMRF

SEQ ID NO: 316534 - protein, 13 aa, Homo sapiens
  CDR3 for beta chain variable domain of TCR clone 158267 (TRBV2, TRBJ2-1)
CASSGTSGGEQFF

SEQ ID NO: 316535 - protein, 14 aa, Homo sapiens
  CDR3 for alpha chain variable domain of TCR clone 158268 (TRAV8-6, TRAJ34)
CAVSDQGNTDKLIF

SEQ ID NO: 316536 - protein, 15 aa, Homo sapiens
  CDR3 for beta chain variable domain of TCR clone 158268 (TRBV2, TRBJ2-7)
CTSSEGLARSYEQYF

SEQ ID NO: 316537 - protein, 17 aa, Homo sapiens
  CDR3 for alpha chain variable domain of TCR clone 158269 (TRAV23/DV6, TRAJ57)
CAASSTLSQGGSEKLVF

SEQ ID NO: 316538 - protein, 14 aa, Homo sapiens
  CDR3 for beta chain variable domain of TCR clone 158269 (TRBV6-1, TRBJ2-6)
CASQQGAGANVLTF

SEQ ID NO: 316539 - protein, 15 aa, Homo sapiens
  CDR3 for alpha chain variable domain of TCR clone 158270 (TRAV26-1, TRAJ29)
CIVRVEGSGNTPLVF

SEQ ID NO: 316540 - protein, 15 aa, Homo sapiens
  CDR3 for beta chain variable domain of TCR clone 158270 (TRBV5-1, TRBJ1-1)
CASSLGMGTSTEAFF

SEQ ID NO: 316541 - protein, 10 aa, Homo sapiens
  CDR3 for alpha chain variable domain of TCR clone 158271 (TRAV23/DV6, TRAJ57)
CAASSTLSQG

SEQ ID NO: 316542 - protein, 15 aa, Homo sapiens
  CDR3 for beta chain variable domain of TCR clone 158271 (TRBV7-6, TRBJ1-5)
CASSQSSGINQPQHF

SEQ ID NO: 316543 - protein, 12 aa, Homo sapiens
  CDR3 for alpha chain variable domain of TCR clone 158272 (TRAV8-4, TRAJ37)
CAKSSNTGKLIF

SEQ ID NO: 316544 - protein, 14 aa, Homo sapiens
  CDR3 for beta chain variable domain of TCR clone 158272 (TRBV7-2, TRBJ1-1)
CASSFLTGTTEAFF

SEQ ID NO: 316545 - protein, 10 aa, Homo sapiens
  CDR3 for alpha chain variable domain of TCR clone 158273 (TRAV1-2, TRAJ31)
CAFFDARLMF

SEQ ID NO: 316546 - protein, 15 aa, Homo sapiens
  CDR3 for beta chain variable domain of TCR clone 158273 (TRBV11-2, TRBJ2-1)
CASSKNRGLIYEQFF

SEQ ID NO: 316547 - protein, 12 aa, Homo sapiens
  CDR3 for alpha chain variable domain of TCR clone 158274 (TRAV2, TRAJ33)
CAFMDSNYQLIW

SEQ ID NO: 316548 - protein, 16 aa, Homo sapiens
  CDR3 for beta chain variable domain of TCR clone 158274 (TRBV2, TRBJ2-7)
CASSEPWTGNSYEQYF

SEQ ID NO: 316549 - protein, 16 aa, Homo sapiens
  CDR3 for alpha chain variable domain of TCR clone 158275 (TRAV30, TRAJ24)
CGTEIVDAYSWGKFPF

SEQ ID NO: 316550 - protein, 15 aa, Homo sapiens
  CDR3 for beta chain variable domain of TCR clone 158275 (TRBV4-1, TRBJ2-7)
CASSQQGQGFDEQYF

SEQ ID NO: 316551 - protein, 13 aa, Homo sapiens
  CDR3 for alpha chain variable domain of TCR clone 158276 (TRAV8-3, TRAJ15)
CAVGIQAGTALIF

SEQ ID NO: 316552 - protein, 13 aa, Homo sapiens
  CDR3 for beta chain variable domain of TCR clone 158276 (TRBV20-1, TRBJ1-1)
CSAPLGGGTEAFF

SEQ ID NO: 316553 - protein, 14 aa, Homo sapiens
  CDR3 for alpha chain variable domain of TCR clone 158277 (TRAV1-2, TRAJ8)
CAVRVDTGFQKLVF

SEQ ID NO: 316554 - protein, 14 aa, Homo sapiens
  CDR3 for beta chain variable domain of TCR clone 158277 (TRBV6-3, TRBJ2-7)
CASSYLVSGNEQYF

SEQ ID NO: 316555 - protein, 16 aa, Homo sapiens
  CDR3 for alpha chain variable domain of TCR clone 158278 (TRAV3, TRAJ13)
CAVRDFKSGGYQKDTF

SEQ ID NO: 316556 - protein, 16 aa, Homo sapiens
  CDR3 for beta chain variable domain of TCR clone 158278 (TRBV27, TRBJ2-5)
CASSYGPGGQKETQYF

SEQ ID NO: 316557 - protein, 11 aa, Homo sapiens
  CDR3 for alpha chain variable domain of TCR clone 158279 (TRAV21, TRAJ41)
CAVRSGNAPNF

SEQ ID NO: 316558 - protein, 13 aa, Homo sapiens
  CDR3 for beta chain variable domain of TCR clone 158279 (TRBV7-2, TRBJ2-5)
CASSQTSVETQYF

SEQ ID NO: 316559 - protein, 12 aa, Homo sapiens
  CDR3 for alpha chain variable domain of TCR clone 158280 (TRAV13-1, TRAJ21)
CAAFFNFNKFYF

SEQ ID NO: 316560 - protein, 14 aa, Homo sapiens
  CDR3 for beta chain variable domain of TCR clone 158280 (TRBV4-1, TRBJ2-7)
CASRLTSGSYEQFF

SEQ ID NO: 316561 - protein, 14 aa, Homo sapiens
  CDR3 for alpha chain variable domain of TCR clone 158281 (TRAV12-2, TRAJ45)
CAVNIGGGADGLTF

SEQ ID NO: 316562 - protein, 17 aa, Homo sapiens
  CDR3 for beta chain variable domain of TCR clone 158281 (TRBV20-1, TRBJ2-2)
CSASGSGQGGVTGELFF

SEQ ID NO: 316563 - protein, 12 aa, Homo sapiens
  CDR3 for alpha chain variable domain of TCR clone 158282 (TRAV21, TRAJ23)
CAVGPQGGKLIF

SEQ ID NO: 316564 - protein, 11 aa, Homo sapiens
  CDR3 for beta chain variable domain of TCR clone 158282 (TRBV10-3, TRBJ2-7)
CAISEGLEQYF

SEQ ID NO: 316565 - protein, 15 aa, Homo sapiens
  CDR3 for alpha chain variable domain of TCR clone 158283 (TRAV35, TRAJ40)
CAGQLGTSGTYKYIF

SEQ ID NO: 316566 - protein, 13 aa, Homo sapiens
  CDR3 for beta chain variable domain of TCR clone 158283 (TRBV7-3, TRBJ2-1)
CQQLAGGTNEQFF

SEQ ID NO: 316567 - protein, 13 aa, Homo sapiens
  CDR3 for alpha chain variable domain of TCR clone 158284 (TRAV8-3, TRAJ43)
CAVGPDNNNDMRF

SEQ ID NO: 316568 - protein, 19 aa, Homo sapiens
  CDR3 for beta chain variable domain of TCR clone 158284 (TRBV7-2, TRBJ2-3)
CASSFLSRKWGGGTDTQYF

SEQ ID NO: 316569 - protein, 11 aa, Homo sapiens
  CDR3 for alpha chain variable domain of TCR clone 158285 (TRAV2, TRAJ13)
CASGGYQKVTF

SEQ ID NO: 316570 - protein, 15 aa, Homo sapiens
  CDR3 for beta chain variable domain of TCR clone 158285 (TRBV5-4, TRBJ2-2)
CASSWGCRPTGELFF

SEQ ID NO: 316571 - protein, 20 aa, Homo sapiens
  CDR3 for alpha chain variable domain of TCR clone 158286 (TRAV12-1, TRAJ42)
RSVIQPPTSVTGGSQGNLIF

SEQ ID NO: 316572 - protein, 18 aa, Homo sapiens
  CDR3 for beta chain variable domain of TCR clone 158286 (TRBV11-2, TRBJ2-3)
CASSLGGASRGAPNTQYF

SEQ ID NO: 316573 - protein, 13 aa, Homo sapiens
  CDR3 for alpha chain variable domain of TCR clone 158287 (TRAV12-1, TRAJ6)
CVVYPGGSCIPTF

SEQ ID NO: 316574 - protein, 13 aa, Homo sapiens
  CDR3 for beta chain variable domain of TCR clone 158287 (TRBV4-2, TRBJ1-1)
CASSQAGNTEAFF

SEQ ID NO: 316575 - protein, 11 aa, Homo sapiens
  CDR3 for alpha chain variable domain of TCR clone 158288 (TRAV35, TRAJ12)
RRMDSSYKLIF

SEQ ID NO: 316576 - protein, 15 aa, Homo sapiens
  CDR3 for beta chain variable domain of TCR clone 158288 (TRBV11-3, TRBJ2-7)
CASSLGDRGSYEQYF

SEQ ID NO: 316577 - protein, 13 aa, Homo sapiens
  CDR3 for alpha chain variable domain of TCR clone 158289 (TRAV12-2, TRAJ57)
CAVTQGGSEKLVF

SEQ ID NO: 316578 - protein, 15 aa, Homo sapiens
  CDR3 for beta chain variable domain of TCR clone 158289 (TRBV5-1, TRBJ1-1)
CASSPTTGTNTEAFF

SEQ ID NO: 316579 - protein, 14 aa, Homo sapiens
  CDR3 for alpha chain variable domain of TCR clone 158290 (TRAV12-2, TRAJ17)
CAALFKAAGNKPTF

SEQ ID NO: 316580 - protein, 16 aa, Homo sapiens
  CDR3 for beta chain variable domain of TCR clone 158290 (TRBV20-1, TRBJ2-2)
CSASASGIPGAGELFF

SEQ ID NO: 316581 - protein, 15 aa, Homo sapiens
  CDR3 for alpha chain variable domain of TCR clone 158291 (TRAV40, TRAJ45)
CLLGDLGGGADGLTF

SEQ ID NO: 316582 - protein, 14 aa, Homo sapiens
  CDR3 for beta chain variable domain of TCR clone 158291 (TRBV7-3, TRBJ2-1)
CASSLAGGTNEQFF

SEQ ID NO: 316583 - protein, 11 aa, Homo sapiens
  CDR3 for alpha chain variable domain of TCR clone 158292 (TRAV13-1, TRAJ20)
CAASNDYKLSF

SEQ ID NO: 316584 - protein, 16 aa, Homo sapiens
  CDR3 for beta chain variable domain of TCR clone 158292 (TRBV27, TRBJ2-1)
CASSLSKGFGHDEQFF

SEQ ID NO: 316585 - protein, 15 aa, Homo sapiens
  CDR3 for alpha chain variable domain of TCR clone 158293 (TRAV26-1, TRAJ23)
CIVRVLNTQGGKLIF

SEQ ID NO: 316586 - protein, 15 aa, Homo sapiens
  CDR3 for beta chain variable domain of TCR clone 158293 (TRBV7-3, TRBJ2-1)
CASSFGQSNYNEQFF

SEQ ID NO: 316587 - protein, 14 aa, Homo sapiens
  CDR3 for alpha chain variable domain of TCR clone 158294 (TRAV9-2, TRAJ39)
CALYIYNAGNMLTF

SEQ ID NO: 316588 - protein, 15 aa, Homo sapiens
  CDR3 for beta chain variable domain of TCR clone 158294 (TRBV11-3, TRBJ2-3)
CASSAGTVVTNTQYF

SEQ ID NO: 316589 - protein, 16 aa, Homo sapiens
  CDR3 for alpha chain variable domain of TCR clone 158295 (TRAV26-2, TRAJ48)
CILRPPFNFGNEKLTF

SEQ ID NO: 316590 - protein, 17 aa, Homo sapiens
  CDR3 for beta chain variable domain of TCR clone 158295 (TRBV7-8, TRBJ2-6)
CASSAGTGGAGANVLTF

SEQ ID NO: 316591 - protein, 14 aa, Homo sapiens
  CDR3 for alpha chain variable domain of TCR clone 158296 (TRAV2, TRAJ9)
CAVEDRSGGFKTIF

SEQ ID NO: 316592 - protein, 13 aa, Homo sapiens
  CDR3 for beta chain variable domain of TCR clone 158296 (TRBV7-9, TRBJ1-2)
CASSLKQNYGYSF

SEQ ID NO: 316593 - protein, 13 aa, Homo sapiens
  CDR3 for alpha chain variable domain of TCR clone 158297 (TRAV1-2, TRAJ36)
CAVDHTGANNLFF

SEQ ID NO: 316594 - protein, 14 aa, Homo sapiens
  CDR3 for beta chain variable domain of TCR clone 158297 (TRBV20-1, TRBJ2-5)
CSAREMTKQETQYF

SEQ ID NO: 316595 - protein, 11 aa, Homo sapiens
  CDR3 for alpha chain variable domain of TCR clone 158298 (TRAV17, TRAJ39)
CSTNPYNMLTF

SEQ ID NO: 316596 - protein, 13 aa, Homo sapiens
  CDR3 for beta chain variable domain of TCR clone 158298 (TRBV7-8, TRBJ2-1)
CASTRDAVDEQFF

SEQ ID NO: 316597 - protein, 14 aa, Homo sapiens
  CDR3 for alpha chain variable domain of TCR clone 158299 (TRAV17, TRAJ32)
CATDPGGATNKLIF

SEQ ID NO: 316598 - protein, 16 aa, Homo sapiens
  CDR3 for beta chain variable domain of TCR clone 158299 (TRBV2, TRBJ1-5)
CASSENRGGQPSILVM

SEQ ID NO: 316599 - protein, 16 aa, Homo sapiens
  CDR3 for alpha chain variable domain of TCR clone 158300 (TRAV3, TRAJ4)
CAVRGTFSGGYNKLIF

SEQ ID NO: 316600 - protein, 20 aa, Homo sapiens
  CDR3 for beta chain variable domain of TCR clone 158300 (TRBV7-8, TRBJ2-2)
CASSHLFPGPTIHITGELFF

SEQ ID NO: 316601 - protein, 14 aa, Homo sapiens
  CDR3 for alpha chain variable domain of TCR clone 158301 (TRAV1-2, TRAJ16)
CAVNRFSDGQKLPF

SEQ ID NO: 316602 - protein, 13 aa, Homo sapiens
  CDR3 for beta chain variable domain of TCR clone 158301 (TRBV7-9, TRBJ1-2)
CASSLKQNYGYTF

SEQ ID NO: 316603 - protein, 12 aa, Homo sapiens
  CDR3 for alpha chain variable domain of TCR clone 158302 (TRAV13-2, TRAJ23)
CAERHRGGKLIF

SEQ ID NO: 316604 - protein, 16 aa, Homo sapiens
  CDR3 for beta chain variable domain of TCR clone 158302 (TRBV11-3, TRBJ2-4)
CASSLRRLLAKNIQYF

SEQ ID NO: 316605 - protein, 15 aa, Homo sapiens
  CDR3 for alpha chain variable domain of TCR clone 158303 (TRAV3, TRAJ22)
CAVRDRGGSARQLTF

SEQ ID NO: 316606 - protein, 15 aa, Homo sapiens
  CDR3 for beta chain variable domain of TCR clone 158303 (TRBV20-1, TRBJ1-1)
CGASRGVTGNTEAFF

SEQ ID NO: 316607 - protein, 18 aa, Homo sapiens
  CDR3 for alpha chain variable domain of TCR clone 158304 (TRAV21, TRAJ52)
CAVRPSPAGGTSYGKLTF

SEQ ID NO: 316608 - protein, 12 aa, Homo sapiens
  CDR3 for beta chain variable domain of TCR clone 158304 (TRBV7-9, TRBJ2-5)
CASSPNIETQYF

SEQ ID NO: 316609 - protein, 11 aa, Homo sapiens
  CDR3 for alpha chain variable domain of TCR clone 158305 (TRAV39, TRAJ49)
CAVDISTQFYF

SEQ ID NO: 316610 - protein, 14 aa, Homo sapiens
  CDR3 for beta chain variable domain of TCR clone 158305 (TRBV7-3, TRBJ2-2)
CASSLNSNTGELFF

SEQ ID NO: 316611 - protein, 15 aa, Homo sapiens
  CDR3 for alpha chain variable domain of TCR clone 158306 (TRAV21, TRAJ13)
CAVRPTSGGHQKVTF

SEQ ID NO: 316612 - protein, 18 aa, Homo sapiens
  CDR3 for beta chain variable domain of TCR clone 158306 (TRBV11-3, TRBJ2-1)
CASSSYPGGRDSYNEQFF

SEQ ID NO: 316613 - protein, 13 aa, Homo sapiens
  CDR3 for alpha chain variable domain of TCR clone 158307 (TRAV30, TRAJ18)
CGTEASTLGRLYS

SEQ ID NO: 316614 - protein, 15 aa, Homo sapiens
  CDR3 for beta chain variable domain of TCR clone 158307 (TRBV7-3, TRBJ2-1)
GASSRIGTGSSEQFF

SEQ ID NO: 316615 - protein, 15 aa, Homo sapiens
  CDR3 for alpha chain variable domain of TCR clone 158308 (TRAV12-1, TRAJ44)
CVVFVNTGTASKLTF

SEQ ID NO: 316616 - protein, 16 aa, Homo sapiens
  CDR3 for beta chain variable domain of TCR clone 158308 (TRBV2, TRBJ2-3)
CASSTSVEGVTDTQYF

SEQ ID NO: 316617 - protein, 11 aa, Homo sapiens
  CDR3 for alpha chain variable domain of TCR clone 158309 (TRAV21, TRAJ49)
CAVKDGNQFYF

SEQ ID NO: 316618 - protein, 16 aa, Homo sapiens
  CDR3 for beta chain variable domain of TCR clone 158309 (TRBV7-2, TRBJ1-2)
CASSSNQDRRGHGYTF

SEQ ID NO: 316619 - protein, 13 aa, Homo sapiens
  CDR3 for alpha chain variable domain of TCR clone 158310 (TRAV21, TRAJ27)
CAARPGNAGKSTF

SEQ ID NO: 316620 - protein, 15 aa, Homo sapiens
  CDR3 for beta chain variable domain of TCR clone 158310 (TRBV6-5, TRBJ2-1)
CASSYDAGAGNEQFF

SEQ ID NO: 316621 - protein, 11 aa, Homo sapiens
  CDR3 for alpha chain variable domain of TCR clone 158311 (TRAV21, TRAJ41)
CAVRSGYALKF

SEQ ID NO: 316622 - protein, 15 aa, Homo sapiens
  CDR3 for beta chain variable domain of TCR clone 158311 (TRBV11-2, TRBJ2-1)
CASSWDGRSYNEQFF

SEQ ID NO: 316623 - protein, 12 aa, Homo sapiens
  CDR3 for alpha chain variable domain of TCR clone 158312 (TRAV1-1, TRAJ30)
CAVRGRDDKIIF

SEQ ID NO: 316624 - protein, 20 aa, Homo sapiens
  CDR3 for beta chain variable domain of TCR clone 158312 (TRBV7-8, TRBJ2-2)
CASSHLFPGPTIHITGELFF

SEQ ID NO: 316625 - protein, 16 aa, Homo sapiens
  CDR3 for alpha chain variable domain of TCR clone 158313 (TRAV30, TRAJ24)
CGTEIVDADSWGKLQF

SEQ ID NO: 316626 - protein, 17 aa, Homo sapiens
  CDR3 for beta chain variable domain of TCR clone 158313 (TRBV20-1, TRBJ2-2)
CSASGSGQGGLTGELFF

SEQ ID NO: 316627 - protein, 14 aa, Homo sapiens
  CDR3 for alpha chain variable domain of TCR clone 158314 (TRAV1-2, TRAJ16)
CAVSRFSDGQKLLF

SEQ ID NO: 316628 - protein, 15 aa, Homo sapiens
  CDR3 for beta chain variable domain of TCR clone 158314 (TRBV5-1, TRBJ2-2)
CASSSQGGNTGELFF

SEQ ID NO: 316629 - protein, 15 aa, Homo sapiens
  CDR3 for alpha chain variable domain of TCR clone 158315 (TRAV12-1, TRAJ5)
CVVNMLETGSRALTF

SEQ ID NO: 316630 - protein, 12 aa, Homo sapiens
  CDR3 for beta chain variable domain of TCR clone 158315 (TRBV11-2, TRBJ2-2)
CASSLGGGELFF

SEQ ID NO: 316631 - protein, 15 aa, Homo sapiens
  CDR3 for alpha chain variable domain of TCR clone 158316 (TRAV23/DV6, TRAJ21)
CSKQRGRDNFNKFSF

SEQ ID NO: 316632 - protein, 11 aa, Homo sapiens
  CDR3 for beta chain variable domain of TCR clone 158316 (TRBV7-8, TRBJ2-7)
CASSLSLEQYF

SEQ ID NO: 316633 - protein, 14 aa, Homo sapiens
  CDR3 for alpha chain variable domain of TCR clone 158317 (TRAV13-1, TRAJ40)
CAASMTSGTYKYIF

SEQ ID NO: 316634 - protein, 12 aa, Homo sapiens
  CDR3 for beta chain variable domain of TCR clone 158317 (TRBV7-3, TRBJ2-3)
CASSSLTDTQYF

SEQ ID NO: 316635 - protein, 15 aa, Homo sapiens
  CDR3 for alpha chain variable domain of TCR clone 158318 (TRAV27, TRAJ38)
CAARRNSGNNRKLIW

SEQ ID NO: 316636 - protein, 17 aa, Homo sapiens
  CDR3 for beta chain variable domain of TCR clone 158318 (TRBV13, TRBJ2-3)
CASSLSRVAGGRNTQYF

SEQ ID NO: 316637 - protein, 17 aa, Homo sapiens
  CDR3 for alpha chain variable domain of TCR clone 158319 (TRAV12-2, TRAJ6)
CAPQGPPRAGGSYIPTF

SEQ ID NO: 316638 - protein, 16 aa, Homo sapiens
  CDR3 for beta chain variable domain of TCR clone 158319 (TRBV19, TRBJ2-2)
GASSTARASNTGELFF

SEQ ID NO: 316639 - protein, 18 aa, Homo sapiens
  CDR3 for alpha chain variable domain of TCR clone 158320 (TRAV21, TRAJ52)
CAVRPSPAGGTSYGKLTF

SEQ ID NO: 316640 - protein, 16 aa, Homo sapiens
  CDR3 for beta chain variable domain of TCR clone 158320 (TRBV12-5, TRBJ2-5)
CASGSRTSGNQETQYF

SEQ ID NO: 316641 - protein, 12 aa, Homo sapiens
  CDR3 for alpha chain variable domain of TCR clone 158321 (TRAV1-1, TRAJ8)
RAGGTGFQKLVF

SEQ ID NO: 316642 - protein, 13 aa, Homo sapiens
  CDR3 for beta chain variable domain of TCR clone 158321 (TRBV7-9, TRBJ1-2)
CASSLKQNYGYAF

SEQ ID NO: 316643 - protein, 16 aa, Homo sapiens
  CDR3 for alpha chain variable domain of TCR clone 158322 (TRAV3, TRAJ18)
CAVRDGRGSTLGRLYF

SEQ ID NO: 316644 - protein, 15 aa, Homo sapiens
  CDR3 for beta chain variable domain of TCR clone 158322 (TRBV5-1, TRBJ2-2)
CASSSQGGNTGELFF

SEQ ID NO: 316645 - protein, 13 aa, Homo sapiens
  CDR3 for alpha chain variable domain of TCR clone 158323 (TRAV17, TRAJ9)
CATDYTGGFKTSF

SEQ ID NO: 316646 - protein, 16 aa, Homo sapiens
  CDR3 for beta chain variable domain of TCR clone 158323 (TRBV7-7, TRBJ2-1)
CASSLASGTSYNEQFF

SEQ ID NO: 316647 - protein, 15 aa, Homo sapiens
  CDR3 for alpha chain variable domain of TCR clone 158324 (TRAV3, TRAJ22)
CAVRDRGGSARQLTF

SEQ ID NO: 316648 - protein, 15 aa, Homo sapiens
  CDR3 for beta chain variable domain of TCR clone 158324 (TRBV20-1, TRBJ2-1)
CSASSAGSSYNEQFF

SEQ ID NO: 316649 - protein, 11 aa, Homo sapiens
  CDR3 for alpha chain variable domain of TCR clone 158325 (TRAV1-1, TRAJ39)
CAVSVVGNMLT

SEQ ID NO: 316650 - protein, 15 aa, Homo sapiens
  CDR3 for beta chain variable domain of TCR clone 158325 (TRBV19, TRBJ1-6)
CASSTQGAVGSALHF

SEQ ID NO: 316651 - protein, 16 aa, Homo sapiens
  CDR3 for alpha chain variable domain of TCR clone 158326 (TRAV4, TRAJ22)
CLEGDLYSGSARQLTF

SEQ ID NO: 316652 - protein, 16 aa, Homo sapiens
  CDR3 for beta chain variable domain of TCR clone 158326 (TRBV7-9, TRBJ2-1)
CASSDVAGGSYNEQFF

SEQ ID NO: 316653 - protein, 12 aa, Homo sapiens
  CDR3 for alpha chain variable domain of TCR clone 158327 (TRAV13-2, TRAJ31)
CAESYNNARLMF

SEQ ID NO: 316654 - protein, 13 aa, Homo sapiens
  CDR3 for beta chain variable domain of TCR clone 158327 (TRBV24-1, TRBJ1-3)
CATMADSGNTLYF

SEQ ID NO: 316655 - protein, 11 aa, Homo sapiens
  CDR3 for alpha chain variable domain of TCR clone 158328 (TRAV12-3, TRAJ43)
CAMSVSNDMRF

SEQ ID NO: 316656 - protein, 13 aa, Homo sapiens
  CDR3 for beta chain variable domain of TCR clone 158328 (TRBV20-1, TRBJ2-5)
CSARGDYQETQYF

SEQ ID NO: 316657 - protein, 13 aa, Homo sapiens
  CDR3 for alpha chain variable domain of TCR clone 158329 (TRAV1-1, TRAJ23)
CAVVANQGGKLIF

SEQ ID NO: 316658 - protein, 13 aa, Homo sapiens
  CDR3 for beta chain variable domain of TCR clone 158329 (TRBV5-5, TRBJ1-2)
CASSPTWAGDSMA

SEQ ID NO: 316659 - protein, 11 aa, Homo sapiens
  CDR3 for alpha chain variable domain of TCR clone 158330 (TRAV12-1, TRAJ35)
SGEGFGNVLHC

SEQ ID NO: 316660 - protein, 15 aa, Homo sapiens
  CDR3 for beta chain variable domain of TCR clone 158330 (TRBV20-1, TRBJ2-7)
CSARDRVSGMDEQYF

SEQ ID NO: 316661 - protein, 14 aa, Homo sapiens
  CDR3 for alpha chain variable domain of TCR clone 158331 (TRAV1-2, TRAJ8)
CAVREETGFQKLVF

SEQ ID NO: 316662 - protein, 14 aa, Homo sapiens
  CDR3 for beta chain variable domain of TCR clone 158331 (TRBV5-4, TRBJ1-1)
CASSLDSRRDEAFF

SEQ ID NO: 316663 - protein, 15 aa, Homo sapiens
  CDR3 for alpha chain variable domain of TCR clone 158332 (TRAV38-1, TRAJ37)
CAFIFGSGNTGKLIF

SEQ ID NO: 316664 - protein, 19 aa, Homo sapiens
  CDR3 for beta chain variable domain of TCR clone 158332 (TRBV4-3, TRBJ2-7)
CPVSLRQQPRGRGIYEQYF

SEQ ID NO: 316665 - protein, 12 aa, Homo sapiens
  CDR3 for alpha chain variable domain of TCR clone 158333 (TRAV8-2, TRAJ45)
CVQGGGADGLTF

SEQ ID NO: 316666 - protein, 16 aa, Homo sapiens
  CDR3 for beta chain variable domain of TCR clone 158333 (TRBV12-5, TRBJ2-5)
CASGPRTSGNQETQYF

SEQ ID NO: 316667 - protein, 15 aa, Homo sapiens
  CDR3 for alpha chain variable domain of TCR clone 158334 (TRAV17, TRAJ57)
CATGPSQGGSEKLGF

SEQ ID NO: 316668 - protein, 16 aa, Homo sapiens
  CDR3 for beta chain variable domain of TCR clone 158334 (TRBV2, TRBJ2-3)
CASSTSVEGVTDTQYF

SEQ ID NO: 316669 - protein, 12 aa, Homo sapiens
  CDR3 for alpha chain variable domain of TCR clone 158335 (TRAV21, TRAJ26)
CAVDNYGQNFVF

SEQ ID NO: 316670 - protein, 11 aa, Homo sapiens
  CDR3 for beta chain variable domain of TCR clone 158335 (TRBV20-1, TRBJ2-1)
CSLSSGSEQFF

SEQ ID NO: 316671 - protein, 13 aa, Homo sapiens
  CDR3 for alpha chain variable domain of TCR clone 158336 (TRAV29/DV5, TRAJ49)
CAASTNTGNQCYF

SEQ ID NO: 316672 - protein, 13 aa, Homo sapiens
  CDR3 for beta chain variable domain of TCR clone 158336 (TRBV7-2, TRBJ1-4)
CASSLTGLEKLFF

SEQ ID NO: 316673 - protein, 16 aa, Homo sapiens
  CDR3 for alpha chain variable domain of TCR clone 158337 (TRAV3, TRAJ21)
CAVRDIERGNFNKFYF

SEQ ID NO: 316674 - protein, 16 aa, Homo sapiens
  CDR3 for beta chain variable domain of TCR clone 158337 (TRBV13, TRBJ2-2)
CASSARTGEHTGELFF

SEQ ID NO: 316675 - protein, 13 aa, Homo sapiens
  CDR3 for alpha chain variable domain of TCR clone 158338 (TRAV12-1, TRAJ26)
CGVRRNYGQNFVF

SEQ ID NO: 316676 - protein, 14 aa, Homo sapiens
  CDR3 for beta chain variable domain of TCR clone 158338 (TRBV6-3, TRBJ1-1)
CASRYTGESTEAFF

SEQ ID NO: 316677 - protein, 15 aa, Homo sapiens
  CDR3 for alpha chain variable domain of TCR clone 158339 (TRAV3, TRAJ3)
CAVRDGHSSGSKIIF

SEQ ID NO: 316678 - protein, 17 aa, Homo sapiens
  CDR3 for beta chain variable domain of TCR clone 158339 (TRBV25-1, TRBJ2-7)
CASSDARVVFSSYEQYF

SEQ ID NO: 316679 - protein, 14 aa, Homo sapiens
  CDR3 for alpha chain variable domain of TCR clone 158340 (TRAV12-2, TRAJ6)
CASKWGRGSYIPTF

SEQ ID NO: 316680 - protein, 13 aa, Homo sapiens
  CDR3 for beta chain variable domain of TCR clone 158340 (TRBV2, TRBJ1-1)
CASSEGGNTEAFF

SEQ ID NO: 316681 - protein, 14 aa, Homo sapiens
  CDR3 for alpha chain variable domain of TCR clone 158341 (TRAV12-1, TRAJ30)
CVVNIGGRDDKIIF

SEQ ID NO: 316682 - protein, 13 aa, Homo sapiens
  CDR3 for beta chain variable domain of TCR clone 158341 (TRBV12-5, TRBJ2-1)
CASGWGRGNEQFF

SEQ ID NO: 316683 - protein, 15 aa, Homo sapiens
  CDR3 for alpha chain variable domain of TCR clone 158342 (TRAV12-3, TRAJ49)
CAMAVTTNTGNQFYF

SEQ ID NO: 316684 - protein, 18 aa, Homo sapiens
  CDR3 for beta chain variable domain of TCR clone 158342 (TRBV4-1, TRBJ1-5)
CASSQDPRGQGLNQPQHF

SEQ ID NO: 316685 - protein, 14 aa, Homo sapiens
  CDR3 for alpha chain variable domain of TCR clone 158343 (TRAV8-6, TRAJ9)
CAVTPATGGFKTIF

SEQ ID NO: 316686 - protein, 13 aa, Homo sapiens
  CDR3 for beta chain variable domain of TCR clone 158343 (TRBV19, TRBJ2-7)
CASSTSGSYEQYF

SEQ ID NO: 316687 - protein, 13 aa, Homo sapiens
  CDR3 for alpha chain variable domain of TCR clone 158344 (TRAV23/DV6, TRAJ15)
CAALPAGRNCSDL

SEQ ID NO: 316688 - protein, 14 aa, Homo sapiens
  CDR3 for beta chain variable domain of TCR clone 158344 (TRBV7-9, TRBJ1-2)
CASSRQVANYGYTF

SEQ ID NO: 316689 - protein, 16 aa, Homo sapiens
  CDR3 for alpha chain variable domain of TCR clone 158345 (TRAV12-2, TRAJ32)
CAVNLGQGGATNKLIF

SEQ ID NO: 316690 - protein, 14 aa, Homo sapiens
  CDR3 for beta chain variable domain of TCR clone 158345 (TRBV4-2, TRBJ1-5)
CASSQDSINQPQHF

SEQ ID NO: 316691 - protein, 23 aa, Homo sapiens
  CDR3 for alpha chain variable domain of TCR clone 158346 (TRAV12-2, TRAJ36)
SLLIRDSQPSDSATLERANNLFF

SEQ ID NO: 316692 - protein, 13 aa, Homo sapiens
  CDR3 for beta chain variable domain of TCR clone 158346 (TRBV11-3, TRBJ2-3)
CASSHDTKDTQYF

SEQ ID NO: 316693 - protein, 14 aa, Homo sapiens
  CDR3 for alpha chain variable domain of TCR clone 158347 (TRAV23/DV6, TRAJ4)
CAARSAGGYNKLIF

SEQ ID NO: 316694 - protein, 12 aa, Homo sapiens
  CDR3 for beta chain variable domain of TCR clone 158347 (TRBV7-8, TRBJ2-7)
CASSLGDREQYF

SEQ ID NO: 316695 - protein, 14 aa, Homo sapiens
  CDR3 for alpha chain variable domain of TCR clone 158348 (TRAV16, TRAJ34)
CALPYDYNTDKLIF

SEQ ID NO: 316696 - protein, 13 aa, Homo sapiens
  CDR3 for beta chain variable domain of TCR clone 158348 (TRBV7-9, TRBJ1-2)
CASSLKQNYGYTF

SEQ ID NO: 316697 - protein, 20 aa, Homo sapiens
  CDR3 for alpha chain variable domain of TCR clone 158349 (TRAV12-1, TRAJ40)
SSVIQPPTCVVYSGTYKYIF

SEQ ID NO: 316698 - protein, 18 aa, Homo sapiens
  CDR3 for beta chain variable domain of TCR clone 158349 (TRBV11-3, TRBJ2-3)
CASSLGGASRGAPNTQYF

SEQ ID NO: 316699 - protein, 16 aa, Homo sapiens
  CDR3 for alpha chain variable domain of TCR clone 158350 (TRAV8-3, TRAJ8)
CAVPRDGNTGFQKLVF

SEQ ID NO: 316700 - protein, 13 aa, Homo sapiens
  CDR3 for beta chain variable domain of TCR clone 158350 (TRBV7-3, TRBJ1-1)
CASSQDWGAEAFF

SEQ ID NO: 316701 - protein, 14 aa, Homo sapiens
  CDR3 for alpha chain variable domain of TCR clone 158351 (TRAV12-3, TRAJ29)
CAMSPYSGKTPLVF

SEQ ID NO: 316702 - protein, 15 aa, Homo sapiens
  CDR3 for beta chain variable domain of TCR clone 158351 (TRBV27, TRBJ2-1)
CASSNGGGSSNEQFF

SEQ ID NO: 316703 - protein, 15 aa, Homo sapiens
  CDR3 for alpha chain variable domain of TCR clone 158352 (TRAV35, TRAJ58)
CAGRRQETSGSRLTF

SEQ ID NO: 316704 - protein, 14 aa, Homo sapiens
  CDR3 for beta chain variable domain of TCR clone 158352 (TRBV5-4, TRBJ1-1)
CASSLDSRRDEAFF

SEQ ID NO: 316705 - protein, 19 aa, Homo sapiens
  CDR3 for alpha chain variable domain of TCR clone 158353 (TRAV2, TRAJ20)
ILQVREADAAVYRDCKLSF

SEQ ID NO: 316706 - protein, 16 aa, Homo sapiens
  CDR3 for beta chain variable domain of TCR clone 158353 (TRBV6-1, TRBJ2-5)
CASSETLDRGAETQYF

SEQ ID NO: 316707 - protein, 12 aa, Homo sapiens
  CDR3 for alpha chain variable domain of TCR clone 158354 (TRAV12-3, TRAJ34)
CTMGYNTDKLIF

SEQ ID NO: 316708 - protein, 15 aa, Homo sapiens
  CDR3 for beta chain variable domain of TCR clone 158354 (TRBV28, TRBJ2-1)
CASSIIAGGRSEQFF

SEQ ID NO: 316709 - protein, 13 aa, Homo sapiens
  CDR3 for alpha chain variable domain of TCR clone 158355 (TRAV35, TRAJ58)
CAGLETSGTRLTF

SEQ ID NO: 316710 - protein, 15 aa, Homo sapiens
  CDR3 for beta chain variable domain of TCR clone 158355 (TRBV20-1, TRBJ2-1)
CSARFSAGGSNEQFF

SEQ ID NO: 316711 - protein, 12 aa, Homo sapiens
  CDR3 for alpha chain variable domain of TCR clone 158356 (TRAV1-2, TRAJ26)
CAVRYYGQNFVF

SEQ ID NO: 316712 - protein, 14 aa, Homo sapiens
  CDR3 for beta chain variable domain of TCR clone 158356 (TRBV20-1, TRBJ1-1)
CSAQTRIGGTEAFF

SEQ ID NO: 316713 - protein, 15 aa, Homo sapiens
  CDR3 for alpha chain variable domain of TCR clone 158357 (TRAV12-2, TRAJ43)
CAFDMRFGAGTSRTV

SEQ ID NO: 316714 - protein, 17 aa, Homo sapiens
  CDR3 for beta chain variable domain of TCR clone 158357 (TRBV13, TRBJ2-3)
CASSLSRVAGGRNTQYF

SEQ ID NO: 316715 - protein, 15 aa, Homo sapiens
  CDR3 for alpha chain variable domain of TCR clone 158358 (TRAV23/DV6, TRAJ18)
CAASHAGSTLGRLYF

SEQ ID NO: 316716 - protein, 15 aa, Homo sapiens
  CDR3 for beta chain variable domain of TCR clone 158358 (TRBV7-2, TRBJ2-2)
CASSLVAGSAGELFF

SEQ ID NO: 316717 - protein, 13 aa, Homo sapiens
  CDR3 for alpha chain variable domain of TCR clone 158359 (TRAV2, TRAJ40)
CAVVTSGTYKYIL

SEQ ID NO: 316718 - protein, 13 aa, Homo sapiens
  CDR3 for beta chain variable domain of TCR clone 158359 (TRBV10-2, TRBJ2-7)
CASGASGGYEQYF

SEQ ID NO: 316719 - protein, 13 aa, Homo sapiens
  CDR3 for alpha chain variable domain of TCR clone 158360 (TRAV12-2, TRAJ10)
CAVPTGGGNKLTF

SEQ ID NO: 316720 - protein, 17 aa, Homo sapiens
  CDR3 for beta chain variable domain of TCR clone 158360 (TRBV20-1, TRBJ2-2)
CSASGSGQGGLTGELFF

SEQ ID NO: 316721 - protein, 11 aa, Homo sapiens
  CDR3 for alpha chain variable domain of TCR clone 158361 (TRAV2, TRAJ13)
CASGGYHKVTF

SEQ ID NO: 316722 - protein, 15 aa, Homo sapiens
  CDR3 for beta chain variable domain of TCR clone 158361 (TRBV7-2, TRBJ2-1)
CASSSGLAGGNEQFF

SEQ ID NO: 316723 - protein, 19 aa, Homo sapiens
  CDR3 for alpha chain variable domain of TCR clone 158362 (TRAV16, TRAJ26)
CALTRWSEFCLWSRNQLVR

SEQ ID NO: 316724 - protein, 16 aa, Homo sapiens
  CDR3 for beta chain variable domain of TCR clone 158362 (TRBV9, TRBJ2-1)
CASSVGGGGNYNEQFF

SEQ ID NO: 316725 - protein, 12 aa, Homo sapiens
  CDR3 for alpha chain variable domain of TCR clone 158363 (TRAV13-2, TRAJ34)
CAENQNTDKLIF

SEQ ID NO: 316726 - protein, 12 aa, Homo sapiens
  CDR3 for beta chain variable domain of TCR clone 158363 (TRBV11-2, TRBJ2-2)
CASSLPTGELFF

SEQ ID NO: 316727 - protein, 14 aa, Homo sapiens
  CDR3 for alpha chain variable domain of TCR clone 158364 (TRAV12-3, TRAJ10)
SHLPLTGGGNNLTF

SEQ ID NO: 316728 - protein, 11 aa, Homo sapiens
  CDR3 for beta chain variable domain of TCR clone 158364 (TRBV19, TRBJ1-1)
CASSIGSEAFF

SEQ ID NO: 316729 - protein, 13 aa, Homo sapiens
  CDR3 for alpha chain variable domain of TCR clone 158365 (TRAV17, TRAJ15)
CATDARAGTALIF

SEQ ID NO: 316730 - protein, 15 aa, Homo sapiens
  CDR3 for beta chain variable domain of TCR clone 158365 (TRBV20-1, TRBJ2-7)
CSARDRVSGMDDQYF

SEQ ID NO: 316731 - protein, 14 aa, Homo sapiens
  CDR3 for alpha chain variable domain of TCR clone 158366 (TRAV35, TRAJ10)
CAGILTGGGNNLTF

SEQ ID NO: 316732 - protein, 16 aa, Homo sapiens
  CDR3 for beta chain variable domain of TCR clone 158366 (TRBV12-5, TRBJ2-5)
CASGPRTSGNQETQYF

SEQ ID NO: 316733 - protein, 17 aa, Homo sapiens
  CDR3 for alpha chain variable domain of TCR clone 158367 (TRAV3, TRAJ42)
CAVRDRDYGGSQGNLIF

SEQ ID NO: 316734 - protein, 14 aa, Homo sapiens
  CDR3 for beta chain variable domain of TCR clone 158367 (TRBV25-1, TRBJ1-1)
CASTHLGGDTEAFF

SEQ ID NO: 316735 - protein, 17 aa, Homo sapiens
  CDR3 for alpha chain variable domain of TCR clone 158368 (TRAV8-6, TRAJ58)
CSVSSWVGETSGSRLTF

SEQ ID NO: 316736 - protein, 14 aa, Homo sapiens
  CDR3 for beta chain variable domain of TCR clone 158368 (TRBV4-2, TRBJ2-1)
CTSGLDRAYNEQFF

SEQ ID NO: 316737 - protein, 18 aa, Homo sapiens
  CDR3 for alpha chain variable domain of TCR clone 158369 (TRAV3, TRAJ32)
CAVRDIRGYGCATNKLIF

SEQ ID NO: 316738 - protein, 15 aa, Homo sapiens
  CDR3 for beta chain variable domain of TCR clone 158369 (TRBV12-4, TRBJ2-2)
CASSLGVRHTGELLF

SEQ ID NO: 316739 - protein, 13 aa, Homo sapiens
  CDR3 for alpha chain variable domain of TCR clone 158370 (TRAV3, TRAJ27)
CDVRHRGAGKSTF

SEQ ID NO: 316740 - protein, 13 aa, Homo sapiens
  CDR3 for beta chain variable domain of TCR clone 158370 (TRBV7-9, TRBJ2-3)
CASSPGSTDTQYF

SEQ ID NO: 316741 - protein, 13 aa, Homo sapiens
  CDR3 for alpha chain variable domain of TCR clone 158371 (TRAV12-3, TRAJ7)
CAMSASGNNRLAF

SEQ ID NO: 316742 - protein, 14 aa, Homo sapiens
  CDR3 for beta chain variable domain of TCR clone 158371 (TRBV13, TRBJ2-5)
FASSLGPRGETQYF

SEQ ID NO: 316743 - protein, 14 aa, Homo sapiens
  CDR3 for alpha chain variable domain of TCR clone 158372 (TRAV21, TRAJ11)
CAVRRNSGYSSLTF

SEQ ID NO: 316744 - protein, 11 aa, Homo sapiens
  CDR3 for beta chain variable domain of TCR clone 158372 (TRBV11-2, TRBJ1-1)
CASSINTEAFF

SEQ ID NO: 316745 - protein, 14 aa, Homo sapiens
  CDR3 for alpha chain variable domain of TCR clone 158373 (TRAV26-1, TRAJ22)
CIVRVSGSARQLTF

SEQ ID NO: 316746 - protein, 12 aa, Homo sapiens
  CDR3 for beta chain variable domain of TCR clone 158373 (TRBV7-9, TRBJ1-4)
CASSTDREKLFF

SEQ ID NO: 316747 - protein, 16 aa, Homo sapiens
  CDR3 for alpha chain variable domain of TCR clone 158374 (TRAV4, TRAJ23)
CLVGDPFYNQGGKLIF

SEQ ID NO: 316748 - protein, 17 aa, Homo sapiens
  CDR3 for beta chain variable domain of TCR clone 158374 (TRBV9, TRBJ1-6)
CASSADPSRGGDSPLHF

SEQ ID NO: 316749 - protein, 16 aa, Homo sapiens
  CDR3 for alpha chain variable domain of TCR clone 158375 (TRAV1-1, TRAJ29)
CAVRSTRHSGNTPLVF

SEQ ID NO: 316750 - protein, 16 aa, Homo sapiens
  CDR3 for beta chain variable domain of TCR clone 158375 (TRBV27, TRBJ1-1)
CASSSRGRTGYTEAFF

SEQ ID NO: 316751 - protein, 18 aa, Homo sapiens
  CDR3 for alpha chain variable domain of TCR clone 158376 (TRAV13-1, TRAJ52)
CAAKNPNAGGPSDGKLTF

SEQ ID NO: 316752 - protein, 12 aa, Homo sapiens
  CDR3 for beta chain variable domain of TCR clone 158376 (TRBV5-1, TRBJ1-1)
CASSFGNTEAFF

SEQ ID NO: 316753 - protein, 15 aa, Homo sapiens
  CDR3 for alpha chain variable domain of TCR clone 158377 (TRAV8-2, TRAJ15)
CVVTMGNQAGTALIF

SEQ ID NO: 316754 - protein, 15 aa, Homo sapiens
  CDR3 for beta chain variable domain of TCR clone 158377 (TRBV12-4, TRBJ2-5)
CASSPPTGLQETQYF

SEQ ID NO: 316755 - protein, 11 aa, Homo sapiens
  CDR3 for alpha chain variable domain of TCR clone 158378 (TRAV17, TRAJ43)
CATPRSNDMRF

SEQ ID NO: 316756 - protein, 14 aa, Homo sapiens
  CDR3 for beta chain variable domain of TCR clone 158378 (TRBV4-2, TRBJ2-1)
CASGLDRAYNEQFF

SEQ ID NO: 316757 - protein, 12 aa, Homo sapiens
  CDR3 for alpha chain variable domain of TCR clone 158379 (TRAV12-1, TRAJ40)
CVFYSGTYKYIF

SEQ ID NO: 316758 - protein, 18 aa, Homo sapiens
  CDR3 for beta chain variable domain of TCR clone 158379 (TRBV12-4, TRBJ2-2)
CASSLVGGTRGRTGELFL

SEQ ID NO: 316759 - protein, 15 aa, Homo sapiens
  CDR3 for alpha chain variable domain of TCR clone 158380 (TRAV8-6, TRAJ10)
CAVSDQAGGGNKLTF

SEQ ID NO: 316760 - protein, 16 aa, Homo sapiens
  CDR3 for beta chain variable domain of TCR clone 158380 (TRBV27, TRBJ2-7)
CASSSERRDSANEQYF

SEQ ID NO: 316761 - protein, 14 aa, Homo sapiens
  CDR3 for alpha chain variable domain of TCR clone 158381 (TRAV12-3, TRAJ10)
SHLPLTGGGKKLTF

SEQ ID NO: 316762 - protein, 16 aa, Homo sapiens
  CDR3 for beta chain variable domain of TCR clone 158381 (TRBV7-3, TRBJ2-2)
CASSLKRGTLSGELFF

SEQ ID NO: 316763 - protein, 13 aa, Homo sapiens
  CDR3 for alpha chain variable domain of TCR clone 158382 (TRAV36/DV7, TRAJ7)
CAGTRNGNNRLAF

SEQ ID NO: 316764 - protein, 14 aa, Homo sapiens
  CDR3 for beta chain variable domain of TCR clone 158382 (TRBV19, TRBJ2-1)
CASPTFVLSGEQFF

SEQ ID NO: 316765 - protein, 20 aa, Homo sapiens
  CDR3 for alpha chain variable domain of TCR clone 158383 (TRAV21, TRAJ13)
CAVPRSFWGLPESYLWIWNK

SEQ ID NO: 316766 - protein, 15 aa, Homo sapiens
  CDR3 for beta chain variable domain of TCR clone 158383 (TRBV27, TRBJ2-5)
CASSLYPRGGETQYF

SEQ ID NO: 316767 - protein, 11 aa, Homo sapiens
  CDR3 for alpha chain variable domain of TCR clone 158384 (TRAV1-1, TRAJ23)
CAVRPGGKLIF

SEQ ID NO: 316768 - protein, 20 aa, Homo sapiens
  CDR3 for beta chain variable domain of TCR clone 158384 (TRBV7-8, TRBJ2-2)
SASSHLFPGPTIHITGELFF

SEQ ID NO: 316769 - protein, 14 aa, Homo sapiens
  CDR3 for alpha chain variable domain of TCR clone 158385 (TRAV12-3, TRAJ10)
SHLPLTGGGNKLTF

SEQ ID NO: 316770 - protein, 17 aa, Homo sapiens
  CDR3 for beta chain variable domain of TCR clone 158385 (TRBV20-1, TRBJ2-1)
CSDSSSGLAGSYNEQFF

SEQ ID NO: 316771 - protein, 13 aa, Homo sapiens
  CDR3 for alpha chain variable domain of TCR clone 158386 (TRAV24, TRAJ13)
CAFDSGGYQKVTF

SEQ ID NO: 316772 - protein, 14 aa, Homo sapiens
  CDR3 for beta chain variable domain of TCR clone 158386 (TRBV7-9, TRBJ2-1)
CASSPRDSIYEQFF

SEQ ID NO: 316773 - protein, 15 aa, Homo sapiens
  CDR3 for alpha chain variable domain of TCR clone 158387 (TRAV8-3, TRAJ11)
CAVGLLNSGYSTLTF

SEQ ID NO: 316774 - protein, 16 aa, Homo sapiens
  CDR3 for beta chain variable domain of TCR clone 158387 (TRBV7-9, TRBJ1-2)
CSSSLGFSSGEDGYTF

SEQ ID NO: 316775 - protein, 16 aa, Homo sapiens
  CDR3 for alpha chain variable domain of TCR clone 158388 (TRAV21, TRAJ33)
YAVSPASMDSNYQLIW

SEQ ID NO: 316776 - protein, 17 aa, Homo sapiens
  CDR3 for beta chain variable domain of TCR clone 158388 (TRBV2, TRBJ1-4)
CASSKRELTQGEEKLFF

SEQ ID NO: 316777 - protein, 15 aa, Homo sapiens
  CDR3 for alpha chain variable domain of TCR clone 158389 (TRAV2, TRAJ22)
CAVPSRGGSARQLTF

SEQ ID NO: 316778 - protein, 14 aa, Homo sapiens
  CDR3 for beta chain variable domain of TCR clone 158389 (TRBV7-7, TRBJ2-3)
CASSLGTVTDTQYF

SEQ ID NO: 316779 - protein, 13 aa, Homo sapiens
  CDR3 for alpha chain variable domain of TCR clone 158390 (TRAV21, TRAJ57)
CTVTQGGSEKLVF

SEQ ID NO: 316780 - protein, 19 aa, Homo sapiens
  CDR3 for beta chain variable domain of TCR clone 158390 (TRBV29-1, TRBJ2-7)
SAALKMLRTVRPKSSTSGR

SEQ ID NO: 316781 - protein, 15 aa, Homo sapiens
  CDR3 for alpha chain variable domain of TCR clone 158391 (TRAV14/DV4, TRAJ22)
CNERGPPGSARQLTF

SEQ ID NO: 316782 - protein, 16 aa, Homo sapiens
  CDR3 for beta chain variable domain of TCR clone 158391 (TRBV19, TRBJ1-6)
CASSVAPVAGNSPLNF

SEQ ID NO: 316783 - protein, 14 aa, Homo sapiens
  CDR3 for alpha chain variable domain of TCR clone 158392 (TRAV12-2, TRAJ17)
CAVNIKAAGNKLTF

SEQ ID NO: 316784 - protein, 16 aa, Homo sapiens
  CDR3 for beta chain variable domain of TCR clone 158392 (TRBV20-1, TRBJ2-6)
CSARSQGYEGANVLTF

SEQ ID NO: 316785 - protein, 14 aa, Homo sapiens
  CDR3 for alpha chain variable domain of TCR clone 158393 (TRAV3, TRAJ21)
CAVRDKYNFNKFYF

SEQ ID NO: 316786 - protein, 12 aa, Homo sapiens
  CDR3 for beta chain variable domain of TCR clone 158393 (TRBV5-1, TRBJ1-2)
CASSQDTYGYTF

SEQ ID NO: 316787 - protein, 13 aa, Homo sapiens
  CDR3 for alpha chain variable domain of TCR clone 158394 (TRAV35, TRAJ37)
CAGSSGNTGKLIF

SEQ ID NO: 316788 - protein, 16 aa, Homo sapiens
  CDR3 for beta chain variable domain of TCR clone 158394 (TRBV10-3, TRBJ2-1)
CAISLTGGSSYNEQFF

SEQ ID NO: 316789 - protein, 14 aa, Homo sapiens
  CDR3 for alpha chain variable domain of TCR clone 158395 (TRAV12-3, TRAJ10)
SHLPLTGGGNKLTF

SEQ ID NO: 316790 - protein, 13 aa, Homo sapiens
  CDR3 for beta chain variable domain of TCR clone 158395 (TRBV5-1, TRBJ2-1)
CASSLGSYNEQFF

SEQ ID NO: 316791 - protein, 14 aa, Homo sapiens
  CDR3 for alpha chain variable domain of TCR clone 158396 (TRAV12-2, TRAJ17)
CAVLFKAAGNKLTF

SEQ ID NO: 316792 - protein, 14 aa, Homo sapiens
  CDR3 for beta chain variable domain of TCR clone 158396 (TRBV7-3, TRBJ1-1)
CASSLGTGYTEAFF

SEQ ID NO: 316793 - protein, 13 aa, Homo sapiens
  CDR3 for alpha chain variable domain of TCR clone 158397 (TRAV2, TRAJ40)
CAVATSGTYKYIF

SEQ ID NO: 316794 - protein, 15 aa, Homo sapiens
  CDR3 for beta chain variable domain of TCR clone 158397 (TRBV18, TRBJ1-1)
CASSPRQGENTEAFF

SEQ ID NO: 316795 - protein, 14 aa, Homo sapiens
  CDR3 for alpha chain variable domain of TCR clone 158398 (TRAV1-2, TRAJ8)
FAVREDTGFQKLVF

SEQ ID NO: 316796 - protein, 15 aa, Homo sapiens
  CDR3 for beta chain variable domain of TCR clone 158398 (TRBV11-3, TRBJ2-3)
CASLKDGREGDTQYF

SEQ ID NO: 316797 - protein, 13 aa, Homo sapiens
  CDR3 for alpha chain variable domain of TCR clone 158399 (TRAV1-1, TRAJ9)
CAAKNTGGFKTIF

SEQ ID NO: 316798 - protein, 16 aa, Homo sapiens
  CDR3 for beta chain variable domain of TCR clone 158399 (TRBV6-1, TRBJ2-5)
CASSETLDRGAETQYF

SEQ ID NO: 316799 - protein, 16 aa, Homo sapiens
  CDR3 for alpha chain variable domain of TCR clone 158400 (TRAV3, TRAJ10)
CAVRDMRAGGGNKLTF

SEQ ID NO: 316800 - protein, 17 aa, Homo sapiens
  CDR3 for beta chain variable domain of TCR clone 158400 (TRBV13, TRBJ2-3)
CASGLSRVAGGRNTQYF

SEQ ID NO: 316801 - protein, 13 aa, Homo sapiens
  CDR3 for alpha chain variable domain of TCR clone 158401 (TRAV1-2, TRAJ9)
CAALNTGGFKTIF

SEQ ID NO: 316802 - protein, 14 aa, Homo sapiens
  CDR3 for beta chain variable domain of TCR clone 158401 (TRBV7-6, TRBJ2-3)
CASSVAGGTDTQYF

SEQ ID NO: 316803 - protein, 18 aa, Homo sapiens
  CDR3 for alpha chain variable domain of TCR clone 158402 (TRAV21, TRAJ52)
CAVRPSPAGGTSYGKLTF

SEQ ID NO: 316804 - protein, 17 aa, Homo sapiens
  CDR3 for beta chain variable domain of TCR clone 158402 (TRBV13, TRBJ2-3)
CASIRSRVAGGRNTQYF

SEQ ID NO: 316805 - protein, 12 aa, Homo sapiens
  CDR3 for alpha chain variable domain of TCR clone 158403 (TRAV12-3, TRAJ17)
CAMTLTGNKLTF

SEQ ID NO: 316806 - protein, 15 aa, Homo sapiens
  CDR3 for beta chain variable domain of TCR clone 158403 (TRBV20-1, TRBJ2-7)
CSARDRVSGMGELYF

SEQ ID NO: 316807 - protein, 12 aa, Homo sapiens
  CDR3 for alpha chain variable domain of TCR clone 158404 (TRAV12-3, TRAJ29)
CAAAKGNTPLVF

SEQ ID NO: 316808 - protein, 17 aa, Homo sapiens
  CDR3 for beta chain variable domain of TCR clone 158404 (TRBV3-1, TRBJ2-5)
CASSNWGGTSGRETQYF

SEQ ID NO: 316809 - protein, 14 aa, Homo sapiens
  CDR3 for alpha chain variable domain of TCR clone 158405 (TRAV16, TRAJ15)
CSLRPNQAGAALIF

SEQ ID NO: 316810 - protein, 16 aa, Homo sapiens
  CDR3 for beta chain variable domain of TCR clone 158405 (TRBV6-5, TRBJ2-2)
CASSYGRVPDTGELFF

SEQ ID NO: 316811 - protein, 14 aa, Homo sapiens
  CDR3 for alpha chain variable domain of TCR clone 158406 (TRAV25, TRAJ27)
CAGPGNTNAGKSTF

SEQ ID NO: 316812 - protein, 16 aa, Homo sapiens
  CDR3 for beta chain variable domain of TCR clone 158406 (TRBV4-1, TRBJ2-6)
CASSQDGGPGANVRLS

SEQ ID NO: 316813 - protein, 15 aa, Homo sapiens
  CDR3 for alpha chain variable domain of TCR clone 158407 (TRAV29/DV5, TRAJ24)
CAASGAIDSWGKFQF

SEQ ID NO: 316814 - protein, 12 aa, Homo sapiens
  CDR3 for beta chain variable domain of TCR clone 158407 (TRBV11-2, TRBJ2-2)
CASSLPTGELFF

SEQ ID NO: 316815 - protein, 14 aa, Homo sapiens
  CDR3 for alpha chain variable domain of TCR clone 158408 (TRAV12-3, TRAJ57)
CAMSAWGGSEKLVF

SEQ ID NO: 316816 - protein, 16 aa, Homo sapiens
  CDR3 for beta chain variable domain of TCR clone 158408 (TRBV3-1, TRBJ2-7)
CASSQGATGVAYEQYF

SEQ ID NO: 316817 - protein, 16 aa, Homo sapiens
  CDR3 for alpha chain variable domain of TCR clone 158409 (TRAV16, TRAJ4)
CITVLPFSGGYNKLIF

SEQ ID NO: 316818 - protein, 12 aa, Homo sapiens
  CDR3 for beta chain variable domain of TCR clone 158409 (TRBV7-8, TRBJ2-7)
CASSLGDRERYF

SEQ ID NO: 316819 - protein, 15 aa, Homo sapiens
  CDR3 for alpha chain variable domain of TCR clone 158410 (TRAV3, TRAJ3)
CAVRDMSSSASKIIF

SEQ ID NO: 316820 - protein, 14 aa, Homo sapiens
  CDR3 for beta chain variable domain of TCR clone 158410 (TRBV19, TRBJ2-1)
CASPTFVLSGEQFV

SEQ ID NO: 316821 - protein, 14 aa, Homo sapiens
  CDR3 for alpha chain variable domain of TCR clone 158411 (TRAV12-1, TRAJ3)
CVVNPGSRASKIIF

SEQ ID NO: 316822 - protein, 15 aa, Homo sapiens
  CDR3 for beta chain variable domain of TCR clone 158411 (TRBV5-7, TRBJ1-2)
CAGSSPGQGNYGYTF

SEQ ID NO: 316823 - protein, 13 aa, Homo sapiens
  CDR3 for alpha chain variable domain of TCR clone 158412 (TRAV20, TRAJ37)
CAGCPSNTGKLIF

SEQ ID NO: 316824 - protein, 14 aa, Homo sapiens
  CDR3 for beta chain variable domain of TCR clone 158412 (TRBV20-1, TRBJ2-5)
CSARGGRAGETQYF

SEQ ID NO: 316825 - protein, 14 aa, Homo sapiens
  CDR3 for alpha chain variable domain of TCR clone 158413 (TRAV27, TRAJ36)
CAGPAKRGANNLFF

SEQ ID NO: 316826 - protein, 15 aa, Homo sapiens
  CDR3 for beta chain variable domain of TCR clone 158413 (TRBV18, TRBJ2-7)
CASSPASTPNYEQYF

SEQ ID NO: 316827 - protein, 16 aa, Homo sapiens
  CDR3 for alpha chain variable domain of TCR clone 158414 (TRAV30, TRAJ24)
CGTEIVDADSWGKFQF

SEQ ID NO: 316828 - protein, 12 aa, Homo sapiens
  CDR3 for beta chain variable domain of TCR clone 158414 (TRBV7-9, TRBJ2-1)
CASSFGSYEQFF

SEQ ID NO: 316829 - protein, 18 aa, Homo sapiens
  CDR3 for alpha chain variable domain of TCR clone 158415 (TRAV13-1, TRAJ52)
CAAKNPNAGGTRYGKLTF

SEQ ID NO: 316830 - protein, 14 aa, Homo sapiens
  CDR3 for beta chain variable domain of TCR clone 158415 (TRBV6-5, TRBJ1-1)
CASSFGQGLTEAFF

SEQ ID NO: 316831 - protein, 16 aa, Homo sapiens
  CDR3 for alpha chain variable domain of TCR clone 158416 (TRAV8-3, TRAJ10)
CAVAPILTGGGNKLNF

SEQ ID NO: 316832 - protein, 14 aa, Homo sapiens
  CDR3 for beta chain variable domain of TCR clone 158416 (TRBV7-2, TRBJ1-5)
CASSRDGSNQPQHF

SEQ ID NO: 316833 - protein, 14 aa, Homo sapiens
  CDR3 for alpha chain variable domain of TCR clone 158417 (TRAV23/DV6, TRAJ4)
CAANLSGGYNKLIF

SEQ ID NO: 316834 - protein, 14 aa, Homo sapiens
  CDR3 for beta chain variable domain of TCR clone 158417 (TRBV19, TRBJ2-1)
CASPTFVLSGEQFF

SEQ ID NO: 316835 - protein, 13 aa, Homo sapiens
  CDR3 for alpha chain variable domain of TCR clone 158418 (TRAV1-1, TRAJ9)
CAAKNTGCFKTIF

SEQ ID NO: 316836 - protein, 14 aa, Homo sapiens
  CDR3 for beta chain variable domain of TCR clone 158418 (TRBV20-1, TRBJ2-1)
CSAQIGVSANEQFF

SEQ ID NO: 316837 - protein, 16 aa, Homo sapiens
  CDR3 for alpha chain variable domain of TCR clone 158419 (TRAV8-3, TRAJ10)
CAVGPILTGGGNKLTF

SEQ ID NO: 316838 - protein, 13 aa, Homo sapiens
  CDR3 for beta chain variable domain of TCR clone 158419 (TRBV27, TRBJ2-7)
CASSFSQGYEQYF

SEQ ID NO: 316839 - protein, 13 aa, Homo sapiens
  CDR3 for alpha chain variable domain of TCR clone 158420 (TRAV8-6, TRAJ9)
CVVWDTGGFKTIF

SEQ ID NO: 316840 - protein, 14 aa, Homo sapiens
  CDR3 for beta chain variable domain of TCR clone 158420 (TRBV2, TRBJ2-1)
CASSEALIYSEQFF

SEQ ID NO: 316841 - protein, 16 aa, Homo sapiens
  CDR3 for alpha chain variable domain of TCR clone 158421 (TRAV30, TRAJ24)
CGTEIVDADSWGKFQF

SEQ ID NO: 316842 - protein, 12 aa, Homo sapiens
  CDR3 for beta chain variable domain of TCR clone 158421 (TRBV18, TRBJ2-5)
CASSPSKETQYF

SEQ ID NO: 316843 - protein, 16 aa, Homo sapiens
  CDR3 for alpha chain variable domain of TCR clone 158422 (TRAV30, TRAJ24)
CGTEIVDADRWGKLQF

SEQ ID NO: 316844 - protein, 14 aa, Homo sapiens
  CDR3 for beta chain variable domain of TCR clone 158422 (TRBV12-5, TRBJ2-5)
CASGSRTHQETQYF

SEQ ID NO: 316845 - protein, 15 aa, Homo sapiens
  CDR3 for alpha chain variable domain of TCR clone 158423 (TRAV16, TRAJ17)
CALSGNNAAGNKLTF

SEQ ID NO: 316846 - protein, 16 aa, Homo sapiens
  CDR3 for beta chain variable domain of TCR clone 158423 (TRBV7-6, TRBJ1-6)
CASSSLPAGEYSPLHF

SEQ ID NO: 316847 - protein, 12 aa, Homo sapiens
  CDR3 for alpha chain variable domain of TCR clone 158424 (TRAV12-1, TRAJ40)
CVVYSGTYKYIF

SEQ ID NO: 316848 - protein, 14 aa, Homo sapiens
  CDR3 for beta chain variable domain of TCR clone 158424 (TRBV5-1, TRBJ2-3)
CASSPGLAADTQYF

SEQ ID NO: 316849 - protein, 14 aa, Homo sapiens
  CDR3 for alpha chain variable domain of TCR clone 158425 (TRAV1-2, TRAJ8)
CAVREDTGFQKLVF

SEQ ID NO: 316850 - protein, 12 aa, Homo sapiens
  CDR3 for beta chain variable domain of TCR clone 158425 (TRBV2, TRBJ2-1)
CAYGQPGNEQFF

SEQ ID NO: 316851 - protein, 10 aa, Homo sapiens
  CDR3 for alpha chain variable domain of TCR clone 158426 (TRAV16, TRAJ22)
SAMYLRQLTF

SEQ ID NO: 316852 - protein, 12 aa, Homo sapiens
  CDR3 for beta chain variable domain of TCR clone 158426 (TRBV7-9, TRBJ1-1)
CASSLVRGEAFF

SEQ ID NO: 316853 - protein, 14 aa, Homo sapiens
  CDR3 for alpha chain variable domain of TCR clone 158427 (TRAV1-2, TRAJ16)
CAVNRFSDVQKLLF

SEQ ID NO: 316854 - protein, 15 aa, Homo sapiens
  CDR3 for beta chain variable domain of TCR clone 158427 (TRBV9, TRBJ1-6)
CGSSGAGTGDSPLHF

SEQ ID NO: 316855 - protein, 13 aa, Homo sapiens
  CDR3 for alpha chain variable domain of TCR clone 158428 (TRAV12-2, TRAJ12)
CAVNWDSSYKLIF

SEQ ID NO: 316856 - protein, 13 aa, Homo sapiens
  CDR3 for beta chain variable domain of TCR clone 158428 (TRBV19, TRBJ1-2)
CASSVPGQDDYTF

SEQ ID NO: 316857 - protein, 16 aa, Homo sapiens
  CDR3 for alpha chain variable domain of TCR clone 158429 (TRAV30, TRAJ24)
CGTEIVDADSWGKFQF

SEQ ID NO: 316858 - protein, 16 aa, Homo sapiens
  CDR3 for beta chain variable domain of TCR clone 158429 (TRBV28, TRBJ2-7)
CASSLFCETGGPEQYF

SEQ ID NO: 316859 - protein, 15 aa, Homo sapiens
  CDR3 for alpha chain variable domain of TCR clone 158430 (TRAV21, TRAJ57)
CAVIITQGGSEKLGF

SEQ ID NO: 316860 - protein, 14 aa, Homo sapiens
  CDR3 for beta chain variable domain of TCR clone 158430 (TRBV5-1, TRBJ2-2)
CASSLIWIPGELFF

SEQ ID NO: 316861 - protein, 14 aa, Homo sapiens
  CDR3 for alpha chain variable domain of TCR clone 158431 (TRAV8-4, TRAJ8)
CAVIGNTGFQKLVF

SEQ ID NO: 316862 - protein, 16 aa, Homo sapiens
  CDR3 for beta chain variable domain of TCR clone 158431 (TRBV9, TRBJ2-1)
CASSGEGDGSYNEQFF

SEQ ID NO: 316863 - protein, 15 aa, Homo sapiens
  CDR3 for alpha chain variable domain of TCR clone 158432 (TRAV12-3, TRAJ6)
CAMSATTGGSYIPTF

SEQ ID NO: 316864 - protein, 13 aa, Homo sapiens
  CDR3 for beta chain variable domain of TCR clone 158432 (TRBV12-4, TRBJ1-1)
CQQFPSFGTEAFF

SEQ ID NO: 316865 - protein, 15 aa, Homo sapiens
  CDR3 for alpha chain variable domain of TCR clone 158433 (TRAV8-6, TRAJ11)
CAVNFMNSGYSTLTF

SEQ ID NO: 316866 - protein, 17 aa, Homo sapiens
  CDR3 for beta chain variable domain of TCR clone 158433 (TRBV18, TRBJ2-1)
CASSSGTSSRHRNEQFF

SEQ ID NO: 316867 - protein, 17 aa, Homo sapiens
  CDR3 for alpha chain variable domain of TCR clone 158434 (TRAV3, TRAJ6)
CAVRDGPRAGGSYIPTF

SEQ ID NO: 316868 - protein, 14 aa, Homo sapiens
  CDR3 for beta chain variable domain of TCR clone 158434 (TRBV7-2, TRBJ2-7)
FASSPKPSFYEQYF

SEQ ID NO: 316869 - protein, 18 aa, Homo sapiens
  CDR3 for alpha chain variable domain of TCR clone 158435 (TRAV17, TRAJ45)
CATSLDLYSGGGADGLTF

SEQ ID NO: 316870 - protein, 15 aa, Homo sapiens
  CDR3 for beta chain variable domain of TCR clone 158435 (TRBV11-2, TRBJ2-1)
CASSLGTSGLNEQFF

SEQ ID NO: 316871 - protein, 11 aa, Homo sapiens
  CDR3 for alpha chain variable domain of TCR clone 158436 (TRAV21, TRAJ39)
LLVNASNMLTF

SEQ ID NO: 316872 - protein, 14 aa, Homo sapiens
  CDR3 for beta chain variable domain of TCR clone 158436 (TRBV19, TRBJ2-1)
CASPTFVLSGEQFF

SEQ ID NO: 316873 - protein, 15 aa, Homo sapiens
  CDR3 for alpha chain variable domain of TCR clone 158437 (TRAV8-6, TRAJ37)
CAVIFSSGNTGKLIF

SEQ ID NO: 316874 - protein, 15 aa, Homo sapiens
  CDR3 for beta chain variable domain of TCR clone 158437 (TRBV25-1, TRBJ2-4)
CASSETESAKNMQCF

SEQ ID NO: 316875 - protein, 17 aa, Homo sapiens
  CDR3 for alpha chain variable domain of TCR clone 158438 (TRAV3, TRAJ6)
FAVRDGPRAGGSYIPKF

SEQ ID NO: 316876 - protein, 14 aa, Homo sapiens
  CDR3 for beta chain variable domain of TCR clone 158438 (TRBV7-2, TRBJ2-7)
CASSPKTSFYEQYF

SEQ ID NO: 316877 - protein, 14 aa, Homo sapiens
  CDR3 for alpha chain variable domain of TCR clone 158439 (TRAV16, TRAJ17)
CAPRIKAAGNKLTV

SEQ ID NO: 316878 - protein, 17 aa, Homo sapiens
  CDR3 for beta chain variable domain of TCR clone 158439 (TRBV11-2, TRBJ2-1)
CASSLYPPGVEYNEQFF

SEQ ID NO: 316879 - protein, 14 aa, Homo sapiens
  CDR3 for alpha chain variable domain of TCR clone 158440 (TRAV38-1, TRAJ29)
CAFMKLGRKHTSCL

SEQ ID NO: 316880 - protein, 14 aa, Homo sapiens
  CDR3 for beta chain variable domain of TCR clone 158440 (TRBV5-1, TRBJ2-7)
CASSRGESLYEQYF

SEQ ID NO: 316881 - protein, 12 aa, Homo sapiens
  CDR3 for alpha chain variable domain of TCR clone 158441 (TRAV1-2, TRAJ9)
FAGYTGGFKTIL

SEQ ID NO: 316882 - protein, 15 aa, Homo sapiens
  CDR3 for beta chain variable domain of TCR clone 158441 (TRBV11-2, TRBJ2-1)
CASSPAGQSLNEQFF

SEQ ID NO: 316883 - protein, 14 aa, Homo sapiens
  CDR3 for alpha chain variable domain of TCR clone 158442 (TRAV1-2, TRAJ8)
VAVREDTGFQKLVF

SEQ ID NO: 316884 - protein, 15 aa, Homo sapiens
  CDR3 for beta chain variable domain of TCR clone 158442 (TRBV6-3, TRBJ2-7)
CASSSPGTVFYEQYF

SEQ ID NO: 316885 - protein, 13 aa, Homo sapiens
  CDR3 for alpha chain variable domain of TCR clone 158443 (TRAV4, TRAJ41)
CLVGENSGYALNF

SEQ ID NO: 316886 - protein, 15 aa, Homo sapiens
  CDR3 for beta chain variable domain of TCR clone 158443 (TRBV7-2, TRBJ2-1)
CASSSGLAGGNEQFF

SEQ ID NO: 316887 - protein, 12 aa, Homo sapiens
  CDR3 for alpha chain variable domain of TCR clone 158444 (TRAV13-2, TRAJ23)
CAERHRGGKLIF

SEQ ID NO: 316888 - protein, 15 aa, Homo sapiens
  CDR3 for beta chain variable domain of TCR clone 158444 (TRBV7-9, TRBJ1-6)
CASSSPGRGNSPLDF

SEQ ID NO: 316889 - protein, 16 aa, Homo sapiens
  CDR3 for alpha chain variable domain of TCR clone 158445 (TRAV14/DV4, TRAJ21)
CAMREGPENNFNKFYF

SEQ ID NO: 316890 - protein, 12 aa, Homo sapiens
  CDR3 for beta chain variable domain of TCR clone 158445 (TRBV29-1, TRBJ2-2)
CNVDKYTGELFF

SEQ ID NO: 316891 - protein, 15 aa, Homo sapiens
  CDR3 for alpha chain variable domain of TCR clone 158446 (TRAV12-1, TRAJ44)
CVADLPTGTASKLTF

SEQ ID NO: 316892 - protein, 13 aa, Homo sapiens
  CDR3 for beta chain variable domain of TCR clone 158446 (TRBV6-5, TRBJ2-5)
CASSPQGGETQCV

SEQ ID NO: 316893 - protein, 16 aa, Homo sapiens
  CDR3 for alpha chain variable domain of TCR clone 158447 (TRAV14/DV4, TRAJ15)
CAMREGPAQAGTALIF

SEQ ID NO: 316894 - protein, 12 aa, Homo sapiens
  CDR3 for beta chain variable domain of TCR clone 158447 (TRBV28, TRBJ2-6)
CAIQAEANVLTF

SEQ ID NO: 316895 - protein, 14 aa, Homo sapiens
  CDR3 for alpha chain variable domain of TCR clone 158448 (TRAV1-2, TRAJ8)
CAVREDTGFQKLVF

SEQ ID NO: 316896 - protein, 13 aa, Homo sapiens
  CDR3 for beta chain variable domain of TCR clone 158448 (TRBV2, TRBJ2-3)
CASILAGGQGQYF

SEQ ID NO: 316897 - protein, 14 aa, Homo sapiens
  CDR3 for alpha chain variable domain of TCR clone 158449 (TRAV14/DV4, TRAJ57)
CAMREEGGSEKLVF

SEQ ID NO: 316898 - protein, 13 aa, Homo sapiens
  CDR3 for beta chain variable domain of TCR clone 158449 (TRBV4-1, TRBJ1-1)
CASSLRGPTEAFF

SEQ ID NO: 316899 - protein, 13 aa, Homo sapiens
  CDR3 for alpha chain variable domain of TCR clone 158450 (TRAV27, TRAJ53)
CAGEAQSNYKLTF

SEQ ID NO: 316900 - protein, 14 aa, Homo sapiens
  CDR3 for beta chain variable domain of TCR clone 158450 (TRBV6-1, TRBJ1-1)
CASSERTGSTEAFF

SEQ ID NO: 316901 - protein, 16 aa, Homo sapiens
  CDR3 for alpha chain variable domain of TCR clone 158451 (TRAV21, TRAJ37)
CAVRTADSSNTGKLIF

SEQ ID NO: 316902 - protein, 13 aa, Homo sapiens
  CDR3 for beta chain variable domain of TCR clone 158451 (TRBV7-9, TRBJ2-5)
CASLPSGRETQYF

SEQ ID NO: 316903 - protein, 11 aa, Homo sapiens
  CDR3 for alpha chain variable domain of TCR clone 158452 (TRAV12-3, TRAJ27)
CAMANAGKSTF

SEQ ID NO: 316904 - protein, 13 aa, Homo sapiens
  CDR3 for beta chain variable domain of TCR clone 158452 (TRBV12-5, TRBJ2-5)
SSGSRTHQETQYF

SEQ ID NO: 316905 - protein, 15 aa, Homo sapiens
  CDR3 for alpha chain variable domain of TCR clone 158453 (TRAV26-2, TRAJ39)
CSLRGYNNSGNMLTF

SEQ ID NO: 316906 - protein, 15 aa, Homo sapiens
  CDR3 for beta chain variable domain of TCR clone 158453 (TRBV5-4, TRBJ1-1)
CASSSLGWANTEAFF

SEQ ID NO: 316907 - protein, 12 aa, Homo sapiens
  CDR3 for alpha chain variable domain of TCR clone 158454 (TRAV27, TRAJ41)
CAGRNSGYVLNF

SEQ ID NO: 316908 - protein, 15 aa, Homo sapiens
  CDR3 for beta chain variable domain of TCR clone 158454 (TRBV20-1, TRBJ1-5)
CSATSDRGLGQPQHF

SEQ ID NO: 316909 - protein, 15 aa, Homo sapiens
  CDR3 for alpha chain variable domain of TCR clone 158455 (TRAV3, TRAJ47)
CAVRDIGEYGNKLVF

SEQ ID NO: 316910 - protein, 16 aa, Homo sapiens
  CDR3 for beta chain variable domain of TCR clone 158455 (TRBV7-3, TRBJ2-2)
CASSLKRGTLSGELFF

SEQ ID NO: 316911 - protein, 18 aa, Homo sapiens
  CDR3 for alpha chain variable domain of TCR clone 158456 (TRAV21, TRAJ52)
CAVRPSPAGGTSYGKLTF

SEQ ID NO: 316912 - protein, 15 aa, Homo sapiens
  CDR3 for beta chain variable domain of TCR clone 158456 (TRBV28, TRBJ2-7)
CASSLEAYPIYEQYF

SEQ ID NO: 316913 - protein, 13 aa, Homo sapiens
  CDR3 for alpha chain variable domain of TCR clone 158457 (TRAV26-2, TRAJ54)
CIPRVGGAQKLVF

SEQ ID NO: 316914 - protein, 16 aa, Homo sapiens
  CDR3 for beta chain variable domain of TCR clone 158457 (TRBV4-1, TRBJ1-1)
CASSSMSERPYTEAFF

SEQ ID NO: 316915 - protein, 23 aa, Homo sapiens
  CDR3 for alpha chain variable domain of TCR clone 158458 (TRAV26-1, TRAJ38)
CIADNAGNNPIQNPDPAVYQLRD

SEQ ID NO: 316916 - protein, 13 aa, Homo sapiens
  CDR3 for beta chain variable domain of TCR clone 158458 (TRBV20-1, TRBJ1-1)
CSARGGGSTEAFF

SEQ ID NO: 316917 - protein, 15 aa, Homo sapiens
  CDR3 for alpha chain variable domain of TCR clone 158459 (TRAV20, TRAJ4)
CAVEGSSGGYNKLIF

SEQ ID NO: 316918 - protein, 14 aa, Homo sapiens
  CDR3 for beta chain variable domain of TCR clone 158459 (TRBV7-8, TRBJ2-7)
CASTIGGALGEQYF

SEQ ID NO: 316919 - protein, 15 aa, Homo sapiens
  CDR3 for alpha chain variable domain of TCR clone 158460 (TRAV23/DV6, TRAJ57)
CAASSTLPQAGSYNL

SEQ ID NO: 316920 - protein, 14 aa, Homo sapiens
  CDR3 for beta chain variable domain of TCR clone 158460 (TRBV25-1, TRBJ1-1)
CASTHLGGNTEAFF

SEQ ID NO: 316921 - protein, 15 aa, Homo sapiens
  CDR3 for alpha chain variable domain of TCR clone 158461 (TRAV12-3, TRAJ42)
CAMSGHGGSQGNLLL

SEQ ID NO: 316922 - protein, 13 aa, Homo sapiens
  CDR3 for beta chain variable domain of TCR clone 158461 (TRBV19, TRBJ2-5)
CASSGRAGETQYF

SEQ ID NO: 316923 - protein, 13 aa, Homo sapiens
  CDR3 for alpha chain variable domain of TCR clone 158462 (TRAV12-1, TRAJ7)
CVVNMRGNNRLAF

SEQ ID NO: 316924 - protein, 14 aa, Homo sapiens
  CDR3 for beta chain variable domain of TCR clone 158462 (TRBV28, TRBJ1-2)
CASRIQGANYGYTF

SEQ ID NO: 316925 - protein, 13 aa, Homo sapiens
  CDR3 for alpha chain variable domain of TCR clone 158463 (TRAV19, TRAJ57)
CALLQGGSEKLVF

SEQ ID NO: 316926 - protein, 13 aa, Homo sapiens
  CDR3 for beta chain variable domain of TCR clone 158463 (TRBV7-3, TRBJ2-1)
CASSPVAYNEQFF

SEQ ID NO: 316927 - protein, 22 aa, Homo sapiens
  CDR3 for alpha chain variable domain of TCR clone 158464 (TRAV4, )
CLGGRVKPNIQNPDPAVYQLRD

SEQ ID NO: 316928 - protein, 13 aa, Homo sapiens
  CDR3 for beta chain variable domain of TCR clone 158464 (TRBV7-9, TRBJ1-2)
CASSLKKNYGYTF

SEQ ID NO: 316929 - protein, 14 aa, Homo sapiens
  CDR3 for alpha chain variable domain of TCR clone 158465 (TRAV12-3, TRAJ10)
SHLPLTGGGNKLTF

SEQ ID NO: 316930 - protein, 16 aa, Homo sapiens
  CDR3 for beta chain variable domain of TCR clone 158465 (TRBV7-9, TRBJ1-3)
CASSLGAGSSGNTIYF

SEQ ID NO: 316931 - protein, 10 aa, Homo sapiens
  CDR3 for alpha chain variable domain of TCR clone 158466 (TRAV26-1, TRAJ22)
RSGSARQLTF

SEQ ID NO: 316932 - protein, 11 aa, Homo sapiens
  CDR3 for beta chain variable domain of TCR clone 158466 (TRBV11-2, TRBJ2-2)
CASSLPGELFF

SEQ ID NO: 316933 - protein, 15 aa, Homo sapiens
  CDR3 for alpha chain variable domain of TCR clone 158467 (TRAV26-1, TRAJ22)
CIVRVSFWFCKATDL

SEQ ID NO: 316934 - protein, 13 aa, Homo sapiens
  CDR3 for beta chain variable domain of TCR clone 158467 (TRBV7-8, TRBJ2-7)
CASSLTGGREQYF

SEQ ID NO: 316935 - protein, 13 aa, Homo sapiens
  CDR3 for alpha chain variable domain of TCR clone 158468 (TRAV13-1, TRAJ21)
CAASIYNFNKFYF

SEQ ID NO: 316936 - protein, 12 aa, Homo sapiens
  CDR3 for beta chain variable domain of TCR clone 158468 (TRBV11-3, TRBJ2-2)
CASSLGGGELFF

SEQ ID NO: 316937 - protein, 11 aa, Homo sapiens
  CDR3 for alpha chain variable domain of TCR clone 158469 (TRAV2, TRAJ23)
CAVETRGKLIF

SEQ ID NO: 316938 - protein, 16 aa, Homo sapiens
  CDR3 for beta chain variable domain of TCR clone 158469 (TRBV2, TRBJ2-3)
CASSEGRTQIRSILAQ

SEQ ID NO: 316939 - protein, 13 aa, Homo sapiens
  CDR3 for alpha chain variable domain of TCR clone 158470 (TRAV8-3, TRAJ37)
CAVPSSNTGKPIF

SEQ ID NO: 316940 - protein, 12 aa, Homo sapiens
  CDR3 for beta chain variable domain of TCR clone 158470 (TRBV11-2, TRBJ2-1)
CASSPGNNEQFF

SEQ ID NO: 316941 - protein, 14 aa, Homo sapiens
  CDR3 for alpha chain variable domain of TCR clone 158471 (TRAV23/DV6, TRAJ9)
CVSKYWRLQNYLLS

SEQ ID NO: 316942 - protein, 14 aa, Homo sapiens
  CDR3 for beta chain variable domain of TCR clone 158471 (TRBV6-1, TRBJ2-7)
CASTRTGDYYEQYF

SEQ ID NO: 316943 - protein, 17 aa, Homo sapiens
  CDR3 for alpha chain variable domain of TCR clone 158472 (TRAV3, TRAJ42)
CAVRDRDYGGSQGNLIF

SEQ ID NO: 316944 - protein, 11 aa, Homo sapiens
  CDR3 for beta chain variable domain of TCR clone 158472 (TRBV7-9, TRBJ2-3)
CASSGPDTQYF

SEQ ID NO: 316945 - protein, 14 aa, Homo sapiens
  CDR3 for alpha chain variable domain of TCR clone 158473 (TRAV3, TRAJ33)
CAVRVMGSNYQLIW

SEQ ID NO: 316946 - protein, 17 aa, Homo sapiens
  CDR3 for beta chain variable domain of TCR clone 158473 (TRBV19, TRBJ2-1)
CASSIWSAQPTHNEQFF

SEQ ID NO: 316947 - protein, 14 aa, Homo sapiens
  CDR3 for alpha chain variable domain of TCR clone 158474 (TRAV12-2, TRAJ17)
CAVNIKAAGNKLTF

SEQ ID NO: 316948 - protein, 14 aa, Homo sapiens
  CDR3 for beta chain variable domain of TCR clone 158474 (TRBV11-2, TRBJ2-5)
CASSRTGGIETQYF

SEQ ID NO: 316949 - protein, 14 aa, Homo sapiens
  CDR3 for alpha chain variable domain of TCR clone 158475 (TRAV1-2, TRAJ8)
CAVREDTGFQKLVF

SEQ ID NO: 316950 - protein, 18 aa, Homo sapiens
  CDR3 for beta chain variable domain of TCR clone 158475 (TRBV10-3, TRBJ2-7)
CAISESGRPSGARVEQYF

SEQ ID NO: 316951 - protein, 14 aa, Homo sapiens
  CDR3 for alpha chain variable domain of TCR clone 158476 (TRAV12-1, TRAJ9)
CVVNRRTVGFKTIF

SEQ ID NO: 316952 - protein, 16 aa, Homo sapiens
  CDR3 for beta chain variable domain of TCR clone 158476 (TRBV4-1, TRBJ2-3)
CASSQSTSGAEDTQYF

SEQ ID NO: 316953 - protein, 15 aa, Homo sapiens
  CDR3 for alpha chain variable domain of TCR clone 158477 (TRAV12-3, TRAJ6)
CAMSATTEGSYIPTF

SEQ ID NO: 316954 - protein, 19 aa, Homo sapiens
  CDR3 for beta chain variable domain of TCR clone 158477 (TRBV25-1, TRBJ2-2)
CAILVYRVDRGRKTGELFF

SEQ ID NO: 316955 - protein, 15 aa, Homo sapiens
  CDR3 for alpha chain variable domain of TCR clone 158478 (TRAV21, TRAJ53)
CATLNSGGSNYKLTF

SEQ ID NO: 316956 - protein, 15 aa, Homo sapiens
  CDR3 for beta chain variable domain of TCR clone 158478 (TRBV6-3, TRBJ2-7)
CASSSPGTVCYEQYF

SEQ ID NO: 316957 - protein, 13 aa, Homo sapiens
  CDR3 for alpha chain variable domain of TCR clone 158479 (TRAV3, TRAJ27)
CAVRPLGAGKSTF

SEQ ID NO: 316958 - protein, 13 aa, Homo sapiens
  CDR3 for beta chain variable domain of TCR clone 158479 (TRBV7-9, TRBJ2-3)
CASCPGSTDTQYF

SEQ ID NO: 316959 - protein, 11 aa, Homo sapiens
  CDR3 for alpha chain variable domain of TCR clone 158480 (TRAV2, TRAJ13)
CASGGYQKVTF

SEQ ID NO: 316960 - protein, 15 aa, Homo sapiens
  CDR3 for beta chain variable domain of TCR clone 158480 (TRBV10-3, TRBJ2-1)
CAISDVQDRAYEQFF

SEQ ID NO: 316961 - protein, 19 aa, Homo sapiens
  CDR3 for alpha chain variable domain of TCR clone 158481 (TRAV27, TRAJ53)
ASTSVQSRNSGGSNYKLTF

SEQ ID NO: 316962 - protein, 14 aa, Homo sapiens
  CDR3 for beta chain variable domain of TCR clone 158481 (TRBV11-1, TRBJ2-7)
CASTFAVPYYEQYF

SEQ ID NO: 316963 - protein, 13 aa, Homo sapiens
  CDR3 for alpha chain variable domain of TCR clone 158482 (TRAV8-6, TRAJ49)
CAVITNTGNPFYF

SEQ ID NO: 316964 - protein, 13 aa, Homo sapiens
  CDR3 for beta chain variable domain of TCR clone 158482 (TRBV10-2, TRBJ2-7)
CASGASGGYEQYF

SEQ ID NO: 316965 - protein, 11 aa, Homo sapiens
  CDR3 for alpha chain variable domain of TCR clone 158483 (TRAV16, TRAJ31)
CALFNNARLMF

SEQ ID NO: 316966 - protein, 12 aa, Homo sapiens
  CDR3 for beta chain variable domain of TCR clone 158483 (TRBV7-3, TRBJ2-5)
CASSSPGGTQYF

SEQ ID NO: 316967 - protein, 13 aa, Homo sapiens
  CDR3 for alpha chain variable domain of TCR clone 158484 (TRAV27, TRAJ56)
WAGKPGANSKLTF

SEQ ID NO: 316968 - protein, 14 aa, Homo sapiens
  CDR3 for beta chain variable domain of TCR clone 158484 (TRBV7-2, TRBJ2-7)
CASSPKTSFYEQYF

SEQ ID NO: 316969 - protein, 14 aa, Homo sapiens
  CDR3 for alpha chain variable domain of TCR clone 158485 (TRAV8-3, TRAJ9)
CAVVYYTGGFKTIF

SEQ ID NO: 316970 - protein, 14 aa, Homo sapiens
  CDR3 for beta chain variable domain of TCR clone 158485 (TRBV7-3, TRBJ2-2)
CASSSGGYTGELFF

SEQ ID NO: 316971 - protein, 11 aa, Homo sapiens
  CDR3 for alpha chain variable domain of TCR clone 158486 (TRAV17, TRAJ9)
CGFTGGFKTIF

SEQ ID NO: 316972 - protein, 12 aa, Homo sapiens
  CDR3 for beta chain variable domain of TCR clone 158486 (TRBV11-2, TRBJ2-5)
CASSLGQETQYF

SEQ ID NO: 316973 - protein, 14 aa, Homo sapiens
  CDR3 for alpha chain variable domain of TCR clone 158487 (TRAV16, TRAJ33)
CALSAMDSNYQLIW

SEQ ID NO: 316974 - protein, 14 aa, Homo sapiens
  CDR3 for beta chain variable domain of TCR clone 158487 (TRBV18, TRBJ2-5)
CASSPGVSQETQYF

SEQ ID NO: 316975 - protein, 14 aa, Homo sapiens
  CDR3 for alpha chain variable domain of TCR clone 158488 (TRAV16, TRAJ31)
CALSGRNNNARLMF

SEQ ID NO: 316976 - protein, 14 aa, Homo sapiens
  CDR3 for beta chain variable domain of TCR clone 158488 (TRBV7-9, TRBJ2-1)
CASSPQDSLYEQFF

SEQ ID NO: 316977 - protein, 13 aa, Homo sapiens
  CDR3 for alpha chain variable domain of TCR clone 158489 (TRAV30, TRAJ6)
CGFIEGGSHIPTF

SEQ ID NO: 316978 - protein, 13 aa, Homo sapiens
  CDR3 for beta chain variable domain of TCR clone 158489 (TRBV5-4, TRBJ2-5)
CASSPVSQETQYF

SEQ ID NO: 316979 - protein, 11 aa, Homo sapiens
  CDR3 for alpha chain variable domain of TCR clone 158490 (TRAV12-2, TRAJ49)
CAVTGGNPFYF

SEQ ID NO: 316980 - protein, 14 aa, Homo sapiens
  CDR3 for beta chain variable domain of TCR clone 158490 (TRBV20-1, TRBJ1-1)
CSAQTRIGGTEAFF

SEQ ID NO: 316981 - protein, 11 aa, Homo sapiens
  CDR3 for alpha chain variable domain of TCR clone 158491 (TRAV26-2, TRAJ8)
CILTGFQKLVF

SEQ ID NO: 316982 - protein, 19 aa, Homo sapiens
  CDR3 for beta chain variable domain of TCR clone 158491 (TRBV20-1, TRBJ2-1)
CSARGETSGNSPQSDEQFF

SEQ ID NO: 316983 - protein, 17 aa, Homo sapiens
  CDR3 for alpha chain variable domain of TCR clone 158492 (TRAV21, TRAJ52)
CWRPSPAGGTSYGKLTF

SEQ ID NO: 316984 - protein, 17 aa, Homo sapiens
  CDR3 for beta chain variable domain of TCR clone 158492 (TRBV13, TRBJ2-3)
CASSLSRVAGGRNTQYF

SEQ ID NO: 316985 - protein, 13 aa, Homo sapiens
  CDR3 for alpha chain variable domain of TCR clone 158493 (TRAV12-3, TRAJ13)
CAMSSGGSQEVTF

SEQ ID NO: 316986 - protein, 13 aa, Homo sapiens
  CDR3 for beta chain variable domain of TCR clone 158493 (TRBV20-1, TRBJ1-1)
CSAPPGGHTEAFF

SEQ ID NO: 316987 - protein, 15 aa, Homo sapiens
  CDR3 for alpha chain variable domain of TCR clone 158494 (TRAV12-2, TRAJ50)
CAVNGLDTSYDKVIF

SEQ ID NO: 316988 - protein, 16 aa, Homo sapiens
  CDR3 for beta chain variable domain of TCR clone 158494 (TRBV5-4, TRBJ2-3)
CASQQPGAGGADTQYF

SEQ ID NO: 316989 - protein, 13 aa, Homo sapiens
  CDR3 for alpha chain variable domain of TCR clone 158495 (TRAV22, TRAJ29)
CAVGGSGNTPLVF

SEQ ID NO: 316990 - protein, 16 aa, Homo sapiens
  CDR3 for beta chain variable domain of TCR clone 158495 (TRBV12-4, TRBJ2-5)
CASSFFVRGRQETQYF

SEQ ID NO: 316991 - protein, 16 aa, Homo sapiens
  CDR3 for alpha chain variable domain of TCR clone 158496 (TRAV23/DV6, TRAJ9)
CAASIGGNTGCLKTIF

SEQ ID NO: 316992 - protein, 14 aa, Homo sapiens
  CDR3 for beta chain variable domain of TCR clone 158496 (TRBV9, TRBJ2-7)
CASSVGVGSYEQYF

SEQ ID NO: 316993 - protein, 13 aa, Homo sapiens
  CDR3 for alpha chain variable domain of TCR clone 158497 (TRAV23/DV6, TRAJ45)
CAEDRRRCVRTHL

SEQ ID NO: 316994 - protein, 15 aa, Homo sapiens
  CDR3 for beta chain variable domain of TCR clone 158497 (TRBV27, TRBJ2-1)
CASSNGGGSSNEQFF

SEQ ID NO: 316995 - protein, 14 aa, Homo sapiens
  CDR3 for alpha chain variable domain of TCR clone 158498 (TRAV8-1, TRAJ5)
CAVSMDTGRRALTF

SEQ ID NO: 316996 - protein, 15 aa, Homo sapiens
  CDR3 for beta chain variable domain of TCR clone 158498 (TRBV19, TRBJ2-4)
CASRGPRGGENSQYF

SEQ ID NO: 316997 - protein, 13 aa, Homo sapiens
  CDR3 for alpha chain variable domain of TCR clone 158499 (TRAV3, TRAJ29)
CAVRDWGNTPIVF

SEQ ID NO: 316998 - protein, 15 aa, Homo sapiens
  CDR3 for beta chain variable domain of TCR clone 158499 (TRBV12-4, TRBJ2-5)
CASIGRTGEGETQYF

SEQ ID NO: 316999 - protein, 12 aa, Homo sapiens
  CDR3 for alpha chain variable domain of TCR clone 158500 (TRAV17, TRAJ30)
RVPERRDDKIIF

SEQ ID NO: 317000 - protein, 14 aa, Homo sapiens
  CDR3 for beta chain variable domain of TCR clone 158500 (TRBV7-7, TRBJ2-2)
CASSRDRSTGELFF

SEQ ID NO: 317001 - protein, 13 aa, Homo sapiens
  CDR3 for alpha chain variable domain of TCR clone 158501 (TRAV38-1, TRAJ42)
CARWGRSQGNLIF

SEQ ID NO: 317002 - protein, 17 aa, Homo sapiens
  CDR3 for beta chain variable domain of TCR clone 158501 (TRBV28, TRBJ2-5)
CASSTPEGDALQETQYF

SEQ ID NO: 317003 - protein, 12 aa, Homo sapiens
  CDR3 for alpha chain variable domain of TCR clone 158502 (TRAV27, TRAJ33)
GAGDGSNYQLIW

SEQ ID NO: 317004 - protein, 14 aa, Homo sapiens
  CDR3 for beta chain variable domain of TCR clone 158502 (TRBV6-6, TRBJ2-3)
CASRLQREADTQYF

SEQ ID NO: 317005 - protein, 15 aa, Homo sapiens
  CDR3 for alpha chain variable domain of TCR clone 158503 (TRAV14/DV4, TRAJ12)
CAMREERDSSYKLIL

SEQ ID NO: 317006 - protein, 17 aa, Homo sapiens
  CDR3 for beta chain variable domain of TCR clone 158503 (TRBV2, TRBJ2-1)
CASSRPGQGVMVNEQFF

SEQ ID NO: 317007 - protein, 11 aa, Homo sapiens
  CDR3 for alpha chain variable domain of TCR clone 158504 (TRAV3, TRAJ17)
PRGAAGNKITF

SEQ ID NO: 317008 - protein, 16 aa, Homo sapiens
  CDR3 for beta chain variable domain of TCR clone 158504 (TRBV7-6, TRBJ2-1)
CASSAPGPSSYNGQFF

SEQ ID NO: 317009 - protein, 14 aa, Homo sapiens
  CDR3 for alpha chain variable domain of TCR clone 158505 (TRAV12-2, TRAJ13)
CAVKKTGGYKKVTF

SEQ ID NO: 317010 - protein, 15 aa, Homo sapiens
  CDR3 for beta chain variable domain of TCR clone 158505 (TRBV27, TRBJ2-1)
CASSNGGGSANEQFF

SEQ ID NO: 317011 - protein, 12 aa, Homo sapiens
  CDR3 for alpha chain variable domain of TCR clone 158506 (TRAV12-3, TRAJ5)
CAMDTGRRALAF

SEQ ID NO: 317012 - protein, 13 aa, Homo sapiens
  CDR3 for beta chain variable domain of TCR clone 158506 (TRBV7-7, TRBJ2-2)
CASSLTSAGELFF

SEQ ID NO: 317013 - protein, 11 aa, Homo sapiens
  CDR3 for alpha chain variable domain of TCR clone 158507 (TRAV12-2, TRAJ3)
CAVKRASKIIF

SEQ ID NO: 317014 - protein, 14 aa, Homo sapiens
  CDR3 for beta chain variable domain of TCR clone 158507 (TRBV7-2, TRBJ2-7)
CASRSQGAAYEQYF

SEQ ID NO: 317015 - protein, 10 aa, Homo sapiens
  CDR3 for alpha chain variable domain of TCR clone 158508 (TRAV21, TRAJ43)
CAVSANDMRL

SEQ ID NO: 317016 - protein, 13 aa, Homo sapiens
  CDR3 for beta chain variable domain of TCR clone 158508 (TRBV7-2, TRBJ1-2)
CASSLDGIYGYTF

SEQ ID NO: 317017 - protein, 10 aa, Homo sapiens
  CDR3 for alpha chain variable domain of TCR clone 158509 (TRAV23/DV6, TRAJ57)
CAASSTLSQG

SEQ ID NO: 317018 - protein, 18 aa, Homo sapiens
  CDR3 for beta chain variable domain of TCR clone 158509 (TRBV7-8, TRBJ2-1)
CASSPAEGLAGGLNEQFF

SEQ ID NO: 317019 - protein, 10 aa, Homo sapiens
  CDR3 for alpha chain variable domain of TCR clone 158510 (TRAV13-1, TRAJ8)
CAAPFQKLVF

SEQ ID NO: 317020 - protein, 13 aa, Homo sapiens
  CDR3 for beta chain variable domain of TCR clone 158510 (TRBV28, TRBJ1-2)
CASRGPGIYGYTF

SEQ ID NO: 317021 - protein, 15 aa, Homo sapiens
  CDR3 for alpha chain variable domain of TCR clone 158511 (TRAV4, TRAJ18)
CVLLIGGSTLGRLYF

SEQ ID NO: 317022 - protein, 12 aa, Homo sapiens
  CDR3 for beta chain variable domain of TCR clone 158511 (TRBV7-8, TRBJ2-7)
CASSLGDREQYF

SEQ ID NO: 317023 - protein, 18 aa, Homo sapiens
  CDR3 for alpha chain variable domain of TCR clone 158512 (TRAV12-3, TRAJ52)
CAMCVGGAGGTSYGELTF

SEQ ID NO: 317024 - protein, 15 aa, Homo sapiens
  CDR3 for beta chain variable domain of TCR clone 158512 (TRBV7-3, TRBJ2-1)
CASSPTGGGEVEQFF

SEQ ID NO: 317025 - protein, 13 aa, Homo sapiens
  CDR3 for alpha chain variable domain of TCR clone 158513 (TRAV21, TRAJ27)
CDARPGHAGKSTF

SEQ ID NO: 317026 - protein, 14 aa, Homo sapiens
  CDR3 for beta chain variable domain of TCR clone 158513 (TRBV7-6, TRBJ2-3)
CASSLGTVTDTQYF

SEQ ID NO: 317027 - protein, 16 aa, Homo sapiens
  CDR3 for alpha chain variable domain of TCR clone 158514 (TRAV13-1, TRAJ37)
CAASSLGSSNTGKLIF

SEQ ID NO: 317028 - protein, 12 aa, Homo sapiens
  CDR3 for beta chain variable domain of TCR clone 158514 (TRBV6-1, TRBJ2-5)
CASSGGRETQYF

SEQ ID NO: 317029 - protein, 12 aa, Homo sapiens
  CDR3 for alpha chain variable domain of TCR clone 158515 (TRAV12-2, TRAJ43)
CAVNVNNNDMRL

SEQ ID NO: 317030 - protein, 14 aa, Homo sapiens
  CDR3 for beta chain variable domain of TCR clone 158515 (TRBV7-2, TRBJ2-7)
CASSFLGRVYEQYF

SEQ ID NO: 317031 - protein, 14 aa, Homo sapiens
  CDR3 for alpha chain variable domain of TCR clone 158516 (TRAV16, TRAJ33)
CALSAMDSNYQLIW

SEQ ID NO: 317032 - protein, 12 aa, Homo sapiens
  CDR3 for beta chain variable domain of TCR clone 158516 (TRBV28, TRBJ2-6)
CAIQDGANVLTF

SEQ ID NO: 317033 - protein, 14 aa, Homo sapiens
  CDR3 for alpha chain variable domain of TCR clone 158517 (TRAV8-4, TRAJ23)
CAVSAPGTGGKLIF

SEQ ID NO: 317034 - protein, 17 aa, Homo sapiens
  CDR3 for beta chain variable domain of TCR clone 158517 (TRBV4-3, TRBJ2-3)
CASSQDPLAGAVDTQYF

SEQ ID NO: 317035 - protein, 14 aa, Homo sapiens
  CDR3 for alpha chain variable domain of TCR clone 158518 (TRAV29/DV5, TRAJ32)
CAAAYGGATNKLIF

SEQ ID NO: 317036 - protein, 15 aa, Homo sapiens
  CDR3 for beta chain variable domain of TCR clone 158518 (TRBV27, TRBJ2-7)
CASSTAGTGSYEQYY

SEQ ID NO: 317037 - protein, 13 aa, Homo sapiens
  CDR3 for alpha chain variable domain of TCR clone 158519 (TRAV13-1, TRAJ42)
CAASELWRRPRKY

SEQ ID NO: 317038 - protein, 15 aa, Homo sapiens
  CDR3 for beta chain variable domain of TCR clone 158519 (TRBV20-1, TRBJ2-1)
CSASSAGSSYNEQFF

SEQ ID NO: 317039 - protein, 15 aa, Homo sapiens
  CDR3 for alpha chain variable domain of TCR clone 158520 (TRAV2, TRAJ22)
CAVPSRGGSAWQLTF

SEQ ID NO: 317040 - protein, 11 aa, Homo sapiens
  CDR3 for beta chain variable domain of TCR clone 158520 (TRBV27, TRBJ2-3)
CASSLGDTQYF

SEQ ID NO: 317041 - protein, 14 aa, Homo sapiens
  CDR3 for alpha chain variable domain of TCR clone 158521 (TRAV1-1, TRAJ28)
CAAPSGAGSYQLTF

SEQ ID NO: 317042 - protein, 15 aa, Homo sapiens
  CDR3 for beta chain variable domain of TCR clone 158521 (TRBV3-1, TRBJ2-2)
CASSQDLAGTGELFF

SEQ ID NO: 317043 - protein, 14 aa, Homo sapiens
  CDR3 for alpha chain variable domain of TCR clone 158522 (TRAV12-1, TRAJ17)
CVVNYKAAGNKLTF

SEQ ID NO: 317044 - protein, 15 aa, Homo sapiens
  CDR3 for beta chain variable domain of TCR clone 158522 (TRBV20-1, TRBJ2-7)
CSARDRVSGIDKQYF

SEQ ID NO: 317045 - protein, 13 aa, Homo sapiens
  CDR3 for alpha chain variable domain of TCR clone 158523 (TRAV8-3, TRAJ48)
CAVVPFGNEKLTF

SEQ ID NO: 317046 - protein, 12 aa, Homo sapiens
  CDR3 for beta chain variable domain of TCR clone 158523 (TRBV2, TRBJ2-5)
CASKEYGETQYF

SEQ ID NO: 317047 - protein, 12 aa, Homo sapiens
  CDR3 for alpha chain variable domain of TCR clone 158524 (TRAV12-1, TRAJ40)
CVVPSGTCKYIF

SEQ ID NO: 317048 - protein, 15 aa, Homo sapiens
  CDR3 for beta chain variable domain of TCR clone 158524 (TRBV12-4, TRBJ2-1)
CASSPLSGRNSEQFF

SEQ ID NO: 317049 - protein, 14 aa, Homo sapiens
  CDR3 for alpha chain variable domain of TCR clone 158525 (TRAV21, TRAJ15)
CAVSLNHAGTALIF

SEQ ID NO: 317050 - protein, 11 aa, Homo sapiens
  CDR3 for beta chain variable domain of TCR clone 158525 (TRBV20-1, TRBJ2-7)
CSARTSYERYF

SEQ ID NO: 317051 - protein, 12 aa, Homo sapiens
  CDR3 for alpha chain variable domain of TCR clone 158526 (TRAV3, TRAJ31)
WAAQRANARLMF

SEQ ID NO: 317052 - protein, 14 aa, Homo sapiens
  CDR3 for beta chain variable domain of TCR clone 158526 (TRBV5-5, TRBJ1-5)
CASSGQGVDQPQHF

SEQ ID NO: 317053 - protein, 12 aa, Homo sapiens
  CDR3 for alpha chain variable domain of TCR clone 158527 (TRAV4, TRAJ6)
CLAPGGSYIPTF

SEQ ID NO: 317054 - protein, 16 aa, Homo sapiens
  CDR3 for beta chain variable domain of TCR clone 158527 (TRBV15, TRBJ2-5)
CATSRYLEAAQETQYF

SEQ ID NO: 317055 - protein, 14 aa, Homo sapiens
  CDR3 for alpha chain variable domain of TCR clone 158528 (TRAV1-2, TRAJ16)
CAVNRFSDGQKLLF

SEQ ID NO: 317056 - protein, 13 aa, Homo sapiens
  CDR3 for beta chain variable domain of TCR clone 158528 (TRBV6-5, TRBJ2-3)
CASSYLRGGTQYF

SEQ ID NO: 317057 - protein, 14 aa, Homo sapiens
  CDR3 for alpha chain variable domain of TCR clone 158529 (TRAV1-2, TRAJ16)
CAVNRFSDGQKLLF

SEQ ID NO: 317058 - protein, 13 aa, Homo sapiens
  CDR3 for beta chain variable domain of TCR clone 158529 (TRBV4-1, TRBJ2-1)
CSSSQAGGDEQFF

SEQ ID NO: 317059 - protein, 14 aa, Homo sapiens
  CDR3 for alpha chain variable domain of TCR clone 158530 (TRAV8-3, TRAJ4)
CAVGASGGYNKLFF

SEQ ID NO: 317060 - protein, 13 aa, Homo sapiens
  CDR3 for beta chain variable domain of TCR clone 158530 (TRBV18, TRBJ2-5)
CASSLQGKETQYF

SEQ ID NO: 317061 - protein, 16 aa, Homo sapiens
  CDR3 for alpha chain variable domain of TCR clone 158531 (TRAV3, TRAJ37)
CAVRDSGSGNKGKLIF

SEQ ID NO: 317062 - protein, 12 aa, Homo sapiens
  CDR3 for beta chain variable domain of TCR clone 158531 (TRBV7-2, TRBJ2-5)
CASSLYRETQYF

SEQ ID NO: 317063 - protein, 16 aa, Homo sapiens
  CDR3 for alpha chain variable domain of TCR clone 158532 (TRAV39, TRAJ53)
CAVDAGSGGSNYKLNF

SEQ ID NO: 317064 - protein, 16 aa, Homo sapiens
  CDR3 for beta chain variable domain of TCR clone 158532 (TRBV12-4, TRBJ2-2)
CASSFWIVGNTGELFF

SEQ ID NO: 317065 - protein, 16 aa, Homo sapiens
  CDR3 for alpha chain variable domain of TCR clone 158533 (TRAV38-1, TRAJ32)
CAFMPFLGGATNKLIF

SEQ ID NO: 317066 - protein, 13 aa, Homo sapiens
  CDR3 for beta chain variable domain of TCR clone 158533 (TRBV10-2, TRBJ1-1)
CASNDQMNTEAFF

SEQ ID NO: 317067 - protein, 17 aa, Homo sapiens
  CDR3 for alpha chain variable domain of TCR clone 158534 (TRAV4, TRAJ13)
CLVGVQGSSGGYQKVTF

SEQ ID NO: 317068 - protein, 17 aa, Homo sapiens
  CDR3 for beta chain variable domain of TCR clone 158534 (TRBV7-8, TRBJ2-6)
CASSAGTGGAGANVLSF

SEQ ID NO: 317069 - protein, 16 aa, Homo sapiens
  CDR3 for alpha chain variable domain of TCR clone 158535 (TRAV12-3, TRAJ53)
CAMSPGSGGSNYKLTF

SEQ ID NO: 317070 - protein, 15 aa, Homo sapiens
  CDR3 for beta chain variable domain of TCR clone 158535 (TRBV25-1, TRBJ1-4)
CASSKRIATNETLFF

SEQ ID NO: 317071 - protein, 17 aa, Homo sapiens
  CDR3 for alpha chain variable domain of TCR clone 158536 (TRAV8-2, )
CVVNIQNPDPVVYQLRD

SEQ ID NO: 317072 - protein, 14 aa, Homo sapiens
  CDR3 for beta chain variable domain of TCR clone 158536 (TRBV7-9, TRBJ2-5)
CASSVVGGEETQYF

SEQ ID NO: 317073 - protein, 13 aa, Homo sapiens
  CDR3 for alpha chain variable domain of TCR clone 158537 (TRAV17, TRAJ30)
CAPSLNRDDKIIF

SEQ ID NO: 317074 - protein, 15 aa, Homo sapiens
  CDR3 for beta chain variable domain of TCR clone 158537 (TRBV20-1, TRBJ2-7)
CSARDRVSGMDEQYF

SEQ ID NO: 317075 - protein, 14 aa, Homo sapiens
  CDR3 for alpha chain variable domain of TCR clone 158538 (TRAV3, TRAJ9)
CAVRLNTGGFKTIF

SEQ ID NO: 317076 - protein, 15 aa, Homo sapiens
  CDR3 for beta chain variable domain of TCR clone 158538 (TRBV7-2, TRBJ2-1)
CASSLASRRVNEHFF

SEQ ID NO: 317077 - protein, 15 aa, Homo sapiens
  CDR3 for alpha chain variable domain of TCR clone 158539 (TRAV1-2, TRAJ28)
CAVQYSGAGSYQLTF

SEQ ID NO: 317078 - protein, 13 aa, Homo sapiens
  CDR3 for beta chain variable domain of TCR clone 158539 (TRBV20-1, TRBJ1-1)
CSARAGGNTEAFF

SEQ ID NO: 317079 - protein, 15 aa, Homo sapiens
  CDR3 for alpha chain variable domain of TCR clone 158540 (TRAV8-4, TRAJ8)
CAVSDLNTGFQKLVF

SEQ ID NO: 317080 - protein, 15 aa, Homo sapiens
  CDR3 for beta chain variable domain of TCR clone 158540 (TRBV19, TRBJ1-1)
CASTSGQIQNTEAFF

SEQ ID NO: 317081 - protein, 15 aa, Homo sapiens
  CDR3 for alpha chain variable domain of TCR clone 158541 (TRAV12-3, TRAJ6)
CAMSATTGGSYIPTF

SEQ ID NO: 317082 - protein, 13 aa, Homo sapiens
  CDR3 for beta chain variable domain of TCR clone 158541 (TRBV6-3, TRBJ2-1)
CASSYDNYNEQFF

SEQ ID NO: 317083 - protein, 14 aa, Homo sapiens
  CDR3 for alpha chain variable domain of TCR clone 158542 (TRAV3, TRAJ22)
CAVRDYGSARQLHF

SEQ ID NO: 317084 - protein, 13 aa, Homo sapiens
  CDR3 for beta chain variable domain of TCR clone 158542 (TRBV11-2, TRBJ2-5)
CASGHGAKETQYF

SEQ ID NO: 317085 - protein, 14 aa, Homo sapiens
  CDR3 for alpha chain variable domain of TCR clone 158543 (TRAV13-1, TRAJ22)
CAASYSGAARQLTF

SEQ ID NO: 317086 - protein, 13 aa, Homo sapiens
  CDR3 for beta chain variable domain of TCR clone 158543 (TRBV6-3, TRBJ1-2)
CASSLTGDYGYTF

SEQ ID NO: 317087 - protein, 16 aa, Homo sapiens
  CDR3 for alpha chain variable domain of TCR clone 158544 (TRAV12-2, TRAJ6)
CAAPLAGSGGGYIPTF

SEQ ID NO: 317088 - protein, 10 aa, Homo sapiens
  CDR3 for beta chain variable domain of TCR clone 158544 (TRBV28, TRBJ1-2)
CASSSDRTVF

SEQ ID NO: 317089 - protein, 13 aa, Homo sapiens
  CDR3 for alpha chain variable domain of TCR clone 158545 (TRAV3, TRAJ21)
CAVGNFNKFYLGS

SEQ ID NO: 317090 - protein, 16 aa, Homo sapiens
  CDR3 for beta chain variable domain of TCR clone 158545 (TRBV19, TRBJ2-1)
CASSKAGPSSYNEQFF

SEQ ID NO: 317091 - protein, 14 aa, Homo sapiens
  CDR3 for alpha chain variable domain of TCR clone 158546 (TRAV13-1, TRAJ31)
CAPRQTHVWRWNSA

SEQ ID NO: 317092 - protein, 12 aa, Homo sapiens
  CDR3 for beta chain variable domain of TCR clone 158546 (TRBV7-9, TRBJ2-7)
CASSLEGYEQYF

SEQ ID NO: 317093 - protein, 10 aa, Homo sapiens
  CDR3 for alpha chain variable domain of TCR clone 158547 (TRAV12-3, TRAJ34)
CAMSADKLII

SEQ ID NO: 317094 - protein, 15 aa, Homo sapiens
  CDR3 for beta chain variable domain of TCR clone 158547 (TRBV20-1, TRBJ2-3)
CSARRGEAITDTQYF

SEQ ID NO: 317095 - protein, 15 aa, Homo sapiens
  CDR3 for alpha chain variable domain of TCR clone 158548 (TRAV3, TRAJ22)
CAVRDRGGSARQLTF

SEQ ID NO: 317096 - protein, 13 aa, Homo sapiens
  CDR3 for beta chain variable domain of TCR clone 158548 (TRBV28, TRBJ2-2)
CASIRESTGELFF

SEQ ID NO: 317097 - protein, 13 aa, Homo sapiens
  CDR3 for alpha chain variable domain of TCR clone 158549 (TRAV24, TRAJ44)
CALLTGTASKLTF

SEQ ID NO: 317098 - protein, 16 aa, Homo sapiens
  CDR3 for beta chain variable domain of TCR clone 158549 (TRBV2, TRBJ2-3)
CASSPSVEGVTDTQYF

SEQ ID NO: 317099 - protein, 14 aa, Homo sapiens
  CDR3 for alpha chain variable domain of TCR clone 158550 (TRAV17, TRAJ57)
CATDPQGGSEKLVF

SEQ ID NO: 317100 - protein, 13 aa, Homo sapiens
  CDR3 for beta chain variable domain of TCR clone 158550 (TRBV20-1, TRBJ2-7)
CSARPSTNYEQYF

SEQ ID NO: 317101 - protein, 14 aa, Homo sapiens
  CDR3 for alpha chain variable domain of TCR clone 158551 (TRAV1-2, TRAJ16)
RAVNRFSDGQKLLF

SEQ ID NO: 317102 - protein, 16 aa, Homo sapiens
  CDR3 for beta chain variable domain of TCR clone 158551 (TRBV11-2, TRBJ1-2)
CASSLDTGGADYGDTF

SEQ ID NO: 317103 - protein, 14 aa, Homo sapiens
  CDR3 for alpha chain variable domain of TCR clone 158552 (TRAV1-2, TRAJ16)
CAVNRFSDGQKLLF

SEQ ID NO: 317104 - protein, 16 aa, Homo sapiens
  CDR3 for beta chain variable domain of TCR clone 158552 (TRBV19, TRBJ2-3)
CASSREWDRGTDTQYF

SEQ ID NO: 317105 - protein, 16 aa, Homo sapiens
  CDR3 for alpha chain variable domain of TCR clone 158553 (TRAV30, TRAJ24)
CGTESVDADSWGKFQF

SEQ ID NO: 317106 - protein, 13 aa, Homo sapiens
  CDR3 for beta chain variable domain of TCR clone 158553 (TRBV18, TRBJ1-2)
CASSASATEGYTF

SEQ ID NO: 317107 - protein, 15 aa, Homo sapiens
  CDR3 for alpha chain variable domain of TCR clone 158554 (TRAV8-3, TRAJ37)
CAVGAPSSNTGKLIF

SEQ ID NO: 317108 - protein, 17 aa, Homo sapiens
  CDR3 for beta chain variable domain of TCR clone 158554 (TRBV4-1, TRBJ1-3)
CASSPQRGIRFGNTIYF

SEQ ID NO: 317109 - protein, 15 aa, Homo sapiens
  CDR3 for alpha chain variable domain of TCR clone 158555 (TRAV21, TRAJ53)
CPTLNSGGSNYKLTF

SEQ ID NO: 317110 - protein, 16 aa, Homo sapiens
  CDR3 for beta chain variable domain of TCR clone 158555 (TRBV9, TRBJ2-1)
CASSVGGGGNYNEQFF

SEQ ID NO: 317111 - protein, 14 aa, Homo sapiens
  CDR3 for alpha chain variable domain of TCR clone 158556 (TRAV3, TRAJ21)
CSVRDAYNFNKFYF

SEQ ID NO: 317112 - protein, 16 aa, Homo sapiens
  CDR3 for beta chain variable domain of TCR clone 158556 (TRBV12-4, TRBJ1-5)
CASSRPVGGSNQPQHF

SEQ ID NO: 317113 - protein, 14 aa, Homo sapiens
  CDR3 for alpha chain variable domain of TCR clone 158557 (TRAV12-3, TRAJ9)
CAMSVETGGFKTIF

SEQ ID NO: 317114 - protein, 14 aa, Homo sapiens
  CDR3 for beta chain variable domain of TCR clone 158557 (TRBV7-3, TRBJ2-2)
CASSSGGYTGELFF

SEQ ID NO: 317115 - protein, 16 aa, Homo sapiens
  CDR3 for alpha chain variable domain of TCR clone 158558 (TRAV13-1, TRAJ17)
CAASKGVKAAGNKLTF

SEQ ID NO: 317116 - protein, 15 aa, Homo sapiens
  CDR3 for beta chain variable domain of TCR clone 158558 (TRBV20-1, TRBJ1-5)
CSAWEGGYSNQPQHF

SEQ ID NO: 317117 - protein, 13 aa, Homo sapiens
  CDR3 for alpha chain variable domain of TCR clone 158559 (TRAV4, TRAJ36)
CLVGPTGANNLFF

SEQ ID NO: 317118 - protein, 14 aa, Homo sapiens
  CDR3 for beta chain variable domain of TCR clone 158559 (TRBV19, TRBJ2-1)
CASPTFVLSGEQFF

SEQ ID NO: 317119 - protein, 18 aa, Homo sapiens
  CDR3 for alpha chain variable domain of TCR clone 158560 (TRAV21, TRAJ52)
CSVRPSPAGCTSYGKLTF

SEQ ID NO: 317120 - protein, 17 aa, Homo sapiens
  CDR3 for beta chain variable domain of TCR clone 158560 (TRBV13, TRBJ2-3)
CASSLSRVAGGRNTQYF

SEQ ID NO: 317121 - protein, 11 aa, Homo sapiens
  CDR3 for alpha chain variable domain of TCR clone 158561 (TRAV21, TRAJ34)
CAHYNTDKLIF

SEQ ID NO: 317122 - protein, 13 aa, Homo sapiens
  CDR3 for beta chain variable domain of TCR clone 158561 (TRBV7-6, TRBJ1-2)
CASSLLADYGYTF

SEQ ID NO: 317123 - protein, 14 aa, Homo sapiens
  CDR3 for alpha chain variable domain of TCR clone 158562 (TRAV1-2, TRAJ16)
CAVNRFSDGQQLLF

SEQ ID NO: 317124 - protein, 13 aa, Homo sapiens
  CDR3 for beta chain variable domain of TCR clone 158562 (TRBV11-2, TRBJ2-5)
CASSFSSQETQYF

SEQ ID NO: 317125 - protein, 17 aa, Homo sapiens
  CDR3 for alpha chain variable domain of TCR clone 158563 (TRAV27, TRAJ42)
SAERVIYYGGSQGNLIF

SEQ ID NO: 317126 - protein, 14 aa, Homo sapiens
  CDR3 for beta chain variable domain of TCR clone 158563 (TRBV6-6, TRBJ2-3)
CASRLQREADTQYF

SEQ ID NO: 317127 - protein, 21 aa, Homo sapiens
  CDR3 for alpha chain variable domain of TCR clone 158564 (TRAV12-2, TRAJ43)
CSSDSQPSDSATYLCAFDMRF

SEQ ID NO: 317128 - protein, 18 aa, Homo sapiens
  CDR3 for beta chain variable domain of TCR clone 158564 (TRBV20-1, TRBJ2-3)
CSASGLAGGPGTTDTQYF

SEQ ID NO: 317129 - protein, 12 aa, Homo sapiens
  CDR3 for alpha chain variable domain of TCR clone 158565 (TRAV8-1, TRAJ23)
CAVGNQGGKIIF

SEQ ID NO: 317130 - protein, 16 aa, Homo sapiens
  CDR3 for beta chain variable domain of TCR clone 158565 (TRBV7-3, TRBJ2-2)
CASSLKRGTLSGELFF

SEQ ID NO: 317131 - protein, 17 aa, Homo sapiens
  CDR3 for alpha chain variable domain of TCR clone 158566 (TRAV3, TRAJ38)
CAVRDCLNAGNNRKLMW

SEQ ID NO: 317132 - protein, 14 aa, Homo sapiens
  CDR3 for beta chain variable domain of TCR clone 158566 (TRBV5-5, TRBJ1-5)
CASSGQGVDQPQHF

SEQ ID NO: 317133 - protein, 15 aa, Homo sapiens
  CDR3 for alpha chain variable domain of TCR clone 158567 (TRAV38-1, TRAJ37)
CAFIFGSGNTGKPIF

SEQ ID NO: 317134 - protein, 13 aa, Homo sapiens
  CDR3 for beta chain variable domain of TCR clone 158567 (TRBV7-9, TRBJ1-2)
CASSLKQNYGYTF

SEQ ID NO: 317135 - protein, 11 aa, Homo sapiens
  CDR3 for alpha chain variable domain of TCR clone 158568 (TRAV2, TRAJ13)
CASGGYQQVTF

SEQ ID NO: 317136 - protein, 20 aa, Homo sapiens
  CDR3 for beta chain variable domain of TCR clone 158568 (TRBV7-8, TRBJ2-2)
CASSHLFPGPTIHITGELFF

SEQ ID NO: 317137 - protein, 13 aa, Homo sapiens
  CDR3 for alpha chain variable domain of TCR clone 158569 (TRAV8-3, TRAJ36)
CAVGATGANNLFF

SEQ ID NO: 317138 - protein, 15 aa, Homo sapiens
  CDR3 for beta chain variable domain of TCR clone 158569 (TRBV7-2, TRBJ1-2)
CASSPRAGWTYGYTF

SEQ ID NO: 317139 - protein, 15 aa, Homo sapiens
  CDR3 for alpha chain variable domain of TCR clone 158570 (TRAV12-2, TRAJ53)
CAVNGGGGSNYKLTF

SEQ ID NO: 317140 - protein, 15 aa, Homo sapiens
  CDR3 for beta chain variable domain of TCR clone 158570 (TRBV6-4, TRBJ1-5)
CASSASSRINQPQHF

SEQ ID NO: 317141 - protein, 18 aa, Homo sapiens
  CDR3 for alpha chain variable domain of TCR clone 158571 (TRAV21, TRAJ52)
CAVRPSPAGGTSYGQQTF

SEQ ID NO: 317142 - protein, 17 aa, Homo sapiens
  CDR3 for beta chain variable domain of TCR clone 158571 (TRBV13, TRBJ2-3)
CASSLSRVAGGRNTQYF

SEQ ID NO: 317143 - protein, 12 aa, Homo sapiens
  CDR3 for alpha chain variable domain of TCR clone 158572 (TRAV12-3, TRAJ17)
CAMTLTGNKLTF

SEQ ID NO: 317144 - protein, 17 aa, Homo sapiens
  CDR3 for beta chain variable domain of TCR clone 158572 (TRBV20-1, TRBJ2-2)
CSASGSGQGGLTGELFL

SEQ ID NO: 317145 - protein, 14 aa, Homo sapiens
  CDR3 for alpha chain variable domain of TCR clone 158573 (TRAV17, TRAJ54)
CATEANQGAQKLVF

SEQ ID NO: 317146 - protein, 12 aa, Homo sapiens
  CDR3 for beta chain variable domain of TCR clone 158573 (TRBV6-3, TRBJ2-1)
CASSGSYNEQFF

SEQ ID NO: 317147 - protein, 19 aa, Homo sapiens
  CDR3 for alpha chain variable domain of TCR clone 158574 (TRAV1-1, TRAJ27)
CAGSEMTRSSLEKGHDFIF

SEQ ID NO: 317148 - protein, 21 aa, Homo sapiens
  CDR3 for beta chain variable domain of TCR clone 158574 (TRBV11-3, TRBJ1-6)
CASSFRGRFTPPLWERDQAHC

SEQ ID NO: 317149 - protein, 13 aa, Homo sapiens
  CDR3 for alpha chain variable domain of TCR clone 158575 (TRAV12-2, TRAJ24)
FAVSTDSWGKLQF

SEQ ID NO: 317150 - protein, 12 aa, Homo sapiens
  CDR3 for beta chain variable domain of TCR clone 158575 (TRBV7-6, TRBJ2-7)
CASSLADSEQYF

SEQ ID NO: 317151 - protein, 15 aa, Homo sapiens
  CDR3 for alpha chain variable domain of TCR clone 158576 (TRAV8-3, TRAJ45)
CASSYSGGGADGLTF

SEQ ID NO: 317152 - protein, 15 aa, Homo sapiens
  CDR3 for beta chain variable domain of TCR clone 158576 (TRBV19, TRBJ2-4)
CASSIGLAGANIQYF

SEQ ID NO: 317153 - protein, 13 aa, Homo sapiens
  CDR3 for alpha chain variable domain of TCR clone 158577 (TRAV3, TRAJ27)
CAVRPLGAGKSTF

SEQ ID NO: 317154 - protein, 14 aa, Homo sapiens
  CDR3 for beta chain variable domain of TCR clone 158577 (TRBV7-6, TRBJ2-3)
CASSVAGGTDTQYF

SEQ ID NO: 317155 - protein, 12 aa, Homo sapiens
  CDR3 for alpha chain variable domain of TCR clone 158578 (TRAV21, TRAJ10)
WTARGGGNKLTF

SEQ ID NO: 317156 - protein, 16 aa, Homo sapiens
  CDR3 for beta chain variable domain of TCR clone 158578 (TRBV20-1, TRBJ1-4)
CSAPGQGLLTNEKLFF

SEQ ID NO: 317157 - protein, 17 aa, Homo sapiens
  CDR3 for alpha chain variable domain of TCR clone 158579 (TRAV4, TRAJ18)
CLVSERSVGSTLGRLYF

SEQ ID NO: 317158 - protein, 16 aa, Homo sapiens
  CDR3 for beta chain variable domain of TCR clone 158579 (TRBV4-2, TRBJ1-1)
CASSPSPGRAAPEAFF

SEQ ID NO: 317159 - protein, 13 aa, Homo sapiens
  CDR3 for alpha chain variable domain of TCR clone 158580 (TRAV2, TRAJ40)
CAVVTSGTYKYIF

SEQ ID NO: 317160 - protein, 17 aa, Homo sapiens
  CDR3 for beta chain variable domain of TCR clone 158580 (TRBV7-3, TRBJ2-3)
CASSRGLAGEVPDTQYF

SEQ ID NO: 317161 - protein, 16 aa, Homo sapiens
  CDR3 for alpha chain variable domain of TCR clone 158581 (TRAV12-3, TRAJ53)
CAMSPGSGGSNYKMTF

SEQ ID NO: 317162 - protein, 14 aa, Homo sapiens
  CDR3 for beta chain variable domain of TCR clone 158581 (TRBV7-2, TRBJ1-1)
CASSFLTGTTEAFF

SEQ ID NO: 317163 - protein, 15 aa, Homo sapiens
  CDR3 for alpha chain variable domain of TCR clone 158582 (TRAV3, TRAJ13)
CAVRLYSGGYQKVTF

SEQ ID NO: 317164 - protein, 15 aa, Homo sapiens
  CDR3 for beta chain variable domain of TCR clone 158582 (TRBV5-6, TRBJ1-2)
CASSLGVAANYGYTF

SEQ ID NO: 317165 - protein, 17 aa, Homo sapiens
  CDR3 for alpha chain variable domain of TCR clone 158583 (TRAV8-3, TRAJ34)
CAIPGKRIFGTGTRLQV

SEQ ID NO: 317166 - protein, 15 aa, Homo sapiens
  CDR3 for beta chain variable domain of TCR clone 158583 (TRBV5-7, TRBJ2-1)
CASSRRLAGDNEQFF

SEQ ID NO: 317167 - protein, 18 aa, Homo sapiens
  CDR3 for alpha chain variable domain of TCR clone 158584 (TRAV26-1, TRAJ39)
CIVRPPDLYNNVGNMLTF

SEQ ID NO: 317168 - protein, 15 aa, Homo sapiens
  CDR3 for beta chain variable domain of TCR clone 158584 (TRBV7-4, TRBJ1-2)
CQQPLTGGVSYGYTF

SEQ ID NO: 317169 - protein, 15 aa, Homo sapiens
  CDR3 for alpha chain variable domain of TCR clone 158585 (TRAV12-2, TRAJ53)
CAVNGGGGSNYKLTF

SEQ ID NO: 317170 - protein, 17 aa, Homo sapiens
  CDR3 for beta chain variable domain of TCR clone 158585 (TRBV7-3, TRBJ2-3)
CASSLMKRMRGADTQYC

SEQ ID NO: 317171 - protein, 14 aa, Homo sapiens
  CDR3 for alpha chain variable domain of TCR clone 158586 (TRAV29/DV5, TRAJ36)
CAARRKTGANNLFF

SEQ ID NO: 317172 - protein, 16 aa, Homo sapiens
  CDR3 for beta chain variable domain of TCR clone 158586 (TRBV4-2, TRBJ1-1)
CASSPSPGRAAPEAFF

SEQ ID NO: 317173 - protein, 14 aa, Homo sapiens
  CDR3 for alpha chain variable domain of TCR clone 158587 (TRAV1-2, TRAJ16)
CAVNRFSDGQQLLF

SEQ ID NO: 317174 - protein, 14 aa, Homo sapiens
  CDR3 for beta chain variable domain of TCR clone 158587 (TRBV19, TRBJ2-7)
CASSVDSESYEQYF

SEQ ID NO: 317175 - protein, 14 aa, Homo sapiens
  CDR3 for alpha chain variable domain of TCR clone 158588 (TRAV23/DV6, TRAJ22)
CAADPSGSARQLTF

SEQ ID NO: 317176 - protein, 14 aa, Homo sapiens
  CDR3 for beta chain variable domain of TCR clone 158588 (TRBV5-1, TRBJ2-7)
CTSSLWGAQDEQYF

SEQ ID NO: 317177 - protein, 16 aa, Homo sapiens
  CDR3 for alpha chain variable domain of TCR clone 158589 (TRAV4, TRAJ9)
CLVGDPNRPGGFKPIF

SEQ ID NO: 317178 - protein, 13 aa, Homo sapiens
  CDR3 for beta chain variable domain of TCR clone 158589 (TRBV5-5, TRBJ1-2)
CASSFWRGEDYTF

SEQ ID NO: 317179 - protein, 15 aa, Homo sapiens
  CDR3 for alpha chain variable domain of TCR clone 158590 (TRAV8-2, TRAJ16)
CVVSEGFSDGQKLLF

SEQ ID NO: 317180 - protein, 14 aa, Homo sapiens
  CDR3 for beta chain variable domain of TCR clone 158590 (TRBV7-3, TRBJ1-1)
CASSLGTGYTEAFF

SEQ ID NO: 317181 - protein, 16 aa, Homo sapiens
  CDR3 for alpha chain variable domain of TCR clone 158591 (TRAV30, TRAJ24)
CGTEIVDADSWGKFQF

SEQ ID NO: 317182 - protein, 15 aa, Homo sapiens
  CDR3 for beta chain variable domain of TCR clone 158591 (TRBV28, TRBJ2-3)
CAPTFRDWSTDTQYF

SEQ ID NO: 317183 - protein, 13 aa, Homo sapiens
  CDR3 for alpha chain variable domain of TCR clone 158592 (TRAV16, TRAJ28)
CALTGAGSYQLTF

SEQ ID NO: 317184 - protein, 19 aa, Homo sapiens
  CDR3 for beta chain variable domain of TCR clone 158592 (TRBV7-2, TRBJ2-3)
CASSFLSRNWGGGTDTQYF

SEQ ID NO: 317185 - protein, 15 aa, Homo sapiens
  CDR3 for alpha chain variable domain of TCR clone 158593 (TRAV38-2/DV8, TRAJ45)
CAYWDSGGGADGLTF

SEQ ID NO: 317186 - protein, 15 aa, Homo sapiens
  CDR3 for beta chain variable domain of TCR clone 158593 (TRBV20-1, TRBJ2-7)
CSASDRVSGMAEQYF

SEQ ID NO: 317187 - protein, 18 aa, Homo sapiens
  CDR3 for alpha chain variable domain of TCR clone 158594 (TRAV12-1, TRAJ37)
CVVTGLEWGSGNTGKLIF

SEQ ID NO: 317188 - protein, 14 aa, Homo sapiens
  CDR3 for beta chain variable domain of TCR clone 158594 (TRBV7-6, TRBJ2-3)
CASSLGTVTDTQYF

SEQ ID NO: 317189 - protein, 13 aa, Homo sapiens
  CDR3 for alpha chain variable domain of TCR clone 158595 (TRAV36/DV7, TRAJ49)
CAGDSNTGNQFYL

SEQ ID NO: 317190 - protein, 13 aa, Homo sapiens
  CDR3 for beta chain variable domain of TCR clone 158595 (TRBV4-2, TRBJ1-1)
CASSQAGNTEAFF

SEQ ID NO: 317191 - protein, 14 aa, Homo sapiens
  CDR3 for alpha chain variable domain of TCR clone 158596 (TRAV1-2, TRAJ15)
CAVRVRQAGTALIF

SEQ ID NO: 317192 - protein, 16 aa, Homo sapiens
  CDR3 for beta chain variable domain of TCR clone 158596 (TRBV5-1, TRBJ2-3)
CASSLGLAVYTDTQYF

SEQ ID NO: 317193 - protein, 14 aa, Homo sapiens
  CDR3 for alpha chain variable domain of TCR clone 158597 (TRAV8-1, TRAJ5)
CAVRTDTGRRALTF

SEQ ID NO: 317194 - protein, 14 aa, Homo sapiens
  CDR3 for beta chain variable domain of TCR clone 158597 (TRBV7-8, TRBJ2-3)
CASSFPDGQDTQYY

SEQ ID NO: 317195 - protein, 12 aa, Homo sapiens
  CDR3 for alpha chain variable domain of TCR clone 158598 (TRAV23/DV6, TRAJ36)
CSKSNWANNLFF

SEQ ID NO: 317196 - protein, 13 aa, Homo sapiens
  CDR3 for beta chain variable domain of TCR clone 158598 (TRBV5-4, TRBJ1-5)
CASSLGGDQPQHF

SEQ ID NO: 317197 - protein, 11 aa, Homo sapiens
  CDR3 for alpha chain variable domain of TCR clone 158599 (TRAV29/DV5, TRAJ31)
CAAMNNARRMF

SEQ ID NO: 317198 - protein, 15 aa, Homo sapiens
  CDR3 for beta chain variable domain of TCR clone 158599 (TRBV20-1, TRBJ2-7)
CSARGPLAGGREQYF

SEQ ID NO: 317199 - protein, 17 aa, Homo sapiens
  CDR3 for alpha chain variable domain of TCR clone 158600 (TRAV3, TRAJ6)
CAVSDGPRAGGSYIPTF

SEQ ID NO: 317200 - protein, 13 aa, Homo sapiens
  CDR3 for beta chain variable domain of TCR clone 158600 (TRBV29-1, TRBJ1-1)
CSVGDSRNTEAFF

SEQ ID NO: 317201 - protein, 15 aa, Homo sapiens
  CDR3 for alpha chain variable domain of TCR clone 158601 (TRAV8-3, TRAJ40)
CAAPSLGSGTYKYIF

SEQ ID NO: 317202 - protein, 17 aa, Homo sapiens
  CDR3 for beta chain variable domain of TCR clone 158601 (TRBV7-2, TRBJ2-1)
CASSLGPPWGGLDEQFF

SEQ ID NO: 317203 - protein, 11 aa, Homo sapiens
  CDR3 for alpha chain variable domain of TCR clone 158602 (TRAV35, TRAJ34)
CWARNTDKLIF

SEQ ID NO: 317204 - protein, 16 aa, Homo sapiens
  CDR3 for beta chain variable domain of TCR clone 158602 (TRBV28, TRBJ2-7)
CASSPWVATGDLSQYF

SEQ ID NO: 317205 - protein, 13 aa, Homo sapiens
  CDR3 for alpha chain variable domain of TCR clone 158603 (TRAV2, TRAJ40)
CAVVTSGTYKYIF

SEQ ID NO: 317206 - protein, 14 aa, Homo sapiens
  CDR3 for beta chain variable domain of TCR clone 158603 (TRBV18, TRBJ2-7)
CASSPRGEAYEQYF

SEQ ID NO: 317207 - protein, 15 aa, Homo sapiens
  CDR3 for alpha chain variable domain of TCR clone 158604 (TRAV4, TRAJ39)
CLVGPNNNAGNMLTF

SEQ ID NO: 317208 - protein, 15 aa, Homo sapiens
  CDR3 for beta chain variable domain of TCR clone 158604 (TRBV5-1, TRBJ2-1)
CASSPPSAPYNEQFF

SEQ ID NO: 317209 - protein, 16 aa, Homo sapiens
  CDR3 for alpha chain variable domain of TCR clone 158605 (TRAV26-1, TRAJ37)
CIVRGDGSGNTGKLIF

SEQ ID NO: 317210 - protein, 17 aa, Homo sapiens
  CDR3 for beta chain variable domain of TCR clone 158605 (TRBV4-1, TRBJ2-7)
GASRRDPLGVRGGEQYF

SEQ ID NO: 317211 - protein, 13 aa, Homo sapiens
  CDR3 for alpha chain variable domain of TCR clone 158606 (TRAV27, TRAJ54)
CAGAGQGAQQLGF

SEQ ID NO: 317212 - protein, 15 aa, Homo sapiens
  CDR3 for beta chain variable domain of TCR clone 158606 (TRBV18, TRBJ2-6)
CASSPSYAGANVLTF

SEQ ID NO: 317213 - protein, 12 aa, Homo sapiens
  CDR3 for alpha chain variable domain of TCR clone 158607 (TRAV3, TRAJ20)
CAVRDGDYKLTF

SEQ ID NO: 317214 - protein, 13 aa, Homo sapiens
  CDR3 for beta chain variable domain of TCR clone 158607 (TRBV9, TRBJ2-1)
CASSVGQGGEQFF

SEQ ID NO: 317215 - protein, 16 aa, Homo sapiens
  CDR3 for alpha chain variable domain of TCR clone 158608 (TRAV3, TRAJ37)
CAVRVRGSGNTGKLIF

SEQ ID NO: 317216 - protein, 14 aa, Homo sapiens
  CDR3 for beta chain variable domain of TCR clone 158608 (TRBV2, TRBJ2-3)
CASTAQTSTDTQYF

SEQ ID NO: 317217 - protein, 12 aa, Homo sapiens
  CDR3 for alpha chain variable domain of TCR clone 158609 (TRAV12-3, TRAJ17)
CAMTLTGNKRTF

SEQ ID NO: 317218 - protein, 18 aa, Homo sapiens
  CDR3 for beta chain variable domain of TCR clone 158609 (TRBV4-3, TRBJ1-6)
CASSQDTPASSYNSPLHF

SEQ ID NO: 317219 - protein, 14 aa, Homo sapiens
  CDR3 for alpha chain variable domain of TCR clone 158610 (TRAV2, TRAJ3)
CAVPPYSSASKIIF

SEQ ID NO: 317220 - protein, 15 aa, Homo sapiens
  CDR3 for beta chain variable domain of TCR clone 158610 (TRBV7-9, TRBJ1-6)
CASSSPGRGNSPLHF

SEQ ID NO: 317221 - protein, 16 aa, Homo sapiens
  CDR3 for alpha chain variable domain of TCR clone 158611 (TRAV3, TRAJ37)
CAVRPHGSGNTGKLIF

SEQ ID NO: 317222 - protein, 15 aa, Homo sapiens
  CDR3 for beta chain variable domain of TCR clone 158611 (TRBV25-1, TRBJ2-4)
CASSETESAKNIQYF

SEQ ID NO: 317223 - protein, 14 aa, Homo sapiens
  CDR3 for alpha chain variable domain of TCR clone 158612 (TRAV1-2, TRAJ16)
CAVNRFSDGQKLLF

SEQ ID NO: 317224 - protein, 15 aa, Homo sapiens
  CDR3 for beta chain variable domain of TCR clone 158612 (TRBV20-1, TRBJ2-7)
CSAKDRVSGMDEQYF

SEQ ID NO: 317225 - protein, 13 aa, Homo sapiens
  CDR3 for alpha chain variable domain of TCR clone 158613 (TRAV1-2, TRAJ9)
CAALNTGGFKTIF

SEQ ID NO: 317226 - protein, 13 aa, Homo sapiens
  CDR3 for beta chain variable domain of TCR clone 158613 (TRBV19, TRBJ1-2)
CASSVPGQAGYTF

SEQ ID NO: 317227 - protein, 15 aa, Homo sapiens
  CDR3 for alpha chain variable domain of TCR clone 158614 (TRAV17, TRAJ37)
CATDHGASNTGKLIF

SEQ ID NO: 317228 - protein, 14 aa, Homo sapiens
  CDR3 for beta chain variable domain of TCR clone 158614 (TRBV7-2, TRBJ2-3)
CASSRTSGADTQYF

SEQ ID NO: 317229 - protein, 13 aa, Homo sapiens
  CDR3 for alpha chain variable domain of TCR clone 158615 (TRAV17, TRAJ40)
CATAFSGTYKYIF

SEQ ID NO: 317230 - protein, 17 aa, Homo sapiens
  CDR3 for beta chain variable domain of TCR clone 158615 (TRBV28, TRBJ2-1)
CQQSGLAGGGSYNEQFF

SEQ ID NO: 317231 - protein, 14 aa, Homo sapiens
  CDR3 for alpha chain variable domain of TCR clone 158616 (TRAV23/DV6, TRAJ40)
CAATPPSGTYKYIF

SEQ ID NO: 317232 - protein, 16 aa, Homo sapiens
  CDR3 for beta chain variable domain of TCR clone 158616 (TRBV7-3, TRBJ2-3)
CQQLFTTSLNTDTQYF

SEQ ID NO: 317233 - protein, 17 aa, Homo sapiens
  CDR3 for alpha chain variable domain of TCR clone 158617 (TRAV13-1, TRAJ31)
CAPRDRLMFGDGTQLVV

SEQ ID NO: 317234 - protein, 19 aa, Homo sapiens
  CDR3 for beta chain variable domain of TCR clone 158617 (TRBV25-1, TRBJ2-2)
CAILVYRVDRGRKTGELFF

SEQ ID NO: 317235 - protein, 14 aa, Homo sapiens
  CDR3 for alpha chain variable domain of TCR clone 158618 (TRAV12-2, TRAJ44)
CAVNPAGTASKLTV

SEQ ID NO: 317236 - protein, 13 aa, Homo sapiens
  CDR3 for beta chain variable domain of TCR clone 158618 (TRBV20-1, TRBJ1-6)
CSAPLGVGSPLHF

SEQ ID NO: 317237 - protein, 13 aa, Homo sapiens
  CDR3 for alpha chain variable domain of TCR clone 158619 (TRAV38-2/DV8, TRAJ34)
CAYRTWNTDKLIF

SEQ ID NO: 317238 - protein, 16 aa, Homo sapiens
  CDR3 for beta chain variable domain of TCR clone 158619 (TRBV19, TRBJ2-1)
CASSKAGPSSYNEHFF

SEQ ID NO: 317239 - protein, 15 aa, Homo sapiens
  CDR3 for alpha chain variable domain of TCR clone 158620 (TRAV12-3, TRAJ5)
CAMGGLGTGRRALTF

SEQ ID NO: 317240 - protein, 16 aa, Homo sapiens
  CDR3 for beta chain variable domain of TCR clone 158620 (TRBV20-1, TRBJ2-3)
CSARLHSAGAIDTQYF

SEQ ID NO: 317241 - protein, 16 aa, Homo sapiens
  CDR3 for alpha chain variable domain of TCR clone 158621 (TRAV14/DV4, TRAJ53)
CAMREGGGGSNYKLTF

SEQ ID NO: 317242 - protein, 13 aa, Homo sapiens
  CDR3 for beta chain variable domain of TCR clone 158621 (TRBV6-5, TRBJ2-5)
CASSPQGGETQYF

SEQ ID NO: 317243 - protein, 18 aa, Homo sapiens
  CDR3 for alpha chain variable domain of TCR clone 158622 (TRAV26-2, TRAJ45)
CILRVDKYSGGGADGLTF

SEQ ID NO: 317244 - protein, 16 aa, Homo sapiens
  CDR3 for beta chain variable domain of TCR clone 158622 (TRBV2, TRBJ1-4)
CASNLIQGATNEKLFF

SEQ ID NO: 317245 - protein, 21 aa, Homo sapiens
  CDR3 for alpha chain variable domain of TCR clone 158623 (TRAV30, TRAJ43)
GLPAQLLRNLLPITELNDMRF

SEQ ID NO: 317246 - protein, 14 aa, Homo sapiens
  CDR3 for beta chain variable domain of TCR clone 158623 (TRBV27, TRBJ2-1)
CASRHLGGGKEQFF

SEQ ID NO: 317247 - protein, 11 aa, Homo sapiens
  CDR3 for alpha chain variable domain of TCR clone 158624 (TRAV12-1, TRAJ43)
CVEYDNNDMRF

SEQ ID NO: 317248 - protein, 15 aa, Homo sapiens
  CDR3 for beta chain variable domain of TCR clone 158624 (TRBV18, TRBJ2-5)
CASAPRASEAETQYF

SEQ ID NO: 317249 - protein, 15 aa, Homo sapiens
  CDR3 for alpha chain variable domain of TCR clone 158625 (TRAV17, TRAJ57)
CATGPSQGGSEKLVF

SEQ ID NO: 317250 - protein, 15 aa, Homo sapiens
  CDR3 for beta chain variable domain of TCR clone 158625 (TRBV9, TRBJ2-1)
CASSLAGSSCNEQFF

SEQ ID NO: 317251 - protein, 13 aa, Homo sapiens
  CDR3 for alpha chain variable domain of TCR clone 158626 (TRAV27, TRAJ17)
CAGAATAGNKLTF

SEQ ID NO: 317252 - protein, 13 aa, Homo sapiens
  CDR3 for beta chain variable domain of TCR clone 158626 (TRBV13, TRBJ2-2)
CASSPGLTGELFF

SEQ ID NO: 317253 - protein, 14 aa, Homo sapiens
  CDR3 for alpha chain variable domain of TCR clone 158627 (TRAV36/DV7, TRAJ53)
CAVVDGGSNYKLTF

SEQ ID NO: 317254 - protein, 15 aa, Homo sapiens
  CDR3 for beta chain variable domain of TCR clone 158627 (TRBV7-2, TRBJ2-1)
CASSFQADEYNEQFF

SEQ ID NO: 317255 - protein, 14 aa, Homo sapiens
  CDR3 for alpha chain variable domain of TCR clone 158628 (TRAV8-3, TRAJ39)
CAVGANNAGNMLTF

SEQ ID NO: 317256 - protein, 19 aa, Homo sapiens
  CDR3 for beta chain variable domain of TCR clone 158628 (TRBV25-1, TRBJ2-2)
CAILVYRVDRGRKTGELFV

SEQ ID NO: 317257 - protein, 13 aa, Homo sapiens
  CDR3 for alpha chain variable domain of TCR clone 158629 (TRAV2, TRAJ15)
CAVASQAGTALIF

SEQ ID NO: 317258 - protein, 16 aa, Homo sapiens
  CDR3 for beta chain variable domain of TCR clone 158629 (TRBV7-8, TRBJ2-3)
CASSTEGQRETDTQYF

SEQ ID NO: 317259 - protein, 11 aa, Homo sapiens
  CDR3 for alpha chain variable domain of TCR clone 158630 (TRAV12-3, TRAJ43)
CAMSVSNDMRF

SEQ ID NO: 317260 - protein, 15 aa, Homo sapiens
  CDR3 for beta chain variable domain of TCR clone 158630 (TRBV5-1, TRBJ2-1)
CASSPPRATYNEQFF

SEQ ID NO: 317261 - protein, 17 aa, Homo sapiens
  CDR3 for alpha chain variable domain of TCR clone 158631 (TRAV3, TRAJ38)
CAVRDCLNAGNNRELIW

SEQ ID NO: 317262 - protein, 13 aa, Homo sapiens
  CDR3 for beta chain variable domain of TCR clone 158631 (TRBV23-1, TRBJ1-4)
CASRGKFNEKLFF

SEQ ID NO: 317263 - protein, 12 aa, Homo sapiens
  CDR3 for alpha chain variable domain of TCR clone 158632 (TRAV16, TRAJ49)
CALNEGGNQSYF

SEQ ID NO: 317264 - protein, 14 aa, Homo sapiens
  CDR3 for beta chain variable domain of TCR clone 158632 (TRBV7-9, TRBJ2-1)
CASRPTGLRNEQFF

SEQ ID NO: 317265 - protein, 16 aa, Homo sapiens
  CDR3 for alpha chain variable domain of TCR clone 158633 (TRAV30, TRAJ24)
CGTEIVDADSWGKFQF

SEQ ID NO: 317266 - protein, 15 aa, Homo sapiens
  CDR3 for beta chain variable domain of TCR clone 158633 (TRBV10-3, TRBJ2-5)
CAISEFGRGQETQYF

SEQ ID NO: 317267 - protein, 12 aa, Homo sapiens
  CDR3 for alpha chain variable domain of TCR clone 158634 (TRAV12-3, TRAJ17)
RAMTLTGNKLTF

SEQ ID NO: 317268 - protein, 15 aa, Homo sapiens
  CDR3 for beta chain variable domain of TCR clone 158634 (TRBV20-1, TRBJ2-7)
CSARDRVAGMDEQYF

SEQ ID NO: 317269 - protein, 17 aa, Homo sapiens
  CDR3 for alpha chain variable domain of TCR clone 158635 (TRAV38-1, TRAJ45)
CAFMRSHSGGGADGLTF

SEQ ID NO: 317270 - protein, 12 aa, Homo sapiens
  CDR3 for beta chain variable domain of TCR clone 158635 (TRBV11-2, TRBJ2-2)
CASSLGGGELFF

SEQ ID NO: 317271 - protein, 12 aa, Homo sapiens
  CDR3 for alpha chain variable domain of TCR clone 158636 (TRAV13-2, TRAJ23)
CAERHRGGKLIF

SEQ ID NO: 317272 - protein, 15 aa, Homo sapiens
  CDR3 for beta chain variable domain of TCR clone 158636 (TRBV11-3, TRBJ2-1)
CASSNGGGSSNEQFF

SEQ ID NO: 317273 - protein, 16 aa, Homo sapiens
  CDR3 for alpha chain variable domain of TCR clone 158637 (TRAV3, TRAJ6)
CAVRDGMRRRKLHTYL

SEQ ID NO: 317274 - protein, 15 aa, Homo sapiens
  CDR3 for beta chain variable domain of TCR clone 158637 (TRBV5-1, TRBJ2-1)
CASSLAGSSYNEQFF

SEQ ID NO: 317275 - protein, 14 aa, Homo sapiens
  CDR3 for alpha chain variable domain of TCR clone 158638 (TRAV20, TRAJ32)
CCGRYGGATNKLIF

SEQ ID NO: 317276 - protein, 17 aa, Homo sapiens
  CDR3 for beta chain variable domain of TCR clone 158638 (TRBV7-3, TRBJ2-3)
CASSLMKRMRGADTQYF

SEQ ID NO: 317277 - protein, 14 aa, Homo sapiens
  CDR3 for alpha chain variable domain of TCR clone 158639 (TRAV26-1, TRAJ38)
CIADNAGNNRKLIW

SEQ ID NO: 317278 - protein, 14 aa, Homo sapiens
  CDR3 for beta chain variable domain of TCR clone 158639 (TRBV5-1, TRBJ2-2)
CASSLVEGSGELFF

SEQ ID NO: 317279 - protein, 15 aa, Homo sapiens
  CDR3 for alpha chain variable domain of TCR clone 158640 (TRAV23/DV6, TRAJ27)
CAASKPMQATQPLVM

SEQ ID NO: 317280 - protein, 14 aa, Homo sapiens
  CDR3 for beta chain variable domain of TCR clone 158640 (TRBV5-4, TRBJ1-1)
CASSLDSRRDEAFF

SEQ ID NO: 317281 - protein, 15 aa, Homo sapiens
  CDR3 for alpha chain variable domain of TCR clone 158641 (TRAV12-1, TRAJ26)
CVVNREDNYGQNFVF

SEQ ID NO: 317282 - protein, 13 aa, Homo sapiens
  CDR3 for beta chain variable domain of TCR clone 158641 (TRBV7-7, TRBJ2-3)
CASSLSRADTRYF

SEQ ID NO: 317283 - protein, 14 aa, Homo sapiens
  CDR3 for alpha chain variable domain of TCR clone 158642 (TRAV12-1, TRAJ17)
CVVNYKAAGKKLTF

SEQ ID NO: 317284 - protein, 14 aa, Homo sapiens
  CDR3 for beta chain variable domain of TCR clone 158642 (TRBV7-8, TRBJ2-3)
CASSLEAGTDTQYF

SEQ ID NO: 317285 - protein, 11 aa, Homo sapiens
  CDR3 for alpha chain variable domain of TCR clone 158643 (TRAV26-1, TRAJ37)
CIVRVGRQLIF

SEQ ID NO: 317286 - protein, 15 aa, Homo sapiens
  CDR3 for beta chain variable domain of TCR clone 158643 (TRBV7-2, TRBJ2-2)
CASSPTGANTGELFF

SEQ ID NO: 317287 - protein, 12 aa, Homo sapiens
  CDR3 for alpha chain variable domain of TCR clone 158644 (TRAV12-2, TRAJ44)
WGVTGGGNKLTF

SEQ ID NO: 317288 - protein, 16 aa, Homo sapiens
  CDR3 for beta chain variable domain of TCR clone 158644 (TRBV6-4, TRBJ1-2)
CASSEAVGDPNYGYTF

SEQ ID NO: 317289 - protein, 15 aa, Homo sapiens
  CDR3 for alpha chain variable domain of TCR clone 158645 (TRAV12-3, TRAJ23)
CAMILIYNQGGKLIF

SEQ ID NO: 317290 - protein, 14 aa, Homo sapiens
  CDR3 for beta chain variable domain of TCR clone 158645 (TRBV27, TRBJ1-5)
CASSLDPRNQTQHF

SEQ ID NO: 317291 - protein, 13 aa, Homo sapiens
  CDR3 for alpha chain variable domain of TCR clone 158646 (TRAV36/DV7, TRAJ54)
CAVCTQGAQKLVF

SEQ ID NO: 317292 - protein, 12 aa, Homo sapiens
  CDR3 for beta chain variable domain of TCR clone 158646 (TRBV7-6, TRBJ2-7)
CQQLRSHHEQYF

SEQ ID NO: 317293 - protein, 13 aa, Homo sapiens
  CDR3 for alpha chain variable domain of TCR clone 158647 (TRAV8-4, TRAJ30)
CAVNRNRDDKIIL

SEQ ID NO: 317294 - protein, 17 aa, Homo sapiens
  CDR3 for beta chain variable domain of TCR clone 158647 (TRBV20-1, TRBJ2-2)
CSASGSGQGGLTGELFF

SEQ ID NO: 317295 - protein, 15 aa, Homo sapiens
  CDR3 for alpha chain variable domain of TCR clone 158648 (TRAV21, TRAJ53)
CATLNSGGSNYKLTV

SEQ ID NO: 317296 - protein, 16 aa, Homo sapiens
  CDR3 for beta chain variable domain of TCR clone 158648 (TRBV12-4, TRBJ1-5)
CASSRPVGGSNQPQHF

SEQ ID NO: 317297 - protein, 13 aa, Homo sapiens
  CDR3 for alpha chain variable domain of TCR clone 158649 (TRAV14/DV4, TRAJ23)
CTMREVKGGKLIF

SEQ ID NO: 317298 - protein, 15 aa, Homo sapiens
  CDR3 for beta chain variable domain of TCR clone 158649 (TRBV6-3, TRBJ2-1)
CASSYASDSYNEQFF

SEQ ID NO: 317299 - protein, 13 aa, Homo sapiens
  CDR3 for alpha chain variable domain of TCR clone 158650 (TRAV12-2, TRAJ52)
CAVRGTSSGKLTF

SEQ ID NO: 317300 - protein, 17 aa, Homo sapiens
  CDR3 for beta chain variable domain of TCR clone 158650 (TRBV11-2, TRBJ2-1)
CASSLYPPGVEYNERFF

SEQ ID NO: 317301 - protein, 11 aa, Homo sapiens
  CDR3 for alpha chain variable domain of TCR clone 158651 (TRAV21, TRAJ7)
CAAYWNNRLAF

SEQ ID NO: 317302 - protein, 14 aa, Homo sapiens
  CDR3 for beta chain variable domain of TCR clone 158651 (TRBV4-1, TRBJ2-7)
CASSRTGVAFEQYF

SEQ ID NO: 317303 - protein, 15 aa, Homo sapiens
  CDR3 for alpha chain variable domain of TCR clone 158652 (TRAV8-4, TRAJ48)
CAVSAAYFGNEKLTF

SEQ ID NO: 317304 - protein, 14 aa, Homo sapiens
  CDR3 for beta chain variable domain of TCR clone 158652 (TRBV11-2, TRBJ2-7)
CASSLGAGAYEQYF

SEQ ID NO: 317305 - protein, 13 aa, Homo sapiens
  CDR3 for alpha chain variable domain of TCR clone 158653 (TRAV2, TRAJ40)
CAVVTSGTYKYIF

SEQ ID NO: 317306 - protein, 12 aa, Homo sapiens
  CDR3 for beta chain variable domain of TCR clone 158653 (TRBV20-1, TRBJ2-1)
CSARLGTDEQFF

SEQ ID NO: 317307 - protein, 16 aa, Homo sapiens
  CDR3 for alpha chain variable domain of TCR clone 158654 (TRAV12-2, TRAJ43)
CAGDDMRFGAGTRLTV

SEQ ID NO: 317308 - protein, 14 aa, Homo sapiens
  CDR3 for beta chain variable domain of TCR clone 158654 (TRBV6-1, TRBJ1-3)
CASVQGGGGNTIYF

SEQ ID NO: 317309 - protein, 16 aa, Homo sapiens
  CDR3 for alpha chain variable domain of TCR clone 158655 (TRAV12-3, TRAJ53)
CAMMEFREGSNYKLTF

SEQ ID NO: 317310 - protein, 16 aa, Homo sapiens
  CDR3 for beta chain variable domain of TCR clone 158655 (TRBV4-1, TRBJ1-2)
CASSQDAGQVLYGYTF

SEQ ID NO: 317311 - protein, 20 aa, Homo sapiens
  CDR3 for alpha chain variable domain of TCR clone 158656 (TRAV26-1, TRAJ42)
CCVLLHRQTYYGGSQGNLIF

SEQ ID NO: 317312 - protein, 15 aa, Homo sapiens
  CDR3 for beta chain variable domain of TCR clone 158656 (TRBV7-6, TRBJ1-2)
CASSSGGRGGYGYTF

SEQ ID NO: 317313 - protein, 14 aa, Homo sapiens
  CDR3 for alpha chain variable domain of TCR clone 158657 (TRAV16, TRAJ37)
CALDISGNTGKLIF

SEQ ID NO: 317314 - protein, 14 aa, Homo sapiens
  CDR3 for beta chain variable domain of TCR clone 158657 (TRBV7-6, TRBJ2-7)
CASSFRQGADDQYF

SEQ ID NO: 317315 - protein, 12 aa, Homo sapiens
  CDR3 for alpha chain variable domain of TCR clone 158658 (TRAV17, TRAJ49)
CATVTTGNQFYF

SEQ ID NO: 317316 - protein, 14 aa, Homo sapiens
  CDR3 for beta chain variable domain of TCR clone 158658 (TRBV7-2, TRBJ2-7)
CASSPKTSFYEQYF

SEQ ID NO: 317317 - protein, 13 aa, Homo sapiens
  CDR3 for alpha chain variable domain of TCR clone 158659 (TRAV14/DV4, TRAJ20)
CAMRESNDYKLSF

SEQ ID NO: 317318 - protein, 13 aa, Homo sapiens
  CDR3 for beta chain variable domain of TCR clone 158659 (TRBV7-9, TRBJ1-2)
CASSLKQNYGYTF

SEQ ID NO: 317319 - protein, 14 aa, Homo sapiens
  CDR3 for alpha chain variable domain of TCR clone 158660 (TRAV1-2, TRAJ16)
CAVNRFSDCQKLLF

SEQ ID NO: 317320 - protein, 14 aa, Homo sapiens
  CDR3 for beta chain variable domain of TCR clone 158660 (TRBV20-1, TRBJ2-7)
CSARRSGSSYEQYF

SEQ ID NO: 317321 - protein, 16 aa, Homo sapiens
  CDR3 for alpha chain variable domain of TCR clone 158661 (TRAV12-1, TRAJ8)
CVVNGRGNTGLQKLVF

SEQ ID NO: 317322 - protein, 15 aa, Homo sapiens
  CDR3 for beta chain variable domain of TCR clone 158661 (TRBV6-1, TRBJ1-2)
CASNPGRGGSYGYTF

SEQ ID NO: 317323 - protein, 14 aa, Homo sapiens
  CDR3 for alpha chain variable domain of TCR clone 158662 (TRAV13-1, TRAJ6)
CAASGPGGSYIPPF

SEQ ID NO: 317324 - protein, 15 aa, Homo sapiens
  CDR3 for beta chain variable domain of TCR clone 158662 (TRBV27, TRBJ2-1)
CASSPLAGGANEQFF

SEQ ID NO: 317325 - protein, 13 aa, Homo sapiens
  CDR3 for alpha chain variable domain of TCR clone 158663 (TRAV3, TRAJ41)
CAVSSNYGYALNF

SEQ ID NO: 317326 - protein, 11 aa, Homo sapiens
  CDR3 for beta chain variable domain of TCR clone 158663 (TRBV2, TRBJ2-1)
CQQTRAPEQFF

SEQ ID NO: 317327 - protein, 11 aa, Homo sapiens
  CDR3 for alpha chain variable domain of TCR clone 158664 (TRAV21, TRAJ9)
CAVPGVFKTIF

SEQ ID NO: 317328 - protein, 17 aa, Homo sapiens
  CDR3 for beta chain variable domain of TCR clone 158664 (TRBV7-9, TRBJ2-5)
CATSVGARDPVLRARHA

SEQ ID NO: 317329 - protein, 14 aa, Homo sapiens
  CDR3 for alpha chain variable domain of TCR clone 158665 (TRAV8-4, TRAJ48)
CAVSETFGNEKLTF

SEQ ID NO: 317330 - protein, 15 aa, Homo sapiens
  CDR3 for beta chain variable domain of TCR clone 158665 (TRBV9, TRBJ1-6)
CASSVAGTGDSPLHF

SEQ ID NO: 317331 - protein, 16 aa, Homo sapiens
  CDR3 for alpha chain variable domain of TCR clone 158666 (TRAV23/DV6, TRAJ9)
CAASIGGNTGGFKTIF

SEQ ID NO: 317332 - protein, 12 aa, Homo sapiens
  CDR3 for beta chain variable domain of TCR clone 158666 (TRBV11-2, TRBJ2-1)
CASSVQREAQFF

SEQ ID NO: 317333 - protein, 17 aa, Homo sapiens
  CDR3 for alpha chain variable domain of TCR clone 158667 (TRAV3, TRAJ7)
CAVRDMSPLAGTTDSLL

SEQ ID NO: 317334 - protein, 17 aa, Homo sapiens
  CDR3 for beta chain variable domain of TCR clone 158667 (TRBV15, TRBJ1-2)
CATSGREIDVVNYGYTF

SEQ ID NO: 317335 - protein, 13 aa, Homo sapiens
  CDR3 for alpha chain variable domain of TCR clone 158668 (TRAV17, TRAJ29)
CATGPSGNTHLVF

SEQ ID NO: 317336 - protein, 14 aa, Homo sapiens
  CDR3 for beta chain variable domain of TCR clone 158668 (TRBV2, TRBJ1-6)
CASEVSSYNSPLHF

SEQ ID NO: 317337 - protein, 13 aa, Homo sapiens
  CDR3 for alpha chain variable domain of TCR clone 158669 (TRAV1-2, TRAJ9)
CAVLNTGGFKTIF

SEQ ID NO: 317338 - protein, 14 aa, Homo sapiens
  CDR3 for beta chain variable domain of TCR clone 158669 (TRBV20-1, TRBJ2-3)
CSARGGTSTDTPYF

SEQ ID NO: 317339 - protein, 13 aa, Homo sapiens
  CDR3 for alpha chain variable domain of TCR clone 158670 (TRAV21, TRAJ36)
CAVFKTGANNLFF

SEQ ID NO: 317340 - protein, 13 aa, Homo sapiens
  CDR3 for beta chain variable domain of TCR clone 158670 (TRBV29-1, TRBJ2-3)
CSATRGGRDTQYF

SEQ ID NO: 317341 - protein, 14 aa, Homo sapiens
  CDR3 for alpha chain variable domain of TCR clone 158671 (TRAV1-2, TRAJ8)
CAVREDTGFQKLVF

SEQ ID NO: 317342 - protein, 15 aa, Homo sapiens
  CDR3 for beta chain variable domain of TCR clone 158671 (TRBV12-4, TRBJ1-1)
CASSLAVSRGAEAFF

SEQ ID NO: 317343 - protein, 15 aa, Homo sapiens
  CDR3 for alpha chain variable domain of TCR clone 158672 (TRAV26-1, TRAJ40)
CIVRVTTSGTYKYIF

SEQ ID NO: 317344 - protein, 14 aa, Homo sapiens
  CDR3 for beta chain variable domain of TCR clone 158672 (TRBV27, TRBJ2-1)
CASRHLGGGKEQFF

SEQ ID NO: 317345 - protein, 12 aa, Homo sapiens
  CDR3 for alpha chain variable domain of TCR clone 158673 (TRAV12-3, TRAJ17)
CAMTLTGNKLPF

SEQ ID NO: 317346 - protein, 11 aa, Homo sapiens
  CDR3 for beta chain variable domain of TCR clone 158673 (TRBV12-4, TRBJ2-2)
CASSSAGELFF

SEQ ID NO: 317347 - protein, 13 aa, Homo sapiens
  CDR3 for alpha chain variable domain of TCR clone 158674 (TRAV13-2, TRAJ48)
CAEMDFGNEKLTF

SEQ ID NO: 317348 - protein, 15 aa, Homo sapiens
  CDR3 for beta chain variable domain of TCR clone 158674 (TRBV7-9, TRBJ1-6)
CASRYPGRGNSPLHF

SEQ ID NO: 317349 - protein, 15 aa, Homo sapiens
  CDR3 for alpha chain variable domain of TCR clone 158675 (TRAV1-2, TRAJ30)
CAVRPHGNRDDKIIF

SEQ ID NO: 317350 - protein, 18 aa, Homo sapiens
  CDR3 for beta chain variable domain of TCR clone 158675 (TRBV25-1, TRBJ1-2)
CASSGLQNGQGLIFGYTF

SEQ ID NO: 317351 - protein, 19 aa, Homo sapiens
  CDR3 for alpha chain variable domain of TCR clone 158676 (TRAV29/DV5, TRAJ49)
CSVLLCSKLTVDTGNQFYF

SEQ ID NO: 317352 - protein, 17 aa, Homo sapiens
  CDR3 for beta chain variable domain of TCR clone 158676 (TRBV13, TRBJ2-3)
CASSLSRVPGGRNTQYF

SEQ ID NO: 317353 - protein, 14 aa, Homo sapiens
  CDR3 for alpha chain variable domain of TCR clone 158677 (TRAV2, TRAJ9)
CAVEDRSGGFKTIF

SEQ ID NO: 317354 - protein, 17 aa, Homo sapiens
  CDR3 for beta chain variable domain of TCR clone 158677 (TRBV4-1, TRBJ2-7)
CASSRDPLGGRGGEQYF

SEQ ID NO: 317355 - protein, 15 aa, Homo sapiens
  CDR3 for alpha chain variable domain of TCR clone 158678 (TRAV13-2, TRAJ10)
CAENRDTGGGNKLTF

SEQ ID NO: 317356 - protein, 15 aa, Homo sapiens
  CDR3 for beta chain variable domain of TCR clone 158678 (TRBV11-3, TRBJ2-3)
CASLKDGREGDTQYF

SEQ ID NO: 317357 - protein, 16 aa, Homo sapiens
  CDR3 for alpha chain variable domain of TCR clone 158679 (TRAV3, TRAJ37)
CAVRPHGSGNTGKLKF

SEQ ID NO: 317358 - protein, 11 aa, Homo sapiens
  CDR3 for beta chain variable domain of TCR clone 158679 (TRBV10-3, TRBJ2-7)
CAISEGLEQYF

SEQ ID NO: 317359 - protein, 16 aa, Homo sapiens
  CDR3 for alpha chain variable domain of TCR clone 158680 (TRAV12-3, TRAJ28)
CPMRANSGAGSYQLTF

SEQ ID NO: 317360 - protein, 16 aa, Homo sapiens
  CDR3 for beta chain variable domain of TCR clone 158680 (TRBV7-2, TRBJ1-3)
CASSRLEASSGNTIYF

SEQ ID NO: 317361 - protein, 15 aa, Homo sapiens
  CDR3 for alpha chain variable domain of TCR clone 158681 (TRAV12-3, TRAJ38)
CAARRNAGNNRKLIW

SEQ ID NO: 317362 - protein, 13 aa, Homo sapiens
  CDR3 for beta chain variable domain of TCR clone 158681 (TRBV12-5, TRBJ2-3)
CASGDRQSDTQYF

SEQ ID NO: 317363 - protein, 11 aa, Homo sapiens
  CDR3 for alpha chain variable domain of TCR clone 158682 (TRAV17, TRAJ43)
CATPRSNDMRF

SEQ ID NO: 317364 - protein, 13 aa, Homo sapiens
  CDR3 for beta chain variable domain of TCR clone 158682 (TRBV10-3, TRBJ2-7)
CASKLAVNYEQYF

SEQ ID NO: 317365 - protein, 13 aa, Homo sapiens
  CDR3 for alpha chain variable domain of TCR clone 158683 (TRAV3, TRAJ21)
CAVREPAFNKFYF

SEQ ID NO: 317366 - protein, 14 aa, Homo sapiens
  CDR3 for beta chain variable domain of TCR clone 158683 (TRBV7-2, TRBJ2-7)
CASRSQGAAYEQYF

SEQ ID NO: 317367 - protein, 14 aa, Homo sapiens
  CDR3 for alpha chain variable domain of TCR clone 158684 (TRAV12-3, TRAJ10)
SHLPLTGGGSKLTF

SEQ ID NO: 317368 - protein, 13 aa, Homo sapiens
  CDR3 for beta chain variable domain of TCR clone 158684 (TRBV5-1, TRBJ1-1)
CASSLTRESDAFF

SEQ ID NO: 317369 - protein, 12 aa, Homo sapiens
  CDR3 for alpha chain variable domain of TCR clone 158685 (TRAV20, TRAJ33)
CAVRGRNYQLIW

SEQ ID NO: 317370 - protein, 13 aa, Homo sapiens
  CDR3 for beta chain variable domain of TCR clone 158685 (TRBV4-3, TRBJ1-1)
CASSPAGNTEAFF

SEQ ID NO: 317371 - protein, 14 aa, Homo sapiens
  CDR3 for alpha chain variable domain of TCR clone 158686 (TRAV35, TRAJ53)
GRVNSGGSNYKLTF

SEQ ID NO: 317372 - protein, 15 aa, Homo sapiens
  CDR3 for beta chain variable domain of TCR clone 158686 (TRBV7-3, TRBJ2-1)
CASSLASGRVNEQFF

SEQ ID NO: 317373 - protein, 15 aa, Homo sapiens
  CDR3 for alpha chain variable domain of TCR clone 158687 (TRAV23/DV6, TRAJ28)
CAALLAYSGAGSYQL

SEQ ID NO: 317374 - protein, 14 aa, Homo sapiens
  CDR3 for beta chain variable domain of TCR clone 158687 (TRBV4-2, TRBJ2-3)
CASSQPVLTDTQYF

SEQ ID NO: 317375 - protein, 13 aa, Homo sapiens
  CDR3 for alpha chain variable domain of TCR clone 158688 (TRAV13-2, TRAJ5)
CAESDTGRRALTF

SEQ ID NO: 317376 - protein, 15 aa, Homo sapiens
  CDR3 for beta chain variable domain of TCR clone 158688 (TRBV20-1, TRBJ2-7)
CSARDRVSGMDEQYF

SEQ ID NO: 317377 - protein, 12 aa, Homo sapiens
  CDR3 for alpha chain variable domain of TCR clone 158689 (TRAV12-2, TRAJ4)
GWPEGGYNKLIF

SEQ ID NO: 317378 - protein, 15 aa, Homo sapiens
  CDR3 for beta chain variable domain of TCR clone 158689 (TRBV7-2, TRBJ2-1)
CASSSGLEGGNEQFF

SEQ ID NO: 317379 - protein, 14 aa, Homo sapiens
  CDR3 for alpha chain variable domain of TCR clone 158690 (TRAV13-1, TRAJ39)
CAASKNNAGSMLTF

SEQ ID NO: 317380 - protein, 15 aa, Homo sapiens
  CDR3 for beta chain variable domain of TCR clone 158690 (TRBV7-9, TRBJ1-6)
CASSSPGRGNSPLHF

SEQ ID NO: 317381 - protein, 12 aa, Homo sapiens
  CDR3 for alpha chain variable domain of TCR clone 158691 (TRAV12-1, TRAJ40)
CVVYSVTYKYIF

SEQ ID NO: 317382 - protein, 18 aa, Homo sapiens
  CDR3 for beta chain variable domain of TCR clone 158691 (TRBV11-2, TRBJ2-3)
CARSLGGASRGAPNTQYF

SEQ ID NO: 317383 - protein, 14 aa, Homo sapiens
  CDR3 for alpha chain variable domain of TCR clone 158692 (TRAV12-2, TRAJ13)
CAVKKTGGYQEVTF

SEQ ID NO: 317384 - protein, 15 aa, Homo sapiens
  CDR3 for beta chain variable domain of TCR clone 158692 (TRBV6-3, TRBJ2-7)
CASSSPGTVFYEQYF

SEQ ID NO: 317385 - protein, 14 aa, Homo sapiens
  CDR3 for alpha chain variable domain of TCR clone 158693 (TRAV12-3, TRAJ10)
SHLPLTGGGNKLTF

SEQ ID NO: 317386 - protein, 13 aa, Homo sapiens
  CDR3 for beta chain variable domain of TCR clone 158693 (TRBV4-2, TRBJ1-2)
CASSLSASGGYTF

SEQ ID NO: 317387 - protein, 23 aa, Homo sapiens
  CDR3 for alpha chain variable domain of TCR clone 158694 (TRAV12-2, TRAJ40)
CAVKIPSGTYKIHLWNRHPAEGF

SEQ ID NO: 317388 - protein, 14 aa, Homo sapiens
  CDR3 for beta chain variable domain of TCR clone 158694 (TRBV20-1, TRBJ1-1)
CSAQTRIGGTEAFF

SEQ ID NO: 317389 - protein, 12 aa, Homo sapiens
  CDR3 for alpha chain variable domain of TCR clone 158695 (TRAV12-1, TRAJ40)
CVVYSGTYKYIF

SEQ ID NO: 317390 - protein, 18 aa, Homo sapiens
  CDR3 for beta chain variable domain of TCR clone 158695 (TRBV11-2, TRBJ2-3)
CASSFGGASRGAPNTQCF

SEQ ID NO: 317391 - protein, 15 aa, Homo sapiens
  CDR3 for alpha chain variable domain of TCR clone 158696 (TRAV13-1, TRAJ57)
CVASNTQGGSEKLVF

SEQ ID NO: 317392 - protein, 16 aa, Homo sapiens
  CDR3 for beta chain variable domain of TCR clone 158696 (TRBV19, TRBJ2-1)
CASSKAGPSSYNEQFF

SEQ ID NO: 317393 - protein, 15 aa, Homo sapiens
  CDR3 for alpha chain variable domain of TCR clone 158697 (TRAV8-2, TRAJ45)
CCDHPSGGGADGLTF

SEQ ID NO: 317394 - protein, 14 aa, Homo sapiens
  CDR3 for beta chain variable domain of TCR clone 158697 (TRBV7-2, TRBJ1-1)
CASSFLTGTTEAFF

SEQ ID NO: 317395 - protein, 15 aa, Homo sapiens
  CDR3 for alpha chain variable domain of TCR clone 158698 (TRAV26-2, TRAJ28)
CILVESWAGSYQLTF

SEQ ID NO: 317396 - protein, 16 aa, Homo sapiens
  CDR3 for beta chain variable domain of TCR clone 158698 (TRBV4-2, TRBJ1-2)
CASSQEIGGASYGYTF

SEQ ID NO: 317397 - protein, 14 aa, Homo sapiens
  CDR3 for alpha chain variable domain of TCR clone 158699 (TRAV17, TRAJ56)
CATVPAGANSKLTF

SEQ ID NO: 317398 - protein, 18 aa, Homo sapiens
  CDR3 for beta chain variable domain of TCR clone 158699 (TRBV20-1, TRBJ2-6)
CSAETTPTHGSGANVLTF

SEQ ID NO: 317399 - protein, 15 aa, Homo sapiens
  CDR3 for alpha chain variable domain of TCR clone 158700 (TRAV8-3, TRAJ11)
CAVGLWNSGYSTLTC

SEQ ID NO: 317400 - protein, 16 aa, Homo sapiens
  CDR3 for beta chain variable domain of TCR clone 158700 (TRBV7-9, TRBJ1-2)
CASSLGFSSGEDGYTF

SEQ ID NO: 317401 - protein, 14 aa, Homo sapiens
  CDR3 for alpha chain variable domain of TCR clone 158701 (TRAV12-2, TRAJ11)
CALNRESGYSTLTF

SEQ ID NO: 317402 - protein, 10 aa, Homo sapiens
  CDR3 for beta chain variable domain of TCR clone 158701 (TRBV20-1, TRBJ2-5)
CSARFETQYF

SEQ ID NO: 317403 - protein, 15 aa, Homo sapiens
  CDR3 for alpha chain variable domain of TCR clone 158702 (TRAV1-2, TRAJ28)
CAVQYSGAGRYQLTF

SEQ ID NO: 317404 - protein, 12 aa, Homo sapiens
  CDR3 for beta chain variable domain of TCR clone 158702 (TRBV7-9, TRBJ1-4)
CASSTDREKLFF

SEQ ID NO: 317405 - protein, 12 aa, Homo sapiens
  CDR3 for alpha chain variable domain of TCR clone 158703 (TRAV13-1, TRAJ21)
CAAKEGFNKFYF

SEQ ID NO: 317406 - protein, 17 aa, Homo sapiens
  CDR3 for beta chain variable domain of TCR clone 158703 (TRBV20-1, TRBJ2-1)
CSARDPLAGVWDNEQFF

SEQ ID NO: 317407 - protein, 12 aa, Homo sapiens
  CDR3 for alpha chain variable domain of TCR clone 158704 (TRAV12-1, TRAJ31)
CVVNKDNARLMF

SEQ ID NO: 317408 - protein, 14 aa, Homo sapiens
  CDR3 for beta chain variable domain of TCR clone 158704 (TRBV12-5, TRBJ2-5)
CASGSRTHQETQYF

SEQ ID NO: 317409 - protein, 11 aa, Homo sapiens
  CDR3 for alpha chain variable domain of TCR clone 158705 (TRAV12-1, TRAJ43)
CVEYDNNDMRF

SEQ ID NO: 317410 - protein, 17 aa, Homo sapiens
  CDR3 for beta chain variable domain of TCR clone 158705 (TRBV20-1, TRBJ2-1)
CSARDPLAGVGDNEQFF

SEQ ID NO: 317411 - protein, 17 aa, Homo sapiens
  CDR3 for alpha chain variable domain of TCR clone 158706 (TRAV35, TRAJ47)
GLLDFRTPTEYGNKLVF

SEQ ID NO: 317412 - protein, 11 aa, Homo sapiens
  CDR3 for beta chain variable domain of TCR clone 158706 (TRBV29-1, TRBJ1-1)
CSVEVGTRTFF

SEQ ID NO: 317413 - protein, 13 aa, Homo sapiens
  CDR3 for alpha chain variable domain of TCR clone 158707 (TRAV8-3, TRAJ48)
CCGCSFGNETLTF

SEQ ID NO: 317414 - protein, 12 aa, Homo sapiens
  CDR3 for beta chain variable domain of TCR clone 158707 (TRBV7-2, TRBJ2-5)
CASSQYQETQYF

SEQ ID NO: 317415 - protein, 12 aa, Homo sapiens
  CDR3 for alpha chain variable domain of TCR clone 158708 (TRAV13-1, TRAJ48)
CAANFGNEKLTF

SEQ ID NO: 317416 - protein, 12 aa, Homo sapiens
  CDR3 for beta chain variable domain of TCR clone 158708 (TRBV11-3, TRBJ2-1)
CASSPGNNEQFF

SEQ ID NO: 317417 - protein, 15 aa, Homo sapiens
  CDR3 for alpha chain variable domain of TCR clone 158709 (TRAV12-3, TRAJ6)
CAMSAASGGSYIPTF

SEQ ID NO: 317418 - protein, 14 aa, Homo sapiens
  CDR3 for beta chain variable domain of TCR clone 158709 (TRBV19, TRBJ2-1)
CASPTFVLSGEQFF

SEQ ID NO: 317419 - protein, 16 aa, Homo sapiens
  CDR3 for alpha chain variable domain of TCR clone 158710 (TRAV29/DV5, TRAJ42)
CAAGGNYGGSQGNLIF

SEQ ID NO: 317420 - protein, 13 aa, Homo sapiens
  CDR3 for beta chain variable domain of TCR clone 158710 (TRBV7-9, TRBJ1-2)
CASSLKQNYGYTF

SEQ ID NO: 317421 - protein, 14 aa, Homo sapiens
  CDR3 for alpha chain variable domain of TCR clone 158711 (TRAV3, TRAJ9)
CAVRLNTVGSKTIF

SEQ ID NO: 317422 - protein, 15 aa, Homo sapiens
  CDR3 for beta chain variable domain of TCR clone 158711 (TRBV7-2, TRBJ2-1)
CASSLASGRVNEQFF

SEQ ID NO: 317423 - protein, 11 aa, Homo sapiens
  CDR3 for alpha chain variable domain of TCR clone 158712 (TRAV21, TRAJ34)
CAHYNTDKLIF

SEQ ID NO: 317424 - protein, 16 aa, Homo sapiens
  CDR3 for beta chain variable domain of TCR clone 158712 (TRBV11-2, TRBJ2-1)
CASSPRLAGVYNEQFF

SEQ ID NO: 317425 - protein, 15 aa, Homo sapiens
  CDR3 for alpha chain variable domain of TCR clone 158713 (TRAV27, TRAJ38)
CAARRHAGNNRKLIW

SEQ ID NO: 317426 - protein, 13 aa, Homo sapiens
  CDR3 for beta chain variable domain of TCR clone 158713 (TRBV28, TRBJ2-5)
CAGVSRGEETQYF

SEQ ID NO: 317427 - protein, 13 aa, Homo sapiens
  CDR3 for alpha chain variable domain of TCR clone 158714 (TRAV21, TRAJ57)
CAVTQGGSEKLVF

SEQ ID NO: 317428 - protein, 14 aa, Homo sapiens
  CDR3 for beta chain variable domain of TCR clone 158714 (TRBV19, TRBJ2-7)
CASSIFAGTYEQYF

SEQ ID NO: 317429 - protein, 12 aa, Homo sapiens
  CDR3 for alpha chain variable domain of TCR clone 158715 (TRAV13-1, TRAJ42)
SVLRGSQGYLIF

SEQ ID NO: 317430 - protein, 13 aa, Homo sapiens
  CDR3 for beta chain variable domain of TCR clone 158715 (TRBV2, TRBJ1-4)
CASSELGVEKLFF

SEQ ID NO: 317431 - protein, 13 aa, Homo sapiens
  CDR3 for alpha chain variable domain of TCR clone 158716 (TRAV26-2, TRAJ43)
CILRAVNNNDMRL

SEQ ID NO: 317432 - protein, 13 aa, Homo sapiens
  CDR3 for beta chain variable domain of TCR clone 158716 (TRBV14, TRBJ2-1)
CASSQDRRNEQFF

SEQ ID NO: 317433 - protein, 14 aa, Homo sapiens
  CDR3 for alpha chain variable domain of TCR clone 158717 (TRAV1-2, TRAJ16)
CAVNRFSDGQKLLF

SEQ ID NO: 317434 - protein, 17 aa, Homo sapiens
  CDR3 for beta chain variable domain of TCR clone 158717 (TRBV7-9, TRBJ1-4)
CASSSGQLGGRSEKLFF

SEQ ID NO: 317435 - protein, 14 aa, Homo sapiens
  CDR3 for alpha chain variable domain of TCR clone 158718 (TRAV6, TRAJ37)
CALGSQGNTGKLIL

SEQ ID NO: 317436 - protein, 15 aa, Homo sapiens
  CDR3 for beta chain variable domain of TCR clone 158718 (TRBV2, TRBJ2-1)
CASSEEREGDNEQFF

SEQ ID NO: 317437 - protein, 15 aa, Homo sapiens
  CDR3 for alpha chain variable domain of TCR clone 158719 (TRAV26-1, TRAJ37)
CIVRLGSGNTGKLIF

SEQ ID NO: 317438 - protein, 16 aa, Homo sapiens
  CDR3 for beta chain variable domain of TCR clone 158719 (TRBV7-3, TRBJ2-1)
CASSKPLAGGYNEQFF

SEQ ID NO: 317439 - protein, 16 aa, Homo sapiens
  CDR3 for alpha chain variable domain of TCR clone 158720 (TRAV38-1, TRAJ42)
CAFRLVRGGSQGNPIF

SEQ ID NO: 317440 - protein, 15 aa, Homo sapiens
  CDR3 for beta chain variable domain of TCR clone 158720 (TRBV7-2, TRBJ1-2)
CASSITWTGNYGYTF

SEQ ID NO: 317441 - protein, 12 aa, Homo sapiens
  CDR3 for alpha chain variable domain of TCR clone 158721 (TRAV21, TRAJ27)
CAANTNAGKPTF

SEQ ID NO: 317442 - protein, 13 aa, Homo sapiens
  CDR3 for beta chain variable domain of TCR clone 158721 (TRBV19, TRBJ1-2)
CASSVPGQDGYTF

SEQ ID NO: 317443 - protein, 16 aa, Homo sapiens
  CDR3 for alpha chain variable domain of TCR clone 158722 (TRAV16, TRAJ54)
CALSPPLIQGAQKLVF

SEQ ID NO: 317444 - protein, 16 aa, Homo sapiens
  CDR3 for beta chain variable domain of TCR clone 158722 (TRBV7-3, TRBJ2-2)
CASSLKRGTLSGELFF

SEQ ID NO: 317445 - protein, 13 aa, Homo sapiens
  CDR3 for alpha chain variable domain of TCR clone 158723 (TRAV20, TRAJ49)
CAVQARTGHQFYF

SEQ ID NO: 317446 - protein, 14 aa, Homo sapiens
  CDR3 for beta chain variable domain of TCR clone 158723 (TRBV7-2, TRBJ2-7)
CASSPKTSFYEQYF

SEQ ID NO: 317447 - protein, 12 aa, Homo sapiens
  CDR3 for alpha chain variable domain of TCR clone 158724 (TRAV13-1, TRAJ21)
CAAKEGFNKFYF

SEQ ID NO: 317448 - protein, 12 aa, Homo sapiens
  CDR3 for beta chain variable domain of TCR clone 158724 (TRBV5-1, TRBJ2-4)
LAGEWTKNIQYF

SEQ ID NO: 317449 - protein, 12 aa, Homo sapiens
  CDR3 for alpha chain variable domain of TCR clone 158725 (TRAV16, TRAJ10)
CSRTGGGNKLTF

SEQ ID NO: 317450 - protein, 12 aa, Homo sapiens
  CDR3 for beta chain variable domain of TCR clone 158725 (TRBV7-8, TRBJ2-1)
CASSLGHNEQFF

SEQ ID NO: 317451 - protein, 13 aa, Homo sapiens
  CDR3 for alpha chain variable domain of TCR clone 158726 (TRAV17, TRAJ5)
CSLRRTGRRALTF

SEQ ID NO: 317452 - protein, 15 aa, Homo sapiens
  CDR3 for beta chain variable domain of TCR clone 158726 (TRBV6-1, TRBJ1-5)
CASSELREGNQPQHF

SEQ ID NO: 317453 - protein, 14 aa, Homo sapiens
  CDR3 for alpha chain variable domain of TCR clone 158727 (TRAV16, TRAJ3)
CALSQYSSASKIIF

SEQ ID NO: 317454 - protein, 17 aa, Homo sapiens
  CDR3 for beta chain variable domain of TCR clone 158727 (TRBV13, TRBJ2-3)
CASSLSRVAGGRNTQYF

SEQ ID NO: 317455 - protein, 15 aa, Homo sapiens
  CDR3 for alpha chain variable domain of TCR clone 158728 (TRAV29/DV5, TRAJ10)
CAAFWITGGGNKLTF

SEQ ID NO: 317456 - protein, 13 aa, Homo sapiens
  CDR3 for beta chain variable domain of TCR clone 158728 (TRBV10-2, TRBJ2-5)
CASGRLARETQYF

SEQ ID NO: 317457 - protein, 18 aa, Homo sapiens
  CDR3 for alpha chain variable domain of TCR clone 158729 (TRAV21, TRAJ52)
CAVRPSPAGGTSYGKLTF

SEQ ID NO: 317458 - protein, 16 aa, Homo sapiens
  CDR3 for beta chain variable domain of TCR clone 158729 (TRBV7-2, TRBJ2-3)
CASSLAGAGSGDTQYF

SEQ ID NO: 317459 - protein, 11 aa, Homo sapiens
  CDR3 for alpha chain variable domain of TCR clone 158730 (TRAV17, TRAJ9)
GATTGGFKTIF

SEQ ID NO: 317460 - protein, 14 aa, Homo sapiens
  CDR3 for beta chain variable domain of TCR clone 158730 (TRBV7-9, TRBJ2-2)
CASSGLADTGELFF

SEQ ID NO: 317461 - protein, 15 aa, Homo sapiens
  CDR3 for alpha chain variable domain of TCR clone 158731 (TRAV21, TRAJ53)
CATLNSGGSNYKLTF

SEQ ID NO: 317462 - protein, 15 aa, Homo sapiens
  CDR3 for beta chain variable domain of TCR clone 158731 (TRBV9, TRBJ1-6)
CARSVAGTGDSPLHF

SEQ ID NO: 317463 - protein, 14 aa, Homo sapiens
  CDR3 for alpha chain variable domain of TCR clone 158732 (TRAV3, TRAJ20)
CAVRDSFNDYKLSF

SEQ ID NO: 317464 - protein, 14 aa, Homo sapiens
  CDR3 for beta chain variable domain of TCR clone 158732 (TRBV19, TRBJ2-1)
CASPTLVLSGEQFF

SEQ ID NO: 317465 - protein, 15 aa, Homo sapiens
  CDR3 for alpha chain variable domain of TCR clone 158733 (TRAV3, TRAJ20)
CAVRDIKLSDYKLSF

SEQ ID NO: 317466 - protein, 12 aa, Homo sapiens
  CDR3 for beta chain variable domain of TCR clone 158733 (TRBV3-1, TRBJ2-2)
CASSLFPGELFF

SEQ ID NO: 317467 - protein, 15 aa, Homo sapiens
  CDR3 for alpha chain variable domain of TCR clone 158734 (TRAV8-3, TRAJ45)
CASLYSGGGADGLTF

SEQ ID NO: 317468 - protein, 13 aa, Homo sapiens
  CDR3 for beta chain variable domain of TCR clone 158734 (TRBV10-3, TRBJ2-7)
CASKLAVSYEQYF

SEQ ID NO: 317469 - protein, 19 aa, Homo sapiens
  CDR3 for alpha chain variable domain of TCR clone 158735 (TRAV3, TRAJ6)
CAVRDRNPSRSGGSYIPTF

SEQ ID NO: 317470 - protein, 15 aa, Homo sapiens
  CDR3 for beta chain variable domain of TCR clone 158735 (TRBV18, TRBJ2-7)
CASSPTFMDSYEQHF

SEQ ID NO: 317471 - protein, 14 aa, Homo sapiens
  CDR3 for alpha chain variable domain of TCR clone 158736 (TRAV1-2, TRAJ8)
CAVREDTGFQKLVF

SEQ ID NO: 317472 - protein, 17 aa, Homo sapiens
  CDR3 for beta chain variable domain of TCR clone 158736 (TRBV20-1, TRBJ2-1)
CSASSSGPAGSYNEQFF

SEQ ID NO: 317473 - protein, 15 aa, Homo sapiens
  CDR3 for alpha chain variable domain of TCR clone 158737 (TRAV12-3, TRAJ6)
CAMSATSGGSYIPTF

SEQ ID NO: 317474 - protein, 13 aa, Homo sapiens
  CDR3 for beta chain variable domain of TCR clone 158737 (TRBV4-2, TRBJ1-1)
CASSQAGNTEAFF

SEQ ID NO: 317475 - protein, 13 aa, Homo sapiens
  CDR3 for alpha chain variable domain of TCR clone 158738 (TRAV12-3, TRAJ33)
CAMSVNSNYQLIW

SEQ ID NO: 317476 - protein, 13 aa, Homo sapiens
  CDR3 for beta chain variable domain of TCR clone 158738 (TRBV29-1, TRBJ2-7)
CSVKRGGNYEQYF

SEQ ID NO: 317477 - protein, 17 aa, Homo sapiens
  CDR3 for alpha chain variable domain of TCR clone 158739 (TRAV3, TRAJ6)
CAVRDGPRAGGSYIPTF

SEQ ID NO: 317478 - protein, 15 aa, Homo sapiens
  CDR3 for beta chain variable domain of TCR clone 158739 (TRBV7-3, TRBJ2-1)
CASSLDGNSYNEQFF

SEQ ID NO: 317479 - protein, 13 aa, Homo sapiens
  CDR3 for alpha chain variable domain of TCR clone 158740 (TRAV35, TRAJ36)
CAGRRIGANNLFF

SEQ ID NO: 317480 - protein, 15 aa, Homo sapiens
  CDR3 for beta chain variable domain of TCR clone 158740 (TRBV28, TRBJ2-5)
CASSPPWSYKETQYF

SEQ ID NO: 317481 - protein, 13 aa, Homo sapiens
  CDR3 for alpha chain variable domain of TCR clone 158741 (TRAV13-1, TRAJ12)
CAASPDSSYKLIF

SEQ ID NO: 317482 - protein, 13 aa, Homo sapiens
  CDR3 for beta chain variable domain of TCR clone 158741 (TRBV4-1, TRBJ2-2)
CASSQEKTGELFF

SEQ ID NO: 317483 - protein, 17 aa, Homo sapiens
  CDR3 for alpha chain variable domain of TCR clone 158742 (TRAV26-1, TRAJ37)
CIVRVITVSSNTGKLIF

SEQ ID NO: 317484 - protein, 15 aa, Homo sapiens
  CDR3 for beta chain variable domain of TCR clone 158742 (TRBV5-1, TRBJ2-5)
CASSFKGGDQETQYF

SEQ ID NO: 317485 - protein, 14 aa, Homo sapiens
  CDR3 for alpha chain variable domain of TCR clone 158743 (TRAV2, TRAJ9)
CAVEGRSGGFKTIF

SEQ ID NO: 317486 - protein, 16 aa, Homo sapiens
  CDR3 for beta chain variable domain of TCR clone 158743 (TRBV7-3, TRBJ2-1)
CASSLEGYRSYNEQFF

SEQ ID NO: 317487 - protein, 21 aa, Homo sapiens
  CDR3 for alpha chain variable domain of TCR clone 158744 (TRAV8-3, TRAJ32)
CAVEVVLQTGSSLELALCLLS

SEQ ID NO: 317488 - protein, 15 aa, Homo sapiens
  CDR3 for beta chain variable domain of TCR clone 158744 (TRBV7-2, TRBJ2-1)
CASSSRTSREDEHFF

SEQ ID NO: 317489 - protein, 12 aa, Homo sapiens
  CDR3 for alpha chain variable domain of TCR clone 158745 (TRAV12-2, TRAJ31)
CAVNTPDARHMF

SEQ ID NO: 317490 - protein, 15 aa, Homo sapiens
  CDR3 for beta chain variable domain of TCR clone 158745 (TRBV20-1, TRBJ2-7)
CSAESGTSGAYEQYF

SEQ ID NO: 317491 - protein, 18 aa, Homo sapiens
  CDR3 for alpha chain variable domain of TCR clone 158746 (TRAV12-3, TRAJ52)
CAMSVGGACGTSYGKLTF

SEQ ID NO: 317492 - protein, 17 aa, Homo sapiens
  CDR3 for beta chain variable domain of TCR clone 158746 (TRBV13, TRBJ2-3)
CASSLSRVAGGRNTQYF

SEQ ID NO: 317493 - protein, 13 aa, Homo sapiens
  CDR3 for alpha chain variable domain of TCR clone 158747 (TRAV27, TRAJ41)
CAGEGNSGYALNF

SEQ ID NO: 317494 - protein, 13 aa, Homo sapiens
  CDR3 for beta chain variable domain of TCR clone 158747 (TRBV12-4, TRBJ1-2)
CASNLRQGKGYTF

SEQ ID NO: 317495 - protein, 18 aa, Homo sapiens
  CDR3 for alpha chain variable domain of TCR clone 158748 (TRAV8-4, TRAJ52)
CAVTRANAGGTSYRKLTF

SEQ ID NO: 317496 - protein, 12 aa, Homo sapiens
  CDR3 for beta chain variable domain of TCR clone 158748 (TRBV29-1, TRBJ2-3)
CSVTGGADTQYF

SEQ ID NO: 317497 - protein, 14 aa, Homo sapiens
  CDR3 for alpha chain variable domain of TCR clone 158749 (TRAV20, TRAJ22)
CAVDLGGSARQLTF

SEQ ID NO: 317498 - protein, 17 aa, Homo sapiens
  CDR3 for beta chain variable domain of TCR clone 158749 (TRBV7-3, TRBJ2-3)
CASSLMKRMRGADTQYF

SEQ ID NO: 317499 - protein, 16 aa, Homo sapiens
  CDR3 for alpha chain variable domain of TCR clone 158750 (TRAV8-3, TRAJ13)
CAAGAYPSGGYQKVTF

SEQ ID NO: 317500 - protein, 13 aa, Homo sapiens
  CDR3 for beta chain variable domain of TCR clone 158750 (TRBV7-9, TRBJ1-2)
CASSLEQNYGYTF

SEQ ID NO: 317501 - protein, 14 aa, Homo sapiens
  CDR3 for alpha chain variable domain of TCR clone 158751 (TRAV13-1, TRAJ35)
CAAGKGGYGNVLHC

SEQ ID NO: 317502 - protein, 13 aa, Homo sapiens
  CDR3 for beta chain variable domain of TCR clone 158751 (TRBV7-3, TRBJ1-1)
CASSQDWGAEAFF

SEQ ID NO: 317503 - protein, 12 aa, Homo sapiens
  CDR3 for alpha chain variable domain of TCR clone 158752 (TRAV35, TRAJ28)
GVEGAGSYQLTF

SEQ ID NO: 317504 - protein, 13 aa, Homo sapiens
  CDR3 for beta chain variable domain of TCR clone 158752 (TRBV4-2, TRBJ1-1)
CASSQAGNTEAFF

SEQ ID NO: 317505 - protein, 15 aa, Homo sapiens
  CDR3 for alpha chain variable domain of TCR clone 158753 (TRAV3, TRAJ3)
CAVRDMSSSASKIIF

SEQ ID NO: 317506 - protein, 17 aa, Homo sapiens
  CDR3 for beta chain variable domain of TCR clone 158753 (TRBV24-1, TRBJ2-1)
CATSDVSNSGTYNEQFF

SEQ ID NO: 317507 - protein, 11 aa, Homo sapiens
  CDR3 for alpha chain variable domain of TCR clone 158754 (TRAV13-1, TRAJ43)
CAASMRNDMRF

SEQ ID NO: 317508 - protein, 14 aa, Homo sapiens
  CDR3 for beta chain variable domain of TCR clone 158754 (TRBV7-3, TRBJ2-1)
CASSLAGGTNEQFF

SEQ ID NO: 317509 - protein, 15 aa, Homo sapiens
  CDR3 for alpha chain variable domain of TCR clone 158755 (TRAV17, TRAJ35)
CATAFVRVFGNVLHC

SEQ ID NO: 317510 - protein, 16 aa, Homo sapiens
  CDR3 for beta chain variable domain of TCR clone 158755 (TRBV11-2, TRBJ2-7)
CASSPLAGGPRYEQYF

SEQ ID NO: 317511 - protein, 13 aa, Homo sapiens
  CDR3 for alpha chain variable domain of TCR clone 158756 (TRAV8-6, TRAJ43)
CAVPGSRNNDMRF

SEQ ID NO: 317512 - protein, 18 aa, Homo sapiens
  CDR3 for beta chain variable domain of TCR clone 158756 (TRBV11-2, TRBJ2-3)
CASSLGGASRGAPNTQYF

SEQ ID NO: 317513 - protein, 13 aa, Homo sapiens
  CDR3 for alpha chain variable domain of TCR clone 158757 (TRAV1-2, TRAJ20)
CAVVDRGDYKLSF

SEQ ID NO: 317514 - protein, 13 aa, Homo sapiens
  CDR3 for beta chain variable domain of TCR clone 158757 (TRBV7-9, TRBJ1-2)
CASSLKQNYGYTF

SEQ ID NO: 317515 - protein, 10 aa, Homo sapiens
  CDR3 for alpha chain variable domain of TCR clone 158758 (TRAV23/DV6, TRAJ22)
CAASSRGSRF

SEQ ID NO: 317516 - protein, 15 aa, Homo sapiens
  CDR3 for beta chain variable domain of TCR clone 158758 (TRBV10-3, TRBJ2-3)
CAIDTSGRRTDTQHF

SEQ ID NO: 317517 - protein, 14 aa, Homo sapiens
  CDR3 for alpha chain variable domain of TCR clone 158759 (TRAV13-1, TRAJ44)
CAAKATGTASKLTL

SEQ ID NO: 317518 - protein, 15 aa, Homo sapiens
  CDR3 for beta chain variable domain of TCR clone 158759 (TRBV19, TRBJ2-1)
CASIKGRGPYNEQFF

SEQ ID NO: 317519 - protein, 15 aa, Homo sapiens
  CDR3 for alpha chain variable domain of TCR clone 158760 (TRAV3, TRAJ17)
CAVRDTGAAGNKLTF

SEQ ID NO: 317520 - protein, 13 aa, Homo sapiens
  CDR3 for beta chain variable domain of TCR clone 158760 (TRBV12-4, TRBJ1-1)
CASSPGTGFEAFF

SEQ ID NO: 317521 - protein, 16 aa, Homo sapiens
  CDR3 for alpha chain variable domain of TCR clone 158761 (TRAV8-3, TRAJ18)
CAVSLDRGSTLGRLYF

SEQ ID NO: 317522 - protein, 11 aa, Homo sapiens
  CDR3 for beta chain variable domain of TCR clone 158761 (TRBV29-1, TRBJ1-1)
CSVEILTEAFF

SEQ ID NO: 317523 - protein, 12 aa, Homo sapiens
  CDR3 for alpha chain variable domain of TCR clone 158762 (TRAV21, TRAJ13)
PGPSGGYQKVTF

SEQ ID NO: 317524 - protein, 15 aa, Homo sapiens
  CDR3 for beta chain variable domain of TCR clone 158762 (TRBV7-9, TRBJ1-6)
CASSSPGRGNSPLRF

SEQ ID NO: 317525 - protein, 13 aa, Homo sapiens
  CDR3 for alpha chain variable domain of TCR clone 158763 (TRAV17, TRAJ6)
CATGFGGSYIPTF

SEQ ID NO: 317526 - protein, 14 aa, Homo sapiens
  CDR3 for beta chain variable domain of TCR clone 158763 (TRBV5-1, TRBJ2-5)
CASSFGGSRETQYF

SEQ ID NO: 317527 - protein, 15 aa, Homo sapiens
  CDR3 for alpha chain variable domain of TCR clone 158764 (TRAV3, TRAJ10)
CAVRDGTGGGNKLTV

SEQ ID NO: 317528 - protein, 15 aa, Homo sapiens
  CDR3 for beta chain variable domain of TCR clone 158764 (TRBV4-2, TRBJ1-4)
CASSLVQREVEKLFF

SEQ ID NO: 317529 - protein, 14 aa, Homo sapiens
  CDR3 for alpha chain variable domain of TCR clone 158765 (TRAV8-3, TRAJ47)
CAVGAQGYGNELVF

SEQ ID NO: 317530 - protein, 12 aa, Homo sapiens
  CDR3 for beta chain variable domain of TCR clone 158765 (TRBV11-2, TRBJ2-2)
CASSLGGGELFF

SEQ ID NO: 317531 - protein, 13 aa, Homo sapiens
  CDR3 for alpha chain variable domain of TCR clone 158766 (TRAV21, TRAJ49)
CAVRQSTGNQFNF

SEQ ID NO: 317532 - protein, 13 aa, Homo sapiens
  CDR3 for beta chain variable domain of TCR clone 158766 (TRBV6-6, TRBJ1-5)
CASRAYQDQPQHF

SEQ ID NO: 317533 - protein, 13 aa, Homo sapiens
  CDR3 for alpha chain variable domain of TCR clone 158767 (TRAV2, TRAJ40)
CAVVTSGTYKYIF

SEQ ID NO: 317534 - protein, 13 aa, Homo sapiens
  CDR3 for beta chain variable domain of TCR clone 158767 (TRBV3-1, TRBJ2-3)
CASSQGGGDTQYF

SEQ ID NO: 317535 - protein, 14 aa, Homo sapiens
  CDR3 for alpha chain variable domain of TCR clone 158768 (TRAV8-4, TRAJ43)
CAVSDPRNNNDMRF

SEQ ID NO: 317536 - protein, 15 aa, Homo sapiens
  CDR3 for beta chain variable domain of TCR clone 158768 (TRBV4-2, TRBJ1-2)
CASSQRAGGRDGYAF

SEQ ID NO: 317537 - protein, 10 aa, Homo sapiens
  CDR3 for alpha chain variable domain of TCR clone 158769 (TRAV12-2, TRAJ20)
CAVYLYKLSF

SEQ ID NO: 317538 - protein, 17 aa, Homo sapiens
  CDR3 for beta chain variable domain of TCR clone 158769 (TRBV11-2, TRBJ2-1)
CASSLYPPGVEYNEQFF

SEQ ID NO: 317539 - protein, 14 aa, Homo sapiens
  CDR3 for alpha chain variable domain of TCR clone 158770 (TRAV2, TRAJ9)
CAVDPNTGGFKPIF

SEQ ID NO: 317540 - protein, 13 aa, Homo sapiens
  CDR3 for beta chain variable domain of TCR clone 158770 (TRBV20-1, TRBJ2-1)
CSASTGTSNEQFF

SEQ ID NO: 317541 - protein, 14 aa, Homo sapiens
  CDR3 for alpha chain variable domain of TCR clone 158771 (TRAV17, TRAJ11)
CATDGSSGYSTLTF

SEQ ID NO: 317542 - protein, 15 aa, Homo sapiens
  CDR3 for beta chain variable domain of TCR clone 158771 (TRBV4-1, TRBJ2-5)
CASSQWDLYQETQYF

SEQ ID NO: 317543 - protein, 13 aa, Homo sapiens
  CDR3 for alpha chain variable domain of TCR clone 158772 (TRAV12-2, TRAJ39)
CAVNNNAGNMLTF

SEQ ID NO: 317544 - protein, 13 aa, Homo sapiens
  CDR3 for beta chain variable domain of TCR clone 158772 (TRBV2, TRBJ1-5)
CATAGRGNQPQHF

SEQ ID NO: 317545 - protein, 14 aa, Homo sapiens
  CDR3 for alpha chain variable domain of TCR clone 158773 (TRAV1-2, TRAJ16)
CAVNRFSDGQKLLF

SEQ ID NO: 317546 - protein, 15 aa, Homo sapiens
  CDR3 for beta chain variable domain of TCR clone 158773 (TRBV7-9, TRBJ1-1)
CASSRPGTANTEAFF

SEQ ID NO: 317547 - protein, 11 aa, Homo sapiens
  CDR3 for alpha chain variable domain of TCR clone 158774 (TRAV1-1, TRAJ23)
SALRQGGKLIF

SEQ ID NO: 317548 - protein, 20 aa, Homo sapiens
  CDR3 for beta chain variable domain of TCR clone 158774 (TRBV7-8, TRBJ2-2)
CASSHLFPGPTVHITGELFF

SEQ ID NO: 317549 - protein, 14 aa, Homo sapiens
  CDR3 for alpha chain variable domain of TCR clone 158775 (TRAV12-2, TRAJ36)
CAVKISTGENNLFF

SEQ ID NO: 317550 - protein, 14 aa, Homo sapiens
  CDR3 for beta chain variable domain of TCR clone 158775 (TRBV25-1, TRBJ1-2)
CASSDTTGVVGYTF

SEQ ID NO: 317551 - protein, 13 aa, Homo sapiens
  CDR3 for alpha chain variable domain of TCR clone 158776 (TRAV13-1, TRAJ13)
CAASKGGYHKVTF

SEQ ID NO: 317552 - protein, 16 aa, Homo sapiens
  CDR3 for beta chain variable domain of TCR clone 158776 (TRBV18, TRBJ1-2)
CASSPPERVTIYGYTF

SEQ ID NO: 317553 - protein, 14 aa, Homo sapiens
  CDR3 for alpha chain variable domain of TCR clone 158777 (TRAV13-2, TRAJ29)
CAEGTFETNTPLVV

SEQ ID NO: 317554 - protein, 13 aa, Homo sapiens
  CDR3 for beta chain variable domain of TCR clone 158777 (TRBV2, TRBJ1-1)
CASNLLRNTEAFF

SEQ ID NO: 317555 - protein, 16 aa, Homo sapiens
  CDR3 for alpha chain variable domain of TCR clone 158778 (TRAV3, TRAJ18)
CAVRDGRGSTLGRLYF

SEQ ID NO: 317556 - protein, 15 aa, Homo sapiens
  CDR3 for beta chain variable domain of TCR clone 158778 (TRBV2, TRBJ2-1)
CASSELAGSYNEQFF

SEQ ID NO: 317557 - protein, 16 aa, Homo sapiens
  CDR3 for alpha chain variable domain of TCR clone 158779 (TRAV3, TRAJ37)
CAVRGKGSGNTGKLIF

SEQ ID NO: 317558 - protein, 14 aa, Homo sapiens
  CDR3 for beta chain variable domain of TCR clone 158779 (TRBV20-1, TRBJ2-1)
QSRGGTRYYNEQFF

SEQ ID NO: 317559 - protein, 10 aa, Homo sapiens
  CDR3 for alpha chain variable domain of TCR clone 158780 (TRAV1-2, TRAJ20)
CALNDYKLSF

SEQ ID NO: 317560 - protein, 14 aa, Homo sapiens
  CDR3 for beta chain variable domain of TCR clone 158780 (TRBV11-2, TRBJ2-5)
CASSRTGGIETQYF

SEQ ID NO: 317561 - protein, 15 aa, Homo sapiens
  CDR3 for alpha chain variable domain of TCR clone 158781 (TRAV12-3, TRAJ42)
CAMITSVGSQGNLIF

SEQ ID NO: 317562 - protein, 12 aa, Homo sapiens
  CDR3 for beta chain variable domain of TCR clone 158781 (TRBV12-4, TRBJ2-7)
CASSLGGYEQYF

SEQ ID NO: 317563 - protein, 13 aa, Homo sapiens
  CDR3 for alpha chain variable domain of TCR clone 158782 (TRAV17, TRAJ5)
SATGDTGRRALTF

SEQ ID NO: 317564 - protein, 13 aa, Homo sapiens
  CDR3 for beta chain variable domain of TCR clone 158782 (TRBV19, TRBJ1-5)
CASSIEPVQPQHF

SEQ ID NO: 317565 - protein, 14 aa, Homo sapiens
  CDR3 for alpha chain variable domain of TCR clone 158783 (TRAV30, TRAJ26)
CGTEIVSYGQNFVF

SEQ ID NO: 317566 - protein, 13 aa, Homo sapiens
  CDR3 for beta chain variable domain of TCR clone 158783 (TRBV10-3, TRBJ2-7)
CASKLAVNYEQYI

SEQ ID NO: 317567 - protein, 11 aa, Homo sapiens
  CDR3 for alpha chain variable domain of TCR clone 158784 (TRAV23/DV6, TRAJ58)
CAARLLRGETN

SEQ ID NO: 317568 - protein, 15 aa, Homo sapiens
  CDR3 for beta chain variable domain of TCR clone 158784 (TRBV9, TRBJ1-6)
CASSVAGTGDSPLHV

SEQ ID NO: 317569 - protein, 15 aa, Homo sapiens
  CDR3 for alpha chain variable domain of TCR clone 158785 (TRAV38-1, TRAJ45)
RAFMKGGGGADGLTF

SEQ ID NO: 317570 - protein, 13 aa, Homo sapiens
  CDR3 for beta chain variable domain of TCR clone 158785 (TRBV7-9, TRBJ1-2)
CASSLKQNYGYTF

SEQ ID NO: 317571 - protein, 18 aa, Homo sapiens
  CDR3 for alpha chain variable domain of TCR clone 158786 (TRAV21, TRAJ52)
YAVRPSPAGGTNYGKLTF

SEQ ID NO: 317572 - protein, 14 aa, Homo sapiens
  CDR3 for beta chain variable domain of TCR clone 158786 (TRBV4-2, TRBJ2-1)
CASGLDRAYNEQFF

SEQ ID NO: 317573 - protein, 12 aa, Homo sapiens
  CDR3 for alpha chain variable domain of TCR clone 158787 (TRAV8-3, TRAJ43)
CAVGTGNNDMRF

SEQ ID NO: 317574 - protein, 18 aa, Homo sapiens
  CDR3 for beta chain variable domain of TCR clone 158787 (TRBV11-2, TRBJ2-3)
CASSLGGASRGAPNTQYF

SEQ ID NO: 317575 - protein, 12 aa, Homo sapiens
  CDR3 for alpha chain variable domain of TCR clone 158788 (TRAV21, TRAJ31)
CAVWGNNARLMF

SEQ ID NO: 317576 - protein, 16 aa, Homo sapiens
  CDR3 for beta chain variable domain of TCR clone 158788 (TRBV27, TRBJ2-5)
CASSYGPGGQKETQDF

SEQ ID NO: 317577 - protein, 14 aa, Homo sapiens
  CDR3 for alpha chain variable domain of TCR clone 158789 (TRAV1-2, TRAJ8)
CAVREATGFQKLVF

SEQ ID NO: 317578 - protein, 12 aa, Homo sapiens
  CDR3 for beta chain variable domain of TCR clone 158789 (TRBV11-2, TRBJ2-2)
CASSLPTGELFF

SEQ ID NO: 317579 - protein, 19 aa, Homo sapiens
  CDR3 for alpha chain variable domain of TCR clone 158790 (TRAV26-1, TRAJ28)
CIVRVAHAYSGAGSYQLTF

SEQ ID NO: 317580 - protein, 18 aa, Homo sapiens
  CDR3 for beta chain variable domain of TCR clone 158790 (TRBV6-6, TRBJ1-3)
CASSYSKWDSISGNTIYF

SEQ ID NO: 317581 - protein, 13 aa, Homo sapiens
  CDR3 for alpha chain variable domain of TCR clone 158791 (TRAV1-2, TRAJ9)
CAALNSGGFKTIF

SEQ ID NO: 317582 - protein, 14 aa, Homo sapiens
  CDR3 for beta chain variable domain of TCR clone 158791 (TRBV11-2, TRBJ2-5)
CASSRTGGIETQYF

SEQ ID NO: 317583 - protein, 15 aa, Homo sapiens
  CDR3 for alpha chain variable domain of TCR clone 158792 (TRAV3, TRAJ16)
CAVRDGFSDGQKLLF

SEQ ID NO: 317584 - protein, 17 aa, Homo sapiens
  CDR3 for beta chain variable domain of TCR clone 158792 (TRBV6-1, TRBJ2-3)
CASRTRGLAQSADTQYF

SEQ ID NO: 317585 - protein, 13 aa, Homo sapiens
  CDR3 for alpha chain variable domain of TCR clone 158793 (TRAV36/DV7, TRAJ29)
CAVEPSGNTPLVF

SEQ ID NO: 317586 - protein, 11 aa, Homo sapiens
  CDR3 for beta chain variable domain of TCR clone 158793 (TRBV19, TRBJ2-7)
CASGNSYEQYF

SEQ ID NO: 317587 - protein, 12 aa, Homo sapiens
  CDR3 for alpha chain variable domain of TCR clone 158794 (TRAV1-1, TRAJ9)
CAVDTGGFKTIF

SEQ ID NO: 317588 - protein, 12 aa, Homo sapiens
  CDR3 for beta chain variable domain of TCR clone 158794 (TRBV9, TRBJ1-3)
CASSVDPGETTI

SEQ ID NO: 317589 - protein, 14 aa, Homo sapiens
  CDR3 for alpha chain variable domain of TCR clone 158795 (TRAV16, TRAJ33)
CALSAMDSNYQLIW

SEQ ID NO: 317590 - protein, 20 aa, Homo sapiens
  CDR3 for beta chain variable domain of TCR clone 158795 (TRBV7-8, TRBJ2-2)
CDSSHLFPGPTIHITGELFF

SEQ ID NO: 317591 - protein, 13 aa, Homo sapiens
  CDR3 for alpha chain variable domain of TCR clone 158796 (TRAV21, TRAJ27)
CAARPGNAGKSTS

SEQ ID NO: 317592 - protein, 14 aa, Homo sapiens
  CDR3 for beta chain variable domain of TCR clone 158796 (TRBV7-6, TRBJ2-3)
CASSLRTVTDTQYF

SEQ ID NO: 317593 - protein, 12 aa, Homo sapiens
  CDR3 for alpha chain variable domain of TCR clone 158797 (TRAV1-2, TRAJ33)
CAALDSNYQLIW

SEQ ID NO: 317594 - protein, 14 aa, Homo sapiens
  CDR3 for beta chain variable domain of TCR clone 158797 (TRBV7-2, TRBJ1-2)
CASSQTGSTYGYTF

SEQ ID NO: 317595 - protein, 12 aa, Homo sapiens
  CDR3 for alpha chain variable domain of TCR clone 158798 (TRAV12-3, TRAJ17)
CAMTLTGNKLTF

SEQ ID NO: 317596 - protein, 12 aa, Homo sapiens
  CDR3 for beta chain variable domain of TCR clone 158798 (TRBV11-2, TRBJ2-7)
CASSLPTYEQYY

SEQ ID NO: 317597 - protein, 16 aa, Homo sapiens
  CDR3 for alpha chain variable domain of TCR clone 158799 (TRAV24, TRAJ53)
CAFNMGGGGSNYKLTF

SEQ ID NO: 317598 - protein, 16 aa, Homo sapiens
  CDR3 for beta chain variable domain of TCR clone 158799 (TRBV7-9, TRBJ2-1)
CASSDVAGGSYNEQFF

SEQ ID NO: 317599 - protein, 16 aa, Homo sapiens
  CDR3 for alpha chain variable domain of TCR clone 158800 (TRAV8-3, TRAJ13)
WAVGAYPSGGYQKVTF

SEQ ID NO: 317600 - protein, 15 aa, Homo sapiens
  CDR3 for beta chain variable domain of TCR clone 158800 (TRBV19, TRBJ1-5)
CASSIVWADNQPQHF

SEQ ID NO: 317601 - protein, 15 aa, Homo sapiens
  CDR3 for alpha chain variable domain of TCR clone 158801 (TRAV4, TRAJ39)
CLVGPNNSPGNMPTF

SEQ ID NO: 317602 - protein, 16 aa, Homo sapiens
  CDR3 for beta chain variable domain of TCR clone 158801 (TRBV13, TRBJ2-2)
CASGPRTGEHTGELFF

SEQ ID NO: 317603 - protein, 12 aa, Homo sapiens
  CDR3 for alpha chain variable domain of TCR clone 158802 (TRAV12-3, TRAJ5)
CAMDMGRRALTF

SEQ ID NO: 317604 - protein, 14 aa, Homo sapiens
  CDR3 for beta chain variable domain of TCR clone 158802 (TRBV20-1, TRBJ2-1)
CSAQIGGSANEQFF

SEQ ID NO: 317605 - protein, 13 aa, Homo sapiens
  CDR3 for alpha chain variable domain of TCR clone 158803 (TRAV12-1, TRAJ31)
CVVNDNNNARLMF

SEQ ID NO: 317606 - protein, 13 aa, Homo sapiens
  CDR3 for beta chain variable domain of TCR clone 158803 (TRBV20-1, TRBJ1-1)
CSARGGGNTEAFF

SEQ ID NO: 317607 - protein, 15 aa, Homo sapiens
  CDR3 for alpha chain variable domain of TCR clone 158804 (TRAV8-4, TRAJ37)
CAVTYGSSNTGKLIF

SEQ ID NO: 317608 - protein, 15 aa, Homo sapiens
  CDR3 for beta chain variable domain of TCR clone 158804 (TRBV7-9, TRBJ1-4)
CASGGQRQGTEKLFF

SEQ ID NO: 317609 - protein, 16 aa, Homo sapiens
  CDR3 for alpha chain variable domain of TCR clone 158805 (TRAV12-3, TRAJ53)
CAMSPGSGGSNYKLTC

SEQ ID NO: 317610 - protein, 17 aa, Homo sapiens
  CDR3 for beta chain variable domain of TCR clone 158805 (TRBV28, TRBJ2-5)
CASSTPEGDALQETQYF

SEQ ID NO: 317611 - protein, 14 aa, Homo sapiens
  CDR3 for alpha chain variable domain of TCR clone 158806 (TRAV30, TRAJ33)
CGTVAPRSNYQLIW

SEQ ID NO: 317612 - protein, 14 aa, Homo sapiens
  CDR3 for beta chain variable domain of TCR clone 158806 (TRBV18, TRBJ2-7)
CASSPRGGAYEQYF

SEQ ID NO: 317613 - protein, 11 aa, Homo sapiens
  CDR3 for alpha chain variable domain of TCR clone 158807 (TRAV8-3, TRAJ49)
CADNTGNQFYF

SEQ ID NO: 317614 - protein, 12 aa, Homo sapiens
  CDR3 for beta chain variable domain of TCR clone 158807 (TRBV11-2, TRBJ2-7)
CASSPPADEQYF

SEQ ID NO: 317615 - protein, 13 aa, Homo sapiens
  CDR3 for alpha chain variable domain of TCR clone 158808 (TRAV21, TRAJ27)
CAARPGHAGNQPL

SEQ ID NO: 317616 - protein, 14 aa, Homo sapiens
  CDR3 for beta chain variable domain of TCR clone 158808 (TRBV7-6, TRBJ2-3)
CASSLGTVTDTQYF

SEQ ID NO: 317617 - protein, 11 aa, Homo sapiens
  CDR3 for alpha chain variable domain of TCR clone 158809 (TRAV3, TRAJ17)
PRGAAGNKLTF

SEQ ID NO: 317618 - protein, 13 aa, Homo sapiens
  CDR3 for beta chain variable domain of TCR clone 158809 (TRBV18, TRBJ1-1)
CASSPETKPEAFF

SEQ ID NO: 317619 - protein, 11 aa, Homo sapiens
  CDR3 for alpha chain variable domain of TCR clone 158810 (TRAV3, TRAJ17)
PRGAAGNKLTF

SEQ ID NO: 317620 - protein, 16 aa, Homo sapiens
  CDR3 for beta chain variable domain of TCR clone 158810 (TRBV7-6, TRBJ2-1)
WASSAPGPSSYNEQFF

SEQ ID NO: 317621 - protein, 13 aa, Homo sapiens
  CDR3 for alpha chain variable domain of TCR clone 158811 (TRAV27, TRAJ57)
CAGFQGGSEKLVF

SEQ ID NO: 317622 - protein, 16 aa, Homo sapiens
  CDR3 for beta chain variable domain of TCR clone 158811 (TRBV7-3, TRBJ2-2)
CASSLKRGTLSGELFF

SEQ ID NO: 317623 - protein, 15 aa, Homo sapiens
  CDR3 for alpha chain variable domain of TCR clone 158812 (TRAV13-1, TRAJ52)
CAATSPRTSYGKLTF

SEQ ID NO: 317624 - protein, 12 aa, Homo sapiens
  CDR3 for beta chain variable domain of TCR clone 158812 (TRBV7-8, TRBJ2-7)
CASSLGDREQDF

SEQ ID NO: 317625 - protein, 16 aa, Homo sapiens
  CDR3 for alpha chain variable domain of TCR clone 158813 (TRAV22, TRAJ45)
CAVERGKRGGADGLTF

SEQ ID NO: 317626 - protein, 13 aa, Homo sapiens
  CDR3 for beta chain variable domain of TCR clone 158813 (TRBV7-2, TRBJ1-5)
CASSFARNQPQHF

SEQ ID NO: 317627 - protein, 13 aa, Homo sapiens
  CDR3 for alpha chain variable domain of TCR clone 158814 (TRAV1-1, TRAJ39)
CAVSDGAGNMLTF

SEQ ID NO: 317628 - protein, 16 aa, Homo sapiens
  CDR3 for beta chain variable domain of TCR clone 158814 (TRBV5-7, TRBJ1-5)
CASSLQQDREYQPQHF

SEQ ID NO: 317629 - protein, 16 aa, Homo sapiens
  CDR3 for alpha chain variable domain of TCR clone 158815 (TRAV12-3, TRAJ53)
CAMSPGSGSSNYKLTF

SEQ ID NO: 317630 - protein, 15 aa, Homo sapiens
  CDR3 for beta chain variable domain of TCR clone 158815 (TRBV7-2, TRBJ2-1)
CASSSGLAGGNEQFF

SEQ ID NO: 317631 - protein, 17 aa, Homo sapiens
  CDR3 for alpha chain variable domain of TCR clone 158816 (TRAV12-2, TRAJ52)
CAVNKGAGGTSYGKLTF

SEQ ID NO: 317632 - protein, 18 aa, Homo sapiens
  CDR3 for beta chain variable domain of TCR clone 158816 (TRBV11-2, TRBJ2-3)
CASSLGGASRGAPNTQYF

SEQ ID NO: 317633 - protein, 13 aa, Homo sapiens
  CDR3 for alpha chain variable domain of TCR clone 158817 (TRAV1-2, TRAJ26)
CAVRPNYGQNFVF

SEQ ID NO: 317634 - protein, 14 aa, Homo sapiens
  CDR3 for beta chain variable domain of TCR clone 158817 (TRBV4-1, TRBJ2-5)
CASSQDWALETQYF

SEQ ID NO: 317635 - protein, 17 aa, Homo sapiens
  CDR3 for alpha chain variable domain of TCR clone 158818 (TRAV13-1, TRAJ28)
CAASPPYSGAGSYQLTF

SEQ ID NO: 317636 - protein, 17 aa, Homo sapiens
  CDR3 for beta chain variable domain of TCR clone 158818 (TRBV28, TRBJ2-3)
CASSPTPAGGRVDTQYS

SEQ ID NO: 317637 - protein, 14 aa, Homo sapiens
  CDR3 for alpha chain variable domain of TCR clone 158819 (TRAV1-2, TRAJ8)
CAVREDTGFQKIVL

SEQ ID NO: 317638 - protein, 15 aa, Homo sapiens
  CDR3 for beta chain variable domain of TCR clone 158819 (TRBV7-3, TRBJ2-2)
CASSETGQGTGELFF

SEQ ID NO: 317639 - protein, 13 aa, Homo sapiens
  CDR3 for alpha chain variable domain of TCR clone 158820 (TRAV12-1, TRAJ22)
CVASGGSARKLTF

SEQ ID NO: 317640 - protein, 12 aa, Homo sapiens
  CDR3 for beta chain variable domain of TCR clone 158820 (TRBV29-1, TRBJ2-3)
CSVTGGADTQYF

SEQ ID NO: 317641 - protein, 12 aa, Homo sapiens
  CDR3 for alpha chain variable domain of TCR clone 158821 (TRAV12-3, TRAJ17)
CAMTLTGNKITF

SEQ ID NO: 317642 - protein, 17 aa, Homo sapiens
  CDR3 for beta chain variable domain of TCR clone 158821 (TRBV11-2, TRBJ2-1)
CASSLYPPGVEYNEQFF

SEQ ID NO: 317643 - protein, 18 aa, Homo sapiens
  CDR3 for alpha chain variable domain of TCR clone 158822 (TRAV13-1, TRAJ52)
CAAKNPNPGGTSYGKLTF

SEQ ID NO: 317644 - protein, 14 aa, Homo sapiens
  CDR3 for beta chain variable domain of TCR clone 158822 (TRBV4-1, TRBJ2-2)
CASSQAVNTGELFF

SEQ ID NO: 317645 - protein, 18 aa, Homo sapiens
  CDR3 for alpha chain variable domain of TCR clone 158823 (TRAV21, TRAJ52)
CSVRPSPAGGTSYGKLTF

SEQ ID NO: 317646 - protein, 14 aa, Homo sapiens
  CDR3 for beta chain variable domain of TCR clone 158823 (TRBV4-1, TRBJ2-2)
CASSQAVNTGELFF

SEQ ID NO: 317647 - protein, 16 aa, Homo sapiens
  CDR3 for alpha chain variable domain of TCR clone 158824 (TRAV3, TRAJ10)
CAVRDMRAGGGNKLTF

SEQ ID NO: 317648 - protein, 14 aa, Homo sapiens
  CDR3 for beta chain variable domain of TCR clone 158824 (TRBV7-2, TRBJ1-1)
CASSFLTGTTEAVF

SEQ ID NO: 317649 - protein, 13 aa, Homo sapiens
  CDR3 for alpha chain variable domain of TCR clone 158825 (TRAV12-1, TRAJ53)
CVVNAESNYKLKF

SEQ ID NO: 317650 - protein, 16 aa, Homo sapiens
  CDR3 for beta chain variable domain of TCR clone 158825 (TRBV19, TRBJ2-2)
CASRSPGTGATGELFF

SEQ ID NO: 317651 - protein, 13 aa, Homo sapiens
  CDR3 for alpha chain variable domain of TCR clone 158826 (TRAV13-1, TRAJ21)
CAASIYNFNKFYY

SEQ ID NO: 317652 - protein, 12 aa, Homo sapiens
  CDR3 for beta chain variable domain of TCR clone 158826 (TRBV11-2, TRBJ2-1)
CASSPGNNEQSF

SEQ ID NO: 317653 - protein, 14 aa, Homo sapiens
  CDR3 for alpha chain variable domain of TCR clone 158827 (TRAV8-3, TRAJ12)
CAVGARDSSYKLIF

SEQ ID NO: 317654 - protein, 15 aa, Homo sapiens
  CDR3 for beta chain variable domain of TCR clone 158827 (TRBV20-1, TRBJ2-7)
CSARDRVSGMDEQYF

SEQ ID NO: 317655 - protein, 12 aa, Homo sapiens
  CDR3 for alpha chain variable domain of TCR clone 158828 (TRAV1-2, TRAJ29)
CAVPSGNTPLVF

SEQ ID NO: 317656 - protein, 13 aa, Homo sapiens
  CDR3 for beta chain variable domain of TCR clone 158828 (TRBV12-4, TRBJ2-7)
CASSPTETYKQYF

SEQ ID NO: 317657 - protein, 13 aa, Homo sapiens
  CDR3 for alpha chain variable domain of TCR clone 158829 (TRAV8-3, TRAJ43)
CAVGPDNNNDIRF

SEQ ID NO: 317658 - protein, 13 aa, Homo sapiens
  CDR3 for beta chain variable domain of TCR clone 158829 (TRBV4-2, TRBJ1-1)
CASSQAGNTEAFF

SEQ ID NO: 317659 - protein, 11 aa, Homo sapiens
  CDR3 for alpha chain variable domain of TCR clone 158830 (TRAV3, TRAJ21)
CAVGNFNKFYF

SEQ ID NO: 317660 - protein, 16 aa, Homo sapiens
  CDR3 for beta chain variable domain of TCR clone 158830 (TRBV19, TRBJ2-1)
CASSKAGPSPYNEQYF

SEQ ID NO: 317661 - protein, 15 aa, Homo sapiens
  CDR3 for alpha chain variable domain of TCR clone 158831 (TRAV4, TRAJ39)
CLVGPNNNAGNMLTF

SEQ ID NO: 317662 - protein, 17 aa, Homo sapiens
  CDR3 for beta chain variable domain of TCR clone 158831 (TRBV20-1, TRBJ2-1)
CSAPPRLAGTRYNEQFF

SEQ ID NO: 317663 - protein, 14 aa, Homo sapiens
  CDR3 for alpha chain variable domain of TCR clone 158832 (TRAV17, TRAJ57)
CATDPQGGSEKLVF

SEQ ID NO: 317664 - protein, 16 aa, Homo sapiens
  CDR3 for beta chain variable domain of TCR clone 158832 (TRBV29-1, TRBJ2-7)
CSVEVVGTSGSYEQYF

SEQ ID NO: 317665 - protein, 13 aa, Homo sapiens
  CDR3 for alpha chain variable domain of TCR clone 158833 (TRAV8-3, TRAJ48)
CAVLPFGNEKLTF

SEQ ID NO: 317666 - protein, 12 aa, Homo sapiens
  CDR3 for beta chain variable domain of TCR clone 158833 (TRBV11-2, TRBJ2-2)
CASSLGGGELFF

SEQ ID NO: 317667 - protein, 11 aa, Homo sapiens
  CDR3 for alpha chain variable domain of TCR clone 158834 (TRAV2, TRAJ13)
CASGGYQKVTF

SEQ ID NO: 317668 - protein, 18 aa, Homo sapiens
  CDR3 for beta chain variable domain of TCR clone 158834 (TRBV27, TRBJ2-1)
CASGNRAVGVGSKNEQFF

SEQ ID NO: 317669 - protein, 16 aa, Homo sapiens
  CDR3 for alpha chain variable domain of TCR clone 158835 (TRAV12-3, TRAJ53)
CAMSPGSGGSNYKLTF

SEQ ID NO: 317670 - protein, 15 aa, Homo sapiens
  CDR3 for beta chain variable domain of TCR clone 158835 (TRBV15, TRBJ2-7)
CATSRGVTPTYEQYF

SEQ ID NO: 317671 - protein, 17 aa, Homo sapiens
  CDR3 for alpha chain variable domain of TCR clone 158836 (TRAV13-1, TRAJ52)
SAASSGAGGTSYGKLTF

SEQ ID NO: 317672 - protein, 15 aa, Homo sapiens
  CDR3 for beta chain variable domain of TCR clone 158836 (TRBV2, TRBJ2-1)
CASSELAGSYNEQFF

SEQ ID NO: 317673 - protein, 15 aa, Homo sapiens
  CDR3 for alpha chain variable domain of TCR clone 158837 (TRAV26-2, TRAJ21)
CILSNTTSTNFTLDL

SEQ ID NO: 317674 - protein, 16 aa, Homo sapiens
  CDR3 for beta chain variable domain of TCR clone 158837 (TRBV4-2, TRBJ2-6)
CASSQARFSGANVLTF

SEQ ID NO: 317675 - protein, 15 aa, Homo sapiens
  CDR3 for alpha chain variable domain of TCR clone 158838 (TRAV25, TRAJ52)
CAGTSGGTSYGKLTF

SEQ ID NO: 317676 - protein, 15 aa, Homo sapiens
  CDR3 for beta chain variable domain of TCR clone 158838 (TRBV7-8, TRBJ2-3)
CASSLSADSGGAQYF

SEQ ID NO: 317677 - protein, 15 aa, Homo sapiens
  CDR3 for alpha chain variable domain of TCR clone 158839 (TRAV13-1, TRAJ8)
CAASNPNTGFQKLVF

SEQ ID NO: 317678 - protein, 13 aa, Homo sapiens
  CDR3 for beta chain variable domain of TCR clone 158839 (TRBV5-4, TRBJ1-1)
CASSFQVNTEAFF

SEQ ID NO: 317679 - protein, 12 aa, Homo sapiens
  CDR3 for alpha chain variable domain of TCR clone 158840 (TRAV4, TRAJ26)
CLVGDYGQNFVF

SEQ ID NO: 317680 - protein, 16 aa, Homo sapiens
  CDR3 for beta chain variable domain of TCR clone 158840 (TRBV27, TRBJ2-2)
CASSSSGVSNTGELFF

SEQ ID NO: 317681 - protein, 12 aa, Homo sapiens
  CDR3 for alpha chain variable domain of TCR clone 158841 (TRAV8-3, TRAJ20)
CAVGANDYKLSF

SEQ ID NO: 317682 - protein, 14 aa, Homo sapiens
  CDR3 for beta chain variable domain of TCR clone 158841 (TRBV11-2, TRBJ2-1)
CQQLGTSGLNEQFF

SEQ ID NO: 317683 - protein, 14 aa, Homo sapiens
  CDR3 for alpha chain variable domain of TCR clone 158842 (TRAV14/DV4, TRAJ15)
CALRRDQAGTALIF

SEQ ID NO: 317684 - protein, 16 aa, Homo sapiens
  CDR3 for beta chain variable domain of TCR clone 158842 (TRBV15, TRBJ2-3)
CATSRDLGIVTDTQYF

SEQ ID NO: 317685 - protein, 12 aa, Homo sapiens
  CDR3 for alpha chain variable domain of TCR clone 158843 (TRAV16, TRAJ10)
CSRTGGGNKLTF

SEQ ID NO: 317686 - protein, 14 aa, Homo sapiens
  CDR3 for beta chain variable domain of TCR clone 158843 (TRBV12-4, TRBJ1-3)
CASSLRGSGNTIYF

SEQ ID NO: 317687 - protein, 16 aa, Homo sapiens
  CDR3 for alpha chain variable domain of TCR clone 158844 (TRAV12-2, TRAJ32)
CAVNMNYGGATNKPIF

SEQ ID NO: 317688 - protein, 13 aa, Homo sapiens
  CDR3 for beta chain variable domain of TCR clone 158844 (TRBV4-2, TRBJ1-1)
CASSQAGNTEAFF

SEQ ID NO: 317689 - protein, 13 aa, Homo sapiens
  CDR3 for alpha chain variable domain of TCR clone 158845 (TRAV16, TRAJ5)
CALTNTGRRALTF

SEQ ID NO: 317690 - protein, 15 aa, Homo sapiens
  CDR3 for beta chain variable domain of TCR clone 158845 (TRBV11-2, TRBJ2-4)
CASSRPGTGIYIQYF

SEQ ID NO: 317691 - protein, 15 aa, Homo sapiens
  CDR3 for alpha chain variable domain of TCR clone 158846 (TRAV8-3, TRAJ45)
CASSCSGGGAGGLTF

SEQ ID NO: 317692 - protein, 12 aa, Homo sapiens
  CDR3 for beta chain variable domain of TCR clone 158846 (TRBV28, TRBJ2-3)
CASSLYRDTQYF

SEQ ID NO: 317693 - protein, 16 aa, Homo sapiens
  CDR3 for alpha chain variable domain of TCR clone 158847 (TRAV30, TRAJ24)
CGTEIVDADSWGKFQF

SEQ ID NO: 317694 - protein, 15 aa, Homo sapiens
  CDR3 for beta chain variable domain of TCR clone 158847 (TRBV7-2, TRBJ1-3)
CASSPQGGSGNTIYF

SEQ ID NO: 317695 - protein, 15 aa, Homo sapiens
  CDR3 for alpha chain variable domain of TCR clone 158848 (TRAV12-1, TRAJ42)
CVVTRDGGSQGNLIF

SEQ ID NO: 317696 - protein, 14 aa, Homo sapiens
  CDR3 for beta chain variable domain of TCR clone 158848 (TRBV11-2, TRBJ2-3)
CASSLGGGADTQYF

SEQ ID NO: 317697 - protein, 15 aa, Homo sapiens
  CDR3 for alpha chain variable domain of TCR clone 158849 (TRAV8-6, TRAJ13)
CAVSGGSGGYQKVTF

SEQ ID NO: 317698 - protein, 14 aa, Homo sapiens
  CDR3 for beta chain variable domain of TCR clone 158849 (TRBV19, TRBJ2-1)
CASPTFVLSGEQFF

SEQ ID NO: 317699 - protein, 15 aa, Homo sapiens
  CDR3 for alpha chain variable domain of TCR clone 158850 (TRAV8-3, TRAJ45)
CASSYSGGGADGLTF

SEQ ID NO: 317700 - protein, 12 aa, Homo sapiens
  CDR3 for beta chain variable domain of TCR clone 158850 (TRBV12-4, TRBJ1-2)
CASSFIWLHLRF

SEQ ID NO: 317701 - protein, 17 aa, Homo sapiens
  CDR3 for alpha chain variable domain of TCR clone 158851 (TRAV3, TRAJ42)
CAVRDRDYGGSQGNLIF

SEQ ID NO: 317702 - protein, 17 aa, Homo sapiens
  CDR3 for beta chain variable domain of TCR clone 158851 (TRBV20-1, TRBJ2-1)
CSARDPLAGVWDNEQFF

SEQ ID NO: 317703 - protein, 14 aa, Homo sapiens
  CDR3 for alpha chain variable domain of TCR clone 158852 (TRAV26-1, TRAJ21)
CIVRVVYNFNKFYF

SEQ ID NO: 317704 - protein, 14 aa, Homo sapiens
  CDR3 for beta chain variable domain of TCR clone 158852 (TRBV20-1, TRBJ2-7)
CSAKTGTGGYEQYF

SEQ ID NO: 317705 - protein, 13 aa, Homo sapiens
  CDR3 for alpha chain variable domain of TCR clone 158853 (TRAV12-3, TRAJ13)
CAMTSGGHKKVTF

SEQ ID NO: 317706 - protein, 13 aa, Homo sapiens
  CDR3 for beta chain variable domain of TCR clone 158853 (TRBV20-1, TRBJ2-2)
CSALSGGAGELFF

SEQ ID NO: 317707 - protein, 16 aa, Homo sapiens
  CDR3 for alpha chain variable domain of TCR clone 158854 (TRAV14/DV4, TRAJ17)
CAMREAGRAAGNKLTF

SEQ ID NO: 317708 - protein, 12 aa, Homo sapiens
  CDR3 for beta chain variable domain of TCR clone 158854 (TRBV11-2, TRBJ2-2)
CASSLGGGELFF

SEQ ID NO: 317709 - protein, 12 aa, Homo sapiens
  CDR3 for alpha chain variable domain of TCR clone 158855 (TRAV8-3, TRAJ20)
CAVDFNDYKLIF

SEQ ID NO: 317710 - protein, 13 aa, Homo sapiens
  CDR3 for beta chain variable domain of TCR clone 158855 (TRBV5-7, TRBJ2-3)
CASSLGRTDTQYF

SEQ ID NO: 317711 - protein, 14 aa, Homo sapiens
  CDR3 for alpha chain variable domain of TCR clone 158856 (TRAV1-1, TRAJ27)
CAVIYNTNAVKSTF

SEQ ID NO: 317712 - protein, 14 aa, Homo sapiens
  CDR3 for beta chain variable domain of TCR clone 158856 (TRBV25-1, TRBJ1-1)
CASTHLGGNTEAFF

SEQ ID NO: 317713 - protein, 17 aa, Homo sapiens
  CDR3 for alpha chain variable domain of TCR clone 158857 (TRAV16, TRAJ58)
CITVLSNGETSGSRFTF

SEQ ID NO: 317714 - protein, 17 aa, Homo sapiens
  CDR3 for beta chain variable domain of TCR clone 158857 (TRBV18, TRBJ2-1)
CASSKGLSGGADNEQFF

SEQ ID NO: 317715 - protein, 12 aa, Homo sapiens
  CDR3 for alpha chain variable domain of TCR clone 158858 (TRAV17, TRAJ12)
CAGGDSSYKLIF

SEQ ID NO: 317716 - protein, 12 aa, Homo sapiens
  CDR3 for beta chain variable domain of TCR clone 158858 (TRBV29-1, TRBJ1-1)
FSESDGNTEAFF

SEQ ID NO: 317717 - protein, 11 aa, Homo sapiens
  CDR3 for alpha chain variable domain of TCR clone 158859 (TRAV2, TRAJ13)
CASGGYQKVTF

SEQ ID NO: 317718 - protein, 13 aa, Homo sapiens
  CDR3 for beta chain variable domain of TCR clone 158859 (TRBV24-1, TRBJ1-4)
CATNNGRSEKLFF

SEQ ID NO: 317719 - protein, 11 aa, Homo sapiens
  CDR3 for alpha chain variable domain of TCR clone 158860 (TRAV3, TRAJ21)
CAVGNFNKFYF

SEQ ID NO: 317720 - protein, 16 aa, Homo sapiens
  CDR3 for beta chain variable domain of TCR clone 158860 (TRBV19, TRBJ2-1)
CASSEAGPSSYNQQFF

SEQ ID NO: 317721 - protein, 12 aa, Homo sapiens
  CDR3 for alpha chain variable domain of TCR clone 158861 (TRAV22, TRAJ22)
CAPGGSASQLTF

SEQ ID NO: 317722 - protein, 14 aa, Homo sapiens
  CDR3 for beta chain variable domain of TCR clone 158861 (TRBV19, TRBJ2-1)
CASPTFVLSGEQFF

SEQ ID NO: 317723 - protein, 14 aa, Homo sapiens
  CDR3 for alpha chain variable domain of TCR clone 158862 (TRAV1-2, TRAJ6)
CAVSLSGGSYIPTF

SEQ ID NO: 317724 - protein, 15 aa, Homo sapiens
  CDR3 for beta chain variable domain of TCR clone 158862 (TRBV28, TRBJ2-7)
CASSPGGRGFYQQYF

SEQ ID NO: 317725 - protein, 12 aa, Homo sapiens
  CDR3 for alpha chain variable domain of TCR clone 158863 (TRAV12-3, TRAJ41)
CAMSYSGYALNF

SEQ ID NO: 317726 - protein, 16 aa, Homo sapiens
  CDR3 for beta chain variable domain of TCR clone 158863 (TRBV7-7, TRBJ2-1)
CASSLASGTSYNEQFF

SEQ ID NO: 317727 - protein, 14 aa, Homo sapiens
  CDR3 for alpha chain variable domain of TCR clone 158864 (TRAV12-3, TRAJ35)
CAMSLIGFGNVLHC

SEQ ID NO: 317728 - protein, 12 aa, Homo sapiens
  CDR3 for beta chain variable domain of TCR clone 158864 (TRBV12-4, TRBJ1-1)
CSSSLAGLEAFF

SEQ ID NO: 317729 - protein, 13 aa, Homo sapiens
  CDR3 for alpha chain variable domain of TCR clone 158865 (TRAV17, TRAJ40)
CATRSPGTYKYIF

SEQ ID NO: 317730 - protein, 16 aa, Homo sapiens
  CDR3 for beta chain variable domain of TCR clone 158865 (TRBV19, TRBJ1-6)
CASSVAPVAGNSPLHF

SEQ ID NO: 317731 - protein, 16 aa, Homo sapiens
  CDR3 for alpha chain variable domain of TCR clone 158866 (TRAV2, TRAJ13)
CCGAFMNSGGYQKVTF

SEQ ID NO: 317732 - protein, 12 aa, Homo sapiens
  CDR3 for beta chain variable domain of TCR clone 158866 (TRBV11-2, TRBJ2-2)
CASSLGGGELFF

SEQ ID NO: 317733 - protein, 14 aa, Homo sapiens
  CDR3 for alpha chain variable domain of TCR clone 158867 (TRAV12-2, TRAJ13)
CAVKKTGGYQKVTF

SEQ ID NO: 317734 - protein, 14 aa, Homo sapiens
  CDR3 for beta chain variable domain of TCR clone 158867 (TRBV3-1, TRBJ2-1)
CASSQAVRQETQFF

SEQ ID NO: 317735 - protein, 21 aa, Homo sapiens
  CDR3 for alpha chain variable domain of TCR clone 158868 (TRAV12-1, TRAJ37)
CVVNGGLWQHRQTNLWARDNF

SEQ ID NO: 317736 - protein, 13 aa, Homo sapiens
  CDR3 for beta chain variable domain of TCR clone 158868 (TRBV5-1, TRBJ2-1)
CASRPFGYNEQFF

SEQ ID NO: 317737 - protein, 12 aa, Homo sapiens
  CDR3 for alpha chain variable domain of TCR clone 158869 (TRAV16, TRAJ9)
CALRAGGFKTIF

SEQ ID NO: 317738 - protein, 13 aa, Homo sapiens
  CDR3 for beta chain variable domain of TCR clone 158869 (TRBV4-3, TRBJ1-1)
CASSQVEGAMAFF

SEQ ID NO: 317739 - protein, 14 aa, Homo sapiens
  CDR3 for alpha chain variable domain of TCR clone 158870 (TRAV21, TRAJ35)
CAVMPIGFGNVLHC

SEQ ID NO: 317740 - protein, 12 aa, Homo sapiens
  CDR3 for beta chain variable domain of TCR clone 158870 (TRBV7-9, TRBJ2-7)
SASSIKREEQYF

SEQ ID NO: 317741 - protein, 14 aa, Homo sapiens
  CDR3 for alpha chain variable domain of TCR clone 158871 (TRAV4, TRAJ17)
CLVGDMAAGNKLPF

SEQ ID NO: 317742 - protein, 14 aa, Homo sapiens
  CDR3 for beta chain variable domain of TCR clone 158871 (TRBV4-1, TRBJ2-7)
CASSPVAGGDEQYF

SEQ ID NO: 317743 - protein, 16 aa, Homo sapiens
  CDR3 for alpha chain variable domain of TCR clone 158872 (TRAV12-2, TRAJ32)
CAVNLGPGGATNKLIF

SEQ ID NO: 317744 - protein, 15 aa, Homo sapiens
  CDR3 for beta chain variable domain of TCR clone 158872 (TRBV20-1, TRBJ2-7)
CSSRGPLAGGREQYF

SEQ ID NO: 317745 - protein, 17 aa, Homo sapiens
  CDR3 for alpha chain variable domain of TCR clone 158873 (TRAV3, TRAJ42)
CAVRDRDYRGSQGNLIF

SEQ ID NO: 317746 - protein, 13 aa, Homo sapiens
  CDR3 for beta chain variable domain of TCR clone 158873 (TRBV7-7, TRBJ2-2)
CASSLTSAGELFF

SEQ ID NO: 317747 - protein, 13 aa, Homo sapiens
  CDR3 for alpha chain variable domain of TCR clone 158874 (TRAV13-1, TRAJ9)
CAASGTGGFKTIF

SEQ ID NO: 317748 - protein, 14 aa, Homo sapiens
  CDR3 for beta chain variable domain of TCR clone 158874 (TRBV20-1, TRBJ2-3)
CSARGGTSTDTQYF

SEQ ID NO: 317749 - protein, 15 aa, Homo sapiens
  CDR3 for alpha chain variable domain of TCR clone 158875 (TRAV35, TRAJ23)
CAGPLGNNQGGKFIL

SEQ ID NO: 317750 - protein, 14 aa, Homo sapiens
  CDR3 for beta chain variable domain of TCR clone 158875 (TRBV7-9, TRBJ1-1)
CASTPLQSYTEAFF

SEQ ID NO: 317751 - protein, 15 aa, Homo sapiens
  CDR3 for alpha chain variable domain of TCR clone 158876 (TRAV23/DV6, TRAJ18)
CAASFRGSTLGRLYF

SEQ ID NO: 317752 - protein, 14 aa, Homo sapiens
  CDR3 for beta chain variable domain of TCR clone 158876 (TRBV7-2, TRBJ2-7)
CASRSQGAAYEQYF

SEQ ID NO: 317753 - protein, 14 aa, Homo sapiens
  CDR3 for alpha chain variable domain of TCR clone 158877 (TRAV12-2, TRAJ13)
CAVKKTGGYQNVTF

SEQ ID NO: 317754 - protein, 13 aa, Homo sapiens
  CDR3 for beta chain variable domain of TCR clone 158877 (TRBV19, TRBJ2-7)
CASRKAGGSEQYF

SEQ ID NO: 317755 - protein, 13 aa, Homo sapiens
  CDR3 for alpha chain variable domain of TCR clone 158878 (TRAV3, TRAJ21)
RAVREPDFNKFYF

SEQ ID NO: 317756 - protein, 15 aa, Homo sapiens
  CDR3 for beta chain variable domain of TCR clone 158878 (TRBV4-3, TRBJ2-2)
CASSQGQGGTGELFF

SEQ ID NO: 317757 - protein, 14 aa, Homo sapiens
  CDR3 for alpha chain variable domain of TCR clone 158879 (TRAV30, TRAJ26)
CGTDIVSYGQNFVF

SEQ ID NO: 317758 - protein, 13 aa, Homo sapiens
  CDR3 for beta chain variable domain of TCR clone 158879 (TRBV10-3, TRBJ2-7)
CASKLAVNYEQYF

SEQ ID NO: 317759 - protein, 12 aa, Homo sapiens
  CDR3 for alpha chain variable domain of TCR clone 158880 (TRAV21, TRAJ27)
CAPPGNAGKSTF

SEQ ID NO: 317760 - protein, 15 aa, Homo sapiens
  CDR3 for beta chain variable domain of TCR clone 158880 (TRBV7-3, TRBJ2-1)
CASSPTGGGEVEQFF

SEQ ID NO: 317761 - protein, 18 aa, Homo sapiens
  CDR3 for alpha chain variable domain of TCR clone 158881 (TRAV12-3, TRAJ52)
CAMSVGGAGGTSYGKLTF

SEQ ID NO: 317762 - protein, 14 aa, Homo sapiens
  CDR3 for beta chain variable domain of TCR clone 158881 (TRBV19, TRBJ2-5)
CASSMTGQQETQYC

SEQ ID NO: 317763 - protein, 14 aa, Homo sapiens
  CDR3 for alpha chain variable domain of TCR clone 158882 (TRAV12-2, TRAJ13)
CAVKKTGGYQKVTF

SEQ ID NO: 317764 - protein, 14 aa, Homo sapiens
  CDR3 for beta chain variable domain of TCR clone 158882 (TRBV5-5, TRBJ2-7)
CASSLGRGTYEQYF

SEQ ID NO: 317765 - protein, 14 aa, Homo sapiens
  CDR3 for alpha chain variable domain of TCR clone 158883 (TRAV13-1, TRAJ35)
CAASKGGFGNVLHC

SEQ ID NO: 317766 - protein, 16 aa, Homo sapiens
  CDR3 for beta chain variable domain of TCR clone 158883 (TRBV7-3, TRBJ2-2)
CASSPRTGEHTGELFF

SEQ ID NO: 317767 - protein, 14 aa, Homo sapiens
  CDR3 for alpha chain variable domain of TCR clone 158884 (TRAV1-2, TRAJ16)
CAVNRFSDGLNLLF

SEQ ID NO: 317768 - protein, 13 aa, Homo sapiens
  CDR3 for beta chain variable domain of TCR clone 158884 (TRBV7-9, TRBJ1-2)
CASSLKQNYGYTF

SEQ ID NO: 317769 - protein, 21 aa, Homo sapiens
  CDR3 for alpha chain variable domain of TCR clone 158885 (TRAV9-2, )
CALIQIGDIQNPDPAVYQLSD

SEQ ID NO: 317770 - protein, 17 aa, Homo sapiens
  CDR3 for beta chain variable domain of TCR clone 158885 (TRBV7-8, TRBJ2-6)
CASSAGTGGAGANVLTF

SEQ ID NO: 317771 - protein, 14 aa, Homo sapiens
  CDR3 for alpha chain variable domain of TCR clone 158886 (TRAV1-2, TRAJ8)
CAVREDTGFKKLVF

SEQ ID NO: 317772 - protein, 15 aa, Homo sapiens
  CDR3 for beta chain variable domain of TCR clone 158886 (TRBV20-1, TRBJ2-7)
CSARDRVSGMDEQYF

SEQ ID NO: 317773 - protein, 16 aa, Homo sapiens
  CDR3 for alpha chain variable domain of TCR clone 158887 (TRAV16, TRAJ42)
CALSGYYGGSQGNLIF

SEQ ID NO: 317774 - protein, 14 aa, Homo sapiens
  CDR3 for beta chain variable domain of TCR clone 158887 (TRBV3-1, TRBJ2-5)
CASSQAVRLETQYF

SEQ ID NO: 317775 - protein, 14 aa, Homo sapiens
  CDR3 for alpha chain variable domain of TCR clone 158888 (TRAV30, TRAJ33)
CGTERRFSNYQLIW

SEQ ID NO: 317776 - protein, 15 aa, Homo sapiens
  CDR3 for beta chain variable domain of TCR clone 158888 (TRBV7-2, TRBJ2-7)
CASSTPGLTRGEQYF

SEQ ID NO: 317777 - protein, 11 aa, Homo sapiens
  CDR3 for alpha chain variable domain of TCR clone 158889 (TRAV13-1, TRAJ6)
CASLGSYIPTF

SEQ ID NO: 317778 - protein, 12 aa, Homo sapiens
  CDR3 for beta chain variable domain of TCR clone 158889 (TRBV11-2, TRBJ2-1)
CASSPGNNEQFF

SEQ ID NO: 317779 - protein, 15 aa, Homo sapiens
  CDR3 for alpha chain variable domain of TCR clone 158890 (TRAV30, TRAJ57)
CGTAIPQGGSEKLVF

SEQ ID NO: 317780 - protein, 14 aa, Homo sapiens
  CDR3 for beta chain variable domain of TCR clone 158890 (TRBV18, TRBJ2-5)
CASSPGVSQETQYF

SEQ ID NO: 317781 - protein, 15 aa, Homo sapiens
  CDR3 for alpha chain variable domain of TCR clone 158891 (TRAV12-3, TRAJ6)
CAMSATTGGSYIPTS

SEQ ID NO: 317782 - protein, 15 aa, Homo sapiens
  CDR3 for beta chain variable domain of TCR clone 158891 (TRBV20-1, TRBJ2-7)
CSARDRVSGMDEQYF

SEQ ID NO: 317783 - protein, 22 aa, Homo sapiens
  CDR3 for alpha chain variable domain of TCR clone 158892 (TRAV27, TRAJ41)
CAVRTQIPDIQDPDPAVYQLRD

SEQ ID NO: 317784 - protein, 13 aa, Homo sapiens
  CDR3 for beta chain variable domain of TCR clone 158892 (TRBV20-1, TRBJ1-1)
CSARGGGNTEAFF

SEQ ID NO: 317785 - protein, 14 aa, Homo sapiens
  CDR3 for alpha chain variable domain of TCR clone 158893 (TRAV12-1, TRAJ12)
CVGTRMDSSYKLIF

SEQ ID NO: 317786 - protein, 18 aa, Homo sapiens
  CDR3 for beta chain variable domain of TCR clone 158893 (TRBV20-1, TRBJ2-6)
CSAETTPTHGSGANVLTF

SEQ ID NO: 317787 - protein, 14 aa, Homo sapiens
  CDR3 for alpha chain variable domain of TCR clone 158894 (TRAV12-1, TRAJ17)
CVMNYKAAGNKLTF

SEQ ID NO: 317788 - protein, 14 aa, Homo sapiens
  CDR3 for beta chain variable domain of TCR clone 158894 (TRBV7-8, TRBJ2-3)
CASSLEAGTDTQYF

SEQ ID NO: 317789 - protein, 13 aa, Homo sapiens
  CDR3 for alpha chain variable domain of TCR clone 158895 (TRAV27, TRAJ8)
CAGGPTGFQKLVF

SEQ ID NO: 317790 - protein, 16 aa, Homo sapiens
  CDR3 for beta chain variable domain of TCR clone 158895 (TRBV15, TRBJ2-3)
CATSRDLGIVTDTQYF

SEQ ID NO: 317791 - protein, 14 aa, Homo sapiens
  CDR3 for alpha chain variable domain of TCR clone 158896 (TRAV38-1, TRAJ45)
CASHSGGGADGLTF

SEQ ID NO: 317792 - protein, 16 aa, Homo sapiens
  CDR3 for beta chain variable domain of TCR clone 158896 (TRBV7-9, TRBJ2-7)
CASSSPSANTVNEQYF

SEQ ID NO: 317793 - protein, 13 aa, Homo sapiens
  CDR3 for alpha chain variable domain of TCR clone 158897 (TRAV13-2, TRAJ48)
CAEIDFGNEKLTF

SEQ ID NO: 317794 - protein, 14 aa, Homo sapiens
  CDR3 for beta chain variable domain of TCR clone 158897 (TRBV19, TRBJ2-7)
CASSMGQGAIEQYF

SEQ ID NO: 317795 - protein, 12 aa, Homo sapiens
  CDR3 for alpha chain variable domain of TCR clone 158898 (TRAV10, TRAJ6)
CVVSEGSYIPTF

SEQ ID NO: 317796 - protein, 14 aa, Homo sapiens
  CDR3 for beta chain variable domain of TCR clone 158898 (TRBV20-1, TRBJ2-1)
CSAQIGGSANEQFF

SEQ ID NO: 317797 - protein, 14 aa, Homo sapiens
  CDR3 for alpha chain variable domain of TCR clone 158899 (TRAV17, TRAJ57)
CATDHQGGSEKLVF

SEQ ID NO: 317798 - protein, 15 aa, Homo sapiens
  CDR3 for beta chain variable domain of TCR clone 158899 (TRBV27, TRBJ2-1)
CASSNGGGSSNEQFF

SEQ ID NO: 317799 - protein, 11 aa, Homo sapiens
  CDR3 for alpha chain variable domain of TCR clone 158900 (TRAV26-1, TRAJ37)
CIVRVGRKLIF

SEQ ID NO: 317800 - protein, 14 aa, Homo sapiens
  CDR3 for beta chain variable domain of TCR clone 158900 (TRBV11-3, TRBJ2-7)
CASSPDRNTYEQYF

SEQ ID NO: 317801 - protein, 13 aa, Homo sapiens
  CDR3 for alpha chain variable domain of TCR clone 158901 (TRAV1-1, TRAJ39)
CAVRDGAGNMLTF

SEQ ID NO: 317802 - protein, 16 aa, Homo sapiens
  CDR3 for beta chain variable domain of TCR clone 158901 (TRBV5-7, TRBJ1-5)
CASSLQQDREYQTQHF

SEQ ID NO: 317803 - protein, 10 aa, Homo sapiens
  CDR3 for alpha chain variable domain of TCR clone 158902 (TRAV12-3, TRAJ18)
CAMSAEAQPW

SEQ ID NO: 317804 - protein, 13 aa, Homo sapiens
  CDR3 for beta chain variable domain of TCR clone 158902 (TRBV15, TRBJ1-6)
CATSGGLNSPLPF

SEQ ID NO: 317805 - protein, 15 aa, Homo sapiens
  CDR3 for alpha chain variable domain of TCR clone 158903 (TRAV3, TRAJ3)
CAVRDRDSSASKIIF

SEQ ID NO: 317806 - protein, 13 aa, Homo sapiens
  CDR3 for beta chain variable domain of TCR clone 158903 (TRBV7-2, TRBJ2-7)
CASSSPSGSEQYF

SEQ ID NO: 317807 - protein, 11 aa, Homo sapiens
  CDR3 for alpha chain variable domain of TCR clone 158904 (TRAV1-2, TRAJ31)
CAVKNNARLMF

SEQ ID NO: 317808 - protein, 13 aa, Homo sapiens
  CDR3 for beta chain variable domain of TCR clone 158904 (TRBV9, TRBJ2-1)
CASSVGQGGEQFF

SEQ ID NO: 317809 - protein, 17 aa, Homo sapiens
  CDR3 for alpha chain variable domain of TCR clone 158905 (TRAV26-1, TRAJ28)
CIVRVPDSGTGSYQLTF

SEQ ID NO: 317810 - protein, 17 aa, Homo sapiens
  CDR3 for beta chain variable domain of TCR clone 158905 (TRBV28, TRBJ2-7)
CASSPLPAGGKSYEQYF

SEQ ID NO: 317811 - protein, 14 aa, Homo sapiens
  CDR3 for alpha chain variable domain of TCR clone 158906 (TRAV1-2, TRAJ8)
CAVREDTGFQKLVF

SEQ ID NO: 317812 - protein, 14 aa, Homo sapiens
  CDR3 for beta chain variable domain of TCR clone 158906 (TRBV27, TRBJ1-5)
CASSLDPRNQPQHF

SEQ ID NO: 317813 - protein, 12 aa, Homo sapiens
  CDR3 for alpha chain variable domain of TCR clone 158907 (TRAV1-1, TRAJ39)
CAAPVVGNMLTF

SEQ ID NO: 317814 - protein, 15 aa, Homo sapiens
  CDR3 for beta chain variable domain of TCR clone 158907 (TRBV19, TRBJ1-6)
CASSTQGAVGSTLHF

SEQ ID NO: 317815 - protein, 13 aa, Homo sapiens
  CDR3 for alpha chain variable domain of TCR clone 158908 (TRAV13-2, TRAJ48)
CAEMDFGNEKLTI

SEQ ID NO: 317816 - protein, 15 aa, Homo sapiens
  CDR3 for beta chain variable domain of TCR clone 158908 (TRBV7-9, TRBJ1-6)
CASSSPGRGNSPLHF

SEQ ID NO: 317817 - protein, 17 aa, Homo sapiens
  CDR3 for alpha chain variable domain of TCR clone 158909 (TRAV3, TRAJ12)
CAVRDGGRMDSSYKLIF

SEQ ID NO: 317818 - protein, 16 aa, Homo sapiens
  CDR3 for beta chain variable domain of TCR clone 158909 (TRBV4-1, TRBJ2-5)
CASSQTFYGDQETQYF

SEQ ID NO: 317819 - protein, 14 aa, Homo sapiens
  CDR3 for alpha chain variable domain of TCR clone 158910 (TRAV12-2, TRAJ17)
CAVHIKAAGNKLTF

SEQ ID NO: 317820 - protein, 16 aa, Homo sapiens
  CDR3 for beta chain variable domain of TCR clone 158910 (TRBV20-1, TRBJ2-6)
CSASSQGYDGANVLTF

SEQ ID NO: 317821 - protein, 16 aa, Homo sapiens
  CDR3 for alpha chain variable domain of TCR clone 158911 (TRAV23/DV6, TRAJ52)
CAARPSGGTSYGKLTF

SEQ ID NO: 317822 - protein, 13 aa, Homo sapiens
  CDR3 for beta chain variable domain of TCR clone 158911 (TRBV7-2, TRBJ1-1)
CASSRNTNTEAFF

SEQ ID NO: 317823 - protein, 14 aa, Homo sapiens
  CDR3 for alpha chain variable domain of TCR clone 158912 (TRAV8-4, TRAJ5)
CAVSTDKGRRALTF

SEQ ID NO: 317824 - protein, 13 aa, Homo sapiens
  CDR3 for beta chain variable domain of TCR clone 158912 (TRBV12-4, TRBJ1-5)
CASSPDRAQPQHF

SEQ ID NO: 317825 - protein, 13 aa, Homo sapiens
  CDR3 for alpha chain variable domain of TCR clone 158913 (TRAV20, TRAJ37)
CSGCSSNTGKLIF

SEQ ID NO: 317826 - protein, 15 aa, Homo sapiens
  CDR3 for beta chain variable domain of TCR clone 158913 (TRBV7-2, TRBJ2-1)
CASSFQADEYNEQFF

SEQ ID NO: 317827 - protein, 15 aa, Homo sapiens
  CDR3 for alpha chain variable domain of TCR clone 158914 (TRAV21, TRAJ40)
CAVRPQTSGTYKYIF

SEQ ID NO: 317828 - protein, 15 aa, Homo sapiens
  CDR3 for beta chain variable domain of TCR clone 158914 (TRBV15, TRBJ1-4)
CATSRDMGSYEKLFF

SEQ ID NO: 317829 - protein, 18 aa, Homo sapiens
  CDR3 for alpha chain variable domain of TCR clone 158915 (TRAV21, TRAJ52)
CAVRPSPAGGTSYGKLTF

SEQ ID NO: 317830 - protein, 11 aa, Homo sapiens
  CDR3 for beta chain variable domain of TCR clone 158915 (TRBV29-1, TRBJ2-5)
CSEGRTGTQYF

SEQ ID NO: 317831 - protein, 14 aa, Homo sapiens
  CDR3 for alpha chain variable domain of TCR clone 158916 (TRAV12-1, TRAJ3)
CVVNPGSSASKIIF

SEQ ID NO: 317832 - protein, 14 aa, Homo sapiens
  CDR3 for beta chain variable domain of TCR clone 158916 (TRBV20-1, TRBJ2-3)
CSARGGTSADTQYF

SEQ ID NO: 317833 - protein, 10 aa, Homo sapiens
  CDR3 for alpha chain variable domain of TCR clone 158917 (TRAV23/DV6, TRAJ57)
CAASSTLSQG

SEQ ID NO: 317834 - protein, 15 aa, Homo sapiens
  CDR3 for beta chain variable domain of TCR clone 158917 (TRBV28, TRBJ2-1)
CASSIIAGGRSEQFF

SEQ ID NO: 317835 - protein, 14 aa, Homo sapiens
  CDR3 for alpha chain variable domain of TCR clone 158918 (TRAV26-1, TRAJ38)
CIADNAGNNRKLIW

SEQ ID NO: 317836 - protein, 15 aa, Homo sapiens
  CDR3 for beta chain variable domain of TCR clone 158918 (TRBV2, TRBJ2-1)
CASRESGGAYNEQFF

SEQ ID NO: 317837 - protein, 13 aa, Homo sapiens
  CDR3 for alpha chain variable domain of TCR clone 158919 (TRAV13-1, TRAJ5)
CAASDTGRRALTF

SEQ ID NO: 317838 - protein, 14 aa, Homo sapiens
  CDR3 for beta chain variable domain of TCR clone 158919 (TRBV11-2, TRBJ2-3)
CASSRLARTDTQYF

SEQ ID NO: 317839 - protein, 15 aa, Homo sapiens
  CDR3 for alpha chain variable domain of TCR clone 158920 (TRAV17, TRAJ45)
CATAELGGGADGLTF

SEQ ID NO: 317840 - protein, 15 aa, Homo sapiens
  CDR3 for beta chain variable domain of TCR clone 158920 (TRBV7-2, TRBJ1-2)
CASSPRAGWNYGYTF

SEQ ID NO: 317841 - protein, 15 aa, Homo sapiens
  CDR3 for alpha chain variable domain of TCR clone 158921 (TRAV26-2, TRAJ45)
CILRVDKYSEEVLTD

SEQ ID NO: 317842 - protein, 16 aa, Homo sapiens
  CDR3 for beta chain variable domain of TCR clone 158921 (TRBV2, TRBJ1-4)
CASNLLQGATNEKLFF

SEQ ID NO: 317843 - protein, 15 aa, Homo sapiens
  CDR3 for alpha chain variable domain of TCR clone 158922 (TRAV8-4, TRAJ7)
CAVIGGNYGNNRLAF

SEQ ID NO: 317844 - protein, 11 aa, Homo sapiens
  CDR3 for beta chain variable domain of TCR clone 158922 (TRBV20-1, TRBJ2-1)
CSLSSGSEQFF

SEQ ID NO: 317845 - protein, 12 aa, Homo sapiens
  CDR3 for alpha chain variable domain of TCR clone 158923 (TRAV21, TRAJ31)
CVLAGNNARLMF

SEQ ID NO: 317846 - protein, 16 aa, Homo sapiens
  CDR3 for beta chain variable domain of TCR clone 158923 (TRBV27, TRBJ2-5)
CASSFGPGGTKATQYF

SEQ ID NO: 317847 - protein, 15 aa, Homo sapiens
  CDR3 for alpha chain variable domain of TCR clone 158924 (TRAV21, TRAJ53)
CATLNSGGSNYKLTF

SEQ ID NO: 317848 - protein, 14 aa, Homo sapiens
  CDR3 for beta chain variable domain of TCR clone 158924 (TRBV5-1, TRBJ2-1)
CASSLDDRFDEQFF

SEQ ID NO: 317849 - protein, 15 aa, Homo sapiens
  CDR3 for alpha chain variable domain of TCR clone 158925 (TRAV3, TRAJ4)
CAVRDGTGGYNKLIF

SEQ ID NO: 317850 - protein, 20 aa, Homo sapiens
  CDR3 for beta chain variable domain of TCR clone 158925 (TRBV4-3, TRBJ2-3)
CASSPRVEMRASGRPDTQYF

SEQ ID NO: 317851 - protein, 14 aa, Homo sapiens
  CDR3 for alpha chain variable domain of TCR clone 158926 (TRAV12-3, TRAJ58)
CAMNTETSGSRLTL

SEQ ID NO: 317852 - protein, 13 aa, Homo sapiens
  CDR3 for beta chain variable domain of TCR clone 158926 (TRBV27, TRBJ2-3)
CASSWGRTDTQYF

SEQ ID NO: 317853 - protein, 16 aa, Homo sapiens
  CDR3 for alpha chain variable domain of TCR clone 158927 (TRAV21, TRAJ37)
CAVRTAGSNNTGKLIF

SEQ ID NO: 317854 - protein, 13 aa, Homo sapiens
  CDR3 for beta chain variable domain of TCR clone 158927 (TRBV7-9, TRBJ2-5)
CASLPSGRETQYF

SEQ ID NO: 317855 - protein, 17 aa, Homo sapiens
  CDR3 for alpha chain variable domain of TCR clone 158928 (TRAV13-1, TRAJ52)
CAAGRNAGGTSYGKLTF

SEQ ID NO: 317856 - protein, 15 aa, Homo sapiens
  CDR3 for beta chain variable domain of TCR clone 158928 (TRBV3-1, TRBJ2-7)
CASSQEWTGSYEQYF

SEQ ID NO: 317857 - protein, 13 aa, Homo sapiens
  CDR3 for alpha chain variable domain of TCR clone 158929 (TRAV29/DV5, TRAJ47)
CAASAEYGNKLDF

SEQ ID NO: 317858 - protein, 15 aa, Homo sapiens
  CDR3 for beta chain variable domain of TCR clone 158929 (TRBV7-9, TRBJ1-4)
CASSARTGGNEKLFF

SEQ ID NO: 317859 - protein, 17 aa, Homo sapiens
  CDR3 for alpha chain variable domain of TCR clone 158930 (TRAV8-6, TRAJ58)
CAVSSWVGETSGSRLTF

SEQ ID NO: 317860 - protein, 14 aa, Homo sapiens
  CDR3 for beta chain variable domain of TCR clone 158930 (TRBV4-2, TRBJ2-1)
CASGLDRANNEQFF

SEQ ID NO: 317861 - protein, 13 aa, Homo sapiens
  CDR3 for alpha chain variable domain of TCR clone 158931 (TRAV2, TRAJ40)
CAVVTSGTYEYIF

SEQ ID NO: 317862 - protein, 16 aa, Homo sapiens
  CDR3 for beta chain variable domain of TCR clone 158931 (TRBV9, TRBJ2-1)
CASSVGGGGNYNEQFF

SEQ ID NO: 317863 - protein, 15 aa, Homo sapiens
  CDR3 for alpha chain variable domain of TCR clone 158932 (TRAV23/DV6, TRAJ30)
CAASSQESRDDKIIF

SEQ ID NO: 317864 - protein, 12 aa, Homo sapiens
  CDR3 for beta chain variable domain of TCR clone 158932 (TRBV11-2, TRBJ2-1)
CASSPGNNEQFF

SEQ ID NO: 317865 - protein, 12 aa, Homo sapiens
  CDR3 for alpha chain variable domain of TCR clone 158933 (TRAV30, TRAJ43)
CGTEERGNDMRF

SEQ ID NO: 317866 - protein, 15 aa, Homo sapiens
  CDR3 for beta chain variable domain of TCR clone 158933 (TRBV27, TRBJ2-7)
CTSVPSFSQGYEQYF

SEQ ID NO: 317867 - protein, 15 aa, Homo sapiens
  CDR3 for alpha chain variable domain of TCR clone 158934 (TRAV3, TRAJ22)
CAVRDRGGSARQLIF

SEQ ID NO: 317868 - protein, 16 aa, Homo sapiens
  CDR3 for beta chain variable domain of TCR clone 158934 (TRBV11-2, TRBJ2-1)
CASARGSYSHHNEQFF

SEQ ID NO: 317869 - protein, 14 aa, Homo sapiens
  CDR3 for alpha chain variable domain of TCR clone 158935 (TRAV12-2, TRAJ52)
CAVPGGTSYGKLTF

SEQ ID NO: 317870 - protein, 16 aa, Homo sapiens
  CDR3 for beta chain variable domain of TCR clone 158935 (TRBV20-1, TRBJ2-1)
CSARDHLAGGRGEQFF

SEQ ID NO: 317871 - protein, 12 aa, Homo sapiens
  CDR3 for alpha chain variable domain of TCR clone 158936 (TRAV12-3, TRAJ17)
CSMTLTGNKLTF

SEQ ID NO: 317872 - protein, 14 aa, Homo sapiens
  CDR3 for beta chain variable domain of TCR clone 158936 (TRBV11-2, TRBJ2-3)
CASSRLARTDTQYF

SEQ ID NO: 317873 - protein, 14 aa, Homo sapiens
  CDR3 for alpha chain variable domain of TCR clone 158937 (TRAV23/DV6, TRAJ24)
CAASLSDSWGKLEF

SEQ ID NO: 317874 - protein, 13 aa, Homo sapiens
  CDR3 for beta chain variable domain of TCR clone 158937 (TRBV7-6, TRBJ2-3)
CASSLRSDNTQYF

SEQ ID NO: 317875 - protein, 13 aa, Homo sapiens
  CDR3 for alpha chain variable domain of TCR clone 158938 (TRAV14/DV4, TRAJ23)
CAMREVKGGKLIF

SEQ ID NO: 317876 - protein, 12 aa, Homo sapiens
  CDR3 for beta chain variable domain of TCR clone 158938 (TRBV6-3, TRBJ2-7)
CASSLTPYEQYF

SEQ ID NO: 317877 - protein, 15 aa, Homo sapiens
  CDR3 for alpha chain variable domain of TCR clone 158939 (TRAV12-2, TRAJ50)
CAVNGLETSYDKVIF

SEQ ID NO: 317878 - protein, 16 aa, Homo sapiens
  CDR3 for beta chain variable domain of TCR clone 158939 (TRBV5-4, TRBJ2-3)
CASQQPGAGGADTEYF

SEQ ID NO: 317879 - protein, 15 aa, Homo sapiens
  CDR3 for alpha chain variable domain of TCR clone 158940 (TRAV25, TRAJ53)
CAATGGGGSNYKLTF

SEQ ID NO: 317880 - protein, 20 aa, Homo sapiens
  CDR3 for beta chain variable domain of TCR clone 158940 (TRBV4-2, TRBJ2-7)
CASSQASGGNLRAVLRAGHQ

SEQ ID NO: 317881 - protein, 12 aa, Homo sapiens
  CDR3 for alpha chain variable domain of TCR clone 158941 (TRAV17, TRAJ57)
CATDGGAEKLVF

SEQ ID NO: 317882 - protein, 12 aa, Homo sapiens
  CDR3 for beta chain variable domain of TCR clone 158941 (TRBV29-1, TRBJ2-2)
CSVGKYTGELFF

SEQ ID NO: 317883 - protein, 14 aa, Homo sapiens
  CDR3 for alpha chain variable domain of TCR clone 158942 (TRAV25, TRAJ22)
CAVRSSGSARQLTF

SEQ ID NO: 317884 - protein, 16 aa, Homo sapiens
  CDR3 for beta chain variable domain of TCR clone 158942 (TRBV4-2, TRBJ1-1)
CASSPSPGRAAPEAVF

SEQ ID NO: 317885 - protein, 15 aa, Homo sapiens
  CDR3 for alpha chain variable domain of TCR clone 158943 (TRAV12-3, TRAJ11)
CAMSEENSGYSNLTF

SEQ ID NO: 317886 - protein, 16 aa, Homo sapiens
  CDR3 for beta chain variable domain of TCR clone 158943 (TRBV5-1, TRBJ2-7)
CASSLEGLGGLYEQYF

SEQ ID NO: 317887 - protein, 16 aa, Homo sapiens
  CDR3 for alpha chain variable domain of TCR clone 158944 (TRAV21, TRAJ52)
CAVTNAGGTSYGKLTF

SEQ ID NO: 317888 - protein, 11 aa, Homo sapiens
  CDR3 for beta chain variable domain of TCR clone 158944 (TRBV2, TRBJ1-1)
CASRECTEAFL

SEQ ID NO: 317889 - protein, 14 aa, Homo sapiens
  CDR3 for alpha chain variable domain of TCR clone 158945 (TRAV35, TRAJ50)
CAGHRKTSYDKVIF

SEQ ID NO: 317890 - protein, 15 aa, Homo sapiens
  CDR3 for beta chain variable domain of TCR clone 158945 (TRBV6-3, TRBJ2-5)
CASSSPGTVFYEQYF

SEQ ID NO: 317891 - protein, 15 aa, Homo sapiens
  CDR3 for alpha chain variable domain of TCR clone 158946 (TRAV23/DV6, TRAJ18)
CAASFRGSTLGRLYL

SEQ ID NO: 317892 - protein, 13 aa, Homo sapiens
  CDR3 for beta chain variable domain of TCR clone 158946 (TRBV28, TRBJ2-7)
CAILERAGGEQYF

SEQ ID NO: 317893 - protein, 14 aa, Homo sapiens
  CDR3 for alpha chain variable domain of TCR clone 158947 (TRAV21, TRAJ12)
CAVRNGDSSYKLIF

SEQ ID NO: 317894 - protein, 14 aa, Homo sapiens
  CDR3 for beta chain variable domain of TCR clone 158947 (TRBV7-6, TRBJ2-7)
CASSLTGTGNEHYF

SEQ ID NO: 317895 - protein, 18 aa, Homo sapiens
  CDR3 for alpha chain variable domain of TCR clone 158948 (TRAV12-2, )
CAVEDIQNPDPAVYQLRD

SEQ ID NO: 317896 - protein, 15 aa, Homo sapiens
  CDR3 for beta chain variable domain of TCR clone 158948 (TRBV11-1, TRBJ2-7)
CASSLSYGASYEQYF

SEQ ID NO: 317897 - protein, 12 aa, Homo sapiens
  CDR3 for alpha chain variable domain of TCR clone 158949 (TRAV1-2, TRAJ29)
CVVPSGNTPLVF

SEQ ID NO: 317898 - protein, 13 aa, Homo sapiens
  CDR3 for beta chain variable domain of TCR clone 158949 (TRBV5-4, TRBJ1-1)
CASSVDLGTEAFF

SEQ ID NO: 317899 - protein, 12 aa, Homo sapiens
  CDR3 for alpha chain variable domain of TCR clone 158950 (TRAV27, TRAJ58)
CAGDRDTSRLTF

SEQ ID NO: 317900 - protein, 14 aa, Homo sapiens
  CDR3 for beta chain variable domain of TCR clone 158950 (TRBV7-3, TRBJ2-1)
CASSLGTSANEQFF

SEQ ID NO: 317901 - protein, 17 aa, Homo sapiens
  CDR3 for alpha chain variable domain of TCR clone 158951 (TRAV13-1, TRAJ28)
CAASPPYSVAGSYQLTF

SEQ ID NO: 317902 - protein, 14 aa, Homo sapiens
  CDR3 for beta chain variable domain of TCR clone 158951 (TRBV24-1, TRBJ1-1)
CATSIPRGDTEAFF

SEQ ID NO: 317903 - protein, 14 aa, Homo sapiens
  CDR3 for alpha chain variable domain of TCR clone 158952 (TRAV12-2, TRAJ53)
CAVRGGGSNNKLTF

SEQ ID NO: 317904 - protein, 14 aa, Homo sapiens
  CDR3 for beta chain variable domain of TCR clone 158952 (TRBV19, TRBJ2-1)
CASPTFVLSGEQFF

SEQ ID NO: 317905 - protein, 12 aa, Homo sapiens
  CDR3 for alpha chain variable domain of TCR clone 158953 (TRAV2, TRAJ26)
CAGSPGRRWSEF

SEQ ID NO: 317906 - protein, 13 aa, Homo sapiens
  CDR3 for beta chain variable domain of TCR clone 158953 (TRBV7-9, TRBJ1-2)
CASSLKQNYGYTF

SEQ ID NO: 317907 - protein, 15 aa, Homo sapiens
  CDR3 for alpha chain variable domain of TCR clone 158954 (TRAV8-4, TRAJ3)
CAVTGEKLVQQCFQD

SEQ ID NO: 317908 - protein, 16 aa, Homo sapiens
  CDR3 for beta chain variable domain of TCR clone 158954 (TRBV4-2, TRBJ1-1)
CASSQAGFGMNTEAFF

SEQ ID NO: 317909 - protein, 11 aa, Homo sapiens
  CDR3 for alpha chain variable domain of TCR clone 158955 (TRAV13-1, TRAJ20)
CAASNDYKLSF

SEQ ID NO: 317910 - protein, 16 aa, Homo sapiens
  CDR3 for beta chain variable domain of TCR clone 158955 (TRBV27, TRBJ2-1)
CASSLSKGFGLVEQFF

SEQ ID NO: 317911 - protein, 14 aa, Homo sapiens
  CDR3 for alpha chain variable domain of TCR clone 158956 (TRAV2, TRAJ23)
CAVGLRNQGGKLIF

SEQ ID NO: 317912 - protein, 13 aa, Homo sapiens
  CDR3 for beta chain variable domain of TCR clone 158956 (TRBV11-2, TRBJ2-5)
CASSRGPSETQYF

SEQ ID NO: 317913 - protein, 20 aa, Homo sapiens
  CDR3 for alpha chain variable domain of TCR clone 158957 (TRAV12-1, TRAJ42)
SSVIQPPTSVKGGSQGILIF

SEQ ID NO: 317914 - protein, 18 aa, Homo sapiens
  CDR3 for beta chain variable domain of TCR clone 158957 (TRBV11-2, TRBJ2-3)
CASSLGGASRGAPNTQYF

SEQ ID NO: 317915 - protein, 16 aa, Homo sapiens
  CDR3 for alpha chain variable domain of TCR clone 158958 (TRAV21, TRAJ52)
CAVTNAGGTSYGKLTF

SEQ ID NO: 317916 - protein, 15 aa, Homo sapiens
  CDR3 for beta chain variable domain of TCR clone 158958 (TRBV5-1, TRBJ2-1)
CASSPPRAPYNEQFF

SEQ ID NO: 317917 - protein, 15 aa, Homo sapiens
  CDR3 for alpha chain variable domain of TCR clone 158959 (TRAV26-1, TRAJ29)
CIVRVEGSGNTPLVV

SEQ ID NO: 317918 - protein, 15 aa, Homo sapiens
  CDR3 for beta chain variable domain of TCR clone 158959 (TRBV7-9, TRBJ1-5)
CASSQGHQPNQPQHV

SEQ ID NO: 317919 - protein, 12 aa, Homo sapiens
  CDR3 for alpha chain variable domain of TCR clone 158960 (TRAV3, TRAJ27)
CAVRDGAGKSTF

SEQ ID NO: 317920 - protein, 15 aa, Homo sapiens
  CDR3 for beta chain variable domain of TCR clone 158960 (TRBV13, TRBJ1-5)
CASSFGQGGVQPQHF

SEQ ID NO: 317921 - protein, 12 aa, Homo sapiens
  CDR3 for alpha chain variable domain of TCR clone 158961 (TRAV12-3, TRAJ17)
CAMTLPGNKLTF

SEQ ID NO: 317922 - protein, 13 aa, Homo sapiens
  CDR3 for beta chain variable domain of TCR clone 158961 (TRBV7-9, TRBJ1-2)
CASSLKQNYGYTF

SEQ ID NO: 317923 - protein, 10 aa, Homo sapiens
  CDR3 for alpha chain variable domain of TCR clone 158962 (TRAV17, TRAJ52)
SATSYGKLTF

SEQ ID NO: 317924 - protein, 13 aa, Homo sapiens
  CDR3 for beta chain variable domain of TCR clone 158962 (TRBV29-1, TRBJ2-5)
CSVGGTSAESQYF

SEQ ID NO: 317925 - protein, 13 aa, Homo sapiens
  CDR3 for alpha chain variable domain of TCR clone 158963 (TRAV20, TRAJ29)
CAVQAVGNTPLVF

SEQ ID NO: 317926 - protein, 15 aa, Homo sapiens
  CDR3 for beta chain variable domain of TCR clone 158963 (TRBV10-2, TRBJ2-5)
CASRGSGGPQETQYF

SEQ ID NO: 317927 - protein, 15 aa, Homo sapiens
  CDR3 for alpha chain variable domain of TCR clone 158964 (TRAV16, TRAJ17)
CALSGNKAAGNKLTF

SEQ ID NO: 317928 - protein, 14 aa, Homo sapiens
  CDR3 for beta chain variable domain of TCR clone 158964 (TRBV7-3, TRBJ2-1)
CASSLAGGTNEQFF

SEQ ID NO: 317929 - protein, 13 aa, Homo sapiens
  CDR3 for alpha chain variable domain of TCR clone 158965 (TRAV12-1, TRAJ6)
CVVYPGGCYIPTF

SEQ ID NO: 317930 - protein, 13 aa, Homo sapiens
  CDR3 for beta chain variable domain of TCR clone 158965 (TRBV4-2, TRBJ1-1)
CASSQAGNTEAFF

SEQ ID NO: 317931 - protein, 11 aa, Homo sapiens
  CDR3 for alpha chain variable domain of TCR clone 158966 (TRAV17, TRAJ36)
CAPTGANNLLF

SEQ ID NO: 317932 - protein, 12 aa, Homo sapiens
  CDR3 for beta chain variable domain of TCR clone 158966 (TRBV29-1, TRBJ2-3)
CSVVLGADTQYF

SEQ ID NO: 317933 - protein, 12 aa, Homo sapiens
  CDR3 for alpha chain variable domain of TCR clone 158967 (TRAV12-2, TRAJ8)
CAVNTGFQKLVF

SEQ ID NO: 317934 - protein, 17 aa, Homo sapiens
  CDR3 for beta chain variable domain of TCR clone 158967 (TRBV13, TRBJ2-3)
CASSLSRVAGGRNTQYF

SEQ ID NO: 317935 - protein, 20 aa, Homo sapiens
  CDR3 for alpha chain variable domain of TCR clone 158968 (TRAV23/DV6, )
CAATELIPDIQNPDPAVYQL

SEQ ID NO: 317936 - protein, 16 aa, Homo sapiens
  CDR3 for beta chain variable domain of TCR clone 158968 (TRBV10-3, TRBJ2-7)
CAISPRGQEQTYEQYF

SEQ ID NO: 317937 - protein, 17 aa, Homo sapiens
  CDR3 for alpha chain variable domain of TCR clone 158969 (TRAV1-2, TRAJ22)
CLLPLCCEPGSARQLTF

SEQ ID NO: 317938 - protein, 14 aa, Homo sapiens
  CDR3 for beta chain variable domain of TCR clone 158969 (TRBV19, TRBJ2-5)
CASSMTGQQETQYF

SEQ ID NO: 317939 - protein, 11 aa, Homo sapiens
  CDR3 for alpha chain variable domain of TCR clone 158970 (TRAV1-2, TRAJ20)
CAVRDSRTTTS

SEQ ID NO: 317940 - protein, 15 aa, Homo sapiens
  CDR3 for beta chain variable domain of TCR clone 158970 (TRBV5-1, TRBJ1-2)
CASSPGDRGSYGYTF

SEQ ID NO: 317941 - protein, 14 aa, Homo sapiens
  CDR3 for alpha chain variable domain of TCR clone 158971 (TRAV12-2, TRAJ40)
CAVKIPSGTYKYIF

SEQ ID NO: 317942 - protein, 14 aa, Homo sapiens
  CDR3 for beta chain variable domain of TCR clone 158971 (TRBV20-1, TRBJ1-1)
CSAQTRIVGTEAFL

SEQ ID NO: 317943 - protein, 14 aa, Homo sapiens
  CDR3 for alpha chain variable domain of TCR clone 158972 (TRAV27, TRAJ15)
CAGFDNQAGTPLIF

SEQ ID NO: 317944 - protein, 11 aa, Homo sapiens
  CDR3 for beta chain variable domain of TCR clone 158972 (TRBV29-1, TRBJ1-1)
CSVEVGTRTFF

SEQ ID NO: 317945 - protein, 11 aa, Homo sapiens
  CDR3 for alpha chain variable domain of TCR clone 158973 (TRAV27, TRAJ20)
CAGLNDYKLSF

SEQ ID NO: 317946 - protein, 14 aa, Homo sapiens
  CDR3 for beta chain variable domain of TCR clone 158973 (TRBV6-1, TRBJ1-1)
CARTPLQMNTEAFF

SEQ ID NO: 317947 - protein, 14 aa, Homo sapiens
  CDR3 for alpha chain variable domain of TCR clone 158974 (TRAV17, TRAJ20)
CATLSGSNDYKLSF

SEQ ID NO: 317948 - protein, 18 aa, Homo sapiens
  CDR3 for beta chain variable domain of TCR clone 158974 (TRBV7-3, TRBJ2-6)
CASSFSRDRDSGANVLTF

SEQ ID NO: 317949 - protein, 14 aa, Homo sapiens
  CDR3 for alpha chain variable domain of TCR clone 158975 (TRAV3, TRAJ30)
CAVRDIGRDDKIIF

SEQ ID NO: 317950 - protein, 15 aa, Homo sapiens
  CDR3 for beta chain variable domain of TCR clone 158975 (TRBV10-3, TRBJ1-1)
CASSEAGTGGTEAFF

SEQ ID NO: 317951 - protein, 13 aa, Homo sapiens
  CDR3 for alpha chain variable domain of TCR clone 158976 (TRAV12-2, TRAJ52)
CAAHGTSYGKLTF

SEQ ID NO: 317952 - protein, 15 aa, Homo sapiens
  CDR3 for beta chain variable domain of TCR clone 158976 (TRBV10-3, TRBJ2-7)
RAISTFSGVKGEQYF

SEQ ID NO: 317953 - protein, 14 aa, Homo sapiens
  CDR3 for alpha chain variable domain of TCR clone 158977 (TRAV1-2, TRAJ16)
CAVNRFSAGQKLLF

SEQ ID NO: 317954 - protein, 17 aa, Homo sapiens
  CDR3 for beta chain variable domain of TCR clone 158977 (TRBV28, TRBJ2-5)
CASSTPEGDALQETQYF

SEQ ID NO: 317955 - protein, 14 aa, Homo sapiens
  CDR3 for alpha chain variable domain of TCR clone 158978 (TRAV8-4, TRAJ13)
CAVTLSGGYQKVTF

SEQ ID NO: 317956 - protein, 14 aa, Homo sapiens
  CDR3 for beta chain variable domain of TCR clone 158978 (TRBV7-2, TRBJ1-2)
CASSQTRSTYGYTV

SEQ ID NO: 317957 - protein, 16 aa, Homo sapiens
  CDR3 for alpha chain variable domain of TCR clone 158979 (TRAV30, TRAJ24)
CVTEIVDADSWGKFQC

SEQ ID NO: 317958 - protein, 14 aa, Homo sapiens
  CDR3 for beta chain variable domain of TCR clone 158979 (TRBV20-1, TRBJ1-1)
CSAQTRIGGTEAFF

SEQ ID NO: 317959 - protein, 11 aa, Homo sapiens
  CDR3 for alpha chain variable domain of TCR clone 158980 (TRAV35, TRAJ12)
RRMDSSYKLIF

SEQ ID NO: 317960 - protein, 14 aa, Homo sapiens
  CDR3 for beta chain variable domain of TCR clone 158980 (TRBV19, TRBJ1-1)
CASSPNRGDAEAFF

SEQ ID NO: 317961 - protein, 12 aa, Homo sapiens
  CDR3 for alpha chain variable domain of TCR clone 158981 (TRAV27, TRAJ21)
CAGVRQLQQILL

SEQ ID NO: 317962 - protein, 12 aa, Homo sapiens
  CDR3 for beta chain variable domain of TCR clone 158981 (TRBV11-2, TRBJ2-1)
CASNPGNNEQFF

SEQ ID NO: 317963 - protein, 13 aa, Homo sapiens
  CDR3 for alpha chain variable domain of TCR clone 158982 (TRAV29/DV5, TRAJ31)
CAASRNNNARLMF

SEQ ID NO: 317964 - protein, 12 aa, Homo sapiens
  CDR3 for beta chain variable domain of TCR clone 158982 (TRBV12-4, TRBJ1-5)
CASSLGRQTQHF

SEQ ID NO: 317965 - protein, 14 aa, Homo sapiens
  CDR3 for alpha chain variable domain of TCR clone 158983 (TRAV12-2, TRAJ45)
CAVNIGGGADGLTF

SEQ ID NO: 317966 - protein, 17 aa, Homo sapiens
  CDR3 for beta chain variable domain of TCR clone 158983 (TRBV7-8, TRBJ2-6)
CASSAGTWGAGANVLTF

SEQ ID NO: 317967 - protein, 14 aa, Homo sapiens
  CDR3 for alpha chain variable domain of TCR clone 158984 (TRAV3, TRAJ28)
CAVRRGDGSYQLTF

SEQ ID NO: 317968 - protein, 16 aa, Homo sapiens
  CDR3 for beta chain variable domain of TCR clone 158984 (TRBV4-1, TRBJ2-7)
CASSQEWTSGPLEQYF

SEQ ID NO: 317969 - protein, 16 aa, Homo sapiens
  CDR3 for alpha chain variable domain of TCR clone 158985 (TRAV12-3, TRAJ53)
CAMSPGSGGSNYKLTF

SEQ ID NO: 317970 - protein, 13 aa, Homo sapiens
  CDR3 for beta chain variable domain of TCR clone 158985 (TRBV12-4, TRBJ1-3)
CASSLASGNTIYF

SEQ ID NO: 317971 - protein, 15 aa, Homo sapiens
  CDR3 for alpha chain variable domain of TCR clone 158986 (TRAV3, TRAJ23)
CAVRDRGNQGGKLIF

SEQ ID NO: 317972 - protein, 15 aa, Homo sapiens
  CDR3 for beta chain variable domain of TCR clone 158986 (TRBV7-3, TRBJ2-1)
CQQLASSGSYNEQFF

SEQ ID NO: 317973 - protein, 14 aa, Homo sapiens
  CDR3 for alpha chain variable domain of TCR clone 158987 (TRAV38-1, TRAJ45)
CADYSGGGADGLTF

SEQ ID NO: 317974 - protein, 20 aa, Homo sapiens
  CDR3 for beta chain variable domain of TCR clone 158987 (TRBV28, TRBJ2-1)
RASTPIGRSPGLAGGNEQFF

SEQ ID NO: 317975 - protein, 14 aa, Homo sapiens
  CDR3 for alpha chain variable domain of TCR clone 158988 (TRAV8-3, TRAJ36)
CAAVGNNGANNLFF

SEQ ID NO: 317976 - protein, 17 aa, Homo sapiens
  CDR3 for beta chain variable domain of TCR clone 158988 (TRBV13, TRBJ2-3)
CASSLSRVAGGRNTQYF

SEQ ID NO: 317977 - protein, 14 aa, Homo sapiens
  CDR3 for alpha chain variable domain of TCR clone 158989 (TRAV2, TRAJ26)
CAGSPGRLWSEFCF

SEQ ID NO: 317978 - protein, 13 aa, Homo sapiens
  CDR3 for beta chain variable domain of TCR clone 158989 (TRBV7-9, TRBJ1-2)
CASSLKQNYGYTF

SEQ ID NO: 317979 - protein, 16 aa, Homo sapiens
  CDR3 for alpha chain variable domain of TCR clone 158990 (TRAV30, TRAJ24)
CGSEMVDADSWGQFQF

SEQ ID NO: 317980 - protein, 15 aa, Homo sapiens
  CDR3 for beta chain variable domain of TCR clone 158990 (TRBV28, TRBJ2-1)
CASSIIAGGRSEQFF

SEQ ID NO: 317981 - protein, 12 aa, Homo sapiens
  CDR3 for alpha chain variable domain of TCR clone 158991 (TRAV21, TRAJ27)
CAPPGNARKSTF

SEQ ID NO: 317982 - protein, 13 aa, Homo sapiens
  CDR3 for beta chain variable domain of TCR clone 158991 (TRBV2, TRBJ1-1)
CARNPTGGFHAFF

SEQ ID NO: 317983 - protein, 11 aa, Homo sapiens
  CDR3 for alpha chain variable domain of TCR clone 158992 (TRAV2, TRAJ13)
CASGGYRKVTF

SEQ ID NO: 317984 - protein, 14 aa, Homo sapiens
  CDR3 for beta chain variable domain of TCR clone 158992 (TRBV12-5, TRBJ2-5)
CASGSRTHQETQYF

SEQ ID NO: 317985 - protein, 14 aa, Homo sapiens
  CDR3 for alpha chain variable domain of TCR clone 158993 (TRAV8-4, TRAJ15)
CAVTIREAGTALIF

SEQ ID NO: 317986 - protein, 16 aa, Homo sapiens
  CDR3 for beta chain variable domain of TCR clone 158993 (TRBV29-1, TRBJ2-6)
CSVEDITYSGANVLTC

SEQ ID NO: 317987 - protein, 14 aa, Homo sapiens
  CDR3 for alpha chain variable domain of TCR clone 158994 (TRAV1-2, TRAJ16)
CAVNRFSDGQKLLF

SEQ ID NO: 317988 - protein, 15 aa, Homo sapiens
  CDR3 for beta chain variable domain of TCR clone 158994 (TRBV3-1, TRBJ2-5)
CASSRGLALRETQYF

SEQ ID NO: 317989 - protein, 18 aa, Homo sapiens
  CDR3 for alpha chain variable domain of TCR clone 158995 (TRAV12-3, TRAJ52)
CAMSVGGAGGTSYGKLTF

SEQ ID NO: 317990 - protein, 14 aa, Homo sapiens
  CDR3 for beta chain variable domain of TCR clone 158995 (TRBV7-2, TRBJ2-5)
CASSPRGSSETQYF

SEQ ID NO: 317991 - protein, 15 aa, Homo sapiens
  CDR3 for alpha chain variable domain of TCR clone 158996 (TRAV26-2, TRAJ13)
CILRDLSGGYQKVTF

SEQ ID NO: 317992 - protein, 11 aa, Homo sapiens
  CDR3 for beta chain variable domain of TCR clone 158996 (TRBV7-9, TRBJ2-3)
CASIYTDTQYF

SEQ ID NO: 317993 - protein, 22 aa, Homo sapiens
  CDR3 for alpha chain variable domain of TCR clone 158997 (TRAV4, )
CLVGPHNYDIQNPDPAVYQLRD

SEQ ID NO: 317994 - protein, 15 aa, Homo sapiens
  CDR3 for beta chain variable domain of TCR clone 158997 (TRBV7-9, TRBJ1-6)
CASSSPGRGNSPLHF

SEQ ID NO: 317995 - protein, 13 aa, Homo sapiens
  CDR3 for alpha chain variable domain of TCR clone 158998 (TRAV13-1, TRAJ43)
CAASLSNNNDMRF

SEQ ID NO: 317996 - protein, 14 aa, Homo sapiens
  CDR3 for beta chain variable domain of TCR clone 158998 (TRBV7-3, TRBJ2-2)
CASSSGGYTGELFF

SEQ ID NO: 317997 - protein, 13 aa, Homo sapiens
  CDR3 for alpha chain variable domain of TCR clone 158999 (TRAV12-1, TRAJ26)
SATYLYYGQNFVF

SEQ ID NO: 317998 - protein, 16 aa, Homo sapiens
  CDR3 for beta chain variable domain of TCR clone 158999 (TRBV24-1, TRBJ2-3)
CATSDRRQDLTDTQYF

SEQ ID NO: 317999 - protein, 13 aa, Homo sapiens
  CDR3 for alpha chain variable domain of TCR clone 159000 (TRAV21, TRAJ56)
CAVRLGANSKLPF

SEQ ID NO: 318000 - protein, 12 aa, Homo sapiens
  CDR3 for beta chain variable domain of TCR clone 159000 (TRBV12-4, TRBJ2-3)
CASSSTTDTQYF

SEQ ID NO: 318001 - protein, 15 aa, Homo sapiens
  CDR3 for alpha chain variable domain of TCR clone 159001 (TRAV21, TRAJ53)
CATLNSGGSNYKLTF

SEQ ID NO: 318002 - protein, 15 aa, Homo sapiens
  CDR3 for beta chain variable domain of TCR clone 159001 (TRBV6-1, TRBJ2-1)
CASSEAAYSYNEQFF

SEQ ID NO: 318003 - protein, 15 aa, Homo sapiens
  CDR3 for alpha chain variable domain of TCR clone 159002 (TRAV39, TRAJ32)
CAVDMEGGATNKLIF

SEQ ID NO: 318004 - protein, 13 aa, Homo sapiens
  CDR3 for beta chain variable domain of TCR clone 159002 (TRBV7-2, TRBJ2-7)
CASSSPSGGEQYF

SEQ ID NO: 318005 - protein, 12 aa, Homo sapiens
  CDR3 for alpha chain variable domain of TCR clone 159003 (TRAV3, TRAJ26)
CDVRDYGQNFVF

SEQ ID NO: 318006 - protein, 16 aa, Homo sapiens
  CDR3 for beta chain variable domain of TCR clone 159003 (TRBV11-2, TRBJ1-2)
CASSPSGREANYGYTF

SEQ ID NO: 318007 - protein, 16 aa, Homo sapiens
  CDR3 for alpha chain variable domain of TCR clone 159004 (TRAV16, TRAJ4)
CALSRMFSGGYNKLIF

SEQ ID NO: 318008 - protein, 16 aa, Homo sapiens
  CDR3 for beta chain variable domain of TCR clone 159004 (TRBV12-4, TRBJ1-5)
CASSRPVGGSKQPQHF

SEQ ID NO: 318009 - protein, 23 aa, Homo sapiens
  CDR3 for alpha chain variable domain of TCR clone 159005 (TRAV26-1, TRAJ38)
CIADNAGNNHIQNPDPAAYQLRD

SEQ ID NO: 318010 - protein, 13 aa, Homo sapiens
  CDR3 for beta chain variable domain of TCR clone 159005 (TRBV20-1, TRBJ1-1)
CSARGGGKTEAFF

SEQ ID NO: 318011 - protein, 12 aa, Homo sapiens
  CDR3 for alpha chain variable domain of TCR clone 159006 (TRAV12-3, TRAJ17)
CAITLTGHKLTF

SEQ ID NO: 318012 - protein, 15 aa, Homo sapiens
  CDR3 for beta chain variable domain of TCR clone 159006 (TRBV20-1, TRBJ2-7)
CSARDRVSGMDEQYF

SEQ ID NO: 318013 - protein, 20 aa, Homo sapiens
  CDR3 for alpha chain variable domain of TCR clone 159007 (TRAV12-1, TRAJ42)
SSVIQPPTSEKGGSQGNLIF

SEQ ID NO: 318014 - protein, 15 aa, Homo sapiens
  CDR3 for beta chain variable domain of TCR clone 159007 (TRBV4-1, TRBJ2-7)
CASSQNTGRLYEQYF

SEQ ID NO: 318015 - protein, 13 aa, Homo sapiens
  CDR3 for alpha chain variable domain of TCR clone 159008 (TRAV21, TRAJ57)
CAVTQGGSEKLVF

SEQ ID NO: 318016 - protein, 13 aa, Homo sapiens
  CDR3 for beta chain variable domain of TCR clone 159008 (TRBV28, TRBJ2-5)
CASSFAGGETQYF

SEQ ID NO: 318017 - protein, 11 aa, Homo sapiens
  CDR3 for alpha chain variable domain of TCR clone 159009 (TRAV12-2, TRAJ39)
CAVNNMLTFGG

SEQ ID NO: 318018 - protein, 16 aa, Homo sapiens
  CDR3 for beta chain variable domain of TCR clone 159009 (TRBV9, TRBJ2-7)
CATSAGPDRSPYEQYF

SEQ ID NO: 318019 - protein, 18 aa, Homo sapiens
  CDR3 for alpha chain variable domain of TCR clone 159010 (TRAV13-1, TRAJ52)
CAASKRSAGGTSYGKLTF

SEQ ID NO: 318020 - protein, 19 aa, Homo sapiens
  CDR3 for beta chain variable domain of TCR clone 159010 (TRBV7-9, TRBJ2-1)
CASSLWGSTRKSSYNEQFF

SEQ ID NO: 318021 - protein, 14 aa, Homo sapiens
  CDR3 for alpha chain variable domain of TCR clone 159011 (TRAV10, TRAJ34)
CVVSRGGDTDKLIF

SEQ ID NO: 318022 - protein, 17 aa, Homo sapiens
  CDR3 for beta chain variable domain of TCR clone 159011 (TRBV6-3, TRBJ2-3)
RASRRPLGGGSTDTQYF

SEQ ID NO: 318023 - protein, 15 aa, Homo sapiens
  CDR3 for alpha chain variable domain of TCR clone 159012 (TRAV12-3, TRAJ49)
CAMAVTPNTGNQFYF

SEQ ID NO: 318024 - protein, 12 aa, Homo sapiens
  CDR3 for beta chain variable domain of TCR clone 159012 (TRBV11-2, TRBJ2-2)
CASSLGGGELFF

SEQ ID NO: 318025 - protein, 19 aa, Homo sapiens
  CDR3 for alpha chain variable domain of TCR clone 159013 (TRAV8-3, TRAJ8)
LSTSVLWDPMNTGFPKLVF

SEQ ID NO: 318026 - protein, 13 aa, Homo sapiens
  CDR3 for beta chain variable domain of TCR clone 159013 (TRBV10-2, TRBJ2-3)
CASSESGDHTQYF

SEQ ID NO: 318027 - protein, 17 aa, Homo sapiens
  CDR3 for alpha chain variable domain of TCR clone 159014 (TRAV3, TRAJ6)
CAVSDGPRAGGSYIPPF

SEQ ID NO: 318028 - protein, 14 aa, Homo sapiens
  CDR3 for beta chain variable domain of TCR clone 159014 (TRBV7-2, TRBJ2-7)
CASSPKTSFYEQYF

SEQ ID NO: 318029 - protein, 14 aa, Homo sapiens
  CDR3 for alpha chain variable domain of TCR clone 159015 (TRAV17, TRAJ54)
CATDANQGAQKLVF

SEQ ID NO: 318030 - protein, 12 aa, Homo sapiens
  CDR3 for beta chain variable domain of TCR clone 159015 (TRBV6-3, TRBJ2-1)
CASSASYNEQFF

SEQ ID NO: 318031 - protein, 11 aa, Homo sapiens
  CDR3 for alpha chain variable domain of TCR clone 159016 (TRAV13-1, TRAJ23)
CAASSQGKLIF

SEQ ID NO: 318032 - protein, 13 aa, Homo sapiens
  CDR3 for beta chain variable domain of TCR clone 159016 (TRBV7-3, TRBJ2-5)
CASSFRGGETQYF

SEQ ID NO: 318033 - protein, 15 aa, Homo sapiens
  CDR3 for alpha chain variable domain of TCR clone 159017 (TRAV21, TRAJ45)
CAVSYSGGGADGLTF

SEQ ID NO: 318034 - protein, 12 aa, Homo sapiens
  CDR3 for beta chain variable domain of TCR clone 159017 (TRBV11-2, TRBJ2-1)
CASSPGSNEQFF

SEQ ID NO: 318035 - protein, 13 aa, Homo sapiens
  CDR3 for alpha chain variable domain of TCR clone 159018 (TRAV13-1, TRAJ10)
CAAAAGGGNKLTF

SEQ ID NO: 318036 - protein, 15 aa, Homo sapiens
  CDR3 for beta chain variable domain of TCR clone 159018 (TRBV7-8, TRBJ2-2)
CASSLDQGWAGELFF

SEQ ID NO: 318037 - protein, 13 aa, Homo sapiens
  CDR3 for alpha chain variable domain of TCR clone 159019 (TRAV8-6, TRAJ41)
CAVSEDSGYALNF

SEQ ID NO: 318038 - protein, 17 aa, Homo sapiens
  CDR3 for beta chain variable domain of TCR clone 159019 (TRBV7-2, TRBJ2-3)
CASSLEARGTSTDTQYF

SEQ ID NO: 318039 - protein, 12 aa, Homo sapiens
  CDR3 for alpha chain variable domain of TCR clone 159020 (TRAV1-2, TRAJ33)
CAALDSNYQVIW

SEQ ID NO: 318040 - protein, 16 aa, Homo sapiens
  CDR3 for beta chain variable domain of TCR clone 159020 (TRBV6-4, TRBJ1-2)
CASSEAVGDPNYGYTF

SEQ ID NO: 318041 - protein, 18 aa, Homo sapiens
  CDR3 for alpha chain variable domain of TCR clone 159021 (TRAV26-1, TRAJ52)
CIVRVEGAGGTSYGKLSF

SEQ ID NO: 318042 - protein, 13 aa, Homo sapiens
  CDR3 for beta chain variable domain of TCR clone 159021 (TRBV7-3, TRBJ1-2)
CASSLKRGYGYTF

SEQ ID NO: 318043 - protein, 14 aa, Homo sapiens
  CDR3 for alpha chain variable domain of TCR clone 159022 (TRAV12-1, TRAJ4)
CVGDFSGGYNKLIF

SEQ ID NO: 318044 - protein, 15 aa, Homo sapiens
  CDR3 for beta chain variable domain of TCR clone 159022 (TRBV4-2, TRBJ2-7)
CASIQVDRSSYEQYF

SEQ ID NO: 318045 - protein, 18 aa, Homo sapiens
  CDR3 for alpha chain variable domain of TCR clone 159023 (TRAV13-1, TRAJ52)
CAAKNPNARGTSYGKLTF

SEQ ID NO: 318046 - protein, 15 aa, Homo sapiens
  CDR3 for beta chain variable domain of TCR clone 159023 (TRBV2, TRBJ2-2)
CASSRETVGTGELFF

SEQ ID NO: 318047 - protein, 12 aa, Homo sapiens
  CDR3 for alpha chain variable domain of TCR clone 159024 (TRAV21, TRAJ58)
CAAETSGSRLAF

SEQ ID NO: 318048 - protein, 15 aa, Homo sapiens
  CDR3 for beta chain variable domain of TCR clone 159024 (TRBV20-1, TRBJ2-7)
CSARDPVKGEGEQYF

SEQ ID NO: 318049 - protein, 20 aa, Homo sapiens
  CDR3 for alpha chain variable domain of TCR clone 159025 (TRAV12-1, TRAJ42)
SSVIQPPTSVKGGSQGNLIF

SEQ ID NO: 318050 - protein, 13 aa, Homo sapiens
  CDR3 for beta chain variable domain of TCR clone 159025 (TRBV4-3, TRBJ1-1)
CASSQAGNTEAFF

SEQ ID NO: 318051 - protein, 17 aa, Homo sapiens
  CDR3 for alpha chain variable domain of TCR clone 159026 (TRAV12-3, TRAJ6)
CAMSARGGAGGSYIPTF

SEQ ID NO: 318052 - protein, 14 aa, Homo sapiens
  CDR3 for beta chain variable domain of TCR clone 159026 (TRBV4-1, TRBJ2-7)
CASSPVAGGDEQYF

SEQ ID NO: 318053 - protein, 16 aa, Homo sapiens
  CDR3 for alpha chain variable domain of TCR clone 159027 (TRAV30, TRAJ24)
CGTEIVDADSWGKFKF

SEQ ID NO: 318054 - protein, 15 aa, Homo sapiens
  CDR3 for beta chain variable domain of TCR clone 159027 (TRBV9, TRBJ1-1)
CASSVVSYLNTEAFF

SEQ ID NO: 318055 - protein, 15 aa, Homo sapiens
  CDR3 for alpha chain variable domain of TCR clone 159028 (TRAV26-1, TRAJ44)
CIVRANTGTASKLTF

SEQ ID NO: 318056 - protein, 12 aa, Homo sapiens
  CDR3 for beta chain variable domain of TCR clone 159028 (TRBV11-2, TRBJ2-2)
CASSLPTGELFF

SEQ ID NO: 318057 - protein, 11 aa, Homo sapiens
  CDR3 for alpha chain variable domain of TCR clone 159029 (TRAV12-3, TRAJ43)
CAMSVSNDMRF

SEQ ID NO: 318058 - protein, 14 aa, Homo sapiens
  CDR3 for beta chain variable domain of TCR clone 159029 (TRBV20-1, TRBJ1-1)
TAVLHLGGGTEAFF

SEQ ID NO: 318059 - protein, 13 aa, Homo sapiens
  CDR3 for alpha chain variable domain of TCR clone 159030 (TRAV26-1, TRAJ33)
CIVRVDSNYQLIW

SEQ ID NO: 318060 - protein, 16 aa, Homo sapiens
  CDR3 for beta chain variable domain of TCR clone 159030 (TRBV20-1, TRBJ1-4)
CSAPGQGLLTNEKLFF

SEQ ID NO: 318061 - protein, 11 aa, Homo sapiens
  CDR3 for alpha chain variable domain of TCR clone 159031 (TRAV12-1, TRAJ33)
CVVNSNYQLIW

SEQ ID NO: 318062 - protein, 19 aa, Homo sapiens
  CDR3 for beta chain variable domain of TCR clone 159031 (TRBV7-6, TRBJ2-5)
CASSLVGPGTSGGQETQYF

SEQ ID NO: 318063 - protein, 14 aa, Homo sapiens
  CDR3 for alpha chain variable domain of TCR clone 159032 (TRAV12-2, TRAJ17)
CAVNIKAAGTKLPF

SEQ ID NO: 318064 - protein, 16 aa, Homo sapiens
  CDR3 for beta chain variable domain of TCR clone 159032 (TRBV20-1, TRBJ2-6)
CSASSQGYDGANVLTF

SEQ ID NO: 318065 - protein, 16 aa, Homo sapiens
  CDR3 for alpha chain variable domain of TCR clone 159033 (TRAV3, TRAJ3)
CAVRDRAKSMASKIIF

SEQ ID NO: 318066 - protein, 16 aa, Homo sapiens
  CDR3 for beta chain variable domain of TCR clone 159033 (TRBV20-1, TRBJ2-4)
CSATSLAELAKNIQYF

SEQ ID NO: 318067 - protein, 14 aa, Homo sapiens
  CDR3 for alpha chain variable domain of TCR clone 159034 (TRAV38-1, TRAJ43)
CAFMKHNNNTDMRF

SEQ ID NO: 318068 - protein, 15 aa, Homo sapiens
  CDR3 for beta chain variable domain of TCR clone 159034 (TRBV9, TRBJ1-6)
CASSVAGTGDSPLHF

SEQ ID NO: 318069 - protein, 15 aa, Homo sapiens
  CDR3 for alpha chain variable domain of TCR clone 159035 (TRAV20, TRAJ53)
CAVQASGGRHYKLTF

SEQ ID NO: 318070 - protein, 12 aa, Homo sapiens
  CDR3 for beta chain variable domain of TCR clone 159035 (TRBV7-8, TRBJ2-7)
CASSLGDREQYF

SEQ ID NO: 318071 - protein, 14 aa, Homo sapiens
  CDR3 for alpha chain variable domain of TCR clone 159036 (TRAV12-2, TRAJ45)
CAVNIGGGADGLPF

SEQ ID NO: 318072 - protein, 13 aa, Homo sapiens
  CDR3 for beta chain variable domain of TCR clone 159036 (TRBV19, TRBJ2-2)
CASSIGSTGELFF

SEQ ID NO: 318073 - protein, 13 aa, Homo sapiens
  CDR3 for alpha chain variable domain of TCR clone 159037 (TRAV12-1, TRAJ9)
CVVLNTGGFKTIF

SEQ ID NO: 318074 - protein, 13 aa, Homo sapiens
  CDR3 for beta chain variable domain of TCR clone 159037 (TRBV19, TRBJ1-2)
CASSVPGQDGYSF

SEQ ID NO: 318075 - protein, 17 aa, Homo sapiens
  CDR3 for alpha chain variable domain of TCR clone 159038 (TRAV26-1, TRAJ36)
FIVRPPGDQTGANNLFF

SEQ ID NO: 318076 - protein, 16 aa, Homo sapiens
  CDR3 for beta chain variable domain of TCR clone 159038 (TRBV19, TRBJ2-1)
CASSRAGPSSYNEQFF

SEQ ID NO: 318077 - protein, 13 aa, Homo sapiens
  CDR3 for alpha chain variable domain of TCR clone 159039 (TRAV26-2, TRAJ37)
CIRGSSNTGKLIF

SEQ ID NO: 318078 - protein, 16 aa, Homo sapiens
  CDR3 for beta chain variable domain of TCR clone 159039 (TRBV7-2, TRBJ2-5)
CASSAGGARRGETQYF

SEQ ID NO: 318079 - protein, 14 aa, Homo sapiens
  CDR3 for alpha chain variable domain of TCR clone 159040 (TRAV12-2, TRAJ13)
CAVKKTGGYQKVTF

SEQ ID NO: 318080 - protein, 15 aa, Homo sapiens
  CDR3 for beta chain variable domain of TCR clone 159040 (TRBV27, TRBJ2-1)
CASSNGGGSSKERFF

SEQ ID NO: 318081 - protein, 18 aa, Homo sapiens
  CDR3 for alpha chain variable domain of TCR clone 159041 (TRAV13-1, TRAJ52)
CAASKRSAGGASYGKRTF

SEQ ID NO: 318082 - protein, 13 aa, Homo sapiens
  CDR3 for beta chain variable domain of TCR clone 159041 (TRBV12-4, TRBJ1-2)
CASSLRQGKGYTF

SEQ ID NO: 318083 - protein, 21 aa, Homo sapiens
  CDR3 for alpha chain variable domain of TCR clone 159042 (TRAV12-1, TRAJ32)
SSVIQPPTSMTYGGATNKLLF

SEQ ID NO: 318084 - protein, 15 aa, Homo sapiens
  CDR3 for beta chain variable domain of TCR clone 159042 (TRBV7-9, TRBJ2-2)
CASGPLDTFPGELFF

SEQ ID NO: 318085 - protein, 15 aa, Homo sapiens
  CDR3 for alpha chain variable domain of TCR clone 159043 (TRAV17, TRAJ57)
CAAGPSQGGSEKLVF

SEQ ID NO: 318086 - protein, 15 aa, Homo sapiens
  CDR3 for beta chain variable domain of TCR clone 159043 (TRBV7-9, TRBJ1-6)
CASSSPGRGNSPLHF

SEQ ID NO: 318087 - protein, 14 aa, Homo sapiens
  CDR3 for alpha chain variable domain of TCR clone 159044 (TRAV12-3, TRAJ10)
SHLPLTGGGNKLTF

SEQ ID NO: 318088 - protein, 14 aa, Homo sapiens
  CDR3 for beta chain variable domain of TCR clone 159044 (TRBV7-9, TRBJ2-2)
CASSLGHRTGELFF

SEQ ID NO: 318089 - protein, 11 aa, Homo sapiens
  CDR3 for alpha chain variable domain of TCR clone 159045 (TRAV2, TRAJ33)
CAVESNYQLIW

SEQ ID NO: 318090 - protein, 11 aa, Homo sapiens
  CDR3 for beta chain variable domain of TCR clone 159045 (TRBV19, TRBJ1-2)
CASSISSGYTF

SEQ ID NO: 318091 - protein, 12 aa, Homo sapiens
  CDR3 for alpha chain variable domain of TCR clone 159046 (TRAV12-3, TRAJ17)
CSMTLTGNKLTF

SEQ ID NO: 318092 - protein, 14 aa, Homo sapiens
  CDR3 for beta chain variable domain of TCR clone 159046 (TRBV28, TRBJ2-3)
CASRSRDSTDTQYF

SEQ ID NO: 318093 - protein, 15 aa, Homo sapiens
  CDR3 for alpha chain variable domain of TCR clone 159047 (TRAV12-2, TRAJ43)
CAFDMRFGAGTRLTV

SEQ ID NO: 318094 - protein, 18 aa, Homo sapiens
  CDR3 for beta chain variable domain of TCR clone 159047 (TRBV20-1, TRBJ2-3)
CSASGLARGPGTTDTQYF

SEQ ID NO: 318095 - protein, 11 aa, Homo sapiens
  CDR3 for alpha chain variable domain of TCR clone 159048 (TRAV21, TRAJ23)
CAPQRRGTLIF

SEQ ID NO: 318096 - protein, 14 aa, Homo sapiens
  CDR3 for beta chain variable domain of TCR clone 159048 (TRBV12-4, TRBJ1-1)
CASTWTGHDTEAFF

SEQ ID NO: 318097 - protein, 15 aa, Homo sapiens
  CDR3 for alpha chain variable domain of TCR clone 159049 (TRAV1-2, TRAJ38)
CAVSENAGNNRKLIW

SEQ ID NO: 318098 - protein, 16 aa, Homo sapiens
  CDR3 for beta chain variable domain of TCR clone 159049 (TRBV4-1, TRBJ2-7)
CSSSLTAGQATYEQYF

SEQ ID NO: 318099 - protein, 11 aa, Homo sapiens
  CDR3 for alpha chain variable domain of TCR clone 159050 (TRAV1-2, TRAJ20)
CAVANEYKLSF

SEQ ID NO: 318100 - protein, 18 aa, Homo sapiens
  CDR3 for beta chain variable domain of TCR clone 159050 (TRBV20-1, TRBJ2-6)
CSAEKTPTHGSGANVLTF

SEQ ID NO: 318101 - protein, 19 aa, Homo sapiens
  CDR3 for alpha chain variable domain of TCR clone 159051 (TRAV2, TRAJ20)
ILQVREADAAVYRDCKLSF

SEQ ID NO: 318102 - protein, 15 aa, Homo sapiens
  CDR3 for beta chain variable domain of TCR clone 159051 (TRBV9, TRBJ1-6)
CASSVVGTGDSPLHF

SEQ ID NO: 318103 - protein, 13 aa, Homo sapiens
  CDR3 for alpha chain variable domain of TCR clone 159052 (TRAV8-4, TRAJ10)
CAAFTGGGNKLPF

SEQ ID NO: 318104 - protein, 15 aa, Homo sapiens
  CDR3 for beta chain variable domain of TCR clone 159052 (TRBV2, TRBJ2-3)
CASSEFEKATDTQYF

SEQ ID NO: 318105 - protein, 15 aa, Homo sapiens
  CDR3 for alpha chain variable domain of TCR clone 159053 (TRAV13-2, TRAJ10)
CAENKIGVGGNKLTF

SEQ ID NO: 318106 - protein, 15 aa, Homo sapiens
  CDR3 for beta chain variable domain of TCR clone 159053 (TRBV5-1, TRBJ1-2)
CASSPGDRGSYGYTF

SEQ ID NO: 318107 - protein, 12 aa, Homo sapiens
  CDR3 for alpha chain variable domain of TCR clone 159054 (TRAV17, TRAJ20)
CATYSNDYKISF

SEQ ID NO: 318108 - protein, 11 aa, Homo sapiens
  CDR3 for beta chain variable domain of TCR clone 159054 (TRBV4-1, TRBJ2-2)
CASEHTGELFF

SEQ ID NO: 318109 - protein, 14 aa, Homo sapiens
  CDR3 for alpha chain variable domain of TCR clone 159055 (TRAV12-1, TRAJ17)
CVVNYKAAGKKLTF

SEQ ID NO: 318110 - protein, 15 aa, Homo sapiens
  CDR3 for beta chain variable domain of TCR clone 159055 (TRBV7-2, TRBJ2-1)
CASTHGTGIYNEQFF

SEQ ID NO: 318111 - protein, 12 aa, Homo sapiens
  CDR3 for alpha chain variable domain of TCR clone 159056 (TRAV3, TRAJ43)
CAVRDPNNDMRF

SEQ ID NO: 318112 - protein, 13 aa, Homo sapiens
  CDR3 for beta chain variable domain of TCR clone 159056 (TRBV11-2, TRBJ2-1)
CASSSEAYNEQFF

SEQ ID NO: 318113 - protein, 15 aa, Homo sapiens
  CDR3 for alpha chain variable domain of TCR clone 159057 (TRAV17, TRAJ54)
CATTRSEQGAQKLVF

SEQ ID NO: 318114 - protein, 17 aa, Homo sapiens
  CDR3 for beta chain variable domain of TCR clone 159057 (TRBV7-3, TRBJ2-3)
CASSLMKRMRGADTQYF

SEQ ID NO: 318115 - protein, 14 aa, Homo sapiens
  CDR3 for alpha chain variable domain of TCR clone 159058 (TRAV12-2, TRAJ11)
CAVEGGSGYSTLTF

SEQ ID NO: 318116 - protein, 11 aa, Homo sapiens
  CDR3 for beta chain variable domain of TCR clone 159058 (TRBV12-4, TRBJ2-3)
CASSATDTQYF

SEQ ID NO: 318117 - protein, 14 aa, Homo sapiens
  CDR3 for alpha chain variable domain of TCR clone 159059 (TRAV1-2, TRAJ8)
CAGREDKGFQKLVF

SEQ ID NO: 318118 - protein, 15 aa, Homo sapiens
  CDR3 for beta chain variable domain of TCR clone 159059 (TRBV6-3, TRBJ2-7)
CASSSPGTVFYEQYF

SEQ ID NO: 318119 - protein, 17 aa, Homo sapiens
  CDR3 for alpha chain variable domain of TCR clone 159060 (TRAV16, TRAJ26)
CALSGSEFCLWSRNQLV

SEQ ID NO: 318120 - protein, 12 aa, Homo sapiens
  CDR3 for beta chain variable domain of TCR clone 159060 (TRBV11-2, TRBJ2-1)
CASSPGNNEQFF

SEQ ID NO: 318121 - protein, 12 aa, Homo sapiens
  CDR3 for alpha chain variable domain of TCR clone 159061 (TRAV12-3, TRAJ17)
CAMTLTGNQLTF

SEQ ID NO: 318122 - protein, 12 aa, Homo sapiens
  CDR3 for beta chain variable domain of TCR clone 159061 (TRBV14, TRBJ2-5)
CASSQLKETQYF

SEQ ID NO: 318123 - protein, 12 aa, Homo sapiens
  CDR3 for alpha chain variable domain of TCR clone 159062 (TRAV17, TRAJ53)
CATEGSNYKMTF

SEQ ID NO: 318124 - protein, 19 aa, Homo sapiens
  CDR3 for beta chain variable domain of TCR clone 159062 (TRBV5-1, TRBJ2-3)
CASSLWTSGGITTPDTQYF

SEQ ID NO: 318125 - protein, 15 aa, Homo sapiens
  CDR3 for alpha chain variable domain of TCR clone 159063 (TRAV9-2, TRAJ9)
CALSLTNTGGFKTIF

SEQ ID NO: 318126 - protein, 15 aa, Homo sapiens
  CDR3 for beta chain variable domain of TCR clone 159063 (TRBV20-1, TRBJ2-1)
CSARVGGVGVLEQFF

SEQ ID NO: 318127 - protein, 14 aa, Homo sapiens
  CDR3 for alpha chain variable domain of TCR clone 159064 (TRAV17, TRAJ11)
CATGTSRGYSTLTF

SEQ ID NO: 318128 - protein, 13 aa, Homo sapiens
  CDR3 for beta chain variable domain of TCR clone 159064 (TRBV19, TRBJ2-5)
CASRDSRRETQYF

SEQ ID NO: 318129 - protein, 13 aa, Homo sapiens
  CDR3 for alpha chain variable domain of TCR clone 159065 (TRAV13-2, TRAJ13)
CAETAGGYQKVTF

SEQ ID NO: 318130 - protein, 13 aa, Homo sapiens
  CDR3 for beta chain variable domain of TCR clone 159065 (TRBV10-2, TRBJ2-7)
CASGASGGYEQYF

SEQ ID NO: 318131 - protein, 13 aa, Homo sapiens
  CDR3 for alpha chain variable domain of TCR clone 159066 (TRAV30, TRAJ20)
CGTEDRSEYKLSF

SEQ ID NO: 318132 - protein, 15 aa, Homo sapiens
  CDR3 for beta chain variable domain of TCR clone 159066 (TRBV2, TRBJ1-2)
CASTQVQDSNYGYTF

SEQ ID NO: 318133 - protein, 10 aa, Homo sapiens
  CDR3 for alpha chain variable domain of TCR clone 159067 (TRAV12-1, TRAJ21)
CVVNPINFYF

SEQ ID NO: 318134 - protein, 16 aa, Homo sapiens
  CDR3 for beta chain variable domain of TCR clone 159067 (TRBV20-1, TRBJ2-1)
CSARGLAESSYNEQFF

SEQ ID NO: 318135 - protein, 14 aa, Homo sapiens
  CDR3 for alpha chain variable domain of TCR clone 159068 (TRAV8-3, TRAJ13)
CAVGGTFGYQKVTV

SEQ ID NO: 318136 - protein, 17 aa, Homo sapiens
  CDR3 for beta chain variable domain of TCR clone 159068 (TRBV7-9, TRBJ2-1)
CASSAGTLGRSYNEQFF

SEQ ID NO: 318137 - protein, 16 aa, Homo sapiens
  CDR3 for alpha chain variable domain of TCR clone 159069 (TRAV30, TRAJ24)
CGTEIVDADSWGKFHF

SEQ ID NO: 318138 - protein, 13 aa, Homo sapiens
  CDR3 for beta chain variable domain of TCR clone 159069 (TRBV20-1, TRBJ1-1)
CSAPPGGHTEAFF

SEQ ID NO: 318139 - protein, 15 aa, Homo sapiens
  CDR3 for alpha chain variable domain of TCR clone 159070 (TRAV13-1, TRAJ5)
CAASPRVHGQESTYF

SEQ ID NO: 318140 - protein, 14 aa, Homo sapiens
  CDR3 for beta chain variable domain of TCR clone 159070 (TRBV6-5, TRBJ1-2)
CASTRGGGSDGYTF

SEQ ID NO: 318141 - protein, 15 aa, Homo sapiens
  CDR3 for alpha chain variable domain of TCR clone 159071 (TRAV12-2, TRAJ53)
WAVNGGGGSNYKLTF

SEQ ID NO: 318142 - protein, 14 aa, Homo sapiens
  CDR3 for beta chain variable domain of TCR clone 159071 (TRBV6-1, TRBJ1-3)
CASVQGGGGNTIYF

SEQ ID NO: 318143 - protein, 13 aa, Homo sapiens
  CDR3 for alpha chain variable domain of TCR clone 159072 (TRAV1-2, TRAJ9)
CAVLNTGGFKTIF

SEQ ID NO: 318144 - protein, 14 aa, Homo sapiens
  CDR3 for beta chain variable domain of TCR clone 159072 (TRBV20-1, TRBJ2-3)
CSARGGTSTDTQYV

SEQ ID NO: 318145 - protein, 14 aa, Homo sapiens
  CDR3 for alpha chain variable domain of TCR clone 159073 (TRAV12-2, TRAJ13)
CAVKATGGYQKVTF

SEQ ID NO: 318146 - protein, 15 aa, Homo sapiens
  CDR3 for beta chain variable domain of TCR clone 159073 (TRBV27, TRBJ2-1)
CASSNGGGSSNEQFF

SEQ ID NO: 318147 - protein, 13 aa, Homo sapiens
  CDR3 for alpha chain variable domain of TCR clone 159074 (TRAV16, TRAJ27)
CALRRTNAGKSTF

SEQ ID NO: 318148 - protein, 15 aa, Homo sapiens
  CDR3 for beta chain variable domain of TCR clone 159074 (TRBV18, TRBJ2-1)
CAISPPSASYNEQFF

SEQ ID NO: 318149 - protein, 14 aa, Homo sapiens
  CDR3 for alpha chain variable domain of TCR clone 159075 (TRAV26-1, TRAJ38)
CIANNAGNNRKLIW

SEQ ID NO: 318150 - protein, 15 aa, Homo sapiens
  CDR3 for beta chain variable domain of TCR clone 159075 (TRBV7-9, TRBJ1-5)
CASSQGHQPNQPQHF

SEQ ID NO: 318151 - protein, 10 aa, Homo sapiens
  CDR3 for alpha chain variable domain of TCR clone 159076 (TRAV36/DV7, TRAJ48)
CAVGNEKLTF

SEQ ID NO: 318152 - protein, 16 aa, Homo sapiens
  CDR3 for beta chain variable domain of TCR clone 159076 (TRBV19, TRBJ2-1)
CASSIETGSPYNEQFF

SEQ ID NO: 318153 - protein, 13 aa, Homo sapiens
  CDR3 for alpha chain variable domain of TCR clone 159077 (TRAV23/DV6, TRAJ16)
CAASISDGQKLLF

SEQ ID NO: 318154 - protein, 15 aa, Homo sapiens
  CDR3 for beta chain variable domain of TCR clone 159077 (TRBV7-9, TRBJ2-7)
CASSLDLDRGYEQYF

SEQ ID NO: 318155 - protein, 14 aa, Homo sapiens
  CDR3 for alpha chain variable domain of TCR clone 159078 (TRAV29/DV5, TRAJ36)
CAARRKTGANNLFF

SEQ ID NO: 318156 - protein, 16 aa, Homo sapiens
  CDR3 for beta chain variable domain of TCR clone 159078 (TRBV4-1, TRBJ2-7)
CASSQEGTASYYEQYF

SEQ ID NO: 318157 - protein, 16 aa, Homo sapiens
  CDR3 for alpha chain variable domain of TCR clone 159079 (TRAV26-1, TRAJ32)
CIVRTKYGGATNKLIF

SEQ ID NO: 318158 - protein, 20 aa, Homo sapiens
  CDR3 for beta chain variable domain of TCR clone 159079 (TRBV7-8, TRBJ2-2)
CASSHLFPGPTIHITGELFF

SEQ ID NO: 318159 - protein, 16 aa, Homo sapiens
  CDR3 for alpha chain variable domain of TCR clone 159080 (TRAV27, TRAJ13)
CAGAKSDSGGYQKVTF

SEQ ID NO: 318160 - protein, 15 aa, Homo sapiens
  CDR3 for beta chain variable domain of TCR clone 159080 (TRBV29-1, TRBJ2-1)
CSVGRHAVLYNEQFF

SEQ ID NO: 318161 - protein, 17 aa, Homo sapiens
  CDR3 for alpha chain variable domain of TCR clone 159081 (TRAV3, TRAJ6)
CAVRDGPSAGGSYIPTF

SEQ ID NO: 318162 - protein, 14 aa, Homo sapiens
  CDR3 for beta chain variable domain of TCR clone 159081 (TRBV12-5, TRBJ2-5)
CASGSRTHQETQYF

SEQ ID NO: 318163 - protein, 11 aa, Homo sapiens
  CDR3 for alpha chain variable domain of TCR clone 159082 (TRAV3, TRAJ21)
CAVGNFNKFYF

SEQ ID NO: 318164 - protein, 12 aa, Homo sapiens
  CDR3 for beta chain variable domain of TCR clone 159082 (TRBV7-2, TRBJ2-5)
CASSQYQETQYF

SEQ ID NO: 318165 - protein, 13 aa, Homo sapiens
  CDR3 for alpha chain variable domain of TCR clone 159083 (TRAV3, TRAJ21)
CAVREPDFNKFYF

SEQ ID NO: 318166 - protein, 14 aa, Homo sapiens
  CDR3 for beta chain variable domain of TCR clone 159083 (TRBV4-2, TRBJ2-1)
CASGLDRDYNEQFF

SEQ ID NO: 318167 - protein, 13 aa, Homo sapiens
  CDR3 for alpha chain variable domain of TCR clone 159084 (TRAV13-1, TRAJ11)
CAAVLAGYSTLTF

SEQ ID NO: 318168 - protein, 17 aa, Homo sapiens
  CDR3 for beta chain variable domain of TCR clone 159084 (TRBV25-1, TRBJ2-7)
CARSDARVVFSSYEQYF

SEQ ID NO: 318169 - protein, 18 aa, Homo sapiens
  CDR3 for alpha chain variable domain of TCR clone 159085 (TRAV13-1, TRAJ52)
CAASKRSAGGTSYGKLTF

SEQ ID NO: 318170 - protein, 16 aa, Homo sapiens
  CDR3 for beta chain variable domain of TCR clone 159085 (TRBV7-9, TRBJ1-2)
CASSLGFSSGEDGYTF

SEQ ID NO: 318171 - protein, 12 aa, Homo sapiens
  CDR3 for alpha chain variable domain of TCR clone 159086 (TRAV1-2, TRAJ29)
CAVPSGNTPLVF

SEQ ID NO: 318172 - protein, 12 aa, Homo sapiens
  CDR3 for beta chain variable domain of TCR clone 159086 (TRBV7-9, TRBJ2-7)
CASSFGGYEQYF

SEQ ID NO: 318173 - protein, 14 aa, Homo sapiens
  CDR3 for alpha chain variable domain of TCR clone 159087 (TRAV26-1, TRAJ39)
CIVRGSRSGNMLTF

SEQ ID NO: 318174 - protein, 15 aa, Homo sapiens
  CDR3 for beta chain variable domain of TCR clone 159087 (TRBV7-9, TRBJ1-5)
CASSQGHQPNQHQHF

SEQ ID NO: 318175 - protein, 14 aa, Homo sapiens
  CDR3 for alpha chain variable domain of TCR clone 159088 (TRAV9-2, TRAJ39)
CALYIYNAGNMLTF

SEQ ID NO: 318176 - protein, 18 aa, Homo sapiens
  CDR3 for beta chain variable domain of TCR clone 159088 (TRBV7-6, TRBJ2-1)
CASSPRTSGMSSYNEQFF

SEQ ID NO: 318177 - protein, 13 aa, Homo sapiens
  CDR3 for alpha chain variable domain of TCR clone 159089 (TRAV21, TRAJ27)
CAARTGNAGKSTF

SEQ ID NO: 318178 - protein, 14 aa, Homo sapiens
  CDR3 for beta chain variable domain of TCR clone 159089 (TRBV7-6, TRBJ2-3)
CANSLGTVTDTQYF

SEQ ID NO: 318179 - protein, 14 aa, Homo sapiens
  CDR3 for alpha chain variable domain of TCR clone 159090 (TRAV12-3, TRAJ10)
SHLPLTGGGNKLNF

SEQ ID NO: 318180 - protein, 13 aa, Homo sapiens
  CDR3 for beta chain variable domain of TCR clone 159090 (TRBV7-6, TRBJ2-3)
CASSLAVGDTQYF

SEQ ID NO: 318181 - protein, 14 aa, Homo sapiens
  CDR3 for alpha chain variable domain of TCR clone 159091 (TRAV1-2, TRAJ16)
CAVNRFSDGEKLLF

SEQ ID NO: 318182 - protein, 17 aa, Homo sapiens
  CDR3 for beta chain variable domain of TCR clone 159091 (TRBV11-2, TRBJ2-1)
CASSLHPPGVEYNEQFF

SEQ ID NO: 318183 - protein, 14 aa, Homo sapiens
  CDR3 for alpha chain variable domain of TCR clone 159092 (TRAV1-2, TRAJ8)
CAVREDTGFQKLVF

SEQ ID NO: 318184 - protein, 16 aa, Homo sapiens
  CDR3 for beta chain variable domain of TCR clone 159092 (TRBV28, TRBJ1-4)
CASGPPYRGRIEKLFF

SEQ ID NO: 318185 - protein, 12 aa, Homo sapiens
  CDR3 for alpha chain variable domain of TCR clone 159093 (TRAV12-3, TRAJ21)
RAMFNNFNKFYF

SEQ ID NO: 318186 - protein, 14 aa, Homo sapiens
  CDR3 for beta chain variable domain of TCR clone 159093 (TRBV28, TRBJ2-1)
CASSIQGTVGEQFF

SEQ ID NO: 318187 - protein, 14 aa, Homo sapiens
  CDR3 for alpha chain variable domain of TCR clone 159094 (TRAV12-1, TRAJ38)
CVVNNAGNNRKLIW

SEQ ID NO: 318188 - protein, 14 aa, Homo sapiens
  CDR3 for beta chain variable domain of TCR clone 159094 (TRBV11-2, TRBJ2-7)
CASSLVPGGDEQYF

SEQ ID NO: 318189 - protein, 15 aa, Homo sapiens
  CDR3 for alpha chain variable domain of TCR clone 159095 (TRAV13-1, TRAJ17)
CAASIERAAGNKLTF

SEQ ID NO: 318190 - protein, 15 aa, Homo sapiens
  CDR3 for beta chain variable domain of TCR clone 159095 (TRBV12-4, TRBJ1-6)
CASSLGGQGTSPLHF

SEQ ID NO: 318191 - protein, 14 aa, Homo sapiens
  CDR3 for alpha chain variable domain of TCR clone 159096 (TRAV2, TRAJ9)
CAVEDRSGGFKTIF

SEQ ID NO: 318192 - protein, 19 aa, Homo sapiens
  CDR3 for beta chain variable domain of TCR clone 159096 (TRBV28, TRBJ2-4)
CASSFQPGGPAHSKNIQYF

SEQ ID NO: 318193 - protein, 17 aa, Homo sapiens
  CDR3 for alpha chain variable domain of TCR clone 159097 (TRAV3, TRAJ42)
CAVRDRDYGGSQGNLIF

SEQ ID NO: 318194 - protein, 15 aa, Homo sapiens
  CDR3 for beta chain variable domain of TCR clone 159097 (TRBV6-6, TRBJ2-7)
WASSYSYGGSYEQYF

SEQ ID NO: 318195 - protein, 11 aa, Homo sapiens
  CDR3 for alpha chain variable domain of TCR clone 159098 (TRAV13-1, TRAJ8)
CAARDFQKLVF

SEQ ID NO: 318196 - protein, 16 aa, Homo sapiens
  CDR3 for beta chain variable domain of TCR clone 159098 (TRBV19, TRBJ1-5)
CASSTRGTRSNQPQHF

SEQ ID NO: 318197 - protein, 15 aa, Homo sapiens
  CDR3 for alpha chain variable domain of TCR clone 159099 (TRAV23/DV6, TRAJ18)
CAARHRGSTLGRLYF

SEQ ID NO: 318198 - protein, 13 aa, Homo sapiens
  CDR3 for beta chain variable domain of TCR clone 159099 (TRBV7-2, TRBJ2-7)
CASSAPSGSEQYF

SEQ ID NO: 318199 - protein, 20 aa, Homo sapiens
  CDR3 for alpha chain variable domain of TCR clone 159100 (TRAV12-1, TRAJ42)
SSVIQPPTSVKGGSQGNLIF

SEQ ID NO: 318200 - protein, 15 aa, Homo sapiens
  CDR3 for beta chain variable domain of TCR clone 159100 (TRBV7-2, TRBJ1-6)
CASSLGPDRGMPLHF

SEQ ID NO: 318201 - protein, 13 aa, Homo sapiens
  CDR3 for alpha chain variable domain of TCR clone 159101 (TRAV27, TRAJ49)
FAPRPYTGYQFYF

SEQ ID NO: 318202 - protein, 16 aa, Homo sapiens
  CDR3 for beta chain variable domain of TCR clone 159101 (TRBV4-1, TRBJ1-2)
CASSQDAGQVLYGYTL

SEQ ID NO: 318203 - protein, 14 aa, Homo sapiens
  CDR3 for alpha chain variable domain of TCR clone 159102 (TRAV1-2, TRAJ8)
CAVIEDTGFQKLVF

SEQ ID NO: 318204 - protein, 14 aa, Homo sapiens
  CDR3 for beta chain variable domain of TCR clone 159102 (TRBV7-3, TRBJ2-2)
CASSSGGYTGELFF

SEQ ID NO: 318205 - protein, 18 aa, Homo sapiens
  CDR3 for alpha chain variable domain of TCR clone 159103 (TRAV21, TRAJ52)
CAVRPSPAGGTSYGKLTF

SEQ ID NO: 318206 - protein, 15 aa, Homo sapiens
  CDR3 for beta chain variable domain of TCR clone 159103 (TRBV20-1, TRBJ2-7)
FSARDRVSGMDEQYF

SEQ ID NO: 318207 - protein, 18 aa, Homo sapiens
  CDR3 for alpha chain variable domain of TCR clone 159104 (TRAV29/DV5, TRAJ52)
CAAGFRGAGGTSYGKLTF

SEQ ID NO: 318208 - protein, 16 aa, Homo sapiens
  CDR3 for beta chain variable domain of TCR clone 159104 (TRBV7-3, TRBJ2-2)
CASSLKRGSLSGELLF

SEQ ID NO: 318209 - protein, 14 aa, Homo sapiens
  CDR3 for alpha chain variable domain of TCR clone 159105 (TRAV23/DV6, TRAJ13)
CSASETGGYQKVTF

SEQ ID NO: 318210 - protein, 16 aa, Homo sapiens
  CDR3 for beta chain variable domain of TCR clone 159105 (TRBV5-1, TRBJ1-3)
CASSPWAPSSGNTIYF

SEQ ID NO: 318211 - protein, 14 aa, Homo sapiens
  CDR3 for alpha chain variable domain of TCR clone 159106 (TRAV21, TRAJ11)
CAVRRNSGYSTLTF

SEQ ID NO: 318212 - protein, 11 aa, Homo sapiens
  CDR3 for beta chain variable domain of TCR clone 159106 (TRBV11-2, TRBJ1-1)
CASSINAEAFF

SEQ ID NO: 318213 - protein, 13 aa, Homo sapiens
  CDR3 for alpha chain variable domain of TCR clone 159107 (TRAV8-6, TRAJ16)
CAVSRWVGQKLLF

SEQ ID NO: 318214 - protein, 12 aa, Homo sapiens
  CDR3 for beta chain variable domain of TCR clone 159107 (TRBV29-1, TRBJ2-3)
CSVTGGADTQYF

SEQ ID NO: 318215 - protein, 12 aa, Homo sapiens
  CDR3 for alpha chain variable domain of TCR clone 159108 (TRAV13-2, TRAJ23)
CAESHRGGKLIL

SEQ ID NO: 318216 - protein, 16 aa, Homo sapiens
  CDR3 for beta chain variable domain of TCR clone 159108 (TRBV20-1, TRBJ1-4)
CSAPGQGLLTNEKLFF

SEQ ID NO: 318217 - protein, 11 aa, Homo sapiens
  CDR3 for alpha chain variable domain of TCR clone 159109 (TRAV2, TRAJ33)
CAVDSNYQLIW

SEQ ID NO: 318218 - protein, 17 aa, Homo sapiens
  CDR3 for beta chain variable domain of TCR clone 159109 (TRBV13, TRBJ2-3)
CASSLKTGTPQKDTQYF

SEQ ID NO: 318219 - protein, 16 aa, Homo sapiens
  CDR3 for alpha chain variable domain of TCR clone 159110 (TRAV1-2, TRAJ27)
CAVREPQPPMQANQPL

SEQ ID NO: 318220 - protein, 13 aa, Homo sapiens
  CDR3 for beta chain variable domain of TCR clone 159110 (TRBV6-1, TRBJ1-2)
CASSAREGYGYTF

SEQ ID NO: 318221 - protein, 12 aa, Homo sapiens
  CDR3 for alpha chain variable domain of TCR clone 159111 (TRAV12-3, TRAJ17)
RAMTLTGNKLTS

SEQ ID NO: 318222 - protein, 15 aa, Homo sapiens
  CDR3 for beta chain variable domain of TCR clone 159111 (TRBV20-1, TRBJ2-7)
CSARDRVSGMDEQYF

SEQ ID NO: 318223 - protein, 11 aa, Homo sapiens
  CDR3 for alpha chain variable domain of TCR clone 159112 (TRAV4, TRAJ28)
CLVGDNRAETL

SEQ ID NO: 318224 - protein, 13 aa, Homo sapiens
  CDR3 for beta chain variable domain of TCR clone 159112 (TRBV20-1, TRBJ2-7)
CSATHTGGYEQYF

SEQ ID NO: 318225 - protein, 14 aa, Homo sapiens
  CDR3 for alpha chain variable domain of TCR clone 159113 (TRAV16, TRAJ31)
CALSGRNNNARLMF

SEQ ID NO: 318226 - protein, 15 aa, Homo sapiens
  CDR3 for beta chain variable domain of TCR clone 159113 (TRBV5-1, TRBJ1-1)
CASSSTTGTNTEAFF

SEQ ID NO: 318227 - protein, 11 aa, Homo sapiens
  CDR3 for alpha chain variable domain of TCR clone 159114 (TRAV13-2, TRAJ54)
RAVQGAHKLVF

SEQ ID NO: 318228 - protein, 15 aa, Homo sapiens
  CDR3 for beta chain variable domain of TCR clone 159114 (TRBV20-1, TRBJ2-7)
CSAESGTSGAYEQCF

SEQ ID NO: 318229 - protein, 13 aa, Homo sapiens
  CDR3 for alpha chain variable domain of TCR clone 159115 (TRAV17, TRAJ26)
CATVDNYGQNFVF

SEQ ID NO: 318230 - protein, 11 aa, Homo sapiens
  CDR3 for beta chain variable domain of TCR clone 159115 (TRBV12-4, TRBJ2-3)
CASTATDTQYF

SEQ ID NO: 318231 - protein, 13 aa, Homo sapiens
  CDR3 for alpha chain variable domain of TCR clone 159116 (TRAV20, TRAJ34)
CAGGSYNTDKLIF

SEQ ID NO: 318232 - protein, 14 aa, Homo sapiens
  CDR3 for beta chain variable domain of TCR clone 159116 (TRBV7-2, TRBJ2-7)
CASSPKTSSYEQYF

SEQ ID NO: 318233 - protein, 11 aa, Homo sapiens
  CDR3 for alpha chain variable domain of TCR clone 159117 (TRAV36/DV7, TRAJ20)
CAANNDYKLSF

SEQ ID NO: 318234 - protein, 13 aa, Homo sapiens
  CDR3 for beta chain variable domain of TCR clone 159117 (TRBV6-1, TRBJ2-7)
RASRASGGYEQYF

SEQ ID NO: 318235 - protein, 12 aa, Homo sapiens
  CDR3 for alpha chain variable domain of TCR clone 159118 (TRAV8-3, TRAJ20)
CAVGANDYKLSF

SEQ ID NO: 318236 - protein, 11 aa, Homo sapiens
  CDR3 for beta chain variable domain of TCR clone 159118 (TRBV19, TRBJ2-2)
CASRSPGRGHR

SEQ ID NO: 318237 - protein, 15 aa, Homo sapiens
  CDR3 for alpha chain variable domain of TCR clone 159119 (TRAV14/DV4, TRAJ4)
CAMRDSSGGYTKLIF

SEQ ID NO: 318238 - protein, 12 aa, Homo sapiens
  CDR3 for beta chain variable domain of TCR clone 159119 (TRBV19, TRBJ1-1)
CASSIGTEEAFF

SEQ ID NO: 318239 - protein, 12 aa, Homo sapiens
  CDR3 for alpha chain variable domain of TCR clone 159120 (TRAV13-2, TRAJ23)
CAERHRGGKLIF

SEQ ID NO: 318240 - protein, 15 aa, Homo sapiens
  CDR3 for beta chain variable domain of TCR clone 159120 (TRBV2, TRBJ2-1)
CASSNGGGSSNEQFF

SEQ ID NO: 318241 - protein, 17 aa, Homo sapiens
  CDR3 for alpha chain variable domain of TCR clone 159121 (TRAV17, TRAJ7)
CATLGRLAFGKGNQEVV

SEQ ID NO: 318242 - protein, 13 aa, Homo sapiens
  CDR3 for beta chain variable domain of TCR clone 159121 (TRBV12-4, TRBJ2-7)
CASSLERVREQYF

SEQ ID NO: 318243 - protein, 15 aa, Homo sapiens
  CDR3 for alpha chain variable domain of TCR clone 159122 (TRAV2, TRAJ37)
CAVGDGSSNTGKLIF

SEQ ID NO: 318244 - protein, 13 aa, Homo sapiens
  CDR3 for beta chain variable domain of TCR clone 159122 (TRBV20-1, TRBJ2-7)
CSAQPGLSYEQYF

SEQ ID NO: 318245 - protein, 14 aa, Homo sapiens
  CDR3 for alpha chain variable domain of TCR clone 159123 (TRAV12-2, TRAJ13)
CAATKTGGYQKVTF

SEQ ID NO: 318246 - protein, 15 aa, Homo sapiens
  CDR3 for beta chain variable domain of TCR clone 159123 (TRBV27, TRBJ2-1)
CASSNGGGSSNEQFF

SEQ ID NO: 318247 - protein, 19 aa, Homo sapiens
  CDR3 for alpha chain variable domain of TCR clone 159124 (TRAV26-1, TRAJ52)
CIVRAHRNAGGTSYGKLTF

SEQ ID NO: 318248 - protein, 15 aa, Homo sapiens
  CDR3 for beta chain variable domain of TCR clone 159124 (TRBV29-1, TRBJ2-1)
CSGRDMGSSYNEQFF

SEQ ID NO: 318249 - protein, 14 aa, Homo sapiens
  CDR3 for alpha chain variable domain of TCR clone 159125 (TRAV20, TRAJ42)
CAVQAGGSQGNLIF

SEQ ID NO: 318250 - protein, 15 aa, Homo sapiens
  CDR3 for beta chain variable domain of TCR clone 159125 (TRBV7-3, TRBJ2-1)
CASSPQRGGYNEQFF

SEQ ID NO: 318251 - protein, 15 aa, Homo sapiens
  CDR3 for alpha chain variable domain of TCR clone 159126 (TRAV3, TRAJ21)
CAVRDRRYNFNKFYF

SEQ ID NO: 318252 - protein, 16 aa, Homo sapiens
  CDR3 for beta chain variable domain of TCR clone 159126 (TRBV7-9, TRBJ1-2)
CASSLGFSSGEDGYTF

SEQ ID NO: 318253 - protein, 12 aa, Homo sapiens
  CDR3 for alpha chain variable domain of TCR clone 159127 (TRAV22, TRAJ45)
CAGGGGADGLTF

SEQ ID NO: 318254 - protein, 15 aa, Homo sapiens
  CDR3 for beta chain variable domain of TCR clone 159127 (TRBV11-3, TRBJ2-3)
CASLKDGREGDTQYF

SEQ ID NO: 318255 - protein, 14 aa, Homo sapiens
  CDR3 for alpha chain variable domain of TCR clone 159128 (TRAV8-3, TRAJ4)
CAVGASGGYNKLIF

SEQ ID NO: 318256 - protein, 15 aa, Homo sapiens
  CDR3 for beta chain variable domain of TCR clone 159128 (TRBV7-9, TRBJ2-2)
CASGPLDTFPGELFF

SEQ ID NO: 318257 - protein, 11 aa, Homo sapiens
  CDR3 for alpha chain variable domain of TCR clone 159129 (TRAV3, TRAJ21)
CAVGNFNEFHF

SEQ ID NO: 318258 - protein, 16 aa, Homo sapiens
  CDR3 for beta chain variable domain of TCR clone 159129 (TRBV19, TRBJ2-1)
CASSKAGPSSYNEQFF

SEQ ID NO: 318259 - protein, 15 aa, Homo sapiens
  CDR3 for alpha chain variable domain of TCR clone 159130 (TRAV17, TRAJ13)
CATDAGSGGYQKGTF

SEQ ID NO: 318260 - protein, 17 aa, Homo sapiens
  CDR3 for beta chain variable domain of TCR clone 159130 (TRBV11-2, TRBJ2-1)
CASSLYPPGAEYNEQFF

SEQ ID NO: 318261 - protein, 14 aa, Homo sapiens
  CDR3 for alpha chain variable domain of TCR clone 159131 (TRAV12-2, TRAJ9)
CAVNALEGGFKTIF

SEQ ID NO: 318262 - protein, 14 aa, Homo sapiens
  CDR3 for beta chain variable domain of TCR clone 159131 (TRBV7-6, TRBJ2-3)
CASSVAGGTDTQYF

SEQ ID NO: 318263 - protein, 15 aa, Homo sapiens
  CDR3 for alpha chain variable domain of TCR clone 159132 (TRAV8-4, TRAJ17)
CAVSDEKAAGNKLTF

SEQ ID NO: 318264 - protein, 14 aa, Homo sapiens
  CDR3 for beta chain variable domain of TCR clone 159132 (TRBV2, TRBJ1-2)
CASSPSLGYYGYTF

SEQ ID NO: 318265 - protein, 11 aa, Homo sapiens
  CDR3 for alpha chain variable domain of TCR clone 159133 (TRAV1-1, TRAJ23)
CAARQGGKLIF

SEQ ID NO: 318266 - protein, 13 aa, Homo sapiens
  CDR3 for beta chain variable domain of TCR clone 159133 (TRBV7-3, TRBJ1-1)
CASSQDWGAEAFF

SEQ ID NO: 318267 - protein, 13 aa, Homo sapiens
  CDR3 for alpha chain variable domain of TCR clone 159134 (TRAV21, TRAJ20)
CAVGLRVDYKLSF

SEQ ID NO: 318268 - protein, 16 aa, Homo sapiens
  CDR3 for beta chain variable domain of TCR clone 159134 (TRBV12-4, TRBJ2-5)
CASSFFVRGRQETQYF

SEQ ID NO: 318269 - protein, 12 aa, Homo sapiens
  CDR3 for alpha chain variable domain of TCR clone 159135 (TRAV3, TRAJ20)
CAVRDPDYKLSF

SEQ ID NO: 318270 - protein, 15 aa, Homo sapiens
  CDR3 for beta chain variable domain of TCR clone 159135 (TRBV2, TRBJ2-2)
CASSRETVGTGELIF

SEQ ID NO: 318271 - protein, 14 aa, Homo sapiens
  CDR3 for alpha chain variable domain of TCR clone 159136 (TRAV1-2, TRAJ8)
CAVREDTGFQKLVF

SEQ ID NO: 318272 - protein, 14 aa, Homo sapiens
  CDR3 for beta chain variable domain of TCR clone 159136 (TRBV7-3, TRBJ2-2)
CASSPGGYTGELFF

SEQ ID NO: 318273 - protein, 13 aa, Homo sapiens
  CDR3 for alpha chain variable domain of TCR clone 159137 (TRAV21, TRAJ37)
CAVSSGNTGKPIF

SEQ ID NO: 318274 - protein, 17 aa, Homo sapiens
  CDR3 for beta chain variable domain of TCR clone 159137 (TRBV5-1, TRBJ2-5)
CASSLLGLAANQETQYF

SEQ ID NO: 318275 - protein, 14 aa, Homo sapiens
  CDR3 for alpha chain variable domain of TCR clone 159138 (TRAV12-2, TRAJ36)
CAVNPPTGAHNLFF

SEQ ID NO: 318276 - protein, 13 aa, Homo sapiens
  CDR3 for beta chain variable domain of TCR clone 159138 (TRBV20-1, TRBJ1-6)
CSAPTGLGSPLHF

SEQ ID NO: 318277 - protein, 14 aa, Homo sapiens
  CDR3 for alpha chain variable domain of TCR clone 159139 (TRAV29/DV5, TRAJ48)
CAAMALFGNEKLTF

SEQ ID NO: 318278 - protein, 14 aa, Homo sapiens
  CDR3 for beta chain variable domain of TCR clone 159139 (TRBV12-5, TRBJ2-5)
CASGSRTHQETQYF

SEQ ID NO: 318279 - protein, 13 aa, Homo sapiens
  CDR3 for alpha chain variable domain of TCR clone 159140 (TRAV36/DV7, TRAJ38)
CVANAGNNRKLIW

SEQ ID NO: 318280 - protein, 16 aa, Homo sapiens
  CDR3 for beta chain variable domain of TCR clone 159140 (TRBV11-2, TRBJ1-2)
CASSLDTGGADYGYTF

SEQ ID NO: 318281 - protein, 14 aa, Homo sapiens
  CDR3 for alpha chain variable domain of TCR clone 159141 (TRAV2, TRAJ9)
CAVEDRSGGFKTIF

SEQ ID NO: 318282 - protein, 14 aa, Homo sapiens
  CDR3 for beta chain variable domain of TCR clone 159141 (TRBV11-2, TRBJ2-5)
CASRPLAGRETQYF

SEQ ID NO: 318283 - protein, 12 aa, Homo sapiens
  CDR3 for alpha chain variable domain of TCR clone 159142 (TRAV17, TRAJ43)
CATDAFPADMRF

SEQ ID NO: 318284 - protein, 16 aa, Homo sapiens
  CDR3 for beta chain variable domain of TCR clone 159142 (TRBV12-5, TRBJ2-5)
CASGPRTSGNQETQYF

SEQ ID NO: 318285 - protein, 16 aa, Homo sapiens
  CDR3 for alpha chain variable domain of TCR clone 159143 (TRAV3, TRAJ10)
CAVRDMRSGGGNKLTF

SEQ ID NO: 318286 - protein, 13 aa, Homo sapiens
  CDR3 for beta chain variable domain of TCR clone 159143 (TRBV12-4, TRBJ2-7)
CASSPTETYEQYF

SEQ ID NO: 318287 - protein, 14 aa, Homo sapiens
  CDR3 for alpha chain variable domain of TCR clone 159144 (TRAV23/DV6, TRAJ27)
CAASRDTHAGKSTF

SEQ ID NO: 318288 - protein, 13 aa, Homo sapiens
  CDR3 for beta chain variable domain of TCR clone 159144 (TRBV20-1, TRBJ1-5)
CSASVRGNQPQHF

SEQ ID NO: 318289 - protein, 14 aa, Homo sapiens
  CDR3 for alpha chain variable domain of TCR clone 159145 (TRAV2, TRAJ29)
CAVEPLSGNTPLVF

SEQ ID NO: 318290 - protein, 13 aa, Homo sapiens
  CDR3 for beta chain variable domain of TCR clone 159145 (TRBV28, TRBJ1-2)
CASRGPGIYGYTF

SEQ ID NO: 318291 - protein, 14 aa, Homo sapiens
  CDR3 for alpha chain variable domain of TCR clone 159146 (TRAV2, TRAJ37)
CAVDFTSNTGKLIF

SEQ ID NO: 318292 - protein, 12 aa, Homo sapiens
  CDR3 for beta chain variable domain of TCR clone 159146 (TRBV7-9, TRBJ1-4)
CASSTEREKLFF

SEQ ID NO: 318293 - protein, 10 aa, Homo sapiens
  CDR3 for alpha chain variable domain of TCR clone 159147 (TRAV4, TRAJ30)
CGWGDDKIIF

SEQ ID NO: 318294 - protein, 12 aa, Homo sapiens
  CDR3 for beta chain variable domain of TCR clone 159147 (TRBV7-9, TRBJ2-1)
CASRAGVDEQFV

SEQ ID NO: 318295 - protein, 16 aa, Homo sapiens
  CDR3 for alpha chain variable domain of TCR clone 159148 (TRAV38-1, TRAJ56)
CSFMKRQTGANSKLTF

SEQ ID NO: 318296 - protein, 15 aa, Homo sapiens
  CDR3 for beta chain variable domain of TCR clone 159148 (TRBV6-1, TRBJ1-3)
CASSEWGGSGNTIYF

SEQ ID NO: 318297 - protein, 13 aa, Homo sapiens
  CDR3 for alpha chain variable domain of TCR clone 159149 (TRAV3, TRAJ21)
CAVREPDFNEFYF

SEQ ID NO: 318298 - protein, 13 aa, Homo sapiens
  CDR3 for beta chain variable domain of TCR clone 159149 (TRBV9, TRBJ2-1)
CASSPSGGNEQFF

SEQ ID NO: 318299 - protein, 14 aa, Homo sapiens
  CDR3 for alpha chain variable domain of TCR clone 159150 (TRAV12-2, TRAJ40)
CAVKIPSGTYKYIF

SEQ ID NO: 318300 - protein, 16 aa, Homo sapiens
  CDR3 for beta chain variable domain of TCR clone 159150 (TRBV7-3, TRBJ2-1)
CASSLVSGSSNNEQFF

SEQ ID NO: 318301 - protein, 10 aa, Homo sapiens
  CDR3 for alpha chain variable domain of TCR clone 159151 (TRAV12-2, TRAJ10)
CAAWTGVETH

SEQ ID NO: 318302 - protein, 16 aa, Homo sapiens
  CDR3 for beta chain variable domain of TCR clone 159151 (TRBV27, TRBJ2-5)
CASSFGPGGTKETQYF

SEQ ID NO: 318303 - protein, 15 aa, Homo sapiens
  CDR3 for alpha chain variable domain of TCR clone 159152 (TRAV12-3, TRAJ27)
CAMRAYNTNAGKSTF

SEQ ID NO: 318304 - protein, 15 aa, Homo sapiens
  CDR3 for beta chain variable domain of TCR clone 159152 (TRBV6-6, TRBJ1-1)
CASSPRGDVETEAFF

SEQ ID NO: 318305 - protein, 14 aa, Homo sapiens
  CDR3 for alpha chain variable domain of TCR clone 159153 (TRAV38-1, TRAJ40)
CALRPTPGTYKYIF

SEQ ID NO: 318306 - protein, 14 aa, Homo sapiens
  CDR3 for beta chain variable domain of TCR clone 159153 (TRBV25-1, TRBJ1-1)
CASTHLGGNTEAFS

SEQ ID NO: 318307 - protein, 15 aa, Homo sapiens
  CDR3 for alpha chain variable domain of TCR clone 159154 (TRAV26-1, TRAJ29)
CIVRVEGSGNTPLVF

SEQ ID NO: 318308 - protein, 13 aa, Homo sapiens
  CDR3 for beta chain variable domain of TCR clone 159154 (TRBV4-1, TRBJ2-7)
CASSQGQAYEQYF

SEQ ID NO: 318309 - protein, 15 aa, Homo sapiens
  CDR3 for alpha chain variable domain of TCR clone 159155 (TRAV29/DV5, TRAJ44)
CAASAGTGPASKLTF

SEQ ID NO: 318310 - protein, 16 aa, Homo sapiens
  CDR3 for beta chain variable domain of TCR clone 159155 (TRBV4-1, TRBJ1-4)
CASSQDLRRGGEKLFF

SEQ ID NO: 318311 - protein, 16 aa, Homo sapiens
  CDR3 for alpha chain variable domain of TCR clone 159156 (TRAV16, TRAJ4)
CALSRMFSGGYNRLIF

SEQ ID NO: 318312 - protein, 12 aa, Homo sapiens
  CDR3 for beta chain variable domain of TCR clone 159156 (TRBV29-1, TRBJ2-3)
CSVTGGADTQYF

SEQ ID NO: 318313 - protein, 15 aa, Homo sapiens
  CDR3 for alpha chain variable domain of TCR clone 159157 (TRAV26-1, TRAJ3)
CIVRSGYSSASKIIF

SEQ ID NO: 318314 - protein, 15 aa, Homo sapiens
  CDR3 for beta chain variable domain of TCR clone 159157 (TRBV4-1, TRBJ1-2)
CASSLNTGQGYGYTF

SEQ ID NO: 318315 - protein, 15 aa, Homo sapiens
  CDR3 for alpha chain variable domain of TCR clone 159158 (TRAV27, TRAJ38)
CAARRNAGNNRKLIW

SEQ ID NO: 318316 - protein, 11 aa, Homo sapiens
  CDR3 for beta chain variable domain of TCR clone 159158 (TRBV20-1, TRBJ2-5)
CSAATQAPQYF

SEQ ID NO: 318317 - protein, 16 aa, Homo sapiens
  CDR3 for alpha chain variable domain of TCR clone 159159 (TRAV12-3, TRAJ53)
CAMSPGSGVSNYKLTF

SEQ ID NO: 318318 - protein, 14 aa, Homo sapiens
  CDR3 for beta chain variable domain of TCR clone 159159 (TRBV4-2, TRBJ2-1)
CASGLDRAYNEQFF

SEQ ID NO: 318319 - protein, 19 aa, Homo sapiens
  CDR3 for alpha chain variable domain of TCR clone 159160 (TRAV1-2, TRAJ26)
CLSPLCCARPDNYGQNFVF

SEQ ID NO: 318320 - protein, 15 aa, Homo sapiens
  CDR3 for beta chain variable domain of TCR clone 159160 (TRBV28, TRBJ1-2)
CASSLWQPTNYGYTF

SEQ ID NO: 318321 - protein, 17 aa, Homo sapiens
  CDR3 for alpha chain variable domain of TCR clone 159161 (TRAV3, TRAJ4)
CAVRDIMFSGGYNKLIF

SEQ ID NO: 318322 - protein, 15 aa, Homo sapiens
  CDR3 for beta chain variable domain of TCR clone 159161 (TRBV9, TRBJ1-6)
CASSVAGTGDSPLHF

SEQ ID NO: 318323 - protein, 15 aa, Homo sapiens
  CDR3 for alpha chain variable domain of TCR clone 159162 (TRAV26-2, TRAJ28)
CILVESGAGSYQLTF

SEQ ID NO: 318324 - protein, 17 aa, Homo sapiens
  CDR3 for beta chain variable domain of TCR clone 159162 (TRBV4-2, TRBJ1-2)
CASSQEIGGELWLHLRF

SEQ ID NO: 318325 - protein, 13 aa, Homo sapiens
  CDR3 for alpha chain variable domain of TCR clone 159163 (TRAV12-1, TRAJ6)
CVVFPGGSYIPTF

SEQ ID NO: 318326 - protein, 14 aa, Homo sapiens
  CDR3 for beta chain variable domain of TCR clone 159163 (TRBV23-1, TRBJ2-5)
CASSFLRSQETQYF

SEQ ID NO: 318327 - protein, 14 aa, Homo sapiens
  CDR3 for alpha chain variable domain of TCR clone 159164 (TRAV12-3, TRAJ12)
CAMSRMDSSYKLIF

SEQ ID NO: 318328 - protein, 15 aa, Homo sapiens
  CDR3 for beta chain variable domain of TCR clone 159164 (TRBV7-9, TRBJ2-7)
CASSLALAEAYEQYF

SEQ ID NO: 318329 - protein, 16 aa, Homo sapiens
  CDR3 for alpha chain variable domain of TCR clone 159165 (TRAV30, TRAJ24)
CGTEIVDADSWGKFQF

SEQ ID NO: 318330 - protein, 15 aa, Homo sapiens
  CDR3 for beta chain variable domain of TCR clone 159165 (TRBV7-9, TRBJ1-6)
CASSSPGRGNSPLHS

SEQ ID NO: 318331 - protein, 12 aa, Homo sapiens
  CDR3 for alpha chain variable domain of TCR clone 159166 (TRAV13-1, TRAJ43)
CAAGRFNNDMRF

SEQ ID NO: 318332 - protein, 13 aa, Homo sapiens
  CDR3 for beta chain variable domain of TCR clone 159166 (TRBV7-2, TRBJ2-2)
CASSLAVTGELFF

SEQ ID NO: 318333 - protein, 11 aa, Homo sapiens
  CDR3 for alpha chain variable domain of TCR clone 159167 (TRAV13-1, TRAJ43)
CAAHNNNDKRF

SEQ ID NO: 318334 - protein, 15 aa, Homo sapiens
  CDR3 for beta chain variable domain of TCR clone 159167 (TRBV6-1, TRBJ2-2)
CASSRIRGDTGELFF

SEQ ID NO: 318335 - protein, 13 aa, Homo sapiens
  CDR3 for alpha chain variable domain of TCR clone 159168 (TRAV12-1, TRAJ33)
CGDAPDSNYQLIW

SEQ ID NO: 318336 - protein, 12 aa, Homo sapiens
  CDR3 for beta chain variable domain of TCR clone 159168 (TRBV11-2, TRBJ2-2)
CASSLGGGEVFF

SEQ ID NO: 318337 - protein, 15 aa, Homo sapiens
  CDR3 for alpha chain variable domain of TCR clone 159169 (TRAV8-2, TRAJ40)
CVVLGTTSGTYKYIF

SEQ ID NO: 318338 - protein, 14 aa, Homo sapiens
  CDR3 for beta chain variable domain of TCR clone 159169 (TRBV4-1, TRBJ1-1)
CASSRSGQSCEAFF

SEQ ID NO: 318339 - protein, 12 aa, Homo sapiens
  CDR3 for alpha chain variable domain of TCR clone 159170 (TRAV13-1, TRAJ27)
CAAHTNAGKSTF

SEQ ID NO: 318340 - protein, 13 aa, Homo sapiens
  CDR3 for beta chain variable domain of TCR clone 159170 (TRBV11-2, TRBJ1-3)
CASSPTGGNTIYF

SEQ ID NO: 318341 - protein, 14 aa, Homo sapiens
  CDR3 for alpha chain variable domain of TCR clone 159171 (TRAV3, TRAJ40)
CAARDRRGTYKYIF

SEQ ID NO: 318342 - protein, 15 aa, Homo sapiens
  CDR3 for beta chain variable domain of TCR clone 159171 (TRBV11-1, TRBJ1-3)
CASTDPRAFGNTIYF

SEQ ID NO: 318343 - protein, 14 aa, Homo sapiens
  CDR3 for alpha chain variable domain of TCR clone 159172 (TRAV12-2, TRAJ32)
CAHPESGATNKLIF

SEQ ID NO: 318344 - protein, 14 aa, Homo sapiens
  CDR3 for beta chain variable domain of TCR clone 159172 (TRBV4-2, TRBJ2-3)
CATRETRAPGMQYF

SEQ ID NO: 318345 - protein, 14 aa, Homo sapiens
  CDR3 for alpha chain variable domain of TCR clone 159173 (TRAV12-2, TRAJ13)
CAVKKTGGYQKVTF

SEQ ID NO: 318346 - protein, 11 aa, Homo sapiens
  CDR3 for beta chain variable domain of TCR clone 159173 (TRBV11-2, TRBJ2-2)
CASRLPGELFF

SEQ ID NO: 318347 - protein, 15 aa, Homo sapiens
  CDR3 for alpha chain variable domain of TCR clone 159174 (TRAV13-1, TRAJ5)
CAASPRGHGQESTYF

SEQ ID NO: 318348 - protein, 15 aa, Homo sapiens
  CDR3 for beta chain variable domain of TCR clone 159174 (TRBV6-1, TRBJ2-3)
CAGSERGGITDTQYF

SEQ ID NO: 318349 - protein, 14 aa, Homo sapiens
  CDR3 for alpha chain variable domain of TCR clone 159175 (TRAV12-2, TRAJ13)
CAVKKTGGYQKVTF

SEQ ID NO: 318350 - protein, 16 aa, Homo sapiens
  CDR3 for beta chain variable domain of TCR clone 159175 (TRBV2, TRBJ2-1)
CDSRSPAGGKYNEQFF

SEQ ID NO: 318351 - protein, 15 aa, Homo sapiens
  CDR3 for alpha chain variable domain of TCR clone 159176 (TRAV30, TRAJ57)
CGTAIPQGGSEKLVF

SEQ ID NO: 318352 - protein, 13 aa, Homo sapiens
  CDR3 for beta chain variable domain of TCR clone 159176 (TRBV19, TRBJ2-5)
CASSIPYGETQYF

SEQ ID NO: 318353 - protein, 17 aa, Homo sapiens
  CDR3 for alpha chain variable domain of TCR clone 159177 (TRAV38-2/DV8, TRAJ38)
CAYRSARGAGNNRKLTW

SEQ ID NO: 318354 - protein, 13 aa, Homo sapiens
  CDR3 for beta chain variable domain of TCR clone 159177 (TRBV6-5, TRBJ2-1)
CASRGRVGNEQFF

SEQ ID NO: 318355 - protein, 12 aa, Homo sapiens
  CDR3 for alpha chain variable domain of TCR clone 159178 (TRAV27, TRAJ9)
CAGESGGFKTIL

SEQ ID NO: 318356 - protein, 13 aa, Homo sapiens
  CDR3 for beta chain variable domain of TCR clone 159178 (TRBV4-2, TRBJ2-3)
CASSLTTTDTQYF

SEQ ID NO: 318357 - protein, 11 aa, Homo sapiens
  CDR3 for alpha chain variable domain of TCR clone 159179 (TRAV4, TRAJ31)
CLVGDNARLMF

SEQ ID NO: 318358 - protein, 16 aa, Homo sapiens
  CDR3 for beta chain variable domain of TCR clone 159179 (TRBV19, TRBJ1-1)
CASRFGGPVTGTEAFF

SEQ ID NO: 318359 - protein, 12 aa, Homo sapiens
  CDR3 for alpha chain variable domain of TCR clone 159180 (TRAV13-1, TRAJ23)
CAASKKGGKLIF

SEQ ID NO: 318360 - protein, 14 aa, Homo sapiens
  CDR3 for beta chain variable domain of TCR clone 159180 (TRBV7-3, TRBJ1-1)
CASSLKGGNTEAFF

SEQ ID NO: 318361 - protein, 16 aa, Homo sapiens
  CDR3 for alpha chain variable domain of TCR clone 159181 (TRAV16, TRAJ52)
CALSAAGGTSYGKLTF

SEQ ID NO: 318362 - protein, 14 aa, Homo sapiens
  CDR3 for beta chain variable domain of TCR clone 159181 (TRBV7-3, TRBJ2-2)
CASSLYPLTGELFF

SEQ ID NO: 318363 - protein, 16 aa, Homo sapiens
  CDR3 for alpha chain variable domain of TCR clone 159182 (TRAV16, TRAJ42)
CARKMNYGGSQGNLIF

SEQ ID NO: 318364 - protein, 13 aa, Homo sapiens
  CDR3 for beta chain variable domain of TCR clone 159182 (TRBV20-1, TRBJ2-7)
CSASPPYSYEQYF

SEQ ID NO: 318365 - protein, 13 aa, Homo sapiens
  CDR3 for alpha chain variable domain of TCR clone 159183 (TRAV8-4, TRAJ10)
CAAFTGGGNKLTF

SEQ ID NO: 318366 - protein, 18 aa, Homo sapiens
  CDR3 for beta chain variable domain of TCR clone 159183 (TRBV11-2, TRBJ2-3)
CARSLGGASRGAPNTQYF

SEQ ID NO: 318367 - protein, 12 aa, Homo sapiens
  CDR3 for alpha chain variable domain of TCR clone 159184 (TRAV26-1, TRAJ36)
CIVRVRADNLFF

SEQ ID NO: 318368 - protein, 14 aa, Homo sapiens
  CDR3 for beta chain variable domain of TCR clone 159184 (TRBV14, TRBJ2-3)
CASSRKLAAATQYF

SEQ ID NO: 318369 - protein, 13 aa, Homo sapiens
  CDR3 for alpha chain variable domain of TCR clone 159185 (TRAV21, TRAJ20)
CAVGLRVDYKLSF

SEQ ID NO: 318370 - protein, 14 aa, Homo sapiens
  CDR3 for beta chain variable domain of TCR clone 159185 (TRBV5-1, TRBJ1-1)
CASSLTRRSTEAFF

SEQ ID NO: 318371 - protein, 12 aa, Homo sapiens
  CDR3 for alpha chain variable domain of TCR clone 159186 (TRAV3, TRAJ26)
CAVRDYGQNFVF

SEQ ID NO: 318372 - protein, 16 aa, Homo sapiens
  CDR3 for beta chain variable domain of TCR clone 159186 (TRBV11-2, TRBJ1-2)
SASSPSGREANYGCTF

SEQ ID NO: 318373 - protein, 14 aa, Homo sapiens
  CDR3 for alpha chain variable domain of TCR clone 159187 (TRAV17, TRAJ39)
CATDPVRAGNMPTF

SEQ ID NO: 318374 - protein, 13 aa, Homo sapiens
  CDR3 for beta chain variable domain of TCR clone 159187 (TRBV10-2, TRBJ2-7)
CASGASGGYEQYF

SEQ ID NO: 318375 - protein, 15 aa, Homo sapiens
  CDR3 for alpha chain variable domain of TCR clone 159188 (TRAV8-3, TRAJ7)
CAVGSISYGNNRLAF

SEQ ID NO: 318376 - protein, 14 aa, Homo sapiens
  CDR3 for beta chain variable domain of TCR clone 159188 (TRBV12-5, TRBJ2-5)
CASGSRTHRETQYF

SEQ ID NO: 318377 - protein, 15 aa, Homo sapiens
  CDR3 for alpha chain variable domain of TCR clone 159189 (TRAV23/DV6, TRAJ57)
CAASSTLSQGGSEKL

SEQ ID NO: 318378 - protein, 14 aa, Homo sapiens
  CDR3 for beta chain variable domain of TCR clone 159189 (TRBV25-1, TRBJ1-1)
CASTHLGGNTDAFF

SEQ ID NO: 318379 - protein, 19 aa, Homo sapiens
  CDR3 for alpha chain variable domain of TCR clone 159190 (TRAV2, TRAJ20)
ILQVREADAAVYRDCKLSF

SEQ ID NO: 318380 - protein, 16 aa, Homo sapiens
  CDR3 for beta chain variable domain of TCR clone 159190 (TRBV20-1, TRBJ1-4)
CSAPGQGLLTNEELFF

SEQ ID NO: 318381 - protein, 14 aa, Homo sapiens
  CDR3 for alpha chain variable domain of TCR clone 159191 (TRAV26-1, TRAJ34)
CIVRVAYNTDKLIF

SEQ ID NO: 318382 - protein, 16 aa, Homo sapiens
  CDR3 for beta chain variable domain of TCR clone 159191 (TRBV2, TRBJ2-3)
CSSSTSVEGVTDTQYF

SEQ ID NO: 318383 - protein, 14 aa, Homo sapiens
  CDR3 for alpha chain variable domain of TCR clone 159192 (TRAV23/DV6, TRAJ4)
CAAPSSGGYNKLIF

SEQ ID NO: 318384 - protein, 16 aa, Homo sapiens
  CDR3 for beta chain variable domain of TCR clone 159192 (TRBV19, TRBJ1-1)
CASRFGGPVAGTEAFF

SEQ ID NO: 318385 - protein, 17 aa, Homo sapiens
  CDR3 for alpha chain variable domain of TCR clone 159193 (TRAV29/DV5, TRAJ49)
CILCSKLTVDTGNQFYF

SEQ ID NO: 318386 - protein, 14 aa, Homo sapiens
  CDR3 for beta chain variable domain of TCR clone 159193 (TRBV7-2, TRBJ2-7)
CASRSQGAAYEQYF

SEQ ID NO: 318387 - protein, 16 aa, Homo sapiens
  CDR3 for alpha chain variable domain of TCR clone 159194 (TRAV1-2, TRAJ10)
CAVRGVLTGGGNKLTF

SEQ ID NO: 318388 - protein, 12 aa, Homo sapiens
  CDR3 for beta chain variable domain of TCR clone 159194 (TRBV7-8, TRBJ2-7)
CASSLGDRKHYF

SEQ ID NO: 318389 - protein, 11 aa, Homo sapiens
  CDR3 for alpha chain variable domain of TCR clone 159195 (TRAV1-2, TRAJ20)
CAVSNDYKLSF

SEQ ID NO: 318390 - protein, 17 aa, Homo sapiens
  CDR3 for beta chain variable domain of TCR clone 159195 (TRBV7-8, TRBJ2-6)
CASSAGTGGAGANVPTF

SEQ ID NO: 318391 - protein, 12 aa, Homo sapiens
  CDR3 for alpha chain variable domain of TCR clone 159196 (TRAV9-2, TRAJ9)
CATNTGGFKTIF

SEQ ID NO: 318392 - protein, 17 aa, Homo sapiens
  CDR3 for beta chain variable domain of TCR clone 159196 (TRBV28, TRBJ2-5)
CASSRQGGLAGAETQYF

SEQ ID NO: 318393 - protein, 14 aa, Homo sapiens
  CDR3 for alpha chain variable domain of TCR clone 159197 (TRAV12-2, TRAJ13)
CAVKKPGGYKKVTF

SEQ ID NO: 318394 - protein, 15 aa, Homo sapiens
  CDR3 for beta chain variable domain of TCR clone 159197 (TRBV27, TRBJ2-1)
CASSNGGGSSNEQFF

SEQ ID NO: 318395 - protein, 12 aa, Homo sapiens
  CDR3 for alpha chain variable domain of TCR clone 159198 (TRAV1-1, TRAJ15)
CAVGQAGTALIF

SEQ ID NO: 318396 - protein, 15 aa, Homo sapiens
  CDR3 for beta chain variable domain of TCR clone 159198 (TRBV12-4, TRBJ2-5)
CASSPPTGLQETQYF

SEQ ID NO: 318397 - protein, 12 aa, Homo sapiens
  CDR3 for alpha chain variable domain of TCR clone 159199 (TRAV13-2, TRAJ23)
CAERHRGGKLIF

SEQ ID NO: 318398 - protein, 15 aa, Homo sapiens
  CDR3 for beta chain variable domain of TCR clone 159199 (TRBV19, TRBJ1-2)
CASSVAQVLNYGYTF

SEQ ID NO: 318399 - protein, 11 aa, Homo sapiens
  CDR3 for alpha chain variable domain of TCR clone 159200 (TRAV21, TRAJ23)
CAPQRRGKLIF

SEQ ID NO: 318400 - protein, 14 aa, Homo sapiens
  CDR3 for beta chain variable domain of TCR clone 159200 (TRBV12-5, TRBJ2-5)
CASGSRTHQETQYF

SEQ ID NO: 318401 - protein, 15 aa, Homo sapiens
  CDR3 for alpha chain variable domain of TCR clone 159201 (TRAV3, TRAJ22)
CAVRDRGGSARPLTF

SEQ ID NO: 318402 - protein, 14 aa, Homo sapiens
  CDR3 for beta chain variable domain of TCR clone 159201 (TRBV7-2, TRBJ2-2)
CASRGQGAAGELFF

SEQ ID NO: 318403 - protein, 14 aa, Homo sapiens
  CDR3 for alpha chain variable domain of TCR clone 159202 (TRAV26-1, TRAJ22)
CIVRVSGSARQLTF

SEQ ID NO: 318404 - protein, 17 aa, Homo sapiens
  CDR3 for beta chain variable domain of TCR clone 159202 (TRBV5-1, TRBJ2-1)
CASSTGTSGYSYNEQFF

SEQ ID NO: 318405 - protein, 19 aa, Homo sapiens
  CDR3 for alpha chain variable domain of TCR clone 159203 (TRAV38-1, TRAJ53)
CAFMKHGLESGGSNYKLTF

SEQ ID NO: 318406 - protein, 13 aa, Homo sapiens
  CDR3 for beta chain variable domain of TCR clone 159203 (TRBV19, TRBJ2-7)
CASSPRQSYGQYF

SEQ ID NO: 318407 - protein, 16 aa, Homo sapiens
  CDR3 for alpha chain variable domain of TCR clone 159204 (TRAV21, TRAJ52)
CAVTNAGGTSYGKLTF

SEQ ID NO: 318408 - protein, 16 aa, Homo sapiens
  CDR3 for beta chain variable domain of TCR clone 159204 (TRBV2, TRBJ2-1)
CASSVVGSLSYNEQFF

SEQ ID NO: 318409 - protein, 12 aa, Homo sapiens
  CDR3 for alpha chain variable domain of TCR clone 159205 (TRAV1-1, TRAJ39)
CAVPVVGNMLTF

SEQ ID NO: 318410 - protein, 15 aa, Homo sapiens
  CDR3 for beta chain variable domain of TCR clone 159205 (TRBV19, TRBJ1-6)
CASSTQGAEGSPLHF

SEQ ID NO: 318411 - protein, 18 aa, Homo sapiens
  CDR3 for alpha chain variable domain of TCR clone 159206 (TRAV9-2, TRAJ52)
CALSRHNAGCTSSGKLTF

SEQ ID NO: 318412 - protein, 13 aa, Homo sapiens
  CDR3 for beta chain variable domain of TCR clone 159206 (TRBV7-9, TRBJ1-2)
CASSLKQNYGYTF

SEQ ID NO: 318413 - protein, 12 aa, Homo sapiens
  CDR3 for alpha chain variable domain of TCR clone 159207 (TRAV8-3, TRAJ26)
CAGDNYGQSFVF

SEQ ID NO: 318414 - protein, 12 aa, Homo sapiens
  CDR3 for beta chain variable domain of TCR clone 159207 (TRBV11-2, TRBJ2-1)
CASSPGNNEQFF

SEQ ID NO: 318415 - protein, 13 aa, Homo sapiens
  CDR3 for alpha chain variable domain of TCR clone 159208 (TRAV26-2, TRAJ43)
CILRAVNNNDMRF

SEQ ID NO: 318416 - protein, 13 aa, Homo sapiens
  CDR3 for beta chain variable domain of TCR clone 159208 (TRBV7-2, TRBJ2-5)
CASSQTSVETQYF

SEQ ID NO: 318417 - protein, 14 aa, Homo sapiens
  CDR3 for alpha chain variable domain of TCR clone 159209 (TRAV26-1, TRAJ6)
CIVSPVGGSYIPTF

SEQ ID NO: 318418 - protein, 14 aa, Homo sapiens
  CDR3 for beta chain variable domain of TCR clone 159209 (TRBV7-2, TRBJ2-7)
CASRSQGAAYEQYF

SEQ ID NO: 318419 - protein, 14 aa, Homo sapiens
  CDR3 for alpha chain variable domain of TCR clone 159210 (TRAV6, TRAJ6)
CALPTSEGSYIPTF

SEQ ID NO: 318420 - protein, 17 aa, Homo sapiens
  CDR3 for beta chain variable domain of TCR clone 159210 (TRBV5-1, TRBJ2-5)
CASSPVALGRNQETQYF

SEQ ID NO: 318421 - protein, 14 aa, Homo sapiens
  CDR3 for alpha chain variable domain of TCR clone 159211 (TRAV12-1, TRAJ30)
CVPTGTNRGDKIIF

SEQ ID NO: 318422 - protein, 11 aa, Homo sapiens
  CDR3 for beta chain variable domain of TCR clone 159211 (TRBV4-1, TRBJ2-2)
CASDHTGELFF

SEQ ID NO: 318423 - protein, 14 aa, Homo sapiens
  CDR3 for alpha chain variable domain of TCR clone 159212 (TRAV12-1, TRAJ17)
CVVNYKAAGNKLTC

SEQ ID NO: 318424 - protein, 14 aa, Homo sapiens
  CDR3 for beta chain variable domain of TCR clone 159212 (TRBV7-2, TRBJ2-7)
CASRSQGAAYEQYF

SEQ ID NO: 318425 - protein, 17 aa, Homo sapiens
  CDR3 for alpha chain variable domain of TCR clone 159213 (TRAV26-1, TRAJ58)
CIVRVGAGETSGSRLTV

SEQ ID NO: 318426 - protein, 18 aa, Homo sapiens
  CDR3 for beta chain variable domain of TCR clone 159213 (TRBV7-9, TRBJ2-7)
CASSLTTSGSRTWYEQYF

SEQ ID NO: 318427 - protein, 14 aa, Homo sapiens
  CDR3 for alpha chain variable domain of TCR clone 159214 (TRAV8-4, TRAJ38)
CARLNAGNNRKLVW

SEQ ID NO: 318428 - protein, 16 aa, Homo sapiens
  CDR3 for beta chain variable domain of TCR clone 159214 (TRBV13, TRBJ2-2)
CASSPRTGEHTGELFF

SEQ ID NO: 318429 - protein, 13 aa, Homo sapiens
  CDR3 for alpha chain variable domain of TCR clone 159215 (TRAV36/DV7, TRAJ29)
CAVEPSGNTPLVF

SEQ ID NO: 318430 - protein, 14 aa, Homo sapiens
  CDR3 for beta chain variable domain of TCR clone 159215 (TRBV7-2, TRBJ2-5)
CASSPRGSSETQYF

SEQ ID NO: 318431 - protein, 14 aa, Homo sapiens
  CDR3 for alpha chain variable domain of TCR clone 159216 (TRAV29/DV5, TRAJ49)
CAASLSNTGNQFYF

SEQ ID NO: 318432 - protein, 16 aa, Homo sapiens
  CDR3 for beta chain variable domain of TCR clone 159216 (TRBV12-4, TRBJ2-5)
CASSFFVRGRQETQYF

SEQ ID NO: 318433 - protein, 16 aa, Homo sapiens
  CDR3 for alpha chain variable domain of TCR clone 159217 (TRAV12-2, TRAJ10)
CAVNRVLTGGGNKLTF

SEQ ID NO: 318434 - protein, 15 aa, Homo sapiens
  CDR3 for beta chain variable domain of TCR clone 159217 (TRBV28, TRBJ2-4)
CAAGSGTLLMGIQYF

SEQ ID NO: 318435 - protein, 16 aa, Homo sapiens
  CDR3 for alpha chain variable domain of TCR clone 159218 (TRAV17, TRAJ4)
CATAAHSSGGYNKLIF

SEQ ID NO: 318436 - protein, 15 aa, Homo sapiens
  CDR3 for beta chain variable domain of TCR clone 159218 (TRBV20-1, TRBJ2-7)
CSARDRVSGMDEQYF

SEQ ID NO: 318437 - protein, 11 aa, Homo sapiens
  CDR3 for alpha chain variable domain of TCR clone 159219 (TRAV17, TRAJ9)
CGFTGGFKTIF

SEQ ID NO: 318438 - protein, 14 aa, Homo sapiens
  CDR3 for beta chain variable domain of TCR clone 159219 (TRBV7-9, TRBJ2-2)
CASSLVQHTGELFF

SEQ ID NO: 318439 - protein, 14 aa, Homo sapiens
  CDR3 for alpha chain variable domain of TCR clone 159220 (TRAV8-4, TRAJ54)
CAVSEVFGAQKLVF

SEQ ID NO: 318440 - protein, 14 aa, Homo sapiens
  CDR3 for beta chain variable domain of TCR clone 159220 (TRBV4-3, TRBJ1-4)
CASSPLQRNENLFF

SEQ ID NO: 318441 - protein, 13 aa, Homo sapiens
  CDR3 for alpha chain variable domain of TCR clone 159221 (TRAV17, TRAJ5)
CALRGTGRRALTF

SEQ ID NO: 318442 - protein, 16 aa, Homo sapiens
  CDR3 for beta chain variable domain of TCR clone 159221 (TRBV20-1, TRBJ2-1)
CSAPGLAGSYSDEQFF

SEQ ID NO: 318443 - protein, 15 aa, Homo sapiens
  CDR3 for alpha chain variable domain of TCR clone 159222 (TRAV8-6, TRAJ20)
CAVTRPGSNDYKLSF

SEQ ID NO: 318444 - protein, 16 aa, Homo sapiens
  CDR3 for beta chain variable domain of TCR clone 159222 (TRBV5-1, TRBJ2-3)
CASSLGLAVYTDTQYF

SEQ ID NO: 318445 - protein, 19 aa, Homo sapiens
  CDR3 for alpha chain variable domain of TCR clone 159223 (TRAV8-3, TRAJ4)
LSTSGLWVFYSGGYNKLIF

SEQ ID NO: 318446 - protein, 16 aa, Homo sapiens
  CDR3 for beta chain variable domain of TCR clone 159223 (TRBV7-8, TRBJ2-3)
CASSTEGQRETDTQYF

SEQ ID NO: 318447 - protein, 13 aa, Homo sapiens
  CDR3 for alpha chain variable domain of TCR clone 159224 (TRAV21, TRAJ15)
CAVANPAGTALIF

SEQ ID NO: 318448 - protein, 14 aa, Homo sapiens
  CDR3 for beta chain variable domain of TCR clone 159224 (TRBV27, TRBJ2-2)
CASSLGAATGELFF

SEQ ID NO: 318449 - protein, 12 aa, Homo sapiens
  CDR3 for alpha chain variable domain of TCR clone 159225 (TRAV2, TRAJ3)
CAVRSSASKIIF

SEQ ID NO: 318450 - protein, 14 aa, Homo sapiens
  CDR3 for beta chain variable domain of TCR clone 159225 (TRBV15, TRBJ2-5)
CHQQRRGPQETQYF

SEQ ID NO: 318451 - protein, 13 aa, Homo sapiens
  CDR3 for alpha chain variable domain of TCR clone 159226 (TRAV12-2, TRAJ15)
CAVFNQAGTALIF

SEQ ID NO: 318452 - protein, 23 aa, Homo sapiens
  CDR3 for beta chain variable domain of TCR clone 159226 (TRBV7-8, TRBJ1-5)
RRTPPCISGPAAGGGDADQPQHF

SEQ ID NO: 318453 - protein, 14 aa, Homo sapiens
  CDR3 for alpha chain variable domain of TCR clone 159227 (TRAV20, TRAJ56)
CSVQFGGANSKLTF

SEQ ID NO: 318454 - protein, 14 aa, Homo sapiens
  CDR3 for beta chain variable domain of TCR clone 159227 (TRBV7-2, TRBJ1-1)
CASSFLTGTTEAFF

SEQ ID NO: 318455 - protein, 14 aa, Homo sapiens
  CDR3 for alpha chain variable domain of TCR clone 159228 (TRAV1-2, TRAJ16)
CAVKRFSDGQKLLF

SEQ ID NO: 318456 - protein, 13 aa, Homo sapiens
  CDR3 for beta chain variable domain of TCR clone 159228 (TRBV7-9, TRBJ1-2)
CASSLKQNYGYTF

SEQ ID NO: 318457 - protein, 18 aa, Homo sapiens
  CDR3 for alpha chain variable domain of TCR clone 159229 (TRAV21, TRAJ52)
CAVRPSPAGGTSYGKLTF

SEQ ID NO: 318458 - protein, 19 aa, Homo sapiens
  CDR3 for beta chain variable domain of TCR clone 159229 (TRBV28, TRBJ2-1)
CASSFSIRGSGRTRYEQFF

SEQ ID NO: 318459 - protein, 18 aa, Homo sapiens
  CDR3 for alpha chain variable domain of TCR clone 159230 (TRAV26-2, TRAJ45)
CILRVDKYSGGGADELTF

SEQ ID NO: 318460 - protein, 12 aa, Homo sapiens
  CDR3 for beta chain variable domain of TCR clone 159230 (TRBV29-1, TRBJ2-3)
CSVTGGADTQYF

SEQ ID NO: 318461 - protein, 15 aa, Homo sapiens
  CDR3 for alpha chain variable domain of TCR clone 159231 (TRAV3, TRAJ20)
CAVRDIKLSDYKLSF

SEQ ID NO: 318462 - protein, 11 aa, Homo sapiens
  CDR3 for beta chain variable domain of TCR clone 159231 (TRBV24-1, TRBJ2-3)
CATSDLDTQYF

SEQ ID NO: 318463 - protein, 13 aa, Homo sapiens
  CDR3 for alpha chain variable domain of TCR clone 159232 (TRAV12-3, TRAJ40)
CAMSDSGTYKYIF

SEQ ID NO: 318464 - protein, 11 aa, Homo sapiens
  CDR3 for beta chain variable domain of TCR clone 159232 (TRBV29-1, TRBJ2-5)
CSEDRTGTQYF

SEQ ID NO: 318465 - protein, 17 aa, Homo sapiens
  CDR3 for alpha chain variable domain of TCR clone 159233 (TRAV26-2, TRAJ17)
CALLHPAIKAAGNKLTF

SEQ ID NO: 318466 - protein, 12 aa, Homo sapiens
  CDR3 for beta chain variable domain of TCR clone 159233 (TRBV29-1, TRBJ2-7)
CSARDRPYEQYF

SEQ ID NO: 318467 - protein, 14 aa, Homo sapiens
  CDR3 for alpha chain variable domain of TCR clone 159234 (TRAV14/DV4, TRAJ54)
CAMREAPGDQKLVF

SEQ ID NO: 318468 - protein, 16 aa, Homo sapiens
  CDR3 for beta chain variable domain of TCR clone 159234 (TRBV18, TRBJ1-5)
CASSPRTGGGNQPQHF

SEQ ID NO: 318469 - protein, 16 aa, Homo sapiens
  CDR3 for alpha chain variable domain of TCR clone 159235 (TRAV8-3, TRAJ48)
CAVGLISNFGNEKLTF

SEQ ID NO: 318470 - protein, 13 aa, Homo sapiens
  CDR3 for beta chain variable domain of TCR clone 159235 (TRBV20-1, TRBJ1-5)
CRASWGRSQPQHF

SEQ ID NO: 318471 - protein, 14 aa, Homo sapiens
  CDR3 for alpha chain variable domain of TCR clone 159236 (TRAV8-4, TRAJ13)
CAVTLSGGYQKVTF

SEQ ID NO: 318472 - protein, 10 aa, Homo sapiens
  CDR3 for beta chain variable domain of TCR clone 159236 (TRBV7-2, TRBJ2-6)
CASSQTGQGA

SEQ ID NO: 318473 - protein, 10 aa, Homo sapiens
  CDR3 for alpha chain variable domain of TCR clone 159237 (TRAV19, TRAJ30)
CALGDDKIIF

SEQ ID NO: 318474 - protein, 15 aa, Homo sapiens
  CDR3 for beta chain variable domain of TCR clone 159237 (TRBV4-2, TRBJ2-6)
CASSLQGTGANVLTF

SEQ ID NO: 318475 - protein, 13 aa, Homo sapiens
  CDR3 for alpha chain variable domain of TCR clone 159238 (TRAV12-1, TRAJ22)
CVVYSGSARQLTF

SEQ ID NO: 318476 - protein, 10 aa, Homo sapiens
  CDR3 for beta chain variable domain of TCR clone 159238 (TRBV6-3, TRBJ2-2)
RASRDGELFF

SEQ ID NO: 318477 - protein, 16 aa, Homo sapiens
  CDR3 for alpha chain variable domain of TCR clone 159239 (TRAV26-1, TRAJ38)
CIVRAYNAGNNRKLIW

SEQ ID NO: 318478 - protein, 15 aa, Homo sapiens
  CDR3 for beta chain variable domain of TCR clone 159239 (TRBV11-2, TRBJ2-3)
CASSPGGGATDTQYS

SEQ ID NO: 318479 - protein, 18 aa, Homo sapiens
  CDR3 for alpha chain variable domain of TCR clone 159240 (TRAV26-1, TRAJ23)
CIVRIGLEVWNQGGKLIF

SEQ ID NO: 318480 - protein, 16 aa, Homo sapiens
  CDR3 for beta chain variable domain of TCR clone 159240 (TRBV12-4, TRBJ2-5)
CASSFFVRGRQETQYF

SEQ ID NO: 318481 - protein, 14 aa, Homo sapiens
  CDR3 for alpha chain variable domain of TCR clone 159241 (TRAV1-2, TRAJ8)
CAVREDTGFQKLVF

SEQ ID NO: 318482 - protein, 13 aa, Homo sapiens
  CDR3 for beta chain variable domain of TCR clone 159241 (TRBV10-3, TRBJ1-2)
YAISERDSYGYTF

SEQ ID NO: 318483 - protein, 23 aa, Homo sapiens
  CDR3 for alpha chain variable domain of TCR clone 159242 (TRAV26-1, TRAJ38)
CIADNAGNNHIQNPDPALYQLRD

SEQ ID NO: 318484 - protein, 13 aa, Homo sapiens
  CDR3 for beta chain variable domain of TCR clone 159242 (TRBV5-4, TRBJ1-1)
CASSVDLGTEAFF

SEQ ID NO: 318485 - protein, 14 aa, Homo sapiens
  CDR3 for alpha chain variable domain of TCR clone 159243 (TRAV12-3, TRAJ58)
CAMSTETGGSRLTF

SEQ ID NO: 318486 - protein, 14 aa, Homo sapiens
  CDR3 for beta chain variable domain of TCR clone 159243 (TRBV25-1, TRBJ1-1)
CASTHLGGNTEAFF

SEQ ID NO: 318487 - protein, 13 aa, Homo sapiens
  CDR3 for alpha chain variable domain of TCR clone 159244 (TRAV12-1, TRAJ16)
CVVNGPDGQELLF

SEQ ID NO: 318488 - protein, 15 aa, Homo sapiens
  CDR3 for beta chain variable domain of TCR clone 159244 (TRBV6-3, TRBJ2-7)
CASSSPGTVFYEQYF

SEQ ID NO: 318489 - protein, 13 aa, Homo sapiens
  CDR3 for alpha chain variable domain of TCR clone 159245 (TRAV36/DV7, TRAJ49)
CAGDSNTGNQFYF

SEQ ID NO: 318490 - protein, 15 aa, Homo sapiens
  CDR3 for beta chain variable domain of TCR clone 159245 (TRBV19, TRBJ2-1)
CASSIGLAGWDEQFF

SEQ ID NO: 318491 - protein, 16 aa, Homo sapiens
  CDR3 for alpha chain variable domain of TCR clone 159246 (TRAV13-1, TRAJ15)
CAANGGPVRAGTALLF

SEQ ID NO: 318492 - protein, 13 aa, Homo sapiens
  CDR3 for beta chain variable domain of TCR clone 159246 (TRBV20-1, TRBJ2-3)
CSATSGSRDTQYF

SEQ ID NO: 318493 - protein, 10 aa, Homo sapiens
  CDR3 for alpha chain variable domain of TCR clone 159247 (TRAV1-2, TRAJ34)
CAVNTDKLIF

SEQ ID NO: 318494 - protein, 18 aa, Homo sapiens
  CDR3 for beta chain variable domain of TCR clone 159247 (TRBV7-9, TRBJ2-7)
CASSLTTRGSRTWYEQYF

SEQ ID NO: 318495 - protein, 16 aa, Homo sapiens
  CDR3 for alpha chain variable domain of TCR clone 159248 (TRAV12-3, TRAJ53)
CAMSPGSGGSNYKLTF

SEQ ID NO: 318496 - protein, 14 aa, Homo sapiens
  CDR3 for beta chain variable domain of TCR clone 159248 (TRBV4-2, TRBJ2-1)
CASGRDRAYNEQFF

SEQ ID NO: 318497 - protein, 16 aa, Homo sapiens
  CDR3 for alpha chain variable domain of TCR clone 159249 (TRAV3, TRAJ10)
CAVRDMRAGGGNKLTF

SEQ ID NO: 318498 - protein, 11 aa, Homo sapiens
  CDR3 for beta chain variable domain of TCR clone 159249 (TRBV20-1, TRBJ2-7)
CSARLSYEQYF

SEQ ID NO: 318499 - protein, 13 aa, Homo sapiens
  CDR3 for alpha chain variable domain of TCR clone 159250 (TRAV38-1, TRAJ36)
CAFVQTGANNLFF

SEQ ID NO: 318500 - protein, 13 aa, Homo sapiens
  CDR3 for beta chain variable domain of TCR clone 159250 (TRBV12-4, TRBJ1-2)
CASSFGSRRSYTF

SEQ ID NO: 318501 - protein, 15 aa, Homo sapiens
  CDR3 for alpha chain variable domain of TCR clone 159251 (TRAV8-4, TRAJ13)
CAVSDWGGGYQKVTF

SEQ ID NO: 318502 - protein, 16 aa, Homo sapiens
  CDR3 for beta chain variable domain of TCR clone 159251 (TRBV20-1, TRBJ2-7)
CSARAPGLALSYEQYF

SEQ ID NO: 318503 - protein, 11 aa, Homo sapiens
  CDR3 for alpha chain variable domain of TCR clone 159252 (TRAV17, TRAJ9)
CGFTGGFKTIF

SEQ ID NO: 318504 - protein, 13 aa, Homo sapiens
  CDR3 for beta chain variable domain of TCR clone 159252 (TRBV7-9, TRBJ2-7)
CASSAGLQYEQYF

SEQ ID NO: 318505 - protein, 13 aa, Homo sapiens
  CDR3 for alpha chain variable domain of TCR clone 159253 (TRAV12-2, TRAJ20)
CRAGQGNDYKLSF

SEQ ID NO: 318506 - protein, 16 aa, Homo sapiens
  CDR3 for beta chain variable domain of TCR clone 159253 (TRBV7-9, TRBJ1-2)
CASSPGGGAINYGDTF

SEQ ID NO: 318507 - protein, 14 aa, Homo sapiens
  CDR3 for alpha chain variable domain of TCR clone 159254 (TRAV12-1, TRAJ9)
CVVNRGTGGFKTIF

SEQ ID NO: 318508 - protein, 16 aa, Homo sapiens
  CDR3 for beta chain variable domain of TCR clone 159254 (TRBV11-2, TRBJ1-2)
CASSPSGREANYGYTF

SEQ ID NO: 318509 - protein, 14 aa, Homo sapiens
  CDR3 for alpha chain variable domain of TCR clone 159255 (TRAV12-2, TRAJ13)
CAVKKTGGYQKVTF

SEQ ID NO: 318510 - protein, 15 aa, Homo sapiens
  CDR3 for beta chain variable domain of TCR clone 159255 (TRBV27, TRBJ2-1)
CASSNGGGPPMSISS

SEQ ID NO: 318511 - protein, 12 aa, Homo sapiens
  CDR3 for alpha chain variable domain of TCR clone 159256 (TRAV2, TRAJ4)
CAVSGGYNKLIF

SEQ ID NO: 318512 - protein, 15 aa, Homo sapiens
  CDR3 for beta chain variable domain of TCR clone 159256 (TRBV5-1, TRBJ2-3)
CASSVTSGSTDTQYF

SEQ ID NO: 318513 - protein, 14 aa, Homo sapiens
  CDR3 for alpha chain variable domain of TCR clone 159257 (TRAV8-2, TRAJ23)
CVVSDDNQGGKLVF

SEQ ID NO: 318514 - protein, 15 aa, Homo sapiens
  CDR3 for beta chain variable domain of TCR clone 159257 (TRBV7-2, TRBJ2-1)
CASSSGLAGGNEQFF

SEQ ID NO: 318515 - protein, 14 aa, Homo sapiens
  CDR3 for alpha chain variable domain of TCR clone 159258 (TRAV12-2, TRAJ40)
CAVKIPSGTYKYIF

SEQ ID NO: 318516 - protein, 15 aa, Homo sapiens
  CDR3 for beta chain variable domain of TCR clone 159258 (TRBV2, TRBJ2-5)
CASSSSVAGGETQYF

SEQ ID NO: 318517 - protein, 10 aa, Homo sapiens
  CDR3 for alpha chain variable domain of TCR clone 159259 (TRAV13-1, TRAJ7)
LIGGNNRLAF

SEQ ID NO: 318518 - protein, 14 aa, Homo sapiens
  CDR3 for beta chain variable domain of TCR clone 159259 (TRBV16, TRBJ1-1)
CASSQAGPNTEAFF

SEQ ID NO: 318519 - protein, 13 aa, Homo sapiens
  CDR3 for alpha chain variable domain of TCR clone 159260 (TRAV2, TRAJ15)
CAVASQAGTALIF

SEQ ID NO: 318520 - protein, 12 aa, Homo sapiens
  CDR3 for beta chain variable domain of TCR clone 159260 (TRBV20-1, TRBJ1-1)
QCSTWGGTEAFF

SEQ ID NO: 318521 - protein, 13 aa, Homo sapiens
  CDR3 for alpha chain variable domain of TCR clone 159261 (TRAV13-1, TRAJ15)
CAASILRSTALIF

SEQ ID NO: 318522 - protein, 14 aa, Homo sapiens
  CDR3 for beta chain variable domain of TCR clone 159261 (TRBV7-9, TRBJ2-3)
CASSLEDGTDTQYF

SEQ ID NO: 318523 - protein, 15 aa, Homo sapiens
  CDR3 for alpha chain variable domain of TCR clone 159262 (TRAV17, TRAJ57)
CATGPSQGGSEKLVF

SEQ ID NO: 318524 - protein, 14 aa, Homo sapiens
  CDR3 for beta chain variable domain of TCR clone 159262 (TRBV11-2, TRBJ1-3)
CASSLAVPGNTIYF

SEQ ID NO: 318525 - protein, 13 aa, Homo sapiens
  CDR3 for alpha chain variable domain of TCR clone 159263 (TRAV13-1, TRAJ4)
CAASIGGYNKLIF

SEQ ID NO: 318526 - protein, 13 aa, Homo sapiens
  CDR3 for beta chain variable domain of TCR clone 159263 (TRBV12-5, TRBJ2-3)
CASGDRQSDTQYF

SEQ ID NO: 318527 - protein, 15 aa, Homo sapiens
  CDR3 for alpha chain variable domain of TCR clone 159264 (TRAV12-2, TRAJ43)
CAFDMRFGAGTRLTV

SEQ ID NO: 318528 - protein, 13 aa, Homo sapiens
  CDR3 for beta chain variable domain of TCR clone 159264 (TRBV6-5, TRBJ2-1)
CASSYELSNEQFF

SEQ ID NO: 318529 - protein, 13 aa, Homo sapiens
  CDR3 for alpha chain variable domain of TCR clone 159265 (TRAV3, TRAJ20)
CAVRSLNDYKLSF

SEQ ID NO: 318530 - protein, 13 aa, Homo sapiens
  CDR3 for beta chain variable domain of TCR clone 159265 (TRBV7-3, TRBJ1-1)
CASSQDWGAEAFF

SEQ ID NO: 318531 - protein, 12 aa, Homo sapiens
  CDR3 for alpha chain variable domain of TCR clone 159266 (TRAV10, TRAJ43)
CVVVRGGNDMRF

SEQ ID NO: 318532 - protein, 15 aa, Homo sapiens
  CDR3 for beta chain variable domain of TCR clone 159266 (TRBV6-3, TRBJ2-7)
CASSSPGTVFYEQYF

SEQ ID NO: 318533 - protein, 15 aa, Homo sapiens
  CDR3 for alpha chain variable domain of TCR clone 159267 (TRAV17, TRAJ57)
CATGPSHGGSEKLGF

SEQ ID NO: 318534 - protein, 16 aa, Homo sapiens
  CDR3 for beta chain variable domain of TCR clone 159267 (TRBV12-4, TRBJ1-5)
CASSRPVGGSNQPQRF

SEQ ID NO: 318535 - protein, 16 aa, Homo sapiens
  CDR3 for alpha chain variable domain of TCR clone 159268 (TRAV2, TRAJ4)
CAVEDRFSGGYNKLIF

SEQ ID NO: 318536 - protein, 13 aa, Homo sapiens
  CDR3 for beta chain variable domain of TCR clone 159268 (TRBV7-7, TRBJ2-5)
CASSRSGQEAQYV

SEQ ID NO: 318537 - protein, 13 aa, Homo sapiens
  CDR3 for alpha chain variable domain of TCR clone 159269 (TRAV2, TRAJ40)
CAVVTSGTYKYIS

SEQ ID NO: 318538 - protein, 15 aa, Homo sapiens
  CDR3 for beta chain variable domain of TCR clone 159269 (TRBV11-3, TRBJ2-3)
CASLKDGREGDTQCF

SEQ ID NO: 318539 - protein, 16 aa, Homo sapiens
  CDR3 for alpha chain variable domain of TCR clone 159270 (TRAV30, TRAJ24)
CGTEIVDADSWGKFKS

SEQ ID NO: 318540 - protein, 14 aa, Homo sapiens
  CDR3 for beta chain variable domain of TCR clone 159270 (TRBV12-5, TRBJ2-5)
CASGSRTHQETQYF

SEQ ID NO: 318541 - protein, 13 aa, Homo sapiens
  CDR3 for alpha chain variable domain of TCR clone 159271 (TRAV26-2, TRAJ43)
CILRDVNNNDMRF

SEQ ID NO: 318542 - protein, 14 aa, Homo sapiens
  CDR3 for beta chain variable domain of TCR clone 159271 (TRBV19, TRBJ2-1)
CASPTFVLSGEQFF

SEQ ID NO: 318543 - protein, 14 aa, Homo sapiens
  CDR3 for alpha chain variable domain of TCR clone 159272 (TRAV17, TRAJ49)
CATDARDTGNQFYF

SEQ ID NO: 318544 - protein, 14 aa, Homo sapiens
  CDR3 for beta chain variable domain of TCR clone 159272 (TRBV5-5, TRBJ1-2)
CASSFGQINYGYIF

SEQ ID NO: 318545 - protein, 14 aa, Homo sapiens
  CDR3 for alpha chain variable domain of TCR clone 159273 (TRAV23/DV6, TRAJ39)
CAATREEAGNMLTF

SEQ ID NO: 318546 - protein, 15 aa, Homo sapiens
  CDR3 for beta chain variable domain of TCR clone 159273 (TRBV5-1, TRBJ2-1)
CASSPPRAPYNEQFF

SEQ ID NO: 318547 - protein, 15 aa, Homo sapiens
  CDR3 for alpha chain variable domain of TCR clone 159274 (TRAV12-3, TRAJ52)
CNGGAGGTSYGKLTC

SEQ ID NO: 318548 - protein, 13 aa, Homo sapiens
  CDR3 for beta chain variable domain of TCR clone 159274 (TRBV20-1, TRBJ2-5)
CSARGDYQETQYF

SEQ ID NO: 318549 - protein, 14 aa, Homo sapiens
  CDR3 for alpha chain variable domain of TCR clone 159275 (TRAV2, TRAJ9)
CAAEDRSGGFKTIF

SEQ ID NO: 318550 - protein, 15 aa, Homo sapiens
  CDR3 for beta chain variable domain of TCR clone 159275 (TRBV5-7, TRBJ1-5)
CASSYGKLWDQPQHF

SEQ ID NO: 318551 - protein, 13 aa, Homo sapiens
  CDR3 for alpha chain variable domain of TCR clone 159276 (TRAV23/DV6, TRAJ24)
CSGSACSRGKLQF

SEQ ID NO: 318552 - protein, 15 aa, Homo sapiens
  CDR3 for beta chain variable domain of TCR clone 159276 (TRBV7-2, TRBJ1-2)
CASSPRAGWNYGYTF

SEQ ID NO: 318553 - protein, 12 aa, Homo sapiens
  CDR3 for alpha chain variable domain of TCR clone 159277 (TRAV25, TRAJ7)
CAGSYGNNRLAF

SEQ ID NO: 318554 - protein, 16 aa, Homo sapiens
  CDR3 for beta chain variable domain of TCR clone 159277 (TRBV10-3, TRBJ2-1)
CAISGVGDGGGGEQFF

SEQ ID NO: 318555 - protein, 13 aa, Homo sapiens
  CDR3 for alpha chain variable domain of TCR clone 159278 (TRAV21, TRAJ26)
CAVLDNYGQHFVF

SEQ ID NO: 318556 - protein, 16 aa, Homo sapiens
  CDR3 for beta chain variable domain of TCR clone 159278 (TRBV29-1, TRBJ2-2)
CSVETRASGNTGELFF

SEQ ID NO: 318557 - protein, 14 aa, Homo sapiens
  CDR3 for alpha chain variable domain of TCR clone 159279 (TRAV9-2, TRAJ9)
CALSDPTGGFKTIF

SEQ ID NO: 318558 - protein, 13 aa, Homo sapiens
  CDR3 for beta chain variable domain of TCR clone 159279 (TRBV19, TRBJ1-2)
CASSVPGQDGYTF

SEQ ID NO: 318559 - protein, 14 aa, Homo sapiens
  CDR3 for alpha chain variable domain of TCR clone 159280 (TRAV38-1, TRAJ40)
CALRPTSGTYKYIF

SEQ ID NO: 318560 - protein, 14 aa, Homo sapiens
  CDR3 for beta chain variable domain of TCR clone 159280 (TRBV11-2, TRBJ2-7)
CASSGSGGAGEQYF

SEQ ID NO: 318561 - protein, 12 aa, Homo sapiens
  CDR3 for alpha chain variable domain of TCR clone 159281 (TRAV30, TRAJ20)
CGTESNDYKLRF

SEQ ID NO: 318562 - protein, 15 aa, Homo sapiens
  CDR3 for beta chain variable domain of TCR clone 159281 (TRBV20-1, TRBJ2-7)
CSARDRVSGMDEQYF

SEQ ID NO: 318563 - protein, 12 aa, Homo sapiens
  CDR3 for alpha chain variable domain of TCR clone 159282 (TRAV3, TRAJ26)
CAVRDYGQNFVF

SEQ ID NO: 318564 - protein, 17 aa, Homo sapiens
  CDR3 for beta chain variable domain of TCR clone 159282 (TRBV19, TRBJ1-5)
CASSRDRILSRFQPQHF

SEQ ID NO: 318565 - protein, 15 aa, Homo sapiens
  CDR3 for alpha chain variable domain of TCR clone 159283 (TRAV21, TRAJ32)
CAAAPYGGATNKLIF

SEQ ID NO: 318566 - protein, 17 aa, Homo sapiens
  CDR3 for beta chain variable domain of TCR clone 159283 (TRBV18, TRBJ2-3)
CASSPFGEGGFTDTQYF

SEQ ID NO: 318567 - protein, 11 aa, Homo sapiens
  CDR3 for alpha chain variable domain of TCR clone 159284 (TRAV13-2, TRAJ20)
CAGSNDYKLSF

SEQ ID NO: 318568 - protein, 14 aa, Homo sapiens
  CDR3 for beta chain variable domain of TCR clone 159284 (TRBV15, TRBJ2-5)
CATSGDRGQETQYF

SEQ ID NO: 318569 - protein, 16 aa, Homo sapiens
  CDR3 for alpha chain variable domain of TCR clone 159285 (TRAV30, TRAJ24)
CGTEIVDADSCGKFQL

SEQ ID NO: 318570 - protein, 13 aa, Homo sapiens
  CDR3 for beta chain variable domain of TCR clone 159285 (TRBV7-2, TRBJ1-4)
CASSLAGLEKLFF

SEQ ID NO: 318571 - protein, 23 aa, Homo sapiens
  CDR3 for alpha chain variable domain of TCR clone 159286 (TRAV26-1, TRAJ38)
CIADNAGNNHIQNPDPAVYQLRD

SEQ ID NO: 318572 - protein, 13 aa, Homo sapiens
  CDR3 for beta chain variable domain of TCR clone 159286 (TRBV20-1, TRBJ1-1)
VSARGGGNTEAFF

SEQ ID NO: 318573 - protein, 13 aa, Homo sapiens
  CDR3 for alpha chain variable domain of TCR clone 159287 (TRAV23/DV6, TRAJ52)
CAATLLSAGGTSY

SEQ ID NO: 318574 - protein, 12 aa, Homo sapiens
  CDR3 for beta chain variable domain of TCR clone 159287 (TRBV5-1, TRBJ1-2)
CASSQDTYGYTF

SEQ ID NO: 318575 - protein, 15 aa, Homo sapiens
  CDR3 for alpha chain variable domain of TCR clone 159288 (TRAV12-3, TRAJ47)
CAMSALVEYGNKLVF

SEQ ID NO: 318576 - protein, 18 aa, Homo sapiens
  CDR3 for beta chain variable domain of TCR clone 159288 (TRBV11-2, TRBJ2-3)
CASSLGGASRGAPNTQYF

SEQ ID NO: 318577 - protein, 13 aa, Homo sapiens
  CDR3 for alpha chain variable domain of TCR clone 159289 (TRAV21, TRAJ27)
CAARPGNACKSTF

SEQ ID NO: 318578 - protein, 13 aa, Homo sapiens
  CDR3 for beta chain variable domain of TCR clone 159289 (TRBV7-3, TRBJ2-7)
CASSQAGWYEQYF

SEQ ID NO: 318579 - protein, 12 aa, Homo sapiens
  CDR3 for alpha chain variable domain of TCR clone 159290 (TRAV23/DV6, TRAJ30)
CAASKGDDKIIF

SEQ ID NO: 318580 - protein, 15 aa, Homo sapiens
  CDR3 for beta chain variable domain of TCR clone 159290 (TRBV19, TRBJ1-1)
CASTSGQIQNTEAFF

SEQ ID NO: 318581 - protein, 12 aa, Homo sapiens
  CDR3 for alpha chain variable domain of TCR clone 159291 (TRAV13-1, TRAJ11)
CAADSGYSTLTF

SEQ ID NO: 318582 - protein, 14 aa, Homo sapiens
  CDR3 for beta chain variable domain of TCR clone 159291 (TRBV18, TRBJ2-5)
CASSPGVSQETQYF

SEQ ID NO: 318583 - protein, 14 aa, Homo sapiens
  CDR3 for alpha chain variable domain of TCR clone 159292 (TRAV1-2, TRAJ16)
CAVNRFSDGKKLLF

SEQ ID NO: 318584 - protein, 14 aa, Homo sapiens
  CDR3 for beta chain variable domain of TCR clone 159292 (TRBV13, TRBJ2-5)
CACSLGRGQETQYF

SEQ ID NO: 318585 - protein, 13 aa, Homo sapiens
  CDR3 for alpha chain variable domain of TCR clone 159293 (TRAV35, TRAJ58)
CAGLETSSSRLNF

SEQ ID NO: 318586 - protein, 15 aa, Homo sapiens
  CDR3 for beta chain variable domain of TCR clone 159293 (TRBV20-1, TRBJ2-1)
CSARFSAGGLNEQFF

SEQ ID NO: 318587 - protein, 12 aa, Homo sapiens
  CDR3 for alpha chain variable domain of TCR clone 159294 (TRAV12-1, TRAJ34)
CVLTFNTDKLIF

SEQ ID NO: 318588 - protein, 14 aa, Homo sapiens
  CDR3 for beta chain variable domain of TCR clone 159294 (TRBV19, TRBJ1-1)
CASLRTGLNTEAFF

SEQ ID NO: 318589 - protein, 12 aa, Homo sapiens
  CDR3 for alpha chain variable domain of TCR clone 159295 (TRAV29/DV5, TRAJ49)
CAATDTGNQFYF

SEQ ID NO: 318590 - protein, 17 aa, Homo sapiens
  CDR3 for beta chain variable domain of TCR clone 159295 (TRBV11-3, TRBJ2-1)
CASSLYPPGVEYNEQFF

SEQ ID NO: 318591 - protein, 14 aa, Homo sapiens
  CDR3 for alpha chain variable domain of TCR clone 159296 (TRAV1-1, TRAJ13)
CASPNSGGYQKVAF

SEQ ID NO: 318592 - protein, 16 aa, Homo sapiens
  CDR3 for beta chain variable domain of TCR clone 159296 (TRBV3-1, TRBJ2-2)
CASSPWTSGNTGELFF

SEQ ID NO: 318593 - protein, 17 aa, Homo sapiens
  CDR3 for alpha chain variable domain of TCR clone 159297 (TRAV38-2/DV8, TRAJ45)
CAYRSRYSGGGADGLTF

SEQ ID NO: 318594 - protein, 15 aa, Homo sapiens
  CDR3 for beta chain variable domain of TCR clone 159297 (TRBV19, TRBJ2-1)
FASIKGRGPYNEQFF

SEQ ID NO: 318595 - protein, 14 aa, Homo sapiens
  CDR3 for alpha chain variable domain of TCR clone 159298 (TRAV26-1, TRAJ15)
CIVRPARAGTALIF

SEQ ID NO: 318596 - protein, 12 aa, Homo sapiens
  CDR3 for beta chain variable domain of TCR clone 159298 (TRBV11-2, TRBJ2-2)
CASSLPTGELFF

SEQ ID NO: 318597 - protein, 16 aa, Homo sapiens
  CDR3 for alpha chain variable domain of TCR clone 159299 (TRAV30, TRAJ24)
CGTEIVDADSGGKFQF

SEQ ID NO: 318598 - protein, 14 aa, Homo sapiens
  CDR3 for beta chain variable domain of TCR clone 159299 (TRBV12-5, TRBJ2-5)
CASGSRTHQATQYF

SEQ ID NO: 318599 - protein, 15 aa, Homo sapiens
  CDR3 for alpha chain variable domain of TCR clone 159300 (TRAV27, TRAJ45)
CAPVDSGGGAAGLTF

SEQ ID NO: 318600 - protein, 15 aa, Homo sapiens
  CDR3 for beta chain variable domain of TCR clone 159300 (TRBV23-1, TRBJ1-5)
CASSQSRGQGWGAYI

SEQ ID NO: 318601 - protein, 23 aa, Homo sapiens
  CDR3 for alpha chain variable domain of TCR clone 159301 (TRAV12-2, TRAJ36)
SLLIRDSQPSDSATLERANNLFF

SEQ ID NO: 318602 - protein, 14 aa, Homo sapiens
  CDR3 for beta chain variable domain of TCR clone 159301 (TRBV5-1, TRBJ2-7)
CASSLTGSGYEQYF

SEQ ID NO: 318603 - protein, 13 aa, Homo sapiens
  CDR3 for alpha chain variable domain of TCR clone 159302 (TRAV1-1, TRAJ13)
CAVNSGGYQKVTF

SEQ ID NO: 318604 - protein, 12 aa, Homo sapiens
  CDR3 for beta chain variable domain of TCR clone 159302 (TRBV28, TRBJ2-1)
CASSVQINEQIF

SEQ ID NO: 318605 - protein, 14 aa, Homo sapiens
  CDR3 for alpha chain variable domain of TCR clone 159303 (TRAV30, TRAJ33)
CGTVAPRSNYQLIW

SEQ ID NO: 318606 - protein, 18 aa, Homo sapiens
  CDR3 for beta chain variable domain of TCR clone 159303 (TRBV11-2, TRBJ2-3)
CASSLGGASRGAHNTQYF

SEQ ID NO: 318607 - protein, 11 aa, Homo sapiens
  CDR3 for alpha chain variable domain of TCR clone 159304 (TRAV2, TRAJ13)
CASGGYQKVTF

SEQ ID NO: 318608 - protein, 16 aa, Homo sapiens
  CDR3 for beta chain variable domain of TCR clone 159304 (TRBV6-1, TRBJ2-5)
CASSEALGRGAETQYF

SEQ ID NO: 318609 - protein, 15 aa, Homo sapiens
  CDR3 for alpha chain variable domain of TCR clone 159305 (TRAV8-2, TRAJ15)
CVVSDRYQAGTALIF

SEQ ID NO: 318610 - protein, 13 aa, Homo sapiens
  CDR3 for beta chain variable domain of TCR clone 159305 (TRBV20-1, TRBJ1-1)
CSAPDRRNTEAFC

SEQ ID NO: 318611 - protein, 15 aa, Homo sapiens
  CDR3 for alpha chain variable domain of TCR clone 159306 (TRAV2, TRAJ22)
CAVRSRGGSARQLTF

SEQ ID NO: 318612 - protein, 11 aa, Homo sapiens
  CDR3 for beta chain variable domain of TCR clone 159306 (TRBV27, TRBJ2-3)
CASSLGDTQYF

SEQ ID NO: 318613 - protein, 10 aa, Homo sapiens
  CDR3 for alpha chain variable domain of TCR clone 159307 (TRAV5, TRAJ34)
CAEDTDKLIF

SEQ ID NO: 318614 - protein, 11 aa, Homo sapiens
  CDR3 for beta chain variable domain of TCR clone 159307 (TRBV10-3, TRBJ2-7)
CAISEGLEQYF

SEQ ID NO: 318615 - protein, 14 aa, Homo sapiens
  CDR3 for alpha chain variable domain of TCR clone 159308 (TRAV16, TRAJ17)
CALSGRAAGNKLTF

SEQ ID NO: 318616 - protein, 13 aa, Homo sapiens
  CDR3 for beta chain variable domain of TCR clone 159308 (TRBV28, TRBJ2-5)
CASSFAGGETQYF

SEQ ID NO: 318617 - protein, 11 aa, Homo sapiens
  CDR3 for alpha chain variable domain of TCR clone 159309 (TRAV16, TRAJ29)
WAPSGNTPLVL

SEQ ID NO: 318618 - protein, 15 aa, Homo sapiens
  CDR3 for beta chain variable domain of TCR clone 159309 (TRBV5-7, TRBJ2-7)
CASSPYLEGSYEQYF

SEQ ID NO: 318619 - protein, 12 aa, Homo sapiens
  CDR3 for alpha chain variable domain of TCR clone 159310 (TRAV12-1, TRAJ40)
WVVYSGTYKYIF

SEQ ID NO: 318620 - protein, 17 aa, Homo sapiens
  CDR3 for beta chain variable domain of TCR clone 159310 (TRBV11-3, TRBJ1-5)
CASSPLTGLRGNQPQHF

SEQ ID NO: 318621 - protein, 12 aa, Homo sapiens
  CDR3 for alpha chain variable domain of TCR clone 159311 (TRAV10, TRAJ31)
CMVRAHRARLMF

SEQ ID NO: 318622 - protein, 11 aa, Homo sapiens
  CDR3 for beta chain variable domain of TCR clone 159311 (TRBV12-4, TRBJ2-3)
CASTATDTQYF

SEQ ID NO: 318623 - protein, 11 aa, Homo sapiens
  CDR3 for alpha chain variable domain of TCR clone 159312 (TRAV2, TRAJ13)
CASWGYQKVTF

SEQ ID NO: 318624 - protein, 17 aa, Homo sapiens
  CDR3 for beta chain variable domain of TCR clone 159312 (TRBV28, TRBJ2-5)
CASSTPEGDALQETQYF

SEQ ID NO: 318625 - protein, 15 aa, Homo sapiens
  CDR3 for alpha chain variable domain of TCR clone 159313 (TRAV38-1, TRAJ37)
CAFIHGSGNTGKLIF

SEQ ID NO: 318626 - protein, 14 aa, Homo sapiens
  CDR3 for beta chain variable domain of TCR clone 159313 (TRBV28, TRBJ2-1)
CASSLNGRNNEQFF

SEQ ID NO: 318627 - protein, 16 aa, Homo sapiens
  CDR3 for alpha chain variable domain of TCR clone 159314 (TRAV1-2, TRAJ10)
CAVRGVLTGGGNKLTF

SEQ ID NO: 318628 - protein, 12 aa, Homo sapiens
  CDR3 for beta chain variable domain of TCR clone 159314 (TRBV20-1, TRBJ1-1)
QCSTWGGTEAFF

SEQ ID NO: 318629 - protein, 14 aa, Homo sapiens
  CDR3 for alpha chain variable domain of TCR clone 159315 (TRAV1-2, TRAJ8)
CAVREDTGFQKLVF

SEQ ID NO: 318630 - protein, 20 aa, Homo sapiens
  CDR3 for beta chain variable domain of TCR clone 159315 (TRBV7-8, TRBJ2-2)
CASSRLFPGPTIHITGELFF

SEQ ID NO: 318631 - protein, 12 aa, Homo sapiens
  CDR3 for alpha chain variable domain of TCR clone 159316 (TRAV1-1, TRAJ43)
CAPRVSSNDMRF

SEQ ID NO: 318632 - protein, 16 aa, Homo sapiens
  CDR3 for beta chain variable domain of TCR clone 159316 (TRBV4-2, TRBJ2-5)
CASSQELVGSQETQYF

SEQ ID NO: 318633 - protein, 12 aa, Homo sapiens
  CDR3 for alpha chain variable domain of TCR clone 159317 (TRAV12-3, TRAJ17)
CAMTLTGNKLTF

SEQ ID NO: 318634 - protein, 13 aa, Homo sapiens
  CDR3 for beta chain variable domain of TCR clone 159317 (TRBV13, TRBJ2-1)
CASILGGRGEQFF

SEQ ID NO: 318635 - protein, 16 aa, Homo sapiens
  CDR3 for alpha chain variable domain of TCR clone 159318 (TRAV16, TRAJ21)
CACGWATTSTNFTLDM

SEQ ID NO: 318636 - protein, 15 aa, Homo sapiens
  CDR3 for beta chain variable domain of TCR clone 159318 (TRBV19, TRBJ2-1)
CASSIQATSYNEQFF

SEQ ID NO: 318637 - protein, 12 aa, Homo sapiens
  CDR3 for alpha chain variable domain of TCR clone 159319 (TRAV12-3, TRAJ17)
CAMTLTGNKLTF

SEQ ID NO: 318638 - protein, 13 aa, Homo sapiens
  CDR3 for beta chain variable domain of TCR clone 159319 (TRBV20-1, TRBJ1-1)
CSAPLGGGTEASF

SEQ ID NO: 318639 - protein, 11 aa, Homo sapiens
  CDR3 for alpha chain variable domain of TCR clone 159320 (TRAV1-2, TRAJ11)
CAVRGYSTLTF

SEQ ID NO: 318640 - protein, 12 aa, Homo sapiens
  CDR3 for beta chain variable domain of TCR clone 159320 (TRBV16, TRBJ2-2)
CASSQSVGELFF

SEQ ID NO: 318641 - protein, 13 aa, Homo sapiens
  CDR3 for alpha chain variable domain of TCR clone 159321 (TRAV8-3, TRAJ43)
CAVGPDNNNDMRF

SEQ ID NO: 318642 - protein, 12 aa, Homo sapiens
  CDR3 for beta chain variable domain of TCR clone 159321 (TRBV11-2, TRBJ2-2)
CASSLGGGELFF

SEQ ID NO: 318643 - protein, 12 aa, Homo sapiens
  CDR3 for alpha chain variable domain of TCR clone 159322 (TRAV22, TRAJ29)
CAPPSGNTPLVF

SEQ ID NO: 318644 - protein, 17 aa, Homo sapiens
  CDR3 for beta chain variable domain of TCR clone 159322 (TRBV7-8, TRBJ1-2)
CASSLRPLQGHLYGYTF

SEQ ID NO: 318645 - protein, 14 aa, Homo sapiens
  CDR3 for alpha chain variable domain of TCR clone 159323 (TRAV26-1, TRAJ48)
CIVRVGFVNEKLTF

SEQ ID NO: 318646 - protein, 13 aa, Homo sapiens
  CDR3 for beta chain variable domain of TCR clone 159323 (TRBV11-3, TRBJ2-3)
CASSHDTKDTQYF

SEQ ID NO: 318647 - protein, 17 aa, Homo sapiens
  CDR3 for alpha chain variable domain of TCR clone 159324 (TRAV3, TRAJ6)
CAVSDCPRAGGSYIPTF

SEQ ID NO: 318648 - protein, 15 aa, Homo sapiens
  CDR3 for beta chain variable domain of TCR clone 159324 (TRBV4-1, TRBJ1-4)
CASSDTGGTNEKLFF

SEQ ID NO: 318649 - protein, 12 aa, Homo sapiens
  CDR3 for alpha chain variable domain of TCR clone 159325 (TRAV26-1, TRAJ36)
CIVRVRADNLFF

SEQ ID NO: 318650 - protein, 15 aa, Homo sapiens
  CDR3 for beta chain variable domain of TCR clone 159325 (TRBV7-3, TRBJ2-1)
CASSLGQGPFGEQFF

SEQ ID NO: 318651 - protein, 11 aa, Homo sapiens
  CDR3 for alpha chain variable domain of TCR clone 159326 (TRAV1-2, TRAJ20)
CAVANDYKLSF

SEQ ID NO: 318652 - protein, 14 aa, Homo sapiens
  CDR3 for beta chain variable domain of TCR clone 159326 (TRBV7-6, TRBJ2-3)
CASSLGTVTDTQYF

SEQ ID NO: 318653 - protein, 13 aa, Homo sapiens
  CDR3 for alpha chain variable domain of TCR clone 159327 (TRAV13-1, TRAJ49)
CAAMLYTGNQFYF

SEQ ID NO: 318654 - protein, 15 aa, Homo sapiens
  CDR3 for beta chain variable domain of TCR clone 159327 (TRBV4-2, TRBJ2-5)
CASSLSGQGEETQYF

SEQ ID NO: 318655 - protein, 11 aa, Homo sapiens
  CDR3 for alpha chain variable domain of TCR clone 159328 (TRAV12-3, TRAJ27)
CAMANAGKSTF

SEQ ID NO: 318656 - protein, 13 aa, Homo sapiens
  CDR3 for beta chain variable domain of TCR clone 159328 (TRBV20-1, TRBJ1-1)
CSARVGGNPEAFF

SEQ ID NO: 318657 - protein, 13 aa, Homo sapiens
  CDR3 for alpha chain variable domain of TCR clone 159329 (TRAV12-3, TRAJ33)
CAMSVNSNYQLIW

SEQ ID NO: 318658 - protein, 15 aa, Homo sapiens
  CDR3 for beta chain variable domain of TCR clone 159329 (TRBV7-9, TRBJ1-4)
CASSRTGGFNGKLFF

SEQ ID NO: 318659 - protein, 12 aa, Homo sapiens
  CDR3 for alpha chain variable domain of TCR clone 159330 (TRAV21, TRAJ13)
PGPSGCYQKVTF

SEQ ID NO: 318660 - protein, 15 aa, Homo sapiens
  CDR3 for beta chain variable domain of TCR clone 159330 (TRBV20-1, TRBJ2-7)
CSARDRVSGMDEQYF

SEQ ID NO: 318661 - protein, 17 aa, Homo sapiens
  CDR3 for alpha chain variable domain of TCR clone 159331 (TRAV1-1, TRAJ28)
CLLLLRYLWAGSYQLTF

SEQ ID NO: 318662 - protein, 17 aa, Homo sapiens
  CDR3 for beta chain variable domain of TCR clone 159331 (TRBV18, TRBJ2-2)
CASSQRSSGQGPGELFF

SEQ ID NO: 318663 - protein, 16 aa, Homo sapiens
  CDR3 for alpha chain variable domain of TCR clone 159332 (TRAV30, TRAJ24)
CGTEIVDADSWGKFQV

SEQ ID NO: 318664 - protein, 15 aa, Homo sapiens
  CDR3 for beta chain variable domain of TCR clone 159332 (TRBV12-4, TRBJ2-2)
CASSPNDSGTGELFF

SEQ ID NO: 318665 - protein, 13 aa, Homo sapiens
  CDR3 for alpha chain variable domain of TCR clone 159333 (TRAV38-1, TRAJ42)
GARGGGSQGNPIF

SEQ ID NO: 318666 - protein, 10 aa, Homo sapiens
  CDR3 for beta chain variable domain of TCR clone 159333 (TRBV2, TRBJ2-5)
CASSAATQYF

SEQ ID NO: 318667 - protein, 13 aa, Homo sapiens
  CDR3 for alpha chain variable domain of TCR clone 159334 (TRAV21, TRAJ37)
CAVSSGTTGKLIF

SEQ ID NO: 318668 - protein, 17 aa, Homo sapiens
  CDR3 for beta chain variable domain of TCR clone 159334 (TRBV5-1, TRBJ2-5)
CASSLLGLAANQETQYF

SEQ ID NO: 318669 - protein, 17 aa, Homo sapiens
  CDR3 for alpha chain variable domain of TCR clone 159335 (TRAV36/DV7, TRAJ52)
CAVAQRAGGTSYGKLQF

SEQ ID NO: 318670 - protein, 14 aa, Homo sapiens
  CDR3 for beta chain variable domain of TCR clone 159335 (TRBV20-1, TRBJ1-1)
CSAQTRIGGTEAFF

SEQ ID NO: 318671 - protein, 16 aa, Homo sapiens
  CDR3 for alpha chain variable domain of TCR clone 159336 (TRAV8-3, TRAJ44)
YAVGASNTGTASKLTF

SEQ ID NO: 318672 - protein, 15 aa, Homo sapiens
  CDR3 for beta chain variable domain of TCR clone 159336 (TRBV27, TRBJ1-5)
CASTFNRGSNQPQHF

SEQ ID NO: 318673 - protein, 12 aa, Homo sapiens
  CDR3 for alpha chain variable domain of TCR clone 159337 (TRAV16, TRAJ26)
CALRSYGQNFVF

SEQ ID NO: 318674 - protein, 14 aa, Homo sapiens
  CDR3 for beta chain variable domain of TCR clone 159337 (TRBV10-3, TRBJ2-1)
CATSSDLAYNEQFS

SEQ ID NO: 318675 - protein, 11 aa, Homo sapiens
  CDR3 for alpha chain variable domain of TCR clone 159338 (TRAV8-3, TRAJ15)
CAVGPGTALIF

SEQ ID NO: 318676 - protein, 15 aa, Homo sapiens
  CDR3 for beta chain variable domain of TCR clone 159338 (TRBV7-9, TRBJ2-7)
CASSLALADAYEQYF

SEQ ID NO: 318677 - protein, 18 aa, Homo sapiens
  CDR3 for alpha chain variable domain of TCR clone 159339 (TRAV9-2, TRAJ52)
CALSRHNAGGTSYGKLTF

SEQ ID NO: 318678 - protein, 18 aa, Homo sapiens
  CDR3 for beta chain variable domain of TCR clone 159339 (TRBV11-2, TRBJ2-3)
CASSLGGASRGAPNTQYF

SEQ ID NO: 318679 - protein, 13 aa, Homo sapiens
  CDR3 for alpha chain variable domain of TCR clone 159340 (TRAV8-6, TRAJ49)
CAVITNTGNKFYF

SEQ ID NO: 318680 - protein, 14 aa, Homo sapiens
  CDR3 for beta chain variable domain of TCR clone 159340 (TRBV27, TRBJ2-2)
CASRPGVNTGELFF

SEQ ID NO: 318681 - protein, 12 aa, Homo sapiens
  CDR3 for alpha chain variable domain of TCR clone 159341 (TRAV3, TRAJ43)
CAVRDPKNDMRF

SEQ ID NO: 318682 - protein, 15 aa, Homo sapiens
  CDR3 for beta chain variable domain of TCR clone 159341 (TRBV6-5, TRBJ2-1)
CASSYDAGAGNEQFF

SEQ ID NO: 318683 - protein, 14 aa, Homo sapiens
  CDR3 for alpha chain variable domain of TCR clone 159342 (TRAV38-2/DV8, TRAJ30)
CAYMYGLGGDKIIF

SEQ ID NO: 318684 - protein, 15 aa, Homo sapiens
  CDR3 for beta chain variable domain of TCR clone 159342 (TRBV7-9, TRBJ2-2)
CASRPADRDTGELFF

SEQ ID NO: 318685 - protein, 14 aa, Homo sapiens
  CDR3 for alpha chain variable domain of TCR clone 159343 (TRAV12-2, TRAJ5)
CAVNRSTGRRALTF

SEQ ID NO: 318686 - protein, 13 aa, Homo sapiens
  CDR3 for beta chain variable domain of TCR clone 159343 (TRBV11-3, TRBJ2-3)
CASSHDTKDTQYF

SEQ ID NO: 318687 - protein, 13 aa, Homo sapiens
  CDR3 for alpha chain variable domain of TCR clone 159344 (TRAV27, TRAJ8)
RAGGPTGFQKLVF

SEQ ID NO: 318688 - protein, 15 aa, Homo sapiens
  CDR3 for beta chain variable domain of TCR clone 159344 (TRBV6-1, TRBJ2-7)
CASSESMGDFYEQYF

SEQ ID NO: 318689 - protein, 12 aa, Homo sapiens
  CDR3 for alpha chain variable domain of TCR clone 159345 (TRAV22, TRAJ22)
CAPWGSARQLTF

SEQ ID NO: 318690 - protein, 13 aa, Homo sapiens
  CDR3 for beta chain variable domain of TCR clone 159345 (TRBV15, TRBJ1-6)
CATSGGLNSPLHF

SEQ ID NO: 318691 - protein, 14 aa, Homo sapiens
  CDR3 for alpha chain variable domain of TCR clone 159346 (TRAV3, TRAJ37)
CAVKESGNTGKLIF

SEQ ID NO: 318692 - protein, 14 aa, Homo sapiens
  CDR3 for beta chain variable domain of TCR clone 159346 (TRBV11-2, TRBJ2-7)
CASSLGAGAYEQYF

SEQ ID NO: 318693 - protein, 14 aa, Homo sapiens
  CDR3 for alpha chain variable domain of TCR clone 159347 (TRAV12-2, TRAJ17)
CAGLFKAAGNKLTF

SEQ ID NO: 318694 - protein, 14 aa, Homo sapiens
  CDR3 for beta chain variable domain of TCR clone 159347 (TRBV6-1, TRBJ1-3)
CASVQGGGGNTIYF

SEQ ID NO: 318695 - protein, 12 aa, Homo sapiens
  CDR3 for alpha chain variable domain of TCR clone 159348 (TRAV21, TRAJ33)
CAKMDSNYQLIW

SEQ ID NO: 318696 - protein, 14 aa, Homo sapiens
  CDR3 for beta chain variable domain of TCR clone 159348 (TRBV7-2, TRBJ2-7)
CASSPKTSLYEQYF

SEQ ID NO: 318697 - protein, 12 aa, Homo sapiens
  CDR3 for alpha chain variable domain of TCR clone 159349 (TRAV36/DV7, TRAJ26)
CAVDNYGQNFVF

SEQ ID NO: 318698 - protein, 16 aa, Homo sapiens
  CDR3 for beta chain variable domain of TCR clone 159349 (TRBV7-3, TRBJ2-2)
CASSLTGTGTTGELFV

SEQ ID NO: 318699 - protein, 16 aa, Homo sapiens
  CDR3 for alpha chain variable domain of TCR clone 159350 (TRAV12-2, TRAJ50)
CAVGNATKTSYDKVIF

SEQ ID NO: 318700 - protein, 12 aa, Homo sapiens
  CDR3 for beta chain variable domain of TCR clone 159350 (TRBV12-4, TRBJ1-5)
CASSLGRQPQHF

SEQ ID NO: 318701 - protein, 12 aa, Homo sapiens
  CDR3 for alpha chain variable domain of TCR clone 159351 (TRAV3, TRAJ20)
CAVRDGDYKLSF

SEQ ID NO: 318702 - protein, 13 aa, Homo sapiens
  CDR3 for beta chain variable domain of TCR clone 159351 (TRBV9, TRBJ2-1)
CASSVGQGGEQCF

SEQ ID NO: 318703 - protein, 14 aa, Homo sapiens
  CDR3 for alpha chain variable domain of TCR clone 159352 (TRAV22, TRAJ28)
CAVYSGAGSYQLTF

SEQ ID NO: 318704 - protein, 12 aa, Homo sapiens
  CDR3 for beta chain variable domain of TCR clone 159352 (TRBV11-2, TRBJ2-2)
CASSLGGGELFF

SEQ ID NO: 318705 - protein, 13 aa, Homo sapiens
  CDR3 for alpha chain variable domain of TCR clone 159353 (TRAV3, TRAJ27)
CAVRPLGAGKSTF

SEQ ID NO: 318706 - protein, 15 aa, Homo sapiens
  CDR3 for beta chain variable domain of TCR clone 159353 (TRBV9, TRBJ1-6)
CASSVAGTGDSPLHV

SEQ ID NO: 318707 - protein, 13 aa, Homo sapiens
  CDR3 for alpha chain variable domain of TCR clone 159354 (TRAV12-2, TRAJ52)
CSVSGTSYGKLTF

SEQ ID NO: 318708 - protein, 17 aa, Homo sapiens
  CDR3 for beta chain variable domain of TCR clone 159354 (TRBV11-2, TRBJ2-1)
CASSLYPPGVEYNEQFF

SEQ ID NO: 318709 - protein, 18 aa, Homo sapiens
  CDR3 for alpha chain variable domain of TCR clone 159355 (TRAV29/DV5, TRAJ26)
CSVLLCIKRKPEGQNFVF

SEQ ID NO: 318710 - protein, 17 aa, Homo sapiens
  CDR3 for beta chain variable domain of TCR clone 159355 (TRBV20-1, TRBJ2-2)
CSASGSGQGGLTGELFF

SEQ ID NO: 318711 - protein, 13 aa, Homo sapiens
  CDR3 for alpha chain variable domain of TCR clone 159356 (TRAV13-2, TRAJ53)
CAGNMGSNYKLTF

SEQ ID NO: 318712 - protein, 13 aa, Homo sapiens
  CDR3 for beta chain variable domain of TCR clone 159356 (TRBV4-1, TRBJ2-2)
CASGQENTWELFF

SEQ ID NO: 318713 - protein, 16 aa, Homo sapiens
  CDR3 for alpha chain variable domain of TCR clone 159357 (TRAV8-2, TRAJ7)
CVVCEGPYYGNNRLAC

SEQ ID NO: 318714 - protein, 13 aa, Homo sapiens
  CDR3 for beta chain variable domain of TCR clone 159357 (TRBV19, TRBJ2-1)
CASSMYRVNEQFF

SEQ ID NO: 318715 - protein, 17 aa, Homo sapiens
  CDR3 for alpha chain variable domain of TCR clone 159358 (TRAV3, TRAJ6)
CALRDGPRAGGSYIPTF

SEQ ID NO: 318716 - protein, 12 aa, Homo sapiens
  CDR3 for beta chain variable domain of TCR clone 159358 (TRBV11-2, TRBJ2-1)
CASSPGNNEQFF

SEQ ID NO: 318717 - protein, 12 aa, Homo sapiens
  CDR3 for alpha chain variable domain of TCR clone 159359 (TRAV35, TRAJ49)
CAGWNTGNQFYF

SEQ ID NO: 318718 - protein, 16 aa, Homo sapiens
  CDR3 for beta chain variable domain of TCR clone 159359 (TRBV5-1, TRBJ2-2)
CASSTWDTTNTGELFF

SEQ ID NO: 318719 - protein, 14 aa, Homo sapiens
  CDR3 for alpha chain variable domain of TCR clone 159360 (TRAV12-1, TRAJ26)
CVGKGSNYGQNFVF

SEQ ID NO: 318720 - protein, 16 aa, Homo sapiens
  CDR3 for beta chain variable domain of TCR clone 159360 (TRBV15, TRBJ1-2)
CATSRGPRTGGGGYTF

SEQ ID NO: 318721 - protein, 16 aa, Homo sapiens
  CDR3 for alpha chain variable domain of TCR clone 159361 (TRAV21, TRAJ37)
CAVRPRGSSSTGKPIF

SEQ ID NO: 318722 - protein, 13 aa, Homo sapiens
  CDR3 for beta chain variable domain of TCR clone 159361 (TRBV7-9, TRBJ2-5)
CASLSPGQETQYF

SEQ ID NO: 318723 - protein, 11 aa, Homo sapiens
  CDR3 for alpha chain variable domain of TCR clone 159362 (TRAV35, TRAJ34)
CWARNTDKLIF

SEQ ID NO: 318724 - protein, 14 aa, Homo sapiens
  CDR3 for beta chain variable domain of TCR clone 159362 (TRBV5-1, TRBJ2-7)
CASSRGESLYELYF

SEQ ID NO: 318725 - protein, 12 aa, Homo sapiens
  CDR3 for alpha chain variable domain of TCR clone 159363 (TRAV26-1, TRAJ35)
CIGLSFGNVLNC

SEQ ID NO: 318726 - protein, 17 aa, Homo sapiens
  CDR3 for beta chain variable domain of TCR clone 159363 (TRBV11-3, TRBJ1-5)
CASSPLTGLRGNQPQHF

SEQ ID NO: 318727 - protein, 14 aa, Homo sapiens
  CDR3 for alpha chain variable domain of TCR clone 159364 (TRAV1-2, TRAJ16)
CAVNRFSDGQKLLF

SEQ ID NO: 318728 - protein, 16 aa, Homo sapiens
  CDR3 for beta chain variable domain of TCR clone 159364 (TRBV7-3, TRBJ2-2)
CASSLKRGTLPGELFF

SEQ ID NO: 318729 - protein, 11 aa, Homo sapiens
  CDR3 for alpha chain variable domain of TCR clone 159365 (TRAV26-1, TRAJ37)
CIVRVGSKLIF

SEQ ID NO: 318730 - protein, 13 aa, Homo sapiens
  CDR3 for beta chain variable domain of TCR clone 159365 (TRBV14, TRBJ1-2)
CASSEDRRYGYTF

SEQ ID NO: 318731 - protein, 13 aa, Homo sapiens
  CDR3 for alpha chain variable domain of TCR clone 159366 (TRAV17, TRAJ15)
CATDARAGTALIF

SEQ ID NO: 318732 - protein, 15 aa, Homo sapiens
  CDR3 for beta chain variable domain of TCR clone 159366 (TRBV20-1, TRBJ2-7)
CSARDRVSGMDEHYF

SEQ ID NO: 318733 - protein, 15 aa, Homo sapiens
  CDR3 for alpha chain variable domain of TCR clone 159367 (TRAV21, TRAJ42)
CAVTRYGGSQGNLIF

SEQ ID NO: 318734 - protein, 16 aa, Homo sapiens
  CDR3 for beta chain variable domain of TCR clone 159367 (TRBV7-3, TRBJ2-2)
CASSLKRGTLSGELFF

SEQ ID NO: 318735 - protein, 13 aa, Homo sapiens
  CDR3 for alpha chain variable domain of TCR clone 159368 (TRAV21, TRAJ20)
CAVGLRVDYKPSF

SEQ ID NO: 318736 - protein, 18 aa, Homo sapiens
  CDR3 for beta chain variable domain of TCR clone 159368 (TRBV7-6, TRBJ2-1)
CASSPRTSGMSSYNEQFF

SEQ ID NO: 318737 - protein, 16 aa, Homo sapiens
  CDR3 for alpha chain variable domain of TCR clone 159369 (TRAV3, TRAJ5)
CAVRNLMDTGRRALTF

SEQ ID NO: 318738 - protein, 16 aa, Homo sapiens
  CDR3 for beta chain variable domain of TCR clone 159369 (TRBV4-2, TRBJ2-7)
YASSQEGLANSYEQYF

SEQ ID NO: 318739 - protein, 14 aa, Homo sapiens
  CDR3 for alpha chain variable domain of TCR clone 159370 (TRAV17, TRAJ56)
CATEDTGANSKLTF

SEQ ID NO: 318740 - protein, 16 aa, Homo sapiens
  CDR3 for beta chain variable domain of TCR clone 159370 (TRBV7-8, TRBJ2-1)
CASSLAGTGRYNEQFF

SEQ ID NO: 318741 - protein, 13 aa, Homo sapiens
  CDR3 for alpha chain variable domain of TCR clone 159371 (TRAV12-2, TRAJ42)
CAVKRGSQGNLIF

SEQ ID NO: 318742 - protein, 12 aa, Homo sapiens
  CDR3 for beta chain variable domain of TCR clone 159371 (TRBV5-7, TRBJ1-2)
CASSLIQNGYTF

SEQ ID NO: 318743 - protein, 14 aa, Homo sapiens
  CDR3 for alpha chain variable domain of TCR clone 159372 (TRAV1-2, TRAJ16)
CAVNRFSDGQQLLF

SEQ ID NO: 318744 - protein, 15 aa, Homo sapiens
  CDR3 for beta chain variable domain of TCR clone 159372 (TRBV7-9, TRBJ1-6)
CASSFPGRGNSPLHF

SEQ ID NO: 318745 - protein, 18 aa, Homo sapiens
  CDR3 for alpha chain variable domain of TCR clone 159373 (TRAV12-3, TRAJ52)
CAMSVGGAGGTSYGKLTF

SEQ ID NO: 318746 - protein, 13 aa, Homo sapiens
  CDR3 for beta chain variable domain of TCR clone 159373 (TRBV10-3, TRBJ2-7)
CASKLAVNYEQYV

SEQ ID NO: 318747 - protein, 13 aa, Homo sapiens
  CDR3 for alpha chain variable domain of TCR clone 159374 (TRAV13-1, TRAJ5)
CAASETGRRALTF

SEQ ID NO: 318748 - protein, 16 aa, Homo sapiens
  CDR3 for beta chain variable domain of TCR clone 159374 (TRBV3-1, TRBJ2-5)
CASSQDWASGQETQYF

SEQ ID NO: 318749 - protein, 21 aa, Homo sapiens
  CDR3 for alpha chain variable domain of TCR clone 159375 (TRAV26-1, TRAJ17)
CCVLLHRQSSGSKAAGNKLTF

SEQ ID NO: 318750 - protein, 14 aa, Homo sapiens
  CDR3 for beta chain variable domain of TCR clone 159375 (TRBV28, TRBJ1-2)
CASRIQGANYGYIF

SEQ ID NO: 318751 - protein, 15 aa, Homo sapiens
  CDR3 for alpha chain variable domain of TCR clone 159376 (TRAV35, TRAJ20)
CAGQPVGSNDYKLSF

SEQ ID NO: 318752 - protein, 13 aa, Homo sapiens
  CDR3 for beta chain variable domain of TCR clone 159376 (TRBV19, TRBJ2-7)
CASSKTGTHEQYF

SEQ ID NO: 318753 - protein, 13 aa, Homo sapiens
  CDR3 for alpha chain variable domain of TCR clone 159377 (TRAV12-3, TRAJ53)
CAMRGGSNYKLTF

SEQ ID NO: 318754 - protein, 17 aa, Homo sapiens
  CDR3 for beta chain variable domain of TCR clone 159377 (TRBV2, TRBJ2-1)
CTSVPPKLLVMIGEQFF

SEQ ID NO: 318755 - protein, 14 aa, Homo sapiens
  CDR3 for alpha chain variable domain of TCR clone 159378 (TRAV1-2, TRAJ8)
CAVREDTGFQKLVV

SEQ ID NO: 318756 - protein, 15 aa, Homo sapiens
  CDR3 for beta chain variable domain of TCR clone 159378 (TRBV28, TRBJ2-1)
CASSIIAGGRSEQFF

SEQ ID NO: 318757 - protein, 14 aa, Homo sapiens
  CDR3 for alpha chain variable domain of TCR clone 159379 (TRAV12-1, TRAJ17)
CVVNYKAAGNKLTF

SEQ ID NO: 318758 - protein, 16 aa, Homo sapiens
  CDR3 for beta chain variable domain of TCR clone 159379 (TRBV2, TRBJ2-1)
CASSVGGSLSYNEQFF

SEQ ID NO: 318759 - protein, 13 aa, Homo sapiens
  CDR3 for alpha chain variable domain of TCR clone 159380 (TRAV20, TRAJ37)
CAGCSSNTGNLIF

SEQ ID NO: 318760 - protein, 11 aa, Homo sapiens
  CDR3 for beta chain variable domain of TCR clone 159380 (TRBV12-4, TRBJ2-3)
CASAATDTQYF

SEQ ID NO: 318761 - protein, 15 aa, Homo sapiens
  CDR3 for alpha chain variable domain of TCR clone 159381 (TRAV12-3, TRAJ13)
CAMGTGGYQKLPLEL

SEQ ID NO: 318762 - protein, 14 aa, Homo sapiens
  CDR3 for beta chain variable domain of TCR clone 159381 (TRBV7-2, TRBJ2-5)
CASSTGGELKTQYF

SEQ ID NO: 318763 - protein, 14 aa, Homo sapiens
  CDR3 for alpha chain variable domain of TCR clone 159382 (TRAV26-1, TRAJ45)
CIEVTGGGADGLTF

SEQ ID NO: 318764 - protein, 19 aa, Homo sapiens
  CDR3 for beta chain variable domain of TCR clone 159382 (TRBV19, TRBJ2-2)
CASTRPGLAGGRVTGELFV

SEQ ID NO: 318765 - protein, 16 aa, Homo sapiens
  CDR3 for alpha chain variable domain of TCR clone 159383 (TRAV27, TRAJ13)
CAGAKSDSRGYQKVTF

SEQ ID NO: 318766 - protein, 15 aa, Homo sapiens
  CDR3 for beta chain variable domain of TCR clone 159383 (TRBV29-1, TRBJ2-1)
CSVGRHALFYNEQLF

SEQ ID NO: 318767 - protein, 16 aa, Homo sapiens
  CDR3 for alpha chain variable domain of TCR clone 159384 (TRAV8-3, TRAJ44)
CAVGTLMTGTASKLTF

SEQ ID NO: 318768 - protein, 15 aa, Homo sapiens
  CDR3 for beta chain variable domain of TCR clone 159384 (TRBV18, TRBJ2-3)
CASSPLAGETDTQYF

SEQ ID NO: 318769 - protein, 14 aa, Homo sapiens
  CDR3 for alpha chain variable domain of TCR clone 159385 (TRAV1-2, TRAJ16)
CAVNRFSDGHKLLF

SEQ ID NO: 318770 - protein, 14 aa, Homo sapiens
  CDR3 for beta chain variable domain of TCR clone 159385 (TRBV7-3, TRBJ1-1)
CASSLKGGNTEAFF

SEQ ID NO: 318771 - protein, 14 aa, Homo sapiens
  CDR3 for alpha chain variable domain of TCR clone 159386 (TRAV26-1, TRAJ39)
CVVRANNAGNMLTF

SEQ ID NO: 318772 - protein, 15 aa, Homo sapiens
  CDR3 for beta chain variable domain of TCR clone 159386 (TRBV28, TRBJ1-2)
CASSLMAGRRDGYTF

SEQ ID NO: 318773 - protein, 14 aa, Homo sapiens
  CDR3 for alpha chain variable domain of TCR clone 159387 (TRAV12-2, TRAJ44)
CAVNPAGTASKLTF

SEQ ID NO: 318774 - protein, 13 aa, Homo sapiens
  CDR3 for beta chain variable domain of TCR clone 159387 (TRBV20-1, TRBJ1-6)
CSAPLGVGSPRHF

SEQ ID NO: 318775 - protein, 13 aa, Homo sapiens
  CDR3 for alpha chain variable domain of TCR clone 159388 (TRAV21, TRAJ3)
CCEPYSSASKIIF

SEQ ID NO: 318776 - protein, 15 aa, Homo sapiens
  CDR3 for beta chain variable domain of TCR clone 159388 (TRBV7-3, TRBJ2-1)
CASSPTGGGEVEQFL

SEQ ID NO: 318777 - protein, 13 aa, Homo sapiens
  CDR3 for alpha chain variable domain of TCR clone 159389 (TRAV12-3, TRAJ33)
CAMSVNSNYQLIW

SEQ ID NO: 318778 - protein, 14 aa, Homo sapiens
  CDR3 for beta chain variable domain of TCR clone 159389 (TRBV7-2, TRBJ2-7)
CASSGLAGRGEQYF

SEQ ID NO: 318779 - protein, 14 aa, Homo sapiens
  CDR3 for alpha chain variable domain of TCR clone 159390 (TRAV1-2, TRAJ8)
CAVREDTGFQQLVF

SEQ ID NO: 318780 - protein, 17 aa, Homo sapiens
  CDR3 for beta chain variable domain of TCR clone 159390 (TRBV20-1, TRBJ2-2)
CSASGSGQGGLTGELFF

SEQ ID NO: 318781 - protein, 11 aa, Homo sapiens
  CDR3 for alpha chain variable domain of TCR clone 159391 (TRAV8-3, TRAJ49)
CAVNTGNQFSF

SEQ ID NO: 318782 - protein, 12 aa, Homo sapiens
  CDR3 for beta chain variable domain of TCR clone 159391 (TRBV11-2, TRBJ2-7)
CASSPPADEQYF

SEQ ID NO: 318783 - protein, 10 aa, Homo sapiens
  CDR3 for alpha chain variable domain of TCR clone 159392 (TRAV13-1, TRAJ43)
CAATLNDMRF

SEQ ID NO: 318784 - protein, 17 aa, Homo sapiens
  CDR3 for beta chain variable domain of TCR clone 159392 (TRBV4-2, TRBJ1-1)
CASTQFGGGSGNTEAFF

SEQ ID NO: 318785 - protein, 13 aa, Homo sapiens
  CDR3 for alpha chain variable domain of TCR clone 159393 (TRAV2, TRAJ40)
CAVVTSGTYNYIF

SEQ ID NO: 318786 - protein, 14 aa, Homo sapiens
  CDR3 for beta chain variable domain of TCR clone 159393 (TRBV19, TRBJ2-1)
CASPTFVLGGEQFF

SEQ ID NO: 318787 - protein, 14 aa, Homo sapiens
  CDR3 for alpha chain variable domain of TCR clone 159394 (TRAV1-2, TRAJ16)
CAVNRFSDVQKLLF

SEQ ID NO: 318788 - protein, 13 aa, Homo sapiens
  CDR3 for beta chain variable domain of TCR clone 159394 (TRBV12-4, TRBJ1-2)
CASSLRQGKGYTF

SEQ ID NO: 318789 - protein, 16 aa, Homo sapiens
  CDR3 for alpha chain variable domain of TCR clone 159395 (TRAV38-1, TRAJ39)
CAFMKHYLGAGNMLTF

SEQ ID NO: 318790 - protein, 14 aa, Homo sapiens
  CDR3 for beta chain variable domain of TCR clone 159395 (TRBV19, TRBJ2-1)
CASPTFVLSGEQFF

SEQ ID NO: 318791 - protein, 14 aa, Homo sapiens
  CDR3 for alpha chain variable domain of TCR clone 159396 (TRAV9-2, TRAJ39)
CALYIYNAGNMLTF

SEQ ID NO: 318792 - protein, 14 aa, Homo sapiens
  CDR3 for beta chain variable domain of TCR clone 159396 (TRBV7-8, TRBJ2-3)
CASSFKSSTDMQYF

SEQ ID NO: 318793 - protein, 15 aa, Homo sapiens
  CDR3 for alpha chain variable domain of TCR clone 159397 (TRAV8-1, TRAJ6)
CTVNTPPGGSYIPTF

SEQ ID NO: 318794 - protein, 14 aa, Homo sapiens
  CDR3 for beta chain variable domain of TCR clone 159397 (TRBV12-4, TRBJ2-1)
CASSLGQGASEQFF

SEQ ID NO: 318795 - protein, 13 aa, Homo sapiens
  CDR3 for alpha chain variable domain of TCR clone 159398 (TRAV29/DV5, TRAJ31)
CAASRNNNARLMF

SEQ ID NO: 318796 - protein, 16 aa, Homo sapiens
  CDR3 for beta chain variable domain of TCR clone 159398 (TRBV5-1, TRBJ2-1)
CASSHGLAGPQNEQFF

SEQ ID NO: 318797 - protein, 12 aa, Homo sapiens
  CDR3 for alpha chain variable domain of TCR clone 159399 (TRAV13-2, TRAJ23)
CAERHRGGKFIF

SEQ ID NO: 318798 - protein, 16 aa, Homo sapiens
  CDR3 for beta chain variable domain of TCR clone 159399 (TRBV19, TRBJ1-1)
CASRPRSEALNTEAFF

SEQ ID NO: 318799 - protein, 17 aa, Homo sapiens
  CDR3 for alpha chain variable domain of TCR clone 159400 (TRAV13-1, TRAJ52)
CAASSGAGGASYGKLTF

SEQ ID NO: 318800 - protein, 15 aa, Homo sapiens
  CDR3 for beta chain variable domain of TCR clone 159400 (TRBV2, TRBJ2-1)
CASSELAGSYNEQFF

SEQ ID NO: 318801 - protein, 14 aa, Homo sapiens
  CDR3 for alpha chain variable domain of TCR clone 159401 (TRAV8-3, TRAJ4)
CAVGAAGGYNKLIF

SEQ ID NO: 318802 - protein, 15 aa, Homo sapiens
  CDR3 for beta chain variable domain of TCR clone 159401 (TRBV12-4, TRBJ1-4)
CASSVRDSPIEKLLF

SEQ ID NO: 318803 - protein, 13 aa, Homo sapiens
  CDR3 for alpha chain variable domain of TCR clone 159402 (TRAV27, TRAJ49)
CAPRPYTGSQFYF

SEQ ID NO: 318804 - protein, 16 aa, Homo sapiens
  CDR3 for beta chain variable domain of TCR clone 159402 (TRBV4-1, TRBJ1-2)
CASSQDAGQVLYGYTF

SEQ ID NO: 318805 - protein, 13 aa, Homo sapiens
  CDR3 for alpha chain variable domain of TCR clone 159403 (TRAV27, TRAJ3)
ASLRGSSASKIIF

SEQ ID NO: 318806 - protein, 16 aa, Homo sapiens
  CDR3 for beta chain variable domain of TCR clone 159403 (TRBV7-2, TRBJ1-2)
CASSRQGGGANYGYTF

SEQ ID NO: 318807 - protein, 11 aa, Homo sapiens
  CDR3 for alpha chain variable domain of TCR clone 159404 (TRAV17, TRAJ31)
CATSNTASLMF

SEQ ID NO: 318808 - protein, 16 aa, Homo sapiens
  CDR3 for beta chain variable domain of TCR clone 159404 (TRBV7-8, TRBJ2-4)
CASSAERTLAKNIQYF

SEQ ID NO: 318809 - protein, 14 aa, Homo sapiens
  CDR3 for alpha chain variable domain of TCR clone 159405 (TRAV12-3, TRAJ10)
SHLPLTGGGNKLTF

SEQ ID NO: 318810 - protein, 12 aa, Homo sapiens
  CDR3 for beta chain variable domain of TCR clone 159405 (TRBV29-1, TRBJ1-1)
CSGATPGVEAFF

SEQ ID NO: 318811 - protein, 16 aa, Homo sapiens
  CDR3 for alpha chain variable domain of TCR clone 159406 (TRAV6, TRAJ43)
CARHKPRFGAGTRLTV

SEQ ID NO: 318812 - protein, 12 aa, Homo sapiens
  CDR3 for beta chain variable domain of TCR clone 159406 (TRBV11-2, TRBJ2-2)
CASSLPTGELFF

SEQ ID NO: 318813 - protein, 17 aa, Homo sapiens
  CDR3 for alpha chain variable domain of TCR clone 159407 (TRAV12-1, TRAJ42)
CVVNMQRKGGSQGNLIS

SEQ ID NO: 318814 - protein, 17 aa, Homo sapiens
  CDR3 for beta chain variable domain of TCR clone 159407 (TRBV18, TRBJ1-5)
CASSPTMGQGTNQPQHF

SEQ ID NO: 318815 - protein, 14 aa, Homo sapiens
  CDR3 for alpha chain variable domain of TCR clone 159408 (TRAV14/DV4, TRAJ11)
CAMSSNSGYSTLTF

SEQ ID NO: 318816 - protein, 11 aa, Homo sapiens
  CDR3 for beta chain variable domain of TCR clone 159408 (TRBV7-9, TRBJ2-3)
CDSSGPDTQYF

SEQ ID NO: 318817 - protein, 13 aa, Homo sapiens
  CDR3 for alpha chain variable domain of TCR clone 159409 (TRAV1-2, TRAJ9)
CAALNTGGFKTIF

SEQ ID NO: 318818 - protein, 17 aa, Homo sapiens
  CDR3 for beta chain variable domain of TCR clone 159409 (TRBV7-3, TRBJ2-5)
CASSLGSGRSGSETQYF

SEQ ID NO: 318819 - protein, 12 aa, Homo sapiens
  CDR3 for alpha chain variable domain of TCR clone 159410 (TRAV20, TRAJ34)
CAVNDNTDKLIF

SEQ ID NO: 318820 - protein, 14 aa, Homo sapiens
  CDR3 for beta chain variable domain of TCR clone 159410 (TRBV7-9, TRBJ2-7)
CASSRPGGPYEQYF

SEQ ID NO: 318821 - protein, 17 aa, Homo sapiens
  CDR3 for alpha chain variable domain of TCR clone 159411 (TRAV8-6, TRAJ58)
WAVSSWVGETSGSRLTF

SEQ ID NO: 318822 - protein, 17 aa, Homo sapiens
  CDR3 for beta chain variable domain of TCR clone 159411 (TRBV4-3, TRBJ1-2)
CASSSRLQAGGSVGYTF

SEQ ID NO: 318823 - protein, 14 aa, Homo sapiens
  CDR3 for alpha chain variable domain of TCR clone 159412 (TRAV4, TRAJ30)
CLVGDMNKDDKIIF

SEQ ID NO: 318824 - protein, 16 aa, Homo sapiens
  CDR3 for beta chain variable domain of TCR clone 159412 (TRBV20-1, TRBJ1-4)
CSAPGQGLLTNEKLFF

SEQ ID NO: 318825 - protein, 13 aa, Homo sapiens
  CDR3 for alpha chain variable domain of TCR clone 159413 (TRAV16, TRAJ20)
CALGPSNDYKPSF

SEQ ID NO: 318826 - protein, 15 aa, Homo sapiens
  CDR3 for beta chain variable domain of TCR clone 159413 (TRBV5-1, TRBJ2-2)
CASSRVGSDTGELFF

SEQ ID NO: 318827 - protein, 14 aa, Homo sapiens
  CDR3 for alpha chain variable domain of TCR clone 159414 (TRAV12-2, TRAJ13)
CAVKKAGGYQKITF

SEQ ID NO: 318828 - protein, 15 aa, Homo sapiens
  CDR3 for beta chain variable domain of TCR clone 159414 (TRBV27, TRBJ2-1)
CASSNGGGSSNEQFF

SEQ ID NO: 318829 - protein, 15 aa, Homo sapiens
  CDR3 for alpha chain variable domain of TCR clone 159415 (TRAV8-2, TRAJ15)
CVVTMGNQAGTALIF

SEQ ID NO: 318830 - protein, 14 aa, Homo sapiens
  CDR3 for beta chain variable domain of TCR clone 159415 (TRBV12-5, TRBJ2-5)
CASGSRTQRETQYF

SEQ ID NO: 318831 - protein, 14 aa, Homo sapiens
  CDR3 for alpha chain variable domain of TCR clone 159416 (TRAV9-2, TRAJ39)
CALYIYNAGNMLTF

SEQ ID NO: 318832 - protein, 15 aa, Homo sapiens
  CDR3 for beta chain variable domain of TCR clone 159416 (TRBV4-2, TRBJ2-4)
CASSPLGAAKNIQYF

SEQ ID NO: 318833 - protein, 15 aa, Homo sapiens
  CDR3 for alpha chain variable domain of TCR clone 159417 (TRAV21, TRAJ53)
CATLNSGGSNYKLTF

SEQ ID NO: 318834 - protein, 15 aa, Homo sapiens
  CDR3 for beta chain variable domain of TCR clone 159417 (TRBV11-3, TRBJ2-1)
CASSLAGQTYNEQFF

SEQ ID NO: 318835 - protein, 13 aa, Homo sapiens
  CDR3 for alpha chain variable domain of TCR clone 159418 (TRAV13-1, TRAJ4)
CAASIGGYNKLIF

SEQ ID NO: 318836 - protein, 16 aa, Homo sapiens
  CDR3 for beta chain variable domain of TCR clone 159418 (TRBV4-2, TRBJ2-1)
CASSQETAPPYNEQFF

SEQ ID NO: 318837 - protein, 14 aa, Homo sapiens
  CDR3 for alpha chain variable domain of TCR clone 159419 (TRAV13-2, TRAJ22)
CADGTLGSARHLTF

SEQ ID NO: 318838 - protein, 15 aa, Homo sapiens
  CDR3 for beta chain variable domain of TCR clone 159419 (TRBV6-3, TRBJ2-7)
CASSSPGTVLYEQYF

SEQ ID NO: 318839 - protein, 12 aa, Homo sapiens
  CDR3 for alpha chain variable domain of TCR clone 159420 (TRAV29/DV5, TRAJ34)
CAASGNTAKLIF

SEQ ID NO: 318840 - protein, 15 aa, Homo sapiens
  CDR3 for beta chain variable domain of TCR clone 159420 (TRBV10-2, TRBJ2-6)
CASSEQGTGANVLTF

SEQ ID NO: 318841 - protein, 17 aa, Homo sapiens
  CDR3 for alpha chain variable domain of TCR clone 159421 (TRAV23/DV6, TRAJ12)
CAAIDLGAMDTSYKLIF

SEQ ID NO: 318842 - protein, 12 aa, Homo sapiens
  CDR3 for beta chain variable domain of TCR clone 159421 (TRBV10-3, TRBJ2-2)
CAIRENTGEPFF

SEQ ID NO: 318843 - protein, 11 aa, Homo sapiens
  CDR3 for alpha chain variable domain of TCR clone 159422 (TRAV2, TRAJ33)
CAVDSNYQLIW

SEQ ID NO: 318844 - protein, 14 aa, Homo sapiens
  CDR3 for beta chain variable domain of TCR clone 159422 (TRBV11-2, TRBJ2-3)
CASSRLALTDTQYF

SEQ ID NO: 318845 - protein, 11 aa, Homo sapiens
  CDR3 for alpha chain variable domain of TCR clone 159423 (TRAV2, TRAJ13)
CASGGYQKVTF

SEQ ID NO: 318846 - protein, 12 aa, Homo sapiens
  CDR3 for beta chain variable domain of TCR clone 159423 (TRBV7-3, TRBJ2-1)
CASSFQSGPQFF

SEQ ID NO: 318847 - protein, 14 aa, Homo sapiens
  CDR3 for alpha chain variable domain of TCR clone 159424 (TRAV26-1, TRAJ38)
CIADNAGNNRKLIW

SEQ ID NO: 318848 - protein, 20 aa, Homo sapiens
  CDR3 for beta chain variable domain of TCR clone 159424 (TRBV7-8, TRBJ2-2)
CASSHLFPGPAIHITGELFF

SEQ ID NO: 318849 - protein, 19 aa, Homo sapiens
  CDR3 for alpha chain variable domain of TCR clone 159425 (TRAV26-1, TRAJ27)
CCVLLHRQSLNTNAGKSTF

SEQ ID NO: 318850 - protein, 13 aa, Homo sapiens
  CDR3 for beta chain variable domain of TCR clone 159425 (TRBV20-1, TRBJ2-7)
CSATHTSGYEQYF

SEQ ID NO: 318851 - protein, 12 aa, Homo sapiens
  CDR3 for alpha chain variable domain of TCR clone 159426 (TRAV1-2, TRAJ33)
CAALDSNFQLIW

SEQ ID NO: 318852 - protein, 14 aa, Homo sapiens
  CDR3 for beta chain variable domain of TCR clone 159426 (TRBV19, TRBJ2-3)
CASSAPRGTDTQYF

SEQ ID NO: 318853 - protein, 13 aa, Homo sapiens
  CDR3 for alpha chain variable domain of TCR clone 159427 (TRAV12-1, TRAJ33)
CGDAPDSNYQLIW

SEQ ID NO: 318854 - protein, 12 aa, Homo sapiens
  CDR3 for beta chain variable domain of TCR clone 159427 (TRBV11-2, TRBJ2-2)
CASSLGGGELFC

SEQ ID NO: 318855 - protein, 14 aa, Homo sapiens
  CDR3 for alpha chain variable domain of TCR clone 159428 (TRAV2, TRAJ4)
CAVEERGGYNKLIF

SEQ ID NO: 318856 - protein, 13 aa, Homo sapiens
  CDR3 for beta chain variable domain of TCR clone 159428 (TRBV10-3, TRBJ2-7)
CASKLAVNYEQYF

SEQ ID NO: 318857 - protein, 14 aa, Homo sapiens
  CDR3 for alpha chain variable domain of TCR clone 159429 (TRAV17, TRAJ54)
CATDANQGAQKLVC

SEQ ID NO: 318858 - protein, 12 aa, Homo sapiens
  CDR3 for beta chain variable domain of TCR clone 159429 (TRBV7-9, TRBJ2-7)
CASSIKREEQYF

SEQ ID NO: 318859 - protein, 12 aa, Homo sapiens
  CDR3 for alpha chain variable domain of TCR clone 159430 (TRAV21, TRAJ37)
CALRGNTGKLIF

SEQ ID NO: 318860 - protein, 15 aa, Homo sapiens
  CDR3 for beta chain variable domain of TCR clone 159430 (TRBV20-1, TRBJ2-1)
CSARGGTRYYNEQFF

SEQ ID NO: 318861 - protein, 12 aa, Homo sapiens
  CDR3 for alpha chain variable domain of TCR clone 159431 (TRAV35, TRAJ30)
CAGQLADDEIIF

SEQ ID NO: 318862 - protein, 17 aa, Homo sapiens
  CDR3 for beta chain variable domain of TCR clone 159431 (TRBV4-2, TRBJ2-5)
CASSPGRWRNFQETQYF

SEQ ID NO: 318863 - protein, 13 aa, Homo sapiens
  CDR3 for alpha chain variable domain of TCR clone 159432 (TRAV3, TRAJ20)
CCEAFCNDYKLSF

SEQ ID NO: 318864 - protein, 12 aa, Homo sapiens
  CDR3 for beta chain variable domain of TCR clone 159432 (TRBV6-3, TRBJ2-7)
CASSEPGFEQYF

SEQ ID NO: 318865 - protein, 18 aa, Homo sapiens
  CDR3 for alpha chain variable domain of TCR clone 159433 (TRAV13-1, TRAJ52)
CAAKNPNAGGTSYGKLTF

SEQ ID NO: 318866 - protein, 14 aa, Homo sapiens
  CDR3 for beta chain variable domain of TCR clone 159433 (TRBV19, TRBJ1-5)
CASRAPDSFLSQHF

SEQ ID NO: 318867 - protein, 13 aa, Homo sapiens
  CDR3 for alpha chain variable domain of TCR clone 159434 (TRAV12-3, TRAJ9)
CAMRNTGGFKAIF

SEQ ID NO: 318868 - protein, 14 aa, Homo sapiens
  CDR3 for beta chain variable domain of TCR clone 159434 (TRBV11-2, TRBJ2-7)
CASSSTGEGYEQYF

SEQ ID NO: 318869 - protein, 15 aa, Homo sapiens
  CDR3 for alpha chain variable domain of TCR clone 159435 (TRAV12-3, TRAJ27)
CAMRAYNTNAGKSTF

SEQ ID NO: 318870 - protein, 13 aa, Homo sapiens
  CDR3 for beta chain variable domain of TCR clone 159435 (TRBV19, TRBJ2-2)
CASKVSAAGELFF

SEQ ID NO: 318871 - protein, 14 aa, Homo sapiens
  CDR3 for alpha chain variable domain of TCR clone 159436 (TRAV8-6, TRAJ9)
CAVTPATGGFKTIF

SEQ ID NO: 318872 - protein, 17 aa, Homo sapiens
  CDR3 for beta chain variable domain of TCR clone 159436 (TRBV7-3, TRBJ2-3)
CASSLMKRMRGADTQYF

SEQ ID NO: 318873 - protein, 14 aa, Homo sapiens
  CDR3 for alpha chain variable domain of TCR clone 159437 (TRAV8-4, TRAJ13)
CAVTLSGGYQKVTI

SEQ ID NO: 318874 - protein, 14 aa, Homo sapiens
  CDR3 for beta chain variable domain of TCR clone 159437 (TRBV7-2, TRBJ1-2)
CASSQTGSTYGYAF

SEQ ID NO: 318875 - protein, 14 aa, Homo sapiens
  CDR3 for alpha chain variable domain of TCR clone 159438 (TRAV9-2, TRAJ39)
CALYIYNAGNMLTF

SEQ ID NO: 318876 - protein, 16 aa, Homo sapiens
  CDR3 for beta chain variable domain of TCR clone 159438 (TRBV15, TRBJ1-2)
CDTSRGPRTGGGGYTF

SEQ ID NO: 318877 - protein, 13 aa, Homo sapiens
  CDR3 for alpha chain variable domain of TCR clone 159439 (TRAV27, TRAJ29)
CAGANSGNTPLVF

SEQ ID NO: 318878 - protein, 17 aa, Homo sapiens
  CDR3 for beta chain variable domain of TCR clone 159439 (TRBV24-1, TRBJ2-1)
CATSDVSTSGTYNEQFF

SEQ ID NO: 318879 - protein, 15 aa, Homo sapiens
  CDR3 for alpha chain variable domain of TCR clone 159440 (TRAV2, TRAJ9)
CAVEDRGTGGFKTIF

SEQ ID NO: 318880 - protein, 14 aa, Homo sapiens
  CDR3 for beta chain variable domain of TCR clone 159440 (TRBV24-1, TRBJ1-1)
CATSIPRGDTEAFF

SEQ ID NO: 318881 - protein, 10 aa, Homo sapiens
  CDR3 for alpha chain variable domain of TCR clone 159441 (TRAV20, TRAJ22)
CAALARQLTF

SEQ ID NO: 318882 - protein, 14 aa, Homo sapiens
  CDR3 for beta chain variable domain of TCR clone 159441 (TRBV19, TRBJ2-1)
CASSMGSGATEQFF

SEQ ID NO: 318883 - protein, 14 aa, Homo sapiens
  CDR3 for alpha chain variable domain of TCR clone 159442 (TRAV21, TRAJ45)
CAVHSGGGADGLTF

SEQ ID NO: 318884 - protein, 16 aa, Homo sapiens
  CDR3 for beta chain variable domain of TCR clone 159442 (TRBV20-1, TRBJ2-2)
CSARDDRVGLTGELFF

SEQ ID NO: 318885 - protein, 16 aa, Homo sapiens
  CDR3 for alpha chain variable domain of TCR clone 159443 (TRAV12-3, TRAJ53)
CAISPGSGGSNYKLTF

SEQ ID NO: 318886 - protein, 11 aa, Homo sapiens
  CDR3 for beta chain variable domain of TCR clone 159443 (TRBV29-1, TRBJ2-5)
CSEDRTGTQYF

SEQ ID NO: 318887 - protein, 15 aa, Homo sapiens
  CDR3 for alpha chain variable domain of TCR clone 159444 (TRAV25, TRAJ53)
CAGPRSGGSNYKLTF

SEQ ID NO: 318888 - protein, 14 aa, Homo sapiens
  CDR3 for beta chain variable domain of TCR clone 159444 (TRBV5-8, TRBJ2-3)
CASSLGQGTDTQYF

SEQ ID NO: 318889 - protein, 15 aa, Homo sapiens
  CDR3 for alpha chain variable domain of TCR clone 159445 (TRAV38-1, TRAJ37)
CAFIHGSGNTGKLIF

SEQ ID NO: 318890 - protein, 16 aa, Homo sapiens
  CDR3 for beta chain variable domain of TCR clone 159445 (TRBV28, TRBJ1-5)
CASSLTGQGWSQPQHF

SEQ ID NO: 318891 - protein, 14 aa, Homo sapiens
  CDR3 for alpha chain variable domain of TCR clone 159446 (TRAV30, TRAJ33)
CGTVAPRSNYQLIW

SEQ ID NO: 318892 - protein, 16 aa, Homo sapiens
  CDR3 for beta chain variable domain of TCR clone 159446 (TRBV3-1, TRBJ2-5)
CASSLGQFNGFGAQYF

SEQ ID NO: 318893 - protein, 13 aa, Homo sapiens
  CDR3 for alpha chain variable domain of TCR clone 159447 (TRAV2, TRAJ40)
CAVVTSGTYKYIF

SEQ ID NO: 318894 - protein, 12 aa, Homo sapiens
  CDR3 for beta chain variable domain of TCR clone 159447 (TRBV10-3, TRBJ2-3)
CAISESPQARVF

SEQ ID NO: 318895 - protein, 11 aa, Homo sapiens
  CDR3 for alpha chain variable domain of TCR clone 159448 (TRAV12-3, TRAJ43)
CAMSVSNDMRL

SEQ ID NO: 318896 - protein, 14 aa, Homo sapiens
  CDR3 for beta chain variable domain of TCR clone 159448 (TRBV4-1, TRBJ2-2)
CASSQAVNTGELFF

SEQ ID NO: 318897 - protein, 15 aa, Homo sapiens
  CDR3 for alpha chain variable domain of TCR clone 159449 (TRAV1-2, TRAJ38)
CAVSENAGNDRKLIW

SEQ ID NO: 318898 - protein, 16 aa, Homo sapiens
  CDR3 for beta chain variable domain of TCR clone 159449 (TRBV4-1, TRBJ2-7)
CASSLTAGQATYEQYF

SEQ ID NO: 318899 - protein, 15 aa, Homo sapiens
  CDR3 for alpha chain variable domain of TCR clone 159450 (TRAV12-3, TRAJ6)
CAMSAASGGSYIPTF

SEQ ID NO: 318900 - protein, 15 aa, Homo sapiens
  CDR3 for beta chain variable domain of TCR clone 159450 (TRBV7-9, TRBJ1-6)
CASSSPGRGNSPLHF

SEQ ID NO: 318901 - protein, 13 aa, Homo sapiens
  CDR3 for alpha chain variable domain of TCR clone 159451 (TRAV13-2, TRAJ30)
CAETSNRDDKIIF

SEQ ID NO: 318902 - protein, 15 aa, Homo sapiens
  CDR3 for beta chain variable domain of TCR clone 159451 (TRBV7-2, TRBJ2-7)
CASSLAVGQVYGQYF

SEQ ID NO: 318903 - protein, 16 aa, Homo sapiens
  CDR3 for alpha chain variable domain of TCR clone 159452 (TRAV12-3, TRAJ53)
CAMSPGSGGSNYKLTF

SEQ ID NO: 318904 - protein, 15 aa, Homo sapiens
  CDR3 for beta chain variable domain of TCR clone 159452 (TRBV25-1, TRBJ1-4)
CASSKRIATNENLFF

SEQ ID NO: 318905 - protein, 16 aa, Homo sapiens
  CDR3 for alpha chain variable domain of TCR clone 159453 (TRAV17, TRAJ53)
CATDALSGGSNYKLTF

SEQ ID NO: 318906 - protein, 12 aa, Homo sapiens
  CDR3 for beta chain variable domain of TCR clone 159453 (TRBV5-1, TRBJ2-7)
RASSFRGYEQYF

SEQ ID NO: 318907 - protein, 13 aa, Homo sapiens
  CDR3 for alpha chain variable domain of TCR clone 159454 (TRAV12-2, TRAJ20)
CAVYPSNDYKLSF

SEQ ID NO: 318908 - protein, 15 aa, Homo sapiens
  CDR3 for beta chain variable domain of TCR clone 159454 (TRBV27, TRBJ2-5)
CASSVFPRGGETQYF

SEQ ID NO: 318909 - protein, 12 aa, Homo sapiens
  CDR3 for alpha chain variable domain of TCR clone 159455 (TRAV13-1, TRAJ53)
AASGGSNYKLTF

SEQ ID NO: 318910 - protein, 18 aa, Homo sapiens
  CDR3 for beta chain variable domain of TCR clone 159455 (TRBV12-4, TRBJ2-4)
CASSRTGAVDVAKNIQYF

SEQ ID NO: 318911 - protein, 14 aa, Homo sapiens
  CDR3 for alpha chain variable domain of TCR clone 159456 (TRAV8-1, TRAJ48)
CAVNAGFGNEKLIF

SEQ ID NO: 318912 - protein, 15 aa, Homo sapiens
  CDR3 for beta chain variable domain of TCR clone 159456 (TRBV9, TRBJ1-6)
CASSVAVTGDSPLHF

SEQ ID NO: 318913 - protein, 16 aa, Homo sapiens
  CDR3 for alpha chain variable domain of TCR clone 159457 (TRAV3, TRAJ32)
CAVRDPLNGATNKLIF

SEQ ID NO: 318914 - protein, 12 aa, Homo sapiens
  CDR3 for beta chain variable domain of TCR clone 159457 (TRBV11-2, TRBJ2-1)
CASSPGNNEQFF

SEQ ID NO: 318915 - protein, 18 aa, Homo sapiens
  CDR3 for alpha chain variable domain of TCR clone 159458 (TRAV12-3, TRAJ52)
CAMSAGGAGGTSYGKLTF

SEQ ID NO: 318916 - protein, 15 aa, Homo sapiens
  CDR3 for beta chain variable domain of TCR clone 159458 (TRBV27, TRBJ1-6)
CASSFDRGLGSPLHF

SEQ ID NO: 318917 - protein, 16 aa, Homo sapiens
  CDR3 for alpha chain variable domain of TCR clone 159459 (TRAV30, TRAJ24)
CGTEIVDADSWGKFQF

SEQ ID NO: 318918 - protein, 15 aa, Homo sapiens
  CDR3 for beta chain variable domain of TCR clone 159459 (TRBV7-8, TRBJ2-2)
CASSLDQGWAGELFF

SEQ ID NO: 318919 - protein, 14 aa, Homo sapiens
  CDR3 for alpha chain variable domain of TCR clone 159460 (TRAV1-2, TRAJ8)
CAVREDTGFKKLVF

SEQ ID NO: 318920 - protein, 12 aa, Homo sapiens
  CDR3 for beta chain variable domain of TCR clone 159460 (TRBV11-2, TRBJ2-1)
CASSPGNNEQFF

SEQ ID NO: 318921 - protein, 15 aa, Homo sapiens
  CDR3 for alpha chain variable domain of TCR clone 159461 (TRAV35, TRAJ40)
CAGQLWDSGTYKYIF

SEQ ID NO: 318922 - protein, 12 aa, Homo sapiens
  CDR3 for beta chain variable domain of TCR clone 159461 (TRBV7-8, TRBJ2-7)
CARRLAGYEQYF

SEQ ID NO: 318923 - protein, 19 aa, Homo sapiens
  CDR3 for alpha chain variable domain of TCR clone 159462 (TRAV4, TRAJ13)
CLVGVRGLLGVTRKLPLEL

SEQ ID NO: 318924 - protein, 16 aa, Homo sapiens
  CDR3 for beta chain variable domain of TCR clone 159462 (TRBV28, TRBJ2-7)
CASSLFFETGGPEQYF

SEQ ID NO: 318925 - protein, 11 aa, Homo sapiens
  CDR3 for alpha chain variable domain of TCR clone 159463 (TRAV3, TRAJ21)
CAVGNFNKFYF

SEQ ID NO: 318926 - protein, 15 aa, Homo sapiens
  CDR3 for beta chain variable domain of TCR clone 159463 (TRBV19, TRBJ1-1)
CASSIRRQMNTEAFF

SEQ ID NO: 318927 - protein, 15 aa, Homo sapiens
  CDR3 for alpha chain variable domain of TCR clone 159464 (TRAV26-1, TRAJ48)
CIARLSWFGNEKLTF

SEQ ID NO: 318928 - protein, 12 aa, Homo sapiens
  CDR3 for beta chain variable domain of TCR clone 159464 (TRBV19, TRBJ2-5)
CASSISEETQYF

SEQ ID NO: 318929 - protein, 14 aa, Homo sapiens
  CDR3 for alpha chain variable domain of TCR clone 159465 (TRAV23/DV6, TRAJ13)
CAASETGGYQNVTF

SEQ ID NO: 318930 - protein, 13 aa, Homo sapiens
  CDR3 for beta chain variable domain of TCR clone 159465 (TRBV29-1, TRBJ2-1)
CSVEGGRVNEQFF

SEQ ID NO: 318931 - protein, 15 aa, Homo sapiens
  CDR3 for alpha chain variable domain of TCR clone 159466 (TRAV1-2, TRAJ36)
CAASADQTGANNLFF

SEQ ID NO: 318932 - protein, 12 aa, Homo sapiens
  CDR3 for beta chain variable domain of TCR clone 159466 (TRBV12-4, TRBJ2-7)
CASSLGGYEQYF

SEQ ID NO: 318933 - protein, 13 aa, Homo sapiens
  CDR3 for alpha chain variable domain of TCR clone 159467 (TRAV4, TRAJ33)
CLVGEDSNYQLIW

SEQ ID NO: 318934 - protein, 15 aa, Homo sapiens
  CDR3 for beta chain variable domain of TCR clone 159467 (TRBV28, TRBJ2-1)
CASSIIAGGGSEQFL

SEQ ID NO: 318935 - protein, 12 aa, Homo sapiens
  CDR3 for alpha chain variable domain of TCR clone 159468 (TRAV2, TRAJ33)
CAVPHSNYQLIW

SEQ ID NO: 318936 - protein, 20 aa, Homo sapiens
  CDR3 for beta chain variable domain of TCR clone 159468 (TRBV19, TRBJ2-1)
CASSISRTVTSTRLNNEQFF

SEQ ID NO: 318937 - protein, 14 aa, Homo sapiens
  CDR3 for alpha chain variable domain of TCR clone 159469 (TRAV8-1, TRAJ5)
CAVRTDTGRRALTF

SEQ ID NO: 318938 - protein, 10 aa, Homo sapiens
  CDR3 for beta chain variable domain of TCR clone 159469 (TRBV24-1, TRBJ2-2)
CATSEADLER

SEQ ID NO: 318939 - protein, 13 aa, Homo sapiens
  CDR3 for alpha chain variable domain of TCR clone 159470 (TRAV13-1, TRAJ5)
CAAEHTGRRALTC

SEQ ID NO: 318940 - protein, 13 aa, Homo sapiens
  CDR3 for beta chain variable domain of TCR clone 159470 (TRBV2, TRBJ1-4)
CASNRGTNEKLFF

SEQ ID NO: 318941 - protein, 13 aa, Homo sapiens
  CDR3 for alpha chain variable domain of TCR clone 159471 (TRAV13-2, TRAJ13)
CAERPGGYQKVTF

SEQ ID NO: 318942 - protein, 19 aa, Homo sapiens
  CDR3 for beta chain variable domain of TCR clone 159471 (TRBV4-1, TRBJ2-1)
CASSQGPLPGLGGRNEQFF

SEQ ID NO: 318943 - protein, 16 aa, Homo sapiens
  CDR3 for alpha chain variable domain of TCR clone 159472 (TRAV12-3, TRAJ53)
CAMSPGRGGSNHKLTL

SEQ ID NO: 318944 - protein, 20 aa, Homo sapiens
  CDR3 for beta chain variable domain of TCR clone 159472 (TRBV7-8, TRBJ2-2)
CASSHLFPGPTIHITGELFF

SEQ ID NO: 318945 - protein, 16 aa, Homo sapiens
  CDR3 for alpha chain variable domain of TCR clone 159473 (TRAV30, TRAJ24)
CGAEIVDADSWGKFQF

SEQ ID NO: 318946 - protein, 13 aa, Homo sapiens
  CDR3 for beta chain variable domain of TCR clone 159473 (TRBV18, TRBJ2-2)
CASSPTRGGELFF

SEQ ID NO: 318947 - protein, 14 aa, Homo sapiens
  CDR3 for alpha chain variable domain of TCR clone 159474 (TRAV8-1, TRAJ30)
CAVNGYQRDDKIIF

SEQ ID NO: 318948 - protein, 16 aa, Homo sapiens
  CDR3 for beta chain variable domain of TCR clone 159474 (TRBV19, TRBJ2-2)
CASRSPGTGATGELFF

SEQ ID NO: 318949 - protein, 14 aa, Homo sapiens
  CDR3 for alpha chain variable domain of TCR clone 159475 (TRAV1-2, TRAJ16)
CAVNRFSDGQKLLF

SEQ ID NO: 318950 - protein, 15 aa, Homo sapiens
  CDR3 for beta chain variable domain of TCR clone 159475 (TRBV7-3, TRBJ2-1)
CASSPTGGSRNEQFF

SEQ ID NO: 318951 - protein, 16 aa, Homo sapiens
  CDR3 for alpha chain variable domain of TCR clone 159476 (TRAV13-1, TRAJ18)
CAASRMRGSTLGRLYF

SEQ ID NO: 318952 - protein, 16 aa, Homo sapiens
  CDR3 for beta chain variable domain of TCR clone 159476 (TRBV27, TRBJ1-1)
CACSSRGRTGYTEAFF

SEQ ID NO: 318953 - protein, 16 aa, Homo sapiens
  CDR3 for alpha chain variable domain of TCR clone 159477 (TRAV12-2, TRAJ52)
CRLANAGGTSYGKLTF

SEQ ID NO: 318954 - protein, 15 aa, Homo sapiens
  CDR3 for beta chain variable domain of TCR clone 159477 (TRBV18, TRBJ2-1)
CASSPPSASYNEQFF

SEQ ID NO: 318955 - protein, 17 aa, Homo sapiens
  CDR3 for alpha chain variable domain of TCR clone 159478 (TRAV3, TRAJ6)
CAVRDGPRAGGSYMPTF

SEQ ID NO: 318956 - protein, 16 aa, Homo sapiens
  CDR3 for beta chain variable domain of TCR clone 159478 (TRBV7-2, TRBJ2-7)
CASSPRLVSTSSTSGR

SEQ ID NO: 318957 - protein, 11 aa, Homo sapiens
  CDR3 for alpha chain variable domain of TCR clone 159479 (TRAV17, TRAJ36)
CAPTGAKNLFF

SEQ ID NO: 318958 - protein, 12 aa, Homo sapiens
  CDR3 for beta chain variable domain of TCR clone 159479 (TRBV29-1, TRBJ2-3)
CSVTGGADTQYF

SEQ ID NO: 318959 - protein, 14 aa, Homo sapiens
  CDR3 for alpha chain variable domain of TCR clone 159480 (TRAV29/DV5, TRAJ36)
CAARRKTGANNLFT

SEQ ID NO: 318960 - protein, 14 aa, Homo sapiens
  CDR3 for beta chain variable domain of TCR clone 159480 (TRBV12-5, TRBJ2-5)
CASGSRTHQETQYF

SEQ ID NO: 318961 - protein, 14 aa, Homo sapiens
  CDR3 for alpha chain variable domain of TCR clone 159481 (TRAV1-2, TRAJ16)
CAVNRFSDGEKLLF

SEQ ID NO: 318962 - protein, 15 aa, Homo sapiens
  CDR3 for beta chain variable domain of TCR clone 159481 (TRBV19, TRBJ2-1)
CASSSPGVPLDEQFF

SEQ ID NO: 318963 - protein, 14 aa, Homo sapiens
  CDR3 for alpha chain variable domain of TCR clone 159482 (TRAV17, TRAJ34)
CATVPTYKTDKLIF

SEQ ID NO: 318964 - protein, 18 aa, Homo sapiens
  CDR3 for beta chain variable domain of TCR clone 159482 (TRBV23-1, TRBJ2-1)
TVSLRQRSEKWLKNEQFF

SEQ ID NO: 318965 - protein, 13 aa, Homo sapiens
  CDR3 for alpha chain variable domain of TCR clone 159483 (TRAV35, TRAJ21)
CAGQLSNFNEFYF

SEQ ID NO: 318966 - protein, 11 aa, Homo sapiens
  CDR3 for beta chain variable domain of TCR clone 159483 (TRBV7-6, TRBJ2-5)
CASSSQETQYF

SEQ ID NO: 318967 - protein, 14 aa, Homo sapiens
  CDR3 for alpha chain variable domain of TCR clone 159484 (TRAV12-2, TRAJ13)
CAVKKTGGYQKVTF

SEQ ID NO: 318968 - protein, 15 aa, Homo sapiens
  CDR3 for beta chain variable domain of TCR clone 159484 (TRBV11-2, TRBJ2-2)
CASRGLAANTGELFF

SEQ ID NO: 318969 - protein, 14 aa, Homo sapiens
  CDR3 for alpha chain variable domain of TCR clone 159485 (TRAV13-1, TRAJ44)
CAAKASGTASKLTF

SEQ ID NO: 318970 - protein, 17 aa, Homo sapiens
  CDR3 for beta chain variable domain of TCR clone 159485 (TRBV7-3, TRBJ2-3)
RASSLMKRMRGADTQYF

SEQ ID NO: 318971 - protein, 15 aa, Homo sapiens
  CDR3 for alpha chain variable domain of TCR clone 159486 (TRAV27, TRAJ38)
CAARRNAGNNRKLIW

SEQ ID NO: 318972 - protein, 15 aa, Homo sapiens
  CDR3 for beta chain variable domain of TCR clone 159486 (TRBV28, TRBJ2-1)
CASSGLAEVDNEQFF

SEQ ID NO: 318973 - protein, 15 aa, Homo sapiens
  CDR3 for alpha chain variable domain of TCR clone 159487 (TRAV12-1, TRAJ44)
CVVFVNTGTASKLTF

SEQ ID NO: 318974 - protein, 15 aa, Homo sapiens
  CDR3 for beta chain variable domain of TCR clone 159487 (TRBV7-2, TRBJ2-1)
CASSLVGSSYNEQFF

SEQ ID NO: 318975 - protein, 13 aa, Homo sapiens
  CDR3 for alpha chain variable domain of TCR clone 159488 (TRAV23/DV6, TRAJ21)
CAASIGNFNKFYF

SEQ ID NO: 318976 - protein, 15 aa, Homo sapiens
  CDR3 for beta chain variable domain of TCR clone 159488 (TRBV12-4, TRBJ2-5)
CASSPPTGLQETQYF

SEQ ID NO: 318977 - protein, 14 aa, Homo sapiens
  CDR3 for alpha chain variable domain of TCR clone 159489 (TRAV12-2, TRAJ13)
CAVKKTGGLPESYL

SEQ ID NO: 318978 - protein, 14 aa, Homo sapiens
  CDR3 for beta chain variable domain of TCR clone 159489 (TRBV12-5, TRBJ2-5)
CASGSRTHQETQYF

SEQ ID NO: 318979 - protein, 14 aa, Homo sapiens
  CDR3 for alpha chain variable domain of TCR clone 159490 (TRAV1-2, TRAJ16)
CAVNRFSDGQKLLF

SEQ ID NO: 318980 - protein, 14 aa, Homo sapiens
  CDR3 for beta chain variable domain of TCR clone 159490 (TRBV18, TRBJ2-7)
CASSPRGGAYEKYF

SEQ ID NO: 318981 - protein, 17 aa, Homo sapiens
  CDR3 for alpha chain variable domain of TCR clone 159491 (TRAV3, TRAJ42)
CAVRDRDYGGSQGNLIL

SEQ ID NO: 318982 - protein, 20 aa, Homo sapiens
  CDR3 for beta chain variable domain of TCR clone 159491 (TRBV28, TRBJ2-1)
CASTPIGRSPGLAGGNEQFF

SEQ ID NO: 318983 - protein, 13 aa, Homo sapiens
  CDR3 for alpha chain variable domain of TCR clone 159492 (TRAV12-1, TRAJ22)
CVASGGSARQLNF

SEQ ID NO: 318984 - protein, 17 aa, Homo sapiens
  CDR3 for beta chain variable domain of TCR clone 159492 (TRBV7-8, TRBJ2-6)
CASSAGTGGAGANVLTF

SEQ ID NO: 318985 - protein, 15 aa, Homo sapiens
  CDR3 for alpha chain variable domain of TCR clone 159493 (TRAV2, TRAJ44)
CAVEAYTGTASKLTF

SEQ ID NO: 318986 - protein, 17 aa, Homo sapiens
  CDR3 for beta chain variable domain of TCR clone 159493 (TRBV12-4, TRBJ2-1)
CASSPGPAGGRINEQFF

SEQ ID NO: 318987 - protein, 14 aa, Homo sapiens
  CDR3 for alpha chain variable domain of TCR clone 159494 (TRAV3, TRAJ22)
CAVRDYGSARQLTF

SEQ ID NO: 318988 - protein, 13 aa, Homo sapiens
  CDR3 for beta chain variable domain of TCR clone 159494 (TRBV11-2, TRBJ2-5)
CASGHGAKENQYF

SEQ ID NO: 318989 - protein, 14 aa, Homo sapiens
  CDR3 for alpha chain variable domain of TCR clone 159495 (TRAV13-1, TRAJ44)
CAAKATGTSSKLTF

SEQ ID NO: 318990 - protein, 12 aa, Homo sapiens
  CDR3 for beta chain variable domain of TCR clone 159495 (TRBV7-8, TRBJ2-7)
CASILGDREQYF

SEQ ID NO: 318991 - protein, 13 aa, Homo sapiens
  CDR3 for alpha chain variable domain of TCR clone 159496 (TRAV20, TRAJ49)
CAVQARTGKQFYF

SEQ ID NO: 318992 - protein, 14 aa, Homo sapiens
  CDR3 for beta chain variable domain of TCR clone 159496 (TRBV5-1, TRBJ1-1)
CASSLQGASTEAFF

SEQ ID NO: 318993 - protein, 15 aa, Homo sapiens
  CDR3 for alpha chain variable domain of TCR clone 159497 (TRAV8-3, TRAJ11)
CAVGLLDSGYSTLTF

SEQ ID NO: 318994 - protein, 14 aa, Homo sapiens
  CDR3 for beta chain variable domain of TCR clone 159497 (TRBV4-1, TRBJ2-5)
CASSRSGSGETQYF

SEQ ID NO: 318995 - protein, 14 aa, Homo sapiens
  CDR3 for alpha chain variable domain of TCR clone 159498 (TRAV12-1, TRAJ17)
CVVNYKAAGNKLTF

SEQ ID NO: 318996 - protein, 16 aa, Homo sapiens
  CDR3 for beta chain variable domain of TCR clone 159498 (TRBV9, TRBJ2-3)
CASSGTSGKDTDTQYF

SEQ ID NO: 318997 - protein, 14 aa, Homo sapiens
  CDR3 for alpha chain variable domain of TCR clone 159499 (TRAV12-2, TRAJ40)
CAVKIPSGTYKYIF

SEQ ID NO: 318998 - protein, 14 aa, Homo sapiens
  CDR3 for beta chain variable domain of TCR clone 159499 (TRBV20-1, TRBJ1-3)
CSASPTGAGNTTYF

SEQ ID NO: 318999 - protein, 13 aa, Homo sapiens
  CDR3 for alpha chain variable domain of TCR clone 159500 (TRAV30, TRAJ24)
CGTVTDSWGKLQF

SEQ ID NO: 319000 - protein, 13 aa, Homo sapiens
  CDR3 for beta chain variable domain of TCR clone 159500 (TRBV28, TRBJ2-7)
CASKAGGVYEQYF

SEQ ID NO: 319001 - protein, 17 aa, Homo sapiens
  CDR3 for alpha chain variable domain of TCR clone 159501 (TRAV3, TRAJ6)
CAVRDGPRVGGSYIPTF

SEQ ID NO: 319002 - protein, 12 aa, Homo sapiens
  CDR3 for beta chain variable domain of TCR clone 159501 (TRBV11-2, TRBJ2-2)
CASSLGGGELLF

SEQ ID NO: 319003 - protein, 15 aa, Homo sapiens
  CDR3 for alpha chain variable domain of TCR clone 159502 (TRAV12-1, TRAJ44)
CVVFVNTGTASKLTF

SEQ ID NO: 319004 - protein, 17 aa, Homo sapiens
  CDR3 for beta chain variable domain of TCR clone 159502 (TRBV7-8, TRBJ2-6)
CASSAGTGGAWANVLTF

SEQ ID NO: 319005 - protein, 12 aa, Homo sapiens
  CDR3 for alpha chain variable domain of TCR clone 159503 (TRAV38-1, TRAJ32)
CAPLGATNKIIF

SEQ ID NO: 319006 - protein, 14 aa, Homo sapiens
  CDR3 for beta chain variable domain of TCR clone 159503 (TRBV29-1, TRBJ2-5)
CSVETSGSGGTQYF

SEQ ID NO: 319007 - protein, 16 aa, Homo sapiens
  CDR3 for alpha chain variable domain of TCR clone 159504 (TRAV1-2, TRAJ18)
CAVRVERGSTLGRLYF

SEQ ID NO: 319008 - protein, 14 aa, Homo sapiens
  CDR3 for beta chain variable domain of TCR clone 159504 (TRBV4-1, TRBJ2-2)
CASSQAVNTGELFF

SEQ ID NO: 319009 - protein, 15 aa, Homo sapiens
  CDR3 for alpha chain variable domain of TCR clone 159505 (TRAV12-3, TRAJ58)
CAMRRQETSGSRLTF

SEQ ID NO: 319010 - protein, 13 aa, Homo sapiens
  CDR3 for beta chain variable domain of TCR clone 159505 (TRBV4-3, TRBJ1-1)
CASSQDWADRAFF

SEQ ID NO: 319011 - protein, 12 aa, Homo sapiens
  CDR3 for alpha chain variable domain of TCR clone 159506 (TRAV29/DV5, TRAJ41)
CAAISSGYALNF

SEQ ID NO: 319012 - protein, 17 aa, Homo sapiens
  CDR3 for beta chain variable domain of TCR clone 159506 (TRBV18, TRBJ2-1)
CASSKGLSGGPTMSSSS

SEQ ID NO: 319013 - protein, 12 aa, Homo sapiens
  CDR3 for alpha chain variable domain of TCR clone 159507 (TRAV13-1, TRAJ49)
CAASPMGNQFSF

SEQ ID NO: 319014 - protein, 10 aa, Homo sapiens
  CDR3 for beta chain variable domain of TCR clone 159507 (TRBV15, TRBJ2-7)
AETGGYEQYF

SEQ ID NO: 319015 - protein, 14 aa, Homo sapiens
  CDR3 for alpha chain variable domain of TCR clone 159508 (TRAV2, TRAJ37)
CAVDFTSNTVKLIF

SEQ ID NO: 319016 - protein, 12 aa, Homo sapiens
  CDR3 for beta chain variable domain of TCR clone 159508 (TRBV11-2, TRBJ2-2)
CASSLGGGELFF

SEQ ID NO: 319017 - protein, 13 aa, Homo sapiens
  CDR3 for alpha chain variable domain of TCR clone 159509 (TRAV21, TRAJ27)
CAARPGNAGESTL

SEQ ID NO: 319018 - protein, 14 aa, Homo sapiens
  CDR3 for beta chain variable domain of TCR clone 159509 (TRBV7-6, TRBJ2-3)
CASGLGTVTDTQYF

SEQ ID NO: 319019 - protein, 12 aa, Homo sapiens
  CDR3 for alpha chain variable domain of TCR clone 159510 (TRAV16, TRAJ26)
CALRMYGQNFVF

SEQ ID NO: 319020 - protein, 15 aa, Homo sapiens
  CDR3 for beta chain variable domain of TCR clone 159510 (TRBV28, TRBJ2-6)
CASTMGGAGANVLTF

SEQ ID NO: 319021 - protein, 16 aa, Homo sapiens
  CDR3 for alpha chain variable domain of TCR clone 159511 (TRAV38-1, TRAJ32)
CAFMPFFGVATNKLIF

SEQ ID NO: 319022 - protein, 13 aa, Homo sapiens
  CDR3 for beta chain variable domain of TCR clone 159511 (TRBV7-9, TRBJ2-7)
CASSFAGAYEQYF

SEQ ID NO: 319023 - protein, 11 aa, Homo sapiens
  CDR3 for alpha chain variable domain of TCR clone 159512 (TRAV13-1, TRAJ18)
CAASRMRGSTL

SEQ ID NO: 319024 - protein, 16 aa, Homo sapiens
  CDR3 for beta chain variable domain of TCR clone 159512 (TRBV27, TRBJ1-1)
CASSSRGRTGYTEAFF

SEQ ID NO: 319025 - protein, 12 aa, Homo sapiens
  CDR3 for alpha chain variable domain of TCR clone 159513 (TRAV12-2, TRAJ52)
IGGGTSYGKLTF

SEQ ID NO: 319026 - protein, 13 aa, Homo sapiens
  CDR3 for beta chain variable domain of TCR clone 159513 (TRBV12-4, TRBJ1-1)
CSSSPGTGFEAFF

SEQ ID NO: 319027 - protein, 14 aa, Homo sapiens
  CDR3 for alpha chain variable domain of TCR clone 159514 (TRAV12-1, TRAJ3)
CGAARYSSASKIIF

SEQ ID NO: 319028 - protein, 15 aa, Homo sapiens
  CDR3 for beta chain variable domain of TCR clone 159514 (TRBV4-1, TRBJ1-4)
CASSDTGGTNEKLFF

SEQ ID NO: 319029 - protein, 12 aa, Homo sapiens
  CDR3 for alpha chain variable domain of TCR clone 159515 (TRAV38-2/DV8, TRAJ47)
CVLMEYGNKLVF

SEQ ID NO: 319030 - protein, 14 aa, Homo sapiens
  CDR3 for beta chain variable domain of TCR clone 159515 (TRBV20-1, TRBJ1-5)
CSATDRGSHQPQHF

SEQ ID NO: 319031 - protein, 15 aa, Homo sapiens
  CDR3 for alpha chain variable domain of TCR clone 159516 (TRAV8-3, TRAJ15)
CAVGAPNQAGTAQSL

SEQ ID NO: 319032 - protein, 14 aa, Homo sapiens
  CDR3 for beta chain variable domain of TCR clone 159516 (TRBV20-1, TRBJ2-1)
CSPSDEASYNEQFF

SEQ ID NO: 319033 - protein, 12 aa, Homo sapiens
  CDR3 for alpha chain variable domain of TCR clone 159517 (TRAV16, TRAJ12)
CALGDSSYKLIF

SEQ ID NO: 319034 - protein, 13 aa, Homo sapiens
  CDR3 for beta chain variable domain of TCR clone 159517 (TRBV27, TRBJ1-4)
CASSLMGDEKLFF

SEQ ID NO: 319035 - protein, 14 aa, Homo sapiens
  CDR3 for alpha chain variable domain of TCR clone 159518 (TRAV35, TRAJ38)
CAVSNAGNNRKLIW

SEQ ID NO: 319036 - protein, 12 aa, Homo sapiens
  CDR3 for beta chain variable domain of TCR clone 159518 (TRBV19, TRBJ2-7)
CASTDRGYEQYF

SEQ ID NO: 319037 - protein, 10 aa, Homo sapiens
  CDR3 for alpha chain variable domain of TCR clone 159519 (TRAV8-4, TRAJ43)
CAVSADDMRF

SEQ ID NO: 319038 - protein, 15 aa, Homo sapiens
  CDR3 for beta chain variable domain of TCR clone 159519 (TRBV5-1, TRBJ2-3)
CASIVTSGSTDTQYF

SEQ ID NO: 319039 - protein, 14 aa, Homo sapiens
  CDR3 for alpha chain variable domain of TCR clone 159520 (TRAV12-3, TRAJ43)
CAMSLGGAGTRLTV

SEQ ID NO: 319040 - protein, 15 aa, Homo sapiens
  CDR3 for beta chain variable domain of TCR clone 159520 (TRBV20-1, TRBJ2-7)
CSARDRVSGMDEQYF

SEQ ID NO: 319041 - protein, 13 aa, Homo sapiens
  CDR3 for alpha chain variable domain of TCR clone 159521 (TRAV2, TRAJ40)
RAVVTSGTYKYIF

SEQ ID NO: 319042 - protein, 14 aa, Homo sapiens
  CDR3 for beta chain variable domain of TCR clone 159521 (TRBV19, TRBJ2-1)
CASPTFVLSGEQFL

SEQ ID NO: 319043 - protein, 13 aa, Homo sapiens
  CDR3 for alpha chain variable domain of TCR clone 159522 (TRAV29/DV5, TRAJ31)
CAASRNNNARLMF

SEQ ID NO: 319044 - protein, 12 aa, Homo sapiens
  CDR3 for beta chain variable domain of TCR clone 159522 (TRBV14, TRBJ2-5)
CSSSQLKETQYF

SEQ ID NO: 319045 - protein, 14 aa, Homo sapiens
  CDR3 for alpha chain variable domain of TCR clone 159523 (TRAV26-1, TRAJ34)
CIVRVAYNTDKLIF

SEQ ID NO: 319046 - protein, 15 aa, Homo sapiens
  CDR3 for beta chain variable domain of TCR clone 159523 (TRBV20-1, TRBJ2-7)
FSARVPAAYFYEQYY

SEQ ID NO: 319047 - protein, 15 aa, Homo sapiens
  CDR3 for alpha chain variable domain of TCR clone 159524 (TRAV35, TRAJ23)
CAGPLGNNQGGKLIF

SEQ ID NO: 319048 - protein, 14 aa, Homo sapiens
  CDR3 for beta chain variable domain of TCR clone 159524 (TRBV19, TRBJ2-1)
CASPTFVLSGEQFF

SEQ ID NO: 319049 - protein, 18 aa, Homo sapiens
  CDR3 for alpha chain variable domain of TCR clone 159525 (TRAV17, TRAJ45)
CATSLDLYSGGGADGLTF

SEQ ID NO: 319050 - protein, 14 aa, Homo sapiens
  CDR3 for beta chain variable domain of TCR clone 159525 (TRBV7-3, TRBJ1-1)
CASSLKGGNTEAFF

SEQ ID NO: 319051 - protein, 15 aa, Homo sapiens
  CDR3 for alpha chain variable domain of TCR clone 159526 (TRAV8-3, TRAJ45)
CASSYSGGGAGGLTF

SEQ ID NO: 319052 - protein, 13 aa, Homo sapiens
  CDR3 for beta chain variable domain of TCR clone 159526 (TRBV7-2, TRBJ1-1)
CASSSQGVTEAFF

SEQ ID NO: 319053 - protein, 12 aa, Homo sapiens
  CDR3 for alpha chain variable domain of TCR clone 159527 (TRAV12-3, TRAJ31)
CAMSIPNARLMF

SEQ ID NO: 319054 - protein, 12 aa, Homo sapiens
  CDR3 for beta chain variable domain of TCR clone 159527 (TRBV11-2, TRBJ2-1)
CASSVQREGQFF

SEQ ID NO: 319055 - protein, 11 aa, Homo sapiens
  CDR3 for alpha chain variable domain of TCR clone 159528 (TRAV2, TRAJ13)
CASGGYQKVTF

SEQ ID NO: 319056 - protein, 15 aa, Homo sapiens
  CDR3 for beta chain variable domain of TCR clone 159528 (TRBV4-3, TRBJ1-3)
CASSQSITPGNTIYF

SEQ ID NO: 319057 - protein, 14 aa, Homo sapiens
  CDR3 for alpha chain variable domain of TCR clone 159529 (TRAV12-2, TRAJ40)
CAVKIPSGTYKYIF

SEQ ID NO: 319058 - protein, 15 aa, Homo sapiens
  CDR3 for beta chain variable domain of TCR clone 159529 (TRBV5-1, TRBJ1-1)
CASSSGGRRVTEAFF

SEQ ID NO: 319059 - protein, 14 aa, Homo sapiens
  CDR3 for alpha chain variable domain of TCR clone 159530 (TRAV38-1, TRAJ29)
CAFITPSGNTPLVF

SEQ ID NO: 319060 - protein, 14 aa, Homo sapiens
  CDR3 for beta chain variable domain of TCR clone 159530 (TRBV18, TRBJ2-7)
CASSPRGGGYEQYF

SEQ ID NO: 319061 - protein, 11 aa, Homo sapiens
  CDR3 for alpha chain variable domain of TCR clone 159531 (TRAV2, TRAJ21)
CAVFNFNKFYF

SEQ ID NO: 319062 - protein, 15 aa, Homo sapiens
  CDR3 for beta chain variable domain of TCR clone 159531 (TRBV2, TRBJ2-1)
CASSEARSAYNEQFF

SEQ ID NO: 319063 - protein, 20 aa, Homo sapiens
  CDR3 for alpha chain variable domain of TCR clone 159532 (TRAV12-2, TRAJ52)
SPVIQPPARAGGTSYGKLTF

SEQ ID NO: 319064 - protein, 17 aa, Homo sapiens
  CDR3 for beta chain variable domain of TCR clone 159532 (TRBV5-1, TRBJ2-5)
CASSLLGLAANQETQYF

SEQ ID NO: 319065 - protein, 14 aa, Homo sapiens
  CDR3 for alpha chain variable domain of TCR clone 159533 (TRAV12-2, TRAJ53)
CRERGGGSNYKLTF

SEQ ID NO: 319066 - protein, 17 aa, Homo sapiens
  CDR3 for beta chain variable domain of TCR clone 159533 (TRBV7-3, TRBJ2-3)
CASSLMKSMRGADTQYF

SEQ ID NO: 319067 - protein, 20 aa, Homo sapiens
  CDR3 for alpha chain variable domain of TCR clone 159534 (TRAV12-1, TRAJ42)
SSVIQPPTSVNGGSQGNLIF

SEQ ID NO: 319068 - protein, 13 aa, Homo sapiens
  CDR3 for beta chain variable domain of TCR clone 159534 (TRBV10-3, TRBJ1-2)
CAISERDSYGYTF

SEQ ID NO: 319069 - protein, 14 aa, Homo sapiens
  CDR3 for alpha chain variable domain of TCR clone 159535 (TRAV3, TRAJ17)
CAVRERSCRQQANF

SEQ ID NO: 319070 - protein, 17 aa, Homo sapiens
  CDR3 for beta chain variable domain of TCR clone 159535 (TRBV13, TRBJ2-3)
CASSLSRAAGGRNTQYF

SEQ ID NO: 319071 - protein, 11 aa, Homo sapiens
  CDR3 for alpha chain variable domain of TCR clone 159536 (TRAV12-2, TRAJ49)
CAVHTGNQFYF

SEQ ID NO: 319072 - protein, 15 aa, Homo sapiens
  CDR3 for beta chain variable domain of TCR clone 159536 (TRBV27, TRBJ2-1)
CASSNGGGSSNESSS

SEQ ID NO: 319073 - protein, 14 aa, Homo sapiens
  CDR3 for alpha chain variable domain of TCR clone 159537 (TRAV12-1, TRAJ12)
CVVTSGDSSYKLIF

SEQ ID NO: 319074 - protein, 14 aa, Homo sapiens
  CDR3 for beta chain variable domain of TCR clone 159537 (TRBV19, TRBJ2-1)
CASPTFVLSGEQFF

SEQ ID NO: 319075 - protein, 13 aa, Homo sapiens
  CDR3 for alpha chain variable domain of TCR clone 159538 (TRAV14/DV4, TRAJ22)
CAMRDLSARQLTF

SEQ ID NO: 319076 - protein, 18 aa, Homo sapiens
  CDR3 for beta chain variable domain of TCR clone 159538 (TRBV19, TRBJ1-5)
CASSKGQVSIHSNQTQHF

SEQ ID NO: 319077 - protein, 13 aa, Homo sapiens
  CDR3 for alpha chain variable domain of TCR clone 159539 (TRAV12-2, TRAJ34)
CAVRGYNTDKLIF

SEQ ID NO: 319078 - protein, 17 aa, Homo sapiens
  CDR3 for beta chain variable domain of TCR clone 159539 (TRBV28, TRBJ2-7)
CASSPLPAGGKSYEQYF

SEQ ID NO: 319079 - protein, 13 aa, Homo sapiens
  CDR3 for alpha chain variable domain of TCR clone 159540 (TRAV2, TRAJ24)
CAVSTDSWGKLQF

SEQ ID NO: 319080 - protein, 16 aa, Homo sapiens
  CDR3 for beta chain variable domain of TCR clone 159540 (TRBV7-3, TRBJ2-1)
CASSLEGYRSYNEQFF

SEQ ID NO: 319081 - protein, 11 aa, Homo sapiens
  CDR3 for alpha chain variable domain of TCR clone 159541 (TRAV1-1, TRAJ23)
CAVRQGGKLIF

SEQ ID NO: 319082 - protein, 18 aa, Homo sapiens
  CDR3 for beta chain variable domain of TCR clone 159541 (TRBV20-1, TRBJ2-5)
CSQTGDSGRLGGKETQYF

SEQ ID NO: 319083 - protein, 14 aa, Homo sapiens
  CDR3 for alpha chain variable domain of TCR clone 159542 (TRAV12-3, TRAJ47)
CAMSVREYGNKLVF

SEQ ID NO: 319084 - protein, 12 aa, Homo sapiens
  CDR3 for beta chain variable domain of TCR clone 159542 (TRBV5-7, TRBJ1-1)
CASSLGRGKAFF

SEQ ID NO: 319085 - protein, 18 aa, Homo sapiens
  CDR3 for alpha chain variable domain of TCR clone 159543 (TRAV26-1, TRAJ52)
CIVRFEWAGGTSYGKLTF

SEQ ID NO: 319086 - protein, 13 aa, Homo sapiens
  CDR3 for beta chain variable domain of TCR clone 159543 (TRBV7-3, TRBJ1-2)
CASSLKRGYGYTF

SEQ ID NO: 319087 - protein, 12 aa, Homo sapiens
  CDR3 for alpha chain variable domain of TCR clone 159544 (TRAV20, TRAJ56)
CAVTEANSKLTF

SEQ ID NO: 319088 - protein, 14 aa, Homo sapiens
  CDR3 for beta chain variable domain of TCR clone 159544 (TRBV20-1, TRBJ2-5)
CSALVPGYQETQYF

SEQ ID NO: 319089 - protein, 13 aa, Homo sapiens
  CDR3 for alpha chain variable domain of TCR clone 159545 (TRAV13-1, TRAJ48)
CAAASFGNEKLTF

SEQ ID NO: 319090 - protein, 14 aa, Homo sapiens
  CDR3 for beta chain variable domain of TCR clone 159545 (TRBV18, TRBJ2-1)
SASSPGTSETEQFF

SEQ ID NO: 319091 - protein, 14 aa, Homo sapiens
  CDR3 for alpha chain variable domain of TCR clone 159546 (TRAV1-2, TRAJ16)
CAVNRFSDGQKLLF

SEQ ID NO: 319092 - protein, 15 aa, Homo sapiens
  CDR3 for beta chain variable domain of TCR clone 159546 (TRBV7-3, TRBJ1-6)
CASSLGRGAGSTLHF

SEQ ID NO: 319093 - protein, 13 aa, Homo sapiens
  CDR3 for alpha chain variable domain of TCR clone 159547 (TRAV36/DV7, TRAJ37)
CAVFSSNTGKLIF

SEQ ID NO: 319094 - protein, 13 aa, Homo sapiens
  CDR3 for beta chain variable domain of TCR clone 159547 (TRBV12-4, TRBJ1-2)
CASSLRQGKGYTF

SEQ ID NO: 319095 - protein, 16 aa, Homo sapiens
  CDR3 for alpha chain variable domain of TCR clone 159548 (TRAV12-2, TRAJ10)
CAVNRVLTGRGNKLTF

SEQ ID NO: 319096 - protein, 16 aa, Homo sapiens
  CDR3 for beta chain variable domain of TCR clone 159548 (TRBV12-5, TRBJ2-5)
CASGPRTSGNQETQYF

SEQ ID NO: 319097 - protein, 11 aa, Homo sapiens
  CDR3 for alpha chain variable domain of TCR clone 159549 (TRAV2, TRAJ33)
CAVDSNYQLIW

SEQ ID NO: 319098 - protein, 16 aa, Homo sapiens
  CDR3 for beta chain variable domain of TCR clone 159549 (TRBV12-5, TRBJ2-5)
CASGPRASGNQETQYF

SEQ ID NO: 319099 - protein, 12 aa, Homo sapiens
  CDR3 for alpha chain variable domain of TCR clone 159550 (TRAV3, TRAJ20)
CAVRDPDYKHSF

SEQ ID NO: 319100 - protein, 15 aa, Homo sapiens
  CDR3 for beta chain variable domain of TCR clone 159550 (TRBV2, TRBJ2-2)
CASSRETVGTGELFF

SEQ ID NO: 319101 - protein, 15 aa, Homo sapiens
  CDR3 for alpha chain variable domain of TCR clone 159551 (TRAV8-3, TRAJ45)
CASSYSGGGADGLTF

SEQ ID NO: 319102 - protein, 14 aa, Homo sapiens
  CDR3 for beta chain variable domain of TCR clone 159551 (TRBV15, TRBJ2-2)
CATSSGWNTGELFF

SEQ ID NO: 319103 - protein, 12 aa, Homo sapiens
  CDR3 for alpha chain variable domain of TCR clone 159552 (TRAV12-3, TRAJ17)
CAMTLTGNKLAF

SEQ ID NO: 319104 - protein, 17 aa, Homo sapiens
  CDR3 for beta chain variable domain of TCR clone 159552 (TRBV7-3, TRBJ2-3)
CASSLMKRMRGADTQYF

SEQ ID NO: 319105 - protein, 10 aa, Homo sapiens
  CDR3 for alpha chain variable domain of TCR clone 159553 (TRAV38-2/DV8, TRAJ40)
CASGTYKYIF

SEQ ID NO: 319106 - protein, 14 aa, Homo sapiens
  CDR3 for beta chain variable domain of TCR clone 159553 (TRBV7-9, TRBJ2-1)
CTSSPRGSLYEQFF

SEQ ID NO: 319107 - protein, 14 aa, Homo sapiens
  CDR3 for alpha chain variable domain of TCR clone 159554 (TRAV21, TRAJ28)
CAVGSGAGSYPLTF

SEQ ID NO: 319108 - protein, 14 aa, Homo sapiens
  CDR3 for beta chain variable domain of TCR clone 159554 (TRBV18, TRBJ1-4)
CASSPGPNGEKLFF

SEQ ID NO: 319109 - protein, 15 aa, Homo sapiens
  CDR3 for alpha chain variable domain of TCR clone 159555 (TRAV14/DV4, TRAJ26)
CAMREGQNYGQNFVF

SEQ ID NO: 319110 - protein, 13 aa, Homo sapiens
  CDR3 for beta chain variable domain of TCR clone 159555 (TRBV24-1, TRBJ2-2)
CAISDWSTGELFF

SEQ ID NO: 319111 - protein, 14 aa, Homo sapiens
  CDR3 for alpha chain variable domain of TCR clone 159556 (TRAV23/DV6, TRAJ11)
RAASLESGYSTLTF

SEQ ID NO: 319112 - protein, 15 aa, Homo sapiens
  CDR3 for beta chain variable domain of TCR clone 159556 (TRBV28, TRBJ2-7)
CASSSPGTEPFEQYF

SEQ ID NO: 319113 - protein, 14 aa, Homo sapiens
  CDR3 for alpha chain variable domain of TCR clone 159557 (TRAV17, TRAJ39)
CATDPVRAGNMLTF

SEQ ID NO: 319114 - protein, 14 aa, Homo sapiens
  CDR3 for beta chain variable domain of TCR clone 159557 (TRBV2, TRBJ2-7)
CASTVGRSSYEQYF

SEQ ID NO: 319115 - protein, 15 aa, Homo sapiens
  CDR3 for alpha chain variable domain of TCR clone 159558 (TRAV21, TRAJ53)
CATLNSGGSNYKLTF

SEQ ID NO: 319116 - protein, 15 aa, Homo sapiens
  CDR3 for beta chain variable domain of TCR clone 159558 (TRBV12-4, TRBJ2-1)
CASSLLATGNNEQFF

SEQ ID NO: 319117 - protein, 12 aa, Homo sapiens
  CDR3 for alpha chain variable domain of TCR clone 159559 (TRAV13-1, TRAJ21)
CAAKEGFRKFYF

SEQ ID NO: 319118 - protein, 14 aa, Homo sapiens
  CDR3 for beta chain variable domain of TCR clone 159559 (TRBV5-4, TRBJ1-1)
CASSLDSRRDEAFF

SEQ ID NO: 319119 - protein, 11 aa, Homo sapiens
  CDR3 for alpha chain variable domain of TCR clone 159560 (TRAV20, TRAJ27)
CAVTNAGKSTF

SEQ ID NO: 319120 - protein, 12 aa, Homo sapiens
  CDR3 for beta chain variable domain of TCR clone 159560 (TRBV5-1, TRBJ2-5)
CASSLGLETQYF

SEQ ID NO: 319121 - protein, 15 aa, Homo sapiens
  CDR3 for alpha chain variable domain of TCR clone 159561 (TRAV13-1, TRAJ45)
CAASGSGGGADRLTF

SEQ ID NO: 319122 - protein, 14 aa, Homo sapiens
  CDR3 for beta chain variable domain of TCR clone 159561 (TRBV12-4, TRBJ1-2)
CASSFVGTAYGYTF

SEQ ID NO: 319123 - protein, 15 aa, Homo sapiens
  CDR3 for alpha chain variable domain of TCR clone 159562 (TRAV12-1, TRAJ34)
CVVPPGGGNTDKLIF

SEQ ID NO: 319124 - protein, 11 aa, Homo sapiens
  CDR3 for beta chain variable domain of TCR clone 159562 (TRBV11-2, TRBJ1-1)
CASSINTEAFF

SEQ ID NO: 319125 - protein, 10 aa, Homo sapiens
  CDR3 for alpha chain variable domain of TCR clone 159563 (TRAV1-2, TRAJ20)
CACNDYKLSF

SEQ ID NO: 319126 - protein, 14 aa, Homo sapiens
  CDR3 for beta chain variable domain of TCR clone 159563 (TRBV20-1, TRBJ1-1)
CSAQTRIGGTEAFL

SEQ ID NO: 319127 - protein, 12 aa, Homo sapiens
  CDR3 for alpha chain variable domain of TCR clone 159564 (TRAV1-1, TRAJ8)
CAGGTGFQKLVF

SEQ ID NO: 319128 - protein, 16 aa, Homo sapiens
  CDR3 for beta chain variable domain of TCR clone 159564 (TRBV4-1, TRBJ2-7)
CASSQEWTSGPLEQYF

SEQ ID NO: 319129 - protein, 13 aa, Homo sapiens
  CDR3 for alpha chain variable domain of TCR clone 159565 (TRAV8-4, TRAJ9)
CAVSGAGGFKTIF

SEQ ID NO: 319130 - protein, 14 aa, Homo sapiens
  CDR3 for beta chain variable domain of TCR clone 159565 (TRBV19, TRBJ2-1)
CASPTFVLSGEQFF

SEQ ID NO: 319131 - protein, 22 aa, Homo sapiens
  CDR3 for alpha chain variable domain of TCR clone 159566 (TRAV1-1, TRAJ30)
CAVRDQTEMTRSSLEKGHDFIF

SEQ ID NO: 319132 - protein, 16 aa, Homo sapiens
  CDR3 for beta chain variable domain of TCR clone 159566 (TRBV20-1, TRBJ2-3)
CSAVRDRGPIADTQYF

SEQ ID NO: 319133 - protein, 15 aa, Homo sapiens
  CDR3 for alpha chain variable domain of TCR clone 159567 (TRAV21, )
CAVRQDAGNNHIQNP

SEQ ID NO: 319134 - protein, 16 aa, Homo sapiens
  CDR3 for beta chain variable domain of TCR clone 159567 (TRBV4-2, TRBJ1-1)
CASRPLDGGGDTEAFF

SEQ ID NO: 319135 - protein, 13 aa, Homo sapiens
  CDR3 for alpha chain variable domain of TCR clone 159568 (TRAV12-2, TRAJ39)
CAVNNNAGNMLTF

SEQ ID NO: 319136 - protein, 12 aa, Homo sapiens
  CDR3 for beta chain variable domain of TCR clone 159568 (TRBV5-1, TRBJ2-7)
CASSFRGYKQYF

SEQ ID NO: 319137 - protein, 13 aa, Homo sapiens
  CDR3 for alpha chain variable domain of TCR clone 159569 (TRAV8-3, TRAJ28)
CAVGAVGSYHLTF

SEQ ID NO: 319138 - protein, 15 aa, Homo sapiens
  CDR3 for beta chain variable domain of TCR clone 159569 (TRBV7-9, TRBJ1-5)
CASSQSHQPNQPQHF

SEQ ID NO: 319139 - protein, 14 aa, Homo sapiens
  CDR3 for alpha chain variable domain of TCR clone 159570 (TRAV12-2, TRAJ13)
CAVKKTGGYQKVTF

SEQ ID NO: 319140 - protein, 14 aa, Homo sapiens
  CDR3 for beta chain variable domain of TCR clone 159570 (TRBV4-1, TRBJ2-2)
CAGSQAVNTGELFF

SEQ ID NO: 319141 - protein, 14 aa, Homo sapiens
  CDR3 for alpha chain variable domain of TCR clone 159571 (TRAV26-1, TRAJ21)
CIVRPPYNFNKFYF

SEQ ID NO: 319142 - protein, 14 aa, Homo sapiens
  CDR3 for beta chain variable domain of TCR clone 159571 (TRBV7-9, TRBJ1-2)
CASSRQGANYGYTF

SEQ ID NO: 319143 - protein, 14 aa, Homo sapiens
  CDR3 for alpha chain variable domain of TCR clone 159572 (TRAV12-3, TRAJ10)
SHLPLPGGGNKLTF

SEQ ID NO: 319144 - protein, 13 aa, Homo sapiens
  CDR3 for beta chain variable domain of TCR clone 159572 (TRBV20-1, TRBJ2-1)
TSGALPPGNEQFF

SEQ ID NO: 319145 - protein, 14 aa, Homo sapiens
  CDR3 for alpha chain variable domain of TCR clone 159573 (TRAV35, TRAJ13)
CAGSPSGGYQKVTF

SEQ ID NO: 319146 - protein, 13 aa, Homo sapiens
  CDR3 for beta chain variable domain of TCR clone 159573 (TRBV7-2, TRBJ1-1)
CASNLKGAKVAFF

SEQ ID NO: 319147 - protein, 16 aa, Homo sapiens
  CDR3 for alpha chain variable domain of TCR clone 159574 (TRAV13-1, TRAJ48)
CAASIFGNFGNEKLTF

SEQ ID NO: 319148 - protein, 15 aa, Homo sapiens
  CDR3 for beta chain variable domain of TCR clone 159574 (TRBV4-1, TRBJ2-7)
CASSQQGQGFDEQYF

SEQ ID NO: 319149 - protein, 17 aa, Homo sapiens
  CDR3 for alpha chain variable domain of TCR clone 159575 (TRAV4, TRAJ18)
CLVGERSVGSTLGRLYF

SEQ ID NO: 319150 - protein, 18 aa, Homo sapiens
  CDR3 for beta chain variable domain of TCR clone 159575 (TRBV11-2, TRBJ2-3)
CASSLGGASRGATNTQYF

SEQ ID NO: 319151 - protein, 14 aa, Homo sapiens
  CDR3 for alpha chain variable domain of TCR clone 159576 (TRAV12-3, TRAJ10)
SHLPLTGGGSKLTF

SEQ ID NO: 319152 - protein, 15 aa, Homo sapiens
  CDR3 for beta chain variable domain of TCR clone 159576 (TRBV9, TRBJ2-1)
CASSLAGSSYNEQFF

SEQ ID NO: 319153 - protein, 18 aa, Homo sapiens
  CDR3 for alpha chain variable domain of TCR clone 159577 (TRAV26-2, TRAJ45)
CILRLWGYSGGGADGLTF

SEQ ID NO: 319154 - protein, 17 aa, Homo sapiens
  CDR3 for beta chain variable domain of TCR clone 159577 (TRBV20-1, TRBJ2-1)
CSASSSGLAGSYNEQFF

SEQ ID NO: 319155 - protein, 13 aa, Homo sapiens
  CDR3 for alpha chain variable domain of TCR clone 159578 (TRAV3, TRAJ21)
CAVREPDFNKFYF

SEQ ID NO: 319156 - protein, 12 aa, Homo sapiens
  CDR3 for beta chain variable domain of TCR clone 159578 (TRBV18, TRBJ2-1)
CASSSDEDEQFF

SEQ ID NO: 319157 - protein, 14 aa, Homo sapiens
  CDR3 for alpha chain variable domain of TCR clone 159579 (TRAV12-2, TRAJ13)
CAVKKTGGYQKVTF

SEQ ID NO: 319158 - protein, 18 aa, Homo sapiens
  CDR3 for beta chain variable domain of TCR clone 159579 (TRBV7-3, TRBJ2-1)
CASSLTLASGRAMVSSSS

SEQ ID NO: 319159 - protein, 15 aa, Homo sapiens
  CDR3 for alpha chain variable domain of TCR clone 159580 (TRAV26-1, TRAJ29)
CIVRIEGSGNTPLVF

SEQ ID NO: 319160 - protein, 14 aa, Homo sapiens
  CDR3 for beta chain variable domain of TCR clone 159580 (TRBV19, TRBJ2-2)
CASTVTANTGELFF

SEQ ID NO: 319161 - protein, 12 aa, Homo sapiens
  CDR3 for alpha chain variable domain of TCR clone 159581 (TRAV38-1, TRAJ57)
CAVMKLPPTLVF

SEQ ID NO: 319162 - protein, 13 aa, Homo sapiens
  CDR3 for beta chain variable domain of TCR clone 159581 (TRBV19, TRBJ2-7)
CASSTSGSYEQYF

SEQ ID NO: 319163 - protein, 13 aa, Homo sapiens
  CDR3 for alpha chain variable domain of TCR clone 159582 (TRAV1-2, TRAJ9)
CAALNTGGFKTIF

SEQ ID NO: 319164 - protein, 16 aa, Homo sapiens
  CDR3 for beta chain variable domain of TCR clone 159582 (TRBV28, TRBJ2-7)
CASSSGTSGRGYEQYF

SEQ ID NO: 319165 - protein, 23 aa, Homo sapiens
  CDR3 for alpha chain variable domain of TCR clone 159583 (TRAV26-1, TRAJ38)
CIVDNAGNNHIQNPDPAVYQLSD

SEQ ID NO: 319166 - protein, 13 aa, Homo sapiens
  CDR3 for beta chain variable domain of TCR clone 159583 (TRBV20-1, TRBJ1-1)
CSARGGGNTEAFF

SEQ ID NO: 319167 - protein, 15 aa, Homo sapiens
  CDR3 for alpha chain variable domain of TCR clone 159584 (TRAV29/DV5, TRAJ12)
CAAAPRMDSSYKLIF

SEQ ID NO: 319168 - protein, 14 aa, Homo sapiens
  CDR3 for beta chain variable domain of TCR clone 159584 (TRBV7-2, TRBJ1-2)
CASSQTGSTYGYTF

SEQ ID NO: 319169 - protein, 18 aa, Homo sapiens
  CDR3 for alpha chain variable domain of TCR clone 159585 (TRAV13-1, TRAJ52)
CAAKNPNAGGTSYGKLKF

SEQ ID NO: 319170 - protein, 13 aa, Homo sapiens
  CDR3 for beta chain variable domain of TCR clone 159585 (TRBV7-8, TRBJ2-7)
CASSFAGLYEQYF

SEQ ID NO: 319171 - protein, 13 aa, Homo sapiens
  CDR3 for alpha chain variable domain of TCR clone 159586 (TRAV3, TRAJ21)
GAVREPDFNKFYF

SEQ ID NO: 319172 - protein, 15 aa, Homo sapiens
  CDR3 for beta chain variable domain of TCR clone 159586 (TRBV2, TRBJ2-1)
CASSELAGGYNEQVF

SEQ ID NO: 319173 - protein, 14 aa, Homo sapiens
  CDR3 for alpha chain variable domain of TCR clone 159587 (TRAV1-1, TRAJ6)
CAVSLSGGSYIPTF

SEQ ID NO: 319174 - protein, 15 aa, Homo sapiens
  CDR3 for beta chain variable domain of TCR clone 159587 (TRBV28, TRBJ2-7)
CASSPGGRGFYEQYF

SEQ ID NO: 319175 - protein, 16 aa, Homo sapiens
  CDR3 for alpha chain variable domain of TCR clone 159588 (TRAV30, TRAJ24)
CGTETVDADSWGKFQF

SEQ ID NO: 319176 - protein, 17 aa, Homo sapiens
  CDR3 for beta chain variable domain of TCR clone 159588 (TRBV19, TRBJ2-7)
CASSISFYDSYPYEQYF

SEQ ID NO: 319177 - protein, 14 aa, Homo sapiens
  CDR3 for alpha chain variable domain of TCR clone 159589 (TRAV2, TRAJ9)
CAVDPNTGGFKTIF

SEQ ID NO: 319178 - protein, 15 aa, Homo sapiens
  CDR3 for beta chain variable domain of TCR clone 159589 (TRBV6-1, TRBJ2-6)
CASSSRPSGANVLTF

SEQ ID NO: 319179 - protein, 12 aa, Homo sapiens
  CDR3 for alpha chain variable domain of TCR clone 159590 (TRAV16, TRAJ10)
CSRTGGGNKLTF

SEQ ID NO: 319180 - protein, 14 aa, Homo sapiens
  CDR3 for beta chain variable domain of TCR clone 159590 (TRBV19, TRBJ2-7)
CASTVQGRPYEQYF

SEQ ID NO: 319181 - protein, 15 aa, Homo sapiens
  CDR3 for alpha chain variable domain of TCR clone 159591 (TRAV26-1, TRAJ27)
SIVRVLTPMQANQPL

SEQ ID NO: 319182 - protein, 13 aa, Homo sapiens
  CDR3 for beta chain variable domain of TCR clone 159591 (TRBV20-1, TRBJ2-7)
CSATHTSGYEQYF

SEQ ID NO: 319183 - protein, 13 aa, Homo sapiens
  CDR3 for alpha chain variable domain of TCR clone 159592 (TRAV3, TRAJ27)
CAVRPLGAGQSTF

SEQ ID NO: 319184 - protein, 15 aa, Homo sapiens
  CDR3 for beta chain variable domain of TCR clone 159592 (TRBV9, TRBJ1-6)
CASSVAGTGDSPLHF

SEQ ID NO: 319185 - protein, 15 aa, Homo sapiens
  CDR3 for alpha chain variable domain of TCR clone 159593 (TRAV13-1, TRAJ15)
CAASIERQAGTALIF

SEQ ID NO: 319186 - protein, 13 aa, Homo sapiens
  CDR3 for beta chain variable domain of TCR clone 159593 (TRBV18, TRBJ1-1)
CASSGGRNTEAFF

SEQ ID NO: 319187 - protein, 12 aa, Homo sapiens
  CDR3 for alpha chain variable domain of TCR clone 159594 (TRAV27, TRAJ35)
CAGAAFGNGLHC

SEQ ID NO: 319188 - protein, 16 aa, Homo sapiens
  CDR3 for beta chain variable domain of TCR clone 159594 (TRBV6-1, TRBJ2-1)
CASILRQGSSYNEQFF

SEQ ID NO: 319189 - protein, 13 aa, Homo sapiens
  CDR3 for alpha chain variable domain of TCR clone 159595 (TRAV21, TRAJ27)
CAARPGNAGKSPF

SEQ ID NO: 319190 - protein, 14 aa, Homo sapiens
  CDR3 for beta chain variable domain of TCR clone 159595 (TRBV7-7, TRBJ2-3)
CASSLGTVTDTQYF

SEQ ID NO: 319191 - protein, 12 aa, Homo sapiens
  CDR3 for alpha chain variable domain of TCR clone 159596 (TRAV12-1, TRAJ34)
CVVARATDKLIF

SEQ ID NO: 319192 - protein, 12 aa, Homo sapiens
  CDR3 for beta chain variable domain of TCR clone 159596 (TRBV7-9, TRBJ1-1)
CASSLVRGEAFF

SEQ ID NO: 319193 - protein, 12 aa, Homo sapiens
  CDR3 for alpha chain variable domain of TCR clone 159597 (TRAV8-3, TRAJ4)
PAFSGGYNKLIF

SEQ ID NO: 319194 - protein, 13 aa, Homo sapiens
  CDR3 for beta chain variable domain of TCR clone 159597 (TRBV20-1, TRBJ1-3)
CSAGADSGNTIYF

SEQ ID NO: 319195 - protein, 12 aa, Homo sapiens
  CDR3 for alpha chain variable domain of TCR clone 159598 (TRAV2, TRAJ36)
CAELTGANNLFF

SEQ ID NO: 319196 - protein, 14 aa, Homo sapiens
  CDR3 for beta chain variable domain of TCR clone 159598 (TRBV18, TRBJ2-7)
CASSPRGVAYEQYF

SEQ ID NO: 319197 - protein, 15 aa, Homo sapiens
  CDR3 for alpha chain variable domain of TCR clone 159599 (TRAV17, TRAJ10)
CATVLLTGGGNKLTF

SEQ ID NO: 319198 - protein, 15 aa, Homo sapiens
  CDR3 for beta chain variable domain of TCR clone 159599 (TRBV2, TRBJ2-7)
CASSEGLARSYEQYF

SEQ ID NO: 319199 - protein, 14 aa, Homo sapiens
  CDR3 for alpha chain variable domain of TCR clone 159600 (TRAV1-2, TRAJ16)
CAVNRFSDGQKLLF

SEQ ID NO: 319200 - protein, 14 aa, Homo sapiens
  CDR3 for beta chain variable domain of TCR clone 159600 (TRBV20-1, TRBJ1-1)
CSAQTRIGGTEAVF

SEQ ID NO: 319201 - protein, 14 aa, Homo sapiens
  CDR3 for alpha chain variable domain of TCR clone 159601 (TRAV1-2, TRAJ8)
CAVREDTDFQKLVF

SEQ ID NO: 319202 - protein, 11 aa, Homo sapiens
  CDR3 for beta chain variable domain of TCR clone 159601 (TRBV11-3, TRBJ2-7)
CASSRTYEQYF

SEQ ID NO: 319203 - protein, 13 aa, Homo sapiens
  CDR3 for alpha chain variable domain of TCR clone 159602 (TRAV21, TRAJ27)
CAAINTNAGKSTF

SEQ ID NO: 319204 - protein, 14 aa, Homo sapiens
  CDR3 for beta chain variable domain of TCR clone 159602 (TRBV7-2, TRBJ2-2)
CASSLGQNTGELFF

SEQ ID NO: 319205 - protein, 14 aa, Homo sapiens
  CDR3 for alpha chain variable domain of TCR clone 159603 (TRAV12-3, TRAJ10)
SHLPLTGGGNKLTF

SEQ ID NO: 319206 - protein, 10 aa, Homo sapiens
  CDR3 for beta chain variable domain of TCR clone 159603 (TRBV19, TRBJ1-1)
CASRQVEAFF

SEQ ID NO: 319207 - protein, 14 aa, Homo sapiens
  CDR3 for alpha chain variable domain of TCR clone 159604 (TRAV8-6, TRAJ29)
CAVSRGSGNTPLVF

SEQ ID NO: 319208 - protein, 13 aa, Homo sapiens
  CDR3 for beta chain variable domain of TCR clone 159604 (TRBV19, TRBJ1-5)
CASSEGSNQPQHF

SEQ ID NO: 319209 - protein, 12 aa, Homo sapiens
  CDR3 for alpha chain variable domain of TCR clone 159605 (TRAV13-1, TRAJ42)
SVLRGSQGNLIF

SEQ ID NO: 319210 - protein, 13 aa, Homo sapiens
  CDR3 for beta chain variable domain of TCR clone 159605 (TRBV2, TRBJ1-4)
CASSELGADKLFF

SEQ ID NO: 319211 - protein, 13 aa, Homo sapiens
  CDR3 for alpha chain variable domain of TCR clone 159606 (TRAV2, TRAJ40)
CAVVTSGTYKYIF

SEQ ID NO: 319212 - protein, 13 aa, Homo sapiens
  CDR3 for beta chain variable domain of TCR clone 159606 (TRBV20-1, TRBJ1-6)
CSAPLGVGSPLHF

SEQ ID NO: 319213 - protein, 13 aa, Homo sapiens
  CDR3 for alpha chain variable domain of TCR clone 159607 (TRAV27, TRAJ45)
CRSSGGGADGLTF

SEQ ID NO: 319214 - protein, 14 aa, Homo sapiens
  CDR3 for beta chain variable domain of TCR clone 159607 (TRBV11-2, TRBJ2-5)
CASSRTGGIETQYF

SEQ ID NO: 319215 - protein, 14 aa, Homo sapiens
  CDR3 for alpha chain variable domain of TCR clone 159608 (TRAV14/DV4, TRAJ20)
CAMRESLNDYKLSF

SEQ ID NO: 319216 - protein, 12 aa, Homo sapiens
  CDR3 for beta chain variable domain of TCR clone 159608 (TRBV29-1, TRBJ2-3)
CSVTGGADTQYF

SEQ ID NO: 319217 - protein, 14 aa, Homo sapiens
  CDR3 for alpha chain variable domain of TCR clone 159609 (TRAV35, TRAJ33)
CAGSSQDSNYQLIW

SEQ ID NO: 319218 - protein, 15 aa, Homo sapiens
  CDR3 for beta chain variable domain of TCR clone 159609 (TRBV28, TRBJ2-5)
CASSPGQGSIGTQYF

SEQ ID NO: 319219 - protein, 18 aa, Homo sapiens
  CDR3 for alpha chain variable domain of TCR clone 159610 (TRAV12-3, TRAJ52)
CAMSVGGAGGTSYGELTF

SEQ ID NO: 319220 - protein, 15 aa, Homo sapiens
  CDR3 for beta chain variable domain of TCR clone 159610 (TRBV27, TRBJ1-6)
CASSFDRGLGSPLHL

SEQ ID NO: 319221 - protein, 11 aa, Homo sapiens
  CDR3 for alpha chain variable domain of TCR clone 159611 (TRAV13-1, TRAJ40)
CAVSGTYKYIF

SEQ ID NO: 319222 - protein, 12 aa, Homo sapiens
  CDR3 for beta chain variable domain of TCR clone 159611 (TRBV11-2, TRBJ2-2)
CASSLPTGELFF

SEQ ID NO: 319223 - protein, 12 aa, Homo sapiens
  CDR3 for alpha chain variable domain of TCR clone 159612 (TRAV39, TRAJ22)
CAVDWFCKATDL

SEQ ID NO: 319224 - protein, 15 aa, Homo sapiens
  CDR3 for beta chain variable domain of TCR clone 159612 (TRBV7-8, TRBJ2-2)
CASSLEAGDTGELFF

SEQ ID NO: 319225 - protein, 13 aa, Homo sapiens
  CDR3 for alpha chain variable domain of TCR clone 159613 (TRAV12-2, TRAJ52)
CNAGGTSYGKLTF

SEQ ID NO: 319226 - protein, 16 aa, Homo sapiens
  CDR3 for beta chain variable domain of TCR clone 159613 (TRBV7-2, TRBJ1-3)
CASSRLEASSGNTIYF

SEQ ID NO: 319227 - protein, 18 aa, Homo sapiens
  CDR3 for alpha chain variable domain of TCR clone 159614 (TRAV9-2, TRAJ52)
CALSRHNASGTSYGKLTF

SEQ ID NO: 319228 - protein, 13 aa, Homo sapiens
  CDR3 for beta chain variable domain of TCR clone 159614 (TRBV7-9, TRBJ1-2)
CASSLKQNYGYAF

SEQ ID NO: 319229 - protein, 16 aa, Homo sapiens
  CDR3 for alpha chain variable domain of TCR clone 159615 (TRAV30, TRAJ24)
CGTEIVDADSWGKFQI

SEQ ID NO: 319230 - protein, 15 aa, Homo sapiens
  CDR3 for beta chain variable domain of TCR clone 159615 (TRBV6-3, TRBJ2-7)
CASSSPGTVFYEQYF

SEQ ID NO: 319231 - protein, 15 aa, Homo sapiens
  CDR3 for alpha chain variable domain of TCR clone 159616 (TRAV2, TRAJ9)
CAVEDRGTGGFKTIF

SEQ ID NO: 319232 - protein, 16 aa, Homo sapiens
  CDR3 for beta chain variable domain of TCR clone 159616 (TRBV13, TRBJ2-2)
CASSPRTGEHTGELFF

SEQ ID NO: 319233 - protein, 16 aa, Homo sapiens
  CDR3 for alpha chain variable domain of TCR clone 159617 (TRAV30, TRAJ24)
CGTEIVDADSWGKCQF

SEQ ID NO: 319234 - protein, 16 aa, Homo sapiens
  CDR3 for beta chain variable domain of TCR clone 159617 (TRBV5-1, TRBJ2-2)
CASSSRTGGRTGELFF

SEQ ID NO: 319235 - protein, 10 aa, Homo sapiens
  CDR3 for alpha chain variable domain of TCR clone 159618 (TRAV1-2, TRAJ23)
CAGQGGKLIF

SEQ ID NO: 319236 - protein, 13 aa, Homo sapiens
  CDR3 for beta chain variable domain of TCR clone 159618 (TRBV7-7, TRBJ2-3)
CACSLSRADTQYF

SEQ ID NO: 319237 - protein, 18 aa, Homo sapiens
  CDR3 for alpha chain variable domain of TCR clone 159619 (TRAV13-1, TRAJ10)
CAASKGRAVTGGGNKLTF

SEQ ID NO: 319238 - protein, 15 aa, Homo sapiens
  CDR3 for beta chain variable domain of TCR clone 159619 (TRBV20-1, TRBJ2-7)
CSARDRVSGMDEQYF

SEQ ID NO: 319239 - protein, 14 aa, Homo sapiens
  CDR3 for alpha chain variable domain of TCR clone 159620 (TRAV1-2, TRAJ16)
CAVNRFSDGPKLLF

SEQ ID NO: 319240 - protein, 13 aa, Homo sapiens
  CDR3 for beta chain variable domain of TCR clone 159620 (TRBV20-1, TRBJ1-1)
CSARGGGNTEAFF

SEQ ID NO: 319241 - protein, 15 aa, Homo sapiens
  CDR3 for alpha chain variable domain of TCR clone 159621 (TRAV3, TRAJ3)
CAVRDGHSSASKIIF

SEQ ID NO: 319242 - protein, 17 aa, Homo sapiens
  CDR3 for beta chain variable domain of TCR clone 159621 (TRBV25-1, TRBJ2-7)
CASSDARVVFSSYEHYF

SEQ ID NO: 319243 - protein, 11 aa, Homo sapiens
  CDR3 for alpha chain variable domain of TCR clone 159622 (TRAV12-1, TRAJ43)
CVEYDNNDMRF

SEQ ID NO: 319244 - protein, 16 aa, Homo sapiens
  CDR3 for beta chain variable domain of TCR clone 159622 (TRBV5-4, TRBJ2-1)
CASILVGSGQDNEQFF

SEQ ID NO: 319245 - protein, 17 aa, Homo sapiens
  CDR3 for alpha chain variable domain of TCR clone 159623 (TRAV26-2, TRAJ42)
CILRDVGYGGSQGNLIF

SEQ ID NO: 319246 - protein, 16 aa, Homo sapiens
  CDR3 for beta chain variable domain of TCR clone 159623 (TRBV6-5, TRBJ2-1)
CASSETLAGHYNVQFF

SEQ ID NO: 319247 - protein, 15 aa, Homo sapiens
  CDR3 for alpha chain variable domain of TCR clone 159624 (TRAV8-3, TRAJ45)
CASSYSGGGADGLTF

SEQ ID NO: 319248 - protein, 15 aa, Homo sapiens
  CDR3 for beta chain variable domain of TCR clone 159624 (TRBV7-9, TRBJ2-2)
CASRRTGGRTGELFF

SEQ ID NO: 319249 - protein, 12 aa, Homo sapiens
  CDR3 for alpha chain variable domain of TCR clone 159625 (TRAV27, TRAJ33)
CAGDGSNYQLIW

SEQ ID NO: 319250 - protein, 16 aa, Homo sapiens
  CDR3 for beta chain variable domain of TCR clone 159625 (TRBV7-2, TRBJ2-3)
CASSLVALYSTDTQYF

SEQ ID NO: 319251 - protein, 13 aa, Homo sapiens
  CDR3 for alpha chain variable domain of TCR clone 159626 (TRAV36/DV7, TRAJ54)
CAVAIQGAQKLVF

SEQ ID NO: 319252 - protein, 14 aa, Homo sapiens
  CDR3 for beta chain variable domain of TCR clone 159626 (TRBV19, TRBJ2-7)
CASNFRDTFTGMYF

SEQ ID NO: 319253 - protein, 16 aa, Homo sapiens
  CDR3 for alpha chain variable domain of TCR clone 159627 (TRAV30, TRAJ24)
CGTEIVDADSWGKFQF

SEQ ID NO: 319254 - protein, 13 aa, Homo sapiens
  CDR3 for beta chain variable domain of TCR clone 159627 (TRBV7-3, TRBJ1-1)
CASSQDWGAETFF

SEQ ID NO: 319255 - protein, 17 aa, Homo sapiens
  CDR3 for alpha chain variable domain of TCR clone 159628 (TRAV12-3, TRAJ6)
CAMSARGGAGGSYIPTF

SEQ ID NO: 319256 - protein, 12 aa, Homo sapiens
  CDR3 for beta chain variable domain of TCR clone 159628 (TRBV12-4, TRBJ2-7)
CASSLGGYEQYF

SEQ ID NO: 319257 - protein, 14 aa, Homo sapiens
  CDR3 for alpha chain variable domain of TCR clone 159629 (TRAV8-6, TRAJ34)
CAVSDLDNTDKLIF

SEQ ID NO: 319258 - protein, 15 aa, Homo sapiens
  CDR3 for beta chain variable domain of TCR clone 159629 (TRBV7-9, TRBJ1-5)
CASSQGHQPNQPQHF

SEQ ID NO: 319259 - protein, 14 aa, Homo sapiens
  CDR3 for alpha chain variable domain of TCR clone 159630 (TRAV1-2, TRAJ16)
CAVNRFSGGQKLLF

SEQ ID NO: 319260 - protein, 14 aa, Homo sapiens
  CDR3 for beta chain variable domain of TCR clone 159630 (TRBV7-9, TRBJ2-3)
CASSLEDGTDTQYF

SEQ ID NO: 319261 - protein, 16 aa, Homo sapiens
  CDR3 for alpha chain variable domain of TCR clone 159631 (TRAV17, TRAJ28)
CASYAYSGAGSYKLTF

SEQ ID NO: 319262 - protein, 15 aa, Homo sapiens
  CDR3 for beta chain variable domain of TCR clone 159631 (TRBV4-2, TRBJ2-1)
CASSPSGGLYNEQFF

SEQ ID NO: 319263 - protein, 11 aa, Homo sapiens
  CDR3 for alpha chain variable domain of TCR clone 159632 (TRAV1-2, TRAJ20)
CAVSNDYKLSF

SEQ ID NO: 319264 - protein, 16 aa, Homo sapiens
  CDR3 for beta chain variable domain of TCR clone 159632 (TRBV29-1, TRBJ2-6)
CSVEDITYSGANVLTL

SEQ ID NO: 319265 - protein, 12 aa, Homo sapiens
  CDR3 for alpha chain variable domain of TCR clone 159633 (TRAV3, TRAJ31)
CAAQRANARLMV

SEQ ID NO: 319266 - protein, 16 aa, Homo sapiens
  CDR3 for beta chain variable domain of TCR clone 159633 (TRBV4-2, TRBJ1-1)
CASSPSPGRAAPEAFF

SEQ ID NO: 319267 - protein, 14 aa, Homo sapiens
  CDR3 for alpha chain variable domain of TCR clone 159634 (TRAV35, TRAJ42)
CAGRYGGSQGNFIF

SEQ ID NO: 319268 - protein, 15 aa, Homo sapiens
  CDR3 for beta chain variable domain of TCR clone 159634 (TRBV7-9, TRBJ2-1)
CASSLGWGRANEQFF

SEQ ID NO: 319269 - protein, 14 aa, Homo sapiens
  CDR3 for alpha chain variable domain of TCR clone 159635 (TRAV1-2, TRAJ16)
CAVNRFSDGQKLLF

SEQ ID NO: 319270 - protein, 15 aa, Homo sapiens
  CDR3 for beta chain variable domain of TCR clone 159635 (TRBV5-1, TRBJ1-1)
CASSLNTLGNTEAFF

SEQ ID NO: 319271 - protein, 14 aa, Homo sapiens
  CDR3 for alpha chain variable domain of TCR clone 159636 (TRAV12-2, TRAJ13)
CSVKKTGGYQKVTF

SEQ ID NO: 319272 - protein, 19 aa, Homo sapiens
  CDR3 for beta chain variable domain of TCR clone 159636 (TRBV25-1, TRBJ2-2)
CAILVYRVDRGRKTGELFF

SEQ ID NO: 319273 - protein, 16 aa, Homo sapiens
  CDR3 for alpha chain variable domain of TCR clone 159637 (TRAV17, TRAJ35)
CATAEGGIGFGNVLHC

SEQ ID NO: 319274 - protein, 16 aa, Homo sapiens
  CDR3 for beta chain variable domain of TCR clone 159637 (TRBV6-5, TRBJ2-7)
CASSSDPISGFYEQYF

SEQ ID NO: 319275 - protein, 13 aa, Homo sapiens
  CDR3 for alpha chain variable domain of TCR clone 159638 (TRAV13-1, TRAJ29)
CAASIGLNTPLVF

SEQ ID NO: 319276 - protein, 15 aa, Homo sapiens
  CDR3 for beta chain variable domain of TCR clone 159638 (TRBV7-2, TRBJ2-1)
CASSSGLAGGNEQFF

SEQ ID NO: 319277 - protein, 13 aa, Homo sapiens
  CDR3 for alpha chain variable domain of TCR clone 159639 (TRAV23/DV6, TRAJ36)
CAVSQTGANNLFF

SEQ ID NO: 319278 - protein, 13 aa, Homo sapiens
  CDR3 for beta chain variable domain of TCR clone 159639 (TRBV5-4, TRBJ1-5)
CASSLGGDQPQHF

SEQ ID NO: 319279 - protein, 14 aa, Homo sapiens
  CDR3 for alpha chain variable domain of TCR clone 159640 (TRAV1-2, TRAJ8)
CAVREDTGFQKLVF

SEQ ID NO: 319280 - protein, 13 aa, Homo sapiens
  CDR3 for beta chain variable domain of TCR clone 159640 (TRBV6-5, TRBJ2-1)
CASSYELSNEQFF

SEQ ID NO: 319281 - protein, 14 aa, Homo sapiens
  CDR3 for alpha chain variable domain of TCR clone 159641 (TRAV3, TRAJ5)
CCERPRHGRRALTF

SEQ ID NO: 319282 - protein, 13 aa, Homo sapiens
  CDR3 for beta chain variable domain of TCR clone 159641 (TRBV12-4, TRBJ2-7)
CASSPTGTYEQYF

SEQ ID NO: 319283 - protein, 13 aa, Homo sapiens
  CDR3 for alpha chain variable domain of TCR clone 159642 (TRAV36/DV7, TRAJ29)
CAVEPSGNTPLVF

SEQ ID NO: 319284 - protein, 12 aa, Homo sapiens
  CDR3 for beta chain variable domain of TCR clone 159642 (TRBV12-5, TRBJ2-5)
CASGQGVETQYF

SEQ ID NO: 319285 - protein, 16 aa, Homo sapiens
  CDR3 for alpha chain variable domain of TCR clone 159643 (TRAV3, TRAJ42)
CAVRDIEGGSQVNLIF

SEQ ID NO: 319286 - protein, 15 aa, Homo sapiens
  CDR3 for beta chain variable domain of TCR clone 159643 (TRBV9, TRBJ2-2)
CASSDFAGASGELFF

SEQ ID NO: 319287 - protein, 14 aa, Homo sapiens
  CDR3 for alpha chain variable domain of TCR clone 159644 (TRAV12-2, TRAJ13)
CAVKTTGGYQKVTF

SEQ ID NO: 319288 - protein, 13 aa, Homo sapiens
  CDR3 for beta chain variable domain of TCR clone 159644 (TRBV20-1, TRBJ1-1)
CSARLGQGTEAFF

SEQ ID NO: 319289 - protein, 14 aa, Homo sapiens
  CDR3 for alpha chain variable domain of TCR clone 159645 (TRAV8-4, TRAJ17)
CAGSEGAAGNKLTF

SEQ ID NO: 319290 - protein, 13 aa, Homo sapiens
  CDR3 for beta chain variable domain of TCR clone 159645 (TRBV19, TRBJ2-1)
CASSMYRVNEQFF

SEQ ID NO: 319291 - protein, 13 aa, Homo sapiens
  CDR3 for alpha chain variable domain of TCR clone 159646 (TRAV12-2, TRAJ39)
CAVNNNAGNMLTF

SEQ ID NO: 319292 - protein, 15 aa, Homo sapiens
  CDR3 for beta chain variable domain of TCR clone 159646 (TRBV20-1, TRBJ2-7)
CSARDRVSGMDEQYF

SEQ ID NO: 319293 - protein, 13 aa, Homo sapiens
  CDR3 for alpha chain variable domain of TCR clone 159647 (TRAV3, TRAJ21)
CAVREPDFNKFYF

SEQ ID NO: 319294 - protein, 17 aa, Homo sapiens
  CDR3 for beta chain variable domain of TCR clone 159647 (TRBV5-1, TRBJ2-6)
CASSLTTGGTGANVLTF

SEQ ID NO: 319295 - protein, 15 aa, Homo sapiens
  CDR3 for alpha chain variable domain of TCR clone 159648 (TRAV12-2, TRAJ50)
CRGTATKTSYDKVIF

SEQ ID NO: 319296 - protein, 12 aa, Homo sapiens
  CDR3 for beta chain variable domain of TCR clone 159648 (TRBV12-4, TRBJ1-5)
CASSLGRQPQHF

SEQ ID NO: 319297 - protein, 15 aa, Homo sapiens
  CDR3 for alpha chain variable domain of TCR clone 159649 (TRAV16, TRAJ4)
CALEDPSGGYNKLIF

SEQ ID NO: 319298 - protein, 12 aa, Homo sapiens
  CDR3 for beta chain variable domain of TCR clone 159649 (TRBV28, TRBJ2-1)
CASSRLVGEQFF

SEQ ID NO: 319299 - protein, 13 aa, Homo sapiens
  CDR3 for alpha chain variable domain of TCR clone 159650 (TRAV27, TRAJ45)
CRSSGGGADGLTF

SEQ ID NO: 319300 - protein, 15 aa, Homo sapiens
  CDR3 for beta chain variable domain of TCR clone 159650 (TRBV6-4, TRBJ1-5)
CASSASSRINQPQHF

SEQ ID NO: 319301 - protein, 16 aa, Homo sapiens
  CDR3 for alpha chain variable domain of TCR clone 159651 (TRAV17, TRAJ22)
CATGPISAGSARQLTF

SEQ ID NO: 319302 - protein, 13 aa, Homo sapiens
  CDR3 for beta chain variable domain of TCR clone 159651 (TRBV11-2, TRBJ2-1)
CASSLGLAGGRFF

SEQ ID NO: 319303 - protein, 13 aa, Homo sapiens
  CDR3 for alpha chain variable domain of TCR clone 159652 (TRAV29/DV5, TRAJ26)
CAATDNYGQNFVF

SEQ ID NO: 319304 - protein, 12 aa, Homo sapiens
  CDR3 for beta chain variable domain of TCR clone 159652 (TRBV29-1, TRBJ2-3)
CSVTGGADTQYF

SEQ ID NO: 319305 - protein, 12 aa, Homo sapiens
  CDR3 for alpha chain variable domain of TCR clone 159653 (TRAV13-1, TRAJ21)
CAAKEGFNKFYF

SEQ ID NO: 319306 - protein, 14 aa, Homo sapiens
  CDR3 for beta chain variable domain of TCR clone 159653 (TRBV7-8, TRBJ2-3)
CASSLDAGTDTQYF

SEQ ID NO: 319307 - protein, 20 aa, Homo sapiens
  CDR3 for alpha chain variable domain of TCR clone 159654 (TRAV6, TRAJ37)
TASQPADSPRKAGNTGKLIF

SEQ ID NO: 319308 - protein, 14 aa, Homo sapiens
  CDR3 for beta chain variable domain of TCR clone 159654 (TRBV7-2, TRBJ2-7)
CASRSQGAAYEQYF

SEQ ID NO: 319309 - protein, 21 aa, Homo sapiens
  CDR3 for alpha chain variable domain of TCR clone 159655 (TRAV12-1, TRAJ20)
SSVIQPPTSVRYIFNDYKLSF

SEQ ID NO: 319310 - protein, 12 aa, Homo sapiens
  CDR3 for beta chain variable domain of TCR clone 159655 (TRBV7-8, TRBJ2-7)
CASSLGDREQYF

SEQ ID NO: 319311 - protein, 15 aa, Homo sapiens
  CDR3 for alpha chain variable domain of TCR clone 159656 (TRAV8-1, TRAJ42)
CAVTNYGGSQGNLIF

SEQ ID NO: 319312 - protein, 11 aa, Homo sapiens
  CDR3 for beta chain variable domain of TCR clone 159656 (TRBV19, TRBJ2-5)
CDSSIKETQYF

SEQ ID NO: 319313 - protein, 16 aa, Homo sapiens
  CDR3 for alpha chain variable domain of TCR clone 159657 (TRAV1-2, TRAJ10)
CAVRGVLTGGGNKLTF

SEQ ID NO: 319314 - protein, 16 aa, Homo sapiens
  CDR3 for beta chain variable domain of TCR clone 159657 (TRBV7-3, TRBJ2-1)
FASSKPLAGGYNEQFF

SEQ ID NO: 319315 - protein, 15 aa, Homo sapiens
  CDR3 for alpha chain variable domain of TCR clone 159658 (TRAV12-1, TRAJ47)
CVVTNRLKGGNKLVL

SEQ ID NO: 319316 - protein, 19 aa, Homo sapiens
  CDR3 for beta chain variable domain of TCR clone 159658 (TRBV20-1, TRBJ2-5)
CSARPQGLAGTSKSGTQYF

SEQ ID NO: 319317 - protein, 19 aa, Homo sapiens
  CDR3 for alpha chain variable domain of TCR clone 159659 (TRAV1-1, TRAJ13)
CLLLLRCEGESGGCQKVTF

SEQ ID NO: 319318 - protein, 19 aa, Homo sapiens
  CDR3 for beta chain variable domain of TCR clone 159659 (TRBV14, TRBJ2-1)
CASSQDQRWEAPEYNEQFF

SEQ ID NO: 319319 - protein, 18 aa, Homo sapiens
  CDR3 for alpha chain variable domain of TCR clone 159660 (TRAV13-1, TRAJ52)
CAAKNPNAGGTSYGKLTF

SEQ ID NO: 319320 - protein, 14 aa, Homo sapiens
  CDR3 for beta chain variable domain of TCR clone 159660 (TRBV12-4, TRBJ1-1)
CASSLGTGGTEAFF

SEQ ID NO: 319321 - protein, 17 aa, Homo sapiens
  CDR3 for alpha chain variable domain of TCR clone 159661 (TRAV3, TRAJ6)
CAVRYGPRAGGSYITTF

SEQ ID NO: 319322 - protein, 14 aa, Homo sapiens
  CDR3 for beta chain variable domain of TCR clone 159661 (TRBV7-2, TRBJ2-7)
CASSPKTSFYEQYF

SEQ ID NO: 319323 - protein, 17 aa, Homo sapiens
  CDR3 for alpha chain variable domain of TCR clone 159662 (TRAV3, TRAJ3)
CAVRDMGKQCFQDNLCI

SEQ ID NO: 319324 - protein, 14 aa, Homo sapiens
  CDR3 for beta chain variable domain of TCR clone 159662 (TRBV7-6, TRBJ2-3)
CASSLGTVTDTQYF

SEQ ID NO: 319325 - protein, 13 aa, Homo sapiens
  CDR3 for alpha chain variable domain of TCR clone 159663 (TRAV27, TRAJ45)
CRSSGGGADGLTF

SEQ ID NO: 319326 - protein, 14 aa, Homo sapiens
  CDR3 for beta chain variable domain of TCR clone 159663 (TRBV7-8, TRBJ1-2)
CASSPDSLSYGYTF

SEQ ID NO: 319327 - protein, 12 aa, Homo sapiens
  CDR3 for alpha chain variable domain of TCR clone 159664 (TRAV8-4, TRAJ31)
CAVSDSNARLMF

SEQ ID NO: 319328 - protein, 15 aa, Homo sapiens
  CDR3 for beta chain variable domain of TCR clone 159664 (TRBV6-6, TRBJ2-7)
CASRFWGQGADEQYF

SEQ ID NO: 319329 - protein, 14 aa, Homo sapiens
  CDR3 for alpha chain variable domain of TCR clone 159665 (TRAV12-1, TRAJ13)
CVVIDSGGYQKVTF

SEQ ID NO: 319330 - protein, 13 aa, Homo sapiens
  CDR3 for beta chain variable domain of TCR clone 159665 (TRBV7-6, TRBJ1-2)
CASSLVADYGYTF

SEQ ID NO: 319331 - protein, 18 aa, Homo sapiens
  CDR3 for alpha chain variable domain of TCR clone 159666 (TRAV12-3, TRAJ52)
CAMSVGGAGGTSYGKLTF

SEQ ID NO: 319332 - protein, 13 aa, Homo sapiens
  CDR3 for beta chain variable domain of TCR clone 159666 (TRBV9, TRBJ2-1)
CASSPSGGSEQFF

SEQ ID NO: 319333 - protein, 15 aa, Homo sapiens
  CDR3 for alpha chain variable domain of TCR clone 159667 (TRAV17, TRAJ45)
CATAELGGGADGLTF

SEQ ID NO: 319334 - protein, 14 aa, Homo sapiens
  CDR3 for beta chain variable domain of TCR clone 159667 (TRBV3-1, TRBJ2-5)
CASSQAVRQETRYF

SEQ ID NO: 319335 - protein, 14 aa, Homo sapiens
  CDR3 for alpha chain variable domain of TCR clone 159668 (TRAV12-1, TRAJ17)
CVVSYKAAGTKLTF

SEQ ID NO: 319336 - protein, 17 aa, Homo sapiens
  CDR3 for beta chain variable domain of TCR clone 159668 (TRBV20-1, TRBJ2-1)
CSASSSGLAGSYNEQFF

SEQ ID NO: 319337 - protein, 15 aa, Homo sapiens
  CDR3 for alpha chain variable domain of TCR clone 159669 (TRAV26-1, TRAJ29)
CIFRVVGSGNTPLVF

SEQ ID NO: 319338 - protein, 15 aa, Homo sapiens
  CDR3 for beta chain variable domain of TCR clone 159669 (TRBV7-9, TRBJ1-5)
CASSQGHQPNQPQHF

SEQ ID NO: 319339 - protein, 17 aa, Homo sapiens
  CDR3 for alpha chain variable domain of TCR clone 159670 (TRAV3, TRAJ42)
CAVRDRDYGGSQGNLIF

SEQ ID NO: 319340 - protein, 16 aa, Homo sapiens
  CDR3 for beta chain variable domain of TCR clone 159670 (TRBV20-1, TRBJ1-4)
CSAPGQGLLTNEKLFF

SEQ ID NO: 319341 - protein, 18 aa, Homo sapiens
  CDR3 for alpha chain variable domain of TCR clone 159671 (TRAV13-1, TRAJ52)
CAASKRSAGGTSDGKLTF

SEQ ID NO: 319342 - protein, 15 aa, Homo sapiens
  CDR3 for beta chain variable domain of TCR clone 159671 (TRBV28, TRBJ2-1)
CASSIIAGGRSEQFF

SEQ ID NO: 319343 - protein, 13 aa, Homo sapiens
  CDR3 for alpha chain variable domain of TCR clone 159672 (TRAV26-2, TRAJ54)
CIPRVGGAQKLVF

SEQ ID NO: 319344 - protein, 16 aa, Homo sapiens
  CDR3 for beta chain variable domain of TCR clone 159672 (TRBV7-2, TRBJ2-7)
CASSLEAGGPWYEQYF

SEQ ID NO: 319345 - protein, 14 aa, Homo sapiens
  CDR3 for alpha chain variable domain of TCR clone 159673 (TRAV39, TRAJ54)
CAVVLIQGTQKLVF

SEQ ID NO: 319346 - protein, 13 aa, Homo sapiens
  CDR3 for beta chain variable domain of TCR clone 159673 (TRBV29-1, TRBJ2-5)
CSVGGTSAETQYF

SEQ ID NO: 319347 - protein, 15 aa, Homo sapiens
  CDR3 for alpha chain variable domain of TCR clone 159674 (TRAV21, TRAJ22)
CDVRLFFCFCKATDL

SEQ ID NO: 319348 - protein, 14 aa, Homo sapiens
  CDR3 for beta chain variable domain of TCR clone 159674 (TRBV19, TRBJ1-5)
CASRAPDSFLSQHF

SEQ ID NO: 319349 - protein, 12 aa, Homo sapiens
  CDR3 for alpha chain variable domain of TCR clone 159675 (TRAV21, TRAJ42)
CAVGGSQGNLIF

SEQ ID NO: 319350 - protein, 13 aa, Homo sapiens
  CDR3 for beta chain variable domain of TCR clone 159675 (TRBV12-4, TRBJ1-1)
CQSLGTGGTEAFF

SEQ ID NO: 319351 - protein, 12 aa, Homo sapiens
  CDR3 for alpha chain variable domain of TCR clone 159676 (TRAV21, TRAJ3)
CCFYSSASKIIF

SEQ ID NO: 319352 - protein, 18 aa, Homo sapiens
  CDR3 for beta chain variable domain of TCR clone 159676 (TRBV3-1, TRBJ2-1)
CASSQDLPGRPLFDEQFF

SEQ ID NO: 319353 - protein, 12 aa, Homo sapiens
  CDR3 for alpha chain variable domain of TCR clone 159677 (TRAV13-1, TRAJ21)
CAAKEGFNKFYF

SEQ ID NO: 319354 - protein, 14 aa, Homo sapiens
  CDR3 for beta chain variable domain of TCR clone 159677 (TRBV12-4, TRBJ2-5)
CASSFGASGGTQYF

SEQ ID NO: 319355 - protein, 14 aa, Homo sapiens
  CDR3 for alpha chain variable domain of TCR clone 159678 (TRAV35, TRAJ22)
CAGLMPGSASQLTF

SEQ ID NO: 319356 - protein, 13 aa, Homo sapiens
  CDR3 for beta chain variable domain of TCR clone 159678 (TRBV20-1, TRBJ2-7)
CSATHTSGYEQYF

SEQ ID NO: 319357 - protein, 14 aa, Homo sapiens
  CDR3 for alpha chain variable domain of TCR clone 159679 (TRAV1-1, TRAJ23)
CAVKAYNQGGKLIF

SEQ ID NO: 319358 - protein, 14 aa, Homo sapiens
  CDR3 for beta chain variable domain of TCR clone 159679 (TRBV7-2, TRBJ2-7)
CASRSQGAAYEQYF

SEQ ID NO: 319359 - protein, 11 aa, Homo sapiens
  CDR3 for alpha chain variable domain of TCR clone 159680 (TRAV12-1, TRAJ40)
CGLLRNLQIHF

SEQ ID NO: 319360 - protein, 15 aa, Homo sapiens
  CDR3 for beta chain variable domain of TCR clone 159680 (TRBV7-9, TRBJ1-6)
CASSSPGRGNSPLHF

SEQ ID NO: 319361 - protein, 13 aa, Homo sapiens
  CDR3 for alpha chain variable domain of TCR clone 159681 (TRAV13-2, TRAJ4)
CAESPGGYNKLIF

SEQ ID NO: 319362 - protein, 12 aa, Homo sapiens
  CDR3 for beta chain variable domain of TCR clone 159681 (TRBV3-1, TRBJ2-1)
CASSQAYNEQFF

SEQ ID NO: 319363 - protein, 14 aa, Homo sapiens
  CDR3 for alpha chain variable domain of TCR clone 159682 (TRAV3, TRAJ9)
CAVRGNTGGFKTIF

SEQ ID NO: 319364 - protein, 16 aa, Homo sapiens
  CDR3 for beta chain variable domain of TCR clone 159682 (TRBV2, TRBJ2-5)
CASSETQGVGEETQYF

SEQ ID NO: 319365 - protein, 10 aa, Homo sapiens
  CDR3 for alpha chain variable domain of TCR clone 159683 (TRAV1-2, TRAJ31)
CVSEDARLMF

SEQ ID NO: 319366 - protein, 18 aa, Homo sapiens
  CDR3 for beta chain variable domain of TCR clone 159683 (TRBV11-2, TRBJ2-3)
CASSLGGASRGAPNTQYF

SEQ ID NO: 319367 - protein, 12 aa, Homo sapiens
  CDR3 for alpha chain variable domain of TCR clone 159684 (TRAV4, TRAJ10)
CRFTGGGNKLTF

SEQ ID NO: 319368 - protein, 18 aa, Homo sapiens
  CDR3 for beta chain variable domain of TCR clone 159684 (TRBV7-9, TRBJ2-7)
CASSLTTSGSRTWYEQYF

SEQ ID NO: 319369 - protein, 12 aa, Homo sapiens
  CDR3 for alpha chain variable domain of TCR clone 159685 (TRAV27, TRAJ33)
CAGDGSNYQLIW

SEQ ID NO: 319370 - protein, 15 aa, Homo sapiens
  CDR3 for beta chain variable domain of TCR clone 159685 (TRBV7-3, TRBJ2-2)
CASSETGQGTGELFF

SEQ ID NO: 319371 - protein, 13 aa, Homo sapiens
  CDR3 for alpha chain variable domain of TCR clone 159686 (TRAV13-2, TRAJ5)
CAVMDTGRRALTF

SEQ ID NO: 319372 - protein, 15 aa, Homo sapiens
  CDR3 for beta chain variable domain of TCR clone 159686 (TRBV4-3, TRBJ2-7)
CASSQGGRGIYEQYF

SEQ ID NO: 319373 - protein, 16 aa, Homo sapiens
  CDR3 for alpha chain variable domain of TCR clone 159687 (TRAV17, TRAJ17)
CATAPQEEAAGNKLTF

SEQ ID NO: 319374 - protein, 12 aa, Homo sapiens
  CDR3 for beta chain variable domain of TCR clone 159687 (TRBV4-2, TRBJ2-5)
CASGGAQETQYF

SEQ ID NO: 319375 - protein, 12 aa, Homo sapiens
  CDR3 for alpha chain variable domain of TCR clone 159688 (TRAV12-3, TRAJ17)
CAMTLTGNKLTF

SEQ ID NO: 319376 - protein, 15 aa, Homo sapiens
  CDR3 for beta chain variable domain of TCR clone 159688 (TRBV7-9, TRBJ2-2)
CASRPEGTSTGELFF

SEQ ID NO: 319377 - protein, 10 aa, Homo sapiens
  CDR3 for alpha chain variable domain of TCR clone 159689 (TRAV23/DV6, TRAJ10)
CAASRLLYSR

SEQ ID NO: 319378 - protein, 15 aa, Homo sapiens
  CDR3 for beta chain variable domain of TCR clone 159689 (TRBV20-1, TRBJ2-1)
CSAERGLLAGDEQFF

SEQ ID NO: 319379 - protein, 18 aa, Homo sapiens
  CDR3 for alpha chain variable domain of TCR clone 159690 (TRAV13-1, TRAJ52)
CEAKNPNAGGTSYGKLTF

SEQ ID NO: 319380 - protein, 19 aa, Homo sapiens
  CDR3 for beta chain variable domain of TCR clone 159690 (TRBV19, TRBJ2-2)
CASTRPGLAGGRVTGELFF

SEQ ID NO: 319381 - protein, 13 aa, Homo sapiens
  CDR3 for alpha chain variable domain of TCR clone 159691 (TRAV21, TRAJ27)
CAARPGNAGKSTF

SEQ ID NO: 319382 - protein, 17 aa, Homo sapiens
  CDR3 for beta chain variable domain of TCR clone 159691 (TRBV7-6, TRBJ2-1)
CASRLYPPGVEYNEQFF

SEQ ID NO: 319383 - protein, 14 aa, Homo sapiens
  CDR3 for alpha chain variable domain of TCR clone 159692 (TRAV12-2, TRAJ13)
CAVKKTGGSQKVTF

SEQ ID NO: 319384 - protein, 13 aa, Homo sapiens
  CDR3 for beta chain variable domain of TCR clone 159692 (TRBV2, TRBJ2-7)
CASSVGGSGEQYF

SEQ ID NO: 319385 - protein, 15 aa, Homo sapiens
  CDR3 for alpha chain variable domain of TCR clone 159693 (TRAV2, TRAJ13)
CATPSYSGGYQKVTF

SEQ ID NO: 319386 - protein, 15 aa, Homo sapiens
  CDR3 for beta chain variable domain of TCR clone 159693 (TRBV7-3, TRBJ2-2)
CASKANGANTGELFF

SEQ ID NO: 319387 - protein, 14 aa, Homo sapiens
  CDR3 for alpha chain variable domain of TCR clone 159694 (TRAV1-2, TRAJ16)
CAVNRFSDGQKLLF

SEQ ID NO: 319388 - protein, 17 aa, Homo sapiens
  CDR3 for beta chain variable domain of TCR clone 159694 (TRBV4-1, TRBJ2-3)
CASSQSATGGPVDTQYF

SEQ ID NO: 319389 - protein, 14 aa, Homo sapiens
  CDR3 for alpha chain variable domain of TCR clone 159695 (TRAV29/DV5, TRAJ36)
CAARRKTGANNLSF

SEQ ID NO: 319390 - protein, 14 aa, Homo sapiens
  CDR3 for beta chain variable domain of TCR clone 159695 (TRBV24-1, TRBJ2-7)
VTTPWDQLYYEQYF

SEQ ID NO: 319391 - protein, 14 aa, Homo sapiens
  CDR3 for alpha chain variable domain of TCR clone 159696 (TRAV12-2, TRAJ13)
CAVKKTGGYQKVTF

SEQ ID NO: 319392 - protein, 15 aa, Homo sapiens
  CDR3 for beta chain variable domain of TCR clone 159696 (TRBV5-1, TRBJ2-1)
CASTGSGRTYNEQFF

SEQ ID NO: 319393 - protein, 11 aa, Homo sapiens
  CDR3 for alpha chain variable domain of TCR clone 159697 (TRAV8-4, TRAJ26)
WAGGEGQNFVF

SEQ ID NO: 319394 - protein, 17 aa, Homo sapiens
  CDR3 for beta chain variable domain of TCR clone 159697 (TRBV7-9, TRBJ2-3)
CASSPTVAGDLTDTQYF

SEQ ID NO: 319395 - protein, 16 aa, Homo sapiens
  CDR3 for alpha chain variable domain of TCR clone 159698 (TRAV1-2, TRAJ10)
CAVRGVLTGGGNKLTF

SEQ ID NO: 319396 - protein, 15 aa, Homo sapiens
  CDR3 for beta chain variable domain of TCR clone 159698 (TRBV5-1, TRBJ2-1)
CASTGSGRTYNEQFF

SEQ ID NO: 319397 - protein, 11 aa, Homo sapiens
  CDR3 for alpha chain variable domain of TCR clone 159699 (TRAV21, TRAJ34)
CAHYNTDKLIF

SEQ ID NO: 319398 - protein, 15 aa, Homo sapiens
  CDR3 for beta chain variable domain of TCR clone 159699 (TRBV7-2, TRBJ2-3)
CASSSAGLETDTQYF

SEQ ID NO: 319399 - protein, 16 aa, Homo sapiens
  CDR3 for alpha chain variable domain of TCR clone 159700 (TRAV1-2, TRAJ33)
CAVRAISMDSNYQLIC

SEQ ID NO: 319400 - protein, 15 aa, Homo sapiens
  CDR3 for beta chain variable domain of TCR clone 159700 (TRBV2, TRBJ1-2)
CASSEIGGANYGYTF

SEQ ID NO: 319401 - protein, 15 aa, Homo sapiens
  CDR3 for alpha chain variable domain of TCR clone 159701 (TRAV25, TRAJ52)
CAGRPGGTSYGKLTF

SEQ ID NO: 319402 - protein, 12 aa, Homo sapiens
  CDR3 for beta chain variable domain of TCR clone 159701 (TRBV11-2, TRBJ2-3)
GASRGAPNTQYF

SEQ ID NO: 319403 - protein, 12 aa, Homo sapiens
  CDR3 for alpha chain variable domain of TCR clone 159702 (TRAV12-3, TRAJ17)
CAMTLTGNKLTF

SEQ ID NO: 319404 - protein, 14 aa, Homo sapiens
  CDR3 for beta chain variable domain of TCR clone 159702 (TRBV5-4, TRBJ2-3)
CASRTGSRTDTQYF

SEQ ID NO: 319405 - protein, 13 aa, Homo sapiens
  CDR3 for alpha chain variable domain of TCR clone 159703 (TRAV8-3, TRAJ28)
CAVGAVGSYQLTF

SEQ ID NO: 319406 - protein, 18 aa, Homo sapiens
  CDR3 for beta chain variable domain of TCR clone 159703 (TRBV12-4, TRBJ2-2)
CASSLVAGTRGRTGELFF

SEQ ID NO: 319407 - protein, 11 aa, Homo sapiens
  CDR3 for alpha chain variable domain of TCR clone 159704 (TRAV13-2, TRAJ23)
CAESPRGKLIF

SEQ ID NO: 319408 - protein, 15 aa, Homo sapiens
  CDR3 for beta chain variable domain of TCR clone 159704 (TRBV20-1, TRBJ2-7)
CSARDRVSGMDEQYF

SEQ ID NO: 319409 - protein, 19 aa, Homo sapiens
  CDR3 for alpha chain variable domain of TCR clone 159705 (TRAV21, TRAJ45)
CAVEAPRGDQEEVLTDSPF

SEQ ID NO: 319410 - protein, 12 aa, Homo sapiens
  CDR3 for beta chain variable domain of TCR clone 159705 (TRBV29-1, TRBJ1-3)
CSTRDSGNTMYF

SEQ ID NO: 319411 - protein, 19 aa, Homo sapiens
  CDR3 for alpha chain variable domain of TCR clone 159706 (TRAV26-1, TRAJ52)
CIVRAHRNAGGTSYGKLTF

SEQ ID NO: 319412 - protein, 16 aa, Homo sapiens
  CDR3 for beta chain variable domain of TCR clone 159706 (TRBV7-2, TRBJ2-5)
CASSPGGARRGETQYF

SEQ ID NO: 319413 - protein, 14 aa, Homo sapiens
  CDR3 for alpha chain variable domain of TCR clone 159707 (TRAV26-1, TRAJ38)
CIADHAGNNRKLIW

SEQ ID NO: 319414 - protein, 15 aa, Homo sapiens
  CDR3 for beta chain variable domain of TCR clone 159707 (TRBV9, TRBJ2-1)
CASSLAGSSYNEQFF

SEQ ID NO: 319415 - protein, 12 aa, Homo sapiens
  CDR3 for alpha chain variable domain of TCR clone 159708 (TRAV36/DV7, TRAJ54)
CAVVRGAQKLVF

SEQ ID NO: 319416 - protein, 14 aa, Homo sapiens
  CDR3 for beta chain variable domain of TCR clone 159708 (TRBV7-3, TRBJ1-1)
CVSSLKGGNTEAFF

SEQ ID NO: 319417 - protein, 11 aa, Homo sapiens
  CDR3 for alpha chain variable domain of TCR clone 159709 (TRAV17, TRAJ20)
CATDAGYKLSF

SEQ ID NO: 319418 - protein, 16 aa, Homo sapiens
  CDR3 for beta chain variable domain of TCR clone 159709 (TRBV20-1, TRBJ2-6)
CSASSQGYDGANDLTF

SEQ ID NO: 319419 - protein, 12 aa, Homo sapiens
  CDR3 for alpha chain variable domain of TCR clone 159710 (TRAV13-1, TRAJ48)
CAANFGNEKLTF

SEQ ID NO: 319420 - protein, 15 aa, Homo sapiens
  CDR3 for beta chain variable domain of TCR clone 159710 (TRBV28, TRBJ1-3)
CASWGGHLSGNTIYF

SEQ ID NO: 319421 - protein, 16 aa, Homo sapiens
  CDR3 for alpha chain variable domain of TCR clone 159711 (TRAV3, TRAJ37)
CAVRGKGSGNTGKLIF

SEQ ID NO: 319422 - protein, 15 aa, Homo sapiens
  CDR3 for beta chain variable domain of TCR clone 159711 (TRBV19, TRBJ2-1)
CASSLETSGYNEQFF

SEQ ID NO: 319423 - protein, 15 aa, Homo sapiens
  CDR3 for alpha chain variable domain of TCR clone 159712 (TRAV6, TRAJ32)
CALDMGGGATNKLIF

SEQ ID NO: 319424 - protein, 14 aa, Homo sapiens
  CDR3 for beta chain variable domain of TCR clone 159712 (TRBV7-2, TRBJ2-5)
CASSPRGSSETQYF

SEQ ID NO: 319425 - protein, 14 aa, Homo sapiens
  CDR3 for alpha chain variable domain of TCR clone 159713 (TRAV26-1, TRAJ45)
CIVRVVGGADGLTF

SEQ ID NO: 319426 - protein, 19 aa, Homo sapiens
  CDR3 for beta chain variable domain of TCR clone 159713 (TRBV7-2, TRBJ2-3)
CASSFLSRNWGGGTDTQYF

SEQ ID NO: 319427 - protein, 13 aa, Homo sapiens
  CDR3 for alpha chain variable domain of TCR clone 159714 (TRAV23/DV6, TRAJ47)
CSASSQYGNKLVF

SEQ ID NO: 319428 - protein, 15 aa, Homo sapiens
  CDR3 for beta chain variable domain of TCR clone 159714 (TRBV7-3, TRBJ2-1)
CASSLDGNSDNEQFF

SEQ ID NO: 319429 - protein, 15 aa, Homo sapiens
  CDR3 for alpha chain variable domain of TCR clone 159715 (TRAV8-3, TRAJ6)
CAVGEDRGGSYIPTF

SEQ ID NO: 319430 - protein, 13 aa, Homo sapiens
  CDR3 for beta chain variable domain of TCR clone 159715 (TRBV27, TRBJ2-2)
CQLRSPPGGELFF

SEQ ID NO: 319431 - protein, 18 aa, Homo sapiens
  CDR3 for alpha chain variable domain of TCR clone 159716 (TRAV26-1, TRAJ23)
CIVRDGLEVWNQGGKLSF

SEQ ID NO: 319432 - protein, 16 aa, Homo sapiens
  CDR3 for beta chain variable domain of TCR clone 159716 (TRBV12-4, TRBJ2-5)
CASSFFVRGRQETQYF

SEQ ID NO: 319433 - protein, 10 aa, Homo sapiens
  CDR3 for alpha chain variable domain of TCR clone 159717 (TRAV8-4, TRAJ43)
CAVSADDMRF

SEQ ID NO: 319434 - protein, 15 aa, Homo sapiens
  CDR3 for beta chain variable domain of TCR clone 159717 (TRBV5-1, TRBJ2-3)
CASSVTSESTDTQYF

SEQ ID NO: 319435 - protein, 16 aa, Homo sapiens
  CDR3 for alpha chain variable domain of TCR clone 159718 (TRAV38-2/DV8, TRAJ57)
CAYRRRAQGGSEKLVL

SEQ ID NO: 319436 - protein, 19 aa, Homo sapiens
  CDR3 for beta chain variable domain of TCR clone 159718 (TRBV25-1, TRBJ2-2)
CAILVYRVDRGRKTGELFF

SEQ ID NO: 319437 - protein, 13 aa, Homo sapiens
  CDR3 for alpha chain variable domain of TCR clone 159719 (TRAV21, TRAJ27)
CAARPGNAGKSTF

SEQ ID NO: 319438 - protein, 16 aa, Homo sapiens
  CDR3 for beta chain variable domain of TCR clone 159719 (TRBV7-9, TRBJ1-2)
CASSLGFSSGGDGYTF

SEQ ID NO: 319439 - protein, 12 aa, Homo sapiens
  CDR3 for alpha chain variable domain of TCR clone 159720 (TRAV2, TRAJ33)
CAVPDSNYQLIW

SEQ ID NO: 319440 - protein, 15 aa, Homo sapiens
  CDR3 for beta chain variable domain of TCR clone 159720 (TRBV7-9, TRBJ1-6)
CASSSPGRGNSPLHF

SEQ ID NO: 319441 - protein, 14 aa, Homo sapiens
  CDR3 for alpha chain variable domain of TCR clone 159721 (TRAV12-2, TRAJ40)
CAVKVPSGTYKYIF

SEQ ID NO: 319442 - protein, 12 aa, Homo sapiens
  CDR3 for beta chain variable domain of TCR clone 159721 (TRBV11-2, TRBJ2-1)
CASSPGNNEQFF

SEQ ID NO: 319443 - protein, 14 aa, Homo sapiens
  CDR3 for alpha chain variable domain of TCR clone 159722 (TRAV8-4, TRAJ15)
CAVTIREAGPARIF

SEQ ID NO: 319444 - protein, 16 aa, Homo sapiens
  CDR3 for beta chain variable domain of TCR clone 159722 (TRBV29-1, TRBJ2-6)
CSVEDITYSGANVLTF

SEQ ID NO: 319445 - protein, 14 aa, Homo sapiens
  CDR3 for alpha chain variable domain of TCR clone 159723 (TRAV12-1, TRAJ43)
VVVNGRSNNNDMRF

SEQ ID NO: 319446 - protein, 13 aa, Homo sapiens
  CDR3 for beta chain variable domain of TCR clone 159723 (TRBV10-3, TRBJ2-7)
CASKLAANYEQYF

SEQ ID NO: 319447 - protein, 11 aa, Homo sapiens
  CDR3 for alpha chain variable domain of TCR clone 159724 (TRAV8-3, TRAJ34)
ASGYNTDKLIF

SEQ ID NO: 319448 - protein, 13 aa, Homo sapiens
  CDR3 for beta chain variable domain of TCR clone 159724 (TRBV6-4, TRBJ2-3)
CASSFSWADTQYF

SEQ ID NO: 319449 - protein, 13 aa, Homo sapiens
  CDR3 for alpha chain variable domain of TCR clone 159725 (TRAV13-1, TRAJ6)
CAARRGGSYIPTF

SEQ ID NO: 319450 - protein, 15 aa, Homo sapiens
  CDR3 for beta chain variable domain of TCR clone 159725 (TRBV4-2, TRBJ1-2)
CASSQRTGGRDGYTF

SEQ ID NO: 319451 - protein, 14 aa, Homo sapiens
  CDR3 for alpha chain variable domain of TCR clone 159726 (TRAV3, TRAJ9)
CAVRGNTGGFKPIF

SEQ ID NO: 319452 - protein, 16 aa, Homo sapiens
  CDR3 for beta chain variable domain of TCR clone 159726 (TRBV7-2, TRBJ2-7)
CASSLGLAGGAYEQYF

SEQ ID NO: 319453 - protein, 15 aa, Homo sapiens
  CDR3 for alpha chain variable domain of TCR clone 159727 (TRAV2, TRAJ40)
CAVVTSGTYKYILEQ

SEQ ID NO: 319454 - protein, 14 aa, Homo sapiens
  CDR3 for beta chain variable domain of TCR clone 159727 (TRBV20-1, TRBJ1-1)
CSAMGGTANTEAFF

SEQ ID NO: 319455 - protein, 12 aa, Homo sapiens
  CDR3 for alpha chain variable domain of TCR clone 159728 (TRAV27, TRAJ9)
CAGESGGFKTIF

SEQ ID NO: 319456 - protein, 18 aa, Homo sapiens
  CDR3 for beta chain variable domain of TCR clone 159728 (TRBV25-1, TRBJ1-2)
CASSGLQNGQGLIFGYTF

SEQ ID NO: 319457 - protein, 15 aa, Homo sapiens
  CDR3 for alpha chain variable domain of TCR clone 159729 (TRAV38-1, TRAJ37)
CAFIFCSGNTGKPIF

SEQ ID NO: 319458 - protein, 15 aa, Homo sapiens
  CDR3 for beta chain variable domain of TCR clone 159729 (TRBV4-3, TRBJ2-7)
CASSQGGRGIYEQYF

SEQ ID NO: 319459 - protein, 13 aa, Homo sapiens
  CDR3 for alpha chain variable domain of TCR clone 159730 (TRAV13-1, TRAJ6)
CAASSGGSYIPTF

SEQ ID NO: 319460 - protein, 13 aa, Homo sapiens
  CDR3 for beta chain variable domain of TCR clone 159730 (TRBV27, TRBJ1-4)
CASSLMGDEKLFF

SEQ ID NO: 319461 - protein, 13 aa, Homo sapiens
  CDR3 for alpha chain variable domain of TCR clone 159731 (TRAV8-3, TRAJ43)
CAVGPDNNNDMRF

SEQ ID NO: 319462 - protein, 15 aa, Homo sapiens
  CDR3 for beta chain variable domain of TCR clone 159731 (TRBV5-1, TRBJ2-5)
CASSFKGEDQETQYF

SEQ ID NO: 319463 - protein, 11 aa, Homo sapiens
  CDR3 for alpha chain variable domain of TCR clone 159732 (TRAV8-3, TRAJ49)
CTVNTGNQFYF

SEQ ID NO: 319464 - protein, 14 aa, Homo sapiens
  CDR3 for beta chain variable domain of TCR clone 159732 (TRBV5-1, TRBJ2-7)
CASSLEGRTYEQYF

SEQ ID NO: 319465 - protein, 14 aa, Homo sapiens
  CDR3 for alpha chain variable domain of TCR clone 159733 (TRAV12-3, TRAJ10)
RHLPLTGGGNKLTF

SEQ ID NO: 319466 - protein, 15 aa, Homo sapiens
  CDR3 for beta chain variable domain of TCR clone 159733 (TRBV29-1, TRBJ2-6)
CSVGDRGSGANVLTF

SEQ ID NO: 319467 - protein, 16 aa, Homo sapiens
  CDR3 for alpha chain variable domain of TCR clone 159734 (TRAV23/DV6, TRAJ9)
CASSIGGNTGGFKTIF

SEQ ID NO: 319468 - protein, 13 aa, Homo sapiens
  CDR3 for beta chain variable domain of TCR clone 159734 (TRBV7-9, TRBJ1-2)
CASSLKQNYGYTF

SEQ ID NO: 319469 - protein, 13 aa, Homo sapiens
  CDR3 for alpha chain variable domain of TCR clone 159735 (TRAV1-2, TRAJ11)
CAVRDSGYSTLTF

SEQ ID NO: 319470 - protein, 16 aa, Homo sapiens
  CDR3 for beta chain variable domain of TCR clone 159735 (TRBV5-4, TRBJ2-1)
CASSLVGSGQDNEQFF

SEQ ID NO: 319471 - protein, 14 aa, Homo sapiens
  CDR3 for alpha chain variable domain of TCR clone 159736 (TRAV13-1, TRAJ35)
CAASKGGFGNVLHC

SEQ ID NO: 319472 - protein, 15 aa, Homo sapiens
  CDR3 for beta chain variable domain of TCR clone 159736 (TRBV28, TRBJ2-1)
CASSIIAGGRSEQFF

SEQ ID NO: 319473 - protein, 13 aa, Homo sapiens
  CDR3 for alpha chain variable domain of TCR clone 159737 (TRAV17, TRAJ56)
CATRPGANSKLTF

SEQ ID NO: 319474 - protein, 15 aa, Homo sapiens
  CDR3 for beta chain variable domain of TCR clone 159737 (TRBV2, TRBJ2-1)
CASSPLAGVYNEQFF

SEQ ID NO: 319475 - protein, 15 aa, Homo sapiens
  CDR3 for alpha chain variable domain of TCR clone 159738 (TRAV12-1, TRAJ44)
CVVFVNTGTASKLTF

SEQ ID NO: 319476 - protein, 13 aa, Homo sapiens
  CDR3 for beta chain variable domain of TCR clone 159738 (TRBV20-1, TRBJ2-7)
CSATHTSGYEQYF

SEQ ID NO: 319477 - protein, 14 aa, Homo sapiens
  CDR3 for alpha chain variable domain of TCR clone 159739 (TRAV13-1, TRAJ3)
CSASKSSSASKIIF

SEQ ID NO: 319478 - protein, 15 aa, Homo sapiens
  CDR3 for beta chain variable domain of TCR clone 159739 (TRBV5-5, TRBJ2-2)
CASSRQASGAGELFF

SEQ ID NO: 319479 - protein, 16 aa, Homo sapiens
  CDR3 for alpha chain variable domain of TCR clone 159740 (TRAV26-1, TRAJ40)
CIVRVGTTSGTYKYIF

SEQ ID NO: 319480 - protein, 13 aa, Homo sapiens
  CDR3 for beta chain variable domain of TCR clone 159740 (TRBV5-4, TRBJ1-1)
CASSVDLGTEAFF

SEQ ID NO: 319481 - protein, 13 aa, Homo sapiens
  CDR3 for alpha chain variable domain of TCR clone 159741 (TRAV2, TRAJ40)
CAVVPSGTYKYIF

SEQ ID NO: 319482 - protein, 16 aa, Homo sapiens
  CDR3 for beta chain variable domain of TCR clone 159741 (TRBV19, TRBJ2-1)
CASSKAGQSSYNEQFF

SEQ ID NO: 319483 - protein, 16 aa, Homo sapiens
  CDR3 for alpha chain variable domain of TCR clone 159742 (TRAV12-3, TRAJ53)
CAMSPGSGGSNYKMTF

SEQ ID NO: 319484 - protein, 15 aa, Homo sapiens
  CDR3 for beta chain variable domain of TCR clone 159742 (TRBV18, TRBJ1-1)
CASSPRQGENTEAFF

SEQ ID NO: 319485 - protein, 16 aa, Homo sapiens
  CDR3 for alpha chain variable domain of TCR clone 159743 (TRAV8-3, TRAJ8)
CAVPRDGNTGFQKLVF

SEQ ID NO: 319486 - protein, 15 aa, Homo sapiens
  CDR3 for beta chain variable domain of TCR clone 159743 (TRBV28, TRBJ2-5)
CASSSGRTIQETQYF

SEQ ID NO: 319487 - protein, 16 aa, Homo sapiens
  CDR3 for alpha chain variable domain of TCR clone 159744 (TRAV36/DV7, TRAJ33)
WRPGNKVQDSNYKLIW

SEQ ID NO: 319488 - protein, 15 aa, Homo sapiens
  CDR3 for beta chain variable domain of TCR clone 159744 (TRBV29-1, TRBJ2-1)
CSVGRHALFYNEQFF

SEQ ID NO: 319489 - protein, 15 aa, Homo sapiens
  CDR3 for alpha chain variable domain of TCR clone 159745 (TRAV3, TRAJ5)
RAVRDLDTGRRELTF

SEQ ID NO: 319490 - protein, 13 aa, Homo sapiens
  CDR3 for beta chain variable domain of TCR clone 159745 (TRBV12-4, TRBJ2-7)
CASSPTETYEQYF

SEQ ID NO: 319491 - protein, 13 aa, Homo sapiens
  CDR3 for alpha chain variable domain of TCR clone 159746 (TRAV8-3, TRAJ21)
CAVGAYNFNKFYF

SEQ ID NO: 319492 - protein, 16 aa, Homo sapiens
  CDR3 for beta chain variable domain of TCR clone 159746 (TRBV19, TRBJ2-1)
CASSMGGGSSYNEQFF

SEQ ID NO: 319493 - protein, 14 aa, Homo sapiens
  CDR3 for alpha chain variable domain of TCR clone 159747 (TRAV12-2, TRAJ24)
CAVTPADSWGKLQF

SEQ ID NO: 319494 - protein, 12 aa, Homo sapiens
  CDR3 for beta chain variable domain of TCR clone 159747 (TRBV3-1, TRBJ2-1)
CTSSQGSSGQFF

SEQ ID NO: 319495 - protein, 12 aa, Homo sapiens
  CDR3 for alpha chain variable domain of TCR clone 159748 (TRAV8-3, TRAJ20)
CAVGANDYKLSF

SEQ ID NO: 319496 - protein, 16 aa, Homo sapiens
  CDR3 for beta chain variable domain of TCR clone 159748 (TRBV19, TRBJ2-2)
CASRSPGTGATGEPFF

SEQ ID NO: 319497 - protein, 12 aa, Homo sapiens
  CDR3 for alpha chain variable domain of TCR clone 159749 (TRAV10, TRAJ43)
CVVVRVGNDMRF

SEQ ID NO: 319498 - protein, 13 aa, Homo sapiens
  CDR3 for beta chain variable domain of TCR clone 159749 (TRBV27, TRBJ2-7)
CASSFSQGYEQYF

SEQ ID NO: 319499 - protein, 13 aa, Homo sapiens
  CDR3 for alpha chain variable domain of TCR clone 159750 (TRAV12-3, TRAJ7)
CAMTPYGNNRLAF

SEQ ID NO: 319500 - protein, 16 aa, Homo sapiens
  CDR3 for beta chain variable domain of TCR clone 159750 (TRBV20-1, TRBJ1-4)
CSARPFGGELNEKLFF

SEQ ID NO: 319501 - protein, 15 aa, Homo sapiens
  CDR3 for alpha chain variable domain of TCR clone 159751 (TRAV13-2, TRAJ58)
CVTAQKETSGSRLTF

SEQ ID NO: 319502 - protein, 14 aa, Homo sapiens
  CDR3 for beta chain variable domain of TCR clone 159751 (TRBV7-2, TRBJ2-3)
CASRRGLAADTQYC

SEQ ID NO: 319503 - protein, 13 aa, Homo sapiens
  CDR3 for alpha chain variable domain of TCR clone 159752 (TRAV38-2/DV8, TRAJ53)
CASGGGGNYKLTF

SEQ ID NO: 319504 - protein, 16 aa, Homo sapiens
  CDR3 for beta chain variable domain of TCR clone 159752 (TRBV28, TRBJ1-5)
CASRFRGAVQNQPQHF

SEQ ID NO: 319505 - protein, 16 aa, Homo sapiens
  CDR3 for alpha chain variable domain of TCR clone 159753 (TRAV3, TRAJ37)
CAVRVRGSGNTGKLIF

SEQ ID NO: 319506 - protein, 16 aa, Homo sapiens
  CDR3 for beta chain variable domain of TCR clone 159753 (TRBV11-2, TRBJ2-7)
CASSPTTWGVSYEQYF

SEQ ID NO: 319507 - protein, 13 aa, Homo sapiens
  CDR3 for alpha chain variable domain of TCR clone 159754 (TRAV36/DV7, TRAJ37)
CAVFSSTTGKLIF

SEQ ID NO: 319508 - protein, 16 aa, Homo sapiens
  CDR3 for beta chain variable domain of TCR clone 159754 (TRBV3-1, TRBJ2-5)
CASSPGQFNGFGTQYF

SEQ ID NO: 319509 - protein, 17 aa, Homo sapiens
  CDR3 for alpha chain variable domain of TCR clone 159755 (TRAV3, TRAJ6)
CAVRYGPRAGGSYIPTF

SEQ ID NO: 319510 - protein, 14 aa, Homo sapiens
  CDR3 for beta chain variable domain of TCR clone 159755 (TRBV11-2, TRBJ2-3)
CASSRLARTDTQYF

SEQ ID NO: 319511 - protein, 16 aa, Homo sapiens
  CDR3 for alpha chain variable domain of TCR clone 159756 (TRAV13-1, TRAJ37)
CAASSLGSSNTGKLIF

SEQ ID NO: 319512 - protein, 12 aa, Homo sapiens
  CDR3 for beta chain variable domain of TCR clone 159756 (TRBV6-1, TRBJ2-5)
CASNEGRETQYF

SEQ ID NO: 319513 - protein, 12 aa, Homo sapiens
  CDR3 for alpha chain variable domain of TCR clone 159757 (TRAV3, TRAJ43)
CAVRDPNNDMRF

SEQ ID NO: 319514 - protein, 15 aa, Homo sapiens
  CDR3 for beta chain variable domain of TCR clone 159757 (TRBV14, TRBJ1-5)
CASSLGTGFDQPQHF

SEQ ID NO: 319515 - protein, 18 aa, Homo sapiens
  CDR3 for alpha chain variable domain of TCR clone 159758 (TRAV13-1, TRAJ52)
CAASKRSAGGTSYGKLTF

SEQ ID NO: 319516 - protein, 13 aa, Homo sapiens
  CDR3 for beta chain variable domain of TCR clone 159758 (TRBV12-4, TRBJ1-2)
CASSLRQGKAYTF

SEQ ID NO: 319517 - protein, 22 aa, Homo sapiens
  CDR3 for alpha chain variable domain of TCR clone 159759 (TRAV8-3, TRAJ32)
CAVEVVLQTSSSLELALCLLSS

SEQ ID NO: 319518 - protein, 15 aa, Homo sapiens
  CDR3 for beta chain variable domain of TCR clone 159759 (TRBV4-3, TRBJ2-5)
CASSQGTGHRETQYF

SEQ ID NO: 319519 - protein, 14 aa, Homo sapiens
  CDR3 for alpha chain variable domain of TCR clone 159760 (TRAV21, TRAJ35)
CAVMPIGFGNVLHC

SEQ ID NO: 319520 - protein, 14 aa, Homo sapiens
  CDR3 for beta chain variable domain of TCR clone 159760 (TRBV18, TRBJ2-5)
CASSPGVSQETQYF

SEQ ID NO: 319521 - protein, 15 aa, Homo sapiens
  CDR3 for alpha chain variable domain of TCR clone 159761 (TRAV23/DV6, TRAJ13)
CAAWPGGGGYQKVTY

SEQ ID NO: 319522 - protein, 17 aa, Homo sapiens
  CDR3 for beta chain variable domain of TCR clone 159761 (TRBV19, TRBJ2-7)
CASSISFYDSYPYEQYF

SEQ ID NO: 319523 - protein, 11 aa, Homo sapiens
  CDR3 for alpha chain variable domain of TCR clone 159762 (TRAV13-1, TRAJ52)
PGGTSYGKLTF

SEQ ID NO: 319524 - protein, 16 aa, Homo sapiens
  CDR3 for beta chain variable domain of TCR clone 159762 (TRBV28, TRBJ2-7)
CASSPWVATGDLSYYF

SEQ ID NO: 319525 - protein, 17 aa, Homo sapiens
  CDR3 for alpha chain variable domain of TCR clone 159763 (TRAV3, TRAJ7)
CAVRDMSPLEGTTDSLL

SEQ ID NO: 319526 - protein, 17 aa, Homo sapiens
  CDR3 for beta chain variable domain of TCR clone 159763 (TRBV15, TRBJ1-2)
CATSGREINVVNYGYTF

SEQ ID NO: 319527 - protein, 13 aa, Homo sapiens
  CDR3 for alpha chain variable domain of TCR clone 159764 (TRAV27, TRAJ53)
CAGQGGSNYKLTF

SEQ ID NO: 319528 - protein, 14 aa, Homo sapiens
  CDR3 for beta chain variable domain of TCR clone 159764 (TRBV5-1, TRBJ2-7)
CASSLTSGGYEQYF

SEQ ID NO: 319529 - protein, 13 aa, Homo sapiens
  CDR3 for alpha chain variable domain of TCR clone 159765 (TRAV8-3, TRAJ44)
CAVVPGTASKLTF

SEQ ID NO: 319530 - protein, 18 aa, Homo sapiens
  CDR3 for beta chain variable domain of TCR clone 159765 (TRBV7-9, TRBJ2-7)
CASSLTTSGSRTWYEQYF

SEQ ID NO: 319531 - protein, 16 aa, Homo sapiens
  CDR3 for alpha chain variable domain of TCR clone 159766 (TRAV30, TRAJ24)
CGTEMVDADSWGKFQF

SEQ ID NO: 319532 - protein, 13 aa, Homo sapiens
  CDR3 for beta chain variable domain of TCR clone 159766 (TRBV7-9, TRBJ1-2)
CASSLKQNYGYTF

SEQ ID NO: 319533 - protein, 12 aa, Homo sapiens
  CDR3 for alpha chain variable domain of TCR clone 159767 (TRAV1-2, TRAJ33)
CAALDSNYQLIW

SEQ ID NO: 319534 - protein, 13 aa, Homo sapiens
  CDR3 for beta chain variable domain of TCR clone 159767 (TRBV11-3, TRBJ2-3)
CASSHDTKDTQYF

SEQ ID NO: 319535 - protein, 13 aa, Homo sapiens
  CDR3 for alpha chain variable domain of TCR clone 159768 (TRAV3, TRAJ27)
CAVRPLGAGKSTF

SEQ ID NO: 319536 - protein, 16 aa, Homo sapiens
  CDR3 for beta chain variable domain of TCR clone 159768 (TRBV28, TRBJ2-7)
CASSSGTSGRGYEQYF

SEQ ID NO: 319537 - protein, 11 aa, Homo sapiens
  CDR3 for alpha chain variable domain of TCR clone 159769 (TRAV36/DV7, TRAJ45)
SGGGGADGLTF

SEQ ID NO: 319538 - protein, 13 aa, Homo sapiens
  CDR3 for beta chain variable domain of TCR clone 159769 (TRBV28, TRBJ2-7)
CASSPSGTYEQFF

SEQ ID NO: 319539 - protein, 17 aa, Homo sapiens
  CDR3 for alpha chain variable domain of TCR clone 159770 (TRAV3, TRAJ12)
CAVRDGGRMDSSYKLIF

SEQ ID NO: 319540 - protein, 13 aa, Homo sapiens
  CDR3 for beta chain variable domain of TCR clone 159770 (TRBV19, TRBJ2-1)
CASSMYRVNEQFF

SEQ ID NO: 319541 - protein, 14 aa, Homo sapiens
  CDR3 for alpha chain variable domain of TCR clone 159771 (TRAV12-3, TRAJ10)
SHLPLTGGGNKLTF

SEQ ID NO: 319542 - protein, 17 aa, Homo sapiens
  CDR3 for beta chain variable domain of TCR clone 159771 (TRBV28, TRBJ2-5)
CASSTPEGGALQETQYF

SEQ ID NO: 319543 - protein, 14 aa, Homo sapiens
  CDR3 for alpha chain variable domain of TCR clone 159772 (TRAV8-4, TRAJ16)
CAVSPVGRWPEAAL

SEQ ID NO: 319544 - protein, 13 aa, Homo sapiens
  CDR3 for beta chain variable domain of TCR clone 159772 (TRBV11-2, TRBJ2-1)
CASSSEAYNEQFF

SEQ ID NO: 319545 - protein, 14 aa, Homo sapiens
  CDR3 for alpha chain variable domain of TCR clone 159773 (TRAV16, TRAJ44)
CALSTTGTASKLTF

SEQ ID NO: 319546 - protein, 17 aa, Homo sapiens
  CDR3 for beta chain variable domain of TCR clone 159773 (TRBV7-2, TRBJ2-3)
CASSLEARGTSADTQYF

SEQ ID NO: 319547 - protein, 16 aa, Homo sapiens
  CDR3 for alpha chain variable domain of TCR clone 159774 (TRAV26-1, TRAJ36)
CIVRVPDQTGANNLFF

SEQ ID NO: 319548 - protein, 21 aa, Homo sapiens
  CDR3 for beta chain variable domain of TCR clone 159774 (TRBV6-1, TRBJ1-1)
CASSGVGNYKGISVFDTEAFF

SEQ ID NO: 319549 - protein, 14 aa, Homo sapiens
  CDR3 for alpha chain variable domain of TCR clone 159775 (TRAV1-2, TRAJ16)
CAVNRFSDGQKLLF

SEQ ID NO: 319550 - protein, 14 aa, Homo sapiens
  CDR3 for beta chain variable domain of TCR clone 159775 (TRBV7-2, TRBJ2-7)
CASSLYPVRYEQYF

SEQ ID NO: 319551 - protein, 15 aa, Homo sapiens
  CDR3 for alpha chain variable domain of TCR clone 159776 (TRAV26-1, TRAJ42)
HRQTYYGGSQGNLTF

SEQ ID NO: 319552 - protein, 16 aa, Homo sapiens
  CDR3 for beta chain variable domain of TCR clone 159776 (TRBV7-3, TRBJ2-2)
CASSLKRGTLSGELFF

SEQ ID NO: 319553 - protein, 15 aa, Homo sapiens
  CDR3 for alpha chain variable domain of TCR clone 159777 (TRAV17, TRAJ13)
CATDAGSGGYQKVTF

SEQ ID NO: 319554 - protein, 17 aa, Homo sapiens
  CDR3 for beta chain variable domain of TCR clone 159777 (TRBV11-2, TRBJ2-1)
WASSLYPPGVEYNEQFF

SEQ ID NO: 319555 - protein, 13 aa, Homo sapiens
  CDR3 for alpha chain variable domain of TCR clone 159778 (TRAV21, TRAJ27)
CAARPGNAGKSTF

SEQ ID NO: 319556 - protein, 12 aa, Homo sapiens
  CDR3 for beta chain variable domain of TCR clone 159778 (TRBV10-3, TRBJ2-1)
CAIHTGHNEQFF

SEQ ID NO: 319557 - protein, 14 aa, Homo sapiens
  CDR3 for alpha chain variable domain of TCR clone 159779 (TRAV13-2, TRAJ8)
CPGGRNTGFQKLVF

SEQ ID NO: 319558 - protein, 15 aa, Homo sapiens
  CDR3 for beta chain variable domain of TCR clone 159779 (TRBV18, TRBJ2-5)
CASSPRASEAETQYF

SEQ ID NO: 319559 - protein, 12 aa, Homo sapiens
  CDR3 for alpha chain variable domain of TCR clone 159780 (TRAV12-2, TRAJ23)
CVVINQGGKLIF

SEQ ID NO: 319560 - protein, 16 aa, Homo sapiens
  CDR3 for beta chain variable domain of TCR clone 159780 (TRBV11-1, TRBJ2-7)
CASSAQTGTLSYEQYF

SEQ ID NO: 319561 - protein, 14 aa, Homo sapiens
  CDR3 for alpha chain variable domain of TCR clone 159781 (TRAV12-2, TRAJ17)
CAVLSKAAGNKLTF

SEQ ID NO: 319562 - protein, 16 aa, Homo sapiens
  CDR3 for beta chain variable domain of TCR clone 159781 (TRBV12-4, TRBJ1-5)
CASSRPVGGSNQPQHF

SEQ ID NO: 319563 - protein, 15 aa, Homo sapiens
  CDR3 for alpha chain variable domain of TCR clone 159782 (TRAV12-2, TRAJ23)
CAVKPIYNQGGKLVF

SEQ ID NO: 319564 - protein, 15 aa, Homo sapiens
  CDR3 for beta chain variable domain of TCR clone 159782 (TRBV5-1, TRBJ1-2)
CASSLVGGQSQGYTF

SEQ ID NO: 319565 - protein, 14 aa, Homo sapiens
  CDR3 for alpha chain variable domain of TCR clone 159783 (TRAV12-3, TRAJ29)
CAMILLSGNTPLVF

SEQ ID NO: 319566 - protein, 16 aa, Homo sapiens
  CDR3 for beta chain variable domain of TCR clone 159783 (TRBV28, TRBJ2-7)
CASSSGTSGRRYEQYF

SEQ ID NO: 319567 - protein, 14 aa, Homo sapiens
  CDR3 for alpha chain variable domain of TCR clone 159784 (TRAV12-2, TRAJ45)
CAVYSGGGADGLTF

SEQ ID NO: 319568 - protein, 16 aa, Homo sapiens
  CDR3 for beta chain variable domain of TCR clone 159784 (TRBV4-2, TRBJ1-1)
CASSQAGFGMNTEAFF

SEQ ID NO: 319569 - protein, 14 aa, Homo sapiens
  CDR3 for alpha chain variable domain of TCR clone 159785 (TRAV13-1, TRAJ23)
CAASRLGRGGKLIF

SEQ ID NO: 319570 - protein, 14 aa, Homo sapiens
  CDR3 for beta chain variable domain of TCR clone 159785 (TRBV25-1, TRBJ1-1)
CASTHLGGNTEAFF

SEQ ID NO: 319571 - protein, 15 aa, Homo sapiens
  CDR3 for alpha chain variable domain of TCR clone 159786 (TRAV13-1, TRAJ15)
RAARIERQAGTALIF

SEQ ID NO: 319572 - protein, 13 aa, Homo sapiens
  CDR3 for beta chain variable domain of TCR clone 159786 (TRBV5-1, TRBJ2-7)
CASSATGGNEQYF

SEQ ID NO: 319573 - protein, 15 aa, Homo sapiens
  CDR3 for alpha chain variable domain of TCR clone 159787 (TRAV20, TRAJ6)
CAVRLQSGGSYIPTF

SEQ ID NO: 319574 - protein, 15 aa, Homo sapiens
  CDR3 for beta chain variable domain of TCR clone 159787 (TRBV7-3, TRBJ2-1)
CASSPTGGGEVEQFF

SEQ ID NO: 319575 - protein, 12 aa, Homo sapiens
  CDR3 for alpha chain variable domain of TCR clone 159788 (TRAV8-3, TRAJ26)
CAGDNYGRNFVF

SEQ ID NO: 319576 - protein, 17 aa, Homo sapiens
  CDR3 for beta chain variable domain of TCR clone 159788 (TRBV7-8, TRBJ2-6)
CASSAGTGGAGANVLTF

SEQ ID NO: 319577 - protein, 11 aa, Homo sapiens
  CDR3 for alpha chain variable domain of TCR clone 159789 (TRAV13-1, TRAJ40)
CAVSGTYKYIF

SEQ ID NO: 319578 - protein, 16 aa, Homo sapiens
  CDR3 for beta chain variable domain of TCR clone 159789 (TRBV10-3, TRBJ2-3)
CAISVSRLALTDTQYC

SEQ ID NO: 319579 - protein, 18 aa, Homo sapiens
  CDR3 for alpha chain variable domain of TCR clone 159790 (TRAV16, TRAJ45)
CAQASYPSSGGGADGRTF

SEQ ID NO: 319580 - protein, 12 aa, Homo sapiens
  CDR3 for beta chain variable domain of TCR clone 159790 (TRBV11-3, TRBJ2-4)
CASSAGRVIQYF

SEQ ID NO: 319581 - protein, 13 aa, Homo sapiens
  CDR3 for alpha chain variable domain of TCR clone 159791 (TRAV13-1, TRAJ53)
QAARGGSNDKLTF

SEQ ID NO: 319582 - protein, 15 aa, Homo sapiens
  CDR3 for beta chain variable domain of TCR clone 159791 (TRBV5-1, TRBJ2-1)
CASSPPRAPYNEQFF

SEQ ID NO: 319583 - protein, 15 aa, Homo sapiens
  CDR3 for alpha chain variable domain of TCR clone 159792 (TRAV2, TRAJ24)
CAVEVLTDSWGKFQF

SEQ ID NO: 319584 - protein, 13 aa, Homo sapiens
  CDR3 for beta chain variable domain of TCR clone 159792 (TRBV10-2, TRBJ2-7)
CASGTSRGYEQYF

SEQ ID NO: 319585 - protein, 15 aa, Homo sapiens
  CDR3 for alpha chain variable domain of TCR clone 159793 (TRAV21, TRAJ53)
CATLNRGGSNYKLTF

SEQ ID NO: 319586 - protein, 16 aa, Homo sapiens
  CDR3 for beta chain variable domain of TCR clone 159793 (TRBV24-1, TRBJ2-3)
CATSDPGTGATDTQYF

SEQ ID NO: 319587 - protein, 14 aa, Homo sapiens
  CDR3 for alpha chain variable domain of TCR clone 159794 (TRAV3, TRAJ40)
CAVRDRRGTYKYIF

SEQ ID NO: 319588 - protein, 16 aa, Homo sapiens
  CDR3 for beta chain variable domain of TCR clone 159794 (TRBV2, TRBJ1-1)
CASSPPNRGMNTEAFF

SEQ ID NO: 319589 - protein, 15 aa, Homo sapiens
  CDR3 for alpha chain variable domain of TCR clone 159795 (TRAV8-3, TRAJ11)
CAVGLLNSGYSTLTF

SEQ ID NO: 319590 - protein, 15 aa, Homo sapiens
  CDR3 for beta chain variable domain of TCR clone 159795 (TRBV7-8, TRBJ2-7)
CASSLRHFEAYEQYF

SEQ ID NO: 319591 - protein, 13 aa, Homo sapiens
  CDR3 for alpha chain variable domain of TCR clone 159796 (TRAV12-1, TRAJ26)
CVVRRNYGQNFVF

SEQ ID NO: 319592 - protein, 13 aa, Homo sapiens
  CDR3 for beta chain variable domain of TCR clone 159796 (TRBV24-1, TRBJ1-4)
CATNNGRSEKLFF

SEQ ID NO: 319593 - protein, 13 aa, Homo sapiens
  CDR3 for alpha chain variable domain of TCR clone 159797 (TRAV12-2, TRAJ20)
CVVYPSNDYKLSF

SEQ ID NO: 319594 - protein, 15 aa, Homo sapiens
  CDR3 for beta chain variable domain of TCR clone 159797 (TRBV27, TRBJ2-5)
CASSLYPRGGETQYV

SEQ ID NO: 319595 - protein, 16 aa, Homo sapiens
  CDR3 for alpha chain variable domain of TCR clone 159798 (TRAV12-2, TRAJ43)
CAGADMCFGAGTRLTV

SEQ ID NO: 319596 - protein, 16 aa, Homo sapiens
  CDR3 for beta chain variable domain of TCR clone 159798 (TRBV2, TRBJ2-4)
CASSEAPGGEQNIQYF

SEQ ID NO: 319597 - protein, 15 aa, Homo sapiens
  CDR3 for alpha chain variable domain of TCR clone 159799 (TRAV29/DV5, TRAJ40)
CAASAQGSGTYKYFF

SEQ ID NO: 319598 - protein, 15 aa, Homo sapiens
  CDR3 for beta chain variable domain of TCR clone 159799 (TRBV7-2, TRBJ2-3)
CASSLAGAFIDTQYF

SEQ ID NO: 319599 - protein, 13 aa, Homo sapiens
  CDR3 for alpha chain variable domain of TCR clone 159800 (TRAV1-2, TRAJ9)
CAALTTGGFKTIF

SEQ ID NO: 319600 - protein, 16 aa, Homo sapiens
  CDR3 for beta chain variable domain of TCR clone 159800 (TRBV28, TRBJ1-4)
CASSSRTGAANEKLFF

SEQ ID NO: 319601 - protein, 13 aa, Homo sapiens
  CDR3 for alpha chain variable domain of TCR clone 159801 (TRAV2, TRAJ40)
CAVVTSGTYKYIF

SEQ ID NO: 319602 - protein, 16 aa, Homo sapiens
  CDR3 for beta chain variable domain of TCR clone 159801 (TRBV19, TRBJ2-2)
CASRSPGTVATGELFF

SEQ ID NO: 319603 - protein, 14 aa, Homo sapiens
  CDR3 for alpha chain variable domain of TCR clone 159802 (TRAV12-2, TRAJ17)
CAALFKAAGNKLTF

SEQ ID NO: 319604 - protein, 16 aa, Homo sapiens
  CDR3 for beta chain variable domain of TCR clone 159802 (TRBV13, TRBJ2-2)
CASSPGTGEHTGELFF

SEQ ID NO: 319605 - protein, 13 aa, Homo sapiens
  CDR3 for alpha chain variable domain of TCR clone 159803 (TRAV21, TRAJ15)
CAVANQSGTALIF

SEQ ID NO: 319606 - protein, 15 aa, Homo sapiens
  CDR3 for beta chain variable domain of TCR clone 159803 (TRBV27, TRBJ2-7)
CASSLGSSVSPEQYF

SEQ ID NO: 319607 - protein, 16 aa, Homo sapiens
  CDR3 for alpha chain variable domain of TCR clone 159804 (TRAV26-1, TRAJ22)
CIVRVPSSGSARQLTF

SEQ ID NO: 319608 - protein, 14 aa, Homo sapiens
  CDR3 for beta chain variable domain of TCR clone 159804 (TRBV7-8, TRBJ1-2)
CASSPDSLSYGYTF

SEQ ID NO: 319609 - protein, 14 aa, Homo sapiens
  CDR3 for alpha chain variable domain of TCR clone 159805 (TRAV12-1, TRAJ30)
CVVNIGGRDDKIIF

SEQ ID NO: 319610 - protein, 14 aa, Homo sapiens
  CDR3 for beta chain variable domain of TCR clone 159805 (TRBV7-6, TRBJ2-3)
CVSSLGTATDTQYF

SEQ ID NO: 319611 - protein, 14 aa, Homo sapiens
  CDR3 for alpha chain variable domain of TCR clone 159806 (TRAV1-2, TRAJ8)
CAVREDTGFQKLVF

SEQ ID NO: 319612 - protein, 19 aa, Homo sapiens
  CDR3 for beta chain variable domain of TCR clone 159806 (TRBV11-2, TRBJ2-3)
CASSAPRAGGNPSTDTQYF

SEQ ID NO: 319613 - protein, 12 aa, Homo sapiens
  CDR3 for alpha chain variable domain of TCR clone 159807 (TRAV12-3, TRAJ17)
YAMTLTGNKLTF

SEQ ID NO: 319614 - protein, 15 aa, Homo sapiens
  CDR3 for beta chain variable domain of TCR clone 159807 (TRBV29-1, TRBJ2-6)
CSFTGGRSGANVLTF

SEQ ID NO: 319615 - protein, 16 aa, Homo sapiens
  CDR3 for alpha chain variable domain of TCR clone 159808 (TRAV16, TRAJ52)
CALSAAGGTSHGKLTF

SEQ ID NO: 319616 - protein, 13 aa, Homo sapiens
  CDR3 for beta chain variable domain of TCR clone 159808 (TRBV3-1, TRBJ1-5)
CASSQFGDQPQHF

SEQ ID NO: 319617 - protein, 15 aa, Homo sapiens
  CDR3 for alpha chain variable domain of TCR clone 159809 (TRAV3, TRAJ3)
CAVRDRDSSASKIIS

SEQ ID NO: 319618 - protein, 18 aa, Homo sapiens
  CDR3 for beta chain variable domain of TCR clone 159809 (TRBV25-1, TRBJ1-2)
CASSGLQNGQGLIFGYTF

SEQ ID NO: 319619 - protein, 11 aa, Homo sapiens
  CDR3 for alpha chain variable domain of TCR clone 159810 (TRAV2, TRAJ13)
CASGGYQKVTF

SEQ ID NO: 319620 - protein, 15 aa, Homo sapiens
  CDR3 for beta chain variable domain of TCR clone 159810 (TRBV18, TRBJ2-7)
CASSSAPTGNYEQYF

SEQ ID NO: 319621 - protein, 18 aa, Homo sapiens
  CDR3 for alpha chain variable domain of TCR clone 159811 (TRAV26-2, TRAJ54)
CILRDVEVGIQGAQKLVF

SEQ ID NO: 319622 - protein, 17 aa, Homo sapiens
  CDR3 for beta chain variable domain of TCR clone 159811 (TRBV20-1, TRBJ1-5)
CGASLSPGQGGNQPQHF

SEQ ID NO: 319623 - protein, 18 aa, Homo sapiens
  CDR3 for alpha chain variable domain of TCR clone 159812 (TRAV17, TRAJ45)
CATSLDLYSGGGADGLTF

SEQ ID NO: 319624 - protein, 15 aa, Homo sapiens
  CDR3 for beta chain variable domain of TCR clone 159812 (TRBV11-2, TRBJ2-1)
CASSKSRGLIYVQFF

SEQ ID NO: 319625 - protein, 14 aa, Homo sapiens
  CDR3 for alpha chain variable domain of TCR clone 159813 (TRAV1-2, TRAJ16)
SAVNRFSDGQKLLF

SEQ ID NO: 319626 - protein, 13 aa, Homo sapiens
  CDR3 for beta chain variable domain of TCR clone 159813 (TRBV11-2, TRBJ2-5)
CASSFSSQETQYF

SEQ ID NO: 319627 - protein, 13 aa, Homo sapiens
  CDR3 for alpha chain variable domain of TCR clone 159814 (TRAV27, TRAJ11)
CAGARSGYSTLTF

SEQ ID NO: 319628 - protein, 12 aa, Homo sapiens
  CDR3 for beta chain variable domain of TCR clone 159814 (TRBV11-2, TRBJ2-4)
CASSSASGSEYF

SEQ ID NO: 319629 - protein, 14 aa, Homo sapiens
  CDR3 for alpha chain variable domain of TCR clone 159815 (TRAV1-2, TRAJ17)
CALRRGAAGNKLTF

SEQ ID NO: 319630 - protein, 13 aa, Homo sapiens
  CDR3 for beta chain variable domain of TCR clone 159815 (TRBV7-7, TRBJ1-1)
CASSSGANTEAFF

SEQ ID NO: 319631 - protein, 12 aa, Homo sapiens
  CDR3 for alpha chain variable domain of TCR clone 159816 (TRAV12-3, TRAJ41)
CTMSYSGYALNF

SEQ ID NO: 319632 - protein, 13 aa, Homo sapiens
  CDR3 for beta chain variable domain of TCR clone 159816 (TRBV7-3, TRBJ2-1)
CASSLDSYNEQFF

SEQ ID NO: 319633 - protein, 14 aa, Homo sapiens
  CDR3 for alpha chain variable domain of TCR clone 159817 (TRAV12-3, TRAJ10)
SHLPPTGGGNKITF

SEQ ID NO: 319634 - protein, 17 aa, Homo sapiens
  CDR3 for beta chain variable domain of TCR clone 159817 (TRBV28, TRBJ2-5)
CASSTPEGDALQETQYF

SEQ ID NO: 319635 - protein, 15 aa, Homo sapiens
  CDR3 for alpha chain variable domain of TCR clone 159818 (TRAV26-1, TRAJ44)
CIVRANTGTASKLTF

SEQ ID NO: 319636 - protein, 16 aa, Homo sapiens
  CDR3 for beta chain variable domain of TCR clone 159818 (TRBV7-7, TRBJ2-1)
CASSLVSGTSYNEQFF

SEQ ID NO: 319637 - protein, 16 aa, Homo sapiens
  CDR3 for alpha chain variable domain of TCR clone 159819 (TRAV13-1, TRAJ3)
CAATGVQQCFQDNLWL

SEQ ID NO: 319638 - protein, 16 aa, Homo sapiens
  CDR3 for beta chain variable domain of TCR clone 159819 (TRBV7-3, TRBJ2-2)
CASSLKRGTLSGELFF

SEQ ID NO: 319639 - protein, 13 aa, Homo sapiens
  CDR3 for alpha chain variable domain of TCR clone 159820 (TRAV12-1, TRAJ30)
CVVNTYRDDKIIF

SEQ ID NO: 319640 - protein, 16 aa, Homo sapiens
  CDR3 for beta chain variable domain of TCR clone 159820 (TRBV7-3, TRBJ2-2)
CASSLKRGTLSGELFF

SEQ ID NO: 319641 - protein, 18 aa, Homo sapiens
  CDR3 for alpha chain variable domain of TCR clone 159821 (TRAV21, TRAJ52)
CAVRPCPAGGTSYGKLTF

SEQ ID NO: 319642 - protein, 13 aa, Homo sapiens
  CDR3 for beta chain variable domain of TCR clone 159821 (TRBV10-3, TRBJ2-7)
CASKLAVNYEQYF

SEQ ID NO: 319643 - protein, 13 aa, Homo sapiens
  CDR3 for alpha chain variable domain of TCR clone 159822 (TRAV8-1, TRAJ47)
CAVGMEYGNKLVF

SEQ ID NO: 319644 - protein, 13 aa, Homo sapiens
  CDR3 for beta chain variable domain of TCR clone 159822 (TRBV20-1, TRBJ2-2)
CRARVANTGELFF

SEQ ID NO: 319645 - protein, 13 aa, Homo sapiens
  CDR3 for alpha chain variable domain of TCR clone 159823 (TRAV35, TRAJ36)
CAGPRIGANNLFF

SEQ ID NO: 319646 - protein, 15 aa, Homo sapiens
  CDR3 for beta chain variable domain of TCR clone 159823 (TRBV28, TRBJ2-5)
CASSPPCSYQETQYF

SEQ ID NO: 319647 - protein, 12 aa, Homo sapiens
  CDR3 for alpha chain variable domain of TCR clone 159824 (TRAV21, TRAJ31)
CVHAGNNARLMF

SEQ ID NO: 319648 - protein, 16 aa, Homo sapiens
  CDR3 for beta chain variable domain of TCR clone 159824 (TRBV27, TRBJ2-5)
CASSFGPGGTKETQYF

SEQ ID NO: 319649 - protein, 16 aa, Homo sapiens
  CDR3 for alpha chain variable domain of TCR clone 159825 (TRAV30, TRAJ49)
SAAQRVGPNTGNQFYF

SEQ ID NO: 319650 - protein, 13 aa, Homo sapiens
  CDR3 for beta chain variable domain of TCR clone 159825 (TRBV10-3, TRBJ2-7)
CASKLAVNYEQYF

SEQ ID NO: 319651 - protein, 13 aa, Homo sapiens
  CDR3 for alpha chain variable domain of TCR clone 159826 (TRAV39, TRAJ33)
CAANPDSNYQLIW

SEQ ID NO: 319652 - protein, 13 aa, Homo sapiens
  CDR3 for beta chain variable domain of TCR clone 159826 (TRBV18, TRBJ1-1)
CASSGGRNTEAFV

SEQ ID NO: 319653 - protein, 10 aa, Homo sapiens
  CDR3 for alpha chain variable domain of TCR clone 159827 (TRAV25, TRAJ20)
CAVNDYKLSF

SEQ ID NO: 319654 - protein, 13 aa, Homo sapiens
  CDR3 for beta chain variable domain of TCR clone 159827 (TRBV6-3, TRBJ2-7)
CASGFSGGYEQYF

SEQ ID NO: 319655 - protein, 12 aa, Homo sapiens
  CDR3 for alpha chain variable domain of TCR clone 159828 (TRAV4, TRAJ26)
CLVGDYGQNFVF

SEQ ID NO: 319656 - protein, 15 aa, Homo sapiens
  CDR3 for beta chain variable domain of TCR clone 159828 (TRBV5-5, TRBJ1-5)
CASSSTPGSNQPQHF

SEQ ID NO: 319657 - protein, 13 aa, Homo sapiens
  CDR3 for alpha chain variable domain of TCR clone 159829 (TRAV27, TRAJ41)
CAGEGNSGYALNF

SEQ ID NO: 319658 - protein, 16 aa, Homo sapiens
  CDR3 for beta chain variable domain of TCR clone 159829 (TRBV7-3, TRBJ2-1)
CASSLEGYRSYNEQFF

SEQ ID NO: 319659 - protein, 17 aa, Homo sapiens
  CDR3 for alpha chain variable domain of TCR clone 159830 (TRAV17, TRAJ28)
CATDPRRGGAGSYQLTF

SEQ ID NO: 319660 - protein, 20 aa, Homo sapiens
  CDR3 for beta chain variable domain of TCR clone 159830 (TRBV28, TRBJ2-1)
CASTPIGRSPGLAGGNEQFF

SEQ ID NO: 319661 - protein, 12 aa, Homo sapiens
  CDR3 for alpha chain variable domain of TCR clone 159831 (TRAV35, TRAJ30)
CARLNRDDKIIF

SEQ ID NO: 319662 - protein, 15 aa, Homo sapiens
  CDR3 for beta chain variable domain of TCR clone 159831 (TRBV9, TRBJ1-6)
CASSVAGTGDSPLHF

SEQ ID NO: 319663 - protein, 13 aa, Homo sapiens
  CDR3 for alpha chain variable domain of TCR clone 159832 (TRAV2, TRAJ40)
CAVVTSGTYKYIF

SEQ ID NO: 319664 - protein, 17 aa, Homo sapiens
  CDR3 for beta chain variable domain of TCR clone 159832 (TRBV7-3, TRBJ2-3)
CASSLMKSMRGADTQYF

SEQ ID NO: 319665 - protein, 14 aa, Homo sapiens
  CDR3 for alpha chain variable domain of TCR clone 159833 (TRAV3, TRAJ9)
CAVRLNTGGFKTIF

SEQ ID NO: 319666 - protein, 12 aa, Homo sapiens
  CDR3 for beta chain variable domain of TCR clone 159833 (TRBV14, TRBJ2-7)
CASSRLKGEQYF

SEQ ID NO: 319667 - protein, 14 aa, Homo sapiens
  CDR3 for alpha chain variable domain of TCR clone 159834 (TRAV35, TRAJ13)
CAGRSPGGYQKVTF

SEQ ID NO: 319668 - protein, 17 aa, Homo sapiens
  CDR3 for beta chain variable domain of TCR clone 159834 (TRBV28, TRBJ2-5)
CASSTPEGDTLQETQYF

SEQ ID NO: 319669 - protein, 11 aa, Homo sapiens
  CDR3 for alpha chain variable domain of TCR clone 159835 (TRAV13-1, TRAJ40)
CAVSGTYKYIF

SEQ ID NO: 319670 - protein, 14 aa, Homo sapiens
  CDR3 for beta chain variable domain of TCR clone 159835 (TRBV19, TRBJ2-7)
CASTVQGRPYEQYF

SEQ ID NO: 319671 - protein, 17 aa, Homo sapiens
  CDR3 for alpha chain variable domain of TCR clone 159836 (TRAV38-2/DV8, TRAJ23)
CALSRKLIFGQGTELSV

SEQ ID NO: 319672 - protein, 13 aa, Homo sapiens
  CDR3 for beta chain variable domain of TCR clone 159836 (TRBV20-1, TRBJ1-1)
CSAPLGGGTEAFF

SEQ ID NO: 319673 - protein, 11 aa, Homo sapiens
  CDR3 for alpha chain variable domain of TCR clone 159837 (TRAV12-2, TRAJ23)
CARGRGGKLIF

SEQ ID NO: 319674 - protein, 14 aa, Homo sapiens
  CDR3 for beta chain variable domain of TCR clone 159837 (TRBV28, TRBJ2-5)
CASSLADRAETQYF

SEQ ID NO: 319675 - protein, 14 aa, Homo sapiens
  CDR3 for alpha chain variable domain of TCR clone 159838 (TRAV13-1, TRAJ44)
CAAKATGTASKLTF

SEQ ID NO: 319676 - protein, 14 aa, Homo sapiens
  CDR3 for beta chain variable domain of TCR clone 159838 (TRBV4-1, TRBJ2-2)
CASSQAVNTGELFL

SEQ ID NO: 319677 - protein, 14 aa, Homo sapiens
  CDR3 for alpha chain variable domain of TCR clone 159839 (TRAV8-4, TRAJ17)
CAVSYQAAGNKLTV

SEQ ID NO: 319678 - protein, 15 aa, Homo sapiens
  CDR3 for beta chain variable domain of TCR clone 159839 (TRBV7-2, TRBJ1-2)
CASSLAPDRGLGYTF

SEQ ID NO: 319679 - protein, 12 aa, Homo sapiens
  CDR3 for alpha chain variable domain of TCR clone 159840 (TRAV17, TRAJ39)
CATCAAGNMLNF

SEQ ID NO: 319680 - protein, 14 aa, Homo sapiens
  CDR3 for beta chain variable domain of TCR clone 159840 (TRBV7-9, TRBJ1-2)
CASSRQGANYGYTF

SEQ ID NO: 319681 - protein, 13 aa, Homo sapiens
  CDR3 for alpha chain variable domain of TCR clone 159841 (TRAV12-3, TRAJ33)
CAMSVNSNYQLIW

SEQ ID NO: 319682 - protein, 16 aa, Homo sapiens
  CDR3 for beta chain variable domain of TCR clone 159841 (TRBV13, TRBJ2-5)
CSSSLRTGGSWETQYF

SEQ ID NO: 319683 - protein, 12 aa, Homo sapiens
  CDR3 for alpha chain variable domain of TCR clone 159842 (TRAV1-2, TRAJ42)
CVAGGSQGNLIF

SEQ ID NO: 319684 - protein, 15 aa, Homo sapiens
  CDR3 for beta chain variable domain of TCR clone 159842 (TRBV28, TRBJ2-5)
CASSSGRTIQETQYF

SEQ ID NO: 319685 - protein, 14 aa, Homo sapiens
  CDR3 for alpha chain variable domain of TCR clone 159843 (TRAV26-1, TRAJ38)
CIADNAGNNRKLIW

SEQ ID NO: 319686 - protein, 16 aa, Homo sapiens
  CDR3 for beta chain variable domain of TCR clone 159843 (TRBV20-1, TRBJ2-7)
CSASTSGRLGSYEQYF

SEQ ID NO: 319687 - protein, 15 aa, Homo sapiens
  CDR3 for alpha chain variable domain of TCR clone 159844 (TRAV12-1, TRAJ9)
CVVSFGDTGGFKTIF

SEQ ID NO: 319688 - protein, 17 aa, Homo sapiens
  CDR3 for beta chain variable domain of TCR clone 159844 (TRBV7-3, TRBJ2-3)
CASSLMKRMRGADTQYF

SEQ ID NO: 319689 - protein, 11 aa, Homo sapiens
  CDR3 for alpha chain variable domain of TCR clone 159845 (TRAV13-1, TRAJ30)
CAASREDKIIF

SEQ ID NO: 319690 - protein, 15 aa, Homo sapiens
  CDR3 for beta chain variable domain of TCR clone 159845 (TRBV18, TRBJ1-1)
CASSPSSWVNTEAFF

SEQ ID NO: 319691 - protein, 13 aa, Homo sapiens
  CDR3 for alpha chain variable domain of TCR clone 159846 (TRAV21, TRAJ27)
CAARPGNEGKSTF

SEQ ID NO: 319692 - protein, 12 aa, Homo sapiens
  CDR3 for beta chain variable domain of TCR clone 159846 (TRBV11-2, TRBJ2-2)
CASSLGGGELFF

SEQ ID NO: 319693 - protein, 16 aa, Homo sapiens
  CDR3 for alpha chain variable domain of TCR clone 159847 (TRAV16, TRAJ52)
CALSAAGGTSYGKLTF

SEQ ID NO: 319694 - protein, 15 aa, Homo sapiens
  CDR3 for beta chain variable domain of TCR clone 159847 (TRBV11-2, TRBJ1-2)
CASSLEGVQRNGYTF

SEQ ID NO: 319695 - protein, 12 aa, Homo sapiens
  CDR3 for alpha chain variable domain of TCR clone 159848 (TRAV13-2, TRAJ8)
CAPWLGFHKLLF

SEQ ID NO: 319696 - protein, 14 aa, Homo sapiens
  CDR3 for beta chain variable domain of TCR clone 159848 (TRBV18, TRBJ1-5)
CASSRQQRNQPQHF

SEQ ID NO: 319697 - protein, 12 aa, Homo sapiens
  CDR3 for alpha chain variable domain of TCR clone 159849 (TRAV1-1, TRAJ8)
WAGGTGFQKLVF

SEQ ID NO: 319698 - protein, 15 aa, Homo sapiens
  CDR3 for beta chain variable domain of TCR clone 159849 (TRBV7-9, TRBJ1-4)
CASSRTGGFNEKLFF

SEQ ID NO: 319699 - protein, 14 aa, Homo sapiens
  CDR3 for alpha chain variable domain of TCR clone 159850 (TRAV26-1, TRAJ38)
CIADNAGNNRKLIW

SEQ ID NO: 319700 - protein, 13 aa, Homo sapiens
  CDR3 for beta chain variable domain of TCR clone 159850 (TRBV12-5, TRBJ2-3)
CASGDRQSDTQYF

SEQ ID NO: 319701 - protein, 17 aa, Homo sapiens
  CDR3 for alpha chain variable domain of TCR clone 159851 (TRAV13-1, TRAJ21)
CAAGRNAGVTSYGKLTF

SEQ ID NO: 319702 - protein, 16 aa, Homo sapiens
  CDR3 for beta chain variable domain of TCR clone 159851 (TRBV12-4, TRBJ1-5)
CASSRPVGGSNQPQHF

SEQ ID NO: 319703 - protein, 14 aa, Homo sapiens
  CDR3 for alpha chain variable domain of TCR clone 159852 (TRAV16, TRAJ17)
CALSGRAAGNKLTF

SEQ ID NO: 319704 - protein, 15 aa, Homo sapiens
  CDR3 for beta chain variable domain of TCR clone 159852 (TRBV3-1, TRBJ1-2)
CASSPTRLPEGGYSF

SEQ ID NO: 319705 - protein, 16 aa, Homo sapiens
  CDR3 for alpha chain variable domain of TCR clone 159853 (TRAV12-3, TRAJ53)
CAMSPGRGGSKYKLTF

SEQ ID NO: 319706 - protein, 11 aa, Homo sapiens
  CDR3 for beta chain variable domain of TCR clone 159853 (TRBV29-1, TRBJ2-5)
CSEDRTGTQYF

SEQ ID NO: 319707 - protein, 14 aa, Homo sapiens
  CDR3 for alpha chain variable domain of TCR clone 159854 (TRAV1-2, TRAJ16)
CAVNRFSDGQKLLF

SEQ ID NO: 319708 - protein, 13 aa, Homo sapiens
  CDR3 for beta chain variable domain of TCR clone 159854 (TRBV20-1, TRBJ1-1)
CNARGGGNTEAFF

SEQ ID NO: 319709 - protein, 14 aa, Homo sapiens
  CDR3 for alpha chain variable domain of TCR clone 159855 (TRAV38-1, TRAJ48)
CAFMANFGNGKLTF

SEQ ID NO: 319710 - protein, 16 aa, Homo sapiens
  CDR3 for beta chain variable domain of TCR clone 159855 (TRBV4-1, TRBJ2-7)
CASRPSGGGADNEQYF

SEQ ID NO: 319711 - protein, 14 aa, Homo sapiens
  CDR3 for alpha chain variable domain of TCR clone 159856 (TRAV13-1, TRAJ35)
CAASKGGFGNVLHC

SEQ ID NO: 319712 - protein, 16 aa, Homo sapiens
  CDR3 for beta chain variable domain of TCR clone 159856 (TRBV5-5, TRBJ2-2)
CASSGRREGATGELFF

SEQ ID NO: 319713 - protein, 11 aa, Homo sapiens
  CDR3 for alpha chain variable domain of TCR clone 159857 (TRAV21, TRAJ34)
CAHYNTDELIF

SEQ ID NO: 319714 - protein, 14 aa, Homo sapiens
  CDR3 for beta chain variable domain of TCR clone 159857 (TRBV7-2, TRBJ2-5)
CASSTGGELKTQYF

SEQ ID NO: 319715 - protein, 16 aa, Homo sapiens
  CDR3 for alpha chain variable domain of TCR clone 159858 (TRAV30, TRAJ28)
CGPPPYSGAGSYQLTF

SEQ ID NO: 319716 - protein, 15 aa, Homo sapiens
  CDR3 for beta chain variable domain of TCR clone 159858 (TRBV10-2, TRBJ2-6)
CASSEQGTGANVLTF

SEQ ID NO: 319717 - protein, 12 aa, Homo sapiens
  CDR3 for alpha chain variable domain of TCR clone 159859 (TRAV12-1, TRAJ40)
CVVYSGTYKYIF

SEQ ID NO: 319718 - protein, 19 aa, Homo sapiens
  CDR3 for beta chain variable domain of TCR clone 159859 (TRBV7-2, TRBJ2-3)
CASSSLSRNWGGGTDTQYF

SEQ ID NO: 319719 - protein, 13 aa, Homo sapiens
  CDR3 for alpha chain variable domain of TCR clone 159860 (TRAV21, TRAJ27)
CAARPGNAGKSTI

SEQ ID NO: 319720 - protein, 14 aa, Homo sapiens
  CDR3 for beta chain variable domain of TCR clone 159860 (TRBV11-2, TRBJ2-7)
CASSLGAGAYEQYF

SEQ ID NO: 319721 - protein, 13 aa, Homo sapiens
  CDR3 for alpha chain variable domain of TCR clone 159861 (TRAV8-3, TRAJ43)
CSVGPDNNNDMRF

SEQ ID NO: 319722 - protein, 14 aa, Homo sapiens
  CDR3 for beta chain variable domain of TCR clone 159861 (TRBV19, TRBJ2-1)
CASPTFVLSGEQFF

SEQ ID NO: 319723 - protein, 18 aa, Homo sapiens
  CDR3 for alpha chain variable domain of TCR clone 159862 (TRAV26-2, TRAJ39)
CILIVPSRMQATCSPLEG

SEQ ID NO: 319724 - protein, 14 aa, Homo sapiens
  CDR3 for beta chain variable domain of TCR clone 159862 (TRBV12-4, TRBJ1-4)
CASRMTGRSEKLFF

SEQ ID NO: 319725 - protein, 16 aa, Homo sapiens
  CDR3 for alpha chain variable domain of TCR clone 159863 (TRAV30, TRAJ24)
CGTVIVDADSWGKFQF

SEQ ID NO: 319726 - protein, 15 aa, Homo sapiens
  CDR3 for beta chain variable domain of TCR clone 159863 (TRBV9, TRBJ1-6)
CASSVAGTGDSPLHF

SEQ ID NO: 319727 - protein, 16 aa, Homo sapiens
  CDR3 for alpha chain variable domain of TCR clone 159864 (TRAV1-2, TRAJ10)
CAVRGVLTGGGNKLTF

SEQ ID NO: 319728 - protein, 13 aa, Homo sapiens
  CDR3 for beta chain variable domain of TCR clone 159864 (TRBV12-5, TRBJ1-2)
CASGVRTGNGYTF

SEQ ID NO: 319729 - protein, 13 aa, Homo sapiens
  CDR3 for alpha chain variable domain of TCR clone 159865 (TRAV21, TRAJ27)
CASRPGNAGKSTF

SEQ ID NO: 319730 - protein, 16 aa, Homo sapiens
  CDR3 for beta chain variable domain of TCR clone 159865 (TRBV20-1, TRBJ1-2)
CSASMGQGVANYGYTF

SEQ ID NO: 319731 - protein, 14 aa, Homo sapiens
  CDR3 for alpha chain variable domain of TCR clone 159866 (TRAV3, TRAJ27)
CAVRDDTNAGNSTF

SEQ ID NO: 319732 - protein, 15 aa, Homo sapiens
  CDR3 for beta chain variable domain of TCR clone 159866 (TRBV7-7, TRBJ2-2)
CATSKLAKNTGELFF

SEQ ID NO: 319733 - protein, 13 aa, Homo sapiens
  CDR3 for alpha chain variable domain of TCR clone 159867 (TRAV21, TRAJ20)
CAVGVFADYKLSF

SEQ ID NO: 319734 - protein, 13 aa, Homo sapiens
  CDR3 for beta chain variable domain of TCR clone 159867 (TRBV11-2, TRBJ1-3)
CASSLEPVNTIYF

SEQ ID NO: 319735 - protein, 12 aa, Homo sapiens
  CDR3 for alpha chain variable domain of TCR clone 159868 (TRAV17, TRAJ12)
CATLRSSYKLIF

SEQ ID NO: 319736 - protein, 13 aa, Homo sapiens
  CDR3 for beta chain variable domain of TCR clone 159868 (TRBV7-9, TRBJ2-7)
CASSFAGAYEQYF

SEQ ID NO: 319737 - protein, 12 aa, Homo sapiens
  CDR3 for alpha chain variable domain of TCR clone 159869 (TRAV1-1, TRAJ39)
CAVPVVGNMLTF

SEQ ID NO: 319738 - protein, 15 aa, Homo sapiens
  CDR3 for beta chain variable domain of TCR clone 159869 (TRBV20-1, TRBJ1-1)
CSASRGVTGNTEAFF

SEQ ID NO: 319739 - protein, 13 aa, Homo sapiens
  CDR3 for alpha chain variable domain of TCR clone 159870 (TRAV2, TRAJ40)
CAVVTSGTYKYIF

SEQ ID NO: 319740 - protein, 14 aa, Homo sapiens
  CDR3 for beta chain variable domain of TCR clone 159870 (TRBV2, TRBJ2-2)
CASSLFGGDGELFF

SEQ ID NO: 319741 - protein, 15 aa, Homo sapiens
  CDR3 for alpha chain variable domain of TCR clone 159871 (TRAV3, TRAJ20)
CAVRDSRSNDYKLSF

SEQ ID NO: 319742 - protein, 14 aa, Homo sapiens
  CDR3 for beta chain variable domain of TCR clone 159871 (TRBV20-1, TRBJ2-7)
CSARRGNGVYEQYF

SEQ ID NO: 319743 - protein, 15 aa, Homo sapiens
  CDR3 for alpha chain variable domain of TCR clone 159872 (TRAV14/DV4, TRAJ12)
CAMREERDSSYKLIF

SEQ ID NO: 319744 - protein, 13 aa, Homo sapiens
  CDR3 for beta chain variable domain of TCR clone 159872 (TRBV7-3, TRBJ1-1)
CASSQDWGAEAFF

SEQ ID NO: 319745 - protein, 16 aa, Homo sapiens
  CDR3 for alpha chain variable domain of TCR clone 159873 (TRAV8-2, TRAJ50)
CVVSDHMKTSYDKVIF

SEQ ID NO: 319746 - protein, 12 aa, Homo sapiens
  CDR3 for beta chain variable domain of TCR clone 159873 (TRBV7-8, TRBJ2-7)
CASSLGDREQYF

SEQ ID NO: 319747 - protein, 15 aa, Homo sapiens
  CDR3 for alpha chain variable domain of TCR clone 159874 (TRAV3, TRAJ33)
CPCERLLLWNYQLIW

SEQ ID NO: 319748 - protein, 14 aa, Homo sapiens
  CDR3 for beta chain variable domain of TCR clone 159874 (TRBV6-1, TRBJ1-3)
CASVQGGGGNTIYF

SEQ ID NO: 319749 - protein, 15 aa, Homo sapiens
  CDR3 for alpha chain variable domain of TCR clone 159875 (TRAV27, TRAJ38)
CAARRNAGNNRKLIW

SEQ ID NO: 319750 - protein, 17 aa, Homo sapiens
  CDR3 for beta chain variable domain of TCR clone 159875 (TRBV20-1, TRBJ2-2)
CSASGSGQGGLAGELFF

SEQ ID NO: 319751 - protein, 14 aa, Homo sapiens
  CDR3 for alpha chain variable domain of TCR clone 159876 (TRAV1-2, TRAJ8)
CAVREDTGFQKLVF

SEQ ID NO: 319752 - protein, 14 aa, Homo sapiens
  CDR3 for beta chain variable domain of TCR clone 159876 (TRBV18, TRBJ1-5)
CASSQGMGNQPQHF

SEQ ID NO: 319753 - protein, 12 aa, Homo sapiens
  CDR3 for alpha chain variable domain of TCR clone 159877 (TRAV13-1, TRAJ3)
CAATGVHQCFQD

SEQ ID NO: 319754 - protein, 15 aa, Homo sapiens
  CDR3 for beta chain variable domain of TCR clone 159877 (TRBV7-3, TRBJ2-2)
CQQLKAGDLVRGAVF

SEQ ID NO: 319755 - protein, 14 aa, Homo sapiens
  CDR3 for alpha chain variable domain of TCR clone 159878 (TRAV16, TRAJ17)
CAPRIKAAGNKLTF

SEQ ID NO: 319756 - protein, 12 aa, Homo sapiens
  CDR3 for beta chain variable domain of TCR clone 159878 (TRBV12-4, TRBJ2-7)
CASGLGGYEQYF

SEQ ID NO: 319757 - protein, 18 aa, Homo sapiens
  CDR3 for alpha chain variable domain of TCR clone 159879 (TRAV12-2, )
CAVEDIQNPDPAVYQLRD

SEQ ID NO: 319758 - protein, 12 aa, Homo sapiens
  CDR3 for beta chain variable domain of TCR clone 159879 (TRBV11-2, TRBJ2-3)
GASRGAPNTQYF

SEQ ID NO: 319759 - protein, 15 aa, Homo sapiens
  CDR3 for alpha chain variable domain of TCR clone 159880 (TRAV13-1, TRAJ57)
CAASNTQGGSEKPVF

SEQ ID NO: 319760 - protein, 16 aa, Homo sapiens
  CDR3 for beta chain variable domain of TCR clone 159880 (TRBV19, TRBJ2-1)
CASSKAGPSSHNEQFF

SEQ ID NO: 319761 - protein, 13 aa, Homo sapiens
  CDR3 for alpha chain variable domain of TCR clone 159881 (TRAV17, TRAJ22)
CATDGGNFNKFYF

SEQ ID NO: 319762 - protein, 16 aa, Homo sapiens
  CDR3 for beta chain variable domain of TCR clone 159881 (TRBV7-9, TRBJ2-1)
CASSDVAGGSYNEQFF

SEQ ID NO: 319763 - protein, 13 aa, Homo sapiens
  CDR3 for alpha chain variable domain of TCR clone 159882 (TRAV12-3, TRAJ13)
CAMSSGGYQKVTF

SEQ ID NO: 319764 - protein, 15 aa, Homo sapiens
  CDR3 for beta chain variable domain of TCR clone 159882 (TRBV4-2, TRBJ2-1)
CASSQDVGLAGEQFF

SEQ ID NO: 319765 - protein, 18 aa, Homo sapiens
  CDR3 for alpha chain variable domain of TCR clone 159883 (TRAV21, TRAJ52)
CAVRPSPAGVTSYGELTF

SEQ ID NO: 319766 - protein, 17 aa, Homo sapiens
  CDR3 for beta chain variable domain of TCR clone 159883 (TRBV13, TRBJ2-3)
CASSLSRVAGGRNTQYF

SEQ ID NO: 319767 - protein, 15 aa, Homo sapiens
  CDR3 for alpha chain variable domain of TCR clone 159884 (TRAV34, TRAJ38)
CGADFTPGNTRKLIW

SEQ ID NO: 319768 - protein, 16 aa, Homo sapiens
  CDR3 for beta chain variable domain of TCR clone 159884 (TRBV12-5, TRBJ2-5)
CASGPRTSGNQETQYF

SEQ ID NO: 319769 - protein, 13 aa, Homo sapiens
  CDR3 for alpha chain variable domain of TCR clone 159885 (TRAV26-1, TRAJ34)
CIVRPWITDKPIF

SEQ ID NO: 319770 - protein, 13 aa, Homo sapiens
  CDR3 for beta chain variable domain of TCR clone 159885 (TRBV5-1, TRBJ2-1)
CARSLGSYNEQFF

SEQ ID NO: 319771 - protein, 16 aa, Homo sapiens
  CDR3 for alpha chain variable domain of TCR clone 159886 (TRAV13-2, TRAJ32)
CAENMNYGGATNKLIF

SEQ ID NO: 319772 - protein, 14 aa, Homo sapiens
  CDR3 for beta chain variable domain of TCR clone 159886 (TRBV15, TRBJ2-5)
CATSSTGYQETQFF

SEQ ID NO: 319773 - protein, 21 aa, Homo sapiens
  CDR3 for alpha chain variable domain of TCR clone 159887 (TRAV25, TRAJ47)
TATQTTDVGTYFWEYGNKLVF

SEQ ID NO: 319774 - protein, 19 aa, Homo sapiens
  CDR3 for beta chain variable domain of TCR clone 159887 (TRBV2, TRBJ2-7)
CASSDDETSGRANDYEQYF

SEQ ID NO: 319775 - protein, 18 aa, Homo sapiens
  CDR3 for alpha chain variable domain of TCR clone 159888 (TRAV13-1, TRAJ52)
CAAKNPNAGGTSYGKLTF

SEQ ID NO: 319776 - protein, 14 aa, Homo sapiens
  CDR3 for beta chain variable domain of TCR clone 159888 (TRBV7-3, TRBJ2-1)
CASSLAGGTNEQFL

SEQ ID NO: 319777 - protein, 14 aa, Homo sapiens
  CDR3 for alpha chain variable domain of TCR clone 159889 (TRAV27, TRAJ23)
CAGAFDNQGGKLIF

SEQ ID NO: 319778 - protein, 15 aa, Homo sapiens
  CDR3 for beta chain variable domain of TCR clone 159889 (TRBV7-3, TRBJ2-7)
CASSLTGQGKYEQFF

SEQ ID NO: 319779 - protein, 16 aa, Homo sapiens
  CDR3 for alpha chain variable domain of TCR clone 159890 (TRAV26-1, TRAJ32)
CIVRTNYGGATNKLNF

SEQ ID NO: 319780 - protein, 14 aa, Homo sapiens
  CDR3 for beta chain variable domain of TCR clone 159890 (TRBV27, TRBJ1-1)
CASSLLSGLSEAFF

SEQ ID NO: 319781 - protein, 15 aa, Homo sapiens
  CDR3 for alpha chain variable domain of TCR clone 159891 (TRAV17, TRAJ23)
CATDAEDNQRGKLIF

SEQ ID NO: 319782 - protein, 12 aa, Homo sapiens
  CDR3 for beta chain variable domain of TCR clone 159891 (TRBV2, TRBJ2-1)
CAKREGYNEQFF

SEQ ID NO: 319783 - protein, 14 aa, Homo sapiens
  CDR3 for alpha chain variable domain of TCR clone 159892 (TRAV12-3, TRAJ10)
SHLPLTGGGNKLTF

SEQ ID NO: 319784 - protein, 17 aa, Homo sapiens
  CDR3 for beta chain variable domain of TCR clone 159892 (TRBV13, TRBJ2-3)
CASSLSMVAGGRNTQYF

SEQ ID NO: 319785 - protein, 10 aa, Homo sapiens
  CDR3 for alpha chain variable domain of TCR clone 159893 (TRAV8-2, TRAJ29)
CTGGNTPLVF

SEQ ID NO: 319786 - protein, 17 aa, Homo sapiens
  CDR3 for beta chain variable domain of TCR clone 159893 (TRBV2, TRBJ2-7)
CAGSQALTGWDSYEQYF

SEQ ID NO: 319787 - protein, 14 aa, Homo sapiens
  CDR3 for alpha chain variable domain of TCR clone 159894 (TRAV12-1, TRAJ23)
CVLIVYNQGGKLIL

SEQ ID NO: 319788 - protein, 15 aa, Homo sapiens
  CDR3 for beta chain variable domain of TCR clone 159894 (TRBV20-1, TRBJ1-5)
CSAKPPGQGPQPQHF

SEQ ID NO: 319789 - protein, 10 aa, Homo sapiens
  CDR3 for alpha chain variable domain of TCR clone 159895 (TRAV20, TRAJ22)
CAAPARQLTF

SEQ ID NO: 319790 - protein, 14 aa, Homo sapiens
  CDR3 for beta chain variable domain of TCR clone 159895 (TRBV19, TRBJ2-1)
WASSMGSGATEQFF

SEQ ID NO: 319791 - protein, 17 aa, Homo sapiens
  CDR3 for alpha chain variable domain of TCR clone 159896 (TRAV3, TRAJ42)
CAVRDRAYGGSQGNLIF

SEQ ID NO: 319792 - protein, 15 aa, Homo sapiens
  CDR3 for beta chain variable domain of TCR clone 159896 (TRBV3-1, TRBJ2-1)
CASSQVVDDGEEQFF

SEQ ID NO: 319793 - protein, 14 aa, Homo sapiens
  CDR3 for alpha chain variable domain of TCR clone 159897 (TRAV12-2, TRAJ13)
CAVKKTGGYQKVTL

SEQ ID NO: 319794 - protein, 15 aa, Homo sapiens
  CDR3 for beta chain variable domain of TCR clone 159897 (TRBV12-4, TRBJ1-5)
CASSFFGGRDQPQHF

SEQ ID NO: 319795 - protein, 12 aa, Homo sapiens
  CDR3 for alpha chain variable domain of TCR clone 159898 (TRAV1-2, TRAJ33)
CAALDSNYQLIW

SEQ ID NO: 319796 - protein, 16 aa, Homo sapiens
  CDR3 for beta chain variable domain of TCR clone 159898 (TRBV24-1, TRBJ2-3)
CATSGRRQDLTDTQYF

SEQ ID NO: 319797 - protein, 17 aa, Homo sapiens
  CDR3 for alpha chain variable domain of TCR clone 159899 (TRAV4, TRAJ18)
CLVGERSVGSTLGRRYF

SEQ ID NO: 319798 - protein, 16 aa, Homo sapiens
  CDR3 for beta chain variable domain of TCR clone 159899 (TRBV4-2, TRBJ1-1)
CASSPSPGRAAPEAFF

SEQ ID NO: 319799 - protein, 12 aa, Homo sapiens
  CDR3 for alpha chain variable domain of TCR clone 159900 (TRAV30, TRAJ43)
CGTEERGNDMRF

SEQ ID NO: 319800 - protein, 11 aa, Homo sapiens
  CDR3 for beta chain variable domain of TCR clone 159900 (TRBV29-1, TRBJ2-5)
CSEDRTGTPYF

SEQ ID NO: 319801 - protein, 18 aa, Homo sapiens
  CDR3 for alpha chain variable domain of TCR clone 159901 (TRAV21, TRAJ52)
CAVRPSPAGGTSYGNLTF

SEQ ID NO: 319802 - protein, 16 aa, Homo sapiens
  CDR3 for beta chain variable domain of TCR clone 159901 (TRBV19, TRBJ2-2)
CASRSPGTGATGELFF

SEQ ID NO: 319803 - protein, 17 aa, Homo sapiens
  CDR3 for alpha chain variable domain of TCR clone 159902 (TRAV13-1, TRAJ28)
CAASPPYSGAGSYQLTF

SEQ ID NO: 319804 - protein, 16 aa, Homo sapiens
  CDR3 for beta chain variable domain of TCR clone 159902 (TRBV7-8, TRBJ2-4)
CASSAERTLAKNMQYF

SEQ ID NO: 319805 - protein, 16 aa, Homo sapiens
  CDR3 for alpha chain variable domain of TCR clone 159903 (TRAV26-1, TRAJ23)
CIVRVNPYNQGGKLIF

SEQ ID NO: 319806 - protein, 15 aa, Homo sapiens
  CDR3 for beta chain variable domain of TCR clone 159903 (TRBV5-7, TRBJ2-7)
CASSPYFEGSYEQYF

SEQ ID NO: 319807 - protein, 16 aa, Homo sapiens
  CDR3 for alpha chain variable domain of TCR clone 159904 (TRAV13-1, TRAJ48)
CSKYRESNLGNEKLTF

SEQ ID NO: 319808 - protein, 17 aa, Homo sapiens
  CDR3 for beta chain variable domain of TCR clone 159904 (TRBV28, TRBJ2-1)
CASSSARQALTYNEQFF

SEQ ID NO: 319809 - protein, 20 aa, Homo sapiens
  CDR3 for alpha chain variable domain of TCR clone 159905 (TRAV26-1, TRAJ42)
CCVLLHRQTYYGGSQGNLIF

SEQ ID NO: 319810 - protein, 14 aa, Homo sapiens
  CDR3 for beta chain variable domain of TCR clone 159905 (TRBV7-3, TRBJ2-5)
CASSPKTGVETQYF

SEQ ID NO: 319811 - protein, 13 aa, Homo sapiens
  CDR3 for alpha chain variable domain of TCR clone 159906 (TRAV12-2, TRAJ10)
CAVPTGGGNKLTF

SEQ ID NO: 319812 - protein, 15 aa, Homo sapiens
  CDR3 for beta chain variable domain of TCR clone 159906 (TRBV11-1, TRBJ2-7)
CASSLNYGASYEQYF

SEQ ID NO: 319813 - protein, 13 aa, Homo sapiens
  CDR3 for alpha chain variable domain of TCR clone 159907 (TRAV12-1, TRAJ42)
CVVNDPRQGNLIF

SEQ ID NO: 319814 - protein, 15 aa, Homo sapiens
  CDR3 for beta chain variable domain of TCR clone 159907 (TRBV20-1, TRBJ2-3)
CSARESRVQGYTQYF

SEQ ID NO: 319815 - protein, 11 aa, Homo sapiens
  CDR3 for alpha chain variable domain of TCR clone 159908 (TRAV3, TRAJ21)
CAVGNFNKFYF

SEQ ID NO: 319816 - protein, 16 aa, Homo sapiens
  CDR3 for beta chain variable domain of TCR clone 159908 (TRBV7-7, TRBJ2-1)
CASSLASGTSYNEQFF

SEQ ID NO: 319817 - protein, 15 aa, Homo sapiens
  CDR3 for alpha chain variable domain of TCR clone 159909 (TRAV38-1, TRAJ57)
CAFMDSQGGSEKLVF

SEQ ID NO: 319818 - protein, 16 aa, Homo sapiens
  CDR3 for beta chain variable domain of TCR clone 159909 (TRBV10-3, TRBJ2-1)
CAIRGEGRGDYNEQFF

SEQ ID NO: 319819 - protein, 11 aa, Homo sapiens
  CDR3 for alpha chain variable domain of TCR clone 159910 (TRAV35, TRAJ30)
CAPGGDDKIIF

SEQ ID NO: 319820 - protein, 14 aa, Homo sapiens
  CDR3 for beta chain variable domain of TCR clone 159910 (TRBV7-6, TRBJ2-1)
CASSLGGGVDEQFF

SEQ ID NO: 319821 - protein, 15 aa, Homo sapiens
  CDR3 for alpha chain variable domain of TCR clone 159911 (TRAV26-1, TRAJ29)
CIVRVEGSGNTPPAF

SEQ ID NO: 319822 - protein, 15 aa, Homo sapiens
  CDR3 for beta chain variable domain of TCR clone 159911 (TRBV7-9, TRBJ1-5)
CASSQGHQPNQPQHF

SEQ ID NO: 319823 - protein, 13 aa, Homo sapiens
  CDR3 for alpha chain variable domain of TCR clone 159912 (TRAV20, TRAJ49)
CAVQARTGNQFYF

SEQ ID NO: 319824 - protein, 13 aa, Homo sapiens
  CDR3 for beta chain variable domain of TCR clone 159912 (TRBV14, TRBJ1-1)
CASSREFGTEAFF

SEQ ID NO: 319825 - protein, 11 aa, Homo sapiens
  CDR3 for alpha chain variable domain of TCR clone 159913 (TRAV2, TRAJ13)
CASGGYQKVTF

SEQ ID NO: 319826 - protein, 13 aa, Homo sapiens
  CDR3 for beta chain variable domain of TCR clone 159913 (TRBV29-1, TRBJ2-5)
CSVVGGLIKTHYF

SEQ ID NO: 319827 - protein, 10 aa, Homo sapiens
  CDR3 for alpha chain variable domain of TCR clone 159914 (TRAV12-2, TRAJ18)
CAVTTDRLNP

SEQ ID NO: 319828 - protein, 15 aa, Homo sapiens
  CDR3 for beta chain variable domain of TCR clone 159914 (TRBV9, TRBJ1-6)
CASSVAGTGDSPLHF

SEQ ID NO: 319829 - protein, 12 aa, Homo sapiens
  CDR3 for alpha chain variable domain of TCR clone 159915 (TRAV1-1, TRAJ8)
CAGGTGFQELVS

SEQ ID NO: 319830 - protein, 14 aa, Homo sapiens
  CDR3 for beta chain variable domain of TCR clone 159915 (TRBV7-2, TRBJ2-7)
CASSPKTSFYEQYF

SEQ ID NO: 319831 - protein, 10 aa, Homo sapiens
  CDR3 for alpha chain variable domain of TCR clone 159916 (TRAV5, TRAJ34)
CAEDTDKLIF

SEQ ID NO: 319832 - protein, 13 aa, Homo sapiens
  CDR3 for beta chain variable domain of TCR clone 159916 (TRBV7-3, TRBJ1-1)
CASSQDWGAEAFF

SEQ ID NO: 319833 - protein, 15 aa, Homo sapiens
  CDR3 for alpha chain variable domain of TCR clone 159917 (TRAV12-2, TRAJ53)
CAVNGGGGCNYKLTF

SEQ ID NO: 319834 - protein, 13 aa, Homo sapiens
  CDR3 for beta chain variable domain of TCR clone 159917 (TRBV3-1, TRBJ1-1)
CASSPGVITEAFF

SEQ ID NO: 319835 - protein, 12 aa, Homo sapiens
  CDR3 for alpha chain variable domain of TCR clone 159918 (TRAV12-3, TRAJ20)
CAMVRGDYKLSS

SEQ ID NO: 319836 - protein, 17 aa, Homo sapiens
  CDR3 for beta chain variable domain of TCR clone 159918 (TRBV28, TRBJ2-5)
CASSKPEGDALQETQYF

SEQ ID NO: 319837 - protein, 15 aa, Homo sapiens
  CDR3 for alpha chain variable domain of TCR clone 159919 (TRAV17, TRAJ37)
CATDGGSSNPGKLIF

SEQ ID NO: 319838 - protein, 15 aa, Homo sapiens
  CDR3 for beta chain variable domain of TCR clone 159919 (TRBV7-2, TRBJ2-2)
CASRRPGQNTGELFF

SEQ ID NO: 319839 - protein, 13 aa, Homo sapiens
  CDR3 for alpha chain variable domain of TCR clone 159920 (TRAV12-1, TRAJ26)
CVVRRNYGQNFVF

SEQ ID NO: 319840 - protein, 14 aa, Homo sapiens
  CDR3 for beta chain variable domain of TCR clone 159920 (TRBV4-1, TRBJ2-2)
CASSQAVNTGELFF

SEQ ID NO: 319841 - protein, 11 aa, Homo sapiens
  CDR3 for alpha chain variable domain of TCR clone 159921 (TRAV12-1, TRAJ20)
CVVNDDYKLSF

SEQ ID NO: 319842 - protein, 22 aa, Homo sapiens
  CDR3 for beta chain variable domain of TCR clone 159921 (TRBV19, TRBJ2-1)
CASSVRDRVTGTSGRIYNEQFF

SEQ ID NO: 319843 - protein, 14 aa, Homo sapiens
  CDR3 for alpha chain variable domain of TCR clone 159922 (TRAV12-3, TRAJ29)
CAMSPYSGNTPLVF

SEQ ID NO: 319844 - protein, 15 aa, Homo sapiens
  CDR3 for beta chain variable domain of TCR clone 159922 (TRBV28, TRBJ2-1)
CASSIIAGGRSEQFF

SEQ ID NO: 319845 - protein, 13 aa, Homo sapiens
  CDR3 for alpha chain variable domain of TCR clone 159923 (TRAV3, TRAJ20)
CAVRPLNDYKLSF

SEQ ID NO: 319846 - protein, 12 aa, Homo sapiens
  CDR3 for beta chain variable domain of TCR clone 159923 (TRBV6-1, TRBJ2-1)
CGTYGLNNEQFF

SEQ ID NO: 319847 - protein, 15 aa, Homo sapiens
  CDR3 for alpha chain variable domain of TCR clone 159924 (TRAV12-2, TRAJ22)
CAVNVASGSARQLTF

SEQ ID NO: 319848 - protein, 15 aa, Homo sapiens
  CDR3 for beta chain variable domain of TCR clone 159924 (TRBV18, TRBJ2-2)
CASSPPVGFTGELFF

SEQ ID NO: 319849 - protein, 14 aa, Homo sapiens
  CDR3 for alpha chain variable domain of TCR clone 159925 (TRAV13-1, TRAJ35)
CAASKGGFGNVLHC

SEQ ID NO: 319850 - protein, 12 aa, Homo sapiens
  CDR3 for beta chain variable domain of TCR clone 159925 (TRBV7-3, TRBJ1-1)
CASQDWGAEAFF

SEQ ID NO: 319851 - protein, 14 aa, Homo sapiens
  CDR3 for alpha chain variable domain of TCR clone 159926 (TRAV12-3, TRAJ10)
SHLPLTGGVNKLTF

SEQ ID NO: 319852 - protein, 12 aa, Homo sapiens
  CDR3 for beta chain variable domain of TCR clone 159926 (TRBV7-8, TRBJ2-7)
CASNLGDREQYF

SEQ ID NO: 319853 - protein, 14 aa, Homo sapiens
  CDR3 for alpha chain variable domain of TCR clone 159927 (TRAV12-2, TRAJ44)
CAVNPAGTSSKLTF

SEQ ID NO: 319854 - protein, 16 aa, Homo sapiens
  CDR3 for beta chain variable domain of TCR clone 159927 (TRBV2, TRBJ2-6)
CASSEVGGAGANVLTF

SEQ ID NO: 319855 - protein, 15 aa, Homo sapiens
  CDR3 for alpha chain variable domain of TCR clone 159928 (TRAV12-2, TRAJ32)
CAVNHYGGARNKLIF

SEQ ID NO: 319856 - protein, 14 aa, Homo sapiens
  CDR3 for beta chain variable domain of TCR clone 159928 (TRBV27, TRBJ2-1)
CASSFGREANEQFF

SEQ ID NO: 319857 - protein, 15 aa, Homo sapiens
  CDR3 for alpha chain variable domain of TCR clone 159929 (TRAV21, TRAJ53)
CATLNSGGSNYKLTF

SEQ ID NO: 319858 - protein, 13 aa, Homo sapiens
  CDR3 for beta chain variable domain of TCR clone 159929 (TRBV7-8, TRBJ2-3)
CASSLRGPDTQYF

SEQ ID NO: 319859 - protein, 14 aa, Homo sapiens
  CDR3 for alpha chain variable domain of TCR clone 159930 (TRAV12-1, TRAJ17)
CVGNYKAAGNKLTF

SEQ ID NO: 319860 - protein, 15 aa, Homo sapiens
  CDR3 for beta chain variable domain of TCR clone 159930 (TRBV7-2, TRBJ2-1)
RASTHGTGIYNEQFF

SEQ ID NO: 319861 - protein, 16 aa, Homo sapiens
  CDR3 for alpha chain variable domain of TCR clone 159931 (TRAV1-2, TRAJ10)
CAVRGVLTGGGNKLTF

SEQ ID NO: 319862 - protein, 12 aa, Homo sapiens
  CDR3 for beta chain variable domain of TCR clone 159931 (TRBV11-3, TRBJ2-1)
CASSPGNNEQFF

SEQ ID NO: 319863 - protein, 12 aa, Homo sapiens
  CDR3 for alpha chain variable domain of TCR clone 159932 (TRAV27, TRAJ35)
CAGADFGNVLHC

SEQ ID NO: 319864 - protein, 16 aa, Homo sapiens
  CDR3 for beta chain variable domain of TCR clone 159932 (TRBV6-1, TRBJ2-1)
CASILRQGSPYSEQFF

SEQ ID NO: 319865 - protein, 14 aa, Homo sapiens
  CDR3 for alpha chain variable domain of TCR clone 159933 (TRAV1-2, TRAJ16)
CAVNRLSDGQKLLF

SEQ ID NO: 319866 - protein, 16 aa, Homo sapiens
  CDR3 for beta chain variable domain of TCR clone 159933 (TRBV20-1, TRBJ1-2)
CSASMGQGAANYGYTF

SEQ ID NO: 319867 - protein, 12 aa, Homo sapiens
  CDR3 for alpha chain variable domain of TCR clone 159934 (TRAV8-3, TRAJ4)
PAFSGCYNKLIF

SEQ ID NO: 319868 - protein, 13 aa, Homo sapiens
  CDR3 for beta chain variable domain of TCR clone 159934 (TRBV20-1, TRBJ1-3)
CSAGAYSGNTMYF

SEQ ID NO: 319869 - protein, 12 aa, Homo sapiens
  CDR3 for alpha chain variable domain of TCR clone 159935 (TRAV13-2, TRAJ23)
CAERHRGGKLIF

SEQ ID NO: 319870 - protein, 14 aa, Homo sapiens
  CDR3 for beta chain variable domain of TCR clone 159935 (TRBV7-2, TRBJ2-7)
RASRSQGAAYEQYF

SEQ ID NO: 319871 - protein, 12 aa, Homo sapiens
  CDR3 for alpha chain variable domain of TCR clone 159936 (TRAV12-2, TRAJ52)
IGGGTSYGKLAF

SEQ ID NO: 319872 - protein, 13 aa, Homo sapiens
  CDR3 for beta chain variable domain of TCR clone 159936 (TRBV15, TRBJ2-7)
CATSTTGHYEQYF

SEQ ID NO: 319873 - protein, 15 aa, Homo sapiens
  CDR3 for alpha chain variable domain of TCR clone 159937 (TRAV3, TRAJ22)
CAVGDRGGSARQLTF

SEQ ID NO: 319874 - protein, 15 aa, Homo sapiens
  CDR3 for beta chain variable domain of TCR clone 159937 (TRBV11-2, TRBJ1-1)
CASSSRSSLLLSLDK

SEQ ID NO: 319875 - protein, 16 aa, Homo sapiens
  CDR3 for alpha chain variable domain of TCR clone 159938 (TRAV8-6, TRAJ37)
CAVSGLGSSNTSTLIF

SEQ ID NO: 319876 - protein, 15 aa, Homo sapiens
  CDR3 for beta chain variable domain of TCR clone 159938 (TRBV20-1, TRBJ1-5)
CSARSGPSMNQPQHF

SEQ ID NO: 319877 - protein, 14 aa, Homo sapiens
  CDR3 for alpha chain variable domain of TCR clone 159939 (TRAV1-2, TRAJ16)
CAVNRFSDGQKLLF

SEQ ID NO: 319878 - protein, 16 aa, Homo sapiens
  CDR3 for beta chain variable domain of TCR clone 159939 (TRBV20-1, TRBJ1-4)
CSPPGQGLLTNEKLFF

SEQ ID NO: 319879 - protein, 13 aa, Homo sapiens
  CDR3 for alpha chain variable domain of TCR clone 159940 (TRAV21, TRAJ20)
CAVGLRVDYKLSF

SEQ ID NO: 319880 - protein, 18 aa, Homo sapiens
  CDR3 for beta chain variable domain of TCR clone 159940 (TRBV20-1, TRBJ2-2)
CSARVQTARPSGTGELFF

SEQ ID NO: 319881 - protein, 17 aa, Homo sapiens
  CDR3 for alpha chain variable domain of TCR clone 159941 (TRAV3, TRAJ6)
CAVSRRTHTGGSYIPTF

SEQ ID NO: 319882 - protein, 18 aa, Homo sapiens
  CDR3 for beta chain variable domain of TCR clone 159941 (TRBV7-2, TRBJ2-3)
CASSLETSRGRKADTQYF

SEQ ID NO: 319883 - protein, 13 aa, Homo sapiens
  CDR3 for alpha chain variable domain of TCR clone 159942 (TRAV2, TRAJ21)
CAVEELNFNKFYF

SEQ ID NO: 319884 - protein, 15 aa, Homo sapiens
  CDR3 for beta chain variable domain of TCR clone 159942 (TRBV28, TRBJ2-5)
CASSPGQGSIETQYC

SEQ ID NO: 319885 - protein, 14 aa, Homo sapiens
  CDR3 for alpha chain variable domain of TCR clone 159943 (TRAV17, TRAJ16)
CATADISDGQKLLF

SEQ ID NO: 319886 - protein, 15 aa, Homo sapiens
  CDR3 for beta chain variable domain of TCR clone 159943 (TRBV18, TRBJ2-1)
CASSPPSASYNEQFF

SEQ ID NO: 319887 - protein, 12 aa, Homo sapiens
  CDR3 for alpha chain variable domain of TCR clone 159944 (TRAV23/DV6, TRAJ30)
CAASKGDDKIIF

SEQ ID NO: 319888 - protein, 18 aa, Homo sapiens
  CDR3 for beta chain variable domain of TCR clone 159944 (TRBV10-3, TRBJ2-3)
CAISESRVRPMRGDTQYF

SEQ ID NO: 319889 - protein, 17 aa, Homo sapiens
  CDR3 for alpha chain variable domain of TCR clone 159945 (TRAV26-1, TRAJ53)
CIVRVDDSGGSNYKLTF

SEQ ID NO: 319890 - protein, 11 aa, Homo sapiens
  CDR3 for beta chain variable domain of TCR clone 159945 (TRBV29-1, TRBJ2-5)
CSEDRTGTQYF

SEQ ID NO: 319891 - protein, 12 aa, Homo sapiens
  CDR3 for alpha chain variable domain of TCR clone 159946 (TRAV20, TRAJ56)
CAVTGANSKLTF

SEQ ID NO: 319892 - protein, 14 aa, Homo sapiens
  CDR3 for beta chain variable domain of TCR clone 159946 (TRBV20-1, TRBJ2-5)
CSALVPGYQETQYV

SEQ ID NO: 319893 - protein, 14 aa, Homo sapiens
  CDR3 for alpha chain variable domain of TCR clone 159947 (TRAV4, TRAJ41)
CLVGDGDSGYALNF

SEQ ID NO: 319894 - protein, 15 aa, Homo sapiens
  CDR3 for beta chain variable domain of TCR clone 159947 (TRBV9, TRBJ2-1)
CASSLAGSSYNEQFF

SEQ ID NO: 319895 - protein, 15 aa, Homo sapiens
  CDR3 for alpha chain variable domain of TCR clone 159948 (TRAV3, TRAJ32)
CAVSSYGGATNKLIF

SEQ ID NO: 319896 - protein, 14 aa, Homo sapiens
  CDR3 for beta chain variable domain of TCR clone 159948 (TRBV25-1, TRBJ1-1)
CASTHLGGNTEAFF

SEQ ID NO: 319897 - protein, 16 aa, Homo sapiens
  CDR3 for alpha chain variable domain of TCR clone 159949 (TRAV30, TRAJ24)
CGTEIVDADSWGKFQF

SEQ ID NO: 319898 - protein, 15 aa, Homo sapiens
  CDR3 for beta chain variable domain of TCR clone 159949 (TRBV28, TRBJ2-1)
CASSIIAGGRSEQFF

SEQ ID NO: 319899 - protein, 15 aa, Homo sapiens
  CDR3 for alpha chain variable domain of TCR clone 159950 (TRAV29/DV5, TRAJ29)
CAASERSSGKTPLVF

SEQ ID NO: 319900 - protein, 12 aa, Homo sapiens
  CDR3 for beta chain variable domain of TCR clone 159950 (TRBV7-9, TRBJ1-4)
CASSTDREKLFF

SEQ ID NO: 319901 - protein, 15 aa, Homo sapiens
  CDR3 for alpha chain variable domain of TCR clone 159951 (TRAV12-3, TRAJ27)
CAMRAYNTNAGKSTF

SEQ ID NO: 319902 - protein, 14 aa, Homo sapiens
  CDR3 for beta chain variable domain of TCR clone 159951 (TRBV7-6, TRBJ2-7)
CASSFRQGADEQYF

SEQ ID NO: 319903 - protein, 13 aa, Homo sapiens
  CDR3 for alpha chain variable domain of TCR clone 159952 (TRAV3, TRAJ9)
CAFWNTGGFKTIF

SEQ ID NO: 319904 - protein, 16 aa, Homo sapiens
  CDR3 for beta chain variable domain of TCR clone 159952 (TRBV4-2, TRBJ2-5)
CASSQELVGSQETQYF

SEQ ID NO: 319905 - protein, 13 aa, Homo sapiens
  CDR3 for alpha chain variable domain of TCR clone 159953 (TRAV2, TRAJ40)
CAVVTSGTYKYIF

SEQ ID NO: 319906 - protein, 14 aa, Homo sapiens
  CDR3 for beta chain variable domain of TCR clone 159953 (TRBV5-1, TRBJ2-2)
CASSLGGGSGELFF

SEQ ID NO: 319907 - protein, 12 aa, Homo sapiens
  CDR3 for alpha chain variable domain of TCR clone 159954 (TRAV27, TRAJ26)
CAGPIYGQNFVF

SEQ ID NO: 319908 - protein, 14 aa, Homo sapiens
  CDR3 for beta chain variable domain of TCR clone 159954 (TRBV19, TRBJ2-2)
CASSGQGIAGELFF

SEQ ID NO: 319909 - protein, 16 aa, Homo sapiens
  CDR3 for alpha chain variable domain of TCR clone 159955 (TRAV12-3, TRAJ45)
CAMCRGSGGGADGLTF

SEQ ID NO: 319910 - protein, 15 aa, Homo sapiens
  CDR3 for beta chain variable domain of TCR clone 159955 (TRBV3-1, TRBJ1-2)
CASSHPGTPGYGYTF

SEQ ID NO: 319911 - protein, 13 aa, Homo sapiens
  CDR3 for alpha chain variable domain of TCR clone 159956 (TRAV3, TRAJ21)
CAVREPDFNNFYF

SEQ ID NO: 319912 - protein, 13 aa, Homo sapiens
  CDR3 for beta chain variable domain of TCR clone 159956 (TRBV9, TRBJ2-1)
CASSPSGGNKQFF

SEQ ID NO: 319913 - protein, 16 aa, Homo sapiens
  CDR3 for alpha chain variable domain of TCR clone 159957 (TRAV26-1, )
CIDIQNPDPAVDQLRD

SEQ ID NO: 319914 - protein, 19 aa, Homo sapiens
  CDR3 for beta chain variable domain of TCR clone 159957 (TRBV19, TRBJ2-5)
CASSIGQVTDFFLGETQYF

SEQ ID NO: 319915 - protein, 15 aa, Homo sapiens
  CDR3 for alpha chain variable domain of TCR clone 159958 (TRAV8-3, TRAJ45)
CASSYLRGGADGLTF

SEQ ID NO: 319916 - protein, 13 aa, Homo sapiens
  CDR3 for beta chain variable domain of TCR clone 159958 (TRBV10-3, TRBJ2-7)
CASKLAVNYEQYF

SEQ ID NO: 319917 - protein, 21 aa, Homo sapiens
  CDR3 for alpha chain variable domain of TCR clone 159959 (TRAV10, TRAJ34)
CVVSGKHRQAHLWDWDQITRL

SEQ ID NO: 319918 - protein, 14 aa, Homo sapiens
  CDR3 for beta chain variable domain of TCR clone 159959 (TRBV19, TRBJ2-1)
CASPTFVLSGEQFF

SEQ ID NO: 319919 - protein, 12 aa, Homo sapiens
  CDR3 for alpha chain variable domain of TCR clone 159960 (TRAV8-3, TRAJ26)
CAGDNDGQNFVF

SEQ ID NO: 319920 - protein, 15 aa, Homo sapiens
  CDR3 for beta chain variable domain of TCR clone 159960 (TRBV9, TRBJ2-1)
CAISLAGSSYNEQFF

SEQ ID NO: 319921 - protein, 11 aa, Homo sapiens
  CDR3 for alpha chain variable domain of TCR clone 159961 (TRAV3, TRAJ21)
CAVGSFNKFYF

SEQ ID NO: 319922 - protein, 16 aa, Homo sapiens
  CDR3 for beta chain variable domain of TCR clone 159961 (TRBV19, TRBJ2-1)
CASSKAGPSSYNEQSF

SEQ ID NO: 319923 - protein, 12 aa, Homo sapiens
  CDR3 for alpha chain variable domain of TCR clone 159962 (TRAV8-3, TRAJ26)
CAGDNYGQNFFF

SEQ ID NO: 319924 - protein, 15 aa, Homo sapiens
  CDR3 for beta chain variable domain of TCR clone 159962 (TRBV5-1, TRBJ2-3)
CASSVTAGSTDTQYF

SEQ ID NO: 319925 - protein, 14 aa, Homo sapiens
  CDR3 for alpha chain variable domain of TCR clone 159963 (TRAV8-3, TRAJ4)
WAVGASGGYNKLIF

SEQ ID NO: 319926 - protein, 16 aa, Homo sapiens
  CDR3 for beta chain variable domain of TCR clone 159963 (TRBV4-3, TRBJ2-2)
CASSHLQGSGTGELFF

SEQ ID NO: 319927 - protein, 13 aa, Homo sapiens
  CDR3 for alpha chain variable domain of TCR clone 159964 (TRAV3, TRAJ15)
CAVRDQAGTALIF

SEQ ID NO: 319928 - protein, 14 aa, Homo sapiens
  CDR3 for beta chain variable domain of TCR clone 159964 (TRBV20-1, TRBJ2-7)
CSAKRGRSSYEQYF

SEQ ID NO: 319929 - protein, 12 aa, Homo sapiens
  CDR3 for alpha chain variable domain of TCR clone 159965 (TRAV2, TRAJ9)
CALGAGGFKTSF

SEQ ID NO: 319930 - protein, 16 aa, Homo sapiens
  CDR3 for beta chain variable domain of TCR clone 159965 (TRBV13, TRBJ2-2)
CASSPRTGEHTGELFF

SEQ ID NO: 319931 - protein, 14 aa, Homo sapiens
  CDR3 for alpha chain variable domain of TCR clone 159966 (TRAV1-2, TRAJ16)
CAVNRFSDGQKLLF

SEQ ID NO: 319932 - protein, 16 aa, Homo sapiens
  CDR3 for beta chain variable domain of TCR clone 159966 (TRBV4-2, TRBJ2-1)
CISVPAAWRAYNEQFF

SEQ ID NO: 319933 - protein, 15 aa, Homo sapiens
  CDR3 for alpha chain variable domain of TCR clone 159967 (TRAV14/DV4, TRAJ12)
CAMREGWDSSYKLIF

SEQ ID NO: 319934 - protein, 16 aa, Homo sapiens
  CDR3 for beta chain variable domain of TCR clone 159967 (TRBV2, TRBJ2-5)
CASSETQGVGEETSTS

SEQ ID NO: 319935 - protein, 13 aa, Homo sapiens
  CDR3 for alpha chain variable domain of TCR clone 159968 (TRAV6, TRAJ45)
SPFSGGGADGLTF

SEQ ID NO: 319936 - protein, 13 aa, Homo sapiens
  CDR3 for beta chain variable domain of TCR clone 159968 (TRBV20-1, TRBJ1-1)
CSARGGGNTEAFF

SEQ ID NO: 319937 - protein, 13 aa, Homo sapiens
  CDR3 for alpha chain variable domain of TCR clone 159969 (TRAV8-6, TRAJ24)
CAVSSDSWGKLQF

SEQ ID NO: 319938 - protein, 14 aa, Homo sapiens
  CDR3 for beta chain variable domain of TCR clone 159969 (TRBV4-1, TRBJ2-2)
CASSQAVNTGELFF

SEQ ID NO: 319939 - protein, 11 aa, Homo sapiens
  CDR3 for alpha chain variable domain of TCR clone 159970 (TRAV3, TRAJ21)
CAVGNFNKFYF

SEQ ID NO: 319940 - protein, 14 aa, Homo sapiens
  CDR3 for beta chain variable domain of TCR clone 159970 (TRBV7-2, TRBJ1-3)
CASSRLRSGNTIYF

SEQ ID NO: 319941 - protein, 16 aa, Homo sapiens
  CDR3 for alpha chain variable domain of TCR clone 159971 (TRAV30, TRAJ24)
CGTEIVDADSWGKFQF

SEQ ID NO: 319942 - protein, 15 aa, Homo sapiens
  CDR3 for beta chain variable domain of TCR clone 159971 (TRBV23-1, TRBJ1-5)
CASSQSRGQGWGAYI

SEQ ID NO: 319943 - protein, 12 aa, Homo sapiens
  CDR3 for alpha chain variable domain of TCR clone 159972 (TRAV2, TRAJ31)
CAVEDNNARLMF

SEQ ID NO: 319944 - protein, 14 aa, Homo sapiens
  CDR3 for beta chain variable domain of TCR clone 159972 (TRBV6-1, TRBJ1-3)
CASVQGGGGNTIYF

SEQ ID NO: 319945 - protein, 17 aa, Homo sapiens
  CDR3 for alpha chain variable domain of TCR clone 159973 (TRAV3, TRAJ6)
CAVRDGPRAGGSYIPTF

SEQ ID NO: 319946 - protein, 16 aa, Homo sapiens
  CDR3 for beta chain variable domain of TCR clone 159973 (TRBV10-2, TRBJ1-1)
CASSEFGEGASTEAFF

SEQ ID NO: 319947 - protein, 14 aa, Homo sapiens
  CDR3 for alpha chain variable domain of TCR clone 159974 (TRAV12-2, TRAJ17)
CAVLFKAAGNKLTF

SEQ ID NO: 319948 - protein, 13 aa, Homo sapiens
  CDR3 for beta chain variable domain of TCR clone 159974 (TRBV7-3, TRBJ2-5)
CASSFRGGETQYF

SEQ ID NO: 319949 - protein, 15 aa, Homo sapiens
  CDR3 for alpha chain variable domain of TCR clone 159975 (TRAV17, TRAJ4)
CATGTWSGGYNKLIF

SEQ ID NO: 319950 - protein, 15 aa, Homo sapiens
  CDR3 for beta chain variable domain of TCR clone 159975 (TRBV4-3, TRBJ2-7)
CASSQGGRGIYEQYF

SEQ ID NO: 319951 - protein, 15 aa, Homo sapiens
  CDR3 for alpha chain variable domain of TCR clone 159976 (TRAV8-4, TRAJ3)
CAVTGENLVQQCFQD

SEQ ID NO: 319952 - protein, 18 aa, Homo sapiens
  CDR3 for beta chain variable domain of TCR clone 159976 (TRBV11-2, TRBJ2-3)
CASSLGGASRGAPNTQYF

SEQ ID NO: 319953 - protein, 21 aa, Homo sapiens
  CDR3 for alpha chain variable domain of TCR clone 159977 (TRAV13-1, )
CAASTRRAQIPDIQNPDPAVY

SEQ ID NO: 319954 - protein, 15 aa, Homo sapiens
  CDR3 for beta chain variable domain of TCR clone 159977 (TRBV12-4, TRBJ2-5)
CASSPPTGLQETQYF

SEQ ID NO: 319955 - protein, 11 aa, Homo sapiens
  CDR3 for alpha chain variable domain of TCR clone 159978 (TRAV17, TRAJ31)
CATSNNARLMF

SEQ ID NO: 319956 - protein, 14 aa, Homo sapiens
  CDR3 for beta chain variable domain of TCR clone 159978 (TRBV19, TRBJ2-1)
CASPTFVLSGEQFF

SEQ ID NO: 319957 - protein, 14 aa, Homo sapiens
  CDR3 for alpha chain variable domain of TCR clone 159979 (TRAV17, TRAJ57)
CATDPQGGSEKLVF

SEQ ID NO: 319958 - protein, 15 aa, Homo sapiens
  CDR3 for beta chain variable domain of TCR clone 159979 (TRBV19, TRBJ2-7)
CASSPRQSYEQYLGR

SEQ ID NO: 319959 - protein, 16 aa, Homo sapiens
  CDR3 for alpha chain variable domain of TCR clone 159980 (TRAV3, TRAJ37)
CAVRGKGSGNTGKLIF

SEQ ID NO: 319960 - protein, 17 aa, Homo sapiens
  CDR3 for beta chain variable domain of TCR clone 159980 (TRBV7-3, TRBJ2-3)
CASSLMKRLRGADTQYF

SEQ ID NO: 319961 - protein, 12 aa, Homo sapiens
  CDR3 for alpha chain variable domain of TCR clone 159981 (TRAV9-2, TRAJ36)
CALKKGANNLFF

SEQ ID NO: 319962 - protein, 13 aa, Homo sapiens
  CDR3 for beta chain variable domain of TCR clone 159981 (TRBV19, TRBJ1-2)
CASSVPGQDGYTF

SEQ ID NO: 319963 - protein, 16 aa, Homo sapiens
  CDR3 for alpha chain variable domain of TCR clone 159982 (TRAV26-1, TRAJ22)
CTVRIPFSGSARQRTF

SEQ ID NO: 319964 - protein, 15 aa, Homo sapiens
  CDR3 for beta chain variable domain of TCR clone 159982 (TRBV28, TRBJ2-1)
CASRVGLDEYNEQFF

SEQ ID NO: 319965 - protein, 20 aa, Homo sapiens
  CDR3 for alpha chain variable domain of TCR clone 159983 (TRAV25, TRAJ53)
CRNLLLPTSNSGGSNYKLTF

SEQ ID NO: 319966 - protein, 14 aa, Homo sapiens
  CDR3 for beta chain variable domain of TCR clone 159983 (TRBV11-2, TRBJ2-3)
CVSSRLARTDTQYF

SEQ ID NO: 319967 - protein, 17 aa, Homo sapiens
  CDR3 for alpha chain variable domain of TCR clone 159984 (TRAV26-1, TRAJ36)
CIVRPPGDQTGANNRFF

SEQ ID NO: 319968 - protein, 15 aa, Homo sapiens
  CDR3 for beta chain variable domain of TCR clone 159984 (TRBV10-3, TRBJ2-6)
CATPAAASGANVLTF

SEQ ID NO: 319969 - protein, 18 aa, Homo sapiens
  CDR3 for alpha chain variable domain of TCR clone 159985 (TRAV21, TRAJ52)
CAVRPSPAGGTSYGKLTF

SEQ ID NO: 319970 - protein, 14 aa, Homo sapiens
  CDR3 for beta chain variable domain of TCR clone 159985 (TRBV12-4, TRBJ1-1)
CASRQGQEYTEAFF

SEQ ID NO: 319971 - protein, 12 aa, Homo sapiens
  CDR3 for alpha chain variable domain of TCR clone 159986 (TRAV30, TRAJ39)
CGLGNAGNMLTF

SEQ ID NO: 319972 - protein, 15 aa, Homo sapiens
  CDR3 for beta chain variable domain of TCR clone 159986 (TRBV5-1, TRBJ1-1)
CASSWTGRGNTEAFF

SEQ ID NO: 319973 - protein, 16 aa, Homo sapiens
  CDR3 for alpha chain variable domain of TCR clone 159987 (TRAV25, TRAJ24)
CAQRRGTTDSWGKLQF

SEQ ID NO: 319974 - protein, 15 aa, Homo sapiens
  CDR3 for beta chain variable domain of TCR clone 159987 (TRBV20-1, TRBJ2-7)
CSARDRVSGMDEQYF

SEQ ID NO: 319975 - protein, 14 aa, Homo sapiens
  CDR3 for alpha chain variable domain of TCR clone 159988 (TRAV9-2, TRAJ39)
CALYIYNAGNMLTF

SEQ ID NO: 319976 - protein, 14 aa, Homo sapiens
  CDR3 for beta chain variable domain of TCR clone 159988 (TRBV4-3, TRBJ2-7)
CASSQDVAGGEQYF

SEQ ID NO: 319977 - protein, 15 aa, Homo sapiens
  CDR3 for alpha chain variable domain of TCR clone 159989 (TRAV12-3, TRAJ22)
CAMRTISGSARQLTF

SEQ ID NO: 319978 - protein, 13 aa, Homo sapiens
  CDR3 for beta chain variable domain of TCR clone 159989 (TRBV10-3, TRBJ2-7)
CASKLAVNYEQYF

SEQ ID NO: 319979 - protein, 12 aa, Homo sapiens
  CDR3 for alpha chain variable domain of TCR clone 159990 (TRAV25, TRAJ11)
CAGYSGCSTLTF

SEQ ID NO: 319980 - protein, 18 aa, Homo sapiens
  CDR3 for beta chain variable domain of TCR clone 159990 (TRBV5-4, TRBJ2-3)
CASSPTAGFLPSTDTQYF

SEQ ID NO: 319981 - protein, 18 aa, Homo sapiens
  CDR3 for alpha chain variable domain of TCR clone 159991 (TRAV8-4, TRAJ52)
CAVTRANAGGTSYGKLTF

SEQ ID NO: 319982 - protein, 13 aa, Homo sapiens
  CDR3 for beta chain variable domain of TCR clone 159991 (TRBV12-4, TRBJ1-2)
CASSLRQGKGYTF

SEQ ID NO: 319983 - protein, 14 aa, Homo sapiens
  CDR3 for alpha chain variable domain of TCR clone 159992 (TRAV9-2, TRAJ39)
CALYIYNAGNMLTF

SEQ ID NO: 319984 - protein, 18 aa, Homo sapiens
  CDR3 for beta chain variable domain of TCR clone 159992 (TRBV12-4, TRBJ2-2)
CASSLVAGTLGRTGELFF

SEQ ID NO: 319985 - protein, 14 aa, Homo sapiens
  CDR3 for alpha chain variable domain of TCR clone 159993 (TRAV12-2, TRAJ53)
CRERGGGSNYKLTF

SEQ ID NO: 319986 - protein, 17 aa, Homo sapiens
  CDR3 for beta chain variable domain of TCR clone 159993 (TRBV7-3, TRBJ2-3)
CADSLMKRMRGADTQYF

SEQ ID NO: 319987 - protein, 14 aa, Homo sapiens
  CDR3 for alpha chain variable domain of TCR clone 159994 (TRAV8-4, TRAJ45)
CASGGGGGADGLTF

SEQ ID NO: 319988 - protein, 20 aa, Homo sapiens
  CDR3 for beta chain variable domain of TCR clone 159994 (TRBV4-3, TRBJ2-3)
CASSPRVDMRASGRPDTQYF

SEQ ID NO: 319989 - protein, 14 aa, Homo sapiens
  CDR3 for alpha chain variable domain of TCR clone 159995 (TRAV1-2, TRAJ13)
CAVREDTGFQKLVF

SEQ ID NO: 319990 - protein, 15 aa, Homo sapiens
  CDR3 for beta chain variable domain of TCR clone 159995 (TRBV19, TRBJ2-1)
CASSTGTSSYNEQFF

SEQ ID NO: 319991 - protein, 14 aa, Homo sapiens
  CDR3 for alpha chain variable domain of TCR clone 159996 (TRAV12-1, TRAJ38)
CGELKAGNNRKLIG

SEQ ID NO: 319992 - protein, 12 aa, Homo sapiens
  CDR3 for beta chain variable domain of TCR clone 159996 (TRBV24-1, TRBJ1-1)
CATLYPDTEAFF

SEQ ID NO: 319993 - protein, 11 aa, Homo sapiens
  CDR3 for alpha chain variable domain of TCR clone 159997 (TRAV2, TRAJ13)
CASGGYQKVTF

SEQ ID NO: 319994 - protein, 15 aa, Homo sapiens
  CDR3 for beta chain variable domain of TCR clone 159997 (TRBV7-3, TRBJ2-5)
CASSPPTGPQETQYF

SEQ ID NO: 319995 - protein, 15 aa, Homo sapiens
  CDR3 for alpha chain variable domain of TCR clone 159998 (TRAV26-1, TRAJ28)
CIVRVAGAGGYQLTF

SEQ ID NO: 319996 - protein, 19 aa, Homo sapiens
  CDR3 for beta chain variable domain of TCR clone 159998 (TRBV7-3, TRBJ2-7)
CASSLTGIAGGWPSYEQYF

SEQ ID NO: 319997 - protein, 18 aa, Homo sapiens
  CDR3 for alpha chain variable domain of TCR clone 159999 (TRAV21, TRAJ52)
CAVRPSPAGGTSYGKLTF

SEQ ID NO: 319998 - protein, 15 aa, Homo sapiens
  CDR3 for beta chain variable domain of TCR clone 159999 (TRBV5-1, TRBJ1-2)
CASSYPGTGSSGYTF

SEQ ID NO: 319999 - protein, 11 aa, Homo sapiens
  CDR3 for alpha chain variable domain of TCR clone 160000 (TRAV21, TRAJ31)
CAVRNNARLMF

SEQ ID NO: 320000 - protein, 17 aa, Homo sapiens
  CDR3 for beta chain variable domain of TCR clone 160000 (TRBV28, TRBJ1-5)
CASSLSWLVSSNQHQHF

SEQ ID NO: 320001 - protein, 16 aa, Homo sapiens
  CDR3 for alpha chain variable domain of TCR clone 160001 (TRAV26-1, TRAJ40)
CIVRGYPTSGTYKYIF

SEQ ID NO: 320002 - protein, 14 aa, Homo sapiens
  CDR3 for beta chain variable domain of TCR clone 160001 (TRBV5-1, TRBJ1-4)
CASSSGQGGEKLLF

SEQ ID NO: 320003 - protein, 14 aa, Homo sapiens
  CDR3 for alpha chain variable domain of TCR clone 160002 (TRAV13-2, TRAJ34)
CAENLGERTDKLIF

SEQ ID NO: 320004 - protein, 11 aa, Homo sapiens
  CDR3 for beta chain variable domain of TCR clone 160002 (TRBV29-1, TRBJ2-5)
CSEDRTGTQYF

SEQ ID NO: 320005 - protein, 13 aa, Homo sapiens
  CDR3 for alpha chain variable domain of TCR clone 160003 (TRAV8-3, TRAJ36)
CAVGATGADNLFF

SEQ ID NO: 320006 - protein, 13 aa, Homo sapiens
  CDR3 for beta chain variable domain of TCR clone 160003 (TRBV12-4, TRBJ1-2)
CASSLRQGKGYTF

SEQ ID NO: 320007 - protein, 15 aa, Homo sapiens
  CDR3 for alpha chain variable domain of TCR clone 160004 (TRAV8-3, TRAJ27)
WAVGPSKTNAGKSTF

SEQ ID NO: 320008 - protein, 12 aa, Homo sapiens
  CDR3 for beta chain variable domain of TCR clone 160004 (TRBV11-2, TRBJ2-2)
CASSLGGGELFF

SEQ ID NO: 320009 - protein, 14 aa, Homo sapiens
  CDR3 for alpha chain variable domain of TCR clone 160005 (TRAV25, TRAJ45)
CAGNSGGGADGRTF

SEQ ID NO: 320010 - protein, 14 aa, Homo sapiens
  CDR3 for beta chain variable domain of TCR clone 160005 (TRBV29-1, TRBJ1-2)
CSARRGTQTSGYTF

SEQ ID NO: 320011 - protein, 14 aa, Homo sapiens
  CDR3 for alpha chain variable domain of TCR clone 160006 (TRAV1-2, TRAJ16)
CAVNRFSDGRKLLF

SEQ ID NO: 320012 - protein, 15 aa, Homo sapiens
  CDR3 for beta chain variable domain of TCR clone 160006 (TRBV20-1, TRBJ2-7)
CSARKGLAESYEQYF

SEQ ID NO: 320013 - protein, 13 aa, Homo sapiens
  CDR3 for alpha chain variable domain of TCR clone 160007 (TRAV1-2, TRAJ9)
CAALNTGGFQTIF

SEQ ID NO: 320014 - protein, 13 aa, Homo sapiens
  CDR3 for beta chain variable domain of TCR clone 160007 (TRBV19, TRBJ1-2)
CASSVPGQDDYTF

SEQ ID NO: 320015 - protein, 16 aa, Homo sapiens
  CDR3 for alpha chain variable domain of TCR clone 160008 (TRAV3, TRAJ37)
CSVRGEGSGNTGKLIF

SEQ ID NO: 320016 - protein, 13 aa, Homo sapiens
  CDR3 for beta chain variable domain of TCR clone 160008 (TRBV14, TRBJ2-7)
CASSQDRRYEQYF

SEQ ID NO: 320017 - protein, 14 aa, Homo sapiens
  CDR3 for alpha chain variable domain of TCR clone 160009 (TRAV12-2, TRAJ40)
CAVKIPSGTYKYIF

SEQ ID NO: 320018 - protein, 14 aa, Homo sapiens
  CDR3 for beta chain variable domain of TCR clone 160009 (TRBV11-3, TRBJ1-1)
CASSPGAWNTEAFF

SEQ ID NO: 320019 - protein, 15 aa, Homo sapiens
  CDR3 for alpha chain variable domain of TCR clone 160010 (TRAV21, TRAJ37)
CAVRPTLSNTGKLIF

SEQ ID NO: 320020 - protein, 16 aa, Homo sapiens
  CDR3 for beta chain variable domain of TCR clone 160010 (TRBV24-1, TRBJ2-3)
CATSDRRQDLTDTQNF

SEQ ID NO: 320021 - protein, 13 aa, Homo sapiens
  CDR3 for alpha chain variable domain of TCR clone 160011 (TRAV8-4, TRAJ49)
CAVSDSTGNQFYF

SEQ ID NO: 320022 - protein, 15 aa, Homo sapiens
  CDR3 for beta chain variable domain of TCR clone 160011 (TRBV11-3, TRBJ2-3)
CASLKDGREGDTQYF

SEQ ID NO: 320023 - protein, 12 aa, Homo sapiens
  CDR3 for alpha chain variable domain of TCR clone 160012 (TRAV8-3, TRAJ20)
CAVDFNDYKLSF

SEQ ID NO: 320024 - protein, 14 aa, Homo sapiens
  CDR3 for beta chain variable domain of TCR clone 160012 (TRBV7-6, TRBJ2-3)
CASSVAGGTDTQYF

SEQ ID NO: 320025 - protein, 15 aa, Homo sapiens
  CDR3 for alpha chain variable domain of TCR clone 160013 (TRAV8-3, TRAJ45)
CASSHSGGGADGLTL

SEQ ID NO: 320026 - protein, 13 aa, Homo sapiens
  CDR3 for beta chain variable domain of TCR clone 160013 (TRBV10-3, TRBJ2-7)
CASKLAVNYEQYF

SEQ ID NO: 320027 - protein, 13 aa, Homo sapiens
  CDR3 for alpha chain variable domain of TCR clone 160014 (TRAV21, TRAJ20)
CAVGLRVDYKLSF

SEQ ID NO: 320028 - protein, 13 aa, Homo sapiens
  CDR3 for beta chain variable domain of TCR clone 160014 (TRBV11-1, TRBJ1-1)
CASSKQGRTEAFF

SEQ ID NO: 320029 - protein, 18 aa, Homo sapiens
  CDR3 for alpha chain variable domain of TCR clone 160015 (TRAV12-2, )
CAVEDIQNPDPAVYQLRD

SEQ ID NO: 320030 - protein, 16 aa, Homo sapiens
  CDR3 for beta chain variable domain of TCR clone 160015 (TRBV20-1, TRBJ2-1)
CSARDVTPPPYNEQFF

SEQ ID NO: 320031 - protein, 13 aa, Homo sapiens
  CDR3 for alpha chain variable domain of TCR clone 160016 (TRAV21, TRAJ57)
CAVTQGGSEKLVF

SEQ ID NO: 320032 - protein, 15 aa, Homo sapiens
  CDR3 for beta chain variable domain of TCR clone 160016 (TRBV7-3, TRBJ2-2)
CASSETGQGTGELFF

SEQ ID NO: 320033 - protein, 15 aa, Homo sapiens
  CDR3 for alpha chain variable domain of TCR clone 160017 (TRAV8-2, TRAJ44)
DAAEYFDGTASKPTF

SEQ ID NO: 320034 - protein, 14 aa, Homo sapiens
  CDR3 for beta chain variable domain of TCR clone 160017 (TRBV7-8, TRBJ2-3)
CASSLDRGTDTQYF

SEQ ID NO: 320035 - protein, 16 aa, Homo sapiens
  CDR3 for alpha chain variable domain of TCR clone 160018 (TRAV26-1, TRAJ36)
CIVRVPDQTGANNLFS

SEQ ID NO: 320036 - protein, 12 aa, Homo sapiens
  CDR3 for beta chain variable domain of TCR clone 160018 (TRBV29-1, TRBJ2-3)
CSVTGGADTQYF

SEQ ID NO: 320037 - protein, 14 aa, Homo sapiens
  CDR3 for alpha chain variable domain of TCR clone 160019 (TRAV4, TRAJ9)
CLVGSGTGGFKTIF

SEQ ID NO: 320038 - protein, 14 aa, Homo sapiens
  CDR3 for beta chain variable domain of TCR clone 160019 (TRBV7-9, TRBJ2-4)
CASSLATGGNIQYF

SEQ ID NO: 320039 - protein, 14 aa, Homo sapiens
  CDR3 for alpha chain variable domain of TCR clone 160020 (TRAV12-3, TRAJ53)
CAMRIGGSNYKLTL

SEQ ID NO: 320040 - protein, 14 aa, Homo sapiens
  CDR3 for beta chain variable domain of TCR clone 160020 (TRBV18, TRBJ2-7)
CASSPPAGAPEQYF

SEQ ID NO: 320041 - protein, 17 aa, Homo sapiens
  CDR3 for alpha chain variable domain of TCR clone 160021 (TRAV3, TRAJ6)
CAVRAGPRAGGSYIPTF

SEQ ID NO: 320042 - protein, 13 aa, Homo sapiens
  CDR3 for beta chain variable domain of TCR clone 160021 (TRBV19, TRBJ2-7)
CASSIDRTYEQYF

SEQ ID NO: 320043 - protein, 12 aa, Homo sapiens
  CDR3 for alpha chain variable domain of TCR clone 160022 (TRAV13-1, TRAJ49)
CAASPMGNQFYF

SEQ ID NO: 320044 - protein, 12 aa, Homo sapiens
  CDR3 for beta chain variable domain of TCR clone 160022 (TRBV12-4, TRBJ1-5)
CASSLGRQPQHF

SEQ ID NO: 320045 - protein, 17 aa, Homo sapiens
  CDR3 for alpha chain variable domain of TCR clone 160023 (TRAV23/DV6, TRAJ3)
CSNHFCFGWSSASKIIF

SEQ ID NO: 320046 - protein, 16 aa, Homo sapiens
  CDR3 for beta chain variable domain of TCR clone 160023 (TRBV19, TRBJ2-2)
CASSFPGQGLAGELFF

SEQ ID NO: 320047 - protein, 13 aa, Homo sapiens
  CDR3 for alpha chain variable domain of TCR clone 160024 (TRAV23/DV6, TRAJ16)
CAASISDGQKLLF

SEQ ID NO: 320048 - protein, 12 aa, Homo sapiens
  CDR3 for beta chain variable domain of TCR clone 160024 (TRBV7-9, TRBJ2-7)
CASSIKREEQYF

SEQ ID NO: 320049 - protein, 15 aa, Homo sapiens
  CDR3 for alpha chain variable domain of TCR clone 160025 (TRAV8-3, TRAJ11)
CAVGLLNSGYSTLTF

SEQ ID NO: 320050 - protein, 16 aa, Homo sapiens
  CDR3 for beta chain variable domain of TCR clone 160025 (TRBV15, TRBJ1-2)
CATSRGPRTGGGGYTV

SEQ ID NO: 320051 - protein, 16 aa, Homo sapiens
  CDR3 for alpha chain variable domain of TCR clone 160026 (TRAV30, TRAJ24)
CGTEIVDADSGGKFQF

SEQ ID NO: 320052 - protein, 14 aa, Homo sapiens
  CDR3 for beta chain variable domain of TCR clone 160026 (TRBV12-5, TRBJ2-5)
CASGSRTHQETQFF

SEQ ID NO: 320053 - protein, 14 aa, Homo sapiens
  CDR3 for alpha chain variable domain of TCR clone 160027 (TRAV12-3, TRAJ42)
CAMNYGGSQGNLIF

SEQ ID NO: 320054 - protein, 16 aa, Homo sapiens
  CDR3 for beta chain variable domain of TCR clone 160027 (TRBV12-4, TRBJ1-5)
CASSSGPRGSNQTQHF

SEQ ID NO: 320055 - protein, 12 aa, Homo sapiens
  CDR3 for alpha chain variable domain of TCR clone 160028 (TRAV13-1, TRAJ15)
CAASQAGTALLF

SEQ ID NO: 320056 - protein, 17 aa, Homo sapiens
  CDR3 for beta chain variable domain of TCR clone 160028 (TRBV6-5, TRBJ2-3)
CASSYTTGTGRGDTQYF

SEQ ID NO: 320057 - protein, 12 aa, Homo sapiens
  CDR3 for alpha chain variable domain of TCR clone 160029 (TRAV8-3, TRAJ20)
CAVGGGDYKLSF

SEQ ID NO: 320058 - protein, 14 aa, Homo sapiens
  CDR3 for beta chain variable domain of TCR clone 160029 (TRBV5-1, TRBJ2-7)
CARSRGESLYEQYF

SEQ ID NO: 320059 - protein, 15 aa, Homo sapiens
  CDR3 for alpha chain variable domain of TCR clone 160030 (TRAV8-3, TRAJ11)
CAVSLLNSGYSTLTF

SEQ ID NO: 320060 - protein, 14 aa, Homo sapiens
  CDR3 for beta chain variable domain of TCR clone 160030 (TRBV4-1, TRBJ2-5)
CASSRSGSGETQYF

SEQ ID NO: 320061 - protein, 15 aa, Homo sapiens
  CDR3 for alpha chain variable domain of TCR clone 160031 (TRAV3, TRAJ22)
CAVRDRGGSAKQLTF

SEQ ID NO: 320062 - protein, 16 aa, Homo sapiens
  CDR3 for beta chain variable domain of TCR clone 160031 (TRBV5-8, TRBJ2-3)
CASQQPGAGGSDTQYF

SEQ ID NO: 320063 - protein, 15 aa, Homo sapiens
  CDR3 for alpha chain variable domain of TCR clone 160032 (TRAV1-2, TRAJ18)
CAWEGRGSTLGRLYF

SEQ ID NO: 320064 - protein, 13 aa, Homo sapiens
  CDR3 for beta chain variable domain of TCR clone 160032 (TRBV4-2, TRBJ1-1)
CASSQAGNTEAFF

SEQ ID NO: 320065 - protein, 15 aa, Homo sapiens
  CDR3 for alpha chain variable domain of TCR clone 160033 (TRAV8-2, TRAJ40)
CVVLGTTSGTYKYIF

SEQ ID NO: 320066 - protein, 16 aa, Homo sapiens
  CDR3 for beta chain variable domain of TCR clone 160033 (TRBV7-3, TRBJ2-1)
CPSSLEGYRSYNEQFF

SEQ ID NO: 320067 - protein, 14 aa, Homo sapiens
  CDR3 for alpha chain variable domain of TCR clone 160034 (TRAV26-1, TRAJ52)
CIVRVGNSYGKLTF

SEQ ID NO: 320068 - protein, 13 aa, Homo sapiens
  CDR3 for beta chain variable domain of TCR clone 160034 (TRBV7-2, TRBJ1-1)
CASSLKASTEAFF

SEQ ID NO: 320069 - protein, 14 aa, Homo sapiens
  CDR3 for alpha chain variable domain of TCR clone 160035 (TRAV38-1, TRAJ35)
CAFLTICFVNVLHF

SEQ ID NO: 320070 - protein, 17 aa, Homo sapiens
  CDR3 for beta chain variable domain of TCR clone 160035 (TRBV28, TRBJ1-1)
CASSGDLRTESNTEAFF

SEQ ID NO: 320071 - protein, 12 aa, Homo sapiens
  CDR3 for alpha chain variable domain of TCR clone 160036 (TRAV27, TRAJ35)
CAGADFGNVLHC

SEQ ID NO: 320072 - protein, 14 aa, Homo sapiens
  CDR3 for beta chain variable domain of TCR clone 160036 (TRBV4-2, TRBJ2-1)
CASGLDRAYNEQFF

SEQ ID NO: 320073 - protein, 13 aa, Homo sapiens
  CDR3 for alpha chain variable domain of TCR clone 160037 (TRAV1-1, TRAJ9)
CAAKNTGGFKTIF

SEQ ID NO: 320074 - protein, 13 aa, Homo sapiens
  CDR3 for beta chain variable domain of TCR clone 160037 (TRBV12-4, TRBJ2-5)
CASSLFRRETQYF

SEQ ID NO: 320075 - protein, 20 aa, Homo sapiens
  CDR3 for alpha chain variable domain of TCR clone 160038 (TRAV12-1, TRAJ42)
SSVIQPPTSVKGGSQGNPIF

SEQ ID NO: 320076 - protein, 18 aa, Homo sapiens
  CDR3 for beta chain variable domain of TCR clone 160038 (TRBV11-2, TRBJ2-3)
CASSLGGASRGAPITQYF

SEQ ID NO: 320077 - protein, 15 aa, Homo sapiens
  CDR3 for alpha chain variable domain of TCR clone 160039 (TRAV3, TRAJ4)
CAVRDGTGGYNKLIF

SEQ ID NO: 320078 - protein, 16 aa, Homo sapiens
  CDR3 for beta chain variable domain of TCR clone 160039 (TRBV12-4, TRBJ1-5)
CASSRPVGGSNQPQHF

SEQ ID NO: 320079 - protein, 14 aa, Homo sapiens
  CDR3 for alpha chain variable domain of TCR clone 160040 (TRAV21, TRAJ35)
CAVMPIGFGNVLHF

SEQ ID NO: 320080 - protein, 13 aa, Homo sapiens
  CDR3 for beta chain variable domain of TCR clone 160040 (TRBV7-9, TRBJ1-2)
CASSLKQNYGYTF

SEQ ID NO: 320081 - protein, 14 aa, Homo sapiens
  CDR3 for alpha chain variable domain of TCR clone 160041 (TRAV13-1, TRAJ40)
CAASMTSGTYKYIF

SEQ ID NO: 320082 - protein, 13 aa, Homo sapiens
  CDR3 for beta chain variable domain of TCR clone 160041 (TRBV7-9, TRBJ2-7)
CASSFAGAYEQYF

SEQ ID NO: 320083 - protein, 14 aa, Homo sapiens
  CDR3 for alpha chain variable domain of TCR clone 160042 (TRAV21, TRAJ21)
CAVKGFGNFNTFYF

SEQ ID NO: 320084 - protein, 13 aa, Homo sapiens
  CDR3 for beta chain variable domain of TCR clone 160042 (TRBV18, TRBJ1-1)
CASSPETKPEAFF

SEQ ID NO: 320085 - protein, 13 aa, Homo sapiens
  CDR3 for alpha chain variable domain of TCR clone 160043 (TRAV1-2, TRAJ34)
CAVRDRDTDKLIF

SEQ ID NO: 320086 - protein, 13 aa, Homo sapiens
  CDR3 for beta chain variable domain of TCR clone 160043 (TRBV29-1, TRBJ2-1)
CSVEGGSVNEQFF

SEQ ID NO: 320087 - protein, 15 aa, Homo sapiens
  CDR3 for alpha chain variable domain of TCR clone 160044 (TRAV26-1, TRAJ29)
CTVRVEGSGNTPLVF

SEQ ID NO: 320088 - protein, 13 aa, Homo sapiens
  CDR3 for beta chain variable domain of TCR clone 160044 (TRBV19, TRBJ1-2)
CASSVPGQDGYTF

SEQ ID NO: 320089 - protein, 16 aa, Homo sapiens
  CDR3 for alpha chain variable domain of TCR clone 160045 (TRAV3, TRAJ36)
CAVRDPYQTGANNLFF

SEQ ID NO: 320090 - protein, 15 aa, Homo sapiens
  CDR3 for beta chain variable domain of TCR clone 160045 (TRBV19, TRBJ1-1)
CASTSGQIQNTEAFY

SEQ ID NO: 320091 - protein, 14 aa, Homo sapiens
  CDR3 for alpha chain variable domain of TCR clone 160046 (TRAV1-2, TRAJ16)
CAVNRFSDGQKLLF

SEQ ID NO: 320092 - protein, 13 aa, Homo sapiens
  CDR3 for beta chain variable domain of TCR clone 160046 (TRBV10-2, TRBJ2-7)
CVSGASGGYEQYF

SEQ ID NO: 320093 - protein, 13 aa, Homo sapiens
  CDR3 for alpha chain variable domain of TCR clone 160047 (TRAV27, TRAJ3)
ASLRGSSASKIIF

SEQ ID NO: 320094 - protein, 15 aa, Homo sapiens
  CDR3 for beta chain variable domain of TCR clone 160047 (TRBV12-4, TRBJ2-5)
CASSPPTGLQETQYF

SEQ ID NO: 320095 - protein, 16 aa, Homo sapiens
  CDR3 for alpha chain variable domain of TCR clone 160048 (TRAV8-3, TRAJ13)
CAVGAYPSGGYQKVIF

SEQ ID NO: 320096 - protein, 15 aa, Homo sapiens
  CDR3 for beta chain variable domain of TCR clone 160048 (TRBV19, TRBJ1-5)
CASSIVWADNQPQHF

SEQ ID NO: 320097 - protein, 14 aa, Homo sapiens
  CDR3 for alpha chain variable domain of TCR clone 160049 (TRAV26-1, TRAJ21)
CIVRVGHNFNKFYF

SEQ ID NO: 320098 - protein, 15 aa, Homo sapiens
  CDR3 for beta chain variable domain of TCR clone 160049 (TRBV4-3, TRBJ2-1)
CASSRGLAGSNEQFF

SEQ ID NO: 320099 - protein, 15 aa, Homo sapiens
  CDR3 for alpha chain variable domain of TCR clone 160050 (TRAV4, TRAJ39)
CLVGPNNSARNMLTF

SEQ ID NO: 320100 - protein, 16 aa, Homo sapiens
  CDR3 for beta chain variable domain of TCR clone 160050 (TRBV13, TRBJ2-2)
CASSPRTGEHTGELFF

SEQ ID NO: 320101 - protein, 13 aa, Homo sapiens
  CDR3 for alpha chain variable domain of TCR clone 160051 (TRAV12-1, TRAJ6)
CVVFPGGSYIPTF

SEQ ID NO: 320102 - protein, 14 aa, Homo sapiens
  CDR3 for beta chain variable domain of TCR clone 160051 (TRBV7-2, TRBJ1-2)
CASSQTGSTYGYTF

SEQ ID NO: 320103 - protein, 13 aa, Homo sapiens
  CDR3 for alpha chain variable domain of TCR clone 160052 (TRAV23/DV6, TRAJ26)
CAATYNYGQNFVF

SEQ ID NO: 320104 - protein, 14 aa, Homo sapiens
  CDR3 for beta chain variable domain of TCR clone 160052 (TRBV11-3, TRBJ1-2)
CASSLGSGTYGYTS

SEQ ID NO: 320105 - protein, 16 aa, Homo sapiens
  CDR3 for alpha chain variable domain of TCR clone 160053 (TRAV13-1, TRAJ18)
CAASRMRGSTLGRLYF

SEQ ID NO: 320106 - protein, 16 aa, Homo sapiens
  CDR3 for beta chain variable domain of TCR clone 160053 (TRBV27, TRBJ1-1)
CASSSRGRTGYTQAFF

SEQ ID NO: 320107 - protein, 13 aa, Homo sapiens
  CDR3 for alpha chain variable domain of TCR clone 160054 (TRAV1-2, TRAJ9)
CAALNTGGFKTIF

SEQ ID NO: 320108 - protein, 15 aa, Homo sapiens
  CDR3 for beta chain variable domain of TCR clone 160054 (TRBV4-1, TRBJ2-3)
CASSQVVAGADTQYF

SEQ ID NO: 320109 - protein, 15 aa, Homo sapiens
  CDR3 for alpha chain variable domain of TCR clone 160055 (TRAV8-4, TRAJ45)
CAVIWTVGGADGLTF

SEQ ID NO: 320110 - protein, 12 aa, Homo sapiens
  CDR3 for beta chain variable domain of TCR clone 160055 (TRBV29-1, TRBJ2-7)
CSVGPSGDEQYF

SEQ ID NO: 320111 - protein, 15 aa, Homo sapiens
  CDR3 for alpha chain variable domain of TCR clone 160056 (TRAV27, TRAJ45)
CRSPQSGGGADGLTF

SEQ ID NO: 320112 - protein, 15 aa, Homo sapiens
  CDR3 for beta chain variable domain of TCR clone 160056 (TRBV7-9, TRBJ1-6)
CASSSPGRGNSPLHF

SEQ ID NO: 320113 - protein, 13 aa, Homo sapiens
  CDR3 for alpha chain variable domain of TCR clone 160057 (TRAV27, TRAJ45)
CRSSGGGADGLTF

SEQ ID NO: 320114 - protein, 15 aa, Homo sapiens
  CDR3 for beta chain variable domain of TCR clone 160057 (TRBV7-8, TRBJ2-1)
CASSLADSLYNEQFF

SEQ ID NO: 320115 - protein, 12 aa, Homo sapiens
  CDR3 for alpha chain variable domain of TCR clone 160058 (TRAV12-3, TRAJ20)
CAMVRGDYKLSS

SEQ ID NO: 320116 - protein, 17 aa, Homo sapiens
  CDR3 for beta chain variable domain of TCR clone 160058 (TRBV28, TRBJ2-5)
CASSTPEGDALQETQYF

SEQ ID NO: 320117 - protein, 14 aa, Homo sapiens
  CDR3 for alpha chain variable domain of TCR clone 160059 (TRAV8-1, TRAJ24)
CAVNAADSWGKLQF

SEQ ID NO: 320118 - protein, 16 aa, Homo sapiens
  CDR3 for beta chain variable domain of TCR clone 160059 (TRBV4-3, TRBJ2-1)
CASSPAQDRGSNEQFF

SEQ ID NO: 320119 - protein, 12 aa, Homo sapiens
  CDR3 for alpha chain variable domain of TCR clone 160060 (TRAV8-3, TRAJ26)
CAGDNYGQNFVF

SEQ ID NO: 320120 - protein, 13 aa, Homo sapiens
  CDR3 for beta chain variable domain of TCR clone 160060 (TRBV20-1, TRBJ2-5)
CSARGDYQETQYL

SEQ ID NO: 320121 - protein, 10 aa, Homo sapiens
  CDR3 for alpha chain variable domain of TCR clone 160061 (TRAV21, TRAJ43)
RAVRIGDMRF

SEQ ID NO: 320122 - protein, 15 aa, Homo sapiens
  CDR3 for beta chain variable domain of TCR clone 160061 (TRBV28, TRBJ2-2)
CASTVAGANTGELFF

SEQ ID NO: 320123 - protein, 14 aa, Homo sapiens
  CDR3 for alpha chain variable domain of TCR clone 160062 (TRAV2, TRAJ9)
CAVEDRSGGLKTIF

SEQ ID NO: 320124 - protein, 14 aa, Homo sapiens
  CDR3 for beta chain variable domain of TCR clone 160062 (TRBV18, TRBJ2-7)
CASSPRGGAYEQYL

SEQ ID NO: 320125 - protein, 11 aa, Homo sapiens
  CDR3 for alpha chain variable domain of TCR clone 160063 (TRAV2, TRAJ13)
CASGGYQKVTF

SEQ ID NO: 320126 - protein, 15 aa, Homo sapiens
  CDR3 for beta chain variable domain of TCR clone 160063 (TRBV7-2, TRBJ2-1)
CASSSGLEGGNEQFF

SEQ ID NO: 320127 - protein, 13 aa, Homo sapiens
  CDR3 for alpha chain variable domain of TCR clone 160064 (TRAV1-1, TRAJ31)
CASYLNNNASLMF

SEQ ID NO: 320128 - protein, 14 aa, Homo sapiens
  CDR3 for beta chain variable domain of TCR clone 160064 (TRBV4-1, TRBJ2-5)
CASSRSGSGETQYF

SEQ ID NO: 320129 - protein, 16 aa, Homo sapiens
  CDR3 for alpha chain variable domain of TCR clone 160065 (TRAV30, TRAJ24)
CGTEIVDAESWGKFRF

SEQ ID NO: 320130 - protein, 14 aa, Homo sapiens
  CDR3 for beta chain variable domain of TCR clone 160065 (TRBV12-5, TRBJ2-5)
CASGSRTHQETQYF

SEQ ID NO: 320131 - protein, 14 aa, Homo sapiens
  CDR3 for alpha chain variable domain of TCR clone 160066 (TRAV12-2, TRAJ40)
CAVKIPSGTYKYIF

SEQ ID NO: 320132 - protein, 14 aa, Homo sapiens
  CDR3 for beta chain variable domain of TCR clone 160066 (TRBV7-9, TRBJ1-2)
CASSRQGANYGYSF

SEQ ID NO: 320133 - protein, 13 aa, Homo sapiens
  CDR3 for alpha chain variable domain of TCR clone 160067 (TRAV13-1, TRAJ6)
CAARRGGSYIPTF

SEQ ID NO: 320134 - protein, 16 aa, Homo sapiens
  CDR3 for beta chain variable domain of TCR clone 160067 (TRBV7-9, TRBJ2-2)
CASSLATGVGTAELFF

SEQ ID NO: 320135 - protein, 14 aa, Homo sapiens
  CDR3 for alpha chain variable domain of TCR clone 160068 (TRAV26-1, TRAJ38)
CIADNASNNRKLIW

SEQ ID NO: 320136 - protein, 13 aa, Homo sapiens
  CDR3 for beta chain variable domain of TCR clone 160068 (TRBV7-9, TRBJ2-3)
CASSPGSTDTQYF

SEQ ID NO: 320137 - protein, 18 aa, Homo sapiens
  CDR3 for alpha chain variable domain of TCR clone 160069 (TRAV12-3, TRAJ52)
CAMSRTNAGGTSYGKLTF

SEQ ID NO: 320138 - protein, 15 aa, Homo sapiens
  CDR3 for beta chain variable domain of TCR clone 160069 (TRBV5-1, TRBJ1-4)
FAPAAWKDGNEKLFF

SEQ ID NO: 320139 - protein, 13 aa, Homo sapiens
  CDR3 for alpha chain variable domain of TCR clone 160070 (TRAV29/DV5, TRAJ47)
CEASAEYGNKLVF

SEQ ID NO: 320140 - protein, 13 aa, Homo sapiens
  CDR3 for beta chain variable domain of TCR clone 160070 (TRBV27, TRBJ1-4)
CASSLMGDEKLFF

SEQ ID NO: 320141 - protein, 16 aa, Homo sapiens
  CDR3 for alpha chain variable domain of TCR clone 160071 (TRAV3, TRAJ10)
CAVRDMWAGGGNKLTF

SEQ ID NO: 320142 - protein, 13 aa, Homo sapiens
  CDR3 for beta chain variable domain of TCR clone 160071 (TRBV7-9, TRBJ1-2)
CASSLKQNYGYAF

SEQ ID NO: 320143 - protein, 15 aa, Homo sapiens
  CDR3 for alpha chain variable domain of TCR clone 160072 (TRAV4, TRAJ8)
CLVGEQHTGFQQLVF

SEQ ID NO: 320144 - protein, 15 aa, Homo sapiens
  CDR3 for beta chain variable domain of TCR clone 160072 (TRBV7-9, TRBJ2-7)
CASSSVGLGGYEQYF

SEQ ID NO: 320145 - protein, 17 aa, Homo sapiens
  CDR3 for alpha chain variable domain of TCR clone 160073 (TRAV3, TRAJ28)
CAVREAYSGAGSYQRTF

SEQ ID NO: 320146 - protein, 17 aa, Homo sapiens
  CDR3 for beta chain variable domain of TCR clone 160073 (TRBV20-1, TRBJ2-1)
CSASSSGLAGSYNEQFF

SEQ ID NO: 320147 - protein, 12 aa, Homo sapiens
  CDR3 for alpha chain variable domain of TCR clone 160074 (TRAV1-1, TRAJ30)
CAPPEWGQDHLW

SEQ ID NO: 320148 - protein, 11 aa, Homo sapiens
  CDR3 for beta chain variable domain of TCR clone 160074 (TRBV11-2, TRBJ2-2)
CASSLPGELFF

SEQ ID NO: 320149 - protein, 13 aa, Homo sapiens
  CDR3 for alpha chain variable domain of TCR clone 160075 (TRAV21, TRAJ10)
CAVPTGGGNKLTV

SEQ ID NO: 320150 - protein, 22 aa, Homo sapiens
  CDR3 for beta chain variable domain of TCR clone 160075 (TRBV19, TRBJ2-1)
CASSVRDRVTGTSGRIYNEQFF

SEQ ID NO: 320151 - protein, 11 aa, Homo sapiens
  CDR3 for alpha chain variable domain of TCR clone 160076 (TRAV13-1, TRAJ39)
CASHAGNMLTF

SEQ ID NO: 320152 - protein, 12 aa, Homo sapiens
  CDR3 for beta chain variable domain of TCR clone 160076 (TRBV12-5, TRBJ2-5)
CASGQGVETQCF

SEQ ID NO: 320153 - protein, 18 aa, Homo sapiens
  CDR3 for alpha chain variable domain of TCR clone 160077 (TRAV29/DV5, TRAJ53)
CSVLLCSKRGGSNYKLTF

SEQ ID NO: 320154 - protein, 14 aa, Homo sapiens
  CDR3 for beta chain variable domain of TCR clone 160077 (TRBV5-7, TRBJ1-5)
CASSRTGGGQPQHF

SEQ ID NO: 320155 - protein, 14 aa, Homo sapiens
  CDR3 for alpha chain variable domain of TCR clone 160078 (TRAV12-1, TRAJ17)
CVVNYKAAGNKLTF

SEQ ID NO: 320156 - protein, 19 aa, Homo sapiens
  CDR3 for beta chain variable domain of TCR clone 160078 (TRBV2, TRBJ2-7)
CASSDDETSGRANDYEQYF

SEQ ID NO: 320157 - protein, 13 aa, Homo sapiens
  CDR3 for alpha chain variable domain of TCR clone 160079 (TRAV12-1, TRAJ40)
CVVPTSGTYKYIF

SEQ ID NO: 320158 - protein, 14 aa, Homo sapiens
  CDR3 for beta chain variable domain of TCR clone 160079 (TRBV4-1, TRBJ2-2)
CASSQAVNTGELFF

SEQ ID NO: 320159 - protein, 13 aa, Homo sapiens
  CDR3 for alpha chain variable domain of TCR clone 160080 (TRAV2, TRAJ24)
CAVTTDSWGTLQF

SEQ ID NO: 320160 - protein, 14 aa, Homo sapiens
  CDR3 for beta chain variable domain of TCR clone 160080 (TRBV13, TRBJ2-5)
CASSLGRGQETQYF

SEQ ID NO: 320161 - protein, 14 aa, Homo sapiens
  CDR3 for alpha chain variable domain of TCR clone 160081 (TRAV36/DV7, TRAJ53)
CAVVDGGCNYKLTF

SEQ ID NO: 320162 - protein, 14 aa, Homo sapiens
  CDR3 for beta chain variable domain of TCR clone 160081 (TRBV6-1, TRBJ1-3)
CASVQGGGGNTIYF

SEQ ID NO: 320163 - protein, 12 aa, Homo sapiens
  CDR3 for alpha chain variable domain of TCR clone 160082 (TRAV16, TRAJ10)
CSRTGGGNKLTF

SEQ ID NO: 320164 - protein, 19 aa, Homo sapiens
  CDR3 for beta chain variable domain of TCR clone 160082 (TRBV28, TRBJ2-1)
CASSSSIRGSGRTRYEQFF

SEQ ID NO: 320165 - protein, 16 aa, Homo sapiens
  CDR3 for alpha chain variable domain of TCR clone 160083 (TRAV3, TRAJ37)
CAVRGKGSGNTGKIIF

SEQ ID NO: 320166 - protein, 16 aa, Homo sapiens
  CDR3 for beta chain variable domain of TCR clone 160083 (TRBV24-1, TRBJ2-3)
CATSDPGTGATDTQYF

SEQ ID NO: 320167 - protein, 13 aa, Homo sapiens
  CDR3 for alpha chain variable domain of TCR clone 160084 (TRAV16, TRAJ39)
CALSDNAGNMLTF

SEQ ID NO: 320168 - protein, 17 aa, Homo sapiens
  CDR3 for beta chain variable domain of TCR clone 160084 (TRBV15, TRBJ1-5)
CATSRVKGIYSNQPQHF

SEQ ID NO: 320169 - protein, 15 aa, Homo sapiens
  CDR3 for alpha chain variable domain of TCR clone 160085 (TRAV26-1, TRAJ40)
CIVRAVPSGKYKYIF

SEQ ID NO: 320170 - protein, 14 aa, Homo sapiens
  CDR3 for beta chain variable domain of TCR clone 160085 (TRBV19, TRBJ2-1)
CASKDPGLANEQFF

SEQ ID NO: 320171 - protein, 11 aa, Homo sapiens
  CDR3 for alpha chain variable domain of TCR clone 160086 (TRAV3, TRAJ17)
CAEAAGNKLTF

SEQ ID NO: 320172 - protein, 14 aa, Homo sapiens
  CDR3 for beta chain variable domain of TCR clone 160086 (TRBV13, TRBJ2-5)
CASSLERVGETQYF

SEQ ID NO: 320173 - protein, 14 aa, Homo sapiens
  CDR3 for alpha chain variable domain of TCR clone 160087 (TRAV26-2, TRAJ27)
CILRDISDAGKSPF

SEQ ID NO: 320174 - protein, 15 aa, Homo sapiens
  CDR3 for beta chain variable domain of TCR clone 160087 (TRBV10-3, TRBJ2-7)
CATREQGLRSYEQYF

SEQ ID NO: 320175 - protein, 15 aa, Homo sapiens
  CDR3 for alpha chain variable domain of TCR clone 160088 (TRAV8-3, TRAJ45)
CASSYSGGGADGLTF

SEQ ID NO: 320176 - protein, 14 aa, Homo sapiens
  CDR3 for beta chain variable domain of TCR clone 160088 (TRBV7-2, TRBJ1-5)
CASSTQGAGQPQHF

SEQ ID NO: 320177 - protein, 18 aa, Homo sapiens
  CDR3 for alpha chain variable domain of TCR clone 160089 (TRAV26-1, TRAJ23)
CIVRVGLVVWNQGGKLIF

SEQ ID NO: 320178 - protein, 16 aa, Homo sapiens
  CDR3 for beta chain variable domain of TCR clone 160089 (TRBV12-4, TRBJ2-5)
CASSFVVRGRQETQYF

SEQ ID NO: 320179 - protein, 15 aa, Homo sapiens
  CDR3 for alpha chain variable domain of TCR clone 160090 (TRAV17, TRAJ37)
CATDGGSSNTGKLIL

SEQ ID NO: 320180 - protein, 15 aa, Homo sapiens
  CDR3 for beta chain variable domain of TCR clone 160090 (TRBV28, TRBJ2-5)
CASSSGRTIQETQYF

SEQ ID NO: 320181 - protein, 15 aa, Homo sapiens
  CDR3 for alpha chain variable domain of TCR clone 160091 (TRAV8-3, TRAJ20)
CAVEAKGSNDYKLSF

SEQ ID NO: 320182 - protein, 13 aa, Homo sapiens
  CDR3 for beta chain variable domain of TCR clone 160091 (TRBV7-2, TRBJ1-6)
CASSLVGSSPLHF

SEQ ID NO: 320183 - protein, 16 aa, Homo sapiens
  CDR3 for alpha chain variable domain of TCR clone 160092 (TRAV16, TRAJ52)
CALSAAGGTSYGKLTF

SEQ ID NO: 320184 - protein, 15 aa, Homo sapiens
  CDR3 for beta chain variable domain of TCR clone 160092 (TRBV7-2, TRBJ2-7)
CASSTPGLTRGEQYF

SEQ ID NO: 320185 - protein, 14 aa, Homo sapiens
  CDR3 for alpha chain variable domain of TCR clone 160093 (TRAV12-2, TRAJ15)
CAPHTGQAGTALIF

SEQ ID NO: 320186 - protein, 14 aa, Homo sapiens
  CDR3 for beta chain variable domain of TCR clone 160093 (TRBV5-1, TRBJ2-7)
CASSLFTGTHEQYF

SEQ ID NO: 320187 - protein, 19 aa, Homo sapiens
  CDR3 for alpha chain variable domain of TCR clone 160094 (TRAV13-1, TRAJ52)
CAASPYQNAGGTSYGKLTF

SEQ ID NO: 320188 - protein, 14 aa, Homo sapiens
  CDR3 for beta chain variable domain of TCR clone 160094 (TRBV13, TRBJ2-5)
CASSLERVGETQYF

SEQ ID NO: 320189 - protein, 12 aa, Homo sapiens
  CDR3 for alpha chain variable domain of TCR clone 160095 (TRAV1-1, TRAJ20)
CAVREDDYKLSF

SEQ ID NO: 320190 - protein, 18 aa, Homo sapiens
  CDR3 for beta chain variable domain of TCR clone 160095 (TRBV20-1, TRBJ2-3)
CSASGLAGRPGTTDTQYF

SEQ ID NO: 320191 - protein, 16 aa, Homo sapiens
  CDR3 for alpha chain variable domain of TCR clone 160096 (TRAV8-2, TRAJ45)
CVVSEGTGGGADGITF

SEQ ID NO: 320192 - protein, 15 aa, Homo sapiens
  CDR3 for beta chain variable domain of TCR clone 160096 (TRBV7-9, TRBJ2-5)
CASSLVAGGLETQYF

SEQ ID NO: 320193 - protein, 14 aa, Homo sapiens
  CDR3 for alpha chain variable domain of TCR clone 160097 (TRAV13-1, TRAJ13)
CAATRVGGYQKVTF

SEQ ID NO: 320194 - protein, 17 aa, Homo sapiens
  CDR3 for beta chain variable domain of TCR clone 160097 (TRBV15, TRBJ1-5)
CATSRAPPGTRNQTQHF

SEQ ID NO: 320195 - protein, 13 aa, Homo sapiens
  CDR3 for alpha chain variable domain of TCR clone 160098 (TRAV13-1, TRAJ39)
CAASIEMQATCSP

SEQ ID NO: 320196 - protein, 16 aa, Homo sapiens
  CDR3 for beta chain variable domain of TCR clone 160098 (TRBV20-1, TRBJ1-4)
CSAPGQGLLTNEKLFF

SEQ ID NO: 320197 - protein, 15 aa, Homo sapiens
  CDR3 for alpha chain variable domain of TCR clone 160099 (TRAV3, TRAJ22)
CDVRDRGGSARQLTF

SEQ ID NO: 320198 - protein, 13 aa, Homo sapiens
  CDR3 for beta chain variable domain of TCR clone 160099 (TRBV12-4, TRBJ1-2)
CASSLRQGKGYTF

SEQ ID NO: 320199 - protein, 16 aa, Homo sapiens
  CDR3 for alpha chain variable domain of TCR clone 160100 (TRAV13-1, TRAJ42)
CADLLNYGGSQGNLIF

SEQ ID NO: 320200 - protein, 12 aa, Homo sapiens
  CDR3 for beta chain variable domain of TCR clone 160100 (TRBV11-2, TRBJ2-2)
CASSLPTGELFF

SEQ ID NO: 320201 - protein, 16 aa, Homo sapiens
  CDR3 for alpha chain variable domain of TCR clone 160101 (TRAV8-3, TRAJ44)
CAVGTLMTGTASKLTF

SEQ ID NO: 320202 - protein, 14 aa, Homo sapiens
  CDR3 for beta chain variable domain of TCR clone 160101 (TRBV7-2, TRBJ2-7)
CASSPKTSFYEQYF

SEQ ID NO: 320203 - protein, 23 aa, Homo sapiens
  CDR3 for alpha chain variable domain of TCR clone 160102 (TRAV26-1, )
CIAGNAGNNDIQNPDPAGYQLRD

SEQ ID NO: 320204 - protein, 12 aa, Homo sapiens
  CDR3 for beta chain variable domain of TCR clone 160102 (TRBV11-2, TRBJ2-2)
CASSLGGGELFF

SEQ ID NO: 320205 - protein, 12 aa, Homo sapiens
  CDR3 for alpha chain variable domain of TCR clone 160103 (TRAV25, TRAJ11)
CAGASGYGTLTF

SEQ ID NO: 320206 - protein, 14 aa, Homo sapiens
  CDR3 for beta chain variable domain of TCR clone 160103 (TRBV5-8, TRBJ2-3)
CASSLGQGTDTQYF

SEQ ID NO: 320207 - protein, 12 aa, Homo sapiens
  CDR3 for alpha chain variable domain of TCR clone 160104 (TRAV9-2, TRAJ26)
CALRVYGQNFVF

SEQ ID NO: 320208 - protein, 12 aa, Homo sapiens
  CDR3 for beta chain variable domain of TCR clone 160104 (TRBV29-1, TRBJ2-3)
CSVTGGADTQYF

SEQ ID NO: 320209 - protein, 13 aa, Homo sapiens
  CDR3 for alpha chain variable domain of TCR clone 160105 (TRAV12-2, TRAJ47)
CAVFMEYGNKLVF

SEQ ID NO: 320210 - protein, 14 aa, Homo sapiens
  CDR3 for beta chain variable domain of TCR clone 160105 (TRBV7-2, TRBJ1-1)
CASSFLTGTTEAFF

SEQ ID NO: 320211 - protein, 13 aa, Homo sapiens
  CDR3 for alpha chain variable domain of TCR clone 160106 (TRAV8-2, TRAJ15)
CVVRNQAGTALIF

SEQ ID NO: 320212 - protein, 14 aa, Homo sapiens
  CDR3 for beta chain variable domain of TCR clone 160106 (TRBV12-5, TRBJ2-5)
CASGSRTHQETQYF

SEQ ID NO: 320213 - protein, 12 aa, Homo sapiens
  CDR3 for alpha chain variable domain of TCR clone 160107 (TRAV21, TRAJ12)
CAVMDSSYKSIF

SEQ ID NO: 320214 - protein, 16 aa, Homo sapiens
  CDR3 for beta chain variable domain of TCR clone 160107 (TRBV7-9, TRBJ2-5)
CASRLEIGTRKETQYF

SEQ ID NO: 320215 - protein, 15 aa, Homo sapiens
  CDR3 for alpha chain variable domain of TCR clone 160108 (TRAV3, TRAJ22)
CAVRDRGGSARQLTF

SEQ ID NO: 320216 - protein, 14 aa, Homo sapiens
  CDR3 for beta chain variable domain of TCR clone 160108 (TRBV19, TRBJ1-2)
CASSLQGQAYGYTF

SEQ ID NO: 320217 - protein, 17 aa, Homo sapiens
  CDR3 for alpha chain variable domain of TCR clone 160109 (TRAV4, TRAJ42)
CLVGVLNYGGSQGNLIF

SEQ ID NO: 320218 - protein, 16 aa, Homo sapiens
  CDR3 for beta chain variable domain of TCR clone 160109 (TRBV24-1, TRBJ2-3)
CATSDRRQDLTDTQYF

SEQ ID NO: 320219 - protein, 13 aa, Homo sapiens
  CDR3 for alpha chain variable domain of TCR clone 160110 (TRAV12-3, TRAJ35)
CAMAIGFGNVLQC

SEQ ID NO: 320220 - protein, 15 aa, Homo sapiens
  CDR3 for beta chain variable domain of TCR clone 160110 (TRBV20-1, TRBJ2-1)
CSARGSGTYYNEQFF

SEQ ID NO: 320221 - protein, 13 aa, Homo sapiens
  CDR3 for alpha chain variable domain of TCR clone 160111 (TRAV12-3, TRAJ29)
CAMTLSGNTPLVF

SEQ ID NO: 320222 - protein, 15 aa, Homo sapiens
  CDR3 for beta chain variable domain of TCR clone 160111 (TRBV5-1, TRBJ2-6)
CASSLDPAGANVLAF

SEQ ID NO: 320223 - protein, 11 aa, Homo sapiens
  CDR3 for alpha chain variable domain of TCR clone 160112 (TRAV2, TRAJ33)
CAVELNYQLIW

SEQ ID NO: 320224 - protein, 15 aa, Homo sapiens
  CDR3 for beta chain variable domain of TCR clone 160112 (TRBV19, TRBJ1-1)
CASTSGQIQNTEAFF

SEQ ID NO: 320225 - protein, 12 aa, Homo sapiens
  CDR3 for alpha chain variable domain of TCR clone 160113 (TRAV8-3, TRAJ26)
CAGDNYCQNSVF

SEQ ID NO: 320226 - protein, 18 aa, Homo sapiens
  CDR3 for beta chain variable domain of TCR clone 160113 (TRBV12-4, TRBJ2-2)
CASSLVAGTRGRTGELFF

SEQ ID NO: 320227 - protein, 13 aa, Homo sapiens
  CDR3 for alpha chain variable domain of TCR clone 160114 (TRAV13-1, TRAJ39)
CSKYSNAVNMLTF

SEQ ID NO: 320228 - protein, 16 aa, Homo sapiens
  CDR3 for beta chain variable domain of TCR clone 160114 (TRBV20-1, TRBJ1-4)
CSTPGQGLLTNEKLFF

SEQ ID NO: 320229 - protein, 15 aa, Homo sapiens
  CDR3 for alpha chain variable domain of TCR clone 160115 (TRAV8-3, TRAJ45)
CASSYSGGGADGLTF

SEQ ID NO: 320230 - protein, 14 aa, Homo sapiens
  CDR3 for beta chain variable domain of TCR clone 160115 (TRBV19, TRBJ2-1)
CAIPTFVLSGEQFF

SEQ ID NO: 320231 - protein, 16 aa, Homo sapiens
  CDR3 for alpha chain variable domain of TCR clone 160116 (TRAV3, TRAJ37)
CALRPHGSGNTGKLIF

SEQ ID NO: 320232 - protein, 13 aa, Homo sapiens
  CDR3 for beta chain variable domain of TCR clone 160116 (TRBV2, TRBJ1-5)
CASGTGGYQPQHF

SEQ ID NO: 320233 - protein, 13 aa, Homo sapiens
  CDR3 for alpha chain variable domain of TCR clone 160117 (TRAV2, TRAJ40)
CAAVTSGTYKYIF

SEQ ID NO: 320234 - protein, 14 aa, Homo sapiens
  CDR3 for beta chain variable domain of TCR clone 160117 (TRBV19, TRBJ2-1)
CASPTFVLSGSSSS

SEQ ID NO: 320235 - protein, 12 aa, Homo sapiens
  CDR3 for alpha chain variable domain of TCR clone 160118 (TRAV3, TRAJ43)
CAVRDPNNDMRF

SEQ ID NO: 320236 - protein, 14 aa, Homo sapiens
  CDR3 for beta chain variable domain of TCR clone 160118 (TRBV2, TRBJ2-1)
CASSEARQGVSEFF

SEQ ID NO: 320237 - protein, 18 aa, Homo sapiens
  CDR3 for alpha chain variable domain of TCR clone 160119 (TRAV21, TRAJ52)
CAVRPSPAGGTSSGKLTF

SEQ ID NO: 320238 - protein, 14 aa, Homo sapiens
  CDR3 for beta chain variable domain of TCR clone 160119 (TRBV28, TRBJ1-1)
CASSPRTRWAEAFF

SEQ ID NO: 320239 - protein, 12 aa, Homo sapiens
  CDR3 for alpha chain variable domain of TCR clone 160120 (TRAV17, TRAJ12)
CATLRSSYKLIF

SEQ ID NO: 320240 - protein, 16 aa, Homo sapiens
  CDR3 for beta chain variable domain of TCR clone 160120 (TRBV28, TRBJ2-7)
RASSLFFETGGTEQYF

SEQ ID NO: 320241 - protein, 16 aa, Homo sapiens
  CDR3 for alpha chain variable domain of TCR clone 160121 (TRAV30, TRAJ24)
CGTEMVDADSWGKFQV

SEQ ID NO: 320242 - protein, 12 aa, Homo sapiens
  CDR3 for beta chain variable domain of TCR clone 160121 (TRBV11-2, TRBJ2-1)
CASSPGNNEQFF

SEQ ID NO: 320243 - protein, 11 aa, Homo sapiens
  CDR3 for alpha chain variable domain of TCR clone 160122 (TRAV2, TRAJ33)
CAVESNYQLIW

SEQ ID NO: 320244 - protein, 13 aa, Homo sapiens
  CDR3 for beta chain variable domain of TCR clone 160122 (TRBV10-3, TRBJ2-7)
CASRLAVNYEQYF

SEQ ID NO: 320245 - protein, 14 aa, Homo sapiens
  CDR3 for alpha chain variable domain of TCR clone 160123 (TRAV1-2, TRAJ8)
CAVREDTGFQKLVI

SEQ ID NO: 320246 - protein, 15 aa, Homo sapiens
  CDR3 for beta chain variable domain of TCR clone 160123 (TRBV7-3, TRBJ2-2)
CASSETGQGTGELFF

SEQ ID NO: 320247 - protein, 16 aa, Homo sapiens
  CDR3 for alpha chain variable domain of TCR clone 160124 (TRAV30, TRAJ24)
CGTEIVYADSWGKFQF

SEQ ID NO: 320248 - protein, 14 aa, Homo sapiens
  CDR3 for beta chain variable domain of TCR clone 160124 (TRBV12-5, TRBJ2-5)
CASGSRTHQETKYF

SEQ ID NO: 320249 - protein, 13 aa, Homo sapiens
  CDR3 for alpha chain variable domain of TCR clone 160125 (TRAV1-2, TRAJ9)
CASLNTGGFKTIF

SEQ ID NO: 320250 - protein, 20 aa, Homo sapiens
  CDR3 for beta chain variable domain of TCR clone 160125 (TRBV28, TRBJ2-1)
CASTPIGRSPGLAGGNEQSF

SEQ ID NO: 320251 - protein, 14 aa, Homo sapiens
  CDR3 for alpha chain variable domain of TCR clone 160126 (TRAV17, TRAJ37)
CATDGSSNTGKLIF

SEQ ID NO: 320252 - protein, 15 aa, Homo sapiens
  CDR3 for beta chain variable domain of TCR clone 160126 (TRBV7-2, TRBJ2-1)
CASSSGLAGGNEQFF

SEQ ID NO: 320253 - protein, 16 aa, Homo sapiens
  CDR3 for alpha chain variable domain of TCR clone 160127 (TRAV30, TRAJ24)
CGTEIVDAESWGKFQF

SEQ ID NO: 320254 - protein, 14 aa, Homo sapiens
  CDR3 for beta chain variable domain of TCR clone 160127 (TRBV7-9, TRBJ2-4)
CASSLAMGGNIQYF

SEQ ID NO: 320255 - protein, 16 aa, Homo sapiens
  CDR3 for alpha chain variable domain of TCR clone 160128 (TRAV3, TRAJ34)
CAVRDRGTPTSSSLGL

SEQ ID NO: 320256 - protein, 15 aa, Homo sapiens
  CDR3 for beta chain variable domain of TCR clone 160128 (TRBV6-3, TRBJ2-7)
CASSSPGTVFYEQYF

SEQ ID NO: 320257 - protein, 12 aa, Homo sapiens
  CDR3 for alpha chain variable domain of TCR clone 160129 (TRAV21, TRAJ33)
CAKMDRNYQLIW

SEQ ID NO: 320258 - protein, 14 aa, Homo sapiens
  CDR3 for beta chain variable domain of TCR clone 160129 (TRBV7-3, TRBJ1-1)
CASSLKGGNTEAFF

SEQ ID NO: 320259 - protein, 12 aa, Homo sapiens
  CDR3 for alpha chain variable domain of TCR clone 160130 (TRAV1-1, TRAJ39)
CAVAVVGNMLTF

SEQ ID NO: 320260 - protein, 14 aa, Homo sapiens
  CDR3 for beta chain variable domain of TCR clone 160130 (TRBV7-2, TRBJ2-7)
CASSLYPGRYEQYF

SEQ ID NO: 320261 - protein, 14 aa, Homo sapiens
  CDR3 for alpha chain variable domain of TCR clone 160131 (TRAV12-3, TRAJ10)
SHLPLTGGGNKLTF

SEQ ID NO: 320262 - protein, 16 aa, Homo sapiens
  CDR3 for beta chain variable domain of TCR clone 160131 (TRBV20-1, TRBJ2-6)
CSASSQVYDGANVLTF

SEQ ID NO: 320263 - protein, 11 aa, Homo sapiens
  CDR3 for alpha chain variable domain of TCR clone 160132 (TRAV21, TRAJ48)
CAGDGNEKLTF

SEQ ID NO: 320264 - protein, 16 aa, Homo sapiens
  CDR3 for beta chain variable domain of TCR clone 160132 (TRBV12-4, TRBJ1-5)
CASSSGPRGSNQPQHF

SEQ ID NO: 320265 - protein, 11 aa, Homo sapiens
  CDR3 for alpha chain variable domain of TCR clone 160133 (TRAV21, TRAJ34)
CAVTNTDKLIF

SEQ ID NO: 320266 - protein, 16 aa, Homo sapiens
  CDR3 for beta chain variable domain of TCR clone 160133 (TRBV7-9, TRBJ2-1)
CASSDVAGGSYNEQFF

SEQ ID NO: 320267 - protein, 14 aa, Homo sapiens
  CDR3 for alpha chain variable domain of TCR clone 160134 (TRAV12-2, TRAJ6)
CASKWGGGIYIPTF

SEQ ID NO: 320268 - protein, 13 aa, Homo sapiens
  CDR3 for beta chain variable domain of TCR clone 160134 (TRBV2, TRBJ1-1)
CVSSEGGNTEAFF

SEQ ID NO: 320269 - protein, 15 aa, Homo sapiens
  CDR3 for alpha chain variable domain of TCR clone 160135 (TRAV26-1, TRAJ44)
CIARIGTGTASKLTF

SEQ ID NO: 320270 - protein, 15 aa, Homo sapiens
  CDR3 for beta chain variable domain of TCR clone 160135 (TRBV7-6, TRBJ2-1)
CASSSLAGEGNEQFF

SEQ ID NO: 320271 - protein, 19 aa, Homo sapiens
  CDR3 for alpha chain variable domain of TCR clone 160136 (TRAV1-2, TRAJ26)
CLLPLCCERPDNYGQNFVF

SEQ ID NO: 320272 - protein, 12 aa, Homo sapiens
  CDR3 for beta chain variable domain of TCR clone 160136 (TRBV20-1, TRBJ2-1)
FSAQYTYNEQFF

SEQ ID NO: 320273 - protein, 15 aa, Homo sapiens
  CDR3 for alpha chain variable domain of TCR clone 160137 (TRAV2, TRAJ9)
CAVEDRGPGGVKTIF

SEQ ID NO: 320274 - protein, 16 aa, Homo sapiens
  CDR3 for beta chain variable domain of TCR clone 160137 (TRBV24-1, TRBJ2-3)
CATSDPGTGATDTQYF

SEQ ID NO: 320275 - protein, 14 aa, Homo sapiens
  CDR3 for alpha chain variable domain of TCR clone 160138 (TRAV4, TRAJ17)
FLVGPRAAGNKLTF

SEQ ID NO: 320276 - protein, 15 aa, Homo sapiens
  CDR3 for beta chain variable domain of TCR clone 160138 (TRBV4-1, TRBJ1-4)
CASSDTGGTNEKLFF

SEQ ID NO: 320277 - protein, 14 aa, Homo sapiens
  CDR3 for alpha chain variable domain of TCR clone 160139 (TRAV26-1, TRAJ45)
CIEVTGGGADGLTF

SEQ ID NO: 320278 - protein, 16 aa, Homo sapiens
  CDR3 for beta chain variable domain of TCR clone 160139 (TRBV4-3, TRBJ2-2)
CASSHLQGSGTGELFF

SEQ ID NO: 320279 - protein, 15 aa, Homo sapiens
  CDR3 for alpha chain variable domain of TCR clone 160140 (TRAV3, TRAJ13)
CAVRVYSGGYQKVTF

SEQ ID NO: 320280 - protein, 16 aa, Homo sapiens
  CDR3 for beta chain variable domain of TCR clone 160140 (TRBV5-5, TRBJ2-5)
CASSPMYGGVGETQYF

SEQ ID NO: 320281 - protein, 17 aa, Homo sapiens
  CDR3 for alpha chain variable domain of TCR clone 160141 (TRAV26-1, TRAJ53)
CIVRVDDSGGSNYKLTF

SEQ ID NO: 320282 - protein, 15 aa, Homo sapiens
  CDR3 for beta chain variable domain of TCR clone 160141 (TRBV20-1, TRBJ2-7)
CNARVPAAYFYEQYF

SEQ ID NO: 320283 - protein, 11 aa, Homo sapiens
  CDR3 for alpha chain variable domain of TCR clone 160142 (TRAV2, TRAJ13)
CASGGYQKVTF

SEQ ID NO: 320284 - protein, 16 aa, Homo sapiens
  CDR3 for beta chain variable domain of TCR clone 160142 (TRBV20-1, TRBJ2-3)
CSARLHSAGAIDTQYF

SEQ ID NO: 320285 - protein, 10 aa, Homo sapiens
  CDR3 for alpha chain variable domain of TCR clone 160143 (TRAV8-6, TRAJ34)
CAGRADKLIF

SEQ ID NO: 320286 - protein, 16 aa, Homo sapiens
  CDR3 for beta chain variable domain of TCR clone 160143 (TRBV12-5, TRBJ2-5)
CASGPRTSGNQETQYF

SEQ ID NO: 320287 - protein, 14 aa, Homo sapiens
  CDR3 for alpha chain variable domain of TCR clone 160144 (TRAV29/DV5, TRAJ5)
CAASGDTGRRALTF

SEQ ID NO: 320288 - protein, 11 aa, Homo sapiens
  CDR3 for beta chain variable domain of TCR clone 160144 (TRBV29-1, TRBJ2-3)
QRTGGADTQYF

SEQ ID NO: 320289 - protein, 13 aa, Homo sapiens
  CDR3 for alpha chain variable domain of TCR clone 160145 (TRAV12-2, TRAJ31)
CAVKADNNARLMF

SEQ ID NO: 320290 - protein, 13 aa, Homo sapiens
  CDR3 for beta chain variable domain of TCR clone 160145 (TRBV20-1, TRBJ2-7)
CSASRSSSYEQYF

SEQ ID NO: 320291 - protein, 16 aa, Homo sapiens
  CDR3 for alpha chain variable domain of TCR clone 160146 (TRAV9-2, TRAJ48)
CALVDNANFGNEKLTF

SEQ ID NO: 320292 - protein, 15 aa, Homo sapiens
  CDR3 for beta chain variable domain of TCR clone 160146 (TRBV6-3, TRBJ2-7)
CASSSPGTVFYEQYF

SEQ ID NO: 320293 - protein, 11 aa, Homo sapiens
  CDR3 for alpha chain variable domain of TCR clone 160147 (TRAV12-2, TRAJ54)
CAVEGAQKLVF

SEQ ID NO: 320294 - protein, 17 aa, Homo sapiens
  CDR3 for beta chain variable domain of TCR clone 160147 (TRBV18, TRBJ1-3)
CASSPYPTWPSGNTIYF

SEQ ID NO: 320295 - protein, 17 aa, Homo sapiens
  CDR3 for alpha chain variable domain of TCR clone 160148 (TRAV8-6, TRAJ58)
CAVSSWVGETSGSRLTF

SEQ ID NO: 320296 - protein, 15 aa, Homo sapiens
  CDR3 for beta chain variable domain of TCR clone 160148 (TRBV6-5, TRBJ2-1)
CASRYDAGAGNEQFF

SEQ ID NO: 320297 - protein, 13 aa, Homo sapiens
  CDR3 for alpha chain variable domain of TCR clone 160149 (TRAV20, TRAJ37)
CAGCSSNTGKLIF

SEQ ID NO: 320298 - protein, 15 aa, Homo sapiens
  CDR3 for beta chain variable domain of TCR clone 160149 (TRBV4-3, TRBJ2-3)
CASSPSLLSTDTQYF

SEQ ID NO: 320299 - protein, 11 aa, Homo sapiens
  CDR3 for alpha chain variable domain of TCR clone 160150 (TRAV13-1, TRAJ20)
CAASKNYKLSF

SEQ ID NO: 320300 - protein, 16 aa, Homo sapiens
  CDR3 for beta chain variable domain of TCR clone 160150 (TRBV20-1, TRBJ1-4)
CSAPGQGLLTNAKLFF

SEQ ID NO: 320301 - protein, 14 aa, Homo sapiens
  CDR3 for alpha chain variable domain of TCR clone 160151 (TRAV26-1, TRAJ34)
CIVRESYNTDKLIF

SEQ ID NO: 320302 - protein, 17 aa, Homo sapiens
  CDR3 for beta chain variable domain of TCR clone 160151 (TRBV7-3, TRBJ2-3)
CASSLMKRMRGADTQYF

SEQ ID NO: 320303 - protein, 14 aa, Homo sapiens
  CDR3 for alpha chain variable domain of TCR clone 160152 (TRAV21, TRAJ45)
CAVSSGGGADGLTF

SEQ ID NO: 320304 - protein, 15 aa, Homo sapiens
  CDR3 for beta chain variable domain of TCR clone 160152 (TRBV27, TRBJ2-1)
CASSNGGGSSNEQFF

SEQ ID NO: 320305 - protein, 12 aa, Homo sapiens
  CDR3 for alpha chain variable domain of TCR clone 160153 (TRAV12-3, TRAJ17)
CAMTLTGNKLTF

SEQ ID NO: 320306 - protein, 15 aa, Homo sapiens
  CDR3 for beta chain variable domain of TCR clone 160153 (TRBV20-1, TRBJ2-7)
GSARERVSGMDEQYF

SEQ ID NO: 320307 - protein, 14 aa, Homo sapiens
  CDR3 for alpha chain variable domain of TCR clone 160154 (TRAV8-3, TRAJ49)
CAVGEPNTGNQFYF

SEQ ID NO: 320308 - protein, 12 aa, Homo sapiens
  CDR3 for beta chain variable domain of TCR clone 160154 (TRBV28, TRBJ1-6)
CASSLLRGGIAF

SEQ ID NO: 320309 - protein, 12 aa, Homo sapiens
  CDR3 for alpha chain variable domain of TCR clone 160155 (TRAV3, TRAJ31)
CAVRDGNARLVF

SEQ ID NO: 320310 - protein, 12 aa, Homo sapiens
  CDR3 for beta chain variable domain of TCR clone 160155 (TRBV11-2, TRBJ2-2)
CASSLGGGELFF

SEQ ID NO: 320311 - protein, 15 aa, Homo sapiens
  CDR3 for alpha chain variable domain of TCR clone 160156 (TRAV38-2/DV8, TRAJ28)
CAYRSRGAGSYQLAF

SEQ ID NO: 320312 - protein, 13 aa, Homo sapiens
  CDR3 for beta chain variable domain of TCR clone 160156 (TRBV7-9, TRBJ1-2)
CASSLKQNYGYTF

SEQ ID NO: 320313 - protein, 13 aa, Homo sapiens
  CDR3 for alpha chain variable domain of TCR clone 160157 (TRAV21, TRAJ15)
CAVRNQAGTALIF

SEQ ID NO: 320314 - protein, 16 aa, Homo sapiens
  CDR3 for beta chain variable domain of TCR clone 160157 (TRBV20-1, TRBJ2-5)
CSPGWTSGGYMETQYF

SEQ ID NO: 320315 - protein, 14 aa, Homo sapiens
  CDR3 for alpha chain variable domain of TCR clone 160158 (TRAV38-1, TRAJ43)
CAFMKHSNNNDMRF

SEQ ID NO: 320316 - protein, 17 aa, Homo sapiens
  CDR3 for beta chain variable domain of TCR clone 160158 (TRBV7-7, TRBJ1-4)
CASSLVGQGASNEKLFF

SEQ ID NO: 320317 - protein, 13 aa, Homo sapiens
  CDR3 for alpha chain variable domain of TCR clone 160159 (TRAV27, TRAJ29)
CAGTHSGNTPLVF

SEQ ID NO: 320318 - protein, 18 aa, Homo sapiens
  CDR3 for beta chain variable domain of TCR clone 160159 (TRBV6-6, TRBJ1-3)
CASSYSKWDSISGNTIYF

SEQ ID NO: 320319 - protein, 16 aa, Homo sapiens
  CDR3 for alpha chain variable domain of TCR clone 160160 (TRAV23/DV6, )
CAEPDIQNPDPAVYQL

SEQ ID NO: 320320 - protein, 15 aa, Homo sapiens
  CDR3 for beta chain variable domain of TCR clone 160160 (TRBV12-4, TRBJ2-5)
CASTLNGGRRETQYF

SEQ ID NO: 320321 - protein, 13 aa, Homo sapiens
  CDR3 for alpha chain variable domain of TCR clone 160161 (TRAV2, TRAJ40)
CAVVTSGTYKYIF

SEQ ID NO: 320322 - protein, 14 aa, Homo sapiens
  CDR3 for beta chain variable domain of TCR clone 160161 (TRBV11-2, TRBJ2-1)
CASTTGQGNNEQFF

SEQ ID NO: 320323 - protein, 15 aa, Homo sapiens
  CDR3 for alpha chain variable domain of TCR clone 160162 (TRAV12-1, TRAJ44)
CVADLPTGTASKLTF

SEQ ID NO: 320324 - protein, 20 aa, Homo sapiens
  CDR3 for beta chain variable domain of TCR clone 160162 (TRBV28, TRBJ2-1)
CASTPIGRSPGLAGGNEQFF

SEQ ID NO: 320325 - protein, 13 aa, Homo sapiens
  CDR3 for alpha chain variable domain of TCR clone 160163 (TRAV3, TRAJ27)
CAVRPLGAGNSTF

SEQ ID NO: 320326 - protein, 14 aa, Homo sapiens
  CDR3 for beta chain variable domain of TCR clone 160163 (TRBV7-2, TRBJ2-7)
CASRSQGAAYEQYF

SEQ ID NO: 320327 - protein, 10 aa, Homo sapiens
  CDR3 for alpha chain variable domain of TCR clone 160164 (TRAV16, TRAJ43)
CALKRRDMRF

SEQ ID NO: 320328 - protein, 16 aa, Homo sapiens
  CDR3 for beta chain variable domain of TCR clone 160164 (TRBV24-1, TRBJ2-3)
CATSDPGAGATDTQYF

SEQ ID NO: 320329 - protein, 13 aa, Homo sapiens
  CDR3 for alpha chain variable domain of TCR clone 160165 (TRAV27, TRAJ17)
CAGAATAGNKLTF

SEQ ID NO: 320330 - protein, 15 aa, Homo sapiens
  CDR3 for beta chain variable domain of TCR clone 160165 (TRBV28, TRBJ2-7)
CASSVRQVSSYEQYF

SEQ ID NO: 320331 - protein, 13 aa, Homo sapiens
  CDR3 for alpha chain variable domain of TCR clone 160166 (TRAV13-2, TRAJ13)
CADLFGGYQKVTF

SEQ ID NO: 320332 - protein, 15 aa, Homo sapiens
  CDR3 for beta chain variable domain of TCR clone 160166 (TRBV19, TRBJ1-1)
CASSIGGGRNTEAFF

SEQ ID NO: 320333 - protein, 14 aa, Homo sapiens
  CDR3 for alpha chain variable domain of TCR clone 160167 (TRAV17, TRAJ31)
CATVLRNNNARLMF

SEQ ID NO: 320334 - protein, 15 aa, Homo sapiens
  CDR3 for beta chain variable domain of TCR clone 160167 (TRBV7-2, TRBJ2-1)
CASSSGLAGGNEQYF

SEQ ID NO: 320335 - protein, 13 aa, Homo sapiens
  CDR3 for alpha chain variable domain of TCR clone 160168 (TRAV3, TRAJ27)
CAVRPLGAGKSTF

SEQ ID NO: 320336 - protein, 14 aa, Homo sapiens
  CDR3 for beta chain variable domain of TCR clone 160168 (TRBV7-9, TRBJ2-3)
CASSLEDGTDTQYF

SEQ ID NO: 320337 - protein, 15 aa, Homo sapiens
  CDR3 for alpha chain variable domain of TCR clone 160169 (TRAV3, TRAJ4)
CAQNMFSGGYHKLIF

SEQ ID NO: 320338 - protein, 13 aa, Homo sapiens
  CDR3 for beta chain variable domain of TCR clone 160169 (TRBV12-4, TRBJ2-5)
CASSPGTEETQYF

SEQ ID NO: 320339 - protein, 22 aa, Homo sapiens
  CDR3 for alpha chain variable domain of TCR clone 160170 (TRAV12-2, TRAJ53)
SPVIPPPTSVPPILSSNYKLTF

SEQ ID NO: 320340 - protein, 13 aa, Homo sapiens
  CDR3 for beta chain variable domain of TCR clone 160170 (TRBV7-7, TRBJ2-3)
CASSLSRADTQYF

SEQ ID NO: 320341 - protein, 21 aa, Homo sapiens
  CDR3 for alpha chain variable domain of TCR clone 160171 (TRAV1-1, TRAJ6)
CLLLLRCERLERTGGSYIPTF

SEQ ID NO: 320342 - protein, 16 aa, Homo sapiens
  CDR3 for beta chain variable domain of TCR clone 160171 (TRBV2, TRBJ2-1)
CASSANPRDWQAEQFF

SEQ ID NO: 320343 - protein, 13 aa, Homo sapiens
  CDR3 for alpha chain variable domain of TCR clone 160172 (TRAV13-1, TRAJ21)
CAASIYNFNKFYF

SEQ ID NO: 320344 - protein, 15 aa, Homo sapiens
  CDR3 for beta chain variable domain of TCR clone 160172 (TRBV7-2, TRBJ2-7)
CASSLSSGRTYEQYF

SEQ ID NO: 320345 - protein, 12 aa, Homo sapiens
  CDR3 for alpha chain variable domain of TCR clone 160173 (TRAV12-3, TRAJ17)
CAMTLTGNKLTF

SEQ ID NO: 320346 - protein, 15 aa, Homo sapiens
  CDR3 for beta chain variable domain of TCR clone 160173 (TRBV20-1, TRBJ2-7)
CSTRGRVSGMDEQYF

SEQ ID NO: 320347 - protein, 12 aa, Homo sapiens
  CDR3 for alpha chain variable domain of TCR clone 160174 (TRAV21, TRAJ33)
CAKMDSNYQLIW

SEQ ID NO: 320348 - protein, 14 aa, Homo sapiens
  CDR3 for beta chain variable domain of TCR clone 160174 (TRBV2, TRBJ2-7)
CASSVGVGSYEQYF

SEQ ID NO: 320349 - protein, 17 aa, Homo sapiens
  CDR3 for alpha chain variable domain of TCR clone 160175 (TRAV13-1, TRAJ52)
CAAGRNAGDTSYGKLTF

SEQ ID NO: 320350 - protein, 13 aa, Homo sapiens
  CDR3 for beta chain variable domain of TCR clone 160175 (TRBV7-2, TRBJ1-1)
CASNLKGAKVAFF

SEQ ID NO: 320351 - protein, 14 aa, Homo sapiens
  CDR3 for alpha chain variable domain of TCR clone 160176 (TRAV29/DV5, TRAJ5)
CAASGDTGRRALTF

SEQ ID NO: 320352 - protein, 14 aa, Homo sapiens
  CDR3 for beta chain variable domain of TCR clone 160176 (TRBV7-3, TRBJ2-1)
CASSLSGSYNEQFL

SEQ ID NO: 320353 - protein, 16 aa, Homo sapiens
  CDR3 for alpha chain variable domain of TCR clone 160177 (TRAV20, TRAJ38)
CAVQASNAGNNRKPSW

SEQ ID NO: 320354 - protein, 16 aa, Homo sapiens
  CDR3 for beta chain variable domain of TCR clone 160177 (TRBV7-8, TRBJ2-6)
CASRVGDSSGANVLTF

SEQ ID NO: 320355 - protein, 18 aa, Homo sapiens
  CDR3 for alpha chain variable domain of TCR clone 160178 (TRAV21, TRAJ52)
CAVRPSPAGGTSYGKLTF

SEQ ID NO: 320356 - protein, 15 aa, Homo sapiens
  CDR3 for beta chain variable domain of TCR clone 160178 (TRBV13, TRBJ1-5)
CASSFGQGGVQPQHF

SEQ ID NO: 320357 - protein, 13 aa, Homo sapiens
  CDR3 for alpha chain variable domain of TCR clone 160179 (TRAV22, TRAJ29)
CAVGGSGNTHLVF

SEQ ID NO: 320358 - protein, 13 aa, Homo sapiens
  CDR3 for beta chain variable domain of TCR clone 160179 (TRBV4-2, TRBJ1-1)
CASSQAGNAEAFF

SEQ ID NO: 320359 - protein, 17 aa, Homo sapiens
  CDR3 for alpha chain variable domain of TCR clone 160180 (TRAV21, TRAJ52)
CCEAFPAGGTSYGKLTF

SEQ ID NO: 320360 - protein, 16 aa, Homo sapiens
  CDR3 for beta chain variable domain of TCR clone 160180 (TRBV7-3, TRBJ2-1)
CASSLGGYRSYNEQFF

SEQ ID NO: 320361 - protein, 14 aa, Homo sapiens
  CDR3 for alpha chain variable domain of TCR clone 160181 (TRAV1-2, TRAJ16)
CAVNRFSDGQKLLF

SEQ ID NO: 320362 - protein, 16 aa, Homo sapiens
  CDR3 for beta chain variable domain of TCR clone 160181 (TRBV11-1, TRBJ2-7)
CASSAQTGTLSYEQYF

SEQ ID NO: 320363 - protein, 19 aa, Homo sapiens
  CDR3 for alpha chain variable domain of TCR clone 160182 (TRAV2, TRAJ20)
ILQVREADAAVYRDCKLSF

SEQ ID NO: 320364 - protein, 15 aa, Homo sapiens
  CDR3 for beta chain variable domain of TCR clone 160182 (TRBV20-1, TRBJ2-5)
CSAEGAGGLQETQYF

SEQ ID NO: 320365 - protein, 14 aa, Homo sapiens
  CDR3 for alpha chain variable domain of TCR clone 160183 (TRAV1-2, TRAJ16)
CAVKRFSDGQKLLF

SEQ ID NO: 320366 - protein, 15 aa, Homo sapiens
  CDR3 for beta chain variable domain of TCR clone 160183 (TRBV27, TRBJ2-3)
CASRSLAGVIDTQYF

SEQ ID NO: 320367 - protein, 13 aa, Homo sapiens
  CDR3 for alpha chain variable domain of TCR clone 160184 (TRAV36/DV7, TRAJ54)
CAVCTHGAQKLVF

SEQ ID NO: 320368 - protein, 13 aa, Homo sapiens
  CDR3 for beta chain variable domain of TCR clone 160184 (TRBV7-6, TRBJ2-7)
CASSLDHTHEQYF

SEQ ID NO: 320369 - protein, 17 aa, Homo sapiens
  CDR3 for alpha chain variable domain of TCR clone 160185 (TRAV3, TRAJ6)
CAVRDGPRAGGSYIPTF

SEQ ID NO: 320370 - protein, 15 aa, Homo sapiens
  CDR3 for beta chain variable domain of TCR clone 160185 (TRBV5-4, TRBJ2-1)
CASSFSGGSYNEQFF

SEQ ID NO: 320371 - protein, 14 aa, Homo sapiens
  CDR3 for alpha chain variable domain of TCR clone 160186 (TRAV12-1, TRAJ26)
CVVKGSNYGQNFVF

SEQ ID NO: 320372 - protein, 15 aa, Homo sapiens
  CDR3 for beta chain variable domain of TCR clone 160186 (TRBV28, TRBJ2-4)
CAAGSGTLLMGIQYF

SEQ ID NO: 320373 - protein, 18 aa, Homo sapiens
  CDR3 for alpha chain variable domain of TCR clone 160187 (TRAV17, TRAJ22)
CFLLLCYEPFWSARQLTF

SEQ ID NO: 320374 - protein, 15 aa, Homo sapiens
  CDR3 for beta chain variable domain of TCR clone 160187 (TRBV4-1, TRBJ2-5)
CASSQWDLYQETQYF

SEQ ID NO: 320375 - protein, 16 aa, Homo sapiens
  CDR3 for alpha chain variable domain of TCR clone 160188 (TRAV8-3, TRAJ52)
CAVHPAGGTSYGKLTF

SEQ ID NO: 320376 - protein, 15 aa, Homo sapiens
  CDR3 for beta chain variable domain of TCR clone 160188 (TRBV11-2, TRBJ2-7)
CASSLAGGVATEQYF

SEQ ID NO: 320377 - protein, 16 aa, Homo sapiens
  CDR3 for alpha chain variable domain of TCR clone 160189 (TRAV30, TRAJ24)
CGTEIVDADSWGKFEF

SEQ ID NO: 320378 - protein, 13 aa, Homo sapiens
  CDR3 for beta chain variable domain of TCR clone 160189 (TRBV10-3, TRBJ2-7)
CASKLAVNYEQYF

SEQ ID NO: 320379 - protein, 11 aa, Homo sapiens
  CDR3 for alpha chain variable domain of TCR clone 160190 (TRAV26-1, TRAJ27)
CIDPNAGKSTF

SEQ ID NO: 320380 - protein, 14 aa, Homo sapiens
  CDR3 for beta chain variable domain of TCR clone 160190 (TRBV20-1, TRBJ2-7)
CSAPELAGVGEQYF

SEQ ID NO: 320381 - protein, 11 aa, Homo sapiens
  CDR3 for alpha chain variable domain of TCR clone 160191 (TRAV13-2, TRAJ23)
CAESPRGKLIF

SEQ ID NO: 320382 - protein, 15 aa, Homo sapiens
  CDR3 for beta chain variable domain of TCR clone 160191 (TRBV28, TRBJ2-1)
CAISGLAEVDNEQFF

SEQ ID NO: 320383 - protein, 15 aa, Homo sapiens
  CDR3 for alpha chain variable domain of TCR clone 160192 (TRAV34, TRAJ38)
CGADFTPGNNRKLIW

SEQ ID NO: 320384 - protein, 15 aa, Homo sapiens
  CDR3 for beta chain variable domain of TCR clone 160192 (TRBV4-3, TRBJ2-5)
CASSQGTGHRETQYF

SEQ ID NO: 320385 - protein, 18 aa, Homo sapiens
  CDR3 for alpha chain variable domain of TCR clone 160193 (TRAV13-1, TRAJ52)
CAASKRSAGGTSYGKLTF

SEQ ID NO: 320386 - protein, 13 aa, Homo sapiens
  CDR3 for beta chain variable domain of TCR clone 160193 (TRBV12-4, TRBJ1-2)
CASSLGQGTGYSF

SEQ ID NO: 320387 - protein, 14 aa, Homo sapiens
  CDR3 for alpha chain variable domain of TCR clone 160194 (TRAV12-2, TRAJ44)
CAVNKAGTASKLTF

SEQ ID NO: 320388 - protein, 14 aa, Homo sapiens
  CDR3 for beta chain variable domain of TCR clone 160194 (TRBV15, TRBJ2-5)
CATSIGGLGETQYF

SEQ ID NO: 320389 - protein, 14 aa, Homo sapiens
  CDR3 for alpha chain variable domain of TCR clone 160195 (TRAV12-2, TRAJ13)
CAVKKTGGYQKVTL

SEQ ID NO: 320390 - protein, 16 aa, Homo sapiens
  CDR3 for beta chain variable domain of TCR clone 160195 (TRBV12-5, TRBJ2-5)
CASGPRTSGNQETQYF

SEQ ID NO: 320391 - protein, 15 aa, Homo sapiens
  CDR3 for alpha chain variable domain of TCR clone 160196 (TRAV17, TRAJ57)
CATGPSQGGSEKLVF

SEQ ID NO: 320392 - protein, 14 aa, Homo sapiens
  CDR3 for beta chain variable domain of TCR clone 160196 (TRBV20-1, TRBJ2-7)
CSAPELAGVGEQYF

SEQ ID NO: 320393 - protein, 14 aa, Homo sapiens
  CDR3 for alpha chain variable domain of TCR clone 160197 (TRAV17, TRAJ56)
CATDYTGANSKRTF

SEQ ID NO: 320394 - protein, 14 aa, Homo sapiens
  CDR3 for beta chain variable domain of TCR clone 160197 (TRBV18, TRBJ2-1)
CASSPVRGDNEQFF

SEQ ID NO: 320395 - protein, 11 aa, Homo sapiens
  CDR3 for alpha chain variable domain of TCR clone 160198 (TRAV17, TRAJ39)
CATNPYNMLPF

SEQ ID NO: 320396 - protein, 13 aa, Homo sapiens
  CDR3 for beta chain variable domain of TCR clone 160198 (TRBV7-8, TRBJ2-1)
CASTRDAVDEQFF

SEQ ID NO: 320397 - protein, 18 aa, Homo sapiens
  CDR3 for alpha chain variable domain of TCR clone 160199 (TRAV8-6, TRAJ39)
CAVTPQGLIDNAGNMLTF

SEQ ID NO: 320398 - protein, 14 aa, Homo sapiens
  CDR3 for beta chain variable domain of TCR clone 160199 (TRBV12-5, TRBJ2-5)
CASGSRTHQETQYF

SEQ ID NO: 320399 - protein, 14 aa, Homo sapiens
  CDR3 for alpha chain variable domain of TCR clone 160200 (TRAV12-1, TRAJ28)
CVAISGAGSYQLTF

SEQ ID NO: 320400 - protein, 15 aa, Homo sapiens
  CDR3 for beta chain variable domain of TCR clone 160200 (TRBV11-3, TRBJ2-3)
CASLKDWREGDTQYF

SEQ ID NO: 320401 - protein, 18 aa, Homo sapiens
  CDR3 for alpha chain variable domain of TCR clone 160201 (TRAV9-2, TRAJ52)
CALSRHNAGGTSYGKLTF

SEQ ID NO: 320402 - protein, 11 aa, Homo sapiens
  CDR3 for beta chain variable domain of TCR clone 160201 (TRBV11-2, TRBJ2-2)
CASSLPGELFF

SEQ ID NO: 320403 - protein, 12 aa, Homo sapiens
  CDR3 for alpha chain variable domain of TCR clone 160202 (TRAV2, TRAJ33)
CAVGDSNYQLIW

SEQ ID NO: 320404 - protein, 14 aa, Homo sapiens
  CDR3 for beta chain variable domain of TCR clone 160202 (TRBV19, TRBJ1-4)
CASSINRGGEKLFF

SEQ ID NO: 320405 - protein, 13 aa, Homo sapiens
  CDR3 for alpha chain variable domain of TCR clone 160203 (TRAV12-1, TRAJ3)
CVVNPSGASKIIF

SEQ ID NO: 320406 - protein, 13 aa, Homo sapiens
  CDR3 for beta chain variable domain of TCR clone 160203 (TRBV28, TRBJ1-5)
CASSDRGNQPQHF

SEQ ID NO: 320407 - protein, 14 aa, Homo sapiens
  CDR3 for alpha chain variable domain of TCR clone 160204 (TRAV30, TRAJ26)
CGTEIVSYGKNFVL

SEQ ID NO: 320408 - protein, 13 aa, Homo sapiens
  CDR3 for beta chain variable domain of TCR clone 160204 (TRBV19, TRBJ1-3)
CASRLSLGNTIYF

SEQ ID NO: 320409 - protein, 14 aa, Homo sapiens
  CDR3 for alpha chain variable domain of TCR clone 160205 (TRAV20, TRAJ29)
CAVQAWVGNTPLVF

SEQ ID NO: 320410 - protein, 15 aa, Homo sapiens
  CDR3 for beta chain variable domain of TCR clone 160205 (TRBV29-1, TRBJ2-7)
CSVEFFDRGSYEQYY

SEQ ID NO: 320411 - protein, 13 aa, Homo sapiens
  CDR3 for alpha chain variable domain of TCR clone 160206 (TRAV27, TRAJ6)
CAGGTRGSYIPTF

SEQ ID NO: 320412 - protein, 16 aa, Homo sapiens
  CDR3 for beta chain variable domain of TCR clone 160206 (TRBV6-3, TRBJ1-1)
CTSVPAVTRRDTEAFF

SEQ ID NO: 320413 - protein, 14 aa, Homo sapiens
  CDR3 for alpha chain variable domain of TCR clone 160207 (TRAV16, TRAJ17)
CAPRIKAAGNKLTF

SEQ ID NO: 320414 - protein, 12 aa, Homo sapiens
  CDR3 for beta chain variable domain of TCR clone 160207 (TRBV7-3, TRBJ2-1)
CASSFQSGPQFF

SEQ ID NO: 320415 - protein, 14 aa, Homo sapiens
  CDR3 for alpha chain variable domain of TCR clone 160208 (TRAV17, TRAJ6)
CATFSSVGSYIPTF

SEQ ID NO: 320416 - protein, 14 aa, Homo sapiens
  CDR3 for beta chain variable domain of TCR clone 160208 (TRBV19, TRBJ1-5)
CASSLSGGSQPQHF

SEQ ID NO: 320417 - protein, 13 aa, Homo sapiens
  CDR3 for alpha chain variable domain of TCR clone 160209 (TRAV12-3, TRAJ9)
CAMRNTGGFKTIF

SEQ ID NO: 320418 - protein, 20 aa, Homo sapiens
  CDR3 for beta chain variable domain of TCR clone 160209 (TRBV5-1, TRBJ2-3)
CASSLWLAGAITTRTDTQYF

SEQ ID NO: 320419 - protein, 15 aa, Homo sapiens
  CDR3 for alpha chain variable domain of TCR clone 160210 (TRAV13-2, TRAJ10)
CAENRDTGGGNNLTF

SEQ ID NO: 320420 - protein, 20 aa, Homo sapiens
  CDR3 for beta chain variable domain of TCR clone 160210 (TRBV28, TRBJ2-1)
CASTPIGRSPGLAGGNEQFF

SEQ ID NO: 320421 - protein, 15 aa, Homo sapiens
  CDR3 for alpha chain variable domain of TCR clone 160211 (TRAV20, TRAJ50)
CAVRQMKTSYDKVTF

SEQ ID NO: 320422 - protein, 16 aa, Homo sapiens
  CDR3 for beta chain variable domain of TCR clone 160211 (TRBV15, TRBJ1-2)
CATSRGPRTGGGGYTF

SEQ ID NO: 320423 - protein, 14 aa, Homo sapiens
  CDR3 for alpha chain variable domain of TCR clone 160212 (TRAV9-2, TRAJ39)
CALYIYNAGNMLTF

SEQ ID NO: 320424 - protein, 14 aa, Homo sapiens
  CDR3 for beta chain variable domain of TCR clone 160212 (TRBV6-1, TRBJ1-3)
CASVRGGGGNTIYF

SEQ ID NO: 320425 - protein, 11 aa, Homo sapiens
  CDR3 for alpha chain variable domain of TCR clone 160213 (TRAV13-1, TRAJ15)
CSSQAGTALIF

SEQ ID NO: 320426 - protein, 13 aa, Homo sapiens
  CDR3 for beta chain variable domain of TCR clone 160213 (TRBV10-3, TRBJ1-2)
CAISERDSYGYTF

SEQ ID NO: 320427 - protein, 15 aa, Homo sapiens
  CDR3 for alpha chain variable domain of TCR clone 160214 (TRAV8-2, TRAJ16)
CVVRDGFSDGQKPLF

SEQ ID NO: 320428 - protein, 15 aa, Homo sapiens
  CDR3 for beta chain variable domain of TCR clone 160214 (TRBV9, TRBJ1-6)
CASSVAGTGDSPLHF

SEQ ID NO: 320429 - protein, 16 aa, Homo sapiens
  CDR3 for alpha chain variable domain of TCR clone 160215 (TRAV13-1, TRAJ48)
CAASIFGNFGNEKLTF

SEQ ID NO: 320430 - protein, 14 aa, Homo sapiens
  CDR3 for beta chain variable domain of TCR clone 160215 (TRBV7-3, TRBJ1-1)
CASSVKGGNTEAFF

SEQ ID NO: 320431 - protein, 16 aa, Homo sapiens
  CDR3 for alpha chain variable domain of TCR clone 160216 (TRAV16, TRAJ57)
CAPHLITQGGSEKLVF

SEQ ID NO: 320432 - protein, 15 aa, Homo sapiens
  CDR3 for beta chain variable domain of TCR clone 160216 (TRBV7-6, TRBJ2-7)
CASSLGGAEPYEQYF

SEQ ID NO: 320433 - protein, 11 aa, Homo sapiens
  CDR3 for alpha chain variable domain of TCR clone 160217 (TRAV8-4, TRAJ34)
CAVNWTDKLIF

SEQ ID NO: 320434 - protein, 14 aa, Homo sapiens
  CDR3 for beta chain variable domain of TCR clone 160217 (TRBV7-9, TRBJ2-3)
CASSLEDGTDTQYF

SEQ ID NO: 320435 - protein, 13 aa, Homo sapiens
  CDR3 for alpha chain variable domain of TCR clone 160218 (TRAV1-2, TRAJ9)
CAALNTGGFKTIF

SEQ ID NO: 320436 - protein, 13 aa, Homo sapiens
  CDR3 for beta chain variable domain of TCR clone 160218 (TRBV19, TRBJ1-2)
CGSSVAGQDGYTF

SEQ ID NO: 320437 - protein, 12 aa, Homo sapiens
  CDR3 for alpha chain variable domain of TCR clone 160219 (TRAV12-2, TRAJ47)
CAVAEYGNKLVL

SEQ ID NO: 320438 - protein, 15 aa, Homo sapiens
  CDR3 for beta chain variable domain of TCR clone 160219 (TRBV28, TRBJ2-1)
CASSIIAGGRSEQFF

SEQ ID NO: 320439 - protein, 13 aa, Homo sapiens
  CDR3 for alpha chain variable domain of TCR clone 160220 (TRAV23/DV6, TRAJ10)
ASVLAGGGNKLTF

SEQ ID NO: 320440 - protein, 13 aa, Homo sapiens
  CDR3 for beta chain variable domain of TCR clone 160220 (TRBV11-1, TRBJ1-2)
CASVGSWGYGYTF

SEQ ID NO: 320441 - protein, 16 aa, Homo sapiens
  CDR3 for alpha chain variable domain of TCR clone 160221 (TRAV14/DV4, TRAJ54)
CAMREGRIQGAQKLVF

SEQ ID NO: 320442 - protein, 13 aa, Homo sapiens
  CDR3 for beta chain variable domain of TCR clone 160221 (TRBV19, TRBJ2-7)
CASSIRSSYEQYF

SEQ ID NO: 320443 - protein, 14 aa, Homo sapiens
  CDR3 for alpha chain variable domain of TCR clone 160222 (TRAV26-1, TRAJ39)
CIVFTNNAGNMLTF

SEQ ID NO: 320444 - protein, 15 aa, Homo sapiens
  CDR3 for beta chain variable domain of TCR clone 160222 (TRBV19, TRBJ2-4)
CASSLTVLTKNIQYF

SEQ ID NO: 320445 - protein, 10 aa, Homo sapiens
  CDR3 for alpha chain variable domain of TCR clone 160223 (TRAV12-3, TRAJ49)
CAMNDDQFYF

SEQ ID NO: 320446 - protein, 14 aa, Homo sapiens
  CDR3 for beta chain variable domain of TCR clone 160223 (TRBV7-9, TRBJ2-1)
CASSPRDSLYEQFF

SEQ ID NO: 320447 - protein, 14 aa, Homo sapiens
  CDR3 for alpha chain variable domain of TCR clone 160224 (TRAV1-2, TRAJ16)
CAVNRFSDGQKLLF

SEQ ID NO: 320448 - protein, 12 aa, Homo sapiens
  CDR3 for beta chain variable domain of TCR clone 160224 (TRBV5-1, TRBJ1-1)
CASSLSGAEAFF

SEQ ID NO: 320449 - protein, 17 aa, Homo sapiens
  CDR3 for alpha chain variable domain of TCR clone 160225 (TRAV4, TRAJ13)
CLVGVQGSSGGYQKVTF

SEQ ID NO: 320450 - protein, 16 aa, Homo sapiens
  CDR3 for beta chain variable domain of TCR clone 160225 (TRBV28, TRBJ2-7)
GASSLFFETGGPEQYF

SEQ ID NO: 320451 - protein, 16 aa, Homo sapiens
  CDR3 for alpha chain variable domain of TCR clone 160226 (TRAV14/DV4, TRAJ53)
CAMRECGGGSNYKLTF

SEQ ID NO: 320452 - protein, 13 aa, Homo sapiens
  CDR3 for beta chain variable domain of TCR clone 160226 (TRBV4-2, TRBJ1-1)
CASSQAGNTEAFF

SEQ ID NO: 320453 - protein, 18 aa, Homo sapiens
  CDR3 for alpha chain variable domain of TCR clone 160227 (TRAV12-3, TRAJ52)
CAMSVGGAGGASYGKLTF

SEQ ID NO: 320454 - protein, 15 aa, Homo sapiens
  CDR3 for beta chain variable domain of TCR clone 160227 (TRBV27, TRBJ1-6)
CASSFDRGLGSALHF

SEQ ID NO: 320455 - protein, 14 aa, Homo sapiens
  CDR3 for alpha chain variable domain of TCR clone 160228 (TRAV13-1, TRAJ9)
CAASALTGGCKTIF

SEQ ID NO: 320456 - protein, 13 aa, Homo sapiens
  CDR3 for beta chain variable domain of TCR clone 160228 (TRBV20-1, TRBJ1-1)
CSAGTVGNTEAFF

SEQ ID NO: 320457 - protein, 15 aa, Homo sapiens
  CDR3 for alpha chain variable domain of TCR clone 160229 (TRAV21, TRAJ24)
CAARSSTDSWGKFQF

SEQ ID NO: 320458 - protein, 11 aa, Homo sapiens
  CDR3 for beta chain variable domain of TCR clone 160229 (TRBV11-2, TRBJ2-2)
CASSLPGELFF

SEQ ID NO: 320459 - protein, 13 aa, Homo sapiens
  CDR3 for alpha chain variable domain of TCR clone 160230 (TRAV20, TRAJ21)
CAVEGFNFNKFYF

SEQ ID NO: 320460 - protein, 14 aa, Homo sapiens
  CDR3 for beta chain variable domain of TCR clone 160230 (TRBV3-1, TRBJ2-5)
CASSQGPDQETQYF

SEQ ID NO: 320461 - protein, 14 aa, Homo sapiens
  CDR3 for alpha chain variable domain of TCR clone 160231 (TRAV12-1, TRAJ17)
YVVNYKAAGNKLTF

SEQ ID NO: 320462 - protein, 12 aa, Homo sapiens
  CDR3 for beta chain variable domain of TCR clone 160231 (TRBV19, TRBJ1-5)
CASSIAQQPQHF

SEQ ID NO: 320463 - protein, 15 aa, Homo sapiens
  CDR3 for alpha chain variable domain of TCR clone 160232 (TRAV21, TRAJ24)
CAAQSSTDSWGKLQF

SEQ ID NO: 320464 - protein, 15 aa, Homo sapiens
  CDR3 for beta chain variable domain of TCR clone 160232 (TRBV20-1, TRBJ1-1)
CSASRGVTGNTEAFF

SEQ ID NO: 320465 - protein, 16 aa, Homo sapiens
  CDR3 for alpha chain variable domain of TCR clone 160233 (TRAV3, TRAJ18)
CAVGDGRGSTLGRPYF

SEQ ID NO: 320466 - protein, 15 aa, Homo sapiens
  CDR3 for beta chain variable domain of TCR clone 160233 (TRBV7-9, TRBJ1-6)
CASSSPGRGNSPLHF

SEQ ID NO: 320467 - protein, 16 aa, Homo sapiens
  CDR3 for alpha chain variable domain of TCR clone 160234 (TRAV12-2, TRAJ28)
CAVITDSGSGSYQLTF

SEQ ID NO: 320468 - protein, 12 aa, Homo sapiens
  CDR3 for beta chain variable domain of TCR clone 160234 (TRBV9, TRBJ2-2)
CASSLVTGELFF

SEQ ID NO: 320469 - protein, 15 aa, Homo sapiens
  CDR3 for alpha chain variable domain of TCR clone 160235 (TRAV34, TRAJ38)
CGADFTPGNNRKLIW

SEQ ID NO: 320470 - protein, 15 aa, Homo sapiens
  CDR3 for beta chain variable domain of TCR clone 160235 (TRBV4-1, TRBJ1-4)
CASSDTGGTNEKLFF

SEQ ID NO: 320471 - protein, 11 aa, Homo sapiens
  CDR3 for alpha chain variable domain of TCR clone 160236 (TRAV20, TRAJ40)
CAVGGTYKYIF

SEQ ID NO: 320472 - protein, 15 aa, Homo sapiens
  CDR3 for beta chain variable domain of TCR clone 160236 (TRBV6-3, TRBJ2-2)
CASSFLATLTGELFF

SEQ ID NO: 320473 - protein, 13 aa, Homo sapiens
  CDR3 for alpha chain variable domain of TCR clone 160237 (TRAV35, TRAJ27)
CAGQEGDAGKATF

SEQ ID NO: 320474 - protein, 16 aa, Homo sapiens
  CDR3 for beta chain variable domain of TCR clone 160237 (TRBV7-2, TRBJ2-5)
CASSYKTGISLETQYF

SEQ ID NO: 320475 - protein, 14 aa, Homo sapiens
  CDR3 for alpha chain variable domain of TCR clone 160238 (TRAV17, TRAJ57)
CATDPQAGSEKLVF

SEQ ID NO: 320476 - protein, 18 aa, Homo sapiens
  CDR3 for beta chain variable domain of TCR clone 160238 (TRBV6-6, TRBJ1-3)
CASSYSKWDSISGNTIYF

SEQ ID NO: 320477 - protein, 12 aa, Homo sapiens
  CDR3 for alpha chain variable domain of TCR clone 160239 (TRAV27, TRAJ9)
CAGESGGCKTIF

SEQ ID NO: 320478 - protein, 14 aa, Homo sapiens
  CDR3 for beta chain variable domain of TCR clone 160239 (TRBV6-1, TRBJ2-1)
CASAKDGFYNEQFF

SEQ ID NO: 320479 - protein, 12 aa, Homo sapiens
  CDR3 for alpha chain variable domain of TCR clone 160240 (TRAV3, TRAJ27)
CAVRDKAGKSTF

SEQ ID NO: 320480 - protein, 15 aa, Homo sapiens
  CDR3 for beta chain variable domain of TCR clone 160240 (TRBV27, TRBJ2-1)
CASSNGGGSSNEQFF

SEQ ID NO: 320481 - protein, 12 aa, Homo sapiens
  CDR3 for alpha chain variable domain of TCR clone 160241 (TRAV29/DV5, TRAJ15)
CASNQAGTALIF

SEQ ID NO: 320482 - protein, 12 aa, Homo sapiens
  CDR3 for beta chain variable domain of TCR clone 160241 (TRBV7-8, TRBJ2-7)
CASSLGDREQYF

SEQ ID NO: 320483 - protein, 17 aa, Homo sapiens
  CDR3 for alpha chain variable domain of TCR clone 160242 (TRAV13-1, TRAJ5)
CSNPSLSRDAGRRALTF

SEQ ID NO: 320484 - protein, 17 aa, Homo sapiens
  CDR3 for beta chain variable domain of TCR clone 160242 (TRBV24-1, TRBJ2-1)
CATSDVSTSGTYNEQFF

SEQ ID NO: 320485 - protein, 15 aa, Homo sapiens
  CDR3 for alpha chain variable domain of TCR clone 160243 (TRAV12-3, TRAJ11)
CAMSEENSGYRTLTF

SEQ ID NO: 320486 - protein, 14 aa, Homo sapiens
  CDR3 for beta chain variable domain of TCR clone 160243 (TRBV18, TRBJ2-5)
CASSPGVSQETQYF

SEQ ID NO: 320487 - protein, 12 aa, Homo sapiens
  CDR3 for alpha chain variable domain of TCR clone 160244 (TRAV8-3, TRAJ20)
CAVGANDYKLSF

SEQ ID NO: 320488 - protein, 11 aa, Homo sapiens
  CDR3 for beta chain variable domain of TCR clone 160244 (TRBV7-9, TRBJ2-5)
CASSLGETQYF

SEQ ID NO: 320489 - protein, 16 aa, Homo sapiens
  CDR3 for alpha chain variable domain of TCR clone 160245 (TRAV25, TRAJ53)
CVGPKGSGGSNYKLTF

SEQ ID NO: 320490 - protein, 17 aa, Homo sapiens
  CDR3 for beta chain variable domain of TCR clone 160245 (TRBV11-3, TRBJ2-6)
CASKWGQGLSGANVLTF

SEQ ID NO: 320491 - protein, 12 aa, Homo sapiens
  CDR3 for alpha chain variable domain of TCR clone 160246 (TRAV17, TRAJ20)
CATDSNDYKLSF

SEQ ID NO: 320492 - protein, 13 aa, Homo sapiens
  CDR3 for beta chain variable domain of TCR clone 160246 (TRBV14, TRBJ2-7)
CASSPRRPYEQYF

SEQ ID NO: 320493 - protein, 14 aa, Homo sapiens
  CDR3 for alpha chain variable domain of TCR clone 160247 (TRAV1-2, TRAJ8)
CAVREDTGFKKLVF

SEQ ID NO: 320494 - protein, 16 aa, Homo sapiens
  CDR3 for beta chain variable domain of TCR clone 160247 (TRBV7-3, TRBJ2-1)
CASSLEGYRSYNEQFF

SEQ ID NO: 320495 - protein, 15 aa, Homo sapiens
  CDR3 for alpha chain variable domain of TCR clone 160248 (TRAV3, TRAJ3)
CAVRDRRSSASKINF

SEQ ID NO: 320496 - protein, 17 aa, Homo sapiens
  CDR3 for beta chain variable domain of TCR clone 160248 (TRBV5-7, TRBJ2-5)
CQQHARFGQLYQETQYF

SEQ ID NO: 320497 - protein, 12 aa, Homo sapiens
  CDR3 for alpha chain variable domain of TCR clone 160249 (TRAV8-1, TRAJ26)
CAVNNYGQNFVF

SEQ ID NO: 320498 - protein, 12 aa, Homo sapiens
  CDR3 for beta chain variable domain of TCR clone 160249 (TRBV5-5, TRBJ2-5)
CASSYLGETQYF

SEQ ID NO: 320499 - protein, 15 aa, Homo sapiens
  CDR3 for alpha chain variable domain of TCR clone 160250 (TRAV38-1, TRAJ37)
CAFINGPGNTGKLIF

SEQ ID NO: 320500 - protein, 12 aa, Homo sapiens
  CDR3 for beta chain variable domain of TCR clone 160250 (TRBV7-9, TRBJ2-7)
CASSFGSYEQYF

SEQ ID NO: 320501 - protein, 16 aa, Homo sapiens
  CDR3 for alpha chain variable domain of TCR clone 160251 (TRAV38-1, TRAJ37)
CAFKGDGSSDTGKLIF

SEQ ID NO: 320502 - protein, 15 aa, Homo sapiens
  CDR3 for beta chain variable domain of TCR clone 160251 (TRBV9, TRBJ1-6)
CASSVAGTGDSPLHF

SEQ ID NO: 320503 - protein, 14 aa, Homo sapiens
  CDR3 for alpha chain variable domain of TCR clone 160252 (TRAV17, TRAJ53)
CATDEGGSNYKLTF

SEQ ID NO: 320504 - protein, 16 aa, Homo sapiens
  CDR3 for beta chain variable domain of TCR clone 160252 (TRBV4-1, TRBJ1-1)
CASSQDAGMGNTEAFF

SEQ ID NO: 320505 - protein, 13 aa, Homo sapiens
  CDR3 for alpha chain variable domain of TCR clone 160253 (TRAV12-2, TRAJ52)
CAAHGTSYGKQTF

SEQ ID NO: 320506 - protein, 15 aa, Homo sapiens
  CDR3 for beta chain variable domain of TCR clone 160253 (TRBV10-3, TRBJ2-7)
CAISTFSGVKGEQYF

SEQ ID NO: 320507 - protein, 13 aa, Homo sapiens
  CDR3 for alpha chain variable domain of TCR clone 160254 (TRAV12-2, TRAJ20)
CAAYPSNDYKLSF

SEQ ID NO: 320508 - protein, 15 aa, Homo sapiens
  CDR3 for beta chain variable domain of TCR clone 160254 (TRBV18, TRBJ1-2)
CASSPGNGLGYGYTF

SEQ ID NO: 320509 - protein, 11 aa, Homo sapiens
  CDR3 for alpha chain variable domain of TCR clone 160255 (TRAV12-3, TRAJ43)
CAMTVTNDMRF

SEQ ID NO: 320510 - protein, 13 aa, Homo sapiens
  CDR3 for beta chain variable domain of TCR clone 160255 (TRBV20-1, TRBJ1-1)
CSAPVGGGTEAFF

SEQ ID NO: 320511 - protein, 13 aa, Homo sapiens
  CDR3 for alpha chain variable domain of TCR clone 160256 (TRAV23/DV6, TRAJ12)
CAPRGDSSYQLIF

SEQ ID NO: 320512 - protein, 12 aa, Homo sapiens
  CDR3 for beta chain variable domain of TCR clone 160256 (TRBV7-6, TRBJ2-5)
CASSLSQETQYF

SEQ ID NO: 320513 - protein, 13 aa, Homo sapiens
  CDR3 for alpha chain variable domain of TCR clone 160257 (TRAV8-4, TRAJ36)
CAVSVAGANNLFF

SEQ ID NO: 320514 - protein, 15 aa, Homo sapiens
  CDR3 for beta chain variable domain of TCR clone 160257 (TRBV7-2, TRBJ2-5)
CASNLEGRGVETQYF

SEQ ID NO: 320515 - protein, 13 aa, Homo sapiens
  CDR3 for alpha chain variable domain of TCR clone 160258 (TRAV3, TRAJ21)
CAVREPDFNKFYF

SEQ ID NO: 320516 - protein, 16 aa, Homo sapiens
  CDR3 for beta chain variable domain of TCR clone 160258 (TRBV7-2, TRBJ1-2)
CASSSNQDRRGHGYTF

SEQ ID NO: 320517 - protein, 14 aa, Homo sapiens
  CDR3 for alpha chain variable domain of TCR clone 160259 (TRAV1-2, TRAJ8)
CAVREDTGFQKLVF

SEQ ID NO: 320518 - protein, 14 aa, Homo sapiens
  CDR3 for beta chain variable domain of TCR clone 160259 (TRBV4-2, TRBJ1-4)
CASSPSSGNEKLFF

SEQ ID NO: 320519 - protein, 14 aa, Homo sapiens
  CDR3 for alpha chain variable domain of TCR clone 160260 (TRAV38-1, TRAJ45)
CAYYSGGGADELTF

SEQ ID NO: 320520 - protein, 20 aa, Homo sapiens
  CDR3 for beta chain variable domain of TCR clone 160260 (TRBV28, TRBJ2-1)
CASAPIGRSPGLAGGNEQFF

SEQ ID NO: 320521 - protein, 17 aa, Homo sapiens
  CDR3 for alpha chain variable domain of TCR clone 160261 (TRAV3, TRAJ6)
CAVRDDPRAGGSYIPTF

SEQ ID NO: 320522 - protein, 15 aa, Homo sapiens
  CDR3 for beta chain variable domain of TCR clone 160261 (TRBV11-3, TRBJ2-7)
CASSPGPASSYEQYF

SEQ ID NO: 320523 - protein, 17 aa, Homo sapiens
  CDR3 for alpha chain variable domain of TCR clone 160262 (TRAV3, TRAJ6)
SAVRDGPRAGGSYIPTF

SEQ ID NO: 320524 - protein, 15 aa, Homo sapiens
  CDR3 for beta chain variable domain of TCR clone 160262 (TRBV4-1, TRBJ2-5)
CASSQWDLYQETQYF

SEQ ID NO: 320525 - protein, 11 aa, Homo sapiens
  CDR3 for alpha chain variable domain of TCR clone 160263 (TRAV2, TRAJ13)
CASVGYQKVTF

SEQ ID NO: 320526 - protein, 14 aa, Homo sapiens
  CDR3 for beta chain variable domain of TCR clone 160263 (TRBV4-1, TRBJ2-7)
CASSPVAGGDEQYF

SEQ ID NO: 320527 - protein, 15 aa, Homo sapiens
  CDR3 for alpha chain variable domain of TCR clone 160264 (TRAV27, TRAJ50)
CAGRERGTSYDKLIF

SEQ ID NO: 320528 - protein, 16 aa, Homo sapiens
  CDR3 for beta chain variable domain of TCR clone 160264 (TRBV10-3, TRBJ1-5)
CAISDQVGAPNQPQHF

SEQ ID NO: 320529 - protein, 12 aa, Homo sapiens
  CDR3 for alpha chain variable domain of TCR clone 160265 (TRAV21, TRAJ33)
CAKMDSNYQLIW

SEQ ID NO: 320530 - protein, 12 aa, Homo sapiens
  CDR3 for beta chain variable domain of TCR clone 160265 (TRBV19, TRBJ2-1)
CASSRQGAEQFF

SEQ ID NO: 320531 - protein, 14 aa, Homo sapiens
  CDR3 for alpha chain variable domain of TCR clone 160266 (TRAV1-2, TRAJ8)
CAVREDTGCQKLVF

SEQ ID NO: 320532 - protein, 17 aa, Homo sapiens
  CDR3 for beta chain variable domain of TCR clone 160266 (TRBV20-1, TRBJ2-1)
CSASSSGLAGSYNEQFF

SEQ ID NO: 320533 - protein, 11 aa, Homo sapiens
  CDR3 for alpha chain variable domain of TCR clone 160267 (TRAV13-1, TRAJ15)
CAATPGTALIF

SEQ ID NO: 320534 - protein, 17 aa, Homo sapiens
  CDR3 for beta chain variable domain of TCR clone 160267 (TRBV13, TRBJ2-3)
CASSLSRVAGGRNTQYV

SEQ ID NO: 320535 - protein, 13 aa, Homo sapiens
  CDR3 for alpha chain variable domain of TCR clone 160268 (TRAV13-1, TRAJ6)
CAASSGGSYIPTF

SEQ ID NO: 320536 - protein, 13 aa, Homo sapiens
  CDR3 for beta chain variable domain of TCR clone 160268 (TRBV7-8, TRBJ2-7)
CASSVTGGREQYF

SEQ ID NO: 320537 - protein, 15 aa, Homo sapiens
  CDR3 for alpha chain variable domain of TCR clone 160269 (TRAV2, TRAJ13)
CATPSYSGGYQKVTF

SEQ ID NO: 320538 - protein, 14 aa, Homo sapiens
  CDR3 for beta chain variable domain of TCR clone 160269 (TRBV11-2, TRBJ2-3)
CASSRLARTNTQYF

SEQ ID NO: 320539 - protein, 13 aa, Homo sapiens
  CDR3 for alpha chain variable domain of TCR clone 160270 (TRAV8-3, TRAJ44)
CALVPGTASKLTF

SEQ ID NO: 320540 - protein, 14 aa, Homo sapiens
  CDR3 for beta chain variable domain of TCR clone 160270 (TRBV11-2, TRBJ2-3)
CASSRLARTDTQYF

SEQ ID NO: 320541 - protein, 13 aa, Homo sapiens
  CDR3 for alpha chain variable domain of TCR clone 160271 (TRAV12-2, TRAJ35)
CAVSAGFGNVLHC

SEQ ID NO: 320542 - protein, 14 aa, Homo sapiens
  CDR3 for beta chain variable domain of TCR clone 160271 (TRBV28, TRBJ2-5)
CASSLRGLEETQYF

SEQ ID NO: 320543 - protein, 18 aa, Homo sapiens
  CDR3 for alpha chain variable domain of TCR clone 160272 (TRAV21, TRAJ53)
CAVKGGENSGGSNYKLTF

SEQ ID NO: 320544 - protein, 13 aa, Homo sapiens
  CDR3 for beta chain variable domain of TCR clone 160272 (TRBV12-4, TRBJ1-1)
CANSPGTGFEAFF

SEQ ID NO: 320545 - protein, 15 aa, Homo sapiens
  CDR3 for alpha chain variable domain of TCR clone 160273 (TRAV17, TRAJ57)
CATVPSQGGSEKLVS

SEQ ID NO: 320546 - protein, 16 aa, Homo sapiens
  CDR3 for beta chain variable domain of TCR clone 160273 (TRBV12-4, TRBJ1-5)
CASSRPVGGSNQPQHF

SEQ ID NO: 320547 - protein, 14 aa, Homo sapiens
  CDR3 for alpha chain variable domain of TCR clone 160274 (TRAV8-4, TRAJ12)
CAVSPMASSYKLIF

SEQ ID NO: 320548 - protein, 15 aa, Homo sapiens
  CDR3 for beta chain variable domain of TCR clone 160274 (TRBV5-5, TRBJ2-1)
CASSPEAETYNEQFF

SEQ ID NO: 320549 - protein, 12 aa, Homo sapiens
  CDR3 for alpha chain variable domain of TCR clone 160275 (TRAV17, TRAJ4)
CATDGGYNKLIF

SEQ ID NO: 320550 - protein, 15 aa, Homo sapiens
  CDR3 for beta chain variable domain of TCR clone 160275 (TRBV7-3, TRBJ2-1)
CQQLQTSGRYNEQFF

SEQ ID NO: 320551 - protein, 23 aa, Homo sapiens
  CDR3 for alpha chain variable domain of TCR clone 160276 (TRAV13-1, TRAJ32)
CAARAVVLQTSSSLELALCLLSS

SEQ ID NO: 320552 - protein, 14 aa, Homo sapiens
  CDR3 for beta chain variable domain of TCR clone 160276 (TRBV7-3, TRBJ1-1)
CASSLGTGYTEAFF

SEQ ID NO: 320553 - protein, 13 aa, Homo sapiens
  CDR3 for alpha chain variable domain of TCR clone 160277 (TRAV35, TRAJ48)
CAGHEFGNEKLTF

SEQ ID NO: 320554 - protein, 14 aa, Homo sapiens
  CDR3 for beta chain variable domain of TCR clone 160277 (TRBV19, TRBJ2-1)
CARPTFVLSGEQFF

SEQ ID NO: 320555 - protein, 23 aa, Homo sapiens
  CDR3 for alpha chain variable domain of TCR clone 160278 (TRAV8-4, TRAJ38)
CARLNAGNNHIQNPDPAVYQLRD

SEQ ID NO: 320556 - protein, 12 aa, Homo sapiens
  CDR3 for beta chain variable domain of TCR clone 160278 (TRBV7-8, TRBJ2-7)
CASSEPLYEQYF

SEQ ID NO: 320557 - protein, 14 aa, Homo sapiens
  CDR3 for alpha chain variable domain of TCR clone 160279 (TRAV26-1, TRAJ45)
CIEVTGGGADGLTF

SEQ ID NO: 320558 - protein, 15 aa, Homo sapiens
  CDR3 for beta chain variable domain of TCR clone 160279 (TRBV11-2, TRBJ2-1)
CASCTGTSGYNEQFF

SEQ ID NO: 320559 - protein, 13 aa, Homo sapiens
  CDR3 for alpha chain variable domain of TCR clone 160280 (TRAV12-2, TRAJ50)
CAVIVTSYDKVIF

SEQ ID NO: 320560 - protein, 15 aa, Homo sapiens
  CDR3 for beta chain variable domain of TCR clone 160280 (TRBV2, TRBJ2-7)
CASSEGLARSYEQYF

SEQ ID NO: 320561 - protein, 15 aa, Homo sapiens
  CDR3 for alpha chain variable domain of TCR clone 160281 (TRAV38-2/DV8, TRAJ31)
CAYRTETRNNARLMF

SEQ ID NO: 320562 - protein, 11 aa, Homo sapiens
  CDR3 for beta chain variable domain of TCR clone 160281 (TRBV11-2, TRBJ2-2)
CASSLPGELFF

SEQ ID NO: 320563 - protein, 16 aa, Homo sapiens
  CDR3 for alpha chain variable domain of TCR clone 160282 (TRAV30, TRAJ24)
CGTEIVDADSWGKCQF

SEQ ID NO: 320564 - protein, 18 aa, Homo sapiens
  CDR3 for beta chain variable domain of TCR clone 160282 (TRBV7-9, TRBJ2-7)
CASSPTTSGSRTWYEQYF

SEQ ID NO: 320565 - protein, 13 aa, Homo sapiens
  CDR3 for alpha chain variable domain of TCR clone 160283 (TRAV3, TRAJ15)
CAVRDQAGTALIF

SEQ ID NO: 320566 - protein, 14 aa, Homo sapiens
  CDR3 for beta chain variable domain of TCR clone 160283 (TRBV7-9, TRBJ2-1)
CASSPRDSLYEQFF

SEQ ID NO: 320567 - protein, 15 aa, Homo sapiens
  CDR3 for alpha chain variable domain of TCR clone 160284 (TRAV12-3, TRAJ11)
CSMSEENSGYSTLTF

SEQ ID NO: 320568 - protein, 14 aa, Homo sapiens
  CDR3 for beta chain variable domain of TCR clone 160284 (TRBV18, TRBJ2-5)
CASSPGVSQETQYF

SEQ ID NO: 320569 - protein, 14 aa, Homo sapiens
  CDR3 for alpha chain variable domain of TCR clone 160285 (TRAV17, TRAJ22)
CSTSPSGSARQLTF

SEQ ID NO: 320570 - protein, 13 aa, Homo sapiens
  CDR3 for beta chain variable domain of TCR clone 160285 (TRBV12-4, TRBJ1-2)
CASSLRQGKGYTF

SEQ ID NO: 320571 - protein, 15 aa, Homo sapiens
  CDR3 for alpha chain variable domain of TCR clone 160286 (TRAV17, TRAJ57)
CATGPYQGGSEKLVF

SEQ ID NO: 320572 - protein, 14 aa, Homo sapiens
  CDR3 for beta chain variable domain of TCR clone 160286 (TRBV12-5, TRBJ2-5)
CASGSRTHQETQYF

SEQ ID NO: 320573 - protein, 15 aa, Homo sapiens
  CDR3 for alpha chain variable domain of TCR clone 160287 (TRAV17, TRAJ57)
CATGPSRVGSEKLVF

SEQ ID NO: 320574 - protein, 16 aa, Homo sapiens
  CDR3 for beta chain variable domain of TCR clone 160287 (TRBV12-4, TRBJ1-5)
CASSRPVGGSNQPQHF

SEQ ID NO: 320575 - protein, 14 aa, Homo sapiens
  CDR3 for alpha chain variable domain of TCR clone 160288 (TRAV1-2, TRAJ16)
CAVNRFSDGQKLLF

SEQ ID NO: 320576 - protein, 13 aa, Homo sapiens
  CDR3 for beta chain variable domain of TCR clone 160288 (TRBV4-1, TRBJ2-1)
CAISQAGGDEQFF

SEQ ID NO: 320577 - protein, 16 aa, Homo sapiens
  CDR3 for alpha chain variable domain of TCR clone 160289 (TRAV12-2, TRAJ28)
CAVITNSGAGSYQLTF

SEQ ID NO: 320578 - protein, 14 aa, Homo sapiens
  CDR3 for beta chain variable domain of TCR clone 160289 (TRBV25-1, TRBJ1-1)
CASTHLGGNTEAFF

SEQ ID NO: 320579 - protein, 14 aa, Homo sapiens
  CDR3 for alpha chain variable domain of TCR clone 160290 (TRAV29/DV5, TRAJ44)
CAAFLVGTVSKLTF

SEQ ID NO: 320580 - protein, 13 aa, Homo sapiens
  CDR3 for beta chain variable domain of TCR clone 160290 (TRBV29-1, TRBJ2-1)
CSVEGGRVNEQFF

SEQ ID NO: 320581 - protein, 14 aa, Homo sapiens
  CDR3 for alpha chain variable domain of TCR clone 160291 (TRAV1-2, TRAJ16)
CAVNRFSDGQKLLF

SEQ ID NO: 320582 - protein, 18 aa, Homo sapiens
  CDR3 for beta chain variable domain of TCR clone 160291 (TRBV11-2, TRBJ2-3)
CASSLGGASRGAPNTRYF

SEQ ID NO: 320583 - protein, 12 aa, Homo sapiens
  CDR3 for alpha chain variable domain of TCR clone 160292 (TRAV13-1, TRAJ21)
CAAKEGFNKFYF

SEQ ID NO: 320584 - protein, 13 aa, Homo sapiens
  CDR3 for beta chain variable domain of TCR clone 160292 (TRBV6-5, TRBJ1-1)
VTSGTPPVGEAFF

SEQ ID NO: 320585 - protein, 12 aa, Homo sapiens
  CDR3 for alpha chain variable domain of TCR clone 160293 (TRAV13-1, TRAJ5)
CAVDTGRRALTF

SEQ ID NO: 320586 - protein, 14 aa, Homo sapiens
  CDR3 for beta chain variable domain of TCR clone 160293 (TRBV28, TRBJ2-1)
CTSVPAVSTHEQFF

SEQ ID NO: 320587 - protein, 12 aa, Homo sapiens
  CDR3 for alpha chain variable domain of TCR clone 160294 (TRAV13-1, TRAJ21)
CAVKEGFNKFYF

SEQ ID NO: 320588 - protein, 15 aa, Homo sapiens
  CDR3 for beta chain variable domain of TCR clone 160294 (TRBV15, TRBJ1-5)
CATSRDPVSNQPQHF

SEQ ID NO: 320589 - protein, 16 aa, Homo sapiens
  CDR3 for alpha chain variable domain of TCR clone 160295 (TRAV23/DV6, TRAJ9)
CAASIGGNTGGFKPIF

SEQ ID NO: 320590 - protein, 12 aa, Homo sapiens
  CDR3 for beta chain variable domain of TCR clone 160295 (TRBV7-8, TRBJ2-7)
CASSLGDREQYF

SEQ ID NO: 320591 - protein, 16 aa, Homo sapiens
  CDR3 for alpha chain variable domain of TCR clone 160296 (TRAV30, TRAJ24)
CGTEIVDADSWGKSQF

SEQ ID NO: 320592 - protein, 13 aa, Homo sapiens
  CDR3 for beta chain variable domain of TCR clone 160296 (TRBV20-1, TRBJ1-1)
CSAPPGGHTEAFF

SEQ ID NO: 320593 - protein, 10 aa, Homo sapiens
  CDR3 for alpha chain variable domain of TCR clone 160297 (TRAV13-2, TRAJ49)
CADTGNQFFF

SEQ ID NO: 320594 - protein, 13 aa, Homo sapiens
  CDR3 for beta chain variable domain of TCR clone 160297 (TRBV10-3, TRBJ1-2)
CAISERDSYGYTF

SEQ ID NO: 320595 - protein, 14 aa, Homo sapiens
  CDR3 for alpha chain variable domain of TCR clone 160298 (TRAV29/DV5, TRAJ36)
FAARRKTGANNLFF

SEQ ID NO: 320596 - protein, 14 aa, Homo sapiens
  CDR3 for beta chain variable domain of TCR clone 160298 (TRBV12-5, TRBJ2-5)
CASGSRTHQETQYF

SEQ ID NO: 320597 - protein, 13 aa, Homo sapiens
  CDR3 for alpha chain variable domain of TCR clone 160299 (TRAV3, TRAJ16)
CAVRDRNGQQLPF

SEQ ID NO: 320598 - protein, 15 aa, Homo sapiens
  CDR3 for beta chain variable domain of TCR clone 160299 (TRBV5-1, TRBJ2-1)
CASSPPRAPYNKQFF

SEQ ID NO: 320599 - protein, 21 aa, Homo sapiens
  CDR3 for alpha chain variable domain of TCR clone 160300 (TRAV35, TRAJ52)
CWAGYADGPNAGGTSYGKRTF

SEQ ID NO: 320600 - protein, 12 aa, Homo sapiens
  CDR3 for beta chain variable domain of TCR clone 160300 (TRBV5-1, TRBJ2-7)
CASSFRGYEQYF

SEQ ID NO: 320601 - protein, 14 aa, Homo sapiens
  CDR3 for alpha chain variable domain of TCR clone 160301 (TRAV1-2, TRAJ8)
CAVREDTGFQKLVF

SEQ ID NO: 320602 - protein, 14 aa, Homo sapiens
  CDR3 for beta chain variable domain of TCR clone 160301 (TRBV4-1, TRBJ2-7)
CASGPVAGGDEQYF

SEQ ID NO: 320603 - protein, 14 aa, Homo sapiens
  CDR3 for alpha chain variable domain of TCR clone 160302 (TRAV17, TRAJ57)
CATDPQGGSEKLVF

SEQ ID NO: 320604 - protein, 12 aa, Homo sapiens
  CDR3 for beta chain variable domain of TCR clone 160302 (TRBV7-9, TRBJ2-7)
CASSLEGYEQYF

SEQ ID NO: 320605 - protein, 13 aa, Homo sapiens
  CDR3 for alpha chain variable domain of TCR clone 160303 (TRAV12-1, TRAJ16)
CVVNGPDGQKLLF

SEQ ID NO: 320606 - protein, 12 aa, Homo sapiens
  CDR3 for beta chain variable domain of TCR clone 160303 (TRBV2, TRBJ1-1)
CQEADRGFHAFF

SEQ ID NO: 320607 - protein, 14 aa, Homo sapiens
  CDR3 for alpha chain variable domain of TCR clone 160304 (TRAV12-3, TRAJ58)
CAMSTETSGYRLTF

SEQ ID NO: 320608 - protein, 12 aa, Homo sapiens
  CDR3 for beta chain variable domain of TCR clone 160304 (TRBV7-8, TRBJ2-7)
CASSLGDREQYF

SEQ ID NO: 320609 - protein, 12 aa, Homo sapiens
  CDR3 for alpha chain variable domain of TCR clone 160305 (TRAV21, TRAJ13)
PGPSGGYQNVTF

SEQ ID NO: 320610 - protein, 13 aa, Homo sapiens
  CDR3 for beta chain variable domain of TCR clone 160305 (TRBV7-9, TRBJ1-2)
CASSLKQNYGYTF

SEQ ID NO: 320611 - protein, 12 aa, Homo sapiens
  CDR3 for alpha chain variable domain of TCR clone 160306 (TRAV12-2, TRAJ42)
CAVGGSQGYLIF

SEQ ID NO: 320612 - protein, 16 aa, Homo sapiens
  CDR3 for beta chain variable domain of TCR clone 160306 (TRBV7-3, TRBJ2-2)
CASSLKRGTLSGELFF

SEQ ID NO: 320613 - protein, 12 aa, Homo sapiens
  CDR3 for alpha chain variable domain of TCR clone 160307 (TRAV12-2, TRAJ21)
CAVRYNFNKFYF

SEQ ID NO: 320614 - protein, 14 aa, Homo sapiens
  CDR3 for beta chain variable domain of TCR clone 160307 (TRBV28, TRBJ2-1)
CASSYYTAYNEQFC

SEQ ID NO: 320615 - protein, 14 aa, Homo sapiens
  CDR3 for alpha chain variable domain of TCR clone 160308 (TRAV17, TRAJ6)
CATNPAGGSYIPTF

SEQ ID NO: 320616 - protein, 15 aa, Homo sapiens
  CDR3 for beta chain variable domain of TCR clone 160308 (TRBV2, TRBJ2-5)
CACSGTVAAGETQYF

SEQ ID NO: 320617 - protein, 12 aa, Homo sapiens
  CDR3 for alpha chain variable domain of TCR clone 160309 (TRAV2, TRAJ10)
CASTGGGIKLTF

SEQ ID NO: 320618 - protein, 14 aa, Homo sapiens
  CDR3 for beta chain variable domain of TCR clone 160309 (TRBV19, TRBJ2-5)
CASSMTGQQETQYF

SEQ ID NO: 320619 - protein, 15 aa, Homo sapiens
  CDR3 for alpha chain variable domain of TCR clone 160310 (TRAV8-4, TRAJ12)
CAVSDRVDSSYKLIF

SEQ ID NO: 320620 - protein, 13 aa, Homo sapiens
  CDR3 for beta chain variable domain of TCR clone 160310 (TRBV7-7, TRBJ2-3)
CASSLSRADTQYF

SEQ ID NO: 320621 - protein, 15 aa, Homo sapiens
  CDR3 for alpha chain variable domain of TCR clone 160311 (TRAV14/DV4, TRAJ33)
CAMREGRDSTYQLIW

SEQ ID NO: 320622 - protein, 15 aa, Homo sapiens
  CDR3 for beta chain variable domain of TCR clone 160311 (TRBV5-5, TRBJ1-5)
CASSSTPGSNQPQHF

SEQ ID NO: 320623 - protein, 15 aa, Homo sapiens
  CDR3 for alpha chain variable domain of TCR clone 160312 (TRAV27, TRAJ38)
CAARRNAGNNRKLIW

SEQ ID NO: 320624 - protein, 17 aa, Homo sapiens
  CDR3 for beta chain variable domain of TCR clone 160312 (TRBV13, TRBJ2-3)
CASILSRVAGGRNTQYF

SEQ ID NO: 320625 - protein, 13 aa, Homo sapiens
  CDR3 for alpha chain variable domain of TCR clone 160313 (TRAV8-2, TRAJ49)
CVVTPNTGNQFYF

SEQ ID NO: 320626 - protein, 15 aa, Homo sapiens
  CDR3 for beta chain variable domain of TCR clone 160313 (TRBV7-3, TRBJ2-1)
CAISLSSGSFDEQFF

SEQ ID NO: 320627 - protein, 12 aa, Homo sapiens
  CDR3 for alpha chain variable domain of TCR clone 160314 (TRAV13-1, TRAJ21)
CAAFFNFNKFYF

SEQ ID NO: 320628 - protein, 14 aa, Homo sapiens
  CDR3 for beta chain variable domain of TCR clone 160314 (TRBV7-3, TRBJ2-2)
CASSSGGYTGELFF

SEQ ID NO: 320629 - protein, 16 aa, Homo sapiens
  CDR3 for alpha chain variable domain of TCR clone 160315 (TRAV26-1, TRAJ45)
CIVEKYSGGGADGVTF

SEQ ID NO: 320630 - protein, 13 aa, Homo sapiens
  CDR3 for beta chain variable domain of TCR clone 160315 (TRBV25-1, TRBJ2-5)
CASSESGRETQYF

SEQ ID NO: 320631 - protein, 14 aa, Homo sapiens
  CDR3 for alpha chain variable domain of TCR clone 160316 (TRAV8-3, TRAJ36)
CAVGPITGAKNLFF

SEQ ID NO: 320632 - protein, 15 aa, Homo sapiens
  CDR3 for beta chain variable domain of TCR clone 160316 (TRBV4-1, TRBJ2-1)
CASSQDPGNYNEQFF

SEQ ID NO: 320633 - protein, 14 aa, Homo sapiens
  CDR3 for alpha chain variable domain of TCR clone 160317 (TRAV35, TRAJ53)
CAGNSGGSNYKLTF

SEQ ID NO: 320634 - protein, 14 aa, Homo sapiens
  CDR3 for beta chain variable domain of TCR clone 160317 (TRBV4-1, TRBJ1-1)
CASSRSGQSFEAFF

SEQ ID NO: 320635 - protein, 12 aa, Homo sapiens
  CDR3 for alpha chain variable domain of TCR clone 160318 (TRAV13-2, TRAJ23)
CAERHRGGKLIF

SEQ ID NO: 320636 - protein, 12 aa, Homo sapiens
  CDR3 for beta chain variable domain of TCR clone 160318 (TRBV7-9, TRBJ2-7)
CASRTGFDEQYF

SEQ ID NO: 320637 - protein, 16 aa, Homo sapiens
  CDR3 for alpha chain variable domain of TCR clone 160319 (TRAV3, TRAJ18)
CAARDGRGSTLGRRYF

SEQ ID NO: 320638 - protein, 15 aa, Homo sapiens
  CDR3 for beta chain variable domain of TCR clone 160319 (TRBV7-9, TRBJ1-6)
CASSSPGRGNSPLHF

SEQ ID NO: 320639 - protein, 13 aa, Homo sapiens
  CDR3 for alpha chain variable domain of TCR clone 160320 (TRAV1-2, TRAJ9)
CAVLNTGGFKTIF

SEQ ID NO: 320640 - protein, 17 aa, Homo sapiens
  CDR3 for beta chain variable domain of TCR clone 160320 (TRBV20-1, TRBJ1-5)
CSASLSPGQGGNQPQHF

SEQ ID NO: 320641 - protein, 15 aa, Homo sapiens
  CDR3 for alpha chain variable domain of TCR clone 160321 (TRAV12-2, TRAJ43)
CAFDMRFGAGTRLTV

SEQ ID NO: 320642 - protein, 15 aa, Homo sapiens
  CDR3 for beta chain variable domain of TCR clone 160321 (TRBV29-1, TRBJ2-7)
CSVEFFDRGSYEQYF

SEQ ID NO: 320643 - protein, 13 aa, Homo sapiens
  CDR3 for alpha chain variable domain of TCR clone 160322 (TRAV26-1, TRAJ33)
CIVRVDSNYQLMG

SEQ ID NO: 320644 - protein, 15 aa, Homo sapiens
  CDR3 for beta chain variable domain of TCR clone 160322 (TRBV7-2, TRBJ1-5)
CASSFSAGINQPQHF

SEQ ID NO: 320645 - protein, 16 aa, Homo sapiens
  CDR3 for alpha chain variable domain of TCR clone 160323 (TRAV4, TRAJ22)
CHVGDLYSGSARQLTF

SEQ ID NO: 320646 - protein, 17 aa, Homo sapiens
  CDR3 for beta chain variable domain of TCR clone 160323 (TRBV11-2, TRBJ2-1)
CASSLYPPGVEYNEQFF

SEQ ID NO: 320647 - protein, 15 aa, Homo sapiens
  CDR3 for alpha chain variable domain of TCR clone 160324 (TRAV12-3, TRAJ13)
CAMSARSGGYQKVTF

SEQ ID NO: 320648 - protein, 15 aa, Homo sapiens
  CDR3 for beta chain variable domain of TCR clone 160324 (TRBV5-1, TRBJ2-7)
CASSLNGGPAREQYF

SEQ ID NO: 320649 - protein, 14 aa, Homo sapiens
  CDR3 for alpha chain variable domain of TCR clone 160325 (TRAV29/DV5, TRAJ22)
CAASATGSAMQLTF

SEQ ID NO: 320650 - protein, 14 aa, Homo sapiens
  CDR3 for beta chain variable domain of TCR clone 160325 (TRBV19, TRBJ2-1)
CASSPGLAPNEQFF

SEQ ID NO: 320651 - protein, 11 aa, Homo sapiens
  CDR3 for alpha chain variable domain of TCR clone 160326 (TRAV25, TRAJ49)
CAGGTGNQLYF

SEQ ID NO: 320652 - protein, 12 aa, Homo sapiens
  CDR3 for beta chain variable domain of TCR clone 160326 (TRBV6-5, TRBJ2-1)
CASRNDRGQQFF

SEQ ID NO: 320653 - protein, 15 aa, Homo sapiens
  CDR3 for alpha chain variable domain of TCR clone 160327 (TRAV12-3, TRAJ6)
CAMSATTGGSYIPTF

SEQ ID NO: 320654 - protein, 16 aa, Homo sapiens
  CDR3 for beta chain variable domain of TCR clone 160327 (TRBV20-1, TRBJ1-2)
CSASMGQGVANYGDTV

SEQ ID NO: 320655 - protein, 13 aa, Homo sapiens
  CDR3 for alpha chain variable domain of TCR clone 160328 (TRAV21, TRAJ27)
RAARPGNAGKSTF

SEQ ID NO: 320656 - protein, 14 aa, Homo sapiens
  CDR3 for beta chain variable domain of TCR clone 160328 (TRBV7-6, TRBJ2-3)
CTSSLGTVTDTQYF

SEQ ID NO: 320657 - protein, 14 aa, Homo sapiens
  CDR3 for alpha chain variable domain of TCR clone 160329 (TRAV2, TRAJ9)
CAVEDRSGGFKTIF

SEQ ID NO: 320658 - protein, 15 aa, Homo sapiens
  CDR3 for beta chain variable domain of TCR clone 160329 (TRBV7-2, TRBJ2-1)
CASSAGLAGGNEQFF

SEQ ID NO: 320659 - protein, 16 aa, Homo sapiens
  CDR3 for alpha chain variable domain of TCR clone 160330 (TRAV30, TRAJ24)
CGTEIVDADSWGKFQF

SEQ ID NO: 320660 - protein, 15 aa, Homo sapiens
  CDR3 for beta chain variable domain of TCR clone 160330 (TRBV20-1, TRBJ2-7)
CSARDRVSGMDEEYF

SEQ ID NO: 320661 - protein, 15 aa, Homo sapiens
  CDR3 for alpha chain variable domain of TCR clone 160331 (TRAV21, TRAJ22)
CAVRLFFWLCKATDL

SEQ ID NO: 320662 - protein, 14 aa, Homo sapiens
  CDR3 for beta chain variable domain of TCR clone 160331 (TRBV19, TRBJ1-5)
CASRAPDSFLAQHF

SEQ ID NO: 320663 - protein, 14 aa, Homo sapiens
  CDR3 for alpha chain variable domain of TCR clone 160332 (TRAV26-1, TRAJ38)
CIADNAGNNRKQNW

SEQ ID NO: 320664 - protein, 13 aa, Homo sapiens
  CDR3 for beta chain variable domain of TCR clone 160332 (TRBV20-1, TRBJ1-1)
CSARGGGNTEAFF

SEQ ID NO: 320665 - protein, 13 aa, Homo sapiens
  CDR3 for alpha chain variable domain of TCR clone 160333 (TRAV1-2, TRAJ11)
CAVRREGYSTLTF

SEQ ID NO: 320666 - protein, 14 aa, Homo sapiens
  CDR3 for beta chain variable domain of TCR clone 160333 (TRBV25-1, TRBJ1-1)
CASTHLWGNTEAFF

SEQ ID NO: 320667 - protein, 15 aa, Homo sapiens
  CDR3 for alpha chain variable domain of TCR clone 160334 (TRAV3, TRAJ22)
CAVRDRGGSARQLTF

SEQ ID NO: 320668 - protein, 20 aa, Homo sapiens
  CDR3 for beta chain variable domain of TCR clone 160334 (TRBV27, TRBJ2-4)
CASRYRDRAPSTKTFSTSAP

SEQ ID NO: 320669 - protein, 14 aa, Homo sapiens
  CDR3 for alpha chain variable domain of TCR clone 160335 (TRAV12-1, TRAJ17)
CLVNPKAAGNKPTF

SEQ ID NO: 320670 - protein, 15 aa, Homo sapiens
  CDR3 for beta chain variable domain of TCR clone 160335 (TRBV7-2, TRBJ2-3)
CASSLAGAFIDTQYF

SEQ ID NO: 320671 - protein, 12 aa, Homo sapiens
  CDR3 for alpha chain variable domain of TCR clone 160336 (TRAV3, TRAJ31)
CAVRDGNARLMF

SEQ ID NO: 320672 - protein, 13 aa, Homo sapiens
  CDR3 for beta chain variable domain of TCR clone 160336 (TRBV7-3, TRBJ2-3)
CASSSWSTDTQYF

SEQ ID NO: 320673 - protein, 14 aa, Homo sapiens
  CDR3 for alpha chain variable domain of TCR clone 160337 (TRAV21, TRAJ17)
CAVRSKAAGNKLTF

SEQ ID NO: 320674 - protein, 16 aa, Homo sapiens
  CDR3 for beta chain variable domain of TCR clone 160337 (TRBV7-3, TRBJ2-2)
CASSLKRGTLSGELFF

SEQ ID NO: 320675 - protein, 15 aa, Homo sapiens
  CDR3 for alpha chain variable domain of TCR clone 160338 (TRAV4, TRAJ36)
CLVGDRQTVANNLFF

SEQ ID NO: 320676 - protein, 15 aa, Homo sapiens
  CDR3 for beta chain variable domain of TCR clone 160338 (TRBV7-6, TRBJ2-1)
CASSSLAGEGNEQFF

SEQ ID NO: 320677 - protein, 14 aa, Homo sapiens
  CDR3 for alpha chain variable domain of TCR clone 160339 (TRAV1-2, TRAJ36)
CAVRDQTGANNLFL

SEQ ID NO: 320678 - protein, 14 aa, Homo sapiens
  CDR3 for beta chain variable domain of TCR clone 160339 (TRBV25-1, TRBJ1-1)
CASTHLGGNTEAFF

SEQ ID NO: 320679 - protein, 15 aa, Homo sapiens
  CDR3 for alpha chain variable domain of TCR clone 160340 (TRAV13-2, TRAJ45)
CAESDSGGGADGLTF

SEQ ID NO: 320680 - protein, 14 aa, Homo sapiens
  CDR3 for beta chain variable domain of TCR clone 160340 (TRBV20-1, TRBJ2-1)
CSAQIGGSANEQFF

SEQ ID NO: 320681 - protein, 15 aa, Homo sapiens
  CDR3 for alpha chain variable domain of TCR clone 160341 (TRAV21, TRAJ52)
CAVGAGGTSYGKLTF

SEQ ID NO: 320682 - protein, 13 aa, Homo sapiens
  CDR3 for beta chain variable domain of TCR clone 160341 (TRBV7-3, TRBJ1-1)
CAISQDWGAEAFF

SEQ ID NO: 320683 - protein, 15 aa, Homo sapiens
  CDR3 for alpha chain variable domain of TCR clone 160342 (TRAV3, TRAJ22)
CAVRDRGGSARQLTF

SEQ ID NO: 320684 - protein, 15 aa, Homo sapiens
  CDR3 for beta chain variable domain of TCR clone 160342 (TRBV11-2, TRBJ2-1)
CASSLGTSGLNEQFF

SEQ ID NO: 320685 - protein, 15 aa, Homo sapiens
  CDR3 for alpha chain variable domain of TCR clone 160343 (TRAV26-1, TRAJ15)
CIVRDANQAGTALIF

SEQ ID NO: 320686 - protein, 13 aa, Homo sapiens
  CDR3 for beta chain variable domain of TCR clone 160343 (TRBV10-3, TRBJ2-7)
CAISEAGPYEQHF

SEQ ID NO: 320687 - protein, 16 aa, Homo sapiens
  CDR3 for alpha chain variable domain of TCR clone 160344 (TRAV26-1, TRAJ32)
CIVRTNYGGATNKRIF

SEQ ID NO: 320688 - protein, 14 aa, Homo sapiens
  CDR3 for beta chain variable domain of TCR clone 160344 (TRBV27, TRBJ1-1)
CASSLLSGLSEAFS

SEQ ID NO: 320689 - protein, 12 aa, Homo sapiens
  CDR3 for alpha chain variable domain of TCR clone 160345 (TRAV35, TRAJ49)
CAGWNTGNQFYF

SEQ ID NO: 320690 - protein, 16 aa, Homo sapiens
  CDR3 for beta chain variable domain of TCR clone 160345 (TRBV5-1, TRBJ2-2)
CASSLWDTTNTGELFL

SEQ ID NO: 320691 - protein, 17 aa, Homo sapiens
  CDR3 for alpha chain variable domain of TCR clone 160346 (TRAV3, TRAJ42)
CAVRDRDYGVSQGNLIF

SEQ ID NO: 320692 - protein, 15 aa, Homo sapiens
  CDR3 for beta chain variable domain of TCR clone 160346 (TRBV6-3, TRBJ2-7)
CASSSPGTVFYEQYF

SEQ ID NO: 320693 - protein, 14 aa, Homo sapiens
  CDR3 for alpha chain variable domain of TCR clone 160347 (TRAV17, TRAJ57)
CATGPQGGSEKLGF

SEQ ID NO: 320694 - protein, 18 aa, Homo sapiens
  CDR3 for beta chain variable domain of TCR clone 160347 (TRBV20-1, TRBJ2-3)
CGASGLAGGPGTTDTQYF

SEQ ID NO: 320695 - protein, 14 aa, Homo sapiens
  CDR3 for alpha chain variable domain of TCR clone 160348 (TRAV1-2, TRAJ8)
CAVREDTGFQKLVF

SEQ ID NO: 320696 - protein, 14 aa, Homo sapiens
  CDR3 for beta chain variable domain of TCR clone 160348 (TRBV19, TRBJ2-1)
CASPTYVLCGEQFF

SEQ ID NO: 320697 - protein, 14 aa, Homo sapiens
  CDR3 for alpha chain variable domain of TCR clone 160349 (TRAV20, TRAJ42)
CAVQAGGSQGNLIF

SEQ ID NO: 320698 - protein, 14 aa, Homo sapiens
  CDR3 for beta chain variable domain of TCR clone 160349 (TRBV28, TRBJ1-2)
CASRIEGAKYGYTF

SEQ ID NO: 320699 - protein, 14 aa, Homo sapiens
  CDR3 for alpha chain variable domain of TCR clone 160350 (TRAV4, TRAJ17)
CLVGDMAAGNKLTF

SEQ ID NO: 320700 - protein, 14 aa, Homo sapiens
  CDR3 for beta chain variable domain of TCR clone 160350 (TRBV7-2, TRBJ1-2)
CACSRGGTNYGYTF

SEQ ID NO: 320701 - protein, 13 aa, Homo sapiens
  CDR3 for alpha chain variable domain of TCR clone 160351 (TRAV12-2, TRAJ15)
CAVFNQAGTALIF

SEQ ID NO: 320702 - protein, 14 aa, Homo sapiens
  CDR3 for beta chain variable domain of TCR clone 160351 (TRBV7-9, TRBJ2-1)
CASSPRDSLYEQFF

SEQ ID NO: 320703 - protein, 15 aa, Homo sapiens
  CDR3 for alpha chain variable domain of TCR clone 160352 (TRAV26-2, TRAJ57)
CTLRDIRGGSEKLVF

SEQ ID NO: 320704 - protein, 15 aa, Homo sapiens
  CDR3 for beta chain variable domain of TCR clone 160352 (TRBV2, TRBJ2-1)
CASDIGLAGEGEQFF

SEQ ID NO: 320705 - protein, 13 aa, Homo sapiens
  CDR3 for alpha chain variable domain of TCR clone 160353 (TRAV8-3, TRAJ36)
CAVGAIGANNLFF

SEQ ID NO: 320706 - protein, 17 aa, Homo sapiens
  CDR3 for beta chain variable domain of TCR clone 160353 (TRBV4-2, TRBJ1-1)
CASTQFGGGSGNTEAFF

SEQ ID NO: 320707 - protein, 12 aa, Homo sapiens
  CDR3 for alpha chain variable domain of TCR clone 160354 (TRAV8-4, TRAJ43)
CAVSVNNNDMRF

SEQ ID NO: 320708 - protein, 14 aa, Homo sapiens
  CDR3 for beta chain variable domain of TCR clone 160354 (TRBV11-2, TRBJ1-2)
CASSLGTANYGYTY

SEQ ID NO: 320709 - protein, 15 aa, Homo sapiens
  CDR3 for alpha chain variable domain of TCR clone 160355 (TRAV35, TRAJ58)
CAGRRQEASGSRLTF

SEQ ID NO: 320710 - protein, 13 aa, Homo sapiens
  CDR3 for beta chain variable domain of TCR clone 160355 (TRBV12-4, TRBJ2-7)
CASSLSGVYEQYF

SEQ ID NO: 320711 - protein, 13 aa, Homo sapiens
  CDR3 for alpha chain variable domain of TCR clone 160356 (TRAV25, TRAJ26)
CAGMDNYGQNFVF

SEQ ID NO: 320712 - protein, 15 aa, Homo sapiens
  CDR3 for beta chain variable domain of TCR clone 160356 (TRBV10-3, TRBJ2-1)
CAIRNGNSGHNEQFF

SEQ ID NO: 320713 - protein, 16 aa, Homo sapiens
  CDR3 for alpha chain variable domain of TCR clone 160357 (TRAV13-2, TRAJ53)
CAENVNSGGSNYKLTF

SEQ ID NO: 320714 - protein, 14 aa, Homo sapiens
  CDR3 for beta chain variable domain of TCR clone 160357 (TRBV27, TRBJ1-1)
CASSLLNGKGQGVF

SEQ ID NO: 320715 - protein, 14 aa, Homo sapiens
  CDR3 for alpha chain variable domain of TCR clone 160358 (TRAV23/DV6, TRAJ39)
CAASIGNAGNILTF

SEQ ID NO: 320716 - protein, 14 aa, Homo sapiens
  CDR3 for beta chain variable domain of TCR clone 160358 (TRBV7-3, TRBJ1-1)
CASSLKGGNTEAFF

SEQ ID NO: 320717 - protein, 15 aa, Homo sapiens
  CDR3 for alpha chain variable domain of TCR clone 160359 (TRAV8-3, TRAJ40)
CAAPSLGSGTYKYIF

SEQ ID NO: 320718 - protein, 15 aa, Homo sapiens
  CDR3 for beta chain variable domain of TCR clone 160359 (TRBV11-2, TRBJ2-2)
CASSETGQGTGELFF

SEQ ID NO: 320719 - protein, 15 aa, Homo sapiens
  CDR3 for alpha chain variable domain of TCR clone 160360 (TRAV26-1, TRAJ29)
CIVRVEGSGNTTIVF

SEQ ID NO: 320720 - protein, 14 aa, Homo sapiens
  CDR3 for beta chain variable domain of TCR clone 160360 (TRBV18, TRBJ2-5)
CASSPGVSQETQYF

SEQ ID NO: 320721 - protein, 14 aa, Homo sapiens
  CDR3 for alpha chain variable domain of TCR clone 160361 (TRAV2, TRAJ9)
CAVEDRSGGFKTIF

SEQ ID NO: 320722 - protein, 14 aa, Homo sapiens
  CDR3 for beta chain variable domain of TCR clone 160361 (TRBV12-4, TRBJ2-4)
CASSSSGNISTSAP

SEQ ID NO: 320723 - protein, 12 aa, Homo sapiens
  CDR3 for alpha chain variable domain of TCR clone 160362 (TRAV12-3, TRAJ17)
CAMTLTGNKLTF

SEQ ID NO: 320724 - protein, 14 aa, Homo sapiens
  CDR3 for beta chain variable domain of TCR clone 160362 (TRBV20-1, TRBJ2-2)
CSAPDTANTGELFF

SEQ ID NO: 320725 - protein, 14 aa, Homo sapiens
  CDR3 for alpha chain variable domain of TCR clone 160363 (TRAV2, TRAJ23)
CAVGLRNQGGKLIF

SEQ ID NO: 320726 - protein, 15 aa, Homo sapiens
  CDR3 for beta chain variable domain of TCR clone 160363 (TRBV20-1, TRBJ1-1)
CSASRGVTGNTEAFF

SEQ ID NO: 320727 - protein, 11 aa, Homo sapiens
  CDR3 for alpha chain variable domain of TCR clone 160364 (TRAV2, TRAJ13)
CASGGYQKVTF

SEQ ID NO: 320728 - protein, 16 aa, Homo sapiens
  CDR3 for beta chain variable domain of TCR clone 160364 (TRBV6-1, TRBJ2-5)
CASSDTLDRGAEAQYF

SEQ ID NO: 320729 - protein, 13 aa, Homo sapiens
  CDR3 for alpha chain variable domain of TCR clone 160365 (TRAV12-3, TRAJ13)
CAMSSGGYQKVTF

SEQ ID NO: 320730 - protein, 12 aa, Homo sapiens
  CDR3 for beta chain variable domain of TCR clone 160365 (TRBV7-8, TRBJ2-1)
CASSLGHNEQFF

SEQ ID NO: 320731 - protein, 13 aa, Homo sapiens
  CDR3 for alpha chain variable domain of TCR clone 160366 (TRAV12-3, TRAJ7)
CAMSASGNNRLAF

SEQ ID NO: 320732 - protein, 14 aa, Homo sapiens
  CDR3 for beta chain variable domain of TCR clone 160366 (TRBV13, TRBJ2-5)
CASSLDPRGETQYF

SEQ ID NO: 320733 - protein, 13 aa, Homo sapiens
  CDR3 for alpha chain variable domain of TCR clone 160367 (TRAV35, TRAJ37)
CAGSTGNTGKLIF

SEQ ID NO: 320734 - protein, 16 aa, Homo sapiens
  CDR3 for beta chain variable domain of TCR clone 160367 (TRBV10-3, TRBJ2-1)
CAISLTSGNSYNEQFF

SEQ ID NO: 320735 - protein, 12 aa, Homo sapiens
  CDR3 for alpha chain variable domain of TCR clone 160368 (TRAV12-2, TRAJ21)
CAVNSNFNKFYF

SEQ ID NO: 320736 - protein, 14 aa, Homo sapiens
  CDR3 for beta chain variable domain of TCR clone 160368 (TRBV12-4, TRBJ2-3)
CASSLSGATDKQYF

SEQ ID NO: 320737 - protein, 14 aa, Homo sapiens
  CDR3 for alpha chain variable domain of TCR clone 160369 (TRAV1-2, TRAJ8)
CAVREDTGFQNLVF

SEQ ID NO: 320738 - protein, 13 aa, Homo sapiens
  CDR3 for beta chain variable domain of TCR clone 160369 (TRBV3-1, TRBJ2-2)
CASLARGSGELFF

SEQ ID NO: 320739 - protein, 12 aa, Homo sapiens
  CDR3 for alpha chain variable domain of TCR clone 160370 (TRAV29/DV5, TRAJ15)
CASNQVGTALIF

SEQ ID NO: 320740 - protein, 15 aa, Homo sapiens
  CDR3 for beta chain variable domain of TCR clone 160370 (TRBV11-2, TRBJ2-2)
CASSSDRVNAGELFF

SEQ ID NO: 320741 - protein, 10 aa, Homo sapiens
  CDR3 for alpha chain variable domain of TCR clone 160371 (TRAV1-2, TRAJ31)
CVSEDARLMF

SEQ ID NO: 320742 - protein, 16 aa, Homo sapiens
  CDR3 for beta chain variable domain of TCR clone 160371 (TRBV7-9, TRBJ2-1)
CASSDVAGGSYNEQFF

SEQ ID NO: 320743 - protein, 12 aa, Homo sapiens
  CDR3 for alpha chain variable domain of TCR clone 160372 (TRAV12-3, TRAJ17)
CPMTLTGNKLTF

SEQ ID NO: 320744 - protein, 16 aa, Homo sapiens
  CDR3 for beta chain variable domain of TCR clone 160372 (TRBV12-4, TRBJ2-5)
CASSFFVRGRQETQYF

SEQ ID NO: 320745 - protein, 14 aa, Homo sapiens
  CDR3 for alpha chain variable domain of TCR clone 160373 (TRAV13-1, TRAJ35)
CAASKGGFGNVLHC

SEQ ID NO: 320746 - protein, 15 aa, Homo sapiens
  CDR3 for beta chain variable domain of TCR clone 160373 (TRBV28, TRBJ2-1)
CASSGLAEVDKEQFF

SEQ ID NO: 320747 - protein, 12 aa, Homo sapiens
  CDR3 for alpha chain variable domain of TCR clone 160374 (TRAV12-3, TRAJ17)
CAMTLTGNKLTF

SEQ ID NO: 320748 - protein, 15 aa, Homo sapiens
  CDR3 for beta chain variable domain of TCR clone 160374 (TRBV27, TRBJ2-1)
CASSNGGGSSNEQFS

SEQ ID NO: 320749 - protein, 14 aa, Homo sapiens
  CDR3 for alpha chain variable domain of TCR clone 160375 (TRAV23/DV6, TRAJ37)
CAASTSSNTGKLIF

SEQ ID NO: 320750 - protein, 13 aa, Homo sapiens
  CDR3 for beta chain variable domain of TCR clone 160375 (TRBV19, TRBJ1-2)
CASSQGQVYGYTF

SEQ ID NO: 320751 - protein, 12 aa, Homo sapiens
  CDR3 for alpha chain variable domain of TCR clone 160376 (TRAV8-3, TRAJ20)
CAVGANDYKLSF

SEQ ID NO: 320752 - protein, 16 aa, Homo sapiens
  CDR3 for beta chain variable domain of TCR clone 160376 (TRBV7-2, TRBJ1-2)
CASSRQGGGANYGYTF

SEQ ID NO: 320753 - protein, 12 aa, Homo sapiens
  CDR3 for alpha chain variable domain of TCR clone 160377 (TRAV13-1, TRAJ21)
RAAKEGFNKFYF

SEQ ID NO: 320754 - protein, 11 aa, Homo sapiens
  CDR3 for beta chain variable domain of TCR clone 160377 (TRBV7-8, TRBJ2-7)
CASSISLEQYF

SEQ ID NO: 320755 - protein, 13 aa, Homo sapiens
  CDR3 for alpha chain variable domain of TCR clone 160378 (TRAV23/DV6, TRAJ36)
CAAGQTGANNLFF

SEQ ID NO: 320756 - protein, 16 aa, Homo sapiens
  CDR3 for beta chain variable domain of TCR clone 160378 (TRBV15, TRBJ2-1)
CATSRERLAGAYEQFF

SEQ ID NO: 320757 - protein, 14 aa, Homo sapiens
  CDR3 for alpha chain variable domain of TCR clone 160379 (TRAV2, TRAJ9)
CSVEDRSGGFKTIF

SEQ ID NO: 320758 - protein, 13 aa, Homo sapiens
  CDR3 for beta chain variable domain of TCR clone 160379 (TRBV19, TRBJ1-2)
CASSVPGQDGYTF

SEQ ID NO: 320759 - protein, 17 aa, Homo sapiens
  CDR3 for alpha chain variable domain of TCR clone 160380 (TRAV19, TRAJ28)
CALSEASSGAGSYQLTF

SEQ ID NO: 320760 - protein, 16 aa, Homo sapiens
  CDR3 for beta chain variable domain of TCR clone 160380 (TRBV12-4, TRBJ2-7)
CASRPTGTGPSYEQYF

SEQ ID NO: 320761 - protein, 16 aa, Homo sapiens
  CDR3 for alpha chain variable domain of TCR clone 160381 (TRAV30, TRAJ24)
CGTEIVGADSWGKFQF

SEQ ID NO: 320762 - protein, 15 aa, Homo sapiens
  CDR3 for beta chain variable domain of TCR clone 160381 (TRBV28, TRBJ2-1)
CASSIIAGGRSEQFF

SEQ ID NO: 320763 - protein, 15 aa, Homo sapiens
  CDR3 for alpha chain variable domain of TCR clone 160382 (TRAV17, TRAJ48)
CATDETNFGNEKLTF

SEQ ID NO: 320764 - protein, 14 aa, Homo sapiens
  CDR3 for beta chain variable domain of TCR clone 160382 (TRBV11-2, TRBJ2-3)
CASSRLARTDTQYF

SEQ ID NO: 320765 - protein, 14 aa, Homo sapiens
  CDR3 for alpha chain variable domain of TCR clone 160383 (TRAV26-1, TRAJ38)
CIADTAGNNRKLIW

SEQ ID NO: 320766 - protein, 15 aa, Homo sapiens
  CDR3 for beta chain variable domain of TCR clone 160383 (TRBV9, TRBJ2-1)
CASSLAGSSYTEQFF

SEQ ID NO: 320767 - protein, 14 aa, Homo sapiens
  CDR3 for alpha chain variable domain of TCR clone 160384 (TRAV12-2, TRAJ13)
CAVKKTGGYSKVTF

SEQ ID NO: 320768 - protein, 15 aa, Homo sapiens
  CDR3 for beta chain variable domain of TCR clone 160384 (TRBV27, TRBJ2-1)
CASSNGGGSSNEQFF

SEQ ID NO: 320769 - protein, 14 aa, Homo sapiens
  CDR3 for alpha chain variable domain of TCR clone 160385 (TRAV1-2, TRAJ8)
CAVREDTGFQKLVF

SEQ ID NO: 320770 - protein, 14 aa, Homo sapiens
  CDR3 for beta chain variable domain of TCR clone 160385 (TRBV12-5, TRBJ2-5)
CASGSRTRQETQYF

SEQ ID NO: 320771 - protein, 16 aa, Homo sapiens
  CDR3 for alpha chain variable domain of TCR clone 160386 (TRAV12-2, TRAJ40)
FAVIRGGTSGTYKYIF

SEQ ID NO: 320772 - protein, 14 aa, Homo sapiens
  CDR3 for beta chain variable domain of TCR clone 160386 (TRBV20-1, TRBJ2-5)
CSARDGRAGETQYF

SEQ ID NO: 320773 - protein, 14 aa, Homo sapiens
  CDR3 for alpha chain variable domain of TCR clone 160387 (TRAV12-3, TRAJ10)
SHLPLTGGGNKLTF

SEQ ID NO: 320774 - protein, 14 aa, Homo sapiens
  CDR3 for beta chain variable domain of TCR clone 160387 (TRBV4-2, TRBJ2-3)
CASSQERGTDTQYF

SEQ ID NO: 320775 - protein, 12 aa, Homo sapiens
  CDR3 for alpha chain variable domain of TCR clone 160388 (TRAV36/DV7, TRAJ54)
CAVVRGAQKLVF

SEQ ID NO: 320776 - protein, 14 aa, Homo sapiens
  CDR3 for beta chain variable domain of TCR clone 160388 (TRBV11-1, TRBJ1-1)
CESSLKGGNTEAFF

SEQ ID NO: 320777 - protein, 13 aa, Homo sapiens
  CDR3 for alpha chain variable domain of TCR clone 160389 (TRAV26-1, TRAJ41)
CIVRINSGDALNF

SEQ ID NO: 320778 - protein, 13 aa, Homo sapiens
  CDR3 for beta chain variable domain of TCR clone 160389 (TRBV20-1, TRBJ1-5)
CSATAAGGQPQHF

SEQ ID NO: 320779 - protein, 17 aa, Homo sapiens
  CDR3 for alpha chain variable domain of TCR clone 160390 (TRAV12-2, TRAJ22)
CAVNRIPFSGSARQLTF

SEQ ID NO: 320780 - protein, 14 aa, Homo sapiens
  CDR3 for beta chain variable domain of TCR clone 160390 (TRBV11-1, TRBJ2-7)
CASTFAVPSYEQYF

SEQ ID NO: 320781 - protein, 13 aa, Homo sapiens
  CDR3 for alpha chain variable domain of TCR clone 160391 (TRAV8-3, TRAJ37)
CAVGSGSTGKLIF

SEQ ID NO: 320782 - protein, 11 aa, Homo sapiens
  CDR3 for beta chain variable domain of TCR clone 160391 (TRBV29-1, TRBJ1-1)
CSLQQNTEAFF

SEQ ID NO: 320783 - protein, 14 aa, Homo sapiens
  CDR3 for alpha chain variable domain of TCR clone 160392 (TRAV12-3, TRAJ10)
SHLPLTGGGNKLTF

SEQ ID NO: 320784 - protein, 14 aa, Homo sapiens
  CDR3 for beta chain variable domain of TCR clone 160392 (TRBV18, TRBJ2-3)
CASSRDRGTDTQYF

SEQ ID NO: 320785 - protein, 13 aa, Homo sapiens
  CDR3 for alpha chain variable domain of TCR clone 160393 (TRAV21, TRAJ27)
CAARPGNAGKSTF

SEQ ID NO: 320786 - protein, 14 aa, Homo sapiens
  CDR3 for beta chain variable domain of TCR clone 160393 (TRBV11-2, TRBJ2-5)
CASSRTGGIETQYF

SEQ ID NO: 320787 - protein, 11 aa, Homo sapiens
  CDR3 for alpha chain variable domain of TCR clone 160394 (TRAV1-1, TRAJ23)
CAVRQGGKLIF

SEQ ID NO: 320788 - protein, 13 aa, Homo sapiens
  CDR3 for beta chain variable domain of TCR clone 160394 (TRBV7-9, TRBJ1-2)
CASSLKKNYGYTF

SEQ ID NO: 320789 - protein, 14 aa, Homo sapiens
  CDR3 for alpha chain variable domain of TCR clone 160395 (TRAV12-2, TRAJ13)
CAVKKTGGYQKVTF

SEQ ID NO: 320790 - protein, 16 aa, Homo sapiens
  CDR3 for beta chain variable domain of TCR clone 160395 (TRBV2, TRBJ2-1)
CASSERGLASHNEQFF

SEQ ID NO: 320791 - protein, 16 aa, Homo sapiens
  CDR3 for alpha chain variable domain of TCR clone 160396 (TRAV23/DV6, TRAJ9)
CAASIGGNTGGFKTIF

SEQ ID NO: 320792 - protein, 15 aa, Homo sapiens
  CDR3 for beta chain variable domain of TCR clone 160396 (TRBV6-3, TRBJ2-7)
CASSSPGTVLYEQYV

SEQ ID NO: 320793 - protein, 12 aa, Homo sapiens
  CDR3 for alpha chain variable domain of TCR clone 160397 (TRAV2, TRAJ32)
CAVGGATNKLLF

SEQ ID NO: 320794 - protein, 15 aa, Homo sapiens
  CDR3 for beta chain variable domain of TCR clone 160397 (TRBV7-2, TRBJ2-1)
CASSSRTSREDEQFF

SEQ ID NO: 320795 - protein, 11 aa, Homo sapiens
  CDR3 for alpha chain variable domain of TCR clone 160398 (TRAV36/DV7, TRAJ36)
CAVIARRQTTS

SEQ ID NO: 320796 - protein, 12 aa, Homo sapiens
  CDR3 for beta chain variable domain of TCR clone 160398 (TRBV7-8, TRBJ2-4)
CASSLGGNIQYF

SEQ ID NO: 320797 - protein, 15 aa, Homo sapiens
  CDR3 for alpha chain variable domain of TCR clone 160399 (TRAV2, TRAJ15)
CAVEDREQAGTALIF

SEQ ID NO: 320798 - protein, 16 aa, Homo sapiens
  CDR3 for beta chain variable domain of TCR clone 160399 (TRBV7-3, TRBJ2-2)
CASSLKRGTLSGELFF

SEQ ID NO: 320799 - protein, 11 aa, Homo sapiens
  CDR3 for alpha chain variable domain of TCR clone 160400 (TRAV12-2, TRAJ31)
CAILNNARLMF

SEQ ID NO: 320800 - protein, 13 aa, Homo sapiens
  CDR3 for beta chain variable domain of TCR clone 160400 (TRBV20-1, TRBJ1-1)
CSARLGQGNEAFF

SEQ ID NO: 320801 - protein, 13 aa, Homo sapiens
  CDR3 for alpha chain variable domain of TCR clone 160401 (TRAV20, TRAJ37)
CAGCSSNTGKLIF

SEQ ID NO: 320802 - protein, 21 aa, Homo sapiens
  CDR3 for beta chain variable domain of TCR clone 160401 (TRBV4-2, TRBJ2-3)
PCSQKTRPCIAVPAAPDTQYF

SEQ ID NO: 320803 - protein, 12 aa, Homo sapiens
  CDR3 for alpha chain variable domain of TCR clone 160402 (TRAV12-3, TRAJ20)
CAMVRGDYKLSF

SEQ ID NO: 320804 - protein, 14 aa, Homo sapiens
  CDR3 for beta chain variable domain of TCR clone 160402 (TRBV6-1, TRBJ1-1)
CASSGTGLNTEAFF

SEQ ID NO: 320805 - protein, 13 aa, Homo sapiens
  CDR3 for alpha chain variable domain of TCR clone 160403 (TRAV12-1, TRAJ40)
CVVPTSGTYKYIF

SEQ ID NO: 320806 - protein, 16 aa, Homo sapiens
  CDR3 for beta chain variable domain of TCR clone 160403 (TRBV7-9, TRBJ1-2)
CASSLGFSSVEDGYTF

SEQ ID NO: 320807 - protein, 13 aa, Homo sapiens
  CDR3 for alpha chain variable domain of TCR clone 160404 (TRAV3, TRAJ30)
CAVRDRGDDKIIF

SEQ ID NO: 320808 - protein, 14 aa, Homo sapiens
  CDR3 for beta chain variable domain of TCR clone 160404 (TRBV7-9, TRBJ2-1)
CASSPRDSLYEQFF

SEQ ID NO: 320809 - protein, 14 aa, Homo sapiens
  CDR3 for alpha chain variable domain of TCR clone 160405 (TRAV13-1, TRAJ44)
CAAKATVTASNLTF

SEQ ID NO: 320810 - protein, 14 aa, Homo sapiens
  CDR3 for beta chain variable domain of TCR clone 160405 (TRBV19, TRBJ2-2)
CASSTLHRSGELFF

SEQ ID NO: 320811 - protein, 12 aa, Homo sapiens
  CDR3 for alpha chain variable domain of TCR clone 160406 (TRAV12-2, TRAJ10)
WGVTGGGNKLTF

SEQ ID NO: 320812 - protein, 16 aa, Homo sapiens
  CDR3 for beta chain variable domain of TCR clone 160406 (TRBV4-2, TRBJ2-7)
CASSHDGVERGYEQYF

SEQ ID NO: 320813 - protein, 12 aa, Homo sapiens
  CDR3 for alpha chain variable domain of TCR clone 160407 (TRAV2, TRAJ32)
CAVGGATNKLIF

SEQ ID NO: 320814 - protein, 15 aa, Homo sapiens
  CDR3 for beta chain variable domain of TCR clone 160407 (TRBV7-2, TRBJ2-1)
CASSSMTSREDEQFF

SEQ ID NO: 320815 - protein, 14 aa, Homo sapiens
  CDR3 for alpha chain variable domain of TCR clone 160408 (TRAV38-1, TRAJ40)
CALRPTSGTYKYIF

SEQ ID NO: 320816 - protein, 16 aa, Homo sapiens
  CDR3 for beta chain variable domain of TCR clone 160408 (TRBV5-1, TRBJ2-2)
CASSSYREGDTGELFF

SEQ ID NO: 320817 - protein, 13 aa, Homo sapiens
  CDR3 for alpha chain variable domain of TCR clone 160409 (TRAV21, TRAJ57)
CAVTQGGSEKLVF

SEQ ID NO: 320818 - protein, 14 aa, Homo sapiens
  CDR3 for beta chain variable domain of TCR clone 160409 (TRBV5-1, TRBJ2-1)
CASSALGAGNEQFF

SEQ ID NO: 320819 - protein, 14 aa, Homo sapiens
  CDR3 for alpha chain variable domain of TCR clone 160410 (TRAV35, TRAJ33)
CAGSFKDRNYQLIW

SEQ ID NO: 320820 - protein, 15 aa, Homo sapiens
  CDR3 for beta chain variable domain of TCR clone 160410 (TRBV20-1, TRBJ2-7)
CSAESGTSGAYEQYF

SEQ ID NO: 320821 - protein, 11 aa, Homo sapiens
  CDR3 for alpha chain variable domain of TCR clone 160411 (TRAV13-1, TRAJ43)
CAAHNNNDMRF

SEQ ID NO: 320822 - protein, 15 aa, Homo sapiens
  CDR3 for beta chain variable domain of TCR clone 160411 (TRBV6-1, TRBJ2-2)
CVSSRLRGDSGELFF

SEQ ID NO: 320823 - protein, 12 aa, Homo sapiens
  CDR3 for alpha chain variable domain of TCR clone 160412 (TRAV12-1, TRAJ23)
CVVNIPGGKLIF

SEQ ID NO: 320824 - protein, 14 aa, Homo sapiens
  CDR3 for beta chain variable domain of TCR clone 160412 (TRBV7-2, TRBJ2-7)
CQQLVSSGSYEQYF

SEQ ID NO: 320825 - protein, 14 aa, Homo sapiens
  CDR3 for alpha chain variable domain of TCR clone 160413 (TRAV2, TRAJ37)
CAVDFTSNTGKLIF

SEQ ID NO: 320826 - protein, 14 aa, Homo sapiens
  CDR3 for beta chain variable domain of TCR clone 160413 (TRBV7-9, TRBJ1-2)
CASSRQGANYGYTF

SEQ ID NO: 320827 - protein, 11 aa, Homo sapiens
  CDR3 for alpha chain variable domain of TCR clone 160414 (TRAV13-2, TRAJ20)
CADSNDYKPSF

SEQ ID NO: 320828 - protein, 14 aa, Homo sapiens
  CDR3 for beta chain variable domain of TCR clone 160414 (TRBV11-2, TRBJ1-5)
CASSLDRGGQPQHF

SEQ ID NO: 320829 - protein, 16 aa, Homo sapiens
  CDR3 for alpha chain variable domain of TCR clone 160415 (TRAV12-3, TRAJ45)
CAMGRGSGGGADGLTF

SEQ ID NO: 320830 - protein, 15 aa, Homo sapiens
  CDR3 for beta chain variable domain of TCR clone 160415 (TRBV3-1, TRBJ1-2)
CASSHPGTPGYGYTF

SEQ ID NO: 320831 - protein, 14 aa, Homo sapiens
  CDR3 for alpha chain variable domain of TCR clone 160416 (TRAV13-1, TRAJ5)
CAASMPTGRRALTF

SEQ ID NO: 320832 - protein, 15 aa, Homo sapiens
  CDR3 for beta chain variable domain of TCR clone 160416 (TRBV19, TRBJ1-1)
CASTSGQIQNTEAFF

SEQ ID NO: 320833 - protein, 12 aa, Homo sapiens
  CDR3 for alpha chain variable domain of TCR clone 160417 (TRAV4, TRAJ26)
CLVGDYGQNFVF

SEQ ID NO: 320834 - protein, 15 aa, Homo sapiens
  CDR3 for beta chain variable domain of TCR clone 160417 (TRBV27, TRBJ1-5)
CASSLGTGFDQPQHF

SEQ ID NO: 320835 - protein, 16 aa, Homo sapiens
  CDR3 for alpha chain variable domain of TCR clone 160418 (TRAV3, TRAJ37)
CAVRPHGSGNTGKLIF

SEQ ID NO: 320836 - protein, 16 aa, Homo sapiens
  CDR3 for beta chain variable domain of TCR clone 160418 (TRBV9, TRBJ1-2)
CASSVEERVSPYGDTF

SEQ ID NO: 320837 - protein, 11 aa, Homo sapiens
  CDR3 for alpha chain variable domain of TCR clone 160419 (TRAV2, TRAJ13)
CASGGYQKVTF

SEQ ID NO: 320838 - protein, 19 aa, Homo sapiens
  CDR3 for beta chain variable domain of TCR clone 160419 (TRBV4-1, TRBJ2-5)
CASSQEGSGTSKRGETQYF

SEQ ID NO: 320839 - protein, 17 aa, Homo sapiens
  CDR3 for alpha chain variable domain of TCR clone 160420 (TRAV3, TRAJ12)
CAVRDGGRMDSSYKLIF

SEQ ID NO: 320840 - protein, 13 aa, Homo sapiens
  CDR3 for beta chain variable domain of TCR clone 160420 (TRBV11-3, TRBJ1-1)
CASSSSGGTEAFF

SEQ ID NO: 320841 - protein, 12 aa, Homo sapiens
  CDR3 for alpha chain variable domain of TCR clone 160421 (TRAV12-1, TRAJ9)
CVVNPASFKTIF

SEQ ID NO: 320842 - protein, 16 aa, Homo sapiens
  CDR3 for beta chain variable domain of TCR clone 160421 (TRBV4-2, TRBJ1-4)
CASSQARGPTNEKLFF

SEQ ID NO: 320843 - protein, 15 aa, Homo sapiens
  CDR3 for alpha chain variable domain of TCR clone 160422 (TRAV12-1, TRAJ8)
CVVNVENTGFQKLVL

SEQ ID NO: 320844 - protein, 16 aa, Homo sapiens
  CDR3 for beta chain variable domain of TCR clone 160422 (TRBV7-2, TRBJ2-7)
CASSLEAGGPWYEQYF

SEQ ID NO: 320845 - protein, 21 aa, Homo sapiens
  CDR3 for alpha chain variable domain of TCR clone 160423 (TRAV12-1, TRAJ37)
SSVIQPPTSPWISGNTGKLIF

SEQ ID NO: 320846 - protein, 14 aa, Homo sapiens
  CDR3 for beta chain variable domain of TCR clone 160423 (TRBV11-2, TRBJ2-1)
CASSLGGSFNEQFF

SEQ ID NO: 320847 - protein, 14 aa, Homo sapiens
  CDR3 for alpha chain variable domain of TCR clone 160424 (TRAV38-1, TRAJ29)
CAFITPSGHTPHVF

SEQ ID NO: 320848 - protein, 14 aa, Homo sapiens
  CDR3 for beta chain variable domain of TCR clone 160424 (TRBV18, TRBJ2-7)
CASSPRGGAYEQYF

SEQ ID NO: 320849 - protein, 14 aa, Homo sapiens
  CDR3 for alpha chain variable domain of TCR clone 160425 (TRAV1-2, TRAJ13)
CAVKHSGGYQKVTF

SEQ ID NO: 320850 - protein, 12 aa, Homo sapiens
  CDR3 for beta chain variable domain of TCR clone 160425 (TRBV7-3, TRBJ2-5)
CASSSAGGTRYF

SEQ ID NO: 320851 - protein, 12 aa, Homo sapiens
  CDR3 for alpha chain variable domain of TCR clone 160426 (TRAV16, TRAJ10)
CSRTGGGNKLTF

SEQ ID NO: 320852 - protein, 16 aa, Homo sapiens
  CDR3 for beta chain variable domain of TCR clone 160426 (TRBV7-3, TRBJ2-2)
CASSLKRGTLSGGLFF

SEQ ID NO: 320853 - protein, 13 aa, Homo sapiens
  CDR3 for alpha chain variable domain of TCR clone 160427 (TRAV23/DV6, TRAJ22)
CAPWGGSARQLTF

SEQ ID NO: 320854 - protein, 13 aa, Homo sapiens
  CDR3 for beta chain variable domain of TCR clone 160427 (TRBV10-3, TRBJ2-7)
CASKLAVNYEQYF

SEQ ID NO: 320855 - protein, 19 aa, Homo sapiens
  CDR3 for alpha chain variable domain of TCR clone 160428 (TRAV2, TRAJ20)
ILQVREADAAVYRDCKLSF

SEQ ID NO: 320856 - protein, 15 aa, Homo sapiens
  CDR3 for beta chain variable domain of TCR clone 160428 (TRBV18, TRBJ2-1)
CASSPPSASYNEQFF

SEQ ID NO: 320857 - protein, 15 aa, Homo sapiens
  CDR3 for alpha chain variable domain of TCR clone 160429 (TRAV17, TRAJ40)
CASKYIFGTGTRLKF

SEQ ID NO: 320858 - protein, 17 aa, Homo sapiens
  CDR3 for beta chain variable domain of TCR clone 160429 (TRBV11-2, TRBJ2-4)
CASSFLALGGAGDIQYF

SEQ ID NO: 320859 - protein, 14 aa, Homo sapiens
  CDR3 for alpha chain variable domain of TCR clone 160430 (TRAV4, TRAJ23)
CLVGSYNQGGKLIF

SEQ ID NO: 320860 - protein, 16 aa, Homo sapiens
  CDR3 for beta chain variable domain of TCR clone 160430 (TRBV7-3, TRBJ2-2)
CASSLKRGTLSGELFF

SEQ ID NO: 320861 - protein, 12 aa, Homo sapiens
  CDR3 for alpha chain variable domain of TCR clone 160431 (TRAV12-3, TRAJ17)
CAMTLTGNKLTF

SEQ ID NO: 320862 - protein, 17 aa, Homo sapiens
  CDR3 for beta chain variable domain of TCR clone 160431 (TRBV15, TRBJ1-2)
CATSGREIDVVNYGYTF

SEQ ID NO: 320863 - protein, 15 aa, Homo sapiens
  CDR3 for alpha chain variable domain of TCR clone 160432 (TRAV8-3, TRAJ23)
CAVGAVYNQGGKLIF

SEQ ID NO: 320864 - protein, 14 aa, Homo sapiens
  CDR3 for beta chain variable domain of TCR clone 160432 (TRBV19, TRBJ2-1)
CASPTFVLSGEQFF

SEQ ID NO: 320865 - protein, 15 aa, Homo sapiens
  CDR3 for alpha chain variable domain of TCR clone 160433 (TRAV14/DV4, TRAJ15)
CAMREGWQAGTALIF

SEQ ID NO: 320866 - protein, 15 aa, Homo sapiens
  CDR3 for beta chain variable domain of TCR clone 160433 (TRBV7-2, TRBJ2-1)
CASSSGLAGGNEQFF

SEQ ID NO: 320867 - protein, 10 aa, Homo sapiens
  CDR3 for alpha chain variable domain of TCR clone 160434 (TRAV2, TRAJ34)
CAVVNDKLIF

SEQ ID NO: 320868 - protein, 14 aa, Homo sapiens
  CDR3 for beta chain variable domain of TCR clone 160434 (TRBV20-1, TRBJ2-3)
CGARGGTSTDTQYF

SEQ ID NO: 320869 - protein, 16 aa, Homo sapiens
  CDR3 for alpha chain variable domain of TCR clone 160435 (TRAV30, TRAJ24)
CCTEIVDADSWGKFQF

SEQ ID NO: 320870 - protein, 16 aa, Homo sapiens
  CDR3 for beta chain variable domain of TCR clone 160435 (TRBV7-9, TRBJ1-2)
CASSLGFSSGEDGYTF

SEQ ID NO: 320871 - protein, 15 aa, Homo sapiens
  CDR3 for alpha chain variable domain of TCR clone 160436 (TRAV21, TRAJ53)
CATLNSGCSNYKLTF

SEQ ID NO: 320872 - protein, 16 aa, Homo sapiens
  CDR3 for beta chain variable domain of TCR clone 160436 (TRBV11-2, TRBJ2-7)
CASSLAPTGVNYEQYF

SEQ ID NO: 320873 - protein, 12 aa, Homo sapiens
  CDR3 for alpha chain variable domain of TCR clone 160437 (TRAV13-2, TRAJ8)
CAPWLGFQKLVF

SEQ ID NO: 320874 - protein, 15 aa, Homo sapiens
  CDR3 for beta chain variable domain of TCR clone 160437 (TRBV7-8, TRBJ2-1)
CASSLADSLYNEQFF

SEQ ID NO: 320875 - protein, 12 aa, Homo sapiens
  CDR3 for alpha chain variable domain of TCR clone 160438 (TRAV12-2, TRAJ3)
CAVCSSASKIIF

SEQ ID NO: 320876 - protein, 12 aa, Homo sapiens
  CDR3 for beta chain variable domain of TCR clone 160438 (TRBV11-2, TRBJ2-1)
CASSPGNNEQFF

SEQ ID NO: 320877 - protein, 15 aa, Homo sapiens
  CDR3 for alpha chain variable domain of TCR clone 160439 (TRAV27, TRAJ53)
CRAIHSGGSNYKLTF

SEQ ID NO: 320878 - protein, 14 aa, Homo sapiens
  CDR3 for beta chain variable domain of TCR clone 160439 (TRBV7-3, TRBJ2-1)
CASSLAGGTNEQFF

SEQ ID NO: 320879 - protein, 15 aa, Homo sapiens
  CDR3 for alpha chain variable domain of TCR clone 160440 (TRAV3, TRAJ5)
CAVRDLDTGRRALTF

SEQ ID NO: 320880 - protein, 14 aa, Homo sapiens
  CDR3 for beta chain variable domain of TCR clone 160440 (TRBV7-9, TRBJ2-1)
CASSPRDSLYEQFF

SEQ ID NO: 320881 - protein, 21 aa, Homo sapiens
  CDR3 for alpha chain variable domain of TCR clone 160441 (TRAV36/DV7, TRAJ39)
TATQTGDSAIYLPNAGNMLPF

SEQ ID NO: 320882 - protein, 16 aa, Homo sapiens
  CDR3 for beta chain variable domain of TCR clone 160441 (TRBV19, TRBJ2-1)
CASSKAGPSSYNEQFF

SEQ ID NO: 320883 - protein, 12 aa, Homo sapiens
  CDR3 for alpha chain variable domain of TCR clone 160442 (TRAV12-3, TRAJ17)
CAMTLTGNKLTF

SEQ ID NO: 320884 - protein, 16 aa, Homo sapiens
  CDR3 for beta chain variable domain of TCR clone 160442 (TRBV7-3, TRBJ2-1)
GASSVEGYRSYNEQFF

SEQ ID NO: 320885 - protein, 13 aa, Homo sapiens
  CDR3 for alpha chain variable domain of TCR clone 160443 (TRAV8-6, TRAJ42)
CAVGGRKPRKSHL

SEQ ID NO: 320886 - protein, 13 aa, Homo sapiens
  CDR3 for beta chain variable domain of TCR clone 160443 (TRBV7-3, TRBJ1-1)
CASSQDWGAEAFF

SEQ ID NO: 320887 - protein, 14 aa, Homo sapiens
  CDR3 for alpha chain variable domain of TCR clone 160444 (TRAV3, TRAJ33)
CAVRDMDSNYQLIW

SEQ ID NO: 320888 - protein, 19 aa, Homo sapiens
  CDR3 for beta chain variable domain of TCR clone 160444 (TRBV7-3, TRBJ1-2)
CASSFPQSNDGELWLHLRF

SEQ ID NO: 320889 - protein, 17 aa, Homo sapiens
  CDR3 for alpha chain variable domain of TCR clone 160445 (TRAV26-1, TRAJ36)
CIVRPPWDQTGANNLFF

SEQ ID NO: 320890 - protein, 16 aa, Homo sapiens
  CDR3 for beta chain variable domain of TCR clone 160445 (TRBV19, TRBJ2-1)
CASSKAGPSSYNEQFF

SEQ ID NO: 320891 - protein, 15 aa, Homo sapiens
  CDR3 for alpha chain variable domain of TCR clone 160446 (TRAV34, TRAJ38)
CGADFTPGNNRKLIW

SEQ ID NO: 320892 - protein, 16 aa, Homo sapiens
  CDR3 for beta chain variable domain of TCR clone 160446 (TRBV7-3, TRBJ2-1)
CASSLSSGGGAKEQFF

SEQ ID NO: 320893 - protein, 15 aa, Homo sapiens
  CDR3 for alpha chain variable domain of TCR clone 160447 (TRAV3, TRAJ22)
CAVRDRGGSARQLTF

SEQ ID NO: 320894 - protein, 16 aa, Homo sapiens
  CDR3 for beta chain variable domain of TCR clone 160447 (TRBV11-2, TRBJ2-1)
CASARGSYSNNNEQFF

SEQ ID NO: 320895 - protein, 11 aa, Homo sapiens
  CDR3 for alpha chain variable domain of TCR clone 160448 (TRAV2, TRAJ13)
CASGGYQKVTF

SEQ ID NO: 320896 - protein, 16 aa, Homo sapiens
  CDR3 for beta chain variable domain of TCR clone 160448 (TRBV19, TRBJ2-1)
CASSTAGPSSYNEQFF

SEQ ID NO: 320897 - protein, 20 aa, Homo sapiens
  CDR3 for alpha chain variable domain of TCR clone 160449 (TRAV27, TRAJ41)
CAVRTQIPDIQNPDPSVYQL

SEQ ID NO: 320898 - protein, 13 aa, Homo sapiens
  CDR3 for beta chain variable domain of TCR clone 160449 (TRBV20-1, TRBJ1-1)
CSARGGGNTEAFF

SEQ ID NO: 320899 - protein, 12 aa, Homo sapiens
  CDR3 for alpha chain variable domain of TCR clone 160450 (TRAV3, TRAJ7)
CTPFMGTTDSLL

SEQ ID NO: 320900 - protein, 15 aa, Homo sapiens
  CDR3 for beta chain variable domain of TCR clone 160450 (TRBV12-4, TRBJ2-1)
CASSLGTSAVNEQFF

SEQ ID NO: 320901 - protein, 11 aa, Homo sapiens
  CDR3 for alpha chain variable domain of TCR clone 160451 (TRAV13-1, TRAJ20)
CAASNDYKLSF

SEQ ID NO: 320902 - protein, 11 aa, Homo sapiens
  CDR3 for beta chain variable domain of TCR clone 160451 (TRBV19, TRBJ2-5)
CASSIKETQYF

SEQ ID NO: 320903 - protein, 14 aa, Homo sapiens
  CDR3 for alpha chain variable domain of TCR clone 160452 (TRAV12-2, TRAJ40)
CAVRIPPGTYKYIF

SEQ ID NO: 320904 - protein, 14 aa, Homo sapiens
  CDR3 for beta chain variable domain of TCR clone 160452 (TRBV20-1, TRBJ1-1)
CSAQTRIGGTEAFF

SEQ ID NO: 320905 - protein, 14 aa, Homo sapiens
  CDR3 for alpha chain variable domain of TCR clone 160453 (TRAV17, TRAJ24)
CATVSTDSWGKLQF

SEQ ID NO: 320906 - protein, 14 aa, Homo sapiens
  CDR3 for beta chain variable domain of TCR clone 160453 (TRBV4-2, TRBJ2-3)
CASSQERGTDTQYF

SEQ ID NO: 320907 - protein, 16 aa, Homo sapiens
  CDR3 for alpha chain variable domain of TCR clone 160454 (TRAV4, TRAJ22)
CLVGDLYSGSARQLTF

SEQ ID NO: 320908 - protein, 15 aa, Homo sapiens
  CDR3 for beta chain variable domain of TCR clone 160454 (TRBV9, TRBJ1-6)
CASSVAGTGDSPLHF

SEQ ID NO: 320909 - protein, 10 aa, Homo sapiens
  CDR3 for alpha chain variable domain of TCR clone 160455 (TRAV26-1, TRAJ28)
CIVRVAHAYS

SEQ ID NO: 320910 - protein, 17 aa, Homo sapiens
  CDR3 for beta chain variable domain of TCR clone 160455 (TRBV9, TRBJ2-2)
CASSVGGQGTDTGELFF

SEQ ID NO: 320911 - protein, 13 aa, Homo sapiens
  CDR3 for alpha chain variable domain of TCR clone 160456 (TRAV23/DV6, TRAJ12)
CAPRLDSSYKLIF

SEQ ID NO: 320912 - protein, 12 aa, Homo sapiens
  CDR3 for beta chain variable domain of TCR clone 160456 (TRBV7-8, TRBJ2-7)
CASSLGDREQYF

SEQ ID NO: 320913 - protein, 18 aa, Homo sapiens
  CDR3 for alpha chain variable domain of TCR clone 160457 (TRAV13-1, TRAJ52)
CAAKNPNAGGTSYGKLTF

SEQ ID NO: 320914 - protein, 14 aa, Homo sapiens
  CDR3 for beta chain variable domain of TCR clone 160457 (TRBV2, TRBJ2-1)
CASRTGSSYNEQFF

SEQ ID NO: 320915 - protein, 14 aa, Homo sapiens
  CDR3 for alpha chain variable domain of TCR clone 160458 (TRAV36/DV7, TRAJ32)
CAVGHVGATKKIIF

SEQ ID NO: 320916 - protein, 16 aa, Homo sapiens
  CDR3 for beta chain variable domain of TCR clone 160458 (TRBV12-4, TRBJ1-4)
CASSLKGIGHGEKLFF

SEQ ID NO: 320917 - protein, 11 aa, Homo sapiens
  CDR3 for alpha chain variable domain of TCR clone 160459 (TRAV2, TRAJ21)
CAVFNFNKFYF

SEQ ID NO: 320918 - protein, 12 aa, Homo sapiens
  CDR3 for beta chain variable domain of TCR clone 160459 (TRBV5-5, TRBJ2-5)
CASSYFGETQYF

SEQ ID NO: 320919 - protein, 15 aa, Homo sapiens
  CDR3 for alpha chain variable domain of TCR clone 160460 (TRAV17, TRAJ13)
CATDAGSGGYQKVTF

SEQ ID NO: 320920 - protein, 15 aa, Homo sapiens
  CDR3 for beta chain variable domain of TCR clone 160460 (TRBV7-9, TRBJ1-6)
CASSSPGRGNSPLHF

SEQ ID NO: 320921 - protein, 15 aa, Homo sapiens
  CDR3 for alpha chain variable domain of TCR clone 160461 (TRAV8-3, TRAJ27)
CAVGPSKTNAGKSTF

SEQ ID NO: 320922 - protein, 14 aa, Homo sapiens
  CDR3 for beta chain variable domain of TCR clone 160461 (TRBV11-2, TRBJ2-3)
CASSRLDRTDTQYC

SEQ ID NO: 320923 - protein, 15 aa, Homo sapiens
  CDR3 for alpha chain variable domain of TCR clone 160462 (TRAV21, TRAJ24)
CAARSSTDSWGKLQF

SEQ ID NO: 320924 - protein, 10 aa, Homo sapiens
  CDR3 for beta chain variable domain of TCR clone 160462 (TRBV11-2, TRBJ2-2)
CQQLTRELFF

SEQ ID NO: 320925 - protein, 14 aa, Homo sapiens
  CDR3 for alpha chain variable domain of TCR clone 160463 (TRAV12-2, TRAJ45)
CAVNIGGGADGLTF

SEQ ID NO: 320926 - protein, 13 aa, Homo sapiens
  CDR3 for beta chain variable domain of TCR clone 160463 (TRBV19, TRBJ2-2)
CASSIWSIGELFF

SEQ ID NO: 320927 - protein, 12 aa, Homo sapiens
  CDR3 for alpha chain variable domain of TCR clone 160464 (TRAV12-3, TRAJ17)
CAMTLTGNKLTF

SEQ ID NO: 320928 - protein, 17 aa, Homo sapiens
  CDR3 for beta chain variable domain of TCR clone 160464 (TRBV28, TRBJ1-1)
CASSLSGTGYENTEAFF

SEQ ID NO: 320929 - protein, 16 aa, Homo sapiens
  CDR3 for alpha chain variable domain of TCR clone 160465 (TRAV14/DV4, TRAJ53)
CAMREGVGGSNYKLTF

SEQ ID NO: 320930 - protein, 17 aa, Homo sapiens
  CDR3 for beta chain variable domain of TCR clone 160465 (TRBV13, TRBJ2-3)
CASSLSRVAGGRNTQYF

SEQ ID NO: 320931 - protein, 13 aa, Homo sapiens
  CDR3 for alpha chain variable domain of TCR clone 160466 (TRAV29/DV5, TRAJ33)
CAASVESNYQLIW

SEQ ID NO: 320932 - protein, 14 aa, Homo sapiens
  CDR3 for beta chain variable domain of TCR clone 160466 (TRBV11-2, TRBJ2-5)
CASSRTWGIETQYF

SEQ ID NO: 320933 - protein, 14 aa, Homo sapiens
  CDR3 for alpha chain variable domain of TCR clone 160467 (TRAV13-1, TRAJ35)
CAASKGGFGNVLHC

SEQ ID NO: 320934 - protein, 15 aa, Homo sapiens
  CDR3 for beta chain variable domain of TCR clone 160467 (TRBV19, TRBJ1-1)
CASTSGQIQNTEAFF

SEQ ID NO: 320935 - protein, 15 aa, Homo sapiens
  CDR3 for alpha chain variable domain of TCR clone 160468 (TRAV21, TRAJ52)
CAVRGGGTSYGKLTF

SEQ ID NO: 320936 - protein, 15 aa, Homo sapiens
  CDR3 for beta chain variable domain of TCR clone 160468 (TRBV6-5, TRBJ2-5)
CTSVTAPSPQETQYF

SEQ ID NO: 320937 - protein, 16 aa, Homo sapiens
  CDR3 for alpha chain variable domain of TCR clone 160469 (TRAV21, TRAJ52)
CAVSDAGGTSYGKLTF

SEQ ID NO: 320938 - protein, 16 aa, Homo sapiens
  CDR3 for beta chain variable domain of TCR clone 160469 (TRBV11-2, TRBJ1-1)
CASSLRQGGEHSKAFF

SEQ ID NO: 320939 - protein, 13 aa, Homo sapiens
  CDR3 for alpha chain variable domain of TCR clone 160470 (TRAV13-1, TRAJ21)
CAASIYNFNKFYF

SEQ ID NO: 320940 - protein, 16 aa, Homo sapiens
  CDR3 for beta chain variable domain of TCR clone 160470 (TRBV7-9, TRBJ2-1)
CASSLDPGLAIDEQFF

SEQ ID NO: 320941 - protein, 14 aa, Homo sapiens
  CDR3 for alpha chain variable domain of TCR clone 160471 (TRAV8-3, TRAJ9)
CAVGERTGGFKTIF

SEQ ID NO: 320942 - protein, 12 aa, Homo sapiens
  CDR3 for beta chain variable domain of TCR clone 160471 (TRBV5-1, TRBJ2-7)
CASSFRGYEQYL

SEQ ID NO: 320943 - protein, 14 aa, Homo sapiens
  CDR3 for alpha chain variable domain of TCR clone 160472 (TRAV2, TRAJ9)
CAVEDRSGGFKTIF

SEQ ID NO: 320944 - protein, 15 aa, Homo sapiens
  CDR3 for beta chain variable domain of TCR clone 160472 (TRBV18, TRBJ1-5)
CASSPSDRSNQTQHF

SEQ ID NO: 320945 - protein, 13 aa, Homo sapiens
  CDR3 for alpha chain variable domain of TCR clone 160473 (TRAV16, TRAJ48)
CALTPVGNEKLTF

SEQ ID NO: 320946 - protein, 20 aa, Homo sapiens
  CDR3 for beta chain variable domain of TCR clone 160473 (TRBV19, TRBJ2-1)
CASSISRTVTSTRLNNEQFF

SEQ ID NO: 320947 - protein, 14 aa, Homo sapiens
  CDR3 for alpha chain variable domain of TCR clone 160474 (TRAV1-2, TRAJ8)
CAVREDTGFQTLVF

SEQ ID NO: 320948 - protein, 17 aa, Homo sapiens
  CDR3 for beta chain variable domain of TCR clone 160474 (TRBV7-3, TRBJ2-3)
CASSLMKRMRGADTQYF

SEQ ID NO: 320949 - protein, 12 aa, Homo sapiens
  CDR3 for alpha chain variable domain of TCR clone 160475 (TRAV12-1, TRAJ31)
CVSWNNNPRLMF

SEQ ID NO: 320950 - protein, 15 aa, Homo sapiens
  CDR3 for beta chain variable domain of TCR clone 160475 (TRBV7-2, TRBJ1-5)
CASSLDRGQDQPQHF

SEQ ID NO: 320951 - protein, 17 aa, Homo sapiens
  CDR3 for alpha chain variable domain of TCR clone 160476 (TRAV36/DV7, TRAJ52)
CAVAQRAGGTSYGKLTF

SEQ ID NO: 320952 - protein, 18 aa, Homo sapiens
  CDR3 for beta chain variable domain of TCR clone 160476 (TRBV4-1, TRBJ1-5)
CASSQDPRGQGLNQPQHF

SEQ ID NO: 320953 - protein, 10 aa, Homo sapiens
  CDR3 for alpha chain variable domain of TCR clone 160477 (TRAV12-2, TRAJ41)
CAVTGYALNF

SEQ ID NO: 320954 - protein, 16 aa, Homo sapiens
  CDR3 for beta chain variable domain of TCR clone 160477 (TRBV12-5, TRBJ2-5)
CASGPRTSGNQETQYF

SEQ ID NO: 320955 - protein, 15 aa, Homo sapiens
  CDR3 for alpha chain variable domain of TCR clone 160478 (TRAV29/DV5, TRAJ44)
CAASAGTGPASKLTL

SEQ ID NO: 320956 - protein, 12 aa, Homo sapiens
  CDR3 for beta chain variable domain of TCR clone 160478 (TRBV11-2, TRBJ2-2)
CASSLGGGELFF

SEQ ID NO: 320957 - protein, 14 aa, Homo sapiens
  CDR3 for alpha chain variable domain of TCR clone 160479 (TRAV9-2, TRAJ39)
CALYIYNAGNMLTF

SEQ ID NO: 320958 - protein, 16 aa, Homo sapiens
  CDR3 for beta chain variable domain of TCR clone 160479 (TRBV6-1, TRBJ2-1)
CASSARLAGSYNEQFF

SEQ ID NO: 320959 - protein, 18 aa, Homo sapiens
  CDR3 for alpha chain variable domain of TCR clone 160480 (TRAV29/DV5, TRAJ52)
CAAGFRGAGGTSYGKLTF

SEQ ID NO: 320960 - protein, 17 aa, Homo sapiens
  CDR3 for beta chain variable domain of TCR clone 160480 (TRBV7-3, TRBJ2-1)
CQQLNVGSREGHGEQFF

SEQ ID NO: 320961 - protein, 12 aa, Homo sapiens
  CDR3 for alpha chain variable domain of TCR clone 160481 (TRAV8-3, TRAJ26)
CAGDNYGQNFVF

SEQ ID NO: 320962 - protein, 15 aa, Homo sapiens
  CDR3 for beta chain variable domain of TCR clone 160481 (TRBV20-1, TRBJ1-1)
RSARSAATSNTEAFF

SEQ ID NO: 320963 - protein, 12 aa, Homo sapiens
  CDR3 for alpha chain variable domain of TCR clone 160482 (TRAV17, TRAJ12)
CATLRSSYKLIF

SEQ ID NO: 320964 - protein, 13 aa, Homo sapiens
  CDR3 for beta chain variable domain of TCR clone 160482 (TRBV19, TRBJ2-1)
CQGSRSFQWEQFF

SEQ ID NO: 320965 - protein, 14 aa, Homo sapiens
  CDR3 for alpha chain variable domain of TCR clone 160483 (TRAV8-2, TRAJ4)
CVVSPSGGYNKLIF

SEQ ID NO: 320966 - protein, 15 aa, Homo sapiens
  CDR3 for beta chain variable domain of TCR clone 160483 (TRBV4-1, TRBJ1-4)
CASSYTGGTNEKLFF

SEQ ID NO: 320967 - protein, 14 aa, Homo sapiens
  CDR3 for alpha chain variable domain of TCR clone 160484 (TRAV12-1, TRAJ42)
CVVIYGGSQGNLIF

SEQ ID NO: 320968 - protein, 17 aa, Homo sapiens
  CDR3 for beta chain variable domain of TCR clone 160484 (TRBV3-1, TRBJ2-6)
CAISPNTGPAGANVLTF

SEQ ID NO: 320969 - protein, 13 aa, Homo sapiens
  CDR3 for alpha chain variable domain of TCR clone 160485 (TRAV8-1, TRAJ28)
CAVSGSGSYQLTF

SEQ ID NO: 320970 - protein, 14 aa, Homo sapiens
  CDR3 for beta chain variable domain of TCR clone 160485 (TRBV7-2, TRBJ2-2)
CASRGQGAAGELFF

SEQ ID NO: 320971 - protein, 13 aa, Homo sapiens
  CDR3 for alpha chain variable domain of TCR clone 160486 (TRAV13-2, TRAJ48)
CAEMDFGNEKLTF

SEQ ID NO: 320972 - protein, 15 aa, Homo sapiens
  CDR3 for beta chain variable domain of TCR clone 160486 (TRBV7-9, TRBJ1-6)
CASSSPGRGNAPLHL

SEQ ID NO: 320973 - protein, 16 aa, Homo sapiens
  CDR3 for alpha chain variable domain of TCR clone 160487 (TRAV12-2, TRAJ32)
CAVNLGQGGATNKLIF

SEQ ID NO: 320974 - protein, 13 aa, Homo sapiens
  CDR3 for beta chain variable domain of TCR clone 160487 (TRBV9, TRBJ2-2)
CASSPRPAGELFF

SEQ ID NO: 320975 - protein, 13 aa, Homo sapiens
  CDR3 for alpha chain variable domain of TCR clone 160488 (TRAV8-4, TRAJ9)
CAVSETGGFKNIF

SEQ ID NO: 320976 - protein, 14 aa, Homo sapiens
  CDR3 for beta chain variable domain of TCR clone 160488 (TRBV18, TRBJ2-3)
CASSGLADTDKQYF

SEQ ID NO: 320977 - protein, 14 aa, Homo sapiens
  CDR3 for alpha chain variable domain of TCR clone 160489 (TRAV12-3, TRAJ13)
CAVKKTGGYQKVTF

SEQ ID NO: 320978 - protein, 15 aa, Homo sapiens
  CDR3 for beta chain variable domain of TCR clone 160489 (TRBV12-4, TRBJ2-5)
CASSPPTVLQETQYF

SEQ ID NO: 320979 - protein, 14 aa, Homo sapiens
  CDR3 for alpha chain variable domain of TCR clone 160490 (TRAV17, TRAJ12)
CATDEKDSSYKLIF

SEQ ID NO: 320980 - protein, 16 aa, Homo sapiens
  CDR3 for beta chain variable domain of TCR clone 160490 (TRBV11-2, TRBJ2-1)
CASSPRLAGVYNESSS

SEQ ID NO: 320981 - protein, 13 aa, Homo sapiens
  CDR3 for alpha chain variable domain of TCR clone 160491 (TRAV27, TRAJ41)
CAGEGNSGYALNF

SEQ ID NO: 320982 - protein, 12 aa, Homo sapiens
  CDR3 for beta chain variable domain of TCR clone 160491 (TRBV7-9, TRBJ2-3)
CASSFITDTQYF

SEQ ID NO: 320983 - protein, 14 aa, Homo sapiens
  CDR3 for alpha chain variable domain of TCR clone 160492 (TRAV27, TRAJ40)
CAGSLLRGTYKYIF

SEQ ID NO: 320984 - protein, 15 aa, Homo sapiens
  CDR3 for beta chain variable domain of TCR clone 160492 (TRBV6-3, TRBJ1-4)
CASSSPGRENEKLFF

SEQ ID NO: 320985 - protein, 16 aa, Homo sapiens
  CDR3 for alpha chain variable domain of TCR clone 160493 (TRAV27, TRAJ48)
TAAQPGDTGLYLPLTF

SEQ ID NO: 320986 - protein, 13 aa, Homo sapiens
  CDR3 for beta chain variable domain of TCR clone 160493 (TRBV6-6, TRBJ2-1)
CASSLHQGDEQFF

SEQ ID NO: 320987 - protein, 10 aa, Homo sapiens
  CDR3 for alpha chain variable domain of TCR clone 160494 (TRAV1-2, TRAJ23)
CAAWAGKLIF

SEQ ID NO: 320988 - protein, 15 aa, Homo sapiens
  CDR3 for beta chain variable domain of TCR clone 160494 (TRBV19, TRBJ2-3)
CASRETMGSRNTQYF

SEQ ID NO: 320989 - protein, 13 aa, Homo sapiens
  CDR3 for alpha chain variable domain of TCR clone 160495 (TRAV27, TRAJ17)
CAGAATAGNKLPF

SEQ ID NO: 320990 - protein, 15 aa, Homo sapiens
  CDR3 for beta chain variable domain of TCR clone 160495 (TRBV5-1, TRBJ2-3)
CASRNQAGSTDTQDF

SEQ ID NO: 320991 - protein, 16 aa, Homo sapiens
  CDR3 for alpha chain variable domain of TCR clone 160496 (TRAV1-1, TRAJ45)
CAVRAYSGGSADGLTF

SEQ ID NO: 320992 - protein, 13 aa, Homo sapiens
  CDR3 for beta chain variable domain of TCR clone 160496 (TRBV20-1, TRBJ1-2)
CSARGTADYGYTS

SEQ ID NO: 320993 - protein, 21 aa, Homo sapiens
  CDR3 for alpha chain variable domain of TCR clone 160497 (TRAV21, TRAJ27)
CAARPGIAGKSTFVDCATLTV

SEQ ID NO: 320994 - protein, 14 aa, Homo sapiens
  CDR3 for beta chain variable domain of TCR clone 160497 (TRBV7-6, TRBJ2-3)
CASSLGTVTDTQYF

SEQ ID NO: 320995 - protein, 13 aa, Homo sapiens
  CDR3 for alpha chain variable domain of TCR clone 160498 (TRAV13-1, TRAJ21)
CAASIYNFNKFYF

SEQ ID NO: 320996 - protein, 15 aa, Homo sapiens
  CDR3 for beta chain variable domain of TCR clone 160498 (TRBV7-3, TRBJ2-2)
CASSETGQGTGELFF

SEQ ID NO: 320997 - protein, 13 aa, Homo sapiens
  CDR3 for alpha chain variable domain of TCR clone 160499 (TRAV30, TRAJ20)
CGTEDRSDYKLSF

SEQ ID NO: 320998 - protein, 16 aa, Homo sapiens
  CDR3 for beta chain variable domain of TCR clone 160499 (TRBV11-2, TRBJ2-7)
CASSPTTGGVSYEQYY

SEQ ID NO: 320999 - protein, 12 aa, Homo sapiens
  CDR3 for alpha chain variable domain of TCR clone 160500 (TRAV12-3, TRAJ17)
CAMTLTGNQLTF

SEQ ID NO: 321000 - protein, 15 aa, Homo sapiens
  CDR3 for beta chain variable domain of TCR clone 160500 (TRBV11-2, TRBJ2-2)
CASSSDRVNAGELFF

SEQ ID NO: 321001 - protein, 16 aa, Homo sapiens
  CDR3 for alpha chain variable domain of TCR clone 160501 (TRAV12-2, TRAJ10)
CVVNRVLTGGGNKLTF

SEQ ID NO: 321002 - protein, 16 aa, Homo sapiens
  CDR3 for beta chain variable domain of TCR clone 160501 (TRBV12-5, TRBJ2-5)
CASGPRTSGNQETQYF

SEQ ID NO: 321003 - protein, 14 aa, Homo sapiens
  CDR3 for alpha chain variable domain of TCR clone 160502 (TRAV8-1, TRAJ5)
CAVRTDTGRRALTF

SEQ ID NO: 321004 - protein, 15 aa, Homo sapiens
  CDR3 for beta chain variable domain of TCR clone 160502 (TRBV11-3, TRBJ2-2)
CASSYFSTGTGELFF

SEQ ID NO: 321005 - protein, 11 aa, Homo sapiens
  CDR3 for alpha chain variable domain of TCR clone 160503 (TRAV20, TRAJ23)
CACNQGGKLIA

SEQ ID NO: 321006 - protein, 16 aa, Homo sapiens
  CDR3 for beta chain variable domain of TCR clone 160503 (TRBV7-8, TRBJ2-5)
CASSFGGQPAQETQYF

SEQ ID NO: 321007 - protein, 12 aa, Homo sapiens
  CDR3 for alpha chain variable domain of TCR clone 160504 (TRAV13-1, TRAJ21)
CAAKEGFNKFYF

SEQ ID NO: 321008 - protein, 13 aa, Homo sapiens
  CDR3 for beta chain variable domain of TCR clone 160504 (TRBV19, TRBJ1-2)
CASSVPGQDGDTF

SEQ ID NO: 321009 - protein, 15 aa, Homo sapiens
  CDR3 for alpha chain variable domain of TCR clone 160505 (TRAV12-1, TRAJ45)
CVVLSGGGGADGLTF

SEQ ID NO: 321010 - protein, 14 aa, Homo sapiens
  CDR3 for beta chain variable domain of TCR clone 160505 (TRBV11-2, TRBJ2-5)
CASSRAGGIETQYF

SEQ ID NO: 321011 - protein, 17 aa, Homo sapiens
  CDR3 for alpha chain variable domain of TCR clone 160506 (TRAV4, TRAJ18)
CRVGERSVGSTLGRLYF

SEQ ID NO: 321012 - protein, 16 aa, Homo sapiens
  CDR3 for beta chain variable domain of TCR clone 160506 (TRBV15, TRBJ1-4)
CATSRDSPPGREKLFF

SEQ ID NO: 321013 - protein, 11 aa, Homo sapiens
  CDR3 for alpha chain variable domain of TCR clone 160507 (TRAV13-2, TRAJ54)
RAVQGAQKLVF

SEQ ID NO: 321014 - protein, 15 aa, Homo sapiens
  CDR3 for beta chain variable domain of TCR clone 160507 (TRBV20-1, TRBJ2-7)
CSAESGTSWAYEQYF

SEQ ID NO: 321015 - protein, 13 aa, Homo sapiens
  CDR3 for alpha chain variable domain of TCR clone 160508 (TRAV39, TRAJ33)
CAANPESNYQLIW

SEQ ID NO: 321016 - protein, 13 aa, Homo sapiens
  CDR3 for beta chain variable domain of TCR clone 160508 (TRBV18, TRBJ1-1)
CASSGGRNTEAYF

SEQ ID NO: 321017 - protein, 13 aa, Homo sapiens
  CDR3 for alpha chain variable domain of TCR clone 160509 (TRAV20, TRAJ20)
CAVRDFNDYKLSF

SEQ ID NO: 321018 - protein, 14 aa, Homo sapiens
  CDR3 for beta chain variable domain of TCR clone 160509 (TRBV25-1, TRBJ1-1)
CASTHLGGNTEAFF

SEQ ID NO: 321019 - protein, 13 aa, Homo sapiens
  CDR3 for alpha chain variable domain of TCR clone 160510 (TRAV8-2, TRAJ43)
CVASDQGDNDMRF

SEQ ID NO: 321020 - protein, 12 aa, Homo sapiens
  CDR3 for beta chain variable domain of TCR clone 160510 (TRBV7-9, TRBJ2-7)
CASRTGFDEQYF

SEQ ID NO: 321021 - protein, 15 aa, Homo sapiens
  CDR3 for alpha chain variable domain of TCR clone 160511 (TRAV12-1, TRAJ44)
CVVDEYTGTASKLTF

SEQ ID NO: 321022 - protein, 13 aa, Homo sapiens
  CDR3 for beta chain variable domain of TCR clone 160511 (TRBV28, TRBJ1-2)
CAGRDRGNYGYTF

SEQ ID NO: 321023 - protein, 11 aa, Homo sapiens
  CDR3 for alpha chain variable domain of TCR clone 160512 (TRAV8-3, TRAJ15)
CAVVPGTALIF

SEQ ID NO: 321024 - protein, 18 aa, Homo sapiens
  CDR3 for beta chain variable domain of TCR clone 160512 (TRBV18, TRBJ2-3)
CASSYTSGAAGGTDTQYF

SEQ ID NO: 321025 - protein, 14 aa, Homo sapiens
  CDR3 for alpha chain variable domain of TCR clone 160513 (TRAV16, TRAJ37)
CALDISGNTGKLIF

SEQ ID NO: 321026 - protein, 15 aa, Homo sapiens
  CDR3 for beta chain variable domain of TCR clone 160513 (TRBV20-1, TRBJ1-1)
CSASRGVTGNTEAFF

SEQ ID NO: 321027 - protein, 15 aa, Homo sapiens
  CDR3 for alpha chain variable domain of TCR clone 160514 (TRAV13-1, TRAJ32)
CAASIYGGSTNKLIF

SEQ ID NO: 321028 - protein, 14 aa, Homo sapiens
  CDR3 for beta chain variable domain of TCR clone 160514 (TRBV7-9, TRBJ2-1)
CASSLASGSNEQFF

SEQ ID NO: 321029 - protein, 12 aa, Homo sapiens
  CDR3 for alpha chain variable domain of TCR clone 160515 (TRAV1-2, TRAJ33)
CAALDSNYQLIG

SEQ ID NO: 321030 - protein, 17 aa, Homo sapiens
  CDR3 for beta chain variable domain of TCR clone 160515 (TRBV25-1, TRBJ1-2)
CASSEFGSATTNYGYTF

SEQ ID NO: 321031 - protein, 15 aa, Homo sapiens
  CDR3 for alpha chain variable domain of TCR clone 160516 (TRAV2, TRAJ9)
CAVEDRGTGGFKTIF

SEQ ID NO: 321032 - protein, 17 aa, Homo sapiens
  CDR3 for beta chain variable domain of TCR clone 160516 (TRBV19, TRBJ2-6)
CASSTGQVFSGANVLTF

SEQ ID NO: 321033 - protein, 15 aa, Homo sapiens
  CDR3 for alpha chain variable domain of TCR clone 160517 (TRAV38-1, TRAJ57)
CAFMKLQGGSEKLVF

SEQ ID NO: 321034 - protein, 14 aa, Homo sapiens
  CDR3 for beta chain variable domain of TCR clone 160517 (TRBV12-4, TRBJ2-3)
CASSLGQGTDTQYF

SEQ ID NO: 321035 - protein, 14 aa, Homo sapiens
  CDR3 for alpha chain variable domain of TCR clone 160518 (TRAV8-2, TRAJ4)
CVVSPSGGDNRLIF

SEQ ID NO: 321036 - protein, 15 aa, Homo sapiens
  CDR3 for beta chain variable domain of TCR clone 160518 (TRBV2, TRBJ2-1)
CASSELAGSYNEQFF

SEQ ID NO: 321037 - protein, 13 aa, Homo sapiens
  CDR3 for alpha chain variable domain of TCR clone 160519 (TRAV12-3, TRAJ13)
CAMSSGGYQKVTF

SEQ ID NO: 321038 - protein, 13 aa, Homo sapiens
  CDR3 for beta chain variable domain of TCR clone 160519 (TRBV7-9, TRBJ1-2)
CASSLKQNYGYTF

SEQ ID NO: 321039 - protein, 12 aa, Homo sapiens
  CDR3 for alpha chain variable domain of TCR clone 160520 (TRAV27, TRAJ36)
CAGMTGANTLFF

SEQ ID NO: 321040 - protein, 14 aa, Homo sapiens
  CDR3 for beta chain variable domain of TCR clone 160520 (TRBV12-4, TRBJ2-3)
CASSLVPSTDTQYF

SEQ ID NO: 321041 - protein, 14 aa, Homo sapiens
  CDR3 for alpha chain variable domain of TCR clone 160521 (TRAV26-2, TRAJ54)
CILRDVRGAQKLLL

SEQ ID NO: 321042 - protein, 14 aa, Homo sapiens
  CDR3 for beta chain variable domain of TCR clone 160521 (TRBV7-6, TRBJ2-3)
CASSLGTVTDTQYF

SEQ ID NO: 321043 - protein, 11 aa, Homo sapiens
  CDR3 for alpha chain variable domain of TCR clone 160522 (TRAV35, TRAJ30)
CAGLRDDKIIF

SEQ ID NO: 321044 - protein, 15 aa, Homo sapiens
  CDR3 for beta chain variable domain of TCR clone 160522 (TRBV12-4, TRBJ2-5)
CASSPPTGLQETQYF

SEQ ID NO: 321045 - protein, 10 aa, Homo sapiens
  CDR3 for alpha chain variable domain of TCR clone 160523 (TRAV8-4, TRAJ43)
CAVSADDMRF

SEQ ID NO: 321046 - protein, 16 aa, Homo sapiens
  CDR3 for beta chain variable domain of TCR clone 160523 (TRBV7-2, TRBJ2-5)
CASSLVLWTKQETQYF

SEQ ID NO: 321047 - protein, 16 aa, Homo sapiens
  CDR3 for alpha chain variable domain of TCR clone 160524 (TRAV14/DV4, TRAJ54)
CAMREGRIQGAQKLVF

SEQ ID NO: 321048 - protein, 20 aa, Homo sapiens
  CDR3 for beta chain variable domain of TCR clone 160524 (TRBV4-2, TRBJ2-7)
CASSQASGGNLRAVLRAGHQ

SEQ ID NO: 321049 - protein, 15 aa, Homo sapiens
  CDR3 for alpha chain variable domain of TCR clone 160525 (TRAV8-3, TRAJ40)
CAAPSLGSGTYKYIF

SEQ ID NO: 321050 - protein, 13 aa, Homo sapiens
  CDR3 for beta chain variable domain of TCR clone 160525 (TRBV9, TRBJ2-1)
CASSPSGGSEQFF

SEQ ID NO: 321051 - protein, 11 aa, Homo sapiens
  CDR3 for alpha chain variable domain of TCR clone 160526 (TRAV12-1, TRAJ43)
CVEYDNNDMRF

SEQ ID NO: 321052 - protein, 14 aa, Homo sapiens
  CDR3 for beta chain variable domain of TCR clone 160526 (TRBV11-3, TRBJ1-1)
CASSLAPSNTEAFF

SEQ ID NO: 321053 - protein, 14 aa, Homo sapiens
  CDR3 for alpha chain variable domain of TCR clone 160527 (TRAV38-2/DV8, TRAJ29)
CAYRSRSGNTPLVF

SEQ ID NO: 321054 - protein, 17 aa, Homo sapiens
  CDR3 for beta chain variable domain of TCR clone 160527 (TRBV6-1, TRBJ1-2)
CASSGTHSQRGNYGYTL

SEQ ID NO: 321055 - protein, 13 aa, Homo sapiens
  CDR3 for alpha chain variable domain of TCR clone 160528 (TRAV20, TRAJ48)
CAVQGVGNEKLTF

SEQ ID NO: 321056 - protein, 19 aa, Homo sapiens
  CDR3 for beta chain variable domain of TCR clone 160528 (TRBV2, TRBJ2-2)
CAGSHPGLAGGGNTGELFF

SEQ ID NO: 321057 - protein, 22 aa, Homo sapiens
  CDR3 for alpha chain variable domain of TCR clone 160529 (TRAV3, TRAJ38)
CAVRDCLNAGNNHIQNPDPAVY

SEQ ID NO: 321058 - protein, 15 aa, Homo sapiens
  CDR3 for beta chain variable domain of TCR clone 160529 (TRBV4-3, TRBJ2-7)
CASSQGGRGIYEQYF

SEQ ID NO: 321059 - protein, 17 aa, Homo sapiens
  CDR3 for alpha chain variable domain of TCR clone 160530 (TRAV12-2, TRAJ36)
CAVKDNLFFGTGKRLTV

SEQ ID NO: 321060 - protein, 15 aa, Homo sapiens
  CDR3 for beta chain variable domain of TCR clone 160530 (TRBV6-5, TRBJ2-1)
CASSYDAGVGNEQFF

SEQ ID NO: 321061 - protein, 14 aa, Homo sapiens
  CDR3 for alpha chain variable domain of TCR clone 160531 (TRAV13-1, TRAJ35)
CAASKGGFGNVLHY

SEQ ID NO: 321062 - protein, 14 aa, Homo sapiens
  CDR3 for beta chain variable domain of TCR clone 160531 (TRBV7-2, TRBJ2-7)
CASSPKTSFYEQYF

SEQ ID NO: 321063 - protein, 14 aa, Homo sapiens
  CDR3 for alpha chain variable domain of TCR clone 160532 (TRAV12-2, TRAJ13)
CAVKKTVGYQKVTF

SEQ ID NO: 321064 - protein, 15 aa, Homo sapiens
  CDR3 for beta chain variable domain of TCR clone 160532 (TRBV19, TRBJ1-6)
CASSTQGAVGSPLHF

SEQ ID NO: 321065 - protein, 13 aa, Homo sapiens
  CDR3 for alpha chain variable domain of TCR clone 160533 (TRAV36/DV7, TRAJ7)
CAGTRYGNNRHAF

SEQ ID NO: 321066 - protein, 15 aa, Homo sapiens
  CDR3 for beta chain variable domain of TCR clone 160533 (TRBV11-3, TRBJ2-7)
CASSPGPASSYEQYF

SEQ ID NO: 321067 - protein, 12 aa, Homo sapiens
  CDR3 for alpha chain variable domain of TCR clone 160534 (TRAV13-1, TRAJ21)
CAAKEGFNKFYF

SEQ ID NO: 321068 - protein, 14 aa, Homo sapiens
  CDR3 for beta chain variable domain of TCR clone 160534 (TRBV5-5, TRBJ2-2)
CASSLLGDTGELFF

SEQ ID NO: 321069 - protein, 15 aa, Homo sapiens
  CDR3 for alpha chain variable domain of TCR clone 160535 (TRAV17, TRAJ56)
CATDANTGANSKLTL

SEQ ID NO: 321070 - protein, 14 aa, Homo sapiens
  CDR3 for beta chain variable domain of TCR clone 160535 (TRBV19, TRBJ1-5)
CASSLGTGGQPQHF

SEQ ID NO: 321071 - protein, 12 aa, Homo sapiens
  CDR3 for alpha chain variable domain of TCR clone 160536 (TRAV4, TRAJ6)
CLAPGGSYIPTF

SEQ ID NO: 321072 - protein, 18 aa, Homo sapiens
  CDR3 for beta chain variable domain of TCR clone 160536 (TRBV23-1, TRBJ2-3)
CISAPAVNRPASTDTQYF

SEQ ID NO: 321073 - protein, 14 aa, Homo sapiens
  CDR3 for alpha chain variable domain of TCR clone 160537 (TRAV1-2, TRAJ16)
CAVNRFSDGQKMLF

SEQ ID NO: 321074 - protein, 13 aa, Homo sapiens
  CDR3 for beta chain variable domain of TCR clone 160537 (TRBV10-3, TRBJ2-7)
CASKLAVNYEQYF

SEQ ID NO: 321075 - protein, 12 aa, Homo sapiens
  CDR3 for alpha chain variable domain of TCR clone 160538 (TRAV21, TRAJ33)
CAKMDSNYQLIW

SEQ ID NO: 321076 - protein, 14 aa, Homo sapiens
  CDR3 for beta chain variable domain of TCR clone 160538 (TRBV2, TRBJ2-7)
CASSLTSGGYEPYF

SEQ ID NO: 321077 - protein, 18 aa, Homo sapiens
  CDR3 for alpha chain variable domain of TCR clone 160539 (TRAV26-1, TRAJ23)
CIVIVGLEVWNQGGKLIF

SEQ ID NO: 321078 - protein, 16 aa, Homo sapiens
  CDR3 for beta chain variable domain of TCR clone 160539 (TRBV12-4, TRBJ2-5)
CASSFFVRGRQETQYF

SEQ ID NO: 321079 - protein, 17 aa, Homo sapiens
  CDR3 for alpha chain variable domain of TCR clone 160540 (TRAV12-2, TRAJ45)
CAVNIWGSGGGADGLTF

SEQ ID NO: 321080 - protein, 18 aa, Homo sapiens
  CDR3 for beta chain variable domain of TCR clone 160540 (TRBV20-1, TRBJ2-6)
CSAGTTPTHGSGANGLTF

SEQ ID NO: 321081 - protein, 13 aa, Homo sapiens
  CDR3 for alpha chain variable domain of TCR clone 160541 (TRAV21, TRAJ49)
CAVMQSTGNQFYF

SEQ ID NO: 321082 - protein, 13 aa, Homo sapiens
  CDR3 for beta chain variable domain of TCR clone 160541 (TRBV6-6, TRBJ1-5)
CASRAYQDQPQHF

SEQ ID NO: 321083 - protein, 10 aa, Homo sapiens
  CDR3 for alpha chain variable domain of TCR clone 160542 (TRAV1-2, TRAJ20)
CALNDYKLSF

SEQ ID NO: 321084 - protein, 16 aa, Homo sapiens
  CDR3 for beta chain variable domain of TCR clone 160542 (TRBV19, TRBJ2-1)
CASSKAGPSSYNEQFF

SEQ ID NO: 321085 - protein, 17 aa, Homo sapiens
  CDR3 for alpha chain variable domain of TCR clone 160543 (TRAV3, TRAJ12)
CAVRDGGRMDSSYKLIF

SEQ ID NO: 321086 - protein, 16 aa, Homo sapiens
  CDR3 for beta chain variable domain of TCR clone 160543 (TRBV19, TRBJ1-3)
CASSMDRALPGNTIYF

SEQ ID NO: 321087 - protein, 13 aa, Homo sapiens
  CDR3 for alpha chain variable domain of TCR clone 160544 (TRAV8-3, TRAJ48)
CCGCNFGNEKLTF

SEQ ID NO: 321088 - protein, 12 aa, Homo sapiens
  CDR3 for beta chain variable domain of TCR clone 160544 (TRBV7-2, TRBJ2-5)
CASSQYQETRYF

SEQ ID NO: 321089 - protein, 14 aa, Homo sapiens
  CDR3 for alpha chain variable domain of TCR clone 160545 (TRAV12-2, TRAJ17)
CAVLFKAAGNKLTF

SEQ ID NO: 321090 - protein, 17 aa, Homo sapiens
  CDR3 for beta chain variable domain of TCR clone 160545 (TRBV20-1, TRBJ2-2)
CSASGSGQGGLTGELSL

SEQ ID NO: 321091 - protein, 18 aa, Homo sapiens
  CDR3 for alpha chain variable domain of TCR clone 160546 (TRAV8-4, TRAJ52)
CAVTQANAGGTSYGKLTF

SEQ ID NO: 321092 - protein, 20 aa, Homo sapiens
  CDR3 for beta chain variable domain of TCR clone 160546 (TRBV19, TRBJ2-1)
CASSIPRTVTSTRLNNEQFF

SEQ ID NO: 321093 - protein, 14 aa, Homo sapiens
  CDR3 for alpha chain variable domain of TCR clone 160547 (TRAV12-3, TRAJ10)
SHLPLTGGGNTLTF

SEQ ID NO: 321094 - protein, 15 aa, Homo sapiens
  CDR3 for beta chain variable domain of TCR clone 160547 (TRBV18, TRBJ2-7)
CASSPSSTGNYEQYF

SEQ ID NO: 321095 - protein, 13 aa, Homo sapiens
  CDR3 for alpha chain variable domain of TCR clone 160548 (TRAV13-1, TRAJ9)
CAANETGGFKTIF

SEQ ID NO: 321096 - protein, 17 aa, Homo sapiens
  CDR3 for beta chain variable domain of TCR clone 160548 (TRBV11-2, TRBJ2-1)
CASSLYPPGVEYNEQFF

SEQ ID NO: 321097 - protein, 12 aa, Homo sapiens
  CDR3 for alpha chain variable domain of TCR clone 160549 (TRAV12-2, TRAJ47)
CAVAEYGNKLVF

SEQ ID NO: 321098 - protein, 15 aa, Homo sapiens
  CDR3 for beta chain variable domain of TCR clone 160549 (TRBV28, TRBJ2-1)
CASSIMAGGRSEQFF

SEQ ID NO: 321099 - protein, 17 aa, Homo sapiens
  CDR3 for alpha chain variable domain of TCR clone 160550 (TRAV3, TRAJ6)
CAVRDGPRAGGSYIPTF

SEQ ID NO: 321100 - protein, 15 aa, Homo sapiens
  CDR3 for beta chain variable domain of TCR clone 160550 (TRBV7-8, TRBJ1-5)
CASSLERRGLEPRHF

SEQ ID NO: 321101 - protein, 12 aa, Homo sapiens
  CDR3 for alpha chain variable domain of TCR clone 160551 (TRAV36/DV7, TRAJ30)
CAASNRDDKIIF

SEQ ID NO: 321102 - protein, 14 aa, Homo sapiens
  CDR3 for beta chain variable domain of TCR clone 160551 (TRBV5-7, TRBJ1-1)
CASSLAGDWTEAFF

SEQ ID NO: 321103 - protein, 13 aa, Homo sapiens
  CDR3 for alpha chain variable domain of TCR clone 160552 (TRAV26-2, TRAJ37)
CIRGSSNTGKLIF

SEQ ID NO: 321104 - protein, 16 aa, Homo sapiens
  CDR3 for beta chain variable domain of TCR clone 160552 (TRBV7-2, TRBJ2-5)
CASSPGGARRGGTQYF

SEQ ID NO: 321105 - protein, 15 aa, Homo sapiens
  CDR3 for alpha chain variable domain of TCR clone 160553 (TRAV3, TRAJ22)
CAVRDRCGSARQLTF

SEQ ID NO: 321106 - protein, 11 aa, Homo sapiens
  CDR3 for beta chain variable domain of TCR clone 160553 (TRBV7-8, TRBJ2-7)
CASSLSLEQYF

SEQ ID NO: 321107 - protein, 14 aa, Homo sapiens
  CDR3 for alpha chain variable domain of TCR clone 160554 (TRAV12-2, TRAJ9)
CAVRVNTGGFKTIF

SEQ ID NO: 321108 - protein, 15 aa, Homo sapiens
  CDR3 for beta chain variable domain of TCR clone 160554 (TRBV4-1, TRBJ1-1)
CASSQAPGLNTEAFF

SEQ ID NO: 321109 - protein, 12 aa, Homo sapiens
  CDR3 for alpha chain variable domain of TCR clone 160555 (TRAV1-1, TRAJ8)
CAGGTGFQKLVF

SEQ ID NO: 321110 - protein, 11 aa, Homo sapiens
  CDR3 for beta chain variable domain of TCR clone 160555 (TRBV29-1, TRBJ2-5)
CSVASGETQYF

SEQ ID NO: 321111 - protein, 12 aa, Homo sapiens
  CDR3 for alpha chain variable domain of TCR clone 160556 (TRAV26-2, TRAJ21)
CILKGNFNKCYF

SEQ ID NO: 321112 - protein, 14 aa, Homo sapiens
  CDR3 for beta chain variable domain of TCR clone 160556 (TRBV7-9, TRBJ1-1)
CASTPLQSYTEAFF

SEQ ID NO: 321113 - protein, 14 aa, Homo sapiens
  CDR3 for alpha chain variable domain of TCR clone 160557 (TRAV17, TRAJ34)
CATDSLEGTDKLIF

SEQ ID NO: 321114 - protein, 13 aa, Homo sapiens
  CDR3 for beta chain variable domain of TCR clone 160557 (TRBV19, TRBJ2-7)
CASSKTGTHEQYF

SEQ ID NO: 321115 - protein, 13 aa, Homo sapiens
  CDR3 for alpha chain variable domain of TCR clone 160558 (TRAV13-1, TRAJ20)
CAARASDDYKLSF

SEQ ID NO: 321116 - protein, 12 aa, Homo sapiens
  CDR3 for beta chain variable domain of TCR clone 160558 (TRBV20-1, TRBJ2-1)
CSARFGTDEQFF

SEQ ID NO: 321117 - protein, 12 aa, Homo sapiens
  CDR3 for alpha chain variable domain of TCR clone 160559 (TRAV2, TRAJ29)
CCGYSGNTPLVF

SEQ ID NO: 321118 - protein, 16 aa, Homo sapiens
  CDR3 for beta chain variable domain of TCR clone 160559 (TRBV19, TRBJ2-1)
CASSKAGPSSYNEQFF

SEQ ID NO: 321119 - protein, 12 aa, Homo sapiens
  CDR3 for alpha chain variable domain of TCR clone 160560 (TRAV12-1, TRAJ40)
CVVYSGTYTYIF

SEQ ID NO: 321120 - protein, 15 aa, Homo sapiens
  CDR3 for beta chain variable domain of TCR clone 160560 (TRBV27, TRBJ1-6)
CASSFDRGLGSPLHF

SEQ ID NO: 321121 - protein, 13 aa, Homo sapiens
  CDR3 for alpha chain variable domain of TCR clone 160561 (TRAV17, TRAJ9)
CATFLTGGFKTIF

SEQ ID NO: 321122 - protein, 14 aa, Homo sapiens
  CDR3 for beta chain variable domain of TCR clone 160561 (TRBV11-2, TRBJ2-1)
CASTTGQGNNEQFF

SEQ ID NO: 321123 - protein, 13 aa, Homo sapiens
  CDR3 for alpha chain variable domain of TCR clone 160562 (TRAV14/DV4, TRAJ43)
CAMREGGSNDMRF

SEQ ID NO: 321124 - protein, 17 aa, Homo sapiens
  CDR3 for beta chain variable domain of TCR clone 160562 (TRBV20-1, TRBJ2-1)
CSASSSGLAGSYNEQFF

SEQ ID NO: 321125 - protein, 15 aa, Homo sapiens
  CDR3 for alpha chain variable domain of TCR clone 160563 (TRAV26-1, TRAJ48)
CIVRVGDFGNETLTF

SEQ ID NO: 321126 - protein, 16 aa, Homo sapiens
  CDR3 for beta chain variable domain of TCR clone 160563 (TRBV4-1, TRBJ2-3)
CASSQRAGGLTDTQYF

SEQ ID NO: 321127 - protein, 15 aa, Homo sapiens
  CDR3 for alpha chain variable domain of TCR clone 160564 (TRAV13-1, TRAJ57)
CAASNTQGGSEKLVF

SEQ ID NO: 321128 - protein, 16 aa, Homo sapiens
  CDR3 for beta chain variable domain of TCR clone 160564 (TRBV19, TRBJ2-1)
CASSKAGPSSYKEQFF

SEQ ID NO: 321129 - protein, 15 aa, Homo sapiens
  CDR3 for alpha chain variable domain of TCR clone 160565 (TRAV26-1, TRAJ29)
CIVRVEGSGNTPLVF

SEQ ID NO: 321130 - protein, 15 aa, Homo sapiens
  CDR3 for beta chain variable domain of TCR clone 160565 (TRBV28, TRBJ1-1)
CASRIKGGLNTEAFF

SEQ ID NO: 321131 - protein, 13 aa, Homo sapiens
  CDR3 for alpha chain variable domain of TCR clone 160566 (TRAV2, TRAJ40)
CAVVTSGTYKYIF

SEQ ID NO: 321132 - protein, 14 aa, Homo sapiens
  CDR3 for beta chain variable domain of TCR clone 160566 (TRBV27, TRBJ2-1)
CAGSIAETYNEQFF

SEQ ID NO: 321133 - protein, 15 aa, Homo sapiens
  CDR3 for alpha chain variable domain of TCR clone 160567 (TRAV3, TRAJ20)
CAVRDIMLSDYKLSF

SEQ ID NO: 321134 - protein, 15 aa, Homo sapiens
  CDR3 for beta chain variable domain of TCR clone 160567 (TRBV7-9, TRBJ1-6)
CASSSPGRGNSPLHF

SEQ ID NO: 321135 - protein, 16 aa, Homo sapiens
  CDR3 for alpha chain variable domain of TCR clone 160568 (TRAV3, TRAJ37)
CAVSVRGSGNTGKLIF

SEQ ID NO: 321136 - protein, 11 aa, Homo sapiens
  CDR3 for beta chain variable domain of TCR clone 160568 (TRBV11-2, TRBJ2-2)
CASSLPGELFF

SEQ ID NO: 321137 - protein, 15 aa, Homo sapiens
  CDR3 for alpha chain variable domain of TCR clone 160569 (TRAV3, TRAJ3)
CAVRDMSSSASKIIF

SEQ ID NO: 321138 - protein, 14 aa, Homo sapiens
  CDR3 for beta chain variable domain of TCR clone 160569 (TRBV19, TRBJ2-1)
CASPTCVLSGEQFF

SEQ ID NO: 321139 - protein, 18 aa, Homo sapiens
  CDR3 for alpha chain variable domain of TCR clone 160570 (TRAV26-1, TRAJ23)
CIVRVGLEVWNQGGKLIF

SEQ ID NO: 321140 - protein, 15 aa, Homo sapiens
  CDR3 for beta chain variable domain of TCR clone 160570 (TRBV9, TRBJ1-6)
CASSVAGTGDSPLLF

SEQ ID NO: 321141 - protein, 15 aa, Homo sapiens
  CDR3 for alpha chain variable domain of TCR clone 160571 (TRAV17, TRAJ56)
CATDANTGANSKLTF

SEQ ID NO: 321142 - protein, 16 aa, Homo sapiens
  CDR3 for beta chain variable domain of TCR clone 160571 (TRBV20-1, TRBJ1-4)
CSAPGQGLLTNEKLFF

SEQ ID NO: 321143 - protein, 16 aa, Homo sapiens
  CDR3 for alpha chain variable domain of TCR clone 160572 (TRAV30, TRAJ24)
CGTEIVDADSWGKFQF

SEQ ID NO: 321144 - protein, 17 aa, Homo sapiens
  CDR3 for beta chain variable domain of TCR clone 160572 (TRBV11-2, TRBJ2-1)
CTSSLYPPGVEYNEQFF

SEQ ID NO: 321145 - protein, 14 aa, Homo sapiens
  CDR3 for alpha chain variable domain of TCR clone 160573 (TRAV1-2, TRAJ8)
CAVREDTGFQKLVF

SEQ ID NO: 321146 - protein, 16 aa, Homo sapiens
  CDR3 for beta chain variable domain of TCR clone 160573 (TRBV29-1, TRBJ2-6)
CSVDDITYSGANDLTF

SEQ ID NO: 321147 - protein, 14 aa, Homo sapiens
  CDR3 for alpha chain variable domain of TCR clone 160574 (TRAV12-2, TRAJ13)
CAVKKTGGYQKVTF

SEQ ID NO: 321148 - protein, 16 aa, Homo sapiens
  CDR3 for beta chain variable domain of TCR clone 160574 (TRBV4-1, TRBJ2-3)
CASSQSTSGAEDTPYF

SEQ ID NO: 321149 - protein, 12 aa, Homo sapiens
  CDR3 for alpha chain variable domain of TCR clone 160575 (TRAV12-2, TRAJ16)
CAVAPDGQKLLF

SEQ ID NO: 321150 - protein, 13 aa, Homo sapiens
  CDR3 for beta chain variable domain of TCR clone 160575 (TRBV6-1, TRBJ1-1)
CASSVTGRLEAVF

SEQ ID NO: 321151 - protein, 12 aa, Homo sapiens
  CDR3 for alpha chain variable domain of TCR clone 160576 (TRAV12-2, TRAJ7)
CAVMRGNNRLGF

SEQ ID NO: 321152 - protein, 12 aa, Homo sapiens
  CDR3 for beta chain variable domain of TCR clone 160576 (TRBV7-8, TRBJ2-7)
CASSLGDREQYF

SEQ ID NO: 321153 - protein, 17 aa, Homo sapiens
  CDR3 for alpha chain variable domain of TCR clone 160577 (TRAV38-2/DV8, TRAJ57)
CAYRSVLAQGGSEKLVF

SEQ ID NO: 321154 - protein, 16 aa, Homo sapiens
  CDR3 for beta chain variable domain of TCR clone 160577 (TRBV7-3, TRBJ2-2)
CASSLKRGTLSGELFF

SEQ ID NO: 321155 - protein, 14 aa, Homo sapiens
  CDR3 for alpha chain variable domain of TCR clone 160578 (TRAV2, TRAJ9)
CAVEDRSGGCKTIF

SEQ ID NO: 321156 - protein, 12 aa, Homo sapiens
  CDR3 for beta chain variable domain of TCR clone 160578 (TRBV7-9, TRBJ2-7)
CASSLEGYEQYF

SEQ ID NO: 321157 - protein, 16 aa, Homo sapiens
  CDR3 for alpha chain variable domain of TCR clone 160579 (TRAV3, TRAJ37)
CAVRPHVSGNTGKLIF

SEQ ID NO: 321158 - protein, 16 aa, Homo sapiens
  CDR3 for beta chain variable domain of TCR clone 160579 (TRBV2, TRBJ2-1)
CASSVGGSLSYNEQFF

SEQ ID NO: 321159 - protein, 14 aa, Homo sapiens
  CDR3 for alpha chain variable domain of TCR clone 160580 (TRAV12-2, TRAJ48)
CAVNAFFGNEKLTF

SEQ ID NO: 321160 - protein, 17 aa, Homo sapiens
  CDR3 for beta chain variable domain of TCR clone 160580 (TRBV12-4, TRBJ2-3)
CASSPPFAGYSTDTQYF

SEQ ID NO: 321161 - protein, 11 aa, Homo sapiens
  CDR3 for alpha chain variable domain of TCR clone 160581 (TRAV13-1, TRAJ33)
CAANSNYQLIW

SEQ ID NO: 321162 - protein, 15 aa, Homo sapiens
  CDR3 for beta chain variable domain of TCR clone 160581 (TRBV7-2, TRBJ1-2)
CASSPRAGWNYGYTF

SEQ ID NO: 321163 - protein, 15 aa, Homo sapiens
  CDR3 for alpha chain variable domain of TCR clone 160582 (TRAV12-3, TRAJ6)
CAMSATTGGSYIPTF

SEQ ID NO: 321164 - protein, 15 aa, Homo sapiens
  CDR3 for beta chain variable domain of TCR clone 160582 (TRBV7-3, TRBJ2-1)
CASSLDGNSYNEQFF

SEQ ID NO: 321165 - protein, 13 aa, Homo sapiens
  CDR3 for alpha chain variable domain of TCR clone 160583 (TRAV17, TRAJ9)
CATDYTGGFKTIF

SEQ ID NO: 321166 - protein, 13 aa, Homo sapiens
  CDR3 for beta chain variable domain of TCR clone 160583 (TRBV12-4, TRBJ1-2)
CASSLRQGKGYTF

SEQ ID NO: 321167 - protein, 13 aa, Homo sapiens
  CDR3 for alpha chain variable domain of TCR clone 160584 (TRAV30, TRAJ29)
CGTEDSGNTPLVF

SEQ ID NO: 321168 - protein, 13 aa, Homo sapiens
  CDR3 for beta chain variable domain of TCR clone 160584 (TRBV25-1, TRBJ1-2)
CASSEAGASGYTF

SEQ ID NO: 321169 - protein, 12 aa, Homo sapiens
  CDR3 for alpha chain variable domain of TCR clone 160585 (TRAV13-1, TRAJ21)
CAAKEGFNKFYF

SEQ ID NO: 321170 - protein, 14 aa, Homo sapiens
  CDR3 for beta chain variable domain of TCR clone 160585 (TRBV20-1, TRBJ2-7)
CSAPELAGVGEQYV

SEQ ID NO: 321171 - protein, 11 aa, Homo sapiens
  CDR3 for alpha chain variable domain of TCR clone 160586 (TRAV12-2, TRAJ29)
VAVTLRSPLVF

SEQ ID NO: 321172 - protein, 16 aa, Homo sapiens
  CDR3 for beta chain variable domain of TCR clone 160586 (TRBV19, TRBJ1-5)
CASSIDRGGPRQPQHF

SEQ ID NO: 321173 - protein, 14 aa, Homo sapiens
  CDR3 for alpha chain variable domain of TCR clone 160587 (TRAV1-2, TRAJ16)
CAVNRFSDGQKLLF

SEQ ID NO: 321174 - protein, 14 aa, Homo sapiens
  CDR3 for beta chain variable domain of TCR clone 160587 (TRBV19, TRBJ2-2)
CASSTLHRSGELLF

SEQ ID NO: 321175 - protein, 11 aa, Homo sapiens
  CDR3 for alpha chain variable domain of TCR clone 160588 (TRAV12-1, TRAJ34)
CVVNKGRELIF

SEQ ID NO: 321176 - protein, 12 aa, Homo sapiens
  CDR3 for beta chain variable domain of TCR clone 160588 (TRBV2, TRBJ2-1)
CAYGPRGNEQFF

SEQ ID NO: 321177 - protein, 14 aa, Homo sapiens
  CDR3 for alpha chain variable domain of TCR clone 160589 (TRAV12-3, TRAJ10)
SHLPLTGGGNKLIF

SEQ ID NO: 321178 - protein, 15 aa, Homo sapiens
  CDR3 for beta chain variable domain of TCR clone 160589 (TRBV25-1, TRBJ2-4)
CASSETESAKNIQYF

SEQ ID NO: 321179 - protein, 14 aa, Homo sapiens
  CDR3 for alpha chain variable domain of TCR clone 160590 (TRAV12-2, TRAJ17)
CAVLFNAAGNKLTF

SEQ ID NO: 321180 - protein, 17 aa, Homo sapiens
  CDR3 for beta chain variable domain of TCR clone 160590 (TRBV20-1, TRBJ2-2)
CSASGSGQGGLTGELSF

SEQ ID NO: 321181 - protein, 11 aa, Homo sapiens
  CDR3 for alpha chain variable domain of TCR clone 160591 (TRAV21, TRAJ34)
CAVTNTDKLIF

SEQ ID NO: 321182 - protein, 12 aa, Homo sapiens
  CDR3 for beta chain variable domain of TCR clone 160591 (TRBV7-9, TRBJ1-4)
CASSTDREKLFF

SEQ ID NO: 321183 - protein, 14 aa, Homo sapiens
  CDR3 for alpha chain variable domain of TCR clone 160592 (TRAV8-3, TRAJ45)
CASSYSGGADGLTF

SEQ ID NO: 321184 - protein, 13 aa, Homo sapiens
  CDR3 for beta chain variable domain of TCR clone 160592 (TRBV10-3, TRBJ2-7)
CASKLAVNYEQYF

SEQ ID NO: 321185 - protein, 16 aa, Homo sapiens
  CDR3 for alpha chain variable domain of TCR clone 160593 (TRAV14/DV4, TRAJ53)
CAMREGGGGSNYKLKF

SEQ ID NO: 321186 - protein, 14 aa, Homo sapiens
  CDR3 for beta chain variable domain of TCR clone 160593 (TRBV12-5, TRBJ2-5)
CASGSRTHQETQYF

SEQ ID NO: 321187 - protein, 15 aa, Homo sapiens
  CDR3 for alpha chain variable domain of TCR clone 160594 (TRAV2, TRAJ24)
CAVVVLTDSWGKFQF

SEQ ID NO: 321188 - protein, 13 aa, Homo sapiens
  CDR3 for beta chain variable domain of TCR clone 160594 (TRBV10-2, TRBJ2-7)
CASGTSGGYEQYF

SEQ ID NO: 321189 - protein, 14 aa, Homo sapiens
  CDR3 for alpha chain variable domain of TCR clone 160595 (TRAV8-1, TRAJ39)
CDGNDNNAGNMLTF

SEQ ID NO: 321190 - protein, 14 aa, Homo sapiens
  CDR3 for beta chain variable domain of TCR clone 160595 (TRBV28, TRBJ2-1)
CASSPSTGYNEQFF

SEQ ID NO: 321191 - protein, 14 aa, Homo sapiens
  CDR3 for alpha chain variable domain of TCR clone 160596 (TRAV29/DV5, TRAJ36)
CAARRKTGANNLFF

SEQ ID NO: 321192 - protein, 17 aa, Homo sapiens
  CDR3 for beta chain variable domain of TCR clone 160596 (TRBV5-4, TRBJ2-1)
CASSSAGGRGPYNEQFF

SEQ ID NO: 321193 - protein, 14 aa, Homo sapiens
  CDR3 for alpha chain variable domain of TCR clone 160597 (TRAV3, TRAJ9)
CAVRLNTGGFKTIF

SEQ ID NO: 321194 - protein, 15 aa, Homo sapiens
  CDR3 for beta chain variable domain of TCR clone 160597 (TRBV7-2, TRBJ2-1)
CASSLASGRVNEQYF

SEQ ID NO: 321195 - protein, 13 aa, Homo sapiens
  CDR3 for alpha chain variable domain of TCR clone 160598 (TRAV21, TRAJ20)
CAVGLRVDYKLSF

SEQ ID NO: 321196 - protein, 13 aa, Homo sapiens
  CDR3 for beta chain variable domain of TCR clone 160598 (TRBV7-3, TRBJ1-1)
CASSQDSGAEAFF

SEQ ID NO: 321197 - protein, 14 aa, Homo sapiens
  CDR3 for alpha chain variable domain of TCR clone 160599 (TRAV12-2, TRAJ13)
CAVKKTGGYQEITF

SEQ ID NO: 321198 - protein, 17 aa, Homo sapiens
  CDR3 for beta chain variable domain of TCR clone 160599 (TRBV20-1, TRBJ2-2)
CSASGSGQGGLTGELFF

SEQ ID NO: 321199 - protein, 14 aa, Homo sapiens
  CDR3 for alpha chain variable domain of TCR clone 160600 (TRAV12-2, TRAJ5)
CAVNRSTGRRALTF

SEQ ID NO: 321200 - protein, 13 aa, Homo sapiens
  CDR3 for beta chain variable domain of TCR clone 160600 (TRBV10-3, TRBJ1-2)
CAISERDSYGYTF

SEQ ID NO: 321201 - protein, 13 aa, Homo sapiens
  CDR3 for alpha chain variable domain of TCR clone 160601 (TRAV17, TRAJ26)
CVTVDNYGQNFVF

SEQ ID NO: 321202 - protein, 13 aa, Homo sapiens
  CDR3 for beta chain variable domain of TCR clone 160601 (TRBV14, TRBJ1-1)
FASSREFGTEAFF

SEQ ID NO: 321203 - protein, 15 aa, Homo sapiens
  CDR3 for alpha chain variable domain of TCR clone 160602 (TRAV12-3, TRAJ6)
CAMTATTGGSYKPTF

SEQ ID NO: 321204 - protein, 16 aa, Homo sapiens
  CDR3 for beta chain variable domain of TCR clone 160602 (TRBV20-1, TRBJ1-2)
CSASMGQGVANYGYTF

SEQ ID NO: 321205 - protein, 14 aa, Homo sapiens
  CDR3 for alpha chain variable domain of TCR clone 160603 (TRAV1-2, TRAJ16)
CAVNRFSGGQKLLF

SEQ ID NO: 321206 - protein, 15 aa, Homo sapiens
  CDR3 for beta chain variable domain of TCR clone 160603 (TRBV9, TRBJ2-1)
CQQRRWRGNYNEQFF

SEQ ID NO: 321207 - protein, 14 aa, Homo sapiens
  CDR3 for alpha chain variable domain of TCR clone 160604 (TRAV9-2, TRAJ39)
CALYIYNAGNMLTF

SEQ ID NO: 321208 - protein, 14 aa, Homo sapiens
  CDR3 for beta chain variable domain of TCR clone 160604 (TRBV12-4, TRBJ2-5)
CSSSSRQGAETQYF

SEQ ID NO: 321209 - protein, 18 aa, Homo sapiens
  CDR3 for alpha chain variable domain of TCR clone 160605 (TRAV26-1, TRAJ44)
CIVRVAGGGISTASKLTF

SEQ ID NO: 321210 - protein, 16 aa, Homo sapiens
  CDR3 for beta chain variable domain of TCR clone 160605 (TRBV20-1, TRBJ2-3)
CSAIFPIGGLKDTQYF

SEQ ID NO: 321211 - protein, 10 aa, Homo sapiens
  CDR3 for alpha chain variable domain of TCR clone 160606 (TRAV8-4, TRAJ43)
CAVSEDDMRF

SEQ ID NO: 321212 - protein, 15 aa, Homo sapiens
  CDR3 for beta chain variable domain of TCR clone 160606 (TRBV5-1, TRBJ2-3)
CASSVTSGSTDTQYF

SEQ ID NO: 321213 - protein, 14 aa, Homo sapiens
  CDR3 for alpha chain variable domain of TCR clone 160607 (TRAV12-2, TRAJ13)
CAVKKTGGYQKVTF

SEQ ID NO: 321214 - protein, 13 aa, Homo sapiens
  CDR3 for beta chain variable domain of TCR clone 160607 (TRBV7-8, TRBJ2-7)
CASSFAGLYEQYF

SEQ ID NO: 321215 - protein, 14 aa, Homo sapiens
  CDR3 for alpha chain variable domain of TCR clone 160608 (TRAV12-3, TRAJ10)
SHLPLTGGGNKLTF

SEQ ID NO: 321216 - protein, 12 aa, Homo sapiens
  CDR3 for beta chain variable domain of TCR clone 160608 (TRBV6-6, TRBJ1-1)
CASSQGTVEAFF

SEQ ID NO: 321217 - protein, 11 aa, Homo sapiens
  CDR3 for alpha chain variable domain of TCR clone 160609 (TRAV1-2, TRAJ20)
CAVANDYKLSF

SEQ ID NO: 321218 - protein, 16 aa, Homo sapiens
  CDR3 for beta chain variable domain of TCR clone 160609 (TRBV7-6, TRBJ2-3)
CASSPLAGGSTDTQYF

SEQ ID NO: 321219 - protein, 12 aa, Homo sapiens
  CDR3 for alpha chain variable domain of TCR clone 160610 (TRAV3, TRAJ31)
CAAQRANARLMF

SEQ ID NO: 321220 - protein, 15 aa, Homo sapiens
  CDR3 for beta chain variable domain of TCR clone 160610 (TRBV10-2, TRBJ1-4)
CASTPIDRGKEKLFF

SEQ ID NO: 321221 - protein, 16 aa, Homo sapiens
  CDR3 for alpha chain variable domain of TCR clone 160611 (TRAV16, TRAJ21)
CACGWATTSTNFTLAL

SEQ ID NO: 321222 - protein, 15 aa, Homo sapiens
  CDR3 for beta chain variable domain of TCR clone 160611 (TRBV19, TRBJ2-1)
CASSIQATSYNEQFF

SEQ ID NO: 321223 - protein, 12 aa, Homo sapiens
  CDR3 for alpha chain variable domain of TCR clone 160612 (TRAV12-1, TRAJ40)
CVVYSGTYKYNF

SEQ ID NO: 321224 - protein, 18 aa, Homo sapiens
  CDR3 for beta chain variable domain of TCR clone 160612 (TRBV11-2, TRBJ2-3)
CASSLGGASRGAPNTQYF

SEQ ID NO: 321225 - protein, 14 aa, Homo sapiens
  CDR3 for alpha chain variable domain of TCR clone 160613 (TRAV13-1, TRAJ5)
CSASPDTGRRALTF

SEQ ID NO: 321226 - protein, 15 aa, Homo sapiens
  CDR3 for beta chain variable domain of TCR clone 160613 (TRBV7-2, TRBJ2-7)
CASSLTGQGTYEQYF

SEQ ID NO: 321227 - protein, 13 aa, Homo sapiens
  CDR3 for alpha chain variable domain of TCR clone 160614 (TRAV13-1, TRAJ10)
CAALEGGGNKLPF

SEQ ID NO: 321228 - protein, 13 aa, Homo sapiens
  CDR3 for beta chain variable domain of TCR clone 160614 (TRBV7-9, TRBJ1-2)
CASSLKQNYGYTF

SEQ ID NO: 321229 - protein, 14 aa, Homo sapiens
  CDR3 for alpha chain variable domain of TCR clone 160615 (TRAV21, TRAJ21)
CAVKGFGNFNKFYF

SEQ ID NO: 321230 - protein, 15 aa, Homo sapiens
  CDR3 for beta chain variable domain of TCR clone 160615 (TRBV7-2, TRBJ1-2)
CASSPRAGWNYGYTF

SEQ ID NO: 321231 - protein, 12 aa, Homo sapiens
  CDR3 for alpha chain variable domain of TCR clone 160616 (TRAV12-3, TRAJ3)
CAIDSSASKIIF

SEQ ID NO: 321232 - protein, 17 aa, Homo sapiens
  CDR3 for beta chain variable domain of TCR clone 160616 (TRBV7-9, TRBJ2-3)
CASSLEEAGVYPDTQYF

SEQ ID NO: 321233 - protein, 11 aa, Homo sapiens
  CDR3 for alpha chain variable domain of TCR clone 160617 (TRAV20, TRAJ34)
CTRDNTDKLIF

SEQ ID NO: 321234 - protein, 15 aa, Homo sapiens
  CDR3 for beta chain variable domain of TCR clone 160617 (TRBV2, TRBJ2-1)
CASSVTSEGADEQFF

SEQ ID NO: 321235 - protein, 14 aa, Homo sapiens
  CDR3 for alpha chain variable domain of TCR clone 160618 (TRAV12-1, TRAJ13)
CVVIDSGGDQKVTF

SEQ ID NO: 321236 - protein, 12 aa, Homo sapiens
  CDR3 for beta chain variable domain of TCR clone 160618 (TRBV7-8, TRBJ2-7)
CASSLGDREQYF

SEQ ID NO: 321237 - protein, 12 aa, Homo sapiens
  CDR3 for alpha chain variable domain of TCR clone 160619 (TRAV13-1, TRAJ21)
SAAKEGFNKLYF

SEQ ID NO: 321238 - protein, 14 aa, Homo sapiens
  CDR3 for beta chain variable domain of TCR clone 160619 (TRBV5-4, TRBJ1-1)
CASSLDSRRDEAFF

SEQ ID NO: 321239 - protein, 11 aa, Homo sapiens
  CDR3 for alpha chain variable domain of TCR clone 160620 (TRAV12-2, TRAJ23)
CARGRAGKLIF

SEQ ID NO: 321240 - protein, 14 aa, Homo sapiens
  CDR3 for beta chain variable domain of TCR clone 160620 (TRBV28, TRBJ2-5)
CASSLGDRAETQYF

SEQ ID NO: 321241 - protein, 12 aa, Homo sapiens
  CDR3 for alpha chain variable domain of TCR clone 160621 (TRAV23/DV6, TRAJ53)
CAASKLGSGGSN

SEQ ID NO: 321242 - protein, 12 aa, Homo sapiens
  CDR3 for beta chain variable domain of TCR clone 160621 (TRBV7-9, TRBJ1-1)
CASSVWVEEAFF

SEQ ID NO: 321243 - protein, 15 aa, Homo sapiens
  CDR3 for alpha chain variable domain of TCR clone 160622 (TRAV23/DV6, TRAJ44)
CAARGGTGTASKLTF

SEQ ID NO: 321244 - protein, 15 aa, Homo sapiens
  CDR3 for beta chain variable domain of TCR clone 160622 (TRBV7-8, TRBJ2-1)
CASSLAGGLCNEQFF

SEQ ID NO: 321245 - protein, 14 aa, Homo sapiens
  CDR3 for alpha chain variable domain of TCR clone 160623 (TRAV29/DV5, TRAJ36)
CAARRKTGANNPFF

SEQ ID NO: 321246 - protein, 16 aa, Homo sapiens
  CDR3 for beta chain variable domain of TCR clone 160623 (TRBV13, TRBJ2-2)
CASSPRTGEHTGELFF

SEQ ID NO: 321247 - protein, 15 aa, Homo sapiens
  CDR3 for alpha chain variable domain of TCR clone 160624 (TRAV26-1, TRAJ29)
CVVRVEGSVNTPLVF

SEQ ID NO: 321248 - protein, 15 aa, Homo sapiens
  CDR3 for beta chain variable domain of TCR clone 160624 (TRBV7-9, TRBJ1-5)
CASSQGHQPNQPQHF

SEQ ID NO: 321249 - protein, 12 aa, Homo sapiens
  CDR3 for alpha chain variable domain of TCR clone 160625 (TRAV8-3, TRAJ20)
CSVGANDYKLSF

SEQ ID NO: 321250 - protein, 17 aa, Homo sapiens
  CDR3 for beta chain variable domain of TCR clone 160625 (TRBV11-2, TRBJ2-1)
CASSLYPPGVEYNEQFF

SEQ ID NO: 321251 - protein, 18 aa, Homo sapiens
  CDR3 for alpha chain variable domain of TCR clone 160626 (TRAV21, TRAJ52)
CAVRPSPAGGTSYGKLTF

SEQ ID NO: 321252 - protein, 11 aa, Homo sapiens
  CDR3 for beta chain variable domain of TCR clone 160626 (TRBV7-2, TRBJ2-7)
CASSSLYEQYF

SEQ ID NO: 321253 - protein, 17 aa, Homo sapiens
  CDR3 for alpha chain variable domain of TCR clone 160627 (TRAV26-1, TRAJ53)
CIVRVDDRGGSNYKLTF

SEQ ID NO: 321254 - protein, 15 aa, Homo sapiens
  CDR3 for beta chain variable domain of TCR clone 160627 (TRBV20-1, TRBJ2-7)
CSARAPAAYFYEQYF

SEQ ID NO: 321255 - protein, 17 aa, Homo sapiens
  CDR3 for alpha chain variable domain of TCR clone 160628 (TRAV16, TRAJ58)
CITVLSNGETSGSRLTF

SEQ ID NO: 321256 - protein, 12 aa, Homo sapiens
  CDR3 for beta chain variable domain of TCR clone 160628 (TRBV11-2, TRBJ2-1)
CASSPGNNEQFF

SEQ ID NO: 321257 - protein, 15 aa, Homo sapiens
  CDR3 for alpha chain variable domain of TCR clone 160629 (TRAV8-3, TRAJ27)
SAVGPSKTNAAKSTF

SEQ ID NO: 321258 - protein, 15 aa, Homo sapiens
  CDR3 for beta chain variable domain of TCR clone 160629 (TRBV7-2, TRBJ2-1)
CASSSGLAGGNEQFF

SEQ ID NO: 321259 - protein, 10 aa, Homo sapiens
  CDR3 for alpha chain variable domain of TCR clone 160630 (TRAV2, TRAJ34)
CAVVNDKLIF

SEQ ID NO: 321260 - protein, 15 aa, Homo sapiens
  CDR3 for beta chain variable domain of TCR clone 160630 (TRBV3-1, TRBJ2-2)
CASSQDWSRAGELFF

SEQ ID NO: 321261 - protein, 14 aa, Homo sapiens
  CDR3 for alpha chain variable domain of TCR clone 160631 (TRAV13-1, TRAJ39)
CAASEGNAGNMLTF

SEQ ID NO: 321262 - protein, 17 aa, Homo sapiens
  CDR3 for beta chain variable domain of TCR clone 160631 (TRBV7-3, TRBJ2-3)
CASSLMRRMRGADTQYF

SEQ ID NO: 321263 - protein, 14 aa, Homo sapiens
  CDR3 for alpha chain variable domain of TCR clone 160632 (TRAV34, TRAJ22)
CGADTSGSARQLTF

SEQ ID NO: 321264 - protein, 15 aa, Homo sapiens
  CDR3 for beta chain variable domain of TCR clone 160632 (TRBV27, TRBJ2-3)
CASSSLAGVIDTQYF

SEQ ID NO: 321265 - protein, 14 aa, Homo sapiens
  CDR3 for alpha chain variable domain of TCR clone 160633 (TRAV23/DV6, TRAJ37)
CAASTSSNTGKLII

SEQ ID NO: 321266 - protein, 13 aa, Homo sapiens
  CDR3 for beta chain variable domain of TCR clone 160633 (TRBV7-7, TRBJ1-1)
CASSLGANTEAFF

SEQ ID NO: 321267 - protein, 12 aa, Homo sapiens
  CDR3 for alpha chain variable domain of TCR clone 160634 (TRAV38-2/DV8, TRAJ48)
CALLSGNEQLTF

SEQ ID NO: 321268 - protein, 15 aa, Homo sapiens
  CDR3 for beta chain variable domain of TCR clone 160634 (TRBV6-1, TRBJ2-1)
CASSELRGQYNEQFF

SEQ ID NO: 321269 - protein, 13 aa, Homo sapiens
  CDR3 for alpha chain variable domain of TCR clone 160635 (TRAV13-2, TRAJ53)
CAENMGSNYKLTF

SEQ ID NO: 321270 - protein, 23 aa, Homo sapiens
  CDR3 for beta chain variable domain of TCR clone 160635 (TRBV4-1, TRBJ2-2)
PCSQKTQPCISAPAAKNTGELSF

SEQ ID NO: 321271 - protein, 17 aa, Homo sapiens
  CDR3 for alpha chain variable domain of TCR clone 160636 (TRAV38-2/DV8, TRAJ40)
CAYRSARLTSGTYKYIF

SEQ ID NO: 321272 - protein, 16 aa, Homo sapiens
  CDR3 for beta chain variable domain of TCR clone 160636 (TRBV11-2, TRBJ1-2)
CASSLDRGGNNYGYTF

SEQ ID NO: 321273 - protein, 12 aa, Homo sapiens
  CDR3 for alpha chain variable domain of TCR clone 160637 (TRAV1-1, TRAJ39)
CSVPVVGNMLTF

SEQ ID NO: 321274 - protein, 13 aa, Homo sapiens
  CDR3 for beta chain variable domain of TCR clone 160637 (TRBV4-1, TRBJ1-1)
CASSRKMNTEAFF

SEQ ID NO: 321275 - protein, 14 aa, Homo sapiens
  CDR3 for alpha chain variable domain of TCR clone 160638 (TRAV8-3, TRAJ39)
CAVGANNAGNMLTF

SEQ ID NO: 321276 - protein, 13 aa, Homo sapiens
  CDR3 for beta chain variable domain of TCR clone 160638 (TRBV7-3, TRBJ2-5)
CASSFRGGETQYF

SEQ ID NO: 321277 - protein, 15 aa, Homo sapiens
  CDR3 for alpha chain variable domain of TCR clone 160639 (TRAV20, TRAJ4)
CAVTMFSGGYNKLIF

SEQ ID NO: 321278 - protein, 11 aa, Homo sapiens
  CDR3 for beta chain variable domain of TCR clone 160639 (TRBV19, TRBJ1-1)
CASSIGSEAFF

SEQ ID NO: 321279 - protein, 15 aa, Homo sapiens
  CDR3 for alpha chain variable domain of TCR clone 160640 (TRAV17, TRAJ52)
CATEAGGTSYGKLTF

SEQ ID NO: 321280 - protein, 14 aa, Homo sapiens
  CDR3 for beta chain variable domain of TCR clone 160640 (TRBV28, TRBJ1-5)
CASSLGVLVKPQHC

SEQ ID NO: 321281 - protein, 16 aa, Homo sapiens
  CDR3 for alpha chain variable domain of TCR clone 160641 (TRAV8-3, TRAJ44)
CAVGASNNGTASRLTF

SEQ ID NO: 321282 - protein, 15 aa, Homo sapiens
  CDR3 for beta chain variable domain of TCR clone 160641 (TRBV27, TRBJ1-5)
CASTFNRGSNQPQHF

SEQ ID NO: 321283 - protein, 10 aa, Homo sapiens
  CDR3 for alpha chain variable domain of TCR clone 160642 (TRAV21, TRAJ31)
CAVDNARLMF

SEQ ID NO: 321284 - protein, 14 aa, Homo sapiens
  CDR3 for beta chain variable domain of TCR clone 160642 (TRBV12-5, TRBJ2-5)
CASGSRTHQETQYF

SEQ ID NO: 321285 - protein, 16 aa, Homo sapiens
  CDR3 for alpha chain variable domain of TCR clone 160643 (TRAV26-1, TRAJ38)
CIVRVELGGNNRKLIW

SEQ ID NO: 321286 - protein, 14 aa, Homo sapiens
  CDR3 for beta chain variable domain of TCR clone 160643 (TRBV5-1, TRBJ2-3)
CASSPGLAADKQYF

SEQ ID NO: 321287 - protein, 12 aa, Homo sapiens
  CDR3 for alpha chain variable domain of TCR clone 160644 (TRAV1-1, TRAJ8)
RAGGTGFQELVF

SEQ ID NO: 321288 - protein, 13 aa, Homo sapiens
  CDR3 for beta chain variable domain of TCR clone 160644 (TRBV7-9, TRBJ1-2)
CASSLKQNYGYTF

SEQ ID NO: 321289 - protein, 17 aa, Homo sapiens
  CDR3 for alpha chain variable domain of TCR clone 160645 (TRAV26-1, TRAJ47)
CIVPSLLYMEYGNKLGF

SEQ ID NO: 321290 - protein, 14 aa, Homo sapiens
  CDR3 for beta chain variable domain of TCR clone 160645 (TRBV7-3, TRBJ1-5)
RASSFSGCNQPQHF

SEQ ID NO: 321291 - protein, 18 aa, Homo sapiens
  CDR3 for alpha chain variable domain of TCR clone 160646 (TRAV21, TRAJ52)
CDVRPSPAGGTSYGKLTF

SEQ ID NO: 321292 - protein, 15 aa, Homo sapiens
  CDR3 for beta chain variable domain of TCR clone 160646 (TRBV19, TRBJ1-1)
CASTSGQIQNTEAFF

SEQ ID NO: 321293 - protein, 15 aa, Homo sapiens
  CDR3 for alpha chain variable domain of TCR clone 160647 (TRAV20, TRAJ53)
RAVQASGGSNYKLTF

SEQ ID NO: 321294 - protein, 12 aa, Homo sapiens
  CDR3 for beta chain variable domain of TCR clone 160647 (TRBV7-6, TRBJ2-5)
CASSLSQETQYF

SEQ ID NO: 321295 - protein, 13 aa, Homo sapiens
  CDR3 for alpha chain variable domain of TCR clone 160648 (TRAV38-2/DV8, TRAJ34)
CAYRTWNTDKLIF

SEQ ID NO: 321296 - protein, 18 aa, Homo sapiens
  CDR3 for beta chain variable domain of TCR clone 160648 (TRBV6-6, TRBJ1-3)
CASSYSTWDSISGNTIYF

SEQ ID NO: 321297 - protein, 14 aa, Homo sapiens
  CDR3 for alpha chain variable domain of TCR clone 160649 (TRAV12-3, TRAJ47)
CAMSAREYGNKLVF

SEQ ID NO: 321298 - protein, 13 aa, Homo sapiens
  CDR3 for beta chain variable domain of TCR clone 160649 (TRBV10-3, TRBJ2-7)
CASKLAVNYEQYF

SEQ ID NO: 321299 - protein, 15 aa, Homo sapiens
  CDR3 for alpha chain variable domain of TCR clone 160650 (TRAV8-4, TRAJ40)
CAVSSITSGTYKYIF

SEQ ID NO: 321300 - protein, 13 aa, Homo sapiens
  CDR3 for beta chain variable domain of TCR clone 160650 (TRBV2, TRBJ2-1)
CATSRVTDDEQFF

SEQ ID NO: 321301 - protein, 12 aa, Homo sapiens
  CDR3 for alpha chain variable domain of TCR clone 160651 (TRAV23/DV6, TRAJ53)
CAASKLGSRGSN

SEQ ID NO: 321302 - protein, 18 aa, Homo sapiens
  CDR3 for beta chain variable domain of TCR clone 160651 (TRBV11-2, TRBJ2-3)
CASSLGGASRGAPNTQYF

SEQ ID NO: 321303 - protein, 17 aa, Homo sapiens
  CDR3 for alpha chain variable domain of TCR clone 160652 (TRAV3, TRAJ42)
CAVRDRDYGGSQGNLIF

SEQ ID NO: 321304 - protein, 13 aa, Homo sapiens
  CDR3 for beta chain variable domain of TCR clone 160652 (TRBV10-2, TRBJ2-7)
CASGASGGYQQYF

SEQ ID NO: 321305 - protein, 15 aa, Homo sapiens
  CDR3 for alpha chain variable domain of TCR clone 160653 (TRAV23/DV6, TRAJ12)
CAAIDLGAMDSSYTL

SEQ ID NO: 321306 - protein, 15 aa, Homo sapiens
  CDR3 for beta chain variable domain of TCR clone 160653 (TRBV12-4, TRBJ2-5)
CASTLNSGRGETQYF

SEQ ID NO: 321307 - protein, 13 aa, Homo sapiens
  CDR3 for alpha chain variable domain of TCR clone 160654 (TRAV27, TRAJ45)
CRSSGGGADGLTF

SEQ ID NO: 321308 - protein, 15 aa, Homo sapiens
  CDR3 for beta chain variable domain of TCR clone 160654 (TRBV29-1, TRBJ2-6)
CSVGDRGSGANVLTF

SEQ ID NO: 321309 - protein, 17 aa, Homo sapiens
  CDR3 for alpha chain variable domain of TCR clone 160655 (TRAV38-1, TRAJ52)
CAFMKPPHGTSYGKLTF

SEQ ID NO: 321310 - protein, 16 aa, Homo sapiens
  CDR3 for beta chain variable domain of TCR clone 160655 (TRBV13, TRBJ2-7)
CASSKRPPGESYEQYF

SEQ ID NO: 321311 - protein, 13 aa, Homo sapiens
  CDR3 for alpha chain variable domain of TCR clone 160656 (TRAV2, TRAJ40)
CAVVTSGTYKYIF

SEQ ID NO: 321312 - protein, 17 aa, Homo sapiens
  CDR3 for beta chain variable domain of TCR clone 160656 (TRBV11-3, TRBJ2-7)
CASSLDGLRTGTYEQYF

SEQ ID NO: 321313 - protein, 15 aa, Homo sapiens
  CDR3 for alpha chain variable domain of TCR clone 160657 (TRAV3, TRAJ3)
CAVRDGHRSASKIIF

SEQ ID NO: 321314 - protein, 17 aa, Homo sapiens
  CDR3 for beta chain variable domain of TCR clone 160657 (TRBV25-1, TRBJ2-7)
CASSDARVVFSSYEQYF

SEQ ID NO: 321315 - protein, 15 aa, Homo sapiens
  CDR3 for alpha chain variable domain of TCR clone 160658 (TRAV12-1, TRAJ44)
CVADLPTVTASKLTF

SEQ ID NO: 321316 - protein, 16 aa, Homo sapiens
  CDR3 for beta chain variable domain of TCR clone 160658 (TRBV12-5, TRBJ2-5)
CASGPRTSGNQETQYF

SEQ ID NO: 321317 - protein, 13 aa, Homo sapiens
  CDR3 for alpha chain variable domain of TCR clone 160659 (TRAV3, TRAJ3)
CAVADSSASKIIF

SEQ ID NO: 321318 - protein, 14 aa, Homo sapiens
  CDR3 for beta chain variable domain of TCR clone 160659 (TRBV5-1, TRBJ2-7)
CASSSGESLYEQYF

SEQ ID NO: 321319 - protein, 16 aa, Homo sapiens
  CDR3 for alpha chain variable domain of TCR clone 160660 (TRAV20, TRAJ53)
CAVQGNSGGSNYKLTF

SEQ ID NO: 321320 - protein, 14 aa, Homo sapiens
  CDR3 for beta chain variable domain of TCR clone 160660 (TRBV6-5, TRBJ2-7)
CASSPHRGLREQYC

SEQ ID NO: 321321 - protein, 14 aa, Homo sapiens
  CDR3 for alpha chain variable domain of TCR clone 160661 (TRAV12-3, TRAJ10)
SHLPLTGGGNKLTF

SEQ ID NO: 321322 - protein, 16 aa, Homo sapiens
  CDR3 for beta chain variable domain of TCR clone 160661 (TRBV7-2, TRBJ1-4)
CASSLAPGRRDEKLFF

SEQ ID NO: 321323 - protein, 13 aa, Homo sapiens
  CDR3 for alpha chain variable domain of TCR clone 160662 (TRAV2, TRAJ15)
CAVASQAGTPLIF

SEQ ID NO: 321324 - protein, 16 aa, Homo sapiens
  CDR3 for beta chain variable domain of TCR clone 160662 (TRBV5-1, TRBJ1-1)
CASSSGGNSLNTEAFF

SEQ ID NO: 321325 - protein, 11 aa, Homo sapiens
  CDR3 for alpha chain variable domain of TCR clone 160663 (TRAV4, TRAJ23)
CLVAPGGKLIF

SEQ ID NO: 321326 - protein, 12 aa, Homo sapiens
  CDR3 for beta chain variable domain of TCR clone 160663 (TRBV12-4, TRBJ2-1)
CASTYVLNEQFF

SEQ ID NO: 321327 - protein, 11 aa, Homo sapiens
  CDR3 for alpha chain variable domain of TCR clone 160664 (TRAV3, TRAJ21)
CAVGNFNKFYF

SEQ ID NO: 321328 - protein, 15 aa, Homo sapiens
  CDR3 for beta chain variable domain of TCR clone 160664 (TRBV19, TRBJ2-5)
CASSLGTSGKETQYF

SEQ ID NO: 321329 - protein, 12 aa, Homo sapiens
  CDR3 for alpha chain variable domain of TCR clone 160665 (TRAV30, TRAJ43)
CGTEERGNDMRF

SEQ ID NO: 321330 - protein, 15 aa, Homo sapiens
  CDR3 for beta chain variable domain of TCR clone 160665 (TRBV12-4, TRBJ2-5)
CASSPPTGLQEAQYF

SEQ ID NO: 321331 - protein, 17 aa, Homo sapiens
  CDR3 for alpha chain variable domain of TCR clone 160666 (TRAV3, TRAJ6)
CAVRDGPRAGGSYKPTF

SEQ ID NO: 321332 - protein, 14 aa, Homo sapiens
  CDR3 for beta chain variable domain of TCR clone 160666 (TRBV18, TRBJ2-4)
CASSPQSGGDIQYF

SEQ ID NO: 321333 - protein, 13 aa, Homo sapiens
  CDR3 for alpha chain variable domain of TCR clone 160667 (TRAV8-3, TRAJ44)
CAVVPGTASKLTF

SEQ ID NO: 321334 - protein, 10 aa, Homo sapiens
  CDR3 for beta chain variable domain of TCR clone 160667 (TRBV20-1, TRBJ2-5)
CSARFETQYF

SEQ ID NO: 321335 - protein, 14 aa, Homo sapiens
  CDR3 for alpha chain variable domain of TCR clone 160668 (TRAV8-3, TRAJ40)
CAVALTSGTYKYIF

SEQ ID NO: 321336 - protein, 17 aa, Homo sapiens
  CDR3 for beta chain variable domain of TCR clone 160668 (TRBV7-8, TRBJ2-6)
CASSAGTGGAGANVLTF

SEQ ID NO: 321337 - protein, 17 aa, Homo sapiens
  CDR3 for alpha chain variable domain of TCR clone 160669 (TRAV3, TRAJ12)
CAVREIGGMYSSYKLIF

SEQ ID NO: 321338 - protein, 14 aa, Homo sapiens
  CDR3 for beta chain variable domain of TCR clone 160669 (TRBV12-4, TRBJ1-1)
CASSFQSFGTEAFF

SEQ ID NO: 321339 - protein, 14 aa, Homo sapiens
  CDR3 for alpha chain variable domain of TCR clone 160670 (TRAV12-1, TRAJ9)
CVVNRRTGGFKTIF

SEQ ID NO: 321340 - protein, 17 aa, Homo sapiens
  CDR3 for beta chain variable domain of TCR clone 160670 (TRBV4-1, TRBJ2-7)
CASSRDPLGVRGGEQYF

SEQ ID NO: 321341 - protein, 14 aa, Homo sapiens
  CDR3 for alpha chain variable domain of TCR clone 160671 (TRAV17, TRAJ32)
CATDPGGATNKLIF

SEQ ID NO: 321342 - protein, 14 aa, Homo sapiens
  CDR3 for beta chain variable domain of TCR clone 160671 (TRBV2, TRBJ1-5)
YASSENRGGQTQHF

SEQ ID NO: 321343 - protein, 13 aa, Homo sapiens
  CDR3 for alpha chain variable domain of TCR clone 160672 (TRAV13-1, TRAJ6)
CAASKGGSYIPTF

SEQ ID NO: 321344 - protein, 15 aa, Homo sapiens
  CDR3 for beta chain variable domain of TCR clone 160672 (TRBV12-4, TRBJ1-1)
FASSGRTGMNTEALF

SEQ ID NO: 321345 - protein, 16 aa, Homo sapiens
  CDR3 for alpha chain variable domain of TCR clone 160673 (TRAV36/DV7, TRAJ30)
CAVETYGLDRDDKIIF

SEQ ID NO: 321346 - protein, 14 aa, Homo sapiens
  CDR3 for beta chain variable domain of TCR clone 160673 (TRBV5-1, TRBJ2-7)
CASSRGESLYEQYF

SEQ ID NO: 321347 - protein, 14 aa, Homo sapiens
  CDR3 for alpha chain variable domain of TCR clone 160674 (TRAV1-2, TRAJ16)
CAVNRFSDGQKLLF

SEQ ID NO: 321348 - protein, 15 aa, Homo sapiens
  CDR3 for beta chain variable domain of TCR clone 160674 (TRBV6-3, TRBJ2-7)
CASSSPRTVFYEQYF

SEQ ID NO: 321349 - protein, 14 aa, Homo sapiens
  CDR3 for alpha chain variable domain of TCR clone 160675 (TRAV12-3, TRAJ22)
CAMSLFGSARQLTF

SEQ ID NO: 321350 - protein, 15 aa, Homo sapiens
  CDR3 for beta chain variable domain of TCR clone 160675 (TRBV27, TRBJ2-1)
CASSNGGGSSNEQFF

SEQ ID NO: 321351 - protein, 13 aa, Homo sapiens
  CDR3 for alpha chain variable domain of TCR clone 160676 (TRAV2, TRAJ40)
CAVVTSGTYKYIF

SEQ ID NO: 321352 - protein, 13 aa, Homo sapiens
  CDR3 for beta chain variable domain of TCR clone 160676 (TRBV12-5, TRBJ2-3)
CASGDRQSDTQYL

SEQ ID NO: 321353 - protein, 13 aa, Homo sapiens
  CDR3 for alpha chain variable domain of TCR clone 160677 (TRAV6, TRAJ20)
CALAVSNDYKLSF

SEQ ID NO: 321354 - protein, 15 aa, Homo sapiens
  CDR3 for beta chain variable domain of TCR clone 160677 (TRBV7-2, TRBJ2-3)
CASSLASARTDTQYF

SEQ ID NO: 321355 - protein, 16 aa, Homo sapiens
  CDR3 for alpha chain variable domain of TCR clone 160678 (TRAV3, TRAJ37)
CAVRGKGSGNTGKLIF

SEQ ID NO: 321356 - protein, 16 aa, Homo sapiens
  CDR3 for beta chain variable domain of TCR clone 160678 (TRBV12-4, TRBJ1-5)
CASSRPVGVSNQPQHF

SEQ ID NO: 321357 - protein, 17 aa, Homo sapiens
  CDR3 for alpha chain variable domain of TCR clone 160679 (TRAV26-1, TRAJ22)
CIVRVPSHFGSARKLTF

SEQ ID NO: 321358 - protein, 16 aa, Homo sapiens
  CDR3 for beta chain variable domain of TCR clone 160679 (TRBV28, TRBJ2-1)
CASRRSGRVVGNEQFF

SEQ ID NO: 321359 - protein, 14 aa, Homo sapiens
  CDR3 for alpha chain variable domain of TCR clone 160680 (TRAV10, TRAJ48)
CVGVFHFGNEKLTF

SEQ ID NO: 321360 - protein, 18 aa, Homo sapiens
  CDR3 for beta chain variable domain of TCR clone 160680 (TRBV27, TRBJ2-3)
CASSFSGTSGRGTDTQYF

SEQ ID NO: 321361 - protein, 14 aa, Homo sapiens
  CDR3 for alpha chain variable domain of TCR clone 160681 (TRAV23/DV6, TRAJ4)
CAANLSGGYNKLIS

SEQ ID NO: 321362 - protein, 11 aa, Homo sapiens
  CDR3 for beta chain variable domain of TCR clone 160681 (TRBV7-9, TRBJ2-3)
CASSPTDTQYF

SEQ ID NO: 321363 - protein, 15 aa, Homo sapiens
  CDR3 for alpha chain variable domain of TCR clone 160682 (TRAV25, TRAJ52)
CAGTSGGTSYGKLTF

SEQ ID NO: 321364 - protein, 16 aa, Homo sapiens
  CDR3 for beta chain variable domain of TCR clone 160682 (TRBV15, TRBJ1-2)
RATSRGPRTGGGGDTF

SEQ ID NO: 321365 - protein, 15 aa, Homo sapiens
  CDR3 for alpha chain variable domain of TCR clone 160683 (TRAV21, TRAJ10)
CAVPLLPGGGNKLTF

SEQ ID NO: 321366 - protein, 14 aa, Homo sapiens
  CDR3 for beta chain variable domain of TCR clone 160683 (TRBV12-4, TRBJ1-1)
CASSLGTGGTEAFF

SEQ ID NO: 321367 - protein, 15 aa, Homo sapiens
  CDR3 for alpha chain variable domain of TCR clone 160684 (TRAV8-6, TRAJ37)
CAVIFSSGNTGKLIF

SEQ ID NO: 321368 - protein, 15 aa, Homo sapiens
  CDR3 for beta chain variable domain of TCR clone 160684 (TRBV25-1, TRBJ2-4)
CASSETESAKNIQCF

SEQ ID NO: 321369 - protein, 12 aa, Homo sapiens
  CDR3 for alpha chain variable domain of TCR clone 160685 (TRAV13-1, TRAJ53)
CAAGGSNYKLTF

SEQ ID NO: 321370 - protein, 11 aa, Homo sapiens
  CDR3 for beta chain variable domain of TCR clone 160685 (TRBV2, TRBJ1-1)
CASREGTEAFY

SEQ ID NO: 321371 - protein, 14 aa, Homo sapiens
  CDR3 for alpha chain variable domain of TCR clone 160686 (TRAV12-2, TRAJ24)
CAVTPADSWGKLQF

SEQ ID NO: 321372 - protein, 13 aa, Homo sapiens
  CDR3 for beta chain variable domain of TCR clone 160686 (TRBV28, TRBJ1-5)
CASSDRGNQPQHF

SEQ ID NO: 321373 - protein, 14 aa, Homo sapiens
  CDR3 for alpha chain variable domain of TCR clone 160687 (TRAV4, TRAJ13)
CLVGYSGGYQKVTF

SEQ ID NO: 321374 - protein, 14 aa, Homo sapiens
  CDR3 for beta chain variable domain of TCR clone 160687 (TRBV7-2, TRBJ2-7)
CASRSQGAAYEQYF

SEQ ID NO: 321375 - protein, 13 aa, Homo sapiens
  CDR3 for alpha chain variable domain of TCR clone 160688 (TRAV12-3, TRAJ47)
CAMKKEYGNKLVF

SEQ ID NO: 321376 - protein, 16 aa, Homo sapiens
  CDR3 for beta chain variable domain of TCR clone 160688 (TRBV19, TRBJ2-1)
CASSKAGPSSYNEQFF

SEQ ID NO: 321377 - protein, 16 aa, Homo sapiens
  CDR3 for alpha chain variable domain of TCR clone 160689 (TRAV3, TRAJ37)
CAVRPHGSSNTGKLIF

SEQ ID NO: 321378 - protein, 15 aa, Homo sapiens
  CDR3 for beta chain variable domain of TCR clone 160689 (TRBV20-1, TRBJ2-7)
RSARDRVSGMDEQYF

SEQ ID NO: 321379 - protein, 11 aa, Homo sapiens
  CDR3 for alpha chain variable domain of TCR clone 160690 (TRAV2, TRAJ13)
CASGGYQKVTF

SEQ ID NO: 321380 - protein, 12 aa, Homo sapiens
  CDR3 for beta chain variable domain of TCR clone 160690 (TRBV29-1, TRBJ2-1)
KGQESSYNEQFF

SEQ ID NO: 321381 - protein, 17 aa, Homo sapiens
  CDR3 for alpha chain variable domain of TCR clone 160691 (TRAV26-1, TRAJ37)
CIVRVITVSSNTGKLIF

SEQ ID NO: 321382 - protein, 16 aa, Homo sapiens
  CDR3 for beta chain variable domain of TCR clone 160691 (TRBV6-6, TRBJ2-4)
CASSNAGQGAKNIQYL

SEQ ID NO: 321383 - protein, 15 aa, Homo sapiens
  CDR3 for alpha chain variable domain of TCR clone 160692 (TRAV27, TRAJ38)
CAGRFNAGNNRKLSW

SEQ ID NO: 321384 - protein, 13 aa, Homo sapiens
  CDR3 for beta chain variable domain of TCR clone 160692 (TRBV20-1, TRBJ1-1)
CSARVGGNTEAFF

SEQ ID NO: 321385 - protein, 13 aa, Homo sapiens
  CDR3 for alpha chain variable domain of TCR clone 160693 (TRAV1-2, TRAJ12)
CAVSMDSSYKLIF

SEQ ID NO: 321386 - protein, 17 aa, Homo sapiens
  CDR3 for beta chain variable domain of TCR clone 160693 (TRBV13, TRBJ2-3)
CASSLSRVAGGRNTQYF

SEQ ID NO: 321387 - protein, 13 aa, Homo sapiens
  CDR3 for alpha chain variable domain of TCR clone 160694 (TRAV1-2, TRAJ9)
CSALNTGGFKTIF

SEQ ID NO: 321388 - protein, 15 aa, Homo sapiens
  CDR3 for beta chain variable domain of TCR clone 160694 (TRBV9, TRBJ1-6)
CASSVAGTGDSPLHF

SEQ ID NO: 321389 - protein, 13 aa, Homo sapiens
  CDR3 for alpha chain variable domain of TCR clone 160695 (TRAV13-1, TRAJ43)
CAASLSNNNDMRF

SEQ ID NO: 321390 - protein, 20 aa, Homo sapiens
  CDR3 for beta chain variable domain of TCR clone 160695 (TRBV5-1, TRBJ2-5)
GSWCSVGAGCWGAGEKTQYF

SEQ ID NO: 321391 - protein, 13 aa, Homo sapiens
  CDR3 for alpha chain variable domain of TCR clone 160696 (TRAV12-2, TRAJ20)
CAVYPSNDDKLGF

SEQ ID NO: 321392 - protein, 15 aa, Homo sapiens
  CDR3 for beta chain variable domain of TCR clone 160696 (TRBV27, TRBJ2-5)
CASSLYPRGGETQYF

SEQ ID NO: 321393 - protein, 14 aa, Homo sapiens
  CDR3 for alpha chain variable domain of TCR clone 160697 (TRAV1-2, TRAJ16)
CAVNRFSDGQKLLF

SEQ ID NO: 321394 - protein, 13 aa, Homo sapiens
  CDR3 for beta chain variable domain of TCR clone 160697 (TRBV20-1, TRBJ1-1)
CSARVGQGTEAFF

SEQ ID NO: 321395 - protein, 13 aa, Homo sapiens
  CDR3 for alpha chain variable domain of TCR clone 160698 (TRAV23/DV6, TRAJ22)
CAPWGGSARQLTF

SEQ ID NO: 321396 - protein, 15 aa, Homo sapiens
  CDR3 for beta chain variable domain of TCR clone 160698 (TRBV18, TRBJ2-7)
CASSPTSGGYEQYFG

SEQ ID NO: 321397 - protein, 12 aa, Homo sapiens
  CDR3 for alpha chain variable domain of TCR clone 160699 (TRAV12-1, TRAJ39)
CGEDNAGNMLTF

SEQ ID NO: 321398 - protein, 14 aa, Homo sapiens
  CDR3 for beta chain variable domain of TCR clone 160699 (TRBV6-1, TRBJ1-3)
CASVQGGGGNTIYF

SEQ ID NO: 321399 - protein, 14 aa, Homo sapiens
  CDR3 for alpha chain variable domain of TCR clone 160700 (TRAV26-1, TRAJ38)
CIADNAGNNRKLIW

SEQ ID NO: 321400 - protein, 15 aa, Homo sapiens
  CDR3 for beta chain variable domain of TCR clone 160700 (TRBV7-6, TRBJ1-4)
CASSLCAGAGEKLFF

SEQ ID NO: 321401 - protein, 11 aa, Homo sapiens
  CDR3 for alpha chain variable domain of TCR clone 160701 (TRAV13-2, TRAJ36)
YAETGANNLFF

SEQ ID NO: 321402 - protein, 13 aa, Homo sapiens
  CDR3 for beta chain variable domain of TCR clone 160701 (TRBV7-9, TRBJ2-4)
CATEGLAGNIQYF

SEQ ID NO: 321403 - protein, 11 aa, Homo sapiens
  CDR3 for alpha chain variable domain of TCR clone 160702 (TRAV12-1, TRAJ30)
CVVNGQDKINF

SEQ ID NO: 321404 - protein, 15 aa, Homo sapiens
  CDR3 for beta chain variable domain of TCR clone 160702 (TRBV28, TRBJ2-5)
CASSSGRTIQETQYF

SEQ ID NO: 321405 - protein, 10 aa, Homo sapiens
  CDR3 for alpha chain variable domain of TCR clone 160703 (TRAV12-2, TRAJ20)
CAVYLYKLSF

SEQ ID NO: 321406 - protein, 14 aa, Homo sapiens
  CDR3 for beta chain variable domain of TCR clone 160703 (TRBV12-5, TRBJ2-5)
CASGSRTHQETQYF

SEQ ID NO: 321407 - protein, 13 aa, Homo sapiens
  CDR3 for alpha chain variable domain of TCR clone 160704 (TRAV38-1, TRAJ42)
CARWGGSQGNLIF

SEQ ID NO: 321408 - protein, 15 aa, Homo sapiens
  CDR3 for beta chain variable domain of TCR clone 160704 (TRBV10-3, TRBJ2-3)
CAISLTSGGTDKQYF

SEQ ID NO: 321409 - protein, 13 aa, Homo sapiens
  CDR3 for alpha chain variable domain of TCR clone 160705 (TRAV21, TRAJ11)
CAVPNSGYSTFTF

SEQ ID NO: 321410 - protein, 13 aa, Homo sapiens
  CDR3 for beta chain variable domain of TCR clone 160705 (TRBV3-1, TRBJ2-7)
CASSLRDGYEQYF

SEQ ID NO: 321411 - protein, 13 aa, Homo sapiens
  CDR3 for alpha chain variable domain of TCR clone 160706 (TRAV3, TRAJ15)
CAVRDQAGTALIF

SEQ ID NO: 321412 - protein, 14 aa, Homo sapiens
  CDR3 for beta chain variable domain of TCR clone 160706 (TRBV4-1, TRBJ2-2)
CASSQAVNTGELFF

SEQ ID NO: 321413 - protein, 13 aa, Homo sapiens
  CDR3 for alpha chain variable domain of TCR clone 160707 (TRAV36/DV7, TRAJ49)
CAGDSNTGNQFYF

SEQ ID NO: 321414 - protein, 15 aa, Homo sapiens
  CDR3 for beta chain variable domain of TCR clone 160707 (TRBV10-1, TRBJ2-3)
CASSATSGGFDTQYF

SEQ ID NO: 321415 - protein, 14 aa, Homo sapiens
  CDR3 for alpha chain variable domain of TCR clone 160708 (TRAV2, TRAJ9)
CSVEDRSGGFKTIF

SEQ ID NO: 321416 - protein, 16 aa, Homo sapiens
  CDR3 for beta chain variable domain of TCR clone 160708 (TRBV15, TRBJ2-7)
CATSRDGGIPSYEQYF

SEQ ID NO: 321417 - protein, 17 aa, Homo sapiens
  CDR3 for alpha chain variable domain of TCR clone 160709 (TRAV3, TRAJ6)
CAVRDGPRAGGSYILTF

SEQ ID NO: 321418 - protein, 14 aa, Homo sapiens
  CDR3 for beta chain variable domain of TCR clone 160709 (TRBV7-2, TRBJ2-7)
CASSPKTSCYGQYF

SEQ ID NO: 321419 - protein, 13 aa, Homo sapiens
  CDR3 for alpha chain variable domain of TCR clone 160710 (TRAV20, TRAJ42)
CAVQGGSKGNLIF

SEQ ID NO: 321420 - protein, 17 aa, Homo sapiens
  CDR3 for beta chain variable domain of TCR clone 160710 (TRBV7-8, TRBJ2-6)
CASSAGTGGAGANDLTF

SEQ ID NO: 321421 - protein, 14 aa, Homo sapiens
  CDR3 for alpha chain variable domain of TCR clone 160711 (TRAV12-3, TRAJ10)
SHLPLTGGGNKLTF

SEQ ID NO: 321422 - protein, 16 aa, Homo sapiens
  CDR3 for beta chain variable domain of TCR clone 160711 (TRBV7-2, TRBJ2-3)
CASSLAGAGSGDTQYF

SEQ ID NO: 321423 - protein, 14 aa, Homo sapiens
  CDR3 for alpha chain variable domain of TCR clone 160712 (TRAV12-2, TRAJ24)
CAVTPVDSWGKLQF

SEQ ID NO: 321424 - protein, 12 aa, Homo sapiens
  CDR3 for beta chain variable domain of TCR clone 160712 (TRBV3-1, TRBJ2-1)
CASSQGSSGQFF

SEQ ID NO: 321425 - protein, 13 aa, Homo sapiens
  CDR3 for alpha chain variable domain of TCR clone 160713 (TRAV3, TRAJ21)
CAVREPDVNKFYL

SEQ ID NO: 321426 - protein, 13 aa, Homo sapiens
  CDR3 for beta chain variable domain of TCR clone 160713 (TRBV20-1, TRBJ1-1)
CSARGGGNTEAFF

SEQ ID NO: 321427 - protein, 13 aa, Homo sapiens
  CDR3 for alpha chain variable domain of TCR clone 160714 (TRAV13-1, TRAJ39)
CAASILAGSMLTF

SEQ ID NO: 321428 - protein, 15 aa, Homo sapiens
  CDR3 for beta chain variable domain of TCR clone 160714 (TRBV7-9, TRBJ1-1)
CASSLLEQGGTEAFF

SEQ ID NO: 321429 - protein, 17 aa, Homo sapiens
  CDR3 for alpha chain variable domain of TCR clone 160715 (TRAV1-1, TRAJ15)
CLLLLRCPNQAGTALIL

SEQ ID NO: 321430 - protein, 15 aa, Homo sapiens
  CDR3 for beta chain variable domain of TCR clone 160715 (TRBV27, TRBJ2-3)
CASSLGLAGPDTQYF

SEQ ID NO: 321431 - protein, 13 aa, Homo sapiens
  CDR3 for alpha chain variable domain of TCR clone 160716 (TRAV39, TRAJ33)
CAVDSDSNYQLIW

SEQ ID NO: 321432 - protein, 16 aa, Homo sapiens
  CDR3 for beta chain variable domain of TCR clone 160716 (TRBV6-1, TRBJ2-3)
CASSEVIGQGTDTQYF

SEQ ID NO: 321433 - protein, 10 aa, Homo sapiens
  CDR3 for alpha chain variable domain of TCR clone 160717 (TRAV12-1, TRAJ24)
CVVRWGKLQF

SEQ ID NO: 321434 - protein, 15 aa, Homo sapiens
  CDR3 for beta chain variable domain of TCR clone 160717 (TRBV7-8, TRBJ1-4)
CASGIRQGANEKLFF

SEQ ID NO: 321435 - protein, 13 aa, Homo sapiens
  CDR3 for alpha chain variable domain of TCR clone 160718 (TRAV8-6, TRAJ32)
CALSDRATNKLIF

SEQ ID NO: 321436 - protein, 13 aa, Homo sapiens
  CDR3 for beta chain variable domain of TCR clone 160718 (TRBV11-2, TRBJ2-7)
CASSLDLGYEQYF

SEQ ID NO: 321437 - protein, 14 aa, Homo sapiens
  CDR3 for alpha chain variable domain of TCR clone 160719 (TRAV12-3, TRAJ21)
CAMEGHQGFNKFYF

SEQ ID NO: 321438 - protein, 16 aa, Homo sapiens
  CDR3 for beta chain variable domain of TCR clone 160719 (TRBV19, TRBJ2-1)
CASSKAGPSSYNEQFY

SEQ ID NO: 321439 - protein, 14 aa, Homo sapiens
  CDR3 for alpha chain variable domain of TCR clone 160720 (TRAV12-1, TRAJ13)
CVVIDSGGYQKVTF

SEQ ID NO: 321440 - protein, 15 aa, Homo sapiens
  CDR3 for beta chain variable domain of TCR clone 160720 (TRBV7-9, TRBJ1-4)
CASSARTGGNEKLFF

SEQ ID NO: 321441 - protein, 14 aa, Homo sapiens
  CDR3 for alpha chain variable domain of TCR clone 160721 (TRAV12-3, TRAJ9)
CAMSPNTGGFKTIF

SEQ ID NO: 321442 - protein, 12 aa, Homo sapiens
  CDR3 for beta chain variable domain of TCR clone 160721 (TRBV19, TRBJ1-5)
CASCIAQQPQHF

SEQ ID NO: 321443 - protein, 14 aa, Homo sapiens
  CDR3 for alpha chain variable domain of TCR clone 160722 (TRAV12-2, TRAJ6)
CASKWGEGSYIPTF

SEQ ID NO: 321444 - protein, 13 aa, Homo sapiens
  CDR3 for beta chain variable domain of TCR clone 160722 (TRBV7-9, TRBJ2-3)
CASSPGSTDTQYF

SEQ ID NO: 321445 - protein, 14 aa, Homo sapiens
  CDR3 for alpha chain variable domain of TCR clone 160723 (TRAV8-1, TRAJ49)
CASSIANTGNQFYF

SEQ ID NO: 321446 - protein, 17 aa, Homo sapiens
  CDR3 for beta chain variable domain of TCR clone 160723 (TRBV20-1, TRBJ2-1)
CSASSSGLAGSYNEQFF

SEQ ID NO: 321447 - protein, 14 aa, Homo sapiens
  CDR3 for alpha chain variable domain of TCR clone 160724 (TRAV1-2, TRAJ16)
CAVNRFSDGQKLLF

SEQ ID NO: 321448 - protein, 13 aa, Homo sapiens
  CDR3 for beta chain variable domain of TCR clone 160724 (TRBV7-3, TRBJ2-1)
CVSSPGSYNEQFF

SEQ ID NO: 321449 - protein, 17 aa, Homo sapiens
  CDR3 for alpha chain variable domain of TCR clone 160725 (TRAV3, TRAJ6)
CAVRDGPRAGGSYIPTF

SEQ ID NO: 321450 - protein, 20 aa, Homo sapiens
  CDR3 for beta chain variable domain of TCR clone 160725 (TRBV28, TRBJ2-5)
CQHPYWTVTGTSGNQETQYF

SEQ ID NO: 321451 - protein, 17 aa, Homo sapiens
  CDR3 for alpha chain variable domain of TCR clone 160726 (TRAV3, TRAJ6)
CAVRDGPRAGGSYIPTF

SEQ ID NO: 321452 - protein, 15 aa, Homo sapiens
  CDR3 for beta chain variable domain of TCR clone 160726 (TRBV5-8, TRBJ1-5)
CASSLVRTGNQPQHF

SEQ ID NO: 321453 - protein, 13 aa, Homo sapiens
  CDR3 for alpha chain variable domain of TCR clone 160727 (TRAV23/DV6, TRAJ21)
CAARREQLQQILL

SEQ ID NO: 321454 - protein, 15 aa, Homo sapiens
  CDR3 for beta chain variable domain of TCR clone 160727 (TRBV27, TRBJ2-1)
CASSNGGGSSNEQFF

SEQ ID NO: 321455 - protein, 11 aa, Homo sapiens
  CDR3 for alpha chain variable domain of TCR clone 160728 (TRAV12-3, TRAJ17)
CNDAYSNKLTF

SEQ ID NO: 321456 - protein, 12 aa, Homo sapiens
  CDR3 for beta chain variable domain of TCR clone 160728 (TRBV12-4, TRBJ2-7)
CASSLGGYEQYF

SEQ ID NO: 321457 - protein, 12 aa, Homo sapiens
  CDR3 for alpha chain variable domain of TCR clone 160729 (TRAV12-3, TRAJ42)
CAPGGSQGNLIF

SEQ ID NO: 321458 - protein, 17 aa, Homo sapiens
  CDR3 for beta chain variable domain of TCR clone 160729 (TRBV28, TRBJ1-3)
CTSASSMGWASGNTIYF

SEQ ID NO: 321459 - protein, 11 aa, Homo sapiens
  CDR3 for alpha chain variable domain of TCR clone 160730 (TRAV27, TRAJ40)
SLTSGTYKYVF

SEQ ID NO: 321460 - protein, 13 aa, Homo sapiens
  CDR3 for beta chain variable domain of TCR clone 160730 (TRBV2, TRBJ2-5)
CASGTPYQETQYF

SEQ ID NO: 321461 - protein, 14 aa, Homo sapiens
  CDR3 for alpha chain variable domain of TCR clone 160731 (TRAV12-1, TRAJ17)
FVVNYKVAGNKLTF

SEQ ID NO: 321462 - protein, 17 aa, Homo sapiens
  CDR3 for beta chain variable domain of TCR clone 160731 (TRBV20-1, TRBJ2-1)
CSASSSGLAGSYNEQFF

SEQ ID NO: 321463 - protein, 13 aa, Homo sapiens
  CDR3 for alpha chain variable domain of TCR clone 160732 (TRAV13-2, TRAJ48)
CAEMDFGNEKLTF

SEQ ID NO: 321464 - protein, 15 aa, Homo sapiens
  CDR3 for beta chain variable domain of TCR clone 160732 (TRBV7-9, TRBJ1-6)
CASSSPGRGNSPRNF

SEQ ID NO: 321465 - protein, 15 aa, Homo sapiens
  CDR3 for alpha chain variable domain of TCR clone 160733 (TRAV2, TRAJ9)
CAVEDRGTGGFKTIF

SEQ ID NO: 321466 - protein, 14 aa, Homo sapiens
  CDR3 for beta chain variable domain of TCR clone 160733 (TRBV20-1, TRBJ2-7)
CSAWTALSSYEQYF

SEQ ID NO: 321467 - protein, 14 aa, Homo sapiens
  CDR3 for alpha chain variable domain of TCR clone 160734 (TRAV12-3, TRAJ12)
CAMSGMDSSYKLIF

SEQ ID NO: 321468 - protein, 14 aa, Homo sapiens
  CDR3 for beta chain variable domain of TCR clone 160734 (TRBV20-1, TRBJ1-4)
CSARSGQSNEKLFF

SEQ ID NO: 321469 - protein, 12 aa, Homo sapiens
  CDR3 for alpha chain variable domain of TCR clone 160735 (TRAV17, TRAJ47)
CATDFDGNKLVF

SEQ ID NO: 321470 - protein, 13 aa, Homo sapiens
  CDR3 for beta chain variable domain of TCR clone 160735 (TRBV4-2, TRBJ1-1)
CASSRAGNTEAFF

SEQ ID NO: 321471 - protein, 13 aa, Homo sapiens
  CDR3 for alpha chain variable domain of TCR clone 160736 (TRAV2, TRAJ40)
CAVVTSGTYKYIF

SEQ ID NO: 321472 - protein, 14 aa, Homo sapiens
  CDR3 for beta chain variable domain of TCR clone 160736 (TRBV4-2, TRBJ1-5)
CASSQEGGYQPQHF

SEQ ID NO: 321473 - protein, 11 aa, Homo sapiens
  CDR3 for alpha chain variable domain of TCR clone 160737 (TRAV13-1, TRAJ5)
CAPKGRRALTF

SEQ ID NO: 321474 - protein, 17 aa, Homo sapiens
  CDR3 for beta chain variable domain of TCR clone 160737 (TRBV28, TRBJ2-5)
CASITPEGDALQETQYF

SEQ ID NO: 321475 - protein, 14 aa, Homo sapiens
  CDR3 for alpha chain variable domain of TCR clone 160738 (TRAV23/DV6, TRAJ58)
CVGMRETSGSRLTF

SEQ ID NO: 321476 - protein, 13 aa, Homo sapiens
  CDR3 for beta chain variable domain of TCR clone 160738 (TRBV28, TRBJ2-7)
CASRSSGVYEQYF

SEQ ID NO: 321477 - protein, 15 aa, Homo sapiens
  CDR3 for alpha chain variable domain of TCR clone 160739 (TRAV25, TRAJ53)
CAATGGGGSNYKLTF

SEQ ID NO: 321478 - protein, 12 aa, Homo sapiens
  CDR3 for beta chain variable domain of TCR clone 160739 (TRBV7-8, TRBJ2-7)
CASSRGDREQYF

SEQ ID NO: 321479 - protein, 16 aa, Homo sapiens
  CDR3 for alpha chain variable domain of TCR clone 160740 (TRAV12-3, TRAJ53)
CAMSPGSGGSNYKLTF

SEQ ID NO: 321480 - protein, 13 aa, Homo sapiens
  CDR3 for beta chain variable domain of TCR clone 160740 (TRBV2, TRBJ1-2)
CASTWTGEDGYTF

SEQ ID NO: 321481 - protein, 12 aa, Homo sapiens
  CDR3 for alpha chain variable domain of TCR clone 160741 (TRAV12-3, TRAJ17)
CAITLTGNKLTF

SEQ ID NO: 321482 - protein, 15 aa, Homo sapiens
  CDR3 for beta chain variable domain of TCR clone 160741 (TRBV5-7, TRBJ2-7)
CASSPYFEGSYEQYF

SEQ ID NO: 321483 - protein, 17 aa, Homo sapiens
  CDR3 for alpha chain variable domain of TCR clone 160742 (TRAV3, TRAJ12)
CAVRDGGRRDSSYKLIF

SEQ ID NO: 321484 - protein, 13 aa, Homo sapiens
  CDR3 for beta chain variable domain of TCR clone 160742 (TRBV4-2, TRBJ1-1)
CASSQAGNTEAFF

SEQ ID NO: 321485 - protein, 13 aa, Homo sapiens
  CDR3 for alpha chain variable domain of TCR clone 160743 (TRAV38-2/DV8, TRAJ34)
CAYRTWNTDKLIF

SEQ ID NO: 321486 - protein, 18 aa, Homo sapiens
  CDR3 for beta chain variable domain of TCR clone 160743 (TRBV7-9, TRBJ2-7)
CASSLTTSGSRTWYEQYF

SEQ ID NO: 321487 - protein, 14 aa, Homo sapiens
  CDR3 for alpha chain variable domain of TCR clone 160744 (TRAV13-2, TRAJ17)
CAENSKAAGNKLTF

SEQ ID NO: 321488 - protein, 11 aa, Homo sapiens
  CDR3 for beta chain variable domain of TCR clone 160744 (TRBV6-3, TRBJ2-3)
CATGQADTQYV

SEQ ID NO: 321489 - protein, 14 aa, Homo sapiens
  CDR3 for alpha chain variable domain of TCR clone 160745 (TRAV4, TRAJ9)
CLVGSGTGGFKTVF

SEQ ID NO: 321490 - protein, 15 aa, Homo sapiens
  CDR3 for beta chain variable domain of TCR clone 160745 (TRBV7-2, TRBJ2-1)
CASILASGRVNEQFF

SEQ ID NO: 321491 - protein, 13 aa, Homo sapiens
  CDR3 for alpha chain variable domain of TCR clone 160746 (TRAV8-6, TRAJ33)
CAVSEGSNYQLIW

SEQ ID NO: 321492 - protein, 11 aa, Homo sapiens
  CDR3 for beta chain variable domain of TCR clone 160746 (TRBV7-9, TRBJ2-3)
CASSPTDTQYF

SEQ ID NO: 321493 - protein, 14 aa, Homo sapiens
  CDR3 for alpha chain variable domain of TCR clone 160747 (TRAV12-2, TRAJ11)
LAVNRESGYSTLTF

SEQ ID NO: 321494 - protein, 10 aa, Homo sapiens
  CDR3 for beta chain variable domain of TCR clone 160747 (TRBV20-1, TRBJ2-5)
CSARFETQYF

SEQ ID NO: 321495 - protein, 15 aa, Homo sapiens
  CDR3 for alpha chain variable domain of TCR clone 160748 (TRAV17, TRAJ57)
CATGPSQGGSEKLVF

SEQ ID NO: 321496 - protein, 19 aa, Homo sapiens
  CDR3 for beta chain variable domain of TCR clone 160748 (TRBV28, TRBJ2-5)
CASSLYLRLAGELQETQYF

SEQ ID NO: 321497 - protein, 15 aa, Homo sapiens
  CDR3 for alpha chain variable domain of TCR clone 160749 (TRAV3, TRAJ5)
CAVRDLDTGRRGLPF

SEQ ID NO: 321498 - protein, 13 aa, Homo sapiens
  CDR3 for beta chain variable domain of TCR clone 160749 (TRBV12-4, TRBJ2-7)
CASSPTETYEQYF

SEQ ID NO: 321499 - protein, 13 aa, Homo sapiens
  CDR3 for alpha chain variable domain of TCR clone 160750 (TRAV27, TRAJ45)
CRSPGGGADGLTF

SEQ ID NO: 321500 - protein, 17 aa, Homo sapiens
  CDR3 for beta chain variable domain of TCR clone 160750 (TRBV11-2, TRBJ2-1)
GASSLYPPGVEYNEQFF

SEQ ID NO: 321501 - protein, 10 aa, Homo sapiens
  CDR3 for alpha chain variable domain of TCR clone 160751 (TRAV13-1, )
CAASGPRRTP

SEQ ID NO: 321502 - protein, 16 aa, Homo sapiens
  CDR3 for beta chain variable domain of TCR clone 160751 (TRBV18, TRBJ2-3)
CASSPPAGGPRKYAVF

SEQ ID NO: 321503 - protein, 17 aa, Homo sapiens
  CDR3 for alpha chain variable domain of TCR clone 160752 (TRAV23/DV6, TRAJ57)
CAASSTPSQGGSEKLVF

SEQ ID NO: 321504 - protein, 14 aa, Homo sapiens
  CDR3 for beta chain variable domain of TCR clone 160752 (TRBV25-1, TRBJ1-1)
CASAHLGGNTEAFF

SEQ ID NO: 321505 - protein, 14 aa, Homo sapiens
  CDR3 for alpha chain variable domain of TCR clone 160753 (TRAV25, TRAJ45)
CARESGGGADGLTF

SEQ ID NO: 321506 - protein, 12 aa, Homo sapiens
  CDR3 for beta chain variable domain of TCR clone 160753 (TRBV7-9, TRBJ2-7)
CASSFDSYEQYL

SEQ ID NO: 321507 - protein, 12 aa, Homo sapiens
  CDR3 for alpha chain variable domain of TCR clone 160754 (TRAV21, TRAJ49)
CAVRNTGNQFYV

SEQ ID NO: 321508 - protein, 13 aa, Homo sapiens
  CDR3 for beta chain variable domain of TCR clone 160754 (TRBV7-9, TRBJ2-3)
CASSPGSTDTQYF

SEQ ID NO: 321509 - protein, 14 aa, Homo sapiens
  CDR3 for alpha chain variable domain of TCR clone 160755 (TRAV13-1, TRAJ23)
CAASRLGRGGKLIF

SEQ ID NO: 321510 - protein, 15 aa, Homo sapiens
  CDR3 for beta chain variable domain of TCR clone 160755 (TRBV20-1, TRBJ2-7)
CSARDRVSGMDEQYF

SEQ ID NO: 321511 - protein, 14 aa, Homo sapiens
  CDR3 for alpha chain variable domain of TCR clone 160756 (TRAV12-1, TRAJ12)
CVVTRMDSSYKLIF

SEQ ID NO: 321512 - protein, 15 aa, Homo sapiens
  CDR3 for beta chain variable domain of TCR clone 160756 (TRBV2, TRBJ2-2)
CASSRETVGTGELFF

SEQ ID NO: 321513 - protein, 16 aa, Homo sapiens
  CDR3 for alpha chain variable domain of TCR clone 160757 (TRAV4, TRAJ22)
CLVGDLYSGSARQLTF

SEQ ID NO: 321514 - protein, 15 aa, Homo sapiens
  CDR3 for beta chain variable domain of TCR clone 160757 (TRBV7-9, TRBJ1-4)
CASSRTGGFNENLFF

SEQ ID NO: 321515 - protein, 12 aa, Homo sapiens
  CDR3 for alpha chain variable domain of TCR clone 160758 (TRAV13-2, TRAJ31)
CAESYNNARLMF

SEQ ID NO: 321516 - protein, 13 aa, Homo sapiens
  CDR3 for beta chain variable domain of TCR clone 160758 (TRBV24-1, TRBJ1-3)
CATMADSGNTIYF

SEQ ID NO: 321517 - protein, 14 aa, Homo sapiens
  CDR3 for alpha chain variable domain of TCR clone 160759 (TRAV9-2, TRAJ39)
CALYIYNAGNMLTF

SEQ ID NO: 321518 - protein, 14 aa, Homo sapiens
  CDR3 for beta chain variable domain of TCR clone 160759 (TRBV7-2, TRBJ2-1)
CQQLRLAGGNEQFF

SEQ ID NO: 321519 - protein, 14 aa, Homo sapiens
  CDR3 for alpha chain variable domain of TCR clone 160760 (TRAV1-2, TRAJ8)
CAVREDTGFQKLLF

SEQ ID NO: 321520 - protein, 15 aa, Homo sapiens
  CDR3 for beta chain variable domain of TCR clone 160760 (TRBV7-9, TRBJ1-6)
CASSSPGRGNSPLHF

SEQ ID NO: 321521 - protein, 14 aa, Homo sapiens
  CDR3 for alpha chain variable domain of TCR clone 160761 (TRAV30, TRAJ26)
CGTEIVSYGQNFVF

SEQ ID NO: 321522 - protein, 15 aa, Homo sapiens
  CDR3 for beta chain variable domain of TCR clone 160761 (TRBV7-2, TRBJ1-2)
CASSLVSGGDYGYTF

SEQ ID NO: 321523 - protein, 17 aa, Homo sapiens
  CDR3 for alpha chain variable domain of TCR clone 160762 (TRAV35, TRAJ52)
CAGQLAAGGTSYGKLTF

SEQ ID NO: 321524 - protein, 12 aa, Homo sapiens
  CDR3 for beta chain variable domain of TCR clone 160762 (TRBV20-1, TRBJ2-7)
CSAGQRQSEQYF

SEQ ID NO: 321525 - protein, 17 aa, Homo sapiens
  CDR3 for alpha chain variable domain of TCR clone 160763 (TRAV23/DV6, TRAJ57)
CAASSTLSQGGSEKLFF

SEQ ID NO: 321526 - protein, 14 aa, Homo sapiens
  CDR3 for beta chain variable domain of TCR clone 160763 (TRBV19, TRBJ2-1)
CASPTFVLSGEQFF

SEQ ID NO: 321527 - protein, 15 aa, Homo sapiens
  CDR3 for alpha chain variable domain of TCR clone 160764 (TRAV21, TRAJ53)
CATLNSGGSNYKLTF

SEQ ID NO: 321528 - protein, 16 aa, Homo sapiens
  CDR3 for beta chain variable domain of TCR clone 160764 (TRBV12-4, TRBJ1-5)
CASSRPVGGSNQHQHF

SEQ ID NO: 321529 - protein, 14 aa, Homo sapiens
  CDR3 for alpha chain variable domain of TCR clone 160765 (TRAV13-1, TRAJ39)
CAASYNNAGNMLTF

SEQ ID NO: 321530 - protein, 13 aa, Homo sapiens
  CDR3 for beta chain variable domain of TCR clone 160765 (TRBV20-1, TRBJ1-1)
CSARVGGNTEAFF

SEQ ID NO: 321531 - protein, 15 aa, Homo sapiens
  CDR3 for alpha chain variable domain of TCR clone 160766 (TRAV17, TRAJ57)
CSTGPSQGGSEKLVC

SEQ ID NO: 321532 - protein, 16 aa, Homo sapiens
  CDR3 for beta chain variable domain of TCR clone 160766 (TRBV12-4, TRBJ1-5)
CASSRPVGGSNQPQHF

SEQ ID NO: 321533 - protein, 15 aa, Homo sapiens
  CDR3 for alpha chain variable domain of TCR clone 160767 (TRAV8-1, TRAJ6)
CAVNTPPGGSYIPTF

SEQ ID NO: 321534 - protein, 14 aa, Homo sapiens
  CDR3 for beta chain variable domain of TCR clone 160767 (TRBV12-4, TRBJ2-1)
CASRLGQGASEQFF

SEQ ID NO: 321535 - protein, 13 aa, Homo sapiens
  CDR3 for alpha chain variable domain of TCR clone 160768 (TRAV3, TRAJ27)
CAVSPLGAGKSTF

SEQ ID NO: 321536 - protein, 16 aa, Homo sapiens
  CDR3 for beta chain variable domain of TCR clone 160768 (TRBV10-3, TRBJ2-1)
CAISLTSGNSYNEQFF

SEQ ID NO: 321537 - protein, 14 aa, Homo sapiens
  CDR3 for alpha chain variable domain of TCR clone 160769 (TRAV12-1, TRAJ17)
CVVNHKAAGNKLTF

SEQ ID NO: 321538 - protein, 14 aa, Homo sapiens
  CDR3 for beta chain variable domain of TCR clone 160769 (TRBV20-1, TRBJ1-1)
CSAQTRIGGTEAFF

SEQ ID NO: 321539 - protein, 13 aa, Homo sapiens
  CDR3 for alpha chain variable domain of TCR clone 160770 (TRAV17, TRAJ5)
CAPMDTGRRALTF

SEQ ID NO: 321540 - protein, 13 aa, Homo sapiens
  CDR3 for beta chain variable domain of TCR clone 160770 (TRBV15, TRBJ2-7)
CATSTTGRYEQYF

SEQ ID NO: 321541 - protein, 12 aa, Homo sapiens
  CDR3 for alpha chain variable domain of TCR clone 160771 (TRAV17, TRAJ20)
CATDYNDYKLSF

SEQ ID NO: 321542 - protein, 17 aa, Homo sapiens
  CDR3 for beta chain variable domain of TCR clone 160771 (TRBV5-1, TRBJ2-2)
CASSLAGLSGGTGELFF

SEQ ID NO: 321543 - protein, 13 aa, Homo sapiens
  CDR3 for alpha chain variable domain of TCR clone 160772 (TRAV12-1, TRAJ42)
CGGVGGSQGNLIF

SEQ ID NO: 321544 - protein, 15 aa, Homo sapiens
  CDR3 for beta chain variable domain of TCR clone 160772 (TRBV5-4, TRBJ1-4)
CASSSFGTGNEQLFF

SEQ ID NO: 321545 - protein, 18 aa, Homo sapiens
  CDR3 for alpha chain variable domain of TCR clone 160773 (TRAV21, TRAJ52)
CAVRPPPAGGTSYGKLAF

SEQ ID NO: 321546 - protein, 14 aa, Homo sapiens
  CDR3 for beta chain variable domain of TCR clone 160773 (TRBV7-2, TRBJ1-4)
CASSHSKTNEKLFF

SEQ ID NO: 321547 - protein, 16 aa, Homo sapiens
  CDR3 for alpha chain variable domain of TCR clone 160774 (TRAV13-1, TRAJ45)
CAARGSIKGGADGLTF

SEQ ID NO: 321548 - protein, 13 aa, Homo sapiens
  CDR3 for beta chain variable domain of TCR clone 160774 (TRBV12-4, TRBJ2-5)
CASSKRGKETQYF

SEQ ID NO: 321549 - protein, 13 aa, Homo sapiens
  CDR3 for alpha chain variable domain of TCR clone 160775 (TRAV21, TRAJ20)
CAVGLRVDYKLSF

SEQ ID NO: 321550 - protein, 13 aa, Homo sapiens
  CDR3 for beta chain variable domain of TCR clone 160775 (TRBV6-1, TRBJ1-1)
CASSRQGNTGAIF

SEQ ID NO: 321551 - protein, 12 aa, Homo sapiens
  CDR3 for alpha chain variable domain of TCR clone 160776 (TRAV17, TRAJ4)
CATRGGYNKLIF

SEQ ID NO: 321552 - protein, 16 aa, Homo sapiens
  CDR3 for beta chain variable domain of TCR clone 160776 (TRBV12-4, TRBJ2-5)
CASSFFVRGRQETQYF

SEQ ID NO: 321553 - protein, 12 aa, Homo sapiens
  CDR3 for alpha chain variable domain of TCR clone 160777 (TRAV13-1, TRAJ49)
CAASPMGDQFYF

SEQ ID NO: 321554 - protein, 15 aa, Homo sapiens
  CDR3 for beta chain variable domain of TCR clone 160777 (TRBV7-9, TRBJ1-5)
CASSQGHQPNQPQHF

SEQ ID NO: 321555 - protein, 17 aa, Homo sapiens
  CDR3 for alpha chain variable domain of TCR clone 160778 (TRAV1-1, TRAJ15)
CLLLLRCPNQAGTALIF

SEQ ID NO: 321556 - protein, 15 aa, Homo sapiens
  CDR3 for beta chain variable domain of TCR clone 160778 (TRBV27, TRBJ2-3)
CAISLGLAGPDTQYF

SEQ ID NO: 321557 - protein, 13 aa, Homo sapiens
  CDR3 for alpha chain variable domain of TCR clone 160779 (TRAV36/DV7, TRAJ29)
YAVEPSGNTPLVF

SEQ ID NO: 321558 - protein, 11 aa, Homo sapiens
  CDR3 for beta chain variable domain of TCR clone 160779 (TRBV19, TRBJ2-7)
CASGNSYEQYF

SEQ ID NO: 321559 - protein, 14 aa, Homo sapiens
  CDR3 for alpha chain variable domain of TCR clone 160780 (TRAV27, TRAJ22)
CAGVSVLGKRQLTF

SEQ ID NO: 321560 - protein, 16 aa, Homo sapiens
  CDR3 for beta chain variable domain of TCR clone 160780 (TRBV4-2, TRBJ2-3)
CASSQELAGDTDTQYV

SEQ ID NO: 321561 - protein, 13 aa, Homo sapiens
  CDR3 for alpha chain variable domain of TCR clone 160781 (TRAV1-2, TRAJ9)
CAALNTGGFKTIF

SEQ ID NO: 321562 - protein, 12 aa, Homo sapiens
  CDR3 for beta chain variable domain of TCR clone 160781 (TRBV27, TRBJ2-2)
CASKLFTGELFF

SEQ ID NO: 321563 - protein, 11 aa, Homo sapiens
  CDR3 for alpha chain variable domain of TCR clone 160782 (TRAV12-3, TRAJ49)
CAANTGNQFYF

SEQ ID NO: 321564 - protein, 15 aa, Homo sapiens
  CDR3 for beta chain variable domain of TCR clone 160782 (TRBV2, TRBJ2-1)
CATLPSGLPYNEQFF

SEQ ID NO: 321565 - protein, 14 aa, Homo sapiens
  CDR3 for alpha chain variable domain of TCR clone 160783 (TRAV35, TRAJ10)
CAGILTGGGNKLTF

SEQ ID NO: 321566 - protein, 17 aa, Homo sapiens
  CDR3 for beta chain variable domain of TCR clone 160783 (TRBV24-1, TRBJ2-4)
CATSDAEARGVRNIQYF

SEQ ID NO: 321567 - protein, 13 aa, Homo sapiens
  CDR3 for alpha chain variable domain of TCR clone 160784 (TRAV8-6, TRAJ21)
CAVSPTSLNKFYF

SEQ ID NO: 321568 - protein, 14 aa, Homo sapiens
  CDR3 for beta chain variable domain of TCR clone 160784 (TRBV7-9, TRBJ2-5)
CASSLDTAQETHYF

SEQ ID NO: 321569 - protein, 12 aa, Homo sapiens
  CDR3 for alpha chain variable domain of TCR clone 160785 (TRAV13-1, TRAJ21)
CAAKEGCNKFYF

SEQ ID NO: 321570 - protein, 14 aa, Homo sapiens
  CDR3 for beta chain variable domain of TCR clone 160785 (TRBV18, TRBJ2-7)
CASSPRGGAYEQYF

SEQ ID NO: 321571 - protein, 16 aa, Homo sapiens
  CDR3 for alpha chain variable domain of TCR clone 160786 (TRAV3, TRAJ6)
CAVRDGMGRRKLHTHI

SEQ ID NO: 321572 - protein, 15 aa, Homo sapiens
  CDR3 for beta chain variable domain of TCR clone 160786 (TRBV9, TRBJ2-1)
CASSLAGSSYNEQFF

SEQ ID NO: 321573 - protein, 14 aa, Homo sapiens
  CDR3 for alpha chain variable domain of TCR clone 160787 (TRAV3, TRAJ28)
CAVRRGAGSYHLTF

SEQ ID NO: 321574 - protein, 16 aa, Homo sapiens
  CDR3 for beta chain variable domain of TCR clone 160787 (TRBV4-1, TRBJ2-7)
CASSQEWTSGPLEQYF

SEQ ID NO: 321575 - protein, 13 aa, Homo sapiens
  CDR3 for alpha chain variable domain of TCR clone 160788 (TRAV13-2, TRAJ48)
CAEMDFGNEKLTF

SEQ ID NO: 321576 - protein, 15 aa, Homo sapiens
  CDR3 for beta chain variable domain of TCR clone 160788 (TRBV7-3, TRBJ2-1)
CASSQRGGALIEKFF

SEQ ID NO: 321577 - protein, 13 aa, Homo sapiens
  CDR3 for alpha chain variable domain of TCR clone 160789 (TRAV13-1, TRAJ33)
CAAWTDSNYQLIW

SEQ ID NO: 321578 - protein, 13 aa, Homo sapiens
  CDR3 for beta chain variable domain of TCR clone 160789 (TRBV20-1, TRBJ2-7)
CSARTSGNYAQYF

SEQ ID NO: 321579 - protein, 14 aa, Homo sapiens
  CDR3 for alpha chain variable domain of TCR clone 160790 (TRAV20, TRAJ42)
CAVQAGGSQGNLIF

SEQ ID NO: 321580 - protein, 17 aa, Homo sapiens
  CDR3 for beta chain variable domain of TCR clone 160790 (TRBV7-9, TRBJ2-3)
CASSLEEAGAYPDTQYF

SEQ ID NO: 321581 - protein, 12 aa, Homo sapiens
  CDR3 for alpha chain variable domain of TCR clone 160791 (TRAV29/DV5, TRAJ49)
CAATDTGNEFYF

SEQ ID NO: 321582 - protein, 12 aa, Homo sapiens
  CDR3 for beta chain variable domain of TCR clone 160791 (TRBV12-4, TRBJ2-7)
CASSLGGYEQYF

SEQ ID NO: 321583 - protein, 14 aa, Homo sapiens
  CDR3 for alpha chain variable domain of TCR clone 160792 (TRAV35, TRAJ50)
CAGHRKTSYDKVIF

SEQ ID NO: 321584 - protein, 15 aa, Homo sapiens
  CDR3 for beta chain variable domain of TCR clone 160792 (TRBV5-1, TRBJ2-7)
CASSLYPDGGYEQYF

SEQ ID NO: 321585 - protein, 16 aa, Homo sapiens
  CDR3 for alpha chain variable domain of TCR clone 160793 (TRAV8-3, TRAJ44)
CAVGASNTGTASRLTF

SEQ ID NO: 321586 - protein, 15 aa, Homo sapiens
  CDR3 for beta chain variable domain of TCR clone 160793 (TRBV27, TRBJ1-5)
CASTFSRGSNQAQHF

SEQ ID NO: 321587 - protein, 13 aa, Homo sapiens
  CDR3 for alpha chain variable domain of TCR clone 160794 (TRAV13-1, TRAJ49)
CAAMLYTGNQFYF

SEQ ID NO: 321588 - protein, 14 aa, Homo sapiens
  CDR3 for beta chain variable domain of TCR clone 160794 (TRBV12-4, TRBJ1-5)
CQHQRVRLRAAQHF

SEQ ID NO: 321589 - protein, 15 aa, Homo sapiens
  CDR3 for alpha chain variable domain of TCR clone 160795 (TRAV17, TRAJ54)
CATEKLGQGAQKLVF

SEQ ID NO: 321590 - protein, 14 aa, Homo sapiens
  CDR3 for beta chain variable domain of TCR clone 160795 (TRBV7-3, TRBJ1-1)
CQQLRGEMNTEAFF

SEQ ID NO: 321591 - protein, 16 aa, Homo sapiens
  CDR3 for alpha chain variable domain of TCR clone 160796 (TRAV4, TRAJ8)
CLVGDSGNTGFQKLVF

SEQ ID NO: 321592 - protein, 15 aa, Homo sapiens
  CDR3 for beta chain variable domain of TCR clone 160796 (TRBV15, TRBJ1-2)
CATSRGRASGSGYTF

SEQ ID NO: 321593 - protein, 18 aa, Homo sapiens
  CDR3 for alpha chain variable domain of TCR clone 160797 (TRAV20, TRAJ37)
CAGCSQHRQTNLWARDNF

SEQ ID NO: 321594 - protein, 11 aa, Homo sapiens
  CDR3 for beta chain variable domain of TCR clone 160797 (TRBV12-4, TRBJ2-3)
CASTATDTQYF

SEQ ID NO: 321595 - protein, 11 aa, Homo sapiens
  CDR3 for alpha chain variable domain of TCR clone 160798 (TRAV1-2, TRAJ40)
CAVPGTYNYIF

SEQ ID NO: 321596 - protein, 15 aa, Homo sapiens
  CDR3 for beta chain variable domain of TCR clone 160798 (TRBV7-9, TRBJ2-7)
CASSLALAEAYEQYF

SEQ ID NO: 321597 - protein, 17 aa, Homo sapiens
  CDR3 for alpha chain variable domain of TCR clone 160799 (TRAV13-1, TRAJ28)
CAASPPYSGAGSYQLTF

SEQ ID NO: 321598 - protein, 15 aa, Homo sapiens
  CDR3 for beta chain variable domain of TCR clone 160799 (TRBV28, TRBJ2-4)
CAAGSGTLLMGIQYF

SEQ ID NO: 321599 - protein, 16 aa, Homo sapiens
  CDR3 for alpha chain variable domain of TCR clone 160800 (TRAV20, TRAJ22)
CAVQASSSGSARQLTF

SEQ ID NO: 321600 - protein, 15 aa, Homo sapiens
  CDR3 for beta chain variable domain of TCR clone 160800 (TRBV7-3, TRBJ2-2)
CASSETGQGTGELFF

SEQ ID NO: 321601 - protein, 14 aa, Homo sapiens
  CDR3 for alpha chain variable domain of TCR clone 160801 (TRAV1-2, TRAJ8)
CAVREDTGFQKLVF

SEQ ID NO: 321602 - protein, 16 aa, Homo sapiens
  CDR3 for beta chain variable domain of TCR clone 160801 (TRBV7-2, TRBJ2-3)
CASSLVALYSTDTQYF

SEQ ID NO: 321603 - protein, 13 aa, Homo sapiens
  CDR3 for alpha chain variable domain of TCR clone 160802 (TRAV2, TRAJ40)
CAVVTSGTYKYIF

SEQ ID NO: 321604 - protein, 16 aa, Homo sapiens
  CDR3 for beta chain variable domain of TCR clone 160802 (TRBV18, TRBJ2-3)
CASSPGGLASTDTQYF

SEQ ID NO: 321605 - protein, 14 aa, Homo sapiens
  CDR3 for alpha chain variable domain of TCR clone 160803 (TRAV12-1, TRAJ12)
CVVTRMDSSYKLIF

SEQ ID NO: 321606 - protein, 16 aa, Homo sapiens
  CDR3 for beta chain variable domain of TCR clone 160803 (TRBV7-3, TRBJ2-1)
CASSLEGYRSYNEQFF

SEQ ID NO: 321607 - protein, 10 aa, Homo sapiens
  CDR3 for alpha chain variable domain of TCR clone 160804 (TRAV12-2, TRAJ52)
RSTSYGKLTF

SEQ ID NO: 321608 - protein, 11 aa, Homo sapiens
  CDR3 for beta chain variable domain of TCR clone 160804 (TRBV11-2, TRBJ2-2)
CASSLPGELFF

SEQ ID NO: 321609 - protein, 13 aa, Homo sapiens
  CDR3 for alpha chain variable domain of TCR clone 160805 (TRAV22, TRAJ29)
CAVGGSGNTPLVF

SEQ ID NO: 321610 - protein, 14 aa, Homo sapiens
  CDR3 for beta chain variable domain of TCR clone 160805 (TRBV7-8, TRBJ2-3)
CASSLEAGTDTQYF

SEQ ID NO: 321611 - protein, 14 aa, Homo sapiens
  CDR3 for alpha chain variable domain of TCR clone 160806 (TRAV2, TRAJ23)
CAMGLRNQGGKLIF

SEQ ID NO: 321612 - protein, 12 aa, Homo sapiens
  CDR3 for beta chain variable domain of TCR clone 160806 (TRBV12-4, TRBJ2-7)
CASSLGGYEQYF

SEQ ID NO: 321613 - protein, 13 aa, Homo sapiens
  CDR3 for alpha chain variable domain of TCR clone 160807 (TRAV21, TRAJ57)
CAVTQGGSEKLVF

SEQ ID NO: 321614 - protein, 11 aa, Homo sapiens
  CDR3 for beta chain variable domain of TCR clone 160807 (TRBV11-2, TRBJ2-2)
CASSLPRELFF

SEQ ID NO: 321615 - protein, 14 aa, Homo sapiens
  CDR3 for alpha chain variable domain of TCR clone 160808 (TRAV2, TRAJ9)
CAVEDRSGGFKTIF

SEQ ID NO: 321616 - protein, 16 aa, Homo sapiens
  CDR3 for beta chain variable domain of TCR clone 160808 (TRBV4-1, TRBJ2-1)
CASSQEAGQGSDEQFF

SEQ ID NO: 321617 - protein, 15 aa, Homo sapiens
  CDR3 for alpha chain variable domain of TCR clone 160809 (TRAV3, TRAJ13)
CAARGYSGGYQKVTF

SEQ ID NO: 321618 - protein, 15 aa, Homo sapiens
  CDR3 for beta chain variable domain of TCR clone 160809 (TRBV5-7, TRBJ1-2)
CASSLGVAANYGYTF

SEQ ID NO: 321619 - protein, 15 aa, Homo sapiens
  CDR3 for alpha chain variable domain of TCR clone 160810 (TRAV29/DV5, TRAJ29)
CAASERSSGNTPLVF

SEQ ID NO: 321620 - protein, 13 aa, Homo sapiens
  CDR3 for beta chain variable domain of TCR clone 160810 (TRBV7-6, TRBJ2-1)
CQQLGGGADEQFF

SEQ ID NO: 321621 - protein, 17 aa, Homo sapiens
  CDR3 for alpha chain variable domain of TCR clone 160811 (TRAV36/DV7, TRAJ52)
CAVAQRAGGTSSGKLTF

SEQ ID NO: 321622 - protein, 14 aa, Homo sapiens
  CDR3 for beta chain variable domain of TCR clone 160811 (TRBV20-1, TRBJ2-3)
CSARGGTSTDTQYF

SEQ ID NO: 321623 - protein, 12 aa, Homo sapiens
  CDR3 for alpha chain variable domain of TCR clone 160812 (TRAV12-3, TRAJ40)
CAVSSGTYKYIF

SEQ ID NO: 321624 - protein, 15 aa, Homo sapiens
  CDR3 for beta chain variable domain of TCR clone 160812 (TRBV7-9, TRBJ2-7)
CASSPGGGLTYEQSF

SEQ ID NO: 321625 - protein, 12 aa, Homo sapiens
  CDR3 for alpha chain variable domain of TCR clone 160813 (TRAV12-3, TRAJ17)
CAMTLTDNKLTF

SEQ ID NO: 321626 - protein, 15 aa, Homo sapiens
  CDR3 for beta chain variable domain of TCR clone 160813 (TRBV10-3, TRBJ2-2)
CAISEGDRAAGELFF

SEQ ID NO: 321627 - protein, 14 aa, Homo sapiens
  CDR3 for alpha chain variable domain of TCR clone 160814 (TRAV12-3, TRAJ9)
CAMSPNTGGFKTIF

SEQ ID NO: 321628 - protein, 12 aa, Homo sapiens
  CDR3 for beta chain variable domain of TCR clone 160814 (TRBV11-2, TRBJ2-2)
CACSLGGGELFF

SEQ ID NO: 321629 - protein, 17 aa, Homo sapiens
  CDR3 for alpha chain variable domain of TCR clone 160815 (TRAV26-1, TRAJ36)
CCVLLHRRSTGANNLFF

SEQ ID NO: 321630 - protein, 19 aa, Homo sapiens
  CDR3 for beta chain variable domain of TCR clone 160815 (TRBV27, TRBJ2-1)
CASSLEILSPGAAGNEQFF

SEQ ID NO: 321631 - protein, 13 aa, Homo sapiens
  CDR3 for alpha chain variable domain of TCR clone 160816 (TRAV12-1, TRAJ7)
CVVNMRGNNRLAF

SEQ ID NO: 321632 - protein, 13 aa, Homo sapiens
  CDR3 for beta chain variable domain of TCR clone 160816 (TRBV11-2, TRBJ2-5)
CASSSTGEETQYF

SEQ ID NO: 321633 - protein, 12 aa, Homo sapiens
  CDR3 for alpha chain variable domain of TCR clone 160817 (TRAV8-3, TRAJ41)
FAVALSGYALNF

SEQ ID NO: 321634 - protein, 16 aa, Homo sapiens
  CDR3 for beta chain variable domain of TCR clone 160817 (TRBV27, TRBJ2-7)
CASSSERRDSAYEQYF

SEQ ID NO: 321635 - protein, 16 aa, Homo sapiens
  CDR3 for alpha chain variable domain of TCR clone 160818 (TRAV20, TRAJ22)
CAVQASSSGSARQLTF

SEQ ID NO: 321636 - protein, 15 aa, Homo sapiens
  CDR3 for beta chain variable domain of TCR clone 160818 (TRBV20-1, TRBJ2-5)
CSAPPRTGFGETQYF

SEQ ID NO: 321637 - protein, 17 aa, Homo sapiens
  CDR3 for alpha chain variable domain of TCR clone 160819 (TRAV3, TRAJ6)
CAVRDGPRAGGSNIPTF

SEQ ID NO: 321638 - protein, 12 aa, Homo sapiens
  CDR3 for beta chain variable domain of TCR clone 160819 (TRBV11-2, TRBJ2-1)
CASSPGNNEQFF

SEQ ID NO: 321639 - protein, 14 aa, Homo sapiens
  CDR3 for alpha chain variable domain of TCR clone 160820 (TRAV12-1, TRAJ23)
CVVNAVGRKAYLRT

SEQ ID NO: 321640 - protein, 12 aa, Homo sapiens
  CDR3 for beta chain variable domain of TCR clone 160820 (TRBV6-5, TRBJ2-3)
CASSDTTDTQYF

SEQ ID NO: 321641 - protein, 14 aa, Homo sapiens
  CDR3 for alpha chain variable domain of TCR clone 160821 (TRAV12-2, TRAJ13)
CAVKKTGGYQKVTF

SEQ ID NO: 321642 - protein, 16 aa, Homo sapiens
  CDR3 for beta chain variable domain of TCR clone 160821 (TRBV20-1, TRBJ1-2)
CSASMGQGVANYGYIF

SEQ ID NO: 321643 - protein, 14 aa, Homo sapiens
  CDR3 for alpha chain variable domain of TCR clone 160822 (TRAV34, TRAJ44)
CGADGTGTASKLTF

SEQ ID NO: 321644 - protein, 14 aa, Homo sapiens
  CDR3 for beta chain variable domain of TCR clone 160822 (TRBV7-2, TRBJ2-5)
CASSFTQGQETQYF

SEQ ID NO: 321645 - protein, 16 aa, Homo sapiens
  CDR3 for alpha chain variable domain of TCR clone 160823 (TRAV26-1, )
CIDIQNPDPAVYQLRD

SEQ ID NO: 321646 - protein, 15 aa, Homo sapiens
  CDR3 for beta chain variable domain of TCR clone 160823 (TRBV11-2, TRBJ2-2)
CASSSDRVNAGELFF

SEQ ID NO: 321647 - protein, 13 aa, Homo sapiens
  CDR3 for alpha chain variable domain of TCR clone 160824 (TRAV8-6, TRAJ49)
CAVITNTGNPFYF

SEQ ID NO: 321648 - protein, 12 aa, Homo sapiens
  CDR3 for beta chain variable domain of TCR clone 160824 (TRBV12-4, TRBJ2-7)
CASSLGGYEQYF

SEQ ID NO: 321649 - protein, 15 aa, Homo sapiens
  CDR3 for alpha chain variable domain of TCR clone 160825 (TRAV27, TRAJ28)
CAGASQGAGSYQLTF

SEQ ID NO: 321650 - protein, 14 aa, Homo sapiens
  CDR3 for beta chain variable domain of TCR clone 160825 (TRBV19, TRBJ2-1)
CASPTFVLSGEQFF

SEQ ID NO: 321651 - protein, 12 aa, Homo sapiens
  CDR3 for alpha chain variable domain of TCR clone 160826 (TRAV13-1, TRAJ17)
CAARTARNKLTF

SEQ ID NO: 321652 - protein, 15 aa, Homo sapiens
  CDR3 for beta chain variable domain of TCR clone 160826 (TRBV7-6, TRBJ1-1)
CASSPQGGANTEAFF

SEQ ID NO: 321653 - protein, 15 aa, Homo sapiens
  CDR3 for alpha chain variable domain of TCR clone 160827 (TRAV1-2, TRAJ28)
CAVQYSGAGSYQLTF

SEQ ID NO: 321654 - protein, 14 aa, Homo sapiens
  CDR3 for beta chain variable domain of TCR clone 160827 (TRBV20-1, TRBJ1-1)
CSAQTRIGGTEAFF

SEQ ID NO: 321655 - protein, 16 aa, Homo sapiens
  CDR3 for alpha chain variable domain of TCR clone 160828 (TRAV8-3, TRAJ10)
CAVGPILTGGGNKLTF

SEQ ID NO: 321656 - protein, 17 aa, Homo sapiens
  CDR3 for beta chain variable domain of TCR clone 160828 (TRBV5-1, TRBJ2-5)
CASSPVALGQNQETQYF

SEQ ID NO: 321657 - protein, 13 aa, Homo sapiens
  CDR3 for alpha chain variable domain of TCR clone 160829 (TRAV35, TRAJ57)
CAGSQGGSEKLVF

SEQ ID NO: 321658 - protein, 14 aa, Homo sapiens
  CDR3 for beta chain variable domain of TCR clone 160829 (TRBV2, TRBJ2-7)
CASSLTSGGYEQYF

SEQ ID NO: 321659 - protein, 17 aa, Homo sapiens
  CDR3 for alpha chain variable domain of TCR clone 160830 (TRAV16, TRAJ37)
CAFWPKNGSSNTGKLIF

SEQ ID NO: 321660 - protein, 13 aa, Homo sapiens
  CDR3 for beta chain variable domain of TCR clone 160830 (TRBV7-9, TRBJ1-2)
CASSLKQNYGYTF

SEQ ID NO: 321661 - protein, 11 aa, Homo sapiens
  CDR3 for alpha chain variable domain of TCR clone 160831 (TRAV3, TRAJ33)
CAVRRNYQLIW

SEQ ID NO: 321662 - protein, 16 aa, Homo sapiens
  CDR3 for beta chain variable domain of TCR clone 160831 (TRBV27, TRBJ2-7)
CASSSKRRDSAYEQYF

SEQ ID NO: 321663 - protein, 15 aa, Homo sapiens
  CDR3 for alpha chain variable domain of TCR clone 160832 (TRAV13-1, TRAJ3)
CAASKLASSASKIIF

SEQ ID NO: 321664 - protein, 16 aa, Homo sapiens
  CDR3 for beta chain variable domain of TCR clone 160832 (TRBV19, TRBJ2-1)
CASSKAGPSSYNEQFF

SEQ ID NO: 321665 - protein, 12 aa, Homo sapiens
  CDR3 for alpha chain variable domain of TCR clone 160833 (TRAV13-1, TRAJ42)
SVLRGSQANLIF

SEQ ID NO: 321666 - protein, 13 aa, Homo sapiens
  CDR3 for beta chain variable domain of TCR clone 160833 (TRBV2, TRBJ1-4)
CASSELGVEKLFF

SEQ ID NO: 321667 - protein, 14 aa, Homo sapiens
  CDR3 for alpha chain variable domain of TCR clone 160834 (TRAV21, TRAJ38)
CAVANAGNNRKLIW

SEQ ID NO: 321668 - protein, 14 aa, Homo sapiens
  CDR3 for beta chain variable domain of TCR clone 160834 (TRBV19, TRBJ2-1)
CASPTFVLSGEQFF

SEQ ID NO: 321669 - protein, 10 aa, Homo sapiens
  CDR3 for alpha chain variable domain of TCR clone 160835 (TRAV2, TRAJ34)
CAVVNDKLIF

SEQ ID NO: 321670 - protein, 15 aa, Homo sapiens
  CDR3 for beta chain variable domain of TCR clone 160835 (TRBV2, TRBJ2-5)
CASSSSVAGGETQYF

SEQ ID NO: 321671 - protein, 12 aa, Homo sapiens
  CDR3 for alpha chain variable domain of TCR clone 160836 (TRAV21, TRAJ31)
CAVWGNNARLMF

SEQ ID NO: 321672 - protein, 16 aa, Homo sapiens
  CDR3 for beta chain variable domain of TCR clone 160836 (TRBV6-1, TRBJ1-2)
CASSGAWQGRSHGYTF

SEQ ID NO: 321673 - protein, 13 aa, Homo sapiens
  CDR3 for alpha chain variable domain of TCR clone 160837 (TRAV2, TRAJ24)
CAVSTDSWGKLQF

SEQ ID NO: 321674 - protein, 14 aa, Homo sapiens
  CDR3 for beta chain variable domain of TCR clone 160837 (TRBV13, TRBJ2-5)
CASSLDTAQETQYF

SEQ ID NO: 321675 - protein, 15 aa, Homo sapiens
  CDR3 for alpha chain variable domain of TCR clone 160838 (TRAV3, TRAJ22)
CAVRDRGGSARHMTF

SEQ ID NO: 321676 - protein, 16 aa, Homo sapiens
  CDR3 for beta chain variable domain of TCR clone 160838 (TRBV5-4, TRBJ2-3)
CASQQPGAGGSDTQYF

SEQ ID NO: 321677 - protein, 15 aa, Homo sapiens
  CDR3 for alpha chain variable domain of TCR clone 160839 (TRAV35, TRAJ52)
CAGPRGGTGYGKLIF

SEQ ID NO: 321678 - protein, 14 aa, Homo sapiens
  CDR3 for beta chain variable domain of TCR clone 160839 (TRBV20-1, TRBJ2-7)
CSAWTALSSYEQYF

SEQ ID NO: 321679 - protein, 16 aa, Homo sapiens
  CDR3 for alpha chain variable domain of TCR clone 160840 (TRAV26-1, TRAJ44)
IASSESRTGTASKLTF

SEQ ID NO: 321680 - protein, 15 aa, Homo sapiens
  CDR3 for beta chain variable domain of TCR clone 160840 (TRBV7-2, TRBJ2-3)
CASSSQTSSTDTQYF

SEQ ID NO: 321681 - protein, 13 aa, Homo sapiens
  CDR3 for alpha chain variable domain of TCR clone 160841 (TRAV12-3, TRAJ33)
CAMSVNSNYQLIW

SEQ ID NO: 321682 - protein, 17 aa, Homo sapiens
  CDR3 for beta chain variable domain of TCR clone 160841 (TRBV7-8, TRBJ2-1)
CASSLRLAGGPLDEQFF

SEQ ID NO: 321683 - protein, 14 aa, Homo sapiens
  CDR3 for alpha chain variable domain of TCR clone 160842 (TRAV4, TRAJ26)
RLVGPHNHGQNFVF

SEQ ID NO: 321684 - protein, 17 aa, Homo sapiens
  CDR3 for beta chain variable domain of TCR clone 160842 (TRBV24-1, TRBJ2-1)
CATSDVSTSGTYNEQFF

SEQ ID NO: 321685 - protein, 15 aa, Homo sapiens
  CDR3 for alpha chain variable domain of TCR clone 160843 (TRAV27, TRAJ38)
CAGRFNAGNNRKLIW

SEQ ID NO: 321686 - protein, 19 aa, Homo sapiens
  CDR3 for beta chain variable domain of TCR clone 160843 (TRBV25-1, TRBJ2-2)
CAILVYRVDRGRKTGELFF

SEQ ID NO: 321687 - protein, 15 aa, Homo sapiens
  CDR3 for alpha chain variable domain of TCR clone 160844 (TRAV8-3, TRAJ45)
CASSYSGGCADGLTF

SEQ ID NO: 321688 - protein, 18 aa, Homo sapiens
  CDR3 for beta chain variable domain of TCR clone 160844 (TRBV18, TRBJ1-3)
CASSPRGGAGPSGNTIYF

SEQ ID NO: 321689 - protein, 15 aa, Homo sapiens
  CDR3 for alpha chain variable domain of TCR clone 160845 (TRAV8-3, TRAJ41)
CAVGSNSNSGYALNF

SEQ ID NO: 321690 - protein, 12 aa, Homo sapiens
  CDR3 for beta chain variable domain of TCR clone 160845 (TRBV11-2, TRBJ2-2)
CASSLPTGELFF

SEQ ID NO: 321691 - protein, 14 aa, Homo sapiens
  CDR3 for alpha chain variable domain of TCR clone 160846 (TRAV17, TRAJ12)
CAILPMDSSYKLIF

SEQ ID NO: 321692 - protein, 11 aa, Homo sapiens
  CDR3 for beta chain variable domain of TCR clone 160846 (TRBV19, TRBJ1-2)
CASSISSGYTF

SEQ ID NO: 321693 - protein, 14 aa, Homo sapiens
  CDR3 for alpha chain variable domain of TCR clone 160847 (TRAV3, TRAJ7)
CAVREEEREQQTRF

SEQ ID NO: 321694 - protein, 12 aa, Homo sapiens
  CDR3 for beta chain variable domain of TCR clone 160847 (TRBV7-8, TRBJ2-7)
CASRLGDREQYF

SEQ ID NO: 321695 - protein, 11 aa, Homo sapiens
  CDR3 for alpha chain variable domain of TCR clone 160848 (TRAV21, TRAJ11)
CAVHGYGTLTF

SEQ ID NO: 321696 - protein, 11 aa, Homo sapiens
  CDR3 for beta chain variable domain of TCR clone 160848 (TRBV19, TRBJ1-1)
CASSIGSEAFF

SEQ ID NO: 321697 - protein, 17 aa, Homo sapiens
  CDR3 for alpha chain variable domain of TCR clone 160849 (TRAV8-6, TRAJ58)
CAVSSWVGETSGARLTF

SEQ ID NO: 321698 - protein, 17 aa, Homo sapiens
  CDR3 for beta chain variable domain of TCR clone 160849 (TRBV11-2, TRBJ2-1)
CASSLYPPGVEYNEQFF

SEQ ID NO: 321699 - protein, 19 aa, Homo sapiens
  CDR3 for alpha chain variable domain of TCR clone 160850 (TRAV25, TRAJ43)
TATQTTDEGTYFCAVFMRF

SEQ ID NO: 321700 - protein, 13 aa, Homo sapiens
  CDR3 for beta chain variable domain of TCR clone 160850 (TRBV7-9, TRBJ1-2)
CASSLKQNYGYTF

SEQ ID NO: 321701 - protein, 14 aa, Homo sapiens
  CDR3 for alpha chain variable domain of TCR clone 160851 (TRAV1-2, TRAJ8)
CAVREDTGFQKLGF

SEQ ID NO: 321702 - protein, 15 aa, Homo sapiens
  CDR3 for beta chain variable domain of TCR clone 160851 (TRBV27, TRBJ2-1)
CASSNGGGSSNEQFF

SEQ ID NO: 321703 - protein, 14 aa, Homo sapiens
  CDR3 for alpha chain variable domain of TCR clone 160852 (TRAV13-1, TRAJ47)
CAASGVKYGNKLVF

SEQ ID NO: 321704 - protein, 14 aa, Homo sapiens
  CDR3 for beta chain variable domain of TCR clone 160852 (TRBV20-1, TRBJ1-1)
CSAQTRIGGTEAFF

SEQ ID NO: 321705 - protein, 14 aa, Homo sapiens
  CDR3 for alpha chain variable domain of TCR clone 160853 (TRAV12-1, TRAJ17)
CVVNYKAAGNKLTF

SEQ ID NO: 321706 - protein, 16 aa, Homo sapiens
  CDR3 for beta chain variable domain of TCR clone 160853 (TRBV12-4, TRBJ1-5)
CASSRPVGGSKQPQHF

SEQ ID NO: 321707 - protein, 13 aa, Homo sapiens
  CDR3 for alpha chain variable domain of TCR clone 160854 (TRAV13-1, TRAJ21)
CAASIYNFNKFYF

SEQ ID NO: 321708 - protein, 15 aa, Homo sapiens
  CDR3 for beta chain variable domain of TCR clone 160854 (TRBV7-2, TRBJ2-3)
CASSSTGLETDTQYF

SEQ ID NO: 321709 - protein, 16 aa, Homo sapiens
  CDR3 for alpha chain variable domain of TCR clone 160855 (TRAV2, TRAJ23)
CLLLCWERGLGGKLIF

SEQ ID NO: 321710 - protein, 20 aa, Homo sapiens
  CDR3 for beta chain variable domain of TCR clone 160855 (TRBV3-1, TRBJ2-6)
CASSPRPGLEGGAGANVLTF

SEQ ID NO: 321711 - protein, 13 aa, Homo sapiens
  CDR3 for alpha chain variable domain of TCR clone 160856 (TRAV29/DV5, TRAJ54)
CAAHLQGAQKLVF

SEQ ID NO: 321712 - protein, 16 aa, Homo sapiens
  CDR3 for beta chain variable domain of TCR clone 160856 (TRBV19, TRBJ2-1)
CASSKAGPSSYNEQFF

SEQ ID NO: 321713 - protein, 23 aa, Homo sapiens
  CDR3 for alpha chain variable domain of TCR clone 160857 (TRAV30, TRAJ43)
CTLRPPSSVTQEPTSAALSDMRF

SEQ ID NO: 321714 - protein, 14 aa, Homo sapiens
  CDR3 for beta chain variable domain of TCR clone 160857 (TRBV7-2, TRBJ2-7)
CASRSQGAAYEQYF

SEQ ID NO: 321715 - protein, 14 aa, Homo sapiens
  CDR3 for alpha chain variable domain of TCR clone 160858 (TRAV12-2, TRAJ17)
CAALFKAAGHKLTF

SEQ ID NO: 321716 - protein, 16 aa, Homo sapiens
  CDR3 for beta chain variable domain of TCR clone 160858 (TRBV20-1, TRBJ2-2)
CSASASGIPGAGELFF

SEQ ID NO: 321717 - protein, 13 aa, Homo sapiens
  CDR3 for alpha chain variable domain of TCR clone 160859 (TRAV27, TRAJ42)
CAGARGSQGTLIF

SEQ ID NO: 321718 - protein, 14 aa, Homo sapiens
  CDR3 for beta chain variable domain of TCR clone 160859 (TRBV20-1, TRBJ1-1)
CSAQTRIGGTEAFF

SEQ ID NO: 321719 - protein, 13 aa, Homo sapiens
  CDR3 for alpha chain variable domain of TCR clone 160860 (TRAV8-6, TRAJ20)
CAVLLGDDYKLSF

SEQ ID NO: 321720 - protein, 15 aa, Homo sapiens
  CDR3 for beta chain variable domain of TCR clone 160860 (TRBV4-1, TRBJ2-7)
CASSQQGQGFVEQYF

SEQ ID NO: 321721 - protein, 13 aa, Homo sapiens
  CDR3 for alpha chain variable domain of TCR clone 160861 (TRAV8-3, TRAJ21)
CAVGAYNFNKFYF

SEQ ID NO: 321722 - protein, 16 aa, Homo sapiens
  CDR3 for beta chain variable domain of TCR clone 160861 (TRBV19, TRBJ2-1)
CAISMGGGSSYNEQFF

SEQ ID NO: 321723 - protein, 13 aa, Homo sapiens
  CDR3 for alpha chain variable domain of TCR clone 160862 (TRAV8-6, TRAJ16)
CAVSSPDGQKLLF

SEQ ID NO: 321724 - protein, 16 aa, Homo sapiens
  CDR3 for beta chain variable domain of TCR clone 160862 (TRBV5-7, TRBJ2-3)
CTSSSLGGAITDTQYF

SEQ ID NO: 321725 - protein, 14 aa, Homo sapiens
  CDR3 for alpha chain variable domain of TCR clone 160863 (TRAV26-1, TRAJ49)
CIVRLTNTGNQFYF

SEQ ID NO: 321726 - protein, 13 aa, Homo sapiens
  CDR3 for beta chain variable domain of TCR clone 160863 (TRBV4-1, TRBJ2-7)
CASSQGQAYEQDF

SEQ ID NO: 321727 - protein, 14 aa, Homo sapiens
  CDR3 for alpha chain variable domain of TCR clone 160864 (TRAV1-2, TRAJ16)
CAVNRFSDGQKLLF

SEQ ID NO: 321728 - protein, 12 aa, Homo sapiens
  CDR3 for beta chain variable domain of TCR clone 160864 (TRBV11-2, TRBJ2-2)
CASSLGGGELHF

SEQ ID NO: 321729 - protein, 13 aa, Homo sapiens
  CDR3 for alpha chain variable domain of TCR clone 160865 (TRAV27, TRAJ41)
CAGEGNSGYALNF

SEQ ID NO: 321730 - protein, 14 aa, Homo sapiens
  CDR3 for beta chain variable domain of TCR clone 160865 (TRBV10-3, TRBJ2-1)
CAISDRGGVTEQFF

SEQ ID NO: 321731 - protein, 17 aa, Homo sapiens
  CDR3 for alpha chain variable domain of TCR clone 160866 (TRAV26-2, TRAJ42)
CLLRDVGYGGGQGNLIF

SEQ ID NO: 321732 - protein, 16 aa, Homo sapiens
  CDR3 for beta chain variable domain of TCR clone 160866 (TRBV12-4, TRBJ2-7)
CASSLIGGTGTYEQYF

SEQ ID NO: 321733 - protein, 10 aa, Homo sapiens
  CDR3 for alpha chain variable domain of TCR clone 160867 (TRAV1-2, TRAJ31)
CAFFDARLMF

SEQ ID NO: 321734 - protein, 14 aa, Homo sapiens
  CDR3 for beta chain variable domain of TCR clone 160867 (TRBV7-3, TRBJ2-1)
CASSLAGGTNEQFF

SEQ ID NO: 321735 - protein, 15 aa, Homo sapiens
  CDR3 for alpha chain variable domain of TCR clone 160868 (TRAV25, TRAJ52)
CAGRPGGTSYGKLTF

SEQ ID NO: 321736 - protein, 16 aa, Homo sapiens
  CDR3 for beta chain variable domain of TCR clone 160868 (TRBV7-9, TRBJ2-1)
CASSDVAGGSYNEQFF

SEQ ID NO: 321737 - protein, 14 aa, Homo sapiens
  CDR3 for alpha chain variable domain of TCR clone 160869 (TRAV12-3, TRAJ10)
SHLPLTGGGNKLTF

SEQ ID NO: 321738 - protein, 14 aa, Homo sapiens
  CDR3 for beta chain variable domain of TCR clone 160869 (TRBV12-4, TRBJ1-1)
CASSLDGLNTEAFF

SEQ ID NO: 321739 - protein, 12 aa, Homo sapiens
  CDR3 for alpha chain variable domain of TCR clone 160870 (TRAV12-3, TRAJ20)
CAMVRGDYKLSF

SEQ ID NO: 321740 - protein, 13 aa, Homo sapiens
  CDR3 for beta chain variable domain of TCR clone 160870 (TRBV11-2, TRBJ2-7)
CASSGTRPYEQYF

SEQ ID NO: 321741 - protein, 18 aa, Homo sapiens
  CDR3 for alpha chain variable domain of TCR clone 160871 (TRAV26-2, TRAJ45)
CILRVDKYSGGGADGLTF

SEQ ID NO: 321742 - protein, 15 aa, Homo sapiens
  CDR3 for beta chain variable domain of TCR clone 160871 (TRBV6-3, TRBJ1-3)
CASRGGGSSGNTIYF

SEQ ID NO: 321743 - protein, 14 aa, Homo sapiens
  CDR3 for alpha chain variable domain of TCR clone 160872 (TRAV12-2, TRAJ44)
CAVNPAGTASKLIF

SEQ ID NO: 321744 - protein, 13 aa, Homo sapiens
  CDR3 for beta chain variable domain of TCR clone 160872 (TRBV20-1, TRBJ1-6)
CSAPLGVGSPLHF

SEQ ID NO: 321745 - protein, 14 aa, Homo sapiens
  CDR3 for alpha chain variable domain of TCR clone 160873 (TRAV4, TRAJ17)
CLVGDMAAGNKLTF

SEQ ID NO: 321746 - protein, 14 aa, Homo sapiens
  CDR3 for beta chain variable domain of TCR clone 160873 (TRBV4-1, TRBJ2-7)
CASSPVAGGGEQYF

SEQ ID NO: 321747 - protein, 13 aa, Homo sapiens
  CDR3 for alpha chain variable domain of TCR clone 160874 (TRAV12-2, TRAJ4)
CAVRSGGYSKLIF

SEQ ID NO: 321748 - protein, 15 aa, Homo sapiens
  CDR3 for beta chain variable domain of TCR clone 160874 (TRBV10-3, TRBJ2-1)
CAISDVQDRAYEQFF

SEQ ID NO: 321749 - protein, 15 aa, Homo sapiens
  CDR3 for alpha chain variable domain of TCR clone 160875 (TRAV13-2, TRAJ10)
CAENKIGGVGNKLTF

SEQ ID NO: 321750 - protein, 15 aa, Homo sapiens
  CDR3 for beta chain variable domain of TCR clone 160875 (TRBV5-1, TRBJ1-2)
CASSPGDRGSYGYTF

SEQ ID NO: 321751 - protein, 13 aa, Homo sapiens
  CDR3 for alpha chain variable domain of TCR clone 160876 (TRAV2, TRAJ40)
CAVVTSGTYKYIF

SEQ ID NO: 321752 - protein, 15 aa, Homo sapiens
  CDR3 for beta chain variable domain of TCR clone 160876 (TRBV7-2, TRBJ2-1)
CASSLASGRVNEQFF

SEQ ID NO: 321753 - protein, 15 aa, Homo sapiens
  CDR3 for alpha chain variable domain of TCR clone 160877 (TRAV12-1, TRAJ42)
CVVTRGGGSQGNLTF

SEQ ID NO: 321754 - protein, 14 aa, Homo sapiens
  CDR3 for beta chain variable domain of TCR clone 160877 (TRBV11-2, TRBJ2-3)
CASSLGGGANTQYF

SEQ ID NO: 321755 - protein, 16 aa, Homo sapiens
  CDR3 for alpha chain variable domain of TCR clone 160878 (TRAV38-1, TRAJ42)
CAFRLVRGGSQGNLIF

SEQ ID NO: 321756 - protein, 13 aa, Homo sapiens
  CDR3 for beta chain variable domain of TCR clone 160878 (TRBV19, TRBJ1-1)
CASTRRGDTEAFF

SEQ ID NO: 321757 - protein, 11 aa, Homo sapiens
  CDR3 for alpha chain variable domain of TCR clone 160879 (TRAV2, TRAJ33)
CAVDSNYQLIW

SEQ ID NO: 321758 - protein, 13 aa, Homo sapiens
  CDR3 for beta chain variable domain of TCR clone 160879 (TRBV27, TRBJ2-7)
CASSSGDSYEQYF

SEQ ID NO: 321759 - protein, 13 aa, Homo sapiens
  CDR3 for alpha chain variable domain of TCR clone 160880 (TRAV20, TRAJ37)
CAGCSSNTGKLIF

SEQ ID NO: 321760 - protein, 14 aa, Homo sapiens
  CDR3 for beta chain variable domain of TCR clone 160880 (TRBV28, TRBJ2-1)
CASSPGEGGNEQFF

SEQ ID NO: 321761 - protein, 14 aa, Homo sapiens
  CDR3 for alpha chain variable domain of TCR clone 160881 (TRAV16, TRAJ39)
CALSKNNAGNMLTF

SEQ ID NO: 321762 - protein, 12 aa, Homo sapiens
  CDR3 for beta chain variable domain of TCR clone 160881 (TRBV19, TRBJ2-7)
CASTSVGSEQYF

SEQ ID NO: 321763 - protein, 15 aa, Homo sapiens
  CDR3 for alpha chain variable domain of TCR clone 160882 (TRAV17, TRAJ45)
CATAELGGSADGLTF

SEQ ID NO: 321764 - protein, 14 aa, Homo sapiens
  CDR3 for beta chain variable domain of TCR clone 160882 (TRBV3-1, TRBJ2-5)
CASSQAVRQETQYF

SEQ ID NO: 321765 - protein, 11 aa, Homo sapiens
  CDR3 for alpha chain variable domain of TCR clone 160883 (TRAV39, TRAJ49)
CAVDISTQFYF

SEQ ID NO: 321766 - protein, 11 aa, Homo sapiens
  CDR3 for beta chain variable domain of TCR clone 160883 (TRBV7-8, TRBJ2-7)
CASSLSPEQYF

SEQ ID NO: 321767 - protein, 12 aa, Homo sapiens
  CDR3 for alpha chain variable domain of TCR clone 160884 (TRAV13-1, TRAJ21)
CSAKEGFNKFYF

SEQ ID NO: 321768 - protein, 20 aa, Homo sapiens
  CDR3 for beta chain variable domain of TCR clone 160884 (TRBV7-8, TRBJ2-2)
CASSHLFPGPTIHITGELFF

SEQ ID NO: 321769 - protein, 13 aa, Homo sapiens
  CDR3 for alpha chain variable domain of TCR clone 160885 (TRAV23/DV6, TRAJ22)
CAPWGGSARQLTF

SEQ ID NO: 321770 - protein, 14 aa, Homo sapiens
  CDR3 for beta chain variable domain of TCR clone 160885 (TRBV18, TRBJ2-7)
CASCPTSGGYEQYF

SEQ ID NO: 321771 - protein, 14 aa, Homo sapiens
  CDR3 for alpha chain variable domain of TCR clone 160886 (TRAV1-2, TRAJ16)
CAVNRFSDGQKLLF

SEQ ID NO: 321772 - protein, 16 aa, Homo sapiens
  CDR3 for beta chain variable domain of TCR clone 160886 (TRBV5-7, TRBJ2-7)
CASSPTSGRELDEQYF

SEQ ID NO: 321773 - protein, 11 aa, Homo sapiens
  CDR3 for alpha chain variable domain of TCR clone 160887 (TRAV3, TRAJ21)
CAVGHFNKPYF

SEQ ID NO: 321774 - protein, 16 aa, Homo sapiens
  CDR3 for beta chain variable domain of TCR clone 160887 (TRBV19, TRBJ2-1)
CASSKAGPSSYNEQFF

SEQ ID NO: 321775 - protein, 18 aa, Homo sapiens
  CDR3 for alpha chain variable domain of TCR clone 160888 (TRAV21, TRAJ52)
CAVRPSPAGGTSYGKLTL

SEQ ID NO: 321776 - protein, 13 aa, Homo sapiens
  CDR3 for beta chain variable domain of TCR clone 160888 (TRBV4-1, TRBJ2-1)
CASSQAGGDEQFF

SEQ ID NO: 321777 - protein, 11 aa, Homo sapiens
  CDR3 for alpha chain variable domain of TCR clone 160889 (TRAV23/DV6, TRAJ4)
APAVGYNKLIF

SEQ ID NO: 321778 - protein, 17 aa, Homo sapiens
  CDR3 for beta chain variable domain of TCR clone 160889 (TRBV20-1, TRBJ2-1)
CSAPDRGAGVAYNEQFF

SEQ ID NO: 321779 - protein, 14 aa, Homo sapiens
  CDR3 for alpha chain variable domain of TCR clone 160890 (TRAV12-2, TRAJ17)
CAVLFKAAGKKLTF

SEQ ID NO: 321780 - protein, 17 aa, Homo sapiens
  CDR3 for beta chain variable domain of TCR clone 160890 (TRBV20-1, TRBJ2-2)
CSASGSGQGGLAGELFF

SEQ ID NO: 321781 - protein, 11 aa, Homo sapiens
  CDR3 for alpha chain variable domain of TCR clone 160891 (TRAV12-3, TRAJ17)
RAMTLTGKLTF

SEQ ID NO: 321782 - protein, 15 aa, Homo sapiens
  CDR3 for beta chain variable domain of TCR clone 160891 (TRBV20-1, TRBJ2-7)
CSARDRVSGMDEQYF

SEQ ID NO: 321783 - protein, 17 aa, Homo sapiens
  CDR3 for alpha chain variable domain of TCR clone 160892 (TRAV3, TRAJ42)
CAVRDRDYGVSQGNLIF

SEQ ID NO: 321784 - protein, 13 aa, Homo sapiens
  CDR3 for beta chain variable domain of TCR clone 160892 (TRBV10-2, TRBJ2-7)
CASGASGGYEQYF

SEQ ID NO: 321785 - protein, 14 aa, Homo sapiens
  CDR3 for alpha chain variable domain of TCR clone 160893 (TRAV26-1, TRAJ16)
RIAVPFSDGQKLLF

SEQ ID NO: 321786 - protein, 12 aa, Homo sapiens
  CDR3 for beta chain variable domain of TCR clone 160893 (TRBV4-2, TRBJ2-1)
CARSAQKNEQFF

SEQ ID NO: 321787 - protein, 19 aa, Homo sapiens
  CDR3 for alpha chain variable domain of TCR clone 160894 (TRAV1-2, TRAJ26)
CLLPLCCKRPDNYGQNFVF

SEQ ID NO: 321788 - protein, 15 aa, Homo sapiens
  CDR3 for beta chain variable domain of TCR clone 160894 (TRBV9, TRBJ1-6)
CASSVAGTGDSPLHF

SEQ ID NO: 321789 - protein, 14 aa, Homo sapiens
  CDR3 for alpha chain variable domain of TCR clone 160895 (TRAV13-1, TRAJ3)
CAASKSSSASKIIF

SEQ ID NO: 321790 - protein, 16 aa, Homo sapiens
  CDR3 for beta chain variable domain of TCR clone 160895 (TRBV15, TRBJ2-3)
CATSRDLGIVTDTRYF

SEQ ID NO: 321791 - protein, 12 aa, Homo sapiens
  CDR3 for alpha chain variable domain of TCR clone 160896 (TRAV16, TRAJ10)
CSRTGGGSKLTF

SEQ ID NO: 321792 - protein, 14 aa, Homo sapiens
  CDR3 for beta chain variable domain of TCR clone 160896 (TRBV7-2, TRBJ1-2)
CASSQTGSTYGYTF

SEQ ID NO: 321793 - protein, 16 aa, Homo sapiens
  CDR3 for alpha chain variable domain of TCR clone 160897 (TRAV5, TRAJ23)
CAGDRLIFGQGTELSV

SEQ ID NO: 321794 - protein, 13 aa, Homo sapiens
  CDR3 for beta chain variable domain of TCR clone 160897 (TRBV7-9, TRBJ1-2)
CASSLKQNYGYTF

SEQ ID NO: 321795 - protein, 13 aa, Homo sapiens
  CDR3 for alpha chain variable domain of TCR clone 160898 (TRAV8-3, TRAJ28)
CAVGAVGSYQLTF

SEQ ID NO: 321796 - protein, 13 aa, Homo sapiens
  CDR3 for beta chain variable domain of TCR clone 160898 (TRBV9, TRBJ2-7)
CASSASDSYEQYF

SEQ ID NO: 321797 - protein, 14 aa, Homo sapiens
  CDR3 for alpha chain variable domain of TCR clone 160899 (TRAV12-3, TRAJ10)
SHLPLTGGGNKLTF

SEQ ID NO: 321798 - protein, 17 aa, Homo sapiens
  CDR3 for beta chain variable domain of TCR clone 160899 (TRBV24-1, TRBJ2-1)
CATCDVSTSGTYNEQFF

SEQ ID NO: 321799 - protein, 14 aa, Homo sapiens
  CDR3 for alpha chain variable domain of TCR clone 160900 (TRAV8-2, TRAJ4)
CVVSPSGGYTKLIF

SEQ ID NO: 321800 - protein, 13 aa, Homo sapiens
  CDR3 for beta chain variable domain of TCR clone 160900 (TRBV27, TRBJ2-1)
CASRTLGVGEQFF

SEQ ID NO: 321801 - protein, 15 aa, Homo sapiens
  CDR3 for alpha chain variable domain of TCR clone 160901 (TRAV8-3, TRAJ27)
CAVGPSKTNAGKSTF

SEQ ID NO: 321802 - protein, 14 aa, Homo sapiens
  CDR3 for beta chain variable domain of TCR clone 160901 (TRBV7-6, TRBJ2-3)
CASSLGTVTDTQYF

SEQ ID NO: 321803 - protein, 13 aa, Homo sapiens
  CDR3 for alpha chain variable domain of TCR clone 160902 (TRAV29/DV5, TRAJ47)
CAASAESGNKLVF

SEQ ID NO: 321804 - protein, 15 aa, Homo sapiens
  CDR3 for beta chain variable domain of TCR clone 160902 (TRBV7-9, TRBJ1-4)
CASSARTGGNEKLFF

SEQ ID NO: 321805 - protein, 17 aa, Homo sapiens
  CDR3 for alpha chain variable domain of TCR clone 160903 (TRAV3, TRAJ6)
CAVRDSPRAGGSYIPTF

SEQ ID NO: 321806 - protein, 13 aa, Homo sapiens
  CDR3 for beta chain variable domain of TCR clone 160903 (TRBV2, TRBJ2-7)
CASSVGGSGEQYF

SEQ ID NO: 321807 - protein, 14 aa, Homo sapiens
  CDR3 for alpha chain variable domain of TCR clone 160904 (TRAV6, TRAJ10)
CALDLTGGGNKPTF

SEQ ID NO: 321808 - protein, 14 aa, Homo sapiens
  CDR3 for beta chain variable domain of TCR clone 160904 (TRBV18, TRBJ2-7)
CASSPAGGPGEQYF

SEQ ID NO: 321809 - protein, 13 aa, Homo sapiens
  CDR3 for alpha chain variable domain of TCR clone 160905 (TRAV12-1, TRAJ22)
CVASGGSARQLTL

SEQ ID NO: 321810 - protein, 12 aa, Homo sapiens
  CDR3 for beta chain variable domain of TCR clone 160905 (TRBV29-1, TRBJ2-3)
CSVTGGADTQYF

SEQ ID NO: 321811 - protein, 10 aa, Homo sapiens
  CDR3 for alpha chain variable domain of TCR clone 160906 (TRAV36/DV7, TRAJ48)
CAVGNVKLTF

SEQ ID NO: 321812 - protein, 15 aa, Homo sapiens
  CDR3 for beta chain variable domain of TCR clone 160906 (TRBV6-5, TRBJ1-4)
CASSSVGGAGEKLFF

SEQ ID NO: 321813 - protein, 13 aa, Homo sapiens
  CDR3 for alpha chain variable domain of TCR clone 160907 (TRAV13-1, TRAJ5)
CAARVTGRRALTF

SEQ ID NO: 321814 - protein, 14 aa, Homo sapiens
  CDR3 for beta chain variable domain of TCR clone 160907 (TRBV15, TRBJ1-5)
CATSSGVPNQPQHF

SEQ ID NO: 321815 - protein, 15 aa, Homo sapiens
  CDR3 for alpha chain variable domain of TCR clone 160908 (TRAV3, TRAJ4)
CAQNMFSGGYNKLIF

SEQ ID NO: 321816 - protein, 16 aa, Homo sapiens
  CDR3 for beta chain variable domain of TCR clone 160908 (TRBV3-1, TRBJ1-6)
CASSQEFQGSYSHLHF

SEQ ID NO: 321817 - protein, 16 aa, Homo sapiens
  CDR3 for alpha chain variable domain of TCR clone 160909 (TRAV21, TRAJ37)
CAVRPRGSSNTGKLIF

SEQ ID NO: 321818 - protein, 14 aa, Homo sapiens
  CDR3 for beta chain variable domain of TCR clone 160909 (TRBV7-3, TRBJ1-1)
CASSLKGGNTEAFF

SEQ ID NO: 321819 - protein, 13 aa, Homo sapiens
  CDR3 for alpha chain variable domain of TCR clone 160910 (TRAV14/DV4, TRAJ26)
CAMREAYGQNFVF

SEQ ID NO: 321820 - protein, 15 aa, Homo sapiens
  CDR3 for beta chain variable domain of TCR clone 160910 (TRBV13, TRBJ2-1)
CASSLVHRARDTAHR

SEQ ID NO: 321821 - protein, 13 aa, Homo sapiens
  CDR3 for alpha chain variable domain of TCR clone 160911 (TRAV2, TRAJ40)
CAVVTSGTYKYIF

SEQ ID NO: 321822 - protein, 18 aa, Homo sapiens
  CDR3 for beta chain variable domain of TCR clone 160911 (TRBV24-1, TRBJ2-1)
CATSDLMFLGRGVHEQFF

SEQ ID NO: 321823 - protein, 10 aa, Homo sapiens
  CDR3 for alpha chain variable domain of TCR clone 160912 (TRAV16, TRAJ22)
SAMYLRHLTF

SEQ ID NO: 321824 - protein, 15 aa, Homo sapiens
  CDR3 for beta chain variable domain of TCR clone 160912 (TRBV7-9, TRBJ1-6)
CASSSPGRGNSPPHF

SEQ ID NO: 321825 - protein, 14 aa, Homo sapiens
  CDR3 for alpha chain variable domain of TCR clone 160913 (TRAV1-2, TRAJ16)
CAVNRFSDGQKLLF

SEQ ID NO: 321826 - protein, 12 aa, Homo sapiens
  CDR3 for beta chain variable domain of TCR clone 160913 (TRBV19, TRBJ2-1)
CASSTTGGSPFF

SEQ ID NO: 321827 - protein, 14 aa, Homo sapiens
  CDR3 for alpha chain variable domain of TCR clone 160914 (TRAV12-1, TRAJ30)
CVVNIGGRDDKISF

SEQ ID NO: 321828 - protein, 13 aa, Homo sapiens
  CDR3 for beta chain variable domain of TCR clone 160914 (TRBV24-1, TRBJ2-2)
CATSDWSTGELFF

SEQ ID NO: 321829 - protein, 11 aa, Homo sapiens
  CDR3 for alpha chain variable domain of TCR clone 160915 (TRAV1-1, TRAJ16)
CTAGDGQKLLF

SEQ ID NO: 321830 - protein, 15 aa, Homo sapiens
  CDR3 for beta chain variable domain of TCR clone 160915 (TRBV28, TRBJ1-2)
CASIPQGSDDYGYTF

SEQ ID NO: 321831 - protein, 12 aa, Homo sapiens
  CDR3 for alpha chain variable domain of TCR clone 160916 (TRAV12-1, TRAJ23)
RVVNIPGGKLIF

SEQ ID NO: 321832 - protein, 15 aa, Homo sapiens
  CDR3 for beta chain variable domain of TCR clone 160916 (TRBV7-2, TRBJ2-7)
CASSVVSSGSYEQYF

SEQ ID NO: 321833 - protein, 12 aa, Homo sapiens
  CDR3 for alpha chain variable domain of TCR clone 160917 (TRAV12-3, TRAJ31)
CAMSVPNARLML

SEQ ID NO: 321834 - protein, 12 aa, Homo sapiens
  CDR3 for beta chain variable domain of TCR clone 160917 (TRBV11-2, TRBJ2-1)
CASSVQREGQFF

SEQ ID NO: 321835 - protein, 13 aa, Homo sapiens
  CDR3 for alpha chain variable domain of TCR clone 160918 (TRAV20, TRAJ34)
CAVRSYNTDKLIF

SEQ ID NO: 321836 - protein, 17 aa, Homo sapiens
  CDR3 for beta chain variable domain of TCR clone 160918 (TRBV7-3, TRBJ2-3)
CASSLMKRMRGADTQYF

SEQ ID NO: 321837 - protein, 12 aa, Homo sapiens
  CDR3 for alpha chain variable domain of TCR clone 160919 (TRAV17, TRAJ57)
CATDGGSEKLVF

SEQ ID NO: 321838 - protein, 13 aa, Homo sapiens
  CDR3 for beta chain variable domain of TCR clone 160919 (TRBV14, TRBJ1-1)
CASSREFGTEAFF

SEQ ID NO: 321839 - protein, 13 aa, Homo sapiens
  CDR3 for alpha chain variable domain of TCR clone 160920 (TRAV12-3, TRAJ43)
CAMIRPNNNDICF

SEQ ID NO: 321840 - protein, 12 aa, Homo sapiens
  CDR3 for beta chain variable domain of TCR clone 160920 (TRBV11-2, TRBJ2-5)
CASSLGQETQYF

SEQ ID NO: 321841 - protein, 11 aa, Homo sapiens
  CDR3 for alpha chain variable domain of TCR clone 160921 (TRAV12-3, TRAJ16)
CAIRDGQKLLF

SEQ ID NO: 321842 - protein, 14 aa, Homo sapiens
  CDR3 for beta chain variable domain of TCR clone 160921 (TRBV7-7, TRBJ2-2)
CASSTRASGGELFF

SEQ ID NO: 321843 - protein, 12 aa, Homo sapiens
  CDR3 for alpha chain variable domain of TCR clone 160922 (TRAV13-1, TRAJ21)
CAAKEGTNKFYF

SEQ ID NO: 321844 - protein, 14 aa, Homo sapiens
  CDR3 for beta chain variable domain of TCR clone 160922 (TRBV5-4, TRBJ1-1)
CASSLDSRRDEAFF

SEQ ID NO: 321845 - protein, 16 aa, Homo sapiens
  CDR3 for alpha chain variable domain of TCR clone 160923 (TRAV1-2, TRAJ10)
CALRGVLTGGGNKLTF

SEQ ID NO: 321846 - protein, 14 aa, Homo sapiens
  CDR3 for beta chain variable domain of TCR clone 160923 (TRBV7-3, TRBJ2-1)
CASSLAGGTNEQFF

SEQ ID NO: 321847 - protein, 14 aa, Homo sapiens
  CDR3 for alpha chain variable domain of TCR clone 160924 (TRAV35, TRAJ22)
CAGLRPGSARQLTF

SEQ ID NO: 321848 - protein, 14 aa, Homo sapiens
  CDR3 for beta chain variable domain of TCR clone 160924 (TRBV4-1, TRBJ2-7)
CASSPVAGGDELYF

SEQ ID NO: 321849 - protein, 13 aa, Homo sapiens
  CDR3 for alpha chain variable domain of TCR clone 160925 (TRAV30, TRAJ24)
CGTVTDSWGKLQF

SEQ ID NO: 321850 - protein, 16 aa, Homo sapiens
  CDR3 for beta chain variable domain of TCR clone 160925 (TRBV7-3, TRBJ2-2)
CASSLKRATLSGELFF

SEQ ID NO: 321851 - protein, 14 aa, Homo sapiens
  CDR3 for alpha chain variable domain of TCR clone 160926 (TRAV17, TRAJ57)
CATDASGGSEKLVF

SEQ ID NO: 321852 - protein, 14 aa, Homo sapiens
  CDR3 for beta chain variable domain of TCR clone 160926 (TRBV4-2, TRBJ2-1)
CASGLDRAYNEQLF

SEQ ID NO: 321853 - protein, 15 aa, Homo sapiens
  CDR3 for alpha chain variable domain of TCR clone 160927 (TRAV1-2, TRAJ28)
CAVQYSGAGSYQLTC

SEQ ID NO: 321854 - protein, 13 aa, Homo sapiens
  CDR3 for beta chain variable domain of TCR clone 160927 (TRBV20-1, TRBJ2-7)
CSATHTSGYEQYF

SEQ ID NO: 321855 - protein, 14 aa, Homo sapiens
  CDR3 for alpha chain variable domain of TCR clone 160928 (TRAV8-3, TRAJ10)
CAVGNAGGGNKLTF

SEQ ID NO: 321856 - protein, 16 aa, Homo sapiens
  CDR3 for beta chain variable domain of TCR clone 160928 (TRBV11-2, TRBJ1-2)
CASSMDTGGADYGYTF

SEQ ID NO: 321857 - protein, 10 aa, Homo sapiens
  CDR3 for alpha chain variable domain of TCR clone 160929 (TRAV36/DV7, TRAJ48)
CAVGYEKLTF

SEQ ID NO: 321858 - protein, 14 aa, Homo sapiens
  CDR3 for beta chain variable domain of TCR clone 160929 (TRBV7-2, TRBJ2-7)
CASSPKTSFYEQYF

SEQ ID NO: 321859 - protein, 15 aa, Homo sapiens
  CDR3 for alpha chain variable domain of TCR clone 160930 (TRAV13-1, TRAJ52)
CAANAGGTSYGKLTF

SEQ ID NO: 321860 - protein, 15 aa, Homo sapiens
  CDR3 for beta chain variable domain of TCR clone 160930 (TRBV25-1, TRBJ1-4)
CASSPGDSTNEKLFF

SEQ ID NO: 321861 - protein, 14 aa, Homo sapiens
  CDR3 for alpha chain variable domain of TCR clone 160931 (TRAV17, TRAJ40)
CATALTSGTYRYIF

SEQ ID NO: 321862 - protein, 13 aa, Homo sapiens
  CDR3 for beta chain variable domain of TCR clone 160931 (TRBV27, TRBJ2-1)
CASSSGSYNEQFF

SEQ ID NO: 321863 - protein, 13 aa, Homo sapiens
  CDR3 for alpha chain variable domain of TCR clone 160932 (TRAV21, TRAJ20)
WAVGLRVDYKLSF

SEQ ID NO: 321864 - protein, 13 aa, Homo sapiens
  CDR3 for beta chain variable domain of TCR clone 160932 (TRBV6-1, TRBJ1-1)
CASSRQGNTEAFF

SEQ ID NO: 321865 - protein, 15 aa, Homo sapiens
  CDR3 for alpha chain variable domain of TCR clone 160933 (TRAV3, TRAJ47)
CAVRDIGEYGNKLVF

SEQ ID NO: 321866 - protein, 14 aa, Homo sapiens
  CDR3 for beta chain variable domain of TCR clone 160933 (TRBV5-1, TRBJ1-1)
CASSRTTGDTEAFF

SEQ ID NO: 321867 - protein, 13 aa, Homo sapiens
  CDR3 for alpha chain variable domain of TCR clone 160934 (TRAV23/DV6, TRAJ16)
CAASISDGQRLPF

SEQ ID NO: 321868 - protein, 15 aa, Homo sapiens
  CDR3 for beta chain variable domain of TCR clone 160934 (TRBV2, TRBJ2-2)
CASSRETVGTGELFF

SEQ ID NO: 321869 - protein, 13 aa, Homo sapiens
  CDR3 for alpha chain variable domain of TCR clone 160935 (TRAV12-1, TRAJ6)
CVVFPGGSYIPTF

SEQ ID NO: 321870 - protein, 17 aa, Homo sapiens
  CDR3 for beta chain variable domain of TCR clone 160935 (TRBV7-8, TRBJ1-2)
CASSLRPLQGHLYGYTF

SEQ ID NO: 321871 - protein, 12 aa, Homo sapiens
  CDR3 for alpha chain variable domain of TCR clone 160936 (TRAV27, TRAJ35)
CAGADFGNVLHS

SEQ ID NO: 321872 - protein, 16 aa, Homo sapiens
  CDR3 for beta chain variable domain of TCR clone 160936 (TRBV6-1, TRBJ2-1)
CASILRQGSSYNEQFF

SEQ ID NO: 321873 - protein, 15 aa, Homo sapiens
  CDR3 for alpha chain variable domain of TCR clone 160937 (TRAV25, TRAJ52)
CAGRLGGTSYGKLTF

SEQ ID NO: 321874 - protein, 13 aa, Homo sapiens
  CDR3 for beta chain variable domain of TCR clone 160937 (TRBV4-1, TRBJ2-2)
CASSQENTGELFF

SEQ ID NO: 321875 - protein, 22 aa, Homo sapiens
  CDR3 for alpha chain variable domain of TCR clone 160938 (TRAV24, TRAJ42)
CAFNGAKEIPSSEKALNSLLNQ

SEQ ID NO: 321876 - protein, 15 aa, Homo sapiens
  CDR3 for beta chain variable domain of TCR clone 160938 (TRBV5-5, TRBJ1-5)
CASSSTPGSNQPQHF

SEQ ID NO: 321877 - protein, 15 aa, Homo sapiens
  CDR3 for alpha chain variable domain of TCR clone 160939 (TRAV21, TRAJ32)
CAAAPYGGATNKLIF

SEQ ID NO: 321878 - protein, 17 aa, Homo sapiens
  CDR3 for beta chain variable domain of TCR clone 160939 (TRBV18, TRBJ2-3)
RASSPFGDGGFTDTQYF

SEQ ID NO: 321879 - protein, 15 aa, Homo sapiens
  CDR3 for alpha chain variable domain of TCR clone 160940 (TRAV17, TRAJ45)
CAMAELGGGADGLTF

SEQ ID NO: 321880 - protein, 14 aa, Homo sapiens
  CDR3 for beta chain variable domain of TCR clone 160940 (TRBV3-1, TRBJ2-5)
CASSQAVRQETQYF

SEQ ID NO: 321881 - protein, 13 aa, Homo sapiens
  CDR3 for alpha chain variable domain of TCR clone 160941 (TRAV21, TRAJ8)
CAAPNTGFQKLVF

SEQ ID NO: 321882 - protein, 14 aa, Homo sapiens
  CDR3 for beta chain variable domain of TCR clone 160941 (TRBV7-2, TRBJ2-7)
CASSPKTSFYEQYF

SEQ ID NO: 321883 - protein, 14 aa, Homo sapiens
  CDR3 for alpha chain variable domain of TCR clone 160942 (TRAV1-2, TRAJ8)
CAVREDTGFQKLVF

SEQ ID NO: 321884 - protein, 16 aa, Homo sapiens
  CDR3 for beta chain variable domain of TCR clone 160942 (TRBV7-9, TRBJ2-7)
CASSYPDREGGYEQYF

SEQ ID NO: 321885 - protein, 15 aa, Homo sapiens
  CDR3 for alpha chain variable domain of TCR clone 160943 (TRAV13-1, TRAJ18)
CAASGGGSTLGRLYF

SEQ ID NO: 321886 - protein, 13 aa, Homo sapiens
  CDR3 for beta chain variable domain of TCR clone 160943 (TRBV18, TRBJ2-1)
CASGLASNDEQFF

SEQ ID NO: 321887 - protein, 15 aa, Homo sapiens
  CDR3 for alpha chain variable domain of TCR clone 160944 (TRAV29/DV5, TRAJ29)
CAASERSSGNTPPVV

SEQ ID NO: 321888 - protein, 17 aa, Homo sapiens
  CDR3 for beta chain variable domain of TCR clone 160944 (TRBV4-1, TRBJ1-4)
CASSQEGPRGVEEKLFF

SEQ ID NO: 321889 - protein, 16 aa, Homo sapiens
  CDR3 for alpha chain variable domain of TCR clone 160945 (TRAV30, TRAJ24)
CGTEIVDADSWGKFQF

SEQ ID NO: 321890 - protein, 13 aa, Homo sapiens
  CDR3 for beta chain variable domain of TCR clone 160945 (TRBV7-9, TRBJ2-4)
CATEGLAGNIQYF

SEQ ID NO: 321891 - protein, 12 aa, Homo sapiens
  CDR3 for alpha chain variable domain of TCR clone 160946 (TRAV26-1, TRAJ20)
CIVTSNDYKLSF

SEQ ID NO: 321892 - protein, 15 aa, Homo sapiens
  CDR3 for beta chain variable domain of TCR clone 160946 (TRBV11-2, TRBJ1-6)
CASSLDPWAVSPLHF

SEQ ID NO: 321893 - protein, 14 aa, Homo sapiens
  CDR3 for alpha chain variable domain of TCR clone 160947 (TRAV12-2, TRAJ13)
CAVKKTGGYQKVTF

SEQ ID NO: 321894 - protein, 17 aa, Homo sapiens
  CDR3 for beta chain variable domain of TCR clone 160947 (TRBV18, TRBJ2-1)
CASSKGLSGGADNEQFF

SEQ ID NO: 321895 - protein, 14 aa, Homo sapiens
  CDR3 for alpha chain variable domain of TCR clone 160948 (TRAV12-2, TRAJ13)
CAVKKTGGYQKVTF

SEQ ID NO: 321896 - protein, 18 aa, Homo sapiens
  CDR3 for beta chain variable domain of TCR clone 160948 (TRBV11-2, TRBJ2-3)
CASSVGGASRGAPNTQYF

SEQ ID NO: 321897 - protein, 12 aa, Homo sapiens
  CDR3 for alpha chain variable domain of TCR clone 160949 (TRAV35, TRAJ52)
NAGGTSYGKLTF

SEQ ID NO: 321898 - protein, 15 aa, Homo sapiens
  CDR3 for beta chain variable domain of TCR clone 160949 (TRBV7-9, TRBJ1-6)
CASSSPGRGNSPLHF

SEQ ID NO: 321899 - protein, 14 aa, Homo sapiens
  CDR3 for alpha chain variable domain of TCR clone 160950 (TRAV1-2, TRAJ8)
CAVGEDTGFQKLVF

SEQ ID NO: 321900 - protein, 15 aa, Homo sapiens
  CDR3 for beta chain variable domain of TCR clone 160950 (TRBV7-9, TRBJ1-4)
CASSARTGGNENLFF

SEQ ID NO: 321901 - protein, 11 aa, Homo sapiens
  CDR3 for alpha chain variable domain of TCR clone 160951 (TRAV13-1, TRAJ24)
WAASGWGKVQL

SEQ ID NO: 321902 - protein, 15 aa, Homo sapiens
  CDR3 for beta chain variable domain of TCR clone 160951 (TRBV11-2, TRBJ2-2)
CASSLDTGNTGELFF

SEQ ID NO: 321903 - protein, 15 aa, Homo sapiens
  CDR3 for alpha chain variable domain of TCR clone 160952 (TRAV3, TRAJ22)
CAVRDRGGSARQLTF

SEQ ID NO: 321904 - protein, 13 aa, Homo sapiens
  CDR3 for beta chain variable domain of TCR clone 160952 (TRBV20-1, TRBJ1-1)
CSARVGGNTEAFF

SEQ ID NO: 321905 - protein, 13 aa, Homo sapiens
  CDR3 for alpha chain variable domain of TCR clone 160953 (TRAV13-1, TRAJ6)
CARGSGGSYIPTF

SEQ ID NO: 321906 - protein, 17 aa, Homo sapiens
  CDR3 for beta chain variable domain of TCR clone 160953 (TRBV7-8, TRBJ2-1)
CASSPPTGTRAYNEQFF

SEQ ID NO: 321907 - protein, 13 aa, Homo sapiens
  CDR3 for alpha chain variable domain of TCR clone 160954 (TRAV13-1, TRAJ5)
CAASDTGRRALTF

SEQ ID NO: 321908 - protein, 15 aa, Homo sapiens
  CDR3 for beta chain variable domain of TCR clone 160954 (TRBV10-3, TRBJ1-2)
CAISESRQENYGYTF

SEQ ID NO: 321909 - protein, 18 aa, Homo sapiens
  CDR3 for alpha chain variable domain of TCR clone 160955 (TRAV29/DV5, TRAJ52)
CAAGFSGAVGTSYGKLTF

SEQ ID NO: 321910 - protein, 16 aa, Homo sapiens
  CDR3 for beta chain variable domain of TCR clone 160955 (TRBV7-3, TRBJ2-2)
CASSLKRGTLSGELFF

SEQ ID NO: 321911 - protein, 13 aa, Homo sapiens
  CDR3 for alpha chain variable domain of TCR clone 160956 (TRAV21, TRAJ57)
CAVTQGGSERLVF

SEQ ID NO: 321912 - protein, 15 aa, Homo sapiens
  CDR3 for beta chain variable domain of TCR clone 160956 (TRBV27, TRBJ2-1)
CASSNGGGSSNEQFF

SEQ ID NO: 321913 - protein, 15 aa, Homo sapiens
  CDR3 for alpha chain variable domain of TCR clone 160957 (TRAV38-2/DV8, TRAJ45)
CAYWDSGGGADGLTF

SEQ ID NO: 321914 - protein, 12 aa, Homo sapiens
  CDR3 for beta chain variable domain of TCR clone 160957 (TRBV20-1, TRBJ2-7)
CSAGRRQSEQYF

SEQ ID NO: 321915 - protein, 14 aa, Homo sapiens
  CDR3 for alpha chain variable domain of TCR clone 160958 (TRAV8-2, TRAJ11)
CVVSEKSGYSTLIF

SEQ ID NO: 321916 - protein, 16 aa, Homo sapiens
  CDR3 for beta chain variable domain of TCR clone 160958 (TRBV28, TRBJ2-1)
CASSSPEYPRDNEQFF

SEQ ID NO: 321917 - protein, 15 aa, Homo sapiens
  CDR3 for alpha chain variable domain of TCR clone 160959 (TRAV12-3, TRAJ53)
CNERPIEGTNYKLTF

SEQ ID NO: 321918 - protein, 13 aa, Homo sapiens
  CDR3 for beta chain variable domain of TCR clone 160959 (TRBV15, TRBJ1-1)
CATSRGIQARAFF

SEQ ID NO: 321919 - protein, 18 aa, Homo sapiens
  CDR3 for alpha chain variable domain of TCR clone 160960 (TRAV17, TRAJ45)
CATSLDLYSGGGADGLTF

SEQ ID NO: 321920 - protein, 14 aa, Homo sapiens
  CDR3 for beta chain variable domain of TCR clone 160960 (TRBV19, TRBJ2-1)
CASSRLASINEQFF

SEQ ID NO: 321921 - protein, 15 aa, Homo sapiens
  CDR3 for alpha chain variable domain of TCR clone 160961 (TRAV26-1, TRAJ52)
CIVGEGGTSYGNLTF

SEQ ID NO: 321922 - protein, 16 aa, Homo sapiens
  CDR3 for beta chain variable domain of TCR clone 160961 (TRBV6-5, TRBJ2-7)
CASSSLAGTFSYEQYF

SEQ ID NO: 321923 - protein, 10 aa, Homo sapiens
  CDR3 for alpha chain variable domain of TCR clone 160962 (TRAV23/DV6, TRAJ43)
CAAAVAALAQ

SEQ ID NO: 321924 - protein, 16 aa, Homo sapiens
  CDR3 for beta chain variable domain of TCR clone 160962 (TRBV18, TRBJ1-2)
CASSPPERVTIYGYTF

SEQ ID NO: 321925 - protein, 15 aa, Homo sapiens
  CDR3 for alpha chain variable domain of TCR clone 160963 (TRAV26-1, TRAJ52)
CIVGEGGTSYGNLTF

SEQ ID NO: 321926 - protein, 16 aa, Homo sapiens
  CDR3 for beta chain variable domain of TCR clone 160963 (TRBV6-5, TRBJ2-5)
CASSSLAGTFSYEQYF

SEQ ID NO: 321927 - protein, 12 aa, Homo sapiens
  CDR3 for alpha chain variable domain of TCR clone 160964 (TRAV35, TRAJ12)
SAGMDSSYKLIF

SEQ ID NO: 321928 - protein, 14 aa, Homo sapiens
  CDR3 for beta chain variable domain of TCR clone 160964 (TRBV28, TRBJ2-5)
CASSLYRGTETQYF

SEQ ID NO: 321929 - protein, 11 aa, Homo sapiens
  CDR3 for alpha chain variable domain of TCR clone 160965 (TRAV2, TRAJ13)
CASGGYQKVTF

SEQ ID NO: 321930 - protein, 15 aa, Homo sapiens
  CDR3 for beta chain variable domain of TCR clone 160965 (TRBV7-9, TRBJ1-1)
CASSHRGTVNTEAFF

SEQ ID NO: 321931 - protein, 14 aa, Homo sapiens
  CDR3 for alpha chain variable domain of TCR clone 160966 (TRAV36/DV7, TRAJ13)
WGSGENGGYQKVTF

SEQ ID NO: 321932 - protein, 14 aa, Homo sapiens
  CDR3 for beta chain variable domain of TCR clone 160966 (TRBV19, TRBJ2-1)
CASPTFVLSGEQFF

SEQ ID NO: 321933 - protein, 11 aa, Homo sapiens
  CDR3 for alpha chain variable domain of TCR clone 160967 (TRAV13-1, TRAJ40)
CAVSGTYKYIF

SEQ ID NO: 321934 - protein, 14 aa, Homo sapiens
  CDR3 for beta chain variable domain of TCR clone 160967 (TRBV7-9, TRBJ2-2)
CASSGLADTGELFF

SEQ ID NO: 321935 - protein, 13 aa, Homo sapiens
  CDR3 for alpha chain variable domain of TCR clone 160968 (TRAV8-6, TRAJ50)
CAVIKNSYDKVIF

SEQ ID NO: 321936 - protein, 13 aa, Homo sapiens
  CDR3 for beta chain variable domain of TCR clone 160968 (TRBV4-2, TRBJ1-1)
CASGQAGNTEAFF

SEQ ID NO: 321937 - protein, 14 aa, Homo sapiens
  CDR3 for alpha chain variable domain of TCR clone 160969 (TRAV16, TRAJ28)
CALSSGAGSYQLTF

SEQ ID NO: 321938 - protein, 16 aa, Homo sapiens
  CDR3 for beta chain variable domain of TCR clone 160969 (TRBV5-1, TRBJ2-1)
CASSLLPSGRPEEQFI

SEQ ID NO: 321939 - protein, 16 aa, Homo sapiens
  CDR3 for alpha chain variable domain of TCR clone 160970 (TRAV23/DV6, TRAJ9)
CAASIGGNTGGFKTIF

SEQ ID NO: 321940 - protein, 15 aa, Homo sapiens
  CDR3 for beta chain variable domain of TCR clone 160970 (TRBV20-1, TRBJ2-1)
CSASSAGSSYSEQFF

SEQ ID NO: 321941 - protein, 13 aa, Homo sapiens
  CDR3 for alpha chain variable domain of TCR clone 160971 (TRAV17, TRAJ5)
CALRGTGRRALTF

SEQ ID NO: 321942 - protein, 15 aa, Homo sapiens
  CDR3 for beta chain variable domain of TCR clone 160971 (TRBV19, TRBJ1-1)
CASTSGQIQNTEAFF

SEQ ID NO: 321943 - protein, 15 aa, Homo sapiens
  CDR3 for alpha chain variable domain of TCR clone 160972 (TRAV26-2, TRAJ50)
CILRDEETSYDKVIF

SEQ ID NO: 321944 - protein, 16 aa, Homo sapiens
  CDR3 for beta chain variable domain of TCR clone 160972 (TRBV9, TRBJ2-1)
CASSGGGGGNYNEQFF

SEQ ID NO: 321945 - protein, 12 aa, Homo sapiens
  CDR3 for alpha chain variable domain of TCR clone 160973 (TRAV16, TRAJ13)
CITLRGCQKVTF

SEQ ID NO: 321946 - protein, 17 aa, Homo sapiens
  CDR3 for beta chain variable domain of TCR clone 160973 (TRBV28, TRBJ2-5)
CASSRQGGLAGAETQYF

SEQ ID NO: 321947 - protein, 15 aa, Homo sapiens
  CDR3 for alpha chain variable domain of TCR clone 160974 (TRAV40, TRAJ45)
CLLGDLGGGADGLTF

SEQ ID NO: 321948 - protein, 17 aa, Homo sapiens
  CDR3 for beta chain variable domain of TCR clone 160974 (TRBV18, TRBJ1-5)
CAGSPTMGQGTNQPQHF

SEQ ID NO: 321949 - protein, 13 aa, Homo sapiens
  CDR3 for alpha chain variable domain of TCR clone 160975 (TRAV35, TRAJ36)
CAGPRIGANNLFF

SEQ ID NO: 321950 - protein, 16 aa, Homo sapiens
  CDR3 for beta chain variable domain of TCR clone 160975 (TRBV28, TRBJ2-3)
CASSLYQRVSTDTQYF

SEQ ID NO: 321951 - protein, 16 aa, Homo sapiens
  CDR3 for alpha chain variable domain of TCR clone 160976 (TRAV4, TRAJ37)
CLVGWFGSSNTGKLIF

SEQ ID NO: 321952 - protein, 15 aa, Homo sapiens
  CDR3 for beta chain variable domain of TCR clone 160976 (TRBV12-4, TRBJ2-3)
CASSLAERPIDTQYF

SEQ ID NO: 321953 - protein, 14 aa, Homo sapiens
  CDR3 for alpha chain variable domain of TCR clone 160977 (TRAV12-3, TRAJ30)
CAMSLLNRDDKIIF

SEQ ID NO: 321954 - protein, 14 aa, Homo sapiens
  CDR3 for beta chain variable domain of TCR clone 160977 (TRBV12-5, TRBJ2-5)
CASGSRTHQETQYF

SEQ ID NO: 321955 - protein, 13 aa, Homo sapiens
  CDR3 for alpha chain variable domain of TCR clone 160978 (TRAV29/DV5, TRAJ31)
CAASRNNNARLMF

SEQ ID NO: 321956 - protein, 13 aa, Homo sapiens
  CDR3 for beta chain variable domain of TCR clone 160978 (TRBV7-9, TRBJ2-3)
CASSPGSTDTQYF

SEQ ID NO: 321957 - protein, 14 aa, Homo sapiens
  CDR3 for alpha chain variable domain of TCR clone 160979 (TRAV17, TRAJ57)
CATDPQGGSEKLVF

SEQ ID NO: 321958 - protein, 14 aa, Homo sapiens
  CDR3 for beta chain variable domain of TCR clone 160979 (TRBV7-8, TRBJ2-7)
CASSPRDRVYEHYF

SEQ ID NO: 321959 - protein, 12 aa, Homo sapiens
  CDR3 for alpha chain variable domain of TCR clone 160980 (TRAV26-1, TRAJ36)
CIVRVRAGNLFF

SEQ ID NO: 321960 - protein, 13 aa, Homo sapiens
  CDR3 for beta chain variable domain of TCR clone 160980 (TRBV11-2, TRBJ2-5)
CASSRGPSETQYF

SEQ ID NO: 321961 - protein, 11 aa, Homo sapiens
  CDR3 for alpha chain variable domain of TCR clone 160981 (TRAV12-3, TRAJ43)
CAMSVSNHMRF

SEQ ID NO: 321962 - protein, 13 aa, Homo sapiens
  CDR3 for beta chain variable domain of TCR clone 160981 (TRBV20-1, TRBJ1-1)
CSAPLGGGTEAFF

SEQ ID NO: 321963 - protein, 16 aa, Homo sapiens
  CDR3 for alpha chain variable domain of TCR clone 160982 (TRAV8-3, TRAJ44)
CAVGTLMTGTASKLTF

SEQ ID NO: 321964 - protein, 14 aa, Homo sapiens
  CDR3 for beta chain variable domain of TCR clone 160982 (TRBV7-3, TRBJ2-1)
CASSLAGGTNEQFF

SEQ ID NO: 321965 - protein, 19 aa, Homo sapiens
  CDR3 for alpha chain variable domain of TCR clone 160983 (TRAV17, TRAJ17)
CATDGRPGVIKAAVNKLTF

SEQ ID NO: 321966 - protein, 17 aa, Homo sapiens
  CDR3 for beta chain variable domain of TCR clone 160983 (TRBV12-4, TRBJ1-1)
CASSLSGFRTMNTEAFF

SEQ ID NO: 321967 - protein, 14 aa, Homo sapiens
  CDR3 for alpha chain variable domain of TCR clone 160984 (TRAV36/DV7, TRAJ40)
GAVETTSGTYKYIF

SEQ ID NO: 321968 - protein, 13 aa, Homo sapiens
  CDR3 for beta chain variable domain of TCR clone 160984 (TRBV10-3, TRBJ2-5)
CAMTSGAGETQYF

SEQ ID NO: 321969 - protein, 14 aa, Homo sapiens
  CDR3 for alpha chain variable domain of TCR clone 160985 (TRAV12-2, TRAJ24)
CAVTPADSWGKLQF

SEQ ID NO: 321970 - protein, 18 aa, Homo sapiens
  CDR3 for beta chain variable domain of TCR clone 160985 (TRBV7-2, TRBJ2-2)
CASSLESGPRMNTGELFF

SEQ ID NO: 321971 - protein, 18 aa, Homo sapiens
  CDR3 for alpha chain variable domain of TCR clone 160986 (TRAV12-3, TRAJ52)
CAMSVGGAGGTSYGKLTF

SEQ ID NO: 321972 - protein, 18 aa, Homo sapiens
  CDR3 for beta chain variable domain of TCR clone 160986 (TRBV6-6, TRBJ1-3)
CASSYSKWDSISGNTIYF

SEQ ID NO: 321973 - protein, 16 aa, Homo sapiens
  CDR3 for alpha chain variable domain of TCR clone 160987 (TRAV12-2, TRAJ13)
CAVDSAGAGGYQKVTF

SEQ ID NO: 321974 - protein, 14 aa, Homo sapiens
  CDR3 for beta chain variable domain of TCR clone 160987 (TRBV20-1, TRBJ1-4)
CSARDGSGWENLFF

SEQ ID NO: 321975 - protein, 13 aa, Homo sapiens
  CDR3 for alpha chain variable domain of TCR clone 160988 (TRAV1-1, TRAJ13)
CAVNSGGYQKGTF

SEQ ID NO: 321976 - protein, 12 aa, Homo sapiens
  CDR3 for beta chain variable domain of TCR clone 160988 (TRBV28, TRBJ2-1)
CASSVQINEQFF

SEQ ID NO: 321977 - protein, 16 aa, Homo sapiens
  CDR3 for alpha chain variable domain of TCR clone 160989 (TRAV22, TRAJ45)
CAVERCKRGGADGLTF

SEQ ID NO: 321978 - protein, 16 aa, Homo sapiens
  CDR3 for beta chain variable domain of TCR clone 160989 (TRBV5-1, TRBJ2-5)
CASSLRRTSGQETQYF

SEQ ID NO: 321979 - protein, 15 aa, Homo sapiens
  CDR3 for alpha chain variable domain of TCR clone 160990 (TRAV12-2, TRAJ43)
CAFNMRFGAGTRLTV

SEQ ID NO: 321980 - protein, 18 aa, Homo sapiens
  CDR3 for beta chain variable domain of TCR clone 160990 (TRBV20-1, TRBJ2-3)
CSASGLAGGPGTTDTQYF

SEQ ID NO: 321981 - protein, 13 aa, Homo sapiens
  CDR3 for alpha chain variable domain of TCR clone 160991 (TRAV17, TRAJ9)
CATDYPGGCKTIF

SEQ ID NO: 321982 - protein, 16 aa, Homo sapiens
  CDR3 for beta chain variable domain of TCR clone 160991 (TRBV7-7, TRBJ2-1)
CASSLASGTSYNEQFF

SEQ ID NO: 321983 - protein, 12 aa, Homo sapiens
  CDR3 for alpha chain variable domain of TCR clone 160992 (TRAV12-2, TRAJ10)
WGVTGGGNKPTF

SEQ ID NO: 321984 - protein, 14 aa, Homo sapiens
  CDR3 for beta chain variable domain of TCR clone 160992 (TRBV27, TRBJ2-7)
CASATGTERREQYF

SEQ ID NO: 321985 - protein, 14 aa, Homo sapiens
  CDR3 for alpha chain variable domain of TCR clone 160993 (TRAV1-2, TRAJ16)
CAVNRFSDGTKLLF

SEQ ID NO: 321986 - protein, 14 aa, Homo sapiens
  CDR3 for beta chain variable domain of TCR clone 160993 (TRBV20-1, TRBJ1-5)
CSAPGTGVGQPQRF

SEQ ID NO: 321987 - protein, 12 aa, Homo sapiens
  CDR3 for alpha chain variable domain of TCR clone 160994 (TRAV27, TRAJ35)
CAGADFGNVLHC

SEQ ID NO: 321988 - protein, 16 aa, Homo sapiens
  CDR3 for beta chain variable domain of TCR clone 160994 (TRBV19, TRBJ1-5)
CASSIDRGGPRQPQHF

SEQ ID NO: 321989 - protein, 14 aa, Homo sapiens
  CDR3 for alpha chain variable domain of TCR clone 160995 (TRAV13-2, TRAJ43)
CAEIPTYNNNDMRF

SEQ ID NO: 321990 - protein, 14 aa, Homo sapiens
  CDR3 for beta chain variable domain of TCR clone 160995 (TRBV7-9, TRBJ2-2)
CQRTLGHLPRGAVF

SEQ ID NO: 321991 - protein, 12 aa, Homo sapiens
  CDR3 for alpha chain variable domain of TCR clone 160996 (TRAV12-3, TRAJ17)
CAMTLTGNKLTF

SEQ ID NO: 321992 - protein, 13 aa, Homo sapiens
  CDR3 for beta chain variable domain of TCR clone 160996 (TRBV27, TRBJ2-1)
CAGRTLGVGEQFF

SEQ ID NO: 321993 - protein, 12 aa, Homo sapiens
  CDR3 for alpha chain variable domain of TCR clone 160997 (TRAV3, TRAJ34)
CAVLGNTDKLIF

SEQ ID NO: 321994 - protein, 13 aa, Homo sapiens
  CDR3 for beta chain variable domain of TCR clone 160997 (TRBV19, TRBJ2-1)
CASSIWTGNEQFF

SEQ ID NO: 321995 - protein, 18 aa, Homo sapiens
  CDR3 for alpha chain variable domain of TCR clone 160998 (TRAV17, TRAJ45)
CATSLDLYSGGGADGLTF

SEQ ID NO: 321996 - protein, 15 aa, Homo sapiens
  CDR3 for beta chain variable domain of TCR clone 160998 (TRBV11-2, TRBJ2-1)
CASSKNRGLIYEQCF

SEQ ID NO: 321997 - protein, 15 aa, Homo sapiens
  CDR3 for alpha chain variable domain of TCR clone 160999 (TRAV3, TRAJ5)
CAVRDRKRGRRALTF

SEQ ID NO: 321998 - protein, 15 aa, Homo sapiens
  CDR3 for beta chain variable domain of TCR clone 160999 (TRBV7-8, TRBJ2-1)
CASSLADSLYNEQFF

SEQ ID NO: 321999 - protein, 15 aa, Homo sapiens
  CDR3 for alpha chain variable domain of TCR clone 161000 (TRAV21, TRAJ45)
GAVSYSVGGADGLTF

SEQ ID NO: 322000 - protein, 13 aa, Homo sapiens
  CDR3 for beta chain variable domain of TCR clone 161000 (TRBV20-1, TRBJ2-5)
CSAATELQETQYF

SEQ ID NO: 322001 - protein, 16 aa, Homo sapiens
  CDR3 for alpha chain variable domain of TCR clone 161001 (TRAV3, TRAJ40)
CAVRDRIASGTYKHIF

SEQ ID NO: 322002 - protein, 15 aa, Homo sapiens
  CDR3 for beta chain variable domain of TCR clone 161001 (TRBV9, TRBJ1-6)
CASSVAGTGDSPLHF

SEQ ID NO: 322003 - protein, 14 aa, Homo sapiens
  CDR3 for alpha chain variable domain of TCR clone 161002 (TRAV26-2, TRAJ23)
CSRTLYNPGGKLIF

SEQ ID NO: 322004 - protein, 15 aa, Homo sapiens
  CDR3 for beta chain variable domain of TCR clone 161002 (TRBV20-1, TRBJ2-7)
CSARDRVSGMDEQYF

SEQ ID NO: 322005 - protein, 13 aa, Homo sapiens
  CDR3 for alpha chain variable domain of TCR clone 161003 (TRAV27, TRAJ29)
CAGAHSGNTPLVF

SEQ ID NO: 322006 - protein, 15 aa, Homo sapiens
  CDR3 for beta chain variable domain of TCR clone 161003 (TRBV7-9, TRBJ1-5)
RASSQGHQPNQPQHF

SEQ ID NO: 322007 - protein, 15 aa, Homo sapiens
  CDR3 for alpha chain variable domain of TCR clone 161004 (TRAV3, TRAJ22)
CAVRDRGGSARQLTF

SEQ ID NO: 322008 - protein, 15 aa, Homo sapiens
  CDR3 for beta chain variable domain of TCR clone 161004 (TRBV20-1, TRBJ2-7)
CSARDRVSGMDEQYL

SEQ ID NO: 322009 - protein, 18 aa, Homo sapiens
  CDR3 for alpha chain variable domain of TCR clone 161005 (TRAV3, TRAJ32)
CAGRDIRGYGGATNKLIF

SEQ ID NO: 322010 - protein, 15 aa, Homo sapiens
  CDR3 for beta chain variable domain of TCR clone 161005 (TRBV12-4, TRBJ2-2)
CASSLGVRHTGELFF

SEQ ID NO: 322011 - protein, 14 aa, Homo sapiens
  CDR3 for alpha chain variable domain of TCR clone 161006 (TRAV26-1, TRAJ39)
CIVFTNNADNMLTF

SEQ ID NO: 322012 - protein, 15 aa, Homo sapiens
  CDR3 for beta chain variable domain of TCR clone 161006 (TRBV19, TRBJ2-4)
CASSLTGLTKNIQYF

SEQ ID NO: 322013 - protein, 13 aa, Homo sapiens
  CDR3 for alpha chain variable domain of TCR clone 161007 (TRAV8-3, TRAJ28)
CAVGAVGSYHLTF

SEQ ID NO: 322014 - protein, 17 aa, Homo sapiens
  CDR3 for beta chain variable domain of TCR clone 161007 (TRBV11-2, TRBJ2-1)
CASSLYPPGVEYNEQFF

SEQ ID NO: 322015 - protein, 15 aa, Homo sapiens
  CDR3 for alpha chain variable domain of TCR clone 161008 (TRAV25, TRAJ52)
CAGRPGGTSYGKLTF

SEQ ID NO: 322016 - protein, 13 aa, Homo sapiens
  CDR3 for beta chain variable domain of TCR clone 161008 (TRBV7-7, TRBJ2-3)
CASSLSRADTQYF

SEQ ID NO: 322017 - protein, 13 aa, Homo sapiens
  CDR3 for alpha chain variable domain of TCR clone 161009 (TRAV21, TRAJ57)
CAVTQGGSEKLVF

SEQ ID NO: 322018 - protein, 17 aa, Homo sapiens
  CDR3 for beta chain variable domain of TCR clone 161009 (TRBV5-1, TRBJ2-5)
CASSPVALGQNQETQYF

SEQ ID NO: 322019 - protein, 13 aa, Homo sapiens
  CDR3 for alpha chain variable domain of TCR clone 161010 (TRAV21, TRAJ20)
CAVGLRVEYKLSF

SEQ ID NO: 322020 - protein, 13 aa, Homo sapiens
  CDR3 for beta chain variable domain of TCR clone 161010 (TRBV10-3, TRBJ2-7)
CASKLAVNYEQYF

SEQ ID NO: 322021 - protein, 14 aa, Homo sapiens
  CDR3 for alpha chain variable domain of TCR clone 161011 (TRAV2, TRAJ9)
CAVEDRSGGFKTIF

SEQ ID NO: 322022 - protein, 14 aa, Homo sapiens
  CDR3 for beta chain variable domain of TCR clone 161011 (TRBV27, TRBJ2-2)
CASRPGVNTGELFF

SEQ ID NO: 322023 - protein, 14 aa, Homo sapiens
  CDR3 for alpha chain variable domain of TCR clone 161012 (TRAV8-4, TRAJ16)
CAVSPVGRWPEAAL

SEQ ID NO: 322024 - protein, 16 aa, Homo sapiens
  CDR3 for beta chain variable domain of TCR clone 161012 (TRBV5-1, TRBJ2-1)
CDSSLSSLRESNEQFF

SEQ ID NO: 322025 - protein, 11 aa, Homo sapiens
  CDR3 for alpha chain variable domain of TCR clone 161013 (TRAV12-3, TRAJ49)
CAMSSGNQFYF

SEQ ID NO: 322026 - protein, 17 aa, Homo sapiens
  CDR3 for beta chain variable domain of TCR clone 161013 (TRBV5-7, TRBJ2-7)
WASSLWRVLAGSYEQYF

SEQ ID NO: 322027 - protein, 12 aa, Homo sapiens
  CDR3 for alpha chain variable domain of TCR clone 161014 (TRAV16, TRAJ22)
CALEVSARLLTF

SEQ ID NO: 322028 - protein, 14 aa, Homo sapiens
  CDR3 for beta chain variable domain of TCR clone 161014 (TRBV11-2, TRBJ2-3)
CASSSIASTDTQYF

SEQ ID NO: 322029 - protein, 13 aa, Homo sapiens
  CDR3 for alpha chain variable domain of TCR clone 161015 (TRAV35, TRAJ36)
CAGPRIGANNLIF

SEQ ID NO: 322030 - protein, 15 aa, Homo sapiens
  CDR3 for beta chain variable domain of TCR clone 161015 (TRBV28, TRBJ2-5)
CASSPPWSYQETQYF

SEQ ID NO: 322031 - protein, 14 aa, Homo sapiens
  CDR3 for alpha chain variable domain of TCR clone 161016 (TRAV13-1, TRAJ35)
CAASKGGCGKVLHC

SEQ ID NO: 322032 - protein, 13 aa, Homo sapiens
  CDR3 for beta chain variable domain of TCR clone 161016 (TRBV7-3, TRBJ1-1)
CASSQDWGAEAFV

SEQ ID NO: 322033 - protein, 13 aa, Homo sapiens
  CDR3 for alpha chain variable domain of TCR clone 161017 (TRAV13-1, TRAJ5)
CAASDTGRTALTF

SEQ ID NO: 322034 - protein, 12 aa, Homo sapiens
  CDR3 for beta chain variable domain of TCR clone 161017 (TRBV28, TRBJ2-3)
CASRLYRDTQYF

SEQ ID NO: 322035 - protein, 17 aa, Homo sapiens
  CDR3 for alpha chain variable domain of TCR clone 161018 (TRAV13-1, TRAJ52)
CAAGRNAGGTSYGKLTF

SEQ ID NO: 322036 - protein, 14 aa, Homo sapiens
  CDR3 for beta chain variable domain of TCR clone 161018 (TRBV6-3, TRBJ2-7)
CQQFPGTVFYEQYF

SEQ ID NO: 322037 - protein, 14 aa, Homo sapiens
  CDR3 for alpha chain variable domain of TCR clone 161019 (TRAV12-3, TRAJ9)
CAMSPNTGGFKTIF

SEQ ID NO: 322038 - protein, 15 aa, Homo sapiens
  CDR3 for beta chain variable domain of TCR clone 161019 (TRBV19, TRBJ1-6)
CASSTQGAVGSPLHF

SEQ ID NO: 322039 - protein, 13 aa, Homo sapiens
  CDR3 for alpha chain variable domain of TCR clone 161020 (TRAV8-3, TRAJ28)
CAVGSVGSYQLTF

SEQ ID NO: 322040 - protein, 13 aa, Homo sapiens
  CDR3 for beta chain variable domain of TCR clone 161020 (TRBV4-3, TRBJ2-1)
CASSQKLERQQFF

SEQ ID NO: 322041 - protein, 13 aa, Homo sapiens
  CDR3 for alpha chain variable domain of TCR clone 161021 (TRAV35, TRAJ37)
CAGSSGYTGKLIF

SEQ ID NO: 322042 - protein, 16 aa, Homo sapiens
  CDR3 for beta chain variable domain of TCR clone 161021 (TRBV10-3, TRBJ2-1)
CAISLTSGNSYNEQFF

SEQ ID NO: 322043 - protein, 15 aa, Homo sapiens
  CDR3 for alpha chain variable domain of TCR clone 161022 (TRAV12-1, TRAJ44)
CVVFVNTGTASKLTF

SEQ ID NO: 322044 - protein, 14 aa, Homo sapiens
  CDR3 for beta chain variable domain of TCR clone 161022 (TRBV7-8, TRBJ2-2)
CASSSLKGTGELFF

SEQ ID NO: 322045 - protein, 14 aa, Homo sapiens
  CDR3 for alpha chain variable domain of TCR clone 161023 (TRAV12-2, TRAJ45)
CAVNIGGGADGLTF

SEQ ID NO: 322046 - protein, 13 aa, Homo sapiens
  CDR3 for beta chain variable domain of TCR clone 161023 (TRBV7-9, TRBJ2-3)
CASSPGSTDTQYF

SEQ ID NO: 322047 - protein, 14 aa, Homo sapiens
  CDR3 for alpha chain variable domain of TCR clone 161024 (TRAV3, TRAJ13)
CAVSYSGGYQKVTF

SEQ ID NO: 322048 - protein, 16 aa, Homo sapiens
  CDR3 for beta chain variable domain of TCR clone 161024 (TRBV19, TRBJ1-2)
CASSIGLFRDAYGYTF

SEQ ID NO: 322049 - protein, 12 aa, Homo sapiens
  CDR3 for alpha chain variable domain of TCR clone 161025 (TRAV8-3, TRAJ20)
CAVGANDYKLSF

SEQ ID NO: 322050 - protein, 15 aa, Homo sapiens
  CDR3 for beta chain variable domain of TCR clone 161025 (TRBV6-1, TRBJ2-5)
CASSEGWGIQETQYF

SEQ ID NO: 322051 - protein, 15 aa, Homo sapiens
  CDR3 for alpha chain variable domain of TCR clone 161026 (TRAV3, TRAJ32)
CAVSSYGGATNKLIF

SEQ ID NO: 322052 - protein, 13 aa, Homo sapiens
  CDR3 for beta chain variable domain of TCR clone 161026 (TRBV20-1, TRBJ2-7)
CNARPSTNYEQYF

SEQ ID NO: 322053 - protein, 14 aa, Homo sapiens
  CDR3 for alpha chain variable domain of TCR clone 161027 (TRAV16, TRAJ44)
CALSTTGTASKLTF

SEQ ID NO: 322054 - protein, 15 aa, Homo sapiens
  CDR3 for beta chain variable domain of TCR clone 161027 (TRBV12-4, TRBJ2-1)
CASSLSTGVSNEQFF

SEQ ID NO: 322055 - protein, 13 aa, Homo sapiens
  CDR3 for alpha chain variable domain of TCR clone 161028 (TRAV17, TRAJ40)
CATDEGGTYKYIF

SEQ ID NO: 322056 - protein, 12 aa, Homo sapiens
  CDR3 for beta chain variable domain of TCR clone 161028 (TRBV7-9, TRBJ1-4)
CASSTDREKLFF

SEQ ID NO: 322057 - protein, 12 aa, Homo sapiens
  CDR3 for alpha chain variable domain of TCR clone 161029 (TRAV12-3, TRAJ17)
CAMTLTGNKLTF

SEQ ID NO: 322058 - protein, 13 aa, Homo sapiens
  CDR3 for beta chain variable domain of TCR clone 161029 (TRBV7-9, TRBJ1-2)
CASSLKQNYGFTF

SEQ ID NO: 322059 - protein, 14 aa, Homo sapiens
  CDR3 for alpha chain variable domain of TCR clone 161030 (TRAV12-3, TRAJ10)
SHLPLTGGGNKLTF

SEQ ID NO: 322060 - protein, 16 aa, Homo sapiens
  CDR3 for beta chain variable domain of TCR clone 161030 (TRBV10-3, TRBJ2-1)
CASSGVGDGGGGEQFF

SEQ ID NO: 322061 - protein, 14 aa, Homo sapiens
  CDR3 for alpha chain variable domain of TCR clone 161031 (TRAV27, TRAJ23)
CAGLSYNQGGKLIF

SEQ ID NO: 322062 - protein, 15 aa, Homo sapiens
  CDR3 for beta chain variable domain of TCR clone 161031 (TRBV5-7, TRBJ1-5)
CASSYGKLWDQPQHF

SEQ ID NO: 322063 - protein, 14 aa, Homo sapiens
  CDR3 for alpha chain variable domain of TCR clone 161032 (TRAV12-3, TRAJ9)
CAMSPNTGGFKTIF

SEQ ID NO: 322064 - protein, 12 aa, Homo sapiens
  CDR3 for beta chain variable domain of TCR clone 161032 (TRBV19, TRBJ1-5)
SASSIAQQPQHF

SEQ ID NO: 322065 - protein, 12 aa, Homo sapiens
  CDR3 for alpha chain variable domain of TCR clone 161033 (TRAV21, TRAJ31)
CAVCPARGRLMF

SEQ ID NO: 322066 - protein, 14 aa, Homo sapiens
  CDR3 for beta chain variable domain of TCR clone 161033 (TRBV28, TRBJ2-7)
CASSLLRISYEQYF

SEQ ID NO: 322067 - protein, 12 aa, Homo sapiens
  CDR3 for alpha chain variable domain of TCR clone 161034 (TRAV17, TRAJ5)
CAHGHGQESTYF

SEQ ID NO: 322068 - protein, 15 aa, Homo sapiens
  CDR3 for beta chain variable domain of TCR clone 161034 (TRBV6-6, TRBJ2-5)
CASSPGGGLEETQYF

SEQ ID NO: 322069 - protein, 11 aa, Homo sapiens
  CDR3 for alpha chain variable domain of TCR clone 161035 (TRAV2, TRAJ33)
CAVESNYQLIW

SEQ ID NO: 322070 - protein, 13 aa, Homo sapiens
  CDR3 for beta chain variable domain of TCR clone 161035 (TRBV7-9, TRBJ1-2)
CASSPSNFWGYTF

SEQ ID NO: 322071 - protein, 13 aa, Homo sapiens
  CDR3 for alpha chain variable domain of TCR clone 161036 (TRAV35, TRAJ42)
CAGFPVSQGNLTF

SEQ ID NO: 322072 - protein, 13 aa, Homo sapiens
  CDR3 for beta chain variable domain of TCR clone 161036 (TRBV29-1, TRBJ2-1)
CSVEGGRVNEQFF

SEQ ID NO: 322073 - protein, 14 aa, Homo sapiens
  CDR3 for alpha chain variable domain of TCR clone 161037 (TRAV1-2, TRAJ16)
CAVNRFADGQTLLF

SEQ ID NO: 322074 - protein, 12 aa, Homo sapiens
  CDR3 for beta chain variable domain of TCR clone 161037 (TRBV12-4, TRBJ2-3)
CASSTLPDTQYF

SEQ ID NO: 322075 - protein, 14 aa, Homo sapiens
  CDR3 for alpha chain variable domain of TCR clone 161038 (TRAV29/DV5, TRAJ6)
CAARVSGGSYIPTF

SEQ ID NO: 322076 - protein, 13 aa, Homo sapiens
  CDR3 for beta chain variable domain of TCR clone 161038 (TRBV7-9, TRBJ1-2)
CDSSLKQNYGDTF

SEQ ID NO: 322077 - protein, 13 aa, Homo sapiens
  CDR3 for alpha chain variable domain of TCR clone 161039 (TRAV20, TRAJ42)
CAVQGGSQGNLIF

SEQ ID NO: 322078 - protein, 15 aa, Homo sapiens
  CDR3 for beta chain variable domain of TCR clone 161039 (TRBV6-6, TRBJ2-5)
CASSPGGGLEETQYF

SEQ ID NO: 322079 - protein, 14 aa, Homo sapiens
  CDR3 for alpha chain variable domain of TCR clone 161040 (TRAV1-2, TRAJ8)
CAMREDTGFQKLVF

SEQ ID NO: 322080 - protein, 16 aa, Homo sapiens
  CDR3 for beta chain variable domain of TCR clone 161040 (TRBV12-4, TRBJ1-5)
CASSRPVGGSNQPQHF

SEQ ID NO: 322081 - protein, 15 aa, Homo sapiens
  CDR3 for alpha chain variable domain of TCR clone 161041 (TRAV27, TRAJ42)
CAGGNYGGSQGNLIF

SEQ ID NO: 322082 - protein, 16 aa, Homo sapiens
  CDR3 for beta chain variable domain of TCR clone 161041 (TRBV20-1, TRBJ2-7)
CSAREGTSGSEYEQYF

SEQ ID NO: 322083 - protein, 17 aa, Homo sapiens
  CDR3 for alpha chain variable domain of TCR clone 161042 (TRAV3, TRAJ6)
CAVRDGPRAGGSYIPTF

SEQ ID NO: 322084 - protein, 16 aa, Homo sapiens
  CDR3 for beta chain variable domain of TCR clone 161042 (TRBV7-8, TRBJ2-6)
CASRVGDSSGANVLTF

SEQ ID NO: 322085 - protein, 14 aa, Homo sapiens
  CDR3 for alpha chain variable domain of TCR clone 161043 (TRAV12-3, TRAJ29)
CAMSPYSGNSPLVF

SEQ ID NO: 322086 - protein, 12 aa, Homo sapiens
  CDR3 for beta chain variable domain of TCR clone 161043 (TRBV9, TRBJ2-1)
CASSVGGTDIFF

SEQ ID NO: 322087 - protein, 12 aa, Homo sapiens
  CDR3 for alpha chain variable domain of TCR clone 161044 (TRAV1-1, TRAJ43)
CAPRVSSNDMRF

SEQ ID NO: 322088 - protein, 15 aa, Homo sapiens
  CDR3 for beta chain variable domain of TCR clone 161044 (TRBV2, TRBJ2-1)
CASSELAGSYNEQFF

SEQ ID NO: 322089 - protein, 17 aa, Homo sapiens
  CDR3 for alpha chain variable domain of TCR clone 161045 (TRAV1-1, TRAJ28)
CALDPAYSGAGSYQLTF

SEQ ID NO: 322090 - protein, 14 aa, Homo sapiens
  CDR3 for beta chain variable domain of TCR clone 161045 (TRBV19, TRBJ2-1)
CASPTFVLSGEQFF

SEQ ID NO: 322091 - protein, 14 aa, Homo sapiens
  CDR3 for alpha chain variable domain of TCR clone 161046 (TRAV17, TRAJ57)
CATDPQGGSEKLVF

SEQ ID NO: 322092 - protein, 13 aa, Homo sapiens
  CDR3 for beta chain variable domain of TCR clone 161046 (TRBV10-3, TRBJ2-7)
CASKRAVNYEQYF

SEQ ID NO: 322093 - protein, 15 aa, Homo sapiens
  CDR3 for alpha chain variable domain of TCR clone 161047 (TRAV12-1, TRAJ9)
CVVSFGDTGGFKTIF

SEQ ID NO: 322094 - protein, 13 aa, Homo sapiens
  CDR3 for beta chain variable domain of TCR clone 161047 (TRBV20-1, TRBJ2-2)
CSALSGGAGELFF

SEQ ID NO: 322095 - protein, 20 aa, Homo sapiens
  CDR3 for alpha chain variable domain of TCR clone 161048 (TRAV26-1, TRAJ42)
CRVLLHRQTYYGGSQGNLIF

SEQ ID NO: 322096 - protein, 16 aa, Homo sapiens
  CDR3 for beta chain variable domain of TCR clone 161048 (TRBV7-3, TRBJ2-2)
CASSLKRGTLSGELSF

SEQ ID NO: 322097 - protein, 12 aa, Homo sapiens
  CDR3 for alpha chain variable domain of TCR clone 161049 (TRAV13-1, TRAJ49)
CAASSTGNQFYF

SEQ ID NO: 322098 - protein, 14 aa, Homo sapiens
  CDR3 for beta chain variable domain of TCR clone 161049 (TRBV7-2, TRBJ2-5)
CASSAAGNQETQYF

SEQ ID NO: 322099 - protein, 14 aa, Homo sapiens
  CDR3 for alpha chain variable domain of TCR clone 161050 (TRAV12-2, TRAJ9)
CAVNALEGGFQTIF

SEQ ID NO: 322100 - protein, 12 aa, Homo sapiens
  CDR3 for beta chain variable domain of TCR clone 161050 (TRBV12-5, TRBJ2-5)
CASGQGVETQYF

SEQ ID NO: 322101 - protein, 12 aa, Homo sapiens
  CDR3 for alpha chain variable domain of TCR clone 161051 (TRAV21, TRAJ29)
CAVTSGNTPLVF

SEQ ID NO: 322102 - protein, 15 aa, Homo sapiens
  CDR3 for beta chain variable domain of TCR clone 161051 (TRBV12-4, TRBJ1-2)
CASRLGVAGNYGYVF

SEQ ID NO: 322103 - protein, 14 aa, Homo sapiens
  CDR3 for alpha chain variable domain of TCR clone 161052 (TRAV13-1, TRAJ40)
CAASMTSGTYKYIF

SEQ ID NO: 322104 - protein, 13 aa, Homo sapiens
  CDR3 for beta chain variable domain of TCR clone 161052 (TRBV19, TRBJ1-2)
CASSQGQVYGYTF

SEQ ID NO: 322105 - protein, 13 aa, Homo sapiens
  CDR3 for alpha chain variable domain of TCR clone 161053 (TRAV12-1, TRAJ26)
CVVRRSYGQNFVF

SEQ ID NO: 322106 - protein, 13 aa, Homo sapiens
  CDR3 for beta chain variable domain of TCR clone 161053 (TRBV12-4, TRBJ1-2)
CASSLRQGKGYTF

SEQ ID NO: 322107 - protein, 11 aa, Homo sapiens
  CDR3 for alpha chain variable domain of TCR clone 161054 (TRAV12-2, TRAJ33)
CAATSNYQVIW

SEQ ID NO: 322108 - protein, 14 aa, Homo sapiens
  CDR3 for beta chain variable domain of TCR clone 161054 (TRBV12-4, TRBJ2-2)
CASNQGANTGELFF

SEQ ID NO: 322109 - protein, 11 aa, Homo sapiens
  CDR3 for alpha chain variable domain of TCR clone 161055 (TRAV35, TRAJ30)
CAGERDDKIIF

SEQ ID NO: 322110 - protein, 14 aa, Homo sapiens
  CDR3 for beta chain variable domain of TCR clone 161055 (TRBV15, TRBJ2-5)
CATSGERGQETQYF

SEQ ID NO: 322111 - protein, 15 aa, Homo sapiens
  CDR3 for alpha chain variable domain of TCR clone 161056 (TRAV3, TRAJ3)
CCERPRYSSASKIIF

SEQ ID NO: 322112 - protein, 16 aa, Homo sapiens
  CDR3 for beta chain variable domain of TCR clone 161056 (TRBV4-3, TRBJ2-1)
CASSPALDRGVSEQFF

SEQ ID NO: 322113 - protein, 12 aa, Homo sapiens
  CDR3 for alpha chain variable domain of TCR clone 161057 (TRAV20, TRAJ33)
CSGNDSNYQLIW

SEQ ID NO: 322114 - protein, 17 aa, Homo sapiens
  CDR3 for beta chain variable domain of TCR clone 161057 (TRBV7-9, TRBJ2-1)
CASSLVASYPSYNEQFF

SEQ ID NO: 322115 - protein, 15 aa, Homo sapiens
  CDR3 for alpha chain variable domain of TCR clone 161058 (TRAV8-3, TRAJ37)
CAVGGLSSNTGKLIF

SEQ ID NO: 322116 - protein, 15 aa, Homo sapiens
  CDR3 for beta chain variable domain of TCR clone 161058 (TRBV7-8, TRBJ1-1)
CTSSLGSGFDTEAFF

SEQ ID NO: 322117 - protein, 14 aa, Homo sapiens
  CDR3 for alpha chain variable domain of TCR clone 161059 (TRAV4, TRAJ17)
CLVGPQAAANKLTF

SEQ ID NO: 322118 - protein, 13 aa, Homo sapiens
  CDR3 for beta chain variable domain of TCR clone 161059 (TRBV20-1, TRBJ2-7)
CSATHTSGYEQYF

SEQ ID NO: 322119 - protein, 12 aa, Homo sapiens
  CDR3 for alpha chain variable domain of TCR clone 161060 (TRAV21, TRAJ13)
PGPPGGYQKVTF

SEQ ID NO: 322120 - protein, 15 aa, Homo sapiens
  CDR3 for beta chain variable domain of TCR clone 161060 (TRBV27, TRBJ2-5)
CASSLYPRGGETQYF

SEQ ID NO: 322121 - protein, 17 aa, Homo sapiens
  CDR3 for alpha chain variable domain of TCR clone 161061 (TRAV12-2, TRAJ52)
CAVNKGAGGTSYGKLTF

SEQ ID NO: 322122 - protein, 14 aa, Homo sapiens
  CDR3 for beta chain variable domain of TCR clone 161061 (TRBV19, TRBJ2-5)
CASSMTGQKETQYF

SEQ ID NO: 322123 - protein, 16 aa, Homo sapiens
  CDR3 for alpha chain variable domain of TCR clone 161062 (TRAV16, TRAJ57)
CAPYLITQGGSEKLVF

SEQ ID NO: 322124 - protein, 17 aa, Homo sapiens
  CDR3 for beta chain variable domain of TCR clone 161062 (TRBV24-1, TRBJ2-4)
CATSDAEARGVRNIQYF

SEQ ID NO: 322125 - protein, 16 aa, Homo sapiens
  CDR3 for alpha chain variable domain of TCR clone 161063 (TRAV26-1, TRAJ40)
CIVRGYLTSGTYKYNF

SEQ ID NO: 322126 - protein, 14 aa, Homo sapiens
  CDR3 for beta chain variable domain of TCR clone 161063 (TRBV5-1, TRBJ1-4)
CASSSGQGGEKLFF

SEQ ID NO: 322127 - protein, 14 aa, Homo sapiens
  CDR3 for alpha chain variable domain of TCR clone 161064 (TRAV12-3, TRAJ10)
THLPLTGVGNKLTF

SEQ ID NO: 322128 - protein, 16 aa, Homo sapiens
  CDR3 for beta chain variable domain of TCR clone 161064 (TRBV4-3, TRBJ2-1)
CASSPALDRGVNEQFF

SEQ ID NO: 322129 - protein, 17 aa, Homo sapiens
  CDR3 for alpha chain variable domain of TCR clone 161065 (TRAV2, TRAJ23)
CCLLLCWERGLRGKLIF

SEQ ID NO: 322130 - protein, 20 aa, Homo sapiens
  CDR3 for beta chain variable domain of TCR clone 161065 (TRBV3-1, TRBJ2-6)
CASSPRPGLEGGAGANVLTF

SEQ ID NO: 322131 - protein, 17 aa, Homo sapiens
  CDR3 for alpha chain variable domain of TCR clone 161066 (TRAV3, TRAJ6)
CAVRDGPRAGGSSKPTF

SEQ ID NO: 322132 - protein, 14 aa, Homo sapiens
  CDR3 for beta chain variable domain of TCR clone 161066 (TRBV7-3, TRBJ2-1)
CASSTSGGWDEQFF

SEQ ID NO: 322133 - protein, 13 aa, Homo sapiens
  CDR3 for alpha chain variable domain of TCR clone 161067 (TRAV26-2, TRAJ43)
CILRAVNNNDMRF

SEQ ID NO: 322134 - protein, 12 aa, Homo sapiens
  CDR3 for beta chain variable domain of TCR clone 161067 (TRBV19, TRBJ2-1)
CASSMQDTEQFF

SEQ ID NO: 322135 - protein, 11 aa, Homo sapiens
  CDR3 for alpha chain variable domain of TCR clone 161068 (TRAV21, TRAJ23)
CAPQRRGKLIF

SEQ ID NO: 322136 - protein, 14 aa, Homo sapiens
  CDR3 for beta chain variable domain of TCR clone 161068 (TRBV12-4, TRBJ1-1)
CASTWTGHGTEAFF

SEQ ID NO: 322137 - protein, 13 aa, Homo sapiens
  CDR3 for alpha chain variable domain of TCR clone 161069 (TRAV13-1, TRAJ11)
CGASIRGYSTLTF

SEQ ID NO: 322138 - protein, 17 aa, Homo sapiens
  CDR3 for beta chain variable domain of TCR clone 161069 (TRBV4-3, TRBJ1-2)
CASSSRLQAGGPVGYTF

SEQ ID NO: 322139 - protein, 16 aa, Homo sapiens
  CDR3 for alpha chain variable domain of TCR clone 161070 (TRAV22, TRAJ45)
FAVERGKRGGADGLTF

SEQ ID NO: 322140 - protein, 11 aa, Homo sapiens
  CDR3 for beta chain variable domain of TCR clone 161070 (TRBV29-1, TRBJ2-5)
CSEDRTGTQYF

SEQ ID NO: 322141 - protein, 13 aa, Homo sapiens
  CDR3 for alpha chain variable domain of TCR clone 161071 (TRAV3, TRAJ33)
CAVRDRSNYQLIW

SEQ ID NO: 322142 - protein, 16 aa, Homo sapiens
  CDR3 for beta chain variable domain of TCR clone 161071 (TRBV4-2, TRBJ2-7)
CASSQDRGTSSYEQYY

SEQ ID NO: 322143 - protein, 14 aa, Homo sapiens
  CDR3 for alpha chain variable domain of TCR clone 161072 (TRAV35, TRAJ22)
CAGLRPGSARQLTF

SEQ ID NO: 322144 - protein, 13 aa, Homo sapiens
  CDR3 for beta chain variable domain of TCR clone 161072 (TRBV4-1, TRBJ2-7)
ASSPVAGGDEQYF

SEQ ID NO: 322145 - protein, 12 aa, Homo sapiens
  CDR3 for alpha chain variable domain of TCR clone 161073 (TRAV12-2, TRAJ10)
WGVTGGGNKLTF

SEQ ID NO: 322146 - protein, 15 aa, Homo sapiens
  CDR3 for beta chain variable domain of TCR clone 161073 (TRBV7-9, TRBJ1-5)
CASSQGHQPNQPQHL

SEQ ID NO: 322147 - protein, 16 aa, Homo sapiens
  CDR3 for alpha chain variable domain of TCR clone 161074 (TRAV30, TRAJ24)
CDTEIVDSDSWGKFQF

SEQ ID NO: 322148 - protein, 15 aa, Homo sapiens
  CDR3 for beta chain variable domain of TCR clone 161074 (TRBV7-2, TRBJ2-1)
CASSSGLAGGNEQFF

SEQ ID NO: 322149 - protein, 17 aa, Homo sapiens
  CDR3 for alpha chain variable domain of TCR clone 161075 (TRAV1-2, TRAJ8)
CAVRDPEENTGFQKLVF

SEQ ID NO: 322150 - protein, 11 aa, Homo sapiens
  CDR3 for beta chain variable domain of TCR clone 161075 (TRBV7-9, TRBJ2-2)
CASSGFGGANT

SEQ ID NO: 322151 - protein, 13 aa, Homo sapiens
  CDR3 for alpha chain variable domain of TCR clone 161076 (TRAV16, TRAJ20)
CALGPSNAYKLSF

SEQ ID NO: 322152 - protein, 15 aa, Homo sapiens
  CDR3 for beta chain variable domain of TCR clone 161076 (TRBV5-1, TRBJ2-2)
CASSRVGSDTGELFF

SEQ ID NO: 322153 - protein, 17 aa, Homo sapiens
  CDR3 for alpha chain variable domain of TCR clone 161077 (TRAV23/DV6, TRAJ57)
CAASSTLSQGGSEKLVF

SEQ ID NO: 322154 - protein, 14 aa, Homo sapiens
  CDR3 for beta chain variable domain of TCR clone 161077 (TRBV25-1, TRBJ1-1)
CASTHLGGNTEAFV

SEQ ID NO: 322155 - protein, 14 aa, Homo sapiens
  CDR3 for alpha chain variable domain of TCR clone 161078 (TRAV12-1, TRAJ17)
CVVNPKAAGNKLTF

SEQ ID NO: 322156 - protein, 16 aa, Homo sapiens
  CDR3 for beta chain variable domain of TCR clone 161078 (TRBV20-1, TRBJ2-1)
CSASASGDSSYNEQFF

SEQ ID NO: 322157 - protein, 11 aa, Homo sapiens
  CDR3 for alpha chain variable domain of TCR clone 161079 (TRAV1-1, TRAJ23)
CAVRQGGKLIF

SEQ ID NO: 322158 - protein, 11 aa, Homo sapiens
  CDR3 for beta chain variable domain of TCR clone 161079 (TRBV3-1, TRBJ2-4)
CASSRSDIQYF

SEQ ID NO: 322159 - protein, 17 aa, Homo sapiens
  CDR3 for alpha chain variable domain of TCR clone 161080 (TRAV3, TRAJ6)
CAVRDGPRAGGSYIPTF

SEQ ID NO: 322160 - protein, 15 aa, Homo sapiens
  CDR3 for beta chain variable domain of TCR clone 161080 (TRBV12-4, TRBJ2-2)
CASSRQGANTGELFF

SEQ ID NO: 322161 - protein, 14 aa, Homo sapiens
  CDR3 for alpha chain variable domain of TCR clone 161081 (TRAV8-3, TRAJ4)
CAVGASGGYNKRIF

SEQ ID NO: 322162 - protein, 14 aa, Homo sapiens
  CDR3 for beta chain variable domain of TCR clone 161081 (TRBV19, TRBJ2-1)
CASPTFILSGEQFF

SEQ ID NO: 322163 - protein, 16 aa, Homo sapiens
  CDR3 for alpha chain variable domain of TCR clone 161082 (TRAV23/DV6, TRAJ9)
CAASIGGNTGGFKTIF

SEQ ID NO: 322164 - protein, 16 aa, Homo sapiens
  CDR3 for beta chain variable domain of TCR clone 161082 (TRBV15, TRBJ2-5)
CASSRYLEAAQETQYF

SEQ ID NO: 322165 - protein, 14 aa, Homo sapiens
  CDR3 for alpha chain variable domain of TCR clone 161083 (TRAV26-1, TRAJ39)
CIVRGSRAGNMLTF

SEQ ID NO: 322166 - protein, 13 aa, Homo sapiens
  CDR3 for beta chain variable domain of TCR clone 161083 (TRBV7-6, TRBJ1-2)
CASSLVADYGYTF

SEQ ID NO: 322167 - protein, 16 aa, Homo sapiens
  CDR3 for alpha chain variable domain of TCR clone 161084 (TRAV30, TRAJ24)
CGTEIVDADSWGKCQF

SEQ ID NO: 322168 - protein, 15 aa, Homo sapiens
  CDR3 for beta chain variable domain of TCR clone 161084 (TRBV19, TRBJ2-1)
CASSSPGVPLDEQFF

SEQ ID NO: 322169 - protein, 14 aa, Homo sapiens
  CDR3 for alpha chain variable domain of TCR clone 161085 (TRAV1-2, TRAJ16)
CAVNRFSDGEKLLF

SEQ ID NO: 322170 - protein, 16 aa, Homo sapiens
  CDR3 for beta chain variable domain of TCR clone 161085 (TRBV7-3, TRBJ2-2)
CASSLKRGTLSGELFF

SEQ ID NO: 322171 - protein, 15 aa, Homo sapiens
  CDR3 for alpha chain variable domain of TCR clone 161086 (TRAV3, TRAJ5)
CAVRDLDTGREALTF

SEQ ID NO: 322172 - protein, 13 aa, Homo sapiens
  CDR3 for beta chain variable domain of TCR clone 161086 (TRBV12-4, TRBJ2-7)
CASSPTETYEQYF

SEQ ID NO: 322173 - protein, 14 aa, Homo sapiens
  CDR3 for alpha chain variable domain of TCR clone 161087 (TRAV26-1, TRAJ6)
CIVSPVGGSYIPTF

SEQ ID NO: 322174 - protein, 16 aa, Homo sapiens
  CDR3 for beta chain variable domain of TCR clone 161087 (TRBV4-1, TRBJ2-5)
CASSSGLAGDLGTQYF

SEQ ID NO: 322175 - protein, 11 aa, Homo sapiens
  CDR3 for alpha chain variable domain of TCR clone 161088 (TRAV12-1, TRAJ43)
CVEYDNNDMRF

SEQ ID NO: 322176 - protein, 14 aa, Homo sapiens
  CDR3 for beta chain variable domain of TCR clone 161088 (TRBV10-2, TRBJ2-1)
CASSEGTSEDDQFF

SEQ ID NO: 322177 - protein, 21 aa, Homo sapiens
  CDR3 for alpha chain variable domain of TCR clone 161089 (TRAV12-1, TRAJ32)
SSVIQPPTSMNYGGATNKLIF

SEQ ID NO: 322178 - protein, 16 aa, Homo sapiens
  CDR3 for beta chain variable domain of TCR clone 161089 (TRBV19, TRBJ2-2)
CASRSPGTGATGELFF

SEQ ID NO: 322179 - protein, 16 aa, Homo sapiens
  CDR3 for alpha chain variable domain of TCR clone 161090 (TRAV22, TRAJ45)
CAVERGKRGGADGLTF

SEQ ID NO: 322180 - protein, 13 aa, Homo sapiens
  CDR3 for beta chain variable domain of TCR clone 161090 (TRBV27, TRBJ1-1)
CASSLAIGAEAFF

SEQ ID NO: 322181 - protein, 12 aa, Homo sapiens
  CDR3 for alpha chain variable domain of TCR clone 161091 (TRAV12-2, TRAJ10)
WGVTGGGNKLTF

SEQ ID NO: 322182 - protein, 17 aa, Homo sapiens
  CDR3 for beta chain variable domain of TCR clone 161091 (TRBV5-1, TRBJ2-5)
CASSLLGLAANQETQYF

SEQ ID NO: 322183 - protein, 15 aa, Homo sapiens
  CDR3 for alpha chain variable domain of TCR clone 161092 (TRAV12-1, TRAJ44)
CVADSPTGTASKLTF

SEQ ID NO: 322184 - protein, 13 aa, Homo sapiens
  CDR3 for beta chain variable domain of TCR clone 161092 (TRBV20-1, TRBJ2-5)
CSARGDYQETQYF

SEQ ID NO: 322185 - protein, 16 aa, Homo sapiens
  CDR3 for alpha chain variable domain of TCR clone 161093 (TRAV12-1, TRAJ48)
CVVNMVSNFGNEKLTF

SEQ ID NO: 322186 - protein, 13 aa, Homo sapiens
  CDR3 for beta chain variable domain of TCR clone 161093 (TRBV11-2, TRBJ2-7)
CASSPLGSYEQYF

SEQ ID NO: 322187 - protein, 14 aa, Homo sapiens
  CDR3 for alpha chain variable domain of TCR clone 161094 (TRAV12-3, TRAJ5)
CAMTWDTGRRALTF

SEQ ID NO: 322188 - protein, 16 aa, Homo sapiens
  CDR3 for beta chain variable domain of TCR clone 161094 (TRBV10-2, TRBJ1-5)
CASSSTGRNQPQLLVM

SEQ ID NO: 322189 - protein, 15 aa, Homo sapiens
  CDR3 for alpha chain variable domain of TCR clone 161095 (TRAV26-1, TRAJ40)
CIVRVTTSGTYKYIF

SEQ ID NO: 322190 - protein, 14 aa, Homo sapiens
  CDR3 for beta chain variable domain of TCR clone 161095 (TRBV7-9, TRBJ1-4)
CASSTDRKNCFLAV

SEQ ID NO: 322191 - protein, 13 aa, Homo sapiens
  CDR3 for alpha chain variable domain of TCR clone 161096 (TRAV12-1, TRAJ26)
CVVRRNYGQNFVF

SEQ ID NO: 322192 - protein, 14 aa, Homo sapiens
  CDR3 for beta chain variable domain of TCR clone 161096 (TRBV6-3, TRBJ1-1)
CASRYTGENTEAFF

SEQ ID NO: 322193 - protein, 15 aa, Homo sapiens
  CDR3 for alpha chain variable domain of TCR clone 161097 (TRAV12-3, TRAJ23)
CAMILIYNQGGKLIF

SEQ ID NO: 322194 - protein, 14 aa, Homo sapiens
  CDR3 for beta chain variable domain of TCR clone 161097 (TRBV27, TRBJ1-5)
CPSSLDPRNQPQHF

SEQ ID NO: 322195 - protein, 14 aa, Homo sapiens
  CDR3 for alpha chain variable domain of TCR clone 161098 (TRAV1-2, TRAJ16)
CAVNRFSDGQKLLF

SEQ ID NO: 322196 - protein, 16 aa, Homo sapiens
  CDR3 for beta chain variable domain of TCR clone 161098 (TRBV6-1, TRBJ2-5)
CASSDTLDRGAETQYF

SEQ ID NO: 322197 - protein, 12 aa, Homo sapiens
  CDR3 for alpha chain variable domain of TCR clone 161099 (TRAV27, TRAJ35)
CAGADFGNVLHC

SEQ ID NO: 322198 - protein, 16 aa, Homo sapiens
  CDR3 for beta chain variable domain of TCR clone 161099 (TRBV7-3, TRBJ2-2)
CAGSLKRGTLSGELFF

SEQ ID NO: 322199 - protein, 12 aa, Homo sapiens
  CDR3 for alpha chain variable domain of TCR clone 161100 (TRAV1-2, TRAJ33)
CAALDSNYQLIW

SEQ ID NO: 322200 - protein, 16 aa, Homo sapiens
  CDR3 for beta chain variable domain of TCR clone 161100 (TRBV4-1, TRBJ2-7)
CASSQNDRDNSYEQYF

SEQ ID NO: 322201 - protein, 14 aa, Homo sapiens
  CDR3 for alpha chain variable domain of TCR clone 161101 (TRAV1-2, TRAJ17)
CSLRRGAAGNKLTF

SEQ ID NO: 322202 - protein, 14 aa, Homo sapiens
  CDR3 for beta chain variable domain of TCR clone 161101 (TRBV7-2, TRBJ2-7)
CASSLYPGRYEQYF

SEQ ID NO: 322203 - protein, 17 aa, Homo sapiens
  CDR3 for alpha chain variable domain of TCR clone 161102 (TRAV23/DV6, TRAJ57)
CAASSTLSQGGSERLVF

SEQ ID NO: 322204 - protein, 17 aa, Homo sapiens
  CDR3 for beta chain variable domain of TCR clone 161102 (TRBV11-2, TRBJ2-1)
CASSLYPPGVEYNEQFF

SEQ ID NO: 322205 - protein, 16 aa, Homo sapiens
  CDR3 for alpha chain variable domain of TCR clone 161103 (TRAV16, TRAJ52)
CALSAAGGTSYGKLTF

SEQ ID NO: 322206 - protein, 14 aa, Homo sapiens
  CDR3 for beta chain variable domain of TCR clone 161103 (TRBV12-4, TRBJ2-3)
CASTIAGWGDTQYF

SEQ ID NO: 322207 - protein, 13 aa, Homo sapiens
  CDR3 for alpha chain variable domain of TCR clone 161104 (TRAV12-2, TRAJ9)
CAGGNTGGFNTIF

SEQ ID NO: 322208 - protein, 17 aa, Homo sapiens
  CDR3 for beta chain variable domain of TCR clone 161104 (TRBV4-1, TRBJ1-4)
CASSQEGPRGVEEKLFF

SEQ ID NO: 322209 - protein, 15 aa, Homo sapiens
  CDR3 for alpha chain variable domain of TCR clone 161105 (TRAV26-1, TRAJ22)
CIVRVSFWFCKATDL

SEQ ID NO: 322210 - protein, 20 aa, Homo sapiens
  CDR3 for beta chain variable domain of TCR clone 161105 (TRBV11-2, TRBJ2-2)
LRTRPCISVPAASLPGSCFF

SEQ ID NO: 322211 - protein, 15 aa, Homo sapiens
  CDR3 for alpha chain variable domain of TCR clone 161106 (TRAV26-1, TRAJ29)
CIVRVEGSGNTPRVF

SEQ ID NO: 322212 - protein, 15 aa, Homo sapiens
  CDR3 for beta chain variable domain of TCR clone 161106 (TRBV7-9, TRBJ1-5)
CASSPGHQPNQPQHF

SEQ ID NO: 322213 - protein, 16 aa, Homo sapiens
  CDR3 for alpha chain variable domain of TCR clone 161107 (TRAV20, TRAJ17)
CAVQARWESCRQQANF

SEQ ID NO: 322214 - protein, 13 aa, Homo sapiens
  CDR3 for beta chain variable domain of TCR clone 161107 (TRBV11-2, TRBJ2-5)
CASSFSSQETQYF

SEQ ID NO: 322215 - protein, 15 aa, Homo sapiens
  CDR3 for alpha chain variable domain of TCR clone 161108 (TRAV26-2, TRAJ50)
CILRDEETFYDKVIF

SEQ ID NO: 322216 - protein, 12 aa, Homo sapiens
  CDR3 for beta chain variable domain of TCR clone 161108 (TRBV5-7, TRBJ1-2)
CASSDGPYGYTF

SEQ ID NO: 322217 - protein, 12 aa, Homo sapiens
  CDR3 for alpha chain variable domain of TCR clone 161109 (TRAV3, TRAJ43)
CAGRDPNNDMRF

SEQ ID NO: 322218 - protein, 15 aa, Homo sapiens
  CDR3 for beta chain variable domain of TCR clone 161109 (TRBV4-3, TRBJ2-7)
CASSQGDWGDYEQYF

SEQ ID NO: 322219 - protein, 12 aa, Homo sapiens
  CDR3 for alpha chain variable domain of TCR clone 161110 (TRAV13-1, TRAJ3)
CAANGVQQCFQD

SEQ ID NO: 322220 - protein, 16 aa, Homo sapiens
  CDR3 for beta chain variable domain of TCR clone 161110 (TRBV7-3, TRBJ2-2)
CASSLKRGTLSGELFF

SEQ ID NO: 322221 - protein, 15 aa, Homo sapiens
  CDR3 for alpha chain variable domain of TCR clone 161111 (TRAV16, TRAJ45)
CAPPYSGGGADGLTF

SEQ ID NO: 322222 - protein, 15 aa, Homo sapiens
  CDR3 for beta chain variable domain of TCR clone 161111 (TRBV4-1, TRBJ1-4)
CASSDTGGTNEKLFF

SEQ ID NO: 322223 - protein, 15 aa, Homo sapiens
  CDR3 for alpha chain variable domain of TCR clone 161112 (TRAV2, TRAJ9)
CAVEDRGTGGLKTIF

SEQ ID NO: 322224 - protein, 12 aa, Homo sapiens
  CDR3 for beta chain variable domain of TCR clone 161112 (TRBV11-2, TRBJ2-2)
CASSLGGGELFF

SEQ ID NO: 322225 - protein, 15 aa, Homo sapiens
  CDR3 for alpha chain variable domain of TCR clone 161113 (TRAV12-3, TRAJ10)
CASYILTGGGNKLTF

SEQ ID NO: 322226 - protein, 15 aa, Homo sapiens
  CDR3 for beta chain variable domain of TCR clone 161113 (TRBV7-2, TRBJ1-6)
CASSLGPDRGMPLYF

SEQ ID NO: 322227 - protein, 14 aa, Homo sapiens
  CDR3 for alpha chain variable domain of TCR clone 161114 (TRAV13-1, TRAJ10)
CAAKEPGGGNKLTF

SEQ ID NO: 322228 - protein, 14 aa, Homo sapiens
  CDR3 for beta chain variable domain of TCR clone 161114 (TRBV6-6, TRBJ2-7)
CASSDSGAGYEQYL

SEQ ID NO: 322229 - protein, 18 aa, Homo sapiens
  CDR3 for alpha chain variable domain of TCR clone 161115 (TRAV21, TRAJ52)
CAVRPSPAGGTSYGKLTF

SEQ ID NO: 322230 - protein, 14 aa, Homo sapiens
  CDR3 for beta chain variable domain of TCR clone 161115 (TRBV7-2, TRBJ1-2)
CASSRGGTNYGYTF

SEQ ID NO: 322231 - protein, 11 aa, Homo sapiens
  CDR3 for alpha chain variable domain of TCR clone 161116 (TRAV1-2, TRAJ31)
CAVNNNARLMF

SEQ ID NO: 322232 - protein, 13 aa, Homo sapiens
  CDR3 for beta chain variable domain of TCR clone 161116 (TRBV27, TRBJ1-4)
CASSLMGDEKLFF

SEQ ID NO: 322233 - protein, 13 aa, Homo sapiens
  CDR3 for alpha chain variable domain of TCR clone 161117 (TRAV12-2, TRAJ9)
CAVLETGGFKTIF

SEQ ID NO: 322234 - protein, 15 aa, Homo sapiens
  CDR3 for beta chain variable domain of TCR clone 161117 (TRBV6-3, TRBJ2-7)
CASSRTGGNLYEQYV

SEQ ID NO: 322235 - protein, 13 aa, Homo sapiens
  CDR3 for alpha chain variable domain of TCR clone 161118 (TRAV27, TRAJ6)
CAGGTRGSYIPTF

SEQ ID NO: 322236 - protein, 15 aa, Homo sapiens
  CDR3 for beta chain variable domain of TCR clone 161118 (TRBV13, TRBJ2-5)
CASSLPGGIQETQYF

SEQ ID NO: 322237 - protein, 12 aa, Homo sapiens
  CDR3 for alpha chain variable domain of TCR clone 161119 (TRAV29/DV5, TRAJ34)
CAARHNTDNPIF

SEQ ID NO: 322238 - protein, 15 aa, Homo sapiens
  CDR3 for beta chain variable domain of TCR clone 161119 (TRBV19, TRBJ2-7)
CASSPAGSGEALRYF

SEQ ID NO: 322239 - protein, 13 aa, Homo sapiens
  CDR3 for alpha chain variable domain of TCR clone 161120 (TRAV12-1, TRAJ34)
CVVTGYNTDKLIF

SEQ ID NO: 322240 - protein, 13 aa, Homo sapiens
  CDR3 for beta chain variable domain of TCR clone 161120 (TRBV28, TRBJ2-7)
CGSKAGGVYEQYF

SEQ ID NO: 322241 - protein, 15 aa, Homo sapiens
  CDR3 for alpha chain variable domain of TCR clone 161121 (TRAV12-2, TRAJ53)
CAVNGGGGSNYKPTF

SEQ ID NO: 322242 - protein, 17 aa, Homo sapiens
  CDR3 for beta chain variable domain of TCR clone 161121 (TRBV20-1, TRBJ2-2)
CSASGSGQGGLTGELFF

SEQ ID NO: 322243 - protein, 13 aa, Homo sapiens
  CDR3 for alpha chain variable domain of TCR clone 161122 (TRAV26-1, TRAJ31)
CIVRVDGNAGLMF

SEQ ID NO: 322244 - protein, 17 aa, Homo sapiens
  CDR3 for beta chain variable domain of TCR clone 161122 (TRBV11-2, TRBJ2-1)
CASSLYPPGVEYNEQFF

SEQ ID NO: 322245 - protein, 14 aa, Homo sapiens
  CDR3 for alpha chain variable domain of TCR clone 161123 (TRAV17, TRAJ57)
CATDPQGGSEKLVF

SEQ ID NO: 322246 - protein, 15 aa, Homo sapiens
  CDR3 for beta chain variable domain of TCR clone 161123 (TRBV5-1, TRBJ2-7)
CASSVDLTSSYEQYF

SEQ ID NO: 322247 - protein, 14 aa, Homo sapiens
  CDR3 for alpha chain variable domain of TCR clone 161124 (TRAV1-1, TRAJ28)
CAAPSGAGSYQLTS

SEQ ID NO: 322248 - protein, 15 aa, Homo sapiens
  CDR3 for beta chain variable domain of TCR clone 161124 (TRBV7-2, TRBJ1-2)
CASSLVSGGDYGYTF

SEQ ID NO: 322249 - protein, 16 aa, Homo sapiens
  CDR3 for alpha chain variable domain of TCR clone 161125 (TRAV3, TRAJ21)
CAVRDRSASSNFTLDL

SEQ ID NO: 322250 - protein, 16 aa, Homo sapiens
  CDR3 for beta chain variable domain of TCR clone 161125 (TRBV7-2, TRBJ2-5)
CASSLESAGGRETQYF

SEQ ID NO: 322251 - protein, 15 aa, Homo sapiens
  CDR3 for alpha chain variable domain of TCR clone 161126 (TRAV2, TRAJ9)
CAVEDRGTGGFKTIF

SEQ ID NO: 322252 - protein, 17 aa, Homo sapiens
  CDR3 for beta chain variable domain of TCR clone 161126 (TRBV20-1, TRBJ2-2)
CSASGSGQGGLTGELFF

SEQ ID NO: 322253 - protein, 13 aa, Homo sapiens
  CDR3 for alpha chain variable domain of TCR clone 161127 (TRAV13-2, TRAJ13)
CAERPGGYQKVTF

SEQ ID NO: 322254 - protein, 14 aa, Homo sapiens
  CDR3 for beta chain variable domain of TCR clone 161127 (TRBV5-1, TRBJ2-5)
CASSLAGKQETQYF

SEQ ID NO: 322255 - protein, 20 aa, Homo sapiens
  CDR3 for alpha chain variable domain of TCR clone 161128 (TRAV26-1, TRAJ42)
CCVLLHRQTYYGGSQGNLIF

SEQ ID NO: 322256 - protein, 15 aa, Homo sapiens
  CDR3 for beta chain variable domain of TCR clone 161128 (TRBV20-1, TRBJ1-1)
CSASRGVTGNTEAFF

SEQ ID NO: 322257 - protein, 13 aa, Homo sapiens
  CDR3 for alpha chain variable domain of TCR clone 161129 (TRAV17, TRAJ5)
CAPMDTGRRALTF

SEQ ID NO: 322258 - protein, 14 aa, Homo sapiens
  CDR3 for beta chain variable domain of TCR clone 161129 (TRBV20-1, TRBJ2-1)
CSAQIGGSANEQFF

SEQ ID NO: 322259 - protein, 12 aa, Homo sapiens
  CDR3 for alpha chain variable domain of TCR clone 161130 (TRAV12-1, TRAJ6)
CVVSERSYIPTF

SEQ ID NO: 322260 - protein, 15 aa, Homo sapiens
  CDR3 for beta chain variable domain of TCR clone 161130 (TRBV10-1, TRBJ2-7)
CAWLHTGTGIYEQYF

SEQ ID NO: 322261 - protein, 13 aa, Homo sapiens
  CDR3 for alpha chain variable domain of TCR clone 161131 (TRAV30, TRAJ48)
CGTFLKRNEKLTF

SEQ ID NO: 322262 - protein, 19 aa, Homo sapiens
  CDR3 for beta chain variable domain of TCR clone 161131 (TRBV7-2, TRBJ2-3)
CASSFLSRNWGGGTDTQYF

SEQ ID NO: 322263 - protein, 10 aa, Homo sapiens
  CDR3 for alpha chain variable domain of TCR clone 161132 (TRAV2, TRAJ34)
CAVVNDKLIF

SEQ ID NO: 322264 - protein, 15 aa, Homo sapiens
  CDR3 for beta chain variable domain of TCR clone 161132 (TRBV3-1, TRBJ2-2)
CARRKDWNREGEMFF

SEQ ID NO: 322265 - protein, 15 aa, Homo sapiens
  CDR3 for alpha chain variable domain of TCR clone 161133 (TRAV8-3, TRAJ45)
CASSYSGRGADGLTF

SEQ ID NO: 322266 - protein, 17 aa, Homo sapiens
  CDR3 for beta chain variable domain of TCR clone 161133 (TRBV7-8, TRBJ1-2)
CASSLRPLQGHLYGYTF

SEQ ID NO: 322267 - protein, 14 aa, Homo sapiens
  CDR3 for alpha chain variable domain of TCR clone 161134 (TRAV17, TRAJ6)
CATDASGGSYIPTF

SEQ ID NO: 322268 - protein, 16 aa, Homo sapiens
  CDR3 for beta chain variable domain of TCR clone 161134 (TRBV7-3, TRBJ2-2)
YASSLKRGTLSGELFF

SEQ ID NO: 322269 - protein, 13 aa, Homo sapiens
  CDR3 for alpha chain variable domain of TCR clone 161135 (TRAV9-2, TRAJ49)
CALIQIGGNQFYF

SEQ ID NO: 322270 - protein, 20 aa, Homo sapiens
  CDR3 for beta chain variable domain of TCR clone 161135 (TRBV19, TRBJ2-1)
CASSISRTVTSTRLNNEQFF

SEQ ID NO: 322271 - protein, 13 aa, Homo sapiens
  CDR3 for alpha chain variable domain of TCR clone 161136 (TRAV8-3, TRAJ4)
WVFYSGGYNKLIF

SEQ ID NO: 322272 - protein, 16 aa, Homo sapiens
  CDR3 for beta chain variable domain of TCR clone 161136 (TRBV7-8, TRBJ2-3)
CASSTEGQRGTDTQYF

SEQ ID NO: 322273 - protein, 16 aa, Homo sapiens
  CDR3 for alpha chain variable domain of TCR clone 161137 (TRAV12-2, TRAJ32)
CAVNLGQGGATNKLIF

SEQ ID NO: 322274 - protein, 16 aa, Homo sapiens
  CDR3 for beta chain variable domain of TCR clone 161137 (TRBV3-1, TRBJ2-5)
CASSPGQFNGFGTQYF

SEQ ID NO: 322275 - protein, 14 aa, Homo sapiens
  CDR3 for alpha chain variable domain of TCR clone 161138 (TRAV38-1, TRAJ29)
CAFITPSRNTPLVF

SEQ ID NO: 322276 - protein, 15 aa, Homo sapiens
  CDR3 for beta chain variable domain of TCR clone 161138 (TRBV7-8, TRBJ2-1)
CASSLADSLYNEQFF

SEQ ID NO: 322277 - protein, 11 aa, Homo sapiens
  CDR3 for alpha chain variable domain of TCR clone 161139 (TRAV2, TRAJ13)
CASGGYQKVTS

SEQ ID NO: 322278 - protein, 13 aa, Homo sapiens
  CDR3 for beta chain variable domain of TCR clone 161139 (TRBV12-4, TRBJ1-2)
CASSLRQGKGYTF

SEQ ID NO: 322279 - protein, 15 aa, Homo sapiens
  CDR3 for alpha chain variable domain of TCR clone 161140 (TRAV35, TRAJ40)
CAGQLWDSGTYNYIF

SEQ ID NO: 322280 - protein, 12 aa, Homo sapiens
  CDR3 for beta chain variable domain of TCR clone 161140 (TRBV7-8, TRBJ2-7)
CASSLAGYERYF

SEQ ID NO: 322281 - protein, 15 aa, Homo sapiens
  CDR3 for alpha chain variable domain of TCR clone 161141 (TRAV12-3, TRAJ49)
CAMAVTPNTGNQFYF

SEQ ID NO: 322282 - protein, 18 aa, Homo sapiens
  CDR3 for beta chain variable domain of TCR clone 161141 (TRBV4-1, TRBJ1-5)
CASSQDPRGQWLNQPQHF

SEQ ID NO: 322283 - protein, 13 aa, Homo sapiens
  CDR3 for alpha chain variable domain of TCR clone 161142 (TRAV13-2, TRAJ13)
CAERPGGYQKDTF

SEQ ID NO: 322284 - protein, 15 aa, Homo sapiens
  CDR3 for beta chain variable domain of TCR clone 161142 (TRBV11-3, TRBJ2-7)
CASSPGPASSYEQYF

SEQ ID NO: 322285 - protein, 19 aa, Homo sapiens
  CDR3 for alpha chain variable domain of TCR clone 161143 (TRAV25, TRAJ20)
TATQTTDVGILPHDYKLSF

SEQ ID NO: 322286 - protein, 12 aa, Homo sapiens
  CDR3 for beta chain variable domain of TCR clone 161143 (TRBV2, TRBJ2-1)
CAYGPPGNEQFF

SEQ ID NO: 322287 - protein, 14 aa, Homo sapiens
  CDR3 for alpha chain variable domain of TCR clone 161144 (TRAV8-4, TRAJ5)
CAVSTDTGRRALTF

SEQ ID NO: 322288 - protein, 13 aa, Homo sapiens
  CDR3 for beta chain variable domain of TCR clone 161144 (TRBV19, TRBJ1-2)
CASSVPGQDGYTF

SEQ ID NO: 322289 - protein, 13 aa, Homo sapiens
  CDR3 for alpha chain variable domain of TCR clone 161145 (TRAV1-2, TRAJ24)
CAVRADSWGKFQF

SEQ ID NO: 322290 - protein, 13 aa, Homo sapiens
  CDR3 for beta chain variable domain of TCR clone 161145 (TRBV20-1, TRBJ2-1)
GSATGLAGDEQFF

SEQ ID NO: 322291 - protein, 11 aa, Homo sapiens
  CDR3 for alpha chain variable domain of TCR clone 161146 (TRAV17, TRAJ23)
CAYNQGGKLIF

SEQ ID NO: 322292 - protein, 15 aa, Homo sapiens
  CDR3 for beta chain variable domain of TCR clone 161146 (TRBV11-3, TRBJ2-3)
CASLKDGREGDTQYF

SEQ ID NO: 322293 - protein, 15 aa, Homo sapiens
  CDR3 for alpha chain variable domain of TCR clone 161147 (TRAV8-2, TRAJ16)
CAVSDGFSDGQKLLF

SEQ ID NO: 322294 - protein, 14 aa, Homo sapiens
  CDR3 for beta chain variable domain of TCR clone 161147 (TRBV7-3, TRBJ1-1)
CASSLGTGYTEAFF

SEQ ID NO: 322295 - protein, 13 aa, Homo sapiens
  CDR3 for alpha chain variable domain of TCR clone 161148 (TRAV12-3, TRAJ9)
CAMRNTGGFKTIF

SEQ ID NO: 322296 - protein, 14 aa, Homo sapiens
  CDR3 for beta chain variable domain of TCR clone 161148 (TRBV4-2, TRBJ2-1)
CASGLDRAYNEQFF

SEQ ID NO: 322297 - protein, 16 aa, Homo sapiens
  CDR3 for alpha chain variable domain of TCR clone 161149 (TRAV21, TRAJ17)
CAVRPGEEAAGNKLTF

SEQ ID NO: 322298 - protein, 16 aa, Homo sapiens
  CDR3 for beta chain variable domain of TCR clone 161149 (TRBV2, TRBJ2-7)
CASSEPCTGPSYEQYF

SEQ ID NO: 322299 - protein, 16 aa, Homo sapiens
  CDR3 for alpha chain variable domain of TCR clone 161150 (TRAV22, TRAJ45)
CAVERGKRGGADGLTF

SEQ ID NO: 322300 - protein, 16 aa, Homo sapiens
  CDR3 for beta chain variable domain of TCR clone 161150 (TRBV5-1, TRBJ2-5)
CASSVRRTSGQENQYF

SEQ ID NO: 322301 - protein, 14 aa, Homo sapiens
  CDR3 for alpha chain variable domain of TCR clone 161151 (TRAV9-2, TRAJ39)
CALYIYNAGNMLTF

SEQ ID NO: 322302 - protein, 18 aa, Homo sapiens
  CDR3 for beta chain variable domain of TCR clone 161151 (TRBV5-4, TRBJ2-3)
CASSPTAGFLPSTDTQYF

SEQ ID NO: 322303 - protein, 13 aa, Homo sapiens
  CDR3 for alpha chain variable domain of TCR clone 161152 (TRAV36/DV7, TRAJ37)
CAVFSSNTGKLIF

SEQ ID NO: 322304 - protein, 16 aa, Homo sapiens
  CDR3 for beta chain variable domain of TCR clone 161152 (TRBV2, TRBJ1-3)
CASSRTGGSTGNTIYF

SEQ ID NO: 322305 - protein, 14 aa, Homo sapiens
  CDR3 for alpha chain variable domain of TCR clone 161153 (TRAV12-1, TRAJ12)
CVVTRMDSSYKLIF

SEQ ID NO: 322306 - protein, 14 aa, Homo sapiens
  CDR3 for beta chain variable domain of TCR clone 161153 (TRBV19, TRBJ2-7)
CASNFRDTFTGMYF

SEQ ID NO: 322307 - protein, 14 aa, Homo sapiens
  CDR3 for alpha chain variable domain of TCR clone 161154 (TRAV12-2, TRAJ40)
CAVKIPSGTYKYIF

SEQ ID NO: 322308 - protein, 15 aa, Homo sapiens
  CDR3 for beta chain variable domain of TCR clone 161154 (TRBV7-8, TRBJ1-2)
CASSLVRDGGLGYTF

SEQ ID NO: 322309 - protein, 12 aa, Homo sapiens
  CDR3 for alpha chain variable domain of TCR clone 161155 (TRAV8-3, TRAJ20)
CAVGANDYKLSF

SEQ ID NO: 322310 - protein, 14 aa, Homo sapiens
  CDR3 for beta chain variable domain of TCR clone 161155 (TRBV12-4, TRBJ1-4)
CASRMTGRSEKLFF

SEQ ID NO: 322311 - protein, 13 aa, Homo sapiens
  CDR3 for alpha chain variable domain of TCR clone 161156 (TRAV21, TRAJ27)
CAARPGNAGKSTF

SEQ ID NO: 322312 - protein, 20 aa, Homo sapiens
  CDR3 for beta chain variable domain of TCR clone 161156 (TRBV4-2, TRBJ2-7)
CASRQASGGNLRAVLRAGHQ

SEQ ID NO: 322313 - protein, 12 aa, Homo sapiens
  CDR3 for alpha chain variable domain of TCR clone 161157 (TRAV21, TRAJ6)
CAVKGGSCIPTF

SEQ ID NO: 322314 - protein, 13 aa, Homo sapiens
  CDR3 for beta chain variable domain of TCR clone 161157 (TRBV11-2, TRBJ1-1)
CVSSFTENTEAFF

SEQ ID NO: 322315 - protein, 21 aa, Homo sapiens
  CDR3 for alpha chain variable domain of TCR clone 161158 (TRAV8-3, TRAJ6)
CAVGGEEATYLHLEEEPALLS

SEQ ID NO: 322316 - protein, 14 aa, Homo sapiens
  CDR3 for beta chain variable domain of TCR clone 161158 (TRBV5-1, TRBJ2-7)
CASSRGESLYEQYF

SEQ ID NO: 322317 - protein, 14 aa, Homo sapiens
  CDR3 for alpha chain variable domain of TCR clone 161159 (TRAV2, TRAJ9)
CAVEDRSGGFKTSF

SEQ ID NO: 322318 - protein, 15 aa, Homo sapiens
  CDR3 for beta chain variable domain of TCR clone 161159 (TRBV19, TRBJ2-1)
CASSHRDRGPNEQFF

SEQ ID NO: 322319 - protein, 11 aa, Homo sapiens
  CDR3 for alpha chain variable domain of TCR clone 161160 (TRAV17, TRAJ31)
CATSNNARPMF

SEQ ID NO: 322320 - protein, 16 aa, Homo sapiens
  CDR3 for beta chain variable domain of TCR clone 161160 (TRBV7-8, TRBJ2-4)
CASSAERTLAKNKQYF

SEQ ID NO: 322321 - protein, 13 aa, Homo sapiens
  CDR3 for alpha chain variable domain of TCR clone 161161 (TRAV12-3, TRAJ29)
CAMTLSGNTPLVF

SEQ ID NO: 322322 - protein, 15 aa, Homo sapiens
  CDR3 for beta chain variable domain of TCR clone 161161 (TRBV5-1, TRBJ1-2)
CASSYPGTGSSGYTF

SEQ ID NO: 322323 - protein, 12 aa, Homo sapiens
  CDR3 for alpha chain variable domain of TCR clone 161162 (TRAV2, TRAJ31)
CSVEDNNARLMF

SEQ ID NO: 322324 - protein, 15 aa, Homo sapiens
  CDR3 for beta chain variable domain of TCR clone 161162 (TRBV11-2, TRBJ2-1)
CASSKNRGLIYEQFF

SEQ ID NO: 322325 - protein, 18 aa, Homo sapiens
  CDR3 for alpha chain variable domain of TCR clone 161163 (TRAV13-1, TRAJ42)
STSVQQVNHGGSQGNLIF

SEQ ID NO: 322326 - protein, 15 aa, Homo sapiens
  CDR3 for beta chain variable domain of TCR clone 161163 (TRBV20-1, TRBJ2-1)
CSASSARSSYNEQFF

SEQ ID NO: 322327 - protein, 12 aa, Homo sapiens
  CDR3 for alpha chain variable domain of TCR clone 161164 (TRAV13-1, TRAJ49)
CAASPMGNQFYF

SEQ ID NO: 322328 - protein, 20 aa, Homo sapiens
  CDR3 for beta chain variable domain of TCR clone 161164 (TRBV28, TRBJ2-1)
CASTPIGRSPGLAGGNEQFF

SEQ ID NO: 322329 - protein, 13 aa, Homo sapiens
  CDR3 for alpha chain variable domain of TCR clone 161165 (TRAV20, TRAJ48)
CAVHLFGNEKLIF

SEQ ID NO: 322330 - protein, 15 aa, Homo sapiens
  CDR3 for beta chain variable domain of TCR clone 161165 (TRBV6-5, TRBJ2-6)
CASSQWEAGANVLTF

SEQ ID NO: 322331 - protein, 14 aa, Homo sapiens
  CDR3 for alpha chain variable domain of TCR clone 161166 (TRAV26-1, TRAJ38)
CIADNAGNNRKLIL

SEQ ID NO: 322332 - protein, 13 aa, Homo sapiens
  CDR3 for beta chain variable domain of TCR clone 161166 (TRBV10-3, TRBJ2-7)
CASKLAVNYEQYF

SEQ ID NO: 322333 - protein, 18 aa, Homo sapiens
  CDR3 for alpha chain variable domain of TCR clone 161167 (TRAV12-2, )
CAVEDIQNTDPAVYQLRD

SEQ ID NO: 322334 - protein, 15 aa, Homo sapiens
  CDR3 for beta chain variable domain of TCR clone 161167 (TRBV6-5, TRBJ2-7)
CASSRTSGFSYEQYF

SEQ ID NO: 322335 - protein, 13 aa, Homo sapiens
  CDR3 for alpha chain variable domain of TCR clone 161168 (TRAV21, TRAJ56)
CAVRTGANSKLTF

SEQ ID NO: 322336 - protein, 15 aa, Homo sapiens
  CDR3 for beta chain variable domain of TCR clone 161168 (TRBV7-9, TRBJ1-1)
CASSHRGTVNTEACF

SEQ ID NO: 322337 - protein, 16 aa, Homo sapiens
  CDR3 for alpha chain variable domain of TCR clone 161169 (TRAV13-2, TRAJ45)
CAENRGSGGGADGLTF

SEQ ID NO: 322338 - protein, 13 aa, Homo sapiens
  CDR3 for beta chain variable domain of TCR clone 161169 (TRBV7-6, TRBJ1-2)
CASSLVADYGYTF

SEQ ID NO: 322339 - protein, 14 aa, Homo sapiens
  CDR3 for alpha chain variable domain of TCR clone 161170 (TRAV26-1, TRAJ44)
CIVRPTGTASKLTF

SEQ ID NO: 322340 - protein, 13 aa, Homo sapiens
  CDR3 for beta chain variable domain of TCR clone 161170 (TRBV10-3, TRBJ2-7)
CASKLAVNYEQYF

SEQ ID NO: 322341 - protein, 12 aa, Homo sapiens
  CDR3 for alpha chain variable domain of TCR clone 161171 (TRAV12-3, TRAJ17)
CAMTLTGNKLTF

SEQ ID NO: 322342 - protein, 13 aa, Homo sapiens
  CDR3 for beta chain variable domain of TCR clone 161171 (TRBV24-1, TRBJ2-3)
CATSFGGTDTQYF

SEQ ID NO: 322343 - protein, 13 aa, Homo sapiens
  CDR3 for alpha chain variable domain of TCR clone 161172 (TRAV19, TRAJ17)
CALSLAAGNKLTF

SEQ ID NO: 322344 - protein, 16 aa, Homo sapiens
  CDR3 for beta chain variable domain of TCR clone 161172 (TRBV5-1, TRBJ2-7)
CASSWGTGGRAWEQYF

SEQ ID NO: 322345 - protein, 14 aa, Homo sapiens
  CDR3 for alpha chain variable domain of TCR clone 161173 (TRAV26-1, TRAJ11)
CIVPLYSGYSTLTF

SEQ ID NO: 322346 - protein, 14 aa, Homo sapiens
  CDR3 for beta chain variable domain of TCR clone 161173 (TRBV7-2, TRBJ2-7)
CASRSQGAAYEQYF

SEQ ID NO: 322347 - protein, 14 aa, Homo sapiens
  CDR3 for alpha chain variable domain of TCR clone 161174 (TRAV13-1, TRAJ35)
CAASKGSFGNVLHC

SEQ ID NO: 322348 - protein, 13 aa, Homo sapiens
  CDR3 for beta chain variable domain of TCR clone 161174 (TRBV7-3, TRBJ1-1)
CASSQDWGAEAFF

SEQ ID NO: 322349 - protein, 14 aa, Homo sapiens
  CDR3 for alpha chain variable domain of TCR clone 161175 (TRAV8-6, TRAJ8)
CAVNENTGFQKLVF

SEQ ID NO: 322350 - protein, 15 aa, Homo sapiens
  CDR3 for beta chain variable domain of TCR clone 161175 (TRBV27, TRBJ2-1)
CASSNGGGSSNEQFF

SEQ ID NO: 322351 - protein, 15 aa, Homo sapiens
  CDR3 for alpha chain variable domain of TCR clone 161176 (TRAV36/DV7, TRAJ53)
CAVEGSGGSNYKLTF

SEQ ID NO: 322352 - protein, 17 aa, Homo sapiens
  CDR3 for beta chain variable domain of TCR clone 161176 (TRBV13, TRBJ2-3)
CASSLSRVAGGRNTQYF

SEQ ID NO: 322353 - protein, 13 aa, Homo sapiens
  CDR3 for alpha chain variable domain of TCR clone 161177 (TRAV3, TRAJ21)
CAVREPDFSKFYF

SEQ ID NO: 322354 - protein, 14 aa, Homo sapiens
  CDR3 for beta chain variable domain of TCR clone 161177 (TRBV4-2, TRBJ2-1)
CASGLDRAYNEQFF

SEQ ID NO: 322355 - protein, 15 aa, Homo sapiens
  CDR3 for alpha chain variable domain of TCR clone 161178 (TRAV3, TRAJ47)
CAVRDIGEYGNNMVF

SEQ ID NO: 322356 - protein, 14 aa, Homo sapiens
  CDR3 for beta chain variable domain of TCR clone 161178 (TRBV13, TRBJ2-5)
CASSLERVGETQYF

SEQ ID NO: 322357 - protein, 12 aa, Homo sapiens
  CDR3 for alpha chain variable domain of TCR clone 161179 (TRAV12-1, TRAJ32)
CVVKGATNKLIF

SEQ ID NO: 322358 - protein, 19 aa, Homo sapiens
  CDR3 for beta chain variable domain of TCR clone 161179 (TRBV6-3, TRBJ2-7)
CASSYRTGLAGGVSGEQYF

SEQ ID NO: 322359 - protein, 14 aa, Homo sapiens
  CDR3 for alpha chain variable domain of TCR clone 161180 (TRAV17, TRAJ12)
CATDGVDSSYKLIF

SEQ ID NO: 322360 - protein, 13 aa, Homo sapiens
  CDR3 for beta chain variable domain of TCR clone 161180 (TRBV10-3, TRBJ1-4)
CAISDREEEKLFF

SEQ ID NO: 322361 - protein, 21 aa, Homo sapiens
  CDR3 for alpha chain variable domain of TCR clone 161181 (TRAV1-1, TRAJ6)
CAVRREEDTYLHLEEEPALLF

SEQ ID NO: 322362 - protein, 15 aa, Homo sapiens
  CDR3 for beta chain variable domain of TCR clone 161181 (TRBV6-6, TRBJ2-1)
CATRQGVSSYNEQFF

SEQ ID NO: 322363 - protein, 17 aa, Homo sapiens
  CDR3 for alpha chain variable domain of TCR clone 161182 (TRAV26-1, TRAJ37)
CIVRVITVSSNTGKLIF

SEQ ID NO: 322364 - protein, 13 aa, Homo sapiens
  CDR3 for beta chain variable domain of TCR clone 161182 (TRBV6-3, TRBJ2-3)
CASTLQGIDTQYF

SEQ ID NO: 322365 - protein, 11 aa, Homo sapiens
  CDR3 for alpha chain variable domain of TCR clone 161183 (TRAV13-2, TRAJ36)
CTETGANNLFF

SEQ ID NO: 322366 - protein, 13 aa, Homo sapiens
  CDR3 for beta chain variable domain of TCR clone 161183 (TRBV7-9, TRBJ2-4)
CATEGLAGNSQYF

SEQ ID NO: 322367 - protein, 14 aa, Homo sapiens
  CDR3 for alpha chain variable domain of TCR clone 161184 (TRAV12-3, TRAJ10)
SHLPLTGGGNKLTF

SEQ ID NO: 322368 - protein, 14 aa, Homo sapiens
  CDR3 for beta chain variable domain of TCR clone 161184 (TRBV6-1, TRBJ1-6)
CASSQGQDNSPLHF

SEQ ID NO: 322369 - protein, 13 aa, Homo sapiens
  CDR3 for alpha chain variable domain of TCR clone 161185 (TRAV26-1, TRAJ40)
CIVATSGTYKYIF

SEQ ID NO: 322370 - protein, 16 aa, Homo sapiens
  CDR3 for beta chain variable domain of TCR clone 161185 (TRBV7-2, TRBJ2-2)
CASSLHRGPNTGELFF

SEQ ID NO: 322371 - protein, 12 aa, Homo sapiens
  CDR3 for alpha chain variable domain of TCR clone 161186 (TRAV12-1, TRAJ34)
CVVAGATDKLIF

SEQ ID NO: 322372 - protein, 16 aa, Homo sapiens
  CDR3 for beta chain variable domain of TCR clone 161186 (TRBV7-2, TRBJ1-2)
CASSSNQDRRGHVYTF

SEQ ID NO: 322373 - protein, 14 aa, Homo sapiens
  CDR3 for alpha chain variable domain of TCR clone 161187 (TRAV12-2, TRAJ36)
CAVKISTVANNLFF

SEQ ID NO: 322374 - protein, 14 aa, Homo sapiens
  CDR3 for beta chain variable domain of TCR clone 161187 (TRBV25-1, TRBJ1-2)
CASSDTTGVVGYTF

SEQ ID NO: 322375 - protein, 15 aa, Homo sapiens
  CDR3 for alpha chain variable domain of TCR clone 161188 (TRAV12-1, TRAJ44)
CVVDTPQGTASKLTF

SEQ ID NO: 322376 - protein, 11 aa, Homo sapiens
  CDR3 for beta chain variable domain of TCR clone 161188 (TRBV13, TRBJ2-3)
CASGNADTQYF

SEQ ID NO: 322377 - protein, 16 aa, Homo sapiens
  CDR3 for alpha chain variable domain of TCR clone 161189 (TRAV3, TRAJ3)
CAVRDRAKSSASKIIF

SEQ ID NO: 322378 - protein, 13 aa, Homo sapiens
  CDR3 for beta chain variable domain of TCR clone 161189 (TRBV10-3, TRBJ2-7)
YASKLAVNYEQYF

SEQ ID NO: 322379 - protein, 15 aa, Homo sapiens
  CDR3 for alpha chain variable domain of TCR clone 161190 (TRAV26-1, TRAJ29)
CIVRVEGSGNTPLGF

SEQ ID NO: 322380 - protein, 15 aa, Homo sapiens
  CDR3 for beta chain variable domain of TCR clone 161190 (TRBV7-9, TRBJ1-5)
CASSQGHRPNQPQHF

SEQ ID NO: 322381 - protein, 10 aa, Homo sapiens
  CDR3 for alpha chain variable domain of TCR clone 161191 (TRAV1-2, TRAJ34)
CAVNTDKLIF

SEQ ID NO: 322382 - protein, 16 aa, Homo sapiens
  CDR3 for beta chain variable domain of TCR clone 161191 (TRBV7-3, TRBJ2-2)
CASSLKRGTLSGELFF

SEQ ID NO: 322383 - protein, 13 aa, Homo sapiens
  CDR3 for alpha chain variable domain of TCR clone 161192 (TRAV8-3, TRAJ36)
CAVGATGANNLFF

SEQ ID NO: 322384 - protein, 13 aa, Homo sapiens
  CDR3 for beta chain variable domain of TCR clone 161192 (TRBV7-3, TRBJ1-2)
CASSLKRGYGYTF

SEQ ID NO: 322385 - protein, 14 aa, Homo sapiens
  CDR3 for alpha chain variable domain of TCR clone 161193 (TRAV9-2, TRAJ39)
CSLYIYNAGNMLTF

SEQ ID NO: 322386 - protein, 13 aa, Homo sapiens
  CDR3 for beta chain variable domain of TCR clone 161193 (TRBV11-3, TRBJ1-1)
CASSRQPNTEAFF

SEQ ID NO: 322387 - protein, 16 aa, Homo sapiens
  CDR3 for alpha chain variable domain of TCR clone 161194 (TRAV12-3, TRAJ53)
CAMSPGSGGSNYKLTF

SEQ ID NO: 322388 - protein, 14 aa, Homo sapiens
  CDR3 for beta chain variable domain of TCR clone 161194 (TRBV19, TRBJ2-7)
CASSMGQGAIEQYF

SEQ ID NO: 322389 - protein, 14 aa, Homo sapiens
  CDR3 for alpha chain variable domain of TCR clone 161195 (TRAV3, TRAJ16)
CCERLKSDGQKLLF

SEQ ID NO: 322390 - protein, 15 aa, Homo sapiens
  CDR3 for beta chain variable domain of TCR clone 161195 (TRBV28, TRBJ2-7)
CASSPCGRGFYEQYF

SEQ ID NO: 322391 - protein, 14 aa, Homo sapiens
  CDR3 for alpha chain variable domain of TCR clone 161196 (TRAV13-1, TRAJ20)
CAARPGSNDYKLSF

SEQ ID NO: 322392 - protein, 13 aa, Homo sapiens
  CDR3 for beta chain variable domain of TCR clone 161196 (TRBV7-8, TRBJ2-7)
CASSLTGGREQYF

SEQ ID NO: 322393 - protein, 13 aa, Homo sapiens
  CDR3 for alpha chain variable domain of TCR clone 161197 (TRAV36/DV7, TRAJ29)
CAVEPSGNTHLVF

SEQ ID NO: 322394 - protein, 11 aa, Homo sapiens
  CDR3 for beta chain variable domain of TCR clone 161197 (TRBV19, TRBJ2-7)
CASGNSYEQYF

SEQ ID NO: 322395 - protein, 14 aa, Homo sapiens
  CDR3 for alpha chain variable domain of TCR clone 161198 (TRAV1-2, TRAJ16)
CAVNRFSDGRKLLF

SEQ ID NO: 322396 - protein, 20 aa, Homo sapiens
  CDR3 for beta chain variable domain of TCR clone 161198 (TRBV7-8, TRBJ2-2)
CASSHLFPGPTIHITGELFF

SEQ ID NO: 322397 - protein, 15 aa, Homo sapiens
  CDR3 for alpha chain variable domain of TCR clone 161199 (TRAV3, TRAJ22)
CAVRDRGGSARQLTF

SEQ ID NO: 322398 - protein, 15 aa, Homo sapiens
  CDR3 for beta chain variable domain of TCR clone 161199 (TRBV5-4, TRBJ2-3)
CASSLDQRATDTQYF

SEQ ID NO: 322399 - protein, 15 aa, Homo sapiens
  CDR3 for alpha chain variable domain of TCR clone 161200 (TRAV23/DV6, TRAJ30)
CAASSQESRDDKIIF

SEQ ID NO: 322400 - protein, 14 aa, Homo sapiens
  CDR3 for beta chain variable domain of TCR clone 161200 (TRBV7-6, TRBJ2-3)
CASSLGTVTDTQYF

SEQ ID NO: 322401 - protein, 14 aa, Homo sapiens
  CDR3 for alpha chain variable domain of TCR clone 161201 (TRAV26-1, TRAJ39)
CIVRAYNAGNMLTF

SEQ ID NO: 322402 - protein, 16 aa, Homo sapiens
  CDR3 for beta chain variable domain of TCR clone 161201 (TRBV15, TRBJ2-7)
CATSRDFGAAVYEQYV

SEQ ID NO: 322403 - protein, 12 aa, Homo sapiens
  CDR3 for alpha chain variable domain of TCR clone 161202 (TRAV12-1, TRAJ40)
CVVYSGTYKYIF

SEQ ID NO: 322404 - protein, 17 aa, Homo sapiens
  CDR3 for beta chain variable domain of TCR clone 161202 (TRBV11-3, TRBJ1-5)
CASSPLTGLRGNQPQHS

SEQ ID NO: 322405 - protein, 12 aa, Homo sapiens
  CDR3 for alpha chain variable domain of TCR clone 161203 (TRAV13-1, TRAJ49)
CAASPMGNQFYF

SEQ ID NO: 322406 - protein, 17 aa, Homo sapiens
  CDR3 for beta chain variable domain of TCR clone 161203 (TRBV11-2, TRBJ2-1)
FASSLYPPGVEYNEQFF

SEQ ID NO: 322407 - protein, 15 aa, Homo sapiens
  CDR3 for alpha chain variable domain of TCR clone 161204 (TRAV12-3, TRAJ6)
CAMSAASGGSYIPTF

SEQ ID NO: 322408 - protein, 15 aa, Homo sapiens
  CDR3 for beta chain variable domain of TCR clone 161204 (TRBV27, TRBJ2-1)
CASSNGGGSSNEQFF

SEQ ID NO: 322409 - protein, 18 aa, Homo sapiens
  CDR3 for alpha chain variable domain of TCR clone 161205 (TRAV13-1, TRAJ52)
CAAKNPNAGGTSYGKLTF

SEQ ID NO: 322410 - protein, 15 aa, Homo sapiens
  CDR3 for beta chain variable domain of TCR clone 161205 (TRBV6-1, TRBJ2-3)
CDSSERGGITDTQYF

SEQ ID NO: 322411 - protein, 23 aa, Homo sapiens
  CDR3 for alpha chain variable domain of TCR clone 161206 (TRAV3, TRAJ38)
CAVRDCLNAGNNHIQNPDPAVYH

SEQ ID NO: 322412 - protein, 15 aa, Homo sapiens
  CDR3 for beta chain variable domain of TCR clone 161206 (TRBV6-5, TRBJ2-1)
CASSYDAGAGNEQFF

SEQ ID NO: 322413 - protein, 11 aa, Homo sapiens
  CDR3 for alpha chain variable domain of TCR clone 161207 (TRAV3, TRAJ21)
CAVRNFNKFCF

SEQ ID NO: 322414 - protein, 13 aa, Homo sapiens
  CDR3 for beta chain variable domain of TCR clone 161207 (TRBV20-1, TRBJ2-5)
CSARGDYQETQYF

SEQ ID NO: 322415 - protein, 11 aa, Homo sapiens
  CDR3 for alpha chain variable domain of TCR clone 161208 (TRAV2, TRAJ13)
CASGVYQKVTF

SEQ ID NO: 322416 - protein, 14 aa, Homo sapiens
  CDR3 for beta chain variable domain of TCR clone 161208 (TRBV19, TRBJ2-1)
CASSKDRGQDEQFF

SEQ ID NO: 322417 - protein, 15 aa, Homo sapiens
  CDR3 for alpha chain variable domain of TCR clone 161209 (TRAV1-2, TRAJ30)
CAVRPHGNRYDKIIF

SEQ ID NO: 322418 - protein, 13 aa, Homo sapiens
  CDR3 for beta chain variable domain of TCR clone 161209 (TRBV4-1, TRBJ2-7)
CASSQGQAYEQYV

SEQ ID NO: 322419 - protein, 14 aa, Homo sapiens
  CDR3 for alpha chain variable domain of TCR clone 161210 (TRAV12-1, TRAJ17)
CVVNYKAAGNKLTF

SEQ ID NO: 322420 - protein, 13 aa, Homo sapiens
  CDR3 for beta chain variable domain of TCR clone 161210 (TRBV19, TRBJ1-2)
CASSQGQVYGYTF

SEQ ID NO: 322421 - protein, 12 aa, Homo sapiens
  CDR3 for alpha chain variable domain of TCR clone 161211 (TRAV3, TRAJ31)
CAVRDGNARLMF

SEQ ID NO: 322422 - protein, 16 aa, Homo sapiens
  CDR3 for beta chain variable domain of TCR clone 161211 (TRBV25-1, TRBJ1-1)
CASSGDRDRGRIEAFF

SEQ ID NO: 322423 - protein, 13 aa, Homo sapiens
  CDR3 for alpha chain variable domain of TCR clone 161212 (TRAV12-1, TRAJ16)
CVVNGPDGQNLLF

SEQ ID NO: 322424 - protein, 15 aa, Homo sapiens
  CDR3 for beta chain variable domain of TCR clone 161212 (TRBV6-3, TRBJ2-7)
CASSSPGTVFYEQYF

SEQ ID NO: 322425 - protein, 13 aa, Homo sapiens
  CDR3 for alpha chain variable domain of TCR clone 161213 (TRAV13-1, TRAJ39)
CATSIVMQATCSP

SEQ ID NO: 322426 - protein, 15 aa, Homo sapiens
  CDR3 for beta chain variable domain of TCR clone 161213 (TRBV10-1, TRBJ2-3)
CASSATSGGFDTQYF

SEQ ID NO: 322427 - protein, 15 aa, Homo sapiens
  CDR3 for alpha chain variable domain of TCR clone 161214 (TRAV30, TRAJ13)
CGTQGVTGGYQKVTF

SEQ ID NO: 322428 - protein, 17 aa, Homo sapiens
  CDR3 for beta chain variable domain of TCR clone 161214 (TRBV20-1, TRBJ2-2)
CSARVKRTHVRSGELLF

SEQ ID NO: 322429 - protein, 15 aa, Homo sapiens
  CDR3 for alpha chain variable domain of TCR clone 161215 (TRAV12-3, TRAJ6)
CAMSASTGGSHIPTF

SEQ ID NO: 322430 - protein, 16 aa, Homo sapiens
  CDR3 for beta chain variable domain of TCR clone 161215 (TRBV20-1, TRBJ1-2)
CSASMGQGVANYGYTF

SEQ ID NO: 322431 - protein, 21 aa, Homo sapiens
  CDR3 for alpha chain variable domain of TCR clone 161216 (TRAV8-4, TRAJ47)
HLTKPSAHMSDAAERGNKLVF

SEQ ID NO: 322432 - protein, 14 aa, Homo sapiens
  CDR3 for beta chain variable domain of TCR clone 161216 (TRBV7-3, TRBJ2-2)
CASSSGGYTGELFF

SEQ ID NO: 322433 - protein, 11 aa, Homo sapiens
  CDR3 for alpha chain variable domain of TCR clone 161217 (TRAV23/DV6, TRAJ48)
CAPRWGEKLTF

SEQ ID NO: 322434 - protein, 13 aa, Homo sapiens
  CDR3 for beta chain variable domain of TCR clone 161217 (TRBV12-4, TRBJ2-5)
CASSRGTEETQYF

SEQ ID NO: 322435 - protein, 11 aa, Homo sapiens
  CDR3 for alpha chain variable domain of TCR clone 161218 (TRAV12-3, TRAJ27)
CAMANAGKSTF

SEQ ID NO: 322436 - protein, 16 aa, Homo sapiens
  CDR3 for beta chain variable domain of TCR clone 161218 (TRBV11-3, TRBJ2-3)
CASSSGSGGGTDTQYF

SEQ ID NO: 322437 - protein, 12 aa, Homo sapiens
  CDR3 for alpha chain variable domain of TCR clone 161219 (TRAV9-2, TRAJ26)
CALRGYGQNFVF

SEQ ID NO: 322438 - protein, 15 aa, Homo sapiens
  CDR3 for beta chain variable domain of TCR clone 161219 (TRBV4-2, TRBJ2-7)
CASSQDRVSGGEQYF

SEQ ID NO: 322439 - protein, 16 aa, Homo sapiens
  CDR3 for alpha chain variable domain of TCR clone 161220 (TRAV8-4, TRAJ18)
CAVTANGGATLGRLYF

SEQ ID NO: 322440 - protein, 14 aa, Homo sapiens
  CDR3 for beta chain variable domain of TCR clone 161220 (TRBV12-4, TRBJ1-2)
CASSSAGHIYGYTF

SEQ ID NO: 322441 - protein, 17 aa, Homo sapiens
  CDR3 for alpha chain variable domain of TCR clone 161221 (TRAV3, TRAJ42)
CAVRDRDYGGSQGNLIF

SEQ ID NO: 322442 - protein, 14 aa, Homo sapiens
  CDR3 for beta chain variable domain of TCR clone 161221 (TRBV7-2, TRBJ2-5)
CASSPRGSSETQYV

SEQ ID NO: 322443 - protein, 16 aa, Homo sapiens
  CDR3 for alpha chain variable domain of TCR clone 161222 (TRAV30, TRAJ24)
CGTEIVDADGWGKFQF

SEQ ID NO: 322444 - protein, 18 aa, Homo sapiens
  CDR3 for beta chain variable domain of TCR clone 161222 (TRBV11-2, TRBJ2-6)
CASSLNPFLGTGANVLTF

SEQ ID NO: 322445 - protein, 10 aa, Homo sapiens
  CDR3 for alpha chain variable domain of TCR clone 161223 (TRAV36/DV7, TRAJ49)
CALTGNQFYF

SEQ ID NO: 322446 - protein, 15 aa, Homo sapiens
  CDR3 for beta chain variable domain of TCR clone 161223 (TRBV18, TRBJ2-7)
CASSPSSTGNYEQYF

SEQ ID NO: 322447 - protein, 13 aa, Homo sapiens
  CDR3 for alpha chain variable domain of TCR clone 161224 (TRAV12-2, TRAJ37)
CAGGSGNTGNLIF

SEQ ID NO: 322448 - protein, 17 aa, Homo sapiens
  CDR3 for beta chain variable domain of TCR clone 161224 (TRBV11-2, TRBJ2-1)
CASSLYPPGVEYNGQFF

SEQ ID NO: 322449 - protein, 16 aa, Homo sapiens
  CDR3 for alpha chain variable domain of TCR clone 161225 (TRAV8-1, TRAJ39)
CAVNVASYNAGNMLTF

SEQ ID NO: 322450 - protein, 15 aa, Homo sapiens
  CDR3 for beta chain variable domain of TCR clone 161225 (TRBV4-1, TRBJ2-3)
CASRSTRAGTDTQYF

SEQ ID NO: 322451 - protein, 15 aa, Homo sapiens
  CDR3 for alpha chain variable domain of TCR clone 161226 (TRAV35, TRAJ40)
CARQLGQAGTYKYIF

SEQ ID NO: 322452 - protein, 14 aa, Homo sapiens
  CDR3 for beta chain variable domain of TCR clone 161226 (TRBV7-3, TRBJ2-1)
CASSLTGGANEQFF

SEQ ID NO: 322453 - protein, 16 aa, Homo sapiens
  CDR3 for alpha chain variable domain of TCR clone 161227 (TRAV17, TRAJ28)
CATASVSGAGSYQLTS

SEQ ID NO: 322454 - protein, 11 aa, Homo sapiens
  CDR3 for beta chain variable domain of TCR clone 161227 (TRBV7-9, TRBJ2-5)
GASSLGETQYF

SEQ ID NO: 322455 - protein, 17 aa, Homo sapiens
  CDR3 for alpha chain variable domain of TCR clone 161228 (TRAV13-1, TRAJ28)
CAASPPYAGAGSYQLTF

SEQ ID NO: 322456 - protein, 15 aa, Homo sapiens
  CDR3 for beta chain variable domain of TCR clone 161228 (TRBV11-3, TRBJ2-3)
CASLKDGREGDTQYF

SEQ ID NO: 322457 - protein, 14 aa, Homo sapiens
  CDR3 for alpha chain variable domain of TCR clone 161229 (TRAV26-1, TRAJ34)
CIVRVAYNTDKLIF

SEQ ID NO: 322458 - protein, 14 aa, Homo sapiens
  CDR3 for beta chain variable domain of TCR clone 161229 (TRBV19, TRBJ2-7)
CASSIFAGTYEQYF

SEQ ID NO: 322459 - protein, 14 aa, Homo sapiens
  CDR3 for alpha chain variable domain of TCR clone 161230 (TRAV26-1, TRAJ45)
CIEGTGGGADGLTF

SEQ ID NO: 322460 - protein, 14 aa, Homo sapiens
  CDR3 for beta chain variable domain of TCR clone 161230 (TRBV19, TRBJ2-1)
CASPTFVLSGEQFF

SEQ ID NO: 322461 - protein, 13 aa, Homo sapiens
  CDR3 for alpha chain variable domain of TCR clone 161231 (TRAV17, TRAJ21)
CATDGGNFNKFYF

SEQ ID NO: 322462 - protein, 15 aa, Homo sapiens
  CDR3 for beta chain variable domain of TCR clone 161231 (TRBV6-3, TRBJ2-7)
CASSSPGTVFYEQYF

SEQ ID NO: 322463 - protein, 12 aa, Homo sapiens
  CDR3 for alpha chain variable domain of TCR clone 161232 (TRAV13-1, TRAJ49)
CAASPMGNQFYF

SEQ ID NO: 322464 - protein, 17 aa, Homo sapiens
  CDR3 for beta chain variable domain of TCR clone 161232 (TRBV11-2, TRBJ2-1)
CASSLYPPGVGYNEQFF

SEQ ID NO: 322465 - protein, 11 aa, Homo sapiens
  CDR3 for alpha chain variable domain of TCR clone 161233 (TRAV12-1, TRAJ30)
CVVNGQDKIIF

SEQ ID NO: 322466 - protein, 12 aa, Homo sapiens
  CDR3 for beta chain variable domain of TCR clone 161233 (TRBV27, TRBJ2-2)
CASKIFTGELFF

SEQ ID NO: 322467 - protein, 18 aa, Homo sapiens
  CDR3 for alpha chain variable domain of TCR clone 161234 (TRAV29/DV5, TRAJ26)
CSVLLCSKRKPEGQNFVF

SEQ ID NO: 322468 - protein, 17 aa, Homo sapiens
  CDR3 for beta chain variable domain of TCR clone 161234 (TRBV20-1, TRBJ2-2)
YSASRSGQGGLTGELFF

SEQ ID NO: 322469 - protein, 14 aa, Homo sapiens
  CDR3 for alpha chain variable domain of TCR clone 161235 (TRAV1-2, TRAJ16)
CAVNRFSDGQQLLF

SEQ ID NO: 322470 - protein, 15 aa, Homo sapiens
  CDR3 for beta chain variable domain of TCR clone 161235 (TRBV7-9, TRBJ1-6)
CASSSPGRGNSPLLF

SEQ ID NO: 322471 - protein, 16 aa, Homo sapiens
  CDR3 for alpha chain variable domain of TCR clone 161236 (TRAV26-1, TRAJ53)
CIVRVAMGGSNYKLTF

SEQ ID NO: 322472 - protein, 17 aa, Homo sapiens
  CDR3 for beta chain variable domain of TCR clone 161236 (TRBV20-1, TRBJ2-2)
CSASGSGQGGLTGELFF

SEQ ID NO: 322473 - protein, 11 aa, Homo sapiens
  CDR3 for alpha chain variable domain of TCR clone 161237 (TRAV1-1, TRAJ23)
CAVRQGGKLIF

SEQ ID NO: 322474 - protein, 14 aa, Homo sapiens
  CDR3 for beta chain variable domain of TCR clone 161237 (TRBV19, TRBJ2-2)
CASSTLHRSGELFF

SEQ ID NO: 322475 - protein, 15 aa, Homo sapiens
  CDR3 for alpha chain variable domain of TCR clone 161238 (TRAV8-2, TRAJ16)
CVVSDGFSDGEKLLF

SEQ ID NO: 322476 - protein, 15 aa, Homo sapiens
  CDR3 for beta chain variable domain of TCR clone 161238 (TRBV12-4, TRBJ2-5)
CASSPPTGLQEAQYF

SEQ ID NO: 322477 - protein, 13 aa, Homo sapiens
  CDR3 for alpha chain variable domain of TCR clone 161239 (TRAV13-1, TRAJ54)
CAASDQGAQKLVF

SEQ ID NO: 322478 - protein, 14 aa, Homo sapiens
  CDR3 for beta chain variable domain of TCR clone 161239 (TRBV12-5, TRBJ2-5)
CASGSRTHQETQYF

SEQ ID NO: 322479 - protein, 14 aa, Homo sapiens
  CDR3 for alpha chain variable domain of TCR clone 161240 (TRAV8-3, TRAJ4)
CAVGAAGVYNKLIF

SEQ ID NO: 322480 - protein, 15 aa, Homo sapiens
  CDR3 for beta chain variable domain of TCR clone 161240 (TRBV20-1, TRBJ2-5)
CSAPPRTGFGETQYF

SEQ ID NO: 322481 - protein, 12 aa, Homo sapiens
  CDR3 for alpha chain variable domain of TCR clone 161241 (TRAV27, TRAJ9)
CAGESGGFKTIF

SEQ ID NO: 322482 - protein, 12 aa, Homo sapiens
  CDR3 for beta chain variable domain of TCR clone 161241 (TRBV11-2, TRBJ2-5)
CASSLVGETQYF

SEQ ID NO: 322483 - protein, 17 aa, Homo sapiens
  CDR3 for alpha chain variable domain of TCR clone 161242 (TRAV19, TRAJ28)
YALSEASSGAGSYQLTF

SEQ ID NO: 322484 - protein, 15 aa, Homo sapiens
  CDR3 for beta chain variable domain of TCR clone 161242 (TRBV9, TRBJ2-1)
CASSLAGSSYNEQFF

SEQ ID NO: 322485 - protein, 14 aa, Homo sapiens
  CDR3 for alpha chain variable domain of TCR clone 161243 (TRAV21, TRAJ35)
CAVMSIGFGNVLHC

SEQ ID NO: 322486 - protein, 12 aa, Homo sapiens
  CDR3 for beta chain variable domain of TCR clone 161243 (TRBV7-9, TRBJ2-7)
YASSIKREEQYF

SEQ ID NO: 322487 - protein, 14 aa, Homo sapiens
  CDR3 for alpha chain variable domain of TCR clone 161244 (TRAV12-2, TRAJ13)
CAVKKTGGYQKVTF

SEQ ID NO: 322488 - protein, 16 aa, Homo sapiens
  CDR3 for beta chain variable domain of TCR clone 161244 (TRBV7-2, TRBJ1-2)
CASSSNQDRRGHGYTF

SEQ ID NO: 322489 - protein, 18 aa, Homo sapiens
  CDR3 for alpha chain variable domain of TCR clone 161245 (TRAV26-2, TRAJ45)
CILRVDKYSGGGADGLNF

SEQ ID NO: 322490 - protein, 11 aa, Homo sapiens
  CDR3 for beta chain variable domain of TCR clone 161245 (TRBV29-1, TRBJ2-5)
CSEDRTGTQYF

SEQ ID NO: 322491 - protein, 14 aa, Homo sapiens
  CDR3 for alpha chain variable domain of TCR clone 161246 (TRAV21, TRAJ12)
CAVGNRDSSYKLIF

SEQ ID NO: 322492 - protein, 14 aa, Homo sapiens
  CDR3 for beta chain variable domain of TCR clone 161246 (TRBV7-6, TRBJ2-7)
CASSLTGTGNEQYF

SEQ ID NO: 322493 - protein, 12 aa, Homo sapiens
  CDR3 for alpha chain variable domain of TCR clone 161247 (TRAV30, TRAJ43)
CGTEERGNDMRF

SEQ ID NO: 322494 - protein, 13 aa, Homo sapiens
  CDR3 for beta chain variable domain of TCR clone 161247 (TRBV7-9, TRBJ2-3)
CASSPGSTETQYF

SEQ ID NO: 322495 - protein, 13 aa, Homo sapiens
  CDR3 for alpha chain variable domain of TCR clone 161248 (TRAV12-3, TRAJ33)
CAMSVNSNYQLIW

SEQ ID NO: 322496 - protein, 12 aa, Homo sapiens
  CDR3 for beta chain variable domain of TCR clone 161248 (TRBV12-4, TRBJ1-2)
CASSFIVLHLRF

SEQ ID NO: 322497 - protein, 12 aa, Homo sapiens
  CDR3 for alpha chain variable domain of TCR clone 161249 (TRAV12-2, TRAJ33)
CAVGDSNYQLIW

SEQ ID NO: 322498 - protein, 13 aa, Homo sapiens
  CDR3 for beta chain variable domain of TCR clone 161249 (TRBV6-1, TRBJ1-2)
CASSAREGYGYNF

SEQ ID NO: 322499 - protein, 14 aa, Homo sapiens
  CDR3 for alpha chain variable domain of TCR clone 161250 (TRAV35, TRAJ40)
CAGSTTSGTCKYIF

SEQ ID NO: 322500 - protein, 13 aa, Homo sapiens
  CDR3 for beta chain variable domain of TCR clone 161250 (TRBV20-1, TRBJ1-6)
CSAPLGVGSPLHF

SEQ ID NO: 322501 - protein, 22 aa, Homo sapiens
  CDR3 for alpha chain variable domain of TCR clone 161251 (TRAV13-1, TRAJ35)
CAASKGGFGNVQHCGSGTPVIV

SEQ ID NO: 322502 - protein, 13 aa, Homo sapiens
  CDR3 for beta chain variable domain of TCR clone 161251 (TRBV7-3, TRBJ1-1)
CASSQDWGAEAFF

SEQ ID NO: 322503 - protein, 13 aa, Homo sapiens
  CDR3 for alpha chain variable domain of TCR clone 161252 (TRAV14/DV4, TRAJ49)
CAMVESTGNQFYF

SEQ ID NO: 322504 - protein, 13 aa, Homo sapiens
  CDR3 for beta chain variable domain of TCR clone 161252 (TRBV11-3, TRBJ2-1)
CASSSRRVDEQFF

SEQ ID NO: 322505 - protein, 13 aa, Homo sapiens
  CDR3 for alpha chain variable domain of TCR clone 161253 (TRAV12-2, TRAJ4)
CAGFSGGYNKLIF

SEQ ID NO: 322506 - protein, 14 aa, Homo sapiens
  CDR3 for beta chain variable domain of TCR clone 161253 (TRBV24-1, TRBJ1-1)
CATSIPRGHTEAFF

SEQ ID NO: 322507 - protein, 11 aa, Homo sapiens
  CDR3 for alpha chain variable domain of TCR clone 161254 (TRAV12-2, TRAJ33)
CAVGSNYPLIW

SEQ ID NO: 322508 - protein, 16 aa, Homo sapiens
  CDR3 for beta chain variable domain of TCR clone 161254 (TRBV27, TRBJ2-7)
CASSSERRDSAYEQYF

SEQ ID NO: 322509 - protein, 14 aa, Homo sapiens
  CDR3 for alpha chain variable domain of TCR clone 161255 (TRAV41, TRAJ57)
CAVLLQGGSEKLVF

SEQ ID NO: 322510 - protein, 12 aa, Homo sapiens
  CDR3 for beta chain variable domain of TCR clone 161255 (TRBV10-3, TRBJ1-1)
CATMDRPPEAVF

SEQ ID NO: 322511 - protein, 14 aa, Homo sapiens
  CDR3 for alpha chain variable domain of TCR clone 161256 (TRAV26-1, TRAJ11)
CIVPLYSGYSTLTF

SEQ ID NO: 322512 - protein, 16 aa, Homo sapiens
  CDR3 for beta chain variable domain of TCR clone 161256 (TRBV7-9, TRBJ2-3)
CASSFSVAGGTDTQYF

SEQ ID NO: 322513 - protein, 14 aa, Homo sapiens
  CDR3 for alpha chain variable domain of TCR clone 161257 (TRAV29/DV5, TRAJ44)
CAAFLVGTASKLTF

SEQ ID NO: 322514 - protein, 15 aa, Homo sapiens
  CDR3 for beta chain variable domain of TCR clone 161257 (TRBV7-3, TRBJ2-2)
CASSETGKGTGELFF

SEQ ID NO: 322515 - protein, 14 aa, Homo sapiens
  CDR3 for alpha chain variable domain of TCR clone 161258 (TRAV26-1, TRAJ45)
CIEVTGGGADGLTF

SEQ ID NO: 322516 - protein, 16 aa, Homo sapiens
  CDR3 for beta chain variable domain of TCR clone 161258 (TRBV11-2, TRBJ1-1)
CASSLRQGGEHSKAFF

SEQ ID NO: 322517 - protein, 13 aa, Homo sapiens
  CDR3 for alpha chain variable domain of TCR clone 161259 (TRAV17, TRAJ9)
CATDYTGGFKTIF

SEQ ID NO: 322518 - protein, 13 aa, Homo sapiens
  CDR3 for beta chain variable domain of TCR clone 161259 (TRBV19, TRBJ1-3)
CASRLSLGNTIYF

SEQ ID NO: 322519 - protein, 13 aa, Homo sapiens
  CDR3 for alpha chain variable domain of TCR clone 161260 (TRAV13-2, TRAJ48)
CAEIDVGNEKLTF

SEQ ID NO: 322520 - protein, 15 aa, Homo sapiens
  CDR3 for beta chain variable domain of TCR clone 161260 (TRBV7-9, TRBJ1-6)
CASSSPGRGNSPLHF

SEQ ID NO: 322521 - protein, 15 aa, Homo sapiens
  CDR3 for alpha chain variable domain of TCR clone 161261 (TRAV14/DV4, TRAJ33)
CAMREGRDSNYQLIW

SEQ ID NO: 322522 - protein, 16 aa, Homo sapiens
  CDR3 for beta chain variable domain of TCR clone 161261 (TRBV12-5, TRBJ2-5)
CASGPRTSGNQETQHF

SEQ ID NO: 322523 - protein, 15 aa, Homo sapiens
  CDR3 for alpha chain variable domain of TCR clone 161262 (TRAV8-1, TRAJ6)
CAVNTPPGGSYIPTF

SEQ ID NO: 322524 - protein, 15 aa, Homo sapiens
  CDR3 for beta chain variable domain of TCR clone 161262 (TRBV7-9, TRBJ1-6)
CASSSPGRGNSPLHF

SEQ ID NO: 322525 - protein, 10 aa, Homo sapiens
  CDR3 for alpha chain variable domain of TCR clone 161263 (TRAV23/DV6, TRAJ57)
CAASSTLSQG

SEQ ID NO: 322526 - protein, 14 aa, Homo sapiens
  CDR3 for beta chain variable domain of TCR clone 161263 (TRBV25-1, TRBJ1-1)
CASSHLGGNTEAFF

SEQ ID NO: 322527 - protein, 14 aa, Homo sapiens
  CDR3 for alpha chain variable domain of TCR clone 161264 (TRAV8-3, TRAJ4)
CAVGAAGAYNKLIF

SEQ ID NO: 322528 - protein, 15 aa, Homo sapiens
  CDR3 for beta chain variable domain of TCR clone 161264 (TRBV6-5, TRBJ2-1)
CASSYDAGAVNEQFF

SEQ ID NO: 322529 - protein, 14 aa, Homo sapiens
  CDR3 for alpha chain variable domain of TCR clone 161265 (TRAV12-2, TRAJ13)
CAVKKTGGNQKVTF

SEQ ID NO: 322530 - protein, 18 aa, Homo sapiens
  CDR3 for beta chain variable domain of TCR clone 161265 (TRBV20-1, TRBJ2-3)
CSASGLAGGPGTTDTQYF

SEQ ID NO: 322531 - protein, 14 aa, Homo sapiens
  CDR3 for alpha chain variable domain of TCR clone 161266 (TRAV4, TRAJ6)
CLVGEAGGSYIPTF

SEQ ID NO: 322532 - protein, 20 aa, Homo sapiens
  CDR3 for beta chain variable domain of TCR clone 161266 (TRBV7-8, TRBJ2-2)
CASSHLFPGPTIHITGELFF

SEQ ID NO: 322533 - protein, 23 aa, Homo sapiens
  CDR3 for alpha chain variable domain of TCR clone 161267 (TRAV21, TRAJ40)
LQLLSRVTQPPTSVISGTYKYIF

SEQ ID NO: 322534 - protein, 16 aa, Homo sapiens
  CDR3 for beta chain variable domain of TCR clone 161267 (TRBV13, TRBJ2-2)
CASSLGRGYGTGELFF

SEQ ID NO: 322535 - protein, 11 aa, Homo sapiens
  CDR3 for alpha chain variable domain of TCR clone 161268 (TRAV2, TRAJ13)
CASWGYQKVTF

SEQ ID NO: 322536 - protein, 16 aa, Homo sapiens
  CDR3 for beta chain variable domain of TCR clone 161268 (TRBV19, TRBJ2-1)
CASSMGGGSSYNEQFF

SEQ ID NO: 322537 - protein, 14 aa, Homo sapiens
  CDR3 for alpha chain variable domain of TCR clone 161269 (TRAV12-2, TRAJ45)
CAVNIGGGADGLTF

SEQ ID NO: 322538 - protein, 15 aa, Homo sapiens
  CDR3 for beta chain variable domain of TCR clone 161269 (TRBV10-2, TRBJ2-6)
CASSEQGTGANVLTF

SEQ ID NO: 322539 - protein, 14 aa, Homo sapiens
  CDR3 for alpha chain variable domain of TCR clone 161270 (TRAV16, TRAJ37)
CALDISGNKGKLIF

SEQ ID NO: 322540 - protein, 13 aa, Homo sapiens
  CDR3 for beta chain variable domain of TCR clone 161270 (TRBV7-9, TRBJ1-2)
CASSLKQNYGYTF

SEQ ID NO: 322541 - protein, 14 aa, Homo sapiens
  CDR3 for alpha chain variable domain of TCR clone 161271 (TRAV1-2, TRAJ16)
CAVNRFSDGQKLLF

SEQ ID NO: 322542 - protein, 17 aa, Homo sapiens
  CDR3 for beta chain variable domain of TCR clone 161271 (TRBV28, TRBJ2-5)
CASSTAEGDALQETQYF

SEQ ID NO: 322543 - protein, 16 aa, Homo sapiens
  CDR3 for alpha chain variable domain of TCR clone 161272 (TRAV12-1, TRAJ43)
CVVNPHRFGAGTRLTV

SEQ ID NO: 322544 - protein, 15 aa, Homo sapiens
  CDR3 for beta chain variable domain of TCR clone 161272 (TRBV20-1, TRBJ2-7)
CSARDRVSGMDEQYF

SEQ ID NO: 322545 - protein, 23 aa, Homo sapiens
  CDR3 for alpha chain variable domain of TCR clone 161273 (TRAV26-1, TRAJ38)
CIADNAGNNHIQNHDPAVYQLRD

SEQ ID NO: 322546 - protein, 12 aa, Homo sapiens
  CDR3 for beta chain variable domain of TCR clone 161273 (TRBV11-2, TRBJ2-2)
CASRLGGGELFF

SEQ ID NO: 322547 - protein, 13 aa, Homo sapiens
  CDR3 for alpha chain variable domain of TCR clone 161274 (TRAV8-3, TRAJ43)
CAVGIYNNNDMRF

SEQ ID NO: 322548 - protein, 16 aa, Homo sapiens
  CDR3 for beta chain variable domain of TCR clone 161274 (TRBV7-2, TRBJ2-5)
CASSLVLWTKQENQYF

SEQ ID NO: 322549 - protein, 10 aa, Homo sapiens
  CDR3 for alpha chain variable domain of TCR clone 161275 (TRAV2, TRAJ34)
CAVVNDKLIF

SEQ ID NO: 322550 - protein, 15 aa, Homo sapiens
  CDR3 for beta chain variable domain of TCR clone 161275 (TRBV3-1, TRBJ2-2)
CTSSQDWTRAGELFF

SEQ ID NO: 322551 - protein, 15 aa, Homo sapiens
  CDR3 for alpha chain variable domain of TCR clone 161276 (TRAV27, TRAJ38)
CAARRNAGNNRKLIL

SEQ ID NO: 322552 - protein, 14 aa, Homo sapiens
  CDR3 for beta chain variable domain of TCR clone 161276 (TRBV7-2, TRBJ2-7)
CASSPRDGAYEQYF

SEQ ID NO: 322553 - protein, 14 aa, Homo sapiens
  CDR3 for alpha chain variable domain of TCR clone 161277 (TRAV2, TRAJ37)
CAVDLTSNTGKLIF

SEQ ID NO: 322554 - protein, 15 aa, Homo sapiens
  CDR3 for beta chain variable domain of TCR clone 161277 (TRBV20-1, TRBJ1-1)
CSASRGVTGNTEAFL

SEQ ID NO: 322555 - protein, 16 aa, Homo sapiens
  CDR3 for alpha chain variable domain of TCR clone 161278 (TRAV4, TRAJ22)
CLVGDLYSGSARQLTF

SEQ ID NO: 322556 - protein, 13 aa, Homo sapiens
  CDR3 for beta chain variable domain of TCR clone 161278 (TRBV7-9, TRBJ2-5)
CASLSPGQETQYF

SEQ ID NO: 322557 - protein, 11 aa, Homo sapiens
  CDR3 for alpha chain variable domain of TCR clone 161279 (TRAV13-1, TRAJ52)
PGGTSYGKLTF

SEQ ID NO: 322558 - protein, 16 aa, Homo sapiens
  CDR3 for beta chain variable domain of TCR clone 161279 (TRBV28, TRBJ2-7)
CASSPWVSTGDLSQYF

SEQ ID NO: 322559 - protein, 15 aa, Homo sapiens
  CDR3 for alpha chain variable domain of TCR clone 161280 (TRAV12-1, TRAJ44)
CVVFVNTGTASKLTF

SEQ ID NO: 322560 - protein, 16 aa, Homo sapiens
  CDR3 for beta chain variable domain of TCR clone 161280 (TRBV20-1, TRBJ2-5)
CSPGGTSGGYMENQYF

SEQ ID NO: 322561 - protein, 15 aa, Homo sapiens
  CDR3 for alpha chain variable domain of TCR clone 161281 (TRAV8-3, TRAJ45)
CASSYSGGGADGLTF

SEQ ID NO: 322562 - protein, 12 aa, Homo sapiens
  CDR3 for beta chain variable domain of TCR clone 161281 (TRBV12-4, TRBJ2-7)
CASRLGGYEQYF

SEQ ID NO: 322563 - protein, 12 aa, Homo sapiens
  CDR3 for alpha chain variable domain of TCR clone 161282 (TRAV36/DV7, TRAJ54)
CAVVRGAQKLVF

SEQ ID NO: 322564 - protein, 16 aa, Homo sapiens
  CDR3 for beta chain variable domain of TCR clone 161282 (TRBV12-4, TRBJ2-5)
CASSFFVRGRQETQYF

SEQ ID NO: 322565 - protein, 16 aa, Homo sapiens
  CDR3 for alpha chain variable domain of TCR clone 161283 (TRAV3, TRAJ10)
CAVRDMRAGGGNKLTF

SEQ ID NO: 322566 - protein, 15 aa, Homo sapiens
  CDR3 for beta chain variable domain of TCR clone 161283 (TRBV4-1, TRBJ1-4)
CASSDTGGTNETLFF

SEQ ID NO: 322567 - protein, 13 aa, Homo sapiens
  CDR3 for alpha chain variable domain of TCR clone 161284 (TRAV8-3, TRAJ43)
CAVGPDNNSDIRF

SEQ ID NO: 322568 - protein, 13 aa, Homo sapiens
  CDR3 for beta chain variable domain of TCR clone 161284 (TRBV29-1, TRBJ2-1)
CSVEGGRVNEQFF

SEQ ID NO: 322569 - protein, 16 aa, Homo sapiens
  CDR3 for alpha chain variable domain of TCR clone 161285 (TRAV12-3, TRAJ53)
CAMSPGSGGSNYKLTF

SEQ ID NO: 322570 - protein, 13 aa, Homo sapiens
  CDR3 for beta chain variable domain of TCR clone 161285 (TRBV7-3, TRBJ1-1)
CASSQDWGAGAFF

SEQ ID NO: 322571 - protein, 14 aa, Homo sapiens
  CDR3 for alpha chain variable domain of TCR clone 161286 (TRAV12-1, TRAJ15)
CLSPANQAGTALIF

SEQ ID NO: 322572 - protein, 13 aa, Homo sapiens
  CDR3 for beta chain variable domain of TCR clone 161286 (TRBV7-2, TRBJ2-4)
CASSREHANIQYF

SEQ ID NO: 322573 - protein, 16 aa, Homo sapiens
  CDR3 for alpha chain variable domain of TCR clone 161287 (TRAV38-1, TRAJ32)
CAFMPFLGGATNKLIF

SEQ ID NO: 322574 - protein, 15 aa, Homo sapiens
  CDR3 for beta chain variable domain of TCR clone 161287 (TRBV9, TRBJ1-6)
CASSVAGTGDSPLHF

SEQ ID NO: 322575 - protein, 12 aa, Homo sapiens
  CDR3 for alpha chain variable domain of TCR clone 161288 (TRAV1-2, TRAJ33)
CAALDSNYQLIW

SEQ ID NO: 322576 - protein, 15 aa, Homo sapiens
  CDR3 for beta chain variable domain of TCR clone 161288 (TRBV7-2, TRBJ2-7)
CASSFGKRRSSTSGR

SEQ ID NO: 322577 - protein, 15 aa, Homo sapiens
  CDR3 for alpha chain variable domain of TCR clone 161289 (TRAV23/DV6, TRAJ44)
CAARTLTGPASKLTF

SEQ ID NO: 322578 - protein, 17 aa, Homo sapiens
  CDR3 for beta chain variable domain of TCR clone 161289 (TRBV24-1, TRBJ2-1)
CATSGVSTSGTYNEQFF

SEQ ID NO: 322579 - protein, 18 aa, Homo sapiens
  CDR3 for alpha chain variable domain of TCR clone 161290 (TRAV26-1, TRAJ30)
CCVLSHRQSTNRDDKIIF

SEQ ID NO: 322580 - protein, 18 aa, Homo sapiens
  CDR3 for beta chain variable domain of TCR clone 161290 (TRBV4-1, TRBJ1-5)
CASSQDPRGQGLNQPQHF

SEQ ID NO: 322581 - protein, 11 aa, Homo sapiens
  CDR3 for alpha chain variable domain of TCR clone 161291 (TRAV1-1, TRAJ23)
CAVRQGGKLVF

SEQ ID NO: 322582 - protein, 13 aa, Homo sapiens
  CDR3 for beta chain variable domain of TCR clone 161291 (TRBV7-3, TRBJ1-1)
CASSQDWGAEAFF

SEQ ID NO: 322583 - protein, 15 aa, Homo sapiens
  CDR3 for alpha chain variable domain of TCR clone 161292 (TRAV34, TRAJ38)
CGADFTPGNNRKMIW

SEQ ID NO: 322584 - protein, 16 aa, Homo sapiens
  CDR3 for beta chain variable domain of TCR clone 161292 (TRBV12-5, TRBJ2-5)
CASGPRTGGNQETQYF

SEQ ID NO: 322585 - protein, 15 aa, Homo sapiens
  CDR3 for alpha chain variable domain of TCR clone 161293 (TRAV21, TRAJ32)
CAVNSYGGATNKLIF

SEQ ID NO: 322586 - protein, 12 aa, Homo sapiens
  CDR3 for beta chain variable domain of TCR clone 161293 (TRBV29-1, TRBJ2-3)
CSVTGGADTQYF

SEQ ID NO: 322587 - protein, 13 aa, Homo sapiens
  CDR3 for alpha chain variable domain of TCR clone 161294 (TRAV1-2, TRAJ20)
CAVPRSKDYKLSF

SEQ ID NO: 322588 - protein, 14 aa, Homo sapiens
  CDR3 for beta chain variable domain of TCR clone 161294 (TRBV20-1, TRBJ2-7)
CSARYGTTYYEQYF

SEQ ID NO: 322589 - protein, 15 aa, Homo sapiens
  CDR3 for alpha chain variable domain of TCR clone 161295 (TRAV26-1, TRAJ29)
CIVGVEGSGNSPLVF

SEQ ID NO: 322590 - protein, 15 aa, Homo sapiens
  CDR3 for beta chain variable domain of TCR clone 161295 (TRBV7-9, TRBJ1-5)
CASSQGHQPNQPQHF

SEQ ID NO: 322591 - protein, 12 aa, Homo sapiens
  CDR3 for alpha chain variable domain of TCR clone 161296 (TRAV13-1, TRAJ53)
AASGGSNYKLTF

SEQ ID NO: 322592 - protein, 12 aa, Homo sapiens
  CDR3 for beta chain variable domain of TCR clone 161296 (TRBV18, TRBJ1-4)
CAGSPSREKLFF

SEQ ID NO: 322593 - protein, 14 aa, Homo sapiens
  CDR3 for alpha chain variable domain of TCR clone 161297 (TRAV8-4, TRAJ8)
CAVSLNTGFQKLVF

SEQ ID NO: 322594 - protein, 13 aa, Homo sapiens
  CDR3 for beta chain variable domain of TCR clone 161297 (TRBV7-9, TRBJ2-3)
CASSHGSTDTQYF

SEQ ID NO: 322595 - protein, 11 aa, Homo sapiens
  CDR3 for alpha chain variable domain of TCR clone 161298 (TRAV17, TRAJ43)
RATDNNNDMRF

SEQ ID NO: 322596 - protein, 15 aa, Homo sapiens
  CDR3 for beta chain variable domain of TCR clone 161298 (TRBV20-1, TRBJ1-2)
CSAIRTGAFNYGYTF

SEQ ID NO: 322597 - protein, 12 aa, Homo sapiens
  CDR3 for alpha chain variable domain of TCR clone 161299 (TRAV13-1, TRAJ21)
CAAKGGFNKFYF

SEQ ID NO: 322598 - protein, 13 aa, Homo sapiens
  CDR3 for beta chain variable domain of TCR clone 161299 (TRBV2, TRBJ2-7)
CASSEGGQFEQYF

SEQ ID NO: 322599 - protein, 15 aa, Homo sapiens
  CDR3 for alpha chain variable domain of TCR clone 161300 (TRAV8-2, TRAJ16)
CVVSDGFSDGQKLLF

SEQ ID NO: 322600 - protein, 15 aa, Homo sapiens
  CDR3 for beta chain variable domain of TCR clone 161300 (TRBV6-1, TRBJ2-1)
CASSEAAYSYNEQFF

SEQ ID NO: 322601 - protein, 16 aa, Homo sapiens
  CDR3 for alpha chain variable domain of TCR clone 161301 (TRAV30, TRAJ24)
CGTEIVDADSWGKFQF

SEQ ID NO: 322602 - protein, 17 aa, Homo sapiens
  CDR3 for beta chain variable domain of TCR clone 161301 (TRBV25-1, TRBJ2-7)
CASSGARVVFSSYEQYF

SEQ ID NO: 322603 - protein, 15 aa, Homo sapiens
  CDR3 for alpha chain variable domain of TCR clone 161302 (TRAV23/DV6, TRAJ38)
CAASGGAGNNRKLVW

SEQ ID NO: 322604 - protein, 13 aa, Homo sapiens
  CDR3 for beta chain variable domain of TCR clone 161302 (TRBV7-2, TRBJ1-2)
CASSLPGLYGYTF

SEQ ID NO: 322605 - protein, 13 aa, Homo sapiens
  CDR3 for alpha chain variable domain of TCR clone 161303 (TRAV38-2/DV8, TRAJ34)
CAYRNYNTDKLIF

SEQ ID NO: 322606 - protein, 15 aa, Homo sapiens
  CDR3 for beta chain variable domain of TCR clone 161303 (TRBV5-1, TRBJ2-3)
CASSVTSGSTDTQYF

SEQ ID NO: 322607 - protein, 16 aa, Homo sapiens
  CDR3 for alpha chain variable domain of TCR clone 161304 (TRAV3, TRAJ10)
CAGRDMRAGGGNKLTL

SEQ ID NO: 322608 - protein, 14 aa, Homo sapiens
  CDR3 for beta chain variable domain of TCR clone 161304 (TRBV25-1, TRBJ1-1)
CASTHLGGNTEAFF

SEQ ID NO: 322609 - protein, 15 aa, Homo sapiens
  CDR3 for alpha chain variable domain of TCR clone 161305 (TRAV21, TRAJ53)
CATLNSGGSNYKLPF

SEQ ID NO: 322610 - protein, 15 aa, Homo sapiens
  CDR3 for beta chain variable domain of TCR clone 161305 (TRBV11-3, TRBJ2-3)
CASSAGTVVTNTQYF

SEQ ID NO: 322611 - protein, 12 aa, Homo sapiens
  CDR3 for alpha chain variable domain of TCR clone 161306 (TRAV12-3, TRAJ17)
CAMTLTCNKPTF

SEQ ID NO: 322612 - protein, 15 aa, Homo sapiens
  CDR3 for beta chain variable domain of TCR clone 161306 (TRBV20-1, TRBJ2-7)
CSARDRVSGMDEQYF

SEQ ID NO: 322613 - protein, 12 aa, Homo sapiens
  CDR3 for alpha chain variable domain of TCR clone 161307 (TRAV13-1, TRAJ49)
CAANPMGNQFYF

SEQ ID NO: 322614 - protein, 17 aa, Homo sapiens
  CDR3 for beta chain variable domain of TCR clone 161307 (TRBV11-2, TRBJ2-1)
CASSSYPPGVEYNEQFF

SEQ ID NO: 322615 - protein, 14 aa, Homo sapiens
  CDR3 for alpha chain variable domain of TCR clone 161308 (TRAV17, TRAJ35)
CATDRPGFGNVLHC

SEQ ID NO: 322616 - protein, 14 aa, Homo sapiens
  CDR3 for beta chain variable domain of TCR clone 161308 (TRBV19, TRBJ2-1)
CASPTLVLSGEQFF

SEQ ID NO: 322617 - protein, 14 aa, Homo sapiens
  CDR3 for alpha chain variable domain of TCR clone 161309 (TRAV35, TRAJ33)
CAGSSQDSNYQLIW

SEQ ID NO: 322618 - protein, 15 aa, Homo sapiens
  CDR3 for beta chain variable domain of TCR clone 161309 (TRBV28, TRBJ2-5)
CASSQTSGSLETQYF

SEQ ID NO: 322619 - protein, 16 aa, Homo sapiens
  CDR3 for alpha chain variable domain of TCR clone 161310 (TRAV26-1, TRAJ36)
CIVRVSYQTGANNLFF

SEQ ID NO: 322620 - protein, 13 aa, Homo sapiens
  CDR3 for beta chain variable domain of TCR clone 161310 (TRBV5-5, TRBJ1-5)
CASSLGIGGDQHV

SEQ ID NO: 322621 - protein, 11 aa, Homo sapiens
  CDR3 for alpha chain variable domain of TCR clone 161311 (TRAV3, TRAJ21)
CAVGNFNKFYF

SEQ ID NO: 322622 - protein, 13 aa, Homo sapiens
  CDR3 for beta chain variable domain of TCR clone 161311 (TRBV7-9, TRBJ1-2)
CASTLKQNYGYTF

SEQ ID NO: 322623 - protein, 11 aa, Homo sapiens
  CDR3 for alpha chain variable domain of TCR clone 161312 (TRAV27, TRAJ47)
SIVEYGNNMVF

SEQ ID NO: 322624 - protein, 18 aa, Homo sapiens
  CDR3 for beta chain variable domain of TCR clone 161312 (TRBV2, TRBJ2-1)
CASRGLAGGPRTYNEQFF

SEQ ID NO: 322625 - protein, 14 aa, Homo sapiens
  CDR3 for alpha chain variable domain of TCR clone 161313 (TRAV26-1, TRAJ39)
CIVRGSRAGNMLTF

SEQ ID NO: 322626 - protein, 15 aa, Homo sapiens
  CDR3 for beta chain variable domain of TCR clone 161313 (TRBV7-9, TRBJ1-5)
CASSQGHQPNQPQLF

SEQ ID NO: 322627 - protein, 14 aa, Homo sapiens
  CDR3 for alpha chain variable domain of TCR clone 161314 (TRAV13-1, TRAJ13)
CAASRVGGYQKVTS

SEQ ID NO: 322628 - protein, 17 aa, Homo sapiens
  CDR3 for beta chain variable domain of TCR clone 161314 (TRBV15, TRBJ1-5)
CATSRAPPGTRNQPQHF

SEQ ID NO: 322629 - protein, 13 aa, Homo sapiens
  CDR3 for alpha chain variable domain of TCR clone 161315 (TRAV8-6, TRAJ49)
CAVSGQTGNQFYF

SEQ ID NO: 322630 - protein, 15 aa, Homo sapiens
  CDR3 for beta chain variable domain of TCR clone 161315 (TRBV28, TRBJ2-1)
CASSIIAGGRSEQFF

SEQ ID NO: 322631 - protein, 13 aa, Homo sapiens
  CDR3 for alpha chain variable domain of TCR clone 161316 (TRAV21, TRAJ27)
CAARPGNAGKSTF

SEQ ID NO: 322632 - protein, 15 aa, Homo sapiens
  CDR3 for beta chain variable domain of TCR clone 161316 (TRBV4-1, TRBJ2-7)
CASSQNTGRLYEQYF

SEQ ID NO: 322633 - protein, 14 aa, Homo sapiens
  CDR3 for alpha chain variable domain of TCR clone 161317 (TRAV13-1, TRAJ35)
CAASKGGFGNVLHF

SEQ ID NO: 322634 - protein, 16 aa, Homo sapiens
  CDR3 for beta chain variable domain of TCR clone 161317 (TRBV5-1, TRBJ2-3)
CASSLQGRVGADTQYF

SEQ ID NO: 322635 - protein, 15 aa, Homo sapiens
  CDR3 for alpha chain variable domain of TCR clone 161318 (TRAV4, TRAJ39)
CLVGPNNNAGDMLTF

SEQ ID NO: 322636 - protein, 16 aa, Homo sapiens
  CDR3 for beta chain variable domain of TCR clone 161318 (TRBV13, TRBJ2-2)
CASSPRTGEHTGELFF

SEQ ID NO: 322637 - protein, 11 aa, Homo sapiens
  CDR3 for alpha chain variable domain of TCR clone 161319 (TRAV21, TRAJ34)
CAVTNTDKLIF

SEQ ID NO: 322638 - protein, 17 aa, Homo sapiens
  CDR3 for beta chain variable domain of TCR clone 161319 (TRBV7-8, TRBJ1-2)
CASSLRPLQGHLYGYTF

SEQ ID NO: 322639 - protein, 13 aa, Homo sapiens
  CDR3 for alpha chain variable domain of TCR clone 161320 (TRAV8-4, TRAJ30)
CAVSVNRDDKIIF

SEQ ID NO: 322640 - protein, 14 aa, Homo sapiens
  CDR3 for beta chain variable domain of TCR clone 161320 (TRBV11-2, TRBJ2-7)
RASSLGAGAYEQYF

SEQ ID NO: 322641 - protein, 17 aa, Homo sapiens
  CDR3 for alpha chain variable domain of TCR clone 161321 (TRAV3, TRAJ42)
CAVRDRDYGGSQGNIIF

SEQ ID NO: 322642 - protein, 16 aa, Homo sapiens
  CDR3 for beta chain variable domain of TCR clone 161321 (TRBV7-3, TRBJ2-2)
CASSLKRGTLSGELFF

SEQ ID NO: 322643 - protein, 18 aa, Homo sapiens
  CDR3 for alpha chain variable domain of TCR clone 161322 (TRAV21, TRAJ52)
CAVRPSPAGGTSYGKLTF

SEQ ID NO: 322644 - protein, 15 aa, Homo sapiens
  CDR3 for beta chain variable domain of TCR clone 161322 (TRBV11-2, TRBJ2-1)
CASSLTSGGYNEQFF

SEQ ID NO: 322645 - protein, 15 aa, Homo sapiens
  CDR3 for alpha chain variable domain of TCR clone 161323 (TRAV3, TRAJ22)
CAVRDRGGSARKLTF

SEQ ID NO: 322646 - protein, 15 aa, Homo sapiens
  CDR3 for beta chain variable domain of TCR clone 161323 (TRBV7-3, TRBJ2-1)
CASSPTGGGEVEQFF

SEQ ID NO: 322647 - protein, 13 aa, Homo sapiens
  CDR3 for alpha chain variable domain of TCR clone 161324 (TRAV17, TRAJ9)
CATDYTGGFKTIF

SEQ ID NO: 322648 - protein, 13 aa, Homo sapiens
  CDR3 for beta chain variable domain of TCR clone 161324 (TRBV5-5, TRBJ2-2)
CASTLGGAGELFF

SEQ ID NO: 322649 - protein, 13 aa, Homo sapiens
  CDR3 for alpha chain variable domain of TCR clone 161325 (TRAV13-1, TRAJ12)
CAASPDSSYKLIF

SEQ ID NO: 322650 - protein, 15 aa, Homo sapiens
  CDR3 for beta chain variable domain of TCR clone 161325 (TRBV7-9, TRBJ1-4)
CASSARTGGNEKLFF

SEQ ID NO: 322651 - protein, 10 aa, Homo sapiens
  CDR3 for alpha chain variable domain of TCR clone 161326 (TRAV13-1, TRAJ49)
CAVPGNQFYF

SEQ ID NO: 322652 - protein, 14 aa, Homo sapiens
  CDR3 for beta chain variable domain of TCR clone 161326 (TRBV7-9, TRBJ2-7)
CASSIGQGAGEQYF

SEQ ID NO: 322653 - protein, 14 aa, Homo sapiens
  CDR3 for alpha chain variable domain of TCR clone 161327 (TRAV2, TRAJ3)
CAVPPYSSASKIIF

SEQ ID NO: 322654 - protein, 21 aa, Homo sapiens
  CDR3 for beta chain variable domain of TCR clone 161327 (TRBV7-2, TRBJ2-2)
RRTRPCISVPAARFGPGSCFF

SEQ ID NO: 322655 - protein, 13 aa, Homo sapiens
  CDR3 for alpha chain variable domain of TCR clone 161328 (TRAV8-6, TRAJ16)
CAVSSPDGHKLLF

SEQ ID NO: 322656 - protein, 16 aa, Homo sapiens
  CDR3 for beta chain variable domain of TCR clone 161328 (TRBV5-7, TRBJ2-3)
CASSSLGGAITDTQYF

SEQ ID NO: 322657 - protein, 23 aa, Homo sapiens
  CDR3 for alpha chain variable domain of TCR clone 161329 (TRAV20, TRAJ32)
CAVDGMVVLQTSSSLELALCLLS

SEQ ID NO: 322658 - protein, 16 aa, Homo sapiens
  CDR3 for beta chain variable domain of TCR clone 161329 (TRBV19, TRBJ2-2)
GASRSPGTGATGELFF

SEQ ID NO: 322659 - protein, 16 aa, Homo sapiens
  CDR3 for alpha chain variable domain of TCR clone 161330 (TRAV26-1, TRAJ38)
CIVRVELGGNHRKLIW

SEQ ID NO: 322660 - protein, 14 aa, Homo sapiens
  CDR3 for beta chain variable domain of TCR clone 161330 (TRBV5-1, TRBJ2-3)
CASSPGLAADTQYF

SEQ ID NO: 322661 - protein, 15 aa, Homo sapiens
  CDR3 for alpha chain variable domain of TCR clone 161331 (TRAV34, TRAJ38)
CGADFTPGNNRKLIW

SEQ ID NO: 322662 - protein, 13 aa, Homo sapiens
  CDR3 for beta chain variable domain of TCR clone 161331 (TRBV29-1, TRBJ1-1)
CSATGPLNTEAFF

SEQ ID NO: 322663 - protein, 15 aa, Homo sapiens
  CDR3 for alpha chain variable domain of TCR clone 161332 (TRAV27, TRAJ38)
CAARRNAGNNRKLIW

SEQ ID NO: 322664 - protein, 15 aa, Homo sapiens
  CDR3 for beta chain variable domain of TCR clone 161332 (TRBV20-1, TRBJ2-7)
CSARDRVSGMGEQYF

SEQ ID NO: 322665 - protein, 16 aa, Homo sapiens
  CDR3 for alpha chain variable domain of TCR clone 161333 (TRAV26-1, TRAJ45)
CIVEKYSGGGADGLTF

SEQ ID NO: 322666 - protein, 15 aa, Homo sapiens
  CDR3 for beta chain variable domain of TCR clone 161333 (TRBV7-9, TRBJ2-2)
CASGPLDTFPGELFF

SEQ ID NO: 322667 - protein, 16 aa, Homo sapiens
  CDR3 for alpha chain variable domain of TCR clone 161334 (TRAV38-1, TRAJ29)
CAFITPSGNTPLSLER

SEQ ID NO: 322668 - protein, 14 aa, Homo sapiens
  CDR3 for beta chain variable domain of TCR clone 161334 (TRBV18, TRBJ2-7)
CASSPRGGAYEQYF

SEQ ID NO: 322669 - protein, 14 aa, Homo sapiens
  CDR3 for alpha chain variable domain of TCR clone 161335 (TRAV35, TRAJ40)
CAGSTTSGTYKYIF

SEQ ID NO: 322670 - protein, 13 aa, Homo sapiens
  CDR3 for beta chain variable domain of TCR clone 161335 (TRBV7-9, TRBJ1-2)
CASSVEQNYGYTF

SEQ ID NO: 322671 - protein, 12 aa, Homo sapiens
  CDR3 for alpha chain variable domain of TCR clone 161336 (TRAV12-3, TRAJ17)
CAMTLTGNKLTF

SEQ ID NO: 322672 - protein, 17 aa, Homo sapiens
  CDR3 for beta chain variable domain of TCR clone 161336 (TRBV19, TRBJ2-2)
CASSRNPGGFGTGELFF

SEQ ID NO: 322673 - protein, 15 aa, Homo sapiens
  CDR3 for alpha chain variable domain of TCR clone 161337 (TRAV8-3, TRAJ11)
CAVGLLNSGYSTLTF

SEQ ID NO: 322674 - protein, 14 aa, Homo sapiens
  CDR3 for beta chain variable domain of TCR clone 161337 (TRBV7-2, TRBJ1-5)
CASSTQGAGQPQHF

SEQ ID NO: 322675 - protein, 14 aa, Homo sapiens
  CDR3 for alpha chain variable domain of TCR clone 161338 (TRAV12-2, TRAJ13)
CAVKKTGGYQKVTF

SEQ ID NO: 322676 - protein, 15 aa, Homo sapiens
  CDR3 for beta chain variable domain of TCR clone 161338 (TRBV11-3, TRBJ2-7)
CASSLLSGSSYEQYF

SEQ ID NO: 322677 - protein, 13 aa, Homo sapiens
  CDR3 for alpha chain variable domain of TCR clone 161339 (TRAV21, TRAJ27)
CSARPGNAGKSTF

SEQ ID NO: 322678 - protein, 20 aa, Homo sapiens
  CDR3 for beta chain variable domain of TCR clone 161339 (TRBV4-2, TRBJ2-7)
CASCQASGGNLRAVLRAGHQ

SEQ ID NO: 322679 - protein, 14 aa, Homo sapiens
  CDR3 for alpha chain variable domain of TCR clone 161340 (TRAV30, TRAJ33)
CGTVAPRSNYQLIW

SEQ ID NO: 322680 - protein, 14 aa, Homo sapiens
  CDR3 for beta chain variable domain of TCR clone 161340 (TRBV19, TRBJ2-1)
CAGPTFVLSGEQFF

SEQ ID NO: 322681 - protein, 12 aa, Homo sapiens
  CDR3 for alpha chain variable domain of TCR clone 161341 (TRAV1-1, TRAJ39)
CAVPVVGNMLTF

SEQ ID NO: 322682 - protein, 16 aa, Homo sapiens
  CDR3 for beta chain variable domain of TCR clone 161341 (TRBV7-2, TRBJ2-5)
CASSPRGRGGGETQYF

SEQ ID NO: 322683 - protein, 12 aa, Homo sapiens
  CDR3 for alpha chain variable domain of TCR clone 161342 (TRAV29/DV5, TRAJ49)
CAATDTGNQFYF

SEQ ID NO: 322684 - protein, 17 aa, Homo sapiens
  CDR3 for beta chain variable domain of TCR clone 161342 (TRBV11-2, TRBJ2-1)
CASSLYPPGVEYNEQFF

SEQ ID NO: 322685 - protein, 15 aa, Homo sapiens
  CDR3 for alpha chain variable domain of TCR clone 161343 (TRAV1-2, TRAJ28)
RAVQYSGAGSYQLTF

SEQ ID NO: 322686 - protein, 15 aa, Homo sapiens
  CDR3 for beta chain variable domain of TCR clone 161343 (TRBV7-3, TRBJ2-1)
CASSLTSGSYNEQFF

SEQ ID NO: 322687 - protein, 14 aa, Homo sapiens
  CDR3 for alpha chain variable domain of TCR clone 161344 (TRAV1-2, TRAJ8)
CAVREDTGFQKLVF

SEQ ID NO: 322688 - protein, 16 aa, Homo sapiens
  CDR3 for beta chain variable domain of TCR clone 161344 (TRBV7-9, TRBJ1-1)
CASSLVGRGLGTEAFF

SEQ ID NO: 322689 - protein, 14 aa, Homo sapiens
  CDR3 for alpha chain variable domain of TCR clone 161345 (TRAV12-2, TRAJ13)
CAVKKTVGYQKVTF

SEQ ID NO: 322690 - protein, 18 aa, Homo sapiens
  CDR3 for beta chain variable domain of TCR clone 161345 (TRBV11-2, TRBJ2-3)
CASSLGGASRGAPNTQYF

SEQ ID NO: 322691 - protein, 13 aa, Homo sapiens
  CDR3 for alpha chain variable domain of TCR clone 161346 (TRAV21, TRAJ20)
CAVGVFADYKLSF

SEQ ID NO: 322692 - protein, 14 aa, Homo sapiens
  CDR3 for beta chain variable domain of TCR clone 161346 (TRBV4-2, TRBJ1-4)
CASSPSSGDEKLFF

SEQ ID NO: 322693 - protein, 11 aa, Homo sapiens
  CDR3 for alpha chain variable domain of TCR clone 161347 (TRAV12-2, TRAJ23)
CARGRGGKLIF

SEQ ID NO: 322694 - protein, 13 aa, Homo sapiens
  CDR3 for beta chain variable domain of TCR clone 161347 (TRBV27, TRBJ1-1)
CASSLSIGAEAFF

SEQ ID NO: 322695 - protein, 12 aa, Homo sapiens
  CDR3 for alpha chain variable domain of TCR clone 161348 (TRAV13-2, TRAJ23)
CAELHRGRKLIF

SEQ ID NO: 322696 - protein, 16 aa, Homo sapiens
  CDR3 for beta chain variable domain of TCR clone 161348 (TRBV20-1, TRBJ1-4)
CSAPGQGLLTNEKLFF

SEQ ID NO: 322697 - protein, 15 aa, Homo sapiens
  CDR3 for alpha chain variable domain of TCR clone 161349 (TRAV17, TRAJ57)
CATGPSQGGSEKLVF

SEQ ID NO: 322698 - protein, 15 aa, Homo sapiens
  CDR3 for beta chain variable domain of TCR clone 161349 (TRBV9, TRBJ1-6)
CASSVAGTGDSHLHF

SEQ ID NO: 322699 - protein, 14 aa, Homo sapiens
  CDR3 for alpha chain variable domain of TCR clone 161350 (TRAV13-1, TRAJ3)
CAAEGYSSASEIIF

SEQ ID NO: 322700 - protein, 14 aa, Homo sapiens
  CDR3 for beta chain variable domain of TCR clone 161350 (TRBV19, TRBJ2-5)
CASSSSGIQETQYL

SEQ ID NO: 322701 - protein, 13 aa, Homo sapiens
  CDR3 for alpha chain variable domain of TCR clone 161351 (TRAV8-3, TRAJ28)
CAVGAVGSYQLTF

SEQ ID NO: 322702 - protein, 15 aa, Homo sapiens
  CDR3 for beta chain variable domain of TCR clone 161351 (TRBV7-2, TRBJ1-2)
CASSPRAGWNYGYTF

SEQ ID NO: 322703 - protein, 12 aa, Homo sapiens
  CDR3 for alpha chain variable domain of TCR clone 161352 (TRAV21, TRAJ49)
CAVNDGGNQVYF

SEQ ID NO: 322704 - protein, 14 aa, Homo sapiens
  CDR3 for beta chain variable domain of TCR clone 161352 (TRBV18, TRBJ2-7)
CASSPRGGSYEQYS

SEQ ID NO: 322705 - protein, 16 aa, Homo sapiens
  CDR3 for alpha chain variable domain of TCR clone 161353 (TRAV12-3, TRAJ53)
CAMSPGSGGSNYKLTF

SEQ ID NO: 322706 - protein, 14 aa, Homo sapiens
  CDR3 for beta chain variable domain of TCR clone 161353 (TRBV2, TRBJ1-5)
CASGGVLSNQPQHF

SEQ ID NO: 322707 - protein, 13 aa, Homo sapiens
  CDR3 for alpha chain variable domain of TCR clone 161354 (TRAV1-2, TRAJ9)
FAALNTGGFKTIF

SEQ ID NO: 322708 - protein, 13 aa, Homo sapiens
  CDR3 for beta chain variable domain of TCR clone 161354 (TRBV19, TRBJ1-2)
CDSSVPGQDGYTF

SEQ ID NO: 322709 - protein, 17 aa, Homo sapiens
  CDR3 for alpha chain variable domain of TCR clone 161355 (TRAV8-3, TRAJ42)
CCGAGMNYGGSQGHLIF

SEQ ID NO: 322710 - protein, 11 aa, Homo sapiens
  CDR3 for beta chain variable domain of TCR clone 161355 (TRBV7-2, TRBJ2-3)
CASSSSDTQYF

SEQ ID NO: 322711 - protein, 13 aa, Homo sapiens
  CDR3 for alpha chain variable domain of TCR clone 161356 (TRAV8-3, TRAJ48)
CAVVPFGNEKLTF

SEQ ID NO: 322712 - protein, 15 aa, Homo sapiens
  CDR3 for beta chain variable domain of TCR clone 161356 (TRBV11-2, TRBJ2-1)
CASISPSTRYNEQFF

SEQ ID NO: 322713 - protein, 14 aa, Homo sapiens
  CDR3 for alpha chain variable domain of TCR clone 161357 (TRAV8-1, TRAJ49)
CASSIANTGNQFYF

SEQ ID NO: 322714 - protein, 15 aa, Homo sapiens
  CDR3 for beta chain variable domain of TCR clone 161357 (TRBV13, TRBJ1-5)
CASSRTGRGHQPQHF

SEQ ID NO: 322715 - protein, 12 aa, Homo sapiens
  CDR3 for alpha chain variable domain of TCR clone 161358 (TRAV12-3, TRAJ17)
CAMTLTGNTLTF

SEQ ID NO: 322716 - protein, 13 aa, Homo sapiens
  CDR3 for beta chain variable domain of TCR clone 161358 (TRBV5-1, TRBJ1-2)
CASSSTGVYGYTF

SEQ ID NO: 322717 - protein, 12 aa, Homo sapiens
  CDR3 for alpha chain variable domain of TCR clone 161359 (TRAV17, TRAJ12)
CATLRSSYKLIY

SEQ ID NO: 322718 - protein, 16 aa, Homo sapiens
  CDR3 for beta chain variable domain of TCR clone 161359 (TRBV28, TRBJ2-7)
CASSLFFETGGPEQYF

SEQ ID NO: 322719 - protein, 14 aa, Homo sapiens
  CDR3 for alpha chain variable domain of TCR clone 161360 (TRAV1-2, TRAJ8)
CAVRQDTGFQKLVF

SEQ ID NO: 322720 - protein, 15 aa, Homo sapiens
  CDR3 for beta chain variable domain of TCR clone 161360 (TRBV6-3, TRBJ2-7)
CASSSPGTVFYEQYF

SEQ ID NO: 322721 - protein, 15 aa, Homo sapiens
  CDR3 for alpha chain variable domain of TCR clone 161361 (TRAV2, TRAJ28)
CAVPYSGAGSYQLTF

SEQ ID NO: 322722 - protein, 13 aa, Homo sapiens
  CDR3 for beta chain variable domain of TCR clone 161361 (TRBV25-1, TRBJ2-7)
CASSEDGDYEQYF

SEQ ID NO: 322723 - protein, 16 aa, Homo sapiens
  CDR3 for alpha chain variable domain of TCR clone 161362 (TRAV30, TRAJ24)
CGTEIVDADSWGKFQF

SEQ ID NO: 322724 - protein, 16 aa, Homo sapiens
  CDR3 for beta chain variable domain of TCR clone 161362 (TRBV2, TRBJ1-3)
CASSGEAGRSGNTIYF

SEQ ID NO: 322725 - protein, 16 aa, Homo sapiens
  CDR3 for alpha chain variable domain of TCR clone 161363 (TRAV1-2, TRAJ10)
CAVRGVLTGGGNKLTF

SEQ ID NO: 322726 - protein, 16 aa, Homo sapiens
  CDR3 for beta chain variable domain of TCR clone 161363 (TRBV12-5, TRBJ2-5)
CAGGPRTSGNQETQYF

SEQ ID NO: 322727 - protein, 15 aa, Homo sapiens
  CDR3 for alpha chain variable domain of TCR clone 161364 (TRAV29/DV5, TRAJ28)
CSASVMGAGSYQLTF

SEQ ID NO: 322728 - protein, 14 aa, Homo sapiens
  CDR3 for beta chain variable domain of TCR clone 161364 (TRBV7-2, TRBJ1-5)
CASSWVGENQPQHF

SEQ ID NO: 322729 - protein, 15 aa, Homo sapiens
  CDR3 for alpha chain variable domain of TCR clone 161365 (TRAV12-2, TRAJ44)
CAVNLNTGTASKLTF

SEQ ID NO: 322730 - protein, 14 aa, Homo sapiens
  CDR3 for beta chain variable domain of TCR clone 161365 (TRBV5-1, TRBJ2-1)
CASSALWAGNEQFF

SEQ ID NO: 322731 - protein, 15 aa, Homo sapiens
  CDR3 for alpha chain variable domain of TCR clone 161366 (TRAV14/DV4, TRAJ10)
CAMRELTGGGNRLTF

SEQ ID NO: 322732 - protein, 18 aa, Homo sapiens
  CDR3 for beta chain variable domain of TCR clone 161366 (TRBV7-9, TRBJ2-7)
CASSLTTSGSRTWYEQYF

SEQ ID NO: 322733 - protein, 13 aa, Homo sapiens
  CDR3 for alpha chain variable domain of TCR clone 161367 (TRAV27, TRAJ6)
CAGGTRGSYIPTF

SEQ ID NO: 322734 - protein, 14 aa, Homo sapiens
  CDR3 for beta chain variable domain of TCR clone 161367 (TRBV20-1, TRBJ2-4)
CSASGRVGENMQYL

SEQ ID NO: 322735 - protein, 16 aa, Homo sapiens
  CDR3 for alpha chain variable domain of TCR clone 161368 (TRAV23/DV6, TRAJ34)
CAASGALSYNTDKLIF

SEQ ID NO: 322736 - protein, 13 aa, Homo sapiens
  CDR3 for beta chain variable domain of TCR clone 161368 (TRBV11-3, TRBJ2-3)
CASSHDTKDTQYF

SEQ ID NO: 322737 - protein, 16 aa, Homo sapiens
  CDR3 for alpha chain variable domain of TCR clone 161369 (TRAV3, TRAJ37)
CAVRPHGSGNTSKLIF

SEQ ID NO: 322738 - protein, 15 aa, Homo sapiens
  CDR3 for beta chain variable domain of TCR clone 161369 (TRBV5-5, TRBJ2-7)
CASSLAAALSYEQYF

SEQ ID NO: 322739 - protein, 14 aa, Homo sapiens
  CDR3 for alpha chain variable domain of TCR clone 161370 (TRAV12-2, TRAJ17)
CSVLFKAAGNKLTF

SEQ ID NO: 322740 - protein, 14 aa, Homo sapiens
  CDR3 for beta chain variable domain of TCR clone 161370 (TRBV7-3, TRBJ1-1)
CASSLKGGNTEAFF

SEQ ID NO: 322741 - protein, 18 aa, Homo sapiens
  CDR3 for alpha chain variable domain of TCR clone 161371 (TRAV13-1, TRAJ52)
CAAKNPNAGGTSYGKLTF

SEQ ID NO: 322742 - protein, 15 aa, Homo sapiens
  CDR3 for beta chain variable domain of TCR clone 161371 (TRBV6-1, TRBJ2-3)
CASSERRGITDTQYF

SEQ ID NO: 322743 - protein, 13 aa, Homo sapiens
  CDR3 for alpha chain variable domain of TCR clone 161372 (TRAV2, TRAJ40)
CAVVTSGTYKYTF

SEQ ID NO: 322744 - protein, 14 aa, Homo sapiens
  CDR3 for beta chain variable domain of TCR clone 161372 (TRBV7-9, TRBJ2-1)
CASSPRDSLYEQFF

SEQ ID NO: 322745 - protein, 15 aa, Homo sapiens
  CDR3 for alpha chain variable domain of TCR clone 161373 (TRAV8-3, TRAJ6)
CAVGPLVGGSYIPTF

SEQ ID NO: 322746 - protein, 14 aa, Homo sapiens
  CDR3 for beta chain variable domain of TCR clone 161373 (TRBV19, TRBJ2-2)
CASSTGQGAGELFF

SEQ ID NO: 322747 - protein, 18 aa, Homo sapiens
  CDR3 for alpha chain variable domain of TCR clone 161374 (TRAV26-1, TRAJ23)
CIVRVGLEGWNQGGKLIF

SEQ ID NO: 322748 - protein, 15 aa, Homo sapiens
  CDR3 for beta chain variable domain of TCR clone 161374 (TRBV10-3, TRBJ2-3)
CAISDWDRDSDTQYF

SEQ ID NO: 322749 - protein, 11 aa, Homo sapiens
  CDR3 for alpha chain variable domain of TCR clone 161375 (TRAV13-1, TRAJ20)
CAASNDYRLIF

SEQ ID NO: 322750 - protein, 14 aa, Homo sapiens
  CDR3 for beta chain variable domain of TCR clone 161375 (TRBV7-2, TRBJ2-7)
CASSPKTSFYEQYF

SEQ ID NO: 322751 - protein, 12 aa, Homo sapiens
  CDR3 for alpha chain variable domain of TCR clone 161376 (TRAV13-2, TRAJ23)
CAERHRGGKLIF

SEQ ID NO: 322752 - protein, 13 aa, Homo sapiens
  CDR3 for beta chain variable domain of TCR clone 161376 (TRBV7-9, TRBJ2-3)
CASSPGSADTQYF

SEQ ID NO: 322753 - protein, 15 aa, Homo sapiens
  CDR3 for alpha chain variable domain of TCR clone 161377 (TRAV3, TRAJ17)
CAVRDTGAAGNKLNF

SEQ ID NO: 322754 - protein, 14 aa, Homo sapiens
  CDR3 for beta chain variable domain of TCR clone 161377 (TRBV6-3, TRBJ1-1)
CASSNLLPGAEAFF

SEQ ID NO: 322755 - protein, 17 aa, Homo sapiens
  CDR3 for alpha chain variable domain of TCR clone 161378 (TRAV21, TRAJ13)
CAVPRSFWGLPESFLWN

SEQ ID NO: 322756 - protein, 15 aa, Homo sapiens
  CDR3 for beta chain variable domain of TCR clone 161378 (TRBV7-9, TRBJ1-6)
CASSSPGRGNSPLHF

SEQ ID NO: 322757 - protein, 15 aa, Homo sapiens
  CDR3 for alpha chain variable domain of TCR clone 161379 (TRAV3, TRAJ22)
CAVRDRGGSAWQLTF

SEQ ID NO: 322758 - protein, 20 aa, Homo sapiens
  CDR3 for beta chain variable domain of TCR clone 161379 (TRBV11-2, TRBJ1-6)
CASSLVFATGGSVHPSTLGT

SEQ ID NO: 322759 - protein, 18 aa, Homo sapiens
  CDR3 for alpha chain variable domain of TCR clone 161380 (TRAV21, TRAJ52)
CAVRPSPAGGTSYGKLTF

SEQ ID NO: 322760 - protein, 13 aa, Homo sapiens
  CDR3 for beta chain variable domain of TCR clone 161380 (TRBV7-3, TRBJ2-3)
CASSSWSTDTQYF

SEQ ID NO: 322761 - protein, 13 aa, Homo sapiens
  CDR3 for alpha chain variable domain of TCR clone 161381 (TRAV12-3, TRAJ13)
CAMGTGGYQKVTF

SEQ ID NO: 322762 - protein, 14 aa, Homo sapiens
  CDR3 for beta chain variable domain of TCR clone 161381 (TRBV7-2, TRBJ2-5)
CASSTWGELKTQYF

SEQ ID NO: 322763 - protein, 14 aa, Homo sapiens
  CDR3 for alpha chain variable domain of TCR clone 161382 (TRAV12-1, TRAJ37)
CVVTGSSNTGKLIF

SEQ ID NO: 322764 - protein, 15 aa, Homo sapiens
  CDR3 for beta chain variable domain of TCR clone 161382 (TRBV4-1, TRBJ2-5)
CASSQWDLYQETQYF

SEQ ID NO: 322765 - protein, 21 aa, Homo sapiens
  CDR3 for alpha chain variable domain of TCR clone 161383 (TRAV12-2, TRAJ52)
CSSETPSPVIQPPTSFRSTSY

SEQ ID NO: 322766 - protein, 15 aa, Homo sapiens
  CDR3 for beta chain variable domain of TCR clone 161383 (TRBV20-1, TRBJ2-7)
CSARDRVSGMDEQYF

SEQ ID NO: 322767 - protein, 16 aa, Homo sapiens
  CDR3 for alpha chain variable domain of TCR clone 161384 (TRAV16, TRAJ52)
CALSAAGGTSYGKLTF

SEQ ID NO: 322768 - protein, 16 aa, Homo sapiens
  CDR3 for beta chain variable domain of TCR clone 161384 (TRBV13, TRBJ2-5)
CASSLRTGGSWETQYF

SEQ ID NO: 322769 - protein, 10 aa, Homo sapiens
  CDR3 for alpha chain variable domain of TCR clone 161385 (TRAV8-4, TRAJ43)
CALSADDMRF

SEQ ID NO: 322770 - protein, 15 aa, Homo sapiens
  CDR3 for beta chain variable domain of TCR clone 161385 (TRBV5-1, TRBJ2-3)
CASSVTSGSTDTQYF

SEQ ID NO: 322771 - protein, 17 aa, Homo sapiens
  CDR3 for alpha chain variable domain of TCR clone 161386 (TRAV3, TRAJ6)
CAVRDGPRAGGSYIPTF

SEQ ID NO: 322772 - protein, 12 aa, Homo sapiens
  CDR3 for beta chain variable domain of TCR clone 161386 (TRBV6-5, TRBJ2-3)
CTSMGRGDTQYF

SEQ ID NO: 322773 - protein, 15 aa, Homo sapiens
  CDR3 for alpha chain variable domain of TCR clone 161387 (TRAV16, TRAJ17)
CALSGNKSAGNKLTF

SEQ ID NO: 322774 - protein, 15 aa, Homo sapiens
  CDR3 for beta chain variable domain of TCR clone 161387 (TRBV20-1, TRBJ2-7)
CSARDRVSGMDEQYF

SEQ ID NO: 322775 - protein, 18 aa, Homo sapiens
  CDR3 for alpha chain variable domain of TCR clone 161388 (TRAV26-2, TRAJ54)
CILRDVEVGIQGAQKLVF

SEQ ID NO: 322776 - protein, 17 aa, Homo sapiens
  CDR3 for beta chain variable domain of TCR clone 161388 (TRBV20-1, TRBJ1-5)
CSARLSPGQGGNQPQHF

SEQ ID NO: 322777 - protein, 15 aa, Homo sapiens
  CDR3 for alpha chain variable domain of TCR clone 161389 (TRAV38-1, TRAJ57)
CAFMDSQGGSEKLVF

SEQ ID NO: 322778 - protein, 16 aa, Homo sapiens
  CDR3 for beta chain variable domain of TCR clone 161389 (TRBV10-3, TRBJ2-1)
CAIRGGGRGDHSEQFF

SEQ ID NO: 322779 - protein, 12 aa, Homo sapiens
  CDR3 for alpha chain variable domain of TCR clone 161390 (TRAV12-3, TRAJ17)
CAMTLTGNKLTF

SEQ ID NO: 322780 - protein, 18 aa, Homo sapiens
  CDR3 for beta chain variable domain of TCR clone 161390 (TRBV24-1, TRBJ2-1)
CATSDLMFLGRGVHEQFF

SEQ ID NO: 322781 - protein, 12 aa, Homo sapiens
  CDR3 for alpha chain variable domain of TCR clone 161391 (TRAV13-1, TRAJ21)
CAAKEGFNKFYF

SEQ ID NO: 322782 - protein, 15 aa, Homo sapiens
  CDR3 for beta chain variable domain of TCR clone 161391 (TRBV5-1, TRBJ2-6)
CASSLDPSGANVLTF

SEQ ID NO: 322783 - protein, 12 aa, Homo sapiens
  CDR3 for alpha chain variable domain of TCR clone 161392 (TRAV1-1, TRAJ39)
CAVPVVGNVLTF

SEQ ID NO: 322784 - protein, 15 aa, Homo sapiens
  CDR3 for beta chain variable domain of TCR clone 161392 (TRBV19, TRBJ1-6)
CASSTQGAVGSPLHF

SEQ ID NO: 322785 - protein, 13 aa, Homo sapiens
  CDR3 for alpha chain variable domain of TCR clone 161393 (TRAV22, TRAJ58)
CAVTETSGSRLTF

SEQ ID NO: 322786 - protein, 15 aa, Homo sapiens
  CDR3 for beta chain variable domain of TCR clone 161393 (TRBV7-6, TRBJ2-1)
CASSPGQGPYNEQFF

SEQ ID NO: 322787 - protein, 13 aa, Homo sapiens
  CDR3 for alpha chain variable domain of TCR clone 161394 (TRAV21, TRAJ27)
CAARPGNAGKSTF

SEQ ID NO: 322788 - protein, 17 aa, Homo sapiens
  CDR3 for beta chain variable domain of TCR clone 161394 (TRBV11-2, TRBJ2-1)
CASSLYPPGGEYNEQFF

SEQ ID NO: 322789 - protein, 13 aa, Homo sapiens
  CDR3 for alpha chain variable domain of TCR clone 161395 (TRAV8-6, TRAJ49)
CAVITNTGNQFYV

SEQ ID NO: 322790 - protein, 14 aa, Homo sapiens
  CDR3 for beta chain variable domain of TCR clone 161395 (TRBV5-1, TRBJ2-7)
CASSRGESLYEQYY

SEQ ID NO: 322791 - protein, 12 aa, Homo sapiens
  CDR3 for alpha chain variable domain of TCR clone 161396 (TRAV12-3, TRAJ17)
CAMTLTGNELTF

SEQ ID NO: 322792 - protein, 12 aa, Homo sapiens
  CDR3 for beta chain variable domain of TCR clone 161396 (TRBV11-2, TRBJ2-7)
CASSLPTYEQYF

SEQ ID NO: 322793 - protein, 12 aa, Homo sapiens
  CDR3 for alpha chain variable domain of TCR clone 161397 (TRAV10, TRAJ43)
CVVVRGGNDMRF

SEQ ID NO: 322794 - protein, 15 aa, Homo sapiens
  CDR3 for beta chain variable domain of TCR clone 161397 (TRBV2, TRBJ2-7)
CASSEGLARSYEQYF

SEQ ID NO: 322795 - protein, 13 aa, Homo sapiens
  CDR3 for alpha chain variable domain of TCR clone 161398 (TRAV21, TRAJ27)
CAARPGNAGKSTS

SEQ ID NO: 322796 - protein, 16 aa, Homo sapiens
  CDR3 for beta chain variable domain of TCR clone 161398 (TRBV12-5, TRBJ2-5)
CASGPRTSGNQETQYF

SEQ ID NO: 322797 - protein, 13 aa, Homo sapiens
  CDR3 for alpha chain variable domain of TCR clone 161399 (TRAV3, TRAJ20)
CCEAFCNDYKLSF

SEQ ID NO: 322798 - protein, 15 aa, Homo sapiens
  CDR3 for beta chain variable domain of TCR clone 161399 (TRBV19, TRBJ2-6)
CASGRRDSGANVLTF

SEQ ID NO: 322799 - protein, 13 aa, Homo sapiens
  CDR3 for alpha chain variable domain of TCR clone 161400 (TRAV12-3, TRAJ7)
CAMTPYGNNRLAF

SEQ ID NO: 322800 - protein, 16 aa, Homo sapiens
  CDR3 for beta chain variable domain of TCR clone 161400 (TRBV20-1, TRBJ1-4)
CSARPYGGELNEKLFV

SEQ ID NO: 322801 - protein, 16 aa, Homo sapiens
  CDR3 for alpha chain variable domain of TCR clone 161401 (TRAV12-3, TRAJ53)
CAMSPGSEGSNYKLTF

SEQ ID NO: 322802 - protein, 16 aa, Homo sapiens
  CDR3 for beta chain variable domain of TCR clone 161401 (TRBV4-2, TRBJ1-1)
CASSQAGFGMNTEAFF

SEQ ID NO: 322803 - protein, 14 aa, Homo sapiens
  CDR3 for alpha chain variable domain of TCR clone 161402 (TRAV35, TRAJ50)
CAGHRKTSYDKVIF

SEQ ID NO: 322804 - protein, 15 aa, Homo sapiens
  CDR3 for beta chain variable domain of TCR clone 161402 (TRBV11-3, TRBJ2-3)
CASLKDGREGDTQYF

SEQ ID NO: 322805 - protein, 13 aa, Homo sapiens
  CDR3 for alpha chain variable domain of TCR clone 161403 (TRAV17, TRAJ21)
CATDGGNFNKFYF

SEQ ID NO: 322806 - protein, 14 aa, Homo sapiens
  CDR3 for beta chain variable domain of TCR clone 161403 (TRBV7-2, TRBJ2-7)
CASRSQGAAYEQYF

SEQ ID NO: 322807 - protein, 17 aa, Homo sapiens
  CDR3 for alpha chain variable domain of TCR clone 161404 (TRAV3, TRAJ6)
CAVRDGPRAGGSYIPTF

SEQ ID NO: 322808 - protein, 15 aa, Homo sapiens
  CDR3 for beta chain variable domain of TCR clone 161404 (TRBV28, TRBJ2-1)
CASRTGAGVIARQFF

SEQ ID NO: 322809 - protein, 13 aa, Homo sapiens
  CDR3 for alpha chain variable domain of TCR clone 161405 (TRAV17, TRAJ22)
CAHHSGSARPLTF

SEQ ID NO: 322810 - protein, 14 aa, Homo sapiens
  CDR3 for beta chain variable domain of TCR clone 161405 (TRBV16, TRBJ1-1)
CASSQAGPNTEAFF

SEQ ID NO: 322811 - protein, 18 aa, Homo sapiens
  CDR3 for alpha chain variable domain of TCR clone 161406 (TRAV21, TRAJ52)
CAVRPSPSGGTSYVKLTF

SEQ ID NO: 322812 - protein, 17 aa, Homo sapiens
  CDR3 for beta chain variable domain of TCR clone 161406 (TRBV13, TRBJ2-3)
CASSLSRVAGGRNTQYF

SEQ ID NO: 322813 - protein, 19 aa, Homo sapiens
  CDR3 for alpha chain variable domain of TCR clone 161407 (TRAV21, TRAJ45)
CAVEAPRGDQEEVLTDSPF

SEQ ID NO: 322814 - protein, 10 aa, Homo sapiens
  CDR3 for beta chain variable domain of TCR clone 161407 (TRBV4-1, TRBJ2-7)
SRGDRHEQYF

SEQ ID NO: 322815 - protein, 15 aa, Homo sapiens
  CDR3 for alpha chain variable domain of TCR clone 161408 (TRAV21, TRAJ10)
CAVPLPTGGGNKLTV

SEQ ID NO: 322816 - protein, 14 aa, Homo sapiens
  CDR3 for beta chain variable domain of TCR clone 161408 (TRBV12-4, TRBJ1-1)
CASSLGTGGTEAFF

SEQ ID NO: 322817 - protein, 14 aa, Homo sapiens
  CDR3 for alpha chain variable domain of TCR clone 161409 (TRAV12-3, TRAJ57)
CAMSAWGGSEKLVF

SEQ ID NO: 322818 - protein, 15 aa, Homo sapiens
  CDR3 for beta chain variable domain of TCR clone 161409 (TRBV11-2, TRBJ2-2)
CASSSDRVNAGELFF

SEQ ID NO: 322819 - protein, 12 aa, Homo sapiens
  CDR3 for alpha chain variable domain of TCR clone 161410 (TRAV35, TRAJ42)
CWVSGKPRNLIF

SEQ ID NO: 322820 - protein, 13 aa, Homo sapiens
  CDR3 for beta chain variable domain of TCR clone 161410 (TRBV29-1, TRBJ2-1)
CSVEGGRVNEQFF

SEQ ID NO: 322821 - protein, 15 aa, Homo sapiens
  CDR3 for alpha chain variable domain of TCR clone 161411 (TRAV17, TRAJ35)
CATAFVIGFGNVLHC

SEQ ID NO: 322822 - protein, 16 aa, Homo sapiens
  CDR3 for beta chain variable domain of TCR clone 161411 (TRBV11-2, TRBJ2-7)
CASSPLAGGARYEQYF

SEQ ID NO: 322823 - protein, 12 aa, Homo sapiens
  CDR3 for alpha chain variable domain of TCR clone 161412 (TRAV3, TRAJ43)
CAVRDPNNDMRF

SEQ ID NO: 322824 - protein, 16 aa, Homo sapiens
  CDR3 for beta chain variable domain of TCR clone 161412 (TRBV19, TRBJ1-2)
CASSIGLFRDAYGYTF

SEQ ID NO: 322825 - protein, 16 aa, Homo sapiens
  CDR3 for alpha chain variable domain of TCR clone 161413 (TRAV12-2, TRAJ40)
CAGIRGGTSGTYKYIF

SEQ ID NO: 322826 - protein, 13 aa, Homo sapiens
  CDR3 for beta chain variable domain of TCR clone 161413 (TRBV7-9, TRBJ1-2)
CASSLKQNYGYTF

SEQ ID NO: 322827 - protein, 16 aa, Homo sapiens
  CDR3 for alpha chain variable domain of TCR clone 161414 (TRAV8-3, TRAJ8)
CAVPRDGTTGFQKLVF

SEQ ID NO: 322828 - protein, 14 aa, Homo sapiens
  CDR3 for beta chain variable domain of TCR clone 161414 (TRBV28, TRBJ1-1)
CASSESGRGTEAFF

SEQ ID NO: 322829 - protein, 16 aa, Homo sapiens
  CDR3 for alpha chain variable domain of TCR clone 161415 (TRAV4, TRAJ22)
CLVGDLYSGSARQLTF

SEQ ID NO: 322830 - protein, 15 aa, Homo sapiens
  CDR3 for beta chain variable domain of TCR clone 161415 (TRBV4-2, TRBJ1-1)
CASSQRSSGRTEAFF

SEQ ID NO: 322831 - protein, 16 aa, Homo sapiens
  CDR3 for alpha chain variable domain of TCR clone 161416 (TRAV30, TRAJ24)
CGTEIVDADSWGKFQF

SEQ ID NO: 322832 - protein, 13 aa, Homo sapiens
  CDR3 for beta chain variable domain of TCR clone 161416 (TRBV19, TRBJ1-2)
CASSVPGQDGYSF

SEQ ID NO: 322833 - protein, 14 aa, Homo sapiens
  CDR3 for alpha chain variable domain of TCR clone 161417 (TRAV1-2, TRAJ33)
CAVRAPDSNFQLIW

SEQ ID NO: 322834 - protein, 15 aa, Homo sapiens
  CDR3 for beta chain variable domain of TCR clone 161417 (TRBV10-3, TRBJ2-3)
CAISLTSGGTDTQYF

SEQ ID NO: 322835 - protein, 14 aa, Homo sapiens
  CDR3 for alpha chain variable domain of TCR clone 161418 (TRAV12-3, TRAJ13)
CAMRNSGGYQKVTF

SEQ ID NO: 322836 - protein, 14 aa, Homo sapiens
  CDR3 for beta chain variable domain of TCR clone 161418 (TRBV19, TRBJ2-1)
CASPTFVLSGEQFF

SEQ ID NO: 322837 - protein, 11 aa, Homo sapiens
  CDR3 for alpha chain variable domain of TCR clone 161419 (TRAV21, TRAJ34)
CAVTNTDKLIF

SEQ ID NO: 322838 - protein, 12 aa, Homo sapiens
  CDR3 for beta chain variable domain of TCR clone 161419 (TRBV5-1, TRBJ1-2)
CASSQDTYGYTF

SEQ ID NO: 322839 - protein, 15 aa, Homo sapiens
  CDR3 for alpha chain variable domain of TCR clone 161420 (TRAV8-3, TRAJ27)
CAVGSSKTNAGKSAF

SEQ ID NO: 322840 - protein, 13 aa, Homo sapiens
  CDR3 for beta chain variable domain of TCR clone 161420 (TRBV7-2, TRBJ2-7)
CASSSPGGSEQYF

SEQ ID NO: 322841 - protein, 14 aa, Homo sapiens
  CDR3 for alpha chain variable domain of TCR clone 161421 (TRAV39, TRAJ58)
YAVDSETSGSRLTF

SEQ ID NO: 322842 - protein, 12 aa, Homo sapiens
  CDR3 for beta chain variable domain of TCR clone 161421 (TRBV11-2, TRBJ2-2)
CASSLGGGELFF

SEQ ID NO: 322843 - protein, 14 aa, Homo sapiens
  CDR3 for alpha chain variable domain of TCR clone 161422 (TRAV21, TRAJ21)
CAVKGFGSFNKFYF

SEQ ID NO: 322844 - protein, 13 aa, Homo sapiens
  CDR3 for beta chain variable domain of TCR clone 161422 (TRBV18, TRBJ1-1)
CASSPETKPEAFF

SEQ ID NO: 322845 - protein, 15 aa, Homo sapiens
  CDR3 for alpha chain variable domain of TCR clone 161423 (TRAV12-2, TRAJ23)
CAGKPIYNQGGKLIF

SEQ ID NO: 322846 - protein, 15 aa, Homo sapiens
  CDR3 for beta chain variable domain of TCR clone 161423 (TRBV5-1, TRBJ1-2)
CASSLVGGQSQGYTF

SEQ ID NO: 322847 - protein, 15 aa, Homo sapiens
  CDR3 for alpha chain variable domain of TCR clone 161424 (TRAV1-1, TRAJ36)
CAVRPQGTGANNLFF

SEQ ID NO: 322848 - protein, 17 aa, Homo sapiens
  CDR3 for beta chain variable domain of TCR clone 161424 (TRBV20-1, TRBJ2-7)
CSAAGTSGRVGESEQYF

SEQ ID NO: 322849 - protein, 16 aa, Homo sapiens
  CDR3 for alpha chain variable domain of TCR clone 161425 (TRAV12-2, TRAJ18)
CAAKGVRGSTLGRLYF

SEQ ID NO: 322850 - protein, 16 aa, Homo sapiens
  CDR3 for beta chain variable domain of TCR clone 161425 (TRBV18, TRBJ2-1)
CASSLGGTSAYNEQFF

SEQ ID NO: 322851 - protein, 14 aa, Homo sapiens
  CDR3 for alpha chain variable domain of TCR clone 161426 (TRAV8-6, TRAJ37)
CAVRLSGNTGKLIF

SEQ ID NO: 322852 - protein, 15 aa, Homo sapiens
  CDR3 for beta chain variable domain of TCR clone 161426 (TRBV20-1, TRBJ2-7)
CSARDRVSGMDEQYF

SEQ ID NO: 322853 - protein, 14 aa, Homo sapiens
  CDR3 for alpha chain variable domain of TCR clone 161427 (TRAV23/DV6, TRAJ22)
CAASVSGSARQMTF

SEQ ID NO: 322854 - protein, 16 aa, Homo sapiens
  CDR3 for beta chain variable domain of TCR clone 161427 (TRBV19, TRBJ2-2)
CASSFPGQGLAGELFF

SEQ ID NO: 322855 - protein, 14 aa, Homo sapiens
  CDR3 for alpha chain variable domain of TCR clone 161428 (TRAV1-2, TRAJ8)
CAGREDTGFQKLVF

SEQ ID NO: 322856 - protein, 13 aa, Homo sapiens
  CDR3 for beta chain variable domain of TCR clone 161428 (TRBV19, TRBJ1-2)
CASSVPGQDGYTF

SEQ ID NO: 322857 - protein, 13 aa, Homo sapiens
  CDR3 for alpha chain variable domain of TCR clone 161429 (TRAV27, TRAJ42)
CAGARGSQGNLLF

SEQ ID NO: 322858 - protein, 14 aa, Homo sapiens
  CDR3 for beta chain variable domain of TCR clone 161429 (TRBV20-1, TRBJ1-1)
CSAQTRIGGTEAFF

SEQ ID NO: 322859 - protein, 12 aa, Homo sapiens
  CDR3 for alpha chain variable domain of TCR clone 161430 (TRAV1-1, TRAJ8)
CAGGTGFQKLVF

SEQ ID NO: 322860 - protein, 13 aa, Homo sapiens
  CDR3 for beta chain variable domain of TCR clone 161430 (TRBV7-9, TRBJ2-5)
CASLPSGRETQYF

SEQ ID NO: 322861 - protein, 10 aa, Homo sapiens
  CDR3 for alpha chain variable domain of TCR clone 161431 (TRAV23/DV6, TRAJ57)
CAASSTLSQG

SEQ ID NO: 322862 - protein, 14 aa, Homo sapiens
  CDR3 for beta chain variable domain of TCR clone 161431 (TRBV12-5, TRBJ2-5)
CASGSRTHKETQYF

SEQ ID NO: 322863 - protein, 22 aa, Homo sapiens
  CDR3 for alpha chain variable domain of TCR clone 161432 (TRAV27, TRAJ38)
CAARRNAGNNHIQKPDPAVYQL

SEQ ID NO: 322864 - protein, 13 aa, Homo sapiens
  CDR3 for beta chain variable domain of TCR clone 161432 (TRBV12-5, TRBJ2-3)
CASGDRQSDTQYF

SEQ ID NO: 322865 - protein, 14 aa, Homo sapiens
  CDR3 for alpha chain variable domain of TCR clone 161433 (TRAV2, TRAJ9)
CAVEDRSGSFKTIF

SEQ ID NO: 322866 - protein, 13 aa, Homo sapiens
  CDR3 for beta chain variable domain of TCR clone 161433 (TRBV27, TRBJ1-1)
CASSLSIGAEAFF

SEQ ID NO: 322867 - protein, 22 aa, Homo sapiens
  CDR3 for alpha chain variable domain of TCR clone 161434 (TRAV3, TRAJ38)
CAVRDCLNAGNNHIQNPDPAVY

SEQ ID NO: 322868 - protein, 14 aa, Homo sapiens
  CDR3 for beta chain variable domain of TCR clone 161434 (TRBV7-2, TRBJ2-7)
CASSPKTSFYEQYF

SEQ ID NO: 322869 - protein, 17 aa, Homo sapiens
  CDR3 for alpha chain variable domain of TCR clone 161435 (TRAV26-1, TRAJ53)
CIVRVDDSGGSHYKLTF

SEQ ID NO: 322870 - protein, 15 aa, Homo sapiens
  CDR3 for beta chain variable domain of TCR clone 161435 (TRBV20-1, TRBJ1-2)
CSARDPLRQGYGYTF

SEQ ID NO: 322871 - protein, 11 aa, Homo sapiens
  CDR3 for alpha chain variable domain of TCR clone 161436 (TRAV3, TRAJ21)
SAVGNFNKFYF

SEQ ID NO: 322872 - protein, 15 aa, Homo sapiens
  CDR3 for beta chain variable domain of TCR clone 161436 (TRBV29-1, TRBJ2-1)
CSVEGGPASYNEQFF

SEQ ID NO: 322873 - protein, 16 aa, Homo sapiens
  CDR3 for alpha chain variable domain of TCR clone 161437 (TRAV26-1, TRAJ33)
CIVSFWGEDSNYQLIW

SEQ ID NO: 322874 - protein, 14 aa, Homo sapiens
  CDR3 for beta chain variable domain of TCR clone 161437 (TRBV6-3, TRBJ1-1)
CASSYHSKNTEAFF

SEQ ID NO: 322875 - protein, 18 aa, Homo sapiens
  CDR3 for alpha chain variable domain of TCR clone 161438 (TRAV29/DV5, TRAJ52)
CAAGFRGAGGTSYGKLTF

SEQ ID NO: 322876 - protein, 13 aa, Homo sapiens
  CDR3 for beta chain variable domain of TCR clone 161438 (TRBV20-1, TRBJ2-2)
CSASAAGTGELFF

SEQ ID NO: 322877 - protein, 14 aa, Homo sapiens
  CDR3 for alpha chain variable domain of TCR clone 161439 (TRAV26-1, TRAJ22)
CIVRVYGSARQLTF

SEQ ID NO: 322878 - protein, 15 aa, Homo sapiens
  CDR3 for beta chain variable domain of TCR clone 161439 (TRBV12-4, TRBJ2-5)
CASSPPTGLQETQYF

SEQ ID NO: 322879 - protein, 15 aa, Homo sapiens
  CDR3 for alpha chain variable domain of TCR clone 161440 (TRAV12-3, TRAJ6)
CAMSATTGGSYIPTF

SEQ ID NO: 322880 - protein, 14 aa, Homo sapiens
  CDR3 for beta chain variable domain of TCR clone 161440 (TRBV27, TRBJ2-5)
CASSSLKGWETQYF

SEQ ID NO: 322881 - protein, 14 aa, Homo sapiens
  CDR3 for alpha chain variable domain of TCR clone 161441 (TRAV35, TRAJ33)
CAGSSQDSIYQLIW

SEQ ID NO: 322882 - protein, 15 aa, Homo sapiens
  CDR3 for beta chain variable domain of TCR clone 161441 (TRBV20-1, TRBJ2-7)
CSAESGTSGAYEQYF

SEQ ID NO: 322883 - protein, 15 aa, Homo sapiens
  CDR3 for alpha chain variable domain of TCR clone 161442 (TRAV23/DV6, TRAJ5)
CAASLMDTGRRALTF

SEQ ID NO: 322884 - protein, 15 aa, Homo sapiens
  CDR3 for beta chain variable domain of TCR clone 161442 (TRBV7-6, TRBJ2-7)
CATTSSAGPTYEQYF

SEQ ID NO: 322885 - protein, 14 aa, Homo sapiens
  CDR3 for alpha chain variable domain of TCR clone 161443 (TRAV16, TRAJ33)
CALSAMDRNYQLIW

SEQ ID NO: 322886 - protein, 16 aa, Homo sapiens
  CDR3 for beta chain variable domain of TCR clone 161443 (TRBV12-4, TRBJ2-3)
CASSFPSNTNTDTQCF

SEQ ID NO: 322887 - protein, 17 aa, Homo sapiens
  CDR3 for alpha chain variable domain of TCR clone 161444 (TRAV26-1, TRAJ58)
CIVRVGAEETSGSRLTF

SEQ ID NO: 322888 - protein, 15 aa, Homo sapiens
  CDR3 for beta chain variable domain of TCR clone 161444 (TRBV24-1, TRBJ2-5)
CATSETTGAVGAQYF

SEQ ID NO: 322889 - protein, 13 aa, Homo sapiens
  CDR3 for alpha chain variable domain of TCR clone 161445 (TRAV13-1, TRAJ20)
CAARVSNDYKLSF

SEQ ID NO: 322890 - protein, 14 aa, Homo sapiens
  CDR3 for beta chain variable domain of TCR clone 161445 (TRBV20-1, TRBJ1-1)
CSAQTRIEGTEAFF

SEQ ID NO: 322891 - protein, 16 aa, Homo sapiens
  CDR3 for alpha chain variable domain of TCR clone 161446 (TRAV26-2, TRAJ57)
CILRDVGAGGFEKLVF

SEQ ID NO: 322892 - protein, 13 aa, Homo sapiens
  CDR3 for beta chain variable domain of TCR clone 161446 (TRBV18, TRBJ2-3)
CASSPGVTDTQYF

SEQ ID NO: 322893 - protein, 14 aa, Homo sapiens
  CDR3 for alpha chain variable domain of TCR clone 161447 (TRAV17, TRAJ31)
CATVLRNNNARLMS

SEQ ID NO: 322894 - protein, 14 aa, Homo sapiens
  CDR3 for beta chain variable domain of TCR clone 161447 (TRBV12-4, TRBJ2-5)
CASSLWQKQETQYF

SEQ ID NO: 322895 - protein, 17 aa, Homo sapiens
  CDR3 for alpha chain variable domain of TCR clone 161448 (TRAV35, TRAJ38)
CAGQLQRNAGNNRKLIW

SEQ ID NO: 322896 - protein, 15 aa, Homo sapiens
  CDR3 for beta chain variable domain of TCR clone 161448 (TRBV4-1, TRBJ2-1)
CASSQDPGNYNEQFF

SEQ ID NO: 322897 - protein, 12 aa, Homo sapiens
  CDR3 for alpha chain variable domain of TCR clone 161449 (TRAV4, TRAJ26)
CLVGDYGQNFVF

SEQ ID NO: 322898 - protein, 18 aa, Homo sapiens
  CDR3 for beta chain variable domain of TCR clone 161449 (TRBV3-1, TRBJ2-1)
CASSFGTSGRAVDNEQFF

SEQ ID NO: 322899 - protein, 13 aa, Homo sapiens
  CDR3 for alpha chain variable domain of TCR clone 161450 (TRAV3, TRAJ27)
CAVRPLGAGKSTL

SEQ ID NO: 322900 - protein, 14 aa, Homo sapiens
  CDR3 for beta chain variable domain of TCR clone 161450 (TRBV7-2, TRBJ2-7)
CASSPKTSFYEQYF

SEQ ID NO: 322901 - protein, 12 aa, Homo sapiens
  CDR3 for alpha chain variable domain of TCR clone 161451 (TRAV3, TRAJ27)
CAVRDGAGKSTF

SEQ ID NO: 322902 - protein, 15 aa, Homo sapiens
  CDR3 for beta chain variable domain of TCR clone 161451 (TRBV13, TRBJ2-2)
CASGYRGRRTWELFF

SEQ ID NO: 322903 - protein, 12 aa, Homo sapiens
  CDR3 for alpha chain variable domain of TCR clone 161452 (TRAV4, TRAJ26)
CLVGDYGQNFVF

SEQ ID NO: 322904 - protein, 19 aa, Homo sapiens
  CDR3 for beta chain variable domain of TCR clone 161452 (TRBV7-2, TRBJ2-3)
CASSVLSRNWGGGTDTQYF

SEQ ID NO: 322905 - protein, 14 aa, Homo sapiens
  CDR3 for alpha chain variable domain of TCR clone 161453 (TRAV12-2, TRAJ13)
CAVKKTGGHQKVTF

SEQ ID NO: 322906 - protein, 15 aa, Homo sapiens
  CDR3 for beta chain variable domain of TCR clone 161453 (TRBV20-1, TRBJ2-7)
CSARDRVSGMDEQYF

SEQ ID NO: 322907 - protein, 14 aa, Homo sapiens
  CDR3 for alpha chain variable domain of TCR clone 161454 (TRAV1-2, TRAJ8)
CAVGEDTGFQKLVF

SEQ ID NO: 322908 - protein, 13 aa, Homo sapiens
  CDR3 for beta chain variable domain of TCR clone 161454 (TRBV4-2, TRBJ1-1)
CASSQAGNTEAFF

SEQ ID NO: 322909 - protein, 12 aa, Homo sapiens
  CDR3 for alpha chain variable domain of TCR clone 161455 (TRAV12-2, TRAJ45)
CASGGGADGLTF

SEQ ID NO: 322910 - protein, 16 aa, Homo sapiens
  CDR3 for beta chain variable domain of TCR clone 161455 (TRBV19, TRBJ2-3)
CASSPGLLASTDTQYL

SEQ ID NO: 322911 - protein, 16 aa, Homo sapiens
  CDR3 for alpha chain variable domain of TCR clone 161456 (TRAV3, TRAJ4)
CAVRPSPSGGYNTLIF

SEQ ID NO: 322912 - protein, 12 aa, Homo sapiens
  CDR3 for beta chain variable domain of TCR clone 161456 (TRBV7-9, TRBJ2-7)
CASSHGVYEQYF

SEQ ID NO: 322913 - protein, 10 aa, Homo sapiens
  CDR3 for alpha chain variable domain of TCR clone 161457 (TRAV1-2, TRAJ18)
CAVRGEAKPW

SEQ ID NO: 322914 - protein, 14 aa, Homo sapiens
  CDR3 for beta chain variable domain of TCR clone 161457 (TRBV7-2, TRBJ2-7)
CASSFKGQDHEQYF

SEQ ID NO: 322915 - protein, 14 aa, Homo sapiens
  CDR3 for alpha chain variable domain of TCR clone 161458 (TRAV13-1, TRAJ44)
CAAKATGTASKLTF

SEQ ID NO: 322916 - protein, 15 aa, Homo sapiens
  CDR3 for beta chain variable domain of TCR clone 161458 (TRBV7-2, TRBJ2-7)
CASSLKGALTYEQYF

SEQ ID NO: 322917 - protein, 10 aa, Homo sapiens
  CDR3 for alpha chain variable domain of TCR clone 161459 (TRAV12-3, TRAJ49)
CAMNDDQFYF

SEQ ID NO: 322918 - protein, 14 aa, Homo sapiens
  CDR3 for beta chain variable domain of TCR clone 161459 (TRBV7-3, TRBJ1-1)
CASSLGTGYTEAFF

SEQ ID NO: 322919 - protein, 12 aa, Homo sapiens
  CDR3 for alpha chain variable domain of TCR clone 161460 (TRAV20, TRAJ39)
CAVGNAGNMLTF

SEQ ID NO: 322920 - protein, 16 aa, Homo sapiens
  CDR3 for beta chain variable domain of TCR clone 161460 (TRBV15, TRBJ1-2)
CATSRGPRTGGDGYTF

SEQ ID NO: 322921 - protein, 18 aa, Homo sapiens
  CDR3 for alpha chain variable domain of TCR clone 161461 (TRAV21, TRAJ52)
CAMRPSPAGGTSYGKLTF

SEQ ID NO: 322922 - protein, 18 aa, Homo sapiens
  CDR3 for beta chain variable domain of TCR clone 161461 (TRBV27, TRBJ2-3)
CASSLSGTSGRGTDTQYF

SEQ ID NO: 322923 - protein, 14 aa, Homo sapiens
  CDR3 for alpha chain variable domain of TCR clone 161462 (TRAV1-2, TRAJ8)
CAVREDTGFQKLVF

SEQ ID NO: 322924 - protein, 17 aa, Homo sapiens
  CDR3 for beta chain variable domain of TCR clone 161462 (TRBV28, TRBJ2-1)
CASSSARQALTYNEQFV

SEQ ID NO: 322925 - protein, 17 aa, Homo sapiens
  CDR3 for alpha chain variable domain of TCR clone 161463 (TRAV17, TRAJ28)
CATDPRRGGAGSYQLSF

SEQ ID NO: 322926 - protein, 16 aa, Homo sapiens
  CDR3 for beta chain variable domain of TCR clone 161463 (TRBV25-1, TRBJ1-1)
CASSGDRDRGRIEAFF

SEQ ID NO: 322927 - protein, 16 aa, Homo sapiens
  CDR3 for alpha chain variable domain of TCR clone 161464 (TRAV14/DV4, TRAJ53)
CAMREGGGGSNYKLTF

SEQ ID NO: 322928 - protein, 18 aa, Homo sapiens
  CDR3 for beta chain variable domain of TCR clone 161464 (TRBV18, TRBJ1-3)
CASSPRGGAGPSGNTIYL

SEQ ID NO: 322929 - protein, 13 aa, Homo sapiens
  CDR3 for alpha chain variable domain of TCR clone 161465 (TRAV21, TRAJ27)
CTALNTNAGKSTF

SEQ ID NO: 322930 - protein, 14 aa, Homo sapiens
  CDR3 for beta chain variable domain of TCR clone 161465 (TRBV27, TRBJ1-1)
CASSLLSGLSEAFF

SEQ ID NO: 322931 - protein, 15 aa, Homo sapiens
  CDR3 for alpha chain variable domain of TCR clone 161466 (TRAV2, TRAJ9)
CAVAALNTGGFKTIF

SEQ ID NO: 322932 - protein, 14 aa, Homo sapiens
  CDR3 for beta chain variable domain of TCR clone 161466 (TRBV7-8, TRBJ2-5)
CASSATGGQETQYC

SEQ ID NO: 322933 - protein, 13 aa, Homo sapiens
  CDR3 for alpha chain variable domain of TCR clone 161467 (TRAV36/DV7, TRAJ37)
CAVFSSDTGKLIF

SEQ ID NO: 322934 - protein, 15 aa, Homo sapiens
  CDR3 for beta chain variable domain of TCR clone 161467 (TRBV6-1, TRBJ2-3)
CASSERGGITDTQYF

SEQ ID NO: 322935 - protein, 14 aa, Homo sapiens
  CDR3 for alpha chain variable domain of TCR clone 161468 (TRAV1-2, TRAJ16)
CAVNRFSDGQKQLF

SEQ ID NO: 322936 - protein, 15 aa, Homo sapiens
  CDR3 for beta chain variable domain of TCR clone 161468 (TRBV7-2, TRBJ2-7)
CASSLKGALTYEQYF

SEQ ID NO: 322937 - protein, 17 aa, Homo sapiens
  CDR3 for alpha chain variable domain of TCR clone 161469 (TRAV36/DV7, TRAJ52)
CAVAQRAGGTSYGKLTF

SEQ ID NO: 322938 - protein, 11 aa, Homo sapiens
  CDR3 for beta chain variable domain of TCR clone 161469 (TRBV24-1, TRBJ2-3)
CATASTDTQYF

SEQ ID NO: 322939 - protein, 13 aa, Homo sapiens
  CDR3 for alpha chain variable domain of TCR clone 161470 (TRAV36/DV7, TRAJ34)
CAVGEVNTDKLIF

SEQ ID NO: 322940 - protein, 12 aa, Homo sapiens
  CDR3 for beta chain variable domain of TCR clone 161470 (TRBV7-9, TRBJ2-7)
CASSFGSYEQYF

SEQ ID NO: 322941 - protein, 12 aa, Homo sapiens
  CDR3 for alpha chain variable domain of TCR clone 161471 (TRAV29/DV5, TRAJ49)
CAATDTGNQFHF

SEQ ID NO: 322942 - protein, 12 aa, Homo sapiens
  CDR3 for beta chain variable domain of TCR clone 161471 (TRBV12-4, TRBJ2-7)
CASSLGGYEQYF

SEQ ID NO: 322943 - protein, 12 aa, Homo sapiens
  CDR3 for alpha chain variable domain of TCR clone 161472 (TRAV27, TRAJ58)
CAGARDTSRLTF

SEQ ID NO: 322944 - protein, 14 aa, Homo sapiens
  CDR3 for beta chain variable domain of TCR clone 161472 (TRBV7-3, TRBJ2-1)
CAGSLGTSANEQFF

SEQ ID NO: 322945 - protein, 11 aa, Homo sapiens
  CDR3 for alpha chain variable domain of TCR clone 161473 (TRAV2, TRAJ21)
CAVFNFNKFYF

SEQ ID NO: 322946 - protein, 14 aa, Homo sapiens
  CDR3 for beta chain variable domain of TCR clone 161473 (TRBV15, TRBJ2-3)
CATKSGTSTDTQYF

SEQ ID NO: 322947 - protein, 18 aa, Homo sapiens
  CDR3 for alpha chain variable domain of TCR clone 161474 (TRAV4, TRAJ9)
CCVLLPRGLWTGGFKTIF

SEQ ID NO: 322948 - protein, 13 aa, Homo sapiens
  CDR3 for beta chain variable domain of TCR clone 161474 (TRBV29-1, TRBJ2-2)
CSTTGVNTGELFF

SEQ ID NO: 322949 - protein, 14 aa, Homo sapiens
  CDR3 for alpha chain variable domain of TCR clone 161475 (TRAV17, TRAJ31)
CATDAEDNNARLMF

SEQ ID NO: 322950 - protein, 16 aa, Homo sapiens
  CDR3 for beta chain variable domain of TCR clone 161475 (TRBV15, TRBJ2-2)
CATSRELAVRTGELFF

SEQ ID NO: 322951 - protein, 15 aa, Homo sapiens
  CDR3 for alpha chain variable domain of TCR clone 161476 (TRAV20, TRAJ32)
CAVQAKRGATNKLIF

SEQ ID NO: 322952 - protein, 13 aa, Homo sapiens
  CDR3 for beta chain variable domain of TCR clone 161476 (TRBV19, TRBJ2-5)
CASSIHSQETQYF

SEQ ID NO: 322953 - protein, 17 aa, Homo sapiens
  CDR3 for alpha chain variable domain of TCR clone 161477 (TRAV23/DV6, TRAJ57)
GAASSTLSPGGSEKLVF

SEQ ID NO: 322954 - protein, 14 aa, Homo sapiens
  CDR3 for beta chain variable domain of TCR clone 161477 (TRBV25-1, TRBJ1-1)
CASTHLGGNTEAFF

SEQ ID NO: 322955 - protein, 12 aa, Homo sapiens
  CDR3 for alpha chain variable domain of TCR clone 161478 (TRAV23/DV6, TRAJ17)
CAAKAAGNKLTF

SEQ ID NO: 322956 - protein, 13 aa, Homo sapiens
  CDR3 for beta chain variable domain of TCR clone 161478 (TRBV9, TRBJ2-1)
CASSPSGGNEQFF

SEQ ID NO: 322957 - protein, 14 aa, Homo sapiens
  CDR3 for alpha chain variable domain of TCR clone 161479 (TRAV12-1, TRAJ24)
CVVIPTDSWGKLQF

SEQ ID NO: 322958 - protein, 14 aa, Homo sapiens
  CDR3 for beta chain variable domain of TCR clone 161479 (TRBV19, TRBJ2-1)
CASPTFVLSGEQFF

SEQ ID NO: 322959 - protein, 14 aa, Homo sapiens
  CDR3 for alpha chain variable domain of TCR clone 161480 (TRAV13-1, TRAJ48)
CAASTDFGNEKLTF

SEQ ID NO: 322960 - protein, 15 aa, Homo sapiens
  CDR3 for beta chain variable domain of TCR clone 161480 (TRBV10-2, TRBJ2-5)
CASKPEDRRQETQYL

SEQ ID NO: 322961 - protein, 15 aa, Homo sapiens
  CDR3 for alpha chain variable domain of TCR clone 161481 (TRAV21, TRAJ53)
CAVRQRGGSNYKLTF

SEQ ID NO: 322962 - protein, 16 aa, Homo sapiens
  CDR3 for beta chain variable domain of TCR clone 161481 (TRBV7-9, TRBJ2-5)
CASSPSGQGVKGTQYF

SEQ ID NO: 322963 - protein, 13 aa, Homo sapiens
  CDR3 for alpha chain variable domain of TCR clone 161482 (TRAV13-1, TRAJ20)
CAARVSNDYKLSF

SEQ ID NO: 322964 - protein, 16 aa, Homo sapiens
  CDR3 for beta chain variable domain of TCR clone 161482 (TRBV11-2, TRBJ2-7)
CASSPTTGGVSYEQYF

SEQ ID NO: 322965 - protein, 14 aa, Homo sapiens
  CDR3 for alpha chain variable domain of TCR clone 161483 (TRAV1-2, TRAJ8)
CAVREDTVFQKLVF

SEQ ID NO: 322966 - protein, 13 aa, Homo sapiens
  CDR3 for beta chain variable domain of TCR clone 161483 (TRBV12-4, TRBJ1-2)
CASSLRQGKGYTF

SEQ ID NO: 322967 - protein, 14 aa, Homo sapiens
  CDR3 for alpha chain variable domain of TCR clone 161484 (TRAV16, TRAJ33)
CALSAMDSNYQLIW

SEQ ID NO: 322968 - protein, 15 aa, Homo sapiens
  CDR3 for beta chain variable domain of TCR clone 161484 (TRBV28, TRBJ2-5)
CASSAPRQVQETQYF

SEQ ID NO: 322969 - protein, 10 aa, Homo sapiens
  CDR3 for alpha chain variable domain of TCR clone 161485 (TRAV1-2, TRAJ23)
CAGQGGKLIF

SEQ ID NO: 322970 - protein, 11 aa, Homo sapiens
  CDR3 for beta chain variable domain of TCR clone 161485 (TRBV20-1, TRBJ2-7)
CSARLSYEQYF

SEQ ID NO: 322971 - protein, 11 aa, Homo sapiens
  CDR3 for alpha chain variable domain of TCR clone 161486 (TRAV12-2, TRAJ3)
CAVNRASKIIF

SEQ ID NO: 322972 - protein, 14 aa, Homo sapiens
  CDR3 for beta chain variable domain of TCR clone 161486 (TRBV6-5, TRBJ1-1)
CASNRQRSDTEAFF

SEQ ID NO: 322973 - protein, 12 aa, Homo sapiens
  CDR3 for alpha chain variable domain of TCR clone 161487 (TRAV8-2, TRAJ45)
CVQGGGADGLTF

SEQ ID NO: 322974 - protein, 16 aa, Homo sapiens
  CDR3 for beta chain variable domain of TCR clone 161487 (TRBV19, TRBJ2-1)
CASSKAGPSSYNEQFF

SEQ ID NO: 322975 - protein, 15 aa, Homo sapiens
  CDR3 for alpha chain variable domain of TCR clone 161488 (TRAV26-1, TRAJ48)
CIVRVGDFGNEKLTF

SEQ ID NO: 322976 - protein, 16 aa, Homo sapiens
  CDR3 for beta chain variable domain of TCR clone 161488 (TRBV4-1, TRBJ2-3)
CASSQSAGGLTDTQYF

SEQ ID NO: 322977 - protein, 10 aa, Homo sapiens
  CDR3 for alpha chain variable domain of TCR clone 161489 (TRAV12-1, TRAJ20)
CAIYFQRLQA

SEQ ID NO: 322978 - protein, 12 aa, Homo sapiens
  CDR3 for beta chain variable domain of TCR clone 161489 (TRBV7-3, TRBJ2-1)
CASSFINNEQFF

SEQ ID NO: 322979 - protein, 14 aa, Homo sapiens
  CDR3 for alpha chain variable domain of TCR clone 161490 (TRAV12-3, TRAJ10)
SHLPLTGGGNKLSF

SEQ ID NO: 322980 - protein, 13 aa, Homo sapiens
  CDR3 for beta chain variable domain of TCR clone 161490 (TRBV4-1, TRBJ2-2)
CASSQENTGELFF

SEQ ID NO: 322981 - protein, 16 aa, Homo sapiens
  CDR3 for alpha chain variable domain of TCR clone 161491 (TRAV8-3, TRAJ52)
CAVQPAVGTSYGKLTF

SEQ ID NO: 322982 - protein, 15 aa, Homo sapiens
  CDR3 for beta chain variable domain of TCR clone 161491 (TRBV11-2, TRBJ2-7)
CASSLAGGVATEQYF

SEQ ID NO: 322983 - protein, 12 aa, Homo sapiens
  CDR3 for alpha chain variable domain of TCR clone 161492 (TRAV12-1, TRAJ16)
CVVFRDGQKLLF

SEQ ID NO: 322984 - protein, 19 aa, Homo sapiens
  CDR3 for beta chain variable domain of TCR clone 161492 (TRBV25-1, TRBJ2-2)
CAILVYRVDRGRKTGELFF

SEQ ID NO: 322985 - protein, 14 aa, Homo sapiens
  CDR3 for alpha chain variable domain of TCR clone 161493 (TRAV23/DV6, TRAJ22)
CADISSGSASQLTF

SEQ ID NO: 322986 - protein, 16 aa, Homo sapiens
  CDR3 for beta chain variable domain of TCR clone 161493 (TRBV5-7, TRBJ2-5)
CASIRGQTGYQETQYF

SEQ ID NO: 322987 - protein, 15 aa, Homo sapiens
  CDR3 for alpha chain variable domain of TCR clone 161494 (TRAV3, TRAJ22)
CAGRDRGGSARQLTF

SEQ ID NO: 322988 - protein, 15 aa, Homo sapiens
  CDR3 for beta chain variable domain of TCR clone 161494 (TRBV7-3, TRBJ2-2)
CASSETGQGTGELFF

SEQ ID NO: 322989 - protein, 14 aa, Homo sapiens
  CDR3 for alpha chain variable domain of TCR clone 161495 (TRAV1-1, TRAJ27)
CAVINNTNAGKSTF

SEQ ID NO: 322990 - protein, 15 aa, Homo sapiens
  CDR3 for beta chain variable domain of TCR clone 161495 (TRBV7-2, TRBJ2-1)
CASSSGLAGGNEQFF

SEQ ID NO: 322991 - protein, 15 aa, Homo sapiens
  CDR3 for alpha chain variable domain of TCR clone 161496 (TRAV39, TRAJ32)
CAVDMEGGATNKLIF

SEQ ID NO: 322992 - protein, 16 aa, Homo sapiens
  CDR3 for beta chain variable domain of TCR clone 161496 (TRBV28, TRBJ2-1)
CASSSSYSGSLNEQFF

SEQ ID NO: 322993 - protein, 14 aa, Homo sapiens
  CDR3 for alpha chain variable domain of TCR clone 161497 (TRAV8-4, TRAJ9)
CAVRINTGGFKTIF

SEQ ID NO: 322994 - protein, 14 aa, Homo sapiens
  CDR3 for beta chain variable domain of TCR clone 161497 (TRBV28, TRBJ1-5)
CASIPYGLEQPQHF

SEQ ID NO: 322995 - protein, 16 aa, Homo sapiens
  CDR3 for alpha chain variable domain of TCR clone 161498 (TRAV3, TRAJ13)
CAVRDFESGGYQKVTF

SEQ ID NO: 322996 - protein, 16 aa, Homo sapiens
  CDR3 for beta chain variable domain of TCR clone 161498 (TRBV27, TRBJ2-5)
CASTYGPGGQKETQYF

SEQ ID NO: 322997 - protein, 15 aa, Homo sapiens
  CDR3 for alpha chain variable domain of TCR clone 161499 (TRAV26-1, TRAJ3)
RIVRSGYSSASKIIF

SEQ ID NO: 322998 - protein, 14 aa, Homo sapiens
  CDR3 for beta chain variable domain of TCR clone 161499 (TRBV13, TRBJ2-5)
CASYRRLAEETQYF

SEQ ID NO: 322999 - protein, 14 aa, Homo sapiens
  CDR3 for alpha chain variable domain of TCR clone 161500 (TRAV12-2, TRAJ40)
HAVNIPSGTYKYIF

SEQ ID NO: 323000 - protein, 13 aa, Homo sapiens
  CDR3 for beta chain variable domain of TCR clone 161500 (TRBV7-9, TRBJ1-2)
CASSLKQNYGYTF

SEQ ID NO: 323001 - protein, 12 aa, Homo sapiens
  CDR3 for alpha chain variable domain of TCR clone 161501 (TRAV23/DV6, TRAJ43)
CHLLLCSRRCSF

SEQ ID NO: 323002 - protein, 13 aa, Homo sapiens
  CDR3 for beta chain variable domain of TCR clone 161501 (TRBV12-4, TRBJ1-2)
CASSLRQGKGYTF

SEQ ID NO: 323003 - protein, 12 aa, Homo sapiens
  CDR3 for alpha chain variable domain of TCR clone 161502 (TRAV29/DV5, TRAJ34)
CAASGNTDKLIF

SEQ ID NO: 323004 - protein, 20 aa, Homo sapiens
  CDR3 for beta chain variable domain of TCR clone 161502 (TRBV19, TRBJ2-7)
CASTRVAPESLRAVLRAGHQ

SEQ ID NO: 323005 - protein, 12 aa, Homo sapiens
  CDR3 for alpha chain variable domain of TCR clone 161503 (TRAV17, TRAJ39)
CATGAAGNMLTF

SEQ ID NO: 323006 - protein, 14 aa, Homo sapiens
  CDR3 for beta chain variable domain of TCR clone 161503 (TRBV7-9, TRBJ1-2)
CASSRQGANYGFTF

SEQ ID NO: 323007 - protein, 12 aa, Homo sapiens
  CDR3 for alpha chain variable domain of TCR clone 161504 (TRAV12-3, TRAJ17)
CAMTLTGNKLTF

SEQ ID NO: 323008 - protein, 18 aa, Homo sapiens
  CDR3 for beta chain variable domain of TCR clone 161504 (TRBV5-1, TRBJ2-7)
CASSSTGGASGYSYEQYF

SEQ ID NO: 323009 - protein, 22 aa, Homo sapiens
  CDR3 for alpha chain variable domain of TCR clone 161505 (TRAV12-3, TRAJ9)
SPVIQPPTSAMSPNTGGFKTIF

SEQ ID NO: 323010 - protein, 12 aa, Homo sapiens
  CDR3 for beta chain variable domain of TCR clone 161505 (TRBV19, TRBJ1-5)
CASSIAQQPQHF

SEQ ID NO: 323011 - protein, 14 aa, Homo sapiens
  CDR3 for alpha chain variable domain of TCR clone 161506 (TRAV23/DV6, TRAJ40)
CAASLTSGTYKSIF

SEQ ID NO: 323012 - protein, 15 aa, Homo sapiens
  CDR3 for beta chain variable domain of TCR clone 161506 (TRBV7-8, TRBJ2-1)
CASSLADSLYNEQFF

SEQ ID NO: 323013 - protein, 14 aa, Homo sapiens
  CDR3 for alpha chain variable domain of TCR clone 161507 (TRAV4, TRAJ32)
CLVNYGGATNKLIS

SEQ ID NO: 323014 - protein, 14 aa, Homo sapiens
  CDR3 for beta chain variable domain of TCR clone 161507 (TRBV15, TRBJ2-5)
CATSGGTRTETQYF

SEQ ID NO: 323015 - protein, 14 aa, Homo sapiens
  CDR3 for alpha chain variable domain of TCR clone 161508 (TRAV35, TRAJ33)
CAGSSQDSNYQLIW

SEQ ID NO: 323016 - protein, 15 aa, Homo sapiens
  CDR3 for beta chain variable domain of TCR clone 161508 (TRBV6-5, TRBJ2-1)
CASSYDAGAGNEQFF

SEQ ID NO: 323017 - protein, 15 aa, Homo sapiens
  CDR3 for alpha chain variable domain of TCR clone 161509 (TRAV8-3, TRAJ45)
CASSYSGGGADGRTF

SEQ ID NO: 323018 - protein, 13 aa, Homo sapiens
  CDR3 for beta chain variable domain of TCR clone 161509 (TRBV7-9, TRBJ2-7)
CASSFAGAYEQYF

SEQ ID NO: 323019 - protein, 14 aa, Homo sapiens
  CDR3 for alpha chain variable domain of TCR clone 161510 (TRAV1-2, TRAJ8)
CAVREDTGLQKLVF

SEQ ID NO: 323020 - protein, 14 aa, Homo sapiens
  CDR3 for beta chain variable domain of TCR clone 161510 (TRBV4-1, TRBJ2-7)
CASSPVAGGDEQYF

SEQ ID NO: 323021 - protein, 14 aa, Homo sapiens
  CDR3 for alpha chain variable domain of TCR clone 161511 (TRAV16, TRAJ33)
CALSAMDSNYKLIW

SEQ ID NO: 323022 - protein, 16 aa, Homo sapiens
  CDR3 for beta chain variable domain of TCR clone 161511 (TRBV25-1, TRBJ2-7)
CASSELTGGGIYEQYF

SEQ ID NO: 323023 - protein, 11 aa, Homo sapiens
  CDR3 for alpha chain variable domain of TCR clone 161512 (TRAV21, TRAJ48)
CAVDGNEKLTF

SEQ ID NO: 323024 - protein, 16 aa, Homo sapiens
  CDR3 for beta chain variable domain of TCR clone 161512 (TRBV12-4, TRBJ1-5)
CASSSRPRGSNQPQHF

SEQ ID NO: 323025 - protein, 16 aa, Homo sapiens
  CDR3 for alpha chain variable domain of TCR clone 161513 (TRAV26-1, TRAJ28)
YIVRGYSGAGSYQLTF

SEQ ID NO: 323026 - protein, 12 aa, Homo sapiens
  CDR3 for beta chain variable domain of TCR clone 161513 (TRBV19, TRBJ1-2)
CASTRAEYGYTF

SEQ ID NO: 323027 - protein, 13 aa, Homo sapiens
  CDR3 for alpha chain variable domain of TCR clone 161514 (TRAV21, TRAJ57)
CAVTQGGSEKLVF

SEQ ID NO: 323028 - protein, 15 aa, Homo sapiens
  CDR3 for beta chain variable domain of TCR clone 161514 (TRBV5-1, TRBJ2-1)
CASSPPRAPYNEQFF

SEQ ID NO: 323029 - protein, 14 aa, Homo sapiens
  CDR3 for alpha chain variable domain of TCR clone 161515 (TRAV12-2, TRAJ13)
CAVKKTGGYQKVTF

SEQ ID NO: 323030 - protein, 17 aa, Homo sapiens
  CDR3 for beta chain variable domain of TCR clone 161515 (TRBV11-2, TRBJ2-1)
CASSLYPPGVEYNEQFC

SEQ ID NO: 323031 - protein, 11 aa, Homo sapiens
  CDR3 for alpha chain variable domain of TCR clone 161516 (TRAV21, TRAJ39)
PLVNAGNRLTF

SEQ ID NO: 323032 - protein, 15 aa, Homo sapiens
  CDR3 for beta chain variable domain of TCR clone 161516 (TRBV29-1, TRBJ2-1)
CSGRDRKSSYNEQFF

SEQ ID NO: 323033 - protein, 13 aa, Homo sapiens
  CDR3 for alpha chain variable domain of TCR clone 161517 (TRAV12-1, TRAJ6)
CVVFPGGSYVPTF

SEQ ID NO: 323034 - protein, 13 aa, Homo sapiens
  CDR3 for beta chain variable domain of TCR clone 161517 (TRBV7-9, TRBJ1-2)
CASSLKQNYGYTF

SEQ ID NO: 323035 - protein, 15 aa, Homo sapiens
  CDR3 for alpha chain variable domain of TCR clone 161518 (TRAV38-1, TRAJ37)
CACIHGSGNTGKLIF

SEQ ID NO: 323036 - protein, 12 aa, Homo sapiens
  CDR3 for beta chain variable domain of TCR clone 161518 (TRBV7-9, TRBJ2-7)
CASSFGSYEQYF

SEQ ID NO: 323037 - protein, 14 aa, Homo sapiens
  CDR3 for alpha chain variable domain of TCR clone 161519 (TRAV12-2, TRAJ44)
CALNPAGTASKLTF

SEQ ID NO: 323038 - protein, 13 aa, Homo sapiens
  CDR3 for beta chain variable domain of TCR clone 161519 (TRBV20-1, TRBJ1-6)
CSAPLGVGSTLHF

SEQ ID NO: 323039 - protein, 13 aa, Homo sapiens
  CDR3 for alpha chain variable domain of TCR clone 161520 (TRAV23/DV6, TRAJ24)
CAASTDSWGKFQF

SEQ ID NO: 323040 - protein, 16 aa, Homo sapiens
  CDR3 for beta chain variable domain of TCR clone 161520 (TRBV2, TRBJ2-1)
CASSVGGSLSYNEQFF

SEQ ID NO: 323041 - protein, 13 aa, Homo sapiens
  CDR3 for alpha chain variable domain of TCR clone 161521 (TRAV35, TRAJ43)
CAEYPYNNNDMRF

SEQ ID NO: 323042 - protein, 15 aa, Homo sapiens
  CDR3 for beta chain variable domain of TCR clone 161521 (TRBV25-1, TRBJ1-4)
CASSKRIAANEKLFF

SEQ ID NO: 323043 - protein, 16 aa, Homo sapiens
  CDR3 for alpha chain variable domain of TCR clone 161522 (TRAV12-2, TRAJ50)
CAVGTATKTSYDKAIF

SEQ ID NO: 323044 - protein, 12 aa, Homo sapiens
  CDR3 for beta chain variable domain of TCR clone 161522 (TRBV12-4, TRBJ1-5)
CASSLGRQPQHF

SEQ ID NO: 323045 - protein, 12 aa, Homo sapiens
  CDR3 for alpha chain variable domain of TCR clone 161523 (TRAV12-2, TRAJ9)
CAVYNGGFKTIF

SEQ ID NO: 323046 - protein, 16 aa, Homo sapiens
  CDR3 for beta chain variable domain of TCR clone 161523 (TRBV13, TRBJ2-2)
CASSPRTGEHTGELFF

SEQ ID NO: 323047 - protein, 12 aa, Homo sapiens
  CDR3 for alpha chain variable domain of TCR clone 161524 (TRAV27, TRAJ41)
CAGRSSGYALNF

SEQ ID NO: 323048 - protein, 15 aa, Homo sapiens
  CDR3 for beta chain variable domain of TCR clone 161524 (TRBV6-3, TRBJ2-7)
CASSCPGTVFYEQYF

SEQ ID NO: 323049 - protein, 15 aa, Homo sapiens
  CDR3 for alpha chain variable domain of TCR clone 161525 (TRAV12-3, TRAJ17)
RAMSPSLAAGNKLTF

SEQ ID NO: 323050 - protein, 15 aa, Homo sapiens
  CDR3 for beta chain variable domain of TCR clone 161525 (TRBV29-1, TRBJ2-7)
CSVEFFDRGSYEQYF

SEQ ID NO: 323051 - protein, 14 aa, Homo sapiens
  CDR3 for alpha chain variable domain of TCR clone 161526 (TRAV1-2, TRAJ16)
CAVNRFSDGQKLLF

SEQ ID NO: 323052 - protein, 14 aa, Homo sapiens
  CDR3 for beta chain variable domain of TCR clone 161526 (TRBV19, TRBJ2-7)
CASSVDSESYERYF

SEQ ID NO: 323053 - protein, 11 aa, Homo sapiens
  CDR3 for alpha chain variable domain of TCR clone 161527 (TRAV3, TRAJ21)
CAVGNLNKFYF

SEQ ID NO: 323054 - protein, 16 aa, Homo sapiens
  CDR3 for beta chain variable domain of TCR clone 161527 (TRBV19, TRBJ2-1)
CASGKAGPSSYNEQFF

SEQ ID NO: 323055 - protein, 14 aa, Homo sapiens
  CDR3 for alpha chain variable domain of TCR clone 161528 (TRAV23/DV6, TRAJ4)
CAVNLSGGYNKLIF

SEQ ID NO: 323056 - protein, 17 aa, Homo sapiens
  CDR3 for beta chain variable domain of TCR clone 161528 (TRBV4-1, TRBJ1-3)
CASSPQRGIRFGNTIYF

SEQ ID NO: 323057 - protein, 13 aa, Homo sapiens
  CDR3 for alpha chain variable domain of TCR clone 161529 (TRAV13-2, TRAJ49)
CAENTNTGNQFYF

SEQ ID NO: 323058 - protein, 17 aa, Homo sapiens
  CDR3 for beta chain variable domain of TCR clone 161529 (TRBV11-2, TRBJ2-1)
CASSLYPPGVEYNEQFF

SEQ ID NO: 323059 - protein, 12 aa, Homo sapiens
  CDR3 for alpha chain variable domain of TCR clone 161530 (TRAV16, TRAJ10)
CSRTGGGNKLTF

SEQ ID NO: 323060 - protein, 15 aa, Homo sapiens
  CDR3 for beta chain variable domain of TCR clone 161530 (TRBV4-1, TRBJ1-6)
CASSAGQGYNSPLHF

SEQ ID NO: 323061 - protein, 14 aa, Homo sapiens
  CDR3 for alpha chain variable domain of TCR clone 161531 (TRAV12-2, TRAJ13)
CAVKKTGGYQKVTF

SEQ ID NO: 323062 - protein, 10 aa, Homo sapiens
  CDR3 for beta chain variable domain of TCR clone 161531 (TRBV7-9, TRBJ1-1)
CASSFTEAFF

SEQ ID NO: 323063 - protein, 14 aa, Homo sapiens
  CDR3 for alpha chain variable domain of TCR clone 161532 (TRAV12-2, TRAJ40)
CAVKIPSGTYKYIF

SEQ ID NO: 323064 - protein, 15 aa, Homo sapiens
  CDR3 for beta chain variable domain of TCR clone 161532 (TRBV2, TRBJ2-7)
CASSEGLTRSYEQYF

SEQ ID NO: 323065 - protein, 15 aa, Homo sapiens
  CDR3 for alpha chain variable domain of TCR clone 161533 (TRAV27, TRAJ38)
CAARRNAGNNRKLIR

SEQ ID NO: 323066 - protein, 13 aa, Homo sapiens
  CDR3 for beta chain variable domain of TCR clone 161533 (TRBV28, TRBJ2-5)
CAGVSRGEETQYF

SEQ ID NO: 323067 - protein, 14 aa, Homo sapiens
  CDR3 for alpha chain variable domain of TCR clone 161534 (TRAV23/DV6, TRAJ11)
CAASLESGHSTLPF

SEQ ID NO: 323068 - protein, 13 aa, Homo sapiens
  CDR3 for beta chain variable domain of TCR clone 161534 (TRBV4-1, TRBJ2-5)
CASSLTRGETQYF

SEQ ID NO: 323069 - protein, 13 aa, Homo sapiens
  CDR3 for alpha chain variable domain of TCR clone 161535 (TRAV8-3, TRAJ36)
CAVGATGANNLFF

SEQ ID NO: 323070 - protein, 13 aa, Homo sapiens
  CDR3 for beta chain variable domain of TCR clone 161535 (TRBV29-1, TRBJ2-2)
CSTTGVNTGELFF

SEQ ID NO: 323071 - protein, 10 aa, Homo sapiens
  CDR3 for alpha chain variable domain of TCR clone 161536 (TRAV23/DV6, TRAJ57)
CAASSTLSQG

SEQ ID NO: 323072 - protein, 15 aa, Homo sapiens
  CDR3 for beta chain variable domain of TCR clone 161536 (TRBV18, TRBJ2-1)
CASSPPSASYNEQFF

SEQ ID NO: 323073 - protein, 12 aa, Homo sapiens
  CDR3 for alpha chain variable domain of TCR clone 161537 (TRAV3, TRAJ27)
CAVRDGAGKSAF

SEQ ID NO: 323074 - protein, 13 aa, Homo sapiens
  CDR3 for beta chain variable domain of TCR clone 161537 (TRBV10-3, TRBJ1-2)
CAINADLNYGYTF

SEQ ID NO: 323075 - protein, 15 aa, Homo sapiens
  CDR3 for alpha chain variable domain of TCR clone 161538 (TRAV3, TRAJ10)
CAVRDGTGGGNKLTF

SEQ ID NO: 323076 - protein, 15 aa, Homo sapiens
  CDR3 for beta chain variable domain of TCR clone 161538 (TRBV12-4, TRBJ2-5)
CASSPPTGLQETQYF

SEQ ID NO: 323077 - protein, 17 aa, Homo sapiens
  CDR3 for alpha chain variable domain of TCR clone 161539 (TRAV3, TRAJ6)
CAVRDGPRAGGSYIPTF

SEQ ID NO: 323078 - protein, 16 aa, Homo sapiens
  CDR3 for beta chain variable domain of TCR clone 161539 (TRBV5-1, TRBJ2-2)
CASSVPAGANTGELFF

SEQ ID NO: 323079 - protein, 13 aa, Homo sapiens
  CDR3 for alpha chain variable domain of TCR clone 161540 (TRAV1-1, TRAJ9)
CAAKNTGGFKTIF

SEQ ID NO: 323080 - protein, 13 aa, Homo sapiens
  CDR3 for beta chain variable domain of TCR clone 161540 (TRBV2, TRBJ1-4)
CASNRGTNEKLFF

SEQ ID NO: 323081 - protein, 20 aa, Homo sapiens
  CDR3 for alpha chain variable domain of TCR clone 161541 (TRAV25, TRAJ21)
KATQTTDVGTYPLSFNKFYF

SEQ ID NO: 323082 - protein, 14 aa, Homo sapiens
  CDR3 for beta chain variable domain of TCR clone 161541 (TRBV6-1, TRBJ2-1)
CASAKDGFYNEQFF

SEQ ID NO: 323083 - protein, 15 aa, Homo sapiens
  CDR3 for alpha chain variable domain of TCR clone 161542 (TRAV8-3, TRAJ27)
CAVGPSKTNAGKSTF

SEQ ID NO: 323084 - protein, 15 aa, Homo sapiens
  CDR3 for beta chain variable domain of TCR clone 161542 (TRBV10-3, TRBJ1-3)
CAISDSQGAGNTIYF

SEQ ID NO: 323085 - protein, 14 aa, Homo sapiens
  CDR3 for alpha chain variable domain of TCR clone 161543 (TRAV1-2, TRAJ16)
CAVNRFSDGQKLIF

SEQ ID NO: 323086 - protein, 14 aa, Homo sapiens
  CDR3 for beta chain variable domain of TCR clone 161543 (TRBV19, TRBJ2-7)
CASSVDSESYEQYF

SEQ ID NO: 323087 - protein, 10 aa, Homo sapiens
  CDR3 for alpha chain variable domain of TCR clone 161544 (TRAV2, TRAJ34)
CAVVNDKLIF

SEQ ID NO: 323088 - protein, 20 aa, Homo sapiens
  CDR3 for beta chain variable domain of TCR clone 161544 (TRBV19, TRBJ2-1)
CASSIPRTVTSTRLNNEQFF

SEQ ID NO: 323089 - protein, 12 aa, Homo sapiens
  CDR3 for alpha chain variable domain of TCR clone 161545 (TRAV12-3, TRAJ17)
SAMTLTGNKLTF

SEQ ID NO: 323090 - protein, 11 aa, Homo sapiens
  CDR3 for beta chain variable domain of TCR clone 161545 (TRBV11-2, TRBJ1-1)
CASSINTEAFF

SEQ ID NO: 323091 - protein, 11 aa, Homo sapiens
  CDR3 for alpha chain variable domain of TCR clone 161546 (TRAV21, TRAJ34)
CDVTNTDKLIF

SEQ ID NO: 323092 - protein, 17 aa, Homo sapiens
  CDR3 for beta chain variable domain of TCR clone 161546 (TRBV20-1, TRBJ2-1)
CSARSPSGGPPTMSSSS

SEQ ID NO: 323093 - protein, 12 aa, Homo sapiens
  CDR3 for alpha chain variable domain of TCR clone 161547 (TRAV8-3, TRAJ41)
CAVGALGYALTF

SEQ ID NO: 323094 - protein, 16 aa, Homo sapiens
  CDR3 for beta chain variable domain of TCR clone 161547 (TRBV7-6, TRBJ2-3)
CASSDSRGEGTDTQYF

SEQ ID NO: 323095 - protein, 16 aa, Homo sapiens
  CDR3 for alpha chain variable domain of TCR clone 161548 (TRAV30, TRAJ24)
CGTEIVDADSWGKFQF

SEQ ID NO: 323096 - protein, 16 aa, Homo sapiens
  CDR3 for beta chain variable domain of TCR clone 161548 (TRBV12-5, TRBJ2-5)
CASGPRTGGNQEAQYF

SEQ ID NO: 323097 - protein, 14 aa, Homo sapiens
  CDR3 for alpha chain variable domain of TCR clone 161549 (TRAV2, TRAJ9)
CAVGDRSGGFKTIF

SEQ ID NO: 323098 - protein, 13 aa, Homo sapiens
  CDR3 for beta chain variable domain of TCR clone 161549 (TRBV7-3, TRBJ1-1)
CASSQDWGAEAFF

SEQ ID NO: 323099 - protein, 23 aa, Homo sapiens
  CDR3 for alpha chain variable domain of TCR clone 161550 (TRAV8-6, TRAJ26)
PLEETLSPYKRHGLVLLSQNFVF

SEQ ID NO: 323100 - protein, 15 aa, Homo sapiens
  CDR3 for beta chain variable domain of TCR clone 161550 (TRBV20-1, TRBJ2-1)
CSARSPGGPGNEQFF

SEQ ID NO: 323101 - protein, 12 aa, Homo sapiens
  CDR3 for alpha chain variable domain of TCR clone 161551 (TRAV30, TRAJ39)
CGRGNVGNMLTF

SEQ ID NO: 323102 - protein, 15 aa, Homo sapiens
  CDR3 for beta chain variable domain of TCR clone 161551 (TRBV5-1, TRBJ1-1)
CASSWTGRGNTEAFF

SEQ ID NO: 323103 - protein, 12 aa, Homo sapiens
  CDR3 for alpha chain variable domain of TCR clone 161552 (TRAV2, TRAJ9)
CAVGAGGFKTIF

SEQ ID NO: 323104 - protein, 14 aa, Homo sapiens
  CDR3 for beta chain variable domain of TCR clone 161552 (TRBV7-9, TRBJ2-2)
CASSGLADTGELFF

SEQ ID NO: 323105 - protein, 11 aa, Homo sapiens
  CDR3 for alpha chain variable domain of TCR clone 161553 (TRAV13-2, TRAJ36)
CAETGANNLFF

SEQ ID NO: 323106 - protein, 19 aa, Homo sapiens
  CDR3 for beta chain variable domain of TCR clone 161553 (TRBV7-9, TRBJ2-4)
CATEGLAEHSVLRRRDPAL

SEQ ID NO: 323107 - protein, 14 aa, Homo sapiens
  CDR3 for alpha chain variable domain of TCR clone 161554 (TRAV12-2, TRAJ6)
CAVIASGGSYIPTF

SEQ ID NO: 323108 - protein, 12 aa, Homo sapiens
  CDR3 for beta chain variable domain of TCR clone 161554 (TRBV5-1, TRBJ1-2)
CASSQDTYGDTF

SEQ ID NO: 323109 - protein, 11 aa, Homo sapiens
  CDR3 for alpha chain variable domain of TCR clone 161555 (TRAV13-2, TRAJ54)
RAVQGAQKLVF

SEQ ID NO: 323110 - protein, 13 aa, Homo sapiens
  CDR3 for beta chain variable domain of TCR clone 161555 (TRBV20-1, TRBJ1-1)
CSARGGGNTEDFF

SEQ ID NO: 323111 - protein, 15 aa, Homo sapiens
  CDR3 for alpha chain variable domain of TCR clone 161556 (TRAV8-6, TRAJ48)
CCEPRFNFGNEKLNF

SEQ ID NO: 323112 - protein, 15 aa, Homo sapiens
  CDR3 for beta chain variable domain of TCR clone 161556 (TRBV12-4, TRBJ2-2)
CASSPQPGSTGELFF

SEQ ID NO: 323113 - protein, 13 aa, Homo sapiens
  CDR3 for alpha chain variable domain of TCR clone 161557 (TRAV29/DV5, TRAJ31)
CAASRNNNARLIF

SEQ ID NO: 323114 - protein, 12 aa, Homo sapiens
  CDR3 for beta chain variable domain of TCR clone 161557 (TRBV11-2, TRBJ2-2)
CASSLGGGELFF

SEQ ID NO: 323115 - protein, 15 aa, Homo sapiens
  CDR3 for alpha chain variable domain of TCR clone 161558 (TRAV8-3, TRAJ45)
CASSYSGGGADGLTF

SEQ ID NO: 323116 - protein, 13 aa, Homo sapiens
  CDR3 for beta chain variable domain of TCR clone 161558 (TRBV10-3, TRBJ2-7)
CASKLAVNYGQFF

SEQ ID NO: 323117 - protein, 19 aa, Homo sapiens
  CDR3 for alpha chain variable domain of TCR clone 161559 (TRAV2, TRAJ20)
ILQVREADAAVYRDCKLSF

SEQ ID NO: 323118 - protein, 17 aa, Homo sapiens
  CDR3 for beta chain variable domain of TCR clone 161559 (TRBV11-2, TRBJ2-1)
CASSLYPPGLEYNEQFF

SEQ ID NO: 323119 - protein, 15 aa, Homo sapiens
  CDR3 for alpha chain variable domain of TCR clone 161560 (TRAV2, TRAJ32)
CAEANYGGATNKLIF

SEQ ID NO: 323120 - protein, 15 aa, Homo sapiens
  CDR3 for beta chain variable domain of TCR clone 161560 (TRBV7-7, TRBJ2-5)
CASSQLERAEETQYF

SEQ ID NO: 323121 - protein, 15 aa, Homo sapiens
  CDR3 for alpha chain variable domain of TCR clone 161561 (TRAV26-1, TRAJ29)
CIVRVEGYGNTHLVF

SEQ ID NO: 323122 - protein, 14 aa, Homo sapiens
  CDR3 for beta chain variable domain of TCR clone 161561 (TRBV18, TRBJ2-5)
CASSPGVSQETQYF

SEQ ID NO: 323123 - protein, 12 aa, Homo sapiens
  CDR3 for alpha chain variable domain of TCR clone 161562 (TRAV12-3, TRAJ40)
CAMSSGTYKYIF

SEQ ID NO: 323124 - protein, 18 aa, Homo sapiens
  CDR3 for beta chain variable domain of TCR clone 161562 (TRBV4-1, TRBJ2-7)
CASSQDTGAGSGLNEQYF

SEQ ID NO: 323125 - protein, 14 aa, Homo sapiens
  CDR3 for alpha chain variable domain of TCR clone 161563 (TRAV25, TRAJ35)
CARRMEGFGNVLHC

SEQ ID NO: 323126 - protein, 13 aa, Homo sapiens
  CDR3 for beta chain variable domain of TCR clone 161563 (TRBV7-2, TRBJ1-4)
CSSSLAGLEKLFF

SEQ ID NO: 323127 - protein, 15 aa, Homo sapiens
  CDR3 for alpha chain variable domain of TCR clone 161564 (TRAV12-1, TRAJ45)
YVVLSGGVGADGLTF

SEQ ID NO: 323128 - protein, 16 aa, Homo sapiens
  CDR3 for beta chain variable domain of TCR clone 161564 (TRBV6-5, TRBJ2-1)
CASSETLAGHYNEQFF

SEQ ID NO: 323129 - protein, 15 aa, Homo sapiens
  CDR3 for alpha chain variable domain of TCR clone 161565 (TRAV3, TRAJ22)
CAVRDRGGSAGQLTF

SEQ ID NO: 323130 - protein, 15 aa, Homo sapiens
  CDR3 for beta chain variable domain of TCR clone 161565 (TRBV20-1, TRBJ1-1)
CSASRGVTGNTEAFF

SEQ ID NO: 323131 - protein, 18 aa, Homo sapiens
  CDR3 for alpha chain variable domain of TCR clone 161566 (TRAV26-2, )
CILLDIQNPDPAGYQLRD

SEQ ID NO: 323132 - protein, 13 aa, Homo sapiens
  CDR3 for beta chain variable domain of TCR clone 161566 (TRBV20-1, TRBJ2-7)
CSADPGATYEQYF

SEQ ID NO: 323133 - protein, 15 aa, Homo sapiens
  CDR3 for alpha chain variable domain of TCR clone 161567 (TRAV26-1, TRAJ56)
CIVRVDNGANSKLTF

SEQ ID NO: 323134 - protein, 15 aa, Homo sapiens
  CDR3 for beta chain variable domain of TCR clone 161567 (TRBV20-1, TRBJ2-7)
SSARDPTEVGHEQYF

SEQ ID NO: 323135 - protein, 13 aa, Homo sapiens
  CDR3 for alpha chain variable domain of TCR clone 161568 (TRAV16, TRAJ34)
CSLTGYNTDKLIF

SEQ ID NO: 323136 - protein, 13 aa, Homo sapiens
  CDR3 for beta chain variable domain of TCR clone 161568 (TRBV6-1, TRBJ2-1)
CASREDGGHEQFF

SEQ ID NO: 323137 - protein, 14 aa, Homo sapiens
  CDR3 for alpha chain variable domain of TCR clone 161569 (TRAV38-1, TRAJ43)
CAFMKHNNNNDMRF

SEQ ID NO: 323138 - protein, 14 aa, Homo sapiens
  CDR3 for beta chain variable domain of TCR clone 161569 (TRBV5-4, TRBJ1-1)
CASSLDSRRDEDFF

SEQ ID NO: 323139 - protein, 14 aa, Homo sapiens
  CDR3 for alpha chain variable domain of TCR clone 161570 (TRAV12-3, TRAJ15)
CAMIPPQAGTALIC

SEQ ID NO: 323140 - protein, 12 aa, Homo sapiens
  CDR3 for beta chain variable domain of TCR clone 161570 (TRBV11-2, TRBJ2-2)
CASSFGGGELFF

SEQ ID NO: 323141 - protein, 14 aa, Homo sapiens
  CDR3 for alpha chain variable domain of TCR clone 161571 (TRAV9-2, TRAJ39)
CALYIYNAGNMLTF

SEQ ID NO: 323142 - protein, 12 aa, Homo sapiens
  CDR3 for beta chain variable domain of TCR clone 161571 (TRBV7-3, TRBJ2-1)
CASSLGFNEQFF

SEQ ID NO: 323143 - protein, 12 aa, Homo sapiens
  CDR3 for alpha chain variable domain of TCR clone 161572 (TRAV25, TRAJ48)
CAGDFGNETLTF

SEQ ID NO: 323144 - protein, 12 aa, Homo sapiens
  CDR3 for beta chain variable domain of TCR clone 161572 (TRBV2, TRBJ2-5)
CASKEYGETQYF

SEQ ID NO: 323145 - protein, 14 aa, Homo sapiens
  CDR3 for alpha chain variable domain of TCR clone 161573 (TRAV9-2, TRAJ39)
CALYIYNAGNMLTF

SEQ ID NO: 323146 - protein, 16 aa, Homo sapiens
  CDR3 for beta chain variable domain of TCR clone 161573 (TRBV12-5, TRBJ2-5)
CASGPRTSGNQETQYS

SEQ ID NO: 323147 - protein, 13 aa, Homo sapiens
  CDR3 for alpha chain variable domain of TCR clone 161574 (TRAV35, TRAJ53)
CAGQERSNYKLTF

SEQ ID NO: 323148 - protein, 11 aa, Homo sapiens
  CDR3 for beta chain variable domain of TCR clone 161574 (TRBV29-1, TRBJ2-5)
CSEDRTGTQYF

SEQ ID NO: 323149 - protein, 15 aa, Homo sapiens
  CDR3 for alpha chain variable domain of TCR clone 161575 (TRAV3, TRAJ5)
CAVRDLDTGRRALTF

SEQ ID NO: 323150 - protein, 13 aa, Homo sapiens
  CDR3 for beta chain variable domain of TCR clone 161575 (TRBV7-3, TRBJ1-2)
CASSLNAGGFHTF

SEQ ID NO: 323151 - protein, 13 aa, Homo sapiens
  CDR3 for alpha chain variable domain of TCR clone 161576 (TRAV38-1, TRAJ42)
CARWGGSQGNLIF

SEQ ID NO: 323152 - protein, 17 aa, Homo sapiens
  CDR3 for beta chain variable domain of TCR clone 161576 (TRBV20-1, TRBJ2-1)
CSAGDPLAGAWDNEQFF

SEQ ID NO: 323153 - protein, 14 aa, Homo sapiens
  CDR3 for alpha chain variable domain of TCR clone 161577 (TRAV26-1, TRAJ38)
CIADNAVNNRKLIW

SEQ ID NO: 323154 - protein, 13 aa, Homo sapiens
  CDR3 for beta chain variable domain of TCR clone 161577 (TRBV7-7, TRBJ2-3)
CASSLSRADTQYF

SEQ ID NO: 323155 - protein, 13 aa, Homo sapiens
  CDR3 for alpha chain variable domain of TCR clone 161578 (TRAV20, TRAJ5)
CAVQDTGRRALTF

SEQ ID NO: 323156 - protein, 15 aa, Homo sapiens
  CDR3 for beta chain variable domain of TCR clone 161578 (TRBV5-1, TRBJ2-5)
CASSLGLAEQETQYF

SEQ ID NO: 323157 - protein, 14 aa, Homo sapiens
  CDR3 for alpha chain variable domain of TCR clone 161579 (TRAV2, TRAJ9)
CAVEDRSGGFKTIF

SEQ ID NO: 323158 - protein, 13 aa, Homo sapiens
  CDR3 for beta chain variable domain of TCR clone 161579 (TRBV11-3, TRBJ1-1)
CASSLALGTEAFF

SEQ ID NO: 323159 - protein, 15 aa, Homo sapiens
  CDR3 for alpha chain variable domain of TCR clone 161580 (TRAV8-3, TRAJ23)
CAVGYRYNQGGKLIF

SEQ ID NO: 323160 - protein, 22 aa, Homo sapiens
  CDR3 for beta chain variable domain of TCR clone 161580 (TRBV29-1, TRBJ2-5)
TVSNMSPEDSSIYLCSAGTQYF

SEQ ID NO: 323161 - protein, 15 aa, Homo sapiens
  CDR3 for alpha chain variable domain of TCR clone 161581 (TRAV12-1, TRAJ23)
CGERSRCNQGGKLIF

SEQ ID NO: 323162 - protein, 15 aa, Homo sapiens
  CDR3 for beta chain variable domain of TCR clone 161581 (TRBV28, TRBJ2-1)
CASSIIAGGRSEQFF

SEQ ID NO: 323163 - protein, 14 aa, Homo sapiens
  CDR3 for alpha chain variable domain of TCR clone 161582 (TRAV30, TRAJ33)
CGTVAPRSNYQLIW

SEQ ID NO: 323164 - protein, 14 aa, Homo sapiens
  CDR3 for beta chain variable domain of TCR clone 161582 (TRBV5-1, TRBJ1-1)
CASSRTTGDTEAFF

SEQ ID NO: 323165 - protein, 17 aa, Homo sapiens
  CDR3 for alpha chain variable domain of TCR clone 161583 (TRAV3, TRAJ42)
CAVRDRDYGGSQGNLII

SEQ ID NO: 323166 - protein, 14 aa, Homo sapiens
  CDR3 for beta chain variable domain of TCR clone 161583 (TRBV12-5, TRBJ2-5)
RASGSRTHQETQYF

SEQ ID NO: 323167 - protein, 17 aa, Homo sapiens
  CDR3 for alpha chain variable domain of TCR clone 161584 (TRAV3, TRAJ7)
CAVRDMSPLEGTTDSLL

SEQ ID NO: 323168 - protein, 17 aa, Homo sapiens
  CDR3 for beta chain variable domain of TCR clone 161584 (TRBV15, TRBJ1-2)
CATSGREIDVVNYGDTF

SEQ ID NO: 323169 - protein, 11 aa, Homo sapiens
  CDR3 for alpha chain variable domain of TCR clone 161585 (TRAV1-2, TRAJ40)
CAVPGTYKYIF

SEQ ID NO: 323170 - protein, 16 aa, Homo sapiens
  CDR3 for beta chain variable domain of TCR clone 161585 (TRBV7-9, TRBJ1-3)
CASSLGAGSSGNTIYF

SEQ ID NO: 323171 - protein, 14 aa, Homo sapiens
  CDR3 for alpha chain variable domain of TCR clone 161586 (TRAV13-1, TRAJ32)
CAARGSGATNKLIF

SEQ ID NO: 323172 - protein, 12 aa, Homo sapiens
  CDR3 for beta chain variable domain of TCR clone 161586 (TRBV2, TRBJ2-1)
CAKREGYNEQFF

SEQ ID NO: 323173 - protein, 11 aa, Homo sapiens
  CDR3 for alpha chain variable domain of TCR clone 161587 (TRAV21, TRAJ23)
CAPQRRGKLIF

SEQ ID NO: 323174 - protein, 14 aa, Homo sapiens
  CDR3 for beta chain variable domain of TCR clone 161587 (TRBV12-4, TRBJ1-1)
CASTWTEHDTEAFF

SEQ ID NO: 323175 - protein, 14 aa, Homo sapiens
  CDR3 for alpha chain variable domain of TCR clone 161588 (TRAV12-3, TRAJ30)
CAMSLLNRDDKIIF

SEQ ID NO: 323176 - protein, 14 aa, Homo sapiens
  CDR3 for beta chain variable domain of TCR clone 161588 (TRBV7-2, TRBJ1-3)
CASSRLRSGNTIYF

SEQ ID NO: 323177 - protein, 16 aa, Homo sapiens
  CDR3 for alpha chain variable domain of TCR clone 161589 (TRAV26-1, TRAJ36)
CIVRVPDRTGANNLFF

SEQ ID NO: 323178 - protein, 14 aa, Homo sapiens
  CDR3 for beta chain variable domain of TCR clone 161589 (TRBV7-2, TRBJ2-7)
CASSLYPGRYEQYF

SEQ ID NO: 323179 - protein, 10 aa, Homo sapiens
  CDR3 for alpha chain variable domain of TCR clone 161590 (TRAV9-2, TRAJ43)
CALRMNDMRF

SEQ ID NO: 323180 - protein, 15 aa, Homo sapiens
  CDR3 for beta chain variable domain of TCR clone 161590 (TRBV11-3, TRBJ2-2)
CASSYFSTGTGELFF

SEQ ID NO: 323181 - protein, 13 aa, Homo sapiens
  CDR3 for alpha chain variable domain of TCR clone 161591 (TRAV38-2/DV8, TRAJ34)
CAYRTWNTDKLIF

SEQ ID NO: 323182 - protein, 16 aa, Homo sapiens
  CDR3 for beta chain variable domain of TCR clone 161591 (TRBV19, TRBJ2-1)
CASSKAGPGSYNEQFF

SEQ ID NO: 323183 - protein, 14 aa, Homo sapiens
  CDR3 for alpha chain variable domain of TCR clone 161592 (TRAV12-2, TRAJ5)
CAVNRSTGRRALTF

SEQ ID NO: 323184 - protein, 12 aa, Homo sapiens
  CDR3 for beta chain variable domain of TCR clone 161592 (TRBV19, TRBJ1-5)
YASSIAQQPQHF

SEQ ID NO: 323185 - protein, 16 aa, Homo sapiens
  CDR3 for alpha chain variable domain of TCR clone 161593 (TRAV12-2, TRAJ43)
CAGDDMRFGAGTRLTV

SEQ ID NO: 323186 - protein, 16 aa, Homo sapiens
  CDR3 for beta chain variable domain of TCR clone 161593 (TRBV2, TRBJ2-4)
CASSEAPGGEQNIQSF

SEQ ID NO: 323187 - protein, 15 aa, Homo sapiens
  CDR3 for alpha chain variable domain of TCR clone 161594 (TRAV3, TRAJ22)
CAVRDRGSSARQLTF

SEQ ID NO: 323188 - protein, 12 aa, Homo sapiens
  CDR3 for beta chain variable domain of TCR clone 161594 (TRBV7-8, TRBJ2-1)
CASSLGHNEQFF

SEQ ID NO: 323189 - protein, 14 aa, Homo sapiens
  CDR3 for alpha chain variable domain of TCR clone 161595 (TRAV12-2, TRAJ17)
CAALFKAAGNKLTF

SEQ ID NO: 323190 - protein, 13 aa, Homo sapiens
  CDR3 for beta chain variable domain of TCR clone 161595 (TRBV7-9, TRBJ1-2)
CASSLKQNYGYTF

SEQ ID NO: 323191 - protein, 14 aa, Homo sapiens
  CDR3 for alpha chain variable domain of TCR clone 161596 (TRAV12-3, TRAJ48)
CAMSVNFGTEKLTF

SEQ ID NO: 323192 - protein, 13 aa, Homo sapiens
  CDR3 for beta chain variable domain of TCR clone 161596 (TRBV20-1, TRBJ1-3)
CSSAGNSGNTIYF

SEQ ID NO: 323193 - protein, 11 aa, Homo sapiens
  CDR3 for alpha chain variable domain of TCR clone 161597 (TRAV23/DV6, TRAJ49)
CAVAPVTSSIL

SEQ ID NO: 323194 - protein, 12 aa, Homo sapiens
  CDR3 for beta chain variable domain of TCR clone 161597 (TRBV11-2, TRBJ2-2)
CASSLPTGELFF

SEQ ID NO: 323195 - protein, 16 aa, Homo sapiens
  CDR3 for alpha chain variable domain of TCR clone 161598 (TRAV30, TRAJ24)
RGTEIVDADSWGKFQF

SEQ ID NO: 323196 - protein, 15 aa, Homo sapiens
  CDR3 for beta chain variable domain of TCR clone 161598 (TRBV15, TRBJ1-5)
CATSRDPVSNQPQHF

SEQ ID NO: 323197 - protein, 13 aa, Homo sapiens
  CDR3 for alpha chain variable domain of TCR clone 161599 (TRAV13-2, TRAJ21)
CAETSDNFNKFYF

SEQ ID NO: 323198 - protein, 16 aa, Homo sapiens
  CDR3 for beta chain variable domain of TCR clone 161599 (TRBV7-9, TRBJ2-1)
CASSPRDSGAYNEQFF

SEQ ID NO: 323199 - protein, 16 aa, Homo sapiens
  CDR3 for alpha chain variable domain of TCR clone 161600 (TRAV12-3, TRAJ53)
CAMSPGSGGSNYKLTF

SEQ ID NO: 323200 - protein, 16 aa, Homo sapiens
  CDR3 for beta chain variable domain of TCR clone 161600 (TRBV27, TRBJ2-2)
CASSLSGVWVTGELFF

SEQ ID NO: 323201 - protein, 14 aa, Homo sapiens
  CDR3 for alpha chain variable domain of TCR clone 161601 (TRAV9-2, TRAJ39)
CALYIYNAGNMLTF

SEQ ID NO: 323202 - protein, 14 aa, Homo sapiens
  CDR3 for beta chain variable domain of TCR clone 161601 (TRBV23-1, TRBJ2-5)
CASSFLRSQETQYF

SEQ ID NO: 323203 - protein, 11 aa, Homo sapiens
  CDR3 for alpha chain variable domain of TCR clone 161602 (TRAV12-1, TRAJ30)
CVVNGQDKMIF

SEQ ID NO: 323204 - protein, 16 aa, Homo sapiens
  CDR3 for beta chain variable domain of TCR clone 161602 (TRBV24-1, TRBJ2-3)
CATSDAISGITDTQYF

SEQ ID NO: 323205 - protein, 11 aa, Homo sapiens
  CDR3 for alpha chain variable domain of TCR clone 161603 (TRAV2, TRAJ33)
CAVDSNYQLIW

SEQ ID NO: 323206 - protein, 12 aa, Homo sapiens
  CDR3 for beta chain variable domain of TCR clone 161603 (TRBV28, TRBJ2-3)
CASSLYRDTQYF

SEQ ID NO: 323207 - protein, 15 aa, Homo sapiens
  CDR3 for alpha chain variable domain of TCR clone 161604 (TRAV8-1, TRAJ6)
CAVNTPPGGSYIPTL

SEQ ID NO: 323208 - protein, 15 aa, Homo sapiens
  CDR3 for beta chain variable domain of TCR clone 161604 (TRBV11-2, TRBJ2-2)
CASSSDRVNAGELFF

SEQ ID NO: 323209 - protein, 11 aa, Homo sapiens
  CDR3 for alpha chain variable domain of TCR clone 161605 (TRAV21, TRAJ34)
CAMTNTDKLIF

SEQ ID NO: 323210 - protein, 17 aa, Homo sapiens
  CDR3 for beta chain variable domain of TCR clone 161605 (TRBV20-1, TRBJ2-1)
CSARSPSGGPPTMSSSS

SEQ ID NO: 323211 - protein, 17 aa, Homo sapiens
  CDR3 for alpha chain variable domain of TCR clone 161606 (TRAV13-1, TRAJ31)
CAPRDRLMFGDGTKLVG

SEQ ID NO: 323212 - protein, 12 aa, Homo sapiens
  CDR3 for beta chain variable domain of TCR clone 161606 (TRBV7-9, TRBJ2-7)
CASSLEGYEQYF

SEQ ID NO: 323213 - protein, 14 aa, Homo sapiens
  CDR3 for alpha chain variable domain of TCR clone 161607 (TRAV12-3, TRAJ9)
CAMGPNTGGFKTIF

SEQ ID NO: 323214 - protein, 13 aa, Homo sapiens
  CDR3 for beta chain variable domain of TCR clone 161607 (TRBV20-1, TRBJ1-1)
CSAPLGGGTEAFF

SEQ ID NO: 323215 - protein, 13 aa, Homo sapiens
  CDR3 for alpha chain variable domain of TCR clone 161608 (TRAV27, TRAJ45)
CRSSGGGADGLTF

SEQ ID NO: 323216 - protein, 17 aa, Homo sapiens
  CDR3 for beta chain variable domain of TCR clone 161608 (TRBV19, TRBJ2-2)
CASSRSPGGFGTGELFF

SEQ ID NO: 323217 - protein, 17 aa, Homo sapiens
  CDR3 for alpha chain variable domain of TCR clone 161609 (TRAV21, TRAJ52)
CAVGVNAGGTSYGKLTF

SEQ ID NO: 323218 - protein, 15 aa, Homo sapiens
  CDR3 for beta chain variable domain of TCR clone 161609 (TRBV28, TRBJ2-5)
CASSSGRTIQETQYF

SEQ ID NO: 323219 - protein, 12 aa, Homo sapiens
  CDR3 for alpha chain variable domain of TCR clone 161610 (TRAV12-3, TRAJ37)
CAMSSNTGKLIF

SEQ ID NO: 323220 - protein, 14 aa, Homo sapiens
  CDR3 for beta chain variable domain of TCR clone 161610 (TRBV7-2, TRBJ2-7)
CASSLRWEVNEQYF

SEQ ID NO: 323221 - protein, 16 aa, Homo sapiens
  CDR3 for alpha chain variable domain of TCR clone 161611 (TRAV2, TRAJ26)
TTVLGPPGDYGQNFVF

SEQ ID NO: 323222 - protein, 13 aa, Homo sapiens
  CDR3 for beta chain variable domain of TCR clone 161611 (TRBV7-9, TRBJ1-2)
RASSLKQNYGYTF

SEQ ID NO: 323223 - protein, 14 aa, Homo sapiens
  CDR3 for alpha chain variable domain of TCR clone 161612 (TRAV1-2, TRAJ8)
CAVREDTGFQKLVF

SEQ ID NO: 323224 - protein, 13 aa, Homo sapiens
  CDR3 for beta chain variable domain of TCR clone 161612 (TRBV5-4, TRBJ2-5)
RASSPVSQETQYF

SEQ ID NO: 323225 - protein, 11 aa, Homo sapiens
  CDR3 for alpha chain variable domain of TCR clone 161613 (TRAV17, TRAJ9)
CATTGGFKTIF

SEQ ID NO: 323226 - protein, 14 aa, Homo sapiens
  CDR3 for beta chain variable domain of TCR clone 161613 (TRBV7-8, TRBJ2-3)
CASSLEAGTDTQYF

SEQ ID NO: 323227 - protein, 12 aa, Homo sapiens
  CDR3 for alpha chain variable domain of TCR clone 161614 (TRAV3, TRAJ26)
RAVRDYGQNFVF

SEQ ID NO: 323228 - protein, 16 aa, Homo sapiens
  CDR3 for beta chain variable domain of TCR clone 161614 (TRBV11-2, TRBJ1-2)
CASSPSGREANYGYTF

SEQ ID NO: 323229 - protein, 16 aa, Homo sapiens
  CDR3 for alpha chain variable domain of TCR clone 161615 (TRAV30, TRAJ24)
CGTEIVDADSWGKFQF

SEQ ID NO: 323230 - protein, 16 aa, Homo sapiens
  CDR3 for beta chain variable domain of TCR clone 161615 (TRBV5-8, TRBJ2-3)
CASSLGVSALTDTQYF

SEQ ID NO: 323231 - protein, 15 aa, Homo sapiens
  CDR3 for alpha chain variable domain of TCR clone 161616 (TRAV25, TRAJ23)
CALAPNYNQGGKLIF

SEQ ID NO: 323232 - protein, 13 aa, Homo sapiens
  CDR3 for beta chain variable domain of TCR clone 161616 (TRBV19, TRBJ2-1)
CATSRGVYNEQFF

SEQ ID NO: 323233 - protein, 10 aa, Homo sapiens
  CDR3 for alpha chain variable domain of TCR clone 161617 (TRAV16, TRAJ22)
SAMYLRQLTF

SEQ ID NO: 323234 - protein, 17 aa, Homo sapiens
  CDR3 for beta chain variable domain of TCR clone 161617 (TRBV19, TRBJ2-7)
CASSISFYDSYPYEQYF

SEQ ID NO: 323235 - protein, 12 aa, Homo sapiens
  CDR3 for alpha chain variable domain of TCR clone 161618 (TRAV21, TRAJ49)
CAVTNTGNQFYF

SEQ ID NO: 323236 - protein, 17 aa, Homo sapiens
  CDR3 for beta chain variable domain of TCR clone 161618 (TRBV13, TRBJ2-3)
CASSLSRVAGGRKTQYF

SEQ ID NO: 323237 - protein, 13 aa, Homo sapiens
  CDR3 for alpha chain variable domain of TCR clone 161619 (TRAV27, TRAJ6)
CAGGTTGSYIPTF

SEQ ID NO: 323238 - protein, 14 aa, Homo sapiens
  CDR3 for beta chain variable domain of TCR clone 161619 (TRBV6-1, TRBJ1-3)
CASVQGGGGNTIYF

SEQ ID NO: 323239 - protein, 11 aa, Homo sapiens
  CDR3 for alpha chain variable domain of TCR clone 161620 (TRAV23/DV6, TRAJ49)
CAVAPVTSSIL

SEQ ID NO: 323240 - protein, 12 aa, Homo sapiens
  CDR3 for beta chain variable domain of TCR clone 161620 (TRBV7-6, TRBJ2-3)
CASSTGTDTQYF

SEQ ID NO: 323241 - protein, 12 aa, Homo sapiens
  CDR3 for alpha chain variable domain of TCR clone 161621 (TRAV1-2, TRAJ42)
CVAGGSQGNLIF

SEQ ID NO: 323242 - protein, 15 aa, Homo sapiens
  CDR3 for beta chain variable domain of TCR clone 161621 (TRBV7-2, TRBJ1-5)
CASSQGHQPNQPQHF

SEQ ID NO: 323243 - protein, 18 aa, Homo sapiens
  CDR3 for alpha chain variable domain of TCR clone 161622 (TRAV21, TRAJ52)
CAARPSPGGGTSYGKLTF

SEQ ID NO: 323244 - protein, 17 aa, Homo sapiens
  CDR3 for beta chain variable domain of TCR clone 161622 (TRBV13, TRBJ2-3)
CASSLSRVAGGRNTQYF

SEQ ID NO: 323245 - protein, 17 aa, Homo sapiens
  CDR3 for alpha chain variable domain of TCR clone 161623 (TRAV3, TRAJ42)
CAVRDRGYGGSQGNLIV

SEQ ID NO: 323246 - protein, 12 aa, Homo sapiens
  CDR3 for beta chain variable domain of TCR clone 161623 (TRBV11-2, TRBJ2-1)
CASSPGNNEQFF

SEQ ID NO: 323247 - protein, 13 aa, Homo sapiens
  CDR3 for alpha chain variable domain of TCR clone 161624 (TRAV8-1, TRAJ34)
CAVRPYNTDKLIF

SEQ ID NO: 323248 - protein, 14 aa, Homo sapiens
  CDR3 for beta chain variable domain of TCR clone 161624 (TRBV6-1, TRBJ1-3)
CASVQGGGGNTIYF

SEQ ID NO: 323249 - protein, 13 aa, Homo sapiens
  CDR3 for alpha chain variable domain of TCR clone 161625 (TRAV29/DV5, TRAJ31)
CAASRNNNARHMF

SEQ ID NO: 323250 - protein, 20 aa, Homo sapiens
  CDR3 for beta chain variable domain of TCR clone 161625 (TRBV19, TRBJ2-1)
CASSISRTVTSTRLNNEQFF

SEQ ID NO: 323251 - protein, 15 aa, Homo sapiens
  CDR3 for alpha chain variable domain of TCR clone 161626 (TRAV2, TRAJ15)
CAVEDRNQAGTALIF

SEQ ID NO: 323252 - protein, 13 aa, Homo sapiens
  CDR3 for beta chain variable domain of TCR clone 161626 (TRBV10-2, TRBJ2-1)
CASGASGDAKQFV

SEQ ID NO: 323253 - protein, 14 aa, Homo sapiens
  CDR3 for alpha chain variable domain of TCR clone 161627 (TRAV9-2, TRAJ39)
CALYIYNEGNMLTF

SEQ ID NO: 323254 - protein, 14 aa, Homo sapiens
  CDR3 for beta chain variable domain of TCR clone 161627 (TRBV6-1, TRBJ1-3)
CASVQGGSGNTIYF

SEQ ID NO: 323255 - protein, 14 aa, Homo sapiens
  CDR3 for alpha chain variable domain of TCR clone 161628 (TRAV2, TRAJ9)
CAVEDRSGGFKNIF

SEQ ID NO: 323256 - protein, 17 aa, Homo sapiens
  CDR3 for beta chain variable domain of TCR clone 161628 (TRBV4-1, TRBJ2-7)
CASSRDPLGVRGGEQYF

SEQ ID NO: 323257 - protein, 14 aa, Homo sapiens
  CDR3 for alpha chain variable domain of TCR clone 161629 (TRAV29/DV5, TRAJ36)
CAARRKTGENNLFF

SEQ ID NO: 323258 - protein, 17 aa, Homo sapiens
  CDR3 for beta chain variable domain of TCR clone 161629 (TRBV3-1, TRBJ2-2)
CASSQFRDKVDTGELFF

SEQ ID NO: 323259 - protein, 12 aa, Homo sapiens
  CDR3 for alpha chain variable domain of TCR clone 161630 (TRAV13-2, TRAJ23)
CAERHRGGKLSF

SEQ ID NO: 323260 - protein, 19 aa, Homo sapiens
  CDR3 for beta chain variable domain of TCR clone 161630 (TRBV19, TRBJ2-5)
CASSIGQVTDFFLGETQYF

SEQ ID NO: 323261 - protein, 14 aa, Homo sapiens
  CDR3 for alpha chain variable domain of TCR clone 161631 (TRAV3, TRAJ33)
CAVRDMDSNYQLIW

SEQ ID NO: 323262 - protein, 19 aa, Homo sapiens
  CDR3 for beta chain variable domain of TCR clone 161631 (TRBV7-3, TRBJ1-2)
CASSFRQGNDGELWLLLRF

SEQ ID NO: 323263 - protein, 15 aa, Homo sapiens
  CDR3 for alpha chain variable domain of TCR clone 161632 (TRAV3, TRAJ22)
CAVRDRGGSARQLTF

SEQ ID NO: 323264 - protein, 19 aa, Homo sapiens
  CDR3 for beta chain variable domain of TCR clone 161632 (TRBV28, TRBJ2-1)
CASSFSIRGSGRTRYEQFF

SEQ ID NO: 323265 - protein, 14 aa, Homo sapiens
  CDR3 for alpha chain variable domain of TCR clone 161633 (TRAV1-2, TRAJ29)
CAVRELTSATPLVF

SEQ ID NO: 323266 - protein, 14 aa, Homo sapiens
  CDR3 for beta chain variable domain of TCR clone 161633 (TRBV3-1, TRBJ2-5)
CASSQGPDQETQYY

SEQ ID NO: 323267 - protein, 14 aa, Homo sapiens
  CDR3 for alpha chain variable domain of TCR clone 161634 (TRAV8-3, TRAJ17)
CAVGAQTALNKLTF

SEQ ID NO: 323268 - protein, 11 aa, Homo sapiens
  CDR3 for beta chain variable domain of TCR clone 161634 (TRBV29-1, TRBJ1-4)
CSVSSGEKLFF

SEQ ID NO: 323269 - protein, 13 aa, Homo sapiens
  CDR3 for alpha chain variable domain of TCR clone 161635 (TRAV17, TRAJ34)
CATDLYNTDKLIF

SEQ ID NO: 323270 - protein, 15 aa, Homo sapiens
  CDR3 for beta chain variable domain of TCR clone 161635 (TRBV20-1, TRBJ2-3)
CSATGTSGFTNTQYF

SEQ ID NO: 323271 - protein, 12 aa, Homo sapiens
  CDR3 for alpha chain variable domain of TCR clone 161636 (TRAV13-1, TRAJ53)
AASGGSNYKLTS

SEQ ID NO: 323272 - protein, 16 aa, Homo sapiens
  CDR3 for beta chain variable domain of TCR clone 161636 (TRBV28, TRBJ2-6)
CASSNRRGSGANVLTF

SEQ ID NO: 323273 - protein, 12 aa, Homo sapiens
  CDR3 for alpha chain variable domain of TCR clone 161637 (TRAV16, TRAJ49)
FALNEGGNQFYF

SEQ ID NO: 323274 - protein, 14 aa, Homo sapiens
  CDR3 for beta chain variable domain of TCR clone 161637 (TRBV7-9, TRBJ2-1)
CASRPTGLRNEQFL

SEQ ID NO: 323275 - protein, 21 aa, Homo sapiens
  CDR3 for alpha chain variable domain of TCR clone 161638 (TRAV30, TRAJ43)
GLPAQLLRNLLPIIELNDMRF

SEQ ID NO: 323276 - protein, 17 aa, Homo sapiens
  CDR3 for beta chain variable domain of TCR clone 161638 (TRBV11-2, TRBJ2-1)
CASSLYPPGVEYNEQFF

SEQ ID NO: 323277 - protein, 13 aa, Homo sapiens
  CDR3 for alpha chain variable domain of TCR clone 161639 (TRAV29/DV5, TRAJ31)
WAASRNNNARLMF

SEQ ID NO: 323278 - protein, 12 aa, Homo sapiens
  CDR3 for beta chain variable domain of TCR clone 161639 (TRBV14, TRBJ2-5)
CASSQLKETQYF

SEQ ID NO: 323279 - protein, 14 aa, Homo sapiens
  CDR3 for alpha chain variable domain of TCR clone 161640 (TRAV26-2, TRAJ32)
CILFRGGSTNKLIF

SEQ ID NO: 323280 - protein, 15 aa, Homo sapiens
  CDR3 for beta chain variable domain of TCR clone 161640 (TRBV2, TRBJ2-2)
CASSGFGAGTGELFF

SEQ ID NO: 323281 - protein, 16 aa, Homo sapiens
  CDR3 for alpha chain variable domain of TCR clone 161641 (TRAV30, TRAJ24)
CGTEIVGADSWGKFQF

SEQ ID NO: 323282 - protein, 14 aa, Homo sapiens
  CDR3 for beta chain variable domain of TCR clone 161641 (TRBV6-1, TRBJ1-3)
CASVQGGGGNTIYF

SEQ ID NO: 323283 - protein, 14 aa, Homo sapiens
  CDR3 for alpha chain variable domain of TCR clone 161642 (TRAV12-2, TRAJ40)
CAVKIPSGTYKYIF

SEQ ID NO: 323284 - protein, 14 aa, Homo sapiens
  CDR3 for beta chain variable domain of TCR clone 161642 (TRBV19, TRBJ1-2)
CASSLQGQAYGYTF

SEQ ID NO: 323285 - protein, 18 aa, Homo sapiens
  CDR3 for alpha chain variable domain of TCR clone 161643 (TRAV26-2, TRAJ45)
CILRVDKYSGGGAAGLTF

SEQ ID NO: 323286 - protein, 14 aa, Homo sapiens
  CDR3 for beta chain variable domain of TCR clone 161643 (TRBV7-2, TRBJ2-7)
CASRSQGAAYEQYF

SEQ ID NO: 323287 - protein, 14 aa, Homo sapiens
  CDR3 for alpha chain variable domain of TCR clone 161644 (TRAV29/DV5, TRAJ20)
CAASAPIEDYKLSF

SEQ ID NO: 323288 - protein, 16 aa, Homo sapiens
  CDR3 for beta chain variable domain of TCR clone 161644 (TRBV12-5, TRBJ2-5)
CASGPRTSGNQETQYF

SEQ ID NO: 323289 - protein, 14 aa, Homo sapiens
  CDR3 for alpha chain variable domain of TCR clone 161645 (TRAV8-4, TRAJ13)
CAVTLSGGYQKVTF

SEQ ID NO: 323290 - protein, 14 aa, Homo sapiens
  CDR3 for beta chain variable domain of TCR clone 161645 (TRBV7-2, TRBJ1-2)
CASSQTGSTYGDTL

SEQ ID NO: 323291 - protein, 14 aa, Homo sapiens
  CDR3 for alpha chain variable domain of TCR clone 161646 (TRAV16, TRAJ17)
YALSGRAAGNKLTF

SEQ ID NO: 323292 - protein, 17 aa, Homo sapiens
  CDR3 for beta chain variable domain of TCR clone 161646 (TRBV18, TRBJ2-6)
CASSPRQGAVGANVLTF

SEQ ID NO: 323293 - protein, 14 aa, Homo sapiens
  CDR3 for alpha chain variable domain of TCR clone 161647 (TRAV8-4, TRAJ54)
CAVSGVLGAQKLVF

SEQ ID NO: 323294 - protein, 13 aa, Homo sapiens
  CDR3 for beta chain variable domain of TCR clone 161647 (TRBV27, TRBJ2-7)
CASSFVSSYEQYF

SEQ ID NO: 323295 - protein, 13 aa, Homo sapiens
  CDR3 for alpha chain variable domain of TCR clone 161648 (TRAV30, TRAJ6)
CGTAAGGSYIPTF

SEQ ID NO: 323296 - protein, 16 aa, Homo sapiens
  CDR3 for beta chain variable domain of TCR clone 161648 (TRBV4-3, TRBJ2-3)
CASSLGLAGEGDTQYF

SEQ ID NO: 323297 - protein, 12 aa, Homo sapiens
  CDR3 for alpha chain variable domain of TCR clone 161649 (TRAV16, TRAJ10)
CSRTGGGNKRTF

SEQ ID NO: 323298 - protein, 14 aa, Homo sapiens
  CDR3 for beta chain variable domain of TCR clone 161649 (TRBV7-2, TRBJ1-1)
CASSFLTGTTEAFF

SEQ ID NO: 323299 - protein, 11 aa, Homo sapiens
  CDR3 for alpha chain variable domain of TCR clone 161650 (TRAV13-2, TRAJ54)
RAVQGAQQLVF

SEQ ID NO: 323300 - protein, 15 aa, Homo sapiens
  CDR3 for beta chain variable domain of TCR clone 161650 (TRBV20-1, TRBJ2-7)
CSAESGTSGAYEQYF

SEQ ID NO: 323301 - protein, 15 aa, Homo sapiens
  CDR3 for alpha chain variable domain of TCR clone 161651 (TRAV13-1, TRAJ36)
CAASIRQTGANNLFF

SEQ ID NO: 323302 - protein, 16 aa, Homo sapiens
  CDR3 for beta chain variable domain of TCR clone 161651 (TRBV7-9, TRBJ1-2)
CASSLGFSSGEDGYTF

SEQ ID NO: 323303 - protein, 14 aa, Homo sapiens
  CDR3 for alpha chain variable domain of TCR clone 161652 (TRAV13-1, TRAJ44)
CAAKATGTASKLTF

SEQ ID NO: 323304 - protein, 14 aa, Homo sapiens
  CDR3 for beta chain variable domain of TCR clone 161652 (TRBV25-1, TRBJ1-1)
CASTNLGGNTEAFF

SEQ ID NO: 323305 - protein, 15 aa, Homo sapiens
  CDR3 for alpha chain variable domain of TCR clone 161653 (TRAV12-1, TRAJ45)
CVVLSGGGGGDGLTF

SEQ ID NO: 323306 - protein, 16 aa, Homo sapiens
  CDR3 for beta chain variable domain of TCR clone 161653 (TRBV6-5, TRBJ2-1)
CASSETLAGHYNEQFF

SEQ ID NO: 323307 - protein, 15 aa, Homo sapiens
  CDR3 for alpha chain variable domain of TCR clone 161654 (TRAV17, TRAJ16)
CATALRFSDGRKLLF

SEQ ID NO: 323308 - protein, 13 aa, Homo sapiens
  CDR3 for beta chain variable domain of TCR clone 161654 (TRBV7-9, TRBJ1-2)
CASSLKQNYGYTF

SEQ ID NO: 323309 - protein, 15 aa, Homo sapiens
  CDR3 for alpha chain variable domain of TCR clone 161655 (TRAV13-1, TRAJ32)
CAASNGLWCYKQAHL

SEQ ID NO: 323310 - protein, 15 aa, Homo sapiens
  CDR3 for beta chain variable domain of TCR clone 161655 (TRBV20-1, TRBJ1-2)
CSAIRTGAFNYGYTF

SEQ ID NO: 323311 - protein, 16 aa, Homo sapiens
  CDR3 for alpha chain variable domain of TCR clone 161656 (TRAV23/DV6, TRAJ13)
CAASFSFSGGYQKVTF

SEQ ID NO: 323312 - protein, 14 aa, Homo sapiens
  CDR3 for beta chain variable domain of TCR clone 161656 (TRBV6-1, TRBJ1-3)
CASVQGGGGNTIYF

SEQ ID NO: 323313 - protein, 15 aa, Homo sapiens
  CDR3 for alpha chain variable domain of TCR clone 161657 (TRAV12-3, TRAJ52)
CNGGAGGTSYGKLTF

SEQ ID NO: 323314 - protein, 13 aa, Homo sapiens
  CDR3 for beta chain variable domain of TCR clone 161657 (TRBV20-1, TRBJ2-5)
CSARGDYQETKYF

SEQ ID NO: 323315 - protein, 15 aa, Homo sapiens
  CDR3 for alpha chain variable domain of TCR clone 161658 (TRAV8-3, TRAJ45)
CASSYSGGGADGLTF

SEQ ID NO: 323316 - protein, 14 aa, Homo sapiens
  CDR3 for beta chain variable domain of TCR clone 161658 (TRBV11-2, TRBJ2-5)
CASSRTGGSETQYF

SEQ ID NO: 323317 - protein, 16 aa, Homo sapiens
  CDR3 for alpha chain variable domain of TCR clone 161659 (TRAV26-1, TRAJ48)
CIVREPPNFGNEKLTF

SEQ ID NO: 323318 - protein, 12 aa, Homo sapiens
  CDR3 for beta chain variable domain of TCR clone 161659 (TRBV19, TRBJ2-1)
CASSRQGAERFF

SEQ ID NO: 323319 - protein, 13 aa, Homo sapiens
  CDR3 for alpha chain variable domain of TCR clone 161660 (TRAV13-1, TRAJ20)
CAARVSNDNKLSF

SEQ ID NO: 323320 - protein, 12 aa, Homo sapiens
  CDR3 for beta chain variable domain of TCR clone 161660 (TRBV20-1, TRBJ2-1)
CSARLGTDEQFF

SEQ ID NO: 323321 - protein, 11 aa, Homo sapiens
  CDR3 for alpha chain variable domain of TCR clone 161661 (TRAV21, TRAJ34)
CAVTNTDKLIF

SEQ ID NO: 323322 - protein, 17 aa, Homo sapiens
  CDR3 for beta chain variable domain of TCR clone 161661 (TRBV20-1, TRBJ2-2)
CSASGSGQGGLTGELFF

SEQ ID NO: 323323 - protein, 13 aa, Homo sapiens
  CDR3 for alpha chain variable domain of TCR clone 161662 (TRAV20, TRAJ20)
CAVQAGSGYKLSF

SEQ ID NO: 323324 - protein, 16 aa, Homo sapiens
  CDR3 for beta chain variable domain of TCR clone 161662 (TRBV4-2, TRBJ2-5)
CASSQELVGSQETQYF

SEQ ID NO: 323325 - protein, 14 aa, Homo sapiens
  CDR3 for alpha chain variable domain of TCR clone 161663 (TRAV17, TRAJ35)
CATDRPGFGNVLHC

SEQ ID NO: 323326 - protein, 16 aa, Homo sapiens
  CDR3 for beta chain variable domain of TCR clone 161663 (TRBV7-2, TRBJ2-1)
CASSLLAQLFSKGQFF

SEQ ID NO: 323327 - protein, 16 aa, Homo sapiens
  CDR3 for alpha chain variable domain of TCR clone 161664 (TRAV12-3, TRAJ53)
CAMSPGSGGSNYKLTL

SEQ ID NO: 323328 - protein, 11 aa, Homo sapiens
  CDR3 for beta chain variable domain of TCR clone 161664 (TRBV29-1, TRBJ2-5)
CSEDRTGTQCF

SEQ ID NO: 323329 - protein, 10 aa, Homo sapiens
  CDR3 for alpha chain variable domain of TCR clone 161665 (TRAV17, TRAJ36)
CATVAGNLFF

SEQ ID NO: 323330 - protein, 19 aa, Homo sapiens
  CDR3 for beta chain variable domain of TCR clone 161665 (TRBV12-4, TRBJ2-1)
CASTLAFDPRDKEANEQFF

SEQ ID NO: 323331 - protein, 13 aa, Homo sapiens
  CDR3 for alpha chain variable domain of TCR clone 161666 (TRAV2, TRAJ40)
CAVVTSGTYKYIF

SEQ ID NO: 323332 - protein, 16 aa, Homo sapiens
  CDR3 for beta chain variable domain of TCR clone 161666 (TRBV7-9, TRBJ1-3)
CASSLGAWSSGNTMYF

SEQ ID NO: 323333 - protein, 12 aa, Homo sapiens
  CDR3 for alpha chain variable domain of TCR clone 161667 (TRAV2, TRAJ33)
CAVWGSNYQLIW

SEQ ID NO: 323334 - protein, 16 aa, Homo sapiens
  CDR3 for beta chain variable domain of TCR clone 161667 (TRBV20-1, TRBJ1-4)
CSTPGQGLLTNEKLFF

SEQ ID NO: 323335 - protein, 13 aa, Homo sapiens
  CDR3 for alpha chain variable domain of TCR clone 161668 (TRAV5, TRAJ30)
CAEIANRDVKIIF

SEQ ID NO: 323336 - protein, 17 aa, Homo sapiens
  CDR3 for beta chain variable domain of TCR clone 161668 (TRBV13, TRBJ2-3)
CASSLSRVAGGRNTQYF

SEQ ID NO: 323337 - protein, 14 aa, Homo sapiens
  CDR3 for alpha chain variable domain of TCR clone 161669 (TRAV12-2, TRAJ53)
CAVKGGGSNYKLTF

SEQ ID NO: 323338 - protein, 12 aa, Homo sapiens
  CDR3 for beta chain variable domain of TCR clone 161669 (TRBV7-2, TRBJ2-5)
CASSQYQETQYF

SEQ ID NO: 323339 - protein, 11 aa, Homo sapiens
  CDR3 for alpha chain variable domain of TCR clone 161670 (TRAV23/DV6, TRAJ48)
CAPRWGAKLTF

SEQ ID NO: 323340 - protein, 17 aa, Homo sapiens
  CDR3 for beta chain variable domain of TCR clone 161670 (TRBV20-1, TRBJ2-2)
CSASGSGQGGLTGELFF

SEQ ID NO: 323341 - protein, 15 aa, Homo sapiens
  CDR3 for alpha chain variable domain of TCR clone 161671 (TRAV27, TRAJ38)
CAARRNAGNNRKLIW

SEQ ID NO: 323342 - protein, 13 aa, Homo sapiens
  CDR3 for beta chain variable domain of TCR clone 161671 (TRBV12-5, TRBJ2-3)
CASGDRQSGTQYF

SEQ ID NO: 323343 - protein, 12 aa, Homo sapiens
  CDR3 for alpha chain variable domain of TCR clone 161672 (TRAV17, TRAJ11)
CATDKGYSTLTF

SEQ ID NO: 323344 - protein, 14 aa, Homo sapiens
  CDR3 for beta chain variable domain of TCR clone 161672 (TRBV20-1, TRBJ1-3)
CSASPTGAGNTIYF

SEQ ID NO: 323345 - protein, 13 aa, Homo sapiens
  CDR3 for alpha chain variable domain of TCR clone 161673 (TRAV12-2, TRAJ18)
CAVRGSTLGRLYF

SEQ ID NO: 323346 - protein, 14 aa, Homo sapiens
  CDR3 for beta chain variable domain of TCR clone 161673 (TRBV11-2, TRBJ2-3)
SASSRLARTDTQYF

SEQ ID NO: 323347 - protein, 15 aa, Homo sapiens
  CDR3 for alpha chain variable domain of TCR clone 161674 (TRAV8-2, TRAJ40)
CVVLGTTPGTYKYIF

SEQ ID NO: 323348 - protein, 13 aa, Homo sapiens
  CDR3 for beta chain variable domain of TCR clone 161674 (TRBV3-1, TRBJ1-2)
CASSQDSRDGYTF

SEQ ID NO: 323349 - protein, 15 aa, Homo sapiens
  CDR3 for alpha chain variable domain of TCR clone 161675 (TRAV10, TRAJ6)
CVVRPRTGGSYIPNF

SEQ ID NO: 323350 - protein, 15 aa, Homo sapiens
  CDR3 for beta chain variable domain of TCR clone 161675 (TRBV20-1, TRBJ2-7)
CSARDRVSGMDEQYF

SEQ ID NO: 323351 - protein, 12 aa, Homo sapiens
  CDR3 for alpha chain variable domain of TCR clone 161676 (TRAV12-3, TRAJ17)
CSMTLTGNKLTF

SEQ ID NO: 323352 - protein, 15 aa, Homo sapiens
  CDR3 for beta chain variable domain of TCR clone 161676 (TRBV20-1, TRBJ2-7)
CSARDRVSGMDERYF

SEQ ID NO: 323353 - protein, 17 aa, Homo sapiens
  CDR3 for alpha chain variable domain of TCR clone 161677 (TRAV23/DV6, TRAJ28)
CAALLAYSGAGSYQLTF

SEQ ID NO: 323354 - protein, 15 aa, Homo sapiens
  CDR3 for beta chain variable domain of TCR clone 161677 (TRBV7-2, TRBJ2-1)
CASSLVAGGYNEQFF

SEQ ID NO: 323355 - protein, 12 aa, Homo sapiens
  CDR3 for alpha chain variable domain of TCR clone 161678 (TRAV4, TRAJ26)
CLVGDYGQNFVF

SEQ ID NO: 323356 - protein, 16 aa, Homo sapiens
  CDR3 for beta chain variable domain of TCR clone 161678 (TRBV5-1, TRBJ2-7)
CASSYASTSSGGEQYF

SEQ ID NO: 323357 - protein, 16 aa, Homo sapiens
  CDR3 for alpha chain variable domain of TCR clone 161679 (TRAV1-2, TRAJ10)
CAVRGVLTGGGNKLTF

SEQ ID NO: 323358 - protein, 14 aa, Homo sapiens
  CDR3 for beta chain variable domain of TCR clone 161679 (TRBV5-8, TRBJ2-1)
CASRLRGGANEQFF

SEQ ID NO: 323359 - protein, 12 aa, Homo sapiens
  CDR3 for alpha chain variable domain of TCR clone 161680 (TRAV17, TRAJ16)
CATVLPGQKLLF

SEQ ID NO: 323360 - protein, 15 aa, Homo sapiens
  CDR3 for beta chain variable domain of TCR clone 161680 (TRBV6-3, TRBJ2-2)
CTSSFLATLTGELFF

SEQ ID NO: 323361 - protein, 13 aa, Homo sapiens
  CDR3 for alpha chain variable domain of TCR clone 161681 (TRAV20, TRAJ45)
CAVKKRRCRRTHL

SEQ ID NO: 323362 - protein, 14 aa, Homo sapiens
  CDR3 for beta chain variable domain of TCR clone 161681 (TRBV15, TRBJ2-5)
CATSIGGRGETQYF

SEQ ID NO: 323363 - protein, 12 aa, Homo sapiens
  CDR3 for alpha chain variable domain of TCR clone 161682 (TRAV17, TRAJ4)
SATAGGYNKLIF

SEQ ID NO: 323364 - protein, 13 aa, Homo sapiens
  CDR3 for beta chain variable domain of TCR clone 161682 (TRBV29-1, TRBJ2-2)
CSTTGVNTGELFF

SEQ ID NO: 323365 - protein, 13 aa, Homo sapiens
  CDR3 for alpha chain variable domain of TCR clone 161683 (TRAV8-6, TRAJ54)
CAVSDQRAQKLVF

SEQ ID NO: 323366 - protein, 17 aa, Homo sapiens
  CDR3 for beta chain variable domain of TCR clone 161683 (TRBV19, TRBJ1-1)
CASSIAGRGLMNTEAFF

SEQ ID NO: 323367 - protein, 11 aa, Homo sapiens
  CDR3 for alpha chain variable domain of TCR clone 161684 (TRAV21, TRAJ11)
CAVNGYSTLTF

SEQ ID NO: 323368 - protein, 14 aa, Homo sapiens
  CDR3 for beta chain variable domain of TCR clone 161684 (TRBV7-8, TRBJ2-2)
CASSLDPNTGELFF

SEQ ID NO: 323369 - protein, 19 aa, Homo sapiens
  CDR3 for alpha chain variable domain of TCR clone 161685 (TRAV13-1, TRAJ52)
CAASPYQNAGGTSYGKMSF

SEQ ID NO: 323370 - protein, 14 aa, Homo sapiens
  CDR3 for beta chain variable domain of TCR clone 161685 (TRBV19, TRBJ2-7)
CASTVQGRPYEQYF

SEQ ID NO: 323371 - protein, 13 aa, Homo sapiens
  CDR3 for alpha chain variable domain of TCR clone 161686 (TRAV3, TRAJ33)
CAVRDRSNYQLIW

SEQ ID NO: 323372 - protein, 16 aa, Homo sapiens
  CDR3 for beta chain variable domain of TCR clone 161686 (TRBV4-2, TRBJ2-7)
CASSQDRGTSSYEQYV

SEQ ID NO: 323373 - protein, 12 aa, Homo sapiens
  CDR3 for alpha chain variable domain of TCR clone 161687 (TRAV3, TRAJ31)
CAVRDGNARLMF

SEQ ID NO: 323374 - protein, 14 aa, Homo sapiens
  CDR3 for beta chain variable domain of TCR clone 161687 (TRBV7-3, TRBJ1-1)
CASSLKGGNTEAFF

SEQ ID NO: 323375 - protein, 16 aa, Homo sapiens
  CDR3 for alpha chain variable domain of TCR clone 161688 (TRAV26-1, TRAJ37)
CIYARHGPSNTGKLIF

SEQ ID NO: 323376 - protein, 16 aa, Homo sapiens
  CDR3 for beta chain variable domain of TCR clone 161688 (TRBV19, TRBJ2-4)
CATGGLAGGTKNIQYF

SEQ ID NO: 323377 - protein, 15 aa, Homo sapiens
  CDR3 for alpha chain variable domain of TCR clone 161689 (TRAV13-1, TRAJ17)
CSASIERSAGNKLTF

SEQ ID NO: 323378 - protein, 12 aa, Homo sapiens
  CDR3 for beta chain variable domain of TCR clone 161689 (TRBV5-7, TRBJ1-1)
CASSLGRGKAFF

SEQ ID NO: 323379 - protein, 13 aa, Homo sapiens
  CDR3 for alpha chain variable domain of TCR clone 161690 (TRAV26-1, TRAJ48)
CIVRVVGDEKLTF

SEQ ID NO: 323380 - protein, 17 aa, Homo sapiens
  CDR3 for beta chain variable domain of TCR clone 161690 (TRBV4-1, TRBJ1-4)
CASSQEGPRGVEEKLFF

SEQ ID NO: 323381 - protein, 12 aa, Homo sapiens
  CDR3 for alpha chain variable domain of TCR clone 161691 (TRAV13-1, TRAJ21)
CAAKEGFNKFYF

SEQ ID NO: 323382 - protein, 12 aa, Homo sapiens
  CDR3 for beta chain variable domain of TCR clone 161691 (TRBV5-1, TRBJ1-2)
CASSQDTYGYTF

SEQ ID NO: 323383 - protein, 11 aa, Homo sapiens
  CDR3 for alpha chain variable domain of TCR clone 161692 (TRAV3, TRAJ21)
CALGNFNKFYF

SEQ ID NO: 323384 - protein, 16 aa, Homo sapiens
  CDR3 for beta chain variable domain of TCR clone 161692 (TRBV19, TRBJ2-1)
CASSKAGASSYNEQFF

SEQ ID NO: 323385 - protein, 14 aa, Homo sapiens
  CDR3 for alpha chain variable domain of TCR clone 161693 (TRAV3, TRAJ27)
CAVRDDTNAGKSTF

SEQ ID NO: 323386 - protein, 13 aa, Homo sapiens
  CDR3 for beta chain variable domain of TCR clone 161693 (TRBV12-4, TRBJ2-5)
CASSPGTEETQYF

SEQ ID NO: 323387 - protein, 15 aa, Homo sapiens
  CDR3 for alpha chain variable domain of TCR clone 161694 (TRAV12-2, TRAJ56)
CAVNPFTGTNSKLTF

SEQ ID NO: 323388 - protein, 13 aa, Homo sapiens
  CDR3 for beta chain variable domain of TCR clone 161694 (TRBV20-1, TRBJ1-2)
CSARDRVYGGYTF

SEQ ID NO: 323389 - protein, 17 aa, Homo sapiens
  CDR3 for alpha chain variable domain of TCR clone 161695 (TRAV3, TRAJ38)
CAVRDCLNAGNNCKLIW

SEQ ID NO: 323390 - protein, 14 aa, Homo sapiens
  CDR3 for beta chain variable domain of TCR clone 161695 (TRBV5-5, TRBJ1-5)
CASSGQGVDQPQHF

SEQ ID NO: 323391 - protein, 13 aa, Homo sapiens
  CDR3 for alpha chain variable domain of TCR clone 161696 (TRAV1-2, TRAJ12)
CAVSMDSSYKLIF

SEQ ID NO: 323392 - protein, 12 aa, Homo sapiens
  CDR3 for beta chain variable domain of TCR clone 161696 (TRBV29-1, TRBJ2-3)
CSVTGGADTQYF

SEQ ID NO: 323393 - protein, 14 aa, Homo sapiens
  CDR3 for alpha chain variable domain of TCR clone 161697 (TRAV12-2, TRAJ13)
CAGKKTGGYQKVTF

SEQ ID NO: 323394 - protein, 13 aa, Homo sapiens
  CDR3 for beta chain variable domain of TCR clone 161697 (TRBV27, TRBJ1-1)
CASSLSIGAEAFF

SEQ ID NO: 323395 - protein, 15 aa, Homo sapiens
  CDR3 for alpha chain variable domain of TCR clone 161698 (TRAV29/DV5, TRAJ40)
CAASAQGSGTYKYIF

SEQ ID NO: 323396 - protein, 12 aa, Homo sapiens
  CDR3 for beta chain variable domain of TCR clone 161698 (TRBV7-9, TRBJ1-5)
CASSSDNQPQHF

SEQ ID NO: 323397 - protein, 14 aa, Homo sapiens
  CDR3 for alpha chain variable domain of TCR clone 161699 (TRAV1-2, TRAJ16)
CAVNRFSDGQKLLF

SEQ ID NO: 323398 - protein, 12 aa, Homo sapiens
  CDR3 for beta chain variable domain of TCR clone 161699 (TRBV13, TRBJ2-1)
CASSLGAQEQFF

SEQ ID NO: 323399 - protein, 15 aa, Homo sapiens
  CDR3 for alpha chain variable domain of TCR clone 161700 (TRAV13-2, TRAJ45)
RAEHHSGGGADGLTF

SEQ ID NO: 323400 - protein, 15 aa, Homo sapiens
  CDR3 for beta chain variable domain of TCR clone 161700 (TRBV7-2, TRBJ2-7)
CASSLALGSAYEQYF

SEQ ID NO: 323401 - protein, 10 aa, Homo sapiens
  CDR3 for alpha chain variable domain of TCR clone 161701 (TRAV36/DV7, TRAJ31)
CAVGEARLMF

SEQ ID NO: 323402 - protein, 16 aa, Homo sapiens
  CDR3 for beta chain variable domain of TCR clone 161701 (TRBV12-5, TRBJ2-5)
CASGPRTSGNQETQYF

SEQ ID NO: 323403 - protein, 15 aa, Homo sapiens
  CDR3 for alpha chain variable domain of TCR clone 161702 (TRAV27, TRAJ38)
CAARRNADKNRKLIW

SEQ ID NO: 323404 - protein, 13 aa, Homo sapiens
  CDR3 for beta chain variable domain of TCR clone 161702 (TRBV12-5, TRBJ2-3)
CASGDRQSDTQYF

SEQ ID NO: 323405 - protein, 16 aa, Homo sapiens
  CDR3 for alpha chain variable domain of TCR clone 161703 (TRAV26-1, TRAJ37)
CIVRGDGPGNTGKLIF

SEQ ID NO: 323406 - protein, 17 aa, Homo sapiens
  CDR3 for beta chain variable domain of TCR clone 161703 (TRBV4-1, TRBJ2-7)
CANSRDPLGVRGGEQYF

SEQ ID NO: 323407 - protein, 14 aa, Homo sapiens
  CDR3 for alpha chain variable domain of TCR clone 161704 (TRAV13-1, TRAJ35)
CAASKGGFGNGLHC

SEQ ID NO: 323408 - protein, 11 aa, Homo sapiens
  CDR3 for beta chain variable domain of TCR clone 161704 (TRBV11-2, TRBJ2-2)
CASSLPGELFF

SEQ ID NO: 323409 - protein, 16 aa, Homo sapiens
  CDR3 for alpha chain variable domain of TCR clone 161705 (TRAV12-3, TRAJ45)
CAMGWGSGGGADGLTF

SEQ ID NO: 323410 - protein, 16 aa, Homo sapiens
  CDR3 for beta chain variable domain of TCR clone 161705 (TRBV11-2, TRBJ2-7)
CASSPTTGGVSYEQYF

SEQ ID NO: 323411 - protein, 15 aa, Homo sapiens
  CDR3 for alpha chain variable domain of TCR clone 161706 (TRAV13-2, TRAJ50)
FAEEPLKTSYDKVIF

SEQ ID NO: 323412 - protein, 15 aa, Homo sapiens
  CDR3 for beta chain variable domain of TCR clone 161706 (TRBV20-1, TRBJ1-5)
CSARGSVDSNQPQHF

SEQ ID NO: 323413 - protein, 13 aa, Homo sapiens
  CDR3 for alpha chain variable domain of TCR clone 161707 (TRAV2, TRAJ29)
CAAQNSGNTPLVF

SEQ ID NO: 323414 - protein, 17 aa, Homo sapiens
  CDR3 for beta chain variable domain of TCR clone 161707 (TRBV15, TRBJ1-4)
CATSRYGTGDPNEKLFF

SEQ ID NO: 323415 - protein, 14 aa, Homo sapiens
  CDR3 for alpha chain variable domain of TCR clone 161708 (TRAV12-2, TRAJ40)
CPVKIPSGTYKYIF

SEQ ID NO: 323416 - protein, 20 aa, Homo sapiens
  CDR3 for beta chain variable domain of TCR clone 161708 (TRBV28, TRBJ2-1)
CASTPIGRSPGLAGGNEQFF

SEQ ID NO: 323417 - protein, 10 aa, Homo sapiens
  CDR3 for alpha chain variable domain of TCR clone 161709 (TRAV16, TRAJ22)
SAMYLRQLTF

SEQ ID NO: 323418 - protein, 15 aa, Homo sapiens
  CDR3 for beta chain variable domain of TCR clone 161709 (TRBV7-9, TRBJ1-6)
CASSAPGRGKSPLHF

SEQ ID NO: 323419 - protein, 15 aa, Homo sapiens
  CDR3 for alpha chain variable domain of TCR clone 161710 (TRAV3, TRAJ17)
FAVSPKEAAGNKLTF

SEQ ID NO: 323420 - protein, 12 aa, Homo sapiens
  CDR3 for beta chain variable domain of TCR clone 161710 (TRBV24-1, TRBJ1-1)
CATLYPDTEAFF

SEQ ID NO: 323421 - protein, 12 aa, Homo sapiens
  CDR3 for alpha chain variable domain of TCR clone 161711 (TRAV13-1, TRAJ21)
CAAFFNFNKFYF

SEQ ID NO: 323422 - protein, 12 aa, Homo sapiens
  CDR3 for beta chain variable domain of TCR clone 161711 (TRBV7-9, TRBJ2-3)
CASSFITDTQYF

SEQ ID NO: 323423 - protein, 13 aa, Homo sapiens
  CDR3 for alpha chain variable domain of TCR clone 161712 (TRAV13-1, TRAJ39)
CAAGIVMQATCSP

SEQ ID NO: 323424 - protein, 15 aa, Homo sapiens
  CDR3 for beta chain variable domain of TCR clone 161712 (TRBV7-2, TRBJ2-7)
CASSLKGALTYEQYF

SEQ ID NO: 323425 - protein, 16 aa, Homo sapiens
  CDR3 for alpha chain variable domain of TCR clone 161713 (TRAV26-1, TRAJ23)
CIVRVHPYNKGGKLIF

SEQ ID NO: 323426 - protein, 15 aa, Homo sapiens
  CDR3 for beta chain variable domain of TCR clone 161713 (TRBV5-7, TRBJ2-7)
CASSPYFEGSYEQYF

SEQ ID NO: 323427 - protein, 16 aa, Homo sapiens
  CDR3 for alpha chain variable domain of TCR clone 161714 (TRAV30, TRAJ24)
CGTEIVDADSWGKFQF

SEQ ID NO: 323428 - protein, 16 aa, Homo sapiens
  CDR3 for beta chain variable domain of TCR clone 161714 (TRBV6-6, TRBJ2-1)
CASSWGGQGPYNEQFF

SEQ ID NO: 323429 - protein, 15 aa, Homo sapiens
  CDR3 for alpha chain variable domain of TCR clone 161715 (TRAV26-1, TRAJ29)
CIVRVEGSGNTPLVF

SEQ ID NO: 323430 - protein, 14 aa, Homo sapiens
  CDR3 for beta chain variable domain of TCR clone 161715 (TRBV19, TRBJ1-2)
CASSLQGQAYGYTF

SEQ ID NO: 323431 - protein, 15 aa, Homo sapiens
  CDR3 for alpha chain variable domain of TCR clone 161716 (TRAV8-3, TRAJ11)
CAVGLLNSGYSTLTF

SEQ ID NO: 323432 - protein, 15 aa, Homo sapiens
  CDR3 for beta chain variable domain of TCR clone 161716 (TRBV19, TRBJ2-1)
CASSMGWNSNNEQFF

SEQ ID NO: 323433 - protein, 14 aa, Homo sapiens
  CDR3 for alpha chain variable domain of TCR clone 161717 (TRAV1-2, TRAJ16)
CADNRFSDGQKLLF

SEQ ID NO: 323434 - protein, 17 aa, Homo sapiens
  CDR3 for beta chain variable domain of TCR clone 161717 (TRBV7-9, TRBJ2-1)
CASSLVASYPSYNEQFF

SEQ ID NO: 323435 - protein, 13 aa, Homo sapiens
  CDR3 for alpha chain variable domain of TCR clone 161718 (TRAV17, TRAJ22)
CAHHSGSARQLTS

SEQ ID NO: 323436 - protein, 14 aa, Homo sapiens
  CDR3 for beta chain variable domain of TCR clone 161718 (TRBV16, TRBJ1-1)
CASSQAGPNTEAFF

SEQ ID NO: 323437 - protein, 14 aa, Homo sapiens
  CDR3 for alpha chain variable domain of TCR clone 161719 (TRAV12-3, TRAJ10)
SHLPLTGGGNKLTF

SEQ ID NO: 323438 - protein, 16 aa, Homo sapiens
  CDR3 for beta chain variable domain of TCR clone 161719 (TRBV19, TRBJ1-1)
CASRFGGPVTGTEAYF

SEQ ID NO: 323439 - protein, 12 aa, Homo sapiens
  CDR3 for alpha chain variable domain of TCR clone 161720 (TRAV1-1, TRAJ15)
CAVGRAGTALIF

SEQ ID NO: 323440 - protein, 16 aa, Homo sapiens
  CDR3 for beta chain variable domain of TCR clone 161720 (TRBV12-4, TRBJ2-7)
CASSPEGQGSSYEQYF

SEQ ID NO: 323441 - protein, 16 aa, Homo sapiens
  CDR3 for alpha chain variable domain of TCR clone 161721 (TRAV3, TRAJ10)
CAVRDMRAGGGNKLIF

SEQ ID NO: 323442 - protein, 20 aa, Homo sapiens
  CDR3 for beta chain variable domain of TCR clone 161721 (TRBV28, TRBJ2-1)
CASTPIGRSPGLAGGNEQFF

SEQ ID NO: 323443 - protein, 16 aa, Homo sapiens
  CDR3 for alpha chain variable domain of TCR clone 161722 (TRAV30, TRAJ24)
CGTEIVDADSWGKYQF

SEQ ID NO: 323444 - protein, 14 aa, Homo sapiens
  CDR3 for beta chain variable domain of TCR clone 161722 (TRBV19, TRBJ2-1)
CASPTFVLSGEQFF

SEQ ID NO: 323445 - protein, 15 aa, Homo sapiens
  CDR3 for alpha chain variable domain of TCR clone 161723 (TRAV8-3, TRAJ45)
CAASYSGGGADGLTF

SEQ ID NO: 323446 - protein, 13 aa, Homo sapiens
  CDR3 for beta chain variable domain of TCR clone 161723 (TRBV10-3, TRBJ2-7)
CASKLAVSYEQYF

SEQ ID NO: 323447 - protein, 15 aa, Homo sapiens
  CDR3 for alpha chain variable domain of TCR clone 161724 (TRAV3, TRAJ22)
RAVRDRGGSARQLTF

SEQ ID NO: 323448 - protein, 17 aa, Homo sapiens
  CDR3 for beta chain variable domain of TCR clone 161724 (TRBV24-1, TRBJ2-1)
CATSDVSTSGTYNEQFF

SEQ ID NO: 323449 - protein, 16 aa, Homo sapiens
  CDR3 for alpha chain variable domain of TCR clone 161725 (TRAV12-3, TRAJ53)
CAMSPGSGGSNYKLTF

SEQ ID NO: 323450 - protein, 11 aa, Homo sapiens
  CDR3 for beta chain variable domain of TCR clone 161725 (TRBV29-1, TRBJ2-5)
CSADRTGTQSF

SEQ ID NO: 323451 - protein, 12 aa, Homo sapiens
  CDR3 for alpha chain variable domain of TCR clone 161726 (TRAV3, TRAJ27)
CAVRDGAGKLTF

SEQ ID NO: 323452 - protein, 13 aa, Homo sapiens
  CDR3 for beta chain variable domain of TCR clone 161726 (TRBV10-3, TRBJ1-2)
CAINADLNYGYTF

SEQ ID NO: 323453 - protein, 15 aa, Homo sapiens
  CDR3 for alpha chain variable domain of TCR clone 161727 (TRAV2, TRAJ38)
CAVEDRIGNNRKLIW

SEQ ID NO: 323454 - protein, 14 aa, Homo sapiens
  CDR3 for beta chain variable domain of TCR clone 161727 (TRBV7-8, TRBJ2-7)
CASSPKTSFYEQYF

SEQ ID NO: 323455 - protein, 15 aa, Homo sapiens
  CDR3 for alpha chain variable domain of TCR clone 161728 (TRAV3, TRAJ5)
CAVRDLYTGRRALNF

SEQ ID NO: 323456 - protein, 16 aa, Homo sapiens
  CDR3 for beta chain variable domain of TCR clone 161728 (TRBV20-1, TRBJ1-4)
CSAPGQGLLTNEKLFF

SEQ ID NO: 323457 - protein, 12 aa, Homo sapiens
  CDR3 for alpha chain variable domain of TCR clone 161729 (TRAV13-1, TRAJ49)
CAASPMGNQFYF

SEQ ID NO: 323458 - protein, 10 aa, Homo sapiens
  CDR3 for beta chain variable domain of TCR clone 161729 (TRBV24-1, TRBJ2-2)
CATSEADLER

SEQ ID NO: 323459 - protein, 17 aa, Homo sapiens
  CDR3 for alpha chain variable domain of TCR clone 161730 (TRAV3, TRAJ22)
CAVRDPPLEGFCKATDL

SEQ ID NO: 323460 - protein, 14 aa, Homo sapiens
  CDR3 for beta chain variable domain of TCR clone 161730 (TRBV19, TRBJ2-1)
CASSLAGTYNEQFF

SEQ ID NO: 323461 - protein, 13 aa, Homo sapiens
  CDR3 for alpha chain variable domain of TCR clone 161731 (TRAV8-2, TRAJ43)
CVVSDQGDNDLRF

SEQ ID NO: 323462 - protein, 12 aa, Homo sapiens
  CDR3 for beta chain variable domain of TCR clone 161731 (TRBV7-9, TRBJ2-7)
CASRTGFDEQYF

SEQ ID NO: 323463 - protein, 14 aa, Homo sapiens
  CDR3 for alpha chain variable domain of TCR clone 161732 (TRAV13-1, TRAJ13)
CAASRVGGYQKVTF

SEQ ID NO: 323464 - protein, 13 aa, Homo sapiens
  CDR3 for beta chain variable domain of TCR clone 161732 (TRBV10-3, TRBJ2-7)
CASKLAVNYEQYF

SEQ ID NO: 323465 - protein, 15 aa, Homo sapiens
  CDR3 for alpha chain variable domain of TCR clone 161733 (TRAV12-2, TRAJ8)
CAVREENTGFQKLVF

SEQ ID NO: 323466 - protein, 16 aa, Homo sapiens
  CDR3 for beta chain variable domain of TCR clone 161733 (TRBV6-1, TRBJ2-5)
CASSETLDRGAETQYF

SEQ ID NO: 323467 - protein, 12 aa, Homo sapiens
  CDR3 for alpha chain variable domain of TCR clone 161734 (TRAV20, TRAJ36)
CAILTGANNLFF

SEQ ID NO: 323468 - protein, 17 aa, Homo sapiens
  CDR3 for beta chain variable domain of TCR clone 161734 (TRBV11-2, TRBJ2-1)
CASSLYPPGVEYNEQFF

SEQ ID NO: 323469 - protein, 13 aa, Homo sapiens
  CDR3 for alpha chain variable domain of TCR clone 161735 (TRAV21, TRAJ27)
CAARPGNAGKSTF

SEQ ID NO: 323470 - protein, 16 aa, Homo sapiens
  CDR3 for beta chain variable domain of TCR clone 161735 (TRBV20-1, TRBJ1-2)
CSASMGQGVANYGYTI

SEQ ID NO: 323471 - protein, 18 aa, Homo sapiens
  CDR3 for alpha chain variable domain of TCR clone 161736 (TRAV26-1, TRAJ52)
CIVRVEGAGGTSYGKLTF

SEQ ID NO: 323472 - protein, 13 aa, Homo sapiens
  CDR3 for beta chain variable domain of TCR clone 161736 (TRBV7-3, TRBJ1-2)
CASSLKGGYGYTF

SEQ ID NO: 323473 - protein, 10 aa, Homo sapiens
  CDR3 for alpha chain variable domain of TCR clone 161737 (TRAV13-1, TRAJ26)
CAPYGQNFVF

SEQ ID NO: 323474 - protein, 15 aa, Homo sapiens
  CDR3 for beta chain variable domain of TCR clone 161737 (TRBV28, TRBJ2-3)
CASSQEIGGTDTQYF

SEQ ID NO: 323475 - protein, 14 aa, Homo sapiens
  CDR3 for alpha chain variable domain of TCR clone 161738 (TRAV13-1, TRAJ44)
CAAKATGTASKLTF

SEQ ID NO: 323476 - protein, 15 aa, Homo sapiens
  CDR3 for beta chain variable domain of TCR clone 161738 (TRBV27, TRBJ2-7)
CASSPQREGQREQYF

SEQ ID NO: 323477 - protein, 10 aa, Homo sapiens
  CDR3 for alpha chain variable domain of TCR clone 161739 (TRAV38-1, TRAJ34)
CAFMADKLIF

SEQ ID NO: 323478 - protein, 14 aa, Homo sapiens
  CDR3 for beta chain variable domain of TCR clone 161739 (TRBV7-2, TRBJ2-2)
CASSLNSNTGELFF

SEQ ID NO: 323479 - protein, 17 aa, Homo sapiens
  CDR3 for alpha chain variable domain of TCR clone 161740 (TRAV3, TRAJ6)
CAVRDGPRAGGSYIPTF

SEQ ID NO: 323480 - protein, 15 aa, Homo sapiens
  CDR3 for beta chain variable domain of TCR clone 161740 (TRBV19, TRBJ2-7)
CASSIGGGLVNEQYF

SEQ ID NO: 323481 - protein, 13 aa, Homo sapiens
  CDR3 for alpha chain variable domain of TCR clone 161741 (TRAV8-4, TRAJ48)
CAVSLFGNEKLTF

SEQ ID NO: 323482 - protein, 18 aa, Homo sapiens
  CDR3 for beta chain variable domain of TCR clone 161741 (TRBV12-4, TRBJ2-2)
CASSLVAGTRGRTGEQFF

SEQ ID NO: 323483 - protein, 14 aa, Homo sapiens
  CDR3 for alpha chain variable domain of TCR clone 161742 (TRAV2, TRAJ37)
CAVDFTSNTGKLIF

SEQ ID NO: 323484 - protein, 15 aa, Homo sapiens
  CDR3 for beta chain variable domain of TCR clone 161742 (TRBV20-1, TRBJ1-1)
CSASLGVTVNTEAFF

SEQ ID NO: 323485 - protein, 16 aa, Homo sapiens
  CDR3 for alpha chain variable domain of TCR clone 161743 (TRAV3, TRAJ37)
CAVRGKGSGNTGKLIF

SEQ ID NO: 323486 - protein, 14 aa, Homo sapiens
  CDR3 for beta chain variable domain of TCR clone 161743 (TRBV10-3, TRBJ1-3)
CAIRGQRAGNTMYF

SEQ ID NO: 323487 - protein, 15 aa, Homo sapiens
  CDR3 for alpha chain variable domain of TCR clone 161744 (TRAV26-1, TRAJ44)
CIVRANTGTASKLTF

SEQ ID NO: 323488 - protein, 15 aa, Homo sapiens
  CDR3 for beta chain variable domain of TCR clone 161744 (TRBV19, TRBJ1-3)
CASRGLRLSGNTIYF

SEQ ID NO: 323489 - protein, 15 aa, Homo sapiens
  CDR3 for alpha chain variable domain of TCR clone 161745 (TRAV17, TRAJ16)
CATALRSSDGQKLLF

SEQ ID NO: 323490 - protein, 14 aa, Homo sapiens
  CDR3 for beta chain variable domain of TCR clone 161745 (TRBV25-1, TRBJ1-1)
CASTHLGGNTEAFF

SEQ ID NO: 323491 - protein, 11 aa, Homo sapiens
  CDR3 for alpha chain variable domain of TCR clone 161746 (TRAV2, TRAJ23)
CAVETRGKLIF

SEQ ID NO: 323492 - protein, 14 aa, Homo sapiens
  CDR3 for beta chain variable domain of TCR clone 161746 (TRBV2, TRBJ2-3)
CASIEGQNTDTQYF

SEQ ID NO: 323493 - protein, 16 aa, Homo sapiens
  CDR3 for alpha chain variable domain of TCR clone 161747 (TRAV27, TRAJ34)
CAGGGLGDYNTDKLIC

SEQ ID NO: 323494 - protein, 15 aa, Homo sapiens
  CDR3 for beta chain variable domain of TCR clone 161747 (TRBV9, TRBJ1-4)
CASSVGGSTNEKLFF

SEQ ID NO: 323495 - protein, 15 aa, Homo sapiens
  CDR3 for alpha chain variable domain of TCR clone 161748 (TRAV1-2, TRAJ15)
CAVDVMGSAGTALIF

SEQ ID NO: 323496 - protein, 13 aa, Homo sapiens
  CDR3 for beta chain variable domain of TCR clone 161748 (TRBV20-1, TRBJ1-1)
CSAFDRENTEVFF

SEQ ID NO: 323497 - protein, 11 aa, Homo sapiens
  CDR3 for alpha chain variable domain of TCR clone 161749 (TRAV21, TRAJ31)
CAVRNNARLMF

SEQ ID NO: 323498 - protein, 15 aa, Homo sapiens
  CDR3 for beta chain variable domain of TCR clone 161749 (TRBV20-1, TRBJ2-7)
CSARERVSGMDEQYF

SEQ ID NO: 323499 - protein, 13 aa, Homo sapiens
  CDR3 for alpha chain variable domain of TCR clone 161750 (TRAV8-6, TRAJ48)
CAGVNFGNEKLTF

SEQ ID NO: 323500 - protein, 16 aa, Homo sapiens
  CDR3 for beta chain variable domain of TCR clone 161750 (TRBV4-2, TRBJ2-6)
CASSQARSAGANVLTF

SEQ ID NO: 323501 - protein, 15 aa, Homo sapiens
  CDR3 for alpha chain variable domain of TCR clone 161751 (TRAV2, TRAJ37)
CAVEDGSSNTGKLIF

SEQ ID NO: 323502 - protein, 15 aa, Homo sapiens
  CDR3 for beta chain variable domain of TCR clone 161751 (TRBV27, TRBJ2-1)
CASSNGGGSSNEQFF

SEQ ID NO: 323503 - protein, 16 aa, Homo sapiens
  CDR3 for alpha chain variable domain of TCR clone 161752 (TRAV16, TRAJ52)
CALRAAGGTSYGKLTF

SEQ ID NO: 323504 - protein, 12 aa, Homo sapiens
  CDR3 for beta chain variable domain of TCR clone 161752 (TRBV12-4, TRBJ1-3)
CASSVSGNTIYF

SEQ ID NO: 323505 - protein, 15 aa, Homo sapiens
  CDR3 for alpha chain variable domain of TCR clone 161753 (TRAV27, TRAJ50)
CAGRERGTYYDKVIF

SEQ ID NO: 323506 - protein, 16 aa, Homo sapiens
  CDR3 for beta chain variable domain of TCR clone 161753 (TRBV10-3, TRBJ1-5)
CAISDQVGAPNQPQHF

SEQ ID NO: 323507 - protein, 12 aa, Homo sapiens
  CDR3 for alpha chain variable domain of TCR clone 161754 (TRAV30, TRAJ43)
CGTEERGNDMRF

SEQ ID NO: 323508 - protein, 15 aa, Homo sapiens
  CDR3 for beta chain variable domain of TCR clone 161754 (TRBV2, TRBJ2-7)
CASSEGLARSYEQYF

SEQ ID NO: 323509 - protein, 16 aa, Homo sapiens
  CDR3 for alpha chain variable domain of TCR clone 161755 (TRAV12-3, TRAJ53)
CAMTPGSGGSNYKLTF

SEQ ID NO: 323510 - protein, 11 aa, Homo sapiens
  CDR3 for beta chain variable domain of TCR clone 161755 (TRBV29-1, TRBJ2-5)
CSEDRTGNQYF

SEQ ID NO: 323511 - protein, 13 aa, Homo sapiens
  CDR3 for alpha chain variable domain of TCR clone 161756 (TRAV13-1, TRAJ6)
CAASKGGSYIPTF

SEQ ID NO: 323512 - protein, 12 aa, Homo sapiens
  CDR3 for beta chain variable domain of TCR clone 161756 (TRBV27, TRBJ2-2)
CASKLFTGELFF

SEQ ID NO: 323513 - protein, 10 aa, Homo sapiens
  CDR3 for alpha chain variable domain of TCR clone 161757 (TRAV12-3, TRAJ49)
CAMNDDQFYF

SEQ ID NO: 323514 - protein, 15 aa, Homo sapiens
  CDR3 for beta chain variable domain of TCR clone 161757 (TRBV7-9, TRBJ1-4)
CASSARTGGNEKLFF

SEQ ID NO: 323515 - protein, 14 aa, Homo sapiens
  CDR3 for alpha chain variable domain of TCR clone 161758 (TRAV27, TRAJ22)
CAGVSVLGKRQLTF

SEQ ID NO: 323516 - protein, 15 aa, Homo sapiens
  CDR3 for beta chain variable domain of TCR clone 161758 (TRBV7-3, TRBJ2-2)
CASSETGQGTGELFF

SEQ ID NO: 323517 - protein, 14 aa, Homo sapiens
  CDR3 for alpha chain variable domain of TCR clone 161759 (TRAV14/DV4, TRAJ38)
CAMRGAGNNRKLIW

SEQ ID NO: 323518 - protein, 16 aa, Homo sapiens
  CDR3 for beta chain variable domain of TCR clone 161759 (TRBV11-1, TRBJ1-1)
CASSPRGAHMNSEAFF

SEQ ID NO: 323519 - protein, 15 aa, Homo sapiens
  CDR3 for alpha chain variable domain of TCR clone 161760 (TRAV21, TRAJ53)
CATLSSGSSNYKLTF

SEQ ID NO: 323520 - protein, 15 aa, Homo sapiens
  CDR3 for beta chain variable domain of TCR clone 161760 (TRBV27, TRBJ2-1)
CASNNGGGSSNEQFF

SEQ ID NO: 323521 - protein, 12 aa, Homo sapiens
  CDR3 for alpha chain variable domain of TCR clone 161761 (TRAV8-3, TRAJ20)
CAVGGGDYKLSF

SEQ ID NO: 323522 - protein, 13 aa, Homo sapiens
  CDR3 for beta chain variable domain of TCR clone 161761 (TRBV10-3, TRBJ2-7)
CASKLAVNYEQYF

SEQ ID NO: 323523 - protein, 13 aa, Homo sapiens
  CDR3 for alpha chain variable domain of TCR clone 161762 (TRAV3, TRAJ21)
CAVREPDFNKFYF

SEQ ID NO: 323524 - protein, 18 aa, Homo sapiens
  CDR3 for beta chain variable domain of TCR clone 161762 (TRBV11-2, TRBJ2-3)
CSSSLGGASRGAPNTQYF

SEQ ID NO: 323525 - protein, 13 aa, Homo sapiens
  CDR3 for alpha chain variable domain of TCR clone 161763 (TRAV35, TRAJ58)
CAGLETSGSRLTF

SEQ ID NO: 323526 - protein, 15 aa, Homo sapiens
  CDR3 for beta chain variable domain of TCR clone 161763 (TRBV20-1, TRBJ2-1)
CSARFSAGDRMSSSS

SEQ ID NO: 323527 - protein, 13 aa, Homo sapiens
  CDR3 for alpha chain variable domain of TCR clone 161764 (TRAV35, TRAJ22)
CAGLSGSARQLTF

SEQ ID NO: 323528 - protein, 16 aa, Homo sapiens
  CDR3 for beta chain variable domain of TCR clone 161764 (TRBV7-9, TRBJ2-1)
CASSLDLTGQGKEQFF

SEQ ID NO: 323529 - protein, 12 aa, Homo sapiens
  CDR3 for alpha chain variable domain of TCR clone 161765 (TRAV13-1, TRAJ49)
CAASPMGYQFYF

SEQ ID NO: 323530 - protein, 16 aa, Homo sapiens
  CDR3 for beta chain variable domain of TCR clone 161765 (TRBV7-3, TRBJ2-2)
CASSLKRGTLSGELFF

SEQ ID NO: 323531 - protein, 16 aa, Homo sapiens
  CDR3 for alpha chain variable domain of TCR clone 161766 (TRAV19, TRAJ4)
CALSGPLVGGYNKLIF

SEQ ID NO: 323532 - protein, 14 aa, Homo sapiens
  CDR3 for beta chain variable domain of TCR clone 161766 (TRBV19, TRBJ2-1)
CASPTFVLSGEQFF

SEQ ID NO: 323533 - protein, 13 aa, Homo sapiens
  CDR3 for alpha chain variable domain of TCR clone 161767 (TRAV25, TRAJ40)
CAGSASGTYKYIF

SEQ ID NO: 323534 - protein, 14 aa, Homo sapiens
  CDR3 for beta chain variable domain of TCR clone 161767 (TRBV7-2, TRBJ2-7)
CASRSQWAAYEQYF

SEQ ID NO: 323535 - protein, 14 aa, Homo sapiens
  CDR3 for alpha chain variable domain of TCR clone 161768 (TRAV13-2, TRAJ15)
CAENPNQAGTALIV

SEQ ID NO: 323536 - protein, 16 aa, Homo sapiens
  CDR3 for beta chain variable domain of TCR clone 161768 (TRBV12-4, TRBJ1-2)
CASSPTATGKTRGYTF

SEQ ID NO: 323537 - protein, 15 aa, Homo sapiens
  CDR3 for alpha chain variable domain of TCR clone 161769 (TRAV27, TRAJ37)
CAGIHGSSRTGKLIF

SEQ ID NO: 323538 - protein, 13 aa, Homo sapiens
  CDR3 for beta chain variable domain of TCR clone 161769 (TRBV19, TRBJ2-1)
CASSIRSSWEQFF

SEQ ID NO: 323539 - protein, 14 aa, Homo sapiens
  CDR3 for alpha chain variable domain of TCR clone 161770 (TRAV29/DV5, TRAJ44)
CAAFLVGTASKLTF

SEQ ID NO: 323540 - protein, 15 aa, Homo sapiens
  CDR3 for beta chain variable domain of TCR clone 161770 (TRBV7-3, TRBJ2-2)
CARSETGQGTGELFF

SEQ ID NO: 323541 - protein, 15 aa, Homo sapiens
  CDR3 for alpha chain variable domain of TCR clone 161771 (TRAV3, TRAJ20)
CAVRDIKLSDYKLSF

SEQ ID NO: 323542 - protein, 15 aa, Homo sapiens
  CDR3 for beta chain variable domain of TCR clone 161771 (TRBV11-1, TRBJ2-7)
CASSLNYGASYEQYF

SEQ ID NO: 323543 - protein, 17 aa, Homo sapiens
  CDR3 for alpha chain variable domain of TCR clone 161772 (TRAV3, TRAJ6)
CAVRDGPREGGSYIPTL

SEQ ID NO: 323544 - protein, 14 aa, Homo sapiens
  CDR3 for beta chain variable domain of TCR clone 161772 (TRBV7-2, TRBJ2-7)
CASSPKTSFYEQYF

SEQ ID NO: 323545 - protein, 13 aa, Homo sapiens
  CDR3 for alpha chain variable domain of TCR clone 161773 (TRAV2, TRAJ40)
CAVVTSGTYKYIF

SEQ ID NO: 323546 - protein, 16 aa, Homo sapiens
  CDR3 for beta chain variable domain of TCR clone 161773 (TRBV19, TRBJ2-2)
CASRSPGTGATGELFV

SEQ ID NO: 323547 - protein, 11 aa, Homo sapiens
  CDR3 for alpha chain variable domain of TCR clone 161774 (TRAV35, TRAJ30)
CAPGGDDKIIF

SEQ ID NO: 323548 - protein, 15 aa, Homo sapiens
  CDR3 for beta chain variable domain of TCR clone 161774 (TRBV20-1, TRBJ2-7)
CSARDRVSGMDEQYF

SEQ ID NO: 323549 - protein, 14 aa, Homo sapiens
  CDR3 for alpha chain variable domain of TCR clone 161775 (TRAV8-1, TRAJ24)
CAVNAADSWGKLQF

SEQ ID NO: 323550 - protein, 13 aa, Homo sapiens
  CDR3 for beta chain variable domain of TCR clone 161775 (TRBV4-3, TRBJ2-1)
QPSLDRGVNEQFF

SEQ ID NO: 323551 - protein, 16 aa, Homo sapiens
  CDR3 for alpha chain variable domain of TCR clone 161776 (TRAV30, TRAJ24)
CGIEIVDADSWGKFQF

SEQ ID NO: 323552 - protein, 14 aa, Homo sapiens
  CDR3 for beta chain variable domain of TCR clone 161776 (TRBV12-5, TRBJ2-5)
CASGSRTHQGTQYF

SEQ ID NO: 323553 - protein, 15 aa, Homo sapiens
  CDR3 for alpha chain variable domain of TCR clone 161777 (TRAV21, TRAJ38)
CAVRQDAGNNRKLIG

SEQ ID NO: 323554 - protein, 11 aa, Homo sapiens
  CDR3 for beta chain variable domain of TCR clone 161777 (TRBV12-4, TRBJ2-3)
CASTATDTQYF

SEQ ID NO: 323555 - protein, 12 aa, Homo sapiens
  CDR3 for alpha chain variable domain of TCR clone 161778 (TRAV8-3, TRAJ26)
CAGDNYGQNFVF

SEQ ID NO: 323556 - protein, 14 aa, Homo sapiens
  CDR3 for beta chain variable domain of TCR clone 161778 (TRBV4-1, TRBJ1-1)
CASSRSGQSFEAFF

SEQ ID NO: 323557 - protein, 14 aa, Homo sapiens
  CDR3 for alpha chain variable domain of TCR clone 161779 (TRAV14/DV4, TRAJ26)
CAMREGTYGQNFVF

SEQ ID NO: 323558 - protein, 14 aa, Homo sapiens
  CDR3 for beta chain variable domain of TCR clone 161779 (TRBV7-3, TRBJ2-3)
CASSSTGVADTQYF

SEQ ID NO: 323559 - protein, 12 aa, Homo sapiens
  CDR3 for alpha chain variable domain of TCR clone 161780 (TRAV2, TRAJ9)
CAVGAGGFRPIF

SEQ ID NO: 323560 - protein, 16 aa, Homo sapiens
  CDR3 for beta chain variable domain of TCR clone 161780 (TRBV13, TRBJ2-2)
CASSPRTGEHTGELFF

SEQ ID NO: 323561 - protein, 15 aa, Homo sapiens
  CDR3 for alpha chain variable domain of TCR clone 161781 (TRAV1-2, TRAJ30)
CAVRPHGNRDDKISF

SEQ ID NO: 323562 - protein, 13 aa, Homo sapiens
  CDR3 for beta chain variable domain of TCR clone 161781 (TRBV4-1, TRBJ2-7)
CASSQGQAYEQYF

SEQ ID NO: 323563 - protein, 14 aa, Homo sapiens
  CDR3 for alpha chain variable domain of TCR clone 161782 (TRAV3, TRAJ34)
CAVRDINNTDKLIF

SEQ ID NO: 323564 - protein, 14 aa, Homo sapiens
  CDR3 for beta chain variable domain of TCR clone 161782 (TRBV7-2, TRBJ2-2)
CASSLGQNTRELFF

SEQ ID NO: 323565 - protein, 15 aa, Homo sapiens
  CDR3 for alpha chain variable domain of TCR clone 161783 (TRAV27, TRAJ38)
CAARRNAGNNRKLIW

SEQ ID NO: 323566 - protein, 16 aa, Homo sapiens
  CDR3 for beta chain variable domain of TCR clone 161783 (TRBV6-1, TRBJ2-5)
CASSETLDSGADAQYF

SEQ ID NO: 323567 - protein, 15 aa, Homo sapiens
  CDR3 for alpha chain variable domain of TCR clone 161784 (TRAV23/DV6, TRAJ13)
CAAWPGGGGYQKVTF

SEQ ID NO: 323568 - protein, 17 aa, Homo sapiens
  CDR3 for beta chain variable domain of TCR clone 161784 (TRBV19, TRBJ2-7)
CASSISFYDSDPYEQYF

SEQ ID NO: 323569 - protein, 16 aa, Homo sapiens
  CDR3 for alpha chain variable domain of TCR clone 161785 (TRAV8-3, TRAJ8)
CAVPRDGNTGFKKLVF

SEQ ID NO: 323570 - protein, 14 aa, Homo sapiens
  CDR3 for beta chain variable domain of TCR clone 161785 (TRBV4-1, TRBJ2-2)
CASSQAVNTGELFF

SEQ ID NO: 323571 - protein, 14 aa, Homo sapiens
  CDR3 for alpha chain variable domain of TCR clone 161786 (TRAV12-3, TRAJ10)
SHLPLTGGGNKLTF

SEQ ID NO: 323572 - protein, 13 aa, Homo sapiens
  CDR3 for beta chain variable domain of TCR clone 161786 (TRBV19, TRBJ1-1)
CASSPQMNTEAFF

SEQ ID NO: 323573 - protein, 17 aa, Homo sapiens
  CDR3 for alpha chain variable domain of TCR clone 161787 (TRAV38-2/DV8, TRAJ23)
CALSRKLIFGQGTELSV

SEQ ID NO: 323574 - protein, 13 aa, Homo sapiens
  CDR3 for beta chain variable domain of TCR clone 161787 (TRBV11-3, TRBJ2-3)
CASSHDTKDTQYF

SEQ ID NO: 323575 - protein, 20 aa, Homo sapiens
  CDR3 for alpha chain variable domain of TCR clone 161788 (TRAV8-3, TRAJ44)
LSTSVLWVRLYTGTASKLTF

SEQ ID NO: 323576 - protein, 15 aa, Homo sapiens
  CDR3 for beta chain variable domain of TCR clone 161788 (TRBV5-5, TRBJ1-5)
CASSSTPGSNQPQHF

SEQ ID NO: 323577 - protein, 15 aa, Homo sapiens
  CDR3 for alpha chain variable domain of TCR clone 161789 (TRAV12-1, TRAJ10)
CVVNKLTGGGNKRTF

SEQ ID NO: 323578 - protein, 17 aa, Homo sapiens
  CDR3 for beta chain variable domain of TCR clone 161789 (TRBV5-1, TRBJ1-6)
CASSPSLQGSDNSPLHF

SEQ ID NO: 323579 - protein, 15 aa, Homo sapiens
  CDR3 for alpha chain variable domain of TCR clone 161790 (TRAV3, TRAJ13)
CAVRDIAGGFQKVTF

SEQ ID NO: 323580 - protein, 13 aa, Homo sapiens
  CDR3 for beta chain variable domain of TCR clone 161790 (TRBV2, TRBJ2-2)
CASSKKNTGELFF

SEQ ID NO: 323581 - protein, 18 aa, Homo sapiens
  CDR3 for alpha chain variable domain of TCR clone 161791 (TRAV21, TRAJ52)
CAVRPSPAGGTSYGKLTF

SEQ ID NO: 323582 - protein, 13 aa, Homo sapiens
  CDR3 for beta chain variable domain of TCR clone 161791 (TRBV20-1, TRBJ1-1)
CSARAGGNTEAFF

SEQ ID NO: 323583 - protein, 13 aa, Homo sapiens
  CDR3 for alpha chain variable domain of TCR clone 161792 (TRAV12-1, TRAJ29)
CVVRNSGNTPLVF

SEQ ID NO: 323584 - protein, 16 aa, Homo sapiens
  CDR3 for beta chain variable domain of TCR clone 161792 (TRBV7-2, TRBJ2-5)
CASSSKWLSGQETQYF

SEQ ID NO: 323585 - protein, 13 aa, Homo sapiens
  CDR3 for alpha chain variable domain of TCR clone 161793 (TRAV3, TRAJ20)
CCEAFCNAYKLSF

SEQ ID NO: 323586 - protein, 16 aa, Homo sapiens
  CDR3 for beta chain variable domain of TCR clone 161793 (TRBV12-5, TRBJ2-5)
CASGPRTSGNQETQYF

SEQ ID NO: 323587 - protein, 12 aa, Homo sapiens
  CDR3 for alpha chain variable domain of TCR clone 161794 (TRAV12-3, TRAJ20)
CAMVRGDYKLSF

SEQ ID NO: 323588 - protein, 13 aa, Homo sapiens
  CDR3 for beta chain variable domain of TCR clone 161794 (TRBV19, TRBJ2-7)
CASSPRQSYEQYF

SEQ ID NO: 323589 - protein, 14 aa, Homo sapiens
  CDR3 for alpha chain variable domain of TCR clone 161795 (TRAV12-1, TRAJ13)
CVVIDSGGHQKGTF

SEQ ID NO: 323590 - protein, 17 aa, Homo sapiens
  CDR3 for beta chain variable domain of TCR clone 161795 (TRBV15, TRBJ1-5)
CATSRAPPGTRNQPQHF

SEQ ID NO: 323591 - protein, 11 aa, Homo sapiens
  CDR3 for alpha chain variable domain of TCR clone 161796 (TRAV21, TRAJ11)
CAVNGYSTLTF

SEQ ID NO: 323592 - protein, 14 aa, Homo sapiens
  CDR3 for beta chain variable domain of TCR clone 161796 (TRBV7-2, TRBJ2-5)
CASSPRGSSETQYF

SEQ ID NO: 323593 - protein, 15 aa, Homo sapiens
  CDR3 for alpha chain variable domain of TCR clone 161797 (TRAV3, TRAJ22)
CAVRDRGGFARQLTF

SEQ ID NO: 323594 - protein, 13 aa, Homo sapiens
  CDR3 for beta chain variable domain of TCR clone 161797 (TRBV7-3, TRBJ2-1)
CASSPVAYNEQFF

SEQ ID NO: 323595 - protein, 11 aa, Homo sapiens
  CDR3 for alpha chain variable domain of TCR clone 161798 (TRAV2, TRAJ13)
CASGVYQKVTF

SEQ ID NO: 323596 - protein, 12 aa, Homo sapiens
  CDR3 for beta chain variable domain of TCR clone 161798 (TRBV11-2, TRBJ2-2)
CASSLGGGELFF

SEQ ID NO: 323597 - protein, 13 aa, Homo sapiens
  CDR3 for alpha chain variable domain of TCR clone 161799 (TRAV17, TRAJ9)
RATDGTGGFKTIF

SEQ ID NO: 323598 - protein, 20 aa, Homo sapiens
  CDR3 for beta chain variable domain of TCR clone 161799 (TRBV7-8, TRBJ2-2)
CASSHLFPGPTIHITGELFV

SEQ ID NO: 323599 - protein, 14 aa, Homo sapiens
  CDR3 for alpha chain variable domain of TCR clone 161800 (TRAV30, TRAJ33)
CGTVAPRSNYQLIW

SEQ ID NO: 323600 - protein, 16 aa, Homo sapiens
  CDR3 for beta chain variable domain of TCR clone 161800 (TRBV3-1, TRBJ2-5)
CDSSPGQFNGFGTQYF

SEQ ID NO: 323601 - protein, 15 aa, Homo sapiens
  CDR3 for alpha chain variable domain of TCR clone 161801 (TRAV8-2, TRAJ24)
CVVSDRTDSWGKLPF

SEQ ID NO: 323602 - protein, 19 aa, Homo sapiens
  CDR3 for beta chain variable domain of TCR clone 161801 (TRBV7-3, TRBJ2-2)
CASSLRAGGSGPNTGELFF

SEQ ID NO: 323603 - protein, 13 aa, Homo sapiens
  CDR3 for alpha chain variable domain of TCR clone 161802 (TRAV8-3, TRAJ43)
CAVGPYNNNDMRF

SEQ ID NO: 323604 - protein, 12 aa, Homo sapiens
  CDR3 for beta chain variable domain of TCR clone 161802 (TRBV7-2, TRBJ1-6)
CASSLSSSPLHF

SEQ ID NO: 323605 - protein, 18 aa, Homo sapiens
  CDR3 for alpha chain variable domain of TCR clone 161803 (TRAV13-1, TRAJ52)
CAASKRSAGGTRYGKLTF

SEQ ID NO: 323606 - protein, 14 aa, Homo sapiens
  CDR3 for beta chain variable domain of TCR clone 161803 (TRBV7-2, TRBJ2-5)
CASSTGGELKTQYF

SEQ ID NO: 323607 - protein, 15 aa, Homo sapiens
  CDR3 for alpha chain variable domain of TCR clone 161804 (TRAV4, TRAJ10)
CLVGDEEGGGNKLAF

SEQ ID NO: 323608 - protein, 17 aa, Homo sapiens
  CDR3 for beta chain variable domain of TCR clone 161804 (TRBV19, TRBJ2-6)
CASSTGQVFSGANVLTF

SEQ ID NO: 323609 - protein, 15 aa, Homo sapiens
  CDR3 for alpha chain variable domain of TCR clone 161805 (TRAV2, TRAJ15)
CAVEDRGQAGTALIF

SEQ ID NO: 323610 - protein, 16 aa, Homo sapiens
  CDR3 for beta chain variable domain of TCR clone 161805 (TRBV7-9, TRBJ2-1)
CASSLLAQLFSKGQFF

SEQ ID NO: 323611 - protein, 12 aa, Homo sapiens
  CDR3 for alpha chain variable domain of TCR clone 161806 (TRAV35, TRAJ49)
CAGWNTGNQFYF

SEQ ID NO: 323612 - protein, 13 aa, Homo sapiens
  CDR3 for beta chain variable domain of TCR clone 161806 (TRBV7-9, TRBJ1-2)
CASSVKQNYGYTF

SEQ ID NO: 323613 - protein, 13 aa, Homo sapiens
  CDR3 for alpha chain variable domain of TCR clone 161807 (TRAV21, TRAJ27)
CAARPGNAGKSTF

SEQ ID NO: 323614 - protein, 16 aa, Homo sapiens
  CDR3 for beta chain variable domain of TCR clone 161807 (TRBV2, TRBJ2-6)
CASSETGGSGANVLTF

SEQ ID NO: 323615 - protein, 17 aa, Homo sapiens
  CDR3 for alpha chain variable domain of TCR clone 161808 (TRAV3, TRAJ6)
CAVRDGPRAGGSYIPTF

SEQ ID NO: 323616 - protein, 14 aa, Homo sapiens
  CDR3 for beta chain variable domain of TCR clone 161808 (TRBV28, TRBJ2-3)
CASSFRTSTDTQYF

SEQ ID NO: 323617 - protein, 12 aa, Homo sapiens
  CDR3 for alpha chain variable domain of TCR clone 161809 (TRAV4, TRAJ26)
CLVGDYGQNYVF

SEQ ID NO: 323618 - protein, 16 aa, Homo sapiens
  CDR3 for beta chain variable domain of TCR clone 161809 (TRBV7-2, TRBJ1-2)
CASSSNQDRRGHGYTF

SEQ ID NO: 323619 - protein, 10 aa, Homo sapiens
  CDR3 for alpha chain variable domain of TCR clone 161810 (TRAV5, TRAJ34)
CAEDTDKLIF

SEQ ID NO: 323620 - protein, 15 aa, Homo sapiens
  CDR3 for beta chain variable domain of TCR clone 161810 (TRBV7-2, TRBJ2-3)
CASSSTGLETDTQYF

SEQ ID NO: 323621 - protein, 14 aa, Homo sapiens
  CDR3 for alpha chain variable domain of TCR clone 161811 (TRAV38-1, TRAJ40)
CALCPTSGTYKYIF

SEQ ID NO: 323622 - protein, 16 aa, Homo sapiens
  CDR3 for beta chain variable domain of TCR clone 161811 (TRBV13, TRBJ2-2)
CASSPRTGEHTGELFF

SEQ ID NO: 323623 - protein, 14 aa, Homo sapiens
  CDR3 for alpha chain variable domain of TCR clone 161812 (TRAV12-2, TRAJ13)
CAVKETGGYQKVTL

SEQ ID NO: 323624 - protein, 15 aa, Homo sapiens
  CDR3 for beta chain variable domain of TCR clone 161812 (TRBV27, TRBJ2-1)
CASSNGGGSSNEQFF

SEQ ID NO: 323625 - protein, 14 aa, Homo sapiens
  CDR3 for alpha chain variable domain of TCR clone 161813 (TRAV12-1, TRAJ38)
CVVNNAGNNRKLIW

SEQ ID NO: 323626 - protein, 15 aa, Homo sapiens
  CDR3 for beta chain variable domain of TCR clone 161813 (TRBV9, TRBJ1-6)
CASSVAGTGDSPLHF

SEQ ID NO: 323627 - protein, 11 aa, Homo sapiens
  CDR3 for alpha chain variable domain of TCR clone 161814 (TRAV2, TRAJ27)
CAVSNAGKSTF

SEQ ID NO: 323628 - protein, 16 aa, Homo sapiens
  CDR3 for beta chain variable domain of TCR clone 161814 (TRBV6-6, TRBJ1-5)
CASSYSTLVGNQPQHF

SEQ ID NO: 323629 - protein, 18 aa, Homo sapiens
  CDR3 for alpha chain variable domain of TCR clone 161815 (TRAV13-1, TRAJ52)
CSASKRSAGGTSYGKLTF

SEQ ID NO: 323630 - protein, 13 aa, Homo sapiens
  CDR3 for beta chain variable domain of TCR clone 161815 (TRBV12-4, TRBJ1-2)
CASSVRQGKGYTF

SEQ ID NO: 323631 - protein, 16 aa, Homo sapiens
  CDR3 for alpha chain variable domain of TCR clone 161816 (TRAV30, TRAJ24)
CGTEIVDADSWGKFQF

SEQ ID NO: 323632 - protein, 13 aa, Homo sapiens
  CDR3 for beta chain variable domain of TCR clone 161816 (TRBV4-1, TRBJ2-2)
CASSQGNTGELFF

SEQ ID NO: 323633 - protein, 14 aa, Homo sapiens
  CDR3 for alpha chain variable domain of TCR clone 161817 (TRAV21, TRAJ15)
CAVSLNQAGTALIF

SEQ ID NO: 323634 - protein, 11 aa, Homo sapiens
  CDR3 for beta chain variable domain of TCR clone 161817 (TRBV20-1, TRBJ2-7)
CSARTSYEQYF

SEQ ID NO: 323635 - protein, 12 aa, Homo sapiens
  CDR3 for alpha chain variable domain of TCR clone 161818 (TRAV3, TRAJ27)
CAVRDGAGKSTF

SEQ ID NO: 323636 - protein, 16 aa, Homo sapiens
  CDR3 for beta chain variable domain of TCR clone 161818 (TRBV7-3, TRBJ2-2)
CASSLKRGTLSGELFF

SEQ ID NO: 323637 - protein, 15 aa, Homo sapiens
  CDR3 for alpha chain variable domain of TCR clone 161819 (TRAV25, TRAJ52)
CAGRPGGTSYGKLTF

SEQ ID NO: 323638 - protein, 12 aa, Homo sapiens
  CDR3 for beta chain variable domain of TCR clone 161819 (TRBV7-8, TRBJ2-7)
CASSLGDREQCF

SEQ ID NO: 323639 - protein, 14 aa, Homo sapiens
  CDR3 for alpha chain variable domain of TCR clone 161820 (TRAV21, TRAJ35)
CAVMPLGFGNVLHG

SEQ ID NO: 323640 - protein, 12 aa, Homo sapiens
  CDR3 for beta chain variable domain of TCR clone 161820 (TRBV7-9, TRBJ2-7)
CASSIKREEQYF

SEQ ID NO: 323641 - protein, 12 aa, Homo sapiens
  CDR3 for alpha chain variable domain of TCR clone 161821 (TRAV8-4, TRAJ20)
CAVSEGDYKLSF

SEQ ID NO: 323642 - protein, 15 aa, Homo sapiens
  CDR3 for beta chain variable domain of TCR clone 161821 (TRBV27, TRBJ2-1)
CASSNGGGSSNEQFF

SEQ ID NO: 323643 - protein, 14 aa, Homo sapiens
  CDR3 for alpha chain variable domain of TCR clone 161822 (TRAV13-1, TRAJ44)
CAAKATGTASKPTF

SEQ ID NO: 323644 - protein, 20 aa, Homo sapiens
  CDR3 for beta chain variable domain of TCR clone 161822 (TRBV7-8, TRBJ2-2)
CASSHLFPGPTIHITGELFF

SEQ ID NO: 323645 - protein, 12 aa, Homo sapiens
  CDR3 for alpha chain variable domain of TCR clone 161823 (TRAV2, TRAJ31)
CAVEDNNARLMF

SEQ ID NO: 323646 - protein, 14 aa, Homo sapiens
  CDR3 for beta chain variable domain of TCR clone 161823 (TRBV28, TRBJ1-5)
CASSRTGLNQPQHS

SEQ ID NO: 323647 - protein, 14 aa, Homo sapiens
  CDR3 for alpha chain variable domain of TCR clone 161824 (TRAV12-2, TRAJ40)
CAVKITSGTYKYIF

SEQ ID NO: 323648 - protein, 13 aa, Homo sapiens
  CDR3 for beta chain variable domain of TCR clone 161824 (TRBV7-9, TRBJ1-2)
CASSLKQNYGYTF

SEQ ID NO: 323649 - protein, 19 aa, Homo sapiens
  CDR3 for alpha chain variable domain of TCR clone 161825 (TRAV30, TRAJ52)
CGTEANTNAGGTSYGKLIF

SEQ ID NO: 323650 - protein, 17 aa, Homo sapiens
  CDR3 for beta chain variable domain of TCR clone 161825 (TRBV28, TRBJ2-7)
CASSPLRGRRWKGGQYF

SEQ ID NO: 323651 - protein, 14 aa, Homo sapiens
  CDR3 for alpha chain variable domain of TCR clone 161826 (TRAV12-3, TRAJ10)
SHLPLTGGGNKLTF

SEQ ID NO: 323652 - protein, 14 aa, Homo sapiens
  CDR3 for beta chain variable domain of TCR clone 161826 (TRBV19, TRBJ2-2)
CDSSTLHRSGELFF

SEQ ID NO: 323653 - protein, 14 aa, Homo sapiens
  CDR3 for alpha chain variable domain of TCR clone 161827 (TRAV1-1, TRAJ35)
CAVRSIGFGNVLHC

SEQ ID NO: 323654 - protein, 14 aa, Homo sapiens
  CDR3 for beta chain variable domain of TCR clone 161827 (TRBV5-7, TRBJ2-7)
CASSGGLSSYKQYF

SEQ ID NO: 323655 - protein, 15 aa, Homo sapiens
  CDR3 for alpha chain variable domain of TCR clone 161828 (TRAV2, TRAJ9)
CAVAALNTGGFKTIL

SEQ ID NO: 323656 - protein, 11 aa, Homo sapiens
  CDR3 for beta chain variable domain of TCR clone 161828 (TRBV20-1, TRBJ2-3)
CSGTSSTTQYF

SEQ ID NO: 323657 - protein, 10 aa, Homo sapiens
  CDR3 for alpha chain variable domain of TCR clone 161829 (TRAV8-4, TRAJ43)
CAVSAVDMRF

SEQ ID NO: 323658 - protein, 13 aa, Homo sapiens
  CDR3 for beta chain variable domain of TCR clone 161829 (TRBV12-4, TRBJ2-5)
CASSPGTEETQYF

SEQ ID NO: 323659 - protein, 14 aa, Homo sapiens
  CDR3 for alpha chain variable domain of TCR clone 161830 (TRAV26-1, TRAJ38)
CIADNAGNNRKLVW

SEQ ID NO: 323660 - protein, 15 aa, Homo sapiens
  CDR3 for beta chain variable domain of TCR clone 161830 (TRBV20-1, TRBJ2-7)
CSARDRVSGMDEQYF

SEQ ID NO: 323661 - protein, 13 aa, Homo sapiens
  CDR3 for alpha chain variable domain of TCR clone 161831 (TRAV27, TRAJ41)
CAGEGNSGYALNF

SEQ ID NO: 323662 - protein, 13 aa, Homo sapiens
  CDR3 for beta chain variable domain of TCR clone 161831 (TRBV20-1, TRBJ1-1)
CSAPLGGGTEAFF

SEQ ID NO: 323663 - protein, 11 aa, Homo sapiens
  CDR3 for alpha chain variable domain of TCR clone 161832 (TRAV17, TRAJ9)
CSTTGGFKTIF

SEQ ID NO: 323664 - protein, 14 aa, Homo sapiens
  CDR3 for beta chain variable domain of TCR clone 161832 (TRBV7-9, TRBJ2-2)
CASSGLADTGELSF

SEQ ID NO: 323665 - protein, 11 aa, Homo sapiens
  CDR3 for alpha chain variable domain of TCR clone 161833 (TRAV22, TRAJ23)
CAVETRGKLIF

SEQ ID NO: 323666 - protein, 14 aa, Homo sapiens
  CDR3 for beta chain variable domain of TCR clone 161833 (TRBV2, TRBJ2-3)
CASSEGQNTDTQYF

SEQ ID NO: 323667 - protein, 13 aa, Homo sapiens
  CDR3 for alpha chain variable domain of TCR clone 161834 (TRAV35, TRAJ57)
CAGSQGGSEKLVF

SEQ ID NO: 323668 - protein, 13 aa, Homo sapiens
  CDR3 for beta chain variable domain of TCR clone 161834 (TRBV12-5, TRBJ2-3)
CASGDRQSDTQYF

SEQ ID NO: 323669 - protein, 16 aa, Homo sapiens
  CDR3 for alpha chain variable domain of TCR clone 161835 (TRAV3, TRAJ37)
CAVRPHGSGNTGKLIF

SEQ ID NO: 323670 - protein, 15 aa, Homo sapiens
  CDR3 for beta chain variable domain of TCR clone 161835 (TRBV11-2, TRBJ2-1)
CASSLTSGGCNEQFF

SEQ ID NO: 323671 - protein, 17 aa, Homo sapiens
  CDR3 for alpha chain variable domain of TCR clone 161836 (TRAV3, TRAJ12)
CALRDGGRMDSSYKLIF

SEQ ID NO: 323672 - protein, 15 aa, Homo sapiens
  CDR3 for beta chain variable domain of TCR clone 161836 (TRBV20-1, TRBJ2-7)
CSARDRVPGMDEQYF

SEQ ID NO: 323673 - protein, 21 aa, Homo sapiens
  CDR3 for alpha chain variable domain of TCR clone 161837 (TRAV12-1, TRAJ32)
SSVIQPPTSMNYGGATNKLIF

SEQ ID NO: 323674 - protein, 15 aa, Homo sapiens
  CDR3 for beta chain variable domain of TCR clone 161837 (TRBV7-9, TRBJ2-2)
CASRPLDTFPGELFF

SEQ ID NO: 323675 - protein, 13 aa, Homo sapiens
  CDR3 for alpha chain variable domain of TCR clone 161838 (TRAV1-2, TRAJ33)
CAVSEDSNYQLIW

SEQ ID NO: 323676 - protein, 16 aa, Homo sapiens
  CDR3 for beta chain variable domain of TCR clone 161838 (TRBV4-2, TRBJ2-7)
CASSQDGVERGYERYF

SEQ ID NO: 323677 - protein, 20 aa, Homo sapiens
  CDR3 for alpha chain variable domain of TCR clone 161839 (TRAV26-1, TRAJ42)
CCVLLHRQTYYGGSQGNLIF

SEQ ID NO: 323678 - protein, 14 aa, Homo sapiens
  CDR3 for beta chain variable domain of TCR clone 161839 (TRBV15, TRBJ2-5)
CATSGDRGQETQYF

SEQ ID NO: 323679 - protein, 17 aa, Homo sapiens
  CDR3 for alpha chain variable domain of TCR clone 161840 (TRAV36/DV7, TRAJ42)
CAGGGMNYGGSQGNLIF

SEQ ID NO: 323680 - protein, 14 aa, Homo sapiens
  CDR3 for beta chain variable domain of TCR clone 161840 (TRBV19, TRBJ2-5)
CASSMTGQQETQYF

SEQ ID NO: 323681 - protein, 14 aa, Homo sapiens
  CDR3 for alpha chain variable domain of TCR clone 161841 (TRAV12-3, TRAJ10)
SHLPLTGGGNKLTF

SEQ ID NO: 323682 - protein, 16 aa, Homo sapiens
  CDR3 for beta chain variable domain of TCR clone 161841 (TRBV5-1, TRBJ2-3)
CASSLGLAVYTDTQYF

SEQ ID NO: 323683 - protein, 13 aa, Homo sapiens
  CDR3 for alpha chain variable domain of TCR clone 161842 (TRAV20, TRAJ31)
CALQAIGGARLMF

SEQ ID NO: 323684 - protein, 14 aa, Homo sapiens
  CDR3 for beta chain variable domain of TCR clone 161842 (TRBV2, TRBJ1-5)
CASSGTVSNQPQHF

SEQ ID NO: 323685 - protein, 13 aa, Homo sapiens
  CDR3 for alpha chain variable domain of TCR clone 161843 (TRAV35, TRAJ44)
CAGLSGTASKLTF

SEQ ID NO: 323686 - protein, 16 aa, Homo sapiens
  CDR3 for beta chain variable domain of TCR clone 161843 (TRBV6-1, TRBJ2-5)
CASSETLDRGAETQYF

SEQ ID NO: 323687 - protein, 16 aa, Homo sapiens
  CDR3 for alpha chain variable domain of TCR clone 161844 (TRAV12-3, TRAJ21)
CAMSHYTTSTNFTLDL

SEQ ID NO: 323688 - protein, 16 aa, Homo sapiens
  CDR3 for beta chain variable domain of TCR clone 161844 (TRBV7-3, TRBJ2-2)
CASSLKRGTLSGELFF

SEQ ID NO: 323689 - protein, 13 aa, Homo sapiens
  CDR3 for alpha chain variable domain of TCR clone 161845 (TRAV12-3, TRAJ13)
CAMGTGGYQKVTF

SEQ ID NO: 323690 - protein, 13 aa, Homo sapiens
  CDR3 for beta chain variable domain of TCR clone 161845 (TRBV4-2, TRBJ1-1)
CASSQAGNTEAFF

SEQ ID NO: 323691 - protein, 11 aa, Homo sapiens
  CDR3 for alpha chain variable domain of TCR clone 161846 (TRAV12-3, TRAJ43)
CAMSVSNDMRF

SEQ ID NO: 323692 - protein, 13 aa, Homo sapiens
  CDR3 for beta chain variable domain of TCR clone 161846 (TRBV7-9, TRBJ1-2)
CASSLKQNYGYIF

SEQ ID NO: 323693 - protein, 14 aa, Homo sapiens
  CDR3 for alpha chain variable domain of TCR clone 161847 (TRAV4, TRAJ17)
CLVGDMAAGNKLTF

SEQ ID NO: 323694 - protein, 13 aa, Homo sapiens
  CDR3 for beta chain variable domain of TCR clone 161847 (TRBV18, TRBJ2-7)
CASQSGGGYEQYL

SEQ ID NO: 323695 - protein, 11 aa, Homo sapiens
  CDR3 for alpha chain variable domain of TCR clone 161848 (TRAV8-6, TRAJ34)
CAVWNTDKLIF

SEQ ID NO: 323696 - protein, 12 aa, Homo sapiens
  CDR3 for beta chain variable domain of TCR clone 161848 (TRBV11-2, TRBJ2-2)
CASSLGGGELLF

SEQ ID NO: 323697 - protein, 14 aa, Homo sapiens
  CDR3 for alpha chain variable domain of TCR clone 161849 (TRAV12-2, TRAJ44)
CAVNPAGTASKLTF

SEQ ID NO: 323698 - protein, 17 aa, Homo sapiens
  CDR3 for beta chain variable domain of TCR clone 161849 (TRBV4-1, TRBJ1-4)
CASSQEGPRGVEEKLFF

SEQ ID NO: 323699 - protein, 11 aa, Homo sapiens
  CDR3 for alpha chain variable domain of TCR clone 161850 (TRAV12-3, TRAJ43)
CAMSVSNDMRF

SEQ ID NO: 323700 - protein, 18 aa, Homo sapiens
  CDR3 for beta chain variable domain of TCR clone 161850 (TRBV20-1, TRBJ2-3)
CRASGLAGGPGTTDTQYF

SEQ ID NO: 323701 - protein, 13 aa, Homo sapiens
  CDR3 for alpha chain variable domain of TCR clone 161851 (TRAV27, TRAJ29)
CTGAHSGNTPLVF

SEQ ID NO: 323702 - protein, 14 aa, Homo sapiens
  CDR3 for beta chain variable domain of TCR clone 161851 (TRBV7-9, TRBJ2-7)
CASSLKGASYEQYF

SEQ ID NO: 323703 - protein, 14 aa, Homo sapiens
  CDR3 for alpha chain variable domain of TCR clone 161852 (TRAV26-1, TRAJ49)
CIVRLKNTGNQFYF

SEQ ID NO: 323704 - protein, 13 aa, Homo sapiens
  CDR3 for beta chain variable domain of TCR clone 161852 (TRBV4-1, TRBJ2-7)
CASSQGQAYEQYF

SEQ ID NO: 323705 - protein, 13 aa, Homo sapiens
  CDR3 for alpha chain variable domain of TCR clone 161853 (TRAV2, TRAJ24)
CAVGSTDREKLQF

SEQ ID NO: 323706 - protein, 15 aa, Homo sapiens
  CDR3 for beta chain variable domain of TCR clone 161853 (TRBV5-7, TRBJ2-3)
CASSPWDRATDTQYF

SEQ ID NO: 323707 - protein, 15 aa, Homo sapiens
  CDR3 for alpha chain variable domain of TCR clone 161854 (TRAV12-3, TRAJ6)
CAMSATTGGSYITTF

SEQ ID NO: 323708 - protein, 15 aa, Homo sapiens
  CDR3 for beta chain variable domain of TCR clone 161854 (TRBV5-1, TRBJ2-7)
CASSLNGGPAREQYF

SEQ ID NO: 323709 - protein, 13 aa, Homo sapiens
  CDR3 for alpha chain variable domain of TCR clone 161855 (TRAV12-1, TRAJ11)
CVVTRGGYSTLTF

SEQ ID NO: 323710 - protein, 13 aa, Homo sapiens
  CDR3 for beta chain variable domain of TCR clone 161855 (TRBV20-1, TRBJ1-2)
CSAGDQGAYGYTF

SEQ ID NO: 323711 - protein, 13 aa, Homo sapiens
  CDR3 for alpha chain variable domain of TCR clone 161856 (TRAV21, TRAJ27)
CAARPGTAGKSTL

SEQ ID NO: 323712 - protein, 14 aa, Homo sapiens
  CDR3 for beta chain variable domain of TCR clone 161856 (TRBV7-6, TRBJ2-3)
CASSLGTVTDTQYF

SEQ ID NO: 323713 - protein, 14 aa, Homo sapiens
  CDR3 for alpha chain variable domain of TCR clone 161857 (TRAV12-2, TRAJ17)
CAVLLKAAGNKLHL

SEQ ID NO: 323714 - protein, 17 aa, Homo sapiens
  CDR3 for beta chain variable domain of TCR clone 161857 (TRBV20-1, TRBJ2-2)
CSASGSGQGGLTGELFF

SEQ ID NO: 323715 - protein, 12 aa, Homo sapiens
  CDR3 for alpha chain variable domain of TCR clone 161858 (TRAV13-1, TRAJ49)
CAASIWGNQFYF

SEQ ID NO: 323716 - protein, 16 aa, Homo sapiens
  CDR3 for beta chain variable domain of TCR clone 161858 (TRBV12-4, TRBJ1-1)
CASSLDGLNTKLSLDK

SEQ ID NO: 323717 - protein, 13 aa, Homo sapiens
  CDR3 for alpha chain variable domain of TCR clone 161859 (TRAV21, TRAJ17)
CAPVKAAGNKLPF

SEQ ID NO: 323718 - protein, 11 aa, Homo sapiens
  CDR3 for beta chain variable domain of TCR clone 161859 (TRBV20-1, TRBJ1-2)
CSIWASYGYTF

SEQ ID NO: 323719 - protein, 14 aa, Homo sapiens
  CDR3 for alpha chain variable domain of TCR clone 161860 (TRAV1-2, TRAJ16)
CAVNRFSDGQKLLF

SEQ ID NO: 323720 - protein, 16 aa, Homo sapiens
  CDR3 for beta chain variable domain of TCR clone 161860 (TRBV3-1, TRBJ1-1)
CASSQRGRGGNTEAFF

SEQ ID NO: 323721 - protein, 17 aa, Homo sapiens
  CDR3 for alpha chain variable domain of TCR clone 161861 (TRAV16, TRAJ58)
CITVLSNGETSGSSLTF

SEQ ID NO: 323722 - protein, 17 aa, Homo sapiens
  CDR3 for beta chain variable domain of TCR clone 161861 (TRBV18, TRBJ2-1)
CASSKGLSGGADNEQFF

SEQ ID NO: 323723 - protein, 11 aa, Homo sapiens
  CDR3 for alpha chain variable domain of TCR clone 161862 (TRAV20, TRAJ40)
CAVGGTYKYIF

SEQ ID NO: 323724 - protein, 13 aa, Homo sapiens
  CDR3 for beta chain variable domain of TCR clone 161862 (TRBV7-9, TRBJ2-5)
CASLPSGRETQYF

SEQ ID NO: 323725 - protein, 16 aa, Homo sapiens
  CDR3 for alpha chain variable domain of TCR clone 161863 (TRAV3, TRAJ10)
CAVRDMRAGGGNKLTF

SEQ ID NO: 323726 - protein, 15 aa, Homo sapiens
  CDR3 for beta chain variable domain of TCR clone 161863 (TRBV20-1, TRBJ2-1)
CNAEGGLLAGDEQFF

SEQ ID NO: 323727 - protein, 15 aa, Homo sapiens
  CDR3 for alpha chain variable domain of TCR clone 161864 (TRAV21, TRAJ53)
CATLNSGGSNYKLTF

SEQ ID NO: 323728 - protein, 20 aa, Homo sapiens
  CDR3 for beta chain variable domain of TCR clone 161864 (TRBV28, TRBJ2-1)
CASTPIGRSPGLTGGNEQFF

SEQ ID NO: 323729 - protein, 12 aa, Homo sapiens
  CDR3 for alpha chain variable domain of TCR clone 161865 (TRAV13-1, TRAJ21)
CAAKEGFNKFYF

SEQ ID NO: 323730 - protein, 14 aa, Homo sapiens
  CDR3 for beta chain variable domain of TCR clone 161865 (TRBV11-2, TRBJ2-5)
CASSRTGGIETQYF

SEQ ID NO: 323731 - protein, 13 aa, Homo sapiens
  CDR3 for alpha chain variable domain of TCR clone 161866 (TRAV35, TRAJ21)
CAGQLSTFNKFYF

SEQ ID NO: 323732 - protein, 11 aa, Homo sapiens
  CDR3 for beta chain variable domain of TCR clone 161866 (TRBV7-6, TRBJ2-5)
CASSAQETQYF

SEQ ID NO: 323733 - protein, 11 aa, Homo sapiens
  CDR3 for alpha chain variable domain of TCR clone 161867 (TRAV13-1, TRAJ15)
CAATPGTALIF

SEQ ID NO: 323734 - protein, 17 aa, Homo sapiens
  CDR3 for beta chain variable domain of TCR clone 161867 (TRBV13, TRBJ2-3)
WASSLARVAGGRNTQYF

SEQ ID NO: 323735 - protein, 13 aa, Homo sapiens
  CDR3 for alpha chain variable domain of TCR clone 161868 (TRAV12-2, TRAJ9)
CAVKWAGGFKTIF

SEQ ID NO: 323736 - protein, 15 aa, Homo sapiens
  CDR3 for beta chain variable domain of TCR clone 161868 (TRBV5-1, TRBJ1-4)
CASSLTADSDEKLFS

SEQ ID NO: 323737 - protein, 12 aa, Homo sapiens
  CDR3 for alpha chain variable domain of TCR clone 161869 (TRAV2, TRAJ31)
CAVEDNNARLMF

SEQ ID NO: 323738 - protein, 15 aa, Homo sapiens
  CDR3 for beta chain variable domain of TCR clone 161869 (TRBV6-3, TRBJ2-7)
CASSSPGTVFYEQYF

SEQ ID NO: 323739 - protein, 18 aa, Homo sapiens
  CDR3 for alpha chain variable domain of TCR clone 161870 (TRAV12-3, TRAJ52)
CAMSRTNAGGSSYGKLTF

SEQ ID NO: 323740 - protein, 17 aa, Homo sapiens
  CDR3 for beta chain variable domain of TCR clone 161870 (TRBV7-3, TRBJ2-3)
CASSFMKRMRGADTQYF

SEQ ID NO: 323741 - protein, 19 aa, Homo sapiens
  CDR3 for alpha chain variable domain of TCR clone 161871 (TRAV2, TRAJ20)
ILQVREADAAVYRDCKLSF

SEQ ID NO: 323742 - protein, 14 aa, Homo sapiens
  CDR3 for beta chain variable domain of TCR clone 161871 (TRBV11-2, TRBJ2-3)
CASSRLARTDTQYF

SEQ ID NO: 323743 - protein, 11 aa, Homo sapiens
  CDR3 for alpha chain variable domain of TCR clone 161872 (TRAV39, TRAJ49)
CAGDISTQFYF

SEQ ID NO: 323744 - protein, 11 aa, Homo sapiens
  CDR3 for beta chain variable domain of TCR clone 161872 (TRBV7-8, TRBJ2-7)
CASSLSREQYF

SEQ ID NO: 323745 - protein, 14 aa, Homo sapiens
  CDR3 for alpha chain variable domain of TCR clone 161873 (TRAV1-2, TRAJ16)
CAVNRFSDGQKLLF

SEQ ID NO: 323746 - protein, 13 aa, Homo sapiens
  CDR3 for beta chain variable domain of TCR clone 161873 (TRBV7-9, TRBJ2-5)
CASSSGLTETQYF

SEQ ID NO: 323747 - protein, 14 aa, Homo sapiens
  CDR3 for alpha chain variable domain of TCR clone 161874 (TRAV20, TRAJ22)
CAVQVSGSARQLTS

SEQ ID NO: 323748 - protein, 13 aa, Homo sapiens
  CDR3 for beta chain variable domain of TCR clone 161874 (TRBV20-1, TRBJ2-5)
CSAREGGKETQYS

SEQ ID NO: 323749 - protein, 14 aa, Homo sapiens
  CDR3 for alpha chain variable domain of TCR clone 161875 (TRAV2, TRAJ9)
CAVDDRSGGFKTIF

SEQ ID NO: 323750 - protein, 17 aa, Homo sapiens
  CDR3 for beta chain variable domain of TCR clone 161875 (TRBV7-8, TRBJ2-6)
CASSAGTGGAGANVLTF

SEQ ID NO: 323751 - protein, 13 aa, Homo sapiens
  CDR3 for alpha chain variable domain of TCR clone 161876 (TRAV27, TRAJ45)
CRSSGGGADGLTF

SEQ ID NO: 323752 - protein, 17 aa, Homo sapiens
  CDR3 for beta chain variable domain of TCR clone 161876 (TRBV11-2, TRBJ2-1)
CASSLYPQGAEYNEQFF

SEQ ID NO: 323753 - protein, 13 aa, Homo sapiens
  CDR3 for alpha chain variable domain of TCR clone 161877 (TRAV2, TRAJ47)
CAVDREYGNKLVF

SEQ ID NO: 323754 - protein, 17 aa, Homo sapiens
  CDR3 for beta chain variable domain of TCR clone 161877 (TRBV15, TRBJ1-5)
CATSRVKGIYSDQPQHF

SEQ ID NO: 323755 - protein, 13 aa, Homo sapiens
  CDR3 for alpha chain variable domain of TCR clone 161878 (TRAV26-1, TRAJ48)
CIVRVVGDEKLTF

SEQ ID NO: 323756 - protein, 11 aa, Homo sapiens
  CDR3 for beta chain variable domain of TCR clone 161878 (TRBV13, TRBJ2-3)
CASGNADTQYF

SEQ ID NO: 323757 - protein, 13 aa, Homo sapiens
  CDR3 for alpha chain variable domain of TCR clone 161879 (TRAV2, TRAJ40)
CAVVTSGTYKYIF

SEQ ID NO: 323758 - protein, 14 aa, Homo sapiens
  CDR3 for beta chain variable domain of TCR clone 161879 (TRBV7-2, TRBJ2-7)
SASRSQGAAYEQYF

SEQ ID NO: 323759 - protein, 15 aa, Homo sapiens
  CDR3 for alpha chain variable domain of TCR clone 161880 (TRAV2, TRAJ37)
CAVGDGSSNTGKLIF

SEQ ID NO: 323760 - protein, 13 aa, Homo sapiens
  CDR3 for beta chain variable domain of TCR clone 161880 (TRBV20-1, TRBJ2-7)
CSAQTGLSDEQYF

SEQ ID NO: 323761 - protein, 14 aa, Homo sapiens
  CDR3 for alpha chain variable domain of TCR clone 161881 (TRAV1-1, TRAJ5)
CAGRDGAGRRALTF

SEQ ID NO: 323762 - protein, 14 aa, Homo sapiens
  CDR3 for beta chain variable domain of TCR clone 161881 (TRBV28, TRBJ2-1)
CASSYYTAYNEQFF

SEQ ID NO: 323763 - protein, 14 aa, Homo sapiens
  CDR3 for alpha chain variable domain of TCR clone 161882 (TRAV2, TRAJ12)
CAVDAMDSSYKLIF

SEQ ID NO: 323764 - protein, 13 aa, Homo sapiens
  CDR3 for beta chain variable domain of TCR clone 161882 (TRBV19, TRBJ2-1)
CASKVGAGGEQFV

SEQ ID NO: 323765 - protein, 15 aa, Homo sapiens
  CDR3 for alpha chain variable domain of TCR clone 161883 (TRAV3, TRAJ22)
CAVRDRGGSARQMTF

SEQ ID NO: 323766 - protein, 15 aa, Homo sapiens
  CDR3 for beta chain variable domain of TCR clone 161883 (TRBV10-3, TRBJ2-3)
CAISLTSGGTDTQYF

SEQ ID NO: 323767 - protein, 17 aa, Homo sapiens
  CDR3 for alpha chain variable domain of TCR clone 161884 (TRAV1-1, TRAJ9)
CLLLLRCQKYWGFKTIF

SEQ ID NO: 323768 - protein, 14 aa, Homo sapiens
  CDR3 for beta chain variable domain of TCR clone 161884 (TRBV20-1, TRBJ2-1)
CSAQIGGSANEQFF

SEQ ID NO: 323769 - protein, 15 aa, Homo sapiens
  CDR3 for alpha chain variable domain of TCR clone 161885 (TRAV8-3, TRAJ45)
CASSYSGGGADGLTF

SEQ ID NO: 323770 - protein, 13 aa, Homo sapiens
  CDR3 for beta chain variable domain of TCR clone 161885 (TRBV2, TRBJ1-1)
CASSVLMNTEAFF

SEQ ID NO: 323771 - protein, 15 aa, Homo sapiens
  CDR3 for alpha chain variable domain of TCR clone 161886 (TRAV8-3, TRAJ45)
CASSYSGGGADGLTF

SEQ ID NO: 323772 - protein, 13 aa, Homo sapiens
  CDR3 for beta chain variable domain of TCR clone 161886 (TRBV10-3, TRBJ1-2)
CAISERDSYGYTF

SEQ ID NO: 323773 - protein, 12 aa, Homo sapiens
  CDR3 for alpha chain variable domain of TCR clone 161887 (TRAV3, TRAJ31)
CAVRDGNARLMF

SEQ ID NO: 323774 - protein, 15 aa, Homo sapiens
  CDR3 for beta chain variable domain of TCR clone 161887 (TRBV7-2, TRBJ2-1)
CASSSGLAGGNEQFF

SEQ ID NO: 323775 - protein, 14 aa, Homo sapiens
  CDR3 for alpha chain variable domain of TCR clone 161888 (TRAV38-1, TRAJ45)
CAYYSGGGADGLTF

SEQ ID NO: 323776 - protein, 17 aa, Homo sapiens
  CDR3 for beta chain variable domain of TCR clone 161888 (TRBV13, TRBJ2-3)
CASSLSRVAGGRNTQYF

SEQ ID NO: 323777 - protein, 14 aa, Homo sapiens
  CDR3 for alpha chain variable domain of TCR clone 161889 (TRAV12-2, TRAJ3)
CAVKGYSSASKILF

SEQ ID NO: 323778 - protein, 14 aa, Homo sapiens
  CDR3 for beta chain variable domain of TCR clone 161889 (TRBV6-3, TRBJ1-2)
CASSEGGGSYGYTF

SEQ ID NO: 323779 - protein, 14 aa, Homo sapiens
  CDR3 for alpha chain variable domain of TCR clone 161890 (TRAV13-1, TRAJ44)
CAAKATGTASKITF

SEQ ID NO: 323780 - protein, 12 aa, Homo sapiens
  CDR3 for beta chain variable domain of TCR clone 161890 (TRBV7-8, TRBJ2-7)
CASSLGDREQYF

SEQ ID NO: 323781 - protein, 12 aa, Homo sapiens
  CDR3 for alpha chain variable domain of TCR clone 161891 (TRAV26-1, TRAJ17)
CISQSCRQQANF

SEQ ID NO: 323782 - protein, 16 aa, Homo sapiens
  CDR3 for beta chain variable domain of TCR clone 161891 (TRBV28, TRBJ1-4)
CASSSRTGAANEKLLF

SEQ ID NO: 323783 - protein, 14 aa, Homo sapiens
  CDR3 for alpha chain variable domain of TCR clone 161892 (TRAV17, TRAJ57)
CAKDPQGGSEKLVF

SEQ ID NO: 323784 - protein, 14 aa, Homo sapiens
  CDR3 for beta chain variable domain of TCR clone 161892 (TRBV7-8, TRBJ2-7)
CASSPRDRVYEQYF

SEQ ID NO: 323785 - protein, 15 aa, Homo sapiens
  CDR3 for alpha chain variable domain of TCR clone 161893 (TRAV20, TRAJ50)
CAVRQMKTSYDKVIF

SEQ ID NO: 323786 - protein, 14 aa, Homo sapiens
  CDR3 for beta chain variable domain of TCR clone 161893 (TRBV7-9, TRBJ2-2)
CASSGLADTGELFF

SEQ ID NO: 323787 - protein, 14 aa, Homo sapiens
  CDR3 for alpha chain variable domain of TCR clone 161894 (TRAV17, TRAJ16)
CATADFSDGQKLFF

SEQ ID NO: 323788 - protein, 15 aa, Homo sapiens
  CDR3 for beta chain variable domain of TCR clone 161894 (TRBV18, TRBJ2-1)
CASSPPSASYNEQFF

SEQ ID NO: 323789 - protein, 14 aa, Homo sapiens
  CDR3 for alpha chain variable domain of TCR clone 161895 (TRAV17, TRAJ57)
CATDPQGGSEKLVL

SEQ ID NO: 323790 - protein, 14 aa, Homo sapiens
  CDR3 for beta chain variable domain of TCR clone 161895 (TRBV27, TRBJ2-5)
CASSSLKGWETQYF

SEQ ID NO: 323791 - protein, 10 aa, Homo sapiens
  CDR3 for alpha chain variable domain of TCR clone 161896 (TRAV13-1, TRAJ41)
CTASGPRRTQ

SEQ ID NO: 323792 - protein, 16 aa, Homo sapiens
  CDR3 for beta chain variable domain of TCR clone 161896 (TRBV18, TRBJ2-3)
CASSPPAGGPRKYAVF

SEQ ID NO: 323793 - protein, 14 aa, Homo sapiens
  CDR3 for alpha chain variable domain of TCR clone 161897 (TRAV26-1, TRAJ38)
CIADNAGINRKLIW

SEQ ID NO: 323794 - protein, 15 aa, Homo sapiens
  CDR3 for beta chain variable domain of TCR clone 161897 (TRBV27, TRBJ2-1)
CASSNGGGSSNEQFF

SEQ ID NO: 323795 - protein, 14 aa, Homo sapiens
  CDR3 for alpha chain variable domain of TCR clone 161898 (TRAV9-2, TRAJ39)
CALYIYNAGNRLTF

SEQ ID NO: 323796 - protein, 15 aa, Homo sapiens
  CDR3 for beta chain variable domain of TCR clone 161898 (TRBV28, TRBJ1-3)
CASSMGWASGNTIYF

SEQ ID NO: 323797 - protein, 12 aa, Homo sapiens
  CDR3 for alpha chain variable domain of TCR clone 161899 (TRAV8-6, TRAJ36)
CAVSDWLGQTTS

SEQ ID NO: 323798 - protein, 14 aa, Homo sapiens
  CDR3 for beta chain variable domain of TCR clone 161899 (TRBV7-9, TRBJ2-4)
CASSLAMGGNIQYF

SEQ ID NO: 323799 - protein, 14 aa, Homo sapiens
  CDR3 for alpha chain variable domain of TCR clone 161900 (TRAV8-3, TRAJ37)
CAVGSSGKTVKLIF

SEQ ID NO: 323800 - protein, 16 aa, Homo sapiens
  CDR3 for beta chain variable domain of TCR clone 161900 (TRBV4-2, TRBJ1-5)
CASSQGQGASNQPQHF

SEQ ID NO: 323801 - protein, 14 aa, Homo sapiens
  CDR3 for alpha chain variable domain of TCR clone 161901 (TRAV12-2, TRAJ29)
CAVRRNSGNTPLVF

SEQ ID NO: 323802 - protein, 13 aa, Homo sapiens
  CDR3 for beta chain variable domain of TCR clone 161901 (TRBV12-4, TRBJ2-1)
CASSHYTDIEQFF

SEQ ID NO: 323803 - protein, 16 aa, Homo sapiens
  CDR3 for alpha chain variable domain of TCR clone 161902 (TRAV4, TRAJ37)
CLVGWFGSSNTGKLIF

SEQ ID NO: 323804 - protein, 15 aa, Homo sapiens
  CDR3 for beta chain variable domain of TCR clone 161902 (TRBV12-4, TRBJ2-3)
CASSLAERLTDTQYF

SEQ ID NO: 323805 - protein, 15 aa, Homo sapiens
  CDR3 for alpha chain variable domain of TCR clone 161903 (TRAV26-1, TRAJ29)
CIVRVEGSGNTPLVF

SEQ ID NO: 323806 - protein, 13 aa, Homo sapiens
  CDR3 for beta chain variable domain of TCR clone 161903 (TRBV15, TRBJ2-5)
CATSQIGEETQYF

SEQ ID NO: 323807 - protein, 12 aa, Homo sapiens
  CDR3 for alpha chain variable domain of TCR clone 161904 (TRAV12-1, TRAJ40)
CVVYSGTYKYIF

SEQ ID NO: 323808 - protein, 15 aa, Homo sapiens
  CDR3 for beta chain variable domain of TCR clone 161904 (TRBV7-9, TRBJ1-6)
CASSSPGRGNSALHF

SEQ ID NO: 323809 - protein, 14 aa, Homo sapiens
  CDR3 for alpha chain variable domain of TCR clone 161905 (TRAV8-6, TRAJ49)
CAVSDPGTGNQFYF

SEQ ID NO: 323810 - protein, 16 aa, Homo sapiens
  CDR3 for beta chain variable domain of TCR clone 161905 (TRBV24-1, TRBJ2-1)
CATSGVAGANYNERFF

SEQ ID NO: 323811 - protein, 14 aa, Homo sapiens
  CDR3 for alpha chain variable domain of TCR clone 161906 (TRAV8-3, TRAJ4)
RAVGASGGYNKLIF

SEQ ID NO: 323812 - protein, 13 aa, Homo sapiens
  CDR3 for beta chain variable domain of TCR clone 161906 (TRBV18, TRBJ2-5)
CASSLQGQETQYF

SEQ ID NO: 323813 - protein, 16 aa, Homo sapiens
  CDR3 for alpha chain variable domain of TCR clone 161907 (TRAV4, TRAJ8)
CLVGASGNTGFQKLVF

SEQ ID NO: 323814 - protein, 15 aa, Homo sapiens
  CDR3 for beta chain variable domain of TCR clone 161907 (TRBV15, TRBJ1-2)
CATSRVRASGSGYTF

SEQ ID NO: 323815 - protein, 12 aa, Homo sapiens
  CDR3 for alpha chain variable domain of TCR clone 161908 (TRAV13-2, TRAJ23)
CAERHRGGKLIF

SEQ ID NO: 323816 - protein, 14 aa, Homo sapiens
  CDR3 for beta chain variable domain of TCR clone 161908 (TRBV5-1, TRBJ1-2)
CASSPQGANYGHTF

SEQ ID NO: 323817 - protein, 13 aa, Homo sapiens
  CDR3 for alpha chain variable domain of TCR clone 161909 (TRAV12-2, TRAJ9)
CAVLETGGFTTIF

SEQ ID NO: 323818 - protein, 15 aa, Homo sapiens
  CDR3 for beta chain variable domain of TCR clone 161909 (TRBV6-3, TRBJ2-7)
CASSRTGANLYEQYF

SEQ ID NO: 323819 - protein, 14 aa, Homo sapiens
  CDR3 for alpha chain variable domain of TCR clone 161910 (TRAV16, TRAJ37)
CALDISGNTGKLIF

SEQ ID NO: 323820 - protein, 14 aa, Homo sapiens
  CDR3 for beta chain variable domain of TCR clone 161910 (TRBV7-6, TRBJ2-7)
CDSSFRQGADELYF

SEQ ID NO: 323821 - protein, 13 aa, Homo sapiens
  CDR3 for alpha chain variable domain of TCR clone 161911 (TRAV8-3, TRAJ48)
CAVVPFGIEKLTF

SEQ ID NO: 323822 - protein, 14 aa, Homo sapiens
  CDR3 for beta chain variable domain of TCR clone 161911 (TRBV18, TRBJ2-7)
CASSPRGGAYEQYF

SEQ ID NO: 323823 - protein, 14 aa, Homo sapiens
  CDR3 for alpha chain variable domain of TCR clone 161912 (TRAV12-3, TRAJ13)
CAMKNSGGYQKVTF

SEQ ID NO: 323824 - protein, 13 aa, Homo sapiens
  CDR3 for beta chain variable domain of TCR clone 161912 (TRBV2, TRBJ1-5)
CASSQGGSQPQHF

SEQ ID NO: 323825 - protein, 13 aa, Homo sapiens
  CDR3 for alpha chain variable domain of TCR clone 161913 (TRAV2, TRAJ40)
CAVVTSGTYKSIF

SEQ ID NO: 323826 - protein, 14 aa, Homo sapiens
  CDR3 for beta chain variable domain of TCR clone 161913 (TRBV19, TRBJ2-1)
CASPTVVLSGEQFF

SEQ ID NO: 323827 - protein, 16 aa, Homo sapiens
  CDR3 for alpha chain variable domain of TCR clone 161914 (TRAV30, TRAJ24)
CGTEIVDADSWGKFQF

SEQ ID NO: 323828 - protein, 15 aa, Homo sapiens
  CDR3 for beta chain variable domain of TCR clone 161914 (TRBV6-5, TRBJ2-7)
CASSRTSGSSYEQYF

SEQ ID NO: 323829 - protein, 14 aa, Homo sapiens
  CDR3 for alpha chain variable domain of TCR clone 161915 (TRAV38-2/DV8, TRAJ26)
CAYRSEVYGQNFVF

SEQ ID NO: 323830 - protein, 14 aa, Homo sapiens
  CDR3 for beta chain variable domain of TCR clone 161915 (TRBV10-3, TRBJ2-2)
CAISETLNTGELFF

SEQ ID NO: 323831 - protein, 13 aa, Homo sapiens
  CDR3 for alpha chain variable domain of TCR clone 161916 (TRAV20, TRAJ48)
CAVQGVGNETLTF

SEQ ID NO: 323832 - protein, 14 aa, Homo sapiens
  CDR3 for beta chain variable domain of TCR clone 161916 (TRBV2, TRBJ2-2)
CASSQPGLAGGKHR

SEQ ID NO: 323833 - protein, 10 aa, Homo sapiens
  CDR3 for alpha chain variable domain of TCR clone 161917 (TRAV12-3, TRAJ49)
CVMNDDQFYF

SEQ ID NO: 323834 - protein, 13 aa, Homo sapiens
  CDR3 for beta chain variable domain of TCR clone 161917 (TRBV12-4, TRBJ1-1)
CASSPGTGCEAFF

SEQ ID NO: 323835 - protein, 11 aa, Homo sapiens
  CDR3 for alpha chain variable domain of TCR clone 161918 (TRAV21, TRAJ23)
CAPQRRGKLIC

SEQ ID NO: 323836 - protein, 14 aa, Homo sapiens
  CDR3 for beta chain variable domain of TCR clone 161918 (TRBV12-4, TRBJ1-1)
CASTWTGHDTEAFF

SEQ ID NO: 323837 - protein, 15 aa, Homo sapiens
  CDR3 for alpha chain variable domain of TCR clone 161919 (TRAV4, TRAJ22)
CLVGSVSGSARQLTF

SEQ ID NO: 323838 - protein, 15 aa, Homo sapiens
  CDR3 for beta chain variable domain of TCR clone 161919 (TRBV20-1, TRBJ1-5)
CSATSDRGLGQPQHF

SEQ ID NO: 323839 - protein, 11 aa, Homo sapiens
  CDR3 for alpha chain variable domain of TCR clone 161920 (TRAV17, TRAJ9)
CGFTGGFKTIF

SEQ ID NO: 323840 - protein, 15 aa, Homo sapiens
  CDR3 for beta chain variable domain of TCR clone 161920 (TRBV4-1, TRBJ2-5)
CASSQWDLYQETQYF

SEQ ID NO: 323841 - protein, 16 aa, Homo sapiens
  CDR3 for alpha chain variable domain of TCR clone 161921 (TRAV14/DV4, TRAJ54)
CAMREGRIQGAEKLVF

SEQ ID NO: 323842 - protein, 15 aa, Homo sapiens
  CDR3 for beta chain variable domain of TCR clone 161921 (TRBV3-1, TRBJ2-1)
CASSQQPSGGNEQFF

SEQ ID NO: 323843 - protein, 13 aa, Homo sapiens
  CDR3 for alpha chain variable domain of TCR clone 161922 (TRAV36/DV7, TRAJ49)
CAVEANTGSQFYF

SEQ ID NO: 323844 - protein, 14 aa, Homo sapiens
  CDR3 for beta chain variable domain of TCR clone 161922 (TRBV20-1, TRBJ2-5)
CSASSGRAAETQYF

SEQ ID NO: 323845 - protein, 13 aa, Homo sapiens
  CDR3 for alpha chain variable domain of TCR clone 161923 (TRAV16, TRAJ26)
CITVLFLGQNFVF

SEQ ID NO: 323846 - protein, 15 aa, Homo sapiens
  CDR3 for beta chain variable domain of TCR clone 161923 (TRBV2, TRBJ2-1)
CDSSELAGSYNEQFF

SEQ ID NO: 323847 - protein, 15 aa, Homo sapiens
  CDR3 for alpha chain variable domain of TCR clone 161924 (TRAV21, TRAJ53)
CATLNSGGSNYKLTL

SEQ ID NO: 323848 - protein, 14 aa, Homo sapiens
  CDR3 for beta chain variable domain of TCR clone 161924 (TRBV7-8, TRBJ2-7)
CASSPGLADYEQYF

SEQ ID NO: 323849 - protein, 14 aa, Homo sapiens
  CDR3 for alpha chain variable domain of TCR clone 161925 (TRAV12-1, TRAJ23)
CVVIVYNQGGKLSS

SEQ ID NO: 323850 - protein, 15 aa, Homo sapiens
  CDR3 for beta chain variable domain of TCR clone 161925 (TRBV20-1, TRBJ1-5)
CSAKPPGQGPQPQHF

SEQ ID NO: 323851 - protein, 14 aa, Homo sapiens
  CDR3 for alpha chain variable domain of TCR clone 161926 (TRAV17, TRAJ34)
CATDSLEGTDKLIF

SEQ ID NO: 323852 - protein, 16 aa, Homo sapiens
  CDR3 for beta chain variable domain of TCR clone 161926 (TRBV12-4, TRBJ1-5)
CASSRPVGGSNQPQHF

SEQ ID NO: 323853 - protein, 16 aa, Homo sapiens
  CDR3 for alpha chain variable domain of TCR clone 161927 (TRAV4, TRAJ8)
FLVGDSGNTGFQKLVF

SEQ ID NO: 323854 - protein, 15 aa, Homo sapiens
  CDR3 for beta chain variable domain of TCR clone 161927 (TRBV15, TRBJ1-2)
CATSRVRASGSGYTF

SEQ ID NO: 323855 - protein, 11 aa, Homo sapiens
  CDR3 for alpha chain variable domain of TCR clone 161928 (TRAV17, TRAJ31)
CATSNNARLMF

SEQ ID NO: 323856 - protein, 17 aa, Homo sapiens
  CDR3 for beta chain variable domain of TCR clone 161928 (TRBV7-8, TRBJ2-1)
CASRPPTGTLAYNEQFF

SEQ ID NO: 323857 - protein, 14 aa, Homo sapiens
  CDR3 for alpha chain variable domain of TCR clone 161929 (TRAV1-2, TRAJ8)
CAVREDTGFQKLLF

SEQ ID NO: 323858 - protein, 12 aa, Homo sapiens
  CDR3 for beta chain variable domain of TCR clone 161929 (TRBV11-2, TRBJ2-2)
CASSLGGGELFF

SEQ ID NO: 323859 - protein, 12 aa, Homo sapiens
  CDR3 for alpha chain variable domain of TCR clone 161930 (TRAV21, TRAJ31)
CVLAGNNARLMF

SEQ ID NO: 323860 - protein, 16 aa, Homo sapiens
  CDR3 for beta chain variable domain of TCR clone 161930 (TRBV27, TRBJ2-5)
CASSVGPGSTKETQYF

SEQ ID NO: 323861 - protein, 11 aa, Homo sapiens
  CDR3 for alpha chain variable domain of TCR clone 161931 (TRAV8-2, TRAJ26)
CVVTLLLWSEF

SEQ ID NO: 323862 - protein, 15 aa, Homo sapiens
  CDR3 for beta chain variable domain of TCR clone 161931 (TRBV11-2, TRBJ2-2)
CASSSDRVNAGELFF

SEQ ID NO: 323863 - protein, 13 aa, Homo sapiens
  CDR3 for alpha chain variable domain of TCR clone 161932 (TRAV20, TRAJ45)
CAVEKRRCRRTHL

SEQ ID NO: 323864 - protein, 14 aa, Homo sapiens
  CDR3 for beta chain variable domain of TCR clone 161932 (TRBV15, TRBJ2-5)
CATSIGGLGETQYF

SEQ ID NO: 323865 - protein, 14 aa, Homo sapiens
  CDR3 for alpha chain variable domain of TCR clone 161933 (TRAV8-2, TRAJ4)
CVVSPAGGYNKLIF

SEQ ID NO: 323866 - protein, 15 aa, Homo sapiens
  CDR3 for beta chain variable domain of TCR clone 161933 (TRBV2, TRBJ2-1)
CASSELAGSYNEQFF

SEQ ID NO: 323867 - protein, 14 aa, Homo sapiens
  CDR3 for alpha chain variable domain of TCR clone 161934 (TRAV12-1, TRAJ12)
CVVTRMDSSYKLIF

SEQ ID NO: 323868 - protein, 15 aa, Homo sapiens
  CDR3 for beta chain variable domain of TCR clone 161934 (TRBV7-2, TRBJ2-1)
CASSSGLAGGNEQFF

SEQ ID NO: 323869 - protein, 15 aa, Homo sapiens
  CDR3 for alpha chain variable domain of TCR clone 161935 (TRAV12-3, TRAJ6)
CAMSPASGGSYIPTF

SEQ ID NO: 323870 - protein, 14 aa, Homo sapiens
  CDR3 for beta chain variable domain of TCR clone 161935 (TRBV20-1, TRBJ2-4)
CSAVAGGPGNIQYF

SEQ ID NO: 323871 - protein, 13 aa, Homo sapiens
  CDR3 for alpha chain variable domain of TCR clone 161936 (TRAV13-1, TRAJ5)
CAARDTGRRALTF

SEQ ID NO: 323872 - protein, 15 aa, Homo sapiens
  CDR3 for beta chain variable domain of TCR clone 161936 (TRBV7-9, TRBJ2-7)
CASSPGGGLTYEQYF

SEQ ID NO: 323873 - protein, 14 aa, Homo sapiens
  CDR3 for alpha chain variable domain of TCR clone 161937 (TRAV1-2, TRAJ16)
CAVNRFSDGQKLLF

SEQ ID NO: 323874 - protein, 15 aa, Homo sapiens
  CDR3 for beta chain variable domain of TCR clone 161937 (TRBV6-5, TRBJ2-7)
CASSRTSGFSYEQYF

SEQ ID NO: 323875 - protein, 15 aa, Homo sapiens
  CDR3 for alpha chain variable domain of TCR clone 161938 (TRAV23/DV6, TRAJ13)
CAAWPGGGGYKKVTL

SEQ ID NO: 323876 - protein, 13 aa, Homo sapiens
  CDR3 for beta chain variable domain of TCR clone 161938 (TRBV10-3, TRBJ2-7)
CASKLAVNYEQYF

SEQ ID NO: 323877 - protein, 17 aa, Homo sapiens
  CDR3 for alpha chain variable domain of TCR clone 161939 (TRAV3, TRAJ12)
CAVRDGGRMDSSYKLIF

SEQ ID NO: 323878 - protein, 15 aa, Homo sapiens
  CDR3 for beta chain variable domain of TCR clone 161939 (TRBV11-3, TRBJ2-7)
CASSPGLASSYEHYF

SEQ ID NO: 323879 - protein, 14 aa, Homo sapiens
  CDR3 for alpha chain variable domain of TCR clone 161940 (TRAV38-1, TRAJ45)
CAYYSGGGADGLTF

SEQ ID NO: 323880 - protein, 13 aa, Homo sapiens
  CDR3 for beta chain variable domain of TCR clone 161940 (TRBV29-1, TRBJ2-1)
CSVEGGRVNEQFF

SEQ ID NO: 323881 - protein, 13 aa, Homo sapiens
  CDR3 for alpha chain variable domain of TCR clone 161941 (TRAV2, TRAJ40)
CAVVTSGTYKYIF

SEQ ID NO: 323882 - protein, 12 aa, Homo sapiens
  CDR3 for beta chain variable domain of TCR clone 161941 (TRBV5-1, TRBJ2-7)
CASSLDSYEQYF

SEQ ID NO: 323883 - protein, 12 aa, Homo sapiens
  CDR3 for alpha chain variable domain of TCR clone 161942 (TRAV13-1, TRAJ21)
CAAKEGFNKCYF

SEQ ID NO: 323884 - protein, 15 aa, Homo sapiens
  CDR3 for beta chain variable domain of TCR clone 161942 (TRBV15, TRBJ1-5)
CATSRDPVSNQPQHF

SEQ ID NO: 323885 - protein, 14 aa, Homo sapiens
  CDR3 for alpha chain variable domain of TCR clone 161943 (TRAV8-3, TRAJ45)
CAVGDGGGADGLTF

SEQ ID NO: 323886 - protein, 16 aa, Homo sapiens
  CDR3 for beta chain variable domain of TCR clone 161943 (TRBV28, TRBJ2-1)
CASSLTSGRSYNEQFF

SEQ ID NO: 323887 - protein, 17 aa, Homo sapiens
  CDR3 for alpha chain variable domain of TCR clone 161944 (TRAV3, TRAJ6)
YAVRDGPRAGGSYIPTF

SEQ ID NO: 323888 - protein, 14 aa, Homo sapiens
  CDR3 for beta chain variable domain of TCR clone 161944 (TRBV7-2, TRBJ2-7)
CASSPKTSFYEQYV

SEQ ID NO: 323889 - protein, 14 aa, Homo sapiens
  CDR3 for alpha chain variable domain of TCR clone 161945 (TRAV1-2, TRAJ16)
CAVNRFSDGQKLLF

SEQ ID NO: 323890 - protein, 15 aa, Homo sapiens
  CDR3 for beta chain variable domain of TCR clone 161945 (TRBV7-6, TRBJ2-2)
CASSSWTGKAGELFF

SEQ ID NO: 323891 - protein, 15 aa, Homo sapiens
  CDR3 for alpha chain variable domain of TCR clone 161946 (TRAV26-1, TRAJ56)
CIVRVDNGANSKLTF

SEQ ID NO: 323892 - protein, 12 aa, Homo sapiens
  CDR3 for beta chain variable domain of TCR clone 161946 (TRBV7-6, TRBJ2-7)
CASSLADSEQYF

SEQ ID NO: 323893 - protein, 16 aa, Homo sapiens
  CDR3 for alpha chain variable domain of TCR clone 161947 (TRAV30, TRAJ24)
CVTEIVDADSWGKFQF

SEQ ID NO: 323894 - protein, 12 aa, Homo sapiens
  CDR3 for beta chain variable domain of TCR clone 161947 (TRBV11-2, TRBJ2-2)
CASSLGGGELFF

SEQ ID NO: 323895 - protein, 17 aa, Homo sapiens
  CDR3 for alpha chain variable domain of TCR clone 161948 (TRAV38-2/DV8, TRAJ28)
CAFLTLYSGPGSYQLTF

SEQ ID NO: 323896 - protein, 14 aa, Homo sapiens
  CDR3 for beta chain variable domain of TCR clone 161948 (TRBV7-2, TRBJ2-5)
CASSLSGGGETQYF

SEQ ID NO: 323897 - protein, 13 aa, Homo sapiens
  CDR3 for alpha chain variable domain of TCR clone 161949 (TRAV12-3, TRAJ47)
CAMKKEYGNKLVF

SEQ ID NO: 323898 - protein, 16 aa, Homo sapiens
  CDR3 for beta chain variable domain of TCR clone 161949 (TRBV3-1, TRBJ2-6)
CASSLTCVSGANVLTF

SEQ ID NO: 323899 - protein, 16 aa, Homo sapiens
  CDR3 for alpha chain variable domain of TCR clone 161950 (TRAV3, TRAJ37)
CAVRPHGSGNTGKPIF

SEQ ID NO: 323900 - protein, 16 aa, Homo sapiens
  CDR3 for beta chain variable domain of TCR clone 161950 (TRBV9, TRBJ1-2)
CASSVEAKVSPYGYTF

SEQ ID NO: 323901 - protein, 12 aa, Homo sapiens
  CDR3 for alpha chain variable domain of TCR clone 161951 (TRAV23/DV6, TRAJ3)
CSARAPQQCFQD

SEQ ID NO: 323902 - protein, 17 aa, Homo sapiens
  CDR3 for beta chain variable domain of TCR clone 161951 (TRBV7-9, TRBJ2-3)
CASSPTVAGDLTDTQYF

SEQ ID NO: 323903 - protein, 13 aa, Homo sapiens
  CDR3 for alpha chain variable domain of TCR clone 161952 (TRAV9-2, TRAJ49)
CALIQIGGNQFYF

SEQ ID NO: 323904 - protein, 13 aa, Homo sapiens
  CDR3 for beta chain variable domain of TCR clone 161952 (TRBV20-1, TRBJ1-1)
CSARSGGNTEAFF

SEQ ID NO: 323905 - protein, 13 aa, Homo sapiens
  CDR3 for alpha chain variable domain of TCR clone 161953 (TRAV21, TRAJ27)
CAARPGHAGKSTF

SEQ ID NO: 323906 - protein, 12 aa, Homo sapiens
  CDR3 for beta chain variable domain of TCR clone 161953 (TRBV11-2, TRBJ2-2)
CASSLGGGELFF

SEQ ID NO: 323907 - protein, 14 aa, Homo sapiens
  CDR3 for alpha chain variable domain of TCR clone 161954 (TRAV3, TRAJ9)
CAVRGNTGGFNTIF

SEQ ID NO: 323908 - protein, 14 aa, Homo sapiens
  CDR3 for beta chain variable domain of TCR clone 161954 (TRBV15, TRBJ2-1)
CATSGVEDYNEQFF

SEQ ID NO: 323909 - protein, 13 aa, Homo sapiens
  CDR3 for alpha chain variable domain of TCR clone 161955 (TRAV12-3, TRAJ35)
CAMAIGFGNVLHC

SEQ ID NO: 323910 - protein, 15 aa, Homo sapiens
  CDR3 for beta chain variable domain of TCR clone 161955 (TRBV6-3, TRBJ2-7)
CASSSPGTVFYEQYF

SEQ ID NO: 323911 - protein, 14 aa, Homo sapiens
  CDR3 for alpha chain variable domain of TCR clone 161956 (TRAV23/DV6, TRAJ24)
CAASLSDSWGKLQF

SEQ ID NO: 323912 - protein, 16 aa, Homo sapiens
  CDR3 for beta chain variable domain of TCR clone 161956 (TRBV7-9, TRBJ2-6)
CASSWKGPLRANDLAF

SEQ ID NO: 323913 - protein, 12 aa, Homo sapiens
  CDR3 for alpha chain variable domain of TCR clone 161957 (TRAV12-1, TRAJ40)
CVFYSGTYKYIF

SEQ ID NO: 323914 - protein, 15 aa, Homo sapiens
  CDR3 for beta chain variable domain of TCR clone 161957 (TRBV7-9, TRBJ1-2)
CASSDIGGIVYGYTF

SEQ ID NO: 323915 - protein, 12 aa, Homo sapiens
  CDR3 for alpha chain variable domain of TCR clone 161958 (TRAV17, TRAJ49)
CATVTTGNQFYF

SEQ ID NO: 323916 - protein, 18 aa, Homo sapiens
  CDR3 for beta chain variable domain of TCR clone 161958 (TRBV11-2, TRBJ2-6)
CASSLNPCLGTGANVLTF

SEQ ID NO: 323917 - protein, 14 aa, Homo sapiens
  CDR3 for alpha chain variable domain of TCR clone 161959 (TRAV21, TRAJ12)
CAVRNGDSRYKLIF

SEQ ID NO: 323918 - protein, 14 aa, Homo sapiens
  CDR3 for beta chain variable domain of TCR clone 161959 (TRBV7-6, TRBJ2-7)
CASSLTGTGNEQYF

SEQ ID NO: 323919 - protein, 16 aa, Homo sapiens
  CDR3 for alpha chain variable domain of TCR clone 161960 (TRAV23/DV6, TRAJ9)
CAASIVGNTGGFKTIF

SEQ ID NO: 323920 - protein, 17 aa, Homo sapiens
  CDR3 for beta chain variable domain of TCR clone 161960 (TRBV13, TRBJ2-3)
CASSLSRVAGGRNTQYF

SEQ ID NO: 323921 - protein, 15 aa, Homo sapiens
  CDR3 for alpha chain variable domain of TCR clone 161961 (TRAV25, TRAJ43)
CAVFMRFVAGTRLTV

SEQ ID NO: 323922 - protein, 13 aa, Homo sapiens
  CDR3 for beta chain variable domain of TCR clone 161961 (TRBV7-9, TRBJ1-2)
CASSLKQNYGYTF

SEQ ID NO: 323923 - protein, 14 aa, Homo sapiens
  CDR3 for alpha chain variable domain of TCR clone 161962 (TRAV20, TRAJ22)
CAVQGAGSARQLTF

SEQ ID NO: 323924 - protein, 13 aa, Homo sapiens
  CDR3 for beta chain variable domain of TCR clone 161962 (TRBV10-2, TRBJ2-7)
CASGASGGYEQYF

SEQ ID NO: 323925 - protein, 13 aa, Homo sapiens
  CDR3 for alpha chain variable domain of TCR clone 161963 (TRAV27, TRAJ56)
CAGQPGANSKLTF

SEQ ID NO: 323926 - protein, 17 aa, Homo sapiens
  CDR3 for beta chain variable domain of TCR clone 161963 (TRBV5-1, TRBJ2-7)
FAPAADNPGQIPYEQYF

SEQ ID NO: 323927 - protein, 14 aa, Homo sapiens
  CDR3 for alpha chain variable domain of TCR clone 161964 (TRAV12-1, TRAJ23)
CVVFVYNQGGKLIF

SEQ ID NO: 323928 - protein, 15 aa, Homo sapiens
  CDR3 for beta chain variable domain of TCR clone 161964 (TRBV20-1, TRBJ1-5)
CSAKPPGQGSQPQHF

SEQ ID NO: 323929 - protein, 13 aa, Homo sapiens
  CDR3 for alpha chain variable domain of TCR clone 161965 (TRAV13-1, TRAJ39)
CSKYSNAVNMLTF

SEQ ID NO: 323930 - protein, 14 aa, Homo sapiens
  CDR3 for beta chain variable domain of TCR clone 161965 (TRBV6-1, TRBJ1-3)
CASVQGGGGNTIYF

SEQ ID NO: 323931 - protein, 13 aa, Homo sapiens
  CDR3 for alpha chain variable domain of TCR clone 161966 (TRAV27, TRAJ41)
CAGEGNSGYALNF

SEQ ID NO: 323932 - protein, 14 aa, Homo sapiens
  CDR3 for beta chain variable domain of TCR clone 161966 (TRBV7-2, TRBJ1-1)
RANSFLTGTTEAFF

SEQ ID NO: 323933 - protein, 16 aa, Homo sapiens
  CDR3 for alpha chain variable domain of TCR clone 161967 (TRAV23/DV6, TRAJ21)
CAASSGGGTTSTNFTL

SEQ ID NO: 323934 - protein, 16 aa, Homo sapiens
  CDR3 for beta chain variable domain of TCR clone 161967 (TRBV19, TRBJ2-1)
CASSKAGPSSYNEQFF

SEQ ID NO: 323935 - protein, 13 aa, Homo sapiens
  CDR3 for alpha chain variable domain of TCR clone 161968 (TRAV8-3, TRAJ6)
CAVEKGGSYIPTF

SEQ ID NO: 323936 - protein, 14 aa, Homo sapiens
  CDR3 for beta chain variable domain of TCR clone 161968 (TRBV12-4, TRBJ2-7)
CASQPGLANYEQYF

SEQ ID NO: 323937 - protein, 14 aa, Homo sapiens
  CDR3 for alpha chain variable domain of TCR clone 161969 (TRAV1-1, TRAJ27)
CAVIYNTNAGKSTL

SEQ ID NO: 323938 - protein, 15 aa, Homo sapiens
  CDR3 for beta chain variable domain of TCR clone 161969 (TRBV6-3, TRBJ2-7)
CASSSPGTVFYEQYF

SEQ ID NO: 323939 - protein, 12 aa, Homo sapiens
  CDR3 for alpha chain variable domain of TCR clone 161970 (TRAV29/DV5, TRAJ49)
CAATDTGNQFYF

SEQ ID NO: 323940 - protein, 15 aa, Homo sapiens
  CDR3 for beta chain variable domain of TCR clone 161970 (TRBV19, TRBJ1-2)
CASSVGQVLNYGYTF

SEQ ID NO: 323941 - protein, 15 aa, Homo sapiens
  CDR3 for alpha chain variable domain of TCR clone 161971 (TRAV13-1, TRAJ52)
CAATSPRTSYGKLTF

SEQ ID NO: 323942 - protein, 14 aa, Homo sapiens
  CDR3 for beta chain variable domain of TCR clone 161971 (TRBV19, TRBJ2-1)
CASPTFVLSGEQFF

SEQ ID NO: 323943 - protein, 16 aa, Homo sapiens
  CDR3 for alpha chain variable domain of TCR clone 161972 (TRAV14/DV4, TRAJ21)
CAMREGPENNFNKFYF

SEQ ID NO: 323944 - protein, 12 aa, Homo sapiens
  CDR3 for beta chain variable domain of TCR clone 161972 (TRBV7-8, TRBJ2-7)
CASSLGDREQYF

SEQ ID NO: 323945 - protein, 14 aa, Homo sapiens
  CDR3 for alpha chain variable domain of TCR clone 161973 (TRAV12-1, TRAJ17)
CVVNYKAAGNKLTF

SEQ ID NO: 323946 - protein, 14 aa, Homo sapiens
  CDR3 for beta chain variable domain of TCR clone 161973 (TRBV20-1, TRBJ1-5)
CSATDRGSNQTQHF

SEQ ID NO: 323947 - protein, 15 aa, Homo sapiens
  CDR3 for alpha chain variable domain of TCR clone 161974 (TRAV26-1, TRAJ48)
CIARWSWFGNERLTF

SEQ ID NO: 323948 - protein, 12 aa, Homo sapiens
  CDR3 for beta chain variable domain of TCR clone 161974 (TRBV19, TRBJ2-5)
CASSISEETQYF

SEQ ID NO: 323949 - protein, 18 aa, Homo sapiens
  CDR3 for alpha chain variable domain of TCR clone 161975 (TRAV13-1, TRAJ52)
CAAKNPNAGGTSSGKLTF

SEQ ID NO: 323950 - protein, 16 aa, Homo sapiens
  CDR3 for beta chain variable domain of TCR clone 161975 (TRBV6-1, TRBJ2-1)
CASILRQGSSYNEQFF

SEQ ID NO: 323951 - protein, 11 aa, Homo sapiens
  CDR3 for alpha chain variable domain of TCR clone 161976 (TRAV2, TRAJ23)
CAVETRGKLIF

SEQ ID NO: 323952 - protein, 15 aa, Homo sapiens
  CDR3 for beta chain variable domain of TCR clone 161976 (TRBV5-5, TRBJ1-5)
CASSSTPGSNQPQHF

SEQ ID NO: 323953 - protein, 14 aa, Homo sapiens
  CDR3 for alpha chain variable domain of TCR clone 161977 (TRAV12-1, TRAJ17)
CVVNYKAAGNKLTF

SEQ ID NO: 323954 - protein, 15 aa, Homo sapiens
  CDR3 for beta chain variable domain of TCR clone 161977 (TRBV18, TRBJ1-1)
CASSPRQGENTEAFF

SEQ ID NO: 323955 - protein, 11 aa, Homo sapiens
  CDR3 for alpha chain variable domain of TCR clone 161978 (TRAV21, TRAJ34)
CAHYNTDKLIF

SEQ ID NO: 323956 - protein, 16 aa, Homo sapiens
  CDR3 for beta chain variable domain of TCR clone 161978 (TRBV27, TRBJ2-7)
CASSSERRDSAYEQYF

SEQ ID NO: 323957 - protein, 14 aa, Homo sapiens
  CDR3 for alpha chain variable domain of TCR clone 161979 (TRAV12-3, TRAJ10)
SYLPLTGGGNKLTF

SEQ ID NO: 323958 - protein, 15 aa, Homo sapiens
  CDR3 for beta chain variable domain of TCR clone 161979 (TRBV20-1, TRBJ2-7)
CSARDRVSGMDEQYF

SEQ ID NO: 323959 - protein, 15 aa, Homo sapiens
  CDR3 for alpha chain variable domain of TCR clone 161980 (TRAV3, TRAJ5)
CAVRDRKTGRRALTF

SEQ ID NO: 323960 - protein, 16 aa, Homo sapiens
  CDR3 for beta chain variable domain of TCR clone 161980 (TRBV7-9, TRBJ2-3)
CASSPWREVGTDTQYF

SEQ ID NO: 323961 - protein, 10 aa, Homo sapiens
  CDR3 for alpha chain variable domain of TCR clone 161981 (TRAV1-2, TRAJ23)
CAGQGGKLIF

SEQ ID NO: 323962 - protein, 14 aa, Homo sapiens
  CDR3 for beta chain variable domain of TCR clone 161981 (TRBV6-1, TRBJ1-3)
CASVQGGGGNTIYF

SEQ ID NO: 323963 - protein, 10 aa, Homo sapiens
  CDR3 for alpha chain variable domain of TCR clone 161982 (TRAV16, TRAJ22)
SAMYLRQLTF

SEQ ID NO: 323964 - protein, 15 aa, Homo sapiens
  CDR3 for beta chain variable domain of TCR clone 161982 (TRBV7-9, TRBJ1-6)
CASSSPGRRNSPLHF

SEQ ID NO: 323965 - protein, 12 aa, Homo sapiens
  CDR3 for alpha chain variable domain of TCR clone 161983 (TRAV38-2/DV8, TRAJ47)
CVLMEYGNKLVF

SEQ ID NO: 323966 - protein, 15 aa, Homo sapiens
  CDR3 for beta chain variable domain of TCR clone 161983 (TRBV11-2, TRBJ2-2)
CASSSDRVNAGELFF

SEQ ID NO: 323967 - protein, 14 aa, Homo sapiens
  CDR3 for alpha chain variable domain of TCR clone 161984 (TRAV9-2, TRAJ39)
CALYIYNAGNMLTF

SEQ ID NO: 323968 - protein, 15 aa, Homo sapiens
  CDR3 for beta chain variable domain of TCR clone 161984 (TRBV20-1, TRBJ2-7)
CSARDWVSGMDEQYF

SEQ ID NO: 323969 - protein, 15 aa, Homo sapiens
  CDR3 for alpha chain variable domain of TCR clone 161985 (TRAV26-1, TRAJ56)
CIVRVATGANSKLTF

SEQ ID NO: 323970 - protein, 15 aa, Homo sapiens
  CDR3 for beta chain variable domain of TCR clone 161985 (TRBV27, TRBJ2-7)
CASSSQREGQREQYF

SEQ ID NO: 323971 - protein, 15 aa, Homo sapiens
  CDR3 for alpha chain variable domain of TCR clone 161986 (TRAV8-3, TRAJ41)
CAVGSNSNSGYALNI

SEQ ID NO: 323972 - protein, 17 aa, Homo sapiens
  CDR3 for beta chain variable domain of TCR clone 161986 (TRBV25-1, TRBJ2-1)
CASSAYGQGRGVYEQFF

SEQ ID NO: 323973 - protein, 15 aa, Homo sapiens
  CDR3 for alpha chain variable domain of TCR clone 161987 (TRAV23/DV6, TRAJ30)
CAASSQESREDKIIF

SEQ ID NO: 323974 - protein, 17 aa, Homo sapiens
  CDR3 for beta chain variable domain of TCR clone 161987 (TRBV4-3, TRBJ2-1)
CASSQFSSGRASGEQFF

SEQ ID NO: 323975 - protein, 11 aa, Homo sapiens
  CDR3 for alpha chain variable domain of TCR clone 161988 (TRAV12-2, TRAJ39)
CAVNNMLTFGG

SEQ ID NO: 323976 - protein, 16 aa, Homo sapiens
  CDR3 for beta chain variable domain of TCR clone 161988 (TRBV28, TRBJ2-7)
CASSPWVATGDLSQYF

SEQ ID NO: 323977 - protein, 14 aa, Homo sapiens
  CDR3 for alpha chain variable domain of TCR clone 161989 (TRAV12-3, TRAJ12)
CAMSALDSSYKLIF

SEQ ID NO: 323978 - protein, 15 aa, Homo sapiens
  CDR3 for beta chain variable domain of TCR clone 161989 (TRBV6-3, TRBJ2-7)
CASSSPGTVFYEQYF

SEQ ID NO: 323979 - protein, 13 aa, Homo sapiens
  CDR3 for alpha chain variable domain of TCR clone 161990 (TRAV35, TRAJ42)
WAGFPGSQGNLIF

SEQ ID NO: 323980 - protein, 15 aa, Homo sapiens
  CDR3 for beta chain variable domain of TCR clone 161990 (TRBV6-3, TRBJ2-7)
CASSSPGTVFYEQYF

SEQ ID NO: 323981 - protein, 11 aa, Homo sapiens
  CDR3 for alpha chain variable domain of TCR clone 161991 (TRAV2, TRAJ13)
CASGGYQKVTF

SEQ ID NO: 323982 - protein, 16 aa, Homo sapiens
  CDR3 for beta chain variable domain of TCR clone 161991 (TRBV7-2, TRBJ1-1)
CASSLGAGWTNTEAFF

SEQ ID NO: 323983 - protein, 16 aa, Homo sapiens
  CDR3 for alpha chain variable domain of TCR clone 161992 (TRAV12-2, TRAJ48)
CAVNPTSNFGNEKLTF

SEQ ID NO: 323984 - protein, 12 aa, Homo sapiens
  CDR3 for beta chain variable domain of TCR clone 161992 (TRBV9, TRBJ2-3)
CASSLPAGTQYF

SEQ ID NO: 323985 - protein, 15 aa, Homo sapiens
  CDR3 for alpha chain variable domain of TCR clone 161993 (TRAV35, TRAJ58)
CAGRRQETSGSRLTF

SEQ ID NO: 323986 - protein, 16 aa, Homo sapiens
  CDR3 for beta chain variable domain of TCR clone 161993 (TRBV2, TRBJ2-1)
CASSVGRSLSYNEQFF

SEQ ID NO: 323987 - protein, 17 aa, Homo sapiens
  CDR3 for alpha chain variable domain of TCR clone 161994 (TRAV12-3, TRAJ52)
CASPPFAGGTSYGKLTF

SEQ ID NO: 323988 - protein, 13 aa, Homo sapiens
  CDR3 for beta chain variable domain of TCR clone 161994 (TRBV12-4, TRBJ2-5)
CASSLGGSRTQYF

SEQ ID NO: 323989 - protein, 15 aa, Homo sapiens
  CDR3 for alpha chain variable domain of TCR clone 161995 (TRAV27, TRAJ33)
CAGADIMDSNYQLNW

SEQ ID NO: 323990 - protein, 13 aa, Homo sapiens
  CDR3 for beta chain variable domain of TCR clone 161995 (TRBV28, TRBJ1-2)
CASSLQGRGGYTF

SEQ ID NO: 323991 - protein, 15 aa, Homo sapiens
  CDR3 for alpha chain variable domain of TCR clone 161996 (TRAV36/DV7, TRAJ54)
CAVGKPVQGAQKLVF

SEQ ID NO: 323992 - protein, 14 aa, Homo sapiens
  CDR3 for beta chain variable domain of TCR clone 161996 (TRBV4-3, TRBJ2-2)
CASSQGHVTGELFF

SEQ ID NO: 323993 - protein, 17 aa, Homo sapiens
  CDR3 for alpha chain variable domain of TCR clone 161997 (TRAV3, TRAJ6)
CSVRDGHRAGGSYIPTF

SEQ ID NO: 323994 - protein, 14 aa, Homo sapiens
  CDR3 for beta chain variable domain of TCR clone 161997 (TRBV7-2, TRBJ2-7)
CASSPKTSFYEQYF

SEQ ID NO: 323995 - protein, 14 aa, Homo sapiens
  CDR3 for alpha chain variable domain of TCR clone 161998 (TRAV26-1, TRAJ38)
CIAGNAGNNRKLIW

SEQ ID NO: 323996 - protein, 11 aa, Homo sapiens
  CDR3 for beta chain variable domain of TCR clone 161998 (TRBV29-1, TRBJ2-5)
CSEDRTGTQYF

SEQ ID NO: 323997 - protein, 15 aa, Homo sapiens
  CDR3 for alpha chain variable domain of TCR clone 161999 (TRAV12-1, TRAJ44)
CVVFVNTGTASKLTF

SEQ ID NO: 323998 - protein, 17 aa, Homo sapiens
  CDR3 for beta chain variable domain of TCR clone 161999 (TRBV4-1, TRBJ2-3)
CASSQVLQGGGTDTQYF

SEQ ID NO: 323999 - protein, 13 aa, Homo sapiens
  CDR3 for alpha chain variable domain of TCR clone 162000 (TRAV12-2, TRAJ39)
CAVHNNAGNMLTF

SEQ ID NO: 324000 - protein, 13 aa, Homo sapiens
  CDR3 for beta chain variable domain of TCR clone 162000 (TRBV2, TRBJ1-5)
CATAGPGNQPQHF

SEQ ID NO: 324001 - protein, 12 aa, Homo sapiens
  CDR3 for alpha chain variable domain of TCR clone 162001 (TRAV17, TRAJ30)
CVPERGDDKIIF

SEQ ID NO: 324002 - protein, 14 aa, Homo sapiens
  CDR3 for beta chain variable domain of TCR clone 162001 (TRBV7-7, TRBJ2-2)
CASSRDRSTGELFF

SEQ ID NO: 324003 - protein, 13 aa, Homo sapiens
  CDR3 for alpha chain variable domain of TCR clone 162002 (TRAV8-4, TRAJ13)
CAVTLWGLPESYL

SEQ ID NO: 324004 - protein, 14 aa, Homo sapiens
  CDR3 for beta chain variable domain of TCR clone 162002 (TRBV7-2, TRBJ1-2)
CASSQTGSTYGYTF

SEQ ID NO: 324005 - protein, 15 aa, Homo sapiens
  CDR3 for alpha chain variable domain of TCR clone 162003 (TRAV21, TRAJ45)
FAVSYSGGGADGLTF

SEQ ID NO: 324006 - protein, 13 aa, Homo sapiens
  CDR3 for beta chain variable domain of TCR clone 162003 (TRBV20-1, TRBJ2-5)
CSAATELQETQYF

SEQ ID NO: 324007 - protein, 15 aa, Homo sapiens
  CDR3 for alpha chain variable domain of TCR clone 162004 (TRAV1-2, TRAJ15)
CAVDVMGSAGTALIF

SEQ ID NO: 324008 - protein, 13 aa, Homo sapiens
  CDR3 for beta chain variable domain of TCR clone 162004 (TRBV28, TRBJ2-7)
CASSLGGAYEQYF

SEQ ID NO: 324009 - protein, 12 aa, Homo sapiens
  CDR3 for alpha chain variable domain of TCR clone 162005 (TRAV21, TRAJ11)
FAATSGYSTLTF

SEQ ID NO: 324010 - protein, 16 aa, Homo sapiens
  CDR3 for beta chain variable domain of TCR clone 162005 (TRBV28, TRBJ2-2)
CASSLEGGSNTGELFF

SEQ ID NO: 324011 - protein, 14 aa, Homo sapiens
  CDR3 for alpha chain variable domain of TCR clone 162006 (TRAV12-2, TRAJ53)
CRELGGGSHYKLTF

SEQ ID NO: 324012 - protein, 14 aa, Homo sapiens
  CDR3 for beta chain variable domain of TCR clone 162006 (TRBV19, TRBJ2-2)
CASSTLHRSGELFF

SEQ ID NO: 324013 - protein, 13 aa, Homo sapiens
  CDR3 for alpha chain variable domain of TCR clone 162007 (TRAV8-6, TRAJ49)
CAVITNTGNQFYF

SEQ ID NO: 324014 - protein, 15 aa, Homo sapiens
  CDR3 for beta chain variable domain of TCR clone 162007 (TRBV5-1, TRBJ2-7)
CASSLNGGPAREQYF

SEQ ID NO: 324015 - protein, 12 aa, Homo sapiens
  CDR3 for alpha chain variable domain of TCR clone 162008 (TRAV27, TRAJ9)
CAGESGGFKTIF

SEQ ID NO: 324016 - protein, 16 aa, Homo sapiens
  CDR3 for beta chain variable domain of TCR clone 162008 (TRBV7-9, TRBJ2-3)
CASSPWREVGTDTQYF

SEQ ID NO: 324017 - protein, 14 aa, Homo sapiens
  CDR3 for alpha chain variable domain of TCR clone 162009 (TRAV12-2, TRAJ9)
CAVRGQTGGFKTIF

SEQ ID NO: 324018 - protein, 13 aa, Homo sapiens
  CDR3 for beta chain variable domain of TCR clone 162009 (TRBV12-4, TRBJ2-5)
CASSPGTVETQYF

SEQ ID NO: 324019 - protein, 18 aa, Homo sapiens
  CDR3 for alpha chain variable domain of TCR clone 162010 (TRAV26-1, TRAJ22)
YIVRVALISSGSARQLTF

SEQ ID NO: 324020 - protein, 13 aa, Homo sapiens
  CDR3 for beta chain variable domain of TCR clone 162010 (TRBV13, TRBJ2-5)
CASSPEVGETQYF

SEQ ID NO: 324021 - protein, 14 aa, Homo sapiens
  CDR3 for alpha chain variable domain of TCR clone 162011 (TRAV8-3, TRAJ4)
CAVGAAGGYNKLIC

SEQ ID NO: 324022 - protein, 14 aa, Homo sapiens
  CDR3 for beta chain variable domain of TCR clone 162011 (TRBV18, TRBJ2-5)
CASSPGVSQETQYF

SEQ ID NO: 324023 - protein, 18 aa, Homo sapiens
  CDR3 for alpha chain variable domain of TCR clone 162012 (TRAV35, TRAJ47)
CWLLDCRTHTEYGNKLVF

SEQ ID NO: 324024 - protein, 11 aa, Homo sapiens
  CDR3 for beta chain variable domain of TCR clone 162012 (TRBV29-1, TRBJ1-1)
CSVEVGTRTFF

SEQ ID NO: 324025 - protein, 14 aa, Homo sapiens
  CDR3 for alpha chain variable domain of TCR clone 162013 (TRAV22, TRAJ6)
CAGVGPGGSYIPTF

SEQ ID NO: 324026 - protein, 19 aa, Homo sapiens
  CDR3 for beta chain variable domain of TCR clone 162013 (TRBV25-1, TRBJ2-2)
CVILVYRVDRGRKTGELFF

SEQ ID NO: 324027 - protein, 15 aa, Homo sapiens
  CDR3 for alpha chain variable domain of TCR clone 162014 (TRAV2, TRAJ9)
CAVEDRGTGGFKTIF

SEQ ID NO: 324028 - protein, 13 aa, Homo sapiens
  CDR3 for beta chain variable domain of TCR clone 162014 (TRBV19, TRBJ1-2)
CASSVPGQDGYAF

SEQ ID NO: 324029 - protein, 12 aa, Homo sapiens
  CDR3 for alpha chain variable domain of TCR clone 162015 (TRAV12-3, TRAJ17)
CAMTLTGNKLTF

SEQ ID NO: 324030 - protein, 20 aa, Homo sapiens
  CDR3 for beta chain variable domain of TCR clone 162015 (TRBV7-8, TRBJ2-2)
CASSHLFPGTTIHITGELFF

SEQ ID NO: 324031 - protein, 15 aa, Homo sapiens
  CDR3 for alpha chain variable domain of TCR clone 162016 (TRAV2, TRAJ15)
CAVEDRGQAGTALIF

SEQ ID NO: 324032 - protein, 13 aa, Homo sapiens
  CDR3 for beta chain variable domain of TCR clone 162016 (TRBV10-2, TRBJ2-7)
SASGASGGYEQYF

SEQ ID NO: 324033 - protein, 13 aa, Homo sapiens
  CDR3 for alpha chain variable domain of TCR clone 162017 (TRAV30, TRAJ24)
CGTVTDSWGKLQF

SEQ ID NO: 324034 - protein, 12 aa, Homo sapiens
  CDR3 for beta chain variable domain of TCR clone 162017 (TRBV6-3, TRBJ2-7)
CASSLTPYEQYF

SEQ ID NO: 324035 - protein, 12 aa, Homo sapiens
  CDR3 for alpha chain variable domain of TCR clone 162018 (TRAV12-1, TRAJ20)
CVGNPDDYKLSF

SEQ ID NO: 324036 - protein, 12 aa, Homo sapiens
  CDR3 for beta chain variable domain of TCR clone 162018 (TRBV11-2, TRBJ2-2)
CASSLGGGELFF

SEQ ID NO: 324037 - protein, 10 aa, Homo sapiens
  CDR3 for alpha chain variable domain of TCR clone 162019 (TRAV1-2, TRAJ31)
CAFFRCQTHV

SEQ ID NO: 324038 - protein, 13 aa, Homo sapiens
  CDR3 for beta chain variable domain of TCR clone 162019 (TRBV7-9, TRBJ1-2)
CASSLKQNYGHTF

SEQ ID NO: 324039 - protein, 12 aa, Homo sapiens
  CDR3 for alpha chain variable domain of TCR clone 162020 (TRAV26-2, TRAJ21)
CILKGNFNKFYL

SEQ ID NO: 324040 - protein, 14 aa, Homo sapiens
  CDR3 for beta chain variable domain of TCR clone 162020 (TRBV7-9, TRBJ1-1)
CASTPLQSYIEAFF

SEQ ID NO: 324041 - protein, 16 aa, Homo sapiens
  CDR3 for alpha chain variable domain of TCR clone 162021 (TRAV12-2, TRAJ52)
CRLANAGGTSYGKLTF

SEQ ID NO: 324042 - protein, 14 aa, Homo sapiens
  CDR3 for beta chain variable domain of TCR clone 162021 (TRBV7-6, TRBJ2-3)
CASSLGTVTDTKYF

SEQ ID NO: 324043 - protein, 11 aa, Homo sapiens
  CDR3 for alpha chain variable domain of TCR clone 162022 (TRAV3, TRAJ21)
CAVGNFNKFYF

SEQ ID NO: 324044 - protein, 17 aa, Homo sapiens
  CDR3 for beta chain variable domain of TCR clone 162022 (TRBV6-5, TRBJ2-3)
CASSYTTGTGRGDTQYF

SEQ ID NO: 324045 - protein, 14 aa, Homo sapiens
  CDR3 for alpha chain variable domain of TCR clone 162023 (TRAV8-4, TRAJ54)
CAVSEVLGVQKLVF

SEQ ID NO: 324046 - protein, 17 aa, Homo sapiens
  CDR3 for beta chain variable domain of TCR clone 162023 (TRBV4-1, TRBJ1-4)
CASSQEGPRGVEEKLFF

SEQ ID NO: 324047 - protein, 14 aa, Homo sapiens
  CDR3 for alpha chain variable domain of TCR clone 162024 (TRAV35, TRAJ50)
CAGHRKTSYDKVIF

SEQ ID NO: 324048 - protein, 18 aa, Homo sapiens
  CDR3 for beta chain variable domain of TCR clone 162024 (TRBV11-2, TRBJ2-3)
CASSLGGASRGAPNTQYF

SEQ ID NO: 324049 - protein, 14 aa, Homo sapiens
  CDR3 for alpha chain variable domain of TCR clone 162025 (TRAV12-2, TRAJ17)
CAALFKAAGNKLTF

SEQ ID NO: 324050 - protein, 16 aa, Homo sapiens
  CDR3 for beta chain variable domain of TCR clone 162025 (TRBV20-1, TRBJ2-2)
CSASASGIPGDGELFF

SEQ ID NO: 324051 - protein, 11 aa, Homo sapiens
  CDR3 for alpha chain variable domain of TCR clone 162026 (TRAV23/DV6, TRAJ43)
CAESSGNDMRF

SEQ ID NO: 324052 - protein, 14 aa, Homo sapiens
  CDR3 for beta chain variable domain of TCR clone 162026 (TRBV4-1, TRBJ1-2)
CASSQDPLPYGYTF

SEQ ID NO: 324053 - protein, 15 aa, Homo sapiens
  CDR3 for alpha chain variable domain of TCR clone 162027 (TRAV23/DV6, TRAJ37)
CAAGEGSSNTGKLIF

SEQ ID NO: 324054 - protein, 17 aa, Homo sapiens
  CDR3 for beta chain variable domain of TCR clone 162027 (TRBV20-1, TRBJ2-7)
GSATRAGGVAGVEEQYF

SEQ ID NO: 324055 - protein, 16 aa, Homo sapiens
  CDR3 for alpha chain variable domain of TCR clone 162028 (TRAV12-3, TRAJ53)
CAMSPGSGGSNYKLTL

SEQ ID NO: 324056 - protein, 16 aa, Homo sapiens
  CDR3 for beta chain variable domain of TCR clone 162028 (TRBV4-2, TRBJ1-1)
CASSQAGFGMNTEAFF

SEQ ID NO: 324057 - protein, 16 aa, Homo sapiens
  CDR3 for alpha chain variable domain of TCR clone 162029 (TRAV35, TRAJ28)
CAGQKYSGAGSYQLTF

SEQ ID NO: 324058 - protein, 16 aa, Homo sapiens
  CDR3 for beta chain variable domain of TCR clone 162029 (TRBV7-3, TRBJ2-2)
CASSLKRGTLSGELYF

SEQ ID NO: 324059 - protein, 11 aa, Homo sapiens
  CDR3 for alpha chain variable domain of TCR clone 162030 (TRAV8-3, TRAJ16)
CAVVPCQKLLF

SEQ ID NO: 324060 - protein, 12 aa, Homo sapiens
  CDR3 for beta chain variable domain of TCR clone 162030 (TRBV3-1, TRBJ1-1)
CASSQDPTEAVF

SEQ ID NO: 324061 - protein, 13 aa, Homo sapiens
  CDR3 for alpha chain variable domain of TCR clone 162031 (TRAV1-1, TRAJ9)
CAAASTGGFKTIF

SEQ ID NO: 324062 - protein, 16 aa, Homo sapiens
  CDR3 for beta chain variable domain of TCR clone 162031 (TRBV10-3, TRBJ2-1)
CAISGVGDGGGGEQFF

SEQ ID NO: 324063 - protein, 14 aa, Homo sapiens
  CDR3 for alpha chain variable domain of TCR clone 162032 (TRAV26-1, TRAJ21)
CIVRPPYNFNKFYF

SEQ ID NO: 324064 - protein, 15 aa, Homo sapiens
  CDR3 for beta chain variable domain of TCR clone 162032 (TRBV24-1, TRBJ2-1)
CATRASGGQYNEQFF

SEQ ID NO: 324065 - protein, 13 aa, Homo sapiens
  CDR3 for alpha chain variable domain of TCR clone 162033 (TRAV21, TRAJ27)
CAARPGNAGKSTC

SEQ ID NO: 324066 - protein, 12 aa, Homo sapiens
  CDR3 for beta chain variable domain of TCR clone 162033 (TRBV11-2, TRBJ2-2)
CASSLGGGELFF

SEQ ID NO: 324067 - protein, 15 aa, Homo sapiens
  CDR3 for alpha chain variable domain of TCR clone 162034 (TRAV3, TRAJ17)
CAVSPKEAAGNKLTF

SEQ ID NO: 324068 - protein, 14 aa, Homo sapiens
  CDR3 for beta chain variable domain of TCR clone 162034 (TRBV19, TRBJ2-1)
CASPTFVLSGEQFF

SEQ ID NO: 324069 - protein, 17 aa, Homo sapiens
  CDR3 for alpha chain variable domain of TCR clone 162035 (TRAV4, TRAJ20)
CTTASWVKGNNDYKLSF

SEQ ID NO: 324070 - protein, 17 aa, Homo sapiens
  CDR3 for beta chain variable domain of TCR clone 162035 (TRBV11-2, TRBJ2-1)
CASSLYPPGVEYNEQFS

SEQ ID NO: 324071 - protein, 16 aa, Homo sapiens
  CDR3 for alpha chain variable domain of TCR clone 162036 (TRAV16, TRAJ21)
CACGWAPTSTNFTLDL

SEQ ID NO: 324072 - protein, 15 aa, Homo sapiens
  CDR3 for beta chain variable domain of TCR clone 162036 (TRBV19, TRBJ2-1)
CASSIQATSYNEQFF

SEQ ID NO: 324073 - protein, 13 aa, Homo sapiens
  CDR3 for alpha chain variable domain of TCR clone 162037 (TRAV12-1, TRAJ29)
CVVNGPGNTPLVF

SEQ ID NO: 324074 - protein, 13 aa, Homo sapiens
  CDR3 for beta chain variable domain of TCR clone 162037 (TRBV12-4, TRBJ1-2)
CASSLRQGKGYTF

SEQ ID NO: 324075 - protein, 13 aa, Homo sapiens
  CDR3 for alpha chain variable domain of TCR clone 162038 (TRAV8-3, TRAJ21)
CAVGAYNFNKFHF

SEQ ID NO: 324076 - protein, 16 aa, Homo sapiens
  CDR3 for beta chain variable domain of TCR clone 162038 (TRBV19, TRBJ2-1)
CASSMGGGSSYNEQFF

SEQ ID NO: 324077 - protein, 15 aa, Homo sapiens
  CDR3 for alpha chain variable domain of TCR clone 162039 (TRAV4, TRAJ39)
CLVGPNNNAGNMLTF

SEQ ID NO: 324078 - protein, 15 aa, Homo sapiens
  CDR3 for beta chain variable domain of TCR clone 162039 (TRBV19, TRBJ1-6)
CASSTQGAVGSPLLF

SEQ ID NO: 324079 - protein, 17 aa, Homo sapiens
  CDR3 for alpha chain variable domain of TCR clone 162040 (TRAV8-2, )
CVVNIQNPDPAVYQLRD

SEQ ID NO: 324080 - protein, 12 aa, Homo sapiens
  CDR3 for beta chain variable domain of TCR clone 162040 (TRBV7-9, TRBJ2-7)
CASSIKREEQYF

SEQ ID NO: 324081 - protein, 16 aa, Homo sapiens
  CDR3 for alpha chain variable domain of TCR clone 162041 (TRAV30, TRAJ24)
CGTEIMDADSWGKFQF

SEQ ID NO: 324082 - protein, 13 aa, Homo sapiens
  CDR3 for beta chain variable domain of TCR clone 162041 (TRBV11-2, TRBJ2-5)
CASSSTGEETQYF

SEQ ID NO: 324083 - protein, 12 aa, Homo sapiens
  CDR3 for alpha chain variable domain of TCR clone 162042 (TRAV12-2, TRAJ36)
CAAPRGANNLFF

SEQ ID NO: 324084 - protein, 17 aa, Homo sapiens
  CDR3 for beta chain variable domain of TCR clone 162042 (TRBV11-2, TRBJ2-1)
CASSLYPPGVEYNEQFF

SEQ ID NO: 324085 - protein, 13 aa, Homo sapiens
  CDR3 for alpha chain variable domain of TCR clone 162043 (TRAV3, TRAJ27)
CAVRPLGAAKSTF

SEQ ID NO: 324086 - protein, 15 aa, Homo sapiens
  CDR3 for beta chain variable domain of TCR clone 162043 (TRBV20-1, TRBJ2-7)
CSARDRVSGMDEQYF

SEQ ID NO: 324087 - protein, 16 aa, Homo sapiens
  CDR3 for alpha chain variable domain of TCR clone 162044 (TRAV30, TRAJ24)
CGTEIVDADSWGKFQF

SEQ ID NO: 324088 - protein, 14 aa, Homo sapiens
  CDR3 for beta chain variable domain of TCR clone 162044 (TRBV7-8, TRBJ2-3)
CASSLEAGTDTQYC

SEQ ID NO: 324089 - protein, 14 aa, Homo sapiens
  CDR3 for alpha chain variable domain of TCR clone 162045 (TRAV1-2, TRAJ16)
CAVNRFSDGKKLLF

SEQ ID NO: 324090 - protein, 14 aa, Homo sapiens
  CDR3 for beta chain variable domain of TCR clone 162045 (TRBV19, TRBJ2-1)
CASPTFVLSGEKFF

SEQ ID NO: 324091 - protein, 11 aa, Homo sapiens
  CDR3 for alpha chain variable domain of TCR clone 162046 (TRAV35, TRAJ34)
CWARNTDKLIF

SEQ ID NO: 324092 - protein, 15 aa, Homo sapiens
  CDR3 for beta chain variable domain of TCR clone 162046 (TRBV12-4, TRBJ2-7)
RASSQVISTGVEQYF

SEQ ID NO: 324093 - protein, 17 aa, Homo sapiens
  CDR3 for alpha chain variable domain of TCR clone 162047 (TRAV16, TRAJ58)
CITVLSNGETGGSRLTF

SEQ ID NO: 324094 - protein, 17 aa, Homo sapiens
  CDR3 for beta chain variable domain of TCR clone 162047 (TRBV18, TRBJ2-1)
CASSKGLSGGADNEQFF

SEQ ID NO: 324095 - protein, 13 aa, Homo sapiens
  CDR3 for alpha chain variable domain of TCR clone 162048 (TRAV12-3, TRAJ29)
CAMTLSGNTPLVF

SEQ ID NO: 324096 - protein, 13 aa, Homo sapiens
  CDR3 for beta chain variable domain of TCR clone 162048 (TRBV7-2, TRBJ2-2)
CASSLAVTGELFF

SEQ ID NO: 324097 - protein, 13 aa, Homo sapiens
  CDR3 for alpha chain variable domain of TCR clone 162049 (TRAV29/DV5, TRAJ31)
CAASRNNNARLMF

SEQ ID NO: 324098 - protein, 12 aa, Homo sapiens
  CDR3 for beta chain variable domain of TCR clone 162049 (TRBV14, TRBJ2-5)
CASSQLKETLYF

SEQ ID NO: 324099 - protein, 14 aa, Homo sapiens
  CDR3 for alpha chain variable domain of TCR clone 162050 (TRAV8-4, TRAJ54)
CAVSEVLGAQKLVF

SEQ ID NO: 324100 - protein, 15 aa, Homo sapiens
  CDR3 for beta chain variable domain of TCR clone 162050 (TRBV20-1, TRBJ2-7)
CSARDRVSGMDEQYF

SEQ ID NO: 324101 - protein, 14 aa, Homo sapiens
  CDR3 for alpha chain variable domain of TCR clone 162051 (TRAV12-1, TRAJ3)
CVVSGYRSASKIIF

SEQ ID NO: 324102 - protein, 14 aa, Homo sapiens
  CDR3 for beta chain variable domain of TCR clone 162051 (TRBV6-6, TRBJ1-3)
CASSRQGSGNTIYF

SEQ ID NO: 324103 - protein, 15 aa, Homo sapiens
  CDR3 for alpha chain variable domain of TCR clone 162052 (TRAV3, TRAJ16)
CAVRDGFSVGQKLPF

SEQ ID NO: 324104 - protein, 17 aa, Homo sapiens
  CDR3 for beta chain variable domain of TCR clone 162052 (TRBV6-1, TRBJ2-3)
CASRTRGLAQSTDTQYF

SEQ ID NO: 324105 - protein, 12 aa, Homo sapiens
  CDR3 for alpha chain variable domain of TCR clone 162053 (TRAV12-3, TRAJ17)
SAMTLTGKKLTF

SEQ ID NO: 324106 - protein, 15 aa, Homo sapiens
  CDR3 for beta chain variable domain of TCR clone 162053 (TRBV20-1, TRBJ2-7)
CSARDRVSGMDEQYF

SEQ ID NO: 324107 - protein, 13 aa, Homo sapiens
  CDR3 for alpha chain variable domain of TCR clone 162054 (TRAV8-4, TRAJ39)
STPPSDAGDMLTF

SEQ ID NO: 324108 - protein, 13 aa, Homo sapiens
  CDR3 for beta chain variable domain of TCR clone 162054 (TRBV12-4, TRBJ2-7)
CASSPTETYEQYF

SEQ ID NO: 324109 - protein, 16 aa, Homo sapiens
  CDR3 for alpha chain variable domain of TCR clone 162055 (TRAV12-1, TRAJ43)
CVVNPHRFGAGTRLRV

SEQ ID NO: 324110 - protein, 13 aa, Homo sapiens
  CDR3 for beta chain variable domain of TCR clone 162055 (TRBV12-4, TRBJ1-2)
CASSSGPNYGYTF

SEQ ID NO: 324111 - protein, 14 aa, Homo sapiens
  CDR3 for alpha chain variable domain of TCR clone 162056 (TRAV13-1, TRAJ44)
CAAKATGTASKLTF

SEQ ID NO: 324112 - protein, 12 aa, Homo sapiens
  CDR3 for beta chain variable domain of TCR clone 162056 (TRBV7-9, TRBJ2-7)
CASSLEGYEQYF

SEQ ID NO: 324113 - protein, 10 aa, Homo sapiens
  CDR3 for alpha chain variable domain of TCR clone 162057 (TRAV12-1, TRAJ33)
CVASNYRLIW

SEQ ID NO: 324114 - protein, 15 aa, Homo sapiens
  CDR3 for beta chain variable domain of TCR clone 162057 (TRBV5-4, TRBJ1-4)
CASSHGDGENEKLFF

SEQ ID NO: 324115 - protein, 13 aa, Homo sapiens
  CDR3 for alpha chain variable domain of TCR clone 162058 (TRAV1-1, TRAJ9)
CAAKNTGGFKTIF

SEQ ID NO: 324116 - protein, 16 aa, Homo sapiens
  CDR3 for beta chain variable domain of TCR clone 162058 (TRBV9, TRBJ2-2)
CASSGPSGTGIGELFF

SEQ ID NO: 324117 - protein, 17 aa, Homo sapiens
  CDR3 for alpha chain variable domain of TCR clone 162059 (TRAV3, TRAJ6)
CAVRDGPRAGGGYIPTF

SEQ ID NO: 324118 - protein, 15 aa, Homo sapiens
  CDR3 for beta chain variable domain of TCR clone 162059 (TRBV11-3, TRBJ2-7)
CASSPGPASSYEQYF

SEQ ID NO: 324119 - protein, 12 aa, Homo sapiens
  CDR3 for alpha chain variable domain of TCR clone 162060 (TRAV3, TRAJ27)
CAVRDKAGKSTF

SEQ ID NO: 324120 - protein, 14 aa, Homo sapiens
  CDR3 for beta chain variable domain of TCR clone 162060 (TRBV5-1, TRBJ1-2)
CASRVDSTNYGYTF

SEQ ID NO: 324121 - protein, 18 aa, Homo sapiens
  CDR3 for alpha chain variable domain of TCR clone 162061 (TRAV26-1, TRAJ23)
CIVRVGLEVWNQGGKLIF

SEQ ID NO: 324122 - protein, 14 aa, Homo sapiens
  CDR3 for beta chain variable domain of TCR clone 162061 (TRBV7-6, TRBJ2-3)
GASSLGTVTDTQYF

SEQ ID NO: 324123 - protein, 13 aa, Homo sapiens
  CDR3 for alpha chain variable domain of TCR clone 162062 (TRAV2, TRAJ40)
CAVATSGTYKYIF

SEQ ID NO: 324124 - protein, 14 aa, Homo sapiens
  CDR3 for beta chain variable domain of TCR clone 162062 (TRBV19, TRBJ2-1)
CASPTFVLSCEQFF

SEQ ID NO: 324125 - protein, 17 aa, Homo sapiens
  CDR3 for alpha chain variable domain of TCR clone 162063 (TRAV13-1, TRAJ31)
CAPRHRLMFGDGTQLVV

SEQ ID NO: 324126 - protein, 12 aa, Homo sapiens
  CDR3 for beta chain variable domain of TCR clone 162063 (TRBV7-9, TRBJ2-7)
CASSLEGYEQYF

SEQ ID NO: 324127 - protein, 10 aa, Homo sapiens
  CDR3 for alpha chain variable domain of TCR clone 162064 (TRAV30, TRAJ24)
WMLTAGKFQF

SEQ ID NO: 324128 - protein, 14 aa, Homo sapiens
  CDR3 for beta chain variable domain of TCR clone 162064 (TRBV7-2, TRBJ2-7)
CASSPKTSFYEQYF

SEQ ID NO: 324129 - protein, 17 aa, Homo sapiens
  CDR3 for alpha chain variable domain of TCR clone 162065 (TRAV3, TRAJ6)
CAVRDGPRAGGSYIPTF

SEQ ID NO: 324130 - protein, 12 aa, Homo sapiens
  CDR3 for beta chain variable domain of TCR clone 162065 (TRBV11-2, TRBJ2-2)
CASSRGGGELFF

SEQ ID NO: 324131 - protein, 16 aa, Homo sapiens
  CDR3 for alpha chain variable domain of TCR clone 162066 (TRAV3, TRAJ10)
CAVRDMRGGGGNKLTF

SEQ ID NO: 324132 - protein, 14 aa, Homo sapiens
  CDR3 for beta chain variable domain of TCR clone 162066 (TRBV7-2, TRBJ2-7)
CASSPKTSFYEQYF

SEQ ID NO: 324133 - protein, 16 aa, Homo sapiens
  CDR3 for alpha chain variable domain of TCR clone 162067 (TRAV3, TRAJ37)
CAVRGKGSGNTGKLIF

SEQ ID NO: 324134 - protein, 14 aa, Homo sapiens
  CDR3 for beta chain variable domain of TCR clone 162067 (TRBV7-2, TRBJ2-7)
CASSPTTSFYEQYF

SEQ ID NO: 324135 - protein, 12 aa, Homo sapiens
  CDR3 for alpha chain variable domain of TCR clone 162068 (TRAV1-1, TRAJ9)
CAANTVGFKTIF

SEQ ID NO: 324136 - protein, 14 aa, Homo sapiens
  CDR3 for beta chain variable domain of TCR clone 162068 (TRBV24-1, TRBJ1-1)
CATRGQGTNTEAFF

SEQ ID NO: 324137 - protein, 13 aa, Homo sapiens
  CDR3 for alpha chain variable domain of TCR clone 162069 (TRAV3, TRAJ41)
CAVSSNSGYALHF

SEQ ID NO: 324138 - protein, 12 aa, Homo sapiens
  CDR3 for beta chain variable domain of TCR clone 162069 (TRBV2, TRBJ2-1)
CASRPGPREQFF

SEQ ID NO: 324139 - protein, 14 aa, Homo sapiens
  CDR3 for alpha chain variable domain of TCR clone 162070 (TRAV17, TRAJ45)
CATASGGGADGLTF

SEQ ID NO: 324140 - protein, 13 aa, Homo sapiens
  CDR3 for beta chain variable domain of TCR clone 162070 (TRBV15, TRBJ2-7)
CATSTTGYYEQYF

SEQ ID NO: 324141 - protein, 18 aa, Homo sapiens
  CDR3 for alpha chain variable domain of TCR clone 162071 (TRAV13-1, TRAJ52)
CAAKNPNAGGTSYGKLTF

SEQ ID NO: 324142 - protein, 12 aa, Homo sapiens
  CDR3 for beta chain variable domain of TCR clone 162071 (TRBV3-1, TRBJ2-2)
CASSLFPGELFF

SEQ ID NO: 324143 - protein, 12 aa, Homo sapiens
  CDR3 for alpha chain variable domain of TCR clone 162072 (TRAV29/DV5, TRAJ49)
CAATDAGNQFYF

SEQ ID NO: 324144 - protein, 14 aa, Homo sapiens
  CDR3 for beta chain variable domain of TCR clone 162072 (TRBV12-4, TRBJ2-5)
CASGSRTHQETQYF

SEQ ID NO: 324145 - protein, 14 aa, Homo sapiens
  CDR3 for alpha chain variable domain of TCR clone 162073 (TRAV8-3, TRAJ6)
CAVGASGGSYIPTF

SEQ ID NO: 324146 - protein, 17 aa, Homo sapiens
  CDR3 for beta chain variable domain of TCR clone 162073 (TRBV18, TRBJ2-2)
CASPPSDPWQNTGELFF

SEQ ID NO: 324147 - protein, 12 aa, Homo sapiens
  CDR3 for alpha chain variable domain of TCR clone 162074 (TRAV12-3, TRAJ17)
CAMTFTGNKLTF

SEQ ID NO: 324148 - protein, 16 aa, Homo sapiens
  CDR3 for beta chain variable domain of TCR clone 162074 (TRBV19, TRBJ2-1)
CASSRAGPSSYNEQFF

SEQ ID NO: 324149 - protein, 13 aa, Homo sapiens
  CDR3 for alpha chain variable domain of TCR clone 162075 (TRAV1-2, TRAJ9)
CAALNTGGFKTIF

SEQ ID NO: 324150 - protein, 16 aa, Homo sapiens
  CDR3 for beta chain variable domain of TCR clone 162075 (TRBV11-2, TRBJ1-2)
CASSLDTGGADYGYTF

SEQ ID NO: 324151 - protein, 12 aa, Homo sapiens
  CDR3 for alpha chain variable domain of TCR clone 162076 (TRAV12-3, TRAJ17)
CSMTLTDNKLTF

SEQ ID NO: 324152 - protein, 15 aa, Homo sapiens
  CDR3 for beta chain variable domain of TCR clone 162076 (TRBV20-1, TRBJ2-7)
CSARDRVSGMDEQYF

SEQ ID NO: 324153 - protein, 14 aa, Homo sapiens
  CDR3 for alpha chain variable domain of TCR clone 162077 (TRAV8-4, TRAJ9)
CTVRINTGGFKTIF

SEQ ID NO: 324154 - protein, 15 aa, Homo sapiens
  CDR3 for beta chain variable domain of TCR clone 162077 (TRBV10-2, TRBJ2-6)
CASSEQGTGANVLTF

SEQ ID NO: 324155 - protein, 15 aa, Homo sapiens
  CDR3 for alpha chain variable domain of TCR clone 162078 (TRAV23/DV6, TRAJ44)
CAATIRYGTASKLTF

SEQ ID NO: 324156 - protein, 11 aa, Homo sapiens
  CDR3 for beta chain variable domain of TCR clone 162078 (TRBV12-4, TRBJ2-3)
CASTATDTQYF

SEQ ID NO: 324157 - protein, 16 aa, Homo sapiens
  CDR3 for alpha chain variable domain of TCR clone 162079 (TRAV17, TRAJ22)
CATGPISSGSARQLTF

SEQ ID NO: 324158 - protein, 13 aa, Homo sapiens
  CDR3 for beta chain variable domain of TCR clone 162079 (TRBV11-2, TRBJ2-1)
CASSLGLAGGLFF

SEQ ID NO: 324159 - protein, 20 aa, Homo sapiens
  CDR3 for alpha chain variable domain of TCR clone 162080 (TRAV8-3, TRAJ44)
LSTSVLWVRLYTGTASKLTF

SEQ ID NO: 324160 - protein, 14 aa, Homo sapiens
  CDR3 for beta chain variable domain of TCR clone 162080 (TRBV7-2, TRBJ2-7)
CATRSQGAAYEQYF

SEQ ID NO: 324161 - protein, 15 aa, Homo sapiens
  CDR3 for alpha chain variable domain of TCR clone 162081 (TRAV17, TRAJ4)
CATGTWSGGYNKLIF

SEQ ID NO: 324162 - protein, 16 aa, Homo sapiens
  CDR3 for beta chain variable domain of TCR clone 162081 (TRBV7-8, TRBJ2-6)
CASRVGDSSGANVLTF

SEQ ID NO: 324163 - protein, 14 aa, Homo sapiens
  CDR3 for alpha chain variable domain of TCR clone 162082 (TRAV12-1, TRAJ17)
CVVNYKAAGNKLTF

SEQ ID NO: 324164 - protein, 18 aa, Homo sapiens
  CDR3 for beta chain variable domain of TCR clone 162082 (TRBV18, TRBJ1-3)
CASSPRGGAGPAGNTIYF

SEQ ID NO: 324165 - protein, 13 aa, Homo sapiens
  CDR3 for alpha chain variable domain of TCR clone 162083 (TRAV13-1, TRAJ5)
CAASDTGRRALTF

SEQ ID NO: 324166 - protein, 14 aa, Homo sapiens
  CDR3 for beta chain variable domain of TCR clone 162083 (TRBV25-1, TRBJ1-1)
CVSTHLGGNTEAFF

SEQ ID NO: 324167 - protein, 16 aa, Homo sapiens
  CDR3 for alpha chain variable domain of TCR clone 162084 (TRAV12-2, TRAJ43)
CAGDDMRFGAGTRLTV

SEQ ID NO: 324168 - protein, 16 aa, Homo sapiens
  CDR3 for beta chain variable domain of TCR clone 162084 (TRBV5-1, TRBJ2-7)
CASSPMTGALSYEQYF

SEQ ID NO: 324169 - protein, 13 aa, Homo sapiens
  CDR3 for alpha chain variable domain of TCR clone 162085 (TRAV12-3, TRAJ33)
CAMSVNSNYQLIW

SEQ ID NO: 324170 - protein, 15 aa, Homo sapiens
  CDR3 for beta chain variable domain of TCR clone 162085 (TRBV12-4, TRBJ1-2)
CASSFPRGLSYGYTF

SEQ ID NO: 324171 - protein, 14 aa, Homo sapiens
  CDR3 for alpha chain variable domain of TCR clone 162086 (TRAV35, TRAJ39)
CAGQLGNAGNMLTF

SEQ ID NO: 324172 - protein, 13 aa, Homo sapiens
  CDR3 for beta chain variable domain of TCR clone 162086 (TRBV19, TRBJ2-1)
CATSRGVYNEQFF

SEQ ID NO: 324173 - protein, 14 aa, Homo sapiens
  CDR3 for alpha chain variable domain of TCR clone 162087 (TRAV14/DV4, TRAJ54)
CAMREAPGAQKLGF

SEQ ID NO: 324174 - protein, 15 aa, Homo sapiens
  CDR3 for beta chain variable domain of TCR clone 162087 (TRBV7-2, TRBJ2-2)
CASRRPGQNTGELFF

SEQ ID NO: 324175 - protein, 15 aa, Homo sapiens
  CDR3 for alpha chain variable domain of TCR clone 162088 (TRAV17, TRAJ56)
CATDANTGANSKLTF

SEQ ID NO: 324176 - protein, 16 aa, Homo sapiens
  CDR3 for beta chain variable domain of TCR clone 162088 (TRBV4-1, TRBJ2-7)
CASSQEWTSGPLEQYF

SEQ ID NO: 324177 - protein, 13 aa, Homo sapiens
  CDR3 for alpha chain variable domain of TCR clone 162089 (TRAV12-2, TRAJ22)
CAVKWGSARQLTF

SEQ ID NO: 324178 - protein, 12 aa, Homo sapiens
  CDR3 for beta chain variable domain of TCR clone 162089 (TRBV11-2, TRBJ2-5)
CASSLVGETQYF

SEQ ID NO: 324179 - protein, 15 aa, Homo sapiens
  CDR3 for alpha chain variable domain of TCR clone 162090 (TRAV25, TRAJ52)
CAGTSGGTSYGKLTF

SEQ ID NO: 324180 - protein, 13 aa, Homo sapiens
  CDR3 for beta chain variable domain of TCR clone 162090 (TRBV6-5, TRBJ2-7)
CASSPQGGETQYF

SEQ ID NO: 324181 - protein, 11 aa, Homo sapiens
  CDR3 for alpha chain variable domain of TCR clone 162091 (TRAV21, TRAJ39)
LLVNAGNMLTF

SEQ ID NO: 324182 - protein, 16 aa, Homo sapiens
  CDR3 for beta chain variable domain of TCR clone 162091 (TRBV9, TRBJ2-7)
CASSVGLGGGTYEQYY

SEQ ID NO: 324183 - protein, 14 aa, Homo sapiens
  CDR3 for alpha chain variable domain of TCR clone 162092 (TRAV12-3, TRAJ42)
CAMNYGGSQGNLIF

SEQ ID NO: 324184 - protein, 20 aa, Homo sapiens
  CDR3 for beta chain variable domain of TCR clone 162092 (TRBV19, TRBJ2-1)
CASSISRTVTSTRLNNEQFF

SEQ ID NO: 324185 - protein, 18 aa, Homo sapiens
  CDR3 for alpha chain variable domain of TCR clone 162093 (TRAV12-3, TRAJ52)
CAMSVGGAGGTSYGKLTF

SEQ ID NO: 324186 - protein, 16 aa, Homo sapiens
  CDR3 for beta chain variable domain of TCR clone 162093 (TRBV7-9, TRBJ1-2)
CASSISFDRGGYGYTF

SEQ ID NO: 324187 - protein, 12 aa, Homo sapiens
  CDR3 for alpha chain variable domain of TCR clone 162094 (TRAV21, TRAJ33)
CAKMDSNYQLIW

SEQ ID NO: 324188 - protein, 15 aa, Homo sapiens
  CDR3 for beta chain variable domain of TCR clone 162094 (TRBV12-4, TRBJ2-5)
CASSPPTGLQETQYC

SEQ ID NO: 324189 - protein, 16 aa, Homo sapiens
  CDR3 for alpha chain variable domain of TCR clone 162095 (TRAV3, TRAJ6)
CAVRDGMGRRQLHTYI

SEQ ID NO: 324190 - protein, 15 aa, Homo sapiens
  CDR3 for beta chain variable domain of TCR clone 162095 (TRBV5-1, TRBJ2-7)
CASSLGDFTTYKQYF

SEQ ID NO: 324191 - protein, 14 aa, Homo sapiens
  CDR3 for alpha chain variable domain of TCR clone 162096 (TRAV1-2, TRAJ16)
CAVNRLSDGHKLLF

SEQ ID NO: 324192 - protein, 14 aa, Homo sapiens
  CDR3 for beta chain variable domain of TCR clone 162096 (TRBV18, TRBJ2-7)
CASSPRGGAYEQYF

SEQ ID NO: 324193 - protein, 14 aa, Homo sapiens
  CDR3 for alpha chain variable domain of TCR clone 162097 (TRAV20, TRAJ42)
CAVQAGGSQRNLIF

SEQ ID NO: 324194 - protein, 14 aa, Homo sapiens
  CDR3 for beta chain variable domain of TCR clone 162097 (TRBV28, TRBJ1-2)
CASRIQGANYGYTF

SEQ ID NO: 324195 - protein, 14 aa, Homo sapiens
  CDR3 for alpha chain variable domain of TCR clone 162098 (TRAV13-1, TRAJ39)
CAASEGNAGNMLTF

SEQ ID NO: 324196 - protein, 14 aa, Homo sapiens
  CDR3 for beta chain variable domain of TCR clone 162098 (TRBV20-1, TRBJ2-7)
CSAKRGRSSYEQYF

SEQ ID NO: 324197 - protein, 14 aa, Homo sapiens
  CDR3 for alpha chain variable domain of TCR clone 162099 (TRAV20, TRAJ42)
CDVQAGGSQGKLIF

SEQ ID NO: 324198 - protein, 14 aa, Homo sapiens
  CDR3 for beta chain variable domain of TCR clone 162099 (TRBV28, TRBJ1-2)
CASRIQGANYGYTF

SEQ ID NO: 324199 - protein, 13 aa, Homo sapiens
  CDR3 for alpha chain variable domain of TCR clone 162100 (TRAV13-1, TRAJ4)
CAASIGGYNKLIF

SEQ ID NO: 324200 - protein, 16 aa, Homo sapiens
  CDR3 for beta chain variable domain of TCR clone 162100 (TRBV20-1, TRBJ2-1)
CSAPGLAGSDSDEQFF

SEQ ID NO: 324201 - protein, 15 aa, Homo sapiens
  CDR3 for alpha chain variable domain of TCR clone 162101 (TRAV8-3, TRAJ40)
CAAPSLGSGTYKYIF

SEQ ID NO: 324202 - protein, 15 aa, Homo sapiens
  CDR3 for beta chain variable domain of TCR clone 162101 (TRBV12-4, TRBJ1-6)
CASSLGGQGTSPLHF

SEQ ID NO: 324203 - protein, 12 aa, Homo sapiens
  CDR3 for alpha chain variable domain of TCR clone 162102 (TRAV17, TRAJ4)
CATDGGYNKLIF

SEQ ID NO: 324204 - protein, 12 aa, Homo sapiens
  CDR3 for beta chain variable domain of TCR clone 162102 (TRBV12-4, TRBJ2-7)
CASSLGGYEQYF

SEQ ID NO: 324205 - protein, 13 aa, Homo sapiens
  CDR3 for alpha chain variable domain of TCR clone 162103 (TRAV13-2, TRAJ48)
YAEMDFGNEKLNF

SEQ ID NO: 324206 - protein, 15 aa, Homo sapiens
  CDR3 for beta chain variable domain of TCR clone 162103 (TRBV7-9, TRBJ1-6)
CASSSPGRGNSPLHF

SEQ ID NO: 324207 - protein, 14 aa, Homo sapiens
  CDR3 for alpha chain variable domain of TCR clone 162104 (TRAV8-4, TRAJ17)
CAVSEGAAGKKLTF

SEQ ID NO: 324208 - protein, 13 aa, Homo sapiens
  CDR3 for beta chain variable domain of TCR clone 162104 (TRBV19, TRBJ2-1)
CASSMYRVNEQFF

SEQ ID NO: 324209 - protein, 15 aa, Homo sapiens
  CDR3 for alpha chain variable domain of TCR clone 162105 (TRAV8-3, TRAJ45)
CASSYSGGGADGLTF

SEQ ID NO: 324210 - protein, 12 aa, Homo sapiens
  CDR3 for beta chain variable domain of TCR clone 162105 (TRBV2, TRBJ2-1)
CAYWPPGNEQFF

SEQ ID NO: 324211 - protein, 15 aa, Homo sapiens
  CDR3 for alpha chain variable domain of TCR clone 162106 (TRAV3, TRAJ22)
CAVRDRGGSGRQLTF

SEQ ID NO: 324212 - protein, 14 aa, Homo sapiens
  CDR3 for beta chain variable domain of TCR clone 162106 (TRBV20-1, TRBJ2-5)
CSALVPDYQETQYF

SEQ ID NO: 324213 - protein, 13 aa, Homo sapiens
  CDR3 for alpha chain variable domain of TCR clone 162107 (TRAV21, TRAJ40)
CAVRQPGTYKYIF

SEQ ID NO: 324214 - protein, 15 aa, Homo sapiens
  CDR3 for beta chain variable domain of TCR clone 162107 (TRBV7-9, TRBJ1-6)
CASSSPGRGNSPLHF

SEQ ID NO: 324215 - protein, 15 aa, Homo sapiens
  CDR3 for alpha chain variable domain of TCR clone 162108 (TRAV21, TRAJ53)
CATLNSGGSNYKLTF

SEQ ID NO: 324216 - protein, 13 aa, Homo sapiens
  CDR3 for beta chain variable domain of TCR clone 162108 (TRBV20-1, TRBJ1-1)
CSAFDRENTEAFF

SEQ ID NO: 324217 - protein, 13 aa, Homo sapiens
  CDR3 for alpha chain variable domain of TCR clone 162109 (TRAV1-2, TRAJ9)
CAVLNTGGFKTSF

SEQ ID NO: 324218 - protein, 14 aa, Homo sapiens
  CDR3 for beta chain variable domain of TCR clone 162109 (TRBV20-1, TRBJ2-3)
CSARGGTSTDTQYF

SEQ ID NO: 324219 - protein, 14 aa, Homo sapiens
  CDR3 for alpha chain variable domain of TCR clone 162110 (TRAV2, TRAJ37)
CAVDFTSNTGKLIF

SEQ ID NO: 324220 - protein, 13 aa, Homo sapiens
  CDR3 for beta chain variable domain of TCR clone 162110 (TRBV20-1, TRBJ1-1)
QCTNTDWGTEAFF

SEQ ID NO: 324221 - protein, 14 aa, Homo sapiens
  CDR3 for alpha chain variable domain of TCR clone 162111 (TRAV1-2, TRAJ16)
CAVNRFSDGKKLPF

SEQ ID NO: 324222 - protein, 14 aa, Homo sapiens
  CDR3 for beta chain variable domain of TCR clone 162111 (TRBV7-3, TRBJ1-1)
CASSLKGGNTEAFF

SEQ ID NO: 324223 - protein, 11 aa, Homo sapiens
  CDR3 for alpha chain variable domain of TCR clone 162112 (TRAV21, TRAJ41)
CAVRSGYALHF

SEQ ID NO: 324224 - protein, 13 aa, Homo sapiens
  CDR3 for beta chain variable domain of TCR clone 162112 (TRBV7-9, TRBJ1-2)
CASSLKQNYGDTF

SEQ ID NO: 324225 - protein, 11 aa, Homo sapiens
  CDR3 for alpha chain variable domain of TCR clone 162113 (TRAV29/DV5, TRAJ49)
CAAVPGNQVYF

SEQ ID NO: 324226 - protein, 17 aa, Homo sapiens
  CDR3 for beta chain variable domain of TCR clone 162113 (TRBV4-2, TRBJ1-1)
CASTQFGGGSGNTEAFF

SEQ ID NO: 324227 - protein, 12 aa, Homo sapiens
  CDR3 for alpha chain variable domain of TCR clone 162114 (TRAV21, TRAJ33)
CAKMDSNYQLMW

SEQ ID NO: 324228 - protein, 15 aa, Homo sapiens
  CDR3 for beta chain variable domain of TCR clone 162114 (TRBV12-4, TRBJ2-5)
CASNPPTGLQETQYF

SEQ ID NO: 324229 - protein, 14 aa, Homo sapiens
  CDR3 for alpha chain variable domain of TCR clone 162115 (TRAV8-4, TRAJ5)
CAVSTDTGRRALTF

SEQ ID NO: 324230 - protein, 15 aa, Homo sapiens
  CDR3 for beta chain variable domain of TCR clone 162115 (TRBV7-9, TRBJ1-4)
CASSARTGGNEKLFF

SEQ ID NO: 324231 - protein, 14 aa, Homo sapiens
  CDR3 for alpha chain variable domain of TCR clone 162116 (TRAV8-6, TRAJ11)
CVVSEKSGYSTLTL

SEQ ID NO: 324232 - protein, 16 aa, Homo sapiens
  CDR3 for beta chain variable domain of TCR clone 162116 (TRBV28, TRBJ2-1)
CASSSPEYPRDNEQFF

SEQ ID NO: 324233 - protein, 13 aa, Homo sapiens
  CDR3 for alpha chain variable domain of TCR clone 162117 (TRAV12-3, TRAJ40)
CAMSDSGTYKYIF

SEQ ID NO: 324234 - protein, 14 aa, Homo sapiens
  CDR3 for beta chain variable domain of TCR clone 162117 (TRBV7-2, TRBJ1-5)
CASSTHGAGQLQHF

SEQ ID NO: 324235 - protein, 17 aa, Homo sapiens
  CDR3 for alpha chain variable domain of TCR clone 162118 (TRAV3, TRAJ6)
CDVRDGPRAGGSYIPTF

SEQ ID NO: 324236 - protein, 15 aa, Homo sapiens
  CDR3 for beta chain variable domain of TCR clone 162118 (TRBV4-1, TRBJ1-4)
CASSDTGGTNEKLFF

SEQ ID NO: 324237 - protein, 15 aa, Homo sapiens
  CDR3 for alpha chain variable domain of TCR clone 162119 (TRAV13-1, TRAJ32)
CAASIYGGATSKLIF

SEQ ID NO: 324238 - protein, 14 aa, Homo sapiens
  CDR3 for beta chain variable domain of TCR clone 162119 (TRBV7-9, TRBJ2-1)
CASSLASGSNEQFF

SEQ ID NO: 324239 - protein, 12 aa, Homo sapiens
  CDR3 for alpha chain variable domain of TCR clone 162120 (TRAV2, TRAJ31)
CAVEDNNARLIF

SEQ ID NO: 324240 - protein, 15 aa, Homo sapiens
  CDR3 for beta chain variable domain of TCR clone 162120 (TRBV12-4, TRBJ1-5)
CASTRGSGFGQPQHF

SEQ ID NO: 324241 - protein, 15 aa, Homo sapiens
  CDR3 for alpha chain variable domain of TCR clone 162121 (TRAV2, TRAJ15)
CAVEDREQAGTALSF

SEQ ID NO: 324242 - protein, 13 aa, Homo sapiens
  CDR3 for beta chain variable domain of TCR clone 162121 (TRBV10-2, TRBJ2-7)
CASGTSGGYEQYF

SEQ ID NO: 324243 - protein, 11 aa, Homo sapiens
  CDR3 for alpha chain variable domain of TCR clone 162122 (TRAV21, TRAJ34)
CAHYNTDKLIF

SEQ ID NO: 324244 - protein, 13 aa, Homo sapiens
  CDR3 for beta chain variable domain of TCR clone 162122 (TRBV7-6, TRBJ1-2)
CACSLVADYGYTF

SEQ ID NO: 324245 - protein, 18 aa, Homo sapiens
  CDR3 for alpha chain variable domain of TCR clone 162123 (TRAV26-1, TRAJ52)
CIVRGRNAGGTSYGKLPF

SEQ ID NO: 324246 - protein, 14 aa, Homo sapiens
  CDR3 for beta chain variable domain of TCR clone 162123 (TRBV6-6, TRBJ1-3)
CASVAGDSGNTIYF

SEQ ID NO: 324247 - protein, 11 aa, Homo sapiens
  CDR3 for alpha chain variable domain of TCR clone 162124 (TRAV21, TRAJ11)
CGVNGYSTLTF

SEQ ID NO: 324248 - protein, 11 aa, Homo sapiens
  CDR3 for beta chain variable domain of TCR clone 162124 (TRBV19, TRBJ1-1)
CASSIGSEAFF

SEQ ID NO: 324249 - protein, 15 aa, Homo sapiens
  CDR3 for alpha chain variable domain of TCR clone 162125 (TRAV17, TRAJ57)
CATGPSQGGSEKLVF

SEQ ID NO: 324250 - protein, 15 aa, Homo sapiens
  CDR3 for beta chain variable domain of TCR clone 162125 (TRBV12-4, TRBJ1-5)
CSSRPVGGSNQPEHF

SEQ ID NO: 324251 - protein, 14 aa, Homo sapiens
  CDR3 for alpha chain variable domain of TCR clone 162126 (TRAV12-1, TRAJ47)
CVVGRREYGNKLVF

SEQ ID NO: 324252 - protein, 14 aa, Homo sapiens
  CDR3 for beta chain variable domain of TCR clone 162126 (TRBV5-7, TRBJ1-5)
CASSLNRLNQPQHF

SEQ ID NO: 324253 - protein, 15 aa, Homo sapiens
  CDR3 for alpha chain variable domain of TCR clone 162127 (TRAV14/DV4, TRAJ15)
CAMREGCQAGTALIF

SEQ ID NO: 324254 - protein, 16 aa, Homo sapiens
  CDR3 for beta chain variable domain of TCR clone 162127 (TRBV18, TRBJ1-5)
CASSPYRVEGNQPQHF

SEQ ID NO: 324255 - protein, 14 aa, Homo sapiens
  CDR3 for alpha chain variable domain of TCR clone 162128 (TRAV2, TRAJ22)
CAVGRGGSARQLTF

SEQ ID NO: 324256 - protein, 17 aa, Homo sapiens
  CDR3 for beta chain variable domain of TCR clone 162128 (TRBV7-2, TRBJ2-4)
CASSVQGLVQAKNIQYF

SEQ ID NO: 324257 - protein, 12 aa, Homo sapiens
  CDR3 for alpha chain variable domain of TCR clone 162129 (TRAV3, TRAJ43)
CAVRDPNNDMRF

SEQ ID NO: 324258 - protein, 12 aa, Homo sapiens
  CDR3 for beta chain variable domain of TCR clone 162129 (TRBV11-2, TRBJ2-1)
CASSPGNNEQFF

SEQ ID NO: 324259 - protein, 14 aa, Homo sapiens
  CDR3 for alpha chain variable domain of TCR clone 162130 (TRAV1-2, TRAJ8)
CAVREDTGFQKLVF

SEQ ID NO: 324260 - protein, 14 aa, Homo sapiens
  CDR3 for beta chain variable domain of TCR clone 162130 (TRBV6-3, TRBJ2-7)
CQQFPGTVFYEQYF

SEQ ID NO: 324261 - protein, 11 aa, Homo sapiens
  CDR3 for alpha chain variable domain of TCR clone 162131 (TRAV2, TRAJ23)
YAVETRGKLIF

SEQ ID NO: 324262 - protein, 14 aa, Homo sapiens
  CDR3 for beta chain variable domain of TCR clone 162131 (TRBV2, TRBJ2-3)
CASSEGQNTDTQYF

SEQ ID NO: 324263 - protein, 15 aa, Homo sapiens
  CDR3 for alpha chain variable domain of TCR clone 162132 (TRAV8-3, TRAJ23)
CAVGDRYNQGGKLIF

SEQ ID NO: 324264 - protein, 17 aa, Homo sapiens
  CDR3 for beta chain variable domain of TCR clone 162132 (TRBV4-1, TRBJ1-4)
CASSPEGPRGVEEKLFF

SEQ ID NO: 324265 - protein, 16 aa, Homo sapiens
  CDR3 for alpha chain variable domain of TCR clone 162133 (TRAV1-2, TRAJ16)
CAVNGFQMARSCPLQG

SEQ ID NO: 324266 - protein, 15 aa, Homo sapiens
  CDR3 for beta chain variable domain of TCR clone 162133 (TRBV7-9, TRBJ1-4)
CASSARTGGNEKLFF

SEQ ID NO: 324267 - protein, 16 aa, Homo sapiens
  CDR3 for alpha chain variable domain of TCR clone 162134 (TRAV29/DV5, )
CAARQNKPEASASYSH

SEQ ID NO: 324268 - protein, 14 aa, Homo sapiens
  CDR3 for beta chain variable domain of TCR clone 162134 (TRBV12-5, TRBJ2-5)
CASGSRTHQETQYF

SEQ ID NO: 324269 - protein, 13 aa, Homo sapiens
  CDR3 for alpha chain variable domain of TCR clone 162135 (TRAV8-3, TRAJ48)
CAVVRFGNETLTF

SEQ ID NO: 324270 - protein, 16 aa, Homo sapiens
  CDR3 for beta chain variable domain of TCR clone 162135 (TRBV20-1, TRBJ2-5)
CSARDFASGIQETQYF

SEQ ID NO: 324271 - protein, 10 aa, Homo sapiens
  CDR3 for alpha chain variable domain of TCR clone 162136 (TRAV25, TRAJ44)
GTGTASKLTF

SEQ ID NO: 324272 - protein, 13 aa, Homo sapiens
  CDR3 for beta chain variable domain of TCR clone 162136 (TRBV20-1, TRBJ2-3)
CSARLAGTDTQYF

SEQ ID NO: 324273 - protein, 12 aa, Homo sapiens
  CDR3 for alpha chain variable domain of TCR clone 162137 (TRAV10, TRAJ31)
CVVSANNARLMF

SEQ ID NO: 324274 - protein, 11 aa, Homo sapiens
  CDR3 for beta chain variable domain of TCR clone 162137 (TRBV29-1, TRBJ1-1)
CSVEILTEAFF

SEQ ID NO: 324275 - protein, 16 aa, Homo sapiens
  CDR3 for alpha chain variable domain of TCR clone 162138 (TRAV16, TRAJ4)
CALSRMFSGGYNKLIF

SEQ ID NO: 324276 - protein, 14 aa, Homo sapiens
  CDR3 for beta chain variable domain of TCR clone 162138 (TRBV4-1, TRBJ2-2)
CASSPAVNTGELFF

SEQ ID NO: 324277 - protein, 13 aa, Homo sapiens
  CDR3 for alpha chain variable domain of TCR clone 162139 (TRAV38-2/DV8, TRAJ34)
CAYRNYKTDKLIF

SEQ ID NO: 324278 - protein, 11 aa, Homo sapiens
  CDR3 for beta chain variable domain of TCR clone 162139 (TRBV29-1, TRBJ2-5)
CSEDRTGTQYF

SEQ ID NO: 324279 - protein, 13 aa, Homo sapiens
  CDR3 for alpha chain variable domain of TCR clone 162140 (TRAV8-3, TRAJ28)
CAVGAVGSYQLTL

SEQ ID NO: 324280 - protein, 15 aa, Homo sapiens
  CDR3 for beta chain variable domain of TCR clone 162140 (TRBV28, TRBJ2-5)
CASSPGQGSIETQYF

SEQ ID NO: 324281 - protein, 16 aa, Homo sapiens
  CDR3 for alpha chain variable domain of TCR clone 162141 (TRAV3, TRAJ28)
CAVLPRSGAGSYQLTS

SEQ ID NO: 324282 - protein, 13 aa, Homo sapiens
  CDR3 for beta chain variable domain of TCR clone 162141 (TRBV12-4, TRBJ2-5)
CASRLAVQETQYF

SEQ ID NO: 324283 - protein, 11 aa, Homo sapiens
  CDR3 for alpha chain variable domain of TCR clone 162142 (TRAV17, TRAJ9)
CGFTGGFKTIF

SEQ ID NO: 324284 - protein, 13 aa, Homo sapiens
  CDR3 for beta chain variable domain of TCR clone 162142 (TRBV11-2, TRBJ2-5)
CASSRGPSETQYF

SEQ ID NO: 324285 - protein, 14 aa, Homo sapiens
  CDR3 for alpha chain variable domain of TCR clone 162143 (TRAV23/DV6, TRAJ53)
CAARSGGSNYKLTF

SEQ ID NO: 324286 - protein, 20 aa, Homo sapiens
  CDR3 for beta chain variable domain of TCR clone 162143 (TRBV7-8, TRBJ2-2)
CASSHLFPGPTIHITGELFF

SEQ ID NO: 324287 - protein, 13 aa, Homo sapiens
  CDR3 for alpha chain variable domain of TCR clone 162144 (TRAV17, TRAJ15)
CATDARAGTALIF

SEQ ID NO: 324288 - protein, 15 aa, Homo sapiens
  CDR3 for beta chain variable domain of TCR clone 162144 (TRBV20-1, TRBJ2-7)
CGARDRFSGMDEQYF

SEQ ID NO: 324289 - protein, 17 aa, Homo sapiens
  CDR3 for alpha chain variable domain of TCR clone 162145 (TRAV23/DV6, TRAJ12)
CEAIDLGAMDSSYKLIF

SEQ ID NO: 324290 - protein, 12 aa, Homo sapiens
  CDR3 for beta chain variable domain of TCR clone 162145 (TRBV10-3, TRBJ2-2)
CAIRENTGELFF

SEQ ID NO: 324291 - protein, 14 aa, Homo sapiens
  CDR3 for alpha chain variable domain of TCR clone 162146 (TRAV23/DV6, TRAJ40)
FAASLTSGTYKYIF

SEQ ID NO: 324292 - protein, 14 aa, Homo sapiens
  CDR3 for beta chain variable domain of TCR clone 162146 (TRBV5-1, TRBJ2-3)
CASSRGQGGGTQYF

SEQ ID NO: 324293 - protein, 12 aa, Homo sapiens
  CDR3 for alpha chain variable domain of TCR clone 162147 (TRAV12-3, TRAJ17)
CAMTLTGNKQTF

SEQ ID NO: 324294 - protein, 16 aa, Homo sapiens
  CDR3 for beta chain variable domain of TCR clone 162147 (TRBV12-4, TRBJ2-5)
CASSFFVRGRQETQYF

SEQ ID NO: 324295 - protein, 12 aa, Homo sapiens
  CDR3 for alpha chain variable domain of TCR clone 162148 (TRAV8-6, TRAJ21)
CAVRPNFNKFYF

SEQ ID NO: 324296 - protein, 15 aa, Homo sapiens
  CDR3 for beta chain variable domain of TCR clone 162148 (TRBV5-1, TRBJ2-5)
CASSFKGGDQETQYF

SEQ ID NO: 324297 - protein, 15 aa, Homo sapiens
  CDR3 for alpha chain variable domain of TCR clone 162149 (TRAV25, TRAJ43)
CAVFMRFGAWTRLTV

SEQ ID NO: 324298 - protein, 13 aa, Homo sapiens
  CDR3 for beta chain variable domain of TCR clone 162149 (TRBV7-9, TRBJ1-2)
CASSLKQNYGYTF

SEQ ID NO: 324299 - protein, 13 aa, Homo sapiens
  CDR3 for alpha chain variable domain of TCR clone 162150 (TRAV12-2, TRAJ10)
CAVPTGGGNKLTF

SEQ ID NO: 324300 - protein, 11 aa, Homo sapiens
  CDR3 for beta chain variable domain of TCR clone 162150 (TRBV12-4, TRBJ2-2)
CDSSSAGELFF

SEQ ID NO: 324301 - protein, 20 aa, Homo sapiens
  CDR3 for alpha chain variable domain of TCR clone 162151 (TRAV1-1, TRAJ4)
CLLLLRCEGFLSGGYNKLIF

SEQ ID NO: 324302 - protein, 15 aa, Homo sapiens
  CDR3 for beta chain variable domain of TCR clone 162151 (TRBV7-9, TRBJ1-5)
CASSQGHQPNQPQHF

SEQ ID NO: 324303 - protein, 13 aa, Homo sapiens
  CDR3 for alpha chain variable domain of TCR clone 162152 (TRAV12-3, TRAJ13)
CAMSSGGYQKVTF

SEQ ID NO: 324304 - protein, 14 aa, Homo sapiens
  CDR3 for beta chain variable domain of TCR clone 162152 (TRBV2, TRBJ2-7)
CASSVLGAAYEQYF

SEQ ID NO: 324305 - protein, 17 aa, Homo sapiens
  CDR3 for alpha chain variable domain of TCR clone 162153 (TRAV20, TRAJ57)
CAVQAIVAQGGSEKLVF

SEQ ID NO: 324306 - protein, 13 aa, Homo sapiens
  CDR3 for beta chain variable domain of TCR clone 162153 (TRBV20-1, TRBJ2-5)
GSAFVGGGETQYF

SEQ ID NO: 324307 - protein, 10 aa, Homo sapiens
  CDR3 for alpha chain variable domain of TCR clone 162154 (TRAV16, TRAJ26)
CALSGSEFFF

SEQ ID NO: 324308 - protein, 12 aa, Homo sapiens
  CDR3 for beta chain variable domain of TCR clone 162154 (TRBV11-2, TRBJ2-1)
CASSPGNNEQFF

SEQ ID NO: 324309 - protein, 15 aa, Homo sapiens
  CDR3 for alpha chain variable domain of TCR clone 162155 (TRAV3, TRAJ5)
CAVRDLDTGRRALTF

SEQ ID NO: 324310 - protein, 14 aa, Homo sapiens
  CDR3 for beta chain variable domain of TCR clone 162155 (TRBV25-1, TRBJ1-4)
CDSSGGGQPEKLFF

SEQ ID NO: 324311 - protein, 14 aa, Homo sapiens
  CDR3 for alpha chain variable domain of TCR clone 162156 (TRAV12-3, TRAJ29)
CAMILLSGNTPLVF

SEQ ID NO: 324312 - protein, 16 aa, Homo sapiens
  CDR3 for beta chain variable domain of TCR clone 162156 (TRBV28, TRBJ2-7)
CASSSGTSGRGYQQYF

SEQ ID NO: 324313 - protein, 13 aa, Homo sapiens
  CDR3 for alpha chain variable domain of TCR clone 162157 (TRAV16, TRAJ28)
CAPTGAVSYQLTF

SEQ ID NO: 324314 - protein, 16 aa, Homo sapiens
  CDR3 for beta chain variable domain of TCR clone 162157 (TRBV28, TRBJ1-5)
CASSLTGQGWNQPQHF

SEQ ID NO: 324315 - protein, 12 aa, Homo sapiens
  CDR3 for alpha chain variable domain of TCR clone 162158 (TRAV12-3, TRAJ17)
CAMTLTGNKLTF

SEQ ID NO: 324316 - protein, 15 aa, Homo sapiens
  CDR3 for beta chain variable domain of TCR clone 162158 (TRBV27, TRBJ2-1)
CASSNEGGSSNEQFF

SEQ ID NO: 324317 - protein, 12 aa, Homo sapiens
  CDR3 for alpha chain variable domain of TCR clone 162159 (TRAV2, TRAJ10)
CASTGGGNKLTF

SEQ ID NO: 324318 - protein, 16 aa, Homo sapiens
  CDR3 for beta chain variable domain of TCR clone 162159 (TRBV5-1, TRBJ1-1)
CASSSGGNSLNTEAFF

SEQ ID NO: 324319 - protein, 13 aa, Homo sapiens
  CDR3 for alpha chain variable domain of TCR clone 162160 (TRAV1-2, TRAJ9)
CAALNTGGFKTIF

SEQ ID NO: 324320 - protein, 15 aa, Homo sapiens
  CDR3 for beta chain variable domain of TCR clone 162160 (TRBV6-5, TRBJ2-1)
CASRGDFDSYNEQFF

SEQ ID NO: 324321 - protein, 12 aa, Homo sapiens
  CDR3 for alpha chain variable domain of TCR clone 162161 (TRAV1-2, TRAJ20)
CAVISNDYKLSF

SEQ ID NO: 324322 - protein, 16 aa, Homo sapiens
  CDR3 for beta chain variable domain of TCR clone 162161 (TRBV7-3, TRBJ2-2)
CASSLKRGTLSGELVF

SEQ ID NO: 324323 - protein, 16 aa, Homo sapiens
  CDR3 for alpha chain variable domain of TCR clone 162162 (TRAV27, TRAJ52)
CAGAPAGGTSYGKLTF

SEQ ID NO: 324324 - protein, 15 aa, Homo sapiens
  CDR3 for beta chain variable domain of TCR clone 162162 (TRBV6-5, TRBJ1-2)
CASSYSQAFNYGYTF

SEQ ID NO: 324325 - protein, 23 aa, Homo sapiens
  CDR3 for alpha chain variable domain of TCR clone 162163 (TRAV8-1, TRAJ6)
CAVNTPPGEATYLHLEEEPALLF

SEQ ID NO: 324326 - protein, 14 aa, Homo sapiens
  CDR3 for beta chain variable domain of TCR clone 162163 (TRBV12-5, TRBJ2-5)
CASGSRTHQETQYF

SEQ ID NO: 324327 - protein, 14 aa, Homo sapiens
  CDR3 for alpha chain variable domain of TCR clone 162164 (TRAV23/DV6, TRAJ39)
CAASIGNAGNMLNF

SEQ ID NO: 324328 - protein, 12 aa, Homo sapiens
  CDR3 for beta chain variable domain of TCR clone 162164 (TRBV20-1, TRBJ2-5)
CSVGTGSETQYF

SEQ ID NO: 324329 - protein, 11 aa, Homo sapiens
  CDR3 for alpha chain variable domain of TCR clone 162165 (TRAV12-1, TRAJ30)
CVVNGQDKIIF

SEQ ID NO: 324330 - protein, 12 aa, Homo sapiens
  CDR3 for beta chain variable domain of TCR clone 162165 (TRBV7-3, TRBJ2-1)
CASSFINNEQFF

SEQ ID NO: 324331 - protein, 12 aa, Homo sapiens
  CDR3 for alpha chain variable domain of TCR clone 162166 (TRAV13-1, TRAJ20)
CSEGLKRHKLSF

SEQ ID NO: 324332 - protein, 12 aa, Homo sapiens
  CDR3 for beta chain variable domain of TCR clone 162166 (TRBV20-1, TRBJ2-1)
CSARLGTDEQFF

SEQ ID NO: 324333 - protein, 12 aa, Homo sapiens
  CDR3 for alpha chain variable domain of TCR clone 162167 (TRAV27, TRAJ42)
CAGGGSKGNLIF

SEQ ID NO: 324334 - protein, 13 aa, Homo sapiens
  CDR3 for beta chain variable domain of TCR clone 162167 (TRBV19, TRBJ2-7)
CASSIRSSYEQYF

SEQ ID NO: 324335 - protein, 17 aa, Homo sapiens
  CDR3 for alpha chain variable domain of TCR clone 162168 (TRAV26-1, TRAJ34)
CCVYCIVRPWITDKLIF

SEQ ID NO: 324336 - protein, 20 aa, Homo sapiens
  CDR3 for beta chain variable domain of TCR clone 162168 (TRBV7-8, TRBJ2-2)
CASSHLFPGPTVHITGELFF

SEQ ID NO: 324337 - protein, 14 aa, Homo sapiens
  CDR3 for alpha chain variable domain of TCR clone 162169 (TRAV13-1, TRAJ23)
CAASRLGRGGKLIF

SEQ ID NO: 324338 - protein, 12 aa, Homo sapiens
  CDR3 for beta chain variable domain of TCR clone 162169 (TRBV28, TRBJ2-7)
CASTWGGPEQYF

SEQ ID NO: 324339 - protein, 13 aa, Homo sapiens
  CDR3 for alpha chain variable domain of TCR clone 162170 (TRAV12-3, TRAJ9)
CAMRNTGGFKTIF

SEQ ID NO: 324340 - protein, 13 aa, Homo sapiens
  CDR3 for beta chain variable domain of TCR clone 162170 (TRBV4-2, TRBJ1-1)
CASSQAGNTEAFF

SEQ ID NO: 324341 - protein, 15 aa, Homo sapiens
  CDR3 for alpha chain variable domain of TCR clone 162171 (TRAV8-3, TRAJ23)
CAVGDRYNQGGKLIF

SEQ ID NO: 324342 - protein, 17 aa, Homo sapiens
  CDR3 for beta chain variable domain of TCR clone 162171 (TRBV4-1, TRBJ1-4)
CASIQEGPRGVEEKLFF

SEQ ID NO: 324343 - protein, 17 aa, Homo sapiens
  CDR3 for alpha chain variable domain of TCR clone 162172 (TRAV3, TRAJ6)
CAVRDGPRAGGRYIPTI

SEQ ID NO: 324344 - protein, 14 aa, Homo sapiens
  CDR3 for beta chain variable domain of TCR clone 162172 (TRBV7-2, TRBJ2-7)
CASSPKTSFYEQYF

SEQ ID NO: 324345 - protein, 14 aa, Homo sapiens
  CDR3 for alpha chain variable domain of TCR clone 162173 (TRAV12-2, TRAJ17)
CAVLFKAAGNKLTF

SEQ ID NO: 324346 - protein, 14 aa, Homo sapiens
  CDR3 for beta chain variable domain of TCR clone 162173 (TRBV4-1, TRBJ2-2)
CASSQAVNTGEMFF

SEQ ID NO: 324347 - protein, 16 aa, Homo sapiens
  CDR3 for alpha chain variable domain of TCR clone 162174 (TRAV12-2, TRAJ43)
CAGDDMRFGAGTKLAV

SEQ ID NO: 324348 - protein, 16 aa, Homo sapiens
  CDR3 for beta chain variable domain of TCR clone 162174 (TRBV2, TRBJ2-4)
CASSEAPGGEQNIQYF

SEQ ID NO: 324349 - protein, 15 aa, Homo sapiens
  CDR3 for alpha chain variable domain of TCR clone 162175 (TRAV3, TRAJ20)
CAVRDIKLSDYKLSF

SEQ ID NO: 324350 - protein, 13 aa, Homo sapiens
  CDR3 for beta chain variable domain of TCR clone 162175 (TRBV7-7, TRBJ2-2)
CASSLTSAGELFF

SEQ ID NO: 324351 - protein, 12 aa, Homo sapiens
  CDR3 for alpha chain variable domain of TCR clone 162176 (TRAV12-1, TRAJ40)
CVVYSGNYKYIF

SEQ ID NO: 324352 - protein, 14 aa, Homo sapiens
  CDR3 for beta chain variable domain of TCR clone 162176 (TRBV20-1, TRBJ2-3)
CSARGGTSTDTQYF

SEQ ID NO: 324353 - protein, 15 aa, Homo sapiens
  CDR3 for alpha chain variable domain of TCR clone 162177 (TRAV21, TRAJ53)
CATLNSGCSNYKLTF

SEQ ID NO: 324354 - protein, 16 aa, Homo sapiens
  CDR3 for beta chain variable domain of TCR clone 162177 (TRBV12-4, TRBJ2-3)
CASSLRLAGTTDTQYF

SEQ ID NO: 324355 - protein, 11 aa, Homo sapiens
  CDR3 for alpha chain variable domain of TCR clone 162178 (TRAV21, TRAJ41)
CAVMSGYALNF

SEQ ID NO: 324356 - protein, 13 aa, Homo sapiens
  CDR3 for beta chain variable domain of TCR clone 162178 (TRBV7-9, TRBJ1-2)
CASSLKQNYGYTF

SEQ ID NO: 324357 - protein, 12 aa, Homo sapiens
  CDR3 for alpha chain variable domain of TCR clone 162179 (TRAV20, TRAJ39)
CAVGNAGNMLTF

SEQ ID NO: 324358 - protein, 15 aa, Homo sapiens
  CDR3 for beta chain variable domain of TCR clone 162179 (TRBV6-1, TRBJ2-3)
CASSERGGITDTQYF

SEQ ID NO: 324359 - protein, 14 aa, Homo sapiens
  CDR3 for alpha chain variable domain of TCR clone 162180 (TRAV35, TRAJ22)
CAGLRPGSSRQMTF

SEQ ID NO: 324360 - protein, 15 aa, Homo sapiens
  CDR3 for beta chain variable domain of TCR clone 162180 (TRBV12-4, TRBJ2-5)
CASSPPTGLQETQYF

SEQ ID NO: 324361 - protein, 14 aa, Homo sapiens
  CDR3 for alpha chain variable domain of TCR clone 162181 (TRAV22, TRAJ36)
CAVDLETGANNLFF

SEQ ID NO: 324362 - protein, 15 aa, Homo sapiens
  CDR3 for beta chain variable domain of TCR clone 162181 (TRBV27, TRBJ2-1)
CASSNGGGSSNEQFF

SEQ ID NO: 324363 - protein, 16 aa, Homo sapiens
  CDR3 for alpha chain variable domain of TCR clone 162182 (TRAV14/DV4, TRAJ12)
CAMREVLMDSSYKLIF

SEQ ID NO: 324364 - protein, 14 aa, Homo sapiens
  CDR3 for beta chain variable domain of TCR clone 162182 (TRBV7-2, TRBJ2-5)
CASSVTQGQETQYF

SEQ ID NO: 324365 - protein, 15 aa, Homo sapiens
  CDR3 for alpha chain variable domain of TCR clone 162183 (TRAV8-3, TRAJ27)
CAVGPSKTHAGKSTF

SEQ ID NO: 324366 - protein, 14 aa, Homo sapiens
  CDR3 for beta chain variable domain of TCR clone 162183 (TRBV11-2, TRBJ2-3)
CASSRLARTDTQYF

SEQ ID NO: 324367 - protein, 13 aa, Homo sapiens
  CDR3 for alpha chain variable domain of TCR clone 162184 (TRAV12-3, TRAJ9)
CAIRNTGGFKTIF

SEQ ID NO: 324368 - protein, 13 aa, Homo sapiens
  CDR3 for beta chain variable domain of TCR clone 162184 (TRBV9, TRBJ2-1)
CASSVGQGGEQFF

SEQ ID NO: 324369 - protein, 13 aa, Homo sapiens
  CDR3 for alpha chain variable domain of TCR clone 162185 (TRAV21, TRAJ26)
CAVIGNHGQNFVF

SEQ ID NO: 324370 - protein, 16 aa, Homo sapiens
  CDR3 for beta chain variable domain of TCR clone 162185 (TRBV6-3, TRBJ2-2)
CASSVSGTDNTGELFF

SEQ ID NO: 324371 - protein, 14 aa, Homo sapiens
  CDR3 for alpha chain variable domain of TCR clone 162186 (TRAV27, TRAJ37)
CAGERSSNTGKLTF

SEQ ID NO: 324372 - protein, 15 aa, Homo sapiens
  CDR3 for beta chain variable domain of TCR clone 162186 (TRBV11-3, TRBJ1-6)
CASSLDWGANSPLHF

SEQ ID NO: 324373 - protein, 15 aa, Homo sapiens
  CDR3 for alpha chain variable domain of TCR clone 162187 (TRAV13-1, TRAJ17)
CAASIERAAGNKLTF

SEQ ID NO: 324374 - protein, 14 aa, Homo sapiens
  CDR3 for beta chain variable domain of TCR clone 162187 (TRBV4-1, TRBJ2-2)
CASSQSVNTGELFF

SEQ ID NO: 324375 - protein, 16 aa, Homo sapiens
  CDR3 for alpha chain variable domain of TCR clone 162188 (TRAV30, TRAJ24)
CGTEIVDADSWGKFQF

SEQ ID NO: 324376 - protein, 17 aa, Homo sapiens
  CDR3 for beta chain variable domain of TCR clone 162188 (TRBV4-3, TRBJ2-7)
CASSQDISGGLSYEQYF

SEQ ID NO: 324377 - protein, 18 aa, Homo sapiens
  CDR3 for alpha chain variable domain of TCR clone 162189 (TRAV12-3, TRAJ52)
CAMSRTNAGGTSYGKLTF

SEQ ID NO: 324378 - protein, 17 aa, Homo sapiens
  CDR3 for beta chain variable domain of TCR clone 162189 (TRBV7-3, TRBJ2-3)
CASSSMKRRRGADTQYF

SEQ ID NO: 324379 - protein, 22 aa, Homo sapiens
  CDR3 for alpha chain variable domain of TCR clone 162190 (TRAV2, TRAJ9)
CAVRIGVEASKLSLEQEQDYLL

SEQ ID NO: 324380 - protein, 15 aa, Homo sapiens
  CDR3 for beta chain variable domain of TCR clone 162190 (TRBV6-6, TRBJ2-7)
CASSYSYGGSYEQYF

SEQ ID NO: 324381 - protein, 16 aa, Homo sapiens
  CDR3 for alpha chain variable domain of TCR clone 162191 (TRAV12-3, TRAJ53)
CALSPESGGSNYKLTF

SEQ ID NO: 324382 - protein, 11 aa, Homo sapiens
  CDR3 for beta chain variable domain of TCR clone 162191 (TRBV29-1, TRBJ2-5)
CSEDRTGTQYF

SEQ ID NO: 324383 - protein, 15 aa, Homo sapiens
  CDR3 for alpha chain variable domain of TCR clone 162192 (TRAV26-2, TRAJ16)
CILSLRFSDGQKLLF

SEQ ID NO: 324384 - protein, 13 aa, Homo sapiens
  CDR3 for beta chain variable domain of TCR clone 162192 (TRBV10-3, TRBJ2-7)
CAIRPTEAYGQYF

SEQ ID NO: 324385 - protein, 17 aa, Homo sapiens
  CDR3 for alpha chain variable domain of TCR clone 162193 (TRAV3, TRAJ7)
CAVRDMSPLEGTTDSLL

SEQ ID NO: 324386 - protein, 13 aa, Homo sapiens
  CDR3 for beta chain variable domain of TCR clone 162193 (TRBV7-3, TRBJ1-1)
CASSQDWGAEAFF

SEQ ID NO: 324387 - protein, 12 aa, Homo sapiens
  CDR3 for alpha chain variable domain of TCR clone 162194 (TRAV21, TRAJ11)
CAATSGYSTLTF

SEQ ID NO: 324388 - protein, 13 aa, Homo sapiens
  CDR3 for beta chain variable domain of TCR clone 162194 (TRBV12-4, TRBJ1-2)
CASSLRQGKGDTF

SEQ ID NO: 324389 - protein, 20 aa, Homo sapiens
  CDR3 for alpha chain variable domain of TCR clone 162195 (TRAV26-1, TRAJ42)
CGVLLRRQTYYGGSQGNLIF

SEQ ID NO: 324390 - protein, 16 aa, Homo sapiens
  CDR3 for beta chain variable domain of TCR clone 162195 (TRBV7-3, TRBJ2-2)
CDSSLKRGTLSGELFF

SEQ ID NO: 324391 - protein, 15 aa, Homo sapiens
  CDR3 for alpha chain variable domain of TCR clone 162196 (TRAV26-2, TRAJ57)
CILRDIRGGSEKMVF

SEQ ID NO: 324392 - protein, 15 aa, Homo sapiens
  CDR3 for beta chain variable domain of TCR clone 162196 (TRBV2, TRBJ2-1)
CASDIGLAGEGEQFF

SEQ ID NO: 324393 - protein, 14 aa, Homo sapiens
  CDR3 for alpha chain variable domain of TCR clone 162197 (TRAV12-2, TRAJ40)
CAVKIPSGTHKYIF

SEQ ID NO: 324394 - protein, 16 aa, Homo sapiens
  CDR3 for beta chain variable domain of TCR clone 162197 (TRBV13, TRBJ2-3)
CQQPLQGSGGGNTQYF

SEQ ID NO: 324395 - protein, 14 aa, Homo sapiens
  CDR3 for alpha chain variable domain of TCR clone 162198 (TRAV35, TRAJ50)
CAGHRKTSYYEAIF

SEQ ID NO: 324396 - protein, 13 aa, Homo sapiens
  CDR3 for beta chain variable domain of TCR clone 162198 (TRBV7-7, TRBJ2-3)
CASSLSRADTQYF

SEQ ID NO: 324397 - protein, 11 aa, Homo sapiens
  CDR3 for alpha chain variable domain of TCR clone 162199 (TRAV1-2, TRAJ20)
CAVANDYKLSF

SEQ ID NO: 324398 - protein, 18 aa, Homo sapiens
  CDR3 for beta chain variable domain of TCR clone 162199 (TRBV20-1, TRBJ2-6)
CSAETTSTHGSGANVLTF

SEQ ID NO: 324399 - protein, 14 aa, Homo sapiens
  CDR3 for alpha chain variable domain of TCR clone 162200 (TRAV12-2, TRAJ13)
CAVKKTGGYQKVTF

SEQ ID NO: 324400 - protein, 16 aa, Homo sapiens
  CDR3 for beta chain variable domain of TCR clone 162200 (TRBV20-1, TRBJ1-2)
CSASMGQGVANYGYTF

SEQ ID NO: 324401 - protein, 14 aa, Homo sapiens
  CDR3 for alpha chain variable domain of TCR clone 162201 (TRAV2, TRAJ9)
CAVEDRSGGFKTIF

SEQ ID NO: 324402 - protein, 14 aa, Homo sapiens
  CDR3 for beta chain variable domain of TCR clone 162201 (TRBV7-9, TRBJ2-7)
CASSPSGGKNEQYF

SEQ ID NO: 324403 - protein, 12 aa, Homo sapiens
  CDR3 for alpha chain variable domain of TCR clone 162202 (TRAV8-3, TRAJ17)
CWDQAAGNKLTF

SEQ ID NO: 324404 - protein, 15 aa, Homo sapiens
  CDR3 for beta chain variable domain of TCR clone 162202 (TRBV4-2, TRBJ2-5)
CASSTQTGLQETQYF

SEQ ID NO: 324405 - protein, 14 aa, Homo sapiens
  CDR3 for alpha chain variable domain of TCR clone 162203 (TRAV12-2, TRAJ40)
CAVKIPSGTYKYIF

SEQ ID NO: 324406 - protein, 16 aa, Homo sapiens
  CDR3 for beta chain variable domain of TCR clone 162203 (TRBV7-2, TRBJ2-1)
CASSLVRAAGGNEQFF

SEQ ID NO: 324407 - protein, 16 aa, Homo sapiens
  CDR3 for alpha chain variable domain of TCR clone 162204 (TRAV39, TRAJ45)
CAVDRSAGGGADVLTF

SEQ ID NO: 324408 - protein, 14 aa, Homo sapiens
  CDR3 for beta chain variable domain of TCR clone 162204 (TRBV28, TRBJ1-3)
CASSFRDRVNTIYF

SEQ ID NO: 324409 - protein, 14 aa, Homo sapiens
  CDR3 for alpha chain variable domain of TCR clone 162205 (TRAV8-4, TRAJ17)
CAVSDQAAGNKLTF

SEQ ID NO: 324410 - protein, 15 aa, Homo sapiens
  CDR3 for beta chain variable domain of TCR clone 162205 (TRBV7-2, TRBJ1-2)
CASSLAPDRGLGYIF

SEQ ID NO: 324411 - protein, 16 aa, Homo sapiens
  CDR3 for alpha chain variable domain of TCR clone 162206 (TRAV8-3, TRAJ13)
CAVGLMKSGGYQKVTF

SEQ ID NO: 324412 - protein, 15 aa, Homo sapiens
  CDR3 for beta chain variable domain of TCR clone 162206 (TRBV5-4, TRBJ2-5)
CASSLAGGAKETQYF

SEQ ID NO: 324413 - protein, 14 aa, Homo sapiens
  CDR3 for alpha chain variable domain of TCR clone 162207 (TRAV26-1, TRAJ21)
CIVRVVYNFNKFYF

SEQ ID NO: 324414 - protein, 17 aa, Homo sapiens
  CDR3 for beta chain variable domain of TCR clone 162207 (TRBV11-2, TRBJ2-1)
CASSLYPPGVEYNEQFF

SEQ ID NO: 324415 - protein, 13 aa, Homo sapiens
  CDR3 for alpha chain variable domain of TCR clone 162208 (TRAV8-3, TRAJ28)
CAVGAAGRYKLTF

SEQ ID NO: 324416 - protein, 14 aa, Homo sapiens
  CDR3 for beta chain variable domain of TCR clone 162208 (TRBV25-1, TRBJ1-1)
CASTHLGGNTEAFF

SEQ ID NO: 324417 - protein, 14 aa, Homo sapiens
  CDR3 for alpha chain variable domain of TCR clone 162209 (TRAV12-3, TRAJ12)
CASVRMDSSYKLNF

SEQ ID NO: 324418 - protein, 15 aa, Homo sapiens
  CDR3 for beta chain variable domain of TCR clone 162209 (TRBV27, TRBJ2-7)
CASSPPGQGTYEQYF

SEQ ID NO: 324419 - protein, 14 aa, Homo sapiens
  CDR3 for alpha chain variable domain of TCR clone 162210 (TRAV4, TRAJ26)
CLVGPHNYGQNFVF

SEQ ID NO: 324420 - protein, 17 aa, Homo sapiens
  CDR3 for beta chain variable domain of TCR clone 162210 (TRBV24-1, TRBJ2-1)
CAPSDVSTSGTYDEQFF

SEQ ID NO: 324421 - protein, 15 aa, Homo sapiens
  CDR3 for alpha chain variable domain of TCR clone 162211 (TRAV3, TRAJ9)
CAVRDSNTGGFKTIF

SEQ ID NO: 324422 - protein, 16 aa, Homo sapiens
  CDR3 for beta chain variable domain of TCR clone 162211 (TRBV15, TRBJ2-5)
CATSPTTGQGKETQYF

SEQ ID NO: 324423 - protein, 18 aa, Homo sapiens
  CDR3 for alpha chain variable domain of TCR clone 162212 (TRAV13-1, TRAJ52)
CAAKNPNAGGTSYGKLTF

SEQ ID NO: 324424 - protein, 18 aa, Homo sapiens
  CDR3 for beta chain variable domain of TCR clone 162212 (TRBV12-4, TRBJ2-4)
CASSRTGAVDVAKKIQYF

SEQ ID NO: 324425 - protein, 23 aa, Homo sapiens
  CDR3 for alpha chain variable domain of TCR clone 162213 (TRAV26-1, )
CIADNAGNNDIQKPDPAVYQLRD

SEQ ID NO: 324426 - protein, 13 aa, Homo sapiens
  CDR3 for beta chain variable domain of TCR clone 162213 (TRBV20-1, TRBJ1-1)
CSARGGGNTEAFF

SEQ ID NO: 324427 - protein, 13 aa, Homo sapiens
  CDR3 for alpha chain variable domain of TCR clone 162214 (TRAV12-2, TRAJ4)
CAVKAGGYNKLIF

SEQ ID NO: 324428 - protein, 13 aa, Homo sapiens
  CDR3 for beta chain variable domain of TCR clone 162214 (TRBV10-3, TRBJ2-7)
CASKLAVNYEQYF

SEQ ID NO: 324429 - protein, 12 aa, Homo sapiens
  CDR3 for alpha chain variable domain of TCR clone 162215 (TRAV12-3, TRAJ17)
CAMTLTGNKLTF

SEQ ID NO: 324430 - protein, 15 aa, Homo sapiens
  CDR3 for beta chain variable domain of TCR clone 162215 (TRBV12-4, TRBJ2-3)
CASSRLRGSTDTQYF

SEQ ID NO: 324431 - protein, 12 aa, Homo sapiens
  CDR3 for alpha chain variable domain of TCR clone 162216 (TRAV1-2, TRAJ33)
CAALDSNYQLIW

SEQ ID NO: 324432 - protein, 14 aa, Homo sapiens
  CDR3 for beta chain variable domain of TCR clone 162216 (TRBV27, TRBJ2-2)
CASRPGVNTGELFF

SEQ ID NO: 324433 - protein, 14 aa, Homo sapiens
  CDR3 for alpha chain variable domain of TCR clone 162217 (TRAV12-2, TRAJ17)
CAVLFKAAGNKLTF

SEQ ID NO: 324434 - protein, 12 aa, Homo sapiens
  CDR3 for beta chain variable domain of TCR clone 162217 (TRBV19, TRBJ2-1)
CASSRQGDEQFF

SEQ ID NO: 324435 - protein, 11 aa, Homo sapiens
  CDR3 for alpha chain variable domain of TCR clone 162218 (TRAV27, TRAJ20)
CAGADDYKLSF

SEQ ID NO: 324436 - protein, 14 aa, Homo sapiens
  CDR3 for beta chain variable domain of TCR clone 162218 (TRBV7-9, TRBJ2-5)
CASSLVGGEETQYF

SEQ ID NO: 324437 - protein, 14 aa, Homo sapiens
  CDR3 for alpha chain variable domain of TCR clone 162219 (TRAV38-1, TRAJ45)
CASHSGGGADGLTF

SEQ ID NO: 324438 - protein, 14 aa, Homo sapiens
  CDR3 for beta chain variable domain of TCR clone 162219 (TRBV20-1, TRBJ1-1)
CSAQTRIGGTEDFF

SEQ ID NO: 324439 - protein, 14 aa, Homo sapiens
  CDR3 for alpha chain variable domain of TCR clone 162220 (TRAV1-2, TRAJ8)
CAVREDTGFQKLVF

SEQ ID NO: 324440 - protein, 16 aa, Homo sapiens
  CDR3 for beta chain variable domain of TCR clone 162220 (TRBV15, TRBJ2-1)
CATSRERLAGAYEQFF

SEQ ID NO: 324441 - protein, 13 aa, Homo sapiens
  CDR3 for alpha chain variable domain of TCR clone 162221 (TRAV23/DV6, TRAJ24)
CSGSACSWGKLQF

SEQ ID NO: 324442 - protein, 14 aa, Homo sapiens
  CDR3 for beta chain variable domain of TCR clone 162221 (TRBV4-1, TRBJ2-3)
CASSQDWSTYTQYF

SEQ ID NO: 324443 - protein, 15 aa, Homo sapiens
  CDR3 for alpha chain variable domain of TCR clone 162222 (TRAV17, TRAJ45)
CATAELGGGAAGLTF

SEQ ID NO: 324444 - protein, 14 aa, Homo sapiens
  CDR3 for beta chain variable domain of TCR clone 162222 (TRBV3-1, TRBJ2-5)
CASSQAVRQETQYF

SEQ ID NO: 324445 - protein, 14 aa, Homo sapiens
  CDR3 for alpha chain variable domain of TCR clone 162223 (TRAV26-1, TRAJ34)
CIVRVAYNTDKHNF

SEQ ID NO: 324446 - protein, 15 aa, Homo sapiens
  CDR3 for beta chain variable domain of TCR clone 162223 (TRBV20-1, TRBJ2-7)
CSARVPAAYFYEQYF

SEQ ID NO: 324447 - protein, 15 aa, Homo sapiens
  CDR3 for alpha chain variable domain of TCR clone 162224 (TRAV17, TRAJ10)
CATVLLTGGGNKLTF

SEQ ID NO: 324448 - protein, 16 aa, Homo sapiens
  CDR3 for beta chain variable domain of TCR clone 162224 (TRBV7-9, TRBJ2-3)
CASSPCREVGTDTQYF

SEQ ID NO: 324449 - protein, 18 aa, Homo sapiens
  CDR3 for alpha chain variable domain of TCR clone 162225 (TRAV26-1, TRAJ57)
CIVRVALRFQGGSEKLVF

SEQ ID NO: 324450 - protein, 14 aa, Homo sapiens
  CDR3 for beta chain variable domain of TCR clone 162225 (TRBV7-2, TRBJ2-7)
CASRSQGAAYEQYF

SEQ ID NO: 324451 - protein, 15 aa, Homo sapiens
  CDR3 for alpha chain variable domain of TCR clone 162226 (TRAV10, TRAJ3)
CVVSVRYSSASKIIF

SEQ ID NO: 324452 - protein, 15 aa, Homo sapiens
  CDR3 for beta chain variable domain of TCR clone 162226 (TRBV9, TRBJ1-6)
CASSVAGTGDSPLHF

SEQ ID NO: 324453 - protein, 14 aa, Homo sapiens
  CDR3 for alpha chain variable domain of TCR clone 162227 (TRAV12-2, TRAJ13)
CAVKKTGGYQKVTF

SEQ ID NO: 324454 - protein, 15 aa, Homo sapiens
  CDR3 for beta chain variable domain of TCR clone 162227 (TRBV7-2, TRBJ2-1)
CASSSRTSREDEQFF

SEQ ID NO: 324455 - protein, 11 aa, Homo sapiens
  CDR3 for alpha chain variable domain of TCR clone 162228 (TRAV12-3, TRAJ27)
CAMANAGKSTF

SEQ ID NO: 324456 - protein, 16 aa, Homo sapiens
  CDR3 for beta chain variable domain of TCR clone 162228 (TRBV7-6, TRBJ2-1)
CASSAPGPSSYNEQFF

SEQ ID NO: 324457 - protein, 15 aa, Homo sapiens
  CDR3 for alpha chain variable domain of TCR clone 162229 (TRAV13-2, TRAJ53)
CAERGSRGSNYKLTY

SEQ ID NO: 324458 - protein, 14 aa, Homo sapiens
  CDR3 for beta chain variable domain of TCR clone 162229 (TRBV4-1, TRBJ2-2)
CASSQYPDTGELFF

SEQ ID NO: 324459 - protein, 11 aa, Homo sapiens
  CDR3 for alpha chain variable domain of TCR clone 162230 (TRAV23/DV6, TRAJ29)
CAASRNTPLVF

SEQ ID NO: 324460 - protein, 15 aa, Homo sapiens
  CDR3 for beta chain variable domain of TCR clone 162230 (TRBV19, TRBJ1-5)
CASSIVWADNQPQHF

SEQ ID NO: 324461 - protein, 16 aa, Homo sapiens
  CDR3 for alpha chain variable domain of TCR clone 162231 (TRAV3, TRAJ10)
CAVRDWLTGGGNKLTF

SEQ ID NO: 324462 - protein, 12 aa, Homo sapiens
  CDR3 for beta chain variable domain of TCR clone 162231 (TRBV11-2, TRBJ2-2)
CASSLGGGELFF

SEQ ID NO: 324463 - protein, 14 aa, Homo sapiens
  CDR3 for alpha chain variable domain of TCR clone 162232 (TRAV26-1, TRAJ45)
CIEVTGGGADGLTF

SEQ ID NO: 324464 - protein, 19 aa, Homo sapiens
  CDR3 for beta chain variable domain of TCR clone 162232 (TRBV19, TRBJ2-2)
CASTRPGLAGGRVTGEMFF

SEQ ID NO: 324465 - protein, 14 aa, Homo sapiens
  CDR3 for alpha chain variable domain of TCR clone 162233 (TRAV24, TRAJ13)
CASSKAGGLPESYL

SEQ ID NO: 324466 - protein, 13 aa, Homo sapiens
  CDR3 for beta chain variable domain of TCR clone 162233 (TRBV5-7, TRBJ2-6)
CASTSSGANVLTF

SEQ ID NO: 324467 - protein, 15 aa, Homo sapiens
  CDR3 for alpha chain variable domain of TCR clone 162234 (TRAV3, TRAJ22)
CAGRDRGGSARQLTF

SEQ ID NO: 324468 - protein, 17 aa, Homo sapiens
  CDR3 for beta chain variable domain of TCR clone 162234 (TRBV13, TRBJ2-3)
CASSLSRVAGGRNTQYF

SEQ ID NO: 324469 - protein, 14 aa, Homo sapiens
  CDR3 for alpha chain variable domain of TCR clone 162235 (TRAV1-1, TRAJ27)
CAVIYNTNAGKSTI

SEQ ID NO: 324470 - protein, 15 aa, Homo sapiens
  CDR3 for beta chain variable domain of TCR clone 162235 (TRBV7-2, TRBJ2-1)
CASSSGLAGGNEQFF

SEQ ID NO: 324471 - protein, 14 aa, Homo sapiens
  CDR3 for alpha chain variable domain of TCR clone 162236 (TRAV26-1, TRAJ34)
CIVRVAYNTDKPIF

SEQ ID NO: 324472 - protein, 15 aa, Homo sapiens
  CDR3 for beta chain variable domain of TCR clone 162236 (TRBV20-1, TRBJ2-7)
CSARVPAAYSYEQYF

SEQ ID NO: 324473 - protein, 14 aa, Homo sapiens
  CDR3 for alpha chain variable domain of TCR clone 162237 (TRAV27, TRAJ36)
CAGPPKRGANNLFF

SEQ ID NO: 324474 - protein, 14 aa, Homo sapiens
  CDR3 for beta chain variable domain of TCR clone 162237 (TRBV15, TRBJ2-5)
CATSIGGLGETQYF

SEQ ID NO: 324475 - protein, 15 aa, Homo sapiens
  CDR3 for alpha chain variable domain of TCR clone 162238 (TRAV12-2, TRAJ53)
CAVNGGGGSNYKLTF

SEQ ID NO: 324476 - protein, 16 aa, Homo sapiens
  CDR3 for beta chain variable domain of TCR clone 162238 (TRBV2, TRBJ2-7)
CASSEPWTGPSYEQYF

SEQ ID NO: 324477 - protein, 15 aa, Homo sapiens
  CDR3 for alpha chain variable domain of TCR clone 162239 (TRAV25, TRAJ52)
CAGRPGGTSYGKLTV

SEQ ID NO: 324478 - protein, 17 aa, Homo sapiens
  CDR3 for beta chain variable domain of TCR clone 162239 (TRBV7-8, TRBJ2-6)
CASSAGTGGAGANVLTF

SEQ ID NO: 324479 - protein, 12 aa, Homo sapiens
  CDR3 for alpha chain variable domain of TCR clone 162240 (TRAV12-3, TRAJ17)
CAMTLTGKQLTF

SEQ ID NO: 324480 - protein, 13 aa, Homo sapiens
  CDR3 for beta chain variable domain of TCR clone 162240 (TRBV5-1, TRBJ1-2)
CASSSTGVYGYTF

SEQ ID NO: 324481 - protein, 14 aa, Homo sapiens
  CDR3 for alpha chain variable domain of TCR clone 162241 (TRAV13-1, TRAJ44)
CAAKATGTASKLTF

SEQ ID NO: 324482 - protein, 17 aa, Homo sapiens
  CDR3 for beta chain variable domain of TCR clone 162241 (TRBV7-3, TRBJ2-3)
CASSLMRRMRGTDTQYF

SEQ ID NO: 324483 - protein, 12 aa, Homo sapiens
  CDR3 for alpha chain variable domain of TCR clone 162242 (TRAV13-1, TRAJ21)
CAAKEGFNKIYF

SEQ ID NO: 324484 - protein, 14 aa, Homo sapiens
  CDR3 for beta chain variable domain of TCR clone 162242 (TRBV5-4, TRBJ1-1)
CASSLDSRRDEAFF

SEQ ID NO: 324485 - protein, 17 aa, Homo sapiens
  CDR3 for alpha chain variable domain of TCR clone 162243 (TRAV13-1, TRAJ52)
CAESSGAGGTSYGKLTF

SEQ ID NO: 324486 - protein, 15 aa, Homo sapiens
  CDR3 for beta chain variable domain of TCR clone 162243 (TRBV2, TRBJ2-1)
CASSELAGSYNEQFF

SEQ ID NO: 324487 - protein, 15 aa, Homo sapiens
  CDR3 for alpha chain variable domain of TCR clone 162244 (TRAV21, TRAJ53)
CATLNSGGSNYKMTF

SEQ ID NO: 324488 - protein, 16 aa, Homo sapiens
  CDR3 for beta chain variable domain of TCR clone 162244 (TRBV7-2, TRBJ2-1)
CASSLVAGAGYNEQFF

SEQ ID NO: 324489 - protein, 13 aa, Homo sapiens
  CDR3 for alpha chain variable domain of TCR clone 162245 (TRAV26-1, TRAJ29)
CIVRRSGNTPLVF

SEQ ID NO: 324490 - protein, 17 aa, Homo sapiens
  CDR3 for beta chain variable domain of TCR clone 162245 (TRBV19, TRBJ1-1)
CASSIAGRGLMNTEGFF

SEQ ID NO: 324491 - protein, 14 aa, Homo sapiens
  CDR3 for alpha chain variable domain of TCR clone 162246 (TRAV4, TRAJ17)
CLVGDMAAGNKLHF

SEQ ID NO: 324492 - protein, 14 aa, Homo sapiens
  CDR3 for beta chain variable domain of TCR clone 162246 (TRBV4-1, TRBJ2-7)
CASSPVAGGDEQYF

SEQ ID NO: 324493 - protein, 14 aa, Homo sapiens
  CDR3 for alpha chain variable domain of TCR clone 162247 (TRAV1-2, TRAJ16)
CAVNRFSDGQKLLF

SEQ ID NO: 324494 - protein, 19 aa, Homo sapiens
  CDR3 for beta chain variable domain of TCR clone 162247 (TRBV3-1, TRBJ2-5)
CASSANLGAQRPSTSGQAR

SEQ ID NO: 324495 - protein, 19 aa, Homo sapiens
  CDR3 for alpha chain variable domain of TCR clone 162248 (TRAV2, )
CAVEEDIQNPDPAGYQLRD

SEQ ID NO: 324496 - protein, 12 aa, Homo sapiens
  CDR3 for beta chain variable domain of TCR clone 162248 (TRBV11-2, TRBJ2-2)
CASSLGGGELFF

SEQ ID NO: 324497 - protein, 12 aa, Homo sapiens
  CDR3 for alpha chain variable domain of TCR clone 162249 (TRAV12-3, TRAJ17)
GSMTLTGNKLTF

SEQ ID NO: 324498 - protein, 15 aa, Homo sapiens
  CDR3 for beta chain variable domain of TCR clone 162249 (TRBV20-1, TRBJ2-7)
CSARDRVSGMDEQYF

SEQ ID NO: 324499 - protein, 19 aa, Homo sapiens
  CDR3 for alpha chain variable domain of TCR clone 162250 (TRAV38-1, TRAJ53)
CAFMKHGLERGGSNYKLTF

SEQ ID NO: 324500 - protein, 14 aa, Homo sapiens
  CDR3 for beta chain variable domain of TCR clone 162250 (TRBV19, TRBJ2-1)
CASPTFVLSGEQFF

SEQ ID NO: 324501 - protein, 15 aa, Homo sapiens
  CDR3 for alpha chain variable domain of TCR clone 162251 (TRAV14/DV4, TRAJ33)
CAMSEGRDSNYQLIW

SEQ ID NO: 324502 - protein, 15 aa, Homo sapiens
  CDR3 for beta chain variable domain of TCR clone 162251 (TRBV5-5, TRBJ1-5)
CASSSTPGSNQPQHF

SEQ ID NO: 324503 - protein, 12 aa, Homo sapiens
  CDR3 for alpha chain variable domain of TCR clone 162252 (TRAV12-1, TRAJ31)
CVSWNNNASLMF

SEQ ID NO: 324504 - protein, 15 aa, Homo sapiens
  CDR3 for beta chain variable domain of TCR clone 162252 (TRBV7-2, TRBJ1-5)
CASSLDRGQDQPQHF

SEQ ID NO: 324505 - protein, 13 aa, Homo sapiens
  CDR3 for alpha chain variable domain of TCR clone 162253 (TRAV3, TRAJ21)
CAVREPDFNKFYF

SEQ ID NO: 324506 - protein, 18 aa, Homo sapiens
  CDR3 for beta chain variable domain of TCR clone 162253 (TRBV11-2, TRBJ1-1)
CASSLRQGGNTRKLSLDK

SEQ ID NO: 324507 - protein, 17 aa, Homo sapiens
  CDR3 for alpha chain variable domain of TCR clone 162254 (TRAV3, TRAJ38)
CAVRDCLNAGNNRKLIW

SEQ ID NO: 324508 - protein, 13 aa, Homo sapiens
  CDR3 for beta chain variable domain of TCR clone 162254 (TRBV19, TRBJ1-3)
CASRLSLGNTIYF

SEQ ID NO: 324509 - protein, 16 aa, Homo sapiens
  CDR3 for alpha chain variable domain of TCR clone 162255 (TRAV12-1, TRAJ28)
CVVIAYSGAGSYQLTF

SEQ ID NO: 324510 - protein, 15 aa, Homo sapiens
  CDR3 for beta chain variable domain of TCR clone 162255 (TRBV14, TRBJ1-1)
CASSQEGMGFTQPFF

SEQ ID NO: 324511 - protein, 12 aa, Homo sapiens
  CDR3 for alpha chain variable domain of TCR clone 162256 (TRAV13-1, TRAJ43)
CAAGRFNNDMRF

SEQ ID NO: 324512 - protein, 15 aa, Homo sapiens
  CDR3 for beta chain variable domain of TCR clone 162256 (TRBV29-1, TRBJ2-7)
CSVEFCDRGSYEQYF

SEQ ID NO: 324513 - protein, 15 aa, Homo sapiens
  CDR3 for alpha chain variable domain of TCR clone 162257 (TRAV35, TRAJ58)
CAGRRQETSGSRLTF

SEQ ID NO: 324514 - protein, 14 aa, Homo sapiens
  CDR3 for beta chain variable domain of TCR clone 162257 (TRBV7-2, TRBJ2-7)
CASRSQGAAYEQYF

SEQ ID NO: 324515 - protein, 11 aa, Homo sapiens
  CDR3 for alpha chain variable domain of TCR clone 162258 (TRAV2, TRAJ13)
CASGGYQKVTF

SEQ ID NO: 324516 - protein, 13 aa, Homo sapiens
  CDR3 for beta chain variable domain of TCR clone 162258 (TRBV9, TRBJ2-1)
CASRPSGGNEQFF

SEQ ID NO: 324517 - protein, 14 aa, Homo sapiens
  CDR3 for alpha chain variable domain of TCR clone 162259 (TRAV1-2, TRAJ16)
CAVNRFSDGQKLLF

SEQ ID NO: 324518 - protein, 15 aa, Homo sapiens
  CDR3 for beta chain variable domain of TCR clone 162259 (TRBV11-3, TRBJ2-3)
CASLKDGREGGTQYF

SEQ ID NO: 324519 - protein, 14 aa, Homo sapiens
  CDR3 for alpha chain variable domain of TCR clone 162260 (TRAV25, TRAJ27)
CAGPGNTNAGKSTF

SEQ ID NO: 324520 - protein, 16 aa, Homo sapiens
  CDR3 for beta chain variable domain of TCR clone 162260 (TRBV4-1, TRBJ2-6)
CASSQDGVPGANVLTF

SEQ ID NO: 324521 - protein, 16 aa, Homo sapiens
  CDR3 for alpha chain variable domain of TCR clone 162261 (TRAV13-1, TRAJ18)
CAASTSGGSTLGRLYF

SEQ ID NO: 324522 - protein, 14 aa, Homo sapiens
  CDR3 for beta chain variable domain of TCR clone 162261 (TRBV18, TRBJ2-7)
CASSPRGGAYEQYF

SEQ ID NO: 324523 - protein, 12 aa, Homo sapiens
  CDR3 for alpha chain variable domain of TCR clone 162262 (TRAV16, TRAJ10)
CSRTGGGNKLTF

SEQ ID NO: 324524 - protein, 15 aa, Homo sapiens
  CDR3 for beta chain variable domain of TCR clone 162262 (TRBV20-1, TRBJ2-1)
CSAKGAGERYNEQFF

SEQ ID NO: 324525 - protein, 13 aa, Homo sapiens
  CDR3 for alpha chain variable domain of TCR clone 162263 (TRAV1-2, TRAJ11)
CAVRREGYSTLTF

SEQ ID NO: 324526 - protein, 12 aa, Homo sapiens
  CDR3 for beta chain variable domain of TCR clone 162263 (TRBV14, TRBJ2-7)
CARSLYKDEQYF

SEQ ID NO: 324527 - protein, 15 aa, Homo sapiens
  CDR3 for alpha chain variable domain of TCR clone 162264 (TRAV3, TRAJ30)
CAVRDRVERGDKIIF

SEQ ID NO: 324528 - protein, 17 aa, Homo sapiens
  CDR3 for beta chain variable domain of TCR clone 162264 (TRBV13, TRBJ2-3)
CASSLSRVAGGRNTQYF

SEQ ID NO: 324529 - protein, 13 aa, Homo sapiens
  CDR3 for alpha chain variable domain of TCR clone 162265 (TRAV23/DV6, TRAJ15)
CAARPAGRNCSDL

SEQ ID NO: 324530 - protein, 14 aa, Homo sapiens
  CDR3 for beta chain variable domain of TCR clone 162265 (TRBV7-9, TRBJ1-2)
CASSRQGANYGYTF

SEQ ID NO: 324531 - protein, 14 aa, Homo sapiens
  CDR3 for alpha chain variable domain of TCR clone 162266 (TRAV21, TRAJ28)
CAVGSGAGSYKLPF

SEQ ID NO: 324532 - protein, 14 aa, Homo sapiens
  CDR3 for beta chain variable domain of TCR clone 162266 (TRBV18, TRBJ1-4)
CASSPGPNGEKLFF

SEQ ID NO: 324533 - protein, 15 aa, Homo sapiens
  CDR3 for alpha chain variable domain of TCR clone 162267 (TRAV17, TRAJ13)
CATVPNSGGYQKVTF

SEQ ID NO: 324534 - protein, 17 aa, Homo sapiens
  CDR3 for beta chain variable domain of TCR clone 162267 (TRBV6-1, TRBJ2-3)
CASSEALRLISTDTQYF

SEQ ID NO: 324535 - protein, 15 aa, Homo sapiens
  CDR3 for alpha chain variable domain of TCR clone 162268 (TRAV38-1, TRAJ37)
CAFIFGSGNTGKRIF

SEQ ID NO: 324536 - protein, 12 aa, Homo sapiens
  CDR3 for beta chain variable domain of TCR clone 162268 (TRBV7-9, TRBJ2-7)
CASSLEGYEQYF

SEQ ID NO: 324537 - protein, 13 aa, Homo sapiens
  CDR3 for alpha chain variable domain of TCR clone 162269 (TRAV13-1, TRAJ10)
CAALEGGGNKLTS

SEQ ID NO: 324538 - protein, 17 aa, Homo sapiens
  CDR3 for beta chain variable domain of TCR clone 162269 (TRBV7-3, TRBJ2-2)
CASSLSGTSGGTGELFF

SEQ ID NO: 324539 - protein, 12 aa, Homo sapiens
  CDR3 for alpha chain variable domain of TCR clone 162270 (TRAV26-1, TRAJ36)
CIVRVRADNLFF

SEQ ID NO: 324540 - protein, 15 aa, Homo sapiens
  CDR3 for beta chain variable domain of TCR clone 162270 (TRBV9, TRBJ2-1)
CASSLAGSSHNEQFF

SEQ ID NO: 324541 - protein, 14 aa, Homo sapiens
  CDR3 for alpha chain variable domain of TCR clone 162271 (TRAV12-2, TRAJ3)
CAVKGYSSASKIIF

SEQ ID NO: 324542 - protein, 15 aa, Homo sapiens
  CDR3 for beta chain variable domain of TCR clone 162271 (TRBV7-2, TRBJ1-2)
CASSPRAGWNYGYTF

SEQ ID NO: 324543 - protein, 14 aa, Homo sapiens
  CDR3 for alpha chain variable domain of TCR clone 162272 (TRAV12-1, TRAJ17)
CVVNYKAAGNKLTF

SEQ ID NO: 324544 - protein, 14 aa, Homo sapiens
  CDR3 for beta chain variable domain of TCR clone 162272 (TRBV20-1, TRBJ1-1)
CSAQTRIGGNEAFC

SEQ ID NO: 324545 - protein, 16 aa, Homo sapiens
  CDR3 for alpha chain variable domain of TCR clone 162273 (TRAV3, TRAJ36)
CAVRDPYQTGANNLFF

SEQ ID NO: 324546 - protein, 15 aa, Homo sapiens
  CDR3 for beta chain variable domain of TCR clone 162273 (TRBV19, TRBJ1-1)
CASTSGQIQNTEAFF

SEQ ID NO: 324547 - protein, 16 aa, Homo sapiens
  CDR3 for alpha chain variable domain of TCR clone 162274 (TRAV12-3, TRAJ53)
CAMSPGSGGSNYKLTF

SEQ ID NO: 324548 - protein, 12 aa, Homo sapiens
  CDR3 for beta chain variable domain of TCR clone 162274 (TRBV7-8, TRBJ2-7)
YASSLGDREQYF

SEQ ID NO: 324549 - protein, 13 aa, Homo sapiens
  CDR3 for alpha chain variable domain of TCR clone 162275 (TRAV8-3, TRAJ28)
CAVGAVGSYQLTF

SEQ ID NO: 324550 - protein, 17 aa, Homo sapiens
  CDR3 for beta chain variable domain of TCR clone 162275 (TRBV11-2, TRBJ2-1)
CASSFYPPGVEYNEQFF

SEQ ID NO: 324551 - protein, 15 aa, Homo sapiens
  CDR3 for alpha chain variable domain of TCR clone 162276 (TRAV21, TRAJ24)
CAARYSTDSWGKLQF

SEQ ID NO: 324552 - protein, 15 aa, Homo sapiens
  CDR3 for beta chain variable domain of TCR clone 162276 (TRBV20-1, TRBJ1-1)
CSASRGVTGNTEAFF

SEQ ID NO: 324553 - protein, 21 aa, Homo sapiens
  CDR3 for alpha chain variable domain of TCR clone 162277 (TRAV1-1, TRAJ6)
CLFLLRCERLERTGGSYIPTF

SEQ ID NO: 324554 - protein, 13 aa, Homo sapiens
  CDR3 for beta chain variable domain of TCR clone 162277 (TRBV10-2, TRBJ2-7)
CASGASGGYEQYF

SEQ ID NO: 324555 - protein, 13 aa, Homo sapiens
  CDR3 for alpha chain variable domain of TCR clone 162278 (TRAV17, TRAJ5)
CAPMDTGRRALTF

SEQ ID NO: 324556 - protein, 14 aa, Homo sapiens
  CDR3 for beta chain variable domain of TCR clone 162278 (TRBV7-2, TRBJ2-1)
CASSRGGTYNEQFF

SEQ ID NO: 324557 - protein, 11 aa, Homo sapiens
  CDR3 for alpha chain variable domain of TCR clone 162279 (TRAV23/DV6, TRAJ13)
CAAGETGGYQK

SEQ ID NO: 324558 - protein, 13 aa, Homo sapiens
  CDR3 for beta chain variable domain of TCR clone 162279 (TRBV29-1, TRBJ2-1)
CSVEGGRVNEQFF

SEQ ID NO: 324559 - protein, 18 aa, Homo sapiens
  CDR3 for alpha chain variable domain of TCR clone 162280 (TRAV26-1, TRAJ23)
CIVRVGLEVWNQGGKLIF

SEQ ID NO: 324560 - protein, 13 aa, Homo sapiens
  CDR3 for beta chain variable domain of TCR clone 162280 (TRBV4-2, TRBJ1-1)
CASSQAGNTDAFF

SEQ ID NO: 324561 - protein, 14 aa, Homo sapiens
  CDR3 for alpha chain variable domain of TCR clone 162281 (TRAV8-2, TRAJ4)
CVVSPSGGYNKLMF

SEQ ID NO: 324562 - protein, 15 aa, Homo sapiens
  CDR3 for beta chain variable domain of TCR clone 162281 (TRBV4-1, TRBJ1-4)
CASSDTGGTNEELFF

SEQ ID NO: 324563 - protein, 12 aa, Homo sapiens
  CDR3 for alpha chain variable domain of TCR clone 162282 (TRAV17, TRAJ39)
CATGAAGNMLTF

SEQ ID NO: 324564 - protein, 13 aa, Homo sapiens
  CDR3 for beta chain variable domain of TCR clone 162282 (TRBV7-6, TRBJ2-3)
CASSLRSDNTQYF

SEQ ID NO: 324565 - protein, 17 aa, Homo sapiens
  CDR3 for alpha chain variable domain of TCR clone 162283 (TRAV3, TRAJ6)
CAVRDGPRAGGSYIPTF

SEQ ID NO: 324566 - protein, 18 aa, Homo sapiens
  CDR3 for beta chain variable domain of TCR clone 162283 (TRBV7-9, TRBJ2-7)
CASSLTTSGSRTWYEEYF

SEQ ID NO: 324567 - protein, 15 aa, Homo sapiens
  CDR3 for alpha chain variable domain of TCR clone 162284 (TRAV12-2, TRAJ57)
CAVIITQGGSEQLVF

SEQ ID NO: 324568 - protein, 16 aa, Homo sapiens
  CDR3 for beta chain variable domain of TCR clone 162284 (TRBV28, TRBJ2-1)
CASRVPASGRIGEQFF

SEQ ID NO: 324569 - protein, 13 aa, Homo sapiens
  CDR3 for alpha chain variable domain of TCR clone 162285 (TRAV13-2, TRAJ13)
CADLSGGYQKVTL

SEQ ID NO: 324570 - protein, 15 aa, Homo sapiens
  CDR3 for beta chain variable domain of TCR clone 162285 (TRBV19, TRBJ1-1)
CASSIGGGRNTEAFF

SEQ ID NO: 324571 - protein, 11 aa, Homo sapiens
  CDR3 for alpha chain variable domain of TCR clone 162286 (TRAV12-2, TRAJ49)
CAVHTGNQFYF

SEQ ID NO: 324572 - protein, 15 aa, Homo sapiens
  CDR3 for beta chain variable domain of TCR clone 162286 (TRBV2, TRBJ2-1)
CASSEEREGDNEQFF

SEQ ID NO: 324573 - protein, 12 aa, Homo sapiens
  CDR3 for alpha chain variable domain of TCR clone 162287 (TRAV13-1, TRAJ21)
CAAKEGFNKFYF

SEQ ID NO: 324574 - protein, 15 aa, Homo sapiens
  CDR3 for beta chain variable domain of TCR clone 162287 (TRBV25-1, TRBJ1-4)
CASSPGDSINEKLFF

SEQ ID NO: 324575 - protein, 14 aa, Homo sapiens
  CDR3 for alpha chain variable domain of TCR clone 162288 (TRAV12-2, TRAJ13)
CAVKKTGGYQKVTF

SEQ ID NO: 324576 - protein, 15 aa, Homo sapiens
  CDR3 for beta chain variable domain of TCR clone 162288 (TRBV27, TRBJ2-1)
CASSNGEGPLMSSSS

SEQ ID NO: 324577 - protein, 19 aa, Homo sapiens
  CDR3 for alpha chain variable domain of TCR clone 162289 (TRAV38-1, TRAJ53)
CAFMKHGLESGGSNSKLTF

SEQ ID NO: 324578 - protein, 13 aa, Homo sapiens
  CDR3 for beta chain variable domain of TCR clone 162289 (TRBV19, TRBJ2-7)
CASSPRQSYEQYF

SEQ ID NO: 324579 - protein, 11 aa, Homo sapiens
  CDR3 for alpha chain variable domain of TCR clone 162290 (TRAV2, TRAJ33)
CAVESNYQLIW

SEQ ID NO: 324580 - protein, 13 aa, Homo sapiens
  CDR3 for beta chain variable domain of TCR clone 162290 (TRBV11-2, TRBJ1-6)
RASSLAGVSPLHF

SEQ ID NO: 324581 - protein, 13 aa, Homo sapiens
  CDR3 for alpha chain variable domain of TCR clone 162291 (TRAV13-1, TRAJ20)
CAARVSNDYKPSF

SEQ ID NO: 324582 - protein, 12 aa, Homo sapiens
  CDR3 for beta chain variable domain of TCR clone 162291 (TRBV20-1, TRBJ2-1)
CSARPGTDEQFF

SEQ ID NO: 324583 - protein, 15 aa, Homo sapiens
  CDR3 for alpha chain variable domain of TCR clone 162292 (TRAV12-1, TRAJ10)
CVFHILTGGGNKLTF

SEQ ID NO: 324584 - protein, 15 aa, Homo sapiens
  CDR3 for beta chain variable domain of TCR clone 162292 (TRBV4-1, TRBJ1-6)
CASSAGQGYNSPLHF

SEQ ID NO: 324585 - protein, 15 aa, Homo sapiens
  CDR3 for alpha chain variable domain of TCR clone 162293 (TRAV1-2, TRAJ26)
CAVRDLITMVRILSL

SEQ ID NO: 324586 - protein, 17 aa, Homo sapiens
  CDR3 for beta chain variable domain of TCR clone 162293 (TRBV28, TRBJ2-5)
CASSRQGGLAGAETQNF

SEQ ID NO: 324587 - protein, 13 aa, Homo sapiens
  CDR3 for alpha chain variable domain of TCR clone 162294 (TRAV21, TRAJ36)
CAVIKTGANNLFF

SEQ ID NO: 324588 - protein, 14 aa, Homo sapiens
  CDR3 for beta chain variable domain of TCR clone 162294 (TRBV19, TRBJ2-7)
CASTVQGRPYEQYF

SEQ ID NO: 324589 - protein, 10 aa, Homo sapiens
  CDR3 for alpha chain variable domain of TCR clone 162295 (TRAV38-2/DV8, TRAJ40)
CASGTYKYIF

SEQ ID NO: 324590 - protein, 13 aa, Homo sapiens
  CDR3 for beta chain variable domain of TCR clone 162295 (TRBV4-2, TRBJ2-3)
CASSLTTTDTQYF

SEQ ID NO: 324591 - protein, 22 aa, Homo sapiens
  CDR3 for alpha chain variable domain of TCR clone 162296 (TRAV2, TRAJ10)
ILQVREADAAVYYTGGGNKLTF

SEQ ID NO: 324592 - protein, 17 aa, Homo sapiens
  CDR3 for beta chain variable domain of TCR clone 162296 (TRBV28, TRBJ2-5)
CASSTPEGDALQETQYF

SEQ ID NO: 324593 - protein, 14 aa, Homo sapiens
  CDR3 for alpha chain variable domain of TCR clone 162297 (TRAV8-3, TRAJ27)
CAGGRNTNAGKSTF

SEQ ID NO: 324594 - protein, 14 aa, Homo sapiens
  CDR3 for beta chain variable domain of TCR clone 162297 (TRBV7-9, TRBJ2-5)
CASSLDTAQETQYF

SEQ ID NO: 324595 - protein, 18 aa, Homo sapiens
  CDR3 for alpha chain variable domain of TCR clone 162298 (TRAV13-1, TRAJ52)
CAESKRSAGGTSYGKLTF

SEQ ID NO: 324596 - protein, 14 aa, Homo sapiens
  CDR3 for beta chain variable domain of TCR clone 162298 (TRBV19, TRBJ2-1)
CASPTFVLSGEQFF

SEQ ID NO: 324597 - protein, 18 aa, Homo sapiens
  CDR3 for alpha chain variable domain of TCR clone 162299 (TRAV12-2, )
CAVEDIQNPDPAVYQLRD

SEQ ID NO: 324598 - protein, 12 aa, Homo sapiens
  CDR3 for beta chain variable domain of TCR clone 162299 (TRBV7-9, TRBJ2-3)
CASSFITDTQYF

SEQ ID NO: 324599 - protein, 14 aa, Homo sapiens
  CDR3 for alpha chain variable domain of TCR clone 162300 (TRAV8-4, TRAJ9)
CAVRINTGGFKTIF

SEQ ID NO: 324600 - protein, 14 aa, Homo sapiens
  CDR3 for beta chain variable domain of TCR clone 162300 (TRBV10-2, TRBJ2-6)
RSSEQGTGANVLTF

SEQ ID NO: 324601 - protein, 15 aa, Homo sapiens
  CDR3 for alpha chain variable domain of TCR clone 162301 (TRAV12-3, TRAJ6)
CAMSATTVGSYIPTF

SEQ ID NO: 324602 - protein, 15 aa, Homo sapiens
  CDR3 for beta chain variable domain of TCR clone 162301 (TRBV5-1, TRBJ2-3)
CASSVTSGSTDTQYF

SEQ ID NO: 324603 - protein, 12 aa, Homo sapiens
  CDR3 for alpha chain variable domain of TCR clone 162302 (TRAV1-2, TRAJ33)
CAALDSNYQLIW

SEQ ID NO: 324604 - protein, 16 aa, Homo sapiens
  CDR3 for beta chain variable domain of TCR clone 162302 (TRBV5-1, TRBJ2-5)
CASSLTTSLGKETQYF

SEQ ID NO: 324605 - protein, 11 aa, Homo sapiens
  CDR3 for alpha chain variable domain of TCR clone 162303 (TRAV1-1, TRAJ22)
CLGGFCKSTDL

SEQ ID NO: 324606 - protein, 14 aa, Homo sapiens
  CDR3 for beta chain variable domain of TCR clone 162303 (TRBV27, TRBJ2-7)
CASSLAGLSYEQYF

SEQ ID NO: 324607 - protein, 11 aa, Homo sapiens
  CDR3 for alpha chain variable domain of TCR clone 162304 (TRAV1-2, TRAJ31)
CAVNNNARLMF

SEQ ID NO: 324608 - protein, 15 aa, Homo sapiens
  CDR3 for beta chain variable domain of TCR clone 162304 (TRBV28, TRBJ2-1)
CASSIIAGGRIEQFF

SEQ ID NO: 324609 - protein, 12 aa, Homo sapiens
  CDR3 for alpha chain variable domain of TCR clone 162305 (TRAV8-3, TRAJ6)
CAVAGGSYIPTF

SEQ ID NO: 324610 - protein, 14 aa, Homo sapiens
  CDR3 for beta chain variable domain of TCR clone 162305 (TRBV27, TRBJ2-7)
CASGTGTERREQYF

SEQ ID NO: 324611 - protein, 12 aa, Homo sapiens
  CDR3 for alpha chain variable domain of TCR clone 162306 (TRAV12-3, TRAJ20)
CAMVRGDYKPSF

SEQ ID NO: 324612 - protein, 17 aa, Homo sapiens
  CDR3 for beta chain variable domain of TCR clone 162306 (TRBV18, TRBJ1-5)
CASSPTMGQGTNQPQHF

SEQ ID NO: 324613 - protein, 18 aa, Homo sapiens
  CDR3 for alpha chain variable domain of TCR clone 162307 (TRAV21, TRAJ52)
CAVRPSPAGGTSYGKLTF

SEQ ID NO: 324614 - protein, 16 aa, Homo sapiens
  CDR3 for beta chain variable domain of TCR clone 162307 (TRBV5-4, TRBJ2-3)
CASSWGTSGGTDTQYF

SEQ ID NO: 324615 - protein, 14 aa, Homo sapiens
  CDR3 for alpha chain variable domain of TCR clone 162308 (TRAV8-3, TRAJ4)
CAVGAAGGYNKLIF

SEQ ID NO: 324616 - protein, 14 aa, Homo sapiens
  CDR3 for beta chain variable domain of TCR clone 162308 (TRBV20-1, TRBJ2-1)
CSAQIGGSANEQFF

SEQ ID NO: 324617 - protein, 14 aa, Homo sapiens
  CDR3 for alpha chain variable domain of TCR clone 162309 (TRAV1-2, TRAJ16)
CAVNRFSDGQKLLF

SEQ ID NO: 324618 - protein, 16 aa, Homo sapiens
  CDR3 for beta chain variable domain of TCR clone 162309 (TRBV29-1, TRBJ2-7)
CSVDVVGTSGSYEQYF

SEQ ID NO: 324619 - protein, 17 aa, Homo sapiens
  CDR3 for alpha chain variable domain of TCR clone 162310 (TRAV3, TRAJ6)
CAVRDVPRAGGSYIPTF

SEQ ID NO: 324620 - protein, 14 aa, Homo sapiens
  CDR3 for beta chain variable domain of TCR clone 162310 (TRBV19, TRBJ2-1)
CASPTFVLSGEQFF

SEQ ID NO: 324621 - protein, 12 aa, Homo sapiens
  CDR3 for alpha chain variable domain of TCR clone 162311 (TRAV12-2, TRAJ9)
CAVNTGGFKTIF

SEQ ID NO: 324622 - protein, 13 aa, Homo sapiens
  CDR3 for beta chain variable domain of TCR clone 162311 (TRBV10-3, TRBJ2-7)
CAAKRAVNYEQYF

SEQ ID NO: 324623 - protein, 14 aa, Homo sapiens
  CDR3 for alpha chain variable domain of TCR clone 162312 (TRAV23/DV6, TRAJ4)
CAANLSGGYNKLIF

SEQ ID NO: 324624 - protein, 11 aa, Homo sapiens
  CDR3 for beta chain variable domain of TCR clone 162312 (TRBV7-9, TRBJ2-3)
SASSPTDTQYF

SEQ ID NO: 324625 - protein, 13 aa, Homo sapiens
  CDR3 for alpha chain variable domain of TCR clone 162313 (TRAV35, TRAJ22)
CAGLSGSARQLTF

SEQ ID NO: 324626 - protein, 16 aa, Homo sapiens
  CDR3 for beta chain variable domain of TCR clone 162313 (TRBV7-9, TRBJ2-1)
FASSLVLTGQGNEQFF

SEQ ID NO: 324627 - protein, 14 aa, Homo sapiens
  CDR3 for alpha chain variable domain of TCR clone 162314 (TRAV13-1, TRAJ13)
CAASRVGGYQKVTF

SEQ ID NO: 324628 - protein, 17 aa, Homo sapiens
  CDR3 for beta chain variable domain of TCR clone 162314 (TRBV15, TRBJ1-5)
CATSRAPPGTRNQHQHF

SEQ ID NO: 324629 - protein, 12 aa, Homo sapiens
  CDR3 for alpha chain variable domain of TCR clone 162315 (TRAV20, TRAJ33)
FAVRGSNYQFIW

SEQ ID NO: 324630 - protein, 15 aa, Homo sapiens
  CDR3 for beta chain variable domain of TCR clone 162315 (TRBV11-3, TRBJ2-3)
CASLKDGREGDTQYF

SEQ ID NO: 324631 - protein, 18 aa, Homo sapiens
  CDR3 for alpha chain variable domain of TCR clone 162316 (TRAV21, TRAJ52)
CAVRPSPACGTSYGKLTF

SEQ ID NO: 324632 - protein, 13 aa, Homo sapiens
  CDR3 for beta chain variable domain of TCR clone 162316 (TRBV4-1, TRBJ2-2)
CASSQENTGGLFF

SEQ ID NO: 324633 - protein, 17 aa, Homo sapiens
  CDR3 for alpha chain variable domain of TCR clone 162317 (TRAV26-1, TRAJ46)
IASSESEKKSSGDKLTF

SEQ ID NO: 324634 - protein, 15 aa, Homo sapiens
  CDR3 for beta chain variable domain of TCR clone 162317 (TRBV4-1, TRBJ1-4)
CASSDTGGTNEKLFF

SEQ ID NO: 324635 - protein, 16 aa, Homo sapiens
  CDR3 for alpha chain variable domain of TCR clone 162318 (TRAV30, TRAJ24)
CGTEIVDADSWGKFQF

SEQ ID NO: 324636 - protein, 18 aa, Homo sapiens
  CDR3 for beta chain variable domain of TCR clone 162318 (TRBV7-9, TRBJ2-7)
CASSPTTSGSRTWYEQYF

SEQ ID NO: 324637 - protein, 17 aa, Homo sapiens
  CDR3 for alpha chain variable domain of TCR clone 162319 (TRAV13-1, TRAJ32)
CAASNGWWCYKQAHLCN

SEQ ID NO: 324638 - protein, 15 aa, Homo sapiens
  CDR3 for beta chain variable domain of TCR clone 162319 (TRBV20-1, TRBJ1-2)
CSAIRTGAFNYGYTF

SEQ ID NO: 324639 - protein, 16 aa, Homo sapiens
  CDR3 for alpha chain variable domain of TCR clone 162320 (TRAV17, TRAJ9)
CATGEWGGTGGFKTIL

SEQ ID NO: 324640 - protein, 12 aa, Homo sapiens
  CDR3 for beta chain variable domain of TCR clone 162320 (TRBV11-2, TRBJ2-1)
CASSPGNNEQFF

SEQ ID NO: 324641 - protein, 13 aa, Homo sapiens
  CDR3 for alpha chain variable domain of TCR clone 162321 (TRAV23/DV6, TRAJ12)
CAPRVDSSYKLIF

SEQ ID NO: 324642 - protein, 12 aa, Homo sapiens
  CDR3 for beta chain variable domain of TCR clone 162321 (TRBV7-6, TRBJ2-5)
GASSLSQETQYF

SEQ ID NO: 324643 - protein, 14 aa, Homo sapiens
  CDR3 for alpha chain variable domain of TCR clone 162322 (TRAV12-3, TRAJ10)
SHLPLTGGGNKLTF

SEQ ID NO: 324644 - protein, 14 aa, Homo sapiens
  CDR3 for beta chain variable domain of TCR clone 162322 (TRBV7-8, TRBJ2-2)
CASSSLKGTGELFF

SEQ ID NO: 324645 - protein, 14 aa, Homo sapiens
  CDR3 for alpha chain variable domain of TCR clone 162323 (TRAV17, TRAJ17)
CATDHRAAGNKLTF

SEQ ID NO: 324646 - protein, 15 aa, Homo sapiens
  CDR3 for beta chain variable domain of TCR clone 162323 (TRBV7-9, TRBJ1-6)
CASSSPGRGNSPLHF

SEQ ID NO: 324647 - protein, 13 aa, Homo sapiens
  CDR3 for alpha chain variable domain of TCR clone 162324 (TRAV20, TRAJ56)
CAVQAGANSKLTF

SEQ ID NO: 324648 - protein, 14 aa, Homo sapiens
  CDR3 for beta chain variable domain of TCR clone 162324 (TRBV28, TRBJ1-1)
CASSPRTRWAEAFS

SEQ ID NO: 324649 - protein, 11 aa, Homo sapiens
  CDR3 for alpha chain variable domain of TCR clone 162325 (TRAV3, TRAJ21)
CAVGNFNKFYF

SEQ ID NO: 324650 - protein, 15 aa, Homo sapiens
  CDR3 for beta chain variable domain of TCR clone 162325 (TRBV19, TRBJ1-2)
SASSVGQVLNYGYTF

SEQ ID NO: 324651 - protein, 13 aa, Homo sapiens
  CDR3 for alpha chain variable domain of TCR clone 162326 (TRAV12-1, TRAJ49)
CVVGANTGNQFYF

SEQ ID NO: 324652 - protein, 15 aa, Homo sapiens
  CDR3 for beta chain variable domain of TCR clone 162326 (TRBV19, TRBJ2-1)
CASSLETSGYNEQFF

SEQ ID NO: 324653 - protein, 11 aa, Homo sapiens
  CDR3 for alpha chain variable domain of TCR clone 162327 (TRAV3, TRAJ21)
CAVGNFNKFYF

SEQ ID NO: 324654 - protein, 15 aa, Homo sapiens
  CDR3 for beta chain variable domain of TCR clone 162327 (TRBV29-1, TRBJ2-1)
CSVEGGPASYNEQFL

SEQ ID NO: 324655 - protein, 12 aa, Homo sapiens
  CDR3 for alpha chain variable domain of TCR clone 162328 (TRAV29/DV5, TRAJ15)
CASNQAGTALIF

SEQ ID NO: 324656 - protein, 17 aa, Homo sapiens
  CDR3 for beta chain variable domain of TCR clone 162328 (TRBV7-8, TRBJ2-6)
CASSAGTGGAGANVLTF

SEQ ID NO: 324657 - protein, 14 aa, Homo sapiens
  CDR3 for alpha chain variable domain of TCR clone 162329 (TRAV12-1, TRAJ45)
CVVNVGGGADGLTF

SEQ ID NO: 324658 - protein, 15 aa, Homo sapiens
  CDR3 for beta chain variable domain of TCR clone 162329 (TRBV10-2, TRBJ2-6)
CASSEQGTGANVLTF

SEQ ID NO: 324659 - protein, 14 aa, Homo sapiens
  CDR3 for alpha chain variable domain of TCR clone 162330 (TRAV1-1, TRAJ27)
CAVIYNTNAAKSTS

SEQ ID NO: 324660 - protein, 15 aa, Homo sapiens
  CDR3 for beta chain variable domain of TCR clone 162330 (TRBV7-2, TRBJ2-1)
CASSSGLAGGNEQFF

SEQ ID NO: 324661 - protein, 13 aa, Homo sapiens
  CDR3 for alpha chain variable domain of TCR clone 162331 (TRAV12-1, TRAJ29)
CVVLNSGNTPLVF

SEQ ID NO: 324662 - protein, 14 aa, Homo sapiens
  CDR3 for beta chain variable domain of TCR clone 162331 (TRBV7-2, TRBJ2-7)
CASRSQGAAYEQYF

SEQ ID NO: 324663 - protein, 13 aa, Homo sapiens
  CDR3 for alpha chain variable domain of TCR clone 162332 (TRAV1-2, TRAJ9)
YAALNTGCFKTIF

SEQ ID NO: 324664 - protein, 13 aa, Homo sapiens
  CDR3 for beta chain variable domain of TCR clone 162332 (TRBV19, TRBJ1-2)
CASSVPGQDGYTF

SEQ ID NO: 324665 - protein, 12 aa, Homo sapiens
  CDR3 for alpha chain variable domain of TCR clone 162333 (TRAV2, TRAJ26)
CAGSPGRLWSEF

SEQ ID NO: 324666 - protein, 14 aa, Homo sapiens
  CDR3 for beta chain variable domain of TCR clone 162333 (TRBV6-1, TRBJ1-3)
CASVQGGGGNTIYF

SEQ ID NO: 324667 - protein, 12 aa, Homo sapiens
  CDR3 for alpha chain variable domain of TCR clone 162334 (TRAV2, TRAJ31)
CAVEGNNARLMF

SEQ ID NO: 324668 - protein, 13 aa, Homo sapiens
  CDR3 for beta chain variable domain of TCR clone 162334 (TRBV7-9, TRBJ2-3)
CASSPGSTDTQYF

SEQ ID NO: 324669 - protein, 13 aa, Homo sapiens
  CDR3 for alpha chain variable domain of TCR clone 162335 (TRAV17, TRAJ26)
CATVDNYGQNFVF

SEQ ID NO: 324670 - protein, 14 aa, Homo sapiens
  CDR3 for beta chain variable domain of TCR clone 162335 (TRBV19, TRBJ2-2)
CASTPGYSGGELFF

SEQ ID NO: 324671 - protein, 14 aa, Homo sapiens
  CDR3 for alpha chain variable domain of TCR clone 162336 (TRAV12-2, TRAJ13)
CAVKKTGGYQKVTF

SEQ ID NO: 324672 - protein, 15 aa, Homo sapiens
  CDR3 for beta chain variable domain of TCR clone 162336 (TRBV20-1, TRBJ2-1)
CSARGIGGAYNEQFF

SEQ ID NO: 324673 - protein, 13 aa, Homo sapiens
  CDR3 for alpha chain variable domain of TCR clone 162337 (TRAV12-1, TRAJ43)
CVVSHHNNYDMRF

SEQ ID NO: 324674 - protein, 15 aa, Homo sapiens
  CDR3 for beta chain variable domain of TCR clone 162337 (TRBV19, TRBJ2-2)
CQPISRDRGHRGAVF

SEQ ID NO: 324675 - protein, 11 aa, Homo sapiens
  CDR3 for alpha chain variable domain of TCR clone 162338 (TRAV8-3, TRAJ49)
CAINTGNQFYF

SEQ ID NO: 324676 - protein, 12 aa, Homo sapiens
  CDR3 for beta chain variable domain of TCR clone 162338 (TRBV11-2, TRBJ2-7)
CASSPPADEQYF

SEQ ID NO: 324677 - protein, 15 aa, Homo sapiens
  CDR3 for alpha chain variable domain of TCR clone 162339 (TRAV26-1, TRAJ5)
CIVRAQHTGRRALTF

SEQ ID NO: 324678 - protein, 12 aa, Homo sapiens
  CDR3 for beta chain variable domain of TCR clone 162339 (TRBV7-6, TRBJ2-5)
CASSLSQETQYF

SEQ ID NO: 324679 - protein, 14 aa, Homo sapiens
  CDR3 for alpha chain variable domain of TCR clone 162340 (TRAV16, TRAJ54)
CALSGLQGAQKLVF

SEQ ID NO: 324680 - protein, 15 aa, Homo sapiens
  CDR3 for beta chain variable domain of TCR clone 162340 (TRBV7-2, TRBJ2-3)
CASSLAGAFIDTQYF

SEQ ID NO: 324681 - protein, 15 aa, Homo sapiens
  CDR3 for alpha chain variable domain of TCR clone 162341 (TRAV4, TRAJ27)
CLGAPLDTNAGKSTF

SEQ ID NO: 324682 - protein, 15 aa, Homo sapiens
  CDR3 for beta chain variable domain of TCR clone 162341 (TRBV29-1, TRBJ2-7)
CSVEFFDRGSYEQYF

SEQ ID NO: 324683 - protein, 15 aa, Homo sapiens
  CDR3 for alpha chain variable domain of TCR clone 162342 (TRAV13-1, TRAJ44)
CAASRGGGTASKPTF

SEQ ID NO: 324684 - protein, 14 aa, Homo sapiens
  CDR3 for beta chain variable domain of TCR clone 162342 (TRBV7-2, TRBJ2-5)
CASSPRGSSETQYV

SEQ ID NO: 324685 - protein, 12 aa, Homo sapiens
  CDR3 for alpha chain variable domain of TCR clone 162343 (TRAV13-1, TRAJ49)
CAASIRSNQFYF

SEQ ID NO: 324686 - protein, 14 aa, Homo sapiens
  CDR3 for beta chain variable domain of TCR clone 162343 (TRBV7-2, TRBJ2-1)
CTSSPGLAGNEQFF

SEQ ID NO: 324687 - protein, 14 aa, Homo sapiens
  CDR3 for alpha chain variable domain of TCR clone 162344 (TRAV26-1, TRAJ38)
CIADNAGNNRKLIC

SEQ ID NO: 324688 - protein, 15 aa, Homo sapiens
  CDR3 for beta chain variable domain of TCR clone 162344 (TRBV20-1, TRBJ2-1)
CSASSAGSSYNEQFF

SEQ ID NO: 324689 - protein, 13 aa, Homo sapiens
  CDR3 for alpha chain variable domain of TCR clone 162345 (TRAV26-1, TRAJ29)
CIVRRSGNTPLVF

SEQ ID NO: 324690 - protein, 16 aa, Homo sapiens
  CDR3 for beta chain variable domain of TCR clone 162345 (TRBV11-2, TRBJ2-7)
CPSSLAPTGVNYEQYF

SEQ ID NO: 324691 - protein, 15 aa, Homo sapiens
  CDR3 for alpha chain variable domain of TCR clone 162346 (TRAV26-1, TRAJ44)
CIVRIGTGTASKLTF

SEQ ID NO: 324692 - protein, 15 aa, Homo sapiens
  CDR3 for beta chain variable domain of TCR clone 162346 (TRBV7-9, TRBJ1-5)
CASSQGHQPNQPQHF

SEQ ID NO: 324693 - protein, 11 aa, Homo sapiens
  CDR3 for alpha chain variable domain of TCR clone 162347 (TRAV22, TRAJ30)
CAGNRDDKIIF

SEQ ID NO: 324694 - protein, 15 aa, Homo sapiens
  CDR3 for beta chain variable domain of TCR clone 162347 (TRBV12-4, TRBJ2-5)
CASSPPTGLQETQYF

SEQ ID NO: 324695 - protein, 15 aa, Homo sapiens
  CDR3 for alpha chain variable domain of TCR clone 162348 (TRAV8-3, TRAJ11)
CAVGLLNSGYSTLTF

SEQ ID NO: 324696 - protein, 16 aa, Homo sapiens
  CDR3 for beta chain variable domain of TCR clone 162348 (TRBV7-9, TRBJ1-2)
CASSLGVASGEDGDTF

SEQ ID NO: 324697 - protein, 16 aa, Homo sapiens
  CDR3 for alpha chain variable domain of TCR clone 162349 (TRAV3, TRAJ37)
CAVRGKGSGNTRKLIF

SEQ ID NO: 324698 - protein, 12 aa, Homo sapiens
  CDR3 for beta chain variable domain of TCR clone 162349 (TRBV12-4, TRBJ2-3)
CASSTLPDTQYF

SEQ ID NO: 324699 - protein, 19 aa, Homo sapiens
  CDR3 for alpha chain variable domain of TCR clone 162350 (TRAV12-1, TRAJ45)
CVVTHDVGYSGGGADGLTF

SEQ ID NO: 324700 - protein, 15 aa, Homo sapiens
  CDR3 for beta chain variable domain of TCR clone 162350 (TRBV28, TRBJ2-1)
CASSIIAGGRSEQFF

SEQ ID NO: 324701 - protein, 12 aa, Homo sapiens
  CDR3 for alpha chain variable domain of TCR clone 162351 (TRAV12-3, TRAJ17)
CAMTLTGNKLTF

SEQ ID NO: 324702 - protein, 14 aa, Homo sapiens
  CDR3 for beta chain variable domain of TCR clone 162351 (TRBV4-1, TRBJ2-7)
CASSRDREHVEQYF

SEQ ID NO: 324703 - protein, 12 aa, Homo sapiens
  CDR3 for alpha chain variable domain of TCR clone 162352 (TRAV17, TRAJ53)
CATEGSNYKLTF

SEQ ID NO: 324704 - protein, 19 aa, Homo sapiens
  CDR3 for beta chain variable domain of TCR clone 162352 (TRBV5-1, TRBJ2-3)
CASSLWSSGGITTPDTQYF

SEQ ID NO: 324705 - protein, 15 aa, Homo sapiens
  CDR3 for alpha chain variable domain of TCR clone 162353 (TRAV8-6, TRAJ48)
CAVSPQVSGNEKLTF

SEQ ID NO: 324706 - protein, 14 aa, Homo sapiens
  CDR3 for beta chain variable domain of TCR clone 162353 (TRBV19, TRBJ2-1)
CASEVTGARNEQFF

SEQ ID NO: 324707 - protein, 15 aa, Homo sapiens
  CDR3 for alpha chain variable domain of TCR clone 162354 (TRAV21, TRAJ24)
CAARSSTDSWGKLQF

SEQ ID NO: 324708 - protein, 15 aa, Homo sapiens
  CDR3 for beta chain variable domain of TCR clone 162354 (TRBV2, TRBJ2-1)
CASSDRSSGAREQFF

SEQ ID NO: 324709 - protein, 14 aa, Homo sapiens
  CDR3 for alpha chain variable domain of TCR clone 162355 (TRAV1-2, TRAJ16)
CSVNRFSDGQKLLF

SEQ ID NO: 324710 - protein, 13 aa, Homo sapiens
  CDR3 for beta chain variable domain of TCR clone 162355 (TRBV10-3, TRBJ1-2)
CAISERDSYGYTF

SEQ ID NO: 324711 - protein, 16 aa, Homo sapiens
  CDR3 for alpha chain variable domain of TCR clone 162356 (TRAV38-1, TRAJ37)
CAFKGDGSSNTGKLIF

SEQ ID NO: 324712 - protein, 12 aa, Homo sapiens
  CDR3 for beta chain variable domain of TCR clone 162356 (TRBV11-2, TRBJ2-2)
CASSLGGGELFF

SEQ ID NO: 324713 - protein, 14 aa, Homo sapiens
  CDR3 for alpha chain variable domain of TCR clone 162357 (TRAV16, TRAJ39)
CALSKNNAGNMLTF

SEQ ID NO: 324714 - protein, 17 aa, Homo sapiens
  CDR3 for beta chain variable domain of TCR clone 162357 (TRBV23-1, TRBJ1-2)
CASSNTGGGLLCLHLRF

SEQ ID NO: 324715 - protein, 11 aa, Homo sapiens
  CDR3 for alpha chain variable domain of TCR clone 162358 (TRAV13-1, TRAJ39)
CASHAGNMLTF

SEQ ID NO: 324716 - protein, 14 aa, Homo sapiens
  CDR3 for beta chain variable domain of TCR clone 162358 (TRBV7-2, TRBJ2-7)
CASSGLAGRGEQYF

SEQ ID NO: 324717 - protein, 12 aa, Homo sapiens
  CDR3 for alpha chain variable domain of TCR clone 162359 (TRAV17, TRAJ53)
CATEGSNYKLTF

SEQ ID NO: 324718 - protein, 12 aa, Homo sapiens
  CDR3 for beta chain variable domain of TCR clone 162359 (TRBV6-3, TRBJ2-7)
CASSLGRRGLYF

SEQ ID NO: 324719 - protein, 17 aa, Homo sapiens
  CDR3 for alpha chain variable domain of TCR clone 162360 (TRAV3, TRAJ42)
CSVRDRDYGGSQGNLIF

SEQ ID NO: 324720 - protein, 13 aa, Homo sapiens
  CDR3 for beta chain variable domain of TCR clone 162360 (TRBV10-3, TRBJ2-7)
CASKLAVNYEQYF

SEQ ID NO: 324721 - protein, 13 aa, Homo sapiens
  CDR3 for alpha chain variable domain of TCR clone 162361 (TRAV3, TRAJ36)
CAVKRTGANNLFF

SEQ ID NO: 324722 - protein, 15 aa, Homo sapiens
  CDR3 for beta chain variable domain of TCR clone 162361 (TRBV28, TRBJ2-1)
CASSGLAEVDNEQFF

SEQ ID NO: 324723 - protein, 13 aa, Homo sapiens
  CDR3 for alpha chain variable domain of TCR clone 162362 (TRAV8-6, TRAJ17)
CAVRETAGNKLTF

SEQ ID NO: 324724 - protein, 14 aa, Homo sapiens
  CDR3 for beta chain variable domain of TCR clone 162362 (TRBV25-1, TRBJ1-1)
CASTHLGGNTEAFF

SEQ ID NO: 324725 - protein, 15 aa, Homo sapiens
  CDR3 for alpha chain variable domain of TCR clone 162363 (TRAV12-2, TRAJ53)
CAVNGGGGGNYKLTF

SEQ ID NO: 324726 - protein, 13 aa, Homo sapiens
  CDR3 for beta chain variable domain of TCR clone 162363 (TRBV7-9, TRBJ1-2)
CASSLKQNYGYTF

SEQ ID NO: 324727 - protein, 16 aa, Homo sapiens
  CDR3 for alpha chain variable domain of TCR clone 162364 (TRAV14/DV4, TRAJ21)
CAMREGPENNFNKFYF

SEQ ID NO: 324728 - protein, 13 aa, Homo sapiens
  CDR3 for beta chain variable domain of TCR clone 162364 (TRBV7-2, TRBJ2-2)
CTSSLAVTGELFF

SEQ ID NO: 324729 - protein, 11 aa, Homo sapiens
  CDR3 for alpha chain variable domain of TCR clone 162365 (TRAV8-2, TRAJ26)
CVVTLLLGSEF

SEQ ID NO: 324730 - protein, 14 aa, Homo sapiens
  CDR3 for beta chain variable domain of TCR clone 162365 (TRBV11-2, TRBJ2-1)
CASTTGQGNNEQFF

SEQ ID NO: 324731 - protein, 13 aa, Homo sapiens
  CDR3 for alpha chain variable domain of TCR clone 162366 (TRAV13-1, TRAJ5)
CAASDPGRRALTF

SEQ ID NO: 324732 - protein, 14 aa, Homo sapiens
  CDR3 for beta chain variable domain of TCR clone 162366 (TRBV7-2, TRBJ2-7)
CASSPKTSFYEQYF

SEQ ID NO: 324733 - protein, 17 aa, Homo sapiens
  CDR3 for alpha chain variable domain of TCR clone 162367 (TRAV12-1, TRAJ13)
CVVTKRGEFWGLPESYL

SEQ ID NO: 324734 - protein, 17 aa, Homo sapiens
  CDR3 for beta chain variable domain of TCR clone 162367 (TRBV28, TRBJ2-5)
CASSTPEGDALQETQYF

SEQ ID NO: 324735 - protein, 16 aa, Homo sapiens
  CDR3 for alpha chain variable domain of TCR clone 162368 (TRAV12-3, TRAJ53)
CAMSPGSGGSNYKLPF

SEQ ID NO: 324736 - protein, 14 aa, Homo sapiens
  CDR3 for beta chain variable domain of TCR clone 162368 (TRBV2, TRBJ2-7)
CASSLTSGGYEQYF

SEQ ID NO: 324737 - protein, 20 aa, Homo sapiens
  CDR3 for alpha chain variable domain of TCR clone 162369 (TRAV27, TRAJ41)
CAVRTQIPDIQNPDPAVHQL

SEQ ID NO: 324738 - protein, 16 aa, Homo sapiens
  CDR3 for beta chain variable domain of TCR clone 162369 (TRBV5-1, TRBJ2-3)
CASSLGLAVYTDTQYF

SEQ ID NO: 324739 - protein, 17 aa, Homo sapiens
  CDR3 for alpha chain variable domain of TCR clone 162370 (TRAV16, TRAJ53)
CALPAMNSGGSNYKLTF

SEQ ID NO: 324740 - protein, 17 aa, Homo sapiens
  CDR3 for beta chain variable domain of TCR clone 162370 (TRBV7-3, TRBJ2-3)
CASSLMKRMRGADTQYF

SEQ ID NO: 324741 - protein, 17 aa, Homo sapiens
  CDR3 for alpha chain variable domain of TCR clone 162371 (TRAV23/DV6, TRAJ57)
CAASSTLSQGGFEKLVF

SEQ ID NO: 324742 - protein, 17 aa, Homo sapiens
  CDR3 for beta chain variable domain of TCR clone 162371 (TRBV10-3, TRBJ2-6)
CAISESTAPSGANVLTF

SEQ ID NO: 324743 - protein, 19 aa, Homo sapiens
  CDR3 for alpha chain variable domain of TCR clone 162372 (TRAV2, TRAJ20)
ILQVREADAVVYRDCKLSF

SEQ ID NO: 324744 - protein, 13 aa, Homo sapiens
  CDR3 for beta chain variable domain of TCR clone 162372 (TRBV15, TRBJ1-6)
CATSGGLNSPLHF

SEQ ID NO: 324745 - protein, 16 aa, Homo sapiens
  CDR3 for alpha chain variable domain of TCR clone 162373 (TRAV8-6, TRAJ4)
CAVSPTFSGGYNTLIF

SEQ ID NO: 324746 - protein, 14 aa, Homo sapiens
  CDR3 for beta chain variable domain of TCR clone 162373 (TRBV29-1, TRBJ2-2)
CSVVTSGAPGELFF

SEQ ID NO: 324747 - protein, 15 aa, Homo sapiens
  CDR3 for alpha chain variable domain of TCR clone 162374 (TRAV26-1, TRAJ22)
ASSEYRSGSARQLTF

SEQ ID NO: 324748 - protein, 13 aa, Homo sapiens
  CDR3 for beta chain variable domain of TCR clone 162374 (TRBV7-9, TRBJ1-2)
CASSLKQNYGYTF

SEQ ID NO: 324749 - protein, 15 aa, Homo sapiens
  CDR3 for alpha chain variable domain of TCR clone 162375 (TRAV17, TRAJ57)
CATGPSQGGSEKLVF

SEQ ID NO: 324750 - protein, 15 aa, Homo sapiens
  CDR3 for beta chain variable domain of TCR clone 162375 (TRBV2, TRBJ1-5)
CASSPGPTGNQPQHF

SEQ ID NO: 324751 - protein, 12 aa, Homo sapiens
  CDR3 for alpha chain variable domain of TCR clone 162376 (TRAV20, TRAJ20)
CAVRFNDYKLSF

SEQ ID NO: 324752 - protein, 15 aa, Homo sapiens
  CDR3 for beta chain variable domain of TCR clone 162376 (TRBV20-1, TRBJ2-1)
CSARGIGGTYNEQFF

SEQ ID NO: 324753 - protein, 12 aa, Homo sapiens
  CDR3 for alpha chain variable domain of TCR clone 162377 (TRAV2, TRAJ31)
CAVEDNNARLIF

SEQ ID NO: 324754 - protein, 18 aa, Homo sapiens
  CDR3 for beta chain variable domain of TCR clone 162377 (TRBV25-1, TRBJ1-2)
CASSGLQNGQGLIFGYTF

SEQ ID NO: 324755 - protein, 14 aa, Homo sapiens
  CDR3 for alpha chain variable domain of TCR clone 162378 (TRAV26-1, TRAJ38)
CIADNAGNNRKLIW

SEQ ID NO: 324756 - protein, 15 aa, Homo sapiens
  CDR3 for beta chain variable domain of TCR clone 162378 (TRBV7-6, TRBJ1-4)
CASSLGAGAVEKLFF

SEQ ID NO: 324757 - protein, 16 aa, Homo sapiens
  CDR3 for alpha chain variable domain of TCR clone 162379 (TRAV8-3, TRAJ44)
CAVGPLNTGTASKLTF

SEQ ID NO: 324758 - protein, 14 aa, Homo sapiens
  CDR3 for beta chain variable domain of TCR clone 162379 (TRBV11-2, TRBJ2-7)
CASSLGAGAYEQYF

SEQ ID NO: 324759 - protein, 13 aa, Homo sapiens
  CDR3 for alpha chain variable domain of TCR clone 162380 (TRAV12-3, TRAJ40)
CAMSDSGTYKYFF

SEQ ID NO: 324760 - protein, 19 aa, Homo sapiens
  CDR3 for beta chain variable domain of TCR clone 162380 (TRBV7-2, TRBJ2-5)
CASSLSGGGGDPVLRARHA

SEQ ID NO: 324761 - protein, 15 aa, Homo sapiens
  CDR3 for alpha chain variable domain of TCR clone 162381 (TRAV8-4, TRAJ3)
CAVSEPYSSASKIIF

SEQ ID NO: 324762 - protein, 14 aa, Homo sapiens
  CDR3 for beta chain variable domain of TCR clone 162381 (TRBV7-2, TRBJ2-5)
CRQLKEQGRETQYF

SEQ ID NO: 324763 - protein, 17 aa, Homo sapiens
  CDR3 for alpha chain variable domain of TCR clone 162382 (TRAV3, TRAJ6)
CAVRDGPRAGGSYIPPF

SEQ ID NO: 324764 - protein, 14 aa, Homo sapiens
  CDR3 for beta chain variable domain of TCR clone 162382 (TRBV7-2, TRBJ2-7)
CASCPKTSFYEQYV

SEQ ID NO: 324765 - protein, 13 aa, Homo sapiens
  CDR3 for alpha chain variable domain of TCR clone 162383 (TRAV27, TRAJ3)
ASLRGSSASKIIF

SEQ ID NO: 324766 - protein, 15 aa, Homo sapiens
  CDR3 for beta chain variable domain of TCR clone 162383 (TRBV28, TRBJ1-3)
CASSMVWASGNTIYF

SEQ ID NO: 324767 - protein, 16 aa, Homo sapiens
  CDR3 for alpha chain variable domain of TCR clone 162384 (TRAV23/DV6, TRAJ48)
FAASGVVNFGNEKLTF

SEQ ID NO: 324768 - protein, 15 aa, Homo sapiens
  CDR3 for beta chain variable domain of TCR clone 162384 (TRBV7-9, TRBJ2-1)
CASSLGWGRANEQFF

SEQ ID NO: 324769 - protein, 14 aa, Homo sapiens
  CDR3 for alpha chain variable domain of TCR clone 162385 (TRAV8-3, TRAJ22)
CAVVVSGSARQLTF

SEQ ID NO: 324770 - protein, 13 aa, Homo sapiens
  CDR3 for beta chain variable domain of TCR clone 162385 (TRBV4-2, TRBJ2-5)
CASSQGGRQTQYF

SEQ ID NO: 324771 - protein, 13 aa, Homo sapiens
  CDR3 for alpha chain variable domain of TCR clone 162386 (TRAV20, TRAJ7)
CAVLQGGNNRHAF

SEQ ID NO: 324772 - protein, 16 aa, Homo sapiens
  CDR3 for beta chain variable domain of TCR clone 162386 (TRBV6-1, TRBJ2-5)
CASSLRTGGVGETQYF

SEQ ID NO: 324773 - protein, 14 aa, Homo sapiens
  CDR3 for alpha chain variable domain of TCR clone 162387 (TRAV8-3, TRAJ9)
CAVVYNTGGFKTIF

SEQ ID NO: 324774 - protein, 13 aa, Homo sapiens
  CDR3 for beta chain variable domain of TCR clone 162387 (TRBV4-1, TRBJ2-2)
CASSQENTGELFF

SEQ ID NO: 324775 - protein, 15 aa, Homo sapiens
  CDR3 for alpha chain variable domain of TCR clone 162388 (TRAV8-3, TRAJ40)
CAVGGRTSGTYKYIF

SEQ ID NO: 324776 - protein, 14 aa, Homo sapiens
  CDR3 for beta chain variable domain of TCR clone 162388 (TRBV19, TRBJ2-1)
CASPTFVLSGEQFF

SEQ ID NO: 324777 - protein, 15 aa, Homo sapiens
  CDR3 for alpha chain variable domain of TCR clone 162389 (TRAV12-1, TRAJ44)
RVVFVNTGTASKLTF

SEQ ID NO: 324778 - protein, 17 aa, Homo sapiens
  CDR3 for beta chain variable domain of TCR clone 162389 (TRBV7-8, TRBJ2-6)
YASSAGTGGAGANVLTF

SEQ ID NO: 324779 - protein, 12 aa, Homo sapiens
  CDR3 for alpha chain variable domain of TCR clone 162390 (TRAV23/DV6, TRAJ45)
CAAKNGGELLTD

SEQ ID NO: 324780 - protein, 13 aa, Homo sapiens
  CDR3 for beta chain variable domain of TCR clone 162390 (TRBV20-1, TRBJ1-1)
CSARGGGNTEAFF

SEQ ID NO: 324781 - protein, 13 aa, Homo sapiens
  CDR3 for alpha chain variable domain of TCR clone 162391 (TRAV1-2, TRAJ9)
CAALNTGGFKTIF

SEQ ID NO: 324782 - protein, 16 aa, Homo sapiens
  CDR3 for beta chain variable domain of TCR clone 162391 (TRBV20-1, TRBJ1-4)
CSAPGQGLLTNERLFF

SEQ ID NO: 324783 - protein, 19 aa, Homo sapiens
  CDR3 for alpha chain variable domain of TCR clone 162392 (TRAV26-1, TRAJ52)
CIVRAHRNAGGTSYGKLTF

SEQ ID NO: 324784 - protein, 15 aa, Homo sapiens
  CDR3 for beta chain variable domain of TCR clone 162392 (TRBV29-1, TRBJ2-1)
YSGRDRKSSYNEQFF

SEQ ID NO: 324785 - protein, 15 aa, Homo sapiens
  CDR3 for alpha chain variable domain of TCR clone 162393 (TRAV25, TRAJ52)
CAGPPGGTSYGKLTF

SEQ ID NO: 324786 - protein, 17 aa, Homo sapiens
  CDR3 for beta chain variable domain of TCR clone 162393 (TRBV7-8, TRBJ2-6)
CASSAGTGGAGANVLTF

SEQ ID NO: 324787 - protein, 12 aa, Homo sapiens
  CDR3 for alpha chain variable domain of TCR clone 162394 (TRAV21, TRAJ33)
CAKMDSNYQLIW

SEQ ID NO: 324788 - protein, 16 aa, Homo sapiens
  CDR3 for beta chain variable domain of TCR clone 162394 (TRBV5-7, TRBJ1-4)
CASSPSGGLKTEKLFF

SEQ ID NO: 324789 - protein, 12 aa, Homo sapiens
  CDR3 for alpha chain variable domain of TCR clone 162395 (TRAV1-2, TRAJ9)
CAGYTGGFKTIF

SEQ ID NO: 324790 - protein, 14 aa, Homo sapiens
  CDR3 for beta chain variable domain of TCR clone 162395 (TRBV19, TRBJ2-1)
CASPTFVLSGEQFF

SEQ ID NO: 324791 - protein, 11 aa, Homo sapiens
  CDR3 for alpha chain variable domain of TCR clone 162396 (TRAV27, TRAJ40)
SLTSGTYEYIF

SEQ ID NO: 324792 - protein, 12 aa, Homo sapiens
  CDR3 for beta chain variable domain of TCR clone 162396 (TRBV18, TRBJ2-3)
CQLKQNTDTQYF

SEQ ID NO: 324793 - protein, 15 aa, Homo sapiens
  CDR3 for alpha chain variable domain of TCR clone 162397 (TRAV3, TRAJ5)
CAVRDLDTGRRALTF

SEQ ID NO: 324794 - protein, 12 aa, Homo sapiens
  CDR3 for beta chain variable domain of TCR clone 162397 (TRBV5-1, TRBJ2-5)
CASSFSWETQYF

SEQ ID NO: 324795 - protein, 15 aa, Homo sapiens
  CDR3 for alpha chain variable domain of TCR clone 162398 (TRAV2, TRAJ13)
CCLLLCFRGLQKVTF

SEQ ID NO: 324796 - protein, 16 aa, Homo sapiens
  CDR3 for beta chain variable domain of TCR clone 162398 (TRBV12-5, TRBJ2-5)
CASGPRTSGNQETQYF

SEQ ID NO: 324797 - protein, 13 aa, Homo sapiens
  CDR3 for alpha chain variable domain of TCR clone 162399 (TRAV38-2/DV8, TRAJ34)
CAYRTWNTDKLIF

SEQ ID NO: 324798 - protein, 16 aa, Homo sapiens
  CDR3 for beta chain variable domain of TCR clone 162399 (TRBV11-1, TRBJ1-1)
CASSPRGAHMNSEAFF

SEQ ID NO: 324799 - protein, 14 aa, Homo sapiens
  CDR3 for alpha chain variable domain of TCR clone 162400 (TRAV35, TRAJ42)
CAGRYGGSQGNLIF

SEQ ID NO: 324800 - protein, 15 aa, Homo sapiens
  CDR3 for beta chain variable domain of TCR clone 162400 (TRBV7-9, TRBJ2-1)
FASSLGWGRANEQFF

SEQ ID NO: 324801 - protein, 12 aa, Homo sapiens
  CDR3 for alpha chain variable domain of TCR clone 162401 (TRAV12-3, TRAJ17)
CAMTLTGSKITF

SEQ ID NO: 324802 - protein, 15 aa, Homo sapiens
  CDR3 for beta chain variable domain of TCR clone 162401 (TRBV20-1, TRBJ2-7)
CSARDRVSGMDERYF

SEQ ID NO: 324803 - protein, 14 aa, Homo sapiens
  CDR3 for alpha chain variable domain of TCR clone 162402 (TRAV20, TRAJ42)
CAVHAGGSQGNLIF

SEQ ID NO: 324804 - protein, 15 aa, Homo sapiens
  CDR3 for beta chain variable domain of TCR clone 162402 (TRBV5-1, TRBJ2-2)
CASSSQGGNTGELFF

SEQ ID NO: 324805 - protein, 14 aa, Homo sapiens
  CDR3 for alpha chain variable domain of TCR clone 162403 (TRAV16, TRAJ15)
CALRPNQAGPALIF

SEQ ID NO: 324806 - protein, 16 aa, Homo sapiens
  CDR3 for beta chain variable domain of TCR clone 162403 (TRBV6-5, TRBJ2-2)
CASSYGRVPDTGELFF

SEQ ID NO: 324807 - protein, 17 aa, Homo sapiens
  CDR3 for alpha chain variable domain of TCR clone 162404 (TRAV3, TRAJ6)
CAVRDGPRAGGSYIPTF

SEQ ID NO: 324808 - protein, 13 aa, Homo sapiens
  CDR3 for beta chain variable domain of TCR clone 162404 (TRBV19, TRBJ2-1)
CQSDFRLSGEQFF

SEQ ID NO: 324809 - protein, 16 aa, Homo sapiens
  CDR3 for alpha chain variable domain of TCR clone 162405 (TRAV25, TRAJ53)
CGVEGDSGGSNYKLTF

SEQ ID NO: 324810 - protein, 14 aa, Homo sapiens
  CDR3 for beta chain variable domain of TCR clone 162405 (TRBV7-6, TRBJ2-1)
CASSSRRQGYEQFF

SEQ ID NO: 324811 - protein, 17 aa, Homo sapiens
  CDR3 for alpha chain variable domain of TCR clone 162406 (TRAV13-1, TRAJ28)
CAASPPYSGAGRYQLTF

SEQ ID NO: 324812 - protein, 14 aa, Homo sapiens
  CDR3 for beta chain variable domain of TCR clone 162406 (TRBV24-1, TRBJ1-1)
CATSIPRGDTEASF

SEQ ID NO: 324813 - protein, 15 aa, Homo sapiens
  CDR3 for alpha chain variable domain of TCR clone 162407 (TRAV21, TRAJ24)
CAARSSTDSWGKLQF

SEQ ID NO: 324814 - protein, 14 aa, Homo sapiens
  CDR3 for beta chain variable domain of TCR clone 162407 (TRBV11-2, TRBJ1-2)
CASSRTGSTYGYTF

SEQ ID NO: 324815 - protein, 14 aa, Homo sapiens
  CDR3 for alpha chain variable domain of TCR clone 162408 (TRAV13-1, TRAJ20)
CAARPGSNDYKLSF

SEQ ID NO: 324816 - protein, 13 aa, Homo sapiens
  CDR3 for beta chain variable domain of TCR clone 162408 (TRBV20-1, TRBJ1-1)
RSAPPGGHTEAFL

SEQ ID NO: 324817 - protein, 12 aa, Homo sapiens
  CDR3 for alpha chain variable domain of TCR clone 162409 (TRAV12-2, TRAJ20)
CAVNRNDYKLCF

SEQ ID NO: 324818 - protein, 16 aa, Homo sapiens
  CDR3 for beta chain variable domain of TCR clone 162409 (TRBV7-3, TRBJ1-2)
CASSLGAPVPNYGYTF

SEQ ID NO: 324819 - protein, 14 aa, Homo sapiens
  CDR3 for alpha chain variable domain of TCR clone 162410 (TRAV8-4, TRAJ4)
CAVSPSGGYNKLIF

SEQ ID NO: 324820 - protein, 14 aa, Homo sapiens
  CDR3 for beta chain variable domain of TCR clone 162410 (TRBV7-8, TRBJ2-3)
CQQLISGLGGAQYF

SEQ ID NO: 324821 - protein, 12 aa, Homo sapiens
  CDR3 for alpha chain variable domain of TCR clone 162411 (TRAV12-3, TRAJ40)
CAMSSGTYKYIF

SEQ ID NO: 324822 - protein, 18 aa, Homo sapiens
  CDR3 for beta chain variable domain of TCR clone 162411 (TRBV12-4, TRBJ2-2)
CASSLVAGTRGRTGELFF

SEQ ID NO: 324823 - protein, 16 aa, Homo sapiens
  CDR3 for alpha chain variable domain of TCR clone 162412 (TRAV12-3, TRAJ53)
CAMSPGSGGSNYKLTF

SEQ ID NO: 324824 - protein, 16 aa, Homo sapiens
  CDR3 for beta chain variable domain of TCR clone 162412 (TRBV29-1, TRBJ2-5)
SARGPNGDPVLRARHA

SEQ ID NO: 324825 - protein, 14 aa, Homo sapiens
  CDR3 for alpha chain variable domain of TCR clone 162413 (TRAV12-3, TRAJ10)
SHLPLTGGGNKLTF

SEQ ID NO: 324826 - protein, 16 aa, Homo sapiens
  CDR3 for beta chain variable domain of TCR clone 162413 (TRBV10-3, TRBJ2-1)
CAIRGGGRGDYNEQFF

SEQ ID NO: 324827 - protein, 13 aa, Homo sapiens
  CDR3 for alpha chain variable domain of TCR clone 162414 (TRAV23/DV6, TRAJ21)
CAASIGNFNKFYF

SEQ ID NO: 324828 - protein, 16 aa, Homo sapiens
  CDR3 for beta chain variable domain of TCR clone 162414 (TRBV19, TRBJ2-1)
SASSKAGPSSYNEQFF

SEQ ID NO: 324829 - protein, 15 aa, Homo sapiens
  CDR3 for alpha chain variable domain of TCR clone 162415 (TRAV8-2, TRAJ15)
CVVTTGNQAGTALIF

SEQ ID NO: 324830 - protein, 13 aa, Homo sapiens
  CDR3 for beta chain variable domain of TCR clone 162415 (TRBV19, TRBJ1-3)
CASRLSLGNTIYF

SEQ ID NO: 324831 - protein, 17 aa, Homo sapiens
  CDR3 for alpha chain variable domain of TCR clone 162416 (TRAV3, TRAJ12)
CCERRDGTMDSSYKLIF

SEQ ID NO: 324832 - protein, 15 aa, Homo sapiens
  CDR3 for beta chain variable domain of TCR clone 162416 (TRBV5-5, TRBJ1-5)
CASSLKGGGEQTQHF

SEQ ID NO: 324833 - protein, 13 aa, Homo sapiens
  CDR3 for alpha chain variable domain of TCR clone 162417 (TRAV2, TRAJ40)
CAVVTSGTYKYIF

SEQ ID NO: 324834 - protein, 14 aa, Homo sapiens
  CDR3 for beta chain variable domain of TCR clone 162417 (TRBV19, TRBJ1-2)
CASSIGAGSYGYTF

SEQ ID NO: 324835 - protein, 16 aa, Homo sapiens
  CDR3 for alpha chain variable domain of TCR clone 162418 (TRAV16, TRAJ52)
CALSAAGGTSYGKLTF

SEQ ID NO: 324836 - protein, 15 aa, Homo sapiens
  CDR3 for beta chain variable domain of TCR clone 162418 (TRBV4-2, TRBJ1-2)
CAGSQRTGGRDGYTF

SEQ ID NO: 324837 - protein, 15 aa, Homo sapiens
  CDR3 for alpha chain variable domain of TCR clone 162419 (TRAV26-1, TRAJ48)
CIARWSWFGNEKLTF

SEQ ID NO: 324838 - protein, 12 aa, Homo sapiens
  CDR3 for beta chain variable domain of TCR clone 162419 (TRBV19, TRBJ2-5)
CASSRSEETQYF

SEQ ID NO: 324839 - protein, 14 aa, Homo sapiens
  CDR3 for alpha chain variable domain of TCR clone 162420 (TRAV8-6, TRAJ54)
CAVSPALGAQKLVF

SEQ ID NO: 324840 - protein, 20 aa, Homo sapiens
  CDR3 for beta chain variable domain of TCR clone 162420 (TRBV7-8, TRBJ2-2)
CASSHLFPGPTIHITGELFF

SEQ ID NO: 324841 - protein, 13 aa, Homo sapiens
  CDR3 for alpha chain variable domain of TCR clone 162421 (TRAV29/DV5, TRAJ29)
CAASAAGNTPLVF

SEQ ID NO: 324842 - protein, 16 aa, Homo sapiens
  CDR3 for beta chain variable domain of TCR clone 162421 (TRBV12-5, TRBJ2-5)
CASGPRTSGNQETQYF

SEQ ID NO: 324843 - protein, 12 aa, Homo sapiens
  CDR3 for alpha chain variable domain of TCR clone 162422 (TRAV3, TRAJ13)
CAVSGGYQKVTF

SEQ ID NO: 324844 - protein, 12 aa, Homo sapiens
  CDR3 for beta chain variable domain of TCR clone 162422 (TRBV7-9, TRBJ1-1)
CASSLVRGEAFF

SEQ ID NO: 324845 - protein, 15 aa, Homo sapiens
  CDR3 for alpha chain variable domain of TCR clone 162423 (TRAV38-1, TRAJ37)
CAFIHGSGNTGKLIF

SEQ ID NO: 324846 - protein, 16 aa, Homo sapiens
  CDR3 for beta chain variable domain of TCR clone 162423 (TRBV19, TRBJ2-1)
CASSKAGPSSYNEQFF

SEQ ID NO: 324847 - protein, 13 aa, Homo sapiens
  CDR3 for alpha chain variable domain of TCR clone 162424 (TRAV21, TRAJ20)
CALGLRVDYKLSF

SEQ ID NO: 324848 - protein, 13 aa, Homo sapiens
  CDR3 for beta chain variable domain of TCR clone 162424 (TRBV7-2, TRBJ2-2)
CASSSARAGELFF

SEQ ID NO: 324849 - protein, 14 aa, Homo sapiens
  CDR3 for alpha chain variable domain of TCR clone 162425 (TRAV12-3, TRAJ42)
CAMNYGGSQGNLIF

SEQ ID NO: 324850 - protein, 15 aa, Homo sapiens
  CDR3 for beta chain variable domain of TCR clone 162425 (TRBV5-7, TRBJ1-5)
CASSYGKLWDQRQHF

SEQ ID NO: 324851 - protein, 15 aa, Homo sapiens
  CDR3 for alpha chain variable domain of TCR clone 162426 (TRAV26-1, TRAJ48)
CIARWSWFGNEKLTF

SEQ ID NO: 324852 - protein, 12 aa, Homo sapiens
  CDR3 for beta chain variable domain of TCR clone 162426 (TRBV19, TRBJ2-5)
CASSISEETQFF

SEQ ID NO: 324853 - protein, 14 aa, Homo sapiens
  CDR3 for alpha chain variable domain of TCR clone 162427 (TRAV17, TRAJ32)
CATDPGVATNKLNF

SEQ ID NO: 324854 - protein, 14 aa, Homo sapiens
  CDR3 for beta chain variable domain of TCR clone 162427 (TRBV2, TRBJ1-5)
CASSENRGGQPQHF

SEQ ID NO: 324855 - protein, 12 aa, Homo sapiens
  CDR3 for alpha chain variable domain of TCR clone 162428 (TRAV26-1, TRAJ48)
CIVSGGNEKLTF

SEQ ID NO: 324856 - protein, 12 aa, Homo sapiens
  CDR3 for beta chain variable domain of TCR clone 162428 (TRBV11-3, TRBJ1-1)
CASSLRDSEAFF

SEQ ID NO: 324857 - protein, 13 aa, Homo sapiens
  CDR3 for alpha chain variable domain of TCR clone 162429 (TRAV8-3, TRAJ28)
CAVGAVGCYQLTF

SEQ ID NO: 324858 - protein, 13 aa, Homo sapiens
  CDR3 for beta chain variable domain of TCR clone 162429 (TRBV19, TRBJ1-2)
CASSVPGQDGYTF

SEQ ID NO: 324859 - protein, 14 aa, Homo sapiens
  CDR3 for alpha chain variable domain of TCR clone 162430 (TRAV12-3, TRAJ9)
CAMSPNNGGFKTIF

SEQ ID NO: 324860 - protein, 12 aa, Homo sapiens
  CDR3 for beta chain variable domain of TCR clone 162430 (TRBV19, TRBJ1-5)
CASSIAQQTQHF

SEQ ID NO: 324861 - protein, 10 aa, Homo sapiens
  CDR3 for alpha chain variable domain of TCR clone 162431 (TRAV21, TRAJ31)
CAVDNARLMF

SEQ ID NO: 324862 - protein, 13 aa, Homo sapiens
  CDR3 for beta chain variable domain of TCR clone 162431 (TRBV7-3, TRBJ1-1)
CASSQDWGAEAFF

SEQ ID NO: 324863 - protein, 14 aa, Homo sapiens
  CDR3 for alpha chain variable domain of TCR clone 162432 (TRAV8-3, TRAJ10)
CAAGNAGGGNKLTF

SEQ ID NO: 324864 - protein, 16 aa, Homo sapiens
  CDR3 for beta chain variable domain of TCR clone 162432 (TRBV11-2, TRBJ1-2)
CASSLDTGGADYGYTF

SEQ ID NO: 324865 - protein, 16 aa, Homo sapiens
  CDR3 for alpha chain variable domain of TCR clone 162433 (TRAV13-2, TRAJ52)
CRESPTGGTSYGKLTF

SEQ ID NO: 324866 - protein, 14 aa, Homo sapiens
  CDR3 for beta chain variable domain of TCR clone 162433 (TRBV19, TRBJ2-1)
CASGKSTQYNEQFF

SEQ ID NO: 324867 - protein, 12 aa, Homo sapiens
  CDR3 for alpha chain variable domain of TCR clone 162434 (TRAV36/DV7, TRAJ54)
CAVVRGAQKLVF

SEQ ID NO: 324868 - protein, 13 aa, Homo sapiens
  CDR3 for beta chain variable domain of TCR clone 162434 (TRBV4-1, TRBJ2-1)
CASSQEVQYEQFF

SEQ ID NO: 324869 - protein, 14 aa, Homo sapiens
  CDR3 for alpha chain variable domain of TCR clone 162435 (TRAV16, TRAJ42)
CALLAGGSQGNLIF

SEQ ID NO: 324870 - protein, 13 aa, Homo sapiens
  CDR3 for beta chain variable domain of TCR clone 162435 (TRBV7-9, TRBJ1-2)
CASSLKQIYGYTF

SEQ ID NO: 324871 - protein, 14 aa, Homo sapiens
  CDR3 for alpha chain variable domain of TCR clone 162436 (TRAV29/DV5, TRAJ45)
CAASFRGGADGLTS

SEQ ID NO: 324872 - protein, 11 aa, Homo sapiens
  CDR3 for beta chain variable domain of TCR clone 162436 (TRBV11-2, TRBJ2-2)
CASSLPGELFF

SEQ ID NO: 324873 - protein, 14 aa, Homo sapiens
  CDR3 for alpha chain variable domain of TCR clone 162437 (TRAV1-2, TRAJ16)
CAVNRFSDGQKLLF

SEQ ID NO: 324874 - protein, 14 aa, Homo sapiens
  CDR3 for beta chain variable domain of TCR clone 162437 (TRBV7-6, TRBJ1-4)
CASSSGRINEKLFF

SEQ ID NO: 324875 - protein, 15 aa, Homo sapiens
  CDR3 for alpha chain variable domain of TCR clone 162438 (TRAV8-3, TRAJ23)
CAVGDRYNQGGKLMF

SEQ ID NO: 324876 - protein, 17 aa, Homo sapiens
  CDR3 for beta chain variable domain of TCR clone 162438 (TRBV4-1, TRBJ1-4)
CASSQEGPRGVEEKLFF

SEQ ID NO: 324877 - protein, 13 aa, Homo sapiens
  CDR3 for alpha chain variable domain of TCR clone 162439 (TRAV12-3, TRAJ47)
CAMKKEYGNKLVF

SEQ ID NO: 324878 - protein, 15 aa, Homo sapiens
  CDR3 for beta chain variable domain of TCR clone 162439 (TRBV12-4, TRBJ1-2)
CASSPITGGGYGYTF

SEQ ID NO: 324879 - protein, 13 aa, Homo sapiens
  CDR3 for alpha chain variable domain of TCR clone 162440 (TRAV16, TRAJ15)
CALSGPGRNCSDL

SEQ ID NO: 324880 - protein, 12 aa, Homo sapiens
  CDR3 for beta chain variable domain of TCR clone 162440 (TRBV18, TRBJ2-5)
CASSPSKETQYF

SEQ ID NO: 324881 - protein, 14 aa, Homo sapiens
  CDR3 for alpha chain variable domain of TCR clone 162441 (TRAV8-3, TRAJ4)
CSVGASGGYNKLIF

SEQ ID NO: 324882 - protein, 13 aa, Homo sapiens
  CDR3 for beta chain variable domain of TCR clone 162441 (TRBV18, TRBJ2-5)
CASSLQGQETQYF

SEQ ID NO: 324883 - protein, 14 aa, Homo sapiens
  CDR3 for alpha chain variable domain of TCR clone 162442 (TRAV17, TRAJ22)
CATSPSGSARQLTF

SEQ ID NO: 324884 - protein, 13 aa, Homo sapiens
  CDR3 for beta chain variable domain of TCR clone 162442 (TRBV2, TRBJ1-1)
CARNPTGGFHSFF

SEQ ID NO: 324885 - protein, 13 aa, Homo sapiens
  CDR3 for alpha chain variable domain of TCR clone 162443 (TRAV12-3, TRAJ33)
CAMSVNSNYQLIW

SEQ ID NO: 324886 - protein, 15 aa, Homo sapiens
  CDR3 for beta chain variable domain of TCR clone 162443 (TRBV20-1, TRBJ1-6)
CSARAASSYNSPLHF

SEQ ID NO: 324887 - protein, 12 aa, Homo sapiens
  CDR3 for alpha chain variable domain of TCR clone 162444 (TRAV25, TRAJ38)
CAGTGNNRKLIW

SEQ ID NO: 324888 - protein, 14 aa, Homo sapiens
  CDR3 for beta chain variable domain of TCR clone 162444 (TRBV19, TRBJ1-5)
CSSSKMTGPQPQHF

SEQ ID NO: 324889 - protein, 14 aa, Homo sapiens
  CDR3 for alpha chain variable domain of TCR clone 162445 (TRAV1-2, TRAJ16)
CAGNRFSDGQKLLF

SEQ ID NO: 324890 - protein, 14 aa, Homo sapiens
  CDR3 for beta chain variable domain of TCR clone 162445 (TRBV10-2, TRBJ1-5)
CASSSTGRNQPQHF

SEQ ID NO: 324891 - protein, 12 aa, Homo sapiens
  CDR3 for alpha chain variable domain of TCR clone 162446 (TRAV26-1, TRAJ17)
CIVRSAGNKLTF

SEQ ID NO: 324892 - protein, 16 aa, Homo sapiens
  CDR3 for beta chain variable domain of TCR clone 162446 (TRBV6-5, TRBJ2-7)
CASSYCRVGISDEQYF

SEQ ID NO: 324893 - protein, 16 aa, Homo sapiens
  CDR3 for alpha chain variable domain of TCR clone 162447 (TRAV27, TRAJ57)
CAGALGTQGGSEKLVF

SEQ ID NO: 324894 - protein, 15 aa, Homo sapiens
  CDR3 for beta chain variable domain of TCR clone 162447 (TRBV9, TRBJ1-6)
CASSVAGTGDSPLHF

SEQ ID NO: 324895 - protein, 14 aa, Homo sapiens
  CDR3 for alpha chain variable domain of TCR clone 162448 (TRAV12-2, TRAJ6)
CASKWGGGSCIPTF

SEQ ID NO: 324896 - protein, 13 aa, Homo sapiens
  CDR3 for beta chain variable domain of TCR clone 162448 (TRBV2, TRBJ1-1)
CASSEGGNTEAFF

SEQ ID NO: 324897 - protein, 14 aa, Homo sapiens
  CDR3 for alpha chain variable domain of TCR clone 162449 (TRAV25, TRAJ35)
CARRMEGFGNVMHC

SEQ ID NO: 324898 - protein, 13 aa, Homo sapiens
  CDR3 for beta chain variable domain of TCR clone 162449 (TRBV7-2, TRBJ1-4)
CASSLAGLEKLFF

SEQ ID NO: 324899 - protein, 15 aa, Homo sapiens
  CDR3 for alpha chain variable domain of TCR clone 162450 (TRAV13-1, TRAJ44)
CAASRGGGTASKLTF

SEQ ID NO: 324900 - protein, 13 aa, Homo sapiens
  CDR3 for beta chain variable domain of TCR clone 162450 (TRBV7-3, TRBJ2-1)
CQQLSGGTNEQFF

SEQ ID NO: 324901 - protein, 13 aa, Homo sapiens
  CDR3 for alpha chain variable domain of TCR clone 162451 (TRAV12-3, TRAJ33)
CAMSVNSNYQLIW

SEQ ID NO: 324902 - protein, 12 aa, Homo sapiens
  CDR3 for beta chain variable domain of TCR clone 162451 (TRBV11-2, TRBJ2-2)
CANSIGGGELFF

SEQ ID NO: 324903 - protein, 15 aa, Homo sapiens
  CDR3 for alpha chain variable domain of TCR clone 162452 (TRAV17, TRAJ57)
CATGPSQGGSEKLVF

SEQ ID NO: 324904 - protein, 18 aa, Homo sapiens
  CDR3 for beta chain variable domain of TCR clone 162452 (TRBV7-9, TRBJ2-7)
CAGSLTTSGSRTWYEQYF

SEQ ID NO: 324905 - protein, 13 aa, Homo sapiens
  CDR3 for alpha chain variable domain of TCR clone 162453 (TRAV12-3, TRAJ7)
CAMSASGNNRIAF

SEQ ID NO: 324906 - protein, 14 aa, Homo sapiens
  CDR3 for beta chain variable domain of TCR clone 162453 (TRBV13, TRBJ2-5)
CASSLGPRGETQYF

SEQ ID NO: 324907 - protein, 14 aa, Homo sapiens
  CDR3 for alpha chain variable domain of TCR clone 162454 (TRAV29/DV5, TRAJ36)
FAARRKTGANNLFF

SEQ ID NO: 324908 - protein, 14 aa, Homo sapiens
  CDR3 for beta chain variable domain of TCR clone 162454 (TRBV12-5, TRBJ2-5)
CASGSRTNQETQYF

SEQ ID NO: 324909 - protein, 14 aa, Homo sapiens
  CDR3 for alpha chain variable domain of TCR clone 162455 (TRAV1-2, TRAJ16)
CAVNRFSDGQKLLF

SEQ ID NO: 324910 - protein, 14 aa, Homo sapiens
  CDR3 for beta chain variable domain of TCR clone 162455 (TRBV7-9, TRBJ2-7)
CASSIGQGAGEQYF

SEQ ID NO: 324911 - protein, 16 aa, Homo sapiens
  CDR3 for alpha chain variable domain of TCR clone 162456 (TRAV8-1, TRAJ48)
CAVTLISNFGNETLTF

SEQ ID NO: 324912 - protein, 12 aa, Homo sapiens
  CDR3 for beta chain variable domain of TCR clone 162456 (TRBV20-1, TRBJ1-2)
CSAPGFNYGYTF

SEQ ID NO: 324913 - protein, 11 aa, Homo sapiens
  CDR3 for alpha chain variable domain of TCR clone 162457 (TRAV13-1, TRAJ30)
CAASGDDKIIF

SEQ ID NO: 324914 - protein, 15 aa, Homo sapiens
  CDR3 for beta chain variable domain of TCR clone 162457 (TRBV18, TRBJ1-1)
CASSPSSWVDTEAFF

SEQ ID NO: 324915 - protein, 10 aa, Homo sapiens
  CDR3 for alpha chain variable domain of TCR clone 162458 (TRAV23/DV6, TRAJ43)
CAATVAALEQ

SEQ ID NO: 324916 - protein, 13 aa, Homo sapiens
  CDR3 for beta chain variable domain of TCR clone 162458 (TRBV12-4, TRBJ1-2)
CASSLRQGKGYTF

SEQ ID NO: 324917 - protein, 12 aa, Homo sapiens
  CDR3 for alpha chain variable domain of TCR clone 162459 (TRAV3, TRAJ20)
CAVRDPDYKLSF

SEQ ID NO: 324918 - protein, 13 aa, Homo sapiens
  CDR3 for beta chain variable domain of TCR clone 162459 (TRBV18, TRBJ1-1)
CASSPETKPEASF

SEQ ID NO: 324919 - protein, 11 aa, Homo sapiens
  CDR3 for alpha chain variable domain of TCR clone 162460 (TRAV2, TRAJ13)
CASGGYQKVTF

SEQ ID NO: 324920 - protein, 15 aa, Homo sapiens
  CDR3 for beta chain variable domain of TCR clone 162460 (TRBV7-9, TRBJ2-7)
CASSLDLDRGYEQYF

SEQ ID NO: 324921 - protein, 13 aa, Homo sapiens
  CDR3 for alpha chain variable domain of TCR clone 162461 (TRAV3, TRAJ21)
CAVREPYFNKFYF

SEQ ID NO: 324922 - protein, 15 aa, Homo sapiens
  CDR3 for beta chain variable domain of TCR clone 162461 (TRBV9, TRBJ1-6)
CASSVAGTGDSPLHF

SEQ ID NO: 324923 - protein, 14 aa, Homo sapiens
  CDR3 for alpha chain variable domain of TCR clone 162462 (TRAV12-2, TRAJ40)
CSVKLPSGTYKYIF

SEQ ID NO: 324924 - protein, 20 aa, Homo sapiens
  CDR3 for beta chain variable domain of TCR clone 162462 (TRBV7-8, TRBJ2-2)
CASSHLFPGPTIHITGELFF

SEQ ID NO: 324925 - protein, 12 aa, Homo sapiens
  CDR3 for alpha chain variable domain of TCR clone 162463 (TRAV13-1, TRAJ53)
AASGGSNYKLTF

SEQ ID NO: 324926 - protein, 13 aa, Homo sapiens
  CDR3 for beta chain variable domain of TCR clone 162463 (TRBV29-1, TRBJ1-3)
CSADVDSGNTIYF

SEQ ID NO: 324927 - protein, 14 aa, Homo sapiens
  CDR3 for alpha chain variable domain of TCR clone 162464 (TRAV12-2, TRAJ44)
CAVNPVGTASKLTF

SEQ ID NO: 324928 - protein, 13 aa, Homo sapiens
  CDR3 for beta chain variable domain of TCR clone 162464 (TRBV20-1, TRBJ1-6)
CSAPLGVGSPLHF

SEQ ID NO: 324929 - protein, 13 aa, Homo sapiens
  CDR3 for alpha chain variable domain of TCR clone 162465 (TRAV8-3, TRAJ4)
WVFYSGGYSKLIF

SEQ ID NO: 324930 - protein, 16 aa, Homo sapiens
  CDR3 for beta chain variable domain of TCR clone 162465 (TRBV7-8, TRBJ2-3)
CASSTEGQRETDTQYF

SEQ ID NO: 324931 - protein, 13 aa, Homo sapiens
  CDR3 for alpha chain variable domain of TCR clone 162466 (TRAV13-2, TRAJ13)
CAERPGGYQKVTF

SEQ ID NO: 324932 - protein, 15 aa, Homo sapiens
  CDR3 for beta chain variable domain of TCR clone 162466 (TRBV11-1, TRBJ2-1)
CASSNGGGSSNEQFF

SEQ ID NO: 324933 - protein, 13 aa, Homo sapiens
  CDR3 for alpha chain variable domain of TCR clone 162467 (TRAV21, TRAJ27)
CAARPGNAGKSTF

SEQ ID NO: 324934 - protein, 22 aa, Homo sapiens
  CDR3 for beta chain variable domain of TCR clone 162467 (TRBV7-2, TRBJ1-5)
RRTRPCISVPAAPDRGTLSQHF

SEQ ID NO: 324935 - protein, 15 aa, Homo sapiens
  CDR3 for alpha chain variable domain of TCR clone 162468 (TRAV29/DV5, TRAJ42)
CAAKTDGGSQGNIIF

SEQ ID NO: 324936 - protein, 16 aa, Homo sapiens
  CDR3 for beta chain variable domain of TCR clone 162468 (TRBV7-9, TRBJ2-1)
CASSLVSGPSYNEQFF

SEQ ID NO: 324937 - protein, 14 aa, Homo sapiens
  CDR3 for alpha chain variable domain of TCR clone 162469 (TRAV8-1, TRAJ22)
CAAPSSGSASQLTF

SEQ ID NO: 324938 - protein, 14 aa, Homo sapiens
  CDR3 for beta chain variable domain of TCR clone 162469 (TRBV9, TRBJ2-2)
CASSVGQGAGELFF

SEQ ID NO: 324939 - protein, 14 aa, Homo sapiens
  CDR3 for alpha chain variable domain of TCR clone 162470 (TRAV38-1, TRAJ40)
CALRPTSGTYKYIF

SEQ ID NO: 324940 - protein, 17 aa, Homo sapiens
  CDR3 for beta chain variable domain of TCR clone 162470 (TRBV25-1, TRBJ1-1)
STSGPAPTWGGNTEAFF

SEQ ID NO: 324941 - protein, 14 aa, Homo sapiens
  CDR3 for alpha chain variable domain of TCR clone 162471 (TRAV2, TRAJ8)
CAGRGNTGFQKLVF

SEQ ID NO: 324942 - protein, 13 aa, Homo sapiens
  CDR3 for beta chain variable domain of TCR clone 162471 (TRBV6-5, TRBJ2-7)
CASRTSGIHEQYS

SEQ ID NO: 324943 - protein, 14 aa, Homo sapiens
  CDR3 for alpha chain variable domain of TCR clone 162472 (TRAV12-2, TRAJ13)
CAVKKTGGYQKVTF

SEQ ID NO: 324944 - protein, 11 aa, Homo sapiens
  CDR3 for beta chain variable domain of TCR clone 162472 (TRBV29-1, TRBJ2-5)
CSEDRTGTQYS

SEQ ID NO: 324945 - protein, 14 aa, Homo sapiens
  CDR3 for alpha chain variable domain of TCR clone 162473 (TRAV1-2, TRAJ8)
CAVREDTGFQKLVF

SEQ ID NO: 324946 - protein, 14 aa, Homo sapiens
  CDR3 for beta chain variable domain of TCR clone 162473 (TRBV7-9, TRBJ1-1)
CASTPLQSYTQAFF

SEQ ID NO: 324947 - protein, 17 aa, Homo sapiens
  CDR3 for alpha chain variable domain of TCR clone 162474 (TRAV8-6, TRAJ8)
CAVKEGIENTGFQKLVF

SEQ ID NO: 324948 - protein, 15 aa, Homo sapiens
  CDR3 for beta chain variable domain of TCR clone 162474 (TRBV11-1, TRBJ2-7)
CASSRGRFKTYEQYF

SEQ ID NO: 324949 - protein, 15 aa, Homo sapiens
  CDR3 for alpha chain variable domain of TCR clone 162475 (TRAV17, TRAJ23)
CATDAEDNQGGKLIF

SEQ ID NO: 324950 - protein, 15 aa, Homo sapiens
  CDR3 for beta chain variable domain of TCR clone 162475 (TRBV5-1, TRBJ2-1)
CASSPPRAPYNEQFF

SEQ ID NO: 324951 - protein, 14 aa, Homo sapiens
  CDR3 for alpha chain variable domain of TCR clone 162476 (TRAV12-1, TRAJ23)
CVVIVYNQGGKLIF

SEQ ID NO: 324952 - protein, 15 aa, Homo sapiens
  CDR3 for beta chain variable domain of TCR clone 162476 (TRBV20-1, TRBJ1-5)
CTAKPPGQGPQPQHF

SEQ ID NO: 324953 - protein, 17 aa, Homo sapiens
  CDR3 for alpha chain variable domain of TCR clone 162477 (TRAV26-1, TRAJ37)
CIVRVITVSSNTGKLIF

SEQ ID NO: 324954 - protein, 13 aa, Homo sapiens
  CDR3 for beta chain variable domain of TCR clone 162477 (TRBV19, TRBJ1-2)
CASSVPGQDGYTF

SEQ ID NO: 324955 - protein, 13 aa, Homo sapiens
  CDR3 for alpha chain variable domain of TCR clone 162478 (TRAV29/DV5, TRAJ31)
CAASRNNNARLMF

SEQ ID NO: 324956 - protein, 15 aa, Homo sapiens
  CDR3 for beta chain variable domain of TCR clone 162478 (TRBV27, TRBJ2-7)
CASSTAGTGSYEQYF

SEQ ID NO: 324957 - protein, 16 aa, Homo sapiens
  CDR3 for alpha chain variable domain of TCR clone 162479 (TRAV8-6, TRAJ58)
CCELLGRRNQWLRLTF

SEQ ID NO: 324958 - protein, 15 aa, Homo sapiens
  CDR3 for beta chain variable domain of TCR clone 162479 (TRBV11-3, TRBJ2-3)
CASLKDGREGDTQYF

SEQ ID NO: 324959 - protein, 14 aa, Homo sapiens
  CDR3 for alpha chain variable domain of TCR clone 162480 (TRAV3, TRAJ7)
CAVREEEREQQNRF

SEQ ID NO: 324960 - protein, 12 aa, Homo sapiens
  CDR3 for beta chain variable domain of TCR clone 162480 (TRBV7-8, TRBJ2-7)
CASSRGDREQYF

SEQ ID NO: 324961 - protein, 14 aa, Homo sapiens
  CDR3 for alpha chain variable domain of TCR clone 162481 (TRAV13-1, TRAJ4)
CSKLDFWWLNKLIF

SEQ ID NO: 324962 - protein, 15 aa, Homo sapiens
  CDR3 for beta chain variable domain of TCR clone 162481 (TRBV28, TRBJ2-3)
CASTPRGENTDTQYF

SEQ ID NO: 324963 - protein, 15 aa, Homo sapiens
  CDR3 for alpha chain variable domain of TCR clone 162482 (TRAV8-3, TRAJ45)
CASSYSGGGAAGLTF

SEQ ID NO: 324964 - protein, 13 aa, Homo sapiens
  CDR3 for beta chain variable domain of TCR clone 162482 (TRBV10-3, TRBJ2-7)
CASKLAVNYEQYV

SEQ ID NO: 324965 - protein, 14 aa, Homo sapiens
  CDR3 for alpha chain variable domain of TCR clone 162483 (TRAV12-2, TRAJ17)
CAMLFKAAGKKLTF

SEQ ID NO: 324966 - protein, 17 aa, Homo sapiens
  CDR3 for beta chain variable domain of TCR clone 162483 (TRBV20-1, TRBJ2-2)
CSASGSGQGGLTGELFF

SEQ ID NO: 324967 - protein, 13 aa, Homo sapiens
  CDR3 for alpha chain variable domain of TCR clone 162484 (TRAV27, TRAJ56)
GAGKPGANSKLTF

SEQ ID NO: 324968 - protein, 18 aa, Homo sapiens
  CDR3 for beta chain variable domain of TCR clone 162484 (TRBV11-2, TRBJ2-3)
CASSLGGASRGAPNTQYF

SEQ ID NO: 324969 - protein, 16 aa, Homo sapiens
  CDR3 for alpha chain variable domain of TCR clone 162485 (TRAV16, TRAJ52)
CALSAAGGTSYGKLTF

SEQ ID NO: 324970 - protein, 16 aa, Homo sapiens
  CDR3 for beta chain variable domain of TCR clone 162485 (TRBV12-4, TRBJ1-5)
CASSRPVGGSNQPQLF

SEQ ID NO: 324971 - protein, 11 aa, Homo sapiens
  CDR3 for alpha chain variable domain of TCR clone 162486 (TRAV13-2, TRAJ23)
CAESPRGKLIF

SEQ ID NO: 324972 - protein, 16 aa, Homo sapiens
  CDR3 for beta chain variable domain of TCR clone 162486 (TRBV7-3, TRBJ2-2)
CASSLKRGTLSGELFF

SEQ ID NO: 324973 - protein, 18 aa, Homo sapiens
  CDR3 for alpha chain variable domain of TCR clone 162487 (TRAV21, TRAJ52)
CAVRPSPAGGTSYGKLTF

SEQ ID NO: 324974 - protein, 15 aa, Homo sapiens
  CDR3 for beta chain variable domain of TCR clone 162487 (TRBV18, TRBJ2-2)
CASSPPVGFTGELFF

SEQ ID NO: 324975 - protein, 12 aa, Homo sapiens
  CDR3 for alpha chain variable domain of TCR clone 162488 (TRAV1-1, TRAJ30)
CAVRGRDDKIIF

SEQ ID NO: 324976 - protein, 17 aa, Homo sapiens
  CDR3 for beta chain variable domain of TCR clone 162488 (TRBV7-8, TRBJ2-6)
CASSAGTGGAGANVLTF

SEQ ID NO: 324977 - protein, 15 aa, Homo sapiens
  CDR3 for alpha chain variable domain of TCR clone 162489 (TRAV21, TRAJ53)
CATLNSGGSNYKLTI

SEQ ID NO: 324978 - protein, 16 aa, Homo sapiens
  CDR3 for beta chain variable domain of TCR clone 162489 (TRBV24-1, TRBJ2-3)
CATSDPGTGATDTQYF

SEQ ID NO: 324979 - protein, 14 aa, Homo sapiens
  CDR3 for alpha chain variable domain of TCR clone 162490 (TRAV12-2, TRAJ13)
WSVKKTGGYQKVTF

SEQ ID NO: 324980 - protein, 12 aa, Homo sapiens
  CDR3 for beta chain variable domain of TCR clone 162490 (TRBV12-4, TRBJ1-2)
CASSFIWLHLRF

SEQ ID NO: 324981 - protein, 15 aa, Homo sapiens
  CDR3 for alpha chain variable domain of TCR clone 162491 (TRAV8-6, TRAJ10)
CAVSDQAGGGNKHTF

SEQ ID NO: 324982 - protein, 15 aa, Homo sapiens
  CDR3 for beta chain variable domain of TCR clone 162491 (TRBV3-1, TRBJ2-5)
CASSANLGGPETQYF

SEQ ID NO: 324983 - protein, 19 aa, Homo sapiens
  CDR3 for alpha chain variable domain of TCR clone 162492 (TRAV3, TRAJ6)
CAVRDRNPSRSGGSYIPTF

SEQ ID NO: 324984 - protein, 18 aa, Homo sapiens
  CDR3 for beta chain variable domain of TCR clone 162492 (TRBV7-9, TRBJ2-7)
CASSLTTSGSRTWYEQYF

SEQ ID NO: 324985 - protein, 16 aa, Homo sapiens
  CDR3 for alpha chain variable domain of TCR clone 162493 (TRAV30, TRAJ24)
CGTEIVDADSWGKFQF

SEQ ID NO: 324986 - protein, 14 aa, Homo sapiens
  CDR3 for beta chain variable domain of TCR clone 162493 (TRBV7-8, TRBJ2-3)
CASSLEAGTDTHYF

SEQ ID NO: 324987 - protein, 14 aa, Homo sapiens
  CDR3 for alpha chain variable domain of TCR clone 162494 (TRAV16, TRAJ37)
CALDISGNTGKLIF

SEQ ID NO: 324988 - protein, 14 aa, Homo sapiens
  CDR3 for beta chain variable domain of TCR clone 162494 (TRBV7-6, TRBJ2-7)
CASSFRQGPDEQYF

SEQ ID NO: 324989 - protein, 12 aa, Homo sapiens
  CDR3 for alpha chain variable domain of TCR clone 162495 (TRAV3, TRAJ29)
CAVRSGNTPLVF

SEQ ID NO: 324990 - protein, 14 aa, Homo sapiens
  CDR3 for beta chain variable domain of TCR clone 162495 (TRBV19, TRBJ2-1)
CASPTFVLSGEQFF

SEQ ID NO: 324991 - protein, 17 aa, Homo sapiens
  CDR3 for alpha chain variable domain of TCR clone 162496 (TRAV2, TRAJ36)
CAVEDRGNWGKQPLLWD

SEQ ID NO: 324992 - protein, 14 aa, Homo sapiens
  CDR3 for beta chain variable domain of TCR clone 162496 (TRBV7-9, TRBJ2-5)
CASSLETAQETQYF

SEQ ID NO: 324993 - protein, 14 aa, Homo sapiens
  CDR3 for alpha chain variable domain of TCR clone 162497 (TRAV29/DV5, TRAJ44)
CAAFLVGTASQLTF

SEQ ID NO: 324994 - protein, 15 aa, Homo sapiens
  CDR3 for beta chain variable domain of TCR clone 162497 (TRBV7-3, TRBJ2-2)
CASSETGQGTGELFF

SEQ ID NO: 324995 - protein, 15 aa, Homo sapiens
  CDR3 for alpha chain variable domain of TCR clone 162498 (TRAV1-1, TRAJ24)
CALPGGTDSWGKFQF

SEQ ID NO: 324996 - protein, 16 aa, Homo sapiens
  CDR3 for beta chain variable domain of TCR clone 162498 (TRBV2, TRBJ2-7)
CASSEPWTGPSYEQYF

SEQ ID NO: 324997 - protein, 11 aa, Homo sapiens
  CDR3 for alpha chain variable domain of TCR clone 162499 (TRAV26-1, TRAJ37)
CIVRVGRKLIF

SEQ ID NO: 324998 - protein, 13 aa, Homo sapiens
  CDR3 for beta chain variable domain of TCR clone 162499 (TRBV14, TRBJ1-2)
CASSEDSRYGYTF

SEQ ID NO: 324999 - protein, 14 aa, Homo sapiens
  CDR3 for alpha chain variable domain of TCR clone 162500 (TRAV26-1, TRAJ38)
CIADNAGNNRKLMW

SEQ ID NO: 325000 - protein, 14 aa, Homo sapiens
  CDR3 for beta chain variable domain of TCR clone 162500 (TRBV20-1, TRBJ1-3)
CSASPTGAGNTIYF

SEQ ID NO: 325001 - protein, 13 aa, Homo sapiens
  CDR3 for alpha chain variable domain of TCR clone 162501 (TRAV2, TRAJ40)
CAVVTSGTYKYIF

SEQ ID NO: 325002 - protein, 14 aa, Homo sapiens
  CDR3 for beta chain variable domain of TCR clone 162501 (TRBV19, TRBJ2-1)
CASPTCVLSGEQFL

SEQ ID NO: 325003 - protein, 14 aa, Homo sapiens
  CDR3 for alpha chain variable domain of TCR clone 162502 (TRAV12-3, TRAJ10)
SHLPLTVGGNKLTF

SEQ ID NO: 325004 - protein, 15 aa, Homo sapiens
  CDR3 for beta chain variable domain of TCR clone 162502 (TRBV10-2, TRBJ2-6)
CASSEQGTGANVLTF

SEQ ID NO: 325005 - protein, 14 aa, Homo sapiens
  CDR3 for alpha chain variable domain of TCR clone 162503 (TRAV8-3, TRAJ39)
CAVCANNAGNMLTF

SEQ ID NO: 325006 - protein, 12 aa, Homo sapiens
  CDR3 for beta chain variable domain of TCR clone 162503 (TRBV28, TRBJ1-3)
CASVSSGNTIYF

SEQ ID NO: 325007 - protein, 17 aa, Homo sapiens
  CDR3 for alpha chain variable domain of TCR clone 162504 (TRAV4, TRAJ18)
CLVGERSVGSTLVRLYF

SEQ ID NO: 325008 - protein, 18 aa, Homo sapiens
  CDR3 for beta chain variable domain of TCR clone 162504 (TRBV11-2, TRBJ2-3)
CASSLGGASRGAPNTQYF

SEQ ID NO: 325009 - protein, 10 aa, Homo sapiens
  CDR3 for alpha chain variable domain of TCR clone 162505 (TRAV30, TRAJ48)
CGIGNEKLTF

SEQ ID NO: 325010 - protein, 14 aa, Homo sapiens
  CDR3 for beta chain variable domain of TCR clone 162505 (TRBV28, TRBJ2-7)
CASSGLAEPAEQYF

SEQ ID NO: 325011 - protein, 15 aa, Homo sapiens
  CDR3 for alpha chain variable domain of TCR clone 162506 (TRAV12-2, TRAJ23)
CAVKTIYNQGGKLIF

SEQ ID NO: 325012 - protein, 15 aa, Homo sapiens
  CDR3 for beta chain variable domain of TCR clone 162506 (TRBV5-1, TRBJ1-2)
CASSLVGGQSQGYTF

SEQ ID NO: 325013 - protein, 15 aa, Homo sapiens
  CDR3 for alpha chain variable domain of TCR clone 162507 (TRAV23/DV6, TRAJ18)
CAARYRGSTLGRLYF

SEQ ID NO: 325014 - protein, 13 aa, Homo sapiens
  CDR3 for beta chain variable domain of TCR clone 162507 (TRBV7-2, TRBJ2-7)
CAISSPSGSEQYF

SEQ ID NO: 325015 - protein, 13 aa, Homo sapiens
  CDR3 for alpha chain variable domain of TCR clone 162508 (TRAV27, TRAJ29)
CAGAHSGNTPLVF

SEQ ID NO: 325016 - protein, 15 aa, Homo sapiens
  CDR3 for beta chain variable domain of TCR clone 162508 (TRBV19, TRBJ1-1)
CASTSGQIQNTEAFF

SEQ ID NO: 325017 - protein, 14 aa, Homo sapiens
  CDR3 for alpha chain variable domain of TCR clone 162509 (TRAV1-2, TRAJ16)
CAVNRFSDGQKLLF

SEQ ID NO: 325018 - protein, 16 aa, Homo sapiens
  CDR3 for beta chain variable domain of TCR clone 162509 (TRBV4-1, TRBJ1-5)
CASSQGGHTTNHPQHF

SEQ ID NO: 325019 - protein, 12 aa, Homo sapiens
  CDR3 for alpha chain variable domain of TCR clone 162510 (TRAV13-1, TRAJ53)
AASGGSNYKLSF

SEQ ID NO: 325020 - protein, 13 aa, Homo sapiens
  CDR3 for beta chain variable domain of TCR clone 162510 (TRBV2, TRBJ2-7)
CASSVGGSGEQYF

SEQ ID NO: 325021 - protein, 12 aa, Homo sapiens
  CDR3 for alpha chain variable domain of TCR clone 162511 (TRAV10, TRAJ33)
CVSGDSNYQLIW

SEQ ID NO: 325022 - protein, 15 aa, Homo sapiens
  CDR3 for beta chain variable domain of TCR clone 162511 (TRBV6-3, TRBJ2-7)
CASSSPGTVFYEQYF

SEQ ID NO: 325023 - protein, 14 aa, Homo sapiens
  CDR3 for alpha chain variable domain of TCR clone 162512 (TRAV13-2, TRAJ11)
CAETGNSGYSTLPF

SEQ ID NO: 325024 - protein, 16 aa, Homo sapiens
  CDR3 for beta chain variable domain of TCR clone 162512 (TRBV10-3, TRBJ2-1)
CAISGVGDGGGGEQFF

SEQ ID NO: 325025 - protein, 16 aa, Homo sapiens
  CDR3 for alpha chain variable domain of TCR clone 162513 (TRAV3, TRAJ37)
CAVRGKGSGNTGKLIF

SEQ ID NO: 325026 - protein, 20 aa, Homo sapiens
  CDR3 for beta chain variable domain of TCR clone 162513 (TRBV7-8, TRBJ2-2)
CASSHLFPGAAIHITGELFF

SEQ ID NO: 325027 - protein, 12 aa, Homo sapiens
  CDR3 for alpha chain variable domain of TCR clone 162514 (TRAV1-2, TRAJ33)
CAALDSNYQLIW

SEQ ID NO: 325028 - protein, 13 aa, Homo sapiens
  CDR3 for beta chain variable domain of TCR clone 162514 (TRBV7-2, TRBJ2-7)
CASSFGQEKEQYF

SEQ ID NO: 325029 - protein, 16 aa, Homo sapiens
  CDR3 for alpha chain variable domain of TCR clone 162515 (TRAV26-1, TRAJ53)
GIVRVAMGGSNYKLTF

SEQ ID NO: 325030 - protein, 12 aa, Homo sapiens
  CDR3 for beta chain variable domain of TCR clone 162515 (TRBV7-9, TRBJ1-5)
CASSPQGQPQHF

SEQ ID NO: 325031 - protein, 14 aa, Homo sapiens
  CDR3 for alpha chain variable domain of TCR clone 162516 (TRAV1-2, TRAJ16)
CAVNRFSDGQKLPF

SEQ ID NO: 325032 - protein, 16 aa, Homo sapiens
  CDR3 for beta chain variable domain of TCR clone 162516 (TRBV13, TRBJ2-2)
CASSPRTGEHTGELFF

SEQ ID NO: 325033 - protein, 12 aa, Homo sapiens
  CDR3 for alpha chain variable domain of TCR clone 162517 (TRAV26-2, TRAJ21)
CILKGNFNKFYF

SEQ ID NO: 325034 - protein, 16 aa, Homo sapiens
  CDR3 for beta chain variable domain of TCR clone 162517 (TRBV12-4, TRBJ1-1)
CASSLGTGGTEAFLDK

SEQ ID NO: 325035 - protein, 15 aa, Homo sapiens
  CDR3 for alpha chain variable domain of TCR clone 162518 (TRAV13-1, TRAJ18)
CAASGGGSTLGRLYF

SEQ ID NO: 325036 - protein, 13 aa, Homo sapiens
  CDR3 for beta chain variable domain of TCR clone 162518 (TRBV18, TRBJ2-1)
RASGLASNNEQFF

SEQ ID NO: 325037 - protein, 14 aa, Homo sapiens
  CDR3 for alpha chain variable domain of TCR clone 162519 (TRAV12-2, TRAJ44)
CAVNPAGTASKLTF

SEQ ID NO: 325038 - protein, 16 aa, Homo sapiens
  CDR3 for beta chain variable domain of TCR clone 162519 (TRBV2, TRBJ2-6)
CASSEVGGAGANILTF

SEQ ID NO: 325039 - protein, 12 aa, Homo sapiens
  CDR3 for alpha chain variable domain of TCR clone 162520 (TRAV12-3, TRAJ21)
CAMFNNFNKFYF

SEQ ID NO: 325040 - protein, 16 aa, Homo sapiens
  CDR3 for beta chain variable domain of TCR clone 162520 (TRBV7-9, TRBJ1-2)
CASSLAPVRAAYGYTF

SEQ ID NO: 325041 - protein, 13 aa, Homo sapiens
  CDR3 for alpha chain variable domain of TCR clone 162521 (TRAV35, TRAJ44)
CAGRSGTASKLTF

SEQ ID NO: 325042 - protein, 16 aa, Homo sapiens
  CDR3 for beta chain variable domain of TCR clone 162521 (TRBV24-1, TRBJ2-3)
CATSGPGTGATDTQYF

SEQ ID NO: 325043 - protein, 14 aa, Homo sapiens
  CDR3 for alpha chain variable domain of TCR clone 162522 (TRAV12-2, TRAJ45)
CAVNIGGGADVLTF

SEQ ID NO: 325044 - protein, 17 aa, Homo sapiens
  CDR3 for beta chain variable domain of TCR clone 162522 (TRBV7-8, TRBJ2-6)
CASSAGTGGAGANVLTF

SEQ ID NO: 325045 - protein, 20 aa, Homo sapiens
  CDR3 for alpha chain variable domain of TCR clone 162523 (TRAV26-2, TRAJ29)
CILRDRSSTQRNSGNTPLVF

SEQ ID NO: 325046 - protein, 13 aa, Homo sapiens
  CDR3 for beta chain variable domain of TCR clone 162523 (TRBV7-9, TRBJ2-7)
CASSLKAGQEQYF

SEQ ID NO: 325047 - protein, 17 aa, Homo sapiens
  CDR3 for alpha chain variable domain of TCR clone 162524 (TRAV3, TRAJ6)
CAVRDGPRAGGSYIPTI

SEQ ID NO: 325048 - protein, 13 aa, Homo sapiens
  CDR3 for beta chain variable domain of TCR clone 162524 (TRBV27, TRBJ2-1)
CASRTLGVGEQFF

SEQ ID NO: 325049 - protein, 15 aa, Homo sapiens
  CDR3 for alpha chain variable domain of TCR clone 162525 (TRAV4, TRAJ36)
CLVGDRQTGANKLFF

SEQ ID NO: 325050 - protein, 15 aa, Homo sapiens
  CDR3 for beta chain variable domain of TCR clone 162525 (TRBV7-6, TRBJ2-1)
CASSSLAGEGNEQFF

SEQ ID NO: 325051 - protein, 11 aa, Homo sapiens
  CDR3 for alpha chain variable domain of TCR clone 162526 (TRAV1-2, TRAJ11)
CAVRGYSTLTF

SEQ ID NO: 325052 - protein, 13 aa, Homo sapiens
  CDR3 for beta chain variable domain of TCR clone 162526 (TRBV19, TRBJ2-1)
CASTNSDVGEQFF

SEQ ID NO: 325053 - protein, 14 aa, Homo sapiens
  CDR3 for alpha chain variable domain of TCR clone 162527 (TRAV1-2, TRAJ16)
CAVNRFSDGQKLLF

SEQ ID NO: 325054 - protein, 13 aa, Homo sapiens
  CDR3 for beta chain variable domain of TCR clone 162527 (TRBV7-7, TRBJ2-2)
CQQHKGLGRGAVF

SEQ ID NO: 325055 - protein, 16 aa, Homo sapiens
  CDR3 for alpha chain variable domain of TCR clone 162528 (TRAV17, TRAJ28)
CATDEYSGAGSYQLTF

SEQ ID NO: 325056 - protein, 13 aa, Homo sapiens
  CDR3 for beta chain variable domain of TCR clone 162528 (TRBV7-9, TRBJ1-2)
CAIRTGPNYGYTF

SEQ ID NO: 325057 - protein, 17 aa, Homo sapiens
  CDR3 for alpha chain variable domain of TCR clone 162529 (TRAV4, TRAJ13)
FIVGVQGSSGGYQKVTF

SEQ ID NO: 325058 - protein, 18 aa, Homo sapiens
  CDR3 for beta chain variable domain of TCR clone 162529 (TRBV15, TRBJ2-3)
CATSRDGARSWDTDTQYF

SEQ ID NO: 325059 - protein, 16 aa, Homo sapiens
  CDR3 for alpha chain variable domain of TCR clone 162530 (TRAV30, TRAJ24)
CGTEIVDADSWGKFQF

SEQ ID NO: 325060 - protein, 12 aa, Homo sapiens
  CDR3 for beta chain variable domain of TCR clone 162530 (TRBV7-9, TRBJ2-1)
CASDTSYNEQFF

SEQ ID NO: 325061 - protein, 14 aa, Homo sapiens
  CDR3 for alpha chain variable domain of TCR clone 162531 (TRAV9-2, TRAJ39)
CALYIYNAGNMLTF

SEQ ID NO: 325062 - protein, 13 aa, Homo sapiens
  CDR3 for beta chain variable domain of TCR clone 162531 (TRBV19, TRBJ2-3)
CATWDKITDTQYF

SEQ ID NO: 325063 - protein, 12 aa, Homo sapiens
  CDR3 for alpha chain variable domain of TCR clone 162532 (TRAV17, TRAJ53)
CATEGSNYKLTF

SEQ ID NO: 325064 - protein, 18 aa, Homo sapiens
  CDR3 for beta chain variable domain of TCR clone 162532 (TRBV5-1, TRBJ2-3)
RSSLWTSGGITTPDTQYF

SEQ ID NO: 325065 - protein, 13 aa, Homo sapiens
  CDR3 for alpha chain variable domain of TCR clone 162533 (TRAV21, TRAJ22)
CAVKSGSASQLTF

SEQ ID NO: 325066 - protein, 19 aa, Homo sapiens
  CDR3 for beta chain variable domain of TCR clone 162533 (TRBV6-5, TRBJ2-7)
CASSYSNRGSNPFTYEQYF

SEQ ID NO: 325067 - protein, 14 aa, Homo sapiens
  CDR3 for alpha chain variable domain of TCR clone 162534 (TRAV8-3, TRAJ6)
CAVSSSGGSYIPTF

SEQ ID NO: 325068 - protein, 14 aa, Homo sapiens
  CDR3 for beta chain variable domain of TCR clone 162534 (TRBV2, TRBJ2-1)
CASSEPSSYNEQFF

SEQ ID NO: 325069 - protein, 10 aa, Homo sapiens
  CDR3 for alpha chain variable domain of TCR clone 162535 (TRAV13-2, TRAJ49)
CADTGNQFYF

SEQ ID NO: 325070 - protein, 16 aa, Homo sapiens
  CDR3 for beta chain variable domain of TCR clone 162535 (TRBV7-3, TRBJ2-2)
CASSLKRGTLSGELFF

SEQ ID NO: 325071 - protein, 16 aa, Homo sapiens
  CDR3 for alpha chain variable domain of TCR clone 162536 (TRAV12-3, TRAJ53)
CAMSPGSGGSNYKLTF

SEQ ID NO: 325072 - protein, 11 aa, Homo sapiens
  CDR3 for beta chain variable domain of TCR clone 162536 (TRBV29-1, TRBJ2-5)
CSEDRTDTQYF

SEQ ID NO: 325073 - protein, 18 aa, Homo sapiens
  CDR3 for alpha chain variable domain of TCR clone 162537 (TRAV13-1, TRAJ20)
CAAPMALQAQLWSRNPSN

SEQ ID NO: 325074 - protein, 14 aa, Homo sapiens
  CDR3 for beta chain variable domain of TCR clone 162537 (TRBV28, TRBJ2-5)
CASTGAGGVETQYF

SEQ ID NO: 325075 - protein, 11 aa, Homo sapiens
  CDR3 for alpha chain variable domain of TCR clone 162538 (TRAV12-1, TRAJ30)
CVVNGQDKIIF

SEQ ID NO: 325076 - protein, 17 aa, Homo sapiens
  CDR3 for beta chain variable domain of TCR clone 162538 (TRBV20-1, TRBJ2-1)
CSARDPLAGVWDNEQFF

SEQ ID NO: 325077 - protein, 14 aa, Homo sapiens
  CDR3 for alpha chain variable domain of TCR clone 162539 (TRAV23/DV6, TRAJ36)
CAASRRTGANNLFF

SEQ ID NO: 325078 - protein, 14 aa, Homo sapiens
  CDR3 for beta chain variable domain of TCR clone 162539 (TRBV6-1, TRBJ1-2)
CASSDTGASYGYAF

SEQ ID NO: 325079 - protein, 12 aa, Homo sapiens
  CDR3 for alpha chain variable domain of TCR clone 162540 (TRAV12-3, TRAJ17)
CAMTLTGNKLTF

SEQ ID NO: 325080 - protein, 15 aa, Homo sapiens
  CDR3 for beta chain variable domain of TCR clone 162540 (TRBV6-5, TRBJ2-5)
CASSPLAGGIETQYF

SEQ ID NO: 325081 - protein, 12 aa, Homo sapiens
  CDR3 for alpha chain variable domain of TCR clone 162541 (TRAV8-3, TRAJ26)
CAVGAGGQNFIF

SEQ ID NO: 325082 - protein, 14 aa, Homo sapiens
  CDR3 for beta chain variable domain of TCR clone 162541 (TRBV5-1, TRBJ1-5)
CASSLGQGAQPQHF

SEQ ID NO: 325083 - protein, 16 aa, Homo sapiens
  CDR3 for alpha chain variable domain of TCR clone 162542 (TRAV12-1, TRAJ48)
CVVNMVSNFGNEKLTF

SEQ ID NO: 325084 - protein, 18 aa, Homo sapiens
  CDR3 for beta chain variable domain of TCR clone 162542 (TRBV11-2, TRBJ2-6)
CASSLTPFLGTGANALTF

SEQ ID NO: 325085 - protein, 11 aa, Homo sapiens
  CDR3 for alpha chain variable domain of TCR clone 162543 (TRAV12-3, TRAJ43)
CAMSVSNDMRF

SEQ ID NO: 325086 - protein, 15 aa, Homo sapiens
  CDR3 for beta chain variable domain of TCR clone 162543 (TRBV4-1, TRBJ2-7)
CASSQNTGRLYEQYF

SEQ ID NO: 325087 - protein, 18 aa, Homo sapiens
  CDR3 for alpha chain variable domain of TCR clone 162544 (TRAV21, TRAJ52)
CAVRPSPAGGTSYVKLTF

SEQ ID NO: 325088 - protein, 13 aa, Homo sapiens
  CDR3 for beta chain variable domain of TCR clone 162544 (TRBV20-1, TRBJ1-1)
CSARVGGNTEAFF

SEQ ID NO: 325089 - protein, 16 aa, Homo sapiens
  CDR3 for alpha chain variable domain of TCR clone 162545 (TRAV35, TRAJ20)
CWADPSSGFNDYRLSF

SEQ ID NO: 325090 - protein, 16 aa, Homo sapiens
  CDR3 for beta chain variable domain of TCR clone 162545 (TRBV4-3, TRBJ1-6)
CASSAQPGGEGSPLHF

SEQ ID NO: 325091 - protein, 15 aa, Homo sapiens
  CDR3 for alpha chain variable domain of TCR clone 162546 (TRAV3, TRAJ13)
CAVRVDSGGYQKVTF

SEQ ID NO: 325092 - protein, 15 aa, Homo sapiens
  CDR3 for beta chain variable domain of TCR clone 162546 (TRBV5-7, TRBJ1-2)
CASSLGVAANYGYAF

SEQ ID NO: 325093 - protein, 16 aa, Homo sapiens
  CDR3 for alpha chain variable domain of TCR clone 162547 (TRAV30, TRAJ24)
CGPEIVDADSWGKFRF

SEQ ID NO: 325094 - protein, 14 aa, Homo sapiens
  CDR3 for beta chain variable domain of TCR clone 162547 (TRBV12-5, TRBJ2-5)
CASGSRTHQETQYF

SEQ ID NO: 325095 - protein, 15 aa, Homo sapiens
  CDR3 for alpha chain variable domain of TCR clone 162548 (TRAV26-1, TRAJ22)
CIVRVSFWFCKATDL

SEQ ID NO: 325096 - protein, 13 aa, Homo sapiens
  CDR3 for beta chain variable domain of TCR clone 162548 (TRBV10-3, TRBJ2-3)
CAIRGDRADTQYF

SEQ ID NO: 325097 - protein, 14 aa, Homo sapiens
  CDR3 for alpha chain variable domain of TCR clone 162549 (TRAV38-1, TRAJ29)
CAFITPSGNTPLAF

SEQ ID NO: 325098 - protein, 15 aa, Homo sapiens
  CDR3 for beta chain variable domain of TCR clone 162549 (TRBV5-1, TRBJ2-1)
CASSPPRAPYNEQSF

SEQ ID NO: 325099 - protein, 14 aa, Homo sapiens
  CDR3 for alpha chain variable domain of TCR clone 162550 (TRAV17, TRAJ6)
CATNPAGGSYIPTF

SEQ ID NO: 325100 - protein, 12 aa, Homo sapiens
  CDR3 for beta chain variable domain of TCR clone 162550 (TRBV7-8, TRBJ2-7)
CASSLGGREQYF

SEQ ID NO: 325101 - protein, 16 aa, Homo sapiens
  CDR3 for alpha chain variable domain of TCR clone 162551 (TRAV30, TRAJ24)
CGTEIVDADSWGKFQF

SEQ ID NO: 325102 - protein, 15 aa, Homo sapiens
  CDR3 for beta chain variable domain of TCR clone 162551 (TRBV13, TRBJ2-1)
CASSLLSGLNNEQFF

SEQ ID NO: 325103 - protein, 14 aa, Homo sapiens
  CDR3 for alpha chain variable domain of TCR clone 162552 (TRAV13-1, TRAJ12)
CSNYPMYSSYKLIF

SEQ ID NO: 325104 - protein, 11 aa, Homo sapiens
  CDR3 for beta chain variable domain of TCR clone 162552 (TRBV20-1, TRBJ2-1)
CSLSSGSEQFF

SEQ ID NO: 325105 - protein, 19 aa, Homo sapiens
  CDR3 for alpha chain variable domain of TCR clone 162553 (TRAV1-2, TRAJ26)
CLLPLCCERPDNYGQNFVF

SEQ ID NO: 325106 - protein, 13 aa, Homo sapiens
  CDR3 for beta chain variable domain of TCR clone 162553 (TRBV7-6, TRBJ2-3)
CASSLRSDNTQYF

SEQ ID NO: 325107 - protein, 13 aa, Homo sapiens
  CDR3 for alpha chain variable domain of TCR clone 162554 (TRAV3, TRAJ21)
CAVREPDFNRFYF

SEQ ID NO: 325108 - protein, 14 aa, Homo sapiens
  CDR3 for beta chain variable domain of TCR clone 162554 (TRBV4-1, TRBJ2-2)
CASSQAVNTGELFF

SEQ ID NO: 325109 - protein, 14 aa, Homo sapiens
  CDR3 for alpha chain variable domain of TCR clone 162555 (TRAV12-3, TRAJ57)
CARSAWGGSDKLVL

SEQ ID NO: 325110 - protein, 14 aa, Homo sapiens
  CDR3 for beta chain variable domain of TCR clone 162555 (TRBV18, TRBJ2-5)
CASSPGVSQETQYF

SEQ ID NO: 325111 - protein, 12 aa, Homo sapiens
  CDR3 for alpha chain variable domain of TCR clone 162556 (TRAV12-3, TRAJ17)
CAMTLTGNKLTF

SEQ ID NO: 325112 - protein, 15 aa, Homo sapiens
  CDR3 for beta chain variable domain of TCR clone 162556 (TRBV20-1, TRBJ2-7)
CSARGRVSGMDEQFF

SEQ ID NO: 325113 - protein, 13 aa, Homo sapiens
  CDR3 for alpha chain variable domain of TCR clone 162557 (TRAV21, TRAJ27)
CAARPVNAGKSTF

SEQ ID NO: 325114 - protein, 17 aa, Homo sapiens
  CDR3 for beta chain variable domain of TCR clone 162557 (TRBV6-5, TRBJ2-3)
CASSYGTSLYKSDTQYF

SEQ ID NO: 325115 - protein, 15 aa, Homo sapiens
  CDR3 for alpha chain variable domain of TCR clone 162558 (TRAV21, TRAJ24)
CAARSSTDSWGKLQF

SEQ ID NO: 325116 - protein, 14 aa, Homo sapiens
  CDR3 for beta chain variable domain of TCR clone 162558 (TRBV7-7, TRBJ2-2)
CATRQDSDTGELFF

SEQ ID NO: 325117 - protein, 13 aa, Homo sapiens
  CDR3 for alpha chain variable domain of TCR clone 162559 (TRAV12-3, TRAJ47)
CAMKKENGNKLVF

SEQ ID NO: 325118 - protein, 15 aa, Homo sapiens
  CDR3 for beta chain variable domain of TCR clone 162559 (TRBV20-1, TRBJ2-7)
CSARDRVSGMDEQYF

SEQ ID NO: 325119 - protein, 14 aa, Homo sapiens
  CDR3 for alpha chain variable domain of TCR clone 162560 (TRAV23/DV6, TRAJ8)
CAASKNTGFQQLVF

SEQ ID NO: 325120 - protein, 16 aa, Homo sapiens
  CDR3 for beta chain variable domain of TCR clone 162560 (TRBV4-1, TRBJ2-6)
CASSQVGDPGANVLTF

SEQ ID NO: 325121 - protein, 11 aa, Homo sapiens
  CDR3 for alpha chain variable domain of TCR clone 162561 (TRAV1-1, TRAJ23)
CAVRQGGKLIF

SEQ ID NO: 325122 - protein, 15 aa, Homo sapiens
  CDR3 for beta chain variable domain of TCR clone 162561 (TRBV7-2, TRBJ2-1)
CASSFSGGIYNEQFF

SEQ ID NO: 325123 - protein, 13 aa, Homo sapiens
  CDR3 for alpha chain variable domain of TCR clone 162562 (TRAV26-1, TRAJ30)
CIVNMKRDGKIIF

SEQ ID NO: 325124 - protein, 16 aa, Homo sapiens
  CDR3 for beta chain variable domain of TCR clone 162562 (TRBV16, TRBJ2-7)
CASSRPAGGSSYEQYF

SEQ ID NO: 325125 - protein, 14 aa, Homo sapiens
  CDR3 for alpha chain variable domain of TCR clone 162563 (TRAV17, TRAJ57)
CATDPQGGSEKLVF

SEQ ID NO: 325126 - protein, 13 aa, Homo sapiens
  CDR3 for beta chain variable domain of TCR clone 162563 (TRBV20-1, TRBJ1-1)
CSAFDKENTEAFF

SEQ ID NO: 325127 - protein, 17 aa, Homo sapiens
  CDR3 for alpha chain variable domain of TCR clone 162564 (TRAV12-2, TRAJ36)
CAVKDNLFFGTGTRLTV

SEQ ID NO: 325128 - protein, 13 aa, Homo sapiens
  CDR3 for beta chain variable domain of TCR clone 162564 (TRBV4-2, TRBJ1-1)
CASSQAGNTEAFF

SEQ ID NO: 325129 - protein, 16 aa, Homo sapiens
  CDR3 for alpha chain variable domain of TCR clone 162565 (TRAV8-2, TRAJ7)
CVVSEGPYYGNTRLAF

SEQ ID NO: 325130 - protein, 15 aa, Homo sapiens
  CDR3 for beta chain variable domain of TCR clone 162565 (TRBV27, TRBJ2-3)
CASSLGLAATDTQYF

SEQ ID NO: 325131 - protein, 15 aa, Homo sapiens
  CDR3 for alpha chain variable domain of TCR clone 162566 (TRAV13-1, TRAJ57)
CAASNTQGGSEKLGF

SEQ ID NO: 325132 - protein, 13 aa, Homo sapiens
  CDR3 for beta chain variable domain of TCR clone 162566 (TRBV7-6, TRBJ1-5)
CASSQGPNRPQHF

SEQ ID NO: 325133 - protein, 15 aa, Homo sapiens
  CDR3 for alpha chain variable domain of TCR clone 162567 (TRAV40, TRAJ53)
CLLTNSGGSNYKLTF

SEQ ID NO: 325134 - protein, 15 aa, Homo sapiens
  CDR3 for beta chain variable domain of TCR clone 162567 (TRBV7-6, TRBJ2-2)
CASRRTSGNTGELFF

SEQ ID NO: 325135 - protein, 17 aa, Homo sapiens
  CDR3 for alpha chain variable domain of TCR clone 162568 (TRAV3, TRAJ42)
CAVRDRDYGGSQGNLIF

SEQ ID NO: 325136 - protein, 14 aa, Homo sapiens
  CDR3 for beta chain variable domain of TCR clone 162568 (TRBV25-1, TRBJ1-1)
CASSHLGGNTEAFF

SEQ ID NO: 325137 - protein, 16 aa, Homo sapiens
  CDR3 for alpha chain variable domain of TCR clone 162569 (TRAV12-3, TRAJ53)
CAMSPGSGGSNYKLTF

SEQ ID NO: 325138 - protein, 16 aa, Homo sapiens
  CDR3 for beta chain variable domain of TCR clone 162569 (TRBV4-2, TRBJ1-1)
CASSPSPGRAAPEAFF

SEQ ID NO: 325139 - protein, 12 aa, Homo sapiens
  CDR3 for alpha chain variable domain of TCR clone 162570 (TRAV3, TRAJ20)
CAVRDPDYKLSF

SEQ ID NO: 325140 - protein, 15 aa, Homo sapiens
  CDR3 for beta chain variable domain of TCR clone 162570 (TRBV6-3, TRBJ2-7)
CASSSPGPVFYEQYF

SEQ ID NO: 325141 - protein, 14 aa, Homo sapiens
  CDR3 for alpha chain variable domain of TCR clone 162571 (TRAV21, TRAJ32)
CAVWDGGATNKLIF

SEQ ID NO: 325142 - protein, 16 aa, Homo sapiens
  CDR3 for beta chain variable domain of TCR clone 162571 (TRBV7-8, TRBJ2-4)
CASSAERTLAKNIQYF

SEQ ID NO: 325143 - protein, 15 aa, Homo sapiens
  CDR3 for alpha chain variable domain of TCR clone 162572 (TRAV12-3, TRAJ6)
CAMSATSGGSYIPTF

SEQ ID NO: 325144 - protein, 13 aa, Homo sapiens
  CDR3 for beta chain variable domain of TCR clone 162572 (TRBV12-4, TRBJ2-3)
CASRLGLGDTQYF

SEQ ID NO: 325145 - protein, 14 aa, Homo sapiens
  CDR3 for alpha chain variable domain of TCR clone 162573 (TRAV2, TRAJ9)
CAVEDLSGGFKTSF

SEQ ID NO: 325146 - protein, 15 aa, Homo sapiens
  CDR3 for beta chain variable domain of TCR clone 162573 (TRBV19, TRBJ1-1)
CASRETGGVNTEAFF

SEQ ID NO: 325147 - protein, 18 aa, Homo sapiens
  CDR3 for alpha chain variable domain of TCR clone 162574 (TRAV26-1, TRAJ45)
CCVLFIVRVVGGADGLTF

SEQ ID NO: 325148 - protein, 16 aa, Homo sapiens
  CDR3 for beta chain variable domain of TCR clone 162574 (TRBV7-9, TRBJ1-1)
CASSLTQVRSNTEAFF

SEQ ID NO: 325149 - protein, 12 aa, Homo sapiens
  CDR3 for alpha chain variable domain of TCR clone 162575 (TRAV27, TRAJ42)
CAGGGSQGYLIF

SEQ ID NO: 325150 - protein, 13 aa, Homo sapiens
  CDR3 for beta chain variable domain of TCR clone 162575 (TRBV19, TRBJ2-7)
CASSIRSSYEQYF

SEQ ID NO: 325151 - protein, 16 aa, Homo sapiens
  CDR3 for alpha chain variable domain of TCR clone 162576 (TRAV26-1, TRAJ23)
CIVRVERYNQGGKLIF

SEQ ID NO: 325152 - protein, 13 aa, Homo sapiens
  CDR3 for beta chain variable domain of TCR clone 162576 (TRBV7-9, TRBJ2-7)
CASSFAGAYEQYF

SEQ ID NO: 325153 - protein, 14 aa, Homo sapiens
  CDR3 for alpha chain variable domain of TCR clone 162577 (TRAV1-2, TRAJ16)
CAVNRFLDGQKLLF

SEQ ID NO: 325154 - protein, 15 aa, Homo sapiens
  CDR3 for beta chain variable domain of TCR clone 162577 (TRBV9, TRBJ1-6)
CASSVAGAGDSPLHF

SEQ ID NO: 325155 - protein, 17 aa, Homo sapiens
  CDR3 for alpha chain variable domain of TCR clone 162578 (TRAV16, TRAJ58)
CITVLSNGETRGSRLTF

SEQ ID NO: 325156 - protein, 17 aa, Homo sapiens
  CDR3 for beta chain variable domain of TCR clone 162578 (TRBV18, TRBJ2-1)
CGSSKGLSGGADNEQFF

SEQ ID NO: 325157 - protein, 13 aa, Homo sapiens
  CDR3 for alpha chain variable domain of TCR clone 162579 (TRAV12-1, TRAJ5)
CGFTDTGRRALTF

SEQ ID NO: 325158 - protein, 14 aa, Homo sapiens
  CDR3 for beta chain variable domain of TCR clone 162579 (TRBV27, TRBJ1-1)
CASSLLSGLSGAFF

SEQ ID NO: 325159 - protein, 13 aa, Homo sapiens
  CDR3 for alpha chain variable domain of TCR clone 162580 (TRAV27, TRAJ3)
ASLRGSSASKIIF

SEQ ID NO: 325160 - protein, 14 aa, Homo sapiens
  CDR3 for beta chain variable domain of TCR clone 162580 (TRBV28, TRBJ1-3)
CSSMGWASGNTIYF

SEQ ID NO: 325161 - protein, 13 aa, Homo sapiens
  CDR3 for alpha chain variable domain of TCR clone 162581 (TRAV17, TRAJ40)
CAGALGGTSQYIF

SEQ ID NO: 325162 - protein, 16 aa, Homo sapiens
  CDR3 for beta chain variable domain of TCR clone 162581 (TRBV11-2, TRBJ1-2)
CASSLDTGGADYGYTF

SEQ ID NO: 325163 - protein, 10 aa, Homo sapiens
  CDR3 for alpha chain variable domain of TCR clone 162582 (TRAV12-3, TRAJ49)
RAMNDDQFYF

SEQ ID NO: 325164 - protein, 16 aa, Homo sapiens
  CDR3 for beta chain variable domain of TCR clone 162582 (TRBV19, TRBJ2-2)
CASRSPGTGATGELFF

SEQ ID NO: 325165 - protein, 14 aa, Homo sapiens
  CDR3 for alpha chain variable domain of TCR clone 162583 (TRAV12-3, TRAJ10)
SHLPLTGGRNKLTF

SEQ ID NO: 325166 - protein, 13 aa, Homo sapiens
  CDR3 for beta chain variable domain of TCR clone 162583 (TRBV20-1, TRBJ2-2)
CSASAAGTGELFF

SEQ ID NO: 325167 - protein, 14 aa, Homo sapiens
  CDR3 for alpha chain variable domain of TCR clone 162584 (TRAV12-2, TRAJ17)
CAVLFKAAGNELTF

SEQ ID NO: 325168 - protein, 15 aa, Homo sapiens
  CDR3 for beta chain variable domain of TCR clone 162584 (TRBV12-4, TRBJ2-5)
CASSPPTGLQETQYF

SEQ ID NO: 325169 - protein, 17 aa, Homo sapiens
  CDR3 for alpha chain variable domain of TCR clone 162585 (TRAV1-2, TRAJ9)
CLLPLCCLKYWRLQTIF

SEQ ID NO: 325170 - protein, 15 aa, Homo sapiens
  CDR3 for beta chain variable domain of TCR clone 162585 (TRBV7-2, TRBJ2-1)
CASTHGTGIYNEQFF

SEQ ID NO: 325171 - protein, 15 aa, Homo sapiens
  CDR3 for alpha chain variable domain of TCR clone 162586 (TRAV13-1, TRAJ27)
CAAGGGNTNAGKSTF

SEQ ID NO: 325172 - protein, 15 aa, Homo sapiens
  CDR3 for beta chain variable domain of TCR clone 162586 (TRBV12-4, TRBJ1-5)
CASTRQGSGNQPQHF

SEQ ID NO: 325173 - protein, 12 aa, Homo sapiens
  CDR3 for alpha chain variable domain of TCR clone 162587 (TRAV12-1, TRAJ40)
CVVYSGTYNYIF

SEQ ID NO: 325174 - protein, 13 aa, Homo sapiens
  CDR3 for beta chain variable domain of TCR clone 162587 (TRBV28, TRBJ2-7)
CAGAQQGLDEQYF

SEQ ID NO: 325175 - protein, 15 aa, Homo sapiens
  CDR3 for alpha chain variable domain of TCR clone 162588 (TRAV2, TRAJ9)
CDVEDRGTGGFKTIL

SEQ ID NO: 325176 - protein, 16 aa, Homo sapiens
  CDR3 for beta chain variable domain of TCR clone 162588 (TRBV24-1, TRBJ2-3)
CATSDPGTGATDTQYF

SEQ ID NO: 325177 - protein, 16 aa, Homo sapiens
  CDR3 for alpha chain variable domain of TCR clone 162589 (TRAV13-1, TRAJ52)
CAAIMRGGTSYGKLTF

SEQ ID NO: 325178 - protein, 15 aa, Homo sapiens
  CDR3 for beta chain variable domain of TCR clone 162589 (TRBV7-9, TRBJ1-6)
CASSSPGRGISPLHF

SEQ ID NO: 325179 - protein, 12 aa, Homo sapiens
  CDR3 for alpha chain variable domain of TCR clone 162590 (TRAV3, TRAJ34)
CAVRGNTDTLIF

SEQ ID NO: 325180 - protein, 13 aa, Homo sapiens
  CDR3 for beta chain variable domain of TCR clone 162590 (TRBV19, TRBJ2-1)
CASSIGTGNEQFF

SEQ ID NO: 325181 - protein, 15 aa, Homo sapiens
  CDR3 for alpha chain variable domain of TCR clone 162591 (TRAV26-1, TRAJ44)
CIVRIGTGTASKLTF

SEQ ID NO: 325182 - protein, 15 aa, Homo sapiens
  CDR3 for beta chain variable domain of TCR clone 162591 (TRBV7-3, TRBJ2-1)
CASSPQRGGYNEQFF

SEQ ID NO: 325183 - protein, 16 aa, Homo sapiens
  CDR3 for alpha chain variable domain of TCR clone 162592 (TRAV16, TRAJ42)
CARQMNYGGSQGNLIF

SEQ ID NO: 325184 - protein, 15 aa, Homo sapiens
  CDR3 for beta chain variable domain of TCR clone 162592 (TRBV20-1, TRBJ2-7)
CSAREGRDSLYEQYF

SEQ ID NO: 325185 - protein, 12 aa, Homo sapiens
  CDR3 for alpha chain variable domain of TCR clone 162593 (TRAV26-1, TRAJ36)
CIVRVRADNLFF

SEQ ID NO: 325186 - protein, 13 aa, Homo sapiens
  CDR3 for beta chain variable domain of TCR clone 162593 (TRBV24-1, TRBJ2-2)
CATSDWSTGELFF

SEQ ID NO: 325187 - protein, 15 aa, Homo sapiens
  CDR3 for alpha chain variable domain of TCR clone 162594 (TRAV2, TRAJ22)
CAVPSRGGSARQLTF

SEQ ID NO: 325188 - protein, 15 aa, Homo sapiens
  CDR3 for beta chain variable domain of TCR clone 162594 (TRBV11-3, TRBJ2-7)
CASSPGPASSYEQYF

SEQ ID NO: 325189 - protein, 14 aa, Homo sapiens
  CDR3 for alpha chain variable domain of TCR clone 162595 (TRAV17, TRAJ45)
WATASGGGADGLTF

SEQ ID NO: 325190 - protein, 15 aa, Homo sapiens
  CDR3 for beta chain variable domain of TCR clone 162595 (TRBV11-2, TRBJ2-1)
CASSRNRGLMYEQFF

SEQ ID NO: 325191 - protein, 16 aa, Homo sapiens
  CDR3 for alpha chain variable domain of TCR clone 162596 (TRAV26-1, )
CIDIQNPDPAVYQLRD

SEQ ID NO: 325192 - protein, 15 aa, Homo sapiens
  CDR3 for beta chain variable domain of TCR clone 162596 (TRBV20-1, TRBJ2-7)
CSAESGTSGAYERYF

SEQ ID NO: 325193 - protein, 18 aa, Homo sapiens
  CDR3 for alpha chain variable domain of TCR clone 162597 (TRAV3, TRAJ42)
CAVRDERTGGGSQGNLIF

SEQ ID NO: 325194 - protein, 16 aa, Homo sapiens
  CDR3 for beta chain variable domain of TCR clone 162597 (TRBV9, TRBJ1-2)
CASSVAKGRVDYGYTF

SEQ ID NO: 325195 - protein, 15 aa, Homo sapiens
  CDR3 for alpha chain variable domain of TCR clone 162598 (TRAV26-1, TRAJ29)
CIVRVEGSGNTPLVF

SEQ ID NO: 325196 - protein, 14 aa, Homo sapiens
  CDR3 for beta chain variable domain of TCR clone 162598 (TRBV11-2, TRBJ2-5)
CASRPLAGRETQYF

SEQ ID NO: 325197 - protein, 14 aa, Homo sapiens
  CDR3 for alpha chain variable domain of TCR clone 162599 (TRAV13-1, TRAJ35)
CAARKGGFGNVLHC

SEQ ID NO: 325198 - protein, 13 aa, Homo sapiens
  CDR3 for beta chain variable domain of TCR clone 162599 (TRBV7-3, TRBJ1-1)
CASSQDWGAEAFF

SEQ ID NO: 325199 - protein, 12 aa, Homo sapiens
  CDR3 for alpha chain variable domain of TCR clone 162600 (TRAV2, TRAJ8)
CAVGQGFQKLVF

SEQ ID NO: 325200 - protein, 17 aa, Homo sapiens
  CDR3 for beta chain variable domain of TCR clone 162600 (TRBV28, TRBJ2-3)
CASSPTPAGGRVDTQYL

SEQ ID NO: 325201 - protein, 14 aa, Homo sapiens
  CDR3 for alpha chain variable domain of TCR clone 162601 (TRAV29/DV5, TRAJ57)
CAARSQGGSEKLVF

SEQ ID NO: 325202 - protein, 14 aa, Homo sapiens
  CDR3 for beta chain variable domain of TCR clone 162601 (TRBV6-1, TRBJ1-3)
CASVQGGGGNTIYF

SEQ ID NO: 325203 - protein, 13 aa, Homo sapiens
  CDR3 for alpha chain variable domain of TCR clone 162602 (TRAV13-1, TRAJ5)
CAASDKGRRALTF

SEQ ID NO: 325204 - protein, 14 aa, Homo sapiens
  CDR3 for beta chain variable domain of TCR clone 162602 (TRBV4-2, TRBJ2-1)
GASGLDRAYNEQFF

SEQ ID NO: 325205 - protein, 16 aa, Homo sapiens
  CDR3 for alpha chain variable domain of TCR clone 162603 (TRAV12-3, TRAJ53)
CAMSPGSGGSNYKLTF

SEQ ID NO: 325206 - protein, 11 aa, Homo sapiens
  CDR3 for beta chain variable domain of TCR clone 162603 (TRBV29-1, TRBJ2-5)
RSEDRTGTQYF

SEQ ID NO: 325207 - protein, 11 aa, Homo sapiens
  CDR3 for alpha chain variable domain of TCR clone 162604 (TRAV12-2, TRAJ29)
CAVILRSPLVF

SEQ ID NO: 325208 - protein, 16 aa, Homo sapiens
  CDR3 for beta chain variable domain of TCR clone 162604 (TRBV19, TRBJ1-5)
CASSIDRGGPRQPQHF

SEQ ID NO: 325209 - protein, 16 aa, Homo sapiens
  CDR3 for alpha chain variable domain of TCR clone 162605 (TRAV21, TRAJ17)
CAVRPGEESAGNKLTF

SEQ ID NO: 325210 - protein, 14 aa, Homo sapiens
  CDR3 for beta chain variable domain of TCR clone 162605 (TRBV19, TRBJ2-1)
CASPTFVLSGEQFF

SEQ ID NO: 325211 - protein, 14 aa, Homo sapiens
  CDR3 for alpha chain variable domain of TCR clone 162606 (TRAV26-1, TRAJ8)
CIVRVDTGFQRLVV

SEQ ID NO: 325212 - protein, 15 aa, Homo sapiens
  CDR3 for beta chain variable domain of TCR clone 162606 (TRBV10-2, TRBJ2-7)
CASWNRGQATYEQYF

SEQ ID NO: 325213 - protein, 14 aa, Homo sapiens
  CDR3 for alpha chain variable domain of TCR clone 162607 (TRAV12-2, TRAJ33)
CAVKRARSNYQLIW

SEQ ID NO: 325214 - protein, 16 aa, Homo sapiens
  CDR3 for beta chain variable domain of TCR clone 162607 (TRBV28, TRBJ2-1)
CASSSPEYPRDNEQFF

SEQ ID NO: 325215 - protein, 14 aa, Homo sapiens
  CDR3 for alpha chain variable domain of TCR clone 162608 (TRAV30, TRAJ33)
YGTVAPRSNYQLIW

SEQ ID NO: 325216 - protein, 13 aa, Homo sapiens
  CDR3 for beta chain variable domain of TCR clone 162608 (TRBV4-2, TRBJ1-1)
CASSQAGNTEAFF

SEQ ID NO: 325217 - protein, 15 aa, Homo sapiens
  CDR3 for alpha chain variable domain of TCR clone 162609 (TRAV17, TRAJ52)
CATEAGGTSYGKLTF

SEQ ID NO: 325218 - protein, 12 aa, Homo sapiens
  CDR3 for beta chain variable domain of TCR clone 162609 (TRBV11-2, TRBJ2-2)
CASSLGGGELFF

SEQ ID NO: 325219 - protein, 14 aa, Homo sapiens
  CDR3 for alpha chain variable domain of TCR clone 162610 (TRAV2, TRAJ37)
TTVPGSSNTGKLLF

SEQ ID NO: 325220 - protein, 14 aa, Homo sapiens
  CDR3 for beta chain variable domain of TCR clone 162610 (TRBV7-8, TRBJ2-7)
CASSLWQSSYEQYF

SEQ ID NO: 325221 - protein, 13 aa, Homo sapiens
  CDR3 for alpha chain variable domain of TCR clone 162611 (TRAV8-6, TRAJ34)
CAVSDQCTDKLIF

SEQ ID NO: 325222 - protein, 14 aa, Homo sapiens
  CDR3 for beta chain variable domain of TCR clone 162611 (TRBV12-4, TRBJ1-1)
CASTWTGHDTEAFS

SEQ ID NO: 325223 - protein, 15 aa, Homo sapiens
  CDR3 for alpha chain variable domain of TCR clone 162612 (TRAV1-2, TRAJ28)
CAVQYSGAGSYQLTF

SEQ ID NO: 325224 - protein, 16 aa, Homo sapiens
  CDR3 for beta chain variable domain of TCR clone 162612 (TRBV28, TRBJ2-7)
CTSVPAKRGGVYEQYF

SEQ ID NO: 325225 - protein, 15 aa, Homo sapiens
  CDR3 for alpha chain variable domain of TCR clone 162613 (TRAV21, TRAJ40)
CAVRPQTSGTYKYIF

SEQ ID NO: 325226 - protein, 13 aa, Homo sapiens
  CDR3 for beta chain variable domain of TCR clone 162613 (TRBV7-9, TRBJ2-3)
CASSPGSTDTQYF

SEQ ID NO: 325227 - protein, 15 aa, Homo sapiens
  CDR3 for alpha chain variable domain of TCR clone 162614 (TRAV27, TRAJ38)
CAARRNAGNNRKLIW

SEQ ID NO: 325228 - protein, 13 aa, Homo sapiens
  CDR3 for beta chain variable domain of TCR clone 162614 (TRBV7-9, TRBJ1-2)
CASSLKQNYGYSF

SEQ ID NO: 325229 - protein, 15 aa, Homo sapiens
  CDR3 for alpha chain variable domain of TCR clone 162615 (TRAV35, TRAJ50)
CAGQLRKTSYDKVIF

SEQ ID NO: 325230 - protein, 12 aa, Homo sapiens
  CDR3 for beta chain variable domain of TCR clone 162615 (TRBV5-1, TRBJ2-5)
CATSLGLETQYF

SEQ ID NO: 325231 - protein, 12 aa, Homo sapiens
  CDR3 for alpha chain variable domain of TCR clone 162616 (TRAV20, TRAJ37)
CALPSNTGKLIF

SEQ ID NO: 325232 - protein, 14 aa, Homo sapiens
  CDR3 for beta chain variable domain of TCR clone 162616 (TRBV19, TRBJ2-1)
CASPTFVLSGEQFV

SEQ ID NO: 325233 - protein, 12 aa, Homo sapiens
  CDR3 for alpha chain variable domain of TCR clone 162617 (TRAV21, TRAJ33)
CAKMDSNYQLIW

SEQ ID NO: 325234 - protein, 15 aa, Homo sapiens
  CDR3 for beta chain variable domain of TCR clone 162617 (TRBV11-2, TRBJ2-1)
CASSRNRGLMYEQFF

SEQ ID NO: 325235 - protein, 15 aa, Homo sapiens
  CDR3 for alpha chain variable domain of TCR clone 162618 (TRAV16, TRAJ20)
CALKGGLRADYKLSF

SEQ ID NO: 325236 - protein, 16 aa, Homo sapiens
  CDR3 for beta chain variable domain of TCR clone 162618 (TRBV11-3, TRBJ2-2)
CASSSRTSPGTGELLF

SEQ ID NO: 325237 - protein, 15 aa, Homo sapiens
  CDR3 for alpha chain variable domain of TCR clone 162619 (TRAV18, TRAJ13)
CAVRPTSGGYQKVTF

SEQ ID NO: 325238 - protein, 18 aa, Homo sapiens
  CDR3 for beta chain variable domain of TCR clone 162619 (TRBV11-3, TRBJ2-1)
CASSSYPGGRDSYNEQFF

SEQ ID NO: 325239 - protein, 16 aa, Homo sapiens
  CDR3 for alpha chain variable domain of TCR clone 162620 (TRAV16, TRAJ4)
CALSRMFSGGYNKLIF

SEQ ID NO: 325240 - protein, 16 aa, Homo sapiens
  CDR3 for beta chain variable domain of TCR clone 162620 (TRBV7-3, TRBJ2-3)
CASSLSGYRPEDTQYF

SEQ ID NO: 325241 - protein, 16 aa, Homo sapiens
  CDR3 for alpha chain variable domain of TCR clone 162621 (TRAV30, TRAJ24)
CGTEIVDADSWGKFQF

SEQ ID NO: 325242 - protein, 14 aa, Homo sapiens
  CDR3 for beta chain variable domain of TCR clone 162621 (TRBV10-3, TRBJ1-6)
CAISVDGDESPLHF

SEQ ID NO: 325243 - protein, 12 aa, Homo sapiens
  CDR3 for alpha chain variable domain of TCR clone 162622 (TRAV8-3, TRAJ27)
CAVGAEAGKSTF

SEQ ID NO: 325244 - protein, 14 aa, Homo sapiens
  CDR3 for beta chain variable domain of TCR clone 162622 (TRBV2, TRBJ2-1)
CASRVIVGHDEQFF

SEQ ID NO: 325245 - protein, 13 aa, Homo sapiens
  CDR3 for alpha chain variable domain of TCR clone 162623 (TRAV12-3, TRAJ49)
CAMSRNTGNQFYF

SEQ ID NO: 325246 - protein, 16 aa, Homo sapiens
  CDR3 for beta chain variable domain of TCR clone 162623 (TRBV5-8, TRBJ2-2)
CASSLISPGGAGELFF

SEQ ID NO: 325247 - protein, 15 aa, Homo sapiens
  CDR3 for alpha chain variable domain of TCR clone 162624 (TRAV17, TRAJ56)
CATDANTGANSKLTF

SEQ ID NO: 325248 - protein, 12 aa, Homo sapiens
  CDR3 for beta chain variable domain of TCR clone 162624 (TRBV7-8, TRBJ2-7)
CASSRGDREQYF

SEQ ID NO: 325249 - protein, 12 aa, Homo sapiens
  CDR3 for alpha chain variable domain of TCR clone 162625 (TRAV3, TRAJ20)
CAVRDGDYRLSF

SEQ ID NO: 325250 - protein, 14 aa, Homo sapiens
  CDR3 for beta chain variable domain of TCR clone 162625 (TRBV11-1, TRBJ1-1)
CASSLEHPNTEAFF

SEQ ID NO: 325251 - protein, 15 aa, Homo sapiens
  CDR3 for alpha chain variable domain of TCR clone 162626 (TRAV26-1, TRAJ29)
CIVRVEGSGNTPLVF

SEQ ID NO: 325252 - protein, 13 aa, Homo sapiens
  CDR3 for beta chain variable domain of TCR clone 162626 (TRBV28, TRBJ1-1)
CASSEQGWTEAFF

SEQ ID NO: 325253 - protein, 18 aa, Homo sapiens
  CDR3 for alpha chain variable domain of TCR clone 162627 (TRAV26-2, TRAJ33)
CCVLLHPEEPASNYQLIW

SEQ ID NO: 325254 - protein, 13 aa, Homo sapiens
  CDR3 for beta chain variable domain of TCR clone 162627 (TRBV24-1, TRBJ2-2)
FATSDWSTGELFF

SEQ ID NO: 325255 - protein, 13 aa, Homo sapiens
  CDR3 for alpha chain variable domain of TCR clone 162628 (TRAV36/DV7, TRAJ53)
CALSGGSNYKLTF

SEQ ID NO: 325256 - protein, 13 aa, Homo sapiens
  CDR3 for beta chain variable domain of TCR clone 162628 (TRBV4-1, TRBJ2-2)
CASSQENTGELFF

SEQ ID NO: 325257 - protein, 12 aa, Homo sapiens
  CDR3 for alpha chain variable domain of TCR clone 162629 (TRAV12-1, TRAJ40)
CVVYSGTYKYIF

SEQ ID NO: 325258 - protein, 13 aa, Homo sapiens
  CDR3 for beta chain variable domain of TCR clone 162629 (TRBV9, TRBJ2-7)
CASSVAEYYEQYF

SEQ ID NO: 325259 - protein, 14 aa, Homo sapiens
  CDR3 for alpha chain variable domain of TCR clone 162630 (TRAV13-2, TRAJ43)
CAEIPTYNKNEMRF

SEQ ID NO: 325260 - protein, 15 aa, Homo sapiens
  CDR3 for beta chain variable domain of TCR clone 162630 (TRBV7-9, TRBJ2-2)
CASGPLDTFPGELFF

SEQ ID NO: 325261 - protein, 12 aa, Homo sapiens
  CDR3 for alpha chain variable domain of TCR clone 162631 (TRAV1-1, TRAJ30)
CAVRGRDDKIIF

SEQ ID NO: 325262 - protein, 15 aa, Homo sapiens
  CDR3 for beta chain variable domain of TCR clone 162631 (TRBV2, TRBJ2-1)
CASSEEREGDNEQFF

SEQ ID NO: 325263 - protein, 16 aa, Homo sapiens
  CDR3 for alpha chain variable domain of TCR clone 162632 (TRAV14/DV4, TRAJ54)
CAMREGRIRGAQKLVF

SEQ ID NO: 325264 - protein, 13 aa, Homo sapiens
  CDR3 for beta chain variable domain of TCR clone 162632 (TRBV4-2, TRBJ1-2)
CASSLSASGGYTF

SEQ ID NO: 325265 - protein, 14 aa, Homo sapiens
  CDR3 for alpha chain variable domain of TCR clone 162633 (TRAV12-3, TRAJ54)
CAMKGPEGAQKLVF

SEQ ID NO: 325266 - protein, 15 aa, Homo sapiens
  CDR3 for beta chain variable domain of TCR clone 162633 (TRBV20-1, TRBJ2-1)
CSAISGTSGSDEQFF

SEQ ID NO: 325267 - protein, 16 aa, Homo sapiens
  CDR3 for alpha chain variable domain of TCR clone 162634 (TRAV21, TRAJ52)
CAVSDAGGTSYGKLTF

SEQ ID NO: 325268 - protein, 13 aa, Homo sapiens
  CDR3 for beta chain variable domain of TCR clone 162634 (TRBV7-3, TRBJ2-5)
CASCFRGSQTQYF

SEQ ID NO: 325269 - protein, 13 aa, Homo sapiens
  CDR3 for alpha chain variable domain of TCR clone 162635 (TRAV13-2, TRAJ11)
CAENYSRYSTLPF

SEQ ID NO: 325270 - protein, 13 aa, Homo sapiens
  CDR3 for beta chain variable domain of TCR clone 162635 (TRBV12-4, TRBJ1-4)
CASAMGHNEKLFF

SEQ ID NO: 325271 - protein, 15 aa, Homo sapiens
  CDR3 for alpha chain variable domain of TCR clone 162636 (TRAV10, TRAJ34)
CVVSGKHRQAHLWVW

SEQ ID NO: 325272 - protein, 14 aa, Homo sapiens
  CDR3 for beta chain variable domain of TCR clone 162636 (TRBV19, TRBJ2-1)
CASPTFVLSGELFF

SEQ ID NO: 325273 - protein, 14 aa, Homo sapiens
  CDR3 for alpha chain variable domain of TCR clone 162637 (TRAV26-1, TRAJ26)
CIVRATFLGQNFGF

SEQ ID NO: 325274 - protein, 16 aa, Homo sapiens
  CDR3 for beta chain variable domain of TCR clone 162637 (TRBV12-4, TRBJ2-7)
CASRSAGTGPSYEQYF

SEQ ID NO: 325275 - protein, 23 aa, Homo sapiens
  CDR3 for alpha chain variable domain of TCR clone 162638 (TRAV12-2, TRAJ36)
SLLIRDSQPSDSATLERANNLFF

SEQ ID NO: 325276 - protein, 18 aa, Homo sapiens
  CDR3 for beta chain variable domain of TCR clone 162638 (TRBV6-6, TRBJ1-5)
CASNRGWDPTGSNQPQHF

SEQ ID NO: 325277 - protein, 14 aa, Homo sapiens
  CDR3 for alpha chain variable domain of TCR clone 162639 (TRAV12-2, TRAJ9)
CAVNALEGGFKTIF

SEQ ID NO: 325278 - protein, 12 aa, Homo sapiens
  CDR3 for beta chain variable domain of TCR clone 162639 (TRBV12-4, TRBJ1-3)
CASSFSGNTIYF

SEQ ID NO: 325279 - protein, 14 aa, Homo sapiens
  CDR3 for alpha chain variable domain of TCR clone 162640 (TRAV12-3, TRAJ10)
SHLPLTGGGNKLTF

SEQ ID NO: 325280 - protein, 14 aa, Homo sapiens
  CDR3 for beta chain variable domain of TCR clone 162640 (TRBV7-9, TRBJ2-3)
CASSLEQGTNTQYF

SEQ ID NO: 325281 - protein, 14 aa, Homo sapiens
  CDR3 for alpha chain variable domain of TCR clone 162641 (TRAV1-2, TRAJ16)
CAVNRFSDGLKLLF

SEQ ID NO: 325282 - protein, 15 aa, Homo sapiens
  CDR3 for beta chain variable domain of TCR clone 162641 (TRBV2, TRBJ2-2)
CASSGFGAGTGELFF

SEQ ID NO: 325283 - protein, 11 aa, Homo sapiens
  CDR3 for alpha chain variable domain of TCR clone 162642 (TRAV1-1, TRAJ39)
CAPGAGNMLTF

SEQ ID NO: 325284 - protein, 14 aa, Homo sapiens
  CDR3 for beta chain variable domain of TCR clone 162642 (TRBV12-5, TRBJ2-5)
CASGSRTHQETQYF

SEQ ID NO: 325285 - protein, 11 aa, Homo sapiens
  CDR3 for alpha chain variable domain of TCR clone 162643 (TRAV3, TRAJ21)
CAVGNLNKFYF

SEQ ID NO: 325286 - protein, 16 aa, Homo sapiens
  CDR3 for beta chain variable domain of TCR clone 162643 (TRBV19, TRBJ2-1)
CASSKAGPSSYIEQFF

SEQ ID NO: 325287 - protein, 23 aa, Homo sapiens
  CDR3 for alpha chain variable domain of TCR clone 162644 (TRAV36/DV7, TRAJ50)
CAVEPENLLRQDIQNPDPAVYQL

SEQ ID NO: 325288 - protein, 13 aa, Homo sapiens
  CDR3 for beta chain variable domain of TCR clone 162644 (TRBV20-1, TRBJ1-3)
CSAGAYSGNTIYF

SEQ ID NO: 325289 - protein, 13 aa, Homo sapiens
  CDR3 for alpha chain variable domain of TCR clone 162645 (TRAV9-2, TRAJ49)
CSLRPNTGNQFYF

SEQ ID NO: 325290 - protein, 15 aa, Homo sapiens
  CDR3 for beta chain variable domain of TCR clone 162645 (TRBV5-1, TRBJ2-1)
CASSPPRAPYNEQFF

SEQ ID NO: 325291 - protein, 18 aa, Homo sapiens
  CDR3 for alpha chain variable domain of TCR clone 162646 (TRAV26-1, TRAJ52)
CIVRVARAGGTSYGKLTF

SEQ ID NO: 325292 - protein, 13 aa, Homo sapiens
  CDR3 for beta chain variable domain of TCR clone 162646 (TRBV7-8, TRBJ1-2)
CASSAQSYYGYTF

SEQ ID NO: 325293 - protein, 14 aa, Homo sapiens
  CDR3 for alpha chain variable domain of TCR clone 162647 (TRAV16, TRAJ33)
CALSAMDSSYQLIW

SEQ ID NO: 325294 - protein, 15 aa, Homo sapiens
  CDR3 for beta chain variable domain of TCR clone 162647 (TRBV28, TRBJ2-7)
CASSLEAYPIYEQYF

SEQ ID NO: 325295 - protein, 16 aa, Homo sapiens
  CDR3 for alpha chain variable domain of TCR clone 162648 (TRAV3, TRAJ10)
WAVRDMRAGGGNKLTF

SEQ ID NO: 325296 - protein, 15 aa, Homo sapiens
  CDR3 for beta chain variable domain of TCR clone 162648 (TRBV9, TRBJ1-6)
CASSVAGTGDSPLHF

SEQ ID NO: 325297 - protein, 16 aa, Homo sapiens
  CDR3 for alpha chain variable domain of TCR clone 162649 (TRAV12-3, TRAJ50)
CAMRDRMKTSYDKVIF

SEQ ID NO: 325298 - protein, 13 aa, Homo sapiens
  CDR3 for beta chain variable domain of TCR clone 162649 (TRBV4-1, TRBJ2-3)
CASSLDFTDTQYF

SEQ ID NO: 325299 - protein, 12 aa, Homo sapiens
  CDR3 for alpha chain variable domain of TCR clone 162650 (TRAV12-3, TRAJ17)
CAMTLTGNKLTF

SEQ ID NO: 325300 - protein, 14 aa, Homo sapiens
  CDR3 for beta chain variable domain of TCR clone 162650 (TRBV12-4, TRBJ1-1)
CAGSLGTGGTEAFF

SEQ ID NO: 325301 - protein, 12 aa, Homo sapiens
  CDR3 for alpha chain variable domain of TCR clone 162651 (TRAV3, TRAJ20)
CAVRDPDYKLSL

SEQ ID NO: 325302 - protein, 13 aa, Homo sapiens
  CDR3 for beta chain variable domain of TCR clone 162651 (TRBV9, TRBJ2-1)
CASSVGQGGEQFF

SEQ ID NO: 325303 - protein, 12 aa, Homo sapiens
  CDR3 for alpha chain variable domain of TCR clone 162652 (TRAV2, TRAJ34)
CAVERNTDKPIF

SEQ ID NO: 325304 - protein, 23 aa, Homo sapiens
  CDR3 for beta chain variable domain of TCR clone 162652 (TRBV7-2, TRBJ2-5)
RRTRPCISGPAASLGGGEETQYF

SEQ ID NO: 325305 - protein, 15 aa, Homo sapiens
  CDR3 for alpha chain variable domain of TCR clone 162653 (TRAV8-4, TRAJ9)
CAVSDLEGGGFKTIF

SEQ ID NO: 325306 - protein, 17 aa, Homo sapiens
  CDR3 for beta chain variable domain of TCR clone 162653 (TRBV7-8, TRBJ2-6)
CASSAGTGGAGANVLTF

SEQ ID NO: 325307 - protein, 10 aa, Homo sapiens
  CDR3 for alpha chain variable domain of TCR clone 162654 (TRAV1-1, TRAJ22)
CAVRDRIFWF

SEQ ID NO: 325308 - protein, 12 aa, Homo sapiens
  CDR3 for beta chain variable domain of TCR clone 162654 (TRBV5-5, TRBJ2-5)
CASSYFGETQYF

SEQ ID NO: 325309 - protein, 12 aa, Homo sapiens
  CDR3 for alpha chain variable domain of TCR clone 162655 (TRAV3, TRAJ43)
CAVRDPKNDMRF

SEQ ID NO: 325310 - protein, 12 aa, Homo sapiens
  CDR3 for beta chain variable domain of TCR clone 162655 (TRBV24-1, TRBJ1-1)
CATSDSDRGAFF

SEQ ID NO: 325311 - protein, 13 aa, Homo sapiens
  CDR3 for alpha chain variable domain of TCR clone 162656 (TRAV8-6, TRAJ49)
CAVITNTGNQFYF

SEQ ID NO: 325312 - protein, 12 aa, Homo sapiens
  CDR3 for beta chain variable domain of TCR clone 162656 (TRBV5-4, TRBJ2-5)
CASSSTRETQYF

SEQ ID NO: 325313 - protein, 14 aa, Homo sapiens
  CDR3 for alpha chain variable domain of TCR clone 162657 (TRAV12-3, TRAJ10)
SHLPLTGGGNKLTF

SEQ ID NO: 325314 - protein, 14 aa, Homo sapiens
  CDR3 for beta chain variable domain of TCR clone 162657 (TRBV7-9, TRBJ2-7)
CASSLDGPTDEQYF

SEQ ID NO: 325315 - protein, 14 aa, Homo sapiens
  CDR3 for alpha chain variable domain of TCR clone 162658 (TRAV12-1, TRAJ30)
CVPPGTNRDDKIIF

SEQ ID NO: 325316 - protein, 11 aa, Homo sapiens
  CDR3 for beta chain variable domain of TCR clone 162658 (TRBV4-1, TRBJ2-2)
CASEHTGELFF

SEQ ID NO: 325317 - protein, 13 aa, Homo sapiens
  CDR3 for alpha chain variable domain of TCR clone 162659 (TRAV27, TRAJ45)
CRSSGVGADGRTF

SEQ ID NO: 325318 - protein, 17 aa, Homo sapiens
  CDR3 for beta chain variable domain of TCR clone 162659 (TRBV11-2, TRBJ2-1)
CASSLYPPGVEYNEQFF

SEQ ID NO: 325319 - protein, 14 aa, Homo sapiens
  CDR3 for alpha chain variable domain of TCR clone 162660 (TRAV20, TRAJ42)
CAVQAGGSQGNLIF

SEQ ID NO: 325320 - protein, 14 aa, Homo sapiens
  CDR3 for beta chain variable domain of TCR clone 162660 (TRBV28, TRBJ1-2)
CASRIQGANYRHTF

SEQ ID NO: 325321 - protein, 13 aa, Homo sapiens
  CDR3 for alpha chain variable domain of TCR clone 162661 (TRAV12-3, TRAJ13)
CAMTSGGYQEVTF

SEQ ID NO: 325322 - protein, 13 aa, Homo sapiens
  CDR3 for beta chain variable domain of TCR clone 162661 (TRBV7-9, TRBJ1-2)
CASSLKQNYGYTF

SEQ ID NO: 325323 - protein, 15 aa, Homo sapiens
  CDR3 for alpha chain variable domain of TCR clone 162662 (TRAV8-3, TRAJ20)
CAVEAKGSNDYTLSF

SEQ ID NO: 325324 - protein, 16 aa, Homo sapiens
  CDR3 for beta chain variable domain of TCR clone 162662 (TRBV4-2, TRBJ2-3)
CASSQELAGDTDTQYF

SEQ ID NO: 325325 - protein, 14 aa, Homo sapiens
  CDR3 for alpha chain variable domain of TCR clone 162663 (TRAV26-1, TRAJ38)
CIADNAGNNRKLIW

SEQ ID NO: 325326 - protein, 15 aa, Homo sapiens
  CDR3 for beta chain variable domain of TCR clone 162663 (TRBV7-2, TRBJ1-1)
CASSPQGGANTEAFF

SEQ ID NO: 325327 - protein, 12 aa, Homo sapiens
  CDR3 for alpha chain variable domain of TCR clone 162664 (TRAV16, TRAJ10)
CSRTGGGNKLTF

SEQ ID NO: 325328 - protein, 15 aa, Homo sapiens
  CDR3 for beta chain variable domain of TCR clone 162664 (TRBV5-1, TRBJ2-2)
CASSSQGGNTGELFF

SEQ ID NO: 325329 - protein, 15 aa, Homo sapiens
  CDR3 for alpha chain variable domain of TCR clone 162665 (TRAV17, TRAJ57)
CATGPSQGGSEKLVF

SEQ ID NO: 325330 - protein, 15 aa, Homo sapiens
  CDR3 for beta chain variable domain of TCR clone 162665 (TRBV2, TRBJ1-2)
CASSEIGGANYGYTF

SEQ ID NO: 325331 - protein, 14 aa, Homo sapiens
  CDR3 for alpha chain variable domain of TCR clone 162666 (TRAV2, TRAJ9)
CAVDTNTGGFKTIF

SEQ ID NO: 325332 - protein, 14 aa, Homo sapiens
  CDR3 for beta chain variable domain of TCR clone 162666 (TRBV7-2, TRBJ2-7)
CASSPKTSFYEQYF

SEQ ID NO: 325333 - protein, 15 aa, Homo sapiens
  CDR3 for alpha chain variable domain of TCR clone 162667 (TRAV3, TRAJ17)
CAVSPKEAAGNKLTF

SEQ ID NO: 325334 - protein, 14 aa, Homo sapiens
  CDR3 for beta chain variable domain of TCR clone 162667 (TRBV7-2, TRBJ2-7)
CASSPKTSFYEQYF

SEQ ID NO: 325335 - protein, 13 aa, Homo sapiens
  CDR3 for alpha chain variable domain of TCR clone 162668 (TRAV26-1, TRAJ48)
CIVANFGNEKLTF

SEQ ID NO: 325336 - protein, 11 aa, Homo sapiens
  CDR3 for beta chain variable domain of TCR clone 162668 (TRBV6-1, TRBJ2-1)
CASISSSEQFF

SEQ ID NO: 325337 - protein, 14 aa, Homo sapiens
  CDR3 for alpha chain variable domain of TCR clone 162669 (TRAV12-2, TRAJ53)
CAVKGGGSNYKLTF

SEQ ID NO: 325338 - protein, 14 aa, Homo sapiens
  CDR3 for beta chain variable domain of TCR clone 162669 (TRBV11-2, TRBJ1-3)
CASSPRTGGNTIYF

SEQ ID NO: 325339 - protein, 17 aa, Homo sapiens
  CDR3 for alpha chain variable domain of TCR clone 162670 (TRAV3, TRAJ12)
CAVREIRGMDSSYKLIF

SEQ ID NO: 325340 - protein, 16 aa, Homo sapiens
  CDR3 for beta chain variable domain of TCR clone 162670 (TRBV7-7, TRBJ2-1)
CASSLASGTSYNEQFF

SEQ ID NO: 325341 - protein, 12 aa, Homo sapiens
  CDR3 for alpha chain variable domain of TCR clone 162671 (TRAV17, TRAJ57)
CATDGGSEKLVF

SEQ ID NO: 325342 - protein, 13 aa, Homo sapiens
  CDR3 for beta chain variable domain of TCR clone 162671 (TRBV7-9, TRBJ2-7)
CASNFAGAYEQYF

SEQ ID NO: 325343 - protein, 12 aa, Homo sapiens
  CDR3 for alpha chain variable domain of TCR clone 162672 (TRAV13-1, TRAJ21)
CAAKEGFNKFYF

SEQ ID NO: 325344 - protein, 13 aa, Homo sapiens
  CDR3 for beta chain variable domain of TCR clone 162672 (TRBV19, TRBJ2-5)
CASSIRGRETQYF

SEQ ID NO: 325345 - protein, 13 aa, Homo sapiens
  CDR3 for alpha chain variable domain of TCR clone 162673 (TRAV23/DV6, TRAJ58)
CAASEIGCSRLTC

SEQ ID NO: 325346 - protein, 15 aa, Homo sapiens
  CDR3 for beta chain variable domain of TCR clone 162673 (TRBV19, TRBJ1-1)
CASTSGQIQNTEAFF

SEQ ID NO: 325347 - protein, 15 aa, Homo sapiens
  CDR3 for alpha chain variable domain of TCR clone 162674 (TRAV21, TRAJ53)
CATLNSGGSNYKLTF

SEQ ID NO: 325348 - protein, 14 aa, Homo sapiens
  CDR3 for beta chain variable domain of TCR clone 162674 (TRBV7-3, TRBJ2-1)
CASSLAGGTNEQFF

SEQ ID NO: 325349 - protein, 13 aa, Homo sapiens
  CDR3 for alpha chain variable domain of TCR clone 162675 (TRAV39, TRAJ58)
CAGEETSGSRLTF

SEQ ID NO: 325350 - protein, 13 aa, Homo sapiens
  CDR3 for beta chain variable domain of TCR clone 162675 (TRBV15, TRBJ2-7)
CATSTTGKYAQYF

SEQ ID NO: 325351 - protein, 14 aa, Homo sapiens
  CDR3 for alpha chain variable domain of TCR clone 162676 (TRAV17, TRAJ17)
CATVVRGAGNKLTF

SEQ ID NO: 325352 - protein, 14 aa, Homo sapiens
  CDR3 for beta chain variable domain of TCR clone 162676 (TRBV12-4, TRBJ2-7)
CASSLSGADYEQYF

SEQ ID NO: 325353 - protein, 13 aa, Homo sapiens
  CDR3 for alpha chain variable domain of TCR clone 162677 (TRAV13-1, TRAJ5)
CAASDTAGEHLLL

SEQ ID NO: 325354 - protein, 12 aa, Homo sapiens
  CDR3 for beta chain variable domain of TCR clone 162677 (TRBV28, TRBJ2-3)
CASSLYRDTQYF

SEQ ID NO: 325355 - protein, 13 aa, Homo sapiens
  CDR3 for alpha chain variable domain of TCR clone 162678 (TRAV1-2, TRAJ9)
CAALNTGGFKTIF

SEQ ID NO: 325356 - protein, 13 aa, Homo sapiens
  CDR3 for beta chain variable domain of TCR clone 162678 (TRBV19, TRBJ1-2)
CASSVPGQDGCIF

SEQ ID NO: 325357 - protein, 14 aa, Homo sapiens
  CDR3 for alpha chain variable domain of TCR clone 162679 (TRAV12-1, TRAJ17)
CVVNYKAAGNKLTF

SEQ ID NO: 325358 - protein, 16 aa, Homo sapiens
  CDR3 for beta chain variable domain of TCR clone 162679 (TRBV11-2, TRBJ1-2)
CASSPSGREANYGYTF

SEQ ID NO: 325359 - protein, 15 aa, Homo sapiens
  CDR3 for alpha chain variable domain of TCR clone 162680 (TRAV8-4, TRAJ29)
CAVSEDFRGNTPLVF

SEQ ID NO: 325360 - protein, 15 aa, Homo sapiens
  CDR3 for beta chain variable domain of TCR clone 162680 (TRBV20-1, TRBJ2-7)
CSARDRVSGMDEQYF

SEQ ID NO: 325361 - protein, 15 aa, Homo sapiens
  CDR3 for alpha chain variable domain of TCR clone 162681 (TRAV16, TRAJ12)
CSKWPLRDSSYKLIF

SEQ ID NO: 325362 - protein, 14 aa, Homo sapiens
  CDR3 for beta chain variable domain of TCR clone 162681 (TRBV5-4, TRBJ1-1)
CASSLDSRRDEAFF

SEQ ID NO: 325363 - protein, 11 aa, Homo sapiens
  CDR3 for alpha chain variable domain of TCR clone 162682 (TRAV13-1, TRAJ40)
CAVSGNYKYIF

SEQ ID NO: 325364 - protein, 16 aa, Homo sapiens
  CDR3 for beta chain variable domain of TCR clone 162682 (TRBV10-3, TRBJ2-3)
CAISVSRLALTDTQYF

SEQ ID NO: 325365 - protein, 18 aa, Homo sapiens
  CDR3 for alpha chain variable domain of TCR clone 162683 (TRAV3, TRAJ32)
CAVRDIRGYGGATNELIF

SEQ ID NO: 325366 - protein, 15 aa, Homo sapiens
  CDR3 for beta chain variable domain of TCR clone 162683 (TRBV12-4, TRBJ2-2)
CASSLGVRHTGELFF

SEQ ID NO: 325367 - protein, 12 aa, Homo sapiens
  CDR3 for alpha chain variable domain of TCR clone 162684 (TRAV8-3, TRAJ20)
CAVGANDYKLSL

SEQ ID NO: 325368 - protein, 17 aa, Homo sapiens
  CDR3 for beta chain variable domain of TCR clone 162684 (TRBV13, TRBJ2-3)
CASSLSRVAGGRNTQYF

SEQ ID NO: 325369 - protein, 16 aa, Homo sapiens
  CDR3 for alpha chain variable domain of TCR clone 162685 (TRAV3, TRAJ37)
CAVRGKGSGNTGTLIS

SEQ ID NO: 325370 - protein, 12 aa, Homo sapiens
  CDR3 for beta chain variable domain of TCR clone 162685 (TRBV11-2, TRBJ2-2)
CASSLPTGELFF

SEQ ID NO: 325371 - protein, 14 aa, Homo sapiens
  CDR3 for alpha chain variable domain of TCR clone 162686 (TRAV1-2, TRAJ8)
CAVREDTCFQKLVF

SEQ ID NO: 325372 - protein, 11 aa, Homo sapiens
  CDR3 for beta chain variable domain of TCR clone 162686 (TRBV11-3, TRBJ2-7)
CASSRTCEQYF

SEQ ID NO: 325373 - protein, 12 aa, Homo sapiens
  CDR3 for alpha chain variable domain of TCR clone 162687 (TRAV3, TRAJ31)
CAVRDGNARLMF

SEQ ID NO: 325374 - protein, 14 aa, Homo sapiens
  CDR3 for beta chain variable domain of TCR clone 162687 (TRBV4-1, TRBJ2-2)
CASSQAVNTGELFF

SEQ ID NO: 325375 - protein, 14 aa, Homo sapiens
  CDR3 for alpha chain variable domain of TCR clone 162688 (TRAV29/DV5, TRAJ36)
CAARRQTGANNLFF

SEQ ID NO: 325376 - protein, 15 aa, Homo sapiens
  CDR3 for beta chain variable domain of TCR clone 162688 (TRBV20-1, TRBJ2-7)
CSARDRVSGMDEQYF

SEQ ID NO: 325377 - protein, 16 aa, Homo sapiens
  CDR3 for alpha chain variable domain of TCR clone 162689 (TRAV30, TRAJ24)
CGTEIVDADSWGKFQF

SEQ ID NO: 325378 - protein, 13 aa, Homo sapiens
  CDR3 for beta chain variable domain of TCR clone 162689 (TRBV12-4, TRBJ2-5)
CASSFNRGETQYF

SEQ ID NO: 325379 - protein, 11 aa, Homo sapiens
  CDR3 for alpha chain variable domain of TCR clone 162690 (TRAV2, TRAJ13)
CASGGYQKVTF

SEQ ID NO: 325380 - protein, 16 aa, Homo sapiens
  CDR3 for beta chain variable domain of TCR clone 162690 (TRBV2, TRBJ1-6)
CASSETGEIYNSHLHF

SEQ ID NO: 325381 - protein, 14 aa, Homo sapiens
  CDR3 for alpha chain variable domain of TCR clone 162691 (TRAV17, TRAJ16)
CATADFSDGQKLLF

SEQ ID NO: 325382 - protein, 15 aa, Homo sapiens
  CDR3 for beta chain variable domain of TCR clone 162691 (TRBV18, TRBJ2-1)
CASSPPSASCNEQFF

SEQ ID NO: 325383 - protein, 15 aa, Homo sapiens
  CDR3 for alpha chain variable domain of TCR clone 162692 (TRAV8-3, TRAJ11)
CAVGLLNSGYSTLTL

SEQ ID NO: 325384 - protein, 16 aa, Homo sapiens
  CDR3 for beta chain variable domain of TCR clone 162692 (TRBV7-9, TRBJ1-2)
CASSLGFSSGEDAYTF

SEQ ID NO: 325385 - protein, 14 aa, Homo sapiens
  CDR3 for alpha chain variable domain of TCR clone 162693 (TRAV17, TRAJ45)
CATASGGGADGLTF

SEQ ID NO: 325386 - protein, 12 aa, Homo sapiens
  CDR3 for beta chain variable domain of TCR clone 162693 (TRBV29-1, TRBJ2-3)
CSVTGGADTQYF

SEQ ID NO: 325387 - protein, 15 aa, Homo sapiens
  CDR3 for alpha chain variable domain of TCR clone 162694 (TRAV27, TRAJ38)
CAARRNAGNHRKPIW

SEQ ID NO: 325388 - protein, 13 aa, Homo sapiens
  CDR3 for beta chain variable domain of TCR clone 162694 (TRBV12-5, TRBJ2-3)
CASGDRQSDTQYF

SEQ ID NO: 325389 - protein, 15 aa, Homo sapiens
  CDR3 for alpha chain variable domain of TCR clone 162695 (TRAV8-3, TRAJ11)
CAVGLLNSGYSTLTF

SEQ ID NO: 325390 - protein, 14 aa, Homo sapiens
  CDR3 for beta chain variable domain of TCR clone 162695 (TRBV4-1, TRBJ2-5)
CASSRSGSGESQYF

SEQ ID NO: 325391 - protein, 16 aa, Homo sapiens
  CDR3 for alpha chain variable domain of TCR clone 162696 (TRAV21, TRAJ37)
CAVRTAGSSNTGKLIF

SEQ ID NO: 325392 - protein, 13 aa, Homo sapiens
  CDR3 for beta chain variable domain of TCR clone 162696 (TRBV7-9, TRBJ2-5)
SASLPSGRETQYF

SEQ ID NO: 325393 - protein, 19 aa, Homo sapiens
  CDR3 for alpha chain variable domain of TCR clone 162697 (TRAV1-2, TRAJ26)
CLLPLCCERPDNYGQNFVF

SEQ ID NO: 325394 - protein, 15 aa, Homo sapiens
  CDR3 for beta chain variable domain of TCR clone 162697 (TRBV28, TRBJ2-4)
CAAGSGTLLMGIQYF

SEQ ID NO: 325395 - protein, 12 aa, Homo sapiens
  CDR3 for alpha chain variable domain of TCR clone 162698 (TRAV12-3, TRAJ34)
GAMGYNTGKLIF

SEQ ID NO: 325396 - protein, 14 aa, Homo sapiens
  CDR3 for beta chain variable domain of TCR clone 162698 (TRBV4-1, TRBJ2-2)
CASSQAVNTGELFF

SEQ ID NO: 325397 - protein, 16 aa, Homo sapiens
  CDR3 for alpha chain variable domain of TCR clone 162699 (TRAV12-2, TRAJ13)
CAVKKTGGYQKVTLEL

SEQ ID NO: 325398 - protein, 15 aa, Homo sapiens
  CDR3 for beta chain variable domain of TCR clone 162699 (TRBV28, TRBJ2-5)
CASSPPWSYQETQYF

SEQ ID NO: 325399 - protein, 14 aa, Homo sapiens
  CDR3 for alpha chain variable domain of TCR clone 162700 (TRAV8-3, TRAJ4)
CAVGASGGYNKLIF

SEQ ID NO: 325400 - protein, 16 aa, Homo sapiens
  CDR3 for beta chain variable domain of TCR clone 162700 (TRBV4-3, TRBJ2-2)
CASSHLQGSGTGGLFF

SEQ ID NO: 325401 - protein, 15 aa, Homo sapiens
  CDR3 for alpha chain variable domain of TCR clone 162701 (TRAV3, TRAJ3)
CCERPRYSSASKIIF

SEQ ID NO: 325402 - protein, 16 aa, Homo sapiens
  CDR3 for beta chain variable domain of TCR clone 162701 (TRBV19, TRBJ1-5)
CACSIDRGGPRQPQHF

SEQ ID NO: 325403 - protein, 16 aa, Homo sapiens
  CDR3 for alpha chain variable domain of TCR clone 162702 (TRAV26-1, TRAJ36)
CIVRVPDQTGANNLFF

SEQ ID NO: 325404 - protein, 21 aa, Homo sapiens
  CDR3 for beta chain variable domain of TCR clone 162702 (TRBV6-1, TRBJ1-1)
CASSGVGNSKGISGFDTEAFF

SEQ ID NO: 325405 - protein, 12 aa, Homo sapiens
  CDR3 for alpha chain variable domain of TCR clone 162703 (TRAV13-2, TRAJ8)
SAPWLGFQKLVF

SEQ ID NO: 325406 - protein, 14 aa, Homo sapiens
  CDR3 for beta chain variable domain of TCR clone 162703 (TRBV18, TRBJ2-7)
CASSPRGGAYEQYF

SEQ ID NO: 325407 - protein, 12 aa, Homo sapiens
  CDR3 for alpha chain variable domain of TCR clone 162704 (TRAV27, TRAJ36)
CAGMPGANNLFF

SEQ ID NO: 325408 - protein, 14 aa, Homo sapiens
  CDR3 for beta chain variable domain of TCR clone 162704 (TRBV12-4, TRBJ2-3)
CASSLVPSTDTQYF

SEQ ID NO: 325409 - protein, 19 aa, Homo sapiens
  CDR3 for alpha chain variable domain of TCR clone 162705 (TRAV26-1, TRAJ22)
CCVLLHRWVFSGSARQLTF

SEQ ID NO: 325410 - protein, 19 aa, Homo sapiens
  CDR3 for beta chain variable domain of TCR clone 162705 (TRBV19, TRBJ2-5)
CASSIVQVTDFFLGETQYF

SEQ ID NO: 325411 - protein, 12 aa, Homo sapiens
  CDR3 for alpha chain variable domain of TCR clone 162706 (TRAV13-2, TRAJ23)
CSERHRGGKLIF

SEQ ID NO: 325412 - protein, 16 aa, Homo sapiens
  CDR3 for beta chain variable domain of TCR clone 162706 (TRBV20-1, TRBJ1-4)
CSAPGQGLLANEKLFF

SEQ ID NO: 325413 - protein, 15 aa, Homo sapiens
  CDR3 for alpha chain variable domain of TCR clone 162707 (TRAV2, TRAJ9)
CAVEDRGTGGFKTVF

SEQ ID NO: 325414 - protein, 16 aa, Homo sapiens
  CDR3 for beta chain variable domain of TCR clone 162707 (TRBV7-3, TRBJ2-2)
CASSLKRGTLSGELFF

SEQ ID NO: 325415 - protein, 13 aa, Homo sapiens
  CDR3 for alpha chain variable domain of TCR clone 162708 (TRAV17, TRAJ26)
CATVDNYGQNFVF

SEQ ID NO: 325416 - protein, 16 aa, Homo sapiens
  CDR3 for beta chain variable domain of TCR clone 162708 (TRBV7-3, TRBJ2-2)
CASSLKRGTLSGELFF

SEQ ID NO: 325417 - protein, 12 aa, Homo sapiens
  CDR3 for alpha chain variable domain of TCR clone 162709 (TRAV12-3, TRAJ4)
CAMTGAWTRLAV

SEQ ID NO: 325418 - protein, 14 aa, Homo sapiens
  CDR3 for beta chain variable domain of TCR clone 162709 (TRBV10-3, TRBJ1-1)
CAISDTDRGVEAFF

SEQ ID NO: 325419 - protein, 16 aa, Homo sapiens
  CDR3 for alpha chain variable domain of TCR clone 162710 (TRAV30, TRAJ24)
CGTEIVDADSWGKFQF

SEQ ID NO: 325420 - protein, 17 aa, Homo sapiens
  CDR3 for beta chain variable domain of TCR clone 162710 (TRBV4-1, TRBJ2-3)
CASSQAPPGGDTDTQYF

SEQ ID NO: 325421 - protein, 13 aa, Homo sapiens
  CDR3 for alpha chain variable domain of TCR clone 162711 (TRAV12-3, TRAJ49)
CAMIRNTGNQFYF

SEQ ID NO: 325422 - protein, 16 aa, Homo sapiens
  CDR3 for beta chain variable domain of TCR clone 162711 (TRBV5-4, TRBJ2-2)
CASSLINPGGAGELFF

SEQ ID NO: 325423 - protein, 17 aa, Homo sapiens
  CDR3 for alpha chain variable domain of TCR clone 162712 (TRAV3, TRAJ6)
CAVRDGPRAGGSYIPTF

SEQ ID NO: 325424 - protein, 18 aa, Homo sapiens
  CDR3 for beta chain variable domain of TCR clone 162712 (TRBV20-1, TRBJ2-6)
CSAETTPTHGSGANVLTF

SEQ ID NO: 325425 - protein, 15 aa, Homo sapiens
  CDR3 for alpha chain variable domain of TCR clone 162713 (TRAV3, TRAJ5)
CAVRDRKTGRRALTF

SEQ ID NO: 325426 - protein, 15 aa, Homo sapiens
  CDR3 for beta chain variable domain of TCR clone 162713 (TRBV7-9, TRBJ2-2)
CARGPLDTFPGELFF

SEQ ID NO: 325427 - protein, 11 aa, Homo sapiens
  CDR3 for alpha chain variable domain of TCR clone 162714 (TRAV2, TRAJ33)
CAVDSNYQLIW

SEQ ID NO: 325428 - protein, 14 aa, Homo sapiens
  CDR3 for beta chain variable domain of TCR clone 162714 (TRBV11-2, TRBJ2-3)
CAISRLARTDTQYF

SEQ ID NO: 325429 - protein, 14 aa, Homo sapiens
  CDR3 for alpha chain variable domain of TCR clone 162715 (TRAV20, TRAJ29)
SAVQAWVGNTPLVF

SEQ ID NO: 325430 - protein, 15 aa, Homo sapiens
  CDR3 for beta chain variable domain of TCR clone 162715 (TRBV29-1, TRBJ2-7)
CSVEFFDRGSYEQYF

SEQ ID NO: 325431 - protein, 14 aa, Homo sapiens
  CDR3 for alpha chain variable domain of TCR clone 162716 (TRAV17, TRAJ34)
CSTDSLEGTDKLIF

SEQ ID NO: 325432 - protein, 14 aa, Homo sapiens
  CDR3 for beta chain variable domain of TCR clone 162716 (TRBV7-2, TRBJ2-7)
CASRSQGAAYEQYF

SEQ ID NO: 325433 - protein, 12 aa, Homo sapiens
  CDR3 for alpha chain variable domain of TCR clone 162717 (TRAV13-1, TRAJ21)
CAAKEGFIKFYF

SEQ ID NO: 325434 - protein, 14 aa, Homo sapiens
  CDR3 for beta chain variable domain of TCR clone 162717 (TRBV18, TRBJ2-7)
CASSPRGGAYEQYF

SEQ ID NO: 325435 - protein, 15 aa, Homo sapiens
  CDR3 for alpha chain variable domain of TCR clone 162718 (TRAV12-1, TRAJ44)
CVVDTPQGTASKLTF

SEQ ID NO: 325436 - protein, 11 aa, Homo sapiens
  CDR3 for beta chain variable domain of TCR clone 162718 (TRBV12-4, TRBJ2-3)
CASTATDTQYF

SEQ ID NO: 325437 - protein, 15 aa, Homo sapiens
  CDR3 for alpha chain variable domain of TCR clone 162719 (TRAV26-1, TRAJ29)
CIVRVEGSGNAPLVF

SEQ ID NO: 325438 - protein, 14 aa, Homo sapiens
  CDR3 for beta chain variable domain of TCR clone 162719 (TRBV18, TRBJ2-5)
CASSPGVYQETQYF

SEQ ID NO: 325439 - protein, 16 aa, Homo sapiens
  CDR3 for alpha chain variable domain of TCR clone 162720 (TRAV30, TRAJ24)
CGTEIVDADSWGKFPF

SEQ ID NO: 325440 - protein, 15 aa, Homo sapiens
  CDR3 for beta chain variable domain of TCR clone 162720 (TRBV28, TRBJ2-1)
CASSIIAGGRSEQFF

SEQ ID NO: 325441 - protein, 14 aa, Homo sapiens
  CDR3 for alpha chain variable domain of TCR clone 162721 (TRAV12-3, TRAJ13)
CAMRNSGGYQKVTF

SEQ ID NO: 325442 - protein, 14 aa, Homo sapiens
  CDR3 for beta chain variable domain of TCR clone 162721 (TRBV4-1, TRBJ1-6)
CASSPGSDSSPLYF

SEQ ID NO: 325443 - protein, 17 aa, Homo sapiens
  CDR3 for alpha chain variable domain of TCR clone 162722 (TRAV23/DV6, TRAJ57)
CAASSTLSQGGSEKLVF

SEQ ID NO: 325444 - protein, 14 aa, Homo sapiens
  CDR3 for beta chain variable domain of TCR clone 162722 (TRBV2, TRBJ2-3)
CASSEGQNTDTQYF

SEQ ID NO: 325445 - protein, 12 aa, Homo sapiens
  CDR3 for alpha chain variable domain of TCR clone 162723 (TRAV12-2, TRAJ31)
CAVNTPDASLMF

SEQ ID NO: 325446 - protein, 15 aa, Homo sapiens
  CDR3 for beta chain variable domain of TCR clone 162723 (TRBV4-2, TRBJ1-1)
CASSQDQGLNTEAFF

SEQ ID NO: 325447 - protein, 16 aa, Homo sapiens
  CDR3 for alpha chain variable domain of TCR clone 162724 (TRAV1-2, TRAJ16)
CAVNRFQMARSCSLQG

SEQ ID NO: 325448 - protein, 16 aa, Homo sapiens
  CDR3 for beta chain variable domain of TCR clone 162724 (TRBV3-1, TRBJ2-5)
CASSPGQFNGFGTQYF

SEQ ID NO: 325449 - protein, 15 aa, Homo sapiens
  CDR3 for alpha chain variable domain of TCR clone 162725 (TRAV13-2, TRAJ10)
CAENRDTGGGNKLTF

SEQ ID NO: 325450 - protein, 16 aa, Homo sapiens
  CDR3 for beta chain variable domain of TCR clone 162725 (TRBV2, TRBJ1-3)
CASSRIGGSTGNTIYF

SEQ ID NO: 325451 - protein, 10 aa, Homo sapiens
  CDR3 for alpha chain variable domain of TCR clone 162726 (TRAV5, TRAJ34)
CAEDTDRLIF

SEQ ID NO: 325452 - protein, 12 aa, Homo sapiens
  CDR3 for beta chain variable domain of TCR clone 162726 (TRBV11-2, TRBJ2-2)
CASSLGGGELFF

SEQ ID NO: 325453 - protein, 13 aa, Homo sapiens
  CDR3 for alpha chain variable domain of TCR clone 162727 (TRAV20, TRAJ26)
CAVPTSYGQNFVF

SEQ ID NO: 325454 - protein, 16 aa, Homo sapiens
  CDR3 for beta chain variable domain of TCR clone 162727 (TRBV28, TRBJ2-7)
CPSSSPQGRDVYEQYF

SEQ ID NO: 325455 - protein, 13 aa, Homo sapiens
  CDR3 for alpha chain variable domain of TCR clone 162728 (TRAV21, TRAJ49)
CAVRQSTGNQFYF

SEQ ID NO: 325456 - protein, 15 aa, Homo sapiens
  CDR3 for beta chain variable domain of TCR clone 162728 (TRBV20-1, TRBJ1-1)
CSASRGVTGNTEAFF

SEQ ID NO: 325457 - protein, 15 aa, Homo sapiens
  CDR3 for alpha chain variable domain of TCR clone 162729 (TRAV20, TRAJ6)
CAVRLQSGGSYIPTF

SEQ ID NO: 325458 - protein, 13 aa, Homo sapiens
  CDR3 for beta chain variable domain of TCR clone 162729 (TRBV4-1, TRBJ2-2)
CASSQGNTGELFF

SEQ ID NO: 325459 - protein, 14 aa, Homo sapiens
  CDR3 for alpha chain variable domain of TCR clone 162730 (TRAV8-3, TRAJ23)
CAVIIYNQRGKLIF

SEQ ID NO: 325460 - protein, 15 aa, Homo sapiens
  CDR3 for beta chain variable domain of TCR clone 162730 (TRBV18, TRBJ2-1)
CASSPPSASYNEQFF

SEQ ID NO: 325461 - protein, 12 aa, Homo sapiens
  CDR3 for alpha chain variable domain of TCR clone 162731 (TRAV41, TRAJ58)
CAVETSGSRLTF

SEQ ID NO: 325462 - protein, 15 aa, Homo sapiens
  CDR3 for beta chain variable domain of TCR clone 162731 (TRBV29-1, TRBJ2-6)
CSVGDRGSGANVLAF

SEQ ID NO: 325463 - protein, 13 aa, Homo sapiens
  CDR3 for alpha chain variable domain of TCR clone 162732 (TRAV2, TRAJ40)
CAVVASGTYKYIF

SEQ ID NO: 325464 - protein, 13 aa, Homo sapiens
  CDR3 for beta chain variable domain of TCR clone 162732 (TRBV7-9, TRBJ2-1)
CASSWESYNEQFF

SEQ ID NO: 325465 - protein, 11 aa, Homo sapiens
  CDR3 for alpha chain variable domain of TCR clone 162733 (TRAV2, TRAJ13)
CASGGYQKVTF

SEQ ID NO: 325466 - protein, 16 aa, Homo sapiens
  CDR3 for beta chain variable domain of TCR clone 162733 (TRBV28, TRBJ2-6)
CASSNRRGSGANVLTF

SEQ ID NO: 325467 - protein, 13 aa, Homo sapiens
  CDR3 for alpha chain variable domain of TCR clone 162734 (TRAV8-6, TRAJ16)
CAASRWGGQKLLF

SEQ ID NO: 325468 - protein, 15 aa, Homo sapiens
  CDR3 for beta chain variable domain of TCR clone 162734 (TRBV12-4, TRBJ2-1)
CASSLSTGVSNEQFF

SEQ ID NO: 325469 - protein, 12 aa, Homo sapiens
  CDR3 for alpha chain variable domain of TCR clone 162735 (TRAV8-3, TRAJ26)
CAGDNYGQNFVF

SEQ ID NO: 325470 - protein, 12 aa, Homo sapiens
  CDR3 for beta chain variable domain of TCR clone 162735 (TRBV7-9, TRBJ1-5)
CASSPQGQPQHF

SEQ ID NO: 325471 - protein, 12 aa, Homo sapiens
  CDR3 for alpha chain variable domain of TCR clone 162736 (TRAV12-3, TRAJ17)
CAMTLTGNKLTF

SEQ ID NO: 325472 - protein, 14 aa, Homo sapiens
  CDR3 for beta chain variable domain of TCR clone 162736 (TRBV28, TRBJ2-1)
CASSPGEGGNEQFF

SEQ ID NO: 325473 - protein, 15 aa, Homo sapiens
  CDR3 for alpha chain variable domain of TCR clone 162737 (TRAV21, TRAJ13)
CAVRPTSGGYQKVTF

SEQ ID NO: 325474 - protein, 17 aa, Homo sapiens
  CDR3 for beta chain variable domain of TCR clone 162737 (TRBV11-2, TRBJ2-1)
CASSLYPPGVEYNEQFF

SEQ ID NO: 325475 - protein, 14 aa, Homo sapiens
  CDR3 for alpha chain variable domain of TCR clone 162738 (TRAV9-2, TRAJ39)
CALYIYNAGNMPTF

SEQ ID NO: 325476 - protein, 15 aa, Homo sapiens
  CDR3 for beta chain variable domain of TCR clone 162738 (TRBV3-1, TRBJ2-7)
CASSQVRQGAYEQYF

SEQ ID NO: 325477 - protein, 18 aa, Homo sapiens
  CDR3 for alpha chain variable domain of TCR clone 162739 (TRAV21, TRAJ52)
CAVRPSPAGGTSYGKLTF

SEQ ID NO: 325478 - protein, 14 aa, Homo sapiens
  CDR3 for beta chain variable domain of TCR clone 162739 (TRBV5-5, TRBJ2-3)
CASSLGLAVYEQYF

SEQ ID NO: 325479 - protein, 20 aa, Homo sapiens
  CDR3 for alpha chain variable domain of TCR clone 162740 (TRAV26-1, TRAJ37)
CCLLLHRQINGSSNTGKLIF

SEQ ID NO: 325480 - protein, 13 aa, Homo sapiens
  CDR3 for beta chain variable domain of TCR clone 162740 (TRBV20-1, TRBJ2-7)
CSARTSGNYEQYF

SEQ ID NO: 325481 - protein, 13 aa, Homo sapiens
  CDR3 for alpha chain variable domain of TCR clone 162741 (TRAV12-1, TRAJ6)
CVVFPGGSYIPTF

SEQ ID NO: 325482 - protein, 13 aa, Homo sapiens
  CDR3 for beta chain variable domain of TCR clone 162741 (TRBV12-4, TRBJ1-1)
CASSPGTGFEAFF

SEQ ID NO: 325483 - protein, 16 aa, Homo sapiens
  CDR3 for alpha chain variable domain of TCR clone 162742 (TRAV12-3, TRAJ53)
CAMSPGSGGSSYKLTF

SEQ ID NO: 325484 - protein, 16 aa, Homo sapiens
  CDR3 for beta chain variable domain of TCR clone 162742 (TRBV2, TRBJ2-1)
CASSVGGSLSYNEQFF

SEQ ID NO: 325485 - protein, 15 aa, Homo sapiens
  CDR3 for alpha chain variable domain of TCR clone 162743 (TRAV13-1, TRAJ8)
CAASIPNTGFQKLVF

SEQ ID NO: 325486 - protein, 13 aa, Homo sapiens
  CDR3 for beta chain variable domain of TCR clone 162743 (TRBV5-4, TRBJ1-1)
CASSFQVNNEAFF

SEQ ID NO: 325487 - protein, 14 aa, Homo sapiens
  CDR3 for alpha chain variable domain of TCR clone 162744 (TRAV1-2, TRAJ8)
CALREDTGFQKLVF

SEQ ID NO: 325488 - protein, 14 aa, Homo sapiens
  CDR3 for beta chain variable domain of TCR clone 162744 (TRBV25-1, TRBJ1-1)
CASTHLGGNTEAFF

SEQ ID NO: 325489 - protein, 14 aa, Homo sapiens
  CDR3 for alpha chain variable domain of TCR clone 162745 (TRAV12-2, TRAJ9)
CAVNMEGGGFETIF

SEQ ID NO: 325490 - protein, 14 aa, Homo sapiens
  CDR3 for beta chain variable domain of TCR clone 162745 (TRBV2, TRBJ2-5)
CASSEVLAQETQYF

SEQ ID NO: 325491 - protein, 15 aa, Homo sapiens
  CDR3 for alpha chain variable domain of TCR clone 162746 (TRAV26-2, TRAJ45)
CILRDRVDQEAVLTD

SEQ ID NO: 325492 - protein, 15 aa, Homo sapiens
  CDR3 for beta chain variable domain of TCR clone 162746 (TRBV7-6, TRBJ2-5)
CASSKPTGPQETQYF

SEQ ID NO: 325493 - protein, 14 aa, Homo sapiens
  CDR3 for alpha chain variable domain of TCR clone 162747 (TRAV13-1, TRAJ40)
CAASMTSGTYKYIF

SEQ ID NO: 325494 - protein, 15 aa, Homo sapiens
  CDR3 for beta chain variable domain of TCR clone 162747 (TRBV28, TRBJ2-1)
CASSIIAGGRGEQFF

SEQ ID NO: 325495 - protein, 13 aa, Homo sapiens
  CDR3 for alpha chain variable domain of TCR clone 162748 (TRAV23/DV6, TRAJ22)
CAPYSGSARQLTF

SEQ ID NO: 325496 - protein, 19 aa, Homo sapiens
  CDR3 for beta chain variable domain of TCR clone 162748 (TRBV12-4, TRBJ2-7)
CASSPRSLRTSGRGHEQYF

SEQ ID NO: 325497 - protein, 20 aa, Homo sapiens
  CDR3 for alpha chain variable domain of TCR clone 162749 (TRAV26-1, TRAJ42)
CCVLLHRQIYYGGSQGNLIF

SEQ ID NO: 325498 - protein, 16 aa, Homo sapiens
  CDR3 for beta chain variable domain of TCR clone 162749 (TRBV7-3, TRBJ2-2)
CASSLKRGTLSGELYF

SEQ ID NO: 325499 - protein, 15 aa, Homo sapiens
  CDR3 for alpha chain variable domain of TCR clone 162750 (TRAV8-3, TRAJ27)
CTVGPSKTNAGKSTF

SEQ ID NO: 325500 - protein, 15 aa, Homo sapiens
  CDR3 for beta chain variable domain of TCR clone 162750 (TRBV7-2, TRBJ2-1)
CASSSGLAEGNEQFF

SEQ ID NO: 325501 - protein, 12 aa, Homo sapiens
  CDR3 for alpha chain variable domain of TCR clone 162751 (TRAV21, TRAJ33)
CAKMDSNYQLIW

SEQ ID NO: 325502 - protein, 16 aa, Homo sapiens
  CDR3 for beta chain variable domain of TCR clone 162751 (TRBV19, TRBJ1-6)
CASSVAPVAGNSPLHF

SEQ ID NO: 325503 - protein, 20 aa, Homo sapiens
  CDR3 for alpha chain variable domain of TCR clone 162752 (TRAV26-2, TRAJ48)
CCVLLHPETHFNFGNEKLTF

SEQ ID NO: 325504 - protein, 15 aa, Homo sapiens
  CDR3 for beta chain variable domain of TCR clone 162752 (TRBV20-1, TRBJ2-3)
CSARVEGTYTGTQYF

SEQ ID NO: 325505 - protein, 15 aa, Homo sapiens
  CDR3 for alpha chain variable domain of TCR clone 162753 (TRAV8-3, TRAJ11)
CAVGLLNSGYSTLTF

SEQ ID NO: 325506 - protein, 14 aa, Homo sapiens
  CDR3 for beta chain variable domain of TCR clone 162753 (TRBV7-2, TRBJ2-7)
CASSLYPGRYEQYF

SEQ ID NO: 325507 - protein, 14 aa, Homo sapiens
  CDR3 for alpha chain variable domain of TCR clone 162754 (TRAV12-2, TRAJ53)
CAVKGGGSNYKLTF

SEQ ID NO: 325508 - protein, 19 aa, Homo sapiens
  CDR3 for beta chain variable domain of TCR clone 162754 (TRBV7-9, TRBJ2-6)
CASSLESATVLPGANVLTF

SEQ ID NO: 325509 - protein, 15 aa, Homo sapiens
  CDR3 for alpha chain variable domain of TCR clone 162755 (TRAV3, TRAJ29)
CAVRDLYSGNTPLVF

SEQ ID NO: 325510 - protein, 14 aa, Homo sapiens
  CDR3 for beta chain variable domain of TCR clone 162755 (TRBV7-6, TRBJ2-7)
CASSFRQGADEQYF

SEQ ID NO: 325511 - protein, 11 aa, Homo sapiens
  CDR3 for alpha chain variable domain of TCR clone 162756 (TRAV1-1, TRAJ23)
CAVRQGGKLIF

SEQ ID NO: 325512 - protein, 14 aa, Homo sapiens
  CDR3 for beta chain variable domain of TCR clone 162756 (TRBV3-1, TRBJ2-7)
CASSPSSGTYEQYF

SEQ ID NO: 325513 - protein, 15 aa, Homo sapiens
  CDR3 for alpha chain variable domain of TCR clone 162757 (TRAV26-2, TRAJ13)
CILRDLSGGYQKVTF

SEQ ID NO: 325514 - protein, 14 aa, Homo sapiens
  CDR3 for beta chain variable domain of TCR clone 162757 (TRBV4-1, TRBJ2-3)
CASSQEGSADTQYF

SEQ ID NO: 325515 - protein, 12 aa, Homo sapiens
  CDR3 for alpha chain variable domain of TCR clone 162758 (TRAV12-1, TRAJ34)
CVVAGATDKLLF

SEQ ID NO: 325516 - protein, 12 aa, Homo sapiens
  CDR3 for beta chain variable domain of TCR clone 162758 (TRBV7-9, TRBJ1-1)
CASSLVRGEAFF

SEQ ID NO: 325517 - protein, 21 aa, Homo sapiens
  CDR3 for alpha chain variable domain of TCR clone 162759 (TRAV12-1, TRAJ32)
SSVIQPPTSMNYGGATNKLIF

SEQ ID NO: 325518 - protein, 15 aa, Homo sapiens
  CDR3 for beta chain variable domain of TCR clone 162759 (TRBV7-9, TRBJ2-2)
CASGPLDTFPGELSV

SEQ ID NO: 325519 - protein, 15 aa, Homo sapiens
  CDR3 for alpha chain variable domain of TCR clone 162760 (TRAV8-6, TRAJ57)
CAVSLTQGGSEKLVF

SEQ ID NO: 325520 - protein, 12 aa, Homo sapiens
  CDR3 for beta chain variable domain of TCR clone 162760 (TRBV7-6, TRBJ2-3)
CASSTGTDTQYF

SEQ ID NO: 325521 - protein, 13 aa, Homo sapiens
  CDR3 for alpha chain variable domain of TCR clone 162761 (TRAV8-3, TRAJ43)
CAVVPYNNNDIPF

SEQ ID NO: 325522 - protein, 17 aa, Homo sapiens
  CDR3 for beta chain variable domain of TCR clone 162761 (TRBV7-7, TRBJ1-1)
CVSIGDRPNLGVTEAFF

SEQ ID NO: 325523 - protein, 13 aa, Homo sapiens
  CDR3 for alpha chain variable domain of TCR clone 162762 (TRAV12-1, TRAJ11)
CVVNRAGYSTLTL

SEQ ID NO: 325524 - protein, 15 aa, Homo sapiens
  CDR3 for beta chain variable domain of TCR clone 162762 (TRBV7-3, TRBJ2-2)
CASSETGQGTGELFF

SEQ ID NO: 325525 - protein, 16 aa, Homo sapiens
  CDR3 for alpha chain variable domain of TCR clone 162763 (TRAV29/DV5, TRAJ36)
CAASAHYQSGANNLFF

SEQ ID NO: 325526 - protein, 14 aa, Homo sapiens
  CDR3 for beta chain variable domain of TCR clone 162763 (TRBV19, TRBJ2-1)
CASPTFVLSGEQFF

SEQ ID NO: 325527 - protein, 16 aa, Homo sapiens
  CDR3 for alpha chain variable domain of TCR clone 162764 (TRAV30, TRAJ24)
CGTEIVGAESWGKFKF

SEQ ID NO: 325528 - protein, 15 aa, Homo sapiens
  CDR3 for beta chain variable domain of TCR clone 162764 (TRBV7-9, TRBJ1-4)
CASSARTGGKEKLFF

SEQ ID NO: 325529 - protein, 16 aa, Homo sapiens
  CDR3 for alpha chain variable domain of TCR clone 162765 (TRAV1-2, TRAJ10)
CAVRGVLTGGGNKLTF

SEQ ID NO: 325530 - protein, 14 aa, Homo sapiens
  CDR3 for beta chain variable domain of TCR clone 162765 (TRBV7-9, TRBJ2-1)
CASRPTGLRNEQFF

SEQ ID NO: 325531 - protein, 14 aa, Homo sapiens
  CDR3 for alpha chain variable domain of TCR clone 162766 (TRAV12-1, TRAJ30)
CVVNIGGRDDKIIF

SEQ ID NO: 325532 - protein, 13 aa, Homo sapiens
  CDR3 for beta chain variable domain of TCR clone 162766 (TRBV12-5, TRBJ2-1)
CASGLGRGNEKFF

SEQ ID NO: 325533 - protein, 14 aa, Homo sapiens
  CDR3 for alpha chain variable domain of TCR clone 162767 (TRAV1-2, TRAJ28)
CAVPSGAGSYQLTF

SEQ ID NO: 325534 - protein, 12 aa, Homo sapiens
  CDR3 for beta chain variable domain of TCR clone 162767 (TRBV20-1, TRBJ1-2)
FSAPPRQGPDTF

SEQ ID NO: 325535 - protein, 17 aa, Homo sapiens
  CDR3 for alpha chain variable domain of TCR clone 162768 (TRAV3, TRAJ42)
CAVRDRYYGGSQGNLIF

SEQ ID NO: 325536 - protein, 15 aa, Homo sapiens
  CDR3 for beta chain variable domain of TCR clone 162768 (TRBV6-6, TRBJ2-7)
CASSYSYGGSYDQYF

SEQ ID NO: 325537 - protein, 13 aa, Homo sapiens
  CDR3 for alpha chain variable domain of TCR clone 162769 (TRAV9-2, TRAJ49)
CALIQIGGNPFYF

SEQ ID NO: 325538 - protein, 15 aa, Homo sapiens
  CDR3 for beta chain variable domain of TCR clone 162769 (TRBV9, TRBJ1-6)
CASSVAGTGDSPLHF

SEQ ID NO: 325539 - protein, 14 aa, Homo sapiens
  CDR3 for alpha chain variable domain of TCR clone 162770 (TRAV26-1, TRAJ39)
CIVCTNNAGNMLTF

SEQ ID NO: 325540 - protein, 15 aa, Homo sapiens
  CDR3 for beta chain variable domain of TCR clone 162770 (TRBV19, TRBJ2-4)
CASSLTGLTKNSQYF

SEQ ID NO: 325541 - protein, 14 aa, Homo sapiens
  CDR3 for alpha chain variable domain of TCR clone 162771 (TRAV20, TRAJ42)
CAVQAGGRQRNLIF

SEQ ID NO: 325542 - protein, 14 aa, Homo sapiens
  CDR3 for beta chain variable domain of TCR clone 162771 (TRBV28, TRBJ1-2)
CASRIQGANYGYTF

SEQ ID NO: 325543 - protein, 12 aa, Homo sapiens
  CDR3 for alpha chain variable domain of TCR clone 162772 (TRAV12-3, TRAJ20)
CAMVRGDYKLSF

SEQ ID NO: 325544 - protein, 16 aa, Homo sapiens
  CDR3 for beta chain variable domain of TCR clone 162772 (TRBV9, TRBJ2-2)
CAGSAMGKGNTGELFF

SEQ ID NO: 325545 - protein, 12 aa, Homo sapiens
  CDR3 for alpha chain variable domain of TCR clone 162773 (TRAV8-3, TRAJ26)
CAGDNYGQNFVF

SEQ ID NO: 325546 - protein, 14 aa, Homo sapiens
  CDR3 for beta chain variable domain of TCR clone 162773 (TRBV7-2, TRBJ2-7)
CASRAQGAAYEQYF

SEQ ID NO: 325547 - protein, 15 aa, Homo sapiens
  CDR3 for alpha chain variable domain of TCR clone 162774 (TRAV2, TRAJ28)
CAVPYSGAGSYQLTF

SEQ ID NO: 325548 - protein, 14 aa, Homo sapiens
  CDR3 for beta chain variable domain of TCR clone 162774 (TRBV12-4, TRBJ1-1)
CASSLGTGGTEAFF

SEQ ID NO: 325549 - protein, 12 aa, Homo sapiens
  CDR3 for alpha chain variable domain of TCR clone 162775 (TRAV17, TRAJ23)
CATDAEDNQEES

SEQ ID NO: 325550 - protein, 12 aa, Homo sapiens
  CDR3 for beta chain variable domain of TCR clone 162775 (TRBV2, TRBJ2-1)
CAKREGYNEQFF

SEQ ID NO: 325551 - protein, 12 aa, Homo sapiens
  CDR3 for alpha chain variable domain of TCR clone 162776 (TRAV16, TRAJ26)
CALRSYGQNFVL

SEQ ID NO: 325552 - protein, 14 aa, Homo sapiens
  CDR3 for beta chain variable domain of TCR clone 162776 (TRBV10-3, TRBJ2-1)
CAISSDLAYNERFS

SEQ ID NO: 325553 - protein, 12 aa, Homo sapiens
  CDR3 for alpha chain variable domain of TCR clone 162777 (TRAV29/DV5, TRAJ49)
CAERTPVTSSIL

SEQ ID NO: 325554 - protein, 19 aa, Homo sapiens
  CDR3 for beta chain variable domain of TCR clone 162777 (TRBV25-1, TRBJ2-2)
CAILVYRVDRGRKTGELFF

SEQ ID NO: 325555 - protein, 14 aa, Homo sapiens
  CDR3 for alpha chain variable domain of TCR clone 162778 (TRAV13-1, TRAJ35)
CAASKGGFGNVLHC

SEQ ID NO: 325556 - protein, 16 aa, Homo sapiens
  CDR3 for beta chain variable domain of TCR clone 162778 (TRBV5-7, TRBJ2-7)
CASSSPGGRTPYEQYF

SEQ ID NO: 325557 - protein, 18 aa, Homo sapiens
  CDR3 for alpha chain variable domain of TCR clone 162779 (TRAV21, TRAJ52)
CAVRPSPAGSTSYGKLTF

SEQ ID NO: 325558 - protein, 17 aa, Homo sapiens
  CDR3 for beta chain variable domain of TCR clone 162779 (TRBV13, TRBJ2-3)
CASILSRVAGGRNTQYF

SEQ ID NO: 325559 - protein, 12 aa, Homo sapiens
  CDR3 for alpha chain variable domain of TCR clone 162780 (TRAV36/DV7, TRAJ50)
CALEPENLLRQG

SEQ ID NO: 325560 - protein, 13 aa, Homo sapiens
  CDR3 for beta chain variable domain of TCR clone 162780 (TRBV7-2, TRBJ2-7)
CASSSPSGSELYF

SEQ ID NO: 325561 - protein, 17 aa, Homo sapiens
  CDR3 for alpha chain variable domain of TCR clone 162781 (TRAV3, TRAJ12)
CAVRDGGRMDSSYKLIF

SEQ ID NO: 325562 - protein, 16 aa, Homo sapiens
  CDR3 for beta chain variable domain of TCR clone 162781 (TRBV9, TRBJ2-2)
CASSAMGKWNTGELFF

SEQ ID NO: 325563 - protein, 15 aa, Homo sapiens
  CDR3 for alpha chain variable domain of TCR clone 162782 (TRAV20, TRAJ4)
CAVTMFSGGYNKLIF

SEQ ID NO: 325564 - protein, 15 aa, Homo sapiens
  CDR3 for beta chain variable domain of TCR clone 162782 (TRBV6-3, TRBJ2-7)
CASSSPGTVFYEQYF

SEQ ID NO: 325565 - protein, 12 aa, Homo sapiens
  CDR3 for alpha chain variable domain of TCR clone 162783 (TRAV3, TRAJ43)
CAVRDPNNDMRF

SEQ ID NO: 325566 - protein, 14 aa, Homo sapiens
  CDR3 for beta chain variable domain of TCR clone 162783 (TRBV27, TRBJ1-5)
CQQSGTGFDQPQHF

SEQ ID NO: 325567 - protein, 17 aa, Homo sapiens
  CDR3 for alpha chain variable domain of TCR clone 162784 (TRAV26-1, TRAJ11)
CIVRVGQSNSGYITLTF

SEQ ID NO: 325568 - protein, 13 aa, Homo sapiens
  CDR3 for beta chain variable domain of TCR clone 162784 (TRBV7-7, TRBJ2-3)
CASSLSRADTQYF

SEQ ID NO: 325569 - protein, 13 aa, Homo sapiens
  CDR3 for alpha chain variable domain of TCR clone 162785 (TRAV13-1, TRAJ21)
CAASIYNFNKFYF

SEQ ID NO: 325570 - protein, 12 aa, Homo sapiens
  CDR3 for beta chain variable domain of TCR clone 162785 (TRBV28, TRBJ2-1)
CASSVQINEQFF

SEQ ID NO: 325571 - protein, 15 aa, Homo sapiens
  CDR3 for alpha chain variable domain of TCR clone 162786 (TRAV8-2, TRAJ40)
CVVSDRGSGTYKYIF

SEQ ID NO: 325572 - protein, 15 aa, Homo sapiens
  CDR3 for beta chain variable domain of TCR clone 162786 (TRBV10-3, TRBJ2-5)
CAISEFGRGQETQYF

SEQ ID NO: 325573 - protein, 14 aa, Homo sapiens
  CDR3 for alpha chain variable domain of TCR clone 162787 (TRAV26-1, TRAJ22)
CIVRVYGSARQLTF

SEQ ID NO: 325574 - protein, 17 aa, Homo sapiens
  CDR3 for beta chain variable domain of TCR clone 162787 (TRBV7-3, TRBJ2-3)
CASSPGGLAGFGDTQCF

SEQ ID NO: 325575 - protein, 17 aa, Homo sapiens
  CDR3 for alpha chain variable domain of TCR clone 162788 (TRAV3, TRAJ38)
CAVRDCLNAGNNRKLIW

SEQ ID NO: 325576 - protein, 16 aa, Homo sapiens
  CDR3 for beta chain variable domain of TCR clone 162788 (TRBV20-1, TRBJ1-4)
CSASPYGGELNEKLFF

SEQ ID NO: 325577 - protein, 12 aa, Homo sapiens
  CDR3 for alpha chain variable domain of TCR clone 162789 (TRAV16, TRAJ27)
CALHTNAGKSTF

SEQ ID NO: 325578 - protein, 14 aa, Homo sapiens
  CDR3 for beta chain variable domain of TCR clone 162789 (TRBV5-1, TRBJ2-7)
CASSLGVRAYEQYF

SEQ ID NO: 325579 - protein, 14 aa, Homo sapiens
  CDR3 for alpha chain variable domain of TCR clone 162790 (TRAV35, TRAJ54)
CAGYLIQVAQKLVF

SEQ ID NO: 325580 - protein, 14 aa, Homo sapiens
  CDR3 for beta chain variable domain of TCR clone 162790 (TRBV7-2, TRBJ2-5)
CASSVGGAEETQYF

SEQ ID NO: 325581 - protein, 16 aa, Homo sapiens
  CDR3 for alpha chain variable domain of TCR clone 162791 (TRAV20, TRAJ28)
CAVRDPSGAGSYQLTF

SEQ ID NO: 325582 - protein, 14 aa, Homo sapiens
  CDR3 for beta chain variable domain of TCR clone 162791 (TRBV28, TRBJ1-5)
CASSLGVLVKPQHF

SEQ ID NO: 325583 - protein, 17 aa, Homo sapiens
  CDR3 for alpha chain variable domain of TCR clone 162792 (TRAV3, TRAJ7)
CAVRDMTPLEGTTDSLL

SEQ ID NO: 325584 - protein, 13 aa, Homo sapiens
  CDR3 for beta chain variable domain of TCR clone 162792 (TRBV2, TRBJ1-1)
CASNLLRNPEAFF

SEQ ID NO: 325585 - protein, 17 aa, Homo sapiens
  CDR3 for alpha chain variable domain of TCR clone 162793 (TRAV3, TRAJ6)
FAVRDGPRAGGSYIPTF

SEQ ID NO: 325586 - protein, 13 aa, Homo sapiens
  CDR3 for beta chain variable domain of TCR clone 162793 (TRBV4-1, TRBJ2-2)
CASSQENTGELFF

SEQ ID NO: 325587 - protein, 13 aa, Homo sapiens
  CDR3 for alpha chain variable domain of TCR clone 162794 (TRAV1-2, TRAJ12)
CAVSMDSSYKLIF

SEQ ID NO: 325588 - protein, 15 aa, Homo sapiens
  CDR3 for beta chain variable domain of TCR clone 162794 (TRBV7-9, TRBJ1-4)
CASSARTGGNEKLFF

SEQ ID NO: 325589 - protein, 14 aa, Homo sapiens
  CDR3 for alpha chain variable domain of TCR clone 162795 (TRAV12-2, TRAJ13)
CAVKKTGGYQKVTF

SEQ ID NO: 325590 - protein, 12 aa, Homo sapiens
  CDR3 for beta chain variable domain of TCR clone 162795 (TRBV29-1, TRBJ1-1)
CSESDGNTEAVF

SEQ ID NO: 325591 - protein, 15 aa, Homo sapiens
  CDR3 for alpha chain variable domain of TCR clone 162796 (TRAV3, TRAJ3)
CAVRDMSSSASKIIF

SEQ ID NO: 325592 - protein, 15 aa, Homo sapiens
  CDR3 for beta chain variable domain of TCR clone 162796 (TRBV7-8, TRBJ1-5)
CASSLERRGLEPQHF

SEQ ID NO: 325593 - protein, 14 aa, Homo sapiens
  CDR3 for alpha chain variable domain of TCR clone 162797 (TRAV1-1, TRAJ27)
CAVIYNTNAGKSTF

SEQ ID NO: 325594 - protein, 15 aa, Homo sapiens
  CDR3 for beta chain variable domain of TCR clone 162797 (TRBV7-3, TRBJ2-1)
RASSLSSGSFDEQFF

SEQ ID NO: 325595 - protein, 14 aa, Homo sapiens
  CDR3 for alpha chain variable domain of TCR clone 162798 (TRAV3, TRAJ9)
CAVRGNTGGFKTIF

SEQ ID NO: 325596 - protein, 14 aa, Homo sapiens
  CDR3 for beta chain variable domain of TCR clone 162798 (TRBV15, TRBJ2-1)
CATSGVVDYNEQFF

SEQ ID NO: 325597 - protein, 13 aa, Homo sapiens
  CDR3 for alpha chain variable domain of TCR clone 162799 (TRAV12-2, TRAJ9)
CAVKWAGGFKTLF

SEQ ID NO: 325598 - protein, 15 aa, Homo sapiens
  CDR3 for beta chain variable domain of TCR clone 162799 (TRBV5-1, TRBJ1-4)
CASSLTADSDEKLFF

SEQ ID NO: 325599 - protein, 14 aa, Homo sapiens
  CDR3 for alpha chain variable domain of TCR clone 162800 (TRAV13-1, TRAJ44)
CAAKATGTASKLTF

SEQ ID NO: 325600 - protein, 17 aa, Homo sapiens
  CDR3 for beta chain variable domain of TCR clone 162800 (TRBV7-3, TRBJ2-3)
CASSLMKRMRGADTQNF

SEQ ID NO: 325601 - protein, 13 aa, Homo sapiens
  CDR3 for alpha chain variable domain of TCR clone 162801 (TRAV26-1, TRAJ30)
CIVNMNRDDKIIF

SEQ ID NO: 325602 - protein, 14 aa, Homo sapiens
  CDR3 for beta chain variable domain of TCR clone 162801 (TRBV19, TRBJ2-1)
CASPTFVLSGEQFF

SEQ ID NO: 325603 - protein, 13 aa, Homo sapiens
  CDR3 for alpha chain variable domain of TCR clone 162802 (TRAV8-4, TRAJ54)
CAVRIQGAQKLVF

SEQ ID NO: 325604 - protein, 13 aa, Homo sapiens
  CDR3 for beta chain variable domain of TCR clone 162802 (TRBV7-9, TRBJ1-2)
CASSLKQNYGYTF

SEQ ID NO: 325605 - protein, 12 aa, Homo sapiens
  CDR3 for alpha chain variable domain of TCR clone 162803 (TRAV12-2, TRAJ8)
CAVNTGFQKLVF

SEQ ID NO: 325606 - protein, 13 aa, Homo sapiens
  CDR3 for beta chain variable domain of TCR clone 162803 (TRBV7-7, TRBJ2-2)
CASSLTSAGELFF

SEQ ID NO: 325607 - protein, 14 aa, Homo sapiens
  CDR3 for alpha chain variable domain of TCR clone 162804 (TRAV12-2, TRAJ13)
CAVKKTGGYQKVTF

SEQ ID NO: 325608 - protein, 11 aa, Homo sapiens
  CDR3 for beta chain variable domain of TCR clone 162804 (TRBV12-4, TRBJ2-3)
WASTATDTQYF

SEQ ID NO: 325609 - protein, 15 aa, Homo sapiens
  CDR3 for alpha chain variable domain of TCR clone 162805 (TRAV3, TRAJ22)
CAVRDRGGSARQLTL

SEQ ID NO: 325610 - protein, 14 aa, Homo sapiens
  CDR3 for beta chain variable domain of TCR clone 162805 (TRBV19, TRBJ1-5)
CASSLGLIGQPQHF

SEQ ID NO: 325611 - protein, 16 aa, Homo sapiens
  CDR3 for alpha chain variable domain of TCR clone 162806 (TRAV4, TRAJ22)
CLVGDLYSGSARQLTF

SEQ ID NO: 325612 - protein, 14 aa, Homo sapiens
  CDR3 for beta chain variable domain of TCR clone 162806 (TRBV11-2, TRBJ2-3)
CASSRLARTDTQYF

SEQ ID NO: 325613 - protein, 14 aa, Homo sapiens
  CDR3 for alpha chain variable domain of TCR clone 162807 (TRAV12-2, TRAJ9)
CAVNLNTGGFKTIF

SEQ ID NO: 325614 - protein, 17 aa, Homo sapiens
  CDR3 for beta chain variable domain of TCR clone 162807 (TRBV20-1, TRBJ2-2)
CSASRQVGQGYTGELFC

SEQ ID NO: 325615 - protein, 15 aa, Homo sapiens
  CDR3 for alpha chain variable domain of TCR clone 162808 (TRAV13-1, TRAJ32)
CAASIYGGATNKLIF

SEQ ID NO: 325616 - protein, 15 aa, Homo sapiens
  CDR3 for beta chain variable domain of TCR clone 162808 (TRBV5-1, TRBJ2-2)
CASRQDTGDTGELFF

SEQ ID NO: 325617 - protein, 15 aa, Homo sapiens
  CDR3 for alpha chain variable domain of TCR clone 162809 (TRAV3, TRAJ22)
CAVRDRGGSARQLTF

SEQ ID NO: 325618 - protein, 13 aa, Homo sapiens
  CDR3 for beta chain variable domain of TCR clone 162809 (TRBV6-5, TRBJ2-5)
CASSPQGGETQYF

SEQ ID NO: 325619 - protein, 13 aa, Homo sapiens
  CDR3 for alpha chain variable domain of TCR clone 162810 (TRAV2, TRAJ40)
CAVVPSGTYKYIF

SEQ ID NO: 325620 - protein, 15 aa, Homo sapiens
  CDR3 for beta chain variable domain of TCR clone 162810 (TRBV28, TRBJ2-1)
CASSGLAEVDNEQFF

SEQ ID NO: 325621 - protein, 14 aa, Homo sapiens
  CDR3 for alpha chain variable domain of TCR clone 162811 (TRAV12-1, TRAJ12)
CVVTRMDSSYNLIF

SEQ ID NO: 325622 - protein, 13 aa, Homo sapiens
  CDR3 for beta chain variable domain of TCR clone 162811 (TRBV20-1, TRBJ1-1)
CSARGGGNTETFF

SEQ ID NO: 325623 - protein, 13 aa, Homo sapiens
  CDR3 for alpha chain variable domain of TCR clone 162812 (TRAV29/DV5, TRAJ31)
CAASRNNNARLMV

SEQ ID NO: 325624 - protein, 15 aa, Homo sapiens
  CDR3 for beta chain variable domain of TCR clone 162812 (TRBV12-4, TRBJ2-5)
CASSPPTGLQETQYF

SEQ ID NO: 325625 - protein, 15 aa, Homo sapiens
  CDR3 for alpha chain variable domain of TCR clone 162813 (TRAV12-2, TRAJ8)
CAVREENTGFQKLVF

SEQ ID NO: 325626 - protein, 13 aa, Homo sapiens
  CDR3 for beta chain variable domain of TCR clone 162813 (TRBV7-9, TRBJ2-3)
CASSPGSTDTQYF

SEQ ID NO: 325627 - protein, 14 aa, Homo sapiens
  CDR3 for alpha chain variable domain of TCR clone 162814 (TRAV1-2, TRAJ16)
CAVNRFSDGQKLLF

SEQ ID NO: 325628 - protein, 18 aa, Homo sapiens
  CDR3 for beta chain variable domain of TCR clone 162814 (TRBV4-1, TRBJ1-5)
CASSQDPRGQGSNQPQHF

SEQ ID NO: 325629 - protein, 13 aa, Homo sapiens
  CDR3 for alpha chain variable domain of TCR clone 162815 (TRAV13-2, TRAJ48)
CAEMDFGNERLTF

SEQ ID NO: 325630 - protein, 13 aa, Homo sapiens
  CDR3 for beta chain variable domain of TCR clone 162815 (TRBV7-9, TRBJ1-2)
CASSLKQNYGYTF

SEQ ID NO: 325631 - protein, 15 aa, Homo sapiens
  CDR3 for alpha chain variable domain of TCR clone 162816 (TRAV3, TRAJ4)
CAVRDGTGGYNKLIF

SEQ ID NO: 325632 - protein, 15 aa, Homo sapiens
  CDR3 for beta chain variable domain of TCR clone 162816 (TRBV7-2, TRBJ1-4)
CASSLGLRGREKLFF

SEQ ID NO: 325633 - protein, 15 aa, Homo sapiens
  CDR3 for alpha chain variable domain of TCR clone 162817 (TRAV13-1, TRAJ5)
CAASPTGHGQESTYF

SEQ ID NO: 325634 - protein, 17 aa, Homo sapiens
  CDR3 for beta chain variable domain of TCR clone 162817 (TRBV3-1, TRBJ2-2)
CASSQFRDKVDTGELFF

SEQ ID NO: 325635 - protein, 14 aa, Homo sapiens
  CDR3 for alpha chain variable domain of TCR clone 162818 (TRAV26-1, TRAJ44)
CIVKNTGTASKLTF

SEQ ID NO: 325636 - protein, 15 aa, Homo sapiens
  CDR3 for beta chain variable domain of TCR clone 162818 (TRBV19, TRBJ2-4)
CASSDGGGAKNSQYF

SEQ ID NO: 325637 - protein, 12 aa, Homo sapiens
  CDR3 for alpha chain variable domain of TCR clone 162819 (TRAV3, TRAJ31)
CAVRPRGRRLMF

SEQ ID NO: 325638 - protein, 17 aa, Homo sapiens
  CDR3 for beta chain variable domain of TCR clone 162819 (TRBV7-9, TRBJ1-5)
CASSASQGGYSNQPQHF

SEQ ID NO: 325639 - protein, 12 aa, Homo sapiens
  CDR3 for alpha chain variable domain of TCR clone 162820 (TRAV2, TRAJ10)
CASTGGGNKLNF

SEQ ID NO: 325640 - protein, 20 aa, Homo sapiens
  CDR3 for beta chain variable domain of TCR clone 162820 (TRBV7-8, TRBJ2-2)
CASSHLFPGPTIHITGELFF

SEQ ID NO: 325641 - protein, 16 aa, Homo sapiens
  CDR3 for alpha chain variable domain of TCR clone 162821 (TRAV16, TRAJ52)
CALSGVGGTSYGKLTF

SEQ ID NO: 325642 - protein, 16 aa, Homo sapiens
  CDR3 for beta chain variable domain of TCR clone 162821 (TRBV7-6, TRBJ2-1)
CASSAPGPSSYNEQFF

SEQ ID NO: 325643 - protein, 16 aa, Homo sapiens
  CDR3 for alpha chain variable domain of TCR clone 162822 (TRAV30, TRAJ24)
CGTEIVDADSWGKFQS

SEQ ID NO: 325644 - protein, 13 aa, Homo sapiens
  CDR3 for beta chain variable domain of TCR clone 162822 (TRBV7-9, TRBJ2-5)
CASLPSGRETQYF

SEQ ID NO: 325645 - protein, 12 aa, Homo sapiens
  CDR3 for alpha chain variable domain of TCR clone 162823 (TRAV12-3, TRAJ17)
CAMTLTGNKLTF

SEQ ID NO: 325646 - protein, 15 aa, Homo sapiens
  CDR3 for beta chain variable domain of TCR clone 162823 (TRBV20-1, TRBJ2-7)
CSARDRVSGVEEQYF

SEQ ID NO: 325647 - protein, 13 aa, Homo sapiens
  CDR3 for alpha chain variable domain of TCR clone 162824 (TRAV27, TRAJ54)
CAGAGQGAQKLVF

SEQ ID NO: 325648 - protein, 15 aa, Homo sapiens
  CDR3 for beta chain variable domain of TCR clone 162824 (TRBV18, TRBJ2-6)
CASSPSYAGANVRTF

SEQ ID NO: 325649 - protein, 15 aa, Homo sapiens
  CDR3 for alpha chain variable domain of TCR clone 162825 (TRAV3, TRAJ20)
CAVRDIKLSDYKLSF

SEQ ID NO: 325650 - protein, 13 aa, Homo sapiens
  CDR3 for beta chain variable domain of TCR clone 162825 (TRBV20-1, TRBJ1-1)
CSARVGGITEAFF

SEQ ID NO: 325651 - protein, 13 aa, Homo sapiens
  CDR3 for alpha chain variable domain of TCR clone 162826 (TRAV2, TRAJ5)
CAVPDTGRRALTF

SEQ ID NO: 325652 - protein, 14 aa, Homo sapiens
  CDR3 for beta chain variable domain of TCR clone 162826 (TRBV2, TRBJ2-1)
CASRTGSSYNEQFF

SEQ ID NO: 325653 - protein, 12 aa, Homo sapiens
  CDR3 for alpha chain variable domain of TCR clone 162827 (TRAV26-1, TRAJ54)
CIGGWGAQKLVL

SEQ ID NO: 325654 - protein, 14 aa, Homo sapiens
  CDR3 for beta chain variable domain of TCR clone 162827 (TRBV11-2, TRBJ1-2)
CASSSGQAGGGYTF

SEQ ID NO: 325655 - protein, 12 aa, Homo sapiens
  CDR3 for alpha chain variable domain of TCR clone 162828 (TRAV16, TRAJ13)
CITLRGYQKVTF

SEQ ID NO: 325656 - protein, 16 aa, Homo sapiens
  CDR3 for beta chain variable domain of TCR clone 162828 (TRBV12-5, TRBJ2-5)
CASGPRTSGNQETQYF

SEQ ID NO: 325657 - protein, 20 aa, Homo sapiens
  CDR3 for alpha chain variable domain of TCR clone 162829 (TRAV12-1, TRAJ42)
SSVIQPPTSVKGGSQGNLIF

SEQ ID NO: 325658 - protein, 15 aa, Homo sapiens
  CDR3 for beta chain variable domain of TCR clone 162829 (TRBV6-1, TRBJ2-3)
CASSERGGITDTQYF

SEQ ID NO: 325659 - protein, 12 aa, Homo sapiens
  CDR3 for alpha chain variable domain of TCR clone 162830 (TRAV17, TRAJ12)
CATLRSSYKLIF

SEQ ID NO: 325660 - protein, 15 aa, Homo sapiens
  CDR3 for beta chain variable domain of TCR clone 162830 (TRBV6-3, TRBJ2-7)
CASSSPGTVFYEQYF

SEQ ID NO: 325661 - protein, 13 aa, Homo sapiens
  CDR3 for alpha chain variable domain of TCR clone 162831 (TRAV12-1, TRAJ9)
CVVRNTGGFKTIF

SEQ ID NO: 325662 - protein, 11 aa, Homo sapiens
  CDR3 for beta chain variable domain of TCR clone 162831 (TRBV29-1, TRBJ2-5)
CSEDRTGTQYF

SEQ ID NO: 325663 - protein, 14 aa, Homo sapiens
  CDR3 for alpha chain variable domain of TCR clone 162832 (TRAV26-1, TRAJ5)
CIVRVRFNRRELTF

SEQ ID NO: 325664 - protein, 17 aa, Homo sapiens
  CDR3 for beta chain variable domain of TCR clone 162832 (TRBV29-1, TRBJ2-3)
CSVEVLAGETSTDTQYF

SEQ ID NO: 325665 - protein, 11 aa, Homo sapiens
  CDR3 for alpha chain variable domain of TCR clone 162833 (TRAV23/DV6, TRAJ58)
CAARLLRGETS

SEQ ID NO: 325666 - protein, 15 aa, Homo sapiens
  CDR3 for beta chain variable domain of TCR clone 162833 (TRBV9, TRBJ1-6)
CASGVAGTGDSPLHF

SEQ ID NO: 325667 - protein, 14 aa, Homo sapiens
  CDR3 for alpha chain variable domain of TCR clone 162834 (TRAV8-1, TRAJ39)
SAVNASNAGNMLTF

SEQ ID NO: 325668 - protein, 13 aa, Homo sapiens
  CDR3 for beta chain variable domain of TCR clone 162834 (TRBV12-4, TRBJ2-5)
CASSPGTEETQYF

SEQ ID NO: 325669 - protein, 14 aa, Homo sapiens
  CDR3 for alpha chain variable domain of TCR clone 162835 (TRAV12-1, TRAJ30)
CVMNIGGRDDKIIF

SEQ ID NO: 325670 - protein, 14 aa, Homo sapiens
  CDR3 for beta chain variable domain of TCR clone 162835 (TRBV7-6, TRBJ2-3)
CASSLGTVTDTQYF

SEQ ID NO: 325671 - protein, 13 aa, Homo sapiens
  CDR3 for alpha chain variable domain of TCR clone 162836 (TRAV21, TRAJ45)
CAVMGGGADGLTF

SEQ ID NO: 325672 - protein, 16 aa, Homo sapiens
  CDR3 for beta chain variable domain of TCR clone 162836 (TRBV20-1, TRBJ2-1)
CIARDHLAGGGGEQFF

SEQ ID NO: 325673 - protein, 10 aa, Homo sapiens
  CDR3 for alpha chain variable domain of TCR clone 162837 (TRAV23/DV6, TRAJ3)
CAATTFALGG

SEQ ID NO: 325674 - protein, 15 aa, Homo sapiens
  CDR3 for beta chain variable domain of TCR clone 162837 (TRBV19, TRBJ1-6)
CASSTQGAVGSALHF

SEQ ID NO: 325675 - protein, 15 aa, Homo sapiens
  CDR3 for alpha chain variable domain of TCR clone 162838 (TRAV13-1, TRAJ27)
CAARELNTNAGKSTF

SEQ ID NO: 325676 - protein, 13 aa, Homo sapiens
  CDR3 for beta chain variable domain of TCR clone 162838 (TRBV7-9, TRBJ2-3)
CASSPGSTDTQYF

SEQ ID NO: 325677 - protein, 13 aa, Homo sapiens
  CDR3 for alpha chain variable domain of TCR clone 162839 (TRAV12-3, TRAJ41)
CAIAPNSGYALNF

SEQ ID NO: 325678 - protein, 14 aa, Homo sapiens
  CDR3 for beta chain variable domain of TCR clone 162839 (TRBV7-2, TRBJ1-3)
CASGLGTAGNTIYF

SEQ ID NO: 325679 - protein, 13 aa, Homo sapiens
  CDR3 for alpha chain variable domain of TCR clone 162840 (TRAV23/DV6, TRAJ16)
CAASISDGQKLLF

SEQ ID NO: 325680 - protein, 16 aa, Homo sapiens
  CDR3 for beta chain variable domain of TCR clone 162840 (TRBV19, TRBJ2-3)
CASSPGAASRTDTQYF

SEQ ID NO: 325681 - protein, 13 aa, Homo sapiens
  CDR3 for alpha chain variable domain of TCR clone 162841 (TRAV39, TRAJ58)
CAGEETSGSRLTF

SEQ ID NO: 325682 - protein, 12 aa, Homo sapiens
  CDR3 for beta chain variable domain of TCR clone 162841 (TRBV15, TRBJ2-7)
CHSTTGHYEQYF

SEQ ID NO: 325683 - protein, 16 aa, Homo sapiens
  CDR3 for alpha chain variable domain of TCR clone 162842 (TRAV14/DV4, TRAJ20)
CAMREGRSRDDYKLSF

SEQ ID NO: 325684 - protein, 12 aa, Homo sapiens
  CDR3 for beta chain variable domain of TCR clone 162842 (TRBV12-4, TRBJ1-2)
CASSFIWLHLRF

SEQ ID NO: 325685 - protein, 12 aa, Homo sapiens
  CDR3 for alpha chain variable domain of TCR clone 162843 (TRAV21, TRAJ37)
CAVRGNTGKLIF

SEQ ID NO: 325686 - protein, 16 aa, Homo sapiens
  CDR3 for beta chain variable domain of TCR clone 162843 (TRBV19, TRBJ2-2)
CASRSPATGATGELFF

SEQ ID NO: 325687 - protein, 12 aa, Homo sapiens
  CDR3 for alpha chain variable domain of TCR clone 162844 (TRAV12-2, TRAJ10)
WGVTGGGNKLTF

SEQ ID NO: 325688 - protein, 12 aa, Homo sapiens
  CDR3 for beta chain variable domain of TCR clone 162844 (TRBV6-3, TRBJ2-7)
CASSLTPYEQYF

SEQ ID NO: 325689 - protein, 17 aa, Homo sapiens
  CDR3 for alpha chain variable domain of TCR clone 162845 (TRAV8-3, TRAJ34)
CAIPGKLIFGTGTRLQV

SEQ ID NO: 325690 - protein, 15 aa, Homo sapiens
  CDR3 for beta chain variable domain of TCR clone 162845 (TRBV5-7, TRBJ2-1)
CASSRRRAGDNEQFF

SEQ ID NO: 325691 - protein, 17 aa, Homo sapiens
  CDR3 for alpha chain variable domain of TCR clone 162846 (TRAV27, TRAJ52)
CAGAGWAGGTSYGKLTS

SEQ ID NO: 325692 - protein, 16 aa, Homo sapiens
  CDR3 for beta chain variable domain of TCR clone 162846 (TRBV19, TRBJ2-1)
CASSKAGPSSYNEQFF

SEQ ID NO: 325693 - protein, 15 aa, Homo sapiens
  CDR3 for alpha chain variable domain of TCR clone 162847 (TRAV4, TRAJ42)
CLVGGYGGSQGNLIF

SEQ ID NO: 325694 - protein, 16 aa, Homo sapiens
  CDR3 for beta chain variable domain of TCR clone 162847 (TRBV27, TRBJ1-1)
CASRTRTGGVGTEAFF

SEQ ID NO: 325695 - protein, 18 aa, Homo sapiens
  CDR3 for alpha chain variable domain of TCR clone 162848 (TRAV21, TRAJ52)
CAVRPSPAGGTSYGKLTF

SEQ ID NO: 325696 - protein, 14 aa, Homo sapiens
  CDR3 for beta chain variable domain of TCR clone 162848 (TRBV6-3, TRBJ1-1)
CASSYGGQHTEAFF

SEQ ID NO: 325697 - protein, 11 aa, Homo sapiens
  CDR3 for alpha chain variable domain of TCR clone 162849 (TRAV39, TRAJ49)
CAVDISTQFYF

SEQ ID NO: 325698 - protein, 11 aa, Homo sapiens
  CDR3 for beta chain variable domain of TCR clone 162849 (TRBV7-8, TRBJ2-7)
CTSSLSLEQYF

SEQ ID NO: 325699 - protein, 14 aa, Homo sapiens
  CDR3 for alpha chain variable domain of TCR clone 162850 (TRAV12-2, TRAJ53)
CAVRGGGSNYKLTF

SEQ ID NO: 325700 - protein, 15 aa, Homo sapiens
  CDR3 for beta chain variable domain of TCR clone 162850 (TRBV7-9, TRBJ1-2)
CASSLDREPNYGYTF

SEQ ID NO: 325701 - protein, 14 aa, Homo sapiens
  CDR3 for alpha chain variable domain of TCR clone 162851 (TRAV12-1, TRAJ30)
CVVNIGGSDDKIFF

SEQ ID NO: 325702 - protein, 13 aa, Homo sapiens
  CDR3 for beta chain variable domain of TCR clone 162851 (TRBV12-5, TRBJ2-1)
CASGLGRGNEQFF

SEQ ID NO: 325703 - protein, 15 aa, Homo sapiens
  CDR3 for alpha chain variable domain of TCR clone 162852 (TRAV8-2, TRAJ16)
CVVSDGFSDGQKLLF

SEQ ID NO: 325704 - protein, 14 aa, Homo sapiens
  CDR3 for beta chain variable domain of TCR clone 162852 (TRBV7-3, TRBJ1-1)
CASSLGTGYTEACF

SEQ ID NO: 325705 - protein, 14 aa, Homo sapiens
  CDR3 for alpha chain variable domain of TCR clone 162853 (TRAV1-2, TRAJ16)
CAVKRFSDGQKLLF

SEQ ID NO: 325706 - protein, 14 aa, Homo sapiens
  CDR3 for beta chain variable domain of TCR clone 162853 (TRBV20-1, TRBJ2-1)
CSARGGSSYNEQFF

SEQ ID NO: 325707 - protein, 17 aa, Homo sapiens
  CDR3 for alpha chain variable domain of TCR clone 162854 (TRAV3, TRAJ6)
CAVRDGPRAGGSYIPTV

SEQ ID NO: 325708 - protein, 20 aa, Homo sapiens
  CDR3 for beta chain variable domain of TCR clone 162854 (TRBV28, TRBJ2-1)
CDSTPIGRSPGLAGGNEQFF

SEQ ID NO: 325709 - protein, 21 aa, Homo sapiens
  CDR3 for alpha chain variable domain of TCR clone 162855 (TRAV12-1, TRAJ32)
SSVIQPPTSMNYGGATNKLIF

SEQ ID NO: 325710 - protein, 18 aa, Homo sapiens
  CDR3 for beta chain variable domain of TCR clone 162855 (TRBV20-1, TRBJ2-3)
CSASGLAGGPGTTDTQYL

SEQ ID NO: 325711 - protein, 13 aa, Homo sapiens
  CDR3 for alpha chain variable domain of TCR clone 162856 (TRAV21, TRAJ27)
CAARPGNAGKSTF

SEQ ID NO: 325712 - protein, 15 aa, Homo sapiens
  CDR3 for beta chain variable domain of TCR clone 162856 (TRBV5-1, TRBJ1-1)
CASSSGGRRVTEAFF

SEQ ID NO: 325713 - protein, 14 aa, Homo sapiens
  CDR3 for alpha chain variable domain of TCR clone 162857 (TRAV12-1, TRAJ30)
CVVNIGGIDDKIIF

SEQ ID NO: 325714 - protein, 14 aa, Homo sapiens
  CDR3 for beta chain variable domain of TCR clone 162857 (TRBV20-1, TRBJ2-1)
CSAQIGGSANEQFF

SEQ ID NO: 325715 - protein, 13 aa, Homo sapiens
  CDR3 for alpha chain variable domain of TCR clone 162858 (TRAV2, TRAJ40)
CAVVTSGTYKYIF

SEQ ID NO: 325716 - protein, 15 aa, Homo sapiens
  CDR3 for beta chain variable domain of TCR clone 162858 (TRBV10-3, TRBJ2-5)
CAISEFGRGQETQYF

SEQ ID NO: 325717 - protein, 12 aa, Homo sapiens
  CDR3 for alpha chain variable domain of TCR clone 162859 (TRAV21, TRAJ11)
CAATSGYSTLTF

SEQ ID NO: 325718 - protein, 14 aa, Homo sapiens
  CDR3 for beta chain variable domain of TCR clone 162859 (TRBV7-9, TRBJ2-1)
CASSPRDSLYEQFF

SEQ ID NO: 325719 - protein, 17 aa, Homo sapiens
  CDR3 for alpha chain variable domain of TCR clone 162860 (TRAV26-1, TRAJ27)
CIVSTTWINTNAGKSTF

SEQ ID NO: 325720 - protein, 16 aa, Homo sapiens
  CDR3 for beta chain variable domain of TCR clone 162860 (TRBV7-9, TRBJ2-1)
CASSLDPGLAIDEQFF

SEQ ID NO: 325721 - protein, 12 aa, Homo sapiens
  CDR3 for alpha chain variable domain of TCR clone 162861 (TRAV1-1, TRAJ8)
CAGGTGSQKLVF

SEQ ID NO: 325722 - protein, 15 aa, Homo sapiens
  CDR3 for beta chain variable domain of TCR clone 162861 (TRBV7-2, TRBJ2-3)
CASSLEQGGTDTQYF

SEQ ID NO: 325723 - protein, 15 aa, Homo sapiens
  CDR3 for alpha chain variable domain of TCR clone 162862 (TRAV3, TRAJ47)
CAVRDIGKDGNKLVF

SEQ ID NO: 325724 - protein, 14 aa, Homo sapiens
  CDR3 for beta chain variable domain of TCR clone 162862 (TRBV13, TRBJ2-5)
CASSLERVGETQYF

SEQ ID NO: 325725 - protein, 12 aa, Homo sapiens
  CDR3 for alpha chain variable domain of TCR clone 162863 (TRAV13-1, TRAJ43)
CRSLSNNNDMRF

SEQ ID NO: 325726 - protein, 14 aa, Homo sapiens
  CDR3 for beta chain variable domain of TCR clone 162863 (TRBV5-1, TRBJ2-5)
CASSLAGKQETQYF

SEQ ID NO: 325727 - protein, 14 aa, Homo sapiens
  CDR3 for alpha chain variable domain of TCR clone 162864 (TRAV12-3, TRAJ31)
CAMSDGNNNARLMF

SEQ ID NO: 325728 - protein, 15 aa, Homo sapiens
  CDR3 for beta chain variable domain of TCR clone 162864 (TRBV19, TRBJ2-4)
CASRGPRRGENIQYF

SEQ ID NO: 325729 - protein, 13 aa, Homo sapiens
  CDR3 for alpha chain variable domain of TCR clone 162865 (TRAV8-3, TRAJ44)
CAVVPGTASKLTF

SEQ ID NO: 325730 - protein, 17 aa, Homo sapiens
  CDR3 for beta chain variable domain of TCR clone 162865 (TRBV7-3, TRBJ2-3)
CASSLMKRVRGADTQYF

SEQ ID NO: 325731 - protein, 11 aa, Homo sapiens
  CDR3 for alpha chain variable domain of TCR clone 162866 (TRAV2, TRAJ33)
CAVGSNYQLIW

SEQ ID NO: 325732 - protein, 14 aa, Homo sapiens
  CDR3 for beta chain variable domain of TCR clone 162866 (TRBV7-2, TRBJ2-7)
CASSPKTSFYEQYF

SEQ ID NO: 325733 - protein, 12 aa, Homo sapiens
  CDR3 for alpha chain variable domain of TCR clone 162867 (TRAV26-1, TRAJ17)
CIVRSAGNKLTF

SEQ ID NO: 325734 - protein, 15 aa, Homo sapiens
  CDR3 for beta chain variable domain of TCR clone 162867 (TRBV7-6, TRBJ1-2)
CASSSGRRGGYGYTF

SEQ ID NO: 325735 - protein, 14 aa, Homo sapiens
  CDR3 for alpha chain variable domain of TCR clone 162868 (TRAV12-1, TRAJ27)
CGEHIRTNAGKSTF

SEQ ID NO: 325736 - protein, 15 aa, Homo sapiens
  CDR3 for beta chain variable domain of TCR clone 162868 (TRBV19, TRBJ1-1)
CASTLGRIQDTEAFF

SEQ ID NO: 325737 - protein, 12 aa, Homo sapiens
  CDR3 for alpha chain variable domain of TCR clone 162869 (TRAV12-3, TRAJ17)
CAMTLTGNKLTF

SEQ ID NO: 325738 - protein, 20 aa, Homo sapiens
  CDR3 for beta chain variable domain of TCR clone 162869 (TRBV4-2, TRBJ2-7)
CASSQASGGNLRAVLRAGHQ

SEQ ID NO: 325739 - protein, 13 aa, Homo sapiens
  CDR3 for alpha chain variable domain of TCR clone 162870 (TRAV17, TRAJ9)
CATDGTGGFKTIF

SEQ ID NO: 325740 - protein, 17 aa, Homo sapiens
  CDR3 for beta chain variable domain of TCR clone 162870 (TRBV6-5, TRBJ2-7)
CASSYSFWGQGRYEQYF

SEQ ID NO: 325741 - protein, 14 aa, Homo sapiens
  CDR3 for alpha chain variable domain of TCR clone 162871 (TRAV8-2, TRAJ37)
CVVSISGNTGKLIF

SEQ ID NO: 325742 - protein, 15 aa, Homo sapiens
  CDR3 for beta chain variable domain of TCR clone 162871 (TRBV7-9, TRBJ1-6)
CASSSPGRGNSPLHF

SEQ ID NO: 325743 - protein, 14 aa, Homo sapiens
  CDR3 for alpha chain variable domain of TCR clone 162872 (TRAV12-2, TRAJ17)
CAALFKAAGNKLTF

SEQ ID NO: 325744 - protein, 16 aa, Homo sapiens
  CDR3 for beta chain variable domain of TCR clone 162872 (TRBV20-1, TRBJ1-5)
CSAELPGQQTNQPQHF

SEQ ID NO: 325745 - protein, 13 aa, Homo sapiens
  CDR3 for alpha chain variable domain of TCR clone 162873 (TRAV3, TRAJ21)
CAVREPDFNKFYF

SEQ ID NO: 325746 - protein, 11 aa, Homo sapiens
  CDR3 for beta chain variable domain of TCR clone 162873 (TRBV6-3, TRBJ2-3)
CATGQADTQYF

SEQ ID NO: 325747 - protein, 15 aa, Homo sapiens
  CDR3 for alpha chain variable domain of TCR clone 162874 (TRAV21, TRAJ24)
CAARSSTDSWGKLQF

SEQ ID NO: 325748 - protein, 15 aa, Homo sapiens
  CDR3 for beta chain variable domain of TCR clone 162874 (TRBV27, TRBJ2-7)
CASSTAGTGSYEQYF

SEQ ID NO: 325749 - protein, 13 aa, Homo sapiens
  CDR3 for alpha chain variable domain of TCR clone 162875 (TRAV21, TRAJ20)
CAVGLRVDYKLSF

SEQ ID NO: 325750 - protein, 14 aa, Homo sapiens
  CDR3 for beta chain variable domain of TCR clone 162875 (TRBV15, TRBJ1-2)
CATSRASVNYGYTF

SEQ ID NO: 325751 - protein, 14 aa, Homo sapiens
  CDR3 for alpha chain variable domain of TCR clone 162876 (TRAV12-3, TRAJ15)
CAMIPPQAGPALIF

SEQ ID NO: 325752 - protein, 12 aa, Homo sapiens
  CDR3 for beta chain variable domain of TCR clone 162876 (TRBV11-2, TRBJ2-2)
CASSFGGGELFF

SEQ ID NO: 325753 - protein, 15 aa, Homo sapiens
  CDR3 for alpha chain variable domain of TCR clone 162877 (TRAV17, TRAJ56)
CATEPFTGANSKLTF

SEQ ID NO: 325754 - protein, 13 aa, Homo sapiens
  CDR3 for beta chain variable domain of TCR clone 162877 (TRBV2, TRBJ2-3)
CASILAGGQGQYF

SEQ ID NO: 325755 - protein, 14 aa, Homo sapiens
  CDR3 for alpha chain variable domain of TCR clone 162878 (TRAV1-1, TRAJ27)
CAVIYNTNAGKSTF

SEQ ID NO: 325756 - protein, 15 aa, Homo sapiens
  CDR3 for beta chain variable domain of TCR clone 162878 (TRBV7-2, TRBJ2-1)
CASSAGLAGGNEQSF

SEQ ID NO: 325757 - protein, 15 aa, Homo sapiens
  CDR3 for alpha chain variable domain of TCR clone 162879 (TRAV26-1, TRAJ40)
CIVRAVPSGTYKYIF

SEQ ID NO: 325758 - protein, 15 aa, Homo sapiens
  CDR3 for beta chain variable domain of TCR clone 162879 (TRBV19, TRBJ1-1)
CASRETGGVNTGAFF

SEQ ID NO: 325759 - protein, 16 aa, Homo sapiens
  CDR3 for alpha chain variable domain of TCR clone 162880 (TRAV38-1, TRAJ56)
CAFMKRQTGANSKLTF

SEQ ID NO: 325760 - protein, 13 aa, Homo sapiens
  CDR3 for beta chain variable domain of TCR clone 162880 (TRBV7-3, TRBJ1-1)
CASSQDWGAEAFF

SEQ ID NO: 325761 - protein, 14 aa, Homo sapiens
  CDR3 for alpha chain variable domain of TCR clone 162881 (TRAV35, TRAJ33)
CAGSSQDSNYQLIW

SEQ ID NO: 325762 - protein, 14 aa, Homo sapiens
  CDR3 for beta chain variable domain of TCR clone 162881 (TRBV20-1, TRBJ2-1)
CSAQISGSANEQFF

SEQ ID NO: 325763 - protein, 15 aa, Homo sapiens
  CDR3 for alpha chain variable domain of TCR clone 162882 (TRAV36/DV7, TRAJ54)
CAVEEPVQGAQKLVF

SEQ ID NO: 325764 - protein, 17 aa, Homo sapiens
  CDR3 for beta chain variable domain of TCR clone 162882 (TRBV6-5, TRBJ1-2)
CASSSPWEGAFDYGDTF

SEQ ID NO: 325765 - protein, 14 aa, Homo sapiens
  CDR3 for alpha chain variable domain of TCR clone 162883 (TRAV3, TRAJ34)
CAVRAPGHTDKLIF

SEQ ID NO: 325766 - protein, 14 aa, Homo sapiens
  CDR3 for beta chain variable domain of TCR clone 162883 (TRBV5-4, TRBJ1-1)
CASSLDSRRDEAFF

SEQ ID NO: 325767 - protein, 14 aa, Homo sapiens
  CDR3 for alpha chain variable domain of TCR clone 162884 (TRAV12-2, TRAJ11)
CAVEGGSGYSTLTF

SEQ ID NO: 325768 - protein, 13 aa, Homo sapiens
  CDR3 for beta chain variable domain of TCR clone 162884 (TRBV10-3, TRBJ2-7)
CASKLAVNYEQYF

SEQ ID NO: 325769 - protein, 13 aa, Homo sapiens
  CDR3 for alpha chain variable domain of TCR clone 162885 (TRAV40, TRAJ43)
SAVYYRPNNDMRF

SEQ ID NO: 325770 - protein, 15 aa, Homo sapiens
  CDR3 for beta chain variable domain of TCR clone 162885 (TRBV7-9, TRBJ1-5)
CASSQGHQPNQPQHF

SEQ ID NO: 325771 - protein, 15 aa, Homo sapiens
  CDR3 for alpha chain variable domain of TCR clone 162886 (TRAV21, TRAJ24)
CAARASTDSWGKLQF

SEQ ID NO: 325772 - protein, 11 aa, Homo sapiens
  CDR3 for beta chain variable domain of TCR clone 162886 (TRBV11-2, TRBJ2-2)
CASSLPGELFF

SEQ ID NO: 325773 - protein, 18 aa, Homo sapiens
  CDR3 for alpha chain variable domain of TCR clone 162887 (TRAV13-1, TRAJ52)
CAAKNPNAGGTSYGKLTF

SEQ ID NO: 325774 - protein, 15 aa, Homo sapiens
  CDR3 for beta chain variable domain of TCR clone 162887 (TRBV7-3, TRBJ2-2)
CASSETGQGTGELFF

SEQ ID NO: 325775 - protein, 14 aa, Homo sapiens
  CDR3 for alpha chain variable domain of TCR clone 162888 (TRAV16, TRAJ39)
CALSKNNAGNMLTF

SEQ ID NO: 325776 - protein, 17 aa, Homo sapiens
  CDR3 for beta chain variable domain of TCR clone 162888 (TRBV6-5, TRBJ2-3)
CASSYGTSLYKSDTQYF

SEQ ID NO: 325777 - protein, 14 aa, Homo sapiens
  CDR3 for alpha chain variable domain of TCR clone 162889 (TRAV1-1, TRAJ27)
CAVIYNTNAGKSTF

SEQ ID NO: 325778 - protein, 17 aa, Homo sapiens
  CDR3 for beta chain variable domain of TCR clone 162889 (TRBV15, TRBJ1-4)
CATSRYGTGDPNEKLFF

SEQ ID NO: 325779 - protein, 12 aa, Homo sapiens
  CDR3 for alpha chain variable domain of TCR clone 162890 (TRAV21, TRAJ31)
CAVSPARGRLMF

SEQ ID NO: 325780 - protein, 13 aa, Homo sapiens
  CDR3 for beta chain variable domain of TCR clone 162890 (TRBV7-3, TRBJ1-2)
CASSLKRGYGYTF

SEQ ID NO: 325781 - protein, 13 aa, Homo sapiens
  CDR3 for alpha chain variable domain of TCR clone 162891 (TRAV26-1, TRAJ9)
CIATYTGGFKTSF

SEQ ID NO: 325782 - protein, 15 aa, Homo sapiens
  CDR3 for beta chain variable domain of TCR clone 162891 (TRBV7-2, TRBJ1-3)
CASSPQGGSGNTIYF

SEQ ID NO: 325783 - protein, 11 aa, Homo sapiens
  CDR3 for alpha chain variable domain of TCR clone 162892 (TRAV3, TRAJ31)
CAALPGARLMF

SEQ ID NO: 325784 - protein, 14 aa, Homo sapiens
  CDR3 for beta chain variable domain of TCR clone 162892 (TRBV7-9, TRBJ2-7)
CASSLSQGSYEQYF

SEQ ID NO: 325785 - protein, 12 aa, Homo sapiens
  CDR3 for alpha chain variable domain of TCR clone 162893 (TRAV1-1, TRAJ39)
CAVPVVGNMLTF

SEQ ID NO: 325786 - protein, 15 aa, Homo sapiens
  CDR3 for beta chain variable domain of TCR clone 162893 (TRBV5-1, TRBJ1-1)
CASSSTTGTNTEAFF

SEQ ID NO: 325787 - protein, 14 aa, Homo sapiens
  CDR3 for alpha chain variable domain of TCR clone 162894 (TRAV8-1, TRAJ5)
CAVRTDTGRRALTF

SEQ ID NO: 325788 - protein, 15 aa, Homo sapiens
  CDR3 for beta chain variable domain of TCR clone 162894 (TRBV7-3, TRBJ2-1)
CASSPPGGGEVEQFF

SEQ ID NO: 325789 - protein, 11 aa, Homo sapiens
  CDR3 for alpha chain variable domain of TCR clone 162895 (TRAV35, TRAJ34)
CWARNTDKLIF

SEQ ID NO: 325790 - protein, 15 aa, Homo sapiens
  CDR3 for beta chain variable domain of TCR clone 162895 (TRBV11-3, TRBJ2-3)
CASSAGTVVTNTQYF

SEQ ID NO: 325791 - protein, 12 aa, Homo sapiens
  CDR3 for alpha chain variable domain of TCR clone 162896 (TRAV4, TRAJ21)
CLVGDNFNKFYF

SEQ ID NO: 325792 - protein, 15 aa, Homo sapiens
  CDR3 for beta chain variable domain of TCR clone 162896 (TRBV11-3, TRBJ2-3)
CASLKDGREGDTQYF

SEQ ID NO: 325793 - protein, 14 aa, Homo sapiens
  CDR3 for alpha chain variable domain of TCR clone 162897 (TRAV14/DV4, TRAJ7)
CAISLYYGNNRLAF

SEQ ID NO: 325794 - protein, 13 aa, Homo sapiens
  CDR3 for beta chain variable domain of TCR clone 162897 (TRBV12-4, TRBJ2-2)
CASSITGSGELFF

SEQ ID NO: 325795 - protein, 17 aa, Homo sapiens
  CDR3 for alpha chain variable domain of TCR clone 162898 (TRAV8-3, TRAJ52)
CAVCAEAGGTSYGKLTF

SEQ ID NO: 325796 - protein, 15 aa, Homo sapiens
  CDR3 for beta chain variable domain of TCR clone 162898 (TRBV5-1, TRBJ2-5)
CASSRQGLGQETQYF

SEQ ID NO: 325797 - protein, 21 aa, Homo sapiens
  CDR3 for alpha chain variable domain of TCR clone 162899 (TRAV8-4, TRAJ47)
HLTKPSAHISDAAERGNKRVF

SEQ ID NO: 325798 - protein, 14 aa, Homo sapiens
  CDR3 for beta chain variable domain of TCR clone 162899 (TRBV7-9, TRBJ2-1)
CASSPRDSLYEQFF

SEQ ID NO: 325799 - protein, 14 aa, Homo sapiens
  CDR3 for alpha chain variable domain of TCR clone 162900 (TRAV26-1, TRAJ45)
CIEVAGGGADGLTF

SEQ ID NO: 325800 - protein, 12 aa, Homo sapiens
  CDR3 for beta chain variable domain of TCR clone 162900 (TRBV12-4, TRBJ2-7)
CASSLGGYEQYF

SEQ ID NO: 325801 - protein, 13 aa, Homo sapiens
  CDR3 for alpha chain variable domain of TCR clone 162901 (TRAV39, TRAJ30)
CARWMNRDDKIIF

SEQ ID NO: 325802 - protein, 15 aa, Homo sapiens
  CDR3 for beta chain variable domain of TCR clone 162901 (TRBV11-2, TRBJ2-1)
CASSSPSTRYNEQFF

SEQ ID NO: 325803 - protein, 14 aa, Homo sapiens
  CDR3 for alpha chain variable domain of TCR clone 162902 (TRAV12-2, TRAJ40)
CAVKIPSGTYNYIF

SEQ ID NO: 325804 - protein, 15 aa, Homo sapiens
  CDR3 for beta chain variable domain of TCR clone 162902 (TRBV20-1, TRBJ1-4)
CSARREWGVNEKLFF

SEQ ID NO: 325805 - protein, 13 aa, Homo sapiens
  CDR3 for alpha chain variable domain of TCR clone 162903 (TRAV3, TRAJ21)
CAVREPDFNKFYF

SEQ ID NO: 325806 - protein, 13 aa, Homo sapiens
  CDR3 for beta chain variable domain of TCR clone 162903 (TRBV9, TRBJ2-1)
RASSPSGGNEQFF

SEQ ID NO: 325807 - protein, 14 aa, Homo sapiens
  CDR3 for alpha chain variable domain of TCR clone 162904 (TRAV1-2, TRAJ8)
CAVREDTGFQKLVF

SEQ ID NO: 325808 - protein, 15 aa, Homo sapiens
  CDR3 for beta chain variable domain of TCR clone 162904 (TRBV5-5, TRBJ1-5)
CASSSTPGSNQHQHF

SEQ ID NO: 325809 - protein, 16 aa, Homo sapiens
  CDR3 for alpha chain variable domain of TCR clone 162905 (TRAV4, TRAJ9)
CLVGDPTRPGGFKTIF

SEQ ID NO: 325810 - protein, 13 aa, Homo sapiens
  CDR3 for beta chain variable domain of TCR clone 162905 (TRBV5-5, TRBJ1-2)
CASSFWRGEDYTF

SEQ ID NO: 325811 - protein, 18 aa, Homo sapiens
  CDR3 for alpha chain variable domain of TCR clone 162906 (TRAV13-1, TRAJ52)
CAASKRSAGGTSYGKLTF

SEQ ID NO: 325812 - protein, 15 aa, Homo sapiens
  CDR3 for beta chain variable domain of TCR clone 162906 (TRBV3-1, TRBJ2-7)
CASSPQGKLNYEQYF

SEQ ID NO: 325813 - protein, 14 aa, Homo sapiens
  CDR3 for alpha chain variable domain of TCR clone 162907 (TRAV27, TRAJ22)
YAGLPSGSARQLTF

SEQ ID NO: 325814 - protein, 16 aa, Homo sapiens
  CDR3 for beta chain variable domain of TCR clone 162907 (TRBV7-3, TRBJ2-2)
CASSLKRGTLSGELFF

SEQ ID NO: 325815 - protein, 14 aa, Homo sapiens
  CDR3 for alpha chain variable domain of TCR clone 162908 (TRAV12-2, TRAJ40)
CAVKILSGTYKYNF

SEQ ID NO: 325816 - protein, 14 aa, Homo sapiens
  CDR3 for beta chain variable domain of TCR clone 162908 (TRBV20-1, TRBJ1-1)
CSAQTRIGGTEAFF

SEQ ID NO: 325817 - protein, 14 aa, Homo sapiens
  CDR3 for alpha chain variable domain of TCR clone 162909 (TRAV16, TRAJ33)
CALSAMDSNYQLLW

SEQ ID NO: 325818 - protein, 16 aa, Homo sapiens
  CDR3 for beta chain variable domain of TCR clone 162909 (TRBV25-1, TRBJ2-7)
CASSELTGGGIYEQYF

SEQ ID NO: 325819 - protein, 12 aa, Homo sapiens
  CDR3 for alpha chain variable domain of TCR clone 162910 (TRAV12-3, TRAJ17)
CAMTLTGNELTV

SEQ ID NO: 325820 - protein, 15 aa, Homo sapiens
  CDR3 for beta chain variable domain of TCR clone 162910 (TRBV20-1, TRBJ2-7)
CSARDRVSGMDEQYF

SEQ ID NO: 325821 - protein, 18 aa, Homo sapiens
  CDR3 for alpha chain variable domain of TCR clone 162911 (TRAV12-3, TRAJ52)
CAMSRTNAGGNSYGKLTF

SEQ ID NO: 325822 - protein, 13 aa, Homo sapiens
  CDR3 for beta chain variable domain of TCR clone 162911 (TRBV2, TRBJ1-4)
CASSERAGEKLFF

SEQ ID NO: 325823 - protein, 11 aa, Homo sapiens
  CDR3 for alpha chain variable domain of TCR clone 162912 (TRAV21, TRAJ11)
CAVNGYSTLTF

SEQ ID NO: 325824 - protein, 12 aa, Homo sapiens
  CDR3 for beta chain variable domain of TCR clone 162912 (TRBV18, TRBJ2-5)
CASSPNQETQYF

SEQ ID NO: 325825 - protein, 13 aa, Homo sapiens
  CDR3 for alpha chain variable domain of TCR clone 162913 (TRAV12-1, TRAJ38)
CVVPAGNNRKLIW

SEQ ID NO: 325826 - protein, 17 aa, Homo sapiens
  CDR3 for beta chain variable domain of TCR clone 162913 (TRBV4-1, TRBJ2-3)
CASSQSTTGGPVDTQYL

SEQ ID NO: 325827 - protein, 14 aa, Homo sapiens
  CDR3 for alpha chain variable domain of TCR clone 162914 (TRAV1-2, TRAJ16)
CAVNRFSDCQELLF

SEQ ID NO: 325828 - protein, 16 aa, Homo sapiens
  CDR3 for beta chain variable domain of TCR clone 162914 (TRBV9, TRBJ2-1)
CASSVGGGGNYNEQFF

SEQ ID NO: 325829 - protein, 22 aa, Homo sapiens
  CDR3 for alpha chain variable domain of TCR clone 162915 (TRAV21, TRAJ39)
AASQPGDSATPKGAKAGNMLTF

SEQ ID NO: 325830 - protein, 14 aa, Homo sapiens
  CDR3 for beta chain variable domain of TCR clone 162915 (TRBV12-5, TRBJ2-5)
CASGSRTHQETQYF

SEQ ID NO: 325831 - protein, 15 aa, Homo sapiens
  CDR3 for alpha chain variable domain of TCR clone 162916 (TRAV10, TRAJ6)
CVVSGGSGGGYIPTF

SEQ ID NO: 325832 - protein, 15 aa, Homo sapiens
  CDR3 for beta chain variable domain of TCR clone 162916 (TRBV6-5, TRBJ2-1)
CASRGDFDSYNEQFF

SEQ ID NO: 325833 - protein, 19 aa, Homo sapiens
  CDR3 for alpha chain variable domain of TCR clone 162917 (TRAV1-2, TRAJ26)
CLLPLCCERPDNYGQNFVF

SEQ ID NO: 325834 - protein, 15 aa, Homo sapiens
  CDR3 for beta chain variable domain of TCR clone 162917 (TRBV9, TRBJ1-6)
WASSVAGTGDSPLHF

SEQ ID NO: 325835 - protein, 13 aa, Homo sapiens
  CDR3 for alpha chain variable domain of TCR clone 162918 (TRAV27, TRAJ45)
CRSSGGGADGLTF

SEQ ID NO: 325836 - protein, 15 aa, Homo sapiens
  CDR3 for beta chain variable domain of TCR clone 162918 (TRBV7-3, TRBJ2-3)
CASSLAGGAGDAQYF

SEQ ID NO: 325837 - protein, 14 aa, Homo sapiens
  CDR3 for alpha chain variable domain of TCR clone 162919 (TRAV4, TRAJ26)
CLVGPHNYGQNFVF

SEQ ID NO: 325838 - protein, 17 aa, Homo sapiens
  CDR3 for beta chain variable domain of TCR clone 162919 (TRBV24-1, TRBJ2-1)
CATSDVSASGTYNEQFF

SEQ ID NO: 325839 - protein, 11 aa, Homo sapiens
  CDR3 for alpha chain variable domain of TCR clone 162920 (TRAV12-3, TRAJ41)
CGMNAREALSF

SEQ ID NO: 325840 - protein, 16 aa, Homo sapiens
  CDR3 for beta chain variable domain of TCR clone 162920 (TRBV7-8, TRBJ2-3)
CASSTEGQRETDTQYF

SEQ ID NO: 325841 - protein, 16 aa, Homo sapiens
  CDR3 for alpha chain variable domain of TCR clone 162921 (TRAV12-1, TRAJ22)
CVVNTISYGSARQLTF

SEQ ID NO: 325842 - protein, 13 aa, Homo sapiens
  CDR3 for beta chain variable domain of TCR clone 162921 (TRBV19, TRBJ2-1)
CASNGGVFSKQFF

SEQ ID NO: 325843 - protein, 13 aa, Homo sapiens
  CDR3 for alpha chain variable domain of TCR clone 162922 (TRAV2, TRAJ40)
WAVVTSGTYKYIF

SEQ ID NO: 325844 - protein, 15 aa, Homo sapiens
  CDR3 for beta chain variable domain of TCR clone 162922 (TRBV11-2, TRBJ1-3)
CASSLSPLVRDTIYF

SEQ ID NO: 325845 - protein, 11 aa, Homo sapiens
  CDR3 for alpha chain variable domain of TCR clone 162923 (TRAV12-3, TRAJ43)
CVMSVSNDMRF

SEQ ID NO: 325846 - protein, 14 aa, Homo sapiens
  CDR3 for beta chain variable domain of TCR clone 162923 (TRBV12-5, TRBJ2-5)
CASGSRTHQETQYF

SEQ ID NO: 325847 - protein, 12 aa, Homo sapiens
  CDR3 for alpha chain variable domain of TCR clone 162924 (TRAV17, TRAJ12)
CATLRSSYKVIF

SEQ ID NO: 325848 - protein, 16 aa, Homo sapiens
  CDR3 for beta chain variable domain of TCR clone 162924 (TRBV28, TRBJ2-7)
CASSLFFETGGPEQYF

SEQ ID NO: 325849 - protein, 14 aa, Homo sapiens
  CDR3 for alpha chain variable domain of TCR clone 162925 (TRAV17, TRAJ24)
CATLTTDSWGKLQF

SEQ ID NO: 325850 - protein, 16 aa, Homo sapiens
  CDR3 for beta chain variable domain of TCR clone 162925 (TRBV4-2, TRBJ2-7)
CASSQDGGSLRGEQYF

SEQ ID NO: 325851 - protein, 16 aa, Homo sapiens
  CDR3 for alpha chain variable domain of TCR clone 162926 (TRAV13-2, TRAJ32)
CAENMNYCGATNKLIF

SEQ ID NO: 325852 - protein, 14 aa, Homo sapiens
  CDR3 for beta chain variable domain of TCR clone 162926 (TRBV4-3, TRBJ2-7)
CASSQDVAGGEQYF

SEQ ID NO: 325853 - protein, 15 aa, Homo sapiens
  CDR3 for alpha chain variable domain of TCR clone 162927 (TRAV8-3, TRAJ27)
CAVGPTKTNAGKSTF

SEQ ID NO: 325854 - protein, 17 aa, Homo sapiens
  CDR3 for beta chain variable domain of TCR clone 162927 (TRBV7-8, TRBJ2-6)
CASSAGTGGAGANVLTF

SEQ ID NO: 325855 - protein, 22 aa, Homo sapiens
  CDR3 for alpha chain variable domain of TCR clone 162928 (TRAV8-2, TRAJ44)
CVREGPALPVNSPLGLEQDFRS

SEQ ID NO: 325856 - protein, 13 aa, Homo sapiens
  CDR3 for beta chain variable domain of TCR clone 162928 (TRBV12-4, TRBJ2-7)
CASSRQASYEQYF

SEQ ID NO: 325857 - protein, 12 aa, Homo sapiens
  CDR3 for alpha chain variable domain of TCR clone 162929 (TRAV29/DV5, TRAJ49)
CAATDTGNQFYF

SEQ ID NO: 325858 - protein, 20 aa, Homo sapiens
  CDR3 for beta chain variable domain of TCR clone 162929 (TRBV28, TRBJ2-1)
CASTPIGRSPGLAGGNEQFF

SEQ ID NO: 325859 - protein, 14 aa, Homo sapiens
  CDR3 for alpha chain variable domain of TCR clone 162930 (TRAV1-1, TRAJ34)
CAVSPSYNTDKLIF

SEQ ID NO: 325860 - protein, 16 aa, Homo sapiens
  CDR3 for beta chain variable domain of TCR clone 162930 (TRBV19, TRBJ2-1)
CASSSKSTRSYNEQFF

SEQ ID NO: 325861 - protein, 14 aa, Homo sapiens
  CDR3 for alpha chain variable domain of TCR clone 162931 (TRAV3, TRAJ17)
CAVSDAAAGNKRTF

SEQ ID NO: 325862 - protein, 13 aa, Homo sapiens
  CDR3 for beta chain variable domain of TCR clone 162931 (TRBV2, TRBJ1-1)
CASSVSGYTEAFF

SEQ ID NO: 325863 - protein, 14 aa, Homo sapiens
  CDR3 for alpha chain variable domain of TCR clone 162932 (TRAV12-2, TRAJ33)
CAVKRARGNYQLIW

SEQ ID NO: 325864 - protein, 14 aa, Homo sapiens
  CDR3 for beta chain variable domain of TCR clone 162932 (TRBV13, TRBJ2-7)
CASSLKGASYEQYF

SEQ ID NO: 325865 - protein, 14 aa, Homo sapiens
  CDR3 for alpha chain variable domain of TCR clone 162933 (TRAV35, TRAJ42)
CAGRYGGSQGNLIF

SEQ ID NO: 325866 - protein, 14 aa, Homo sapiens
  CDR3 for beta chain variable domain of TCR clone 162933 (TRBV2, TRBJ2-1)
CASRTGSSYNEQFF

SEQ ID NO: 325867 - protein, 13 aa, Homo sapiens
  CDR3 for alpha chain variable domain of TCR clone 162934 (TRAV12-3, TRAJ33)
CAMSVNSNYQLIW

SEQ ID NO: 325868 - protein, 13 aa, Homo sapiens
  CDR3 for beta chain variable domain of TCR clone 162934 (TRBV5-1, TRBJ1-2)
CARSFQDGYGYTF

SEQ ID NO: 325869 - protein, 16 aa, Homo sapiens
  CDR3 for alpha chain variable domain of TCR clone 162935 (TRAV22, TRAJ45)
CAVARGKRGGADGLTF

SEQ ID NO: 325870 - protein, 16 aa, Homo sapiens
  CDR3 for beta chain variable domain of TCR clone 162935 (TRBV5-1, TRBJ2-5)
CASSLRRTSGQETQYF

SEQ ID NO: 325871 - protein, 13 aa, Homo sapiens
  CDR3 for alpha chain variable domain of TCR clone 162936 (TRAV6, TRAJ16)
CALDDSDGQKLLF

SEQ ID NO: 325872 - protein, 14 aa, Homo sapiens
  CDR3 for beta chain variable domain of TCR clone 162936 (TRBV12-5, TRBJ2-5)
CASGSRTHQETQYF

SEQ ID NO: 325873 - protein, 15 aa, Homo sapiens
  CDR3 for alpha chain variable domain of TCR clone 162937 (TRAV27, TRAJ38)
CAARRNAGNNRKLIW

SEQ ID NO: 325874 - protein, 14 aa, Homo sapiens
  CDR3 for beta chain variable domain of TCR clone 162937 (TRBV4-2, TRBJ2-3)
CASSQERGTDTQYF

SEQ ID NO: 325875 - protein, 12 aa, Homo sapiens
  CDR3 for alpha chain variable domain of TCR clone 162938 (TRAV12-3, TRAJ3)
CAIDSSASKIIF

SEQ ID NO: 325876 - protein, 17 aa, Homo sapiens
  CDR3 for beta chain variable domain of TCR clone 162938 (TRBV7-9, TRBJ2-3)
CASSLEEAGEYPDTQYF

SEQ ID NO: 325877 - protein, 13 aa, Homo sapiens
  CDR3 for alpha chain variable domain of TCR clone 162939 (TRAV8-3, TRAJ44)
CAVVPCTASKLTF

SEQ ID NO: 325878 - protein, 13 aa, Homo sapiens
  CDR3 for beta chain variable domain of TCR clone 162939 (TRBV11-2, TRBJ1-2)
CASSLGTNYGYTF

SEQ ID NO: 325879 - protein, 23 aa, Homo sapiens
  CDR3 for alpha chain variable domain of TCR clone 162940 (TRAV4, TRAJ26)
IPADRKSSTLSKNRVYYGQTLVL

SEQ ID NO: 325880 - protein, 16 aa, Homo sapiens
  CDR3 for beta chain variable domain of TCR clone 162940 (TRBV7-2, TRBJ1-2)
CASSSNQDRRGHGYTF

SEQ ID NO: 325881 - protein, 16 aa, Homo sapiens
  CDR3 for alpha chain variable domain of TCR clone 162941 (TRAV26-1, TRAJ38)
CIVRPLNAGNNRKLIG

SEQ ID NO: 325882 - protein, 13 aa, Homo sapiens
  CDR3 for beta chain variable domain of TCR clone 162941 (TRBV18, TRBJ1-1)
CASSPNGDTEAFF

SEQ ID NO: 325883 - protein, 11 aa, Homo sapiens
  CDR3 for alpha chain variable domain of TCR clone 162942 (TRAV8-6, TRAJ34)
CAVWNTDKLIF

SEQ ID NO: 325884 - protein, 16 aa, Homo sapiens
  CDR3 for beta chain variable domain of TCR clone 162942 (TRBV5-1, TRBJ2-7)
CASSSASTRSGGEQYF

SEQ ID NO: 325885 - protein, 14 aa, Homo sapiens
  CDR3 for alpha chain variable domain of TCR clone 162943 (TRAV8-4, TRAJ38)
CAVSYAGNNRKLIW

SEQ ID NO: 325886 - protein, 15 aa, Homo sapiens
  CDR3 for beta chain variable domain of TCR clone 162943 (TRBV12-4, TRBJ2-1)
CASSLLATGNNQQFF

SEQ ID NO: 325887 - protein, 16 aa, Homo sapiens
  CDR3 for alpha chain variable domain of TCR clone 162944 (TRAV12-3, TRAJ53)
CAMSPGSGGSNYKLTF

SEQ ID NO: 325888 - protein, 16 aa, Homo sapiens
  CDR3 for beta chain variable domain of TCR clone 162944 (TRBV27, TRBJ2-2)
CASSFRGLVRTGELFC

SEQ ID NO: 325889 - protein, 12 aa, Homo sapiens
  CDR3 for alpha chain variable domain of TCR clone 162945 (TRAV12-2, TRAJ34)
CAVSYNTDKLIF

SEQ ID NO: 325890 - protein, 14 aa, Homo sapiens
  CDR3 for beta chain variable domain of TCR clone 162945 (TRBV15, TRBJ2-5)
CATSSTGYQETQYF

SEQ ID NO: 325891 - protein, 13 aa, Homo sapiens
  CDR3 for alpha chain variable domain of TCR clone 162946 (TRAV25, TRAJ10)
CAGRTGGGNKLTF

SEQ ID NO: 325892 - protein, 20 aa, Homo sapiens
  CDR3 for beta chain variable domain of TCR clone 162946 (TRBV7-8, TRBJ2-2)
CASSHLFPGPTIHIAGELFF

SEQ ID NO: 325893 - protein, 14 aa, Homo sapiens
  CDR3 for alpha chain variable domain of TCR clone 162947 (TRAV20, TRAJ22)
CAVALGGSAMQLTF

SEQ ID NO: 325894 - protein, 15 aa, Homo sapiens
  CDR3 for beta chain variable domain of TCR clone 162947 (TRBV7-2, TRBJ1-1)
CASSFAGDRDTEAFF

SEQ ID NO: 325895 - protein, 10 aa, Homo sapiens
  CDR3 for alpha chain variable domain of TCR clone 162948 (TRAV30, TRAJ48)
CGIGNENLTF

SEQ ID NO: 325896 - protein, 15 aa, Homo sapiens
  CDR3 for beta chain variable domain of TCR clone 162948 (TRBV28, TRBJ2-5)
CASSPPWSYQETQYF

SEQ ID NO: 325897 - protein, 10 aa, Homo sapiens
  CDR3 for alpha chain variable domain of TCR clone 162949 (TRAV1-2, TRAJ31)
CVSEDARLMF

SEQ ID NO: 325898 - protein, 14 aa, Homo sapiens
  CDR3 for beta chain variable domain of TCR clone 162949 (TRBV19, TRBJ2-1)
CASPTFALRGEQFF

SEQ ID NO: 325899 - protein, 13 aa, Homo sapiens
  CDR3 for alpha chain variable domain of TCR clone 162950 (TRAV25, TRAJ26)
CAGMDNYGQNFVF

SEQ ID NO: 325900 - protein, 15 aa, Homo sapiens
  CDR3 for beta chain variable domain of TCR clone 162950 (TRBV10-3, TRBJ2-1)
CASRNGTSGHNEQFF

SEQ ID NO: 325901 - protein, 13 aa, Homo sapiens
  CDR3 for alpha chain variable domain of TCR clone 162951 (TRAV27, TRAJ40)
CAGPPSGTYKYIF

SEQ ID NO: 325902 - protein, 13 aa, Homo sapiens
  CDR3 for beta chain variable domain of TCR clone 162951 (TRBV28, TRBJ1-2)
CAGRERGNYGYTF

SEQ ID NO: 325903 - protein, 13 aa, Homo sapiens
  CDR3 for alpha chain variable domain of TCR clone 162952 (TRAV36/DV7, TRAJ53)
CALSGGSNYKLTF

SEQ ID NO: 325904 - protein, 13 aa, Homo sapiens
  CDR3 for beta chain variable domain of TCR clone 162952 (TRBV28, TRBJ2-7)
CASRLPSRYEQYF

SEQ ID NO: 325905 - protein, 17 aa, Homo sapiens
  CDR3 for alpha chain variable domain of TCR clone 162953 (TRAV4, TRAJ42)
CLVGVLNYGGSQGNLIF

SEQ ID NO: 325906 - protein, 15 aa, Homo sapiens
  CDR3 for beta chain variable domain of TCR clone 162953 (TRBV20-1, TRBJ2-7)
CSAESGTSGAYEKYF

SEQ ID NO: 325907 - protein, 14 aa, Homo sapiens
  CDR3 for alpha chain variable domain of TCR clone 162954 (TRAV20, TRAJ56)
CAVQFGGANSKLAF

SEQ ID NO: 325908 - protein, 14 aa, Homo sapiens
  CDR3 for beta chain variable domain of TCR clone 162954 (TRBV20-1, TRBJ2-7)
CSAKRGRSSYEQYV

SEQ ID NO: 325909 - protein, 13 aa, Homo sapiens
  CDR3 for alpha chain variable domain of TCR clone 162955 (TRAV8-3, TRAJ28)
CAVGAVGSYQLTF

SEQ ID NO: 325910 - protein, 14 aa, Homo sapiens
  CDR3 for beta chain variable domain of TCR clone 162955 (TRBV5-1, TRBJ2-3)
CASSFPGNTDTQYF

SEQ ID NO: 325911 - protein, 13 aa, Homo sapiens
  CDR3 for alpha chain variable domain of TCR clone 162956 (TRAV27, TRAJ54)
CAGAGQGAQKLVF

SEQ ID NO: 325912 - protein, 15 aa, Homo sapiens
  CDR3 for beta chain variable domain of TCR clone 162956 (TRBV18, TRBJ2-6)
CASSPSYAGANVQTF

SEQ ID NO: 325913 - protein, 16 aa, Homo sapiens
  CDR3 for alpha chain variable domain of TCR clone 162957 (TRAV30, TRAJ24)
CGTEIVDADSWGKFQF

SEQ ID NO: 325914 - protein, 13 aa, Homo sapiens
  CDR3 for beta chain variable domain of TCR clone 162957 (TRBV6-3, TRBJ2-1)
CASLAGGFDEQFF

SEQ ID NO: 325915 - protein, 13 aa, Homo sapiens
  CDR3 for alpha chain variable domain of TCR clone 162958 (TRAV27, TRAJ41)
CAGEGNSWYALNF

SEQ ID NO: 325916 - protein, 13 aa, Homo sapiens
  CDR3 for beta chain variable domain of TCR clone 162958 (TRBV11-2, TRBJ1-1)
CASSLGNGAEAFF

SEQ ID NO: 325917 - protein, 14 aa, Homo sapiens
  CDR3 for alpha chain variable domain of TCR clone 162959 (TRAV27, TRAJ58)
CAGDGETSGSRLTF

SEQ ID NO: 325918 - protein, 14 aa, Homo sapiens
  CDR3 for beta chain variable domain of TCR clone 162959 (TRBV19, TRBJ2-1)
CASPTFVLSGEQFF

SEQ ID NO: 325919 - protein, 15 aa, Homo sapiens
  CDR3 for alpha chain variable domain of TCR clone 162960 (TRAV13-2, TRAJ37)
CREYEDPGNTGKLIF

SEQ ID NO: 325920 - protein, 13 aa, Homo sapiens
  CDR3 for beta chain variable domain of TCR clone 162960 (TRBV20-1, TRBJ2-7)
CSARSGQPYEQYF

SEQ ID NO: 325921 - protein, 15 aa, Homo sapiens
  CDR3 for alpha chain variable domain of TCR clone 162961 (TRAV20, TRAJ53)
CAVQERGGSNYKLTF

SEQ ID NO: 325922 - protein, 14 aa, Homo sapiens
  CDR3 for beta chain variable domain of TCR clone 162961 (TRBV7-2, TRBJ2-7)
CASSPKTSFYEQYF

SEQ ID NO: 325923 - protein, 14 aa, Homo sapiens
  CDR3 for alpha chain variable domain of TCR clone 162962 (TRAV12-3, TRAJ10)
SHLPLTGGGNKLTF

SEQ ID NO: 325924 - protein, 15 aa, Homo sapiens
  CDR3 for beta chain variable domain of TCR clone 162962 (TRBV29-1, TRBJ2-6)
CSVGDRGSGANVLSF

SEQ ID NO: 325925 - protein, 14 aa, Homo sapiens
  CDR3 for alpha chain variable domain of TCR clone 162963 (TRAV26-2, TRAJ32)
CCVGYGSATNKLIF

SEQ ID NO: 325926 - protein, 13 aa, Homo sapiens
  CDR3 for beta chain variable domain of TCR clone 162963 (TRBV12-5, TRBJ2-3)
CASGDRQSDTQYF

SEQ ID NO: 325927 - protein, 10 aa, Homo sapiens
  CDR3 for alpha chain variable domain of TCR clone 162964 (TRAV30, TRAJ48)
CGIGNEKLTF

SEQ ID NO: 325928 - protein, 15 aa, Homo sapiens
  CDR3 for beta chain variable domain of TCR clone 162964 (TRBV20-1, TRBJ1-1)
CSASRGVTGNTEAFF

SEQ ID NO: 325929 - protein, 11 aa, Homo sapiens
  CDR3 for alpha chain variable domain of TCR clone 162965 (TRAV1-1, TRAJ23)
CAVRQGGKLIF

SEQ ID NO: 325930 - protein, 13 aa, Homo sapiens
  CDR3 for beta chain variable domain of TCR clone 162965 (TRBV7-3, TRBJ1-1)
CASSQDWLAEAFF

SEQ ID NO: 325931 - protein, 13 aa, Homo sapiens
  CDR3 for alpha chain variable domain of TCR clone 162966 (TRAV26-1, )
CIVSHRVEGVWNQ

SEQ ID NO: 325932 - protein, 14 aa, Homo sapiens
  CDR3 for beta chain variable domain of TCR clone 162966 (TRBV20-1, TRBJ2-7)
CSAWTALSSYEHYF

SEQ ID NO: 325933 - protein, 11 aa, Homo sapiens
  CDR3 for alpha chain variable domain of TCR clone 162967 (TRAV12-2, TRAJ29)
CAVTLRSPLVF

SEQ ID NO: 325934 - protein, 13 aa, Homo sapiens
  CDR3 for beta chain variable domain of TCR clone 162967 (TRBV7-7, TRBJ2-3)
CASSLSRADTQYF

SEQ ID NO: 325935 - protein, 13 aa, Homo sapiens
  CDR3 for alpha chain variable domain of TCR clone 162968 (TRAV2, TRAJ20)
CAVEDLSEYKLSF

SEQ ID NO: 325936 - protein, 16 aa, Homo sapiens
  CDR3 for beta chain variable domain of TCR clone 162968 (TRBV25-1, TRBJ2-7)
CASSELTGGGIYEQYF

SEQ ID NO: 325937 - protein, 13 aa, Homo sapiens
  CDR3 for alpha chain variable domain of TCR clone 162969 (TRAV21, TRAJ57)
FAVTQGGSEKLVF

SEQ ID NO: 325938 - protein, 17 aa, Homo sapiens
  CDR3 for beta chain variable domain of TCR clone 162969 (TRBV10-3, TRBJ2-6)
CAISELAESSGANVLTF

SEQ ID NO: 325939 - protein, 17 aa, Homo sapiens
  CDR3 for alpha chain variable domain of TCR clone 162970 (TRAV3, TRAJ6)
CAVRDGPRAGGSYIPTF

SEQ ID NO: 325940 - protein, 14 aa, Homo sapiens
  CDR3 for beta chain variable domain of TCR clone 162970 (TRBV7-2, TRBJ2-7)
CSSSPKTSFDEQYF

SEQ ID NO: 325941 - protein, 14 aa, Homo sapiens
  CDR3 for alpha chain variable domain of TCR clone 162971 (TRAV13-1, TRAJ42)
QQVNYGGSQGNLIF

SEQ ID NO: 325942 - protein, 15 aa, Homo sapiens
  CDR3 for beta chain variable domain of TCR clone 162971 (TRBV20-1, TRBJ2-1)
CSASSAGSSYNEQFF

SEQ ID NO: 325943 - protein, 17 aa, Homo sapiens
  CDR3 for alpha chain variable domain of TCR clone 162972 (TRAV3, TRAJ42)
CAVRDRDYGGSQGNLIF

SEQ ID NO: 325944 - protein, 12 aa, Homo sapiens
  CDR3 for beta chain variable domain of TCR clone 162972 (TRBV11-2, TRBJ2-1)
CARSPGNNEQFF

SEQ ID NO: 325945 - protein, 15 aa, Homo sapiens
  CDR3 for alpha chain variable domain of TCR clone 162973 (TRAV34, TRAJ38)
CGADFTPGNNRKLIW

SEQ ID NO: 325946 - protein, 17 aa, Homo sapiens
  CDR3 for beta chain variable domain of TCR clone 162973 (TRBV11-2, TRBJ2-1)
RASSLYPPGVEYNEQFF

SEQ ID NO: 325947 - protein, 13 aa, Homo sapiens
  CDR3 for alpha chain variable domain of TCR clone 162974 (TRAV36/DV7, TRAJ57)
CAVVLGGSEKLVF

SEQ ID NO: 325948 - protein, 14 aa, Homo sapiens
  CDR3 for beta chain variable domain of TCR clone 162974 (TRBV4-1, TRBJ1-2)
CASSQDGQIRGYTF

SEQ ID NO: 325949 - protein, 19 aa, Homo sapiens
  CDR3 for alpha chain variable domain of TCR clone 162975 (TRAV1-1, TRAJ32)
CSVRVDELWWCYKQAHLWN

SEQ ID NO: 325950 - protein, 12 aa, Homo sapiens
  CDR3 for beta chain variable domain of TCR clone 162975 (TRBV19, TRBJ2-1)
CASSRQGAEQFF

SEQ ID NO: 325951 - protein, 16 aa, Homo sapiens
  CDR3 for alpha chain variable domain of TCR clone 162976 (TRAV13-1, TRAJ37)
CAASSLGSSNTGKLIF

SEQ ID NO: 325952 - protein, 15 aa, Homo sapiens
  CDR3 for beta chain variable domain of TCR clone 162976 (TRBV19, TRBJ1-1)
CASTSGQIQNTEAFF

SEQ ID NO: 325953 - protein, 12 aa, Homo sapiens
  CDR3 for alpha chain variable domain of TCR clone 162977 (TRAV26-1, TRAJ43)
CIVRGNNNDMRF

SEQ ID NO: 325954 - protein, 13 aa, Homo sapiens
  CDR3 for beta chain variable domain of TCR clone 162977 (TRBV20-1, TRBJ2-3)
CSSIYPGADTQYF

SEQ ID NO: 325955 - protein, 14 aa, Homo sapiens
  CDR3 for alpha chain variable domain of TCR clone 162978 (TRAV20, TRAJ56)
CAVQFGGANSKLTF

SEQ ID NO: 325956 - protein, 14 aa, Homo sapiens
  CDR3 for beta chain variable domain of TCR clone 162978 (TRBV20-1, TRBJ2-7)
CSAKRGRSPYEQYS

SEQ ID NO: 325957 - protein, 15 aa, Homo sapiens
  CDR3 for alpha chain variable domain of TCR clone 162979 (TRAV3, TRAJ30)
CAVRDEYGRDDKIIF

SEQ ID NO: 325958 - protein, 16 aa, Homo sapiens
  CDR3 for beta chain variable domain of TCR clone 162979 (TRBV5-1, TRBJ2-5)
CASSLANHRWRETQYF

SEQ ID NO: 325959 - protein, 14 aa, Homo sapiens
  CDR3 for alpha chain variable domain of TCR clone 162980 (TRAV1-2, TRAJ8)
CAVREDTGFQKLGF

SEQ ID NO: 325960 - protein, 15 aa, Homo sapiens
  CDR3 for beta chain variable domain of TCR clone 162980 (TRBV28, TRBJ2-6)
CASSLAGSGANVLTF

SEQ ID NO: 325961 - protein, 15 aa, Homo sapiens
  CDR3 for alpha chain variable domain of TCR clone 162981 (TRAV2, TRAJ22)
CAVPSRGGSARQLTF

SEQ ID NO: 325962 - protein, 14 aa, Homo sapiens
  CDR3 for beta chain variable domain of TCR clone 162981 (TRBV7-6, TRBJ2-3)
CASSLGTVADMQYF

SEQ ID NO: 325963 - protein, 13 aa, Homo sapiens
  CDR3 for alpha chain variable domain of TCR clone 162982 (TRAV21, TRAJ45)
CAHTGGGADGLTF

SEQ ID NO: 325964 - protein, 13 aa, Homo sapiens
  CDR3 for beta chain variable domain of TCR clone 162982 (TRBV5-1, TRBJ2-7)
CASSLAVGYEQYF

SEQ ID NO: 325965 - protein, 16 aa, Homo sapiens
  CDR3 for alpha chain variable domain of TCR clone 162983 (TRAV30, TRAJ24)
CGTEIVDADSWGKFQF

SEQ ID NO: 325966 - protein, 15 aa, Homo sapiens
  CDR3 for beta chain variable domain of TCR clone 162983 (TRBV7-2, TRBJ2-1)
CASSLVLAGGNEQFF

SEQ ID NO: 325967 - protein, 16 aa, Homo sapiens
  CDR3 for alpha chain variable domain of TCR clone 162984 (TRAV3, TRAJ37)
CAVRPHGSGNTGKLIF

SEQ ID NO: 325968 - protein, 15 aa, Homo sapiens
  CDR3 for beta chain variable domain of TCR clone 162984 (TRBV9, TRBJ1-2)
CQQRRGKGLPYGYTF

SEQ ID NO: 325969 - protein, 18 aa, Homo sapiens
  CDR3 for alpha chain variable domain of TCR clone 162985 (TRAV16, TRAJ26)
CALTRWSEFCPWSRNQIV

SEQ ID NO: 325970 - protein, 13 aa, Homo sapiens
  CDR3 for beta chain variable domain of TCR clone 162985 (TRBV4-1, TRBJ2-2)
CASSQENTGELFF

SEQ ID NO: 325971 - protein, 16 aa, Homo sapiens
  CDR3 for alpha chain variable domain of TCR clone 162986 (TRAV30, TRAJ24)
CGTEIVDADSWGKFQF

SEQ ID NO: 325972 - protein, 14 aa, Homo sapiens
  CDR3 for beta chain variable domain of TCR clone 162986 (TRBV19, TRBJ2-1)
CASSMGSGRRSSSS

SEQ ID NO: 325973 - protein, 10 aa, Homo sapiens
  CDR3 for alpha chain variable domain of TCR clone 162987 (TRAV9-2, TRAJ49)
CALTGNQFYF

SEQ ID NO: 325974 - protein, 17 aa, Homo sapiens
  CDR3 for beta chain variable domain of TCR clone 162987 (TRBV7-7, TRBJ1-1)
CASIGDRPNLGVTEAFF

SEQ ID NO: 325975 - protein, 13 aa, Homo sapiens
  CDR3 for alpha chain variable domain of TCR clone 162988 (TRAV1-2, TRAJ11)
CAVRDSGYSTLTF

SEQ ID NO: 325976 - protein, 17 aa, Homo sapiens
  CDR3 for beta chain variable domain of TCR clone 162988 (TRBV7-8, TRBJ2-6)
CASSAGTGGAGANVLTF

SEQ ID NO: 325977 - protein, 14 aa, Homo sapiens
  CDR3 for alpha chain variable domain of TCR clone 162989 (TRAV1-1, TRAJ27)
CAVIYNTNAGKSTF

SEQ ID NO: 325978 - protein, 15 aa, Homo sapiens
  CDR3 for beta chain variable domain of TCR clone 162989 (TRBV19, TRBJ2-7)
CASSIGGGLVNEQYF

SEQ ID NO: 325979 - protein, 14 aa, Homo sapiens
  CDR3 for alpha chain variable domain of TCR clone 162990 (TRAV13-1, TRAJ35)
CAASKGGFGNVLHC

SEQ ID NO: 325980 - protein, 15 aa, Homo sapiens
  CDR3 for beta chain variable domain of TCR clone 162990 (TRBV7-3, TRBJ2-1)
CASSLSSGSFDEQFF

SEQ ID NO: 325981 - protein, 12 aa, Homo sapiens
  CDR3 for alpha chain variable domain of TCR clone 162991 (TRAV29/DV5, TRAJ49)
CAATDTGNQFDF

SEQ ID NO: 325982 - protein, 14 aa, Homo sapiens
  CDR3 for beta chain variable domain of TCR clone 162991 (TRBV7-9, TRBJ2-2)
CASSLVQDTGELFF

SEQ ID NO: 325983 - protein, 18 aa, Homo sapiens
  CDR3 for alpha chain variable domain of TCR clone 162992 (TRAV21, TRAJ52)
CAVRPSPAGGTSSGKLTF

SEQ ID NO: 325984 - protein, 16 aa, Homo sapiens
  CDR3 for beta chain variable domain of TCR clone 162992 (TRBV4-2, TRBJ1-1)
CASRPLDGGGDTEAFF

SEQ ID NO: 325985 - protein, 15 aa, Homo sapiens
  CDR3 for alpha chain variable domain of TCR clone 162993 (TRAV12-2, TRAJ53)
CAVNGGGASNYKLTF

SEQ ID NO: 325986 - protein, 17 aa, Homo sapiens
  CDR3 for beta chain variable domain of TCR clone 162993 (TRBV7-3, TRBJ2-3)
CASSLMKRMRGADTQYF

SEQ ID NO: 325987 - protein, 15 aa, Homo sapiens
  CDR3 for alpha chain variable domain of TCR clone 162994 (TRAV21, TRAJ53)
SATLNSGGSNYKLTF

SEQ ID NO: 325988 - protein, 14 aa, Homo sapiens
  CDR3 for beta chain variable domain of TCR clone 162994 (TRBV20-1, TRBJ2-1)
CSAQIGGSANEQFF

SEQ ID NO: 325989 - protein, 14 aa, Homo sapiens
  CDR3 for alpha chain variable domain of TCR clone 162995 (TRAV1-2, TRAJ8)
YAAREDTGFQKLVF

SEQ ID NO: 325990 - protein, 16 aa, Homo sapiens
  CDR3 for beta chain variable domain of TCR clone 162995 (TRBV7-3, TRBJ2-2)
CASSLKRGTLSGELFF

SEQ ID NO: 325991 - protein, 19 aa, Homo sapiens
  CDR3 for alpha chain variable domain of TCR clone 162996 (TRAV1-2, TRAJ26)
CLLTLCCERPDNYGQNFVF

SEQ ID NO: 325992 - protein, 16 aa, Homo sapiens
  CDR3 for beta chain variable domain of TCR clone 162996 (TRBV4-3, TRBJ2-7)
CASSPRTSGRSYEQYF

SEQ ID NO: 325993 - protein, 15 aa, Homo sapiens
  CDR3 for alpha chain variable domain of TCR clone 162997 (TRAV1-2, TRAJ30)
CAVRPHGNRDDKIIF

SEQ ID NO: 325994 - protein, 15 aa, Homo sapiens
  CDR3 for beta chain variable domain of TCR clone 162997 (TRBV27, TRBJ2-7)
CASSTAGTGSYEQYF

SEQ ID NO: 325995 - protein, 13 aa, Homo sapiens
  CDR3 for alpha chain variable domain of TCR clone 162998 (TRAV2, TRAJ21)
CAVEDLNFNKFYF

SEQ ID NO: 325996 - protein, 15 aa, Homo sapiens
  CDR3 for beta chain variable domain of TCR clone 162998 (TRBV28, TRBJ2-5)
CASSAGQGSIETQYF

SEQ ID NO: 325997 - protein, 13 aa, Homo sapiens
  CDR3 for alpha chain variable domain of TCR clone 162999 (TRAV8-3, TRAJ6)
CAVGSGGSYIPTF

SEQ ID NO: 325998 - protein, 13 aa, Homo sapiens
  CDR3 for beta chain variable domain of TCR clone 162999 (TRBV11-2, TRBJ1-1)
CSSTQRGRTEAFF

SEQ ID NO: 325999 - protein, 14 aa, Homo sapiens
  CDR3 for alpha chain variable domain of TCR clone 163000 (TRAV12-2, TRAJ9)
CAVNALEGGFKTIF

SEQ ID NO: 326000 - protein, 16 aa, Homo sapiens
  CDR3 for beta chain variable domain of TCR clone 163000 (TRBV19, TRBJ1-6)
CASSVAPAAGNSPLHF

SEQ ID NO: 326001 - protein, 15 aa, Homo sapiens
  CDR3 for alpha chain variable domain of TCR clone 163001 (TRAV12-3, TRAJ49)
CAMAVTPNTGNQFYF

SEQ ID NO: 326002 - protein, 18 aa, Homo sapiens
  CDR3 for beta chain variable domain of TCR clone 163001 (TRBV4-1, TRBJ1-5)
CASSQDHRGQGLNQPQHF

SEQ ID NO: 326003 - protein, 13 aa, Homo sapiens
  CDR3 for alpha chain variable domain of TCR clone 163002 (TRAV21, TRAJ57)
CAVTQGGSEKLVF

SEQ ID NO: 326004 - protein, 17 aa, Homo sapiens
  CDR3 for beta chain variable domain of TCR clone 163002 (TRBV10-3, TRBJ2-6)
CAISGLAESAGANVLTF

SEQ ID NO: 326005 - protein, 13 aa, Homo sapiens
  CDR3 for alpha chain variable domain of TCR clone 163003 (TRAV13-1, TRAJ39)
CAASIWPGNMLTF

SEQ ID NO: 326006 - protein, 15 aa, Homo sapiens
  CDR3 for beta chain variable domain of TCR clone 163003 (TRBV7-9, TRBJ1-1)
CASSLLEQGGTEAFF

SEQ ID NO: 326007 - protein, 11 aa, Homo sapiens
  CDR3 for alpha chain variable domain of TCR clone 163004 (TRAV12-3, TRAJ27)
CTMANAGKSTF

SEQ ID NO: 326008 - protein, 13 aa, Homo sapiens
  CDR3 for beta chain variable domain of TCR clone 163004 (TRBV20-1, TRBJ1-1)
SSARVGGNTEAFF

SEQ ID NO: 326009 - protein, 13 aa, Homo sapiens
  CDR3 for alpha chain variable domain of TCR clone 163005 (TRAV29/DV5, TRAJ47)
CAASAEYGNKLVF

SEQ ID NO: 326010 - protein, 15 aa, Homo sapiens
  CDR3 for beta chain variable domain of TCR clone 163005 (TRBV7-9, TRBJ1-4)
CASSARTGGNEKLVF

SEQ ID NO: 326011 - protein, 13 aa, Homo sapiens
  CDR3 for alpha chain variable domain of TCR clone 163006 (TRAV2, TRAJ40)
CAVVPSGTYKYNF

SEQ ID NO: 326012 - protein, 16 aa, Homo sapiens
  CDR3 for beta chain variable domain of TCR clone 163006 (TRBV7-3, TRBJ2-2)
CASSLKRGTLSGELFF

SEQ ID NO: 326013 - protein, 14 aa, Homo sapiens
  CDR3 for alpha chain variable domain of TCR clone 163007 (TRAV12-2, TRAJ40)
CAVKIPSGTYKYIF

SEQ ID NO: 326014 - protein, 12 aa, Homo sapiens
  CDR3 for beta chain variable domain of TCR clone 163007 (TRBV6-1, TRBJ2-7)
CASSDYSYEQYF

SEQ ID NO: 326015 - protein, 15 aa, Homo sapiens
  CDR3 for alpha chain variable domain of TCR clone 163008 (TRAV3, TRAJ6)
CAVRDFVGGSYIPTF

SEQ ID NO: 326016 - protein, 17 aa, Homo sapiens
  CDR3 for beta chain variable domain of TCR clone 163008 (TRBV7-3, TRBJ2-2)
CASSLSGTSGGTGELFF

SEQ ID NO: 326017 - protein, 13 aa, Homo sapiens
  CDR3 for alpha chain variable domain of TCR clone 163009 (TRAV36/DV7, TRAJ7)
CAGTWYGNNRLAF

SEQ ID NO: 326018 - protein, 14 aa, Homo sapiens
  CDR3 for beta chain variable domain of TCR clone 163009 (TRBV19, TRBJ2-1)
CASPAFVLSGEQFF

SEQ ID NO: 326019 - protein, 12 aa, Homo sapiens
  CDR3 for alpha chain variable domain of TCR clone 163010 (TRAV12-3, TRAJ17)
CAMTLTGNKLTF

SEQ ID NO: 326020 - protein, 13 aa, Homo sapiens
  CDR3 for beta chain variable domain of TCR clone 163010 (TRBV27, TRBJ2-1)
CASRTLGVGERFF

SEQ ID NO: 326021 - protein, 10 aa, Homo sapiens
  CDR3 for alpha chain variable domain of TCR clone 163011 (TRAV23/DV6, TRAJ43)
CAAAVAALVQ

SEQ ID NO: 326022 - protein, 13 aa, Homo sapiens
  CDR3 for beta chain variable domain of TCR clone 163011 (TRBV12-4, TRBJ1-2)
CASSLRQGKGYTF

SEQ ID NO: 326023 - protein, 12 aa, Homo sapiens
  CDR3 for alpha chain variable domain of TCR clone 163012 (TRAV12-3, TRAJ17)
CAMTLTGNNQTF

SEQ ID NO: 326024 - protein, 15 aa, Homo sapiens
  CDR3 for beta chain variable domain of TCR clone 163012 (TRBV20-1, TRBJ2-7)
CSARDRVSGMDEQYF

SEQ ID NO: 326025 - protein, 13 aa, Homo sapiens
  CDR3 for alpha chain variable domain of TCR clone 163013 (TRAV8-6, TRAJ8)
CAFMNTCFQKLVF

SEQ ID NO: 326026 - protein, 15 aa, Homo sapiens
  CDR3 for beta chain variable domain of TCR clone 163013 (TRBV28, TRBJ2-5)
CASSSGRVIQETQYF

SEQ ID NO: 326027 - protein, 13 aa, Homo sapiens
  CDR3 for alpha chain variable domain of TCR clone 163014 (TRAV27, TRAJ45)
CRSSGGGADGLTF

SEQ ID NO: 326028 - protein, 13 aa, Homo sapiens
  CDR3 for beta chain variable domain of TCR clone 163014 (TRBV2, TRBJ2-7)
CANGLAGDYEQYF

SEQ ID NO: 326029 - protein, 14 aa, Homo sapiens
  CDR3 for alpha chain variable domain of TCR clone 163015 (TRAV2, TRAJ39)
CAVEGDNSGNMPTF

SEQ ID NO: 326030 - protein, 14 aa, Homo sapiens
  CDR3 for beta chain variable domain of TCR clone 163015 (TRBV28, TRBJ2-7)
CASSLRARGNEQYF

SEQ ID NO: 326031 - protein, 11 aa, Homo sapiens
  CDR3 for alpha chain variable domain of TCR clone 163016 (TRAV35, TRAJ34)
CWARNTDKLLF

SEQ ID NO: 326032 - protein, 14 aa, Homo sapiens
  CDR3 for beta chain variable domain of TCR clone 163016 (TRBV5-1, TRBJ2-7)
CASSRGESLYEQYF

SEQ ID NO: 326033 - protein, 13 aa, Homo sapiens
  CDR3 for alpha chain variable domain of TCR clone 163017 (TRAV12-2, TRAJ52)
CAAHGTSYGKLTF

SEQ ID NO: 326034 - protein, 12 aa, Homo sapiens
  CDR3 for beta chain variable domain of TCR clone 163017 (TRBV12-4, TRBJ2-7)
CASSLGGYEQYF

SEQ ID NO: 326035 - protein, 10 aa, Homo sapiens
  CDR3 for alpha chain variable domain of TCR clone 163018 (TRAV38-1, TRAJ34)
CAFMDDKLIF

SEQ ID NO: 326036 - protein, 14 aa, Homo sapiens
  CDR3 for beta chain variable domain of TCR clone 163018 (TRBV7-2, TRBJ2-2)
CASSFNSNTGELFF

SEQ ID NO: 326037 - protein, 13 aa, Homo sapiens
  CDR3 for alpha chain variable domain of TCR clone 163019 (TRAV12-3, TRAJ5)
CATRPTGRRALTF

SEQ ID NO: 326038 - protein, 13 aa, Homo sapiens
  CDR3 for beta chain variable domain of TCR clone 163019 (TRBV2, TRBJ2-7)
CASSVVEAYEQYF

SEQ ID NO: 326039 - protein, 18 aa, Homo sapiens
  CDR3 for alpha chain variable domain of TCR clone 163020 (TRAV21, TRAJ52)
CAVRPSPAGGTSYGKLTF

SEQ ID NO: 326040 - protein, 16 aa, Homo sapiens
  CDR3 for beta chain variable domain of TCR clone 163020 (TRBV13, TRBJ2-2)
CASSPRTGEHTGGLFF

SEQ ID NO: 326041 - protein, 14 aa, Homo sapiens
  CDR3 for alpha chain variable domain of TCR clone 163021 (TRAV1-2, TRAJ16)
CAVNRFSDGQKLLF

SEQ ID NO: 326042 - protein, 15 aa, Homo sapiens
  CDR3 for beta chain variable domain of TCR clone 163021 (TRBV15, TRBJ1-5)
CATSTTGVVNQPQHF

SEQ ID NO: 326043 - protein, 15 aa, Homo sapiens
  CDR3 for alpha chain variable domain of TCR clone 163022 (TRAV8-6, TRAJ6)
CAVSGESGGSYIPTF

SEQ ID NO: 326044 - protein, 14 aa, Homo sapiens
  CDR3 for beta chain variable domain of TCR clone 163022 (TRBV7-9, TRBJ2-1)
CASSSMVEFGEQFF

SEQ ID NO: 326045 - protein, 13 aa, Homo sapiens
  CDR3 for alpha chain variable domain of TCR clone 163023 (TRAV12-1, TRAJ22)
CVVYSGSARQLTF

SEQ ID NO: 326046 - protein, 14 aa, Homo sapiens
  CDR3 for beta chain variable domain of TCR clone 163023 (TRBV11-2, TRBJ2-1)
CASSPSRQGGGQFF

SEQ ID NO: 326047 - protein, 14 aa, Homo sapiens
  CDR3 for alpha chain variable domain of TCR clone 163024 (TRAV13-1, TRAJ31)
CAGSSRPNKARLMF

SEQ ID NO: 326048 - protein, 15 aa, Homo sapiens
  CDR3 for beta chain variable domain of TCR clone 163024 (TRBV4-2, TRBJ2-4)
CASSPLGAAKNIQYS

SEQ ID NO: 326049 - protein, 11 aa, Homo sapiens
  CDR3 for alpha chain variable domain of TCR clone 163025 (TRAV12-1, TRAJ43)
CVEYDNNDMRF

SEQ ID NO: 326050 - protein, 15 aa, Homo sapiens
  CDR3 for beta chain variable domain of TCR clone 163025 (TRBV18, TRBJ2-5)
CASSPRTSEAETQYF

SEQ ID NO: 326051 - protein, 14 aa, Homo sapiens
  CDR3 for alpha chain variable domain of TCR clone 163026 (TRAV26-1, TRAJ34)
CIVRVAYNTDKLIF

SEQ ID NO: 326052 - protein, 13 aa, Homo sapiens
  CDR3 for beta chain variable domain of TCR clone 163026 (TRBV4-2, TRBJ1-1)
CASSQAENTEAFF

SEQ ID NO: 326053 - protein, 12 aa, Homo sapiens
  CDR3 for alpha chain variable domain of TCR clone 163027 (TRAV12-3, TRAJ17)
RAMKLTGNKLTF

SEQ ID NO: 326054 - protein, 17 aa, Homo sapiens
  CDR3 for beta chain variable domain of TCR clone 163027 (TRBV7-3, TRBJ2-3)
CASSLMKRMRGADTQYF

SEQ ID NO: 326055 - protein, 11 aa, Homo sapiens
  CDR3 for alpha chain variable domain of TCR clone 163028 (TRAV35, TRAJ34)
CWARNTDKLIF

SEQ ID NO: 326056 - protein, 14 aa, Homo sapiens
  CDR3 for beta chain variable domain of TCR clone 163028 (TRBV2, TRBJ2-1)
CASSEARQGVSEFF

SEQ ID NO: 326057 - protein, 13 aa, Homo sapiens
  CDR3 for alpha chain variable domain of TCR clone 163029 (TRAV35, TRAJ36)
CAGPRIVANNLFF

SEQ ID NO: 326058 - protein, 15 aa, Homo sapiens
  CDR3 for beta chain variable domain of TCR clone 163029 (TRBV28, TRBJ2-5)
CASSPPWSDQETQYF

SEQ ID NO: 326059 - protein, 14 aa, Homo sapiens
  CDR3 for alpha chain variable domain of TCR clone 163030 (TRAV3, TRAJ9)
CAVRLNTGCFKTIF

SEQ ID NO: 326060 - protein, 15 aa, Homo sapiens
  CDR3 for beta chain variable domain of TCR clone 163030 (TRBV7-2, TRBJ2-1)
CASSLASGRVNEQVF

SEQ ID NO: 326061 - protein, 12 aa, Homo sapiens
  CDR3 for alpha chain variable domain of TCR clone 163031 (TRAV2, TRAJ33)
CAVWGSNYQLIW

SEQ ID NO: 326062 - protein, 16 aa, Homo sapiens
  CDR3 for beta chain variable domain of TCR clone 163031 (TRBV7-3, TRBJ2-1)
CASSLEGYRSYNEQFF

SEQ ID NO: 326063 - protein, 15 aa, Homo sapiens
  CDR3 for alpha chain variable domain of TCR clone 163032 (TRAV12-1, TRAJ42)
CVVTRDGGSQGNLIC

SEQ ID NO: 326064 - protein, 15 aa, Homo sapiens
  CDR3 for beta chain variable domain of TCR clone 163032 (TRBV7-2, TRBJ2-7)
CASSLKGALTYEQYF

SEQ ID NO: 326065 - protein, 15 aa, Homo sapiens
  CDR3 for alpha chain variable domain of TCR clone 163033 (TRAV3, TRAJ3)
CAVRDGHSSASKIIF

SEQ ID NO: 326066 - protein, 14 aa, Homo sapiens
  CDR3 for beta chain variable domain of TCR clone 163033 (TRBV4-1, TRBJ2-2)
CASSQAVNTGELFF

SEQ ID NO: 326067 - protein, 14 aa, Homo sapiens
  CDR3 for alpha chain variable domain of TCR clone 163034 (TRAV17, TRAJ54)
CATDANQGAQKLVF

SEQ ID NO: 326068 - protein, 14 aa, Homo sapiens
  CDR3 for beta chain variable domain of TCR clone 163034 (TRBV25-1, TRBJ1-1)
CGSTHLGGNTEAFF

SEQ ID NO: 326069 - protein, 17 aa, Homo sapiens
  CDR3 for alpha chain variable domain of TCR clone 163035 (TRAV12-2, TRAJ18)
CAVNPLDRGSTLGRLYF

SEQ ID NO: 326070 - protein, 16 aa, Homo sapiens
  CDR3 for beta chain variable domain of TCR clone 163035 (TRBV7-9, TRBJ2-1)
CASSPRDSGAYNEQFF

SEQ ID NO: 326071 - protein, 13 aa, Homo sapiens
  CDR3 for alpha chain variable domain of TCR clone 163036 (TRAV39, TRAJ49)
CAVDRNTGNQFYF

SEQ ID NO: 326072 - protein, 15 aa, Homo sapiens
  CDR3 for beta chain variable domain of TCR clone 163036 (TRBV7-3, TRBJ2-1)
CASSLSSGSFDEQFF

SEQ ID NO: 326073 - protein, 13 aa, Homo sapiens
  CDR3 for alpha chain variable domain of TCR clone 163037 (TRAV13-1, TRAJ6)
CAALRGGSYIPTF

SEQ ID NO: 326074 - protein, 13 aa, Homo sapiens
  CDR3 for beta chain variable domain of TCR clone 163037 (TRBV5-8, TRBJ1-2)
CASSLGGNYGYTF

SEQ ID NO: 326075 - protein, 14 aa, Homo sapiens
  CDR3 for alpha chain variable domain of TCR clone 163038 (TRAV12-2, TRAJ13)
CAVKKTGGSQKVTF

SEQ ID NO: 326076 - protein, 19 aa, Homo sapiens
  CDR3 for beta chain variable domain of TCR clone 163038 (TRBV25-1, TRBJ2-2)
CAILVYRVDRGRKTGELFF

SEQ ID NO: 326077 - protein, 13 aa, Homo sapiens
  CDR3 for alpha chain variable domain of TCR clone 163039 (TRAV3, TRAJ27)
CAVRPLGAGKSTF

SEQ ID NO: 326078 - protein, 15 aa, Homo sapiens
  CDR3 for beta chain variable domain of TCR clone 163039 (TRBV27, TRBJ2-1)
CASSNGGGSSNEQFF

SEQ ID NO: 326079 - protein, 11 aa, Homo sapiens
  CDR3 for alpha chain variable domain of TCR clone 163040 (TRAV25, TRAJ21)
CAGTIFNKFYF

SEQ ID NO: 326080 - protein, 14 aa, Homo sapiens
  CDR3 for beta chain variable domain of TCR clone 163040 (TRBV11-2, TRBJ2-5)
CASSRTGGIETQYF

SEQ ID NO: 326081 - protein, 19 aa, Homo sapiens
  CDR3 for alpha chain variable domain of TCR clone 163041 (TRAV1-2, TRAJ26)
CLLPLCCERPENYGQNFVF

SEQ ID NO: 326082 - protein, 12 aa, Homo sapiens
  CDR3 for beta chain variable domain of TCR clone 163041 (TRBV7-9, TRBJ2-7)
CATRTDAYEQYF

SEQ ID NO: 326083 - protein, 11 aa, Homo sapiens
  CDR3 for alpha chain variable domain of TCR clone 163042 (TRAV35, TRAJ34)
CWARNTDKLIF

SEQ ID NO: 326084 - protein, 16 aa, Homo sapiens
  CDR3 for beta chain variable domain of TCR clone 163042 (TRBV12-5, TRBJ2-5)
CASGPRTSGDQETQYF

SEQ ID NO: 326085 - protein, 12 aa, Homo sapiens
  CDR3 for alpha chain variable domain of TCR clone 163043 (TRAV12-3, TRAJ17)
CAMTLTGNKLTF

SEQ ID NO: 326086 - protein, 14 aa, Homo sapiens
  CDR3 for beta chain variable domain of TCR clone 163043 (TRBV7-3, TRBJ2-7)
CASSLSGVPYEQYF

SEQ ID NO: 326087 - protein, 15 aa, Homo sapiens
  CDR3 for alpha chain variable domain of TCR clone 163044 (TRAV17, TRAJ13)
CATDAGSGGYQKVTF

SEQ ID NO: 326088 - protein, 15 aa, Homo sapiens
  CDR3 for beta chain variable domain of TCR clone 163044 (TRBV28, TRBJ2-1)
CASSIIAGGRSEQFF

SEQ ID NO: 326089 - protein, 14 aa, Homo sapiens
  CDR3 for alpha chain variable domain of TCR clone 163045 (TRAV29/DV5, TRAJ36)
CAARRKTGANNLFF

SEQ ID NO: 326090 - protein, 15 aa, Homo sapiens
  CDR3 for beta chain variable domain of TCR clone 163045 (TRBV19, TRBJ2-4)
CASRGPRRGENIQYF

SEQ ID NO: 326091 - protein, 18 aa, Homo sapiens
  CDR3 for alpha chain variable domain of TCR clone 163046 (TRAV21, TRAJ52)
CAVTPSPAGGTSYGKLTF

SEQ ID NO: 326092 - protein, 13 aa, Homo sapiens
  CDR3 for beta chain variable domain of TCR clone 163046 (TRBV7-3, TRBJ1-1)
CASSQDWGAEAFF

SEQ ID NO: 326093 - protein, 14 aa, Homo sapiens
  CDR3 for alpha chain variable domain of TCR clone 163047 (TRAV12-2, TRAJ40)
CAVKIHSGTYNYIF

SEQ ID NO: 326094 - protein, 17 aa, Homo sapiens
  CDR3 for beta chain variable domain of TCR clone 163047 (TRBV13, TRBJ2-3)
CASSLSRVAGGRNTQYF

SEQ ID NO: 326095 - protein, 13 aa, Homo sapiens
  CDR3 for alpha chain variable domain of TCR clone 163048 (TRAV12-1, TRAJ3)
CVVNPRGASKIIF

SEQ ID NO: 326096 - protein, 13 aa, Homo sapiens
  CDR3 for beta chain variable domain of TCR clone 163048 (TRBV28, TRBJ1-5)
CASSDRGKQPQHF

SEQ ID NO: 326097 - protein, 16 aa, Homo sapiens
  CDR3 for alpha chain variable domain of TCR clone 163049 (TRAV30, TRAJ24)
CGTEIVDADSWGKFQF

SEQ ID NO: 326098 - protein, 15 aa, Homo sapiens
  CDR3 for beta chain variable domain of TCR clone 163049 (TRBV12-4, TRBJ2-1)
CASSLSTGVSNEQFF

SEQ ID NO: 326099 - protein, 11 aa, Homo sapiens
  CDR3 for alpha chain variable domain of TCR clone 163050 (TRAV17, TRAJ43)
CATPRSNDMRF

SEQ ID NO: 326100 - protein, 14 aa, Homo sapiens
  CDR3 for beta chain variable domain of TCR clone 163050 (TRBV11-2, TRBJ2-1)
CASSLGTSGLNEQF

SEQ ID NO: 326101 - protein, 14 aa, Homo sapiens
  CDR3 for alpha chain variable domain of TCR clone 163051 (TRAV13-1, TRAJ40)
CAASMTSGTYKYIF

SEQ ID NO: 326102 - protein, 16 aa, Homo sapiens
  CDR3 for beta chain variable domain of TCR clone 163051 (TRBV19, TRBJ2-2)
CASSAAGTGGTGELFF

SEQ ID NO: 326103 - protein, 15 aa, Homo sapiens
  CDR3 for alpha chain variable domain of TCR clone 163052 (TRAV12-2, TRAJ45)
CAVKRTGGGADGLTF

SEQ ID NO: 326104 - protein, 12 aa, Homo sapiens
  CDR3 for beta chain variable domain of TCR clone 163052 (TRBV7-9, TRBJ1-4)
CASSTDREKLFF

SEQ ID NO: 326105 - protein, 17 aa, Homo sapiens
  CDR3 for alpha chain variable domain of TCR clone 163053 (TRAV3, TRAJ6)
CAVRDGPRAGGSYIPTF

SEQ ID NO: 326106 - protein, 13 aa, Homo sapiens
  CDR3 for beta chain variable domain of TCR clone 163053 (TRBV15, TRBJ2-7)
CATSTTGHHEQYF

SEQ ID NO: 326107 - protein, 16 aa, Homo sapiens
  CDR3 for alpha chain variable domain of TCR clone 163054 (TRAV3, TRAJ21)
CAVESQATSTNFTLDL

SEQ ID NO: 326108 - protein, 12 aa, Homo sapiens
  CDR3 for beta chain variable domain of TCR clone 163054 (TRBV6-3, TRBJ2-7)
CASSLTPYEQYF

SEQ ID NO: 326109 - protein, 15 aa, Homo sapiens
  CDR3 for alpha chain variable domain of TCR clone 163055 (TRAV27, TRAJ38)
CAGRFNAGNNRKPIW

SEQ ID NO: 326110 - protein, 13 aa, Homo sapiens
  CDR3 for beta chain variable domain of TCR clone 163055 (TRBV12-5, TRBJ2-3)
CASQNRGTDTQYF

SEQ ID NO: 326111 - protein, 13 aa, Homo sapiens
  CDR3 for alpha chain variable domain of TCR clone 163056 (TRAV8-3, TRAJ43)
CAGVPYNNNDMRF

SEQ ID NO: 326112 - protein, 16 aa, Homo sapiens
  CDR3 for beta chain variable domain of TCR clone 163056 (TRBV7-2, TRBJ2-5)
CASSPFPTGGEETQYF

SEQ ID NO: 326113 - protein, 14 aa, Homo sapiens
  CDR3 for alpha chain variable domain of TCR clone 163057 (TRAV17, TRAJ57)
CATDPQGGSEKLVF

SEQ ID NO: 326114 - protein, 17 aa, Homo sapiens
  CDR3 for beta chain variable domain of TCR clone 163057 (TRBV20-1, TRBJ2-1)
CSASSSGLAGSYNEQFF

SEQ ID NO: 326115 - protein, 13 aa, Homo sapiens
  CDR3 for alpha chain variable domain of TCR clone 163058 (TRAV29/DV5, TRAJ31)
CAASRNNNARLMF

SEQ ID NO: 326116 - protein, 15 aa, Homo sapiens
  CDR3 for beta chain variable domain of TCR clone 163058 (TRBV20-1, TRBJ2-7)
CSARKGLAESYEQYF

SEQ ID NO: 326117 - protein, 14 aa, Homo sapiens
  CDR3 for alpha chain variable domain of TCR clone 163059 (TRAV17, TRAJ4)
CATAPLGGYNKLIF

SEQ ID NO: 326118 - protein, 13 aa, Homo sapiens
  CDR3 for beta chain variable domain of TCR clone 163059 (TRBV12-4, TRBJ1-3)
CASNLASGNTIYF

SEQ ID NO: 326119 - protein, 14 aa, Homo sapiens
  CDR3 for alpha chain variable domain of TCR clone 163060 (TRAV14/DV4, TRAJ15)
CAMKRDQAGTALIF

SEQ ID NO: 326120 - protein, 16 aa, Homo sapiens
  CDR3 for beta chain variable domain of TCR clone 163060 (TRBV15, TRBJ2-3)
CATSRDLGIVTDTQYF

SEQ ID NO: 326121 - protein, 16 aa, Homo sapiens
  CDR3 for alpha chain variable domain of TCR clone 163061 (TRAV8-2, TRAJ7)
CVVSEGSYYGDNRLAF

SEQ ID NO: 326122 - protein, 13 aa, Homo sapiens
  CDR3 for beta chain variable domain of TCR clone 163061 (TRBV19, TRBJ2-1)
CASSMYRVNEQFF

SEQ ID NO: 326123 - protein, 15 aa, Homo sapiens
  CDR3 for alpha chain variable domain of TCR clone 163062 (TRAV23/DV6, TRAJ18)
CAASFSGSTLGRLYF

SEQ ID NO: 326124 - protein, 13 aa, Homo sapiens
  CDR3 for beta chain variable domain of TCR clone 163062 (TRBV28, TRBJ2-7)
CAILDRAGGEQYF

SEQ ID NO: 326125 - protein, 15 aa, Homo sapiens
  CDR3 for alpha chain variable domain of TCR clone 163063 (TRAV20, TRAJ4)
CAVEGSAGGYNKLIF

SEQ ID NO: 326126 - protein, 14 aa, Homo sapiens
  CDR3 for beta chain variable domain of TCR clone 163063 (TRBV7-8, TRBJ2-7)
CASPLGGALGEQYF

SEQ ID NO: 326127 - protein, 16 aa, Homo sapiens
  CDR3 for alpha chain variable domain of TCR clone 163064 (TRAV8-3, TRAJ22)
CAVDLLGPGSARQLTL

SEQ ID NO: 326128 - protein, 14 aa, Homo sapiens
  CDR3 for beta chain variable domain of TCR clone 163064 (TRBV11-2, TRBJ2-7)
CASSLELEGYEQYF

SEQ ID NO: 326129 - protein, 14 aa, Homo sapiens
  CDR3 for alpha chain variable domain of TCR clone 163065 (TRAV12-2, TRAJ45)
CAVYSGGGADGLTS

SEQ ID NO: 326130 - protein, 14 aa, Homo sapiens
  CDR3 for beta chain variable domain of TCR clone 163065 (TRBV6-5, TRBJ1-2)
CASTRGGGSDGYTF

SEQ ID NO: 326131 - protein, 13 aa, Homo sapiens
  CDR3 for alpha chain variable domain of TCR clone 163066 (TRAV12-2, TRAJ39)
CAVNNNAGNMPTF

SEQ ID NO: 326132 - protein, 14 aa, Homo sapiens
  CDR3 for beta chain variable domain of TCR clone 163066 (TRBV12-4, TRBJ1-3)
CASSLRGSGNTIYF

SEQ ID NO: 326133 - protein, 14 aa, Homo sapiens
  CDR3 for alpha chain variable domain of TCR clone 163067 (TRAV25, TRAJ35)
CARRMEGFGNELHC

SEQ ID NO: 326134 - protein, 13 aa, Homo sapiens
  CDR3 for beta chain variable domain of TCR clone 163067 (TRBV7-2, TRBJ1-4)
CASSLAGLEKLFF

SEQ ID NO: 326135 - protein, 11 aa, Homo sapiens
  CDR3 for alpha chain variable domain of TCR clone 163068 (TRAV17, TRAJ9)
CGFTGGFKTIF

SEQ ID NO: 326136 - protein, 13 aa, Homo sapiens
  CDR3 for beta chain variable domain of TCR clone 163068 (TRBV7-9, TRBJ1-1)
CASSLVSASEAFF

SEQ ID NO: 326137 - protein, 15 aa, Homo sapiens
  CDR3 for alpha chain variable domain of TCR clone 163069 (TRAV8-3, TRAJ23)
CAVGDRYNQGGKPIF

SEQ ID NO: 326138 - protein, 15 aa, Homo sapiens
  CDR3 for beta chain variable domain of TCR clone 163069 (TRBV29-1, TRBJ2-5)
EDSSIYLCSAGTQYF

SEQ ID NO: 326139 - protein, 14 aa, Homo sapiens
  CDR3 for alpha chain variable domain of TCR clone 163070 (TRAV23/DV6, TRAJ4)
CAAPRSGGYNKLIF

SEQ ID NO: 326140 - protein, 12 aa, Homo sapiens
  CDR3 for beta chain variable domain of TCR clone 163070 (TRBV19, TRBJ2-1)
CASSMQDTEQFF

SEQ ID NO: 326141 - protein, 13 aa, Homo sapiens
  CDR3 for alpha chain variable domain of TCR clone 163071 (TRAV1-2, TRAJ24)
CAVMADSRGKFQF

SEQ ID NO: 326142 - protein, 13 aa, Homo sapiens
  CDR3 for beta chain variable domain of TCR clone 163071 (TRBV20-1, TRBJ2-1)
CSATGLAGDEQFF

SEQ ID NO: 326143 - protein, 14 aa, Homo sapiens
  CDR3 for alpha chain variable domain of TCR clone 163072 (TRAV13-1, TRAJ39)
CAASYNNAGNMLTF

SEQ ID NO: 326144 - protein, 13 aa, Homo sapiens
  CDR3 for beta chain variable domain of TCR clone 163072 (TRBV4-1, TRBJ1-1)
CASSRKMNTEAFF

SEQ ID NO: 326145 - protein, 12 aa, Homo sapiens
  CDR3 for alpha chain variable domain of TCR clone 163073 (TRAV4, TRAJ26)
CLVGDYGQNFVF

SEQ ID NO: 326146 - protein, 11 aa, Homo sapiens
  CDR3 for beta chain variable domain of TCR clone 163073 (TRBV29-1, TRBJ2-5)
CSEDRTGTQYF

SEQ ID NO: 326147 - protein, 15 aa, Homo sapiens
  CDR3 for alpha chain variable domain of TCR clone 163074 (TRAV8-4, TRAJ37)
CAVSRGSGNPGKLIF

SEQ ID NO: 326148 - protein, 14 aa, Homo sapiens
  CDR3 for beta chain variable domain of TCR clone 163074 (TRBV7-9, TRBJ2-5)
CASSLDTAQETQYF

SEQ ID NO: 326149 - protein, 14 aa, Homo sapiens
  CDR3 for alpha chain variable domain of TCR clone 163075 (TRAV8-4, TRAJ9)
CAVRIDTGGFKTIF

SEQ ID NO: 326150 - protein, 15 aa, Homo sapiens
  CDR3 for beta chain variable domain of TCR clone 163075 (TRBV10-2, TRBJ2-6)
CASSEQGTGANVLTV

SEQ ID NO: 326151 - protein, 11 aa, Homo sapiens
  CDR3 for alpha chain variable domain of TCR clone 163076 (TRAV1-1, TRAJ23)
CAVRQGGKLIF

SEQ ID NO: 326152 - protein, 14 aa, Homo sapiens
  CDR3 for beta chain variable domain of TCR clone 163076 (TRBV19, TRBJ2-2)
CASSGQGIAGELFF

SEQ ID NO: 326153 - protein, 12 aa, Homo sapiens
  CDR3 for alpha chain variable domain of TCR clone 163077 (TRAV12-1, TRAJ40)
CAVYSGTYKYIF

SEQ ID NO: 326154 - protein, 18 aa, Homo sapiens
  CDR3 for beta chain variable domain of TCR clone 163077 (TRBV11-2, TRBJ2-3)
CASSLGGAARGAPNTQYF

SEQ ID NO: 326155 - protein, 14 aa, Homo sapiens
  CDR3 for alpha chain variable domain of TCR clone 163078 (TRAV12-2, TRAJ9)
RAVNMEGGGFKTIF

SEQ ID NO: 326156 - protein, 14 aa, Homo sapiens
  CDR3 for beta chain variable domain of TCR clone 163078 (TRBV27, TRBJ2-3)
CASRKGGRTDTQYF

SEQ ID NO: 326157 - protein, 10 aa, Homo sapiens
  CDR3 for alpha chain variable domain of TCR clone 163079 (TRAV1-2, TRAJ31)
CVSEDARLLF

SEQ ID NO: 326158 - protein, 13 aa, Homo sapiens
  CDR3 for beta chain variable domain of TCR clone 163079 (TRBV4-2, TRBJ1-1)
CASSQAGNTEAFF

SEQ ID NO: 326159 - protein, 13 aa, Homo sapiens
  CDR3 for alpha chain variable domain of TCR clone 163080 (TRAV8-6, TRAJ21)
CAVSPSSLNKFYF

SEQ ID NO: 326160 - protein, 18 aa, Homo sapiens
  CDR3 for beta chain variable domain of TCR clone 163080 (TRBV11-2, TRBJ2-3)
SASSLGGASRGAPNTQYF

SEQ ID NO: 326161 - protein, 14 aa, Homo sapiens
  CDR3 for alpha chain variable domain of TCR clone 163081 (TRAV2, TRAJ9)
CAVEDRSGGFKTIF

SEQ ID NO: 326162 - protein, 13 aa, Homo sapiens
  CDR3 for beta chain variable domain of TCR clone 163081 (TRBV7-9, TRBJ2-1)
RASSLDVGNEQFF

SEQ ID NO: 326163 - protein, 11 aa, Homo sapiens
  CDR3 for alpha chain variable domain of TCR clone 163082 (TRAV13-2, TRAJ23)
CAESPRGKLIF

SEQ ID NO: 326164 - protein, 15 aa, Homo sapiens
  CDR3 for beta chain variable domain of TCR clone 163082 (TRBV7-3, TRBJ2-1)
CASSPTGGGEVEQFF

SEQ ID NO: 326165 - protein, 14 aa, Homo sapiens
  CDR3 for alpha chain variable domain of TCR clone 163083 (TRAV23/DV6, TRAJ22)
CAVISSGSARQLTF

SEQ ID NO: 326166 - protein, 16 aa, Homo sapiens
  CDR3 for beta chain variable domain of TCR clone 163083 (TRBV5-7, TRBJ2-5)
CASIRGQTGYQETQYF

SEQ ID NO: 326167 - protein, 14 aa, Homo sapiens
  CDR3 for alpha chain variable domain of TCR clone 163084 (TRAV25, TRAJ6)
CAGRESGGSYIHTF

SEQ ID NO: 326168 - protein, 15 aa, Homo sapiens
  CDR3 for beta chain variable domain of TCR clone 163084 (TRBV11-1, TRBJ2-7)
CASSLNYGASYEQYF

SEQ ID NO: 326169 - protein, 11 aa, Homo sapiens
  CDR3 for alpha chain variable domain of TCR clone 163085 (TRAV3, TRAJ21)
CAVGNFNSFYF

SEQ ID NO: 326170 - protein, 16 aa, Homo sapiens
  CDR3 for beta chain variable domain of TCR clone 163085 (TRBV19, TRBJ2-1)
CASSKAGPSSYNEQFF

SEQ ID NO: 326171 - protein, 15 aa, Homo sapiens
  CDR3 for alpha chain variable domain of TCR clone 163086 (TRAV3, TRAJ22)
CAVGDRGVSAGQLTF

SEQ ID NO: 326172 - protein, 16 aa, Homo sapiens
  CDR3 for beta chain variable domain of TCR clone 163086 (TRBV4-2, TRBJ1-1)
CASSPSPGRAAPEAFF

SEQ ID NO: 326173 - protein, 17 aa, Homo sapiens
  CDR3 for alpha chain variable domain of TCR clone 163087 (TRAV8-3, TRAJ32)
CAVGPLDYGGATNKIIF

SEQ ID NO: 326174 - protein, 15 aa, Homo sapiens
  CDR3 for beta chain variable domain of TCR clone 163087 (TRBV18, TRBJ1-2)
CASSPGNGLGYGYTF

SEQ ID NO: 326175 - protein, 14 aa, Homo sapiens
  CDR3 for alpha chain variable domain of TCR clone 163088 (TRAV13-1, TRAJ35)
CAASKGGFGNGLHC

SEQ ID NO: 326176 - protein, 13 aa, Homo sapiens
  CDR3 for beta chain variable domain of TCR clone 163088 (TRBV7-3, TRBJ1-1)
CASSHDWGAEAFF

SEQ ID NO: 326177 - protein, 15 aa, Homo sapiens
  CDR3 for alpha chain variable domain of TCR clone 163089 (TRAV12-3, TRAJ52)
CNGGAGGTSYGKLTF

SEQ ID NO: 326178 - protein, 13 aa, Homo sapiens
  CDR3 for beta chain variable domain of TCR clone 163089 (TRBV20-1, TRBJ2-5)
CSARGDYHETQYF

SEQ ID NO: 326179 - protein, 12 aa, Homo sapiens
  CDR3 for alpha chain variable domain of TCR clone 163090 (TRAV8-4, TRAJ43)
CAVSVNNNDMSF

SEQ ID NO: 326180 - protein, 14 aa, Homo sapiens
  CDR3 for beta chain variable domain of TCR clone 163090 (TRBV11-2, TRBJ1-2)
CASSLGTANYGYAF

SEQ ID NO: 326181 - protein, 14 aa, Homo sapiens
  CDR3 for alpha chain variable domain of TCR clone 163091 (TRAV13-1, TRAJ13)
CAASRVGGYQKVTF

SEQ ID NO: 326182 - protein, 15 aa, Homo sapiens
  CDR3 for beta chain variable domain of TCR clone 163091 (TRBV5-1, TRBJ2-3)
CASSVTSGSTDTQYF

SEQ ID NO: 326183 - protein, 14 aa, Homo sapiens
  CDR3 for alpha chain variable domain of TCR clone 163092 (TRAV9-2, TRAJ39)
CALYIYNAGNMLTF

SEQ ID NO: 326184 - protein, 17 aa, Homo sapiens
  CDR3 for beta chain variable domain of TCR clone 163092 (TRBV24-1, TRBJ2-1)
CATSDVSTSGTYNEQFF

SEQ ID NO: 326185 - protein, 17 aa, Homo sapiens
  CDR3 for alpha chain variable domain of TCR clone 163093 (TRAV3, TRAJ6)
CAVRDGPRAGGSYIPTF

SEQ ID NO: 326186 - protein, 18 aa, Homo sapiens
  CDR3 for beta chain variable domain of TCR clone 163093 (TRBV25-1, TRBJ1-2)
CASSGLQNGQGVIFGYTF

SEQ ID NO: 326187 - protein, 17 aa, Homo sapiens
  CDR3 for alpha chain variable domain of TCR clone 163094 (TRAV19, TRAJ53)
CALSEADSGGSNYKLTF

SEQ ID NO: 326188 - protein, 13 aa, Homo sapiens
  CDR3 for beta chain variable domain of TCR clone 163094 (TRBV29-1, TRBJ1-1)
CSVGDSRNTEAVF

SEQ ID NO: 326189 - protein, 10 aa, Homo sapiens
  CDR3 for alpha chain variable domain of TCR clone 163095 (TRAV1-2, TRAJ34)
CAVNTDKLIF

SEQ ID NO: 326190 - protein, 12 aa, Homo sapiens
  CDR3 for beta chain variable domain of TCR clone 163095 (TRBV11-2, TRBJ2-2)
CASSLGGGELFF

SEQ ID NO: 326191 - protein, 14 aa, Homo sapiens
  CDR3 for alpha chain variable domain of TCR clone 163096 (TRAV17, TRAJ57)
CATDPQGGSEKLVF

SEQ ID NO: 326192 - protein, 11 aa, Homo sapiens
  CDR3 for beta chain variable domain of TCR clone 163096 (TRBV12-4, TRBJ2-3)
CASSSVRGRYC

SEQ ID NO: 326193 - protein, 14 aa, Homo sapiens
  CDR3 for alpha chain variable domain of TCR clone 163097 (TRAV12-1, TRAJ30)
CVVNIGGRDGKIIF

SEQ ID NO: 326194 - protein, 14 aa, Homo sapiens
  CDR3 for beta chain variable domain of TCR clone 163097 (TRBV20-1, TRBJ2-1)
CSAQIGGSANEQFF

SEQ ID NO: 326195 - protein, 14 aa, Homo sapiens
  CDR3 for alpha chain variable domain of TCR clone 163098 (TRAV23/DV6, TRAJ23)
CAAGPYNQGGTLIF

SEQ ID NO: 326196 - protein, 15 aa, Homo sapiens
  CDR3 for beta chain variable domain of TCR clone 163098 (TRBV20-1, TRBJ2-7)
CSARDRVSGMDEQYF

SEQ ID NO: 326197 - protein, 14 aa, Homo sapiens
  CDR3 for alpha chain variable domain of TCR clone 163099 (TRAV12-1, TRAJ36)
CVVNYWGKQPLLWD

SEQ ID NO: 326198 - protein, 13 aa, Homo sapiens
  CDR3 for beta chain variable domain of TCR clone 163099 (TRBV7-9, TRBJ1-2)
CASGLKQNYGYTF

SEQ ID NO: 326199 - protein, 13 aa, Homo sapiens
  CDR3 for alpha chain variable domain of TCR clone 163100 (TRAV13-1, TRAJ41)
CAAILNSGYALNF

SEQ ID NO: 326200 - protein, 14 aa, Homo sapiens
  CDR3 for beta chain variable domain of TCR clone 163100 (TRBV20-1, TRBJ1-1)
CSARDRRTNTDAFF

SEQ ID NO: 326201 - protein, 19 aa, Homo sapiens
  CDR3 for alpha chain variable domain of TCR clone 163101 (TRAV26-1, TRAJ52)
CIVRAHRNAGGISYGKLTF

SEQ ID NO: 326202 - protein, 15 aa, Homo sapiens
  CDR3 for beta chain variable domain of TCR clone 163101 (TRBV29-1, TRBJ2-1)
CGGRDRRSSYNEQFF

SEQ ID NO: 326203 - protein, 14 aa, Homo sapiens
  CDR3 for alpha chain variable domain of TCR clone 163102 (TRAV12-1, TRAJ12)
CVVTRMDSSYKLIF

SEQ ID NO: 326204 - protein, 15 aa, Homo sapiens
  CDR3 for beta chain variable domain of TCR clone 163102 (TRBV7-2, TRBJ2-1)
CASTHGTGIYNEQFF

SEQ ID NO: 326205 - protein, 12 aa, Homo sapiens
  CDR3 for alpha chain variable domain of TCR clone 163103 (TRAV20, TRAJ20)
CAVRFNDYKLSF

SEQ ID NO: 326206 - protein, 14 aa, Homo sapiens
  CDR3 for beta chain variable domain of TCR clone 163103 (TRBV20-1, TRBJ2-1)
CSAQIGGSTNEQFF

SEQ ID NO: 326207 - protein, 16 aa, Homo sapiens
  CDR3 for alpha chain variable domain of TCR clone 163104 (TRAV1-1, TRAJ29)
CAVRSTRNSGNTPLVF

SEQ ID NO: 326208 - protein, 14 aa, Homo sapiens
  CDR3 for beta chain variable domain of TCR clone 163104 (TRBV12-4, TRBJ1-1)
CASSLGTGGTEAFF

SEQ ID NO: 326209 - protein, 15 aa, Homo sapiens
  CDR3 for alpha chain variable domain of TCR clone 163105 (TRAV4, TRAJ39)
CLVGPNNNAGNLPTF

SEQ ID NO: 326210 - protein, 13 aa, Homo sapiens
  CDR3 for beta chain variable domain of TCR clone 163105 (TRBV11-2, TRBJ2-5)
CASSSTGEETQYF

SEQ ID NO: 326211 - protein, 14 aa, Homo sapiens
  CDR3 for alpha chain variable domain of TCR clone 163106 (TRAV8-4, TRAJ9)
CAVRINTGGFKTIF

SEQ ID NO: 326212 - protein, 18 aa, Homo sapiens
  CDR3 for beta chain variable domain of TCR clone 163106 (TRBV7-2, TRBJ2-3)
CASSLKREGSGITDTQYF

SEQ ID NO: 326213 - protein, 16 aa, Homo sapiens
  CDR3 for alpha chain variable domain of TCR clone 163107 (TRAV26-1, TRAJ47)
CIVRVVLSQYGNKLVF

SEQ ID NO: 326214 - protein, 13 aa, Homo sapiens
  CDR3 for beta chain variable domain of TCR clone 163107 (TRBV7-2, TRBJ1-4)
CASSLAGLEKLFF

SEQ ID NO: 326215 - protein, 11 aa, Homo sapiens
  CDR3 for alpha chain variable domain of TCR clone 163108 (TRAV17, TRAJ9)
CGFTGGFKTIF

SEQ ID NO: 326216 - protein, 14 aa, Homo sapiens
  CDR3 for beta chain variable domain of TCR clone 163108 (TRBV7-9, TRBJ2-2)
CASSLVLDTGELFF

SEQ ID NO: 326217 - protein, 14 aa, Homo sapiens
  CDR3 for alpha chain variable domain of TCR clone 163109 (TRAV2, TRAJ22)
CAVGRGGSARQLTF

SEQ ID NO: 326218 - protein, 14 aa, Homo sapiens
  CDR3 for beta chain variable domain of TCR clone 163109 (TRBV19, TRBJ2-1)
CASPIFVLSGEQFF

SEQ ID NO: 326219 - protein, 12 aa, Homo sapiens
  CDR3 for alpha chain variable domain of TCR clone 163110 (TRAV1-1, TRAJ8)
CAGGTGFQKLEF

SEQ ID NO: 326220 - protein, 16 aa, Homo sapiens
  CDR3 for beta chain variable domain of TCR clone 163110 (TRBV12-5, TRBJ2-5)
CASGPRTSGNQETQYF

SEQ ID NO: 326221 - protein, 13 aa, Homo sapiens
  CDR3 for alpha chain variable domain of TCR clone 163111 (TRAV30, TRAJ24)
RGTVTDSWGKLQF

SEQ ID NO: 326222 - protein, 15 aa, Homo sapiens
  CDR3 for beta chain variable domain of TCR clone 163111 (TRBV4-1, TRBJ2-1)
CASSQAPGNYNEQFF

SEQ ID NO: 326223 - protein, 14 aa, Homo sapiens
  CDR3 for alpha chain variable domain of TCR clone 163112 (TRAV1-2, TRAJ8)
CAVREDTGFQKLVF

SEQ ID NO: 326224 - protein, 15 aa, Homo sapiens
  CDR3 for beta chain variable domain of TCR clone 163112 (TRBV19, TRBJ2-1)
CASSTGTSSCNEQFF

SEQ ID NO: 326225 - protein, 15 aa, Homo sapiens
  CDR3 for alpha chain variable domain of TCR clone 163113 (TRAV25, TRAJ52)
CAGRPGGTSYGKLTF

SEQ ID NO: 326226 - protein, 15 aa, Homo sapiens
  CDR3 for beta chain variable domain of TCR clone 163113 (TRBV7-2, TRBJ2-1)
CASNSGLAGGNEQFF

SEQ ID NO: 326227 - protein, 15 aa, Homo sapiens
  CDR3 for alpha chain variable domain of TCR clone 163114 (TRAV38-1, TRAJ37)
CAFIFGSSNTGKLIF

SEQ ID NO: 326228 - protein, 15 aa, Homo sapiens
  CDR3 for beta chain variable domain of TCR clone 163114 (TRBV4-3, TRBJ2-7)
CASSQGGRGIYEQYF

SEQ ID NO: 326229 - protein, 16 aa, Homo sapiens
  CDR3 for alpha chain variable domain of TCR clone 163115 (TRAV26-1, TRAJ32)
CIVRTNYGGGTNKLIF

SEQ ID NO: 326230 - protein, 20 aa, Homo sapiens
  CDR3 for beta chain variable domain of TCR clone 163115 (TRBV7-8, TRBJ2-2)
CASSHLFPGPTIHITGELFF

SEQ ID NO: 326231 - protein, 14 aa, Homo sapiens
  CDR3 for alpha chain variable domain of TCR clone 163116 (TRAV12-1, TRAJ42)
CVVIYGGSQGNLIF

SEQ ID NO: 326232 - protein, 12 aa, Homo sapiens
  CDR3 for beta chain variable domain of TCR clone 163116 (TRBV11-2, TRBJ2-4)
CSSSSASGSEYF

SEQ ID NO: 326233 - protein, 11 aa, Homo sapiens
  CDR3 for alpha chain variable domain of TCR clone 163117 (TRAV21, TRAJ3)
CLYSSASKIIF

SEQ ID NO: 326234 - protein, 16 aa, Homo sapiens
  CDR3 for beta chain variable domain of TCR clone 163117 (TRBV19, TRBJ2-1)
CASSKAGPSSYNEQFF

SEQ ID NO: 326235 - protein, 13 aa, Homo sapiens
  CDR3 for alpha chain variable domain of TCR clone 163118 (TRAV17, TRAJ54)
CATSWGGTQKLLF

SEQ ID NO: 326236 - protein, 15 aa, Homo sapiens
  CDR3 for beta chain variable domain of TCR clone 163118 (TRBV4-3, TRBJ2-3)
CASSPSLLSTDTQYF

SEQ ID NO: 326237 - protein, 12 aa, Homo sapiens
  CDR3 for alpha chain variable domain of TCR clone 163119 (TRAV27, TRAJ9)
CAGESGGFKTIF

SEQ ID NO: 326238 - protein, 18 aa, Homo sapiens
  CDR3 for beta chain variable domain of TCR clone 163119 (TRBV10-2, TRBJ2-2)
CISAPAVHRQADAGQLFF

SEQ ID NO: 326239 - protein, 13 aa, Homo sapiens
  CDR3 for alpha chain variable domain of TCR clone 163120 (TRAV21, TRAJ57)
CAVIQGGSEKLVF

SEQ ID NO: 326240 - protein, 16 aa, Homo sapiens
  CDR3 for beta chain variable domain of TCR clone 163120 (TRBV29-1, TRBJ2-7)
CRVEDAEDGTAYEQYF

SEQ ID NO: 326241 - protein, 15 aa, Homo sapiens
  CDR3 for alpha chain variable domain of TCR clone 163121 (TRAV3, TRAJ5)
SAVRDRKTGRRALTF

SEQ ID NO: 326242 - protein, 15 aa, Homo sapiens
  CDR3 for beta chain variable domain of TCR clone 163121 (TRBV7-8, TRBJ2-1)
CASSLADSLYDEQFF

SEQ ID NO: 326243 - protein, 16 aa, Homo sapiens
  CDR3 for alpha chain variable domain of TCR clone 163122 (TRAV26-1, TRAJ37)
CIVRGDGSGNTGKLIF

SEQ ID NO: 326244 - protein, 14 aa, Homo sapiens
  CDR3 for beta chain variable domain of TCR clone 163122 (TRBV19, TRBJ2-2)
CASSTLHRSGELFF

SEQ ID NO: 326245 - protein, 14 aa, Homo sapiens
  CDR3 for alpha chain variable domain of TCR clone 163123 (TRAV12-2, TRAJ17)
CAGLFKAAGNKLTL

SEQ ID NO: 326246 - protein, 17 aa, Homo sapiens
  CDR3 for beta chain variable domain of TCR clone 163123 (TRBV20-1, TRBJ2-2)
CSASGSGQGGLTGELFF

SEQ ID NO: 326247 - protein, 13 aa, Homo sapiens
  CDR3 for alpha chain variable domain of TCR clone 163124 (TRAV26-1, TRAJ40)
CIVRVEGTYKYIF

SEQ ID NO: 326248 - protein, 15 aa, Homo sapiens
  CDR3 for beta chain variable domain of TCR clone 163124 (TRBV12-4, TRBJ1-2)
CASSLAHRDGKAYTF

SEQ ID NO: 326249 - protein, 11 aa, Homo sapiens
  CDR3 for alpha chain variable domain of TCR clone 163125 (TRAV20, TRAJ23)
FACNQGGKLIF

SEQ ID NO: 326250 - protein, 15 aa, Homo sapiens
  CDR3 for beta chain variable domain of TCR clone 163125 (TRBV15, TRBJ1-4)
CATSRDMGSYEKLFF

SEQ ID NO: 326251 - protein, 19 aa, Homo sapiens
  CDR3 for alpha chain variable domain of TCR clone 163126 (TRAV8-3, TRAJ8)
LSTSVLWDPMNTGFQELVF

SEQ ID NO: 326252 - protein, 13 aa, Homo sapiens
  CDR3 for beta chain variable domain of TCR clone 163126 (TRBV10-2, TRBJ2-3)
CASSESGDHTQYF

SEQ ID NO: 326253 - protein, 14 aa, Homo sapiens
  CDR3 for alpha chain variable domain of TCR clone 163127 (TRAV13-1, TRAJ24)
CAASRTDSWGKLQF

SEQ ID NO: 326254 - protein, 15 aa, Homo sapiens
  CDR3 for beta chain variable domain of TCR clone 163127 (TRBV7-9, TRBJ1-5)
CASSQGHQPNQPRHF

SEQ ID NO: 326255 - protein, 16 aa, Homo sapiens
  CDR3 for alpha chain variable domain of TCR clone 163128 (TRAV12-1, TRAJ43)
CVVNPHRFGAGTRLTV

SEQ ID NO: 326256 - protein, 13 aa, Homo sapiens
  CDR3 for beta chain variable domain of TCR clone 163128 (TRBV12-4, TRBJ1-2)
CASSLGPNYGYTF

SEQ ID NO: 326257 - protein, 15 aa, Homo sapiens
  CDR3 for alpha chain variable domain of TCR clone 163129 (TRAV21, TRAJ42)
CAVTRYGGSQGNLIV

SEQ ID NO: 326258 - protein, 18 aa, Homo sapiens
  CDR3 for beta chain variable domain of TCR clone 163129 (TRBV11-2, TRBJ2-3)
CASSLGGASRGAPNTQYF

SEQ ID NO: 326259 - protein, 17 aa, Homo sapiens
  CDR3 for alpha chain variable domain of TCR clone 163130 (TRAV3, TRAJ6)
CAVRDGPRAGGSYIPQF

SEQ ID NO: 326260 - protein, 15 aa, Homo sapiens
  CDR3 for beta chain variable domain of TCR clone 163130 (TRBV20-1, TRBJ1-1)
CSASWDRFLNTEAFF

SEQ ID NO: 326261 - protein, 15 aa, Homo sapiens
  CDR3 for alpha chain variable domain of TCR clone 163131 (TRAV16, TRAJ4)
CALEDPSGGYNKLIF

SEQ ID NO: 326262 - protein, 15 aa, Homo sapiens
  CDR3 for beta chain variable domain of TCR clone 163131 (TRBV7-6, TRBJ1-5)
CASSQSSGINQPQHF

SEQ ID NO: 326263 - protein, 13 aa, Homo sapiens
  CDR3 for alpha chain variable domain of TCR clone 163132 (TRAV27, TRAJ6)
CAGGTRGSSIPTF

SEQ ID NO: 326264 - protein, 15 aa, Homo sapiens
  CDR3 for beta chain variable domain of TCR clone 163132 (TRBV5-7, TRBJ2-7)
CASSLGPGRGHEQYF

SEQ ID NO: 326265 - protein, 14 aa, Homo sapiens
  CDR3 for alpha chain variable domain of TCR clone 163133 (TRAV13-1, TRAJ29)
CAASKHSGNTPLVF

SEQ ID NO: 326266 - protein, 14 aa, Homo sapiens
  CDR3 for beta chain variable domain of TCR clone 163133 (TRBV6-1, TRBJ2-6)
CASQQGAGANVLTF

SEQ ID NO: 326267 - protein, 13 aa, Homo sapiens
  CDR3 for alpha chain variable domain of TCR clone 163134 (TRAV27, TRAJ29)
CAGAHSGNTPLVF

SEQ ID NO: 326268 - protein, 15 aa, Homo sapiens
  CDR3 for beta chain variable domain of TCR clone 163134 (TRBV4-1, TRBJ1-2)
CASSQGQGAAYGYTF

SEQ ID NO: 326269 - protein, 13 aa, Homo sapiens
  CDR3 for alpha chain variable domain of TCR clone 163135 (TRAV12-1, TRAJ49)
CVVGANTGNQFYF

SEQ ID NO: 326270 - protein, 16 aa, Homo sapiens
  CDR3 for beta chain variable domain of TCR clone 163135 (TRBV2, TRBJ2-5)
CASSETQGVGEETQYF

SEQ ID NO: 326271 - protein, 14 aa, Homo sapiens
  CDR3 for alpha chain variable domain of TCR clone 163136 (TRAV12-3, TRAJ10)
SHLPLTGGGNKLTF

SEQ ID NO: 326272 - protein, 13 aa, Homo sapiens
  CDR3 for beta chain variable domain of TCR clone 163136 (TRBV7-3, TRBJ1-1)
CASSQDWGAGAFF

SEQ ID NO: 326273 - protein, 15 aa, Homo sapiens
  CDR3 for alpha chain variable domain of TCR clone 163137 (TRAV2, TRAJ9)
CAVEDRGTGGFTTIF

SEQ ID NO: 326274 - protein, 13 aa, Homo sapiens
  CDR3 for beta chain variable domain of TCR clone 163137 (TRBV5-5, TRBJ1-2)
CASSFWRGEDYTF

SEQ ID NO: 326275 - protein, 12 aa, Homo sapiens
  CDR3 for alpha chain variable domain of TCR clone 163138 (TRAV12-1, TRAJ40)
CVVYSGTYKYIS

SEQ ID NO: 326276 - protein, 18 aa, Homo sapiens
  CDR3 for beta chain variable domain of TCR clone 163138 (TRBV11-2, TRBJ2-3)
CASSLGGAARGAPNTQYF

SEQ ID NO: 326277 - protein, 12 aa, Homo sapiens
  CDR3 for alpha chain variable domain of TCR clone 163139 (TRAV25, TRAJ5)
CAGGGGRGALNF

SEQ ID NO: 326278 - protein, 20 aa, Homo sapiens
  CDR3 for beta chain variable domain of TCR clone 163139 (TRBV19, TRBJ2-1)
CASSISRTVTSTRLNNEQFF

SEQ ID NO: 326279 - protein, 14 aa, Homo sapiens
  CDR3 for alpha chain variable domain of TCR clone 163140 (TRAV17, TRAJ22)
CATSPSGSARQLTF

SEQ ID NO: 326280 - protein, 15 aa, Homo sapiens
  CDR3 for beta chain variable domain of TCR clone 163140 (TRBV4-1, TRBJ2-5)
CASGQWDLYQETQFF

SEQ ID NO: 326281 - protein, 14 aa, Homo sapiens
  CDR3 for alpha chain variable domain of TCR clone 163141 (TRAV12-2, TRAJ17)
CAVLFKAAGNKLTF

SEQ ID NO: 326282 - protein, 16 aa, Homo sapiens
  CDR3 for beta chain variable domain of TCR clone 163141 (TRBV29-1, TRBJ2-6)
CSVEDITYSGANVLTF

SEQ ID NO: 326283 - protein, 16 aa, Homo sapiens
  CDR3 for alpha chain variable domain of TCR clone 163142 (TRAV3, TRAJ6)
CAVRYGMGRRKLHTYI

SEQ ID NO: 326284 - protein, 15 aa, Homo sapiens
  CDR3 for beta chain variable domain of TCR clone 163142 (TRBV9, TRBJ2-1)
CASSLAGSSYNEQFF

SEQ ID NO: 326285 - protein, 15 aa, Homo sapiens
  CDR3 for alpha chain variable domain of TCR clone 163143 (TRAV20, TRAJ53)
CAVQASGGSNYKLTF

SEQ ID NO: 326286 - protein, 15 aa, Homo sapiens
  CDR3 for beta chain variable domain of TCR clone 163143 (TRBV9, TRBJ2-1)
CASSPAGSSYNEQFF

SEQ ID NO: 326287 - protein, 12 aa, Homo sapiens
  CDR3 for alpha chain variable domain of TCR clone 163144 (TRAV26-1, TRAJ54)
CIGGWGAQKLVF

SEQ ID NO: 326288 - protein, 13 aa, Homo sapiens
  CDR3 for beta chain variable domain of TCR clone 163144 (TRBV27, TRBJ1-1)
CASSLSIGAEAFF

SEQ ID NO: 326289 - protein, 14 aa, Homo sapiens
  CDR3 for alpha chain variable domain of TCR clone 163145 (TRAV38-1, TRAJ40)
CALRPTSGTYKYIF

SEQ ID NO: 326290 - protein, 15 aa, Homo sapiens
  CDR3 for beta chain variable domain of TCR clone 163145 (TRBV25-1, TRBJ1-1)
PLCQNPPGGNTEAFF

SEQ ID NO: 326291 - protein, 15 aa, Homo sapiens
  CDR3 for alpha chain variable domain of TCR clone 163146 (TRAV17, TRAJ4)
CATGTWSGDYNKLIF

SEQ ID NO: 326292 - protein, 13 aa, Homo sapiens
  CDR3 for beta chain variable domain of TCR clone 163146 (TRBV6-6, TRBJ2-7)
CASSPKHLAEQYF

SEQ ID NO: 326293 - protein, 11 aa, Homo sapiens
  CDR3 for alpha chain variable domain of TCR clone 163147 (TRAV4, TRAJ31)
CLVGDNARLMF

SEQ ID NO: 326294 - protein, 16 aa, Homo sapiens
  CDR3 for beta chain variable domain of TCR clone 163147 (TRBV7-2, TRBJ2-5)
SASSSKWLSGQETQYF

SEQ ID NO: 326295 - protein, 14 aa, Homo sapiens
  CDR3 for alpha chain variable domain of TCR clone 163148 (TRAV12-2, TRAJ40)
CAVKIPSGTYKYIF

SEQ ID NO: 326296 - protein, 12 aa, Homo sapiens
  CDR3 for beta chain variable domain of TCR clone 163148 (TRBV7-3, TRBJ1-3)
CASSLGGNTIYF

SEQ ID NO: 326297 - protein, 11 aa, Homo sapiens
  CDR3 for alpha chain variable domain of TCR clone 163149 (TRAV2, TRAJ21)
CAVFNFNKFYF

SEQ ID NO: 326298 - protein, 13 aa, Homo sapiens
  CDR3 for beta chain variable domain of TCR clone 163149 (TRBV12-5, TRBJ2-3)
CANGDRQSDTQYF

SEQ ID NO: 326299 - protein, 13 aa, Homo sapiens
  CDR3 for alpha chain variable domain of TCR clone 163150 (TRAV3, TRAJ30)
CAVRYRGDDKIIF

SEQ ID NO: 326300 - protein, 16 aa, Homo sapiens
  CDR3 for beta chain variable domain of TCR clone 163150 (TRBV7-3, TRBJ2-2)
CASSLKRGTLSGELFF

SEQ ID NO: 326301 - protein, 14 aa, Homo sapiens
  CDR3 for alpha chain variable domain of TCR clone 163151 (TRAV3, TRAJ40)
SAVRDRRGTYKYIF

SEQ ID NO: 326302 - protein, 15 aa, Homo sapiens
  CDR3 for beta chain variable domain of TCR clone 163151 (TRBV11-1, TRBJ1-3)
CASTDPRAFGNTIYF

SEQ ID NO: 326303 - protein, 11 aa, Homo sapiens
  CDR3 for alpha chain variable domain of TCR clone 163152 (TRAV13-1, TRAJ23)
CAASSRGKLIF

SEQ ID NO: 326304 - protein, 16 aa, Homo sapiens
  CDR3 for beta chain variable domain of TCR clone 163152 (TRBV19, TRBJ2-2)
CASRSPWTGATGELFF

SEQ ID NO: 326305 - protein, 16 aa, Homo sapiens
  CDR3 for alpha chain variable domain of TCR clone 163153 (TRAV26-1, TRAJ53)
CIVRVAMGGSNYKLTF

SEQ ID NO: 326306 - protein, 13 aa, Homo sapiens
  CDR3 for beta chain variable domain of TCR clone 163153 (TRBV7-6, TRBJ2-7)
CASSLDHTHEQYF

SEQ ID NO: 326307 - protein, 15 aa, Homo sapiens
  CDR3 for alpha chain variable domain of TCR clone 163154 (TRAV8-3, TRAJ27)
CAVGAGDTNAGKSTF

SEQ ID NO: 326308 - protein, 14 aa, Homo sapiens
  CDR3 for beta chain variable domain of TCR clone 163154 (TRBV7-2, TRBJ2-7)
CASSLPPGQGPQYF

SEQ ID NO: 326309 - protein, 11 aa, Homo sapiens
  CDR3 for alpha chain variable domain of TCR clone 163155 (TRAV3, TRAJ21)
CAVGNFNKFYF

SEQ ID NO: 326310 - protein, 17 aa, Homo sapiens
  CDR3 for beta chain variable domain of TCR clone 163155 (TRBV13, TRBJ2-3)
CARSLSRVAGGRNTQYF

SEQ ID NO: 326311 - protein, 18 aa, Homo sapiens
  CDR3 for alpha chain variable domain of TCR clone 163156 (TRAV9-2, TRAJ52)
CALSRHNAGGTSYGKLTF

SEQ ID NO: 326312 - protein, 10 aa, Homo sapiens
  CDR3 for beta chain variable domain of TCR clone 163156 (TRBV7-9, TRBJ1-2)
CASSLSRTMA

SEQ ID NO: 326313 - protein, 14 aa, Homo sapiens
  CDR3 for alpha chain variable domain of TCR clone 163157 (TRAV12-2, TRAJ53)
CAVQGGGSNYKLTF

SEQ ID NO: 326314 - protein, 15 aa, Homo sapiens
  CDR3 for beta chain variable domain of TCR clone 163157 (TRBV11-2, TRBJ2-2)
CASSSDRVNAGELFF

SEQ ID NO: 326315 - protein, 17 aa, Homo sapiens
  CDR3 for alpha chain variable domain of TCR clone 163158 (TRAV3, TRAJ6)
CAVRDGPRAGGSYIPTF

SEQ ID NO: 326316 - protein, 14 aa, Homo sapiens
  CDR3 for beta chain variable domain of TCR clone 163158 (TRBV20-1, TRBJ2-2)
CSARKRLATGELFF

SEQ ID NO: 326317 - protein, 12 aa, Homo sapiens
  CDR3 for alpha chain variable domain of TCR clone 163159 (TRAV12-3, TRAJ17)
CAMTLTGNKLTF

SEQ ID NO: 326318 - protein, 16 aa, Homo sapiens
  CDR3 for beta chain variable domain of TCR clone 163159 (TRBV10-3, TRBJ2-1)
CAISGVGDGGGGDQFF

SEQ ID NO: 326319 - protein, 12 aa, Homo sapiens
  CDR3 for alpha chain variable domain of TCR clone 163160 (TRAV8-3, TRAJ26)
CAGDNYGKNFVF

SEQ ID NO: 326320 - protein, 13 aa, Homo sapiens
  CDR3 for beta chain variable domain of TCR clone 163160 (TRBV10-3, TRBJ2-7)
CASKLAVNYEQYF

SEQ ID NO: 326321 - protein, 11 aa, Homo sapiens
  CDR3 for alpha chain variable domain of TCR clone 163161 (TRAV16, TRAJ31)
CALFNNARLMF

SEQ ID NO: 326322 - protein, 16 aa, Homo sapiens
  CDR3 for beta chain variable domain of TCR clone 163161 (TRBV4-1, TRBJ2-7)
CASSQEWTSGPLEQYF

SEQ ID NO: 326323 - protein, 13 aa, Homo sapiens
  CDR3 for alpha chain variable domain of TCR clone 163162 (TRAV8-3, TRAJ48)
CAVVPFGNEKITF

SEQ ID NO: 326324 - protein, 15 aa, Homo sapiens
  CDR3 for beta chain variable domain of TCR clone 163162 (TRBV11-2, TRBJ2-1)
CASSSPSTRYNEQFF

SEQ ID NO: 326325 - protein, 14 aa, Homo sapiens
  CDR3 for alpha chain variable domain of TCR clone 163163 (TRAV2, TRAJ16)
CAVERGSDGQKLLF

SEQ ID NO: 326326 - protein, 12 aa, Homo sapiens
  CDR3 for beta chain variable domain of TCR clone 163163 (TRBV6-5, TRBJ2-7)
CASDIYGYEQYF

SEQ ID NO: 326327 - protein, 13 aa, Homo sapiens
  CDR3 for alpha chain variable domain of TCR clone 163164 (TRAV4, TRAJ9)
CLVAEGGGFKTIF

SEQ ID NO: 326328 - protein, 17 aa, Homo sapiens
  CDR3 for beta chain variable domain of TCR clone 163164 (TRBV27, TRBJ2-1)
CASGPMKGQGSYNEQFF

SEQ ID NO: 326329 - protein, 13 aa, Homo sapiens
  CDR3 for alpha chain variable domain of TCR clone 163165 (TRAV8-3, TRAJ43)
CAVVPYNNNDMRF

SEQ ID NO: 326330 - protein, 13 aa, Homo sapiens
  CDR3 for beta chain variable domain of TCR clone 163165 (TRBV11-1, TRBJ2-1)
CASSLEDDTIRFF

SEQ ID NO: 326331 - protein, 14 aa, Homo sapiens
  CDR3 for alpha chain variable domain of TCR clone 163166 (TRAV26-1, TRAJ34)
CIVRVAYNTDKLIF

SEQ ID NO: 326332 - protein, 16 aa, Homo sapiens
  CDR3 for beta chain variable domain of TCR clone 163166 (TRBV13, TRBJ2-2)
CASSPRTGEHTGELFF

SEQ ID NO: 326333 - protein, 12 aa, Homo sapiens
  CDR3 for alpha chain variable domain of TCR clone 163167 (TRAV2, TRAJ31)
CSVEDNNARLMF

SEQ ID NO: 326334 - protein, 16 aa, Homo sapiens
  CDR3 for beta chain variable domain of TCR clone 163167 (TRBV10-3, TRBJ2-1)
CAISGVGDGGGGEQFF

SEQ ID NO: 326335 - protein, 13 aa, Homo sapiens
  CDR3 for alpha chain variable domain of TCR clone 163168 (TRAV13-1, TRAJ26)
CAIVFGPGTRLSV

SEQ ID NO: 326336 - protein, 18 aa, Homo sapiens
  CDR3 for beta chain variable domain of TCR clone 163168 (TRBV11-2, TRBJ2-6)
CVSSLNPFLGTGANVLTF

SEQ ID NO: 326337 - protein, 14 aa, Homo sapiens
  CDR3 for alpha chain variable domain of TCR clone 163169 (TRAV12-3, TRAJ58)
CAMSTETSGSRFTF

SEQ ID NO: 326338 - protein, 15 aa, Homo sapiens
  CDR3 for beta chain variable domain of TCR clone 163169 (TRBV4-1, TRBJ1-4)
CASSDTGGTNEKLFF

SEQ ID NO: 326339 - protein, 21 aa, Homo sapiens
  CDR3 for alpha chain variable domain of TCR clone 163170 (TRAV1-1, TRAJ6)
CAVRREEATYLHLEEEPALLF

SEQ ID NO: 326340 - protein, 15 aa, Homo sapiens
  CDR3 for beta chain variable domain of TCR clone 163170 (TRBV6-6, TRBJ2-1)
RATRQGVSSYNEQFF

SEQ ID NO: 326341 - protein, 15 aa, Homo sapiens
  CDR3 for alpha chain variable domain of TCR clone 163171 (TRAV8-3, TRAJ6)
CAVGPLGGGSYIPTF

SEQ ID NO: 326342 - protein, 14 aa, Homo sapiens
  CDR3 for beta chain variable domain of TCR clone 163171 (TRBV19, TRBJ2-2)
CASSTGQGAWELFF

SEQ ID NO: 326343 - protein, 14 aa, Homo sapiens
  CDR3 for alpha chain variable domain of TCR clone 163172 (TRAV8-4, TRAJ54)
CAVSEVLGAQKLVF

SEQ ID NO: 326344 - protein, 17 aa, Homo sapiens
  CDR3 for beta chain variable domain of TCR clone 163172 (TRBV4-1)
CASSQEGPRGVEEKLFF

SEQ ID NO: 326345 - protein, 14 aa, Homo sapiens
  CDR3 for alpha chain variable domain of TCR clone 163173 (TRAV17, TRAJ39)
CATDPVRAGNMLTF

SEQ ID NO: 326346 - protein, 16 aa, Homo sapiens
  CDR3 for beta chain variable domain of TCR clone 163173 (TRBV20-1, TRBJ2-3)
CSAVRDRGPIADTQYF

SEQ ID NO: 326347 - protein, 17 aa, Homo sapiens
  CDR3 for alpha chain variable domain of TCR clone 163174 (TRAV21, TRAJ24)
CAGIRLRSTDSWGKLKF

SEQ ID NO: 326348 - protein, 15 aa, Homo sapiens
  CDR3 for beta chain variable domain of TCR clone 163174 (TRBV7-2, TRBJ2-3)
CASSPRGLSTDTQYF

SEQ ID NO: 326349 - protein, 15 aa, Homo sapiens
  CDR3 for alpha chain variable domain of TCR clone 163175 (TRAV34, TRAJ38)
CGADFTPGNNRTLIW

SEQ ID NO: 326350 - protein, 16 aa, Homo sapiens
  CDR3 for beta chain variable domain of TCR clone 163175 (TRBV6-1, TRBJ2-3)
CASSEVIGQGTDTQYF

SEQ ID NO: 326351 - protein, 14 aa, Homo sapiens
  CDR3 for alpha chain variable domain of TCR clone 163176 (TRAV12-1, TRAJ23)
CVVIVYNQGGKIIF

SEQ ID NO: 326352 - protein, 13 aa, Homo sapiens
  CDR3 for beta chain variable domain of TCR clone 163176 (TRBV11-2, TRBJ2-5)
CASSFSSQETQYF

SEQ ID NO: 326353 - protein, 14 aa, Homo sapiens
  CDR3 for alpha chain variable domain of TCR clone 163177 (TRAV21, TRAJ45)
CAVSSGGGADGLTF

SEQ ID NO: 326354 - protein, 18 aa, Homo sapiens
  CDR3 for beta chain variable domain of TCR clone 163177 (TRBV4-1, TRBJ1-5)
CASSQDPRGQGLNQPQHF

SEQ ID NO: 326355 - protein, 12 aa, Homo sapiens
  CDR3 for alpha chain variable domain of TCR clone 163178 (TRAV2, TRAJ5)
CALDTGRIALTF

SEQ ID NO: 326356 - protein, 15 aa, Homo sapiens
  CDR3 for beta chain variable domain of TCR clone 163178 (TRBV10-3, TRBJ2-1)
CAISDVQDRAYEQFF

SEQ ID NO: 326357 - protein, 12 aa, Homo sapiens
  CDR3 for alpha chain variable domain of TCR clone 163179 (TRAV21, TRAJ13)
PGPSWGYQKVTF

SEQ ID NO: 326358 - protein, 14 aa, Homo sapiens
  CDR3 for beta chain variable domain of TCR clone 163179 (TRBV27, TRBJ2-5)
CASSSLKGWETQYF

SEQ ID NO: 326359 - protein, 14 aa, Homo sapiens
  CDR3 for alpha chain variable domain of TCR clone 163180 (TRAV35, TRAJ33)
CWPRGRDSNYQLIW

SEQ ID NO: 326360 - protein, 11 aa, Homo sapiens
  CDR3 for beta chain variable domain of TCR clone 163180 (TRBV10-3, TRBJ2-7)
CAIGEGLEQYF

SEQ ID NO: 326361 - protein, 13 aa, Homo sapiens
  CDR3 for alpha chain variable domain of TCR clone 163181 (TRAV8-6, TRAJ33)
CAVSEGSNYQLIW

SEQ ID NO: 326362 - protein, 16 aa, Homo sapiens
  CDR3 for beta chain variable domain of TCR clone 163181 (TRBV28, TRBJ1-5)
CASSFRGGYSNQPQHF

SEQ ID NO: 326363 - protein, 12 aa, Homo sapiens
  CDR3 for alpha chain variable domain of TCR clone 163182 (TRAV16, TRAJ10)
CSRTGGGNKLTF

SEQ ID NO: 326364 - protein, 13 aa, Homo sapiens
  CDR3 for beta chain variable domain of TCR clone 163182 (TRBV7-6, TRBJ2-3)
CASSLRSDNTQYF

SEQ ID NO: 326365 - protein, 11 aa, Homo sapiens
  CDR3 for alpha chain variable domain of TCR clone 163183 (TRAV16, TRAJ33)
CALHSNYQLIW

SEQ ID NO: 326366 - protein, 15 aa, Homo sapiens
  CDR3 for beta chain variable domain of TCR clone 163183 (TRBV6-1, TRBJ2-3)
CASSERGGITDTQYF

SEQ ID NO: 326367 - protein, 13 aa, Homo sapiens
  CDR3 for alpha chain variable domain of TCR clone 163184 (TRAV13-2, TRAJ53)
CAENMGSNYKLTF

SEQ ID NO: 326368 - protein, 17 aa, Homo sapiens
  CDR3 for beta chain variable domain of TCR clone 163184 (TRBV19, TRBJ1-1)
CASSIAGRGLMNTEAFF

SEQ ID NO: 326369 - protein, 13 aa, Homo sapiens
  CDR3 for alpha chain variable domain of TCR clone 163185 (TRAV13-1, TRAJ21)
CAASIYNFNKFYF

SEQ ID NO: 326370 - protein, 17 aa, Homo sapiens
  CDR3 for beta chain variable domain of TCR clone 163185 (TRBV7-9, TRBJ2-3)
CASSPTVAGDLTDTQYL

SEQ ID NO: 326371 - protein, 14 aa, Homo sapiens
  CDR3 for alpha chain variable domain of TCR clone 163186 (TRAV23/DV6, TRAJ24)
CAASLSDSWGKLQF

SEQ ID NO: 326372 - protein, 15 aa, Homo sapiens
  CDR3 for beta chain variable domain of TCR clone 163186 (TRBV7-2, TRBJ2-3)
CVSSSTGLETDTQYF

SEQ ID NO: 326373 - protein, 11 aa, Homo sapiens
  CDR3 for alpha chain variable domain of TCR clone 163187 (TRAV12-1, TRAJ34)
CVVNKGRELVF

SEQ ID NO: 326374 - protein, 14 aa, Homo sapiens
  CDR3 for beta chain variable domain of TCR clone 163187 (TRBV15, TRBJ2-3)
CATSREENTDTQYF

SEQ ID NO: 326375 - protein, 15 aa, Homo sapiens
  CDR3 for alpha chain variable domain of TCR clone 163188 (TRAV3, TRAJ5)
CAVRDRKTGRSALTF

SEQ ID NO: 326376 - protein, 12 aa, Homo sapiens
  CDR3 for beta chain variable domain of TCR clone 163188 (TRBV11-2, TRBJ2-1)
CASSPGNNEQFF

SEQ ID NO: 326377 - protein, 13 aa, Homo sapiens
  CDR3 for alpha chain variable domain of TCR clone 163189 (TRAV8-3, TRAJ47)
CAVSMEYGNNLVF

SEQ ID NO: 326378 - protein, 12 aa, Homo sapiens
  CDR3 for beta chain variable domain of TCR clone 163189 (TRBV11-2, TRBJ2-2)
CASSLPTGELFF

SEQ ID NO: 326379 - protein, 16 aa, Homo sapiens
  CDR3 for alpha chain variable domain of TCR clone 163190 (TRAV26-2, TRAJ28)
CILRPYSGAGGYQLTF

SEQ ID NO: 326380 - protein, 17 aa, Homo sapiens
  CDR3 for beta chain variable domain of TCR clone 163190 (TRBV27, TRBJ2-5)
CASRLRPGQGVQETQYF

SEQ ID NO: 326381 - protein, 13 aa, Homo sapiens
  CDR3 for alpha chain variable domain of TCR clone 163191 (TRAV3, TRAJ36)
CAVRDTGANNLFF

SEQ ID NO: 326382 - protein, 17 aa, Homo sapiens
  CDR3 for beta chain variable domain of TCR clone 163191 (TRBV20-1, TRBJ2-2)
CSASGSGQGGLTGELFF

SEQ ID NO: 326383 - protein, 13 aa, Homo sapiens
  CDR3 for alpha chain variable domain of TCR clone 163192 (TRAV12-1, TRAJ33)
CGDAPDSNYQLIW

SEQ ID NO: 326384 - protein, 17 aa, Homo sapiens
  CDR3 for beta chain variable domain of TCR clone 163192 (TRBV28, TRBJ2-1)
CASSSARQALTYNEQFF

SEQ ID NO: 326385 - protein, 13 aa, Homo sapiens
  CDR3 for alpha chain variable domain of TCR clone 163193 (TRAV13-2, TRAJ8)
CAFMNTGFQKLVF

SEQ ID NO: 326386 - protein, 15 aa, Homo sapiens
  CDR3 for beta chain variable domain of TCR clone 163193 (TRBV19, TRBJ2-3)
CAAGETNAPNDTQYF

SEQ ID NO: 326387 - protein, 16 aa, Homo sapiens
  CDR3 for alpha chain variable domain of TCR clone 163194 (TRAV30, TRAJ24)
CGTEIVDADSWGKFQF

SEQ ID NO: 326388 - protein, 13 aa, Homo sapiens
  CDR3 for beta chain variable domain of TCR clone 163194 (TRBV7-2, TRBJ1-4)
CARSFAGLEKLFF

SEQ ID NO: 326389 - protein, 14 aa, Homo sapiens
  CDR3 for alpha chain variable domain of TCR clone 163195 (TRAV17, TRAJ6)
CATNPAGGSYIPTF

SEQ ID NO: 326390 - protein, 16 aa, Homo sapiens
  CDR3 for beta chain variable domain of TCR clone 163195 (TRBV12-5, TRBJ2-5)
CASGPRTSGNQETQYF

SEQ ID NO: 326391 - protein, 15 aa, Homo sapiens
  CDR3 for alpha chain variable domain of TCR clone 163196 (TRAV21, TRAJ53)
CATLTSGGSNYKLTF

SEQ ID NO: 326392 - protein, 15 aa, Homo sapiens
  CDR3 for beta chain variable domain of TCR clone 163196 (TRBV18, TRBJ2-1)
CASSPPSASYNEQFF

SEQ ID NO: 326393 - protein, 16 aa, Homo sapiens
  CDR3 for alpha chain variable domain of TCR clone 163197 (TRAV14/DV4, TRAJ54)
CAMREGRIQGAQKLVF

SEQ ID NO: 326394 - protein, 14 aa, Homo sapiens
  CDR3 for beta chain variable domain of TCR clone 163197 (TRBV7-8, TRBJ2-3)
CASSLEAGTDTQYF

SEQ ID NO: 326395 - protein, 13 aa, Homo sapiens
  CDR3 for alpha chain variable domain of TCR clone 163198 (TRAV12-2, TRAJ20)
CAVYPSNDYKLIL

SEQ ID NO: 326396 - protein, 15 aa, Homo sapiens
  CDR3 for beta chain variable domain of TCR clone 163198 (TRBV27, TRBJ2-5)
CASSLYPRGGETQYF

SEQ ID NO: 326397 - protein, 14 aa, Homo sapiens
  CDR3 for alpha chain variable domain of TCR clone 163199 (TRAV12-2, TRAJ40)
CAVKIPPGTYKNIF

SEQ ID NO: 326398 - protein, 14 aa, Homo sapiens
  CDR3 for beta chain variable domain of TCR clone 163199 (TRBV20-1, TRBJ1-1)
CSAQTRIGGTEAFF

SEQ ID NO: 326399 - protein, 15 aa, Homo sapiens
  CDR3 for alpha chain variable domain of TCR clone 163200 (TRAV38-1, TRAJ37)
CAFIFGSSNTGNIIF

SEQ ID NO: 326400 - protein, 12 aa, Homo sapiens
  CDR3 for beta chain variable domain of TCR clone 163200 (TRBV7-9, TRBJ2-7)
CASSLEGYEQYF

SEQ ID NO: 326401 - protein, 16 aa, Homo sapiens
  CDR3 for alpha chain variable domain of TCR clone 163201 (TRAV30, TRAJ24)
CGTESVDADSWGKFQF

SEQ ID NO: 326402 - protein, 13 aa, Homo sapiens
  CDR3 for beta chain variable domain of TCR clone 163201 (TRBV20-1, TRBJ1-1)
CSAPPGGHTDAFF

SEQ ID NO: 326403 - protein, 12 aa, Homo sapiens
  CDR3 for alpha chain variable domain of TCR clone 163202 (TRAV23/DV6, TRAJ30)
CAASKGDDKIIF

SEQ ID NO: 326404 - protein, 13 aa, Homo sapiens
  CDR3 for beta chain variable domain of TCR clone 163202 (TRBV19, TRBJ1-2)
CASGVPGQDGYTF

SEQ ID NO: 326405 - protein, 14 aa, Homo sapiens
  CDR3 for alpha chain variable domain of TCR clone 163203 (TRAV23/DV6, TRAJ39)
CAASIGNAGNMHNF

SEQ ID NO: 326406 - protein, 12 aa, Homo sapiens
  CDR3 for beta chain variable domain of TCR clone 163203 (TRBV20-1, TRBJ2-5)
CSVGTGSETQYF

SEQ ID NO: 326407 - protein, 15 aa, Homo sapiens
  CDR3 for alpha chain variable domain of TCR clone 163204 (TRAV23/DV6, TRAJ33)
CAASNSGGGNYRLIW

SEQ ID NO: 326408 - protein, 14 aa, Homo sapiens
  CDR3 for beta chain variable domain of TCR clone 163204 (TRBV7-2, TRBJ2-7)
CASSLYPGRYEQYF

SEQ ID NO: 326409 - protein, 14 aa, Homo sapiens
  CDR3 for alpha chain variable domain of TCR clone 163205 (TRAV3, TRAJ9)
CAVRLNTGGFKTIF

SEQ ID NO: 326410 - protein, 14 aa, Homo sapiens
  CDR3 for beta chain variable domain of TCR clone 163205 (TRBV5-7, TRBJ2-1)
CASSLGDSYNEQFF

SEQ ID NO: 326411 - protein, 14 aa, Homo sapiens
  CDR3 for alpha chain variable domain of TCR clone 163206 (TRAV20, TRAJ42)
CAVQAGGSQGNLIF

SEQ ID NO: 326412 - protein, 12 aa, Homo sapiens
  CDR3 for beta chain variable domain of TCR clone 163206 (TRBV7-3, TRBJ1-1)
CASSHGGTEAFF

SEQ ID NO: 326413 - protein, 17 aa, Homo sapiens
  CDR3 for alpha chain variable domain of TCR clone 163207 (TRAV16, TRAJ58)
CITVLSNGETSGSRLTF

SEQ ID NO: 326414 - protein, 17 aa, Homo sapiens
  CDR3 for beta chain variable domain of TCR clone 163207 (TRBV18, TRBJ2-1)
CASSKGLSGGAYNEQFF

SEQ ID NO: 326415 - protein, 15 aa, Homo sapiens
  CDR3 for alpha chain variable domain of TCR clone 163208 (TRAV3, TRAJ22)
CAVRDRGGSERQLTF

SEQ ID NO: 326416 - protein, 17 aa, Homo sapiens
  CDR3 for beta chain variable domain of TCR clone 163208 (TRBV13, TRBJ2-3)
CASSLSRVAGGRNTQYF

SEQ ID NO: 326417 - protein, 13 aa, Homo sapiens
  CDR3 for alpha chain variable domain of TCR clone 163209 (TRAV27, TRAJ49)
CAPRPYTGNQFYF

SEQ ID NO: 326418 - protein, 16 aa, Homo sapiens
  CDR3 for beta chain variable domain of TCR clone 163209 (TRBV4-1, TRBJ1-2)
CANSQDAGQVLYGYTF

SEQ ID NO: 326419 - protein, 15 aa, Homo sapiens
  CDR3 for alpha chain variable domain of TCR clone 163210 (TRAV12-3, TRAJ11)
CAMSEGNSGYSTLTF

SEQ ID NO: 326420 - protein, 14 aa, Homo sapiens
  CDR3 for beta chain variable domain of TCR clone 163210 (TRBV18, TRBJ2-5)
CASSPGVSQETQYF

SEQ ID NO: 326421 - protein, 15 aa, Homo sapiens
  CDR3 for alpha chain variable domain of TCR clone 163211 (TRAV38-1, TRAJ57)
CDFMDSQGGSEKLVF

SEQ ID NO: 326422 - protein, 16 aa, Homo sapiens
  CDR3 for beta chain variable domain of TCR clone 163211 (TRBV10-3, TRBJ2-1)
CAIRGGGRGDYNEQFF

SEQ ID NO: 326423 - protein, 16 aa, Homo sapiens
  CDR3 for alpha chain variable domain of TCR clone 163212 (TRAV3, TRAJ10)
CVVRDMRAGGGNKLTF

SEQ ID NO: 326424 - protein, 15 aa, Homo sapiens
  CDR3 for beta chain variable domain of TCR clone 163212 (TRBV6-3, TRBJ2-7)
CASSSPGTVFYEQYF

SEQ ID NO: 326425 - protein, 12 aa, Homo sapiens
  CDR3 for alpha chain variable domain of TCR clone 163213 (TRAV12-3, TRAJ17)
CGMTLTGNKLTF

SEQ ID NO: 326426 - protein, 16 aa, Homo sapiens
  CDR3 for beta chain variable domain of TCR clone 163213 (TRBV29-1, TRBJ2-7)
CSVEVVGTSGSYEQYF

SEQ ID NO: 326427 - protein, 10 aa, Homo sapiens
  CDR3 for alpha chain variable domain of TCR clone 163214 (TRAV30, TRAJ48)
CGIGNEKLAF

SEQ ID NO: 326428 - protein, 15 aa, Homo sapiens
  CDR3 for beta chain variable domain of TCR clone 163214 (TRBV28, TRBJ2-5)
CASSPPWSYQETQYF

SEQ ID NO: 326429 - protein, 13 aa, Homo sapiens
  CDR3 for alpha chain variable domain of TCR clone 163215 (TRAV17, TRAJ15)
CATGARAGTALIF

SEQ ID NO: 326430 - protein, 14 aa, Homo sapiens
  CDR3 for beta chain variable domain of TCR clone 163215 (TRBV7-2, TRBJ2-5)
CASSIRLTQETQYF

SEQ ID NO: 326431 - protein, 15 aa, Homo sapiens
  CDR3 for alpha chain variable domain of TCR clone 163216 (TRAV12-1, TRAJ42)
CVVTRDGGSQGNLIF

SEQ ID NO: 326432 - protein, 13 aa, Homo sapiens
  CDR3 for beta chain variable domain of TCR clone 163216 (TRBV27, TRBJ2-7)
CASSLTTGHEQYF

SEQ ID NO: 326433 - protein, 14 aa, Homo sapiens
  CDR3 for alpha chain variable domain of TCR clone 163217 (TRAV13-1, TRAJ40)
CAASMTSGTYKYII

SEQ ID NO: 326434 - protein, 13 aa, Homo sapiens
  CDR3 for beta chain variable domain of TCR clone 163217 (TRBV4-1, TRBJ2-5)
CDSSREVQETQYF

SEQ ID NO: 326435 - protein, 15 aa, Homo sapiens
  CDR3 for alpha chain variable domain of TCR clone 163218 (TRAV8-6, TRAJ6)
CAVSGESGGSYIPTF

SEQ ID NO: 326436 - protein, 14 aa, Homo sapiens
  CDR3 for beta chain variable domain of TCR clone 163218 (TRBV20-1, TRBJ2-7)
CSAPELAGVGEQYF

SEQ ID NO: 326437 - protein, 14 aa, Homo sapiens
  CDR3 for alpha chain variable domain of TCR clone 163219 (TRAV13-2, TRAJ17)
CAENSKAEGKKLTF

SEQ ID NO: 326438 - protein, 11 aa, Homo sapiens
  CDR3 for beta chain variable domain of TCR clone 163219 (TRBV6-3, TRBJ2-3)
CATGQADTQYF

SEQ ID NO: 326439 - protein, 18 aa, Homo sapiens
  CDR3 for alpha chain variable domain of TCR clone 163220 (TRAV21, TRAJ52)
CAVRPSPAGGTSYGKLTL

SEQ ID NO: 326440 - protein, 17 aa, Homo sapiens
  CDR3 for beta chain variable domain of TCR clone 163220 (TRBV13, TRBJ2-3)
CASSLSRLAGGRNTQYF

SEQ ID NO: 326441 - protein, 16 aa, Homo sapiens
  CDR3 for alpha chain variable domain of TCR clone 163221 (TRAV30, TRAJ32)
CGTESSYGGATNKLIF

SEQ ID NO: 326442 - protein, 12 aa, Homo sapiens
  CDR3 for beta chain variable domain of TCR clone 163221 (TRBV2, TRBJ2-1)
CAYGPPGNEQFF

SEQ ID NO: 326443 - protein, 13 aa, Homo sapiens
  CDR3 for alpha chain variable domain of TCR clone 163222 (TRAV12-3, TRAJ56)
CAMSFGANRKLTF

SEQ ID NO: 326444 - protein, 12 aa, Homo sapiens
  CDR3 for beta chain variable domain of TCR clone 163222 (TRBV12-4, TRBJ1-4)
CASSETNEKLFV

SEQ ID NO: 326445 - protein, 12 aa, Homo sapiens
  CDR3 for alpha chain variable domain of TCR clone 163223 (TRAV17, TRAJ4)
CATDGGYNKLIF

SEQ ID NO: 326446 - protein, 12 aa, Homo sapiens
  CDR3 for beta chain variable domain of TCR clone 163223 (TRBV7-9, TRBJ2-7)
CASSIKREEQYF

SEQ ID NO: 326447 - protein, 13 aa, Homo sapiens
  CDR3 for alpha chain variable domain of TCR clone 163224 (TRAV24, TRAJ44)
CALLTGTASKLTF

SEQ ID NO: 326448 - protein, 13 aa, Homo sapiens
  CDR3 for beta chain variable domain of TCR clone 163224 (TRBV19, TRBJ1-3)
CASRLSLGNTIDF

SEQ ID NO: 326449 - protein, 14 aa, Homo sapiens
  CDR3 for alpha chain variable domain of TCR clone 163225 (TRAV23/DV6, TRAJ8)
CAASKATGFKKLVF

SEQ ID NO: 326450 - protein, 13 aa, Homo sapiens
  CDR3 for beta chain variable domain of TCR clone 163225 (TRBV11-3, TRBJ2-5)
CASSSGLQETQYF

SEQ ID NO: 326451 - protein, 15 aa, Homo sapiens
  CDR3 for alpha chain variable domain of TCR clone 163226 (TRAV25, TRAJ10)
CAGPLLTGGGNKLTF

SEQ ID NO: 326452 - protein, 15 aa, Homo sapiens
  CDR3 for beta chain variable domain of TCR clone 163226 (TRBV7-9, TRBJ1-6)
CASSSPGRGNSPLHF

SEQ ID NO: 326453 - protein, 14 aa, Homo sapiens
  CDR3 for alpha chain variable domain of TCR clone 163227 (TRAV21, TRAJ35)
CAVMPIGFGNVLHC

SEQ ID NO: 326454 - protein, 15 aa, Homo sapiens
  CDR3 for beta chain variable domain of TCR clone 163227 (TRBV7-9, TRBJ2-1)
CASSSGLAGGNEQFF

SEQ ID NO: 326455 - protein, 13 aa, Homo sapiens
  CDR3 for alpha chain variable domain of TCR clone 163228 (TRAV25, TRAJ29)
CAGRFVGNTPLVF

SEQ ID NO: 326456 - protein, 15 aa, Homo sapiens
  CDR3 for beta chain variable domain of TCR clone 163228 (TRBV29-1, TRBJ2-1)
GSVRTSLSSYNEQFF

SEQ ID NO: 326457 - protein, 14 aa, Homo sapiens
  CDR3 for alpha chain variable domain of TCR clone 163229 (TRAV38-1, TRAJ45)
FAYYSGGGADGLTF

SEQ ID NO: 326458 - protein, 15 aa, Homo sapiens
  CDR3 for beta chain variable domain of TCR clone 163229 (TRBV11-2, TRBJ2-1)
CASSKNRGLIYEQFF

SEQ ID NO: 326459 - protein, 17 aa, Homo sapiens
  CDR3 for alpha chain variable domain of TCR clone 163230 (TRAV12-1, TRAJ42)
CVVRRMNYGGSQGNLIF

SEQ ID NO: 326460 - protein, 13 aa, Homo sapiens
  CDR3 for beta chain variable domain of TCR clone 163230 (TRBV7-2, TRBJ1-1)
CASSLARPAEAFF

SEQ ID NO: 326461 - protein, 15 aa, Homo sapiens
  CDR3 for alpha chain variable domain of TCR clone 163231 (TRAV21, TRAJ17)
CAVRRSPSCRQQANF

SEQ ID NO: 326462 - protein, 14 aa, Homo sapiens
  CDR3 for beta chain variable domain of TCR clone 163231 (TRBV25-1, TRBJ1-1)
CASTHLGGNTEAFF

SEQ ID NO: 326463 - protein, 14 aa, Homo sapiens
  CDR3 for alpha chain variable domain of TCR clone 163232 (TRAV27, TRAJ22)
CAGLPSGSARQLTF

SEQ ID NO: 326464 - protein, 16 aa, Homo sapiens
  CDR3 for beta chain variable domain of TCR clone 163232 (TRBV7-3, TRBJ2-2)
CASSLKRGTLSVELFF

SEQ ID NO: 326465 - protein, 14 aa, Homo sapiens
  CDR3 for alpha chain variable domain of TCR clone 163233 (TRAV9-2, TRAJ39)
CALYIYNAGNMLTF

SEQ ID NO: 326466 - protein, 14 aa, Homo sapiens
  CDR3 for beta chain variable domain of TCR clone 163233 (TRBV15, TRBJ2-1)
CATSGAEDYNEQFF

SEQ ID NO: 326467 - protein, 15 aa, Homo sapiens
  CDR3 for alpha chain variable domain of TCR clone 163234 (TRAV17, TRAJ57)
CATGPSQGGTEKLVF

SEQ ID NO: 326468 - protein, 16 aa, Homo sapiens
  CDR3 for beta chain variable domain of TCR clone 163234 (TRBV4-1, TRBJ2-5)
CASSQAIAASSATQYF

SEQ ID NO: 326469 - protein, 13 aa, Homo sapiens
  CDR3 for alpha chain variable domain of TCR clone 163235 (TRAV41, TRAJ54)
CAVKIQGSQKLVF

SEQ ID NO: 326470 - protein, 14 aa, Homo sapiens
  CDR3 for beta chain variable domain of TCR clone 163235 (TRBV2, TRBJ2-1)
CASRTGSSYNEQFF

SEQ ID NO: 326471 - protein, 15 aa, Homo sapiens
  CDR3 for alpha chain variable domain of TCR clone 163236 (TRAV3, TRAJ22)
CAVRDRGGSARPLTF

SEQ ID NO: 326472 - protein, 16 aa, Homo sapiens
  CDR3 for beta chain variable domain of TCR clone 163236 (TRBV5-4, TRBJ2-3)
CASQQPGAGWADTQYF

SEQ ID NO: 326473 - protein, 13 aa, Homo sapiens
  CDR3 for alpha chain variable domain of TCR clone 163237 (TRAV17, TRAJ9)
CATDGTGGFKTIF

SEQ ID NO: 326474 - protein, 17 aa, Homo sapiens
  CDR3 for beta chain variable domain of TCR clone 163237 (TRBV6-5, TRBJ2-7)
CASSYSFWGQGIYEQYF

SEQ ID NO: 326475 - protein, 14 aa, Homo sapiens
  CDR3 for alpha chain variable domain of TCR clone 163238 (TRAV20, TRAJ56)
CAEQFGGANSKLTF

SEQ ID NO: 326476 - protein, 14 aa, Homo sapiens
  CDR3 for beta chain variable domain of TCR clone 163238 (TRBV20-1, TRBJ2-7)
CSAKRGRSSYEQYF

SEQ ID NO: 326477 - protein, 15 aa, Homo sapiens
  CDR3 for alpha chain variable domain of TCR clone 163239 (TRAV21, TRAJ53)
CATLNSGGSNYQLTF

SEQ ID NO: 326478 - protein, 16 aa, Homo sapiens
  CDR3 for beta chain variable domain of TCR clone 163239 (TRBV19, TRBJ1-5)
CASSTWTGGGNQTQHF

SEQ ID NO: 326479 - protein, 14 aa, Homo sapiens
  CDR3 for alpha chain variable domain of TCR clone 163240 (TRAV12-3, TRAJ42)
CAMNDGGSQGNLIF

SEQ ID NO: 326480 - protein, 15 aa, Homo sapiens
  CDR3 for beta chain variable domain of TCR clone 163240 (TRBV5-7, TRBJ1-5)
CASSYGKLWDQPQHF

SEQ ID NO: 326481 - protein, 15 aa, Homo sapiens
  CDR3 for alpha chain variable domain of TCR clone 163241 (TRAV8-3, TRAJ40)
CAAPSLGSGTYKYIF

SEQ ID NO: 326482 - protein, 14 aa, Homo sapiens
  CDR3 for beta chain variable domain of TCR clone 163241 (TRBV7-2, TRBJ2-7)
CASSPKTSFYEQYF

SEQ ID NO: 326483 - protein, 15 aa, Homo sapiens
  CDR3 for alpha chain variable domain of TCR clone 163242 (TRAV20, TRAJ4)
CAVQGFSGGYDKLIF

SEQ ID NO: 326484 - protein, 14 aa, Homo sapiens
  CDR3 for beta chain variable domain of TCR clone 163242 (TRBV7-6, TRBJ2-3)
CASNSGGDANTQYF

SEQ ID NO: 326485 - protein, 15 aa, Homo sapiens
  CDR3 for alpha chain variable domain of TCR clone 163243 (TRAV27, TRAJ38)
CAARRNAGNNRKLIL

SEQ ID NO: 326486 - protein, 17 aa, Homo sapiens
  CDR3 for beta chain variable domain of TCR clone 163243 (TRBV13, TRBJ2-3)
CASSLSRVAGGRNTQYF

SEQ ID NO: 326487 - protein, 14 aa, Homo sapiens
  CDR3 for alpha chain variable domain of TCR clone 163244 (TRAV1-2, TRAJ16)
CAVNRFSNGQKLLF

SEQ ID NO: 326488 - protein, 14 aa, Homo sapiens
  CDR3 for beta chain variable domain of TCR clone 163244 (TRBV4-1, TRBJ2-5)
CASSQYRDQETQYF

SEQ ID NO: 326489 - protein, 12 aa, Homo sapiens
  CDR3 for alpha chain variable domain of TCR clone 163245 (TRAV21, TRAJ33)
CAKMDSNYQLIW

SEQ ID NO: 326490 - protein, 16 aa, Homo sapiens
  CDR3 for beta chain variable domain of TCR clone 163245 (TRBV7-2, TRBJ2-3)
CASSLVGDASTDTQYF

SEQ ID NO: 326491 - protein, 13 aa, Homo sapiens
  CDR3 for alpha chain variable domain of TCR clone 163246 (TRAV3, TRAJ21)
CAVGNFNKFYFDL

SEQ ID NO: 326492 - protein, 16 aa, Homo sapiens
  CDR3 for beta chain variable domain of TCR clone 163246 (TRBV19, TRBJ2-1)
CASSKAGPSSYNEQFF

SEQ ID NO: 326493 - protein, 15 aa, Homo sapiens
  CDR3 for alpha chain variable domain of TCR clone 163247 (TRAV12-1, TRAJ44)
CVADLPTGTASKLTF

SEQ ID NO: 326494 - protein, 12 aa, Homo sapiens
  CDR3 for beta chain variable domain of TCR clone 163247 (TRBV27, TRBJ2-5)
CASSPTGETQYF

SEQ ID NO: 326495 - protein, 14 aa, Homo sapiens
  CDR3 for alpha chain variable domain of TCR clone 163248 (TRAV2, TRAJ9)
CAVEDRSGGCKTIF

SEQ ID NO: 326496 - protein, 12 aa, Homo sapiens
  CDR3 for beta chain variable domain of TCR clone 163248 (TRBV12-4, TRBJ2-4)
CASSSSGNIQYF

SEQ ID NO: 326497 - protein, 13 aa, Homo sapiens
  CDR3 for alpha chain variable domain of TCR clone 163249 (TRAV23/DV6, TRAJ21)
CAASRKQLQQILL

SEQ ID NO: 326498 - protein, 16 aa, Homo sapiens
  CDR3 for beta chain variable domain of TCR clone 163249 (TRBV20-1, TRBJ2-3)
CSAVRDRGPIADTQYF

SEQ ID NO: 326499 - protein, 21 aa, Homo sapiens
  CDR3 for alpha chain variable domain of TCR clone 163250 (TRAV35, TRAJ52)
CWAGYADGPNAGGTSDGKLTF

SEQ ID NO: 326500 - protein, 12 aa, Homo sapiens
  CDR3 for beta chain variable domain of TCR clone 163250 (TRBV5-1, TRBJ2-7)
CASSFRGYEQYF

SEQ ID NO: 326501 - protein, 14 aa, Homo sapiens
  CDR3 for alpha chain variable domain of TCR clone 163251 (TRAV2, TRAJ37)
CAVDFTSNTGKLIF

SEQ ID NO: 326502 - protein, 16 aa, Homo sapiens
  CDR3 for beta chain variable domain of TCR clone 163251 (TRBV7-2, TRBJ2-3)
CASSPQGLSNTDTQYF

SEQ ID NO: 326503 - protein, 17 aa, Homo sapiens
  CDR3 for alpha chain variable domain of TCR clone 163252 (TRAV23/DV6, TRAJ57)
CSASSTLSQGGSENLVF

SEQ ID NO: 326504 - protein, 14 aa, Homo sapiens
  CDR3 for beta chain variable domain of TCR clone 163252 (TRBV25-1, TRBJ1-1)
CASTHLGGNTEAFF

SEQ ID NO: 326505 - protein, 15 aa, Homo sapiens
  CDR3 for alpha chain variable domain of TCR clone 163253 (TRAV4, TRAJ39)
CLVGPNNNAGNMLTF

SEQ ID NO: 326506 - protein, 15 aa, Homo sapiens
  CDR3 for beta chain variable domain of TCR clone 163253 (TRBV4-1, TRBJ2-5)
CASSQWDLYQETQYF

SEQ ID NO: 326507 - protein, 16 aa, Homo sapiens
  CDR3 for alpha chain variable domain of TCR clone 163254 (TRAV12-3, TRAJ53)
CAMSPGNGGSNYKLTF

SEQ ID NO: 326508 - protein, 14 aa, Homo sapiens
  CDR3 for beta chain variable domain of TCR clone 163254 (TRBV7-2, TRBJ2-7)
CASRSQGAAYEQYF

SEQ ID NO: 326509 - protein, 15 aa, Homo sapiens
  CDR3 for alpha chain variable domain of TCR clone 163255 (TRAV16, TRAJ12)
CSKWPLRDSSYKLIF

SEQ ID NO: 326510 - protein, 13 aa, Homo sapiens
  CDR3 for beta chain variable domain of TCR clone 163255 (TRBV12-4, TRBJ2-5)
CASSLGGSRTQYF

SEQ ID NO: 326511 - protein, 14 aa, Homo sapiens
  CDR3 for alpha chain variable domain of TCR clone 163256 (TRAV12-2, TRAJ53)
CRERGGGTNYKLTF

SEQ ID NO: 326512 - protein, 17 aa, Homo sapiens
  CDR3 for beta chain variable domain of TCR clone 163256 (TRBV7-3, TRBJ2-3)
CAGSLMKRMRGADTQYF

SEQ ID NO: 326513 - protein, 17 aa, Homo sapiens
  CDR3 for alpha chain variable domain of TCR clone 163257 (TRAV3, TRAJ6)
CAVRDGPRGGGSYIPTF

SEQ ID NO: 326514 - protein, 12 aa, Homo sapiens
  CDR3 for beta chain variable domain of TCR clone 163257 (TRBV11-2, TRBJ2-2)
CASSLGGGELFF

SEQ ID NO: 326515 - protein, 18 aa, Homo sapiens
  CDR3 for alpha chain variable domain of TCR clone 163258 (TRAV26-2, TRAJ17)
CCVLLHPAIKAEGNKLTF

SEQ ID NO: 326516 - protein, 15 aa, Homo sapiens
  CDR3 for beta chain variable domain of TCR clone 163258 (TRBV27, TRBJ2-7)
CASSTAGTGSYEQYF

SEQ ID NO: 326517 - protein, 16 aa, Homo sapiens
  CDR3 for alpha chain variable domain of TCR clone 163259 (TRAV30, TRAJ24)
CGKEIVDADSWGKFKF

SEQ ID NO: 326518 - protein, 14 aa, Homo sapiens
  CDR3 for beta chain variable domain of TCR clone 163259 (TRBV12-5, TRBJ2-5)
CASGSRKHQETQYF

SEQ ID NO: 326519 - protein, 12 aa, Homo sapiens
  CDR3 for alpha chain variable domain of TCR clone 163260 (TRAV38-1, TRAJ47)
CAFETYGNKLVF

SEQ ID NO: 326520 - protein, 13 aa, Homo sapiens
  CDR3 for beta chain variable domain of TCR clone 163260 (TRBV7-9, TRBJ2-5)
CASLPSGRETQYF

SEQ ID NO: 326521 - protein, 14 aa, Homo sapiens
  CDR3 for alpha chain variable domain of TCR clone 163261 (TRAV12-1, TRAJ3)
CVVGRHSSASKIIF

SEQ ID NO: 326522 - protein, 15 aa, Homo sapiens
  CDR3 for beta chain variable domain of TCR clone 163261 (TRBV7-3, TRBJ2-1)
CASSLGQGPFGEQFF

SEQ ID NO: 326523 - protein, 15 aa, Homo sapiens
  CDR3 for alpha chain variable domain of TCR clone 163262 (TRAV21, TRAJ53)
CATLNSGGSNYKLTF

SEQ ID NO: 326524 - protein, 18 aa, Homo sapiens
  CDR3 for beta chain variable domain of TCR clone 163262 (TRBV4-1, TRBJ1-5)
CASSQDPRGQGLNQPQHF

SEQ ID NO: 326525 - protein, 12 aa, Homo sapiens
  CDR3 for alpha chain variable domain of TCR clone 163263 (TRAV12-1, TRAJ40)
CVVYSGTYKYIF

SEQ ID NO: 326526 - protein, 16 aa, Homo sapiens
  CDR3 for beta chain variable domain of TCR clone 163263 (TRBV27, TRBJ2-7)
CASSFQGGRGSYEQYF

SEQ ID NO: 326527 - protein, 14 aa, Homo sapiens
  CDR3 for alpha chain variable domain of TCR clone 163264 (TRAV26-1, TRAJ38)
CIAANAGNNRKLIW

SEQ ID NO: 326528 - protein, 13 aa, Homo sapiens
  CDR3 for beta chain variable domain of TCR clone 163264 (TRBV20-1, TRBJ1-1)
CSARGGGNTAAFF

SEQ ID NO: 326529 - protein, 13 aa, Homo sapiens
  CDR3 for alpha chain variable domain of TCR clone 163265 (TRAV20, TRAJ50)
CAVQQTSYDKVIF

SEQ ID NO: 326530 - protein, 16 aa, Homo sapiens
  CDR3 for beta chain variable domain of TCR clone 163265 (TRBV27, TRBJ2-1)
CASSTLTSGSGNEQFF

SEQ ID NO: 326531 - protein, 12 aa, Homo sapiens
  CDR3 for alpha chain variable domain of TCR clone 163266 (TRAV21, TRAJ11)
WAVRGGNSTLTF

SEQ ID NO: 326532 - protein, 15 aa, Homo sapiens
  CDR3 for beta chain variable domain of TCR clone 163266 (TRBV6-1, TRBJ2-7)
CASSEPIAATTEQYF

SEQ ID NO: 326533 - protein, 13 aa, Homo sapiens
  CDR3 for alpha chain variable domain of TCR clone 163267 (TRAV8-3, TRAJ43)
CAVVPYNNNDMRF

SEQ ID NO: 326534 - protein, 16 aa, Homo sapiens
  CDR3 for beta chain variable domain of TCR clone 163267 (TRBV7-2, TRBJ2-5)
CASRPFPTGGEETQYF

SEQ ID NO: 326535 - protein, 14 aa, Homo sapiens
  CDR3 for alpha chain variable domain of TCR clone 163268 (TRAV8-3, TRAJ39)
CAVGANYAGNMLTF

SEQ ID NO: 326536 - protein, 12 aa, Homo sapiens
  CDR3 for beta chain variable domain of TCR clone 163268 (TRBV28, TRBJ1-3)
CASVSSGNTIYF

SEQ ID NO: 326537 - protein, 17 aa, Homo sapiens
  CDR3 for alpha chain variable domain of TCR clone 163269 (TRAV17, TRAJ4)
CFLLLCYGRGGYNKLIF

SEQ ID NO: 326538 - protein, 14 aa, Homo sapiens
  CDR3 for beta chain variable domain of TCR clone 163269 (TRBV13, TRBJ2-3)
CASSLGGPQRPQYF

SEQ ID NO: 326539 - protein, 14 aa, Homo sapiens
  CDR3 for alpha chain variable domain of TCR clone 163270 (TRAV9-2, TRAJ13)
CALSDSGGYQKVTF

SEQ ID NO: 326540 - protein, 15 aa, Homo sapiens
  CDR3 for beta chain variable domain of TCR clone 163270 (TRBV11-2, TRBJ2-1)
CASSKNRGLIYEQFF

SEQ ID NO: 326541 - protein, 15 aa, Homo sapiens
  CDR3 for alpha chain variable domain of TCR clone 163271 (TRAV8-3, TRAJ37)
CSVCARASNTGKLIF

SEQ ID NO: 326542 - protein, 15 aa, Homo sapiens
  CDR3 for beta chain variable domain of TCR clone 163271 (TRBV5-4, TRBJ2-3)
CASSLAGRVTDTQYF

SEQ ID NO: 326543 - protein, 14 aa, Homo sapiens
  CDR3 for alpha chain variable domain of TCR clone 163272 (TRAV1-2, TRAJ16)
CAVNRFSGGQKLLF

SEQ ID NO: 326544 - protein, 17 aa, Homo sapiens
  CDR3 for beta chain variable domain of TCR clone 163272 (TRBV13, TRBJ2-3)
CASSLSRVAGGRNTQYF

SEQ ID NO: 326545 - protein, 13 aa, Homo sapiens
  CDR3 for alpha chain variable domain of TCR clone 163273 (TRAV27, TRAJ29)
CAVAHSGKTPLVF

SEQ ID NO: 326546 - protein, 14 aa, Homo sapiens
  CDR3 for beta chain variable domain of TCR clone 163273 (TRBV7-9, TRBJ2-7)
CASSIGQGAGEQYF

SEQ ID NO: 326547 - protein, 13 aa, Homo sapiens
  CDR3 for alpha chain variable domain of TCR clone 163274 (TRAV8-1, TRAJ30)
CAVNGRRDDKIIF

SEQ ID NO: 326548 - protein, 15 aa, Homo sapiens
  CDR3 for beta chain variable domain of TCR clone 163274 (TRBV5-7, TRBJ1-5)
CASSYGELWDQPQHF

SEQ ID NO: 326549 - protein, 13 aa, Homo sapiens
  CDR3 for alpha chain variable domain of TCR clone 163275 (TRAV8-4, TRAJ26)
CAVSSSMVRILSL

SEQ ID NO: 326550 - protein, 14 aa, Homo sapiens
  CDR3 for beta chain variable domain of TCR clone 163275 (TRBV6-1, TRBJ1-3)
CASVQGGGGNTIYF

SEQ ID NO: 326551 - protein, 16 aa, Homo sapiens
  CDR3 for alpha chain variable domain of TCR clone 163276 (TRAV30, TRAJ24)
CGTEIVDADSWGKFQF

SEQ ID NO: 326552 - protein, 14 aa, Homo sapiens
  CDR3 for beta chain variable domain of TCR clone 163276 (TRBV7-9, TRBJ2-4)
YASSLAMGGNIQYF

SEQ ID NO: 326553 - protein, 14 aa, Homo sapiens
  CDR3 for alpha chain variable domain of TCR clone 163277 (TRAV12-3, TRAJ10)
SHLPLTGGGNKLTF

SEQ ID NO: 326554 - protein, 14 aa, Homo sapiens
  CDR3 for beta chain variable domain of TCR clone 163277 (TRBV25-1, TRBJ1-1)
CASTHLGGNNEAFF

SEQ ID NO: 326555 - protein, 12 aa, Homo sapiens
  CDR3 for alpha chain variable domain of TCR clone 163278 (TRAV13-1, TRAJ49)
CAASPMGNQFYF

SEQ ID NO: 326556 - protein, 14 aa, Homo sapiens
  CDR3 for beta chain variable domain of TCR clone 163278 (TRBV12-4, TRBJ1-1)
CASSRGTGGTEAFF

SEQ ID NO: 326557 - protein, 11 aa, Homo sapiens
  CDR3 for alpha chain variable domain of TCR clone 163279 (TRAV29/DV5, TRAJ47)
CEATYGNKLVF

SEQ ID NO: 326558 - protein, 17 aa, Homo sapiens
  CDR3 for beta chain variable domain of TCR clone 163279 (TRBV7-9, TRBJ2-1)
CASSLVASYPSYNEQLF

SEQ ID NO: 326559 - protein, 13 aa, Homo sapiens
  CDR3 for alpha chain variable domain of TCR clone 163280 (TRAV2, TRAJ40)
CAVVTSGTYKYIF

SEQ ID NO: 326560 - protein, 15 aa, Homo sapiens
  CDR3 for beta chain variable domain of TCR clone 163280 (TRBV7-2, TRBJ2-3)
CASSLEQGGTDTQYF

SEQ ID NO: 326561 - protein, 13 aa, Homo sapiens
  CDR3 for alpha chain variable domain of TCR clone 163281 (TRAV23/DV6, TRAJ27)
CAASNTNAGKSTF

SEQ ID NO: 326562 - protein, 14 aa, Homo sapiens
  CDR3 for beta chain variable domain of TCR clone 163281 (TRBV20-1, TRBJ2-5)
CSASGLAVQDTQYF

SEQ ID NO: 326563 - protein, 15 aa, Homo sapiens
  CDR3 for alpha chain variable domain of TCR clone 163282 (TRAV14/DV4, TRAJ39)
CAMRAVNNAGNMLTF

SEQ ID NO: 326564 - protein, 10 aa, Homo sapiens
  CDR3 for beta chain variable domain of TCR clone 163282 (TRBV20-1, TRBJ2-5)
CSARFETQYF

SEQ ID NO: 326565 - protein, 14 aa, Homo sapiens
  CDR3 for alpha chain variable domain of TCR clone 163283 (TRAV13-1, TRAJ44)
CAAKVTGTASKLTF

SEQ ID NO: 326566 - protein, 13 aa, Homo sapiens
  CDR3 for beta chain variable domain of TCR clone 163283 (TRBV20-1, TRBJ2-2)
CSALSGGAGELFF

SEQ ID NO: 326567 - protein, 10 aa, Homo sapiens
  CDR3 for alpha chain variable domain of TCR clone 163284 (TRAV25, TRAJ53)
CAGSNYKLTF

SEQ ID NO: 326568 - protein, 15 aa, Homo sapiens
  CDR3 for beta chain variable domain of TCR clone 163284 (TRBV15, TRBJ1-1)
CATSLQGGRNTEAFF

SEQ ID NO: 326569 - protein, 14 aa, Homo sapiens
  CDR3 for alpha chain variable domain of TCR clone 163285 (TRAV35, TRAJ22)
CAGLRPGSARQLTL

SEQ ID NO: 326570 - protein, 13 aa, Homo sapiens
  CDR3 for beta chain variable domain of TCR clone 163285 (TRBV20-1, TRBJ2-7)
CSATHTSGYEQYF

SEQ ID NO: 326571 - protein, 12 aa, Homo sapiens
  CDR3 for alpha chain variable domain of TCR clone 163286 (TRAV16, TRAJ26)
CASKDGGQNFVF

SEQ ID NO: 326572 - protein, 13 aa, Homo sapiens
  CDR3 for beta chain variable domain of TCR clone 163286 (TRBV25-1, TRBJ1-1)
CASRDRGRAEAFF

SEQ ID NO: 326573 - protein, 12 aa, Homo sapiens
  CDR3 for alpha chain variable domain of TCR clone 163287 (TRAV3, TRAJ27)
CAVRDGAGKSTF

SEQ ID NO: 326574 - protein, 15 aa, Homo sapiens
  CDR3 for beta chain variable domain of TCR clone 163287 (TRBV13, TRBJ2-2)
CASGYRWRRTGELFF

SEQ ID NO: 326575 - protein, 11 aa, Homo sapiens
  CDR3 for alpha chain variable domain of TCR clone 163288 (TRAV30, TRAJ24)
WMLTAWGKFQF

SEQ ID NO: 326576 - protein, 14 aa, Homo sapiens
  CDR3 for beta chain variable domain of TCR clone 163288 (TRBV12-5, TRBJ2-5)
CASGSRTHQETQYF

SEQ ID NO: 326577 - protein, 10 aa, Homo sapiens
  CDR3 for alpha chain variable domain of TCR clone 163289 (TRAV8-3, TRAJ33)
CAVGAIATIS

SEQ ID NO: 326578 - protein, 13 aa, Homo sapiens
  CDR3 for beta chain variable domain of TCR clone 163289 (TRBV27, TRBJ2-7)
CASSLTTGYEQYL

SEQ ID NO: 326579 - protein, 11 aa, Homo sapiens
  CDR3 for alpha chain variable domain of TCR clone 163290 (TRAV4, TRAJ31)
CLVGLNARLMF

SEQ ID NO: 326580 - protein, 16 aa, Homo sapiens
  CDR3 for beta chain variable domain of TCR clone 163290 (TRBV15, TRBJ2-6)
CATSVNGGFLANVLNF

SEQ ID NO: 326581 - protein, 12 aa, Homo sapiens
  CDR3 for alpha chain variable domain of TCR clone 163291 (TRAV1-2, TRAJ29)
CAVPSGNTPLVF

SEQ ID NO: 326582 - protein, 13 aa, Homo sapiens
  CDR3 for beta chain variable domain of TCR clone 163291 (TRBV7-6, TRBJ2-1)
CRQLGGGADEQFF

SEQ ID NO: 326583 - protein, 13 aa, Homo sapiens
  CDR3 for alpha chain variable domain of TCR clone 163292 (TRAV22, TRAJ29)
CAVGGSGNTPLVF

SEQ ID NO: 326584 - protein, 16 aa, Homo sapiens
  CDR3 for beta chain variable domain of TCR clone 163292 (TRBV10-3, TRBJ2-1)
CAISGVGDGGGGEQFF

SEQ ID NO: 326585 - protein, 13 aa, Homo sapiens
  CDR3 for alpha chain variable domain of TCR clone 163293 (TRAV12-2, TRAJ52)
CAAHGTSYGKLTF

SEQ ID NO: 326586 - protein, 15 aa, Homo sapiens
  CDR3 for beta chain variable domain of TCR clone 163293 (TRBV5-1, TRBJ2-3)
CASSVTSGSTDTQYF

SEQ ID NO: 326587 - protein, 17 aa, Homo sapiens
  CDR3 for alpha chain variable domain of TCR clone 163294 (TRAV26-1, TRAJ53)
CIVRVDDSGGSNYKLTF

SEQ ID NO: 326588 - protein, 15 aa, Homo sapiens
  CDR3 for beta chain variable domain of TCR clone 163294 (TRBV7-9, TRBJ2-2)
CASGPLDTFPGELFF

SEQ ID NO: 326589 - protein, 12 aa, Homo sapiens
  CDR3 for alpha chain variable domain of TCR clone 163295 (TRAV17, TRAJ20)
CATALNDYKLSF

SEQ ID NO: 326590 - protein, 14 aa, Homo sapiens
  CDR3 for beta chain variable domain of TCR clone 163295 (TRBV7-3, TRBJ2-1)
CASSLAGGTNEQFV

SEQ ID NO: 326591 - protein, 13 aa, Homo sapiens
  CDR3 for alpha chain variable domain of TCR clone 163296 (TRAV17, TRAJ9)
CATEYTVGFKTIF

SEQ ID NO: 326592 - protein, 14 aa, Homo sapiens
  CDR3 for beta chain variable domain of TCR clone 163296 (TRBV19, TRBJ2-5)
CASSMTGQQETQYF

SEQ ID NO: 326593 - protein, 10 aa, Homo sapiens
  CDR3 for alpha chain variable domain of TCR clone 163297 (TRAV12-1, TRAJ33)
CAASNYQLIW

SEQ ID NO: 326594 - protein, 15 aa, Homo sapiens
  CDR3 for beta chain variable domain of TCR clone 163297 (TRBV5-4, TRBJ1-4)
CASSHGDGENEKLFF

SEQ ID NO: 326595 - protein, 13 aa, Homo sapiens
  CDR3 for alpha chain variable domain of TCR clone 163298 (TRAV27, TRAJ57)
CRSAQGGSEKLVF

SEQ ID NO: 326596 - protein, 17 aa, Homo sapiens
  CDR3 for beta chain variable domain of TCR clone 163298 (TRBV7-8, TRBJ2-6)
CASSAGTGGAGANVLTF

SEQ ID NO: 326597 - protein, 13 aa, Homo sapiens
  CDR3 for alpha chain variable domain of TCR clone 163299 (TRAV13-1, TRAJ39)
CAASIWAGNMLTF

SEQ ID NO: 326598 - protein, 19 aa, Homo sapiens
  CDR3 for beta chain variable domain of TCR clone 163299 (TRBV25-1, TRBJ2-2)
CAILVYRMDRGRKTGELFF

SEQ ID NO: 326599 - protein, 15 aa, Homo sapiens
  CDR3 for alpha chain variable domain of TCR clone 163300 (TRAV1-2, TRAJ13)
CAVRGSSGGYQKVTF

SEQ ID NO: 326600 - protein, 14 aa, Homo sapiens
  CDR3 for beta chain variable domain of TCR clone 163300 (TRBV27, TRBJ2-2)
CASRPGVNTGELFF

SEQ ID NO: 326601 - protein, 15 aa, Homo sapiens
  CDR3 for alpha chain variable domain of TCR clone 163301 (TRAV2, TRAJ45)
CAVDGTGGGAGGLTF

SEQ ID NO: 326602 - protein, 15 aa, Homo sapiens
  CDR3 for beta chain variable domain of TCR clone 163301 (TRBV29-1, TRBJ2-7)
CSVEFFDRGSYEQYF

SEQ ID NO: 326603 - protein, 15 aa, Homo sapiens
  CDR3 for alpha chain variable domain of TCR clone 163302 (TRAV2, TRAJ24)
CAVVRLQSSWGKLQF

SEQ ID NO: 326604 - protein, 16 aa, Homo sapiens
  CDR3 for beta chain variable domain of TCR clone 163302 (TRBV7-7, TRBJ2-3)
CASSPGTSGSTDTQYF

SEQ ID NO: 326605 - protein, 15 aa, Homo sapiens
  CDR3 for alpha chain variable domain of TCR clone 163303 (TRAV41, TRAJ45)
CAASYSGGGADGLTF

SEQ ID NO: 326606 - protein, 14 aa, Homo sapiens
  CDR3 for beta chain variable domain of TCR clone 163303 (TRBV12-5, TRBJ2-5)
CASGSRTDQEAQYF

SEQ ID NO: 326607 - protein, 12 aa, Homo sapiens
  CDR3 for alpha chain variable domain of TCR clone 163304 (TRAV13-2, TRAJ23)
CAERHRGGKLII

SEQ ID NO: 326608 - protein, 13 aa, Homo sapiens
  CDR3 for beta chain variable domain of TCR clone 163304 (TRBV19, TRBJ1-2)
CASSVPGQDGYTF

SEQ ID NO: 326609 - protein, 18 aa, Homo sapiens
  CDR3 for alpha chain variable domain of TCR clone 163305 (TRAV29/DV5, TRAJ52)
CAAGFRGAGGTSYGKLTF

SEQ ID NO: 326610 - protein, 13 aa, Homo sapiens
  CDR3 for beta chain variable domain of TCR clone 163305 (TRBV12-4, TRBJ2-7)
CASSFVPTAEQYF

SEQ ID NO: 326611 - protein, 23 aa, Homo sapiens
  CDR3 for alpha chain variable domain of TCR clone 163306 (TRAV8-6, TRAJ38)
CAVRNAGNNHIQNPDPAVYKLRD

SEQ ID NO: 326612 - protein, 15 aa, Homo sapiens
  CDR3 for beta chain variable domain of TCR clone 163306 (TRBV4-1, TRBJ2-2)
CASSEGQGITGELFF

SEQ ID NO: 326613 - protein, 16 aa, Homo sapiens
  CDR3 for alpha chain variable domain of TCR clone 163307 (TRAV26-1, TRAJ11)
CIVRVVLGFRIQHPHL

SEQ ID NO: 326614 - protein, 14 aa, Homo sapiens
  CDR3 for beta chain variable domain of TCR clone 163307 (TRBV25-1, TRBJ1-4)
CASSGGGQPENLFF

SEQ ID NO: 326615 - protein, 13 aa, Homo sapiens
  CDR3 for alpha chain variable domain of TCR clone 163308 (TRAV17, TRAJ35)
CATDYPFGNVLHC

SEQ ID NO: 326616 - protein, 13 aa, Homo sapiens
  CDR3 for beta chain variable domain of TCR clone 163308 (TRBV12-4, TRBJ1-2)
CASSLRQGKGYTF

SEQ ID NO: 326617 - protein, 14 aa, Homo sapiens
  CDR3 for alpha chain variable domain of TCR clone 163309 (TRAV26-1, TRAJ22)
CIVRVYGSARQLTF

SEQ ID NO: 326618 - protein, 17 aa, Homo sapiens
  CDR3 for beta chain variable domain of TCR clone 163309 (TRBV7-3, TRBJ2-3)
CASRKGGIEGFGDKKYF

SEQ ID NO: 326619 - protein, 14 aa, Homo sapiens
  CDR3 for alpha chain variable domain of TCR clone 163310 (TRAV1-2, TRAJ16)
CAVNRFSDGHKLLF

SEQ ID NO: 326620 - protein, 14 aa, Homo sapiens
  CDR3 for beta chain variable domain of TCR clone 163310 (TRBV7-2, TRBJ1-2)
CASSQTGSTYGYTF

SEQ ID NO: 326621 - protein, 12 aa, Homo sapiens
  CDR3 for alpha chain variable domain of TCR clone 163311 (TRAV17, TRAJ57)
CATDGGFEKLVF

SEQ ID NO: 326622 - protein, 13 aa, Homo sapiens
  CDR3 for beta chain variable domain of TCR clone 163311 (TRBV7-9, TRBJ2-7)
CASSFAGAYEQYF

SEQ ID NO: 326623 - protein, 16 aa, Homo sapiens
  CDR3 for alpha chain variable domain of TCR clone 163312 (TRAV12-2, TRAJ43)
CAGDEMRFGAGTRLTV

SEQ ID NO: 326624 - protein, 13 aa, Homo sapiens
  CDR3 for beta chain variable domain of TCR clone 163312 (TRBV4-2, TRBJ1-1)
CASSQAGNTEAFF

SEQ ID NO: 326625 - protein, 12 aa, Homo sapiens
  CDR3 for alpha chain variable domain of TCR clone 163313 (TRAV26-1, TRAJ43)
CIVRPRGDEMRF

SEQ ID NO: 326626 - protein, 16 aa, Homo sapiens
  CDR3 for beta chain variable domain of TCR clone 163313 (TRBV3-1, TRBJ2-1)
CASSQGGRRSSDEQFF

SEQ ID NO: 326627 - protein, 15 aa, Homo sapiens
  CDR3 for alpha chain variable domain of TCR clone 163314 (TRAV3, TRAJ45)
CAVRTPWGGADGLTF

SEQ ID NO: 326628 - protein, 16 aa, Homo sapiens
  CDR3 for beta chain variable domain of TCR clone 163314 (TRBV6-1, TRBJ2-2)
CPSSFGQGANTGELFF

SEQ ID NO: 326629 - protein, 15 aa, Homo sapiens
  CDR3 for alpha chain variable domain of TCR clone 163315 (TRAV26-1, TRAJ29)
CIVRVEGSGNTPLVF

SEQ ID NO: 326630 - protein, 13 aa, Homo sapiens
  CDR3 for beta chain variable domain of TCR clone 163315 (TRBV19, TRBJ2-7)
CASSPRQSYEQYF

SEQ ID NO: 326631 - protein, 17 aa, Homo sapiens
  CDR3 for alpha chain variable domain of TCR clone 163316 (TRAV3, TRAJ6)
CAVRDGTRAGGSYRPTF

SEQ ID NO: 326632 - protein, 14 aa, Homo sapiens
  CDR3 for beta chain variable domain of TCR clone 163316 (TRBV11-2, TRBJ2-3)
CASSRLARTDTQYF

SEQ ID NO: 326633 - protein, 16 aa, Homo sapiens
  CDR3 for alpha chain variable domain of TCR clone 163317 (TRAV3, TRAJ37)
CAVRPHGSGNTGTLIF

SEQ ID NO: 326634 - protein, 15 aa, Homo sapiens
  CDR3 for beta chain variable domain of TCR clone 163317 (TRBV5-5, TRBJ2-7)
CASSLAAPLSYEQYF

SEQ ID NO: 326635 - protein, 17 aa, Homo sapiens
  CDR3 for alpha chain variable domain of TCR clone 163318 (TRAV23/DV6, TRAJ57)
CAASSTLSQGGSEKLVF

SEQ ID NO: 326636 - protein, 14 aa, Homo sapiens
  CDR3 for beta chain variable domain of TCR clone 163318 (TRBV25-1, TRBJ1-1)
CASTHLGGNTGAVF

SEQ ID NO: 326637 - protein, 17 aa, Homo sapiens
  CDR3 for alpha chain variable domain of TCR clone 163319 (TRAV13-1, TRAJ31)
CAPRDRLMFGDGTRLVV

SEQ ID NO: 326638 - protein, 12 aa, Homo sapiens
  CDR3 for beta chain variable domain of TCR clone 163319 (TRBV7-9, TRBJ2-7)
CASSLEGYEQYF

SEQ ID NO: 326639 - protein, 16 aa, Homo sapiens
  CDR3 for alpha chain variable domain of TCR clone 163320 (TRAV23/DV6, TRAJ9)
CAASIGGNTGGFKIIF

SEQ ID NO: 326640 - protein, 14 aa, Homo sapiens
  CDR3 for beta chain variable domain of TCR clone 163320 (TRBV9, TRBJ2-7)
CASSVGVGSYEQYL

SEQ ID NO: 326641 - protein, 13 aa, Homo sapiens
  CDR3 for alpha chain variable domain of TCR clone 163321 (TRAV8-3, TRAJ43)
CAVVPYNNNDMRF

SEQ ID NO: 326642 - protein, 15 aa, Homo sapiens
  CDR3 for beta chain variable domain of TCR clone 163321 (TRBV28, TRBJ2-7)
CASSVRQVSSYEQYF

SEQ ID NO: 326643 - protein, 13 aa, Homo sapiens
  CDR3 for alpha chain variable domain of TCR clone 163322 (TRAV13-1, TRAJ10)
CAATAGGGNKLTF

SEQ ID NO: 326644 - protein, 14 aa, Homo sapiens
  CDR3 for beta chain variable domain of TCR clone 163322 (TRBV12-4, TRBJ2-7)
CAGSPAGLKYEQYF

SEQ ID NO: 326645 - protein, 14 aa, Homo sapiens
  CDR3 for alpha chain variable domain of TCR clone 163323 (TRAV17, TRAJ54)
CATDANQGAQKLVF

SEQ ID NO: 326646 - protein, 14 aa, Homo sapiens
  CDR3 for beta chain variable domain of TCR clone 163323 (TRBV19, TRBJ2-5)
CASSMTGQQETQYF

SEQ ID NO: 326647 - protein, 13 aa, Homo sapiens
  CDR3 for alpha chain variable domain of TCR clone 163324 (TRAV13-1, TRAJ21)
CAASIYNFNKSYF

SEQ ID NO: 326648 - protein, 14 aa, Homo sapiens
  CDR3 for beta chain variable domain of TCR clone 163324 (TRBV4-2, TRBJ2-5)
CASSQDRGRETQYF

SEQ ID NO: 326649 - protein, 14 aa, Homo sapiens
  CDR3 for alpha chain variable domain of TCR clone 163325 (TRAV17, TRAJ15)
CATGPNQAGTALIF

SEQ ID NO: 326650 - protein, 15 aa, Homo sapiens
  CDR3 for beta chain variable domain of TCR clone 163325 (TRBV11-2, TRBJ2-2)
CASSSDRVKAGELFF

SEQ ID NO: 326651 - protein, 16 aa, Homo sapiens
  CDR3 for alpha chain variable domain of TCR clone 163326 (TRAV3, TRAJ37)
CAVRPHGSGNPGKLIF

SEQ ID NO: 326652 - protein, 16 aa, Homo sapiens
  CDR3 for beta chain variable domain of TCR clone 163326 (TRBV20-1, TRBJ1-4)
CSAPGQGLLTNEKLFF

SEQ ID NO: 326653 - protein, 11 aa, Homo sapiens
  CDR3 for alpha chain variable domain of TCR clone 163327 (TRAV2, TRAJ13)
CASGGYQKVTY

SEQ ID NO: 326654 - protein, 16 aa, Homo sapiens
  CDR3 for beta chain variable domain of TCR clone 163327 (TRBV6-1, TRBJ2-5)
CASSETLDRGAETQYF

SEQ ID NO: 326655 - protein, 17 aa, Homo sapiens
  CDR3 for alpha chain variable domain of TCR clone 163328 (TRAV3, TRAJ6)
CAVRDGPRAGGSYIPPF

SEQ ID NO: 326656 - protein, 19 aa, Homo sapiens
  CDR3 for beta chain variable domain of TCR clone 163328 (TRBV5-1, TRBJ2-3)
CASSLWTSGGITTPDTQYF

SEQ ID NO: 326657 - protein, 14 aa, Homo sapiens
  CDR3 for alpha chain variable domain of TCR clone 163329 (TRAV21, TRAJ21)
CAVKGFGHFNKFYF

SEQ ID NO: 326658 - protein, 13 aa, Homo sapiens
  CDR3 for beta chain variable domain of TCR clone 163329 (TRBV18, TRBJ1-1)
CASSPETKPEAFF

SEQ ID NO: 326659 - protein, 13 aa, Homo sapiens
  CDR3 for alpha chain variable domain of TCR clone 163330 (TRAV13-1, TRAJ6)
CAASKGGSYIPTF

SEQ ID NO: 326660 - protein, 14 aa, Homo sapiens
  CDR3 for beta chain variable domain of TCR clone 163330 (TRBV7-2, TRBJ2-1)
CASSFGVGYNEQFF

SEQ ID NO: 326661 - protein, 12 aa, Homo sapiens
  CDR3 for alpha chain variable domain of TCR clone 163331 (TRAV3, TRAJ39)
CAVIEWSNMLTF

SEQ ID NO: 326662 - protein, 14 aa, Homo sapiens
  CDR3 for beta chain variable domain of TCR clone 163331 (TRBV7-8, TRBJ2-3)
CVSSFPDGQDTQYF

SEQ ID NO: 326663 - protein, 15 aa, Homo sapiens
  CDR3 for alpha chain variable domain of TCR clone 163332 (TRAV21, TRAJ52)
CAVRGGGTSYGKLTF

SEQ ID NO: 326664 - protein, 13 aa, Homo sapiens
  CDR3 for beta chain variable domain of TCR clone 163332 (TRBV19, TRBJ2-5)
CASSIHSQETQYF

SEQ ID NO: 326665 - protein, 14 aa, Homo sapiens
  CDR3 for alpha chain variable domain of TCR clone 163333 (TRAV23/DV6, TRAJ22)
CAATGSGSARQLTF

SEQ ID NO: 326666 - protein, 15 aa, Homo sapiens
  CDR3 for beta chain variable domain of TCR clone 163333 (TRBV6-5, TRBJ2-1)
CASSYDAGAGNEQFF

SEQ ID NO: 326667 - protein, 18 aa, Homo sapiens
  CDR3 for alpha chain variable domain of TCR clone 163334 (TRAV13-1, TRAJ52)
CAAKNPNAGVTSYGKLTF

SEQ ID NO: 326668 - protein, 17 aa, Homo sapiens
  CDR3 for beta chain variable domain of TCR clone 163334 (TRBV11-2, TRBJ2-1)
CASSLYPPGVEYNEQFF

SEQ ID NO: 326669 - protein, 11 aa, Homo sapiens
  CDR3 for alpha chain variable domain of TCR clone 163335 (TRAV12-1, TRAJ30)
FVVNGQDKIIF

SEQ ID NO: 326670 - protein, 15 aa, Homo sapiens
  CDR3 for beta chain variable domain of TCR clone 163335 (TRBV28, TRBJ2-5)
CASSSGRTIQETQYF

SEQ ID NO: 326671 - protein, 14 aa, Homo sapiens
  CDR3 for alpha chain variable domain of TCR clone 163336 (TRAV26-1, TRAJ34)
CIVRVAYNTDKLIF

SEQ ID NO: 326672 - protein, 13 aa, Homo sapiens
  CDR3 for beta chain variable domain of TCR clone 163336 (TRBV12-5, TRBJ2-3)
CASGDRQSDTQYF

SEQ ID NO: 326673 - protein, 15 aa, Homo sapiens
  CDR3 for alpha chain variable domain of TCR clone 163337 (TRAV38-1, TRAJ37)
CAFIHGSGNTGKLIF

SEQ ID NO: 326674 - protein, 16 aa, Homo sapiens
  CDR3 for beta chain variable domain of TCR clone 163337 (TRBV6-1, TRBJ2-5)
CASSETLDRGAETQYF

SEQ ID NO: 326675 - protein, 13 aa, Homo sapiens
  CDR3 for alpha chain variable domain of TCR clone 163338 (TRAV23/DV6, TRAJ45)
CAARRGGADGLTF

SEQ ID NO: 326676 - protein, 14 aa, Homo sapiens
  CDR3 for beta chain variable domain of TCR clone 163338 (TRBV7-2, TRBJ2-3)
CASSLDRGTDTQYF

SEQ ID NO: 326677 - protein, 12 aa, Homo sapiens
  CDR3 for alpha chain variable domain of TCR clone 163339 (TRAV21, TRAJ33)
CAKMDSNYQLIW

SEQ ID NO: 326678 - protein, 13 aa, Homo sapiens
  CDR3 for beta chain variable domain of TCR clone 163339 (TRBV12-4, TRBJ1-3)
CASSLASGNTMYF

SEQ ID NO: 326679 - protein, 15 aa, Homo sapiens
  CDR3 for alpha chain variable domain of TCR clone 163340 (TRAV17, TRAJ57)
CATGPSQGGSEKLVF

SEQ ID NO: 326680 - protein, 14 aa, Homo sapiens
  CDR3 for beta chain variable domain of TCR clone 163340 (TRBV2, TRBJ2-1)
CASSEQMRESEQFF

SEQ ID NO: 326681 - protein, 14 aa, Homo sapiens
  CDR3 for alpha chain variable domain of TCR clone 163341 (TRAV1-1, TRAJ27)
FAVIYNTNAGKSTF

SEQ ID NO: 326682 - protein, 13 aa, Homo sapiens
  CDR3 for beta chain variable domain of TCR clone 163341 (TRBV7-9, TRBJ1-2)
CASSLKQNYGYTF

SEQ ID NO: 326683 - protein, 16 aa, Homo sapiens
  CDR3 for alpha chain variable domain of TCR clone 163342 (TRAV3, TRAJ37)
CAVRGKGSVNTGKLIF

SEQ ID NO: 326684 - protein, 14 aa, Homo sapiens
  CDR3 for beta chain variable domain of TCR clone 163342 (TRBV20-1, TRBJ2-3)
CSARGGTSTDTQYF

SEQ ID NO: 326685 - protein, 11 aa, Homo sapiens
  CDR3 for alpha chain variable domain of TCR clone 163343 (TRAV1-1, TRAJ23)
CAVRQGGNLIF

SEQ ID NO: 326686 - protein, 20 aa, Homo sapiens
  CDR3 for beta chain variable domain of TCR clone 163343 (TRBV7-8, TRBJ2-2)
CASSHLFPGPTIHITGELSF

SEQ ID NO: 326687 - protein, 17 aa, Homo sapiens
  CDR3 for alpha chain variable domain of TCR clone 163344 (TRAV26-2, TRAJ52)
CILRVTAGGTSYGKLTF

SEQ ID NO: 326688 - protein, 18 aa, Homo sapiens
  CDR3 for beta chain variable domain of TCR clone 163344 (TRBV4-3, TRBJ2-6)
CASSQDIQGGPGANVLTF

SEQ ID NO: 326689 - protein, 13 aa, Homo sapiens
  CDR3 for alpha chain variable domain of TCR clone 163345 (TRAV8-2, TRAJ47)
CAVSEREGNKLVC

SEQ ID NO: 326690 - protein, 15 aa, Homo sapiens
  CDR3 for beta chain variable domain of TCR clone 163345 (TRBV6-3, TRBJ2-7)
CASSSPGTVFYEQYF

SEQ ID NO: 326691 - protein, 12 aa, Homo sapiens
  CDR3 for alpha chain variable domain of TCR clone 163346 (TRAV13-1, TRAJ48)
CAANFGNEKLTF

SEQ ID NO: 326692 - protein, 14 aa, Homo sapiens
  CDR3 for beta chain variable domain of TCR clone 163346 (TRBV4-1, TRBJ2-2)
CASSQAVNTGELFF

SEQ ID NO: 326693 - protein, 15 aa, Homo sapiens
  CDR3 for alpha chain variable domain of TCR clone 163347 (TRAV17, TRAJ16)
CATALRFSDGQKLLF

SEQ ID NO: 326694 - protein, 15 aa, Homo sapiens
  CDR3 for beta chain variable domain of TCR clone 163347 (TRBV11-3, TRBJ2-3)
CASLKDGREGDTQYF

SEQ ID NO: 326695 - protein, 12 aa, Homo sapiens
  CDR3 for alpha chain variable domain of TCR clone 163348 (TRAV3, TRAJ43)
CAVRDPNNDRRF

SEQ ID NO: 326696 - protein, 17 aa, Homo sapiens
  CDR3 for beta chain variable domain of TCR clone 163348 (TRBV7-8, TRBJ2-6)
CASSAGTGGAGANVLTF

SEQ ID NO: 326697 - protein, 16 aa, Homo sapiens
  CDR3 for alpha chain variable domain of TCR clone 163349 (TRAV36/DV7, TRAJ38)
CAVTTSNTGNNRKLIW

SEQ ID NO: 326698 - protein, 13 aa, Homo sapiens
  CDR3 for beta chain variable domain of TCR clone 163349 (TRBV7-9, TRBJ1-2)
CASSLKQNYGYTF

SEQ ID NO: 326699 - protein, 15 aa, Homo sapiens
  CDR3 for alpha chain variable domain of TCR clone 163350 (TRAV12-1, TRAJ41)
CVVNSRTGSGYALHF

SEQ ID NO: 326700 - protein, 11 aa, Homo sapiens
  CDR3 for beta chain variable domain of TCR clone 163350 (TRBV6-4, TRBJ2-1)
CASSDSCAQFF

SEQ ID NO: 326701 - protein, 12 aa, Homo sapiens
  CDR3 for alpha chain variable domain of TCR clone 163351 (TRAV36/DV7, TRAJ54)
CAVVRGAPKLVF

SEQ ID NO: 326702 - protein, 13 aa, Homo sapiens
  CDR3 for beta chain variable domain of TCR clone 163351 (TRBV7-9, TRBJ1-2)
CASSLKQNYGYTF

SEQ ID NO: 326703 - protein, 16 aa, Homo sapiens
  CDR3 for alpha chain variable domain of TCR clone 163352 (TRAV30, TRAJ24)
CGTEIVDADSWGKFQF

SEQ ID NO: 326704 - protein, 12 aa, Homo sapiens
  CDR3 for beta chain variable domain of TCR clone 163352 (TRBV20-1, TRBJ2-5)
CSVGTGSETQYF

SEQ ID NO: 326705 - protein, 13 aa, Homo sapiens
  CDR3 for alpha chain variable domain of TCR clone 163353 (TRAV20, TRAJ37)
CAGCSSNTGKLIF

SEQ ID NO: 326706 - protein, 14 aa, Homo sapiens
  CDR3 for beta chain variable domain of TCR clone 163353 (TRBV19, TRBJ2-1)
CASKDPSSYDEQFF

SEQ ID NO: 326707 - protein, 10 aa, Homo sapiens
  CDR3 for alpha chain variable domain of TCR clone 163354 (TRAV12-2, TRAJ10)
CAAWTGVETH

SEQ ID NO: 326708 - protein, 17 aa, Homo sapiens
  CDR3 for beta chain variable domain of TCR clone 163354 (TRBV13, TRBJ2-3)
CASSLSRVAGGRNTQYS

SEQ ID NO: 326709 - protein, 15 aa, Homo sapiens
  CDR3 for alpha chain variable domain of TCR clone 163355 (TRAV20, TRAJ43)
CAVQAGKSSNNDMRF

SEQ ID NO: 326710 - protein, 17 aa, Homo sapiens
  CDR3 for beta chain variable domain of TCR clone 163355 (TRBV5-1, TRBJ2-2)
CASSLAGLSGGTGELFF

SEQ ID NO: 326711 - protein, 13 aa, Homo sapiens
  CDR3 for alpha chain variable domain of TCR clone 163356 (TRAV2, TRAJ40)
CAVVTSGTYKYIF

SEQ ID NO: 326712 - protein, 14 aa, Homo sapiens
  CDR3 for beta chain variable domain of TCR clone 163356 (TRBV19, TRBJ2-1)
SASPTFVLSGVQFF

SEQ ID NO: 326713 - protein, 13 aa, Homo sapiens
  CDR3 for alpha chain variable domain of TCR clone 163357 (TRAV26-1, TRAJ48)
CIVRVVGDEKLSF

SEQ ID NO: 326714 - protein, 18 aa, Homo sapiens
  CDR3 for beta chain variable domain of TCR clone 163357 (TRBV4-3, TRBJ1-6)
CASSQETPASSYNSPLHF

SEQ ID NO: 326715 - protein, 10 aa, Homo sapiens
  CDR3 for alpha chain variable domain of TCR clone 163358 (TRAV1-2, TRAJ20)
CALNDYKLSF

SEQ ID NO: 326716 - protein, 16 aa, Homo sapiens
  CDR3 for beta chain variable domain of TCR clone 163358 (TRBV20-1, TRBJ1-1)
CSARALTKGMNTEAFF

SEQ ID NO: 326717 - protein, 13 aa, Homo sapiens
  CDR3 for alpha chain variable domain of TCR clone 163359 (TRAV2, TRAJ40)
CAVVTSGTYKYIF

SEQ ID NO: 326718 - protein, 15 aa, Homo sapiens
  CDR3 for beta chain variable domain of TCR clone 163359 (TRBV11-3, TRBJ2-3)
CANLKDGREGDTQYF

SEQ ID NO: 326719 - protein, 14 aa, Homo sapiens
  CDR3 for alpha chain variable domain of TCR clone 163360 (TRAV12-2, TRAJ15)
CAPHTGQAGTALIF

SEQ ID NO: 326720 - protein, 13 aa, Homo sapiens
  CDR3 for beta chain variable domain of TCR clone 163360 (TRBV10-2, TRBJ2-7)
CASGASGGYEQYF

SEQ ID NO: 326721 - protein, 10 aa, Homo sapiens
  CDR3 for alpha chain variable domain of TCR clone 163361 (TRAV12-3, TRAJ49)
CAMNDDQFYF

SEQ ID NO: 326722 - protein, 16 aa, Homo sapiens
  CDR3 for beta chain variable domain of TCR clone 163361 (TRBV12-4, TRBJ1-5)
CASSRPVGGSNQPQHF

SEQ ID NO: 326723 - protein, 12 aa, Homo sapiens
  CDR3 for alpha chain variable domain of TCR clone 163362 (TRAV13-1, TRAJ53)
AASGGSNYKLTF

SEQ ID NO: 326724 - protein, 14 aa, Homo sapiens
  CDR3 for beta chain variable domain of TCR clone 163362 (TRBV7-3, TRBJ2-1)
CASSLAGGTNEQFF

SEQ ID NO: 326725 - protein, 16 aa, Homo sapiens
  CDR3 for alpha chain variable domain of TCR clone 163363 (TRAV12-2, TRAJ10)
GAVNRVLTGGGNKLTF

SEQ ID NO: 326726 - protein, 12 aa, Homo sapiens
  CDR3 for beta chain variable domain of TCR clone 163363 (TRBV28, TRBJ2-7)
CASSFSSYEQYF

SEQ ID NO: 326727 - protein, 14 aa, Homo sapiens
  CDR3 for alpha chain variable domain of TCR clone 163364 (TRAV12-1, TRAJ37)
CVVTGSSNPGKLIF

SEQ ID NO: 326728 - protein, 20 aa, Homo sapiens
  CDR3 for beta chain variable domain of TCR clone 163364 (TRBV23-1, TRBJ2-5)
CISAPAVPERVLLIQETQYF

SEQ ID NO: 326729 - protein, 14 aa, Homo sapiens
  CDR3 for alpha chain variable domain of TCR clone 163365 (TRAV3, TRAJ36)
CAVSDGTGANNLFF

SEQ ID NO: 326730 - protein, 16 aa, Homo sapiens
  CDR3 for beta chain variable domain of TCR clone 163365 (TRBV20-1, TRBJ2-6)
CSAREGPGVGANVLTF

SEQ ID NO: 326731 - protein, 15 aa, Homo sapiens
  CDR3 for alpha chain variable domain of TCR clone 163366 (TRAV21, TRAJ24)
CAARSSTDSWGKLQF

SEQ ID NO: 326732 - protein, 15 aa, Homo sapiens
  CDR3 for beta chain variable domain of TCR clone 163366 (TRBV4-1, TRBJ2-7)
CASSQKTGRLYEQYF

SEQ ID NO: 326733 - protein, 11 aa, Homo sapiens
  CDR3 for alpha chain variable domain of TCR clone 163367 (TRAV12-3, TRAJ17)
CNDAYRQQATF

SEQ ID NO: 326734 - protein, 15 aa, Homo sapiens
  CDR3 for beta chain variable domain of TCR clone 163367 (TRBV20-1, TRBJ2-7)
CSARDRVAGMDEQYF

SEQ ID NO: 326735 - protein, 17 aa, Homo sapiens
  CDR3 for alpha chain variable domain of TCR clone 163368 (TRAV3, TRAJ42)
CAVRDRDYGGSQGNLIF

SEQ ID NO: 326736 - protein, 12 aa, Homo sapiens
  CDR3 for beta chain variable domain of TCR clone 163368 (TRBV11-2, TRBJ2-1)
FASSPGNNEQFF

SEQ ID NO: 326737 - protein, 12 aa, Homo sapiens
  CDR3 for alpha chain variable domain of TCR clone 163369 (TRAV26-1, TRAJ31)
CIVRNNTARLMF

SEQ ID NO: 326738 - protein, 15 aa, Homo sapiens
  CDR3 for beta chain variable domain of TCR clone 163369 (TRBV20-1, TRBJ2-4)
CSARDLTGGPNMQYF

SEQ ID NO: 326739 - protein, 12 aa, Homo sapiens
  CDR3 for alpha chain variable domain of TCR clone 163370 (TRAV16, TRAJ56)
CAPTGANSKLTF

SEQ ID NO: 326740 - protein, 17 aa, Homo sapiens
  CDR3 for beta chain variable domain of TCR clone 163370 (TRBV27, TRBJ2-6)
CASSFTGFASGANDLSF

SEQ ID NO: 326741 - protein, 14 aa, Homo sapiens
  CDR3 for alpha chain variable domain of TCR clone 163371 (TRAV12-2, TRAJ13)
CAVKKTGGYQKVTF

SEQ ID NO: 326742 - protein, 12 aa, Homo sapiens
  CDR3 for beta chain variable domain of TCR clone 163371 (TRBV7-9, TRBJ1-1)
CASSLEGTEAFF

SEQ ID NO: 326743 - protein, 14 aa, Homo sapiens
  CDR3 for alpha chain variable domain of TCR clone 163372 (TRAV12-2, TRAJ17)
CAGLFKAAGNKLTF

SEQ ID NO: 326744 - protein, 14 aa, Homo sapiens
  CDR3 for beta chain variable domain of TCR clone 163372 (TRBV12-5, TRBJ2-5)
CASGSRTHQETQYF

SEQ ID NO: 326745 - protein, 15 aa, Homo sapiens
  CDR3 for alpha chain variable domain of TCR clone 163373 (TRAV12-3, TRAJ6)
CAMSATTGGSYIPKF

SEQ ID NO: 326746 - protein, 17 aa, Homo sapiens
  CDR3 for beta chain variable domain of TCR clone 163373 (TRBV13, TRBJ2-3)
CASSLSRVAGGRNTQYF

SEQ ID NO: 326747 - protein, 15 aa, Homo sapiens
  CDR3 for alpha chain variable domain of TCR clone 163374 (TRAV12-2, TRAJ53)
CAVNGGGGSNYKLTS

SEQ ID NO: 326748 - protein, 15 aa, Homo sapiens
  CDR3 for beta chain variable domain of TCR clone 163374 (TRBV5-7, TRBJ2-7)
CASSLGPGRGHEQYF

SEQ ID NO: 326749 - protein, 15 aa, Homo sapiens
  CDR3 for alpha chain variable domain of TCR clone 163375 (TRAV3, TRAJ22)
CAVRDRGGSARQLTF

SEQ ID NO: 326750 - protein, 14 aa, Homo sapiens
  CDR3 for beta chain variable domain of TCR clone 163375 (TRBV7-2, TRBJ2-5)
CASSPRGSSETQYF

SEQ ID NO: 326751 - protein, 16 aa, Homo sapiens
  CDR3 for alpha chain variable domain of TCR clone 163376 (TRAV12-2, TRAJ28)
CAVITDSGAGSYQLTF

SEQ ID NO: 326752 - protein, 13 aa, Homo sapiens
  CDR3 for beta chain variable domain of TCR clone 163376 (TRBV10-3, TRBJ2-7)
CASKLAVNYEQYF

SEQ ID NO: 326753 - protein, 14 aa, Homo sapiens
  CDR3 for alpha chain variable domain of TCR clone 163377 (TRAV1-2, TRAJ16)
CSVNRFSDGQKLLF

SEQ ID NO: 326754 - protein, 15 aa, Homo sapiens
  CDR3 for beta chain variable domain of TCR clone 163377 (TRBV18, TRBJ2-6)
CASSPSYAGANVLTF

SEQ ID NO: 326755 - protein, 15 aa, Homo sapiens
  CDR3 for alpha chain variable domain of TCR clone 163378 (TRAV3, TRAJ5)
CAVRDRKTGRRALTF

SEQ ID NO: 326756 - protein, 15 aa, Homo sapiens
  CDR3 for beta chain variable domain of TCR clone 163378 (TRBV12-4, TRBJ2-5)
CQQFFVRGRQDTQYF

SEQ ID NO: 326757 - protein, 15 aa, Homo sapiens
  CDR3 for alpha chain variable domain of TCR clone 163379 (TRAV21, TRAJ53)
CSTLNSGGSNYKLTF

SEQ ID NO: 326758 - protein, 15 aa, Homo sapiens
  CDR3 for beta chain variable domain of TCR clone 163379 (TRBV6-3, TRBJ2-7)
CASSSPGTVFYEQYF

SEQ ID NO: 326759 - protein, 12 aa, Homo sapiens
  CDR3 for alpha chain variable domain of TCR clone 163380 (TRAV2, TRAJ9)
CAVGAGGFKTIF

SEQ ID NO: 326760 - protein, 15 aa, Homo sapiens
  CDR3 for beta chain variable domain of TCR clone 163380 (TRBV7-9, TRBJ2-1)
CASSLGWGRANEQFF

SEQ ID NO: 326761 - protein, 14 aa, Homo sapiens
  CDR3 for alpha chain variable domain of TCR clone 163381 (TRAV13-1, TRAJ39)
CAASTGNAGNMLTF

SEQ ID NO: 326762 - protein, 14 aa, Homo sapiens
  CDR3 for beta chain variable domain of TCR clone 163381 (TRBV6-3, TRBJ1-1)
CASSLYTGSGRAFF

SEQ ID NO: 326763 - protein, 20 aa, Homo sapiens
  CDR3 for alpha chain variable domain of TCR clone 163382 (TRAV26-1, TRAJ47)
CCVLLHRQSSSMEYGNKLVF

SEQ ID NO: 326764 - protein, 14 aa, Homo sapiens
  CDR3 for beta chain variable domain of TCR clone 163382 (TRBV7-2, TRBJ1-2)
CASSRGGTNYGYTF

SEQ ID NO: 326765 - protein, 14 aa, Homo sapiens
  CDR3 for alpha chain variable domain of TCR clone 163383 (TRAV12-3, TRAJ10)
SHLPLTGGGNKLTF

SEQ ID NO: 326766 - protein, 12 aa, Homo sapiens
  CDR3 for beta chain variable domain of TCR clone 163383 (TRBV7-8, TRBJ2-1)
CASSLGHNEQFF

SEQ ID NO: 326767 - protein, 16 aa, Homo sapiens
  CDR3 for alpha chain variable domain of TCR clone 163384 (TRAV12-3, TRAJ57)
CAMSYGTHGGSEKLVF

SEQ ID NO: 326768 - protein, 15 aa, Homo sapiens
  CDR3 for beta chain variable domain of TCR clone 163384 (TRBV9, TRBJ1-6)
CASSVAGTGDSPLHF

SEQ ID NO: 326769 - protein, 14 aa, Homo sapiens
  CDR3 for alpha chain variable domain of TCR clone 163385 (TRAV8-3, TRAJ9)
CAVVYSTGGFKTIF

SEQ ID NO: 326770 - protein, 15 aa, Homo sapiens
  CDR3 for beta chain variable domain of TCR clone 163385 (TRBV28, TRBJ2-5)
CASSSGRTIQETQYF

SEQ ID NO: 326771 - protein, 13 aa, Homo sapiens
  CDR3 for alpha chain variable domain of TCR clone 163386 (TRAV21, TRAJ27)
CAERPGNAGKSTF

SEQ ID NO: 326772 - protein, 13 aa, Homo sapiens
  CDR3 for beta chain variable domain of TCR clone 163386 (TRBV18, TRBJ2-7)
CASQSGGGYEQYF

SEQ ID NO: 326773 - protein, 14 aa, Homo sapiens
  CDR3 for alpha chain variable domain of TCR clone 163387 (TRAV26-1, TRAJ38)
CIADNAGNNRKLIW

SEQ ID NO: 326774 - protein, 12 aa, Homo sapiens
  CDR3 for beta chain variable domain of TCR clone 163387 (TRBV7-8, TRBJ2-7)
CASSLGDRQQYF

SEQ ID NO: 326775 - protein, 17 aa, Homo sapiens
  CDR3 for alpha chain variable domain of TCR clone 163388 (TRAV19, TRAJ28)
CALSEASSGAGSYQLTF

SEQ ID NO: 326776 - protein, 15 aa, Homo sapiens
  CDR3 for beta chain variable domain of TCR clone 163388 (TRBV27, TRBJ2-7)
CASSTAGTGSYEQYF

SEQ ID NO: 326777 - protein, 14 aa, Homo sapiens
  CDR3 for alpha chain variable domain of TCR clone 163389 (TRAV1-2, TRAJ16)
CAVNRFSDGQKLLF

SEQ ID NO: 326778 - protein, 14 aa, Homo sapiens
  CDR3 for beta chain variable domain of TCR clone 163389 (TRBV7-3, TRBJ2-1)
CASSVAGGTNEQFF

SEQ ID NO: 326779 - protein, 14 aa, Homo sapiens
  CDR3 for alpha chain variable domain of TCR clone 163390 (TRAV12-2, TRAJ13)
CAVKKTGGYQKVTF

SEQ ID NO: 326780 - protein, 14 aa, Homo sapiens
  CDR3 for beta chain variable domain of TCR clone 163390 (TRBV4-1, TRBJ2-2)
CASSRAVNTGELFF

SEQ ID NO: 326781 - protein, 17 aa, Homo sapiens
  CDR3 for alpha chain variable domain of TCR clone 163391 (TRAV3, TRAJ12)
CAVRDGGRMDRSYKLIF

SEQ ID NO: 326782 - protein, 14 aa, Homo sapiens
  CDR3 for beta chain variable domain of TCR clone 163391 (TRBV20-1, TRBJ1-1)
SAVLHLGGGTEAFF

SEQ ID NO: 326783 - protein, 13 aa, Homo sapiens
  CDR3 for alpha chain variable domain of TCR clone 163392 (TRAV13-2, TRAJ53)
CAENMGSNYKLTF

SEQ ID NO: 326784 - protein, 14 aa, Homo sapiens
  CDR3 for beta chain variable domain of TCR clone 163392 (TRBV19, TRBJ2-1)
CASSPGLAPNEQFF

SEQ ID NO: 326785 - protein, 15 aa, Homo sapiens
  CDR3 for alpha chain variable domain of TCR clone 163393 (TRAV21, TRAJ40)
CAVRPQTSGTYKYIF

SEQ ID NO: 326786 - protein, 13 aa, Homo sapiens
  CDR3 for beta chain variable domain of TCR clone 163393 (TRBV7-2, TRBJ2-2)
CASSSDRAGELFF

SEQ ID NO: 326787 - protein, 16 aa, Homo sapiens
  CDR3 for alpha chain variable domain of TCR clone 163394 (TRAV4, TRAJ22)
CLVGDLSSGSARQLTF

SEQ ID NO: 326788 - protein, 16 aa, Homo sapiens
  CDR3 for beta chain variable domain of TCR clone 163394 (TRBV7-9, TRBJ2-1)
CASSDVAGVSYNEQFF

SEQ ID NO: 326789 - protein, 14 aa, Homo sapiens
  CDR3 for alpha chain variable domain of TCR clone 163395 (TRAV2, TRAJ9)
CAVEDRSGGFKTIC

SEQ ID NO: 326790 - protein, 12 aa, Homo sapiens
  CDR3 for beta chain variable domain of TCR clone 163395 (TRBV7-9, TRBJ2-7)
CASSLEGYEQYF

SEQ ID NO: 326791 - protein, 14 aa, Homo sapiens
  CDR3 for alpha chain variable domain of TCR clone 163396 (TRAV4, TRAJ17)
CLVGPQAAGNKLTF

SEQ ID NO: 326792 - protein, 16 aa, Homo sapiens
  CDR3 for beta chain variable domain of TCR clone 163396 (TRBV7-3, TRBJ2-2)
CASSLKRGTLSGELFF

SEQ ID NO: 326793 - protein, 19 aa, Homo sapiens
  CDR3 for alpha chain variable domain of TCR clone 163397 (TRAV26-1, TRAJ52)
CIVRAHRKAGGTSYGKLTF

SEQ ID NO: 326794 - protein, 15 aa, Homo sapiens
  CDR3 for beta chain variable domain of TCR clone 163397 (TRBV12-4, TRBJ2-5)
CASSPPTGLQETQYF

SEQ ID NO: 326795 - protein, 20 aa, Homo sapiens
  CDR3 for alpha chain variable domain of TCR clone 163398 (TRAV1-2, TRAJ8)
CAVREDRLSETCIWNWHPTS

SEQ ID NO: 326796 - protein, 14 aa, Homo sapiens
  CDR3 for beta chain variable domain of TCR clone 163398 (TRBV11-2, TRBJ2-3)
CASSRLARTDTQYF

SEQ ID NO: 326797 - protein, 11 aa, Homo sapiens
  CDR3 for alpha chain variable domain of TCR clone 163399 (TRAV16, TRAJ49)
CSLNTGNQFYF

SEQ ID NO: 326798 - protein, 15 aa, Homo sapiens
  CDR3 for beta chain variable domain of TCR clone 163399 (TRBV7-9, TRBJ1-5)
CASSQGHQPNQPQHF

SEQ ID NO: 326799 - protein, 14 aa, Homo sapiens
  CDR3 for alpha chain variable domain of TCR clone 163400 (TRAV1-2, TRAJ8)
CAAREDTGFQKLLF

SEQ ID NO: 326800 - protein, 15 aa, Homo sapiens
  CDR3 for beta chain variable domain of TCR clone 163400 (TRBV6-3, TRBJ2-7)
CASSSPGTVFYEQYF

SEQ ID NO: 326801 - protein, 15 aa, Homo sapiens
  CDR3 for alpha chain variable domain of TCR clone 163401 (TRAV8-3, TRAJ40)
CAVGPYTSGTYKYIF

SEQ ID NO: 326802 - protein, 14 aa, Homo sapiens
  CDR3 for beta chain variable domain of TCR clone 163401 (TRBV4-2, TRBJ2-1)
CASGLDRAYNEQFF

SEQ ID NO: 326803 - protein, 21 aa, Homo sapiens
  CDR3 for alpha chain variable domain of TCR clone 163402 (TRAV1-1, TRAJ6)
CLLLLRCERLERTGGSYIPTF

SEQ ID NO: 326804 - protein, 14 aa, Homo sapiens
  CDR3 for beta chain variable domain of TCR clone 163402 (TRBV7-9, TRBJ2-1)
CASSSMVGFGEQFF

SEQ ID NO: 326805 - protein, 15 aa, Homo sapiens
  CDR3 for alpha chain variable domain of TCR clone 163403 (TRAV1-2, TRAJ28)
CAVQYSGAGSYQLTF

SEQ ID NO: 326806 - protein, 16 aa, Homo sapiens
  CDR3 for beta chain variable domain of TCR clone 163403 (TRBV12-5, TRBJ2-5)
CASGPRTSGNQETQYF

SEQ ID NO: 326807 - protein, 14 aa, Homo sapiens
  CDR3 for alpha chain variable domain of TCR clone 163404 (TRAV4, TRAJ43)
CLVGPMYNNNEMRF

SEQ ID NO: 326808 - protein, 21 aa, Homo sapiens
  CDR3 for beta chain variable domain of TCR clone 163404 (TRBV11-1, TRBJ2-1)
CASSARERLRPEGPSYNEQFL

SEQ ID NO: 326809 - protein, 11 aa, Homo sapiens
  CDR3 for alpha chain variable domain of TCR clone 163405 (TRAV13-1, TRAJ11)
CAARGYSTLTF

SEQ ID NO: 326810 - protein, 15 aa, Homo sapiens
  CDR3 for beta chain variable domain of TCR clone 163405 (TRBV9, TRBJ1-6)
CASSVAGTGDSTLHF

SEQ ID NO: 326811 - protein, 16 aa, Homo sapiens
  CDR3 for alpha chain variable domain of TCR clone 163406 (TRAV3, TRAJ21)
CAVRDIERGNFNKFYF

SEQ ID NO: 326812 - protein, 13 aa, Homo sapiens
  CDR3 for beta chain variable domain of TCR clone 163406 (TRBV27, TRBJ2-7)
CASSLTTGYEQYF

SEQ ID NO: 326813 - protein, 16 aa, Homo sapiens
  CDR3 for alpha chain variable domain of TCR clone 163407 (TRAV35, TRAJ28)
CAGYLYSGAGSYQLTS

SEQ ID NO: 326814 - protein, 16 aa, Homo sapiens
  CDR3 for beta chain variable domain of TCR clone 163407 (TRBV5-1, TRBJ2-1)
CASSHGLAGPQNEQFF

SEQ ID NO: 326815 - protein, 16 aa, Homo sapiens
  CDR3 for alpha chain variable domain of TCR clone 163408 (TRAV23/DV6, TRAJ9)
CAASIGGNTGGFKTIV

SEQ ID NO: 326816 - protein, 12 aa, Homo sapiens
  CDR3 for beta chain variable domain of TCR clone 163408 (TRBV11-2, TRBJ2-1)
CASSVQREGQFF

SEQ ID NO: 326817 - protein, 14 aa, Homo sapiens
  CDR3 for alpha chain variable domain of TCR clone 163409 (TRAV12-2, TRAJ6)
CASKWGGGSYIPTF

SEQ ID NO: 326818 - protein, 18 aa, Homo sapiens
  CDR3 for beta chain variable domain of TCR clone 163409 (TRBV7-9, TRBJ2-7)
CASSLTTSGSRTWYEQYF

SEQ ID NO: 326819 - protein, 14 aa, Homo sapiens
  CDR3 for alpha chain variable domain of TCR clone 163410 (TRAV8-3, TRAJ4)
CAVGAAGGYNKLIF

SEQ ID NO: 326820 - protein, 15 aa, Homo sapiens
  CDR3 for beta chain variable domain of TCR clone 163410 (TRBV7-2, TRBJ2-5)
CASSSARSLTETQYF

SEQ ID NO: 326821 - protein, 12 aa, Homo sapiens
  CDR3 for alpha chain variable domain of TCR clone 163411 (TRAV3, TRAJ20)
CAVGDPDYKLSF

SEQ ID NO: 326822 - protein, 13 aa, Homo sapiens
  CDR3 for beta chain variable domain of TCR clone 163411 (TRBV9, TRBJ2-7)
CASSASDSYEQYF

SEQ ID NO: 326823 - protein, 11 aa, Homo sapiens
  CDR3 for alpha chain variable domain of TCR clone 163412 (TRAV3, TRAJ21)
CAVGNFNKFYF

SEQ ID NO: 326824 - protein, 13 aa, Homo sapiens
  CDR3 for beta chain variable domain of TCR clone 163412 (TRBV7-3, TRBJ1-1)
CASSQEWGAEAFF

SEQ ID NO: 326825 - protein, 14 aa, Homo sapiens
  CDR3 for alpha chain variable domain of TCR clone 163413 (TRAV2, TRAJ9)
CAVEDRSGGFKTIF

SEQ ID NO: 326826 - protein, 13 aa, Homo sapiens
  CDR3 for beta chain variable domain of TCR clone 163413 (TRBV15, TRBJ2-5)
CATSQIGEETQFF

SEQ ID NO: 326827 - protein, 12 aa, Homo sapiens
  CDR3 for alpha chain variable domain of TCR clone 163414 (TRAV12-3, TRAJ4)
CAMTGAGTRLAV

SEQ ID NO: 326828 - protein, 17 aa, Homo sapiens
  CDR3 for beta chain variable domain of TCR clone 163414 (TRBV24-1, TRBJ2-3)
CATSDYAGTGPNGGQYF

SEQ ID NO: 326829 - protein, 12 aa, Homo sapiens
  CDR3 for alpha chain variable domain of TCR clone 163415 (TRAV3, TRAJ20)
CSVRDPDYKPSF

SEQ ID NO: 326830 - protein, 14 aa, Homo sapiens
  CDR3 for beta chain variable domain of TCR clone 163415 (TRBV4-2, TRBJ2-1)
CASGLDRAYNEQFF

SEQ ID NO: 326831 - protein, 13 aa, Homo sapiens
  CDR3 for alpha chain variable domain of TCR clone 163416 (TRAV8-3, TRAJ44)
CAVVPGTASKLTF

SEQ ID NO: 326832 - protein, 14 aa, Homo sapiens
  CDR3 for beta chain variable domain of TCR clone 163416 (TRBV5-4, TRBJ1-1)
CASSLDSRRDEAFF

SEQ ID NO: 326833 - protein, 15 aa, Homo sapiens
  CDR3 for alpha chain variable domain of TCR clone 163417 (TRAV12-3, TRAJ49)
CAMAVTPNTGNQFYF

SEQ ID NO: 326834 - protein, 12 aa, Homo sapiens
  CDR3 for beta chain variable domain of TCR clone 163417 (TRBV7-9, TRBJ1-5)
CASSPQGQPQHF

SEQ ID NO: 326835 - protein, 12 aa, Homo sapiens
  CDR3 for alpha chain variable domain of TCR clone 163418 (TRAV2, TRAJ26)
CAGSPGRLWSEF

SEQ ID NO: 326836 - protein, 16 aa, Homo sapiens
  CDR3 for beta chain variable domain of TCR clone 163418 (TRBV19, TRBJ2-1)
CASSKAGPSSYNEQFF

SEQ ID NO: 326837 - protein, 17 aa, Homo sapiens
  CDR3 for alpha chain variable domain of TCR clone 163419 (TRAV23/DV6, TRAJ57)
CAASSTLSQGGSEKLVF

SEQ ID NO: 326838 - protein, 15 aa, Homo sapiens
  CDR3 for beta chain variable domain of TCR clone 163419 (TRBV4-1, TRBJ2-5)
CASSQWDLYQETQYF

SEQ ID NO: 326839 - protein, 13 aa, Homo sapiens
  CDR3 for alpha chain variable domain of TCR clone 163420 (TRAV8-1, TRAJ39)
CAGLNNAGNMLTF

SEQ ID NO: 326840 - protein, 14 aa, Homo sapiens
  CDR3 for beta chain variable domain of TCR clone 163420 (TRBV19, TRBJ2-5)
CASSMTGQQETQYF

SEQ ID NO: 326841 - protein, 17 aa, Homo sapiens
  CDR3 for alpha chain variable domain of TCR clone 163421 (TRAV26-2, TRAJ13)
CILRDLSGGYQKVTLEL

SEQ ID NO: 326842 - protein, 11 aa, Homo sapiens
  CDR3 for beta chain variable domain of TCR clone 163421 (TRBV7-9, TRBJ2-5)
CASSLSATQYF

SEQ ID NO: 326843 - protein, 12 aa, Homo sapiens
  CDR3 for alpha chain variable domain of TCR clone 163422 (TRAV12-1, TRAJ40)
CVVPSGTYKYIF

SEQ ID NO: 326844 - protein, 14 aa, Homo sapiens
  CDR3 for beta chain variable domain of TCR clone 163422 (TRBV12-4, TRBJ2-1)
CQQSLSGRNNEQFF

SEQ ID NO: 326845 - protein, 14 aa, Homo sapiens
  CDR3 for alpha chain variable domain of TCR clone 163423 (TRAV12-1, TRAJ17)
CAVNYKAAGNKLTF

SEQ ID NO: 326846 - protein, 17 aa, Homo sapiens
  CDR3 for beta chain variable domain of TCR clone 163423 (TRBV20-1, TRBJ2-1)
CSASSSGLAGSYNAQFF

SEQ ID NO: 326847 - protein, 11 aa, Homo sapiens
  CDR3 for alpha chain variable domain of TCR clone 163424 (TRAV12-2, TRAJ31)
CAILNNARLMF

SEQ ID NO: 326848 - protein, 13 aa, Homo sapiens
  CDR3 for beta chain variable domain of TCR clone 163424 (TRBV20-1, TRBJ1-1)
CSARLGQGTEAFL

SEQ ID NO: 326849 - protein, 11 aa, Homo sapiens
  CDR3 for alpha chain variable domain of TCR clone 163425 (TRAV17, TRAJ31)
CATSNNARLMF

SEQ ID NO: 326850 - protein, 16 aa, Homo sapiens
  CDR3 for beta chain variable domain of TCR clone 163425 (TRBV7-8, TRBJ2-4)
CSSSAERTLAKNIQYF

SEQ ID NO: 326851 - protein, 14 aa, Homo sapiens
  CDR3 for alpha chain variable domain of TCR clone 163426 (TRAV40, TRAJ27)
CLLVQVANAGKSTF

SEQ ID NO: 326852 - protein, 15 aa, Homo sapiens
  CDR3 for beta chain variable domain of TCR clone 163426 (TRBV27, TRBJ1-4)
CASSAQQDLNEKLFF

SEQ ID NO: 326853 - protein, 13 aa, Homo sapiens
  CDR3 for alpha chain variable domain of TCR clone 163427 (TRAV13-1, TRAJ39)
CAASIWAGNMLTF

SEQ ID NO: 326854 - protein, 11 aa, Homo sapiens
  CDR3 for beta chain variable domain of TCR clone 163427 (TRBV12-4, TRBJ2-2)
CASSSAGELFF

SEQ ID NO: 326855 - protein, 14 aa, Homo sapiens
  CDR3 for alpha chain variable domain of TCR clone 163428 (TRAV12-2, TRAJ40)
CAVKIPSGTYKYIF

SEQ ID NO: 326856 - protein, 14 aa, Homo sapiens
  CDR3 for beta chain variable domain of TCR clone 163428 (TRBV15, TRBJ2-1)
CATSGVEDYNEQFF

SEQ ID NO: 326857 - protein, 14 aa, Homo sapiens
  CDR3 for alpha chain variable domain of TCR clone 163429 (TRAV1-2, TRAJ16)
CAVNRCLDGQKLLF

SEQ ID NO: 326858 - protein, 12 aa, Homo sapiens
  CDR3 for beta chain variable domain of TCR clone 163429 (TRBV11-2, TRBJ2-1)
CASSPGNNEQFF

SEQ ID NO: 326859 - protein, 13 aa, Homo sapiens
  CDR3 for alpha chain variable domain of TCR clone 163430 (TRAV12-2, TRAJ9)
CAVKWAGGFKTIF

SEQ ID NO: 326860 - protein, 17 aa, Homo sapiens
  CDR3 for beta chain variable domain of TCR clone 163430 (TRBV28, TRBJ2-5)
CASSTPEGDALQETQYF

SEQ ID NO: 326861 - protein, 12 aa, Homo sapiens
  CDR3 for alpha chain variable domain of TCR clone 163431 (TRAV10, TRAJ34)
CVVSGRHRQAHL

SEQ ID NO: 326862 - protein, 14 aa, Homo sapiens
  CDR3 for beta chain variable domain of TCR clone 163431 (TRBV19, TRBJ2-1)
CAGPTFALSGEQFF

SEQ ID NO: 326863 - protein, 15 aa, Homo sapiens
  CDR3 for alpha chain variable domain of TCR clone 163432 (TRAV29/DV5, TRAJ53)
CAASASGGSNYKLTF

SEQ ID NO: 326864 - protein, 15 aa, Homo sapiens
  CDR3 for beta chain variable domain of TCR clone 163432 (TRBV10-3, TRBJ2-3)
CAISLTSGGTDTQYF

SEQ ID NO: 326865 - protein, 16 aa, Homo sapiens
  CDR3 for alpha chain variable domain of TCR clone 163433 (TRAV17, TRAJ28)
CATASVSGAGSYKLTF

SEQ ID NO: 326866 - protein, 11 aa, Homo sapiens
  CDR3 for beta chain variable domain of TCR clone 163433 (TRBV7-9, TRBJ2-5)
CASSLGETQYF

SEQ ID NO: 326867 - protein, 13 aa, Homo sapiens
  CDR3 for alpha chain variable domain of TCR clone 163434 (TRAV21, TRAJ36)
CAVIKTGANNLFF

SEQ ID NO: 326868 - protein, 13 aa, Homo sapiens
  CDR3 for beta chain variable domain of TCR clone 163434 (TRBV29-1, TRBJ2-3)
CSATRGGRDTQYC

SEQ ID NO: 326869 - protein, 12 aa, Homo sapiens
  CDR3 for alpha chain variable domain of TCR clone 163435 (TRAV12-3, TRAJ20)
CAMVRGDYKLSF

SEQ ID NO: 326870 - protein, 16 aa, Homo sapiens
  CDR3 for beta chain variable domain of TCR clone 163435 (TRBV5-1, TRBJ2-3)
CASSLGLAVYTDTQCF

SEQ ID NO: 326871 - protein, 15 aa, Homo sapiens
  CDR3 for alpha chain variable domain of TCR clone 163436 (TRAV3, TRAJ22)
CAVRDRGGSARQLTF

SEQ ID NO: 326872 - protein, 12 aa, Homo sapiens
  CDR3 for beta chain variable domain of TCR clone 163436 (TRBV18, TRBJ2-7)
CASSLDSYEQYF

SEQ ID NO: 326873 - protein, 14 aa, Homo sapiens
  CDR3 for alpha chain variable domain of TCR clone 163437 (TRAV26-1, TRAJ48)
CIVRTNFGNKKLTF

SEQ ID NO: 326874 - protein, 12 aa, Homo sapiens
  CDR3 for beta chain variable domain of TCR clone 163437 (TRBV20-1, TRBJ2-7)
RSASSGANEQYF

SEQ ID NO: 326875 - protein, 16 aa, Homo sapiens
  CDR3 for alpha chain variable domain of TCR clone 163438 (TRAV29/DV5, TRAJ36)
CAASAHYQSGANNLFF

SEQ ID NO: 326876 - protein, 16 aa, Homo sapiens
  CDR3 for beta chain variable domain of TCR clone 163438 (TRBV11-2, TRBJ1-2)
CASSPSGREANYGYTF

SEQ ID NO: 326877 - protein, 15 aa, Homo sapiens
  CDR3 for alpha chain variable domain of TCR clone 163439 (TRAV17, TRAJ23)
CATDAEDNQGGKLIF

SEQ ID NO: 326878 - protein, 12 aa, Homo sapiens
  CDR3 for beta chain variable domain of TCR clone 163439 (TRBV2, TRBJ2-1)
CAKREGYNEEFF

SEQ ID NO: 326879 - protein, 14 aa, Homo sapiens
  CDR3 for alpha chain variable domain of TCR clone 163440 (TRAV20, TRAJ44)
CAVQDTGTASKHTF

SEQ ID NO: 326880 - protein, 13 aa, Homo sapiens
  CDR3 for beta chain variable domain of TCR clone 163440 (TRBV29-1, TRBJ1-3)
CSAGTGRGNTMYF

SEQ ID NO: 326881 - protein, 12 aa, Homo sapiens
  CDR3 for alpha chain variable domain of TCR clone 163441 (TRAV25, TRAJ11)
CAGASGYSTLTF

SEQ ID NO: 326882 - protein, 15 aa, Homo sapiens
  CDR3 for beta chain variable domain of TCR clone 163441 (TRBV20-1, TRBJ2-7)
CSARDRVSGMNEQYF

SEQ ID NO: 326883 - protein, 14 aa, Homo sapiens
  CDR3 for alpha chain variable domain of TCR clone 163442 (TRAV12-2, TRAJ13)
CAVKKTGGYQKVTF

SEQ ID NO: 326884 - protein, 11 aa, Homo sapiens
  CDR3 for beta chain variable domain of TCR clone 163442 (TRBV3-1, TRBJ2-7)
CASSQVREQYF

SEQ ID NO: 326885 - protein, 14 aa, Homo sapiens
  CDR3 for alpha chain variable domain of TCR clone 163443 (TRAV12-3, TRAJ7)
CAMSEIGGNNRIAF

SEQ ID NO: 326886 - protein, 12 aa, Homo sapiens
  CDR3 for beta chain variable domain of TCR clone 163443 (TRBV5-4, TRBJ1-1)
CASSLDRREAFF

SEQ ID NO: 326887 - protein, 11 aa, Homo sapiens
  CDR3 for alpha chain variable domain of TCR clone 163444 (TRAV35, TRAJ42)
CKGGSQGNLIF

SEQ ID NO: 326888 - protein, 13 aa, Homo sapiens
  CDR3 for beta chain variable domain of TCR clone 163444 (TRBV7-3, TRBJ1-1)
CASSQDWGAEAFF

SEQ ID NO: 326889 - protein, 12 aa, Homo sapiens
  CDR3 for alpha chain variable domain of TCR clone 163445 (TRAV17, TRAJ39)
CATAAAGNMLTF

SEQ ID NO: 326890 - protein, 14 aa, Homo sapiens
  CDR3 for beta chain variable domain of TCR clone 163445 (TRBV7-9, TRBJ1-2)
CASSRQGANYGYTF

SEQ ID NO: 326891 - protein, 13 aa, Homo sapiens
  CDR3 for alpha chain variable domain of TCR clone 163446 (TRAV30, TRAJ39)
CGTENNAGNMLTF

SEQ ID NO: 326892 - protein, 14 aa, Homo sapiens
  CDR3 for beta chain variable domain of TCR clone 163446 (TRBV7-2, TRBJ2-7)
CASSPKTSFYEQYF

SEQ ID NO: 326893 - protein, 16 aa, Homo sapiens
  CDR3 for alpha chain variable domain of TCR clone 163447 (TRAV26-1, TRAJ53)
CIVRVAMGGSNYKQTF

SEQ ID NO: 326894 - protein, 11 aa, Homo sapiens
  CDR3 for beta chain variable domain of TCR clone 163447 (TRBV19, TRBJ1-1)
CASSIGSEAFF

SEQ ID NO: 326895 - protein, 14 aa, Homo sapiens
  CDR3 for alpha chain variable domain of TCR clone 163448 (TRAV12-1, TRAJ13)
CVVIDSGGYQKVTF

SEQ ID NO: 326896 - protein, 14 aa, Homo sapiens
  CDR3 for beta chain variable domain of TCR clone 163448 (TRBV10-3, TRBJ2-1)
CAISSDLAYNEQFF

SEQ ID NO: 326897 - protein, 13 aa, Homo sapiens
  CDR3 for alpha chain variable domain of TCR clone 163449 (TRAV2, TRAJ24)
CAVSTDSWGKLQF

SEQ ID NO: 326898 - protein, 18 aa, Homo sapiens
  CDR3 for beta chain variable domain of TCR clone 163449 (TRBV13, TRBJ2-5)
CASSLGRPKRPSTSGQAR

SEQ ID NO: 326899 - protein, 19 aa, Homo sapiens
  CDR3 for alpha chain variable domain of TCR clone 163450 (TRAV38-1, TRAJ53)
CAFMKHGLESGGSNYKLTF

SEQ ID NO: 326900 - protein, 12 aa, Homo sapiens
  CDR3 for beta chain variable domain of TCR clone 163450 (TRBV10-3, TRBJ2-2)
CAIRENTGELFF

SEQ ID NO: 326901 - protein, 15 aa, Homo sapiens
  CDR3 for alpha chain variable domain of TCR clone 163451 (TRAV21, TRAJ48)
CAVPSSNFGNEKLTF

SEQ ID NO: 326902 - protein, 16 aa, Homo sapiens
  CDR3 for beta chain variable domain of TCR clone 163451 (TRBV5-7, TRBJ2-7)
CASSLAPSVLNYEQYF

SEQ ID NO: 326903 - protein, 13 aa, Homo sapiens
  CDR3 for alpha chain variable domain of TCR clone 163452 (TRAV23/DV6, TRAJ22)
CALYSGSARQLTF

SEQ ID NO: 326904 - protein, 13 aa, Homo sapiens
  CDR3 for beta chain variable domain of TCR clone 163452 (TRBV6-1, TRBJ1-1)
CASSRQGNTEAFF

SEQ ID NO: 326905 - protein, 14 aa, Homo sapiens
  CDR3 for alpha chain variable domain of TCR clone 163453 (TRAV35, TRAJ33)
CAGSSQDSNYQLIW

SEQ ID NO: 326906 - protein, 15 aa, Homo sapiens
  CDR3 for beta chain variable domain of TCR clone 163453 (TRBV7-3, TRBJ2-2)
CASSETGQGTGELFF

SEQ ID NO: 326907 - protein, 15 aa, Homo sapiens
  CDR3 for alpha chain variable domain of TCR clone 163454 (TRAV8-3, TRAJ45)
CASTYSGGGADGLTF

SEQ ID NO: 326908 - protein, 13 aa, Homo sapiens
  CDR3 for beta chain variable domain of TCR clone 163454 (TRBV10-3, TRBJ2-7)
CASNLAVSYEQYF

SEQ ID NO: 326909 - protein, 11 aa, Homo sapiens
  CDR3 for alpha chain variable domain of TCR clone 163455 (TRAV1-2, TRAJ31)
CAVKNNARLMF

SEQ ID NO: 326910 - protein, 13 aa, Homo sapiens
  CDR3 for beta chain variable domain of TCR clone 163455 (TRBV20-1, TRBJ2-2)
CSASAAGTGELFF

SEQ ID NO: 326911 - protein, 14 aa, Homo sapiens
  CDR3 for alpha chain variable domain of TCR clone 163456 (TRAV2, TRAJ9)
CAVEDRSGGFRTIV

SEQ ID NO: 326912 - protein, 14 aa, Homo sapiens
  CDR3 for beta chain variable domain of TCR clone 163456 (TRBV18, TRBJ1-5)
CASSRQQRNQPQHF

SEQ ID NO: 326913 - protein, 11 aa, Homo sapiens
  CDR3 for alpha chain variable domain of TCR clone 163457 (TRAV2, TRAJ4)
CAAGGYNKLLF

SEQ ID NO: 326914 - protein, 13 aa, Homo sapiens
  CDR3 for beta chain variable domain of TCR clone 163457 (TRBV20-1, TRBJ1-1)
CSARVGGNTEAFF

SEQ ID NO: 326915 - protein, 14 aa, Homo sapiens
  CDR3 for alpha chain variable domain of TCR clone 163458 (TRAV13-1, TRAJ10)
CAASSTGEGNKLTF

SEQ ID NO: 326916 - protein, 15 aa, Homo sapiens
  CDR3 for beta chain variable domain of TCR clone 163458 (TRBV11-3, TRBJ1-3)
CASSLFGPSGNTIYF

SEQ ID NO: 326917 - protein, 12 aa, Homo sapiens
  CDR3 for alpha chain variable domain of TCR clone 163459 (TRAV1-2, TRAJ33)
CAALDSNYQLIW

SEQ ID NO: 326918 - protein, 13 aa, Homo sapiens
  CDR3 for beta chain variable domain of TCR clone 163459 (TRBV20-1, TRBJ2-7)
CSATHTSGYEQYF

SEQ ID NO: 326919 - protein, 12 aa, Homo sapiens
  CDR3 for alpha chain variable domain of TCR clone 163460 (TRAV38-2/DV8, TRAJ48)
CALLSGNEKLTF

SEQ ID NO: 326920 - protein, 15 aa, Homo sapiens
  CDR3 for beta chain variable domain of TCR clone 163460 (TRBV11-2, TRBJ1-2)
CASSLEGVQRNGYTF

SEQ ID NO: 326921 - protein, 16 aa, Homo sapiens
  CDR3 for alpha chain variable domain of TCR clone 163461 (TRAV12-3, TRAJ10)
CAMKKGITGGGNKITF

SEQ ID NO: 326922 - protein, 12 aa, Homo sapiens
  CDR3 for beta chain variable domain of TCR clone 163461 (TRBV20-1, TRBJ2-7)
CSAITPTKEQYF

SEQ ID NO: 326923 - protein, 12 aa, Homo sapiens
  CDR3 for alpha chain variable domain of TCR clone 163462 (TRAV35, TRAJ49)
CAGWNTGNQFYF

SEQ ID NO: 326924 - protein, 11 aa, Homo sapiens
  CDR3 for beta chain variable domain of TCR clone 163462 (TRBV11-2, TRBJ2-2)
CASSLPGELFF

SEQ ID NO: 326925 - protein, 18 aa, Homo sapiens
  CDR3 for alpha chain variable domain of TCR clone 163463 (TRAV29/DV5, TRAJ52)
CAAGFRGAGGTSYGKLTF

SEQ ID NO: 326926 - protein, 13 aa, Homo sapiens
  CDR3 for beta chain variable domain of TCR clone 163463 (TRBV7-3, TRBJ1-2)
CASSLKQNYGYTF

SEQ ID NO: 326927 - protein, 15 aa, Homo sapiens
  CDR3 for alpha chain variable domain of TCR clone 163464 (TRAV17, TRAJ56)
RATEPVTGANSKLTF

SEQ ID NO: 326928 - protein, 15 aa, Homo sapiens
  CDR3 for beta chain variable domain of TCR clone 163464 (TRBV28, TRBJ1-5)
CASSRTGGYVQPQHF

SEQ ID NO: 326929 - protein, 14 aa, Homo sapiens
  CDR3 for alpha chain variable domain of TCR clone 163465 (TRAV8-3, TRAJ21)
CAVGARDNFNKFYF

SEQ ID NO: 326930 - protein, 14 aa, Homo sapiens
  CDR3 for beta chain variable domain of TCR clone 163465 (TRBV20-1, TRBJ2-7)
CSAKTGTGGYEQYF

SEQ ID NO: 326931 - protein, 12 aa, Homo sapiens
  CDR3 for alpha chain variable domain of TCR clone 163466 (TRAV35, TRAJ30)
CAGFNRDDKIIF

SEQ ID NO: 326932 - protein, 15 aa, Homo sapiens
  CDR3 for beta chain variable domain of TCR clone 163466 (TRBV9, TRBJ1-6)
CASSVAGTGESPLHF

SEQ ID NO: 326933 - protein, 14 aa, Homo sapiens
  CDR3 for alpha chain variable domain of TCR clone 163467 (TRAV9-2, TRAJ39)
CALYIYNAGNMLTF

SEQ ID NO: 326934 - protein, 15 aa, Homo sapiens
  CDR3 for beta chain variable domain of TCR clone 163467 (TRBV12-4, TRBJ2-5)
CASSPPTGRQETQYF

SEQ ID NO: 326935 - protein, 15 aa, Homo sapiens
  CDR3 for alpha chain variable domain of TCR clone 163468 (TRAV8-3, TRAJ6)
CAVGRLGGGSYIPTF

SEQ ID NO: 326936 - protein, 14 aa, Homo sapiens
  CDR3 for beta chain variable domain of TCR clone 163468 (TRBV19, TRBJ2-2)
CASSTGQGAGELFF

SEQ ID NO: 326937 - protein, 15 aa, Homo sapiens
  CDR3 for alpha chain variable domain of TCR clone 163469 (TRAV9-2, TRAJ18)
CALSGRGSTPGRLYF

SEQ ID NO: 326938 - protein, 14 aa, Homo sapiens
  CDR3 for beta chain variable domain of TCR clone 163469 (TRBV4-2, TRBJ1-2)
CASSQDRREGGYTF

SEQ ID NO: 326939 - protein, 14 aa, Homo sapiens
  CDR3 for alpha chain variable domain of TCR clone 163470 (TRAV26-1, TRAJ38)
CIADNAGNNRKLIW

SEQ ID NO: 326940 - protein, 13 aa, Homo sapiens
  CDR3 for beta chain variable domain of TCR clone 163470 (TRBV20-1, TRBJ1-1)
RSARGGGNTEAVF

SEQ ID NO: 326941 - protein, 16 aa, Homo sapiens
  CDR3 for alpha chain variable domain of TCR clone 163471 (TRAV3, TRAJ10)
CAVRDMRAGGGNKLTF

SEQ ID NO: 326942 - protein, 13 aa, Homo sapiens
  CDR3 for beta chain variable domain of TCR clone 163471 (TRBV6-1, TRBJ1-1)
RASSRQGNTEAFF

SEQ ID NO: 326943 - protein, 13 aa, Homo sapiens
  CDR3 for alpha chain variable domain of TCR clone 163472 (TRAV30, TRAJ49)
CGTESQPVTSSIL

SEQ ID NO: 326944 - protein, 13 aa, Homo sapiens
  CDR3 for beta chain variable domain of TCR clone 163472 (TRBV7-2, TRBJ2-2)
CASSLAATGELFF

SEQ ID NO: 326945 - protein, 14 aa, Homo sapiens
  CDR3 for alpha chain variable domain of TCR clone 163473 (TRAV4, TRAJ37)
CLVVVAGNTGKLIF

SEQ ID NO: 326946 - protein, 17 aa, Homo sapiens
  CDR3 for beta chain variable domain of TCR clone 163473 (TRBV20-1, TRBJ2-2)
CSASGSGQGGLTGELFF

SEQ ID NO: 326947 - protein, 14 aa, Homo sapiens
  CDR3 for alpha chain variable domain of TCR clone 163474 (TRAV12-1, TRAJ20)
CVVNPLSNDYKLSF

SEQ ID NO: 326948 - protein, 17 aa, Homo sapiens
  CDR3 for beta chain variable domain of TCR clone 163474 (TRBV13, TRBJ2-3)
CASSLSRVAGGRNTQYF

SEQ ID NO: 326949 - protein, 15 aa, Homo sapiens
  CDR3 for alpha chain variable domain of TCR clone 163475 (TRAV8-2, TRAJ16)
CVASDGFSDGQKLLF

SEQ ID NO: 326950 - protein, 15 aa, Homo sapiens
  CDR3 for beta chain variable domain of TCR clone 163475 (TRBV12-4, TRBJ2-5)
CASSPPTGLQETQYF

SEQ ID NO: 326951 - protein, 13 aa, Homo sapiens
  CDR3 for alpha chain variable domain of TCR clone 163476 (TRAV2, TRAJ40)
CAVVTSGTYKYIF

SEQ ID NO: 326952 - protein, 16 aa, Homo sapiens
  CDR3 for beta chain variable domain of TCR clone 163476 (TRBV10-3, TRBJ1-5)
CAISDQVGAPNQPQHF

SEQ ID NO: 326953 - protein, 14 aa, Homo sapiens
  CDR3 for alpha chain variable domain of TCR clone 163477 (TRAV8-6, TRAJ29)
CAVSRSSGNTPLVF

SEQ ID NO: 326954 - protein, 13 aa, Homo sapiens
  CDR3 for beta chain variable domain of TCR clone 163477 (TRBV19, TRBJ1-5)
CASSEGSNQPQHF

SEQ ID NO: 326955 - protein, 10 aa, Homo sapiens
  CDR3 for alpha chain variable domain of TCR clone 163478 (TRAV26-1, TRAJ40)
CIAGTYKFIF

SEQ ID NO: 326956 - protein, 15 aa, Homo sapiens
  CDR3 for beta chain variable domain of TCR clone 163478 (TRBV19, TRBJ2-1)
CASSSPGVPLDEQFF

SEQ ID NO: 326957 - protein, 20 aa, Homo sapiens
  CDR3 for alpha chain variable domain of TCR clone 163479 (TRAV26-1, TRAJ38)
CIADNAGNNHIQNPDPAVYQ

SEQ ID NO: 326958 - protein, 20 aa, Homo sapiens
  CDR3 for beta chain variable domain of TCR clone 163479 (TRBV28, TRBJ2-1)
CASTPIGRSPGLAGGNEQFF

SEQ ID NO: 326959 - protein, 15 aa, Homo sapiens
  CDR3 for alpha chain variable domain of TCR clone 163480 (TRAV8-3, TRAJ6)
CALGPLGGGSNIPTF

SEQ ID NO: 326960 - protein, 14 aa, Homo sapiens
  CDR3 for beta chain variable domain of TCR clone 163480 (TRBV19, TRBJ2-2)
CASSTGQGAGELFF

SEQ ID NO: 326961 - protein, 10 aa, Homo sapiens
  CDR3 for alpha chain variable domain of TCR clone 163481 (TRAV21, TRAJ31)
CAADNARLML

SEQ ID NO: 326962 - protein, 13 aa, Homo sapiens
  CDR3 for beta chain variable domain of TCR clone 163481 (TRBV4-1, TRBJ1-1)
CASSRKMNTEAFF

SEQ ID NO: 326963 - protein, 15 aa, Homo sapiens
  CDR3 for alpha chain variable domain of TCR clone 163482 (TRAV16, TRAJ17)
CALSGNKAAGNKLTF

SEQ ID NO: 326964 - protein, 16 aa, Homo sapiens
  CDR3 for beta chain variable domain of TCR clone 163482 (TRBV7-6, TRBJ1-6)
CASSSLPAGEYSPLLF

SEQ ID NO: 326965 - protein, 14 aa, Homo sapiens
  CDR3 for alpha chain variable domain of TCR clone 163483 (TRAV17, TRAJ22)
CATVLSGSTRQLTF

SEQ ID NO: 326966 - protein, 14 aa, Homo sapiens
  CDR3 for beta chain variable domain of TCR clone 163483 (TRBV19, TRBJ2-1)
CASPTFVLSGEQFF

SEQ ID NO: 326967 - protein, 15 aa, Homo sapiens
  CDR3 for alpha chain variable domain of TCR clone 163484 (TRAV21, TRAJ53)
CATLNSGRSNYKLTF

SEQ ID NO: 326968 - protein, 16 aa, Homo sapiens
  CDR3 for beta chain variable domain of TCR clone 163484 (TRBV9, TRBJ2-1)
CASSVGGGGNYNEQFF

SEQ ID NO: 326969 - protein, 13 aa, Homo sapiens
  CDR3 for alpha chain variable domain of TCR clone 163485 (TRAV21, TRAJ57)
CAVTQGGSEKLVL

SEQ ID NO: 326970 - protein, 16 aa, Homo sapiens
  CDR3 for beta chain variable domain of TCR clone 163485 (TRBV29-1, TRBJ2-7)
CSVDDAEDGTAYEQYF

SEQ ID NO: 326971 - protein, 14 aa, Homo sapiens
  CDR3 for alpha chain variable domain of TCR clone 163486 (TRAV12-3, TRAJ33)
CAMSVPGSNYQLIW

SEQ ID NO: 326972 - protein, 16 aa, Homo sapiens
  CDR3 for beta chain variable domain of TCR clone 163486 (TRBV7-2, TRBJ1-2)
CASSPTSGTSLVGYTF

SEQ ID NO: 326973 - protein, 14 aa, Homo sapiens
  CDR3 for alpha chain variable domain of TCR clone 163487 (TRAV13-1, TRAJ35)
CAASKGGFGNVLHC

SEQ ID NO: 326974 - protein, 16 aa, Homo sapiens
  CDR3 for beta chain variable domain of TCR clone 163487 (TRBV24-1, TRBJ2-3)
CATSGYRDRDTDTQYF

SEQ ID NO: 326975 - protein, 18 aa, Homo sapiens
  CDR3 for alpha chain variable domain of TCR clone 163488 (TRAV21, TRAJ52)
CAVRPSPAGGTSYGKLTF

SEQ ID NO: 326976 - protein, 17 aa, Homo sapiens
  CDR3 for beta chain variable domain of TCR clone 163488 (TRBV5-7, TRBJ2-4)
CASSPGTGHLAKNIQYF

SEQ ID NO: 326977 - protein, 16 aa, Homo sapiens
  CDR3 for alpha chain variable domain of TCR clone 163489 (TRAV16, TRAJ52)
CALSGVGGTSYGKLTF

SEQ ID NO: 326978 - protein, 15 aa, Homo sapiens
  CDR3 for beta chain variable domain of TCR clone 163489 (TRBV7-9, TRBJ1-5)
CASSQGHQPNQPQHF

SEQ ID NO: 326979 - protein, 13 aa, Homo sapiens
  CDR3 for alpha chain variable domain of TCR clone 163490 (TRAV16, TRAJ11)
CALMNSGYSTLTF

SEQ ID NO: 326980 - protein, 16 aa, Homo sapiens
  CDR3 for beta chain variable domain of TCR clone 163490 (TRBV19, TRBJ2-3)
CASSPGAASRTDTQYF

SEQ ID NO: 326981 - protein, 14 aa, Homo sapiens
  CDR3 for alpha chain variable domain of TCR clone 163491 (TRAV3, TRAJ9)
CAMRGNTGGFKTIF

SEQ ID NO: 326982 - protein, 16 aa, Homo sapiens
  CDR3 for beta chain variable domain of TCR clone 163491 (TRBV7-2, TRBJ2-7)
CASSLGLAGGAYEQYF

SEQ ID NO: 326983 - protein, 15 aa, Homo sapiens
  CDR3 for alpha chain variable domain of TCR clone 163492 (TRAV3, TRAJ22)
CAVRDRGGSARQLTF

SEQ ID NO: 326984 - protein, 13 aa, Homo sapiens
  CDR3 for beta chain variable domain of TCR clone 163492 (TRBV20-1, TRBJ1-1)
RSARVGGNTEAFF

SEQ ID NO: 326985 - protein, 13 aa, Homo sapiens
  CDR3 for alpha chain variable domain of TCR clone 163493 (TRAV27, TRAJ29)
CSGAHSGNTPLVF

SEQ ID NO: 326986 - protein, 14 aa, Homo sapiens
  CDR3 for beta chain variable domain of TCR clone 163493 (TRBV7-9, TRBJ2-7)
CASSIGQGAGEQYF

SEQ ID NO: 326987 - protein, 15 aa, Homo sapiens
  CDR3 for alpha chain variable domain of TCR clone 163494 (TRAV38-1, TRAJ57)
CAFMDSQGGPEKLVF

SEQ ID NO: 326988 - protein, 16 aa, Homo sapiens
  CDR3 for beta chain variable domain of TCR clone 163494 (TRBV10-3, TRBJ2-1)
CAIRGGGRGDYNEQFF

SEQ ID NO: 326989 - protein, 14 aa, Homo sapiens
  CDR3 for alpha chain variable domain of TCR clone 163495 (TRAV26-2, TRAJ32)
CCVGSGGATNKLIF

SEQ ID NO: 326990 - protein, 14 aa, Homo sapiens
  CDR3 for beta chain variable domain of TCR clone 163495 (TRBV7-6, TRBJ2-3)
CASSLGTVTDTQYF

SEQ ID NO: 326991 - protein, 13 aa, Homo sapiens
  CDR3 for alpha chain variable domain of TCR clone 163496 (TRAV20, TRAJ37)
CAGSSSNTGKLIF

SEQ ID NO: 326992 - protein, 14 aa, Homo sapiens
  CDR3 for beta chain variable domain of TCR clone 163496 (TRBV2, TRBJ2-1)
CASRTGSSYNEQFF

SEQ ID NO: 326993 - protein, 14 aa, Homo sapiens
  CDR3 for alpha chain variable domain of TCR clone 163497 (TRAV29/DV5, TRAJ37)
CAARALATQANYSL

SEQ ID NO: 326994 - protein, 14 aa, Homo sapiens
  CDR3 for beta chain variable domain of TCR clone 163497 (TRBV5-1, TRBJ1-1)
CASSLAVGSGEAFF

SEQ ID NO: 326995 - protein, 18 aa, Homo sapiens
  CDR3 for alpha chain variable domain of TCR clone 163498 (TRAV13-1, TRAJ52)
CAAKKPNAGGTSYGKLTF

SEQ ID NO: 326996 - protein, 15 aa, Homo sapiens
  CDR3 for beta chain variable domain of TCR clone 163498 (TRBV6-1, TRBJ2-3)
CASSERGGITDTQYI

SEQ ID NO: 326997 - protein, 15 aa, Homo sapiens
  CDR3 for alpha chain variable domain of TCR clone 163499 (TRAV17, TRAJ22)
CATVAPSGSARQLTF

SEQ ID NO: 326998 - protein, 16 aa, Homo sapiens
  CDR3 for beta chain variable domain of TCR clone 163499 (TRBV28, TRBJ2-7)
CASSFPDRRLTYEQYF

SEQ ID NO: 326999 - protein, 22 aa, Homo sapiens
  CDR3 for alpha chain variable domain of TCR clone 163500 (TRAV12-2, TRAJ53)
SPVIQPPTSVPPILSSNYKLTF

SEQ ID NO: 327000 - protein, 13 aa, Homo sapiens
  CDR3 for beta chain variable domain of TCR clone 163500 (TRBV7-7, TRBJ2-3)
CASSLGRADTQYF

SEQ ID NO: 327001 - protein, 13 aa, Homo sapiens
  CDR3 for alpha chain variable domain of TCR clone 163501 (TRAV21, TRAJ37)
CAVSSGNTGKLIF

SEQ ID NO: 327002 - protein, 13 aa, Homo sapiens
  CDR3 for beta chain variable domain of TCR clone 163501 (TRBV7-9, TRBJ1-2)
CASSLKQNYGYTF

SEQ ID NO: 327003 - protein, 12 aa, Homo sapiens
  CDR3 for alpha chain variable domain of TCR clone 163502 (TRAV17, TRAJ30)
CASDARDDKIIF

SEQ ID NO: 327004 - protein, 15 aa, Homo sapiens
  CDR3 for beta chain variable domain of TCR clone 163502 (TRBV4-1, TRBJ2-1)
CASSQGGELYNEQFF

SEQ ID NO: 327005 - protein, 13 aa, Homo sapiens
  CDR3 for alpha chain variable domain of TCR clone 163503 (TRAV23/DV6, TRAJ12)
CAPRVDSSYKLIF

SEQ ID NO: 327006 - protein, 12 aa, Homo sapiens
  CDR3 for beta chain variable domain of TCR clone 163503 (TRBV7-8, TRBJ2-7)
CVSSLGDREQYF

SEQ ID NO: 327007 - protein, 14 aa, Homo sapiens
  CDR3 for alpha chain variable domain of TCR clone 163504 (TRAV12-2, TRAJ13)
CAVKKTGGYQKVTF

SEQ ID NO: 327008 - protein, 13 aa, Homo sapiens
  CDR3 for beta chain variable domain of TCR clone 163504 (TRBV28, TRBJ2-7)
CASKAGGVYEQCF

SEQ ID NO: 327009 - protein, 16 aa, Homo sapiens
  CDR3 for alpha chain variable domain of TCR clone 163505 (TRAV30, TRAJ24)
CGTEIVDADSWGKFQF

SEQ ID NO: 327010 - protein, 17 aa, Homo sapiens
  CDR3 for beta chain variable domain of TCR clone 163505 (TRBV5-1, TRBJ2-7)
FAPAADNPGQIPYEQYF

SEQ ID NO: 327011 - protein, 11 aa, Homo sapiens
  CDR3 for alpha chain variable domain of TCR clone 163506 (TRAV12-1, TRAJ43)
CVEYDNNDMRF

SEQ ID NO: 327012 - protein, 13 aa, Homo sapiens
  CDR3 for beta chain variable domain of TCR clone 163506 (TRBV7-9, TRBJ2-3)
CASSPGSTDTQYF

SEQ ID NO: 327013 - protein, 14 aa, Homo sapiens
  CDR3 for alpha chain variable domain of TCR clone 163507 (TRAV13-1, TRAJ35)
CASIKLFFGNVLHC

SEQ ID NO: 327014 - protein, 13 aa, Homo sapiens
  CDR3 for beta chain variable domain of TCR clone 163507 (TRBV7-3, TRBJ1-1)
CASSQDWGAEAFF

SEQ ID NO: 327015 - protein, 12 aa, Homo sapiens
  CDR3 for alpha chain variable domain of TCR clone 163508 (TRAV2, TRAJ33)
CAFPDSNYQLIW

SEQ ID NO: 327016 - protein, 15 aa, Homo sapiens
  CDR3 for beta chain variable domain of TCR clone 163508 (TRBV15, TRBJ1-5)
CATSRDPVSNQPQHF

SEQ ID NO: 327017 - protein, 13 aa, Homo sapiens
  CDR3 for alpha chain variable domain of TCR clone 163509 (TRAV12-2, TRAJ52)
CAVGGTSYGKLTF

SEQ ID NO: 327018 - protein, 14 aa, Homo sapiens
  CDR3 for beta chain variable domain of TCR clone 163509 (TRBV19, TRBJ2-1)
CASPTFVLSGEQSF

SEQ ID NO: 327019 - protein, 12 aa, Homo sapiens
  CDR3 for alpha chain variable domain of TCR clone 163510 (TRAV12-3, TRAJ17)
CAMTLTGNKLTL

SEQ ID NO: 327020 - protein, 16 aa, Homo sapiens
  CDR3 for beta chain variable domain of TCR clone 163510 (TRBV13, TRBJ2-2)
CASSPRTGEHTGELFF

SEQ ID NO: 327021 - protein, 14 aa, Homo sapiens
  CDR3 for alpha chain variable domain of TCR clone 163511 (TRAV12-3, TRAJ57)
CAMSAWGGSEKLVF

SEQ ID NO: 327022 - protein, 17 aa, Homo sapiens
  CDR3 for beta chain variable domain of TCR clone 163511 (TRBV13, TRBJ2-3)
CASSLSRVAGGRNTQYF

SEQ ID NO: 327023 - protein, 15 aa, Homo sapiens
  CDR3 for alpha chain variable domain of TCR clone 163512 (TRAV2, TRAJ15)
CAVEDREQAGTALIF

SEQ ID NO: 327024 - protein, 14 aa, Homo sapiens
  CDR3 for beta chain variable domain of TCR clone 163512 (TRBV20-1, TRBJ2-3)
CSARGGTSTDTQYF

SEQ ID NO: 327025 - protein, 11 aa, Homo sapiens
  CDR3 for alpha chain variable domain of TCR clone 163513 (TRAV27, TRAJ45)
CAGAQEEVLTD

SEQ ID NO: 327026 - protein, 13 aa, Homo sapiens
  CDR3 for beta chain variable domain of TCR clone 163513 (TRBV7-9, TRBJ1-2)
CASSLKQNYGYTF

SEQ ID NO: 327027 - protein, 16 aa, Homo sapiens
  CDR3 for alpha chain variable domain of TCR clone 163514 (TRAV1-2, TRAJ10)
CAVRGVLTGGGNKPTF

SEQ ID NO: 327028 - protein, 12 aa, Homo sapiens
  CDR3 for beta chain variable domain of TCR clone 163514 (TRBV11-2, TRBJ2-1)
CASSPGNNEQFF

SEQ ID NO: 327029 - protein, 13 aa, Homo sapiens
  CDR3 for alpha chain variable domain of TCR clone 163515 (TRAV12-2, TRAJ34)
CAVRGYNTDKLIF

SEQ ID NO: 327030 - protein, 15 aa, Homo sapiens
  CDR3 for beta chain variable domain of TCR clone 163515 (TRBV28, TRBJ2-1)
CASRTGAGVIAQQFF

SEQ ID NO: 327031 - protein, 11 aa, Homo sapiens
  CDR3 for alpha chain variable domain of TCR clone 163516 (TRAV1-2, TRAJ40)
CAVPGAYKYIF

SEQ ID NO: 327032 - protein, 18 aa, Homo sapiens
  CDR3 for beta chain variable domain of TCR clone 163516 (TRBV11-2, TRBJ2-3)
CASSVRTSGSKKTDTQYF

SEQ ID NO: 327033 - protein, 15 aa, Homo sapiens
  CDR3 for alpha chain variable domain of TCR clone 163517 (TRAV12-2, TRAJ53)
CAVNGGGGSNYKLTF

SEQ ID NO: 327034 - protein, 14 aa, Homo sapiens
  CDR3 for beta chain variable domain of TCR clone 163517 (TRBV7-9, TRBJ2-5)
CASSLDTAQETQYF

SEQ ID NO: 327035 - protein, 14 aa, Homo sapiens
  CDR3 for alpha chain variable domain of TCR clone 163518 (TRAV8-6, TRAJ12)
CAVKAADSRYKLIF

SEQ ID NO: 327036 - protein, 15 aa, Homo sapiens
  CDR3 for beta chain variable domain of TCR clone 163518 (TRBV5-1, TRBJ2-5)
CASSLGLAEQEAQYF

SEQ ID NO: 327037 - protein, 12 aa, Homo sapiens
  CDR3 for alpha chain variable domain of TCR clone 163519 (TRAV1-1, TRAJ33)
FAASDSNYQLIW

SEQ ID NO: 327038 - protein, 18 aa, Homo sapiens
  CDR3 for beta chain variable domain of TCR clone 163519 (TRBV20-1, TRBJ2-2)
CSARVQTARPSGTGELFF

SEQ ID NO: 327039 - protein, 13 aa, Homo sapiens
  CDR3 for alpha chain variable domain of TCR clone 163520 (TRAV12-2, TRAJ50)
CAVIVTSYDKVIF

SEQ ID NO: 327040 - protein, 12 aa, Homo sapiens
  CDR3 for beta chain variable domain of TCR clone 163520 (TRBV11-2, TRBJ2-1)
CASSPGNNEQFF

SEQ ID NO: 327041 - protein, 12 aa, Homo sapiens
  CDR3 for alpha chain variable domain of TCR clone 163521 (TRAV12-3, TRAJ20)
CAMVRGDYKLRF

SEQ ID NO: 327042 - protein, 13 aa, Homo sapiens
  CDR3 for beta chain variable domain of TCR clone 163521 (TRBV23-1, TRBJ1-4)
CASRGKFNEKLFF

SEQ ID NO: 327043 - protein, 16 aa, Homo sapiens
  CDR3 for alpha chain variable domain of TCR clone 163522 (TRAV30, TRAJ24)
CGTEIVDAGSWGKFQF

SEQ ID NO: 327044 - protein, 17 aa, Homo sapiens
  CDR3 for beta chain variable domain of TCR clone 163522 (TRBV13, TRBJ2-3)
CASSLSRVAGGRNTQYF

SEQ ID NO: 327045 - protein, 14 aa, Homo sapiens
  CDR3 for alpha chain variable domain of TCR clone 163523 (TRAV9-2, TRAJ39)
CALYIYNAGNMLTF

SEQ ID NO: 327046 - protein, 14 aa, Homo sapiens
  CDR3 for beta chain variable domain of TCR clone 163523 (TRBV27, TRBJ2-7)
CASATGTERREQYF

SEQ ID NO: 327047 - protein, 11 aa, Homo sapiens
  CDR3 for alpha chain variable domain of TCR clone 163524 (TRAV1-2, TRAJ11)
CAVRGYSTLTF

SEQ ID NO: 327048 - protein, 13 aa, Homo sapiens
  CDR3 for beta chain variable domain of TCR clone 163524 (TRBV19, TRBJ1-5)
CASSMRGYQPQHF

SEQ ID NO: 327049 - protein, 14 aa, Homo sapiens
  CDR3 for alpha chain variable domain of TCR clone 163525 (TRAV1-2, TRAJ16)
CAVNRFSDGQMLLF

SEQ ID NO: 327050 - protein, 12 aa, Homo sapiens
  CDR3 for beta chain variable domain of TCR clone 163525 (TRBV5-1, TRBJ2-7)
CASSSTTYEQYF

SEQ ID NO: 327051 - protein, 16 aa, Homo sapiens
  CDR3 for alpha chain variable domain of TCR clone 163526 (TRAV12-1, TRAJ12)
CVVNNLLMDSSYKLIF

SEQ ID NO: 327052 - protein, 13 aa, Homo sapiens
  CDR3 for beta chain variable domain of TCR clone 163526 (TRBV11-2, TRBJ2-1)
CASSSEAYNEQFF

SEQ ID NO: 327053 - protein, 14 aa, Homo sapiens
  CDR3 for alpha chain variable domain of TCR clone 163527 (TRAV12-3, TRAJ20)
CAMSARRGDYKLSF

SEQ ID NO: 327054 - protein, 13 aa, Homo sapiens
  CDR3 for beta chain variable domain of TCR clone 163527 (TRBV7-3, TRBJ1-1)
CASSQDWGAEAFF

SEQ ID NO: 327055 - protein, 17 aa, Homo sapiens
  CDR3 for alpha chain variable domain of TCR clone 163528 (TRAV13-1, TRAJ53)
CTASWKSSGGSNYKLTF

SEQ ID NO: 327056 - protein, 19 aa, Homo sapiens
  CDR3 for beta chain variable domain of TCR clone 163528 (TRBV7-9, TRBJ2-1)
CASSHNRGALLRSYNEQFF

SEQ ID NO: 327057 - protein, 15 aa, Homo sapiens
  CDR3 for alpha chain variable domain of TCR clone 163529 (TRAV8-3, TRAJ44)
CAVGAGARTASKLTF

SEQ ID NO: 327058 - protein, 12 aa, Homo sapiens
  CDR3 for beta chain variable domain of TCR clone 163529 (TRBV7-8, TRBJ2-4)
CASSLGGNSQYF

SEQ ID NO: 327059 - protein, 11 aa, Homo sapiens
  CDR3 for alpha chain variable domain of TCR clone 163530 (TRAV2, TRAJ33)
CAVESNYQLIW

SEQ ID NO: 327060 - protein, 13 aa, Homo sapiens
  CDR3 for beta chain variable domain of TCR clone 163530 (TRBV24-1, TRBJ2-1)
CATSAGPYNEQFF

SEQ ID NO: 327061 - protein, 14 aa, Homo sapiens
  CDR3 for alpha chain variable domain of TCR clone 163531 (TRAV26-1, TRAJ44)
CIVRPTGTSSKLTF

SEQ ID NO: 327062 - protein, 12 aa, Homo sapiens
  CDR3 for beta chain variable domain of TCR clone 163531 (TRBV11-3, TRBJ1-1)
CASSLRDSEAFF

SEQ ID NO: 327063 - protein, 13 aa, Homo sapiens
  CDR3 for alpha chain variable domain of TCR clone 163532 (TRAV12-1, TRAJ49)
CVVNTNTGNQLYF

SEQ ID NO: 327064 - protein, 16 aa, Homo sapiens
  CDR3 for beta chain variable domain of TCR clone 163532 (TRBV12-5, TRBJ2-5)
CASGPRTSGNQETQYF

SEQ ID NO: 327065 - protein, 14 aa, Homo sapiens
  CDR3 for alpha chain variable domain of TCR clone 163533 (TRAV35, TRAJ33)
YAGSSQDSNYQLIW

SEQ ID NO: 327066 - protein, 15 aa, Homo sapiens
  CDR3 for beta chain variable domain of TCR clone 163533 (TRBV20-1, TRBJ2-7)
CSAESGTSGAYGQYF

SEQ ID NO: 327067 - protein, 14 aa, Homo sapiens
  CDR3 for alpha chain variable domain of TCR clone 163534 (TRAV35, TRAJ13)
CAGSPSWGYQKVTF

SEQ ID NO: 327068 - protein, 17 aa, Homo sapiens
  CDR3 for beta chain variable domain of TCR clone 163534 (TRBV7-6, TRBJ2-5)
CASSPGLADPWGETQYF

SEQ ID NO: 327069 - protein, 17 aa, Homo sapiens
  CDR3 for alpha chain variable domain of TCR clone 163535 (TRAV3, TRAJ6)
CAASDGPRAGGSYIPTF

SEQ ID NO: 327070 - protein, 14 aa, Homo sapiens
  CDR3 for beta chain variable domain of TCR clone 163535 (TRBV6-1, TRBJ1-3)
CASVQGGGGNTMYF

SEQ ID NO: 327071 - protein, 16 aa, Homo sapiens
  CDR3 for alpha chain variable domain of TCR clone 163536 (TRAV30, TRAJ24)
FGTEIVDADSWGKFQF

SEQ ID NO: 327072 - protein, 14 aa, Homo sapiens
  CDR3 for beta chain variable domain of TCR clone 163536 (TRBV7-2, TRBJ1-2)
CASSQTGSTYGYTF

SEQ ID NO: 327073 - protein, 14 aa, Homo sapiens
  CDR3 for alpha chain variable domain of TCR clone 163537 (TRAV13-1, TRAJ9)
CAASALTGGFKTIF

SEQ ID NO: 327074 - protein, 16 aa, Homo sapiens
  CDR3 for beta chain variable domain of TCR clone 163537 (TRBV12-4, TRBJ2-3)
FASSFGTGGISDTQYF

SEQ ID NO: 327075 - protein, 15 aa, Homo sapiens
  CDR3 for alpha chain variable domain of TCR clone 163538 (TRAV12-1, TRAJ15)
CVVTRANQAGTALIF

SEQ ID NO: 327076 - protein, 16 aa, Homo sapiens
  CDR3 for beta chain variable domain of TCR clone 163538 (TRBV29-1, TRBJ1-2)
CSVEANRDIANYGYTF

SEQ ID NO: 327077 - protein, 16 aa, Homo sapiens
  CDR3 for alpha chain variable domain of TCR clone 163539 (TRAV30, TRAJ24)
CGTEIVDADSWGKFPF

SEQ ID NO: 327078 - protein, 18 aa, Homo sapiens
  CDR3 for beta chain variable domain of TCR clone 163539 (TRBV11-2, TRBJ2-3)
CASSLGRASRGAPNTQYF

SEQ ID NO: 327079 - protein, 13 aa, Homo sapiens
  CDR3 for alpha chain variable domain of TCR clone 163540 (TRAV23/DV6, TRAJ15)
CAALPAGRNCSDL

SEQ ID NO: 327080 - protein, 14 aa, Homo sapiens
  CDR3 for beta chain variable domain of TCR clone 163540 (TRBV7-9, TRBJ1-2)
CANSRQGANYGYTF

SEQ ID NO: 327081 - protein, 17 aa, Homo sapiens
  CDR3 for alpha chain variable domain of TCR clone 163541 (TRAV4, TRAJ22)
CCVLLPRGGGSARQLTF

SEQ ID NO: 327082 - protein, 12 aa, Homo sapiens
  CDR3 for beta chain variable domain of TCR clone 163541 (TRBV19, TRBJ2-7)
CASTDRGYEQYF

SEQ ID NO: 327083 - protein, 14 aa, Homo sapiens
  CDR3 for alpha chain variable domain of TCR clone 163542 (TRAV29/DV5, TRAJ45)
CAASSRGGADGLTF

SEQ ID NO: 327084 - protein, 11 aa, Homo sapiens
  CDR3 for beta chain variable domain of TCR clone 163542 (TRBV11-2, TRBJ2-2)
CASSLPGELFF

SEQ ID NO: 327085 - protein, 14 aa, Homo sapiens
  CDR3 for alpha chain variable domain of TCR clone 163543 (TRAV12-2, TRAJ13)
CAVKKTGGYQKVTF

SEQ ID NO: 327086 - protein, 11 aa, Homo sapiens
  CDR3 for beta chain variable domain of TCR clone 163543 (TRBV29-1, TRBJ2-5)
CSEDRTWTQYF

SEQ ID NO: 327087 - protein, 14 aa, Homo sapiens
  CDR3 for alpha chain variable domain of TCR clone 163544 (TRAV1-2, TRAJ16)
CAVNRFSDGQRLLF

SEQ ID NO: 327088 - protein, 13 aa, Homo sapiens
  CDR3 for beta chain variable domain of TCR clone 163544 (TRBV12-4, TRBJ2-5)
CASSPGTEETQYF

SEQ ID NO: 327089 - protein, 13 aa, Homo sapiens
  CDR3 for alpha chain variable domain of TCR clone 163545 (TRAV8-3, TRAJ28)
CAVGALGSYQLTF

SEQ ID NO: 327090 - protein, 14 aa, Homo sapiens
  CDR3 for beta chain variable domain of TCR clone 163545 (TRBV7-2, TRBJ2-7)
CASRSQGAAYEQYF

SEQ ID NO: 327091 - protein, 16 aa, Homo sapiens
  CDR3 for alpha chain variable domain of TCR clone 163546 (TRAV16, TRAJ52)
CALSAAGGTSYGKLTF

SEQ ID NO: 327092 - protein, 16 aa, Homo sapiens
  CDR3 for beta chain variable domain of TCR clone 163546 (TRBV7-9, TRBJ1-3)
CASSLGAGSSGNTIYF

SEQ ID NO: 327093 - protein, 16 aa, Homo sapiens
  CDR3 for alpha chain variable domain of TCR clone 163547 (TRAV8-4, TRAJ28)
CAVESNSGAGSYQLTF

SEQ ID NO: 327094 - protein, 14 aa, Homo sapiens
  CDR3 for beta chain variable domain of TCR clone 163547 (TRBV7-3, TRBJ2-1)
CASSLAGGTNEQFF

SEQ ID NO: 327095 - protein, 11 aa, Homo sapiens
  CDR3 for alpha chain variable domain of TCR clone 163548 (TRAV1-2, TRAJ40)
CAVPGTSKYIF

SEQ ID NO: 327096 - protein, 15 aa, Homo sapiens
  CDR3 for beta chain variable domain of TCR clone 163548 (TRBV7-9, TRBJ2-7)
CASSLALAEAYEQYF

SEQ ID NO: 327097 - protein, 14 aa, Homo sapiens
  CDR3 for alpha chain variable domain of TCR clone 163549 (TRAV20, TRAJ42)
CDVQAGGSQGNLLF

SEQ ID NO: 327098 - protein, 14 aa, Homo sapiens
  CDR3 for beta chain variable domain of TCR clone 163549 (TRBV28, TRBJ1-2)
CASRIQGANYGYTF

SEQ ID NO: 327099 - protein, 14 aa, Homo sapiens
  CDR3 for alpha chain variable domain of TCR clone 163550 (TRAV17, TRAJ22)
CATSPSGSARQLTF

SEQ ID NO: 327100 - protein, 14 aa, Homo sapiens
  CDR3 for beta chain variable domain of TCR clone 163550 (TRBV7-2, TRBJ1-1)
CASSFLTGTTEAVF

SEQ ID NO: 327101 - protein, 11 aa, Homo sapiens
  CDR3 for alpha chain variable domain of TCR clone 163551 (TRAV27, TRAJ47)
CAGAYGNKLVF

SEQ ID NO: 327102 - protein, 15 aa, Homo sapiens
  CDR3 for beta chain variable domain of TCR clone 163551 (TRBV9, TRBJ2-7)
CASSPHEQGSYEQYC

SEQ ID NO: 327103 - protein, 14 aa, Homo sapiens
  CDR3 for alpha chain variable domain of TCR clone 163552 (TRAV1-2, TRAJ16)
CTVNRFSDGQKLLF

SEQ ID NO: 327104 - protein, 14 aa, Homo sapiens
  CDR3 for beta chain variable domain of TCR clone 163552 (TRBV20-1, TRBJ1-1)
CSAQTRIGGTEAFF

SEQ ID NO: 327105 - protein, 11 aa, Homo sapiens
  CDR3 for alpha chain variable domain of TCR clone 163553 (TRAV29/DV5, TRAJ47)
CAATYGNKLVF

SEQ ID NO: 327106 - protein, 17 aa, Homo sapiens
  CDR3 for beta chain variable domain of TCR clone 163553 (TRBV7-9, TRBJ2-1)
CASSLLASYPSYNEQFF

SEQ ID NO: 327107 - protein, 15 aa, Homo sapiens
  CDR3 for alpha chain variable domain of TCR clone 163554 (TRAV19, TRAJ9)
CALSLPDTGGFKTIF

SEQ ID NO: 327108 - protein, 17 aa, Homo sapiens
  CDR3 for beta chain variable domain of TCR clone 163554 (TRBV7-8, TRBJ2-6)
CASSAGTGGAGANVLTF

SEQ ID NO: 327109 - protein, 14 aa, Homo sapiens
  CDR3 for alpha chain variable domain of TCR clone 163555 (TRAV29/DV5, TRAJ48)
CAAMALFGNEKLTF

SEQ ID NO: 327110 - protein, 15 aa, Homo sapiens
  CDR3 for beta chain variable domain of TCR clone 163555 (TRBV10-2, TRBJ2-6)
CASSEQGTGANVLTF

SEQ ID NO: 327111 - protein, 14 aa, Homo sapiens
  CDR3 for alpha chain variable domain of TCR clone 163556 (TRAV29/DV5, TRAJ4)
CAATVLGGYNKLIF

SEQ ID NO: 327112 - protein, 17 aa, Homo sapiens
  CDR3 for beta chain variable domain of TCR clone 163556 (TRBV11-2, TRBJ2-1)
CASSLYPPGVEYNEQLF

SEQ ID NO: 327113 - protein, 15 aa, Homo sapiens
  CDR3 for alpha chain variable domain of TCR clone 163557 (TRAV2, TRAJ9)
CAVEDRSTGGFKTIF

SEQ ID NO: 327114 - protein, 14 aa, Homo sapiens
  CDR3 for beta chain variable domain of TCR clone 163557 (TRBV4-1, TRBJ2-2)
CASSQAVNTGELFF

SEQ ID NO: 327115 - protein, 11 aa, Homo sapiens
  CDR3 for alpha chain variable domain of TCR clone 163558 (TRAV3, TRAJ21)
CAVGNFDKFYF

SEQ ID NO: 327116 - protein, 15 aa, Homo sapiens
  CDR3 for beta chain variable domain of TCR clone 163558 (TRBV12-4, TRBJ2-5)
CASSPPTGLQETQYF

SEQ ID NO: 327117 - protein, 14 aa, Homo sapiens
  CDR3 for alpha chain variable domain of TCR clone 163559 (TRAV12-1, TRAJ43)
CVVNGRSNNNDMRF

SEQ ID NO: 327118 - protein, 13 aa, Homo sapiens
  CDR3 for beta chain variable domain of TCR clone 163559 (TRBV27, TRBJ1-1)
CASSLSIGAEAFV

SEQ ID NO: 327119 - protein, 13 aa, Homo sapiens
  CDR3 for alpha chain variable domain of TCR clone 163560 (TRAV13-1, TRAJ11)
CAAVLAGYSTLTF

SEQ ID NO: 327120 - protein, 13 aa, Homo sapiens
  CDR3 for beta chain variable domain of TCR clone 163560 (TRBV7-8, TRBJ1-1)
CASSSDANTEAFF

SEQ ID NO: 327121 - protein, 13 aa, Homo sapiens
  CDR3 for alpha chain variable domain of TCR clone 163561 (TRAV12-2, TRAJ34)
CAVRGYNTDKLIF

SEQ ID NO: 327122 - protein, 18 aa, Homo sapiens
  CDR3 for beta chain variable domain of TCR clone 163561 (TRBV11-2, TRBJ2-3)
CASSFGGASRGAPNTQYF

SEQ ID NO: 327123 - protein, 13 aa, Homo sapiens
  CDR3 for alpha chain variable domain of TCR clone 163562 (TRAV27, TRAJ29)
CVGAHSGNTPLVF

SEQ ID NO: 327124 - protein, 14 aa, Homo sapiens
  CDR3 for beta chain variable domain of TCR clone 163562 (TRBV7-9, TRBJ2-7)
CASSSGQGAGEQYF

SEQ ID NO: 327125 - protein, 13 aa, Homo sapiens
  CDR3 for alpha chain variable domain of TCR clone 163563 (TRAV2, TRAJ24)
CAVSTDSWGKLEF

SEQ ID NO: 327126 - protein, 14 aa, Homo sapiens
  CDR3 for beta chain variable domain of TCR clone 163563 (TRBV13, TRBJ2-5)
CASSLGTAQETQYF

SEQ ID NO: 327127 - protein, 15 aa, Homo sapiens
  CDR3 for alpha chain variable domain of TCR clone 163564 (TRAV13-1, TRAJ9)
CAASTLNTGGFKTIF

SEQ ID NO: 327128 - protein, 15 aa, Homo sapiens
  CDR3 for beta chain variable domain of TCR clone 163564 (TRBV7-9, TRBJ2-7)
CASSLALAEAYEQYF

SEQ ID NO: 327129 - protein, 15 aa, Homo sapiens
  CDR3 for alpha chain variable domain of TCR clone 163565 (TRAV13-1, TRAJ57)
CAASNTQGGSEKLVF

SEQ ID NO: 327130 - protein, 15 aa, Homo sapiens
  CDR3 for beta chain variable domain of TCR clone 163565 (TRBV28, TRBJ2-5)
CASSPPWSYQETQYF

SEQ ID NO: 327131 - protein, 14 aa, Homo sapiens
  CDR3 for alpha chain variable domain of TCR clone 163566 (TRAV3, TRAJ6)
CAVRDPWGSYIPTF

SEQ ID NO: 327132 - protein, 15 aa, Homo sapiens
  CDR3 for beta chain variable domain of TCR clone 163566 (TRBV19, TRBJ1-6)
CASSNQGAVGSPLHF

SEQ ID NO: 327133 - protein, 11 aa, Homo sapiens
  CDR3 for alpha chain variable domain of TCR clone 163567 (TRAV12-3, TRAJ49)
CSANTGNQFYF

SEQ ID NO: 327134 - protein, 12 aa, Homo sapiens
  CDR3 for beta chain variable domain of TCR clone 163567 (TRBV6-3, TRBJ2-7)
CASSEPGFEQYF

SEQ ID NO: 327135 - protein, 14 aa, Homo sapiens
  CDR3 for alpha chain variable domain of TCR clone 163568 (TRAV1-2, TRAJ16)
CAVSRFSDGEKLLF

SEQ ID NO: 327136 - protein, 11 aa, Homo sapiens
  CDR3 for beta chain variable domain of TCR clone 163568 (TRBV4-1, TRBJ2-2)
CASEHTGELFF

SEQ ID NO: 327137 - protein, 16 aa, Homo sapiens
  CDR3 for alpha chain variable domain of TCR clone 163569 (TRAV13-1, TRAJ48)
CAASIFGKFGNEKLTF

SEQ ID NO: 327138 - protein, 12 aa, Homo sapiens
  CDR3 for beta chain variable domain of TCR clone 163569 (TRBV14, TRBJ2-4)
CASSNLKSIQYF

SEQ ID NO: 327139 - protein, 16 aa, Homo sapiens
  CDR3 for alpha chain variable domain of TCR clone 163570 (TRAV20, TRAJ54)
CAVQRVLIQGAQKLVF

SEQ ID NO: 327140 - protein, 15 aa, Homo sapiens
  CDR3 for beta chain variable domain of TCR clone 163570 (TRBV7-3, TRBJ2-1)
CASSPTGGGEGEQFF

SEQ ID NO: 327141 - protein, 14 aa, Homo sapiens
  CDR3 for alpha chain variable domain of TCR clone 163571 (TRAV12-3, TRAJ57)
CAMSAWGGSEKLGF

SEQ ID NO: 327142 - protein, 16 aa, Homo sapiens
  CDR3 for beta chain variable domain of TCR clone 163571 (TRBV7-3, TRBJ2-2)
CASSLKRGTLSGELFF

SEQ ID NO: 327143 - protein, 12 aa, Homo sapiens
  CDR3 for alpha chain variable domain of TCR clone 163572 (TRAV8-4, TRAJ37)
CAVRSNTGKRIF

SEQ ID NO: 327144 - protein, 16 aa, Homo sapiens
  CDR3 for beta chain variable domain of TCR clone 163572 (TRBV7-2, TRBJ2-3)
CASSLVGDASTDTQYF

SEQ ID NO: 327145 - protein, 11 aa, Homo sapiens
  CDR3 for alpha chain variable domain of TCR clone 163573 (TRAV21, TRAJ48)
CAVDGNEKLTF

SEQ ID NO: 327146 - protein, 14 aa, Homo sapiens
  CDR3 for beta chain variable domain of TCR clone 163573 (TRBV7-9, TRBJ2-5)
CASSPAQDQETQYF

SEQ ID NO: 327147 - protein, 15 aa, Homo sapiens
  CDR3 for alpha chain variable domain of TCR clone 163574 (TRAV8-4, TRAJ3)
CAVTGENLVQQWFQD

SEQ ID NO: 327148 - protein, 16 aa, Homo sapiens
  CDR3 for beta chain variable domain of TCR clone 163574 (TRBV4-2, TRBJ1-1)
CASSQAGFGMNTEAFF

SEQ ID NO: 327149 - protein, 13 aa, Homo sapiens
  CDR3 for alpha chain variable domain of TCR clone 163575 (TRAV8-3, TRAJ36)
CAAGATGANNLFF

SEQ ID NO: 327150 - protein, 15 aa, Homo sapiens
  CDR3 for beta chain variable domain of TCR clone 163575 (TRBV7-2, TRBJ1-2)
RASSPRAGWNYGYTF

SEQ ID NO: 327151 - protein, 16 aa, Homo sapiens
  CDR3 for alpha chain variable domain of TCR clone 163576 (TRAV26-1, TRAJ28)
CIVRGYSGAGRYQLTF

SEQ ID NO: 327152 - protein, 14 aa, Homo sapiens
  CDR3 for beta chain variable domain of TCR clone 163576 (TRBV7-3, TRBJ1-1)
CASSLKGGNTEAFF

SEQ ID NO: 327153 - protein, 14 aa, Homo sapiens
  CDR3 for alpha chain variable domain of TCR clone 163577 (TRAV1-2, TRAJ8)
CAVREDTGFQKLGF

SEQ ID NO: 327154 - protein, 13 aa, Homo sapiens
  CDR3 for beta chain variable domain of TCR clone 163577 (TRBV7-3, TRBJ2-1)
CASSLDSYNEQFF

SEQ ID NO: 327155 - protein, 12 aa, Homo sapiens
  CDR3 for alpha chain variable domain of TCR clone 163578 (TRAV12-3, TRAJ4)
CAMTGAGTRLAV

SEQ ID NO: 327156 - protein, 12 aa, Homo sapiens
  CDR3 for beta chain variable domain of TCR clone 163578 (TRBV11-2, TRBJ2-2)
CASSLGGGERFF

SEQ ID NO: 327157 - protein, 14 aa, Homo sapiens
  CDR3 for alpha chain variable domain of TCR clone 163579 (TRAV3, TRAJ36)
CAVSDGTGANNLFF

SEQ ID NO: 327158 - protein, 16 aa, Homo sapiens
  CDR3 for beta chain variable domain of TCR clone 163579 (TRBV7-3, TRBJ2-5)
CASIQPGGSVQENQYF

SEQ ID NO: 327159 - protein, 13 aa, Homo sapiens
  CDR3 for alpha chain variable domain of TCR clone 163580 (TRAV4, TRAJ20)
CLVGSSNDYKLSF

SEQ ID NO: 327160 - protein, 15 aa, Homo sapiens
  CDR3 for beta chain variable domain of TCR clone 163580 (TRBV7-2, TRBJ2-3)
CASSSTGLETDTQYF

SEQ ID NO: 327161 - protein, 14 aa, Homo sapiens
  CDR3 for alpha chain variable domain of TCR clone 163581 (TRAV12-1, TRAJ29)
CVVNEGSGNTPLVF

SEQ ID NO: 327162 - protein, 13 aa, Homo sapiens
  CDR3 for beta chain variable domain of TCR clone 163581 (TRBV7-9, TRBJ2-3)
CASSPGSTDTQYC

SEQ ID NO: 327163 - protein, 15 aa, Homo sapiens
  CDR3 for alpha chain variable domain of TCR clone 163582 (TRAV12-2, TRAJ53)
CAVNGGGGSNYKRTF

SEQ ID NO: 327164 - protein, 14 aa, Homo sapiens
  CDR3 for beta chain variable domain of TCR clone 163582 (TRBV6-1, TRBJ1-3)
CASVQGGGGNTIYF

SEQ ID NO: 327165 - protein, 12 aa, Homo sapiens
  CDR3 for alpha chain variable domain of TCR clone 163583 (TRAV13-1, TRAJ53)
CAAGGSNYKLTF

SEQ ID NO: 327166 - protein, 14 aa, Homo sapiens
  CDR3 for beta chain variable domain of TCR clone 163583 (TRBV7-2, TRBJ2-7)
CASSPKTSFYEQYF

SEQ ID NO: 327167 - protein, 19 aa, Homo sapiens
  CDR3 for alpha chain variable domain of TCR clone 163584 (TRAV16, )
CALSGDIQNPDPAVYLLRD

SEQ ID NO: 327168 - protein, 16 aa, Homo sapiens
  CDR3 for beta chain variable domain of TCR clone 163584 (TRBV12-5, TRBJ2-5)
CASGPRTSGNQETQYF

SEQ ID NO: 327169 - protein, 11 aa, Homo sapiens
  CDR3 for alpha chain variable domain of TCR clone 163585 (TRAV2, TRAJ13)
CASGGYQKVTF

SEQ ID NO: 327170 - protein, 17 aa, Homo sapiens
  CDR3 for beta chain variable domain of TCR clone 163585 (TRBV20-1, TRBJ2-1)
CSASSSGLAGSYNEQFS

SEQ ID NO: 327171 - protein, 14 aa, Homo sapiens
  CDR3 for alpha chain variable domain of TCR clone 163586 (TRAV2, TRAJ20)
CAVELTANDYELSF

SEQ ID NO: 327172 - protein, 14 aa, Homo sapiens
  CDR3 for beta chain variable domain of TCR clone 163586 (TRBV4-2, TRBJ1-2)
CASSQVGQNYGYTF

SEQ ID NO: 327173 - protein, 14 aa, Homo sapiens
  CDR3 for alpha chain variable domain of TCR clone 163587 (TRAV25, TRAJ22)
CSVRSSGSARQLTF

SEQ ID NO: 327174 - protein, 16 aa, Homo sapiens
  CDR3 for beta chain variable domain of TCR clone 163587 (TRBV4-2, TRBJ1-1)
CASSPSPGRAAPEAFF

SEQ ID NO: 327175 - protein, 15 aa, Homo sapiens
  CDR3 for alpha chain variable domain of TCR clone 163588 (TRAV30, TRAJ32)
CGTEIPGGATNKLIF

SEQ ID NO: 327176 - protein, 13 aa, Homo sapiens
  CDR3 for beta chain variable domain of TCR clone 163588 (TRBV6-3, TRBJ2-7)
CASSLSGGYEQYF

SEQ ID NO: 327177 - protein, 12 aa, Homo sapiens
  CDR3 for alpha chain variable domain of TCR clone 163589 (TRAV21, TRAJ33)
CAKMDSKYQLIW

SEQ ID NO: 327178 - protein, 14 aa, Homo sapiens
  CDR3 for beta chain variable domain of TCR clone 163589 (TRBV2, TRBJ2-7)
CDSSLTSGGYEQYF

SEQ ID NO: 327179 - protein, 13 aa, Homo sapiens
  CDR3 for alpha chain variable domain of TCR clone 163590 (TRAV38-1, TRAJ42)
CARWGGSQANLIF

SEQ ID NO: 327180 - protein, 17 aa, Homo sapiens
  CDR3 for beta chain variable domain of TCR clone 163590 (TRBV20-1, TRBJ2-1)
CSARDPLAGVWDNEQFF

SEQ ID NO: 327181 - protein, 13 aa, Homo sapiens
  CDR3 for alpha chain variable domain of TCR clone 163591 (TRAV12-2, TRAJ47)
CAVFMEYGNKLVF

SEQ ID NO: 327182 - protein, 16 aa, Homo sapiens
  CDR3 for beta chain variable domain of TCR clone 163591 (TRBV4-1, TRBJ1-5)
CASSQGPTISPSILVM

SEQ ID NO: 327183 - protein, 13 aa, Homo sapiens
  CDR3 for alpha chain variable domain of TCR clone 163592 (TRAV8-3, TRAJ43)
CAVVPYNNNDMRF

SEQ ID NO: 327184 - protein, 16 aa, Homo sapiens
  CDR3 for beta chain variable domain of TCR clone 163592 (TRBV7-2, TRBJ2-5)
CASSPFLTGGEETQYF

SEQ ID NO: 327185 - protein, 11 aa, Homo sapiens
  CDR3 for alpha chain variable domain of TCR clone 163593 (TRAV17, TRAJ9)
CGFTGGFKTIF

SEQ ID NO: 327186 - protein, 14 aa, Homo sapiens
  CDR3 for beta chain variable domain of TCR clone 163593 (TRBV7-9, TRBJ2-2)
CASSLVQDTGELFL

SEQ ID NO: 327187 - protein, 12 aa, Homo sapiens
  CDR3 for alpha chain variable domain of TCR clone 163594 (TRAV13-1, TRAJ53)
AASGGSNYKLTV

SEQ ID NO: 327188 - protein, 16 aa, Homo sapiens
  CDR3 for beta chain variable domain of TCR clone 163594 (TRBV28, TRBJ2-6)
CASSNRRGSGANDLTF

SEQ ID NO: 327189 - protein, 11 aa, Homo sapiens
  CDR3 for alpha chain variable domain of TCR clone 163595 (TRAV12-2, TRAJ33)
CAGTSNYQLLW

SEQ ID NO: 327190 - protein, 14 aa, Homo sapiens
  CDR3 for beta chain variable domain of TCR clone 163595 (TRBV12-4, TRBJ2-2)
CASNQGANTGELFF

SEQ ID NO: 327191 - protein, 13 aa, Homo sapiens
  CDR3 for alpha chain variable domain of TCR clone 163596 (TRAV12-3, TRAJ13)
CAMGTGGYQKVTF

SEQ ID NO: 327192 - protein, 14 aa, Homo sapiens
  CDR3 for beta chain variable domain of TCR clone 163596 (TRBV7-2, TRBJ2-5)
CTSSTGGELKTQYF

SEQ ID NO: 327193 - protein, 14 aa, Homo sapiens
  CDR3 for alpha chain variable domain of TCR clone 163597 (TRAV35, TRAJ56)
CAGQLTGANSKLTF

SEQ ID NO: 327194 - protein, 18 aa, Homo sapiens
  CDR3 for beta chain variable domain of TCR clone 163597 (TRBV11-2, TRBJ2-3)
CASSLGGASRGAPNTQYF

SEQ ID NO: 327195 - protein, 14 aa, Homo sapiens
  CDR3 for alpha chain variable domain of TCR clone 163598 (TRAV16, TRAJ57)
CALSSPGGSEKLVF

SEQ ID NO: 327196 - protein, 14 aa, Homo sapiens
  CDR3 for beta chain variable domain of TCR clone 163598 (TRBV2, TRBJ2-1)
CASRAYGIYNEQFF

SEQ ID NO: 327197 - protein, 14 aa, Homo sapiens
  CDR3 for alpha chain variable domain of TCR clone 163599 (TRAV1-2, TRAJ16)
CAVNRFSDGQKLLF

SEQ ID NO: 327198 - protein, 15 aa, Homo sapiens
  CDR3 for beta chain variable domain of TCR clone 163599 (TRBV7-3, TRBJ2-1)
CQQLKFGRGAKEQFF

SEQ ID NO: 327199 - protein, 13 aa, Homo sapiens
  CDR3 for alpha chain variable domain of TCR clone 163600 (TRAV26-1, TRAJ30)
CTVRVESNDKILF

SEQ ID NO: 327200 - protein, 15 aa, Homo sapiens
  CDR3 for beta chain variable domain of TCR clone 163600 (TRBV6-1, TRBJ2-3)
CASSERGGITDTQYF

SEQ ID NO: 327201 - protein, 12 aa, Homo sapiens
  CDR3 for alpha chain variable domain of TCR clone 163601 (TRAV2, TRAJ15)
CCASQAGTALIF

SEQ ID NO: 327202 - protein, 15 aa, Homo sapiens
  CDR3 for beta chain variable domain of TCR clone 163601 (TRBV11-1, TRBJ2-1)
CASHTGLAGSNEQFF

SEQ ID NO: 327203 - protein, 14 aa, Homo sapiens
  CDR3 for alpha chain variable domain of TCR clone 163602 (TRAV26-1, TRAJ45)
CIVRVVGGADGLTF

SEQ ID NO: 327204 - protein, 13 aa, Homo sapiens
  CDR3 for beta chain variable domain of TCR clone 163602 (TRBV4-2, TRBJ2-5)
CASSRGQQETQYF

SEQ ID NO: 327205 - protein, 16 aa, Homo sapiens
  CDR3 for alpha chain variable domain of TCR clone 163603 (TRAV12-2, TRAJ18)
CAVFAGRGSTLGRLYF

SEQ ID NO: 327206 - protein, 13 aa, Homo sapiens
  CDR3 for beta chain variable domain of TCR clone 163603 (TRBV2, TRBJ2-7)
CAHGLAGDYEQYF

SEQ ID NO: 327207 - protein, 13 aa, Homo sapiens
  CDR3 for alpha chain variable domain of TCR clone 163604 (TRAV21, TRAJ9)
CAVRRSGGFKTIF

SEQ ID NO: 327208 - protein, 14 aa, Homo sapiens
  CDR3 for beta chain variable domain of TCR clone 163604 (TRBV20-1, TRBJ2-7)
CSAKRGRSSYEQYF

SEQ ID NO: 327209 - protein, 14 aa, Homo sapiens
  CDR3 for alpha chain variable domain of TCR clone 163605 (TRAV1-2, TRAJ16)
CAVNRFSDGQKLLF

SEQ ID NO: 327210 - protein, 14 aa, Homo sapiens
  CDR3 for beta chain variable domain of TCR clone 163605 (TRBV19, TRBJ2-2)
CASSTGQGAGELFF

SEQ ID NO: 327211 - protein, 14 aa, Homo sapiens
  CDR3 for alpha chain variable domain of TCR clone 163606 (TRAV26-1, TRAJ38)
CIADNAGNNRKLIW

SEQ ID NO: 327212 - protein, 12 aa, Homo sapiens
  CDR3 for beta chain variable domain of TCR clone 163606 (TRBV20-1, TRBJ2-7)
CSAGRRQSEQYF

SEQ ID NO: 327213 - protein, 13 aa, Homo sapiens
  CDR3 for alpha chain variable domain of TCR clone 163607 (TRAV12-3, TRAJ9)
CAMRNTGGVKTIF

SEQ ID NO: 327214 - protein, 14 aa, Homo sapiens
  CDR3 for beta chain variable domain of TCR clone 163607 (TRBV11-2, TRBJ2-7)
CASSSTGEGYEQYF

SEQ ID NO: 327215 - protein, 15 aa, Homo sapiens
  CDR3 for alpha chain variable domain of TCR clone 163608 (TRAV38-1, TRAJ37)
CAFIYGSGNTGKLIF

SEQ ID NO: 327216 - protein, 12 aa, Homo sapiens
  CDR3 for beta chain variable domain of TCR clone 163608 (TRBV7-9, TRBJ2-7)
CASSFGSYEQYF

SEQ ID NO: 327217 - protein, 17 aa, Homo sapiens
  CDR3 for alpha chain variable domain of TCR clone 163609 (TRAV17, TRAJ52)
WATERPSGGTSYGKLTF

SEQ ID NO: 327218 - protein, 13 aa, Homo sapiens
  CDR3 for beta chain variable domain of TCR clone 163609 (TRBV6-4, TRBJ1-5)
CARSADLNQPQHF

SEQ ID NO: 327219 - protein, 13 aa, Homo sapiens
  CDR3 for alpha chain variable domain of TCR clone 163610 (TRAV21, TRAJ20)
CAVGLRVDYKLSF

SEQ ID NO: 327220 - protein, 12 aa, Homo sapiens
  CDR3 for beta chain variable domain of TCR clone 163610 (TRBV7-2, TRBJ2-5)
CASSQYQETQYF

SEQ ID NO: 327221 - protein, 15 aa, Homo sapiens
  CDR3 for alpha chain variable domain of TCR clone 163611 (TRAV2, TRAJ13)
CAVESGGYQKVTLEL

SEQ ID NO: 327222 - protein, 13 aa, Homo sapiens
  CDR3 for beta chain variable domain of TCR clone 163611 (TRBV28, TRBJ2-5)
CASSFAGGETQYF

SEQ ID NO: 327223 - protein, 14 aa, Homo sapiens
  CDR3 for alpha chain variable domain of TCR clone 163612 (TRAV26-1, TRAJ34)
CIVRVAYNTDKLIF

SEQ ID NO: 327224 - protein, 13 aa, Homo sapiens
  CDR3 for beta chain variable domain of TCR clone 163612 (TRBV24-1, TRBJ2-2)
CATSDWSTGELFF

SEQ ID NO: 327225 - protein, 21 aa, Homo sapiens
  CDR3 for alpha chain variable domain of TCR clone 163613 (TRAV3, TRAJ17)
CAVRARRGGRSCRQQANFCRR

SEQ ID NO: 327226 - protein, 15 aa, Homo sapiens
  CDR3 for beta chain variable domain of TCR clone 163613 (TRBV7-3, TRBJ2-1)
CASSLGQGPFGEQFF

SEQ ID NO: 327227 - protein, 14 aa, Homo sapiens
  CDR3 for alpha chain variable domain of TCR clone 163614 (TRAV8-4, TRAJ40)
CAVLSTSGTYKYIF

SEQ ID NO: 327228 - protein, 16 aa, Homo sapiens
  CDR3 for beta chain variable domain of TCR clone 163614 (TRBV19, TRBJ2-1)
CAWSVGGGSSYNEQFF

SEQ ID NO: 327229 - protein, 14 aa, Homo sapiens
  CDR3 for alpha chain variable domain of TCR clone 163615 (TRAV12-2, TRAJ15)
CAPHTGQAGTALIF

SEQ ID NO: 327230 - protein, 15 aa, Homo sapiens
  CDR3 for beta chain variable domain of TCR clone 163615 (TRBV10-3, TRBJ2-3)
CAISLTSGGTDTQYF

SEQ ID NO: 327231 - protein, 14 aa, Homo sapiens
  CDR3 for alpha chain variable domain of TCR clone 163616 (TRAV38-1, TRAJ40)
CALRPTPGTYKYIF

SEQ ID NO: 327232 - protein, 14 aa, Homo sapiens
  CDR3 for beta chain variable domain of TCR clone 163616 (TRBV25-1, TRBJ1-1)
CASTHLWGNTEAFF

SEQ ID NO: 327233 - protein, 11 aa, Homo sapiens
  CDR3 for alpha chain variable domain of TCR clone 163617 (TRAV30, TRAJ24)
WMLTAGGKFQF

SEQ ID NO: 327234 - protein, 14 aa, Homo sapiens
  CDR3 for beta chain variable domain of TCR clone 163617 (TRBV27, TRBJ2-2)
CASSLGAATGELFF

SEQ ID NO: 327235 - protein, 14 aa, Homo sapiens
  CDR3 for alpha chain variable domain of TCR clone 163618 (TRAV12-2, TRAJ13)
CAVKKTGGYQKVTF

SEQ ID NO: 327236 - protein, 14 aa, Homo sapiens
  CDR3 for beta chain variable domain of TCR clone 163618 (TRBV5-5, TRBJ2-7)
CASSLGQRTYEQYF

SEQ ID NO: 327237 - protein, 16 aa, Homo sapiens
  CDR3 for alpha chain variable domain of TCR clone 163619 (TRAV14/DV4, TRAJ53)
CAMREGGGGRNYKLTF

SEQ ID NO: 327238 - protein, 14 aa, Homo sapiens
  CDR3 for beta chain variable domain of TCR clone 163619 (TRBV27, TRBJ2-5)
CASSSLKGWETQYF

SEQ ID NO: 327239 - protein, 15 aa, Homo sapiens
  CDR3 for alpha chain variable domain of TCR clone 163620 (TRAV27, TRAJ39)
ASTSVQENAGNMLTF

SEQ ID NO: 327240 - protein, 13 aa, Homo sapiens
  CDR3 for beta chain variable domain of TCR clone 163620 (TRBV7-3, TRBJ1-1)
CASSQDWGAEAFF

SEQ ID NO: 327241 - protein, 14 aa, Homo sapiens
  CDR3 for alpha chain variable domain of TCR clone 163621 (TRAV13-1, TRAJ39)
CAASYNNAGNMLTF

SEQ ID NO: 327242 - protein, 13 aa, Homo sapiens
  CDR3 for beta chain variable domain of TCR clone 163621 (TRBV24-1, TRBJ1-4)
CATNNGRSDKLFF

SEQ ID NO: 327243 - protein, 12 aa, Homo sapiens
  CDR3 for alpha chain variable domain of TCR clone 163622 (TRAV20, TRAJ39)
CAVGNAGHMLTF

SEQ ID NO: 327244 - protein, 16 aa, Homo sapiens
  CDR3 for beta chain variable domain of TCR clone 163622 (TRBV15, TRBJ1-2)
CATSRGPRTGGGGYTF

SEQ ID NO: 327245 - protein, 16 aa, Homo sapiens
  CDR3 for alpha chain variable domain of TCR clone 163623 (TRAV14/DV4, TRAJ20)
CAMREGRSRDDYKLSF

SEQ ID NO: 327246 - protein, 13 aa, Homo sapiens
  CDR3 for beta chain variable domain of TCR clone 163623 (TRBV12-4, TRBJ1-1)
CASSPGTGFEAFF

SEQ ID NO: 327247 - protein, 18 aa, Homo sapiens
  CDR3 for alpha chain variable domain of TCR clone 163624 (TRAV12-3, TRAJ52)
CAMSVGGAGGTSYGKLTF

SEQ ID NO: 327248 - protein, 15 aa, Homo sapiens
  CDR3 for beta chain variable domain of TCR clone 163624 (TRBV5-1, TRBJ2-7)
CASSLNGGPAREQYF

SEQ ID NO: 327249 - protein, 16 aa, Homo sapiens
  CDR3 for alpha chain variable domain of TCR clone 163625 (TRAV12-3, TRAJ53)
CAMSPGSGGSDYKLTF

SEQ ID NO: 327250 - protein, 17 aa, Homo sapiens
  CDR3 for beta chain variable domain of TCR clone 163625 (TRBV28, TRBJ2-5)
CASSTPEGDALQETQYF

SEQ ID NO: 327251 - protein, 15 aa, Homo sapiens
  CDR3 for alpha chain variable domain of TCR clone 163626 (TRAV12-3, TRAJ11)
CAMSEENSGYSTLTF

SEQ ID NO: 327252 - protein, 16 aa, Homo sapiens
  CDR3 for beta chain variable domain of TCR clone 163626 (TRBV5-1, TRBJ2-7)
CASSLEGLAGLYEQCF

SEQ ID NO: 327253 - protein, 11 aa, Homo sapiens
  CDR3 for alpha chain variable domain of TCR clone 163627 (TRAV1-1, TRAJ23)
CAVRQGGKLLF

SEQ ID NO: 327254 - protein, 14 aa, Homo sapiens
  CDR3 for beta chain variable domain of TCR clone 163627 (TRBV7-9, TRBJ2-1)
CASSPRDSLYEQFF

SEQ ID NO: 327255 - protein, 13 aa, Homo sapiens
  CDR3 for alpha chain variable domain of TCR clone 163628 (TRAV35, TRAJ42)
CAGFPGSQGNLIF

SEQ ID NO: 327256 - protein, 14 aa, Homo sapiens
  CDR3 for beta chain variable domain of TCR clone 163628 (TRBV9, TRBJ2-5)
CASSVVPYQETQYF

SEQ ID NO: 327257 - protein, 13 aa, Homo sapiens
  CDR3 for alpha chain variable domain of TCR clone 163629 (TRAV26-1, )
CIVSHRVEGFWNQ

SEQ ID NO: 327258 - protein, 14 aa, Homo sapiens
  CDR3 for beta chain variable domain of TCR clone 163629 (TRBV12-4, TRBJ1-1)
CASSLGTGGTEAFF

SEQ ID NO: 327259 - protein, 14 aa, Homo sapiens
  CDR3 for alpha chain variable domain of TCR clone 163630 (TRAV8-6, TRAJ49)
CAVSVRYNGNQFYF

SEQ ID NO: 327260 - protein, 19 aa, Homo sapiens
  CDR3 for beta chain variable domain of TCR clone 163630 (TRBV28, TRBJ2-1)
CASSFSIRGSGRTRYEQFF

SEQ ID NO: 327261 - protein, 13 aa, Homo sapiens
  CDR3 for alpha chain variable domain of TCR clone 163631 (TRAV21, TRAJ11)
CAVQNSGYSTLTF

SEQ ID NO: 327262 - protein, 13 aa, Homo sapiens
  CDR3 for beta chain variable domain of TCR clone 163631 (TRBV3-1, TRBJ2-7)
CASSLRDVYEQYF

SEQ ID NO: 327263 - protein, 13 aa, Homo sapiens
  CDR3 for alpha chain variable domain of TCR clone 163632 (TRAV12-2, TRAJ54)
CAVNRRGAQKLVF

SEQ ID NO: 327264 - protein, 16 aa, Homo sapiens
  CDR3 for beta chain variable domain of TCR clone 163632 (TRBV12-5, TRBJ2-5)
CASGPRTSGNQETQYF

SEQ ID NO: 327265 - protein, 13 aa, Homo sapiens
  CDR3 for alpha chain variable domain of TCR clone 163633 (TRAV3, TRAJ21)
CAVREPDFNKFYF

SEQ ID NO: 327266 - protein, 16 aa, Homo sapiens
  CDR3 for beta chain variable domain of TCR clone 163633 (TRBV4-2, TRBJ1-1)
CASSQAGFGMNTEAFF

SEQ ID NO: 327267 - protein, 14 aa, Homo sapiens
  CDR3 for alpha chain variable domain of TCR clone 163634 (TRAV12-2, TRAJ24)
CAVTPADSWGKLQF

SEQ ID NO: 327268 - protein, 15 aa, Homo sapiens
  CDR3 for beta chain variable domain of TCR clone 163634 (TRBV7-2, TRBJ2-1)
CASRKTGSSYNEQFF

SEQ ID NO: 327269 - protein, 15 aa, Homo sapiens
  CDR3 for alpha chain variable domain of TCR clone 163635 (TRAV17, TRAJ57)
CATCPSQGGSEKLVF

SEQ ID NO: 327270 - protein, 13 aa, Homo sapiens
  CDR3 for beta chain variable domain of TCR clone 163635 (TRBV12-4, TRBJ1-2)
CASSLRQGKGYTF

SEQ ID NO: 327271 - protein, 14 aa, Homo sapiens
  CDR3 for alpha chain variable domain of TCR clone 163636 (TRAV26-1, TRAJ38)
CIADNAGNNRRLIW

SEQ ID NO: 327272 - protein, 15 aa, Homo sapiens
  CDR3 for beta chain variable domain of TCR clone 163636 (TRBV12-4, TRBJ2-5)
CASSPPTGLQETQYF

SEQ ID NO: 327273 - protein, 12 aa, Homo sapiens
  CDR3 for alpha chain variable domain of TCR clone 163637 (TRAV3, TRAJ20)
CAVRDGDYKLSF

SEQ ID NO: 327274 - protein, 14 aa, Homo sapiens
  CDR3 for beta chain variable domain of TCR clone 163637 (TRBV4-1, TRBJ2-2)
CASSQAVNTGELFF

SEQ ID NO: 327275 - protein, 17 aa, Homo sapiens
  CDR3 for alpha chain variable domain of TCR clone 163638 (TRAV8-6, TRAJ8)
CAVKEGIENTGFQKLVF

SEQ ID NO: 327276 - protein, 13 aa, Homo sapiens
  CDR3 for beta chain variable domain of TCR clone 163638 (TRBV19, TRBJ1-2)
CASSVPGQDGYTF

SEQ ID NO: 327277 - protein, 15 aa, Homo sapiens
  CDR3 for alpha chain variable domain of TCR clone 163639 (TRAV12-3, TRAJ6)
CAMSATSGGSYIPTF

SEQ ID NO: 327278 - protein, 15 aa, Homo sapiens
  CDR3 for beta chain variable domain of TCR clone 163639 (TRBV7-9, TRBJ1-6)
CASSSPGRGNSPLHF

SEQ ID NO: 327279 - protein, 11 aa, Homo sapiens
  CDR3 for alpha chain variable domain of TCR clone 163640 (TRAV8-6, TRAJ43)
CAVSEKMVFGA

SEQ ID NO: 327280 - protein, 14 aa, Homo sapiens
  CDR3 for beta chain variable domain of TCR clone 163640 (TRBV20-1, TRBJ1-1)
CSAQTRIGGTEAFF

SEQ ID NO: 327281 - protein, 12 aa, Homo sapiens
  CDR3 for alpha chain variable domain of TCR clone 163641 (TRAV13-1, TRAJ48)
CAARVGGEKLTF

SEQ ID NO: 327282 - protein, 14 aa, Homo sapiens
  CDR3 for beta chain variable domain of TCR clone 163641 (TRBV7-3, TRBJ2-1)
CASSLSGSYNEPVF

SEQ ID NO: 327283 - protein, 12 aa, Homo sapiens
  CDR3 for alpha chain variable domain of TCR clone 163642 (TRAV17, TRAJ12)
CATLRSSYKLIF

SEQ ID NO: 327284 - protein, 11 aa, Homo sapiens
  CDR3 for beta chain variable domain of TCR clone 163642 (TRBV20-1, TRBJ2-1)
CSLSSGSEQFF

SEQ ID NO: 327285 - protein, 12 aa, Homo sapiens
  CDR3 for alpha chain variable domain of TCR clone 163643 (TRAV21, TRAJ49)
CAVNDRGNQFYF

SEQ ID NO: 327286 - protein, 14 aa, Homo sapiens
  CDR3 for beta chain variable domain of TCR clone 163643 (TRBV18, TRBJ2-7)
CASSPRGGSYEQYF

SEQ ID NO: 327287 - protein, 12 aa, Homo sapiens
  CDR3 for alpha chain variable domain of TCR clone 163644 (TRAV1-1, TRAJ39)
CAVPVVGNMLTF

SEQ ID NO: 327288 - protein, 12 aa, Homo sapiens
  CDR3 for beta chain variable domain of TCR clone 163644 (TRBV7-9, TRBJ2-7)
CASSLEGYEQYF

SEQ ID NO: 327289 - protein, 14 aa, Homo sapiens
  CDR3 for alpha chain variable domain of TCR clone 163645 (TRAV1-2, TRAJ16)
GAVNRFSDGQKLLF

SEQ ID NO: 327290 - protein, 18 aa, Homo sapiens
  CDR3 for beta chain variable domain of TCR clone 163645 (TRBV20-1, TRBJ2-6)
CSAETTPTHGSGANVLTF

SEQ ID NO: 327291 - protein, 14 aa, Homo sapiens
  CDR3 for alpha chain variable domain of TCR clone 163646 (TRAV13-1, TRAJ35)
CAASKGGFGNVLHC

SEQ ID NO: 327292 - protein, 16 aa, Homo sapiens
  CDR3 for beta chain variable domain of TCR clone 163646 (TRBV2, TRBJ2-3)
SQHRGAPRRWTDTQYF

SEQ ID NO: 327293 - protein, 15 aa, Homo sapiens
  CDR3 for alpha chain variable domain of TCR clone 163647 (TRAV20, TRAJ50)
CAVRQMKTSYDKVIF

SEQ ID NO: 327294 - protein, 15 aa, Homo sapiens
  CDR3 for beta chain variable domain of TCR clone 163647 (TRBV9, TRBJ1-6)
CASSVAGTGDSPLHF

SEQ ID NO: 327295 - protein, 15 aa, Homo sapiens
  CDR3 for alpha chain variable domain of TCR clone 163648 (TRAV17, TRAJ13)
CATDAGSGGYQKVTF

SEQ ID NO: 327296 - protein, 16 aa, Homo sapiens
  CDR3 for beta chain variable domain of TCR clone 163648 (TRBV11-2, TRBJ2-1)
CQQLTPPGVEYNEQFF

SEQ ID NO: 327297 - protein, 18 aa, Homo sapiens
  CDR3 for alpha chain variable domain of TCR clone 163649 (TRAV21, TRAJ52)
CAVRPSPAGGTSYGKLTF

SEQ ID NO: 327298 - protein, 13 aa, Homo sapiens
  CDR3 for beta chain variable domain of TCR clone 163649 (TRBV2, TRBJ1-5)
CATAGPGNQHQHF

SEQ ID NO: 327299 - protein, 16 aa, Homo sapiens
  CDR3 for alpha chain variable domain of TCR clone 163650 (TRAV29/DV5, TRAJ36)
CAASAHYQSGANNLYF

SEQ ID NO: 327300 - protein, 16 aa, Homo sapiens
  CDR3 for beta chain variable domain of TCR clone 163650 (TRBV4-2, TRBJ2-3)
CASSQELAGDTDTQYF

SEQ ID NO: 327301 - protein, 14 aa, Homo sapiens
  CDR3 for alpha chain variable domain of TCR clone 163651 (TRAV13-1, TRAJ40)
CAASMTSGTYKYMF

SEQ ID NO: 327302 - protein, 13 aa, Homo sapiens
  CDR3 for beta chain variable domain of TCR clone 163651 (TRBV7-2, TRBJ1-1)
CASSRNTNTEAFF

SEQ ID NO: 327303 - protein, 12 aa, Homo sapiens
  CDR3 for alpha chain variable domain of TCR clone 163652 (TRAV12-3, TRAJ17)
CAMTLTGNKLTF

SEQ ID NO: 327304 - protein, 12 aa, Homo sapiens
  CDR3 for beta chain variable domain of TCR clone 163652 (TRBV19, TRBJ1-2)
CASSPDVYGYTF

SEQ ID NO: 327305 - protein, 14 aa, Homo sapiens
  CDR3 for alpha chain variable domain of TCR clone 163653 (TRAV38-1, TRAJ29)
CAFMTPSGNTPLVF

SEQ ID NO: 327306 - protein, 14 aa, Homo sapiens
  CDR3 for beta chain variable domain of TCR clone 163653 (TRBV18, TRBJ2-7)
CASSPRGGAYEQYF

SEQ ID NO: 327307 - protein, 14 aa, Homo sapiens
  CDR3 for alpha chain variable domain of TCR clone 163654 (TRAV1-2, TRAJ16)
CAVNRFSDGQKLLF

SEQ ID NO: 327308 - protein, 15 aa, Homo sapiens
  CDR3 for beta chain variable domain of TCR clone 163654 (TRBV7-9, TRBJ1-6)
CASSSPGRGNTPLLF

SEQ ID NO: 327309 - protein, 14 aa, Homo sapiens
  CDR3 for alpha chain variable domain of TCR clone 163655 (TRAV16, TRAJ33)
CALSAMDSNYQLIW

SEQ ID NO: 327310 - protein, 13 aa, Homo sapiens
  CDR3 for beta chain variable domain of TCR clone 163655 (TRBV12-4, TRBJ2-5)
CASSLGGSRTQYF

SEQ ID NO: 327311 - protein, 12 aa, Homo sapiens
  CDR3 for alpha chain variable domain of TCR clone 163656 (TRAV12-2, TRAJ10)
WGVTGGGNKLTF

SEQ ID NO: 327312 - protein, 15 aa, Homo sapiens
  CDR3 for beta chain variable domain of TCR clone 163656 (TRBV18, TRBJ1-1)
CASSPRQGENTEAFF

SEQ ID NO: 327313 - protein, 13 aa, Homo sapiens
  CDR3 for alpha chain variable domain of TCR clone 163657 (TRAV17, TRAJ33)
CATAADSNYQLIW

SEQ ID NO: 327314 - protein, 12 aa, Homo sapiens
  CDR3 for beta chain variable domain of TCR clone 163657 (TRBV19, TRBJ1-5)
CASSIAQQPQHF

SEQ ID NO: 327315 - protein, 14 aa, Homo sapiens
  CDR3 for alpha chain variable domain of TCR clone 163658 (TRAV17, TRAJ31)
CATVLRNNNARLMF

SEQ ID NO: 327316 - protein, 14 aa, Homo sapiens
  CDR3 for beta chain variable domain of TCR clone 163658 (TRBV12-4, TRBJ2-5)
CPSSLWQKQETQYF

SEQ ID NO: 327317 - protein, 16 aa, Homo sapiens
  CDR3 for alpha chain variable domain of TCR clone 163659 (TRAV17, TRAJ35)
CATAEGGIGFGNVLHC

SEQ ID NO: 327318 - protein, 13 aa, Homo sapiens
  CDR3 for beta chain variable domain of TCR clone 163659 (TRBV4-1, TRBJ2-2)
CASSQENTGELFF

SEQ ID NO: 327319 - protein, 15 aa, Homo sapiens
  CDR3 for alpha chain variable domain of TCR clone 163660 (TRAV3, TRAJ7)
CAVRDKDNGNNRLAF

SEQ ID NO: 327320 - protein, 14 aa, Homo sapiens
  CDR3 for beta chain variable domain of TCR clone 163660 (TRBV28, TRBJ1-2)
CASRIQGANYGYTF

SEQ ID NO: 327321 - protein, 15 aa, Homo sapiens
  CDR3 for alpha chain variable domain of TCR clone 163661 (TRAV8-3, TRAJ32)
CAVDLYGGATNKLIF

SEQ ID NO: 327322 - protein, 12 aa, Homo sapiens
  CDR3 for beta chain variable domain of TCR clone 163661 (TRBV11-2, TRBJ2-2)
CASSLGGGELFF

SEQ ID NO: 327323 - protein, 13 aa, Homo sapiens
  CDR3 for alpha chain variable domain of TCR clone 163662 (TRAV8-3, TRAJ48)
CAVVRFGNEKLTF

SEQ ID NO: 327324 - protein, 16 aa, Homo sapiens
  CDR3 for beta chain variable domain of TCR clone 163662 (TRBV20-1, TRBJ2-5)
CSARDCASGIQETQYF

SEQ ID NO: 327325 - protein, 14 aa, Homo sapiens
  CDR3 for alpha chain variable domain of TCR clone 163663 (TRAV12-1, TRAJ27)
CGEHIRTNAGKSTF

SEQ ID NO: 327326 - protein, 15 aa, Homo sapiens
  CDR3 for beta chain variable domain of TCR clone 163663 (TRBV28, TRBJ2-1)
CASSIIAGGRSEQFF

SEQ ID NO: 327327 - protein, 18 aa, Homo sapiens
  CDR3 for alpha chain variable domain of TCR clone 163664 (TRAV12-3, TRAJ52)
CAMSRTNAGGTSYGKLTF

SEQ ID NO: 327328 - protein, 17 aa, Homo sapiens
  CDR3 for beta chain variable domain of TCR clone 163664 (TRBV7-3, TRBJ2-3)
CASSLMKRMRGADRQYF

SEQ ID NO: 327329 - protein, 15 aa, Homo sapiens
  CDR3 for alpha chain variable domain of TCR clone 163665 (TRAV16, TRAJ10)
CALREFTGGGNKLTF

SEQ ID NO: 327330 - protein, 14 aa, Homo sapiens
  CDR3 for beta chain variable domain of TCR clone 163665 (TRBV5-5, TRBJ2-7)
CASSLGQGTYEQYF

SEQ ID NO: 327331 - protein, 14 aa, Homo sapiens
  CDR3 for alpha chain variable domain of TCR clone 163666 (TRAV12-1, TRAJ6)
CVVKRSGGSYIPTF

SEQ ID NO: 327332 - protein, 15 aa, Homo sapiens
  CDR3 for beta chain variable domain of TCR clone 163666 (TRBV7-2, TRBJ2-3)
CASSLAGAFIDTQYF

SEQ ID NO: 327333 - protein, 15 aa, Homo sapiens
  CDR3 for alpha chain variable domain of TCR clone 163667 (TRAV2, TRAJ27)
CAVDSITPMQANQPL

SEQ ID NO: 327334 - protein, 13 aa, Homo sapiens
  CDR3 for beta chain variable domain of TCR clone 163667 (TRBV4-1, TRBJ1-1)
CASSRKMNTEAFF

SEQ ID NO: 327335 - protein, 10 aa, Homo sapiens
  CDR3 for alpha chain variable domain of TCR clone 163668 (TRAV12-3, TRAJ18)
CAMSEEAQPW

SEQ ID NO: 327336 - protein, 15 aa, Homo sapiens
  CDR3 for beta chain variable domain of TCR clone 163668 (TRBV4-1, TRBJ1-4)
CASSDTGGTNEKLFF

SEQ ID NO: 327337 - protein, 18 aa, Homo sapiens
  CDR3 for alpha chain variable domain of TCR clone 163669 (TRAV26-1, TRAJ5)
CIVRVVPPRDTGRRALTF

SEQ ID NO: 327338 - protein, 14 aa, Homo sapiens
  CDR3 for beta chain variable domain of TCR clone 163669 (TRBV7-3, TRBJ2-1)
CASSALAGGPEQFF

SEQ ID NO: 327339 - protein, 13 aa, Homo sapiens
  CDR3 for alpha chain variable domain of TCR clone 163670 (TRAV38-1, TRAJ42)
CARWGGSQGNLIF

SEQ ID NO: 327340 - protein, 16 aa, Homo sapiens
  CDR3 for beta chain variable domain of TCR clone 163670 (TRBV4-2, TRBJ2-3)
CASSQEVAGDTDTQYF

SEQ ID NO: 327341 - protein, 13 aa, Homo sapiens
  CDR3 for alpha chain variable domain of TCR clone 163671 (TRAV8-6, TRAJ49)
CAVITNTGNQFYF

SEQ ID NO: 327342 - protein, 14 aa, Homo sapiens
  CDR3 for beta chain variable domain of TCR clone 163671 (TRBV5-1, TRBJ2-7)
CASSRGGSLYEQYL

SEQ ID NO: 327343 - protein, 13 aa, Homo sapiens
  CDR3 for alpha chain variable domain of TCR clone 163672 (TRAV20, TRAJ34)
CAVRSYNTYKLIF

SEQ ID NO: 327344 - protein, 13 aa, Homo sapiens
  CDR3 for beta chain variable domain of TCR clone 163672 (TRBV7-9, TRBJ1-1)
CASSLSGETEAFF

SEQ ID NO: 327345 - protein, 15 aa, Homo sapiens
  CDR3 for alpha chain variable domain of TCR clone 163673 (TRAV3, TRAJ22)
CAVRDRGGSARQLTF

SEQ ID NO: 327346 - protein, 14 aa, Homo sapiens
  CDR3 for beta chain variable domain of TCR clone 163673 (TRBV28, TRBJ1-5)
CASSGQALYQPQHF

SEQ ID NO: 327347 - protein, 13 aa, Homo sapiens
  CDR3 for alpha chain variable domain of TCR clone 163674 (TRAV20, TRAJ48)
CAVQGVGNDKLTF

SEQ ID NO: 327348 - protein, 19 aa, Homo sapiens
  CDR3 for beta chain variable domain of TCR clone 163674 (TRBV2, TRBJ2-2)
CASSQPGLAGGGNTGELFF

SEQ ID NO: 327349 - protein, 14 aa, Homo sapiens
  CDR3 for alpha chain variable domain of TCR clone 163675 (TRAV12-3, TRAJ35)
CAMSLIGFGNVLHC

SEQ ID NO: 327350 - protein, 16 aa, Homo sapiens
  CDR3 for beta chain variable domain of TCR clone 163675 (TRBV7-3, TRBJ2-2)
CASSLKRGTLSGELFF

SEQ ID NO: 327351 - protein, 11 aa, Homo sapiens
  CDR3 for alpha chain variable domain of TCR clone 163676 (TRAV13-1, TRAJ8)
CAARGFKKLVF

SEQ ID NO: 327352 - protein, 16 aa, Homo sapiens
  CDR3 for beta chain variable domain of TCR clone 163676 (TRBV19, TRBJ1-5)
CASSTRGTRSNQPQHF

SEQ ID NO: 327353 - protein, 16 aa, Homo sapiens
  CDR3 for alpha chain variable domain of TCR clone 163677 (TRAV8-2, TRAJ48)
CVVSDVSNFGNEKLTF

SEQ ID NO: 327354 - protein, 15 aa, Homo sapiens
  CDR3 for beta chain variable domain of TCR clone 163677 (TRBV7-3, TRBJ2-1)
CASSPTGGGEVEQFF

SEQ ID NO: 327355 - protein, 13 aa, Homo sapiens
  CDR3 for alpha chain variable domain of TCR clone 163678 (TRAV21, TRAJ57)
CAVTQGGSGKLVF

SEQ ID NO: 327356 - protein, 13 aa, Homo sapiens
  CDR3 for beta chain variable domain of TCR clone 163678 (TRBV11-2, TRBJ2-5)
CASLPSGRETQYF

SEQ ID NO: 327357 - protein, 14 aa, Homo sapiens
  CDR3 for alpha chain variable domain of TCR clone 163679 (TRAV8-4, TRAJ54)
CAVSEVLGAQKLVF

SEQ ID NO: 327358 - protein, 13 aa, Homo sapiens
  CDR3 for beta chain variable domain of TCR clone 163679 (TRBV10-2, TRBJ2-7)
CASGASGGYEQYF

SEQ ID NO: 327359 - protein, 12 aa, Homo sapiens
  CDR3 for alpha chain variable domain of TCR clone 163680 (TRAV17, TRAJ48)
CALNFGNAKLTF

SEQ ID NO: 327360 - protein, 13 aa, Homo sapiens
  CDR3 for beta chain variable domain of TCR clone 163680 (TRBV6-5, TRBJ2-5)
CASSSPGGETQYF

SEQ ID NO: 327361 - protein, 17 aa, Homo sapiens
  CDR3 for alpha chain variable domain of TCR clone 163681 (TRAV38-1, TRAJ45)
CAFMKHYMGGGADGLTF

SEQ ID NO: 327362 - protein, 13 aa, Homo sapiens
  CDR3 for beta chain variable domain of TCR clone 163681 (TRBV2, TRBJ1-4)
CASSERAGENLFF

SEQ ID NO: 327363 - protein, 16 aa, Homo sapiens
  CDR3 for alpha chain variable domain of TCR clone 163682 (TRAV30, TRAJ24)
CGTEIVDADSWGKFQF

SEQ ID NO: 327364 - protein, 17 aa, Homo sapiens
  CDR3 for beta chain variable domain of TCR clone 163682 (TRBV20-1, TRBJ2-1)
CSARDRRRASSYDEQFF

SEQ ID NO: 327365 - protein, 15 aa, Homo sapiens
  CDR3 for alpha chain variable domain of TCR clone 163683 (TRAV35, TRAJ58)
CAGRRQETSGSRLTF

SEQ ID NO: 327366 - protein, 11 aa, Homo sapiens
  CDR3 for beta chain variable domain of TCR clone 163683 (TRBV11-2, TRBJ1-1)
CASSIDTEAFF

SEQ ID NO: 327367 - protein, 14 aa, Homo sapiens
  CDR3 for alpha chain variable domain of TCR clone 163684 (TRAV12-2, TRAJ40)
CAVKIPSGTYKYIF

SEQ ID NO: 327368 - protein, 15 aa, Homo sapiens
  CDR3 for beta chain variable domain of TCR clone 163684 (TRBV19, TRBJ2-1)
CASSIVRGEGREQFF

SEQ ID NO: 327369 - protein, 13 aa, Homo sapiens
  CDR3 for alpha chain variable domain of TCR clone 163685 (TRAV8-1, TRAJ13)
CAMSKGGYQKVTL

SEQ ID NO: 327370 - protein, 18 aa, Homo sapiens
  CDR3 for beta chain variable domain of TCR clone 163685 (TRBV11-2, TRBJ2-7)
CASSWRTVQTGQSYEQYF

SEQ ID NO: 327371 - protein, 14 aa, Homo sapiens
  CDR3 for alpha chain variable domain of TCR clone 163686 (TRAV17, TRAJ57)
CATDPQGGSEKLVF

SEQ ID NO: 327372 - protein, 13 aa, Homo sapiens
  CDR3 for beta chain variable domain of TCR clone 163686 (TRBV10-3, TRBJ2-7)
CAIRAGGPHEQYF

SEQ ID NO: 327373 - protein, 12 aa, Homo sapiens
  CDR3 for alpha chain variable domain of TCR clone 163687 (TRAV2, TRAJ33)
CAVEDSNYQLIW

SEQ ID NO: 327374 - protein, 14 aa, Homo sapiens
  CDR3 for beta chain variable domain of TCR clone 163687 (TRBV19, IGHJ2)
CASSINRGGEKLFF

SEQ ID NO: 327375 - protein, 13 aa, Homo sapiens
  CDR3 for alpha chain variable domain of TCR clone 163688 (TRAV12-3, TRAJ43)
CAMIRPNNNDMRF

SEQ ID NO: 327376 - protein, 13 aa, Homo sapiens
  CDR3 for beta chain variable domain of TCR clone 163688 (TRBV10-3, TRBJ2-7)
CASKLAVNYEQYF

SEQ ID NO: 327377 - protein, 13 aa, Homo sapiens
  CDR3 for alpha chain variable domain of TCR clone 163689 (TRAV12-2, TRAJ10)
CAVPTGGGNKLTF

SEQ ID NO: 327378 - protein, 13 aa, Homo sapiens
  CDR3 for beta chain variable domain of TCR clone 163689 (TRBV19, TRBJ1-2)
CASSQGQVYGYTF

SEQ ID NO: 327379 - protein, 12 aa, Homo sapiens
  CDR3 for alpha chain variable domain of TCR clone 163690 (TRAV27, TRAJ34)
CAEPYNTDKLIF

SEQ ID NO: 327380 - protein, 16 aa, Homo sapiens
  CDR3 for beta chain variable domain of TCR clone 163690 (TRBV12-4, TRBJ2-5)
CASSFFVRGRQETQYF

SEQ ID NO: 327381 - protein, 19 aa, Homo sapiens
  CDR3 for alpha chain variable domain of TCR clone 163691 (TRAV26-1, TRAJ22)
CCVLLHRWVFSGSAMQLTF

SEQ ID NO: 327382 - protein, 19 aa, Homo sapiens
  CDR3 for beta chain variable domain of TCR clone 163691 (TRBV19, TRBJ2-5)
CASSIGQVTDFFLGETQYF

SEQ ID NO: 327383 - protein, 15 aa, Homo sapiens
  CDR3 for alpha chain variable domain of TCR clone 163692 (TRAV21, TRAJ52)
CAVRGGGTSYGKLTF

SEQ ID NO: 327384 - protein, 17 aa, Homo sapiens
  CDR3 for beta chain variable domain of TCR clone 163692 (TRBV11-2, TRBJ2-1)
CASSLYPPGVEYNEQFF

SEQ ID NO: 327385 - protein, 15 aa, Homo sapiens
  CDR3 for alpha chain variable domain of TCR clone 163693 (TRAV12-3, TRAJ6)
CAMSATTGGSYIPTF

SEQ ID NO: 327386 - protein, 13 aa, Homo sapiens
  CDR3 for beta chain variable domain of TCR clone 163693 (TRBV7-7, TRBJ2-2)
CASSLTSAGELFF

SEQ ID NO: 327387 - protein, 13 aa, Homo sapiens
  CDR3 for alpha chain variable domain of TCR clone 163694 (TRAV17, TRAJ54)
CATSWGGAQKLVF

SEQ ID NO: 327388 - protein, 14 aa, Homo sapiens
  CDR3 for beta chain variable domain of TCR clone 163694 (TRBV19, TRBJ2-1)
CASPTLVLSGEQFF

SEQ ID NO: 327389 - protein, 14 aa, Homo sapiens
  CDR3 for alpha chain variable domain of TCR clone 163695 (TRAV12-2, TRAJ13)
CAVKKTGGYQKVTF

SEQ ID NO: 327390 - protein, 15 aa, Homo sapiens
  CDR3 for beta chain variable domain of TCR clone 163695 (TRBV27, TRBJ2-1)
CTSSNGGGTSNEQFF

SEQ ID NO: 327391 - protein, 11 aa, Homo sapiens
  CDR3 for alpha chain variable domain of TCR clone 163696 (TRAV4, TRAJ23)
CLVAPGGKLSF

SEQ ID NO: 327392 - protein, 13 aa, Homo sapiens
  CDR3 for beta chain variable domain of TCR clone 163696 (TRBV7-9, TRBJ1-2)
CASSLKQNYGYTF

SEQ ID NO: 327393 - protein, 10 aa, Homo sapiens
  CDR3 for alpha chain variable domain of TCR clone 163697 (TRAV1-2, TRAJ20)
CALNEYKLSF

SEQ ID NO: 327394 - protein, 16 aa, Homo sapiens
  CDR3 for beta chain variable domain of TCR clone 163697 (TRBV20-1, TRBJ1-1)
CSARALTQGMNTEAFF

SEQ ID NO: 327395 - protein, 17 aa, Homo sapiens
  CDR3 for alpha chain variable domain of TCR clone 163698 (TRAV3, TRAJ6)
CAVRDGPRAGGSYIPTF

SEQ ID NO: 327396 - protein, 18 aa, Homo sapiens
  CDR3 for beta chain variable domain of TCR clone 163698 (TRBV7-9, TRBJ2-7)
CASSITTSGSRTWYEQYF

SEQ ID NO: 327397 - protein, 15 aa, Homo sapiens
  CDR3 for alpha chain variable domain of TCR clone 163699 (TRAV17, TRAJ3)
CATDGPHSSASKIGF

SEQ ID NO: 327398 - protein, 14 aa, Homo sapiens
  CDR3 for beta chain variable domain of TCR clone 163699 (TRBV4-3, TRBJ1-4)
CASSQQPVGEKLFF

SEQ ID NO: 327399 - protein, 16 aa, Homo sapiens
  CDR3 for alpha chain variable domain of TCR clone 163700 (TRAV16, TRAJ4)
CALSRMFSGGYNKLIF

SEQ ID NO: 327400 - protein, 16 aa, Homo sapiens
  CDR3 for beta chain variable domain of TCR clone 163700 (TRBV19, TRBJ2-2)
CAGRSPGTGATGELFF

SEQ ID NO: 327401 - protein, 13 aa, Homo sapiens
  CDR3 for alpha chain variable domain of TCR clone 163701 (TRAV13-1, TRAJ24)
CAASDGSWGKLQF

SEQ ID NO: 327402 - protein, 13 aa, Homo sapiens
  CDR3 for beta chain variable domain of TCR clone 163701 (TRBV4-3, TRBJ2-5)
CARSQGGGETQYF

SEQ ID NO: 327403 - protein, 15 aa, Homo sapiens
  CDR3 for alpha chain variable domain of TCR clone 163702 (TRAV12-3, TRAJ11)
CAMSEENSGYSTLTF

SEQ ID NO: 327404 - protein, 12 aa, Homo sapiens
  CDR3 for beta chain variable domain of TCR clone 163702 (TRBV12-4, TRBJ2-7)
CASSLGGYEQYF

SEQ ID NO: 327405 - protein, 15 aa, Homo sapiens
  CDR3 for alpha chain variable domain of TCR clone 163703 (TRAV3, TRAJ22)
CAVRDRGGSARQLTF

SEQ ID NO: 327406 - protein, 14 aa, Homo sapiens
  CDR3 for beta chain variable domain of TCR clone 163703 (TRBV7-9, TRBJ2-1)
CASSSMVGFGEQFF

SEQ ID NO: 327407 - protein, 14 aa, Homo sapiens
  CDR3 for alpha chain variable domain of TCR clone 163704 (TRAV1-2, TRAJ16)
CAVNRFSDGQKMLF

SEQ ID NO: 327408 - protein, 13 aa, Homo sapiens
  CDR3 for beta chain variable domain of TCR clone 163704 (TRBV20-1, TRBJ1-1)
CSARLGQGTEAFF

SEQ ID NO: 327409 - protein, 17 aa, Homo sapiens
  CDR3 for alpha chain variable domain of TCR clone 163705 (TRAV3, TRAJ28)
CAVREAYSGAGSYQLTF

SEQ ID NO: 327410 - protein, 14 aa, Homo sapiens
  CDR3 for beta chain variable domain of TCR clone 163705 (TRBV7-2, TRBJ2-7)
CASSLYPGRYEQYF

SEQ ID NO: 327411 - protein, 17 aa, Homo sapiens
  CDR3 for alpha chain variable domain of TCR clone 163706 (TRAV3, TRAJ38)
CAVRDCLNAGDNRKLIW

SEQ ID NO: 327412 - protein, 14 aa, Homo sapiens
  CDR3 for beta chain variable domain of TCR clone 163706 (TRBV11-3, TRBJ2-7)
CASSPDRNTYEQYF

SEQ ID NO: 327413 - protein, 16 aa, Homo sapiens
  CDR3 for alpha chain variable domain of TCR clone 163707 (TRAV26-1, TRAJ31)
CIVRPPVLNNNARLMF

SEQ ID NO: 327414 - protein, 15 aa, Homo sapiens
  CDR3 for beta chain variable domain of TCR clone 163707 (TRBV6-3, TRBJ2-7)
CASSSPGTVFYEQYF

SEQ ID NO: 327415 - protein, 12 aa, Homo sapiens
  CDR3 for alpha chain variable domain of TCR clone 163708 (TRAV1-1, TRAJ8)
CAGGTGFQKLVF

SEQ ID NO: 327416 - protein, 18 aa, Homo sapiens
  CDR3 for beta chain variable domain of TCR clone 163708 (TRBV7-2, TRBJ2-3)
CASSLKREGSGITDTQYF

SEQ ID NO: 327417 - protein, 15 aa, Homo sapiens
  CDR3 for alpha chain variable domain of TCR clone 163709 (TRAV38-1, TRAJ57)
CAFMDSQGGSEKPVF

SEQ ID NO: 327418 - protein, 16 aa, Homo sapiens
  CDR3 for beta chain variable domain of TCR clone 163709 (TRBV10-3, TRBJ2-1)
CAIRGGGRGDYNEQFF

SEQ ID NO: 327419 - protein, 14 aa, Homo sapiens
  CDR3 for alpha chain variable domain of TCR clone 163710 (TRAV8-3, TRAJ4)
CAVGAASGYNKLIF

SEQ ID NO: 327420 - protein, 14 aa, Homo sapiens
  CDR3 for beta chain variable domain of TCR clone 163710 (TRBV10-2, TRBJ1-5)
CASSSTGRNQPQHF

SEQ ID NO: 327421 - protein, 13 aa, Homo sapiens
  CDR3 for alpha chain variable domain of TCR clone 163711 (TRAV12-3, TRAJ53)
CAMRGGSNYKLTF

SEQ ID NO: 327422 - protein, 15 aa, Homo sapiens
  CDR3 for beta chain variable domain of TCR clone 163711 (TRBV10-3, TRBJ1-2)
CAISEPTSRGYGYTF

SEQ ID NO: 327423 - protein, 17 aa, Homo sapiens
  CDR3 for alpha chain variable domain of TCR clone 163712 (TRAV2, TRAJ22)
ILQVREADAAEHRQLTF

SEQ ID NO: 327424 - protein, 16 aa, Homo sapiens
  CDR3 for beta chain variable domain of TCR clone 163712 (TRBV2, TRBJ2-5)
CASSETQGVGEETQYF

SEQ ID NO: 327425 - protein, 12 aa, Homo sapiens
  CDR3 for alpha chain variable domain of TCR clone 163713 (TRAV12-3, TRAJ42)
CAPGGSQGNLIF

SEQ ID NO: 327426 - protein, 18 aa, Homo sapiens
  CDR3 for beta chain variable domain of TCR clone 163713 (TRBV4-1, TRBJ1-5)
CASSQDPRGQGLNQPQHF

SEQ ID NO: 327427 - protein, 14 aa, Homo sapiens
  CDR3 for alpha chain variable domain of TCR clone 163714 (TRAV12-2, TRAJ13)
CAAKQTGGYQNVTF

SEQ ID NO: 327428 - protein, 15 aa, Homo sapiens
  CDR3 for beta chain variable domain of TCR clone 163714 (TRBV27, TRBJ2-1)
CASSNGGGSSNEQFF

SEQ ID NO: 327429 - protein, 14 aa, Homo sapiens
  CDR3 for alpha chain variable domain of TCR clone 163715 (TRAV1-2, TRAJ16)
CAVNRFSDGQKLLV

SEQ ID NO: 327430 - protein, 15 aa, Homo sapiens
  CDR3 for beta chain variable domain of TCR clone 163715 (TRBV20-1, TRBJ2-1)
CSARGIGGTYNEQFF

SEQ ID NO: 327431 - protein, 15 aa, Homo sapiens
  CDR3 for alpha chain variable domain of TCR clone 163716 (TRAV9-2, TRAJ9)
CALSLTNTGGFKTIF

SEQ ID NO: 327432 - protein, 15 aa, Homo sapiens
  CDR3 for beta chain variable domain of TCR clone 163716 (TRBV6-3, TRBJ2-7)
CASSSPGTVFYEQYF

SEQ ID NO: 327433 - protein, 14 aa, Homo sapiens
  CDR3 for alpha chain variable domain of TCR clone 163717 (TRAV21, TRAJ32)
CCGDYGCATNRLIF

SEQ ID NO: 327434 - protein, 13 aa, Homo sapiens
  CDR3 for beta chain variable domain of TCR clone 163717 (TRBV2, TRBJ1-6)
CASGRGGISPLHF

SEQ ID NO: 327435 - protein, 12 aa, Homo sapiens
  CDR3 for alpha chain variable domain of TCR clone 163718 (TRAV2, TRAJ45)
CAEEEVLTDSPL

SEQ ID NO: 327436 - protein, 13 aa, Homo sapiens
  CDR3 for beta chain variable domain of TCR clone 163718 (TRBV19, TRBJ1-2)
CASSVPGQDGYTF

SEQ ID NO: 327437 - protein, 13 aa, Homo sapiens
  CDR3 for alpha chain variable domain of TCR clone 163719 (TRAV8-6, TRAJ49)
CAVITNTGNQFYF

SEQ ID NO: 327438 - protein, 16 aa, Homo sapiens
  CDR3 for beta chain variable domain of TCR clone 163719 (TRBV19, TRBJ2-7)
CASSLTGTSELGEQYF

SEQ ID NO: 327439 - protein, 14 aa, Homo sapiens
  CDR3 for alpha chain variable domain of TCR clone 163720 (TRAV8-1, TRAJ36)
CAVNYSTGANNLFF

SEQ ID NO: 327440 - protein, 15 aa, Homo sapiens
  CDR3 for beta chain variable domain of TCR clone 163720 (TRBV7-2, TRBJ2-3)
CASSLEQGGTDTQYF

SEQ ID NO: 327441 - protein, 16 aa, Homo sapiens
  CDR3 for alpha chain variable domain of TCR clone 163721 (TRAV30, TRAJ24)
CGTEIVDADSWGKFKF

SEQ ID NO: 327442 - protein, 15 aa, Homo sapiens
  CDR3 for beta chain variable domain of TCR clone 163721 (TRBV9, TRBJ1-6)
CASSVAGTGDSPLHF

SEQ ID NO: 327443 - protein, 12 aa, Homo sapiens
  CDR3 for alpha chain variable domain of TCR clone 163722 (TRAV6, TRAJ33)
CSRIWSNYQLIW

SEQ ID NO: 327444 - protein, 15 aa, Homo sapiens
  CDR3 for beta chain variable domain of TCR clone 163722 (TRBV12-4, TRBJ2-5)
CASSPPTGLQETQYF

SEQ ID NO: 327445 - protein, 16 aa, Homo sapiens
  CDR3 for alpha chain variable domain of TCR clone 163723 (TRAV3, TRAJ10)
CAVRDMRAGGGNKITF

SEQ ID NO: 327446 - protein, 15 aa, Homo sapiens
  CDR3 for beta chain variable domain of TCR clone 163723 (TRBV6-3, TRBJ2-7)
CASSSPGTVFYEQYF

SEQ ID NO: 327447 - protein, 13 aa, Homo sapiens
  CDR3 for alpha chain variable domain of TCR clone 163724 (TRAV27, TRAJ29)
CAGAHSGNTPIVF

SEQ ID NO: 327448 - protein, 18 aa, Homo sapiens
  CDR3 for beta chain variable domain of TCR clone 163724 (TRBV6-6, TRBJ1-3)
CASSYSKWDSISGNTIYF

SEQ ID NO: 327449 - protein, 15 aa, Homo sapiens
  CDR3 for alpha chain variable domain of TCR clone 163725 (TRAV8-4, TRAJ9)
CAVSDLEGGGFKTIF

SEQ ID NO: 327450 - protein, 14 aa, Homo sapiens
  CDR3 for beta chain variable domain of TCR clone 163725 (TRBV12-5, TRBJ2-5)
CASGSRTHQETQYF

SEQ ID NO: 327451 - protein, 13 aa, Homo sapiens
  CDR3 for alpha chain variable domain of TCR clone 163726 (TRAV21, TRAJ20)
CAVGLRVDYKLSF

SEQ ID NO: 327452 - protein, 14 aa, Homo sapiens
  CDR3 for beta chain variable domain of TCR clone 163726 (TRBV7-9, TRBJ2-7)
CASSIGQGAGEQYF

SEQ ID NO: 327453 - protein, 16 aa, Homo sapiens
  CDR3 for alpha chain variable domain of TCR clone 163727 (TRAV30, TRAJ24)
CGTEIVDADSCGKFQF

SEQ ID NO: 327454 - protein, 14 aa, Homo sapiens
  CDR3 for beta chain variable domain of TCR clone 163727 (TRBV20-1, TRBJ1-1)
CSAQTRIGGTEAFF

SEQ ID NO: 327455 - protein, 15 aa, Homo sapiens
  CDR3 for alpha chain variable domain of TCR clone 163728 (TRAV3, TRAJ3)
CAVRDMSSSASKMIF

SEQ ID NO: 327456 - protein, 14 aa, Homo sapiens
  CDR3 for beta chain variable domain of TCR clone 163728 (TRBV19, TRBJ2-1)
CASPTFVLSGEQFF

SEQ ID NO: 327457 - protein, 12 aa, Homo sapiens
  CDR3 for alpha chain variable domain of TCR clone 163729 (TRAV21, TRAJ31)
CVLAGNNARLMF

SEQ ID NO: 327458 - protein, 16 aa, Homo sapiens
  CDR3 for beta chain variable domain of TCR clone 163729 (TRBV27, TRBJ2-5)
CASSCGPGGAKETQYF

SEQ ID NO: 327459 - protein, 16 aa, Homo sapiens
  CDR3 for alpha chain variable domain of TCR clone 163730 (TRAV14/DV4, TRAJ53)
CAMREGGGGSNYKLTF

SEQ ID NO: 327460 - protein, 19 aa, Homo sapiens
  CDR3 for beta chain variable domain of TCR clone 163730 (TRBV28, TRBJ2-4)
CASGLQPGGPAHSKNIQYF

SEQ ID NO: 327461 - protein, 12 aa, Homo sapiens
  CDR3 for alpha chain variable domain of TCR clone 163731 (TRAV3, TRAJ43)
CAVRDPNNDMRF

SEQ ID NO: 327462 - protein, 15 aa, Homo sapiens
  CDR3 for beta chain variable domain of TCR clone 163731 (TRBV4-1, TRBJ2-7)
CASSQGDWGDYEQYF

SEQ ID NO: 327463 - protein, 14 aa, Homo sapiens
  CDR3 for alpha chain variable domain of TCR clone 163732 (TRAV4, TRAJ26)
CLVGPHNYGQNFVF

SEQ ID NO: 327464 - protein, 19 aa, Homo sapiens
  CDR3 for beta chain variable domain of TCR clone 163732 (TRBV25-1, TRBJ2-2)
CAILVYRVDRGRKTGELFF

SEQ ID NO: 327465 - protein, 16 aa, Homo sapiens
  CDR3 for alpha chain variable domain of TCR clone 163733 (TRAV30, TRAJ24)
CGTEIVDADSWGKLQF

SEQ ID NO: 327466 - protein, 14 aa, Homo sapiens
  CDR3 for beta chain variable domain of TCR clone 163733 (TRBV12-5, TRBJ2-5)
CASGSRKHQETQYF

SEQ ID NO: 327467 - protein, 13 aa, Homo sapiens
  CDR3 for alpha chain variable domain of TCR clone 163734 (TRAV27, TRAJ45)
CRSSGGGADGLTF

SEQ ID NO: 327468 - protein, 15 aa, Homo sapiens
  CDR3 for beta chain variable domain of TCR clone 163734 (TRBV7-9, TRBJ1-5)
CASSQGHQPKQPQHF

SEQ ID NO: 327469 - protein, 15 aa, Homo sapiens
  CDR3 for alpha chain variable domain of TCR clone 163735 (TRAV8-3, TRAJ27)
CAVGPSKTNAGKLTF

SEQ ID NO: 327470 - protein, 13 aa, Homo sapiens
  CDR3 for beta chain variable domain of TCR clone 163735 (TRBV12-5, TRBJ1-2)
CASGVRTGNGYTF

SEQ ID NO: 327471 - protein, 18 aa, Homo sapiens
  CDR3 for alpha chain variable domain of TCR clone 163736 (TRAV13-1, TRAJ52)
CAASKRSAGSTSYGKLTF

SEQ ID NO: 327472 - protein, 13 aa, Homo sapiens
  CDR3 for beta chain variable domain of TCR clone 163736 (TRBV12-4, TRBJ1-2)
CASSLRQGRGYTF

SEQ ID NO: 327473 - protein, 14 aa, Homo sapiens
  CDR3 for alpha chain variable domain of TCR clone 163737 (TRAV13-1, TRAJ12)
CAASYMDSIYKLIF

SEQ ID NO: 327474 - protein, 13 aa, Homo sapiens
  CDR3 for beta chain variable domain of TCR clone 163737 (TRBV2, TRBJ2-5)
CASSDGIQETQYF

SEQ ID NO: 327475 - protein, 15 aa, Homo sapiens
  CDR3 for alpha chain variable domain of TCR clone 163738 (TRAV38-2/DV8, TRAJ47)
CAYRSAKGYGNKLAF

SEQ ID NO: 327476 - protein, 15 aa, Homo sapiens
  CDR3 for beta chain variable domain of TCR clone 163738 (TRBV6-6, TRBJ2-7)
CASSYSYGGSYEQYF

SEQ ID NO: 327477 - protein, 13 aa, Homo sapiens
  CDR3 for alpha chain variable domain of TCR clone 163739 (TRAV27, TRAJ3)
ASLRRSSASKIIF

SEQ ID NO: 327478 - protein, 15 aa, Homo sapiens
  CDR3 for beta chain variable domain of TCR clone 163739 (TRBV28, TRBJ1-3)
CASSMGWASGNTIYF

SEQ ID NO: 327479 - protein, 16 aa, Homo sapiens
  CDR3 for alpha chain variable domain of TCR clone 163740 (TRAV21, TRAJ37)
CAVRTAGPSNTGKIIF

SEQ ID NO: 327480 - protein, 13 aa, Homo sapiens
  CDR3 for beta chain variable domain of TCR clone 163740 (TRBV7-9, TRBJ2-5)
CASLPSGRETQYF

SEQ ID NO: 327481 - protein, 17 aa, Homo sapiens
  CDR3 for alpha chain variable domain of TCR clone 163741 (TRAV3, TRAJ42)
CAVRDRDYGGSQGNLIF

SEQ ID NO: 327482 - protein, 15 aa, Homo sapiens
  CDR3 for beta chain variable domain of TCR clone 163741 (TRBV11-3, TRBJ2-1)
CASSRVADSYNEQFF

SEQ ID NO: 327483 - protein, 13 aa, Homo sapiens
  CDR3 for alpha chain variable domain of TCR clone 163742 (TRAV21, TRAJ57)
CAVTQGGSEKLVF

SEQ ID NO: 327484 - protein, 13 aa, Homo sapiens
  CDR3 for beta chain variable domain of TCR clone 163742 (TRBV12-4, TRBJ2-5)
CASRLAVQETQYF

SEQ ID NO: 327485 - protein, 13 aa, Homo sapiens
  CDR3 for alpha chain variable domain of TCR clone 163743 (TRAV21, TRAJ27)
CAARHGNAGKSAF

SEQ ID NO: 327486 - protein, 14 aa, Homo sapiens
  CDR3 for beta chain variable domain of TCR clone 163743 (TRBV7-6, TRBJ2-3)
CASSLGTVTDTQYF

SEQ ID NO: 327487 - protein, 13 aa, Homo sapiens
  CDR3 for alpha chain variable domain of TCR clone 163744 (TRAV1-1, TRAJ9)
CAAKNTGGFKTIF

SEQ ID NO: 327488 - protein, 14 aa, Homo sapiens
  CDR3 for beta chain variable domain of TCR clone 163744 (TRBV7-3, TRBJ2-7)
CASSYDQDYYEQYF

SEQ ID NO: 327489 - protein, 13 aa, Homo sapiens
  CDR3 for alpha chain variable domain of TCR clone 163745 (TRAV17, TRAJ9)
CATDYTGGFKTII

SEQ ID NO: 327490 - protein, 16 aa, Homo sapiens
  CDR3 for beta chain variable domain of TCR clone 163745 (TRBV7-7, TRBJ2-1)
CASSLASGTSYNEQFF

SEQ ID NO: 327491 - protein, 16 aa, Homo sapiens
  CDR3 for alpha chain variable domain of TCR clone 163746 (TRAV3, TRAJ6)
CAVRDGMGRMKLHTYI

SEQ ID NO: 327492 - protein, 15 aa, Homo sapiens
  CDR3 for beta chain variable domain of TCR clone 163746 (TRBV9, TRBJ2-1)
CASSLAGSSYNEQFF

SEQ ID NO: 327493 - protein, 17 aa, Homo sapiens
  CDR3 for alpha chain variable domain of TCR clone 163747 (TRAV3, TRAJ6)
CAVRDGPWAGGSYIPTF

SEQ ID NO: 327494 - protein, 20 aa, Homo sapiens
  CDR3 for beta chain variable domain of TCR clone 163747 (TRBV28, TRBJ2-1)
CASTPIGRSPGLAGGNEQFF

SEQ ID NO: 327495 - protein, 17 aa, Homo sapiens
  CDR3 for alpha chain variable domain of TCR clone 163748 (TRAV26-1, TRAJ37)
CIVRVITVSSNTGKLIF

SEQ ID NO: 327496 - protein, 15 aa, Homo sapiens
  CDR3 for beta chain variable domain of TCR clone 163748 (TRBV7-2, TRBJ2-3)
CASSLEQGGTDTQYF

SEQ ID NO: 327497 - protein, 13 aa, Homo sapiens
  CDR3 for alpha chain variable domain of TCR clone 163749 (TRAV4, TRAJ42)
CLVGGGSQGNLIF

SEQ ID NO: 327498 - protein, 16 aa, Homo sapiens
  CDR3 for beta chain variable domain of TCR clone 163749 (TRBV5-1, TRBJ2-3)
CASSLQGRVVADTQYF

SEQ ID NO: 327499 - protein, 14 aa, Homo sapiens
  CDR3 for alpha chain variable domain of TCR clone 163750 (TRAV1-2, TRAJ8)
CAVREDTGFQKLVF

SEQ ID NO: 327500 - protein, 15 aa, Homo sapiens
  CDR3 for beta chain variable domain of TCR clone 163750 (TRBV28, TRBJ2-4)
CAAGSVTLLMGIQYF

SEQ ID NO: 327501 - protein, 17 aa, Homo sapiens
  CDR3 for alpha chain variable domain of TCR clone 163751 (TRAV27, TRAJ18)
CAGLHRGRGSPLGRLYF

SEQ ID NO: 327502 - protein, 14 aa, Homo sapiens
  CDR3 for beta chain variable domain of TCR clone 163751 (TRBV20-1, TRBJ1-5)
CSARGRGSDQPQHF

SEQ ID NO: 327503 - protein, 13 aa, Homo sapiens
  CDR3 for alpha chain variable domain of TCR clone 163752 (TRAV23/DV6, TRAJ12)
YAPRVDSSYKLIF

SEQ ID NO: 327504 - protein, 12 aa, Homo sapiens
  CDR3 for beta chain variable domain of TCR clone 163752 (TRBV7-6, TRBJ2-5)
CASSLSQETQYF

SEQ ID NO: 327505 - protein, 12 aa, Homo sapiens
  CDR3 for alpha chain variable domain of TCR clone 163753 (TRAV12-3, TRAJ17)
CAMTLTGKKLTF

SEQ ID NO: 327506 - protein, 15 aa, Homo sapiens
  CDR3 for beta chain variable domain of TCR clone 163753 (TRBV7-3, TRBJ2-1)
CASSPTGGGEVEQFF

SEQ ID NO: 327507 - protein, 16 aa, Homo sapiens
  CDR3 for alpha chain variable domain of TCR clone 163754 (TRAV4, TRAJ5)
CLVGPDHGHGQESTYF

SEQ ID NO: 327508 - protein, 15 aa, Homo sapiens
  CDR3 for beta chain variable domain of TCR clone 163754 (TRBV27, TRBJ2-5)
CASSLRPSGGETQYF

SEQ ID NO: 327509 - protein, 13 aa, Homo sapiens
  CDR3 for alpha chain variable domain of TCR clone 163755 (TRAV3, TRAJ21)
CAVREPDFNKFYF

SEQ ID NO: 327510 - protein, 13 aa, Homo sapiens
  CDR3 for beta chain variable domain of TCR clone 163755 (TRBV13, TRBJ2-1)
CASILGGRGEQFF

SEQ ID NO: 327511 - protein, 10 aa, Homo sapiens
  CDR3 for alpha chain variable domain of TCR clone 163756 (TRAV23/DV6, TRAJ31)
CARGGAKLMF

SEQ ID NO: 327512 - protein, 14 aa, Homo sapiens
  CDR3 for beta chain variable domain of TCR clone 163756 (TRBV7-8, TRBJ1-2)
CASSPDSLSYGYTF

SEQ ID NO: 327513 - protein, 14 aa, Homo sapiens
  CDR3 for alpha chain variable domain of TCR clone 163757 (TRAV1-2, TRAJ16)
CAVNRFSDCQKLLF

SEQ ID NO: 327514 - protein, 12 aa, Homo sapiens
  CDR3 for beta chain variable domain of TCR clone 163757 (TRBV7-6, TRBJ2-7)
CASSLADSEQYF

SEQ ID NO: 327515 - protein, 15 aa, Homo sapiens
  CDR3 for alpha chain variable domain of TCR clone 163758 (TRAV8-3, TRAJ45)
CASSYSGGGADGLTF

SEQ ID NO: 327516 - protein, 11 aa, Homo sapiens
  CDR3 for beta chain variable domain of TCR clone 163758 (TRBV7-9, TRBJ2-3)
CASSPTDTQYF

SEQ ID NO: 327517 - protein, 15 aa, Homo sapiens
  CDR3 for alpha chain variable domain of TCR clone 163759 (TRAV1-2, TRAJ12)
CADARWMDRRYKLIF

SEQ ID NO: 327518 - protein, 14 aa, Homo sapiens
  CDR3 for beta chain variable domain of TCR clone 163759 (TRBV7-8, TRBJ2-3)
CASSLEAGTDTQYF

SEQ ID NO: 327519 - protein, 12 aa, Homo sapiens
  CDR3 for alpha chain variable domain of TCR clone 163760 (TRAV13-1, TRAJ21)
CAAFFNFNKFYF

SEQ ID NO: 327520 - protein, 14 aa, Homo sapiens
  CDR3 for beta chain variable domain of TCR clone 163760 (TRBV7-2, TRBJ1-2)
CASSQTGSTYGYTF

SEQ ID NO: 327521 - protein, 14 aa, Homo sapiens
  CDR3 for alpha chain variable domain of TCR clone 163761 (TRAV12-2, TRAJ9)
CAVNMEGGGFKAIF

SEQ ID NO: 327522 - protein, 14 aa, Homo sapiens
  CDR3 for beta chain variable domain of TCR clone 163761 (TRBV27, TRBJ2-3)
CASRKGGRTDTQYF

SEQ ID NO: 327523 - protein, 13 aa, Homo sapiens
  CDR3 for alpha chain variable domain of TCR clone 163762 (TRAV35, TRAJ42)
CAGFPGSQGNLIF

SEQ ID NO: 327524 - protein, 13 aa, Homo sapiens
  CDR3 for beta chain variable domain of TCR clone 163762 (TRBV29-1, TRBJ2-1)
CSVEGGRVNEQFY

SEQ ID NO: 327525 - protein, 18 aa, Homo sapiens
  CDR3 for alpha chain variable domain of TCR clone 163763 (TRAV17, TRAJ45)
CAASLDLYSGGGADGLTF

SEQ ID NO: 327526 - protein, 15 aa, Homo sapiens
  CDR3 for beta chain variable domain of TCR clone 163763 (TRBV11-2, TRBJ2-1)
CASSKNRGLIYEQFF

SEQ ID NO: 327527 - protein, 16 aa, Homo sapiens
  CDR3 for alpha chain variable domain of TCR clone 163764 (TRAV12-3, TRAJ53)
CAMSPGSGGSNYKLTF

SEQ ID NO: 327528 - protein, 16 aa, Homo sapiens
  CDR3 for beta chain variable domain of TCR clone 163764 (TRBV18, TRBJ1-1)
CASSPGVGGRGGEAFF

SEQ ID NO: 327529 - protein, 12 aa, Homo sapiens
  CDR3 for alpha chain variable domain of TCR clone 163765 (TRAV27, TRAJ33)
CAGDGSNYQLIW

SEQ ID NO: 327530 - protein, 13 aa, Homo sapiens
  CDR3 for beta chain variable domain of TCR clone 163765 (TRBV20-1, TRBJ1-3)
CSAGAYSGNTIYF

SEQ ID NO: 327531 - protein, 14 aa, Homo sapiens
  CDR3 for alpha chain variable domain of TCR clone 163766 (TRAV12-2, TRAJ6)
CAVIASGGSYIPPF

SEQ ID NO: 327532 - protein, 12 aa, Homo sapiens
  CDR3 for beta chain variable domain of TCR clone 163766 (TRBV5-1, TRBJ1-2)
CASSQDTYGYTF

SEQ ID NO: 327533 - protein, 13 aa, Homo sapiens
  CDR3 for alpha chain variable domain of TCR clone 163767 (TRAV13-1, TRAJ33)
CAAWTDSNYQLIW

SEQ ID NO: 327534 - protein, 15 aa, Homo sapiens
  CDR3 for beta chain variable domain of TCR clone 163767 (TRBV19, TRBJ2-7)
CASSIGRTFSYEQYF

SEQ ID NO: 327535 - protein, 13 aa, Homo sapiens
  CDR3 for alpha chain variable domain of TCR clone 163768 (TRAV12-3, TRAJ56)
CAWATGANSKLTF

SEQ ID NO: 327536 - protein, 12 aa, Homo sapiens
  CDR3 for beta chain variable domain of TCR clone 163768 (TRBV10-2, TRBJ2-3)
CASSPESDTQYF

SEQ ID NO: 327537 - protein, 14 aa, Homo sapiens
  CDR3 for alpha chain variable domain of TCR clone 163769 (TRAV12-2, TRAJ24)
CAVTPADSWGKLQF

SEQ ID NO: 327538 - protein, 15 aa, Homo sapiens
  CDR3 for beta chain variable domain of TCR clone 163769 (TRBV6-4, TRBJ2-1)
CASSSGTSGYNEQFF

SEQ ID NO: 327539 - protein, 13 aa, Homo sapiens
  CDR3 for alpha chain variable domain of TCR clone 163770 (TRAV2, TRAJ29)
CAAGNSGNTPLVF

SEQ ID NO: 327540 - protein, 16 aa, Homo sapiens
  CDR3 for beta chain variable domain of TCR clone 163770 (TRBV7-9, TRBJ1-2)
CASSPGGGATNYGYTF

SEQ ID NO: 327541 - protein, 14 aa, Homo sapiens
  CDR3 for alpha chain variable domain of TCR clone 163771 (TRAV12-2, TRAJ9)
CAVSFGTGGFKTIF

SEQ ID NO: 327542 - protein, 14 aa, Homo sapiens
  CDR3 for beta chain variable domain of TCR clone 163771 (TRBV3-1, TRBJ2-2)
CASSLPDNTGELFF

SEQ ID NO: 327543 - protein, 14 aa, Homo sapiens
  CDR3 for alpha chain variable domain of TCR clone 163772 (TRAV8-2, TRAJ4)
CVVSPSGGYNKLIF

SEQ ID NO: 327544 - protein, 16 aa, Homo sapiens
  CDR3 for beta chain variable domain of TCR clone 163772 (TRBV7-9, TRBJ2-6)
CASSWKGPLRANDLTF

SEQ ID NO: 327545 - protein, 14 aa, Homo sapiens
  CDR3 for alpha chain variable domain of TCR clone 163773 (TRAV1-2, TRAJ16)
CAVNRFSDGQKMLF

SEQ ID NO: 327546 - protein, 16 aa, Homo sapiens
  CDR3 for beta chain variable domain of TCR clone 163773 (TRBV20-1, TRBJ1-2)
CSASMGQGVANYGYTF

SEQ ID NO: 327547 - protein, 14 aa, Homo sapiens
  CDR3 for alpha chain variable domain of TCR clone 163774 (TRAV12-2, TRAJ36)
CAVKISTGANNLFF

SEQ ID NO: 327548 - protein, 14 aa, Homo sapiens
  CDR3 for beta chain variable domain of TCR clone 163774 (TRBV7-3, TRBJ2-1)
CASSLAGGTNEQFF

SEQ ID NO: 327549 - protein, 13 aa, Homo sapiens
  CDR3 for alpha chain variable domain of TCR clone 163775 (TRAV1-2, TRAJ31)
RAVRPNNNARLMF

SEQ ID NO: 327550 - protein, 14 aa, Homo sapiens
  CDR3 for beta chain variable domain of TCR clone 163775 (TRBV11-2, TRBJ2-1)
CASSLSGPYNEQFF

SEQ ID NO: 327551 - protein, 15 aa, Homo sapiens
  CDR3 for alpha chain variable domain of TCR clone 163776 (TRAV12-1, TRAJ15)
CVVNSYGQAGTALIF

SEQ ID NO: 327552 - protein, 13 aa, Homo sapiens
  CDR3 for beta chain variable domain of TCR clone 163776 (TRBV28, TRBJ2-7)
CASRFTPRPEQYF

SEQ ID NO: 327553 - protein, 14 aa, Homo sapiens
  CDR3 for alpha chain variable domain of TCR clone 163777 (TRAV17, TRAJ54)
CATDANQGAQKLVL

SEQ ID NO: 327554 - protein, 14 aa, Homo sapiens
  CDR3 for beta chain variable domain of TCR clone 163777 (TRBV25-1, TRBJ1-1)
CASTHLGGNTEAFF

SEQ ID NO: 327555 - protein, 12 aa, Homo sapiens
  CDR3 for alpha chain variable domain of TCR clone 163778 (TRAV20, TRAJ56)
CAVTGANSKLTF

SEQ ID NO: 327556 - protein, 14 aa, Homo sapiens
  CDR3 for beta chain variable domain of TCR clone 163778 (TRBV20-1, TRBJ2-5)
CSALVPGYRETQYF

SEQ ID NO: 327557 - protein, 14 aa, Homo sapiens
  CDR3 for alpha chain variable domain of TCR clone 163779 (TRAV30, TRAJ33)
CGTVAPRSNYQLIW

SEQ ID NO: 327558 - protein, 15 aa, Homo sapiens
  CDR3 for beta chain variable domain of TCR clone 163779 (TRBV7-3, TRBJ2-1)
CASSPTGGGEVEQFF

SEQ ID NO: 327559 - protein, 13 aa, Homo sapiens
  CDR3 for alpha chain variable domain of TCR clone 163780 (TRAV2, TRAJ40)
CAVVTSGTYKYIF

SEQ ID NO: 327560 - protein, 13 aa, Homo sapiens
  CDR3 for beta chain variable domain of TCR clone 163780 (TRBV11-2, TRBJ1-4)
CASSPGTLEKLFF

SEQ ID NO: 327561 - protein, 12 aa, Homo sapiens
  CDR3 for alpha chain variable domain of TCR clone 163781 (TRAV12-3, TRAJ17)
CAMTLTGNKLTF

SEQ ID NO: 327562 - protein, 17 aa, Homo sapiens
  CDR3 for beta chain variable domain of TCR clone 163781 (TRBV5-1, TRBJ1-6)
CASSPSLQGSDNSPLHF

SEQ ID NO: 327563 - protein, 12 aa, Homo sapiens
  CDR3 for alpha chain variable domain of TCR clone 163782 (TRAV13-1, TRAJ48)
CAANFGNKKLTF

SEQ ID NO: 327564 - protein, 14 aa, Homo sapiens
  CDR3 for beta chain variable domain of TCR clone 163782 (TRBV18, TRBJ2-7)
CASSPRGGAYEQYF

SEQ ID NO: 327565 - protein, 14 aa, Homo sapiens
  CDR3 for alpha chain variable domain of TCR clone 163783 (TRAV26-1, TRAJ38)
CIVVGAGNNRKLIW

SEQ ID NO: 327566 - protein, 16 aa, Homo sapiens
  CDR3 for beta chain variable domain of TCR clone 163783 (TRBV20-1, TRBJ1-4)
CSAPGQGLLTNEKLFF

SEQ ID NO: 327567 - protein, 14 aa, Homo sapiens
  CDR3 for alpha chain variable domain of TCR clone 163784 (TRAV13-1, TRAJ3)
CAASKSSSASKIIL

SEQ ID NO: 327568 - protein, 13 aa, Homo sapiens
  CDR3 for beta chain variable domain of TCR clone 163784 (TRBV25-1, TRBJ2-5)
CASSESGSETQYF

SEQ ID NO: 327569 - protein, 15 aa, Homo sapiens
  CDR3 for alpha chain variable domain of TCR clone 163785 (TRAV38-1, TRAJ57)
CAFMDSQGGSEKLVF

SEQ ID NO: 327570 - protein, 16 aa, Homo sapiens
  CDR3 for beta chain variable domain of TCR clone 163785 (TRBV10-3, TRBJ2-1)
CAISLTSGNSYNEQFF

SEQ ID NO: 327571 - protein, 13 aa, Homo sapiens
  CDR3 for alpha chain variable domain of TCR clone 163786 (TRAV27, TRAJ45)
CRSSGGGSDGLTF

SEQ ID NO: 327572 - protein, 15 aa, Homo sapiens
  CDR3 for beta chain variable domain of TCR clone 163786 (TRBV20-1, TRBJ2-7)
CSARDRVSGMDEQYF

SEQ ID NO: 327573 - protein, 12 aa, Homo sapiens
  CDR3 for alpha chain variable domain of TCR clone 163787 (TRAV12-3, TRAJ17)
CAMTLTVNKLTF

SEQ ID NO: 327574 - protein, 20 aa, Homo sapiens
  CDR3 for beta chain variable domain of TCR clone 163787 (TRBV7-8, TRBJ2-2)
CASSHLFPGPTIHITGELFF

SEQ ID NO: 327575 - protein, 10 aa, Homo sapiens
  CDR3 for alpha chain variable domain of TCR clone 163788 (TRAV8-4, TRAJ11)
CAVSLHTLTF

SEQ ID NO: 327576 - protein, 13 aa, Homo sapiens
  CDR3 for beta chain variable domain of TCR clone 163788 (TRBV12-4, TRBJ2-2)
CASSITGSGELFF

SEQ ID NO: 327577 - protein, 12 aa, Homo sapiens
  CDR3 for alpha chain variable domain of TCR clone 163789 (TRAV26-2, TRAJ21)
CILKGSFNKFYF

SEQ ID NO: 327578 - protein, 14 aa, Homo sapiens
  CDR3 for beta chain variable domain of TCR clone 163789 (TRBV7-9, TRBJ1-1)
CATTTIQSYTEAFF

SEQ ID NO: 327579 - protein, 13 aa, Homo sapiens
  CDR3 for alpha chain variable domain of TCR clone 163790 (TRAV17, TRAJ26)
CATVENYGQNFVF

SEQ ID NO: 327580 - protein, 14 aa, Homo sapiens
  CDR3 for beta chain variable domain of TCR clone 163790 (TRBV6-1, TRBJ1-3)
CASVQGGGGNTIYF

SEQ ID NO: 327581 - protein, 15 aa, Homo sapiens
  CDR3 for alpha chain variable domain of TCR clone 163791 (TRAV23/DV6, TRAJ44)
CAAMKPTGTASKHTF

SEQ ID NO: 327582 - protein, 16 aa, Homo sapiens
  CDR3 for beta chain variable domain of TCR clone 163791 (TRBV28, TRBJ2-5)
CATSGWPSRLKETQYF

SEQ ID NO: 327583 - protein, 11 aa, Homo sapiens
  CDR3 for alpha chain variable domain of TCR clone 163792 (TRAV1-2, TRAJ40)
CAVPGTYKYIF

SEQ ID NO: 327584 - protein, 14 aa, Homo sapiens
  CDR3 for beta chain variable domain of TCR clone 163792 (TRBV18, TRBJ2-7)
CASSPRGGAYEQYF

SEQ ID NO: 327585 - protein, 18 aa, Homo sapiens
  CDR3 for alpha chain variable domain of TCR clone 163793 (TRAV35, TRAJ28)
CAGHNYPLSGAGNYQLTF

SEQ ID NO: 327586 - protein, 12 aa, Homo sapiens
  CDR3 for beta chain variable domain of TCR clone 163793 (TRBV7-9, TRBJ1-1)
CASSLEGTEAFF

SEQ ID NO: 327587 - protein, 17 aa, Homo sapiens
  CDR3 for alpha chain variable domain of TCR clone 163794 (TRAV3, TRAJ21)
CAVRDRDYGGSQGNLIF

SEQ ID NO: 327588 - protein, 13 aa, Homo sapiens
  CDR3 for beta chain variable domain of TCR clone 163794 (TRBV11-3, TRBJ1-1)
CASTGSLNTEAFF

SEQ ID NO: 327589 - protein, 14 aa, Homo sapiens
  CDR3 for alpha chain variable domain of TCR clone 163795 (TRAV12-1, TRAJ17)
CVVNPKAAGNKLTF

SEQ ID NO: 327590 - protein, 12 aa, Homo sapiens
  CDR3 for beta chain variable domain of TCR clone 163795 (TRBV11-2, TRBJ2-2)
CASSLPTGELFF

SEQ ID NO: 327591 - protein, 14 aa, Homo sapiens
  CDR3 for alpha chain variable domain of TCR clone 163796 (TRAV14/DV4, TRAJ54)
CAMSPIQGAQKLVF

SEQ ID NO: 327592 - protein, 13 aa, Homo sapiens
  CDR3 for beta chain variable domain of TCR clone 163796 (TRBV5-8, TRBJ1-2)
CASSLGGNYGYTF

SEQ ID NO: 327593 - protein, 12 aa, Homo sapiens
  CDR3 for alpha chain variable domain of TCR clone 163797 (TRAV13-1, TRAJ21)
CAAKEGFNKFYF

SEQ ID NO: 327594 - protein, 14 aa, Homo sapiens
  CDR3 for beta chain variable domain of TCR clone 163797 (TRBV20-1, TRBJ2-7)
CSAKAGTGGYEQYF

SEQ ID NO: 327595 - protein, 18 aa, Homo sapiens
  CDR3 for alpha chain variable domain of TCR clone 163798 (TRAV13-2, TRAJ52)
CAETPPNAGGTSYGKLTF

SEQ ID NO: 327596 - protein, 14 aa, Homo sapiens
  CDR3 for beta chain variable domain of TCR clone 163798 (TRBV7-9, TRBJ2-1)
CASSWMVGFGEQFF

SEQ ID NO: 327597 - protein, 14 aa, Homo sapiens
  CDR3 for alpha chain variable domain of TCR clone 163799 (TRAV1-2, TRAJ17)
CAVSDMTAGNKLTF

SEQ ID NO: 327598 - protein, 15 aa, Homo sapiens
  CDR3 for beta chain variable domain of TCR clone 163799 (TRBV20-1, TRBJ2-7)
CSARDRVSGMDEQYF

SEQ ID NO: 327599 - protein, 13 aa, Homo sapiens
  CDR3 for alpha chain variable domain of TCR clone 163800 (TRAV2, TRAJ15)
CAVSSQAGTALIF

SEQ ID NO: 327600 - protein, 17 aa, Homo sapiens
  CDR3 for beta chain variable domain of TCR clone 163800 (TRBV20-1, TRBJ2-2)
CSAGGSGQGGLTGELFF

SEQ ID NO: 327601 - protein, 11 aa, Homo sapiens
  CDR3 for alpha chain variable domain of TCR clone 163801 (TRAV22, TRAJ20)
CAPLHDYKLSF

SEQ ID NO: 327602 - protein, 11 aa, Homo sapiens
  CDR3 for beta chain variable domain of TCR clone 163801 (TRBV12-4, TRBJ2-2)
CASSSAGELFF

SEQ ID NO: 327603 - protein, 15 aa, Homo sapiens
  CDR3 for alpha chain variable domain of TCR clone 163802 (TRAV8-2, TRAJ28)
CVVSESGAGSYQLTF

SEQ ID NO: 327604 - protein, 16 aa, Homo sapiens
  CDR3 for beta chain variable domain of TCR clone 163802 (TRBV10-3, TRBJ2-1)
CAISLASGNSYNEQFF

SEQ ID NO: 327605 - protein, 14 aa, Homo sapiens
  CDR3 for alpha chain variable domain of TCR clone 163803 (TRAV30, TRAJ26)
CGTEIVSYGQNFVF

SEQ ID NO: 327606 - protein, 13 aa, Homo sapiens
  CDR3 for beta chain variable domain of TCR clone 163803 (TRBV19, TRBJ1-3)
CASRLSLGNIIYF

SEQ ID NO: 327607 - protein, 16 aa, Homo sapiens
  CDR3 for alpha chain variable domain of TCR clone 163804 (TRAV30, TRAJ24)
CGTEIVDADSWGKFQF

SEQ ID NO: 327608 - protein, 13 aa, Homo sapiens
  CDR3 for beta chain variable domain of TCR clone 163804 (TRBV18, TRBJ1-2)
CASYASATEGYTF

SEQ ID NO: 327609 - protein, 14 aa, Homo sapiens
  CDR3 for alpha chain variable domain of TCR clone 163805 (TRAV13-1, TRAJ20)
CAARPGSNDYKLGF

SEQ ID NO: 327610 - protein, 17 aa, Homo sapiens
  CDR3 for beta chain variable domain of TCR clone 163805 (TRBV24-1, TRBJ2-1)
CATSDVSTSGTYNEQFF

SEQ ID NO: 327611 - protein, 15 aa, Homo sapiens
  CDR3 for alpha chain variable domain of TCR clone 163806 (TRAV17, TRAJ37)
CATEGGSSNTGKLIF

SEQ ID NO: 327612 - protein, 15 aa, Homo sapiens
  CDR3 for beta chain variable domain of TCR clone 163806 (TRBV28, TRBJ2-5)
CASSSGRTIQETQYF

SEQ ID NO: 327613 - protein, 11 aa, Homo sapiens
  CDR3 for alpha chain variable domain of TCR clone 163807 (TRAV12-3, TRAJ49)
CAANTGNQFYF

SEQ ID NO: 327614 - protein, 16 aa, Homo sapiens
  CDR3 for beta chain variable domain of TCR clone 163807 (TRBV7-9, TRBJ2-1)
CDSSDVAGGSYNEQFF

SEQ ID NO: 327615 - protein, 11 aa, Homo sapiens
  CDR3 for alpha chain variable domain of TCR clone 163808 (TRAV1-1, TRAJ23)
CAVRRGGKLIF

SEQ ID NO: 327616 - protein, 20 aa, Homo sapiens
  CDR3 for beta chain variable domain of TCR clone 163808 (TRBV7-8, TRBJ2-2)
CASSHLFPGPTVHITGELFF

SEQ ID NO: 327617 - protein, 15 aa, Homo sapiens
  CDR3 for alpha chain variable domain of TCR clone 163809 (TRAV21, TRAJ17)
CAVDEQKAAGNKLTF

SEQ ID NO: 327618 - protein, 13 aa, Homo sapiens
  CDR3 for beta chain variable domain of TCR clone 163809 (TRBV7-3, TRBJ1-1)
CASSQDWGAEAFF

SEQ ID NO: 327619 - protein, 17 aa, Homo sapiens
  CDR3 for alpha chain variable domain of TCR clone 163810 (TRAV17, TRAJ28)
CATDPRRGGAGSYQLTF

SEQ ID NO: 327620 - protein, 14 aa, Homo sapiens
  CDR3 for beta chain variable domain of TCR clone 163810 (TRBV7-3, TRBJ1-1)
CASSLKGGNTEAFF

SEQ ID NO: 327621 - protein, 10 aa, Homo sapiens
  CDR3 for alpha chain variable domain of TCR clone 163811 (TRAV23/DV6, TRAJ57)
CAASSTLSQG

SEQ ID NO: 327622 - protein, 15 aa, Homo sapiens
  CDR3 for beta chain variable domain of TCR clone 163811 (TRBV7-6, TRBJ1-5)
CASSQSSGINQPQHL

SEQ ID NO: 327623 - protein, 16 aa, Homo sapiens
  CDR3 for alpha chain variable domain of TCR clone 163812 (TRAV12-3, TRAJ53)
CATSPGSGGSNHKLTF

SEQ ID NO: 327624 - protein, 11 aa, Homo sapiens
  CDR3 for beta chain variable domain of TCR clone 163812 (TRBV29-1, TRBJ2-5)
CSEDRTGTQYF

SEQ ID NO: 327625 - protein, 14 aa, Homo sapiens
  CDR3 for alpha chain variable domain of TCR clone 163813 (TRAV17, TRAJ34)
CDTVPTYNTDKLIF

SEQ ID NO: 327626 - protein, 18 aa, Homo sapiens
  CDR3 for beta chain variable domain of TCR clone 163813 (TRBV23-1, TRBJ2-1)
TVSLRQRSEKWLKNEQFF

SEQ ID NO: 327627 - protein, 12 aa, Homo sapiens
  CDR3 for alpha chain variable domain of TCR clone 163814 (TRAV13-2, TRAJ23)
CAERHRGGKIIF

SEQ ID NO: 327628 - protein, 12 aa, Homo sapiens
  CDR3 for beta chain variable domain of TCR clone 163814 (TRBV11-2, TRBJ2-1)
CASSPGNNEQFF

SEQ ID NO: 327629 - protein, 16 aa, Homo sapiens
  CDR3 for alpha chain variable domain of TCR clone 163815 (TRAV12-1, TRAJ23)
CVVTLGLYNQGGKLIF

SEQ ID NO: 327630 - protein, 16 aa, Homo sapiens
  CDR3 for beta chain variable domain of TCR clone 163815 (TRBV12-4, TRBJ1-5)
CASSRPVGGSNQPQHF

SEQ ID NO: 327631 - protein, 15 aa, Homo sapiens
  CDR3 for alpha chain variable domain of TCR clone 163816 (TRAV16, TRAJ12)
CSKWPLRDSSYKLIY

SEQ ID NO: 327632 - protein, 13 aa, Homo sapiens
  CDR3 for beta chain variable domain of TCR clone 163816 (TRBV4-2, TRBJ1-1)
CASSQAGNTEAFF

SEQ ID NO: 327633 - protein, 11 aa, Homo sapiens
  CDR3 for alpha chain variable domain of TCR clone 163817 (TRAV2, TRAJ21)
CAVFNFNKFYF

SEQ ID NO: 327634 - protein, 16 aa, Homo sapiens
  CDR3 for beta chain variable domain of TCR clone 163817 (TRBV7-3, TRBJ2-2)
CASSLKRGTLSGELFF

SEQ ID NO: 327635 - protein, 15 aa, Homo sapiens
  CDR3 for alpha chain variable domain of TCR clone 163818 (TRAV12-1, TRAJ9)
CVVSFGDTGGFKTIF

SEQ ID NO: 327636 - protein, 13 aa, Homo sapiens
  CDR3 for beta chain variable domain of TCR clone 163818 (TRBV12-4, TRBJ2-7)
CASSPTGTYEQYF

SEQ ID NO: 327637 - protein, 16 aa, Homo sapiens
  CDR3 for alpha chain variable domain of TCR clone 163819 (TRAV30, TRAJ24)
CGTEIVDADSWGKFQF

SEQ ID NO: 327638 - protein, 16 aa, Homo sapiens
  CDR3 for beta chain variable domain of TCR clone 163819 (TRBV12-5, TRBJ1-2)
CASSSNQDRRGHGYTF

SEQ ID NO: 327639 - protein, 17 aa, Homo sapiens
  CDR3 for alpha chain variable domain of TCR clone 163820 (TRAV3, TRAJ38)
CAVRDCLNAGNTRKLIW

SEQ ID NO: 327640 - protein, 14 aa, Homo sapiens
  CDR3 for beta chain variable domain of TCR clone 163820 (TRBV5-5, TRBJ1-5)
CASSGQGVDQPQHF

SEQ ID NO: 327641 - protein, 13 aa, Homo sapiens
  CDR3 for alpha chain variable domain of TCR clone 163821 (TRAV2, TRAJ40)
CAVVTSGIYKYIF

SEQ ID NO: 327642 - protein, 14 aa, Homo sapiens
  CDR3 for beta chain variable domain of TCR clone 163821 (TRBV7-2, TRBJ1-1)
CASSFLTGTTEAFF

SEQ ID NO: 327643 - protein, 14 aa, Homo sapiens
  CDR3 for alpha chain variable domain of TCR clone 163822 (TRAV2, TRAJ37)
CAVDFTSNTSKLIV

SEQ ID NO: 327644 - protein, 15 aa, Homo sapiens
  CDR3 for beta chain variable domain of TCR clone 163822 (TRBV20-1, TRBJ1-1)
CSASRGVTGNTEAFF

SEQ ID NO: 327645 - protein, 14 aa, Homo sapiens
  CDR3 for alpha chain variable domain of TCR clone 163823 (TRAV16, TRAJ9)
CITVLRAGGFKTIF

SEQ ID NO: 327646 - protein, 13 aa, Homo sapiens
  CDR3 for beta chain variable domain of TCR clone 163823 (TRBV4-3, TRBJ1-1)
CASSQVEGSMAFF

SEQ ID NO: 327647 - protein, 14 aa, Homo sapiens
  CDR3 for alpha chain variable domain of TCR clone 163824 (TRAV8-4, TRAJ5)
CAVSTDTGRRALTF

SEQ ID NO: 327648 - protein, 17 aa, Homo sapiens
  CDR3 for beta chain variable domain of TCR clone 163824 (TRBV19, TRBJ2-7)
CASSISFYDSYPYEQYF

SEQ ID NO: 327649 - protein, 18 aa, Homo sapiens
  CDR3 for alpha chain variable domain of TCR clone 163825 (TRAV26-1, TRAJ23)
CIVRVGLEVGNQGGKLIF

SEQ ID NO: 327650 - protein, 15 aa, Homo sapiens
  CDR3 for beta chain variable domain of TCR clone 163825 (TRBV12-4, TRBJ2-5)
CQQFFVRGRQETQYF

SEQ ID NO: 327651 - protein, 17 aa, Homo sapiens
  CDR3 for alpha chain variable domain of TCR clone 163826 (TRAV1-2, TRAJ8)
CDVRDPDENTGFQKLVF

SEQ ID NO: 327652 - protein, 16 aa, Homo sapiens
  CDR3 for beta chain variable domain of TCR clone 163826 (TRBV7-9, TRBJ2-2)
CASSGFGGANTGELFF

SEQ ID NO: 327653 - protein, 13 aa, Homo sapiens
  CDR3 for alpha chain variable domain of TCR clone 163827 (TRAV3, TRAJ31)
SAVREGNNARLMF

SEQ ID NO: 327654 - protein, 15 aa, Homo sapiens
  CDR3 for beta chain variable domain of TCR clone 163827 (TRBV6-1, TRBJ1-1)
CASRTPGQLNTEAFF

SEQ ID NO: 327655 - protein, 13 aa, Homo sapiens
  CDR3 for alpha chain variable domain of TCR clone 163828 (TRAV36/DV7, TRAJ54)
CAVLIQGAQKLVF

SEQ ID NO: 327656 - protein, 13 aa, Homo sapiens
  CDR3 for beta chain variable domain of TCR clone 163828 (TRBV29-1, TRBJ2-4)
CSVGEWTKNMQYF

SEQ ID NO: 327657 - protein, 12 aa, Homo sapiens
  CDR3 for alpha chain variable domain of TCR clone 163829 (TRAV12-1, TRAJ35)
CPAGALGMCCIA

SEQ ID NO: 327658 - protein, 15 aa, Homo sapiens
  CDR3 for beta chain variable domain of TCR clone 163829 (TRBV20-1, TRBJ2-7)
CSARDRVSGMDEQYF

SEQ ID NO: 327659 - protein, 14 aa, Homo sapiens
  CDR3 for alpha chain variable domain of TCR clone 163830 (TRAV26-1, TRAJ54)
CIVRVHQGAQKLVF

SEQ ID NO: 327660 - protein, 15 aa, Homo sapiens
  CDR3 for beta chain variable domain of TCR clone 163830 (TRBV18, TRBJ2-7)
CASSPNSGSGNEQYF

SEQ ID NO: 327661 - protein, 13 aa, Homo sapiens
  CDR3 for alpha chain variable domain of TCR clone 163831 (TRAV36/DV7, TRAJ34)
CAGRPHNTDKLIF

SEQ ID NO: 327662 - protein, 15 aa, Homo sapiens
  CDR3 for beta chain variable domain of TCR clone 163831 (TRBV27, TRBJ1-6)
CASSFDRGLGSPLHF

SEQ ID NO: 327663 - protein, 12 aa, Homo sapiens
  CDR3 for alpha chain variable domain of TCR clone 163832 (TRAV3, TRAJ31)
CAVRDGNARLMF

SEQ ID NO: 327664 - protein, 13 aa, Homo sapiens
  CDR3 for beta chain variable domain of TCR clone 163832 (TRBV7-7, TRBJ2-3)
CASSLSRADTQYF

SEQ ID NO: 327665 - protein, 10 aa, Homo sapiens
  CDR3 for alpha chain variable domain of TCR clone 163833 (TRAV23/DV6, TRAJ43)
CAAAVAALEQ

SEQ ID NO: 327666 - protein, 13 aa, Homo sapiens
  CDR3 for beta chain variable domain of TCR clone 163833 (TRBV12-4, TRBJ1-2)
CASSLRQGRGYTF

SEQ ID NO: 327667 - protein, 13 aa, Homo sapiens
  CDR3 for alpha chain variable domain of TCR clone 163834 (TRAV3, TRAJ20)
CCEAFCNDYKLSF

SEQ ID NO: 327668 - protein, 15 aa, Homo sapiens
  CDR3 for beta chain variable domain of TCR clone 163834 (TRBV19, TRBJ2-6)
CASVRRDSGANVPTF

SEQ ID NO: 327669 - protein, 17 aa, Homo sapiens
  CDR3 for alpha chain variable domain of TCR clone 163835 (TRAV3, TRAJ42)
FAVRDRDYGGSQGNLIF

SEQ ID NO: 327670 - protein, 20 aa, Homo sapiens
  CDR3 for beta chain variable domain of TCR clone 163835 (TRBV28, TRBJ2-1)
CASTPIGRSPGLAGGNEQFF

SEQ ID NO: 327671 - protein, 14 aa, Homo sapiens
  CDR3 for alpha chain variable domain of TCR clone 163836 (TRAV16, TRAJ57)
CALPTQGGSEKLVF

SEQ ID NO: 327672 - protein, 15 aa, Homo sapiens
  CDR3 for beta chain variable domain of TCR clone 163836 (TRBV28, TRBJ1-3)
CASWGGHLSGNTISF

SEQ ID NO: 327673 - protein, 14 aa, Homo sapiens
  CDR3 for alpha chain variable domain of TCR clone 163837 (TRAV8-1, TRAJ4)
CAVKFSGGYNKRIF

SEQ ID NO: 327674 - protein, 22 aa, Homo sapiens
  CDR3 for beta chain variable domain of TCR clone 163837 (TRBV7-3, TRBJ2-5)
CASARDRVILRPRDPVLRARHA

SEQ ID NO: 327675 - protein, 13 aa, Homo sapiens
  CDR3 for alpha chain variable domain of TCR clone 163838 (TRAV29/DV5, TRAJ31)
CAASRNNNARLMF

SEQ ID NO: 327676 - protein, 13 aa, Homo sapiens
  CDR3 for beta chain variable domain of TCR clone 163838 (TRBV5-1, TRBJ2-1)
CASSLGSYNEQFF

SEQ ID NO: 327677 - protein, 14 aa, Homo sapiens
  CDR3 for alpha chain variable domain of TCR clone 163839 (TRAV21, TRAJ58)
CAVRRGRSGSRLTF

SEQ ID NO: 327678 - protein, 13 aa, Homo sapiens
  CDR3 for beta chain variable domain of TCR clone 163839 (TRBV7-2, TRBJ1-6)
CASSLKFESPLHF

SEQ ID NO: 327679 - protein, 16 aa, Homo sapiens
  CDR3 for alpha chain variable domain of TCR clone 163840 (TRAV26-2, TRAJ57)
CILRDVGSGGSEKLVF

SEQ ID NO: 327680 - protein, 13 aa, Homo sapiens
  CDR3 for beta chain variable domain of TCR clone 163840 (TRBV18, TRBJ2-3)
CANSPGVTDTQYF

SEQ ID NO: 327681 - protein, 19 aa, Homo sapiens
  CDR3 for alpha chain variable domain of TCR clone 163841 (TRAV12-2, TRAJ52)
PVTQPPTSFRSTSYGKLTF

SEQ ID NO: 327682 - protein, 16 aa, Homo sapiens
  CDR3 for beta chain variable domain of TCR clone 163841 (TRBV15, TRBJ2-6)
CATSVNGGFLANVLTF

SEQ ID NO: 327683 - protein, 15 aa, Homo sapiens
  CDR3 for alpha chain variable domain of TCR clone 163842 (TRAV26-2, TRAJ26)
CILRDFDNYGQNFIF

SEQ ID NO: 327684 - protein, 14 aa, Homo sapiens
  CDR3 for beta chain variable domain of TCR clone 163842 (TRBV29-1, TRBJ2-5)
CSFWTPYAGETQYF

SEQ ID NO: 327685 - protein, 18 aa, Homo sapiens
  CDR3 for alpha chain variable domain of TCR clone 163843 (TRAV3, TRAJ17)
FSVRARRGGRSCRQQANF

SEQ ID NO: 327686 - protein, 14 aa, Homo sapiens
  CDR3 for beta chain variable domain of TCR clone 163843 (TRBV4-1, TRBJ2-2)
CASSQAVNTGEPFF

SEQ ID NO: 327687 - protein, 12 aa, Homo sapiens
  CDR3 for alpha chain variable domain of TCR clone 163844 (TRAV21, TRAJ39)
CAADNAGNMLTF

SEQ ID NO: 327688 - protein, 13 aa, Homo sapiens
  CDR3 for beta chain variable domain of TCR clone 163844 (TRBV12-4, TRBJ1-1)
CASSPGTGFEAFS

SEQ ID NO: 327689 - protein, 16 aa, Homo sapiens
  CDR3 for alpha chain variable domain of TCR clone 163845 (TRAV30, TRAJ53)
CGITGGSGGSNYKLTF

SEQ ID NO: 327690 - protein, 16 aa, Homo sapiens
  CDR3 for beta chain variable domain of TCR clone 163845 (TRBV4-3, TRBJ2-1)
CASSPALDRGVNEQFF

SEQ ID NO: 327691 - protein, 14 aa, Homo sapiens
  CDR3 for alpha chain variable domain of TCR clone 163846 (TRAV12-2, TRAJ13)
CAVKKTGGYQKVTF

SEQ ID NO: 327692 - protein, 15 aa, Homo sapiens
  CDR3 for beta chain variable domain of TCR clone 163846 (TRBV27, TRBJ2-1)
CASSNGGGSSNGQFV

SEQ ID NO: 327693 - protein, 18 aa, Homo sapiens
  CDR3 for alpha chain variable domain of TCR clone 163847 (TRAV21, TRAJ52)
CAVRPSPAGGTSYGKLTF

SEQ ID NO: 327694 - protein, 16 aa, Homo sapiens
  CDR3 for beta chain variable domain of TCR clone 163847 (TRBV13, TRBJ2-2)
CASSPRTGEHTGELFF

SEQ ID NO: 327695 - protein, 15 aa, Homo sapiens
  CDR3 for alpha chain variable domain of TCR clone 163848 (TRAV29/DV5, TRAJ29)
CAESERSSGNTPIVF

SEQ ID NO: 327696 - protein, 17 aa, Homo sapiens
  CDR3 for beta chain variable domain of TCR clone 163848 (TRBV4-1, TRBJ1-4)
CASSQEGPRGVEEKLFF

SEQ ID NO: 327697 - protein, 15 aa, Homo sapiens
  CDR3 for alpha chain variable domain of TCR clone 163849 (TRAV12-2, TRAJ53)
CAVNGGGGSNYTLTF

SEQ ID NO: 327698 - protein, 13 aa, Homo sapiens
  CDR3 for beta chain variable domain of TCR clone 163849 (TRBV12-4, TRBJ1-2)
CASSLRQGKGYTF

SEQ ID NO: 327699 - protein, 11 aa, Homo sapiens
  CDR3 for alpha chain variable domain of TCR clone 163850 (TRAV21, TRAJ11)
CAVNGYSTLTF

SEQ ID NO: 327700 - protein, 11 aa, Homo sapiens
  CDR3 for beta chain variable domain of TCR clone 163850 (TRBV19, TRBJ1-1)
CASSIGSETFF

SEQ ID NO: 327701 - protein, 12 aa, Homo sapiens
  CDR3 for alpha chain variable domain of TCR clone 163851 (TRAV2, TRAJ9)
CAVGAGGFKTIF

SEQ ID NO: 327702 - protein, 18 aa, Homo sapiens
  CDR3 for beta chain variable domain of TCR clone 163851 (TRBV7-9, TRBJ2-7)
CASSLTTSGSRTWYEQYF

SEQ ID NO: 327703 - protein, 13 aa, Homo sapiens
  CDR3 for alpha chain variable domain of TCR clone 163852 (TRAV21, TRAJ15)
CAVANQAGTALIF

SEQ ID NO: 327704 - protein, 13 aa, Homo sapiens
  CDR3 for beta chain variable domain of TCR clone 163852 (TRBV4-1, TRBJ2-7)
CASSQGQAYEQYF

SEQ ID NO: 327705 - protein, 14 aa, Homo sapiens
  CDR3 for alpha chain variable domain of TCR clone 163853 (TRAV1-2, TRAJ16)
CAVNRFSDGQKLLF

SEQ ID NO: 327706 - protein, 15 aa, Homo sapiens
  CDR3 for beta chain variable domain of TCR clone 163853 (TRBV9, TRBJ1-4)
CASSVGGSTNEKLFF

SEQ ID NO: 327707 - protein, 14 aa, Homo sapiens
  CDR3 for alpha chain variable domain of TCR clone 163854 (TRAV12-1, TRAJ12)
CVVTSMDSSYKLIF

SEQ ID NO: 327708 - protein, 13 aa, Homo sapiens
  CDR3 for beta chain variable domain of TCR clone 163854 (TRBV20-1, TRBJ1-1)
CSARGGGNTETFF

SEQ ID NO: 327709 - protein, 17 aa, Homo sapiens
  CDR3 for alpha chain variable domain of TCR clone 163855 (TRAV8-6, TRAJ58)
RAVSSWVGETSGSRLTF

SEQ ID NO: 327710 - protein, 14 aa, Homo sapiens
  CDR3 for beta chain variable domain of TCR clone 163855 (TRBV4-3, TRBJ2-1)
CASGLDRAYNEQFF

SEQ ID NO: 327711 - protein, 15 aa, Homo sapiens
  CDR3 for alpha chain variable domain of TCR clone 163856 (TRAV3, TRAJ3)
CAVRDGHSSASTIIF

SEQ ID NO: 327712 - protein, 14 aa, Homo sapiens
  CDR3 for beta chain variable domain of TCR clone 163856 (TRBV28, TRBJ1-4)
CASSLGTFDEKLFF

SEQ ID NO: 327713 - protein, 13 aa, Homo sapiens
  CDR3 for alpha chain variable domain of TCR clone 163857 (TRAV21, TRAJ27)
CAARPGNAGQSTF

SEQ ID NO: 327714 - protein, 13 aa, Homo sapiens
  CDR3 for beta chain variable domain of TCR clone 163857 (TRBV27, TRBJ2-1)
CASRTLGVGEQFF

SEQ ID NO: 327715 - protein, 13 aa, Homo sapiens
  CDR3 for alpha chain variable domain of TCR clone 163858 (TRAV8-3, TRAJ48)
CAVVPFGNEKLTF

SEQ ID NO: 327716 - protein, 14 aa, Homo sapiens
  CDR3 for beta chain variable domain of TCR clone 163858 (TRBV12-5, TRBJ2-5)
CAGGSRTQQETQYF

SEQ ID NO: 327717 - protein, 18 aa, Homo sapiens
  CDR3 for alpha chain variable domain of TCR clone 163859 (TRAV29/DV5, TRAJ52)
CAVGFRGAGGTSYGKLTF

SEQ ID NO: 327718 - protein, 16 aa, Homo sapiens
  CDR3 for beta chain variable domain of TCR clone 163859 (TRBV7-3, TRBJ2-2)
CASSLKRGTLSGELFC

SEQ ID NO: 327719 - protein, 16 aa, Homo sapiens
  CDR3 for alpha chain variable domain of TCR clone 163860 (TRAV30, TRAJ24)
CGTEIVVADSWGKFQF

SEQ ID NO: 327720 - protein, 16 aa, Homo sapiens
  CDR3 for beta chain variable domain of TCR clone 163860 (TRBV7-3, TRBJ2-3)
ELSLMKRMRGADTQYF

SEQ ID NO: 327721 - protein, 13 aa, Homo sapiens
  CDR3 for alpha chain variable domain of TCR clone 163861 (TRAV8-3, TRAJ31)
CAVGARNNARLMF

SEQ ID NO: 327722 - protein, 14 aa, Homo sapiens
  CDR3 for beta chain variable domain of TCR clone 163861 (TRBV12-5, TRBJ2-5)
CASGSRTHQETQFY

SEQ ID NO: 327723 - protein, 14 aa, Homo sapiens
  CDR3 for alpha chain variable domain of TCR clone 163862 (TRAV12-1, TRAJ24)
CVVRSTDSWGKYQF

SEQ ID NO: 327724 - protein, 13 aa, Homo sapiens
  CDR3 for beta chain variable domain of TCR clone 163862 (TRBV2, TRBJ2-3)
CASILAGGQGQYF

SEQ ID NO: 327725 - protein, 16 aa, Homo sapiens
  CDR3 for alpha chain variable domain of TCR clone 163863 (TRAV12-2, TRAJ45)
CAVKRNPGGGADGLTF

SEQ ID NO: 327726 - protein, 14 aa, Homo sapiens
  CDR3 for beta chain variable domain of TCR clone 163863 (TRBV9, TRBJ2-7)
CASSVAGVPYEQYF

SEQ ID NO: 327727 - protein, 16 aa, Homo sapiens
  CDR3 for alpha chain variable domain of TCR clone 163864 (TRAV13-1, TRAJ45)
CAARGSRKGGADGLTF

SEQ ID NO: 327728 - protein, 13 aa, Homo sapiens
  CDR3 for beta chain variable domain of TCR clone 163864 (TRBV12-4, TRBJ2-5)
CASRKRGRETQYF

SEQ ID NO: 327729 - protein, 17 aa, Homo sapiens
  CDR3 for alpha chain variable domain of TCR clone 163865 (TRAV4, TRAJ13)
CIVGVQGSSGGYQKVTF

SEQ ID NO: 327730 - protein, 18 aa, Homo sapiens
  CDR3 for beta chain variable domain of TCR clone 163865 (TRBV15, TRBJ2-3)
CATSRDGAMSWDTDTQYF

SEQ ID NO: 327731 - protein, 12 aa, Homo sapiens
  CDR3 for alpha chain variable domain of TCR clone 163866 (TRAV13-1, TRAJ49)
CAASSMGNQFYF

SEQ ID NO: 327732 - protein, 13 aa, Homo sapiens
  CDR3 for beta chain variable domain of TCR clone 163866 (TRBV20-1, TRBJ2-2)
CSASAAGTGELFF

SEQ ID NO: 327733 - protein, 15 aa, Homo sapiens
  CDR3 for alpha chain variable domain of TCR clone 163867 (TRAV13-1, TRAJ11)
CAASNRNSGYSTLTF

SEQ ID NO: 327734 - protein, 15 aa, Homo sapiens
  CDR3 for beta chain variable domain of TCR clone 163867 (TRBV5-1, TRBJ2-2)
CASSSQGGNTGELFF

SEQ ID NO: 327735 - protein, 12 aa, Homo sapiens
  CDR3 for alpha chain variable domain of TCR clone 163868 (TRAV16, TRAJ10)
CSRTGGGNKLTF

SEQ ID NO: 327736 - protein, 14 aa, Homo sapiens
  CDR3 for beta chain variable domain of TCR clone 163868 (TRBV15, TRBJ2-3)
CATRSGTSTDTQYF

SEQ ID NO: 327737 - protein, 16 aa, Homo sapiens
  CDR3 for alpha chain variable domain of TCR clone 163869 (TRAV21, TRAJ37)
CAVRTAGSSNTGKLIF

SEQ ID NO: 327738 - protein, 13 aa, Homo sapiens
  CDR3 for beta chain variable domain of TCR clone 163869 (TRBV12-5, TRBJ2-3)
CASGGRQSDTQYF

SEQ ID NO: 327739 - protein, 12 aa, Homo sapiens
  CDR3 for alpha chain variable domain of TCR clone 163870 (TRAV13-1, TRAJ53)
AASGGSNYKLTF

SEQ ID NO: 327740 - protein, 16 aa, Homo sapiens
  CDR3 for beta chain variable domain of TCR clone 163870 (TRBV28, TRBJ2-6)
CASSNRRRAGANVLTF

SEQ ID NO: 327741 - protein, 14 aa, Homo sapiens
  CDR3 for alpha chain variable domain of TCR clone 163871 (TRAV1-2, TRAJ8)
CAVREDTGFQKLVF

SEQ ID NO: 327742 - protein, 16 aa, Homo sapiens
  CDR3 for beta chain variable domain of TCR clone 163871 (TRBV5-7, TRBJ2-5)
CASPLAPAGGRETQYF

SEQ ID NO: 327743 - protein, 14 aa, Homo sapiens
  CDR3 for alpha chain variable domain of TCR clone 163872 (TRAV12-2, TRAJ13)
CAVKKNGGYQKVTF

SEQ ID NO: 327744 - protein, 15 aa, Homo sapiens
  CDR3 for beta chain variable domain of TCR clone 163872 (TRBV27, TRBJ2-1)
CASSNGGVSSNEQFF

SEQ ID NO: 327745 - protein, 14 aa, Homo sapiens
  CDR3 for alpha chain variable domain of TCR clone 163873 (TRAV1-2, TRAJ16)
CAVRGFSDGQKLLF

SEQ ID NO: 327746 - protein, 15 aa, Homo sapiens
  CDR3 for beta chain variable domain of TCR clone 163873 (TRBV20-1, TRBJ2-7)
CSARDRVSGMDEQYF

SEQ ID NO: 327747 - protein, 13 aa, Homo sapiens
  CDR3 for alpha chain variable domain of TCR clone 163874 (TRAV13-1, TRAJ5)
CAAEHTGRRALTF

SEQ ID NO: 327748 - protein, 13 aa, Homo sapiens
  CDR3 for beta chain variable domain of TCR clone 163874 (TRBV2, TRBJ1-4)
CASNRGTNEKPFF

SEQ ID NO: 327749 - protein, 16 aa, Homo sapiens
  CDR3 for alpha chain variable domain of TCR clone 163875 (TRAV3, TRAJ37)
CAVRGNGSGNTGKLIF

SEQ ID NO: 327750 - protein, 14 aa, Homo sapiens
  CDR3 for beta chain variable domain of TCR clone 163875 (TRBV7-2, TRBJ2-7)
CASSPKTSFYEQYF

SEQ ID NO: 327751 - protein, 11 aa, Homo sapiens
  CDR3 for alpha chain variable domain of TCR clone 163876 (TRAV26-1, TRAJ37)
CIVRVGRKLIF

SEQ ID NO: 327752 - protein, 16 aa, Homo sapiens
  CDR3 for beta chain variable domain of TCR clone 163876 (TRBV13, TRBJ2-2)
CASSPRTGEHTGELVF

SEQ ID NO: 327753 - protein, 14 aa, Homo sapiens
  CDR3 for alpha chain variable domain of TCR clone 163877 (TRAV12-1, TRAJ42)
CVVIYGGSQGNLIF

SEQ ID NO: 327754 - protein, 13 aa, Homo sapiens
  CDR3 for beta chain variable domain of TCR clone 163877 (TRBV18, TRBJ2-5)
WASSPPGKETQYF

SEQ ID NO: 327755 - protein, 16 aa, Homo sapiens
  CDR3 for alpha chain variable domain of TCR clone 163878 (TRAV30, TRAJ26)
CGTESVGDNYGQDFVF

SEQ ID NO: 327756 - protein, 13 aa, Homo sapiens
  CDR3 for beta chain variable domain of TCR clone 163878 (TRBV19, TRBJ1-2)
CASSISEDYGYTF

SEQ ID NO: 327757 - protein, 16 aa, Homo sapiens
  CDR3 for alpha chain variable domain of TCR clone 163879 (TRAV26-1, TRAJ36)
CIVRGSYQTGANNLFF

SEQ ID NO: 327758 - protein, 16 aa, Homo sapiens
  CDR3 for beta chain variable domain of TCR clone 163879 (TRBV27, TRBJ2-5)
CASSYGPGGQKETQYF

SEQ ID NO: 327759 - protein, 12 aa, Homo sapiens
  CDR3 for alpha chain variable domain of TCR clone 163880 (TRAV13-1, TRAJ15)
CAASQAGTALIF

SEQ ID NO: 327760 - protein, 14 aa, Homo sapiens
  CDR3 for beta chain variable domain of TCR clone 163880 (TRBV19, TRBJ2-2)
CASSTLYRSGELFF

SEQ ID NO: 327761 - protein, 14 aa, Homo sapiens
  CDR3 for alpha chain variable domain of TCR clone 163881 (TRAV21, TRAJ52)
CGRAGGTSYGKLTI

SEQ ID NO: 327762 - protein, 14 aa, Homo sapiens
  CDR3 for beta chain variable domain of TCR clone 163881 (TRBV19, TRBJ1-2)
CASSVLGYNYGYTF

SEQ ID NO: 327763 - protein, 15 aa, Homo sapiens
  CDR3 for alpha chain variable domain of TCR clone 163882 (TRAV26-1, TRAJ29)
CIVRVEGSGNTPLVF

SEQ ID NO: 327764 - protein, 14 aa, Homo sapiens
  CDR3 for beta chain variable domain of TCR clone 163882 (TRBV12-4, TRBJ1-1)
CASSLGTGGTEAFF

SEQ ID NO: 327765 - protein, 13 aa, Homo sapiens
  CDR3 for alpha chain variable domain of TCR clone 163883 (TRAV1-1, TRAJ23)
CAVVANQGGKLIF

SEQ ID NO: 327766 - protein, 16 aa, Homo sapiens
  CDR3 for beta chain variable domain of TCR clone 163883 (TRBV7-2, TRBJ1-4)
CASSPVGRFDREKLFF

SEQ ID NO: 327767 - protein, 13 aa, Homo sapiens
  CDR3 for alpha chain variable domain of TCR clone 163884 (TRAV38-2/DV8, TRAJ34)
CALISYNTDKLIF

SEQ ID NO: 327768 - protein, 14 aa, Homo sapiens
  CDR3 for beta chain variable domain of TCR clone 163884 (TRBV6-1, TRBJ1-3)
CASVQGGGGNTIYF

SEQ ID NO: 327769 - protein, 13 aa, Homo sapiens
  CDR3 for alpha chain variable domain of TCR clone 163885 (TRAV12-1, TRAJ6)
CVVFPGGSYIPTF

SEQ ID NO: 327770 - protein, 14 aa, Homo sapiens
  CDR3 for beta chain variable domain of TCR clone 163885 (TRBV7-3, TRBJ2-1)
CASSLAGGTNEQFF

SEQ ID NO: 327771 - protein, 14 aa, Homo sapiens
  CDR3 for alpha chain variable domain of TCR clone 163886 (TRAV38-2/DV8, TRAJ54)
AAMYQIQGAQKLVL

SEQ ID NO: 327772 - protein, 17 aa, Homo sapiens
  CDR3 for beta chain variable domain of TCR clone 163886 (TRBV6-1, TRBJ2-3)
CASSEALRLISTDTQYF

SEQ ID NO: 327773 - protein, 13 aa, Homo sapiens
  CDR3 for alpha chain variable domain of TCR clone 163887 (TRAV38-2/DV8, TRAJ34)
CPYRNYNTDNLIF

SEQ ID NO: 327774 - protein, 16 aa, Homo sapiens
  CDR3 for beta chain variable domain of TCR clone 163887 (TRBV9, TRBJ2-2)
CASSAMGKGNTGELFF

SEQ ID NO: 327775 - protein, 22 aa, Homo sapiens
  CDR3 for alpha chain variable domain of TCR clone 163888 (TRAV4, TRAJ38)
CLVGTNAGNNHIQNPDPAVYQL

SEQ ID NO: 327776 - protein, 16 aa, Homo sapiens
  CDR3 for beta chain variable domain of TCR clone 163888 (TRBV19, TRBJ2-1)
CASSKAGPSSYNEQFF

SEQ ID NO: 327777 - protein, 14 aa, Homo sapiens
  CDR3 for alpha chain variable domain of TCR clone 163889 (TRAV26-1, TRAJ39)
CIVRGSRAGNMLTF

SEQ ID NO: 327778 - protein, 15 aa, Homo sapiens
  CDR3 for beta chain variable domain of TCR clone 163889 (TRBV7-9, TRBJ1-5)
CASSQGRQPNQTQHF
